United States Patent Application Publication US 2004/0123343 A1 - sequence listing, part 32

SEQ ID NO: 88172 - DNA, 195 bp, Oryza sativa
  unsure (1)..(195): unsure at all n locations
  Clone ID: PAT_MRT4530_87049C.1
cggacgngtcngcgaaacgctatggggnaagcnaaccctttccntcctctntngncgccgccggcgaatccccacctgggaagcagcaanncgncgnntnctcccnaattnntntccanaatggccgnaggnnagganccttgcttnttaaggtacntgcacttnacnttgggnctctttagttatttanttaaa

SEQ ID NO: 88173 - DNA, 114 bp, Oryza sativa
  Clone ID: PAT_MRT4530_8704C.1
taccgtgccgctcgctccagcatggccgccgtgccgttgtgccacctacgaccacgacatgaccggcacggatgcaagcggaaaagacggcaacctattcacctaaattggtta

SEQ ID NO: 88174 - DNA, 3783 bp, Oryza sativa
  Clone ID: PAT_MRT4530_87050C.1
atggcggcggttcggaagatggcggccaatggcctcgcagcaaaaagggagaatacagggacaaagaaatctcccctgcaaatccagatgctggagagattctactctgaggtacaataccctcagtcggaggacattgcagagtatgcaacatctgttggtttgacttacaatcaggtcagaatatggtttaaggagcggaggaggaaagagaggagagaaacggaatctttaggggcgcatatggaaaagcaacttagtgcaagatcaaatgggttcagatgcagcagcagcaggtcttcctcttttagccggtctaccatgtaccgtactgtgaatttacagccagaggacgaccgttatgttgacaagggtatgagcttcacaggagagaaacacacactccgatcacaagttctgtttcccaaggattatatcctgaggaaagtcttccgcaaggatggtccacctcttggaagcgaatttgatccccttccccatagtgcacctggccatctcagagatactacagacgaccatttctaccagaaccaaagagtaataaagaagagaaagattgtggagcctaccactcagagatcttccctgccatgtggggacaatggtcctgtgaggaaacatggagccgggaaaggtctaatgacagtgtggcatgcaatgtattcccatagtagcaaaattcaagatggatctaattttattgatgaaactggttgcttgaggtccttgagaccattagatgattgtggcagaatagaggattgcgatgatggaaagctaattcaggtgccaagtagcagagttactgatccgaagaagcatcctccaatggaatgccatctttcagttgatgaatcacaatccccagtgctacaggctaaccaagtgactttagttgatgatgaggagcttgaactccgtgaattgcaagcaggtcctaacccattgagatgttcagctcacctttcttcaagtgggagacatggctgccctctttgtaaagatttactttccaggtttcctccatcaagtgtcaagatgaaacagccattctccacaagaccttgggggtcatcaccagaaatggtgaaaaagcttttccaggttgtccggtttatctacaatcgttttggttatatggatgtccatcccttcacacttgatgagttggcacaggcatttcatgacaaggttagggaacaggagtttgatatgaatttttggatcaagtctctgaattctcttacctgggttgaaatactacgtcaagttttggttgcttctggttttggttcgaaacatcatatgctgaatcgggatttttttaataaggagaaaaatcaaatggttaaatatggtttacgtcctcgtacactgaagggtgaattgtttgcactattgtctaagaaaggtagtggtggcttaaaggtatcagaacttgccaaatcacctgagattgttgatcttagcatctccagcacagaaatagagcagctgatctattcaactctttctagtgatatcacattatttgagaagattgcgccttctgcatatcgtctccgtgtagatcctcgaattaaaggaaaggaagactctggatcagataccgaggactctggaagtgttgatgatcacagtgatgctagcagtggtgctgatgaatctgatggttcacatgagatgagtttttctgagcatgaacatagaatccttagaagaaagtggaaaaatggtcatgaaaatgtgaatagatgtagtgaaattgatgaaagttattctggagaacgatggcttctggggttgatggaaggcgagtactcagacttaagcattgatgagaagttggattgcttggttgctttaatggatgttgtttctggtgctgattctgctccaagacttgaggaaccatcaagagtcgtgcctagcataccgagagcacagccgcatgtgtcaggtgggaaaataaagaaatcgacaagaaacatttgtcaatctagtgatgagtgctttaatgcatcaggaagcatgtatggtttggattcttctatgcatgagcagtcaagaagcctgagaagtcgtgattatgttgcttactctggaaggaatgatacgtctacaggagttgctcatcaaccacaagttgttctcttaggatccgaccgtaggtataataattattggctcttccttggaccttgtagagcagatgatccaggacatcgtagggtgtacttcgagtcatcagaagatggtcactgggaggttattgattcaccacaggagttactttccctactagcttcgctagacagcagaggtactagggaagcttatcttcttgcgtcaatgaaaaagagacagacatgcctttttgaagccatgaaaaagcattacgaaaatagagatgcagttcaacctgcaatgccatctgatacatctcactctgagacaagtagtggagatggagcttcacccaagctaagtagtggagatggagcttcgccaacatcagacattgacaatgcttctgtccccacaaatccagctgagaatatgataaatgcatcatctgcaatagcaattgaagttgggaggagaggtgatgagaaaatattgaagtgggaaagatctcaaacatttgataaatggatctggacttctttctattcttgcctaactgctgttaagtgtggcaagaaatcattcaaggaatcactagttcgctgtgaaagttgtcatgatttgtattggagagatgaaaagcattgcagaatatgccactctacttttgaagttagctttgatcttgaagaacgatatgctatacatgtggctacatgcagggatcctgaagatgtgtatgatgtgccaaatcataaagttctgccttcacagctacaagcacttaaggcagccattcatgctattgaggcacacatgcctgaagcagcgtttgctggtttgtggatgaagtcttcgcacaagctgtgggttaagcggctgcgacgaacgtcatctttggcagagcttttacaggttcttgttgattttgtgggggcaatggatgaggattggctgtacaaaagttcatcatctgtaagcttttgttcgtatttggatgacattgtcatatacttccaaacaatgccacaaacaacatcagcagttgcactgtgggttgttaaattggatgccctcatcacgccttatttggaaagagctgattctgacagagcattgggcgaagagtctgtgcagacaagaacgcgagcatgcggtgagatagctaggaatcgatgatggaattctttcttttgtggtactccaagcaaagcacccagctgacacgttctttctcatcaactgcaagtttttttgtttgattgtcgagcttttttctcaagactgagacaaccataatgtctcttccttgagcatcaggccttagcagaagccatggcttcctagttctgctggatacctggagaacatccttgttcccacccaacagaaagtcgtcccttatgtacaatagtagacaggaaaaaaaaggcttttttttgttaataatcattgcttcccccatgtgaatttttttgctcccaacattagtgatcacgaggaatactaaaaacttctatataggtcattgccggatagatgatgtatgttgttcatgaactaaggcgaccccttttgatgcaataagagggtcagatatctcctttttgatcggttaaaaaaaaaaaaaaaaaa

SEQ ID NO: 88175 - DNA, 618 bp, Oryza sativa
  unsure (1)..(618): unsure at all n locations
  Clone ID: PAT_MRT4530_87051C.1
cnaaagtttcgaaagagtcgaagccattgaaggactcgaaagaagacaagaaggcagtgaaagaagataagaaggcggctgcgaaagattcgaaagaacagaagaaggcactgaaggactcgaaagaactaaaaaaggcgttgaaggactcgaaagaacaggggttgcagaaggattcagatgaacttaaaccaaagagcaacaagcgcgtgacgttcgccgaggtggagcccgagaaggaactcaaggcctccaacagcgactggcatccgacctccgagtatcacagcgtgtacccggagcacaactcatggagcagcagcttcatgatctttgaggatgagaacagttactggaactagagatctctagacctgccaaaaaaaaaaaagcagcccggtgaagagtcttcagttagttagagaagtagctaggaggccatttaaacgctcttgttctagctgtcctctatcgattgttctgacttgggtcaccatgtaacatatttctctaatttacaccagtagatgatgagtaatgtagaaatctgcaatgtgggttggtgatgaaaatggtgatgctggtagaattcagattatatcaaaaaaaaaaaaaaaa

SEQ ID NO: 88176 - DNA, 566 bp, Oryza sativa
  unsure (1)..(566): unsure at all n locations
  Clone ID: PAT_MRT4530_87052C.1
aggatatccatatttctcagaattattataacatgttattatttttttaagcgaacttggttttccaaaggcataaaagcggattgtgtttgataatttatcaagttggatgagctgaaggggggaaggaaattgaggtgagaaaaacagtttgtttgacgatgatgactcatcgtataaccattgaaataattattgtttttaattctgtatgtatctttttctcataatatgtcatgttctctccttaatatggtaattaaatcatggataattgatttagtttgctttgtatcccctagttttggtcactacatgttgtttttgtcttggataatagttctttttttttacttttgataatttagcattcgattttgctatatatttgtcgaaaaaattttccgcaaaaatttgacagatgtaattacagtacaatcgtagtgtaattacactgtaactatagtgtaacttatatgtaactttnaaaaatctcttcgnaacatattattncggnaaaatgggggncgngggaacaaattattttatatatgngngngctatga

SEQ ID NO: 88177 - DNA, 1728 bp, Oryza sativa
  Clone ID: PAT_MRT4530_87053C.1
atttttaaaaaacagaatttgtgaagctttactttgaccagaaactgtgatacatagtcaataactcaatgtgtgcgttaagtcaactaataacacacatgactaccatgctacctccattttaccagcatctcgtattagtgaagatctggtgacagattacatcaagcaagagagatgaccatgtcagcaggcaatagcgcatcatcatactaggatacgtgtattccatgttcagaatccaatccaataatccgaatagtgtacaacccaaccaagtaatctcatacaacctaacgggatagtaaacccaaccaattacaccgtaactaaggtaatgtgttaacaagaacaatgcactgagcactggacgcgtcacattcacaacagcatactatagtcagatatagttgtgattaattagtgagtagagtgtgatacctggactttgagagctagaaatggcaccgacttcgacgttcccggtcatcaacatggagttgctcgccggggaggagcgacctgcggcgatggagcagctggatgatgcttgcgagaactggggattcttcgagatcctgaaccacggcatctcgacggagctgatggacgaggtggagaagatgaccaaggaccactacaagcgtgtgcgcgagcagaggttcctcgagttcgcgagcaagacgctcaaggaaggctgcgacgacgtgaataaggcggagaagctggactgggagagcaccttcttcgtccgccacctcccggagtccaacatcgccgacatacccgacctcgacgacgactacaggcgcctcatgaagcgcttcgcggcggagctggagacgctggcggagcggctactggacctgctctgcgagaacctcggcctcgagaagggctacctcaccaaggccttccgtggccccgcgggcgcacccaccttcggcaccaaggtcagcagctacccgccgtgcccgcgccccgacctcgtcaagggcctccgcgcccacaccgacgccggcggcatcatcctgctcttccaggacgaccgcgtcggtggcctccagctgctcaaggacggcgagtgggtggacgtgccgcccatgcgccactccatcgtcgtcaacctcggcgaccagctggaggtgatcaccaacggcaggtacaagagcgtgatgcaccgggtggtggcgcagaccgacggcaacaggatgtccatcgcgtccttctacaaccctggcagcgacgccgtcatctcccctgcgccggcgctggtgaaggaggaggaggccgtcgtggcgtaccccaagttcgtgttcgaggactacatgaagctgtacgtgcgccacaagttcgaggccaaggagcccaggttcgaggcgttcaagtccatggaaaccgagacctccaaccgcatcgccatcgcttgatagcgtgtgtaccacagcgacccctaccgggtcggtgtcagtaaggtttagtcgtgttcgtagtgatcagtgcgtgcatggtcagctactcagctcgcgttttctacctgaataaattaagctccgtcgtcgtcgtctcgtcaccttggataattgtcagttggtgtggcgtgctgttgcacgtacggccatgtatctttgtcggctgtcctcgtgtggtacttgatagcttgtgcggcgtgctgtaccgtgtacggtttattatctactccagttctatatcgtggtgatttctgat

SEQ ID NO: 88178 - DNA, 160 bp, Oryza sativa
  Clone ID: PAT_MRT4530_87054C.1
gcggccgaagcggaagcagcagcagcagcagcggcgacgaagccgtccatagattcttcttcctccccgtcactcctcaccgacaaccatgcccaccctccaagaggacgccgcgcaccgctcaggagggtcgcagtcaaaccggtctatgacagaagcg

SEQ ID NO: 88179 - DNA, 294 bp, Oryza sativa
  Clone ID: PAT_MRT4530_87055C.1
tgagattggtaacctgtcactattaaagttctttttggttagatgtgtagtgcacactatttgtttcagcaccaactagttgcacttcataatatatgccaaaccaagaaccatagtgaattcaggcctcatgatcatgttcgtttgaaggaaaaggaatctgacttccatgcttgtctggataacaaattcagtttcaagttgtcaattggtctgtgcagtgttgaggaatttggaactggaacaagaggagattctatatacaattattgcacaatgtcattgattgcaggc

SEQ ID NO: 88180 - DNA, 267 bp, Oryza sativa
  Clone ID: PAT_MRT4530_87056C.1
attatcaccgagttcgtcgccggacaggaggtgaggcagtactccgtagccgatcaggcagaggtgctggacgcgaccaatataaccgtggtctatgcgctagacgcgacggatgtggtcgcggacgaacgatcagtggacaggacggacgtagagtgcatccgatcggtggaaatggctgttcatggatgcagcttgactatgtccagcagtctcttcaaccatgcgcatgcggcgtggctctcctacgccgaatgcgaccgggac

SEQ ID NO: 88181 - DNA, 456 bp, Oryza sativa
  Clone ID: PAT_MRT4530_87057C.1
atggggatcgtcgatgctaggatatacgcaagactgagcgtggggagcggcgtccggatcggcagcagcgacggtgggcggggaccgaagctgtggcagcggcgggcgaccgctggagttgcggacccggaggccggatcagcccctcacttccttcctcctcccgatagaccgcgccatggccgtcgctgctgcgccgccgacgatagccgcttccccatcctcttcggccggggcctggacgccatggccgacctcatggacgcggccgacaacactgcctcatatatgtcgttatccccatcgtcttcctcgtcagcatcgtccgacgaggactcaccttatgggcgtgcgcggcgtgcaagaaggtcttcgtcgggaagcttatggtggaggtcgatggaggacgtcgccacatgccatgctgggagctcgctggtggcaatcatggcgtag

SEQ ID NO: 88182 - DNA, 612 bp, Oryza sativa
  Clone ID: PAT_MRT4530_87058C.1
atggacaattcggtgtcggaccggagcttcctcatcgacagcgacgaggaggacgacgccgccgccgccgtcgaggatgggaagcgtcgcggccacggcggcgatgagtcggacgacgggtcggactcgtcgtcttcgtgcggtaccccgcgggtcgccgccgccggcggtggcggtggcggccgcggcagccagcccagctcctatacgcagcagtggcctcagagctacaggcagtcgattgacatgtacagtagcgtgcaatccccgaacctgagcttcctgggcactccgacgctgagccgtctatcaaactcattcctgaccgcctcgttccggggaaagccgccggagatcatctccgggctcatcaagccactgctgccgacgacggcggcggccgacgacgaaggtgaccgccggcaacagcagcacgaagatggccggaagagctcgcagtacctcctgccgccgaggaggccgtcgtctctgcagaagatccccgaggatcagaagccgctggtggttggacaccacgaggttgggccctaccggcagtgcacctacactcagggcgtcttgaacggtatgttctgggtgcatttggtttga

SEQ ID NO: 88183 - DNA, 306 bp, Oryza sativa
  Clone ID: PAT_MRT4530_87059C.1
atggggtcgctaccgccggcgccggcaacgacgctgcgggaggggcggaggaggctgtggatgggattggaggaggcgtcggccaccgccgccgccgaagatccggcccctgctccgaggagcggcgtccgtgcggcgcggcggcccgagccggaacgactcggcgcacggtggggcgagcggcgcatcaccagatacccgccggcggcggcggcgaagcgcggcgactgcccggcgcgcggcgcgacggcgcgcagcggcgccgagatcccaaaagcggcggcggcacaatggaggccaatatga

SEQ ID NO: 88184 - DNA, 742 bp, Oryza sativa
  Clone ID: PAT_MRT4530_8705C.1
ccggccgggaggccccagctagtgcagagatttctcttcctttgcccagtttccaggcagaagcatcaggccaagagctcaagacccaaccagtgtagtggttgcagtcagtgagtgagtgagtgaccagtgagatagtggcatcgatggctcggggaagaggcagtgcaatgcgaggcgccgtcgccgtcgcgtttctcgccgtcgtcgtgagctgcatcttcctctccggctgcggcgtcgccgacgccgccacctactacgtcggcgacagcctcggctggtccctcggcagcgggagctggcccagcggcaagaagttccacgccggcgacatcctcgtgttcaggtacttgccgtggatgcacaacgtggtggccgtcgacgaagacgggtacgccgactgcaacccgccgccgttctcgaggtactacacctccggctccgacagcgtcaggctcgccaggggggacaacttcttcgtctgcacccgctacggccactgcaacctcggcatgaagatggtcgtcaccgccgtgtgactgagggagaaacatgtcaagactgtttcgtacgtctcgatcgagcgaaaatgctgtgaaatgtcacactctctctatcttgttccatccggttcgttctcagtttttagcattttggatgattgattagaggattctctagctgttctatgccggtgtgacacgactcggtttgccaattgtgtgtgcattgttgacgc

SEQ ID NO: 88185 - DNA, 1254 bp, Oryza sativa
  Clone ID: PAT_MRT4530_87060C.1
atgccgttcccctattttcttcttgctcctctcctcactccccttccccactctgcttcagacccccaaccaaagtacccaatcactgtgtctcagatcatccaatggaggcaacagcggaaaatagtccatatgccacatctttgttcggagttgtatttcgcctatggcttaaggtacgggagaaatttcggtactatatatttaagaaggttggggctcagccgttttattgccaaaattaatattagcctttgttgtttatcttgtcattcattcttgtatatctcaccatttattgtttccatatcaaacaagaactcaaacatatctgccaagataatatctattaatagcctaaaaaaattttctatttcccttggctttatcctcatcgtttcctccacctacatgtacatctcaccatattctccccaatttccacaaaacaatttagagagaaaaatacagatcagaagaatgcttcaggttcaaggctctcttcgtgtccacactttctcctctgctgccatcgtccatgccgttgaaacctctgatgaagattctgatccatcccacttctgcgccgtgccgcagaacggtaagaaggcatcgaggaaggagatcaagaggaggataaagaagcttctgtcatcgctggggcagaaacaccacatctctaaggtgttcttcagatcacgttctgaagctgccaatagcaatgctgtcattgacaacagaggtggtggtcagagtgacatggagacttttgtgtccgcgaagagctccgagttgtgttcattccgtaccgatgatgacgactccgagtcacgatcgtttcgtctcagcccgttgccaatcttcccaaccggaggtattgaattccagccacccgcctctccagtgaagataatcaagaagctcccatttgggtatatcatcggccgtcagctcgacggcgcccccgcagcagcggcgccatcaacgaagctctcattgagcttcaaaaagttgatgcataggttggttgataagtcaaagtcgaagatgatcaagaagaaagtgttacgtgctctcaagggaagatttggaggcggcgagcgacgaggcagggatggacatgtaagggaaggtaaggagagcagcgactatggtgacggtgatggtgatggagacgatgaagatgtattttggaggaaggatgtgagggggctgcgctgcaggcgggtggaggacaacgatcttccatactga

SEQ ID NO: 88186 - DNA, 184 bp, Oryza sativa
  Clone ID: PAT_MRT4530_87061C.1
actgcttcgtattcctgcagcccataactccgtctctcaccatcatggctgtgaccatagatagtttcaccataaccggggaacccccccacaaggcactgaacatctctacagccttcatctacaaccttcaaacagggccaaggtatgaaaactatgctcccaaatctctacagcccacaag

SEQ ID NO: 88187 - DNA, 360 bp, Oryza sativa
  Clone ID: PAT_MRT4530_87062C.1
atgacgctcctgttggtggacggaggcgactgggtggcggccagggaagcgcgtgatgcggcgaggccagcgatgcgggcggcgcgtcgcagcggtggccgtggtgatggcaaacggcggctagaggcagtggaggcggcagtgtttcgggtttgctttagggtggtggtttcggcggcgggttgggggaaaagaggcaacagccgggcttgcccttgcggcggggcagccggtggtgctagcggcgtggcgcggcggtggctagggcgcaggtggttgtcgggcgggggcggcggatggcagtggcggctcgccctcgagatctctatagttctccctgtccaggtatggagtagagcg

SEQ ID NO: 88188 - DNA, 207 bp, Oryza sativa
  Clone ID: PAT_MRT4530_87063C.1
cgcaaaatgtgaattggtgggaagttgaagctcctactgcaatgtgaggcaaccacccccaggctgtgttacaactttaatgcttgccggctgccagtatgttggtggtgggaatgtggtgacgcaggataacaaatttcaacacaaggaaacaagcatgatggaccatggatttaacacgccacaaaggcttctgaatgacagact

SEQ ID NO: 88189 - DNA, 1027 bp, Oryza sativa
  Clone ID: PAT_MRT4530_87064C.1
atggaaggaggaaaaccccaccctgctgcgactggaggaggagcatcgagcagccaccacgccgccgccgccgccgccgccgatgtcgccgtcgacgaggcgttcgcgcgtgacctgtacgtgtcgcagctgatggagctgggcgacgacgactggagcagcttcgcgccgccgatggatcgcgtaggatcgacgtcttccctcgccgccggcgccgccgggagcagggcccaacccatcgtcatcgatgatgatgatgacgcgccggcggcggcggcggcggcgcggaccgtccaactggcctacctgctgccatggcgccgtctactgaactctcactccgccccggcggcctcatcgctggcgggcggcccccgctcccgccccggcgggagacgtcctgccgcccgtatggcggctcgtgccgctcccggcaccggccatgcccgtggcgccggcaatggccgttgggctagggcagaaaacctcatggcagcattgcaagcaaaccctcgcccaaacgtcgcgcagttcggccggatatggactcgcattgccgccgccgaccgccagctcaccgccgccgccgccgccgccgacaccccggcggccgtcaccgccaccacgggagaagggagccacgccgcccctgccgtctctgccggcaagtgtgggcaacacagaaccccggccatctccgccggcaaaggaggcgccgccggcggcatggaagaagaagaagaggttcaccgcaacgtcgcgaacgagaacgactcggtttcctcgaagaggcaggccctactcgccgacagggacacgccggccgtcttcgccggcatggaagacggccacgacaacgactggtacgactccgtcatccgcgacgccgtgatcgccgagctgcaagaggacccagagctccatgggcctctcccggtgcaatacctcacaaaatcgcccgtcgtggcgcaaccaccaccccgcgccaccgccgccgccatcgccggagaagaagaagaagaagaag

SEQ ID NO: 88190 - DNA, 538 bp, Oryza sativa
  Clone ID: PAT_MRT4530_87065C.1
ctagtgaagccctggaaggtggtgtatccccgccagtgctgcgacggcgggagccccgacaaggtccgggacttgagatgcggcatggtcgcggatgggggcagcgctaccacacccacgggcagctgccatgtggtgagcccccatgccaccaggaagctcgcagtggccctgcacctgcagctcctccttcacaggggcgccgtcgatgctcgggtatagccgcttcacctccggggatggtaatctgagggagaagtcgacgtcctcgatgaccatgaccgacttggaccgcgtcgaggccagcagccttcggagatcaaagttggacatcactgtggtccgctcaaatggtgtcgcgcagtgtcggatcgatggcgagtatttagtgattgtccatgccaccgccgctttcgtagaaactggaactgttggtgtggagcttactctcccacatcttggcccacgatgtcgccgcctcctcaagaatgaaggggatgtacacgtcatccatgacgttgcggtcacgtcaccataa

SEQ ID NO: 88191 - DNA, 2577 bp, Oryza sativa
  Clone ID: PAT_MRT4530_87066C.1
atggaaggaggaaaaccccaccctgctgcgactggaggaggagcatcgagcagccaccacgccgccgccgccgccgccgccgatgtcgccgtcgacgaggcgttcgcgcgtgacctgtacgtgtcgcagctgatggagctgggcgacgacgactggagcagcttcgcgccgccgatggatcgcgtaggatcgacgtcttccctcgccgccggcgccgccgggagcagggcccaacccatcgtcatcgatgatgatgatgacgcgccggcggcggcggcggcggcgcggaccgtccaactgtacgtgccgcctccgttacgatccggtgggcgccgcaccgtggcgacgagacagcagccggcaccggcaagatcagcgacggccttcctcccgcggccgccgggcggcgccgccaccgccgacatcggcacgagctctaccgccaccttaccacagggcctacctgctgccatggcgccgtctactgaactctcactccgccccggcggcctcatcgctggcggcgccgccgctccccgccacggcgggagacgtcctgccgcccgtatggcggctcgtgccgctcccggcaccggccatgcccgtggcgccggcaatggccgttgggctagggcagaaaacctcatggcagcattgcaagcaaaccctcgcccaaacgtcgcgcagttcggccggatatggactcgcattgccgccgccgaccgccagctcaccgccgccgccgccgccgccgacaccccggcggccgtcaccgccaccacgggagaagggagccacgccgcccctgccgtctctgccggcaagtgtgggcaacacagaaccccggccatctccgccggcaaaggaggcgccgccggcggcatggaagaagaagaagaggttcaccgcaacgtcgcgaacgagaacgactcggtttcctcgaagaggcaggccctactcgccgacagggacacgccggccgtcttcgccggcatggaagacggccacgacaacgactggtacgactccgtcatccgcgacgccgtgatcgccgagctgcaagaggacccagagctccatgggcctctcccggtgcaatacctcacaaaatcgcccgtcgtggcgcaaccaccaccccgcgccaccgccgccgccatcgccggagaagaagaagaagaagaaggtgaattctccatgccaaacttctacaagaagtggggcctccgcccatccgacctcgaccccgacgaggccggcccgtcgacgaggcggccgagggtgctccccctcgccgacggcgacctcccgacgttcgactgcggcatctgcttcgacaccttgccgatgctcgacctcttccgcggcctcccctgcgaccacaagtactgcctcgagtgcatgaccacctacatcgacggcaaggggtgcaagaaggccatcgacttcgccgcgttcaccgactgggggctccggctcgccgagggcgccgtgccgcacgaccggcgggcgtactgccccaaccgccggtgcgggatcctgctggagaccagcggcgaggcggagccggccatggcggcgtgcccggcgtgccagcacctgctgtgcgcgacgtgcggcggggagtggagcacggcggacgacgccgaccaccgggactgctccaaggggcccgaggccgccatggtgaagaagctcgccgacgagcggcggtggaaggcgtgccccaaatgcaggatgctggttgagaggacagccggctgcagggtcatgagttgcaggtgccgcatggtcttctgctacctttgtgggctccagataggagcggtgctggaggggaaggagaaatgccagtgcctcgacaatctcggcgtcgttctgattaaagcactgtgcagattttctaaaaggagaactgcatcttatcctccaataaaagccattcaaataaaaggggtggtggtctctcatctgcgcagtagccaacgacacagacgccatcccgtcgccgactaccaagcacgagaagaggagagttgtcgccaacacctctacacaaaggtggtcaacccccaccttcctcctatcgccgtgtctgctaccaataccgcatcctgtcggcacgagggggttgccacagcaactgctcacacccatccccgtacctccacgcaggcggtctcaccattgcccagtgtcgccattgctatgccttgcgagcattcctctaccacgcgttggtcacgtagatctagcctcgaagctactggatctagcatcaccagcgctagatccactactggaactgtcttcaacaccattggtcatagttgtcgtcgcttcaaccgcgttgccgccatcacagtcactatcatggccagatccatcctccaaatctatcaccttgtgctcgcaacctctgggagctcatgggagaaaaggccccacaccactaacatccttgtcaccgcaagatttccgacggatggctctgatggtggcgaggaggtgggagggaggaaagtggagtggcaccgtggcatgggtcactgcccgagtcattcctcagtaattgagtaa

SEQ ID NO: 88192 - DNA, 565 bp, Oryza sativa
  Clone ID: PAT_MRT4530_87067C.1
gcacgaggaatgaatgtaactttggacctttggtatttctgcttgttgaaagggcaaccatggttagtgagcttcattcaatctctgttggtggtgaatagtgattcttcccttgttgtgtcatgaatgttgtttttttgttaaaaaaaagttgtttccaccacagggtaactgctgattttgcaaaagttgtttatacagagaaacaaactaattcacctttttactaggttttccaagaggaaacttatttattcacaaaaataacgggtggatatggtttctctgctaatctctcatatttgcctgtagaatgttgcacctgtgcaccatgcacagtaccctttttcttcttgttcacatacatcatgtaagatggtagtttctttttcctataccaagtctcagatcgtgcaagttcggtacacttcagtttcatctatagcatgtagatagtagaaggcccctataccatattccctttattagtaacttagttttctttccattttacgggtacagccatatttcgttctatttcatgcatccaaagtagtagccggtc

SEQ ID NO: 88193 - DNA, 2664 bp, Oryza sativa
  Clone ID: PAT_MRT4530_87068C.1
ttactcaattactgaggaatgactcgggcagtgacccatgccacggtgccactccactttcctccctcccacctcctcgccaccatcagagccatccgtcggaaatcttgcggtgacaaggatgttagtggtgtggggccttttctcccatgagctcccagaggttgcgagcacaaggtgatagatttggaggatggatctggccatgatagtgactgtgatggcggcaacgcggttgaagcgacgacaactatgaccaatggtgttgaagacagttccagtagtggatctagcgctggtgatgctagatccagtagcttcgaggctagatctacgtgaccaacgcgtggtagaggaatgctcgcaaggcatagcaatggcgacactgggcaatggtgagaccgcctgcgtggaggtacggggatgggtgtgagcagttgctgtggcaaccccctcgtgccgacaggatgcggtattggtagcagacacggcgataggaggaaggtgggggttgaccacctttgtgtagaggtgttggcgacaactctcctcttctcgtgcttggtagtcggcgacgggatggcgtctgtgtcgttggctactgcgcagatgagagaccaccaccccttttatttgaatggcttttattggaggataagatgcagttctccttttagaaaatctgcacagtgctttaatcagaacgacgccgagattgtcgaggcactggcatttctccttcccctccagcaccgctcctatctggagcccacaaaggtagcagaagaccatgcggcacctgcaactcatgaccctgcagccggctgtcctctcaaccagcatcctgcatttggggcacgccttccaccgccgctcgtcggcgagcttcttcaccatggcggcctcgggccccttggagcagtcccggtggtcggcgtcgtccgccgtgctccactccccgccgcacgtcgcgcacagcaggtgctggcacgccgggcacgccgccatggccggctccgcctcgccgctggtctccagcaggatcccgcaccggcggttggggcagtacgcccgccggtcgtgcggcacggcgccctcggcgagccggagcccccagtcggtgaacgcggcgaagtcgatggccttcttgcacccctccgggtggagcacgccggcgccgccgtcgccgccgtcggcgcactccgggtccgggcacgccaccggcacggccccctccctcaccttgccgtcgatgtaggtggtcatgcactcgaggcagtacttgtggtcgcaggggaggccgcggaagaggtcgagcatcggcaaggtgtcgaagcagatgccgcagtcgaacgtcgggaggtcgccgtcggcgagggggagcaccctcggccgcctcgtcgacgggccggcctcgtcggggtcgaggtcggatgggcggaggccccacttcttgtagaagtttggcatggagaattcaccttcttcttcttcttcttctccggcgatggcggcggcggtggcgcggggtggtggttgcgccacgacgggcgattttgtgaggtattgcaccgggagaggcccatggagctctgggtcctcttgcagctcggcgatcacggcgtcgcggatgacggagtcgtaccagtcgttgtcgtggccgtcttccatgccggcgaagacggccggcgtgtccctgtcggcgagtagggcctgcctcttcgaggaaaccgagtcgttctcgttcgcgacgttgcggtgaacctcttcttcttcttccatgccgccggcggcgcctcctttgccggcggagatggccggggttctgtgttgcccacacttgccggcagagacggcaggggcggcgtggctcccttctcccgtggtggcggtgacggccgccggggtgtcggcggcggcggcggcggcggtgagctggcggtcggcggcggcaatgcgagtccatatccggccgaactgcgcgacgtttgggcgagggtttgcttgcaatgctgccatgaggttttctgccctagcccaacggccattgccggcgccacgggcatggccggtgccgggagcggcacgagccgccatacgggcggcaggacgtctcccgccgtggcggggagcggcggcgccgccagcgatgaggccgccggggcggagtgagagttcagtagacggcgccatggcagcaggtaggccctgtggtaaggtggcggtagagctcgtgccgatgtcggcggtggcggcgccgcccggcggccgcgggaggaaggccgtcgctgatcttgccggtgccggctgctgtctcgtcgccacggtgcggcgcccaccggatcgtaacggaggcggcacgtacagttggacggtccgcgccgccgccgccgccgccggcgcgtcatcatcatcatcgatgacgatgggttgggccctgctcccggcggcgccggcggcgagggaagacgtcgatcctacgcgatccatcggcggcgcgaagctgctccagtcgtcgtcgcccagctccatcagctgcgacacgtacaggtcacgcgcgaacgcctcgtcgacggcgacatcggcggcggcggcggcggcggcgtggtggctgctcgatgctcctcctccagtcgcagcagggtggggttttcctccttccat

SEQ ID NO: 88194 - DNA, 170 bp, Oryza sativa
  Clone ID: PAT_MRT4530_87069C.1
caaaccatgcccatcctccagccccttttcacatggggcaccacccattccagcacattcatgcagttccaaggtcaccatcaccattggttgtcatcatttcacacccatcccgcacacccattcaactctcacttcacaagtgacacacaaggcaccaggtggccccc

SEQ ID NO: 88195 - DNA, 429 bp, Oryza sativa
  Clone ID: PAT_MRT4530_8706C.1
atggcggcggaggctcgggccgagagccccgccgcgcccgtcgtcgtacccgccgcggcctcccccgagaagcgcgtgctctcgggtgacgccgggagggaggaggagcggcccgagccgaagcggcgcagagcgtgcgtcgcggcgctcgacagcgtcccctgcgccgcgccgccgctggttgacggggacggctcgtccttctccttccagcacgcgcgcggcggcttcgtggtgctcgagacgacccccaagttcgggtccttcaacccgcccgccgcggctgccgtcggcccgaagcctgcgccgcctgccggtgccgggcagggctcgccggaggaggaagggggaccggctcgcgaggaggctgaggccaaagacgggaattcgcagttagtggggccgggcgttcaggggcagaagacatga

SEQ ID NO: 88196 - DNA, 315 bp, Oryza sativa
  Clone ID: PAT_MRT4530_87070C.1
atggcgcgggagcgatttgccaaacagtgctgcggactgggggtgcgggactggcttggcgcgcagaccgtgggggtgcggaactggcttggtcacgcagaccgagagtgcggaaccgagtcggtctcgcgcggtggctgtgctcatgcgtgtggagtgcgggaccgcaccgatggctgctcagtcgcgcagaatggtggcacgggaccaaagtggtaccgcagtctgaaggcgcggaaccgagccagtcccgtggggctacagttccacgtttccgacgtgcgggagcgtgtcaaagtaaaagcaaatcattga

SEQ ID NO: 88197 - DNA, 528 bp, Oryza sativa
  Clone ID: PAT_MRT4530_87071C.1
atggccacgtggcagtggcagcaagggaggggcttggtttgctcctcccttaataccgcaatcgagctcctcgccaaggacgggcaggtgggcggcgaggagaacgacggaggaggcgaggcggcatatgggcaggtgggcggcgaggagaacgggggaggaggtgagacagtggtggacaggcaggtgggcggcgaggagcggtggtggacgggtgggtgcgcggcgaggagaatggtggaggaggcgagatggtggacggtgggcggcgtgtggcatggggtggtggccagcgggggcggggtaggtggccggtcttcggtggaagaggatgaccaggcggtgtcgcggcgagaggtgaagagaggagagcttttggcgctggctggggaagtgcggcgacggccctagcagttggcggcggcgaggagagcttcttcaatggaagaggatggccgggcggcgtcgcagcgagagatgaggagaggagagcgactagtggcagcgcactacgccattgcggaagcc

SEQ ID NO: 88198 - DNA, 365 bp, Oryza sativa
  Clone ID: PAT_MRT4530_87072C.1
gaaaactaccgctaaataaaaaaaataaaaaagatgtataaaatttgtccgtgttattgtaagtaaaatatttactcacagatttacttataagtaataattttactcatgatgacgtggacgaatatcaaaaatttaaatttttgatccaacggtagttttcgagttttcattatataaggtttgcattacttttttttttgctaactgttaggttggcaaataaaagtacttcctcccttcattgttttaggaggatcaaatcttatcctcagattgtaacatcttgtaatagagatagtacagtaccttggccctaaaataacttatagagtctaatcatttaaattcaaattagcatgagg

SEQ ID NO: 88199 - DNA, 192 bp, Oryza sativa
  Clone ID: PAT_MRT4530_87073C.1
atgacaaaggtggcggagaaagggataggggcggagaggagaggagacgttggcgagaggaaggggaagggggcgacgtggcgtgtgatcattggcggttgggttcttgggcccaggctgtgccggtcaaaccaacatgttctcgtgcttcaccgttgcatgacgccggagtatgccttcttcgcgctctga

SEQ ID NO: 88200 - DNA, 499 bp, Oryza sativa
  unsure (1)..(499): unsure at all n locations
  Clone ID: PAT_MRT4530_87074C.1
aattcggcacgagggagtngagtgctacatcttccttcgatgaataatttgaaaagtgcatctgcattcatccaatcctctccaaaaagacattggctctggtgtacttggtatctgtacatctggttcatatttttcttcaacaagtcatgaaatatcgactctcttagtctctttgccagcaggagtcgtgacctgaagttccttgggtctttaccttgtgtttcacttccagtgagaaaggcccggggtcttcccggctagcaacgcaagctgtgagctagccggtctaggttcgagcctcaccccctccttaattcaaaatcaatctagtccttcctagattggtccatttttttttgtttcacttccagttcttaaatccgtttcaggtagcacactgtttaatatgtagaatgmtccyttcttcccggcatggatttatacataatgatctcatagcatcccttwaaaaaaaaaaaaaaaaaaaaaaaatatt

SEQ ID NO: 88201 - DNA, 358 bp, Oryza sativa
  Clone ID: PAT_MRT4530_87075C.1
gtaaggaagtgcttgttctggtcgtcgaagatgttggattctctatgctggttgggttggtacgggagcgaattgcttggacaatgagtacctgatggatttatactgaacatgtggattgactgttgaggagatttgtgtgcacaataaacatgtcgtgaaccgctcacttgacttgttgatgaacaggaactgtatccaagtcatctttatccttggctcagctgatcttcaaggcccaaatggccagcacgatttctacacttgtgaagatgagaagtatctgtcacttcattatgcgtctcaggagaagagcaccagtgaagatattgacctttttgaggattataatattatg

SEQ ID NO: 88202 - DNA, 2064 bp, Oryza sativa
  Clone ID: PAT_MRT4530_87076C.1
gcgttgagggcagtagcagtagcaggggccctgctgctgcttgtggttgtgggttcttccgccgccggtgccggtagtggcagctgccagacaaggtgcggcgacgtggacatcccgtacccattcggcatcggccccaactgctcccgcggcgttgggttcgagatcgagtgcaatacgaggaacggcagcggcgacttggtgccgaccctggcggccaccagcttgagcatcgtgcagaacctgtcggtggagtcgcctccaatggcgaaggtgatgctgccggtggcatacaagtgctacgacgacccaacaaaaacccaagatttcaacggcgaggtagagctgaacaagaccggcgtgtaccgcatctccgatgagctgaacatgctggtcgtcctcggctgcaacaccatggtgtacaccaagaacggcaacagtgagggcggcctatacccgtacctctactacaccggctgcatcgcctactgcaacgactccaggagcgcacaagacggcaagtgcgccggtgccggctgctgccatgtcgacatccccggtggcctcaccgacaacaccctcgtcttcgactcgtggaaccgtaccaagtaggtggatttcagcccctgcgactacgccttcctcgtggccaaggaggagtacgtcttccagaggtctgacctcaataaggacctgaaccggaacatgccagtgtggctggactgggccatccgcgacgacgactcggcctgtcctccgctggcgctggggaagaaaccaccagctgcgtcgtacgcctgcgtcagcgacaacagcgagtgcgtcttctccaccaacggccccggttacttctgcaggtgcctcccagcctaccatgggaacccttatgataccatgcatatgtgtgcagacatcaacgagtgcctagcgcccgagcggtatcactgtaacggagtatgcaacaacatcccaggcaatgacacgtgtcattgccacgcaggttaccagtctaatgatgcaaagacacaacggtgcactcctaagttccccgttgcatcaagaattgcacttggtgtctgcttgggtttttccttcctgattgtcgcttttcttatcacacttgtgatgtttcaaaagcagaaaatgaatgaatatttcaaaaagaatggtggttcaatactacagaaagtggacaatgtctagattttttccaaagatgagctaaaaaagatcacaaagaacaattcagaggttcttggtcaaggaggctttggtaaggtatacaaggggactcttggagataatactattgtcgctgtgaagacctcaattgaggtaaatgaagcacgaaaggatgatttcacaaatgaggtaattattcagtcgcaaatgatgcacaacaacattatcaaacttttgggttgttgcttggaggtggatgttccgatgttggtatatgaatttgcggctaatggcaatctgcaagatattctccatggtgatggcaatatccctctaccattacacttacgcctagacattgcaattgaatctgccgaaggtctaagatacatgcactcctcaactaatcgtaccatacgacatggcgatgtcaaaccagccaacatacttctaacggataagttcatccctaagatatcagactttggaacttccaagcttcttactgtagacaaagactttaccatgtttgtggtaggaagcatgggctacatagacccagtgttccataagactggtcatttaacacagaagagtgatgtgtatagctttggagttgtactacttgaactcataagtagaaagccaacaatatatggtgaaaattgtagcctgatcattgagttccagcagtcctacgataaagagaatagtgggagaatgatgttcgacaaggatattgaaattgaagaagacatcctcatccttgaagaaattggcaggctggcaatggagtgtttgaaagaaaaggttgaagaacgacctgatatgaaggaggtagcagaacgactagtgatgctgcgaagatctaggaagggtggg

SEQ ID NO: 88203 - DNA, 1185 bp, Oryza sativa
  Clone ID: PAT_MRT4530_87077C.1
aaaaaaatcggctcgatataaatggcaacctgcaagatacaagtgaaaaccatgacatgatgatgaattcacgctttaaatactacatgcagtccaaatatgatgtttggcaagctctacaattttaagcagcacttataaacagcctatcgcagtacagaatacaggaaaatgggatacatacaacaatagggtgacggatctcagcgaagtgaggtcttgccggcgagatggagcaacgcctgcttgtggtaggcggctcggagctttttgtacttctgaacaaaggttgggaggtcaatgtccttctccaggaacttctggtgcagctcctccgactcctcgtccaactttgccatcgatttttggagcttgtcgagcagtgcagcaggagaatatgacctcataatctcatccttttgcctttccaactcagccaacctatcttgagcagcagctagttctgtagttcttataatggtgcactgattcctgagctccaagatccgttgctctttttccaaattttctcttgcaagttgcactgtctcctttctaagctcatcgcgtaagttgttctgggttttaacttgatcgagtgaattgaagaaagcattatatgcctctttgtctttcaacagcctctgcaactcatcaacacttttgtcctttaaccgagcaattatccctgcagcctcagctggagatggttgagcacgcgatgaagactgggaattatcagaagctctttgatgtggaccaacattggaagagcttggtgtggatggatgtgaagatgaaccaactacagactgagggtaccaaggttgcgtagggttgtcctggaaatttggatcaggttgctgctgctgcgagttgctgccaaaaagaggaaatctccagctcattgtactggagcaatctgctgcaacatgatcagcaaatatgtcacacatcattcccatcagcagagtttgccagtagtttaacacttcctggtggcacatcagcctcgaaaccgagttgccggtgcgggcggcgctcagggacggccggcgagggtcgcggaggcctggtctcaccgccgcgaggtggcggggaggggagcgcgtcgcgttcgcgttgcttcgggtgggagcaagcgaagcagcgatggacggtggccggcttgtcgaaggagaataa

SEQ ID NO: 88204 - DNA, 681 bp, Oryza sativa
  Clone ID: PAT_MRT4530_87078C.1
atggatcaggttcgtagttcaattgttcgtttacgttttatttgggaaaaggaggaaaaacaagatgactctactgttattatcaagacacagcatatggttattcctgggatcataatctcaatcagtggtagagaagaggctgttatgatagcaaacgccactttctttaataacaagaagagtcaacttaacttttgggtgagctttccaaattctaccggatatgaacaagaacgttctgttccctttagtgaagtggttcttgaggatgagttcttctgcacatttactcttaagccaattgaaggcggttttataaaaccgatccaatttgaaattcagcctgttaaaaggatggatgaagttcattcatttgtttttcctagagaagaatatattacaccaacaagctatccaaatggttttattacacgaatggtcaaacattttttaaaaagtcaacggcgtcaaatatttggggtggagggagtatttcataattgcaagatgcatgagtatgggtacttgggatcaccggtgttcaatttccgtggtgatcttgttgcgattacataccttgataaagggcaactgcaagcatggaccgtgaagtcacttctatctggtatcctccgtagaaagactagaactcttgtctccaacggagagcattgctga

SEQ ID NO: 88205 - DNA, 1114 bp, Oryza sativa
  Clone ID: PAT_MRT4530_87079C.1
tcaattttggcaaaatataactggctgcaagtaaacaggctccattggcagctccatccaccagctttctgccaatccactttggtcagtatagacagcatcaacgtcatcaagctcaagcaacttagacactaggaccttgtttagttctcatcgcctcggtggcatctacctcaatcgggttcagaggcagcaattcatagccattatcagtttcaaattttagtccttcctcttgtagcttcgatagcacaacaggatagttctctgatgtagtaactatcttgtaaaacctttctgaaacatcttcagaggagtcgtcatcgtagtcgtcgtcgtcatcatcatcatcatcaaaatttggttcaatgacatcatcggcgccagcatccaaagcaacagtgagcagttggtccttatcagcatcagttactttgatgttcaccactcgagcttgtctgaatctgaatgtaacagatccaggatcagccaattttgctccacagtcctttacaacatttcttatatccgcaatagatcttgtaattttatctgtaaggacctcaacaaccatacctactccaccaaaaccatacacctcgtaaaccttttctgtgtaagtatcttggcccttttctgaagccctttttatgttgcgctccaagatttctttggggatatcaagttcccttgctttctccaatattgctgctaaagttgtgtttgatgaaggacttgggccacctttcttaatgcttaataagatctcttttaagagtatctccttcagggaattagtagtggtgtctgatagcttccttccggcgatcttgcaggagcgccgtcccatgcaaagcggctggaacgtcgaaatcctccgcctcgccgcgtgcctctggaacaatctggcgctgccgccagcagagcctctccctgaacacaccaacgcatcaatcgctggatccgtggagacggccagacgggagacgagtgagcgagcgagcgaggactggttaccatggaggacggcggcgctcctgagagcggcggcggaggaggacagcgacgaggccttgtggacgagcgcgcccagagcccgcgcggcggacgccat

SEQ ID NO: 88206 - DNA, 230 bp, Oryza sativa
  Clone ID: PAT_MRT4530_8707C.1
tggttgctaggatcacacagagcccgagagctaactgtgcagtgtgctgtggaggtcgagggaatagtgaagctccgaccactatacgcatcaaggcgtggggtgccaggagcagcacttcgaccttaggtttggttttgccgggctttacaaccaacggtccaacgtcggggtcggtagaccgcacgaacgtccccatagaagacgtaaagttccaaccggcggctttt

SEQ ID NO: 88207 - DNA, 526 bp, Oryza sativa
  Clone ID: PAT_MRT4530_87080C.1
atcactactccgcgccgctagctacccacttgttccaccgaccacatcgcgcgcccacctacgaactccgcccgccggcatcgatgggggcttcgacgaacgcccgcgagcgcgccatcgctggccgcagtacgatccgcacgccggagaagcgttcttcagttgccagttcgtgcagatctgtctctcaggcaagctagatttatgcagcatgttgatccagattattacaggagaaacttccacattcctgaagtcatggtacaattggtatttggatggaagataaggaaatgtgatggcactcaatgctgagaagaaacttttttttcagtagctggagccactggaaagcccacaatcgatgcttataaatccttcatctacaaggggagggagtcagctgagccatttgcactccacatgttaattcgcaggttagccaatagaattataattatagtcatggaagaataatccttcccatagaacgtattggcaccaaaaatatgaaaatttatcaggt

SEQ ID NO: 88208 - DNA, 393 bp, Oryza sativa
  Clone ID: PAT_MRT4530_87081C.1
attatgatccaggctcgcgtcgcgtcctgctgaggccgcttctactccgccagcccgcgccgccggaagcgggcaattcgtcgagcacctggtgcgcgcgctccgccgccatggcgtccgccgcgcgggctctgggcgcgctcgtccacaagggctcgtcgctgtcctcctccgccgccgctctcaggagcgccgccgtcctccatgggagaggctctgctggcggcagcgccagattgttccagaggcacgcggcgaggcggaggatttcgacgttccagccgctttgcatgggacggcgctcctgcaagatcgccggaaggaagcattaagaaaggtggcccaagtccttcatcaaacacaactttagcaggaatattggagaaagcaagg

SEQ ID NO: 88209 - DNA, 492 bp, Oryza sativa
  Clone ID: PAT_MRT4530_87082C.1
ggcaattcgtcgagcacctggtgcgcgcgctccgccgccatggcgtccgccgcgcgggctctgggcgcgctcgtccacaaggcctcgtcgctgtcctcctccgccgccgctctcaggagcgccgccgtcctccatgggagaggctctgctggcggcagcgccagattgttccagaggcacgcggcgaggcggaggatttcgacgttccagccgctttgcatgggacggcgctcctgcaagatcgccggaaggaaggatgctcagaatttgaaaaagatgaagcgcaacagtaaaattgggaaagaaatcgttgctgccattaagaaaggtggcccaagtccttcatcaaacacaactttagcagcaatattggagaaagcaagggaacttgatatccccaaagaaatcttggagcgcaacataaaaagggcttcagaaaagggccaagatacttacacagaaaaggtttacgaggtgtatggttttggtgga

SEQ ID NO: 88210 - DNA, 288 bp, Oryza sativa
  Clone ID: PAT_MRT4530_87083C.1
aaaacgcagacagctaggctttgctgtcctagacgatccttcaaaggggggggggcccctcaaaaaatacatccttgatccttcggtaattaccctataccaatttcgccctctaggctcgttgcacctctggctactttgctacagtcctagcagcaagcacgccaggtagccaaaggcggtagtaaatgaggacagcaaaaaaactaaaagtacgtgctccatccaagcatgcaatgcgccaatgcggtcatgcacagcgctactaaccatgccattattacacta

SEQ ID NO: 88211 - DNA, 494 bp, Oryza sativa
  Clone ID: PAT_MRT4530_87084C.1
gggaagggaaaatttttaaaactctttgtttgagatgcgagtgtgcaaagtagttacacaaaaaatgccggattatcaactcaattttggcaaaatataactggctgcaagtaaacaggctccattggcagctccatccaccagctttttgccaatccactgccaatccacagtgtaacccaaaaaccgtcggcatcgagtgttttggatcatgaattcaaagtcacctttggtcagtatagacagcatcaacgtcatcaagctcaagcaacttaaacactaggaccttgtttagttccatggcctcgtcatctaccttaatcgggttcagaggcagcaattcatagccattatcagtttcaaaatttaatccttcctcttgtagcttcgatagcacaacaggatagttctcttgtgtagtaacttttttgtaaaacctttctgaaacatcttcaaaggaatcgtcatcgtagtcgtcggcgtcatcattatca

SEQ ID NO: 88212 - DNA, 523 bp, Oryza sativa
  unsure (1)..(523): unsure at all n locations
  Clone ID: PAT_MRT4530_87085C.1
ccgcgtcccacgccccgcgccgccctcggccttctccctctgccgcgtcctccaccgccgaggcgccgcctcctagccgccgtcgctgcgacccgcgccaccctcgaccgccgacgcgggaggaggacgtcacgccgcgccatcaccgccgaggcgccgcctcctcgccgccgncgctgcgaccactcgcttgccctctaatcgngacaacagncaaagaggaatatacgcccaccgcctgcgccgattcctcgccggcggtctcctccggcctctcagccatcaccaccaggaaggagacgccgncgnctttggtgattnctgctggcatatnaagcgaagccntatcgnccggcggncagggacgcccgctccgtgggggcaacctacccttgactgggagngnnnncgnngggnnaagnnnagggtacataggncgggtnncaacaaaccanannnnagaagggctgggcatgggcatgggcaatggatgcctttgggtncggggtnggggagggccagg

SEQ ID NO: 88213 - DNA, 367 bp, Oryza sativa
  Clone ID: PAT_MRT4530_87086C.1
cacgtaccggcacccgaattcccacgcggacccacacgtgcgcgcacgtgtgcggccacgcgtgcggccaggcagtcgctcttacaaagctggagccagtgcttgaaaaagccgggagaaaacatcgggccaggcgcttacgaagagtaccgaaatgagctccccgtgcccctgcagtaagtacaccaatgagcgcccacgctgactaaagaaacgatagccgtggtgcgcaactctgatcaaggaaacgattaccacatgaagtactacacacccgaacaccgtctagaacatcaagtacgtacacgcgacactgctacgaaagccagacctatagcggtacatggttgctaagcatgccgaacct

SEQ ID NO: 88214 - DNA, 384 bp, Oryza sativa
  Clone ID: PAT_MRT4530_87087C.1
atgcggcggtcacatcggctacagtggtggcggcagagcagatccgtctccgcccaccgcggggaggccggatccgtcaccggcgaccgtggggacgacggcggcgacgatgacgaacacgaccaccacatcgtccctctagccgccaagcctagcctaccacccacagctcaagtaggttcacgagccgccatcctccgttgcacaaccgttgcttccccccttcccccagagttccccatggctagaataggaaatccagccataggaggggaggagctccacaaagaacatactgcccacagcggccgcttgggccaccgtgcgacccttgccgctgccctgtgccacttcgcggccatgtcatggcctaccatcgtctag

SEQ ID NO: 88215 - DNA, 406 bp, Oryza sativa
  Clone ID: PAT_MRT4530_87088C.1
aaacccatgcaaaaaaatttgggggggccttttatttaattttatacttatttttaatttaaccgcaaagtttgggttgggcgaaaaaagatcaacaaaggggggcgttttttgttttggggggctttttttggaaatgggcacaaatttttgtccgacagaaaaaatttttaatggcgggacaagcctgggggattttggcgtttggaactttcccaaaaatacatttaagggtgttggtccccccctgcttcaagatgagatcgatgcaactggggggctgcaaaattgcgtttttttgttgggcaaaaaaggacttttttggtccatgactttacccaaacaccgttgcgaaatgggacaagtttgttctggaatccttggaattaaacatgggtttttaaaa

SEQ ID NO: 88216 - DNA, 205 bp, Oryza sativa
  unsure (1)..(205): unsure at all n locations
  Clone ID: PAT_MRT4530_87089C.1
ctnaacctncccaaaaacagggcccgagctaataacaagaatgtgcctatccccttatcgccccccnnnnncagngggcacaacataaactccaattattccaagtaaggcagcgcgttacttccggggactcaaacagcgcacacttgcacaagcagcacgcccggcgctaactcccgaatgcccagaaaggcagaagggcaaa

SEQ ID NO: 88217 - DNA, 528 bp, Oryza sativa
  Clone ID: PAT_MRT4530_8708C.1
atggatttacctgggccaatacatgaaattcttgtgctatttgggggatttgttcttctactagggggtctaggggtggtattacttaccaacccaactttttctgctttttcgctaggattagttcttgtttgtatatccttattctatattttattgaattcctactttgtagctgtggcacaacttcttatttatgtgggagctataaatgtcttgatcatatttgccgtaatgttcgtaaatggctcagaatggtctaaagataagaatttttggactattggagatgggttcacttcactcgtttgtataactattcctttttcactaatgactactatcccagatacgtcatggtatggaattctttggactacaagatcaaaccaaatagtagaacagggtctcataaataacgttcaacaaattgggattcatttagcaaccgatttttatcttccatttgaactcatttccataattcttctagtttctttaataggtgcaattactatggctcggcaa

SEQ ID NO: 88218 - DNA, 319 bp, Oryza sativa
  Clone ID: PAT_MRT4530_87090C.1
aacttcaaaacgtactgggtttttgtatacacactgacagatggtttcccccagagaatcgaggtttgtcgctatgatagttggaccttccctacctccactatttgactctgggcttttagcaacaccgagagcaaagacgaggccacgaaaagcaccgtttgcttttgtgggatatcccccatcctcggtgttttttactggcgcactagttgtactacaaaactgccggcagcgatcgcctgccgtcaaaaagtgggggcttgaaacaacgtttaaactattttttccttgacacgcctacaagaaccggggacat

SEQ ID NO: 88219 - DNA, 2313 bp, Oryza sativa
  unsure (1)..(2313): unsure at all n locations
  Clone ID: PAT_MRT4530_87091C.1
ttagaatccgtggaccttgatgttgtccttgcggaccatgccggccttggcgaggaagtcggagacgctgttgcggtggtcgccctgcagctggatgatcttgccgagctccttgtcctccaccacgttgccgttgcagcagagctcccgcttgaggtcgcggagcaccttggcgtagttgtactcgccgccgatcccctgcacggtggtcagcgtcttccgcccattgcgctgctgcacgcggacgtgcacgtagtcgccgccggcgccgcggccgcggcggcgtcctccccctccgcgtccgcgaacgcgtcgaacgtccccgccggcaggccgaactcctccggcgccccggacatcaacttgctgccgctgttcccgccgccctccgccgcctgatcctcctcgccgcggcgggggacaaggtacttgttcttggacgccgcgcggcccttgacgtactttcccttcttgctcgccggctgcggcggcggcggcgctgggacgacggcgacggcgacggcgacggcctcctcctcctcgtcggacgacgaggcggcggcccacagcgcggacaactgcggcggcggcggcgacaccttggtgaccttgttgctgctcgccaacttcgacgacggcgacacggcggcagcggcgggtttcttggctctggggatcgttgcgctcgagatcgccggaggattcgtgttcttcgcgttcgttttttgcattgcacgaatcagggggcgcctcttgaactgaaaaaacatcagcaacatatggggtcaagtactcgaggtaatgttcaacttcaaatacaaagaacaaaaacttcaccatccattcatttatcgcaggtgcatgaccataatagtctctcccagcgtcgaccagaaccggtggatcatgaggtcgctggtgccaaacaatctttggaggaactaggtcatccacatcggctttcttccacttgtgtttaccacgccagccctcgaacttgaataccccacacattctggccttgtgccctgacagcccaacatgcacttcagagcaacgctcacacactttggatgggtaaaccaataggagttttgtcacacctaatctaagcctttcccatgcttctattgtcctctgacctatgaatctaagctcttctggcaaaaaagcagcaggtttttcatcattttctctgactattgcagatgacgtgccactcctatgccaaacttcatcaggtatatctgcacctgcctgatggcagagctcgagtaccgctgggacacgagggaaatcaaacctctggtcatgttttatctcatcctggaacgtgttttccaggtggaaggattcaacagggataaggatgtcattcaagcatcctggaccccatttatgcggctggttcttgatcatacgcttgaaaccatgacaggattgcatctcatgccctacagctccaatatgaacttcgggacaaaacttgcatgaatgtatgggaacaacttgaagcagcgtcgagacacctttggtgacaatctctctagccttgactacctcctccgctactggaatcatgcgcttgattggatactcctttgcccggttctttatcctcttgaggatcataggccgaagctgcttccagtccaccctcgaagagtacagcctctgattcataaccgagccacacagctccgagcaaatgtagcccccgactctccgccgcatcaacgccattgttgcacacacacatagagtacgcctgcaagtttcacatcatgcattagcgcaagaaactagttcattgccgccctgctcctccacccttgccgtcgccttccctctccggcgggccatcgtcttcagcggcctccgtggtggtgaccgcgcatggctgctcacgcggctggccacaggaggagtcggagcgcccgactgcgggctccaacaatgaggacaacgaatccggcgccatcgccacggcgcacgccaagaagccgttgtccaccattgccaccgcgctcgagaaggagacggagttcgacagtggcgtcaaagtattgagggcggggatgcggccaccgtagcccgactgcttcttgcgcttcccgccgtcggccagcaggggccacatcggccggggcacgaaaggcgggcggcgctgccgccgcgagctcgatggcctcctcctttactgccaccgtcaccgacggcggcggaatcggcttctttggaggtagcagcggcgggcgtgtccgaaggtgccgagccacacgcgtngcccgcttcaccaacacccgcctcgcc

SEQ ID NO: 88220 - DNA, 442 bp, Oryza sativa
  Clone ID: PAT_MRT4530_87092C.1
ggacgcgcgattaattcatacttaggagccacatcattcaaatagcatgggaaacataaaccattttagtatgaagagtaccaaccaaacagttaaattactgtgaactgagattaagccttccattaaatgctccatctattaacccagcagcagggctgaggaaaccaagaggactttagcggaacttgatgaagccgatgtccttggtcgttgctgagagaagcactgcactgcagtgcatgagcccgtacttactgatcagaccatgagggttcccgaacacacggtagacgcgggagcccggaccgtacttcttggggtgggagttacacacgttggagtgccccatattcgtggacgcagccgtcgccttagacttgcgccggcgacggtgagaggggggaaaccctagagaggcgcgcgcgagcccacgcatacg

SEQ ID NO: 88221 - DNA, 453 bp, Oryza sativa
  Clone ID: PAT_MRT4530_87093C.1
atggcgtcgaagtcgcgggtcggcgaggacgcacagtgccactgtggaggagctgcgctgtggcgtgtggctgacgcggccacggcgccgtcccccttggtgggccacgacgctgtcctcctccgccaccgcgggcaacgacgttgtcctccctcgccgctgcgggaggctgcgggccacagtgtcgttctcctccgccactgcaggccacggcgccgtcctcctctgccaccaaccatgccgtcgtcctcttccgacgccaacctcgtcgatttctccctcggcgctgtcttcctccaccgccgcgagacacaccgccgccccttctctgtcatcctcctaagccaccggtcacgtcgccgtcctcttcctccaccgccaccggtggcagagccctgggatggtggtcgtgtcagctcgtgtattccacgatgggatgagggggggagatag

SEQ ID NO: 88222 - DNA, 678 bp, Oryza sativa
  unsure (1)..(678): unsure at all n locations
  Clone ID: PAT_MRT4530_87094C.1
gcgacagcgagcgaggcgaggcgaggcgaaggcgagcgctcccatctcctctccacttttccgcgccgcgtgcgccgaggcggggagggaggcaggttcgcgcggatctcgcgatgcggatcgcgaggctgctgctgctgctggcgctcgtcgccggggcggcggtggcgcaggacgcggggctcggggacgtggcggcggaggagacgaccgcggcgagggccaaggaggaggcggcgctcgcggccgagctgggccagctcagggcgaagatctccgccttagagtcgagcataacaaaacagacccaggagttgaagagcaaggatgacggcatccagaagctggaaaagcttattgaggagaagtcaaagaaaattgctaccctgcagagtgagataacttcacttgagacaaagagatctttagctgcagaggagcaggcaggcaaggccaatgcccgggctattgagcttgagaagcagattgaaaaactgaagaaggatattgaagcacanaatagcaagaaatcaactgtggaggctagggnctggtgatgcagataagaaggtgcaagagctgaaatgctagctggagaaactnccaaaagacagtgatgagcaaaagcgtaggattcagaagactgaacatgctctttaaagntgcagaggaggagct

SEQ ID NO: 88223 - DNA, 237 bp, Oryza sativa
  Clone ID: PAT_MRT4530_87095C.1
atggcgatgcccattgcccaagctcttcttttttttattcaggtcgtcaaggaaattcagacccaatgcgtttctgacaccgaagtttctgaaacggctgtaatccaaattccaaaatcgagacagatgttccaggctagccaaacaaggggctatgccccctctgtcgtaggacaaacgaatcggcaagccacctattcgcccactgtagatacacctgaagaatttgaagcctaa

SEQ ID NO: 88224 - DNA, 369 bp, Oryza sativa
  Clone ID: PAT_MRT4530_87096C.1
atggcgccgctcccaccaccggcggcagcggctgcctccccgacctgctgggtctcgctccacgcccccggcccccgcggccgcagcgcttccttccccgccgccccgtgctccgccagaaggttctccagattcgtagccaggagtagcggcggcggcggcgggaccaatccagggcccaaaccaggtgacgatgagagcaaggctgtgcttgacgccttcttccttgggaaggccttcgccgaggcgctgaccgagaaggtggagtcggtggtgggcgaggtgttcagtgtggtggggcagtggcaagccgagcagcagaagcaggtccaggagttccagcttccagagaatgcagttgaatactaa

SEQ ID NO: 88225 - DNA, 445 bp, Oryza sativa
  unsure (1)..(445): unsure at all n locations
  Clone ID: PAT_MRT4530_87097C.1
tatggcttccaggctcggtatgttgtggtggaattggtgacggataacaagttgtcacaccaaggataacaagctatgaccaatgantacagccaagctctaatacgactcactatagggaaagctggtacgcactgcaaggtaccaggtccaggaattcccagggtcagacaccacagcgtccaggttcagtctcgctcgcagcaggtntacaggctccacaggtggactggaacccctcggatcacagcaaactccaggttcatcactgattgggaggtacaaaacagaaccaaatcggtgcaaaattcgattcaaatcagatcgaaaagatcggaatttttcaaatngagtttngaatttggtagctgaaaatagtatttgtgttcaattgatggtgcgaataaaanctgtcctcgaccacagcgacaaaaaaaaaaaaaaa

SEQ ID NO: 88226 - DNA, 483 bp, Oryza sativa
  Clone ID: PAT_MRT4530_87098C.1
cccttgatggggccgtagtggcggaacgggatcagccccccctagaagaagttgggggacctggggcccacgatcagtggcaccgcggtgcttgccatgacgtacttctaggtcactgaccagacaattccttggatataaagattgtacctacacacgctccagcggctccgatgctacagagttcatgtactccctccgctctataatataattatgacgggtactaagattttacttatattgttggaccactcgtattatttaaaagcacttaacactattatgattgttacttactttattatccaacatattttaagcatagcttctttatatgtatataatttttttagatacgacgactagctaaacaatgaataaactcaaaatcctttagaagacggatggagtagcagctgtgactgaccagagaataacatgagtagtcgtaaccttatttctacctgtgagtgcactgtt

SEQ ID NO: 88227 - DNA, 4080 bp, Oryza sativa
  Clone ID: PAT_MRT4530_87099C.1
ttaaggttcacatggcagttttcgaagcacgtcagcatctcggatttgatacagcggttttacagcataagctttcacaaaatccgccttttcaggtatggttccactagatgaaactctcctctttcttatatgaaataagaaatcttcagtatcaaggacataggaaacctttgaggatttgcaggatatcttgcattcaagaccattagtaaccatgaaagcatcaatggccttcaaagaagcttgagagtcatcgtttcccccacgcttccgtttattcctcccaaggaagatatcgtcatacaatttagtattagaaatacttgacagatactcattatatagataagacgaaaaatttggatcaattgacactgcagttacttcaggtttttcatgcccatactccattagctgaattgataatcttgtaggatttgaacgccgttcaaatcgatatatgctctcatcatggagaagtacacgcgcattttcatgataaactagatcaaagaatctcccaggtgacctggatttttcgtatatgtaaagttggagcagcttgttatccatttcgtcagaagctatcgcttgaagaactttgtatatcagcttatctagagtaaaaagaacatatgactgagtcccgatgattgaacggcagtcatcttcaaatttggtgttgtcagaagaaccatcaagcaagttatacagtgcactcataaactttgaatattggtctggcaagttcgtatccttagaagctttccatttcttttcagctgaggaggagttagtcttagctgacagtattctttcatataggatctggtgtagcctgaacaaaacataaaacgagtcatttccataaaatatacaagagaacttctcttcatgatcatttaaagctctaggaacatgcttagcaagcggtttaactgcattgtgtgagcgttctgagaatggaagtgatattcctgcatcggcatcttgtgcctcagtgttttccgctgcctcaccctcactttcagcctttgcatcaggatcatcctgatccatatcatcttcatcctcatgatcttctcgagaacactcttcaccatcaccagattcactaccagaggcatcttcaccagcttcagatgcattttcactgtcctccatcatctgggcactttcctcaccttcatcatctgcatcaacatcattctctccagcaaactcggttgcatccataggtctaccctggaggagtctcctagtagaatcttccttcgctttagaaactccatctacagatacaccatcaaaaggcccaaaattctccccaacatccccattaggagataattccccctcttctctttcaacctttgaatgattatgggatccacaatattcattaattggacagtgtttgttgtccttgctgttgaaagaccctggaatcctaatttctccactccccataattgcttcattgccacccttagcttcagacacaacctcacctccagctggagtagcactgcaagcgtttatacctggtttaacctccatatttgctctactatgattctgttcaggccgagaaaggtgactgctctccactgatctttcagtggaaatgttttgtgcatataccgctggaaccacatcaacagcaggagtggtattttgcagccttctatctaacatagttttaggtctttcctcatccctgcaaacagttcgttcagcatcctgcaagctattttgcgcatctgctgcaactccacccaccaatatagcacgagaacatgaagcttgttcctttggaacaatttcatcactatgagcatgcttaacagtaactgtgccgtttgttgatgcattattaatttcaacatttgcaggaccagcctttgtgcttctgctattgtgtttttcatcttcaacaccatggcctcgaggatgaacacccaaaataggctccagaaatgtagcccagattttcatcactttgtcaacttgatccgaagaactgcagacttctccacaagagtacttgatgatctgataaagatcttcatgaatttctgggtctacatactcaaatgacatattgggaactattggccgcctattcccagaagcaatagtaagaagcatatcatcctccttccttttcttctcattaacttctttgattgcagctaatagagcttttgtactcagattctttgtgtcctgttgtttgaaatagaagctgcgatgatcaagggacttgtgataattcttagcgtatatttcagcccaaactttattaaaatctgaccggcaccttgaccattcctcttgcttttgcttaagcctagttaaaataactggaagtgcaacactagcgtttttgcgaagaacatccatgacatcaagcccatggtcaccatataaccgttcaatacacctcagattcaatggagtcaaatgctcgtctatgcgtatagggctgtctggtttgattgagttgtcctgcatcttttctatcagctcctcaacacgcttaattgccacaataacagattccaacagcatgtccaactcaaatctgtcatcttcacatctaaacaagctttcttcatactgattcttccgcatgtgcttaaacgaataatcctcacttcctgaggtcacagacacccagagatcattgagaactgaggctccaaggtcagttctgcaacttgcaggaggcattgggtaatttttaggcagaagtcggtaacttggagtacaccgctgacaatttgagaggtcaagttctgatattggcttgcataggttatacttgtctttgctagagaatgtagtagctttgtgggtagcgccttccttagaattgagtgcagatcctttttctactattttaactatttgtgatgttttccttttactgaagactccctccagaaaggcatctatattttcgcactgttccaggaagtcattaaatccattcataagatctggatagtgctgcagtatgtcgttgaccaagtttttcaattcactccttgtaattatttcctggctgtatatgtgaaggcatttcaaaaactcctggtaagcttcaggctctagcttctcctttactttctcacaaaaacggaactcctttgtgtatgcactcttcaatgcatccttatcgtcgtatggtgaagtagaggtgctaaccccaccttgttgtgtgtcagcaagagcaccatccatcttccttgctagtttgcgcttacgttgtcctccatccaaatctttgctgtcatattcaacgtctttcacgtccgtttcataatcttttctactgcgatcaaccttaccatcccttcccttgtcaacacgccttctgtggggatcatcctcaggatcagggcgatcaatactgaagtcacgatcgacagttgatggataagccctctccctcttaatgatctgcgcgttccttgccgagggcattagtgggcccctgtcgtcgtgtctgcttgaaacacctctaggaacagttaccggttctggagcggttgacgtatcaggcaagaaatgcttgaactcctcgagtaaatcgggatagtcacggaagagcgctgcaacctccccgtaaacatcttggatggacttgttatgcaagcggtacatgttgaggatgcctaagaaggacttgtagacgtggtcctcctgctggaagcgagccttgatcttgttgacgaaattgatggcctccatgaagtcaacaggcttcttctccaggtcctggagcttgatggcaaatcccttgggcaagaaggcgttgaagccaaggatgagctcgtggtggccattgaagagggtcttgacacggatgatgacgccagcggtgtcgatcctgccgctcttgaaatcgcgcatgacctcgaggaactcatcgtacttgtcgcgcttgtcctggaacttatccttgacggccttgaggtagagaagcgcgtcattggtggtgagcttctggttctgggagggcccctgcccctgctgcgagggggcgggcgcgggcgcgggcgccggcat

SEQ ID NO: 88228 - DNA, 587 bp, Oryza sativa
  unsure (1)..(587): unsure at all n locations
  Clone ID: PAT_MRT4530_8709C.1
ccggccgggtaaaaaataatttaaaaaataatgaagagttttctntgggagcattattacagggtcagatcgatatgtgtagggcttatctcaaattctaggtattgtttggatttgcttgcagccacaagaattataactcaaatttcccttgcatcaaattatagaaggaattagaaggcatatataagttatagacaaatactgtggtcaaaaaaagtttgttcacgtacgttctgatgcaacgcgtaactaattttcttttactgtttaccttccttgcacttgcagatgaaagataaatatggatccgtatcatgcatgtgctttcttcaaggagagtgatcagttagatatattacactgtgtcagtagaacttttacgtgtgaactcttgtatggatgaataattaactttatcccataattcaggcttggcactatcaaggtgatgtacggttcaacctgtgaaattcaaatacttcatacccttttcctaagtttctatatgtaatattggtgataatatcttgtgtatacatataagtgttgtttcgtcaaaaaaaaaaaaaaaaaaacccgcggcc

SEQ ID NO: 88229 - DNA, 293 bp, Oryza sativa
  Clone ID: PAT_MRT4530_870C.1
gggggggaaaaaggtgaaaacccccaaaaaaaaaaaagcctttccccaaagaatttttattctttggccagttacaggaacgggcttccccagcccccagccctttttaggcaaaaagggaaccccccccaacaggtaagggaaaaaaaaacccctggggcccccaaaaggggggggcggcttaaaggggaaaatccaggtttgggatcttttggaacacaacgggaagcttaagggccaaaaaattggggtccccaaatgctgaaaaggcggaggggtttccctttgaaaaa

SEQ ID NO: 88230 - DNA, 177 bp, Oryza sativa
  Clone ID: PAT_MRT4530_87100C.1
atgacggcaaagggaataatggagaaactgagcaaggaaaggatgacctccttcggtcgttatccctacaaaaaggaacatgtaccggtcattttggatagtatatttcaatctgaactcaacaagatgcataaagctgttccaagtattactatttccatctattcaatcaaatag

SEQ ID NO: 88231 - DNA, 664 bp, Oryza sativa
  Clone ID: PAT_MRT4530_87101C.1
aggataacatgcaaaactatattaacaggagtgacaagttagtgtagccagtacaattaacctgaataaatgcattctcatgatacatatgtacacaattttaggccattaagagaactcacggttgccacacacttcagcatttaccagagtatcccatctattattccaaaggtacagttgtctgaaattttggaatattaaggttcacatggcagttttcgaagcacgtcagcatctcggatttgatacagcggcagaatttcgccgcttaaccctagggccttgatagaaatctatggaatcgctgtacttttacagcataagctttcacaaaatccgccttttcaggtatggttccactagatgaaactctcctctttcttatatgaaataagaaatcttcagtatcaaggacataggaaacctttgaggatttgcaggatatcttgcattcaagaccattagtaaccatgaaagcatcaatggccttcaaagaagcttgagagtcatcgtttcccccacgcttccgtttattcctcccaaggaagatatcgtcatacaatttagtattagaaatacttgacagatactcattatttagataagacgaaaaatttggatcaattgacactgcaattacttcaaggtttttcatgcccat

SEQ ID NO: 88232 - DNA, 761 bp, Oryza sativa
  unsure (1)..(761): unsure at all n locations
  Clone ID: PAT_MRT4530_87102C.1
ggataacatgcaaaactatattaacaggagtgacaagttagtgtagccagtacaattaacctgaataaatgcattctcatgatacatatgtacacaattttaggccattaagagaactcacggttgccacacacttcagcatttaccagagtatcccatctattattccaaaggtacagttgtctgaaattttggaatattaaggttcacatggcagttttcgaagcacgtcagcatctcggatttgatacagcggctgcaaaccagaaacatcacaaatatcgttttaaattaacagcagtcatgcctgtagagacattgcattcagtaaacgtggatgtagatgctcagattcaagggtctttttcttttattgttggcaaaaatcaagatgcatggtgtgcagtggtgactgatgctagttaagtttcaagatgctcacgtttgatgggagcaaactaagtgcaacctacatatagagtatagatgagacagcggcgtgtataactgatcaaaagcagcatataagtaactttaccagatatgatgactgactacaatataaagatgcatgtgaaggttactaaacatgaagctcataatgacaatctaataaagctaaaagattaccagaatttcgccgcttaaccctagggccttgatagaaatctatggaatcgctgacttttacagcataagctttcacaaaatccgcctttcaggtcatggttccactagatgaaacccnccggacgcgtggg

SEQ ID NO: 88233 - DNA, 261 bp, Oryza sativa
  unsure (1)..(261): unsure at all n locations
  Clone ID: PAT_MRT4530_87103C.1
agaaggtnggcggcgccgcntngaccgccgacccgaaccggcccaagaagccggcgtcgtcgttcctgctgttcagcaaggaggcgaggcggcactggcggaggagcgccccggcgtngcgagctccacnctgaccgcgctcgtntcggtgaagtggaaggagctcggggaggcggagaagcaggcgtngaacngcaatgccgcggaggccatngcggcgtacaagagggacatngaggagtacaccaaggcggcggccac

SEQ ID NO: 88234 - DNA, 239 bp, Oryza sativa
  Clone ID: PAT_MRT4530_87104C.1
atacataagacttaattgatgctgactagattgtgggctgtgcacacttacgactagattcattgtacacaaatctcttttaatcttaacgaaccgtcaagcactctaaaatgtatgaaaggtttcatgcacttgaaaaactcgcgtggggtctctacacagagagtgtcatatcaagcgtaagccacatggacctaatatctacagacgccggaagcaaaatactcggagcgttggca

SEQ ID NO: 88235 - DNA, 243 bp, Oryza sativa
  Clone ID: PAT_MRT4530_87105C.1
atggcgaagactatcaagcaaagacggcgaagggcgaaggatcgcgctgttatccaacaaggttggaggcatcttggacgaaggatgtatggcaaaagcggatggattcgccataacaagttcaacttcaaggaggcccaagaggccatctcagccaatcaagcccgggggccactgggccagcgttcgccagtcggcccactagaggcccatgtatctcaattacattatatacccatgtaa

SEQ ID NO: 88236 - DNA, 773 bp, Oryza sativa
  Clone ID: PAT_MRT4530_87106C.1
agcgtttcttccgccgccgccattgtcactctcgtctccatctgcgtctccgtcttcgtctccggccagcgagccccttttcgccggcgacctagaagcgagaaatcccaacaaatacacatccagagaaccggctcggctctgtcgccttcccctttcctgggtgttggcttgtttggttggatctaagcaaaggcctaaccgcggcgatcttccgcctcccatcccatggacggcgcgagcggcagcggggagccgacggccaacggggagaagaagcccgacgagcaacacttcgatcccagccgaatgataggaataatcaaaaggaaggccttgattaaagaactggctgctgcttaccatgctgagtgtgtggcatgctgtaaagagcttttgcagctccagaaaaagtgggaggaggagcagtatgttgaatttaagatgtctgatgaagcgccaaggacgttgacagtgaagtcttccaagcgcaggaaaaggtagctttagaaggcatgattttgacaggagctttagatgttggaagttaacagaaagaagccctgtgtagtttgagattttttttggtagataatcagcttattctggactctcaattgtttttggagtgtgtgtgaaaaacattgtagctagctgcttgctgaggtatcaacttggccgctataaattgggcatctatcctccttacgtgcttgtggagcacattatttctattcgaaccggattgttccataaatccattggaagtttcc

SEQ ID NO: 88237 - DNA, 1114 bp, Oryza sativa
  unsure (1)..(1114): unsure at all n locations
  Clone ID: PAT_MRT4530_87107C.1
ttggcaggggaattttccgggggaccggaagcttccgttggcccgaaattttcccggcaccgaanccggggnttaaattgggttttcccttcccggcnnggaaaggcncggaaaggcncggggggcccaaaanaatgtttccggggggcngccgccgccccaaaanaaaanaaaccgaaccnaaccccccnagtttcttaaccnaaaattcccttggggggggttcccccaaatnaacccgccctcccccagggaacgaaccttccaaanaaaagggcgttnnccggccnaaggggcccgccccattccaaanaaacccacccccccaaccnaagggggcggggggaaccccccnaanaaaatttccaagggaagctttggccaccaaagcctttattgaagggttattttgaatgttgaacccctggaanaaaaacanttgaaaattcttattgaacccaaataattgggttgaaaagattgccccctcccacggaaaaggaaattggggttgtgaagggcgggattccccatttttttgaatcncatttttgaacattcttttttccattccatntcctttttgggaaccctttcttttttgggttgggttgggttgggccanccaagcccangggggccnngaaangggcaaaaagggaangggggaanaagggaatntttattccnatccccncctttaaaggggtttttcttcttancaaaanattctttttaccnnattggggttactttcccaaaagaaaaaccttcttcttnctttttccccngccaaattgttccttccttnccgccccnaaanttgccaaanggggccaaanggggtttncccnaantttccttggggtggcctttcccccttnaaaaggtttgccccccantttttttnccccnannggggggttcttttggccnttttaaaaaaaattccancccattccccccccccaancctttngggggggcccttttnccccnttnaaattncccnnntccnanaaatttncccnnnccaannccccttttngccnaantttnaaattttttttttnnggggggggaaccttgggnaaaaaaaaaaaacccntttttt

SEQ ID NO: 88238 - DNA, 211 bp, Oryza sativa
  Clone ID: PAT_MRT4530_87108C.1
gcacgaggctgaactctgaagaatccatcaccattccatccactccaaatcccccccccccaggattgtgaccactaatccatagaacaatctgagtagactctgtgtgtaacatgtgttcctactctgaagaatcatccccctgctcctcttcttgctctggctctactgatcggtagccttgtgctcctgcagagaccagcctatgctg

SEQ ID NO: 88239 - DNA, 432 bp, Oryza sativa
  Clone ID: PAT_MRT4530_87109C.1
atggaggagatggccatggccatcgccgtcggcctcgggcgggggcggtggctcggcgaagagagcgaaggtggcagttcggcgagcaggaggacaagcggcggggacgagcgacggcgaggaggagcggcggcggcggttcggcgaggaggaggacgcgcagcggggtggagccgcggcgaggaggagcgccgccgtcggccacctcacctccttcgtcttccgcatccacagctgacagggcgaaggggtggcggcgccgggaggaggaggcagcggtgggtaatttttttcccccaaaagcaggtgaaagcagggggtaagggtgcttttgatttgtactacaccaaaagctggcttttgacaaaagcagctgtagcttttgggctctttggttggcttttagcttttgcaaaagcaaaagcaggttga

SEQ ID NO: 88240 - DNA, 489 bp, Oryza sativa
  Clone ID: PAT_MRT4530_8710C.1
cccacgcgtccgcaccattcgtgtttggacctaaaagtgggaattgctgttgtgctggactcatatcctgacaacattgcttatgtggcattattctccaattcatctatttttgaagcagagaggattgaaaaggatagatgttcgcaagttcaaccctaactggaaccaaggagctgggtgttaagataagattgtgctacttggcagtagttctggacacggtcaaggcagcaatttgctagtgaggatgaactatatccaccaagctaagtcttctgcgcagcaagctccgacatgtgaaatacagtctgccgatgtaccatggccattacagctagttcaatcgtgagaactggaccagtcgaactgagtatccgtttggaactttacgatctggaacgagtgtacccatttgttactacggtcacctacgggtaatttttaacctgagattgatgatgatataatacggctcttttggtcatt

SEQ ID NO: 88241 - DNA, 369 bp, Oryza sativa
  unsure (1)..(369): unsure at all n locations
  Clone ID: PAT_MRT4530_87110C.1
gtccgcatagtttcttcccccttctggcaaccgttgtcgttgcaatagataaacaaccaantcatgcagcatcantgttnccaacagctcangctggtagcacaacaatctcactaccaggccattagtattgttcaagcgattgtgcaacagctacaactgcatcaattttttttgtctactggggtcagactcaanctcaatcccaaactcttttaaccttcaacttgccatccatatntnctatctaccctaactactatannnctcccataatcattnccactntttnttttttcttntactnaattnnaacaatataatatttcctattttaaaaataaanncatacatcattatnttttacat

SEQ ID NO: 88242 - DNA, 2550 bp, Oryza sativa
  Clone ID: PAT_MRT4530_87111C.1
atgggcacagttttggatgctctcgcttggaaattcttggaaaagctgggtcagcttattgaggatgaggttatcatgacattaagtgtgaaaaggggtattgagagcctgaagaaaaatctggaattcttcaacgctgttcgtgaggatgctgaggctctggccatggaggatccagggatagattcatggtggaagaacatgagaaatgttatgtttgatgtcgatgacatcgtagatcttttcatggttcattcacagaagtttttgctgccaccaaggccggtatgttgcaatcagcccttgttctctagctttgcaaagttttcatttgatcacatgattgccaaaagaattgataatataaatgaaaagtttgaagaaattaaaatgaacaaagagatgtttggcttggagagaaccaacgggcaacaaatccagataacaattgttgacagaagtcagacatctcctgtagatgaacttgaggtggttggagaagatatcagaagggctattgatgacatcgtcaaaatgattgttagtagtaactacaatgaaagcaggtcaactgtttttgggatccaggggatgggaggcatcggtaagacaacattagctcaaaagatatacaatgaacagaggataagggagaaattccaagttcatatatggttgtgcatttctcagaattacacagagaccagtttgttaaaacaggcaatcagaatggctggaggaatttgtgatcagctggagactaagactgagcttctaccgcttctagtggacactattagagggaagagtgtttttcttgtgctggatgatgtttggaaatctgatgtatggattgatcttcttcgatcgccttccgagagaggcttgaattctcgtatccttgtgacctcaagaaacctggatgttttggtcgaaatgcatgcaacttatacccacagggtaaacaaaatgaatgattacgatggcctagaactgctgatgaagatgtcattagggccatacgagcaaagaagagaattcagtggtgttgggtatcaaattgtcaaaaagtgtgatggccttcctcttgccatcaaagttgttgcaggtgtcctatctagtaagaaaacaaaggcagaatgggagagcatccgagatagcaaatggtctattcatggacttcccaaagaactaggaggtcctctgtacttaagctacagcaacttacctcctgaacttaagcaattctttctctggtgtgctttgttaccatcaaattttgggatccatcgtgatgctgtcgcttactggtgggtcgctgaaggctttgtgacgaaaatgcatgggtactcaatacatgaagccgcagaagaatactaccatgagctaattagaatgaatcttctgcagccaaaaccagagtttgttgacaaatggatgtcaacgatgcatgatcttttgagtttccttgagctagaacaaactggaatcgaccatgttccaaaagggatcgcgaagtttcagaaactctacaaccttaaaggagttttcgagagtgcatctggattcaggctagatgaactgcaatgtctccccaacatccaacgtctccggattgtaaagctagaaaaagcaacgccagggggtgcatttgtactcaggaacagtcttcgtcttcgagaactgtggtttcgctgcacaatgggagctaatactcatgatattacccactaccagatgaacgagattgagagaattcaacaagtctatgagatgctaagtccatcatcaagcctaatttatttattttttgaggggtttcctggtgtaaggttcccagattggttgtgctcagaaccagagtataagatgccaaatttgggacatatgtacctcaacgagtgcatttcatgctctgagcttccaccagcaggtcagatgccagaactactaattcttcagatcagatgtgcagatgcagtagtgaatattggttcagagctcctaggaaaaggcgtcagcagtgccacgcatataactattttcccaaagctcaaattgcttcacatcattgatatgagcaatttggaaagttggtctcttaacacagggaatttgcgtggtagatctgaacagctcgttctgatgccttgccttaagcgtctgtttcttaatggctgcccaaaactaagggctctccctgaagacttgcataggattgctaacttaagaagaatccacattgaaggtgctcacacgctgcatgaaattgacaaccttccttcagtgttatggctcaaggtcaagaataacaggtgtttgaggagaatttccaatctctgtattctgcaggacttgtttgcacaggactgtccagcgctggatcaggcagagaatctaatctcactaaagagactccacatggttgattgccagaatgcaaagcaattcagaatgtgcctcctagaagaccaacaacttgcagtcgatgttgttacagttggtgcagatggcagggatatctttccagatgaaactctctataattag

SEQ ID NO: 88243 - DNA, 2973 bp, Oryza sativa
  Clone ID: PAT_MRT4530_87112C.1
atgggcacagttttggatgctctcgcttggaaattcttggaaaagctgggtcagcttattgaggatgaggttatcatgacattaagtgtgaaaaggggtattgagagcctgaagaaaaatctggaattcttcaacgctgttcgtgaggatgctgaggctctggccatggaggatccagggatagattcatggtggaagaacatgagaaatgttatgtttgatgtcgatgacatcgtggatcttttcatggttcattcacagaagtttttgctgccaccaaggccggtatgttgcaatcagcccttgttctctagctttgcaaagttttcatttgatcacaggattgccaaaagaatcgataatataaatgaaaagtttgaagaaattaaaatgaacaaagagatgtttggcttcgagagaaccaaccggcaacaagtccagataacaattgttgacagaagtcagacatctcctgtagatgaacttgaggttgttggagaagatatcagaagggctgttgatgacatggtcaaaatgattgttagtaactacaatgacaacaggtcaactgtttttgggatccaggggatgggaggcatcggtaagacaacattagctcaaaagatatacaatgaacagaggataagggagaaattccaagttcatatatggttgtgtatttctcagaattacacagagaccagtttgttaaaacaggcaataagaatggctggaggaatttgtgatcagctggagactaagactgagcttctaccgcttctagtggacactattagagggaagagtgtttttcttgtgctggatgatgtttggaaatctgatgtatggattgatcttcttcgatcgccttccgagagaggcttgaattctcgtatccttgtgacctcaagaaacctggatgttttggtcgaaatgcatgcaacttatacccacagggtaaacaaaatgaatgattacgatggcctagaactgctgatgaagatgtcattagggccatacgagcaaagaagagaattcagtggtgttgggtatcaaattgtcaaaaagtgtgatggccttcctcttgccatcaaagttgttgcaggtgtcctatctagtaagaaaacaaaggcagaatgggagagcatccgagatagcaaatggtctattcatggacttcccaaagaactaggaggtcctctgtacttaagctacagcaacttacctcctgaacttaagcaattctttctctggtgtgctttgttaccatcaaattttgggatccatcgtgatgctgtcgcttactggtgggtcgctgaaggctttgtgacgaaaatgcatgggtactcaatacatgaagccgcagaagaatactaccatgagctaattagaatgaatcttctgcagccaaaaccagagtttgttgacaaatggatgtcaacgatgcatgatcttttgaggtcacttggacaatttttgacaaaggatcattccttattcatgaatatggaaaatagcaaaaccttactgaatctacgtcacttagtaataagcaatgatgtaaaagaaatacctgctatagaagagctgaagtgcttgaggagcctcctaatttttaataacaagaactttaagacaattaataaggacattttcagagagctcaagcatattcgtgtcttagttctcagtggaacaagcatccaagtcataccagagtcggtgggaaacttgttgctactgaggttgctagatctaagctatacaaaaatcaaaaaactccctgaatccataggaaatcttaccagccttgaatacctttctttgcactgttgcagacatttggatagcctgccagctagtttgatgagactgtccaacataagtttccttgagctagaacaaactggaatcgaccatgttccaaaagggatcgcgaagtttcagaaactctacaaccttaaaggagttttcgagagtgcatctggattcaggctagatgaactgcaatgtctccccaacatccaacgtctccggattgtaaagctagaaaaagcaacgccagggggtgcatttgtactcaggaacagtcttcgtcttcgagaactgtggtttcgctgcacaatgggagctaatactcatgatattacccactaccagatgaacgagattgagagaattcaacaagtctatgagatgctaagtccatcatcaagcctaatttatttattttttgaggggtttcctggtgtaaggttcccagattggttgtgctcagaaccagagtataagatgccaaatttgggacatatgtacctcaacgagtgcatttcatgctctgagcttccaccagcaggtcagatgccagaactactaattcttcagatcagatgtgcagatgcagtagtgaatattggttcagagctcctaggaaaaggcgtcagcagtgccacgcatataactattttcccaaagctcaaattgcttcacatcattgatatgagcaatttggaaagttggtctcttaacacagggaatttgcgtggtagatctgaacagctcgttctgatgccttgccttaagcgtctgtttcttaatggctgcccaaaactaagggctctccctgaagacttgcataggattgctaacttaagaagaatccacattgaaggtgctcacacgctgcatgaaattgacaaccttccttcagtgttatggctcaaggtcaagaataacaggtgtttgaggagaatttccaatctctgtattctgcaggacttgtttgcacaggactgtccagcgctggatcaggcagagaatctaatctcactaaagagactccacatggttgattgccagaatgcaaagcaattcagaatgtgcctcctagaagaccaacaacttgcagtcgatgttgttacagttggtgcagatggcagggatatctttccagatgaaactctctataattag

SEQ ID NO: 88244 - DNA, 238 bp, Oryza sativa
  Clone ID: PAT_MRT4530_87113C.1
gatagcagagtggcaacccccttctggcaaccagctgacgtttcaattgataaacaaccaagtcatgcagcagcagtgttgccaacagctgcaggtggtagcacaacaatctcgactaccaggccattagtattgttcaagcgattgtcgaacagctacaactcgagccaatttagtggtgtctgacttttgatcagactcgagctcagcccaactgtgtgactcactcgacatatgt

SEQ ID NO: 88245 - DNA, 1555 bp, Oryza sativa
  Clone ID: PAT_MRT4530_87114C.1
atggctggaggaatttgtgatcagctggagactaagactgagcttctaccgcttctagtggacactattagagggaagagtgtttttcttgtgctggatgatgtttggaaatctgatgtatggattgatcttcttcgatcgccttccgagagaggcttgaattctcgtatccttgtgacctcaagaaacctggatgttttggtcgaaatgcatgcaacttatacccacagggtaaacaaaatgaatgattacgatggcctagaactgctgatgaagatgtcattagggccatacgagcaaagaagagaattcagtggtgttgggtatcaaattgtcaaaaagtgtgatggccttcctcttgccatcaaagttgttgcaggtgtcctatctagtaagaaaacaaaggcagaatgggagagcatccgagatagcaaatggtctattcatggacttcccaaagaactaggaggtcctctgtacttaagctacagcaacttacctcctgaacttaagcaattctttctctggtgtgctttgttaccatcaaattttgggatccatcgtgatgctgtcgcttactggtgggtcgctgaaggctttgtgacgaaaatgcatgggtactcaatacatgaagccgcagaagaatactaccatgagctaattagaatgaatcttctgcagccaaaaccagagtttgttgacaaatggatgtcaacgatgcatgatcttttgaggtcacttggacaatttttgacaaaggatcattccttattcatgaatatggaaaatagcaaaaccttactgaatctacgtcacttagtaataagcaatgatgtaaaagaaatacctgctatagaagagctgaagtgcttgaggagcctcctaatttttaataacaagaactttaagacaattaataaggacattttcagagagctcaagcatattcgtgtcttagttctcagtggaacaagcatccaagtcataccagagtcagtgggaaacttgttgctactgaggttgctagatctaagctatacaaaaatcaaaaaactccctgaatccataggaaatcttaccagccttgaatacctttctttgcactgttgcatacatttggatagcctgccagatagtttgatgagactgtccaacataagtttcctagagctagaacagactggaatcgaccatgttccaaaaggagttgcaaagttgcagcaactctacaaccttagaggagtttttgagagtgcatctggattcagactagatgaactccaatgtctctccaatatccaacgtctccggattgtgaagctagaaaaagcagcaccagggggttcatttgtactcaagaactgtcttcatcttcgagaattgtggctcggttgcacaatcggaggtcatgataaaacttattatcagaccaacgagattgagagaattcagcaagtctacgaactgctaattccatcgccaagcttactgtatatatttcttgtcgggttccctggtgtaaggttcccagattggttgtgctcagaaccagagc

SEQ ID NO: 88246 - DNA, 1692 bp, Oryza sativa
  Clone ID: PAT_MRT4530_87115C.1
atggcagcaggcaatgtcgtcgccgctgctctcttcctcttcctcgccacgtccgccctcctcgtcgccggcgacgacccgtaccggttcttcacgtggacggtcacctacggcgacatcaccccgctcggcgtcaagcagcaggggatcctgatcaacgggcagttcccggggccgacgatagaggccgtcaccaacgacaacctcatcatcaacgtcttcaacaagctcaacgacccattcctcatctcctggaacgggatacagcagcggcggaactcgttcgaggacggcgtggccgggacgacgtgcccgatcccccccggcggcaacttcacctacatcctgcaggtgaaggaccagatcggcacctacttctacttcccctccctcgccttccacaaggccgccggcggcttcggcgccatccgcgtcctcagccgccccatgatccccgtccccttccctccccccgccgccgactaccccctcctcatcggcgactggtacaaggccaaccacaccgacttgaagtacatgctcgacagcggcaaggccctcggcttccccgacggccttctcatcaatggccggagttgggacggctacaccttcaacgtccaacaaggcaaaatcccatgtttcagcaaaattttcgtgctgaaaacaaaaaatgcagggaggacgtacaggttccggatctcgaacgtggggctgtcgacgtcgctgaacatccggttccaggggcacacgatgacgctggtggaggtggaggggtcccacaccatgcagaccacctactcgtcgctcgacgtccacctcggccagtcctactccgtgctcctcaccgccgaccagccggcctacgactacgccgtcgtcgtctccacgcgcttcacctccaagatcatctccaccaccgccgtcctccgctactccggctccggcggcaagtcccccgccgcactcccgggcggccccaccatccagatcgactggtccctcaaccaggcccgctccatcaggtggaacttgacggcgagcgggccgcggccgaacccgcaggggtcgtaccactacgggatggtgacgacgacgaggacgatcaggctggcgagctcgtcggcgactgtgaacgggaagcagaggtactcggtgaacggggtgtcgcacgtgaacccggacacgccgctcaaggtcgccgactactacaagatcgccggcgtgttctctgtcgggaccatctccgacagcccctccggcggcggcggcggcggcgcctacctccagacggcggtgatgggggccagctacagggactacgtcgagatcgtgttcgagaaccccgagaacgaggtgcagtcgtggcacatcgacggctacgccttctgggtcgttggaatggatggagggaaatggtcatcagcgagcaggcagggctacaacctgcgggatgccgtttcgcggtacactgttcaggtttaccctaattcatggactgcgatctacatgccattggacaacgtgggcatgtggaacgtccggtcggagaactgggcgaggcagtacctcgggcagcagttctacctccgcgtctggacgtcgtcgacgtcgtggcgcgacgagtaccccatccccaagaacgccctcctctgcggccgcgccgctggtcgccggacacggccgctctga

SEQ ID NO: 88247 - DNA, 2970 bp, Oryza sativa
  Clone ID: PAT_MRT4530_87116C.1
ctaattatagagagattcatctggaaagatatccctgccatctgcaccaactgtaacaacatggacggcaagttgttggtcttccaggaggctcatcctgaattgcttcgcgttgtggcaatcgaccatgtagagtctctttagtgagattagattctctgcctgatacagcgctggacagtcctgcgcaagcaagtcctttagattacagagattggaaattctcctcaaacacctgttgttcttgaccttgagccataacactgaaggaaggttgtcaacttcttgcagcgtgtgagcaccttcgatatggattcttcttaagttagcaatcctatgcaagtcttcagggagagcccttagttttgggcagtcgttaagaaacaaacgcttaaggcaaggcatcagaacaagctgttcagatttgccacacaaattccatgtgttgagagaccaactttccaaattgctcatgttagtgatgagaagcaattcgagttttggaaaaatagttatatgctttgcgctattgacgcctttccctagcagctctgcacccatattcactattgcatctgcgcctttaatcttaaaaactagcagttctggcatctggcctgctggtggaagcactgaacatgaagtgcagtcgttgaggtgcatatgacccaaatttggcatcttacgctctggttctgagcacaaccaatctgggaaccttacaccagggaacccgacaagaaatatatacagtaagcttggcgatggaattagcagttcgtagacttgctgaattctctcaatctcgttggtctgataataagttttatcatgacctccgattgtgcaaccgagccacaattctcgaagatgaagacagttcttgagtacaaatgaaccccctggtgctgctttttctagcttcacaatccggagacgttggatattggagagacattggagttcatctagtctgaatccagttccactgtcaaaaactcctctaaggttgtagagttgctgcaactttgcaactccttttggaacatggtcgattgcagtctgttctagctctaggaaacttatgttcgacagtctcattaaactatctggcaggctatccaaatgtatgcaaccatgcaaagaaaggtattcaaggctggtaagttttcctatggattctgggagtttctgaatttttgtatagcttagatctagaagcctcagtaacaagaagtttcccactgactctggtatgatttggatgcttgttccactgagaactaagacacggatatgcttgagttctctgaaaatgtccttattaattttcatgaagtttttgttatcaaaaactaggaggctcctcaagcacttgtgcttttctatagcaggtatttcttctacatcattgctgatacataagtggcgtagatttggtaaggctttgctatattccatgttcatgaatatggagtgatcctttgtcaaaaattgaccaagtgacctcaatagatcatgcattgttgactcgcctttgtctacaaactctggtcgtggctgcagaagattccttctgattagctcatggtagtactcttcagcaacctcatgtattgagtacccatgcacttccgtcacgaaaccttcagcaacccaccagtaagcgacagcatcacgacgtatcacaaaatttgacggcaacaaagcacaccagagaaagcattgtttaagttcagggggtaagttgctgtagcttaagtacagagggcctcctagttctctgggaagtccatgaatggaccacttgctatctcggatactctcccattctgcccttgttcttttagtagatagaacacctgcaacaactttgatggcaagaggaaggccatcacactttttgacaatttgatatccaacaccactgaattctctgctttgctcgtatggccctaatgacatcttcatcagcagttctaggccatcgcaatcattcattttgtttaccttgtgggtataagttgcatgcatttcaaccaaaacatccaggtttcttgaggtcacaaggatatgagaattcaaacctctcaagaaaggcaaacgaagaagatcaatccatacatcagatttccaaacatcatccagcacaagaaaaacactcttccctctaatagtgtccactagaagcggtagaagctcagtcttagtctccagctgatcacaaattcctccagccattctgattgcctgttttaacaaactggtctctgtgtaattctgagaaatgcacaaccatatatgaacttggaatttctcccttatcctctgttcattgtatatcttttgagctaatgttgtcttaccgatgcctcccatcccctggatcccaaaaacagttgacctgctttcattgtagttactactaacaatcattttgacgatgtcatcaatagcccttctgatatcttctccaaccacctcaagttcatctacaggagatgtctgacttctgtcaacaattgttatctggatttgttgcccgttggttctctccaagccaaacatctctttgttcattttaatttcttcaaacttttcatttatattatcaattcttttggcaatcatgtgatcaaatgaaaactttgcaaagctagagaacaagggctgattgcaacataccggccttggtggcagcaagagcttctgtgaatgaaccatgaaaagatctacgatgtcatcgacatcaaacataacatctctcatgttcttccaccatgaatctatccctggatcctccatggccagagcctcagcatcctcatgaacagcgttgaagaattccagatttttcttcaggctctcaataccccttttcacacttaatgtcatgataacctcatcctcaataagttgacccagcttttccaagaatttccaagcgagagcatccaaaactgtgcccat

SEQ ID NO: 88248 - DNA, 720 bp, Oryza sativa
  Clone ID: PAT_MRT4530_87117C.1
atggacgaggaggcgagccggtgccggtatataaggccccgccacagaatcgagcacgtcgctcgcggcgaccgtgggaacatgcggggaggagcggtatcagggggtgactcgagggagagggagagctgcgggcacgacgcgcgggcgacgccggtgcggcgggagccttatcgctttccccgcagaaaatttgtgcgcgcaggggaaatcggcagcgcgcccgcgaggacgcattttttgcggcgtccgttccaccgggggtcggggactccacctcacctcggtgtggcagcggcaaacgcccggtacgacggaactagtcgccaaaacagcgcggcgctagcgaccgcgaccgcggacggagcgagggatctagctaacgtaaccagattcaagcatgggcggggacgggaacacgtgggtcgcgggggtgggcgctgcacagtgcacccagcagcgcggctcgtcggtccgatccgcccactgacgcgcggggtcgctgagtacggttggcgatggtgcatcggtgagtcagcgacggccgtgtgtggtttggtggatctgcggggtggggcctggacgacgttggttgggatcacctaccgccaaagaatctctcggaacccgtggggtgggaggccgggtgtcgctgttccaccaaacctccttccggctgctcagttgctcgtacatagaaaaaccgtttttctttgctaa

SEQ ID NO: 88249 - DNA, 564 bp, Oryza sativa
  Clone ID: PAT_MRT4530_87118C.1
ggggaggccaacgcggcggaaacagctgacgcgctccgctacggtccgctgacggcgttggccggccgggcggccgctgtagctgacttgaccagacacgagcaccagggggggcagctggatagcattacgagggtgcttttatatccaggagcacgagtgaggaggaggaggagggccatcctgcctatccatctccgattacagattctttctggagcatccatactccatcgagagcgatagcgagagggagaggaagacggaaagccgcctccgccatgttggggcatgtgcttgagctggagaaggtgcgggtggtgaggggcgtaggcctcgtcgaccgagacctgcgctccagagacccctacgtgatcctgcggatggccaagcggaagttgaagacgctaggcataaagaagactaccattgcgcagtgtgacgatgaactcacccgtctcgtggaagatgcatcggtatctggtagacctgatagtgatgacatgcacacgttaatatgatgatgcaatggactgtgcaggagctggacatccggccattgct

SEQ ID NO: 88250 - DNA, 411 bp, Oryza sativa
  Clone ID: PAT_MRT4530_87119C.1
atggggccaaaaggagtcgcggaggcggtggggacggtcggcggcgccggatccgccacccacaccctcgggagcgacggcgatgtggcgggatcggcggcggcagcgatgggaagggtcggcggtgtcggatctgccacccacgccctcgggagcgataatggcgggcggcgggcggcggcggcgggagcgtgcgacggcgatgtggcgggcgaggaggcgatgggacatggcggcggcggcttggccctgtggcggtgggctgatgggagcagcggcggtgggtctcgtcctgcccggatccggcagcggcgggcctccttgcgcctagatccagcggcggcgggcctcgtcccgcccagatccgatggtggcgggagcggacggcggtggctcccacgacagcggtag

SEQ ID NO: 88251 - DNA, 2304 bp, Oryza sativa
  Clone ID: PAT_MRT4530_8711C.1
atggcgatccccacgccttcgccatcggtcgtagatcagccgtcccctcccgcgcctgcttccgccgccgcggcggcgtctcagccgctagccggcgatccggctcccgaggcggcggcggcggcggagggggcggggggtgatcagacggccccggcggccgccgccgccaccggcgcgtcgctgtacgtgggagacctggaggcgagcgtcggggaggaccagctcgtggcgctcttctcccaggtggcgcccgtcgcgtccgcctatgtgtgccgcgacatcgccggcggcagaaagtccttgggatacggctacgtcaacttcatgtcgcgtgaagacgctacccgtgccatggaaaatctaaacttcaccgttgtcaatgggaagccaatcagagtcatgttttcgaatagggatccaactctgcgaaaaagtggacttgccaatgtgtttataaaaaatcttgaaccgaatattgacaacaagagtttgtatgaaatgttttcgtcttttggcacaatcctctccagtaaggttgccacagatttcaatggaaagtctaagggttatggatttatacaatttgagagcgagtcgtctgctaaggatgctatcaatggcctaaatggcatgttggctaatggacaaaaaatatttgttggattgttcatccgccggcaggagagagaacacactggagacgctaacaactttactcctgtatatgtgaaaaatttaccaaaacattttagtgataacgatttgctaaatgagttttcatcatttggtgcaattactagtgctattgtcatgagagatgcaaatggattgtcgagatgctttgggtttgtaaactttgagaaatcagaatgtgctagaaatgcagttaaaaatctcaatgggaagtccattggtgatatggtgttatatgttgcaagggctcagaaaaaatcagaaagacaagctgagttaaaagcgaaatttgagcatgacaaaaatcagaaatttgagaagcttcaaacagtcaatctatacttgaagaatttggatgatgacatcaatgatgagcatcttaggaagttgtttgaatgttttggtgaggtagcatcatgcaaggtcatgcttgattcgcatggaaggagcaagggttgtggatttgtatcttttgcaactgttgaagacgctaacaatgctattttaaaaatgaacgggaaaatggttgggaaaaagccattatatgttgccgtagctcaacggaaggaggagagaaaggcatttttagcggcacattttgctcgtgttagagccctagcaacaatggcacctacattagggccaaacattgctccccatcagttcaattttggccatggtgtgcctgccttgttcccaccaccaccacctgcaggctttgggttccaaccaaattttgttccaaacatgatgatgccatataacatgcaaaggcagcctggccagaggagtggtcctccgcatggaggaatgcctagacatctgcataatcctcaccagatgtttcaccaaaatgccaaccagggcttcagacacatgccaaatcgtaggaatggtgtggccaacccagcaatgttgcatcagcaccatcgcttctctagcccaatgcagccaatgcaacaagctgtcaagcatgtggtgcccgtgggggaattgcaagctccaagcaataaccttcagacttccttggcttctgcgaacccggaacaacaacgagagattcttggcgacatgttgttcccgctcgtcgaacagctggtgaacgagaaagcttataaggtgactgggatgctgcttgagctggacaagactgaagttctgaacctcgtagagtctccagatactctccgggacaaggttgctgaggccatgaaggtgctggagttggaggctaccgccaccgccgccgccgccgccgccgcttcaggctccggcgacggcgacgccgccgcgccgtcctcctccagcgccgcctgagcggtgttggtgcgccggatgaattatcactaattaacgaaggaaccttttgaagtcgtgtgatatattggaccttgtgaacctgtttacgatgacctgttccacgctttatgacctttagcacgccttgccgctttgccacgatttatttgaagtgtttggttatggttgtgtacctctttatgtttattttttttctttttcatgtgatggtacactgtgtggatggttaattaggatttttgttgaaatggatccttatttcagactcaaaaaaaaaaaaaaaaaaaa

SEQ ID NO: 88252 - DNA, 3195 bp, Oryza sativa
  Clone ID: PAT_MRT4530_87120C.1
atgcgggcgggggcgtacaccatccaccagtcgctcaccgccgaggcggccgcggtgctcaagctcgcgctcggcatcgcgcgacgccgcggtcatgcgcaggtcacgccgctccacgtcgcgttcgcgctgctgagcccggcgtgctcgccgccgcagcagcagccggcgccgccgccgtacggtctgctcaagcgcgcgtgcctgcggtcgcacccgtccgccgcggcggcggtggccgcgcacccgctccagtgccgtgcgctcgagctctgcttcaacgtcgcgctcaaccgcctgcccacctccgcgccgcactcgccgcccccgtcgtcgtccgcgccgtcgggcgccgtggcgccgccgttcgcgtcgtcgctcatccagcctaacccgacgctctccaacgcgctcgtcgccgcgctcaagcgcgcgcaggccaaccagcgccgcggctgcgtcgagctccagcagcagcctcctcctccgccaccgccgccgccgccgccggtggctgccacggcgcagcagcagcagccgttgctcgccatcaaggtcgagctggaccagctcatcatctccatcctcgacgatcccagcgtgagccgggtgatgcgcgaggccggcttctccagctccaccgtcaagagcaacctcgagggggagagcgcgctcatgatgtccacctcatcgtcccctccgccgccggccatcccacctcacttcttcctcgaccccagcattggcgtcggcggcaacggtggcggcggcggcggcggcttcatgctgtggccggcgccgttcttgagctcgccgggcatggcggtgccgtcgtgcaaggaggacgtgagggcggtattggaggtgatggtgcggaagcaggggaggcggaccaaccccgtggtggtcggcgactcggtgtcaatggcggaagccgtcgccggcgagctcctgcggcggctggagggcggcgacgtcccggacgagctcgccggcgcgcacctcctcaagctccagctctcctacgtccacgtccgcctcatgagccgcgccgacgtggacgccaaggccgccgagctccgccgcagcgtcgacgccgtcaagcgcggcggcctggtcgtctacgtcggcgacctccgctgggcgctcgacgaggaccaccaccaccaccaccaccccggcgcggaccaccacaacaccgcctcgtcctacagccccgtcgaacacatggtcgccgagctcggccgcctcctcggcgacctccgagccagcgcgccgccgcgcgggcgcgtctggctcgtcgccacggcgagctaccagacatacatgcgatgccgccgccgccgcccgtcgctggagtccgcgtgggcgctccaggccgtcgtcgtccccaccggcgccggcaccggcctggccctcaacaacctccacgccgtcgccaccaccacgagcaatggagagcctgtgcagcaggccatggtggcgaccaaccaccagcagcagcagcagcagcttgctagccctttcgtcgccatggccgccgagccggcagcgaggaacgagctggatgacaagctgctggtactctgcaccgagtgcagccacaactacgagagggaggcgtcggcggtgaaggcggaggcggccgccgacgaggagggcccacgcgccgccggtaatctccccggctggctcgtgccggagccacccaaggagaactatttgatcgagctgaagaggaaatggagtaggctatgcagaaagcttcatctctgcggcggcggcgatccatgctcaggtcagtcgtttggagctggagcttatggcaatggaccaagcagcctcctcccatggtggtcagcttcttgcttgctgccgaacggcggcggcaagccgagcattgcggggttcttgggcatggaggcgttgcggtggtcgccgccggcggcggcggcgctgccgtccctgagttctctgagggagccggagtgccaggacgtgacgacggcgctcgcgctcggcagcctcccgctctcggactcggcgtcgtcctccggtggcggcggtggcgacggcgcggcggcgcgcgagctggagcggaggctgcgcaagaacgtgccgtggcagcgcgccgccgtggcggagatcgccgacgcggtggccgccggcgcccggagcgggaacgggacgaagggcgcgggcgtctggctgctcttgaaggggagcgaccacgccgccgtgcgccgggtggcggcggtgatcgccgagacgcattgcggctcagctgatcgggtcgtcgtcgtctccgccgatcccaacaagttcgggtgcgccgacgatttccgctccgacgtcgtcgcgagagcgtccatggcggcggccgccggcggcaacaaactcgtgctcgtcgttgacgacgtcgagcgcgcgccgcagcacgtcgtggaatgtctcgtggcggcgtcgaggagcggagctctgaaggacaagttcggcggccaagagctcgatctctcgggctccgtagtggtcatgacgacatcgaagctcgccgatgcagcggtcagcggcgtcatcagcctacggctgtacacgtcggagcagtcgccgccgtccggggacctcaagaggaagacgcccaccagttcaccaccaacaagcgaccgcaagcgcgcacgggcacggcgcagcgccggcaatggccacagcctcgacctcaacctcaacctcttcgcccacgacgacgacgacaacgacgccggagacgttgacgacgacgacgacggcgtcccgagcgacataacccacgaaggcggcggcgacgactccggcgagcacggccactcgcaccaccgcctcctcctcgagtccatcgccacgcgcgtggtcaccctcgacggcgaccaccacggcgccgcggccgccgtccgcgagaggctgtcggggcggctcgacggcggcgggcgggagctgcgcgtcgacggcgaggcggcggcggcgctggcggcggcgtcggggcacttcgtcgacgaggtgatggagcggtgggtggcggaggtgtttgaaccggcggcggcaacggtcaaaaatggcgggaaggctgtagtgttgggggtggggcccagtggaggtggggcccacgagtcagtagggttcatgggctcggtccttccgagtagggtccatgtggactga

SEQ ID NO: 88253 - DNA, 151 bp, Oryza sativa
  Clone ID: PAT_MRT4530_87121C.1
catgcattctgtttgtctctttatccgccaaggaaccagggaccaaggggcacccacaggtagacccccgcccccagaggttagacttatacataaaactccccccaaaaagaaccaaacggaagcttaaaaggggccctgcaaaagagaa

SEQ ID NO: 88254 - DNA, 329 bp, Oryza sativa
  Clone ID: PAT_MRT4530_87122C.1
acaaaaaagggccgaaaggagattaaaaaaaaaaatccgggggggggggattatacaatgggaagcacaggtttttttttacccacaaaaggtccatctaaattaaaacccaaggggataaggacccccacggggaaggggggaaaaagcttatcatacccatggtaaaataacggggggaaggggggggaaaaaatccgggggggggggggaactattttcggggggcgggtttcagaaaaaacccccgaagggttccacgggggcccaagcgggaaccactgcggggccggagggggaagactccgacccaggccttgggggggggg

SEQ ID NO: 88255 - DNA, 1013 bp, Oryza sativa
  Clone ID: PAT_MRT4530_87123C.1
ctccgtcgccgaagtgggggctcgatcgtctccgccgccgtcgcacgggcatggctcgtctcgtcctcctcgccgtactacctctcctcctcctcttcgtcgccggcgactcgtacgccaccgccgccggcggcggcggcgggggaggaggacggcgattcgacgcctcccgcgccgtcgatgtctcgtggcgccccagagcgttcctgtacgaggggttcctgtcggatgcggagtgcgaccacctcatctcgctcgtaaagggtaagatggagaagtcgacggtggtggacggcgagtcgggggagagcgtgacgagcaaggtgaggaccagctccggcatgttcctcgacaagaagcaggatgaagttgttgcaagaatagaggagaggattgcggcttggaccatgcttccaacagaaaacggtgaatctatgcaaatgctacgttatgggcaaggtgagaaatacgagccacactttgattacattcgcggacggcaagcctcagctcgtggaggtcatcggattgctactgtgctcatgtacctgtccaatgtcaagatgggtggagagaccgtcttccccgatgcagaggctaggttatcacagcctaaagacgagacatggtccgactgcgcagaacagggcttcgcagtgaaacctaccaaaggcagtgcggtgctgttcttcagcctctaccccaacgcgacgttcgacccaggcagcctgcacggaagctgccctgtcatacaaggcgagaagtggtcggcgacgaaatggatccatgtgagatcctacgacgaaaatggccggagatcctcggacaaatgcgaggatcaacatgctctctgctccagctgggctgctgctggagagtgtgccaagaaccccggttacatggtcggcaccagtgaatcccctggcttctgccggaagagttgcaacgtatgtacatcgtagtttcagactactaatcgactaataatcataataaatacatattttattctt

SEQ ID NO: 88256 - DNA, 1181 bp, Oryza sativa
  Clone ID: PAT_MRT4530_87124C.1
ccggccaaaaaaaaaaaaaaaccccagatcaacctcatcgtctccgacccccctccgccgcccaagggagctaggccggcggcgctcgtctctgccgccgccgccgtcgcacgggcatggctcgtctcgtcctcctcgtcgtcctactgcttctcctctccgtcaccggcgagacgtccgccaccggcggtggcggggaaggcgggcgattcgacgcctcccgcacagtcgatgtctcgtggagccccagggtgttcctgtacgaggggttcctgtcggatgtggagtgcgaacacctcatcgcgctggcgaagcagggtaggatggagaggtcgacggtggtaaacggcaagtcgggggagagcgtgatgagcaagacgaggaccagctccggcatgttcctcatcaggaaacaggatgaagtcgttgcaagaatagaggagaggattgctgcttggaccatgtttccagcagaaaacggtgaatctatgcaaatgctacgttatgggcaaggtgagaaatacgagccacactttgattacattcgcggacggcaagcctcagctcgtggaggtcatcggattgctactgtgctcatgtacctgtccaatgtcaagatgggtggagagaccgtcttccccgatgcagaggctaggttatcacagcctaaagacgagacatggtccgactgcgcagaacagggcttcgcagtgaaacctaccaaaggcagtgcggtgctgttcttcagcctctaccccaacgcgacgttcgacccaggcagcctgcacggaagctgccctgtcatacaaggcgagaagtggtcggcgacgaaatggatccatgtgagatcctacgacgaaaatggccggagatcctcggacaaatgcgaggatcaacatgctctctgctccagctgggctgctgctggagagtgtgccaagaaccccggttacatggtcggcaccagtgaatcccctggcttctgccggaagagttgcaacgcggccggcgcggaggcggcgatacgggggacggcgcggaggcggcctgcgcggcggcggcggtgggcggccggcgcggcggcgcggggggccacgcggctgcgccgggggccgcgcggaggcggcggctgcggtgggtggccgctcggcggcgatcggcgcgaaccttgtgaggactaa

SEQ ID NO: 88257 - DNA, 2016 bp, Oryza sativa
  Clone ID: PAT_MRT4530_87125C.1
atgggcttgttgaagagcccgaggggaacggtgatccgtattgaggttcttgtggtgttggctgcttgtatgcttatattcctcgccgtgtttgggtttctccgacggcgatgcacaaatcccttgttccagacggctgtcatgggctcctatgtcctgtcctcctccctggtaacatacacgcttggttcaatgcagtcttctgctgccaagagtggcatgtaccccatttgggccttgtcactctttatcctttctgggattattgcatctcagctggcaagcgtgtcgtggaacctgaacaagatggttgccgattacatgcatgaggagcacgccaatcatccaatacgggagtacgacgcaggcagcatgaagggttaccgttacctagtctactggcgattggacaagacgtccaagattgaagctgcgacatcatatgcagcacgcgtaacaacaacagatgatgatgcccagatcatttgcatcgacgacatatggctccgcagcgacaagtcactgagcacggacctgaaggatgcctgtctctccttctctctattccatttgttgcggaggcgcttctttgggttcacatgtgctgaatctgcacaccccaagactagtgatttcgtcttcaagggcctgctgcagttgaagaatggcagcacaggcactgtagactacatcagagctttcaaggtcatcgaggttgagttggcttttatgtatgacttcttcttcacaaagtatgctctcatctactacagttcaacctctgctgcagtttggtcattggtttcagctgccttcacagttttaactgcatattccacaaccaaactccattggcttcagggtggatccactgttgtggttcagggtggacccactgttgtgggcgacaacaaagctgacatttttatcaccatgctcctgcttgtatctattgctttgctagagctgcttcagccactgctttactggaccaccatttggggcagagtatcttttgtttgtcagtatatcagacaacaacagccattgcggcatggcttcagctgctgcatgatgagagttaaggagcttctcaccaagatcggtctgcgtgtgtcgtcaaatgggagctactggcaggacatgcttgggcaatactcgttgcttgcatcagtcagccgcaataaaccgattaagcagctggggagaaaacgtagtagatttattaagtgtatgaatcttttggactacagggcacttaatttttatccagcgattgcctccttcaagaagaagaaccctgtagacaaacctatcaagttgtccccacaagtgaaggaggcagttgccaagtccctgctgcaacatgctgctgctggtcatggtaatctgacgaacggagtgtcatcattgaagtccaatggagctcatcacctcttatgggcttgtgacccagacccagctgcacgcatcttgcagaatcagacgccctctattttgatatggcacatcgcgacatgctgctgcgagaagaaaccgcccaactaccagcatgaagaagagctgaaaaatttccaggtcgccactgcgctgtccagatactgtgcgtaccacagcttcttcctgggcaccactatgacacagccgtgtgtgctgcatgcggtcggagaggaatccgtgcagtttcttcgtgaacgtggaaaaaaggagttcgacgccatggccctgcaaggctatgagccaccaccggagggcgagccaactaagggcatattcgagagtggcttgaagctggggaagcagctggaggagatgccagagaagatgcgttggaaggtcctggccgacttctggcctgagatgttgctctacatctcgccgtcagacaatgtcaaagagcacatccagcggctcgccaagggaggcgagttcatcacccatctctgggctttgctctcgcacgccggcatccttgagcgtccgaagcaggagcatcaccccggaagcagcgtatga

SEQ ID NO: 88258 - DNA, 3351 bp, Oryza sativa
  Clone ID: PAT_MRT4530_87126C.1
atggcggaggggcggcgctacgcgatcgcgccgcagctagatattgagcagatactgaaggaggctcaacgccgatggttacgtccgactgaaatttgtgaaatacttaagaattacaggagtttccgtattgctcctgaacctccaaataggcctccaagtggttcacttttcttgtttgatcggaaggtcctgagatatttcaggaaggacggtcataattggaggaagaaaagagatggaaagacagtcaaagaagcccatgaaaggttaaagtctggaagcattgatgtgcttcattgctactatgctcatggggaggagaatataaatttccaaaggaggagttattggatgttggaggaggattacatgcacattgtacttgtacattatctggaagtcaagctgaagtttcatttcctgcacatatatgggtatgaccatcaggctggaaaattaagctctcgtagtacgggacatgatgatgtactgcaagcatctcatgcggatagccctttaagtcaattgccttcacaaactaccgaaggagaaagctcagttagcggacaggcctctgaatatgatgaaacagaatcaggcagttatcaaggattacaggctacagcacctaatacaggcttctattctcatggtcaagataacttacccgtggttcttaacgagtcagaccttgggactgcatttaatggccctaatagtcagtttgatctatcattatggattgaagcaatgaaacctgacaaagggacccatcaaattcctctttaccaagctcctgttccctccgaacagtctccttttacaggaggcccaggaattgaatctttcacatttgatgaagtatacaacaatggactgagtatcaaggatgtagatggtgatgatacagatggagaaactccatggcagattccaaatgcaagtggtacatttgctacagcggacagctttcaacaaaatgataaaactttggaggaagccattaattaccctctcttgaaaactcaatcatctagtctttctgatatcataaaggacagttttaagaaaaatgacagtttcactagatggatgagcaaagagcttgctgaagtagatgattctcaaatcacatctagttctggagtgtactggaacagtgaagaagctgacaatatcattgaagcatcaagcagtgatcagtatactctgggaccagtgcttgcacaagatcagctgtttactatagttgatttttctccaacctggacatatgcaggttcaaagactagggtatttattaaaggtaatttcttaagttctgatgaagttaagagattaaaatggtcatgcatgtttggagaatttgaagtcccagctgagattatagcagatgatactcttgtatgtcattctccctcacacaagcctggcagggtccctttctatgtgacttgctccaatagattggcctgcagtgaagtacgggagtttgatttccgacctcagtacatggatgctccaagtccacttggttctacaaacaaaatatatctccagaagcgtcttgataaactattgtctgtggagcaggatgagatccagacaactctgtctaaccccacgaaggagattattgatttgagcaagaagataagttcattgatgatgaacaatgatgattggtctgagttgctaaagttggctgatgataatgagcctgccacagatgataagcaagatcagttccttcaaaaccgcattaaggaaaaattgcatatctggcttctccataaagtaggggatggaggcaaaggtcccagtatgttagatgaggaggggcagggtgtgcttcatttggcagctgccctagggtacgattgggcaataagaccaacaatagctgctggtgtgaatataaacttcagagatgctcatggatggactgcactccactgggctgcattttgtggaagagagcggacagtcgttgcacttatagcactaggtgcagctcctggagctgtaacagacccaacaccaagtttcccttcaggaagcacaccagctgatcttgcatcagccaacggacacaagggaatctctggtttcctagcagagtcttctttaacaagtcatctgcagactctcaatctaaaggaagccatgcgtagcagtgcaggagaaatatctggtctacctggcattgtaaatgttgctgatagaagcgcctcgcctttggcagttgaaggccatcagactggatctatgggagattcactaggtgctgttcgtaatgccgcccaagctgctgcccggatataccaagtttttaggatgcaatccttccagagaaaacaagcagttcagtatgaggatgaaaatggtgcgatatcagatgagcgtgccatgtcactcttgtctgctaaaccatccaaacctgcacagcttgatcctctgcatgctgctgcgactcgaatacaaaacaagttccgtggatggaagggaagaaaagaatttctgcttattagacagcgaatcgtcaagatccaggcgcatgtgcgaggtcaccaagtgagaaagcattatcgcaaaataatttggtctgttgggatagtggagaaggttatattgcgctggaggcgacgaggtgctgggttgcgtgggtttcgacccacagaaaatgcagtcacagagagtactagcagcagcagtggcaacgtgacccaaaacagacctgccgagaatgactatgatttcttacaagaaggacggaagcagactgaagaaaggctacagaaagctcttgccagagtgaaatccatggttcaatacccagatgccagggatcagtaccagaggattttgacggtggtaactaaaatgcaggaatcccaggctatgcaagaaaagatgctcgaggagtcgacagagatggatgaaggccttttgatgagcgaattcaaagaactgtgggatgacgacatgccaacgcctggatatttctaggatctaacgtcttgtgtatgcgcttgtaaattacttccaggtctttgtacatagcattaccaaatcgataacctgtagttgcattgctaaatttttgtatgttttgaagtttggttggtacaataatttttgtatgcgttttgtacagtaattcttctgtaaaatgtatcaaaatgatgtagctcgtgaaaagcttcagatagttggagaagctaggtctagaatctgcagatagtttgtgtaaggaaaaatgtttaatccttgctatgttttgactacggtgtctcgagttccaacggttgtccaggctgacagcgtcaaaaaaaaaaaaaaaaaaaa

SEQ ID NO: 88259 - DNA, 616 bp, Oryza sativa
  Clone ID: PAT_MRT4530_87127C.1
cgacgtacagcgtcccctccgctgcccgccagggcacctccaagcggtgccgcctccccacccacacccatcccgctccccaccagcggcgatcccccccgcaccctccgcgacgctcgctccacacccaggccgcccagtccatcgactgtccagagtgcgctgccggggccaggcgggcccacaccccccgcaccccgggtacgccgggagagctcgtctgcccccagtccgcttacctccccggcaccaccccacgcttagcgcccctctcctcccccaccggccgcccccagaacccccaaccaccaccctaaaacaccccccccccccaacaccttcccggcagcgcatcctccaccgcgccgccgcgcgcctccccggctgcgcctacgtctgcgcctgggctcccctccccctcgtcgccgccgccggcctcgccgaggccgacgacgccgccatggcacaggcgatgctcgacgtcatctcctccccctcgacgtcgtcctccgccgccgccgccgccgctgccagcgctgccgcggcacagcggagcggcggcggcgacgacgaggacgccacggccgcgccgccgccgccgacgagcagccagctc

SEQ ID NO: 88260 - DNA, 123 bp, Oryza sativa
  Clone ID: PAT_MRT4530_87128C.1
atgaggaagaccatatataatgcattaaaggggttcaatgagacaaatcctccactcagcctgcccaacgacacccactctagctgcaacgatgttcctatcatcgcgcccttccttttcgcg

SEQ ID NO: 88261 - DNA, 3501 bp, Oryza sativa
  Clone ID: PAT_MRT4530_87129C.1
cacccaaatcggcgagccgtgcagccgccgccgtactcctcctcccgaggcgtcgcagccgccgccaccctgacacctctccccgccgtcgcgccgccggcgctcgcggcgcccatccaccgtccacctgttgccaccgccgcatgcgccagagggaggcctagcgcgctcgcggatccctcctcctcctcgcctcgcccgacgacgacgcggcttccagcgatgcatcgcgcgatgcggctgcgcggcctcctgcgcccgcagctcctgcgcacgcatgagaccggaggcgcgcttgtcgtggggctcggagagcctggcgggagcgcggtggcgcggaggccgcctcccctgcctttcggcgacgggcggcggcggccgtcgtcccggttctactgctccaagggcggcgtcggcagcgtggaggcggctgtggggagcggcggaggcggtagtagtagcagcagcagcgagcaggagcacgcgcggctcggggagagggaccagaaggaatggctgagcggcgagcggttcgtcaccggctgcaggaggcgggagtctccattcctcaccaagcgggagcgcttccgcgaccagttcctgcgccgcgtcgtgccatgggagaaggccaccctctcctggcgcagcttcccgtactacgtcgatgaggacgcaaggcagctgctgagtgattgtgtggcggcacacctgcgccacaaagatgtcgctctggagtatggttctcggctgcagtcctctggtgggaggatattgctccagagcttgtcaggaactgagctctaccgggagagattggtaaaagcacttgcccatgagctacgcgtgccactgttggttttggacagcagtgttctagctccatatgattttggtgaagattgttcagagagtgaggaagaagatgatcatgcagaatctgaagatgaagggtctgtgtcagaggtggaagatgaaggcgatgatgatgaagaaaaatcaggtgaaagcgatgatgatgatgctattaaatccgtggaagacctcaagaagcttgttccatgcactcttgaggaatttgcaaagagagttgctagtgcccagggaagttcatcaacatcagaatcctctgacactgctgagtctcctgaagatgggaaaaggccgctccaaaagggagatagggtcaagtatgttggagcatcagtgcttgttgaagcagatcacaggatcaatttggggcaaattcctactcaagagggaggaacaaatgcctatacttctattaatggcaggacattatcaaatggacagcgtggagaggtgtatgagatcaatggcgatcaagcagctgttatatttgatccttctgaagacaagctgtctgatgataaaaaagatgaagctagcaaagagcatcttgctaaaccagcagtttgttgggtcgacactcaggatattgagcttgaccatgatatacaggcagaagattggcacatcgcaatcgaagcacttcgtgaggtactgccatctctacagccagccattgtttactttcctgatagttcccagtggctgtctagggcagttccaagatcaaatcgcagggagtttgttgaaaaggtagaagaagtgtttgaccagcttactgggtctttagttttgatatgtggacaaaatataactgaggcagcgcccaaggaaaaagagccgaagacgctagtgttccacaatcttgctcgcctatctccactgacatcatccttgaagcggctggtaggtgggctaaaagcgcggaagccttcaaagtcaaatgacatatcaaagctcttcagaaataaattctttattcctcttccaaaggatgatgaacagctgagagttttcaataaccagattgaggaggacagaaaaataattatctcaaggcataaccttgtagaaatgcacaaggtgcttgaagagcatgagctatcatgtgaggatcttttgcatgtgaaattggagggcattattttgacaaaacaaagagcagagaaggtcattggatgggctagaagtcactatttatcatcagtgacgtgtccctctataaagggtgacaggctgatcattccccgtgagagtctggacctagcaattggaaggttaaaggcacaggaggcttcatcgaggaagtcttctgaaaaaattaagattttggcaaaagatgaattcgagcgcaatttcatttcagcagttgtacctcccaatgaaattggagtaaaatttgatgatattggtgctcttgaggatgttaagaagacactggatgaacttgttactcttccaatgaggagaccagagcttttttctcatgggaacttgttaaggccttgcaaaggtatattgctttttggacctccagggacagggaaaacacttttggcaaaggcacttgcaacagaagctggagcaaattttatcagcataactggttctaatcttacatcaaagtggtttggagacgctgagaagctcactaaggcccttttctcctttgctagtcggctagcacctgttatcatatttgtggacgaggttgatagcttacttggtgcaagaggtggtgcatttgaacacgaagcaacaagaagaatgcggaatgaattcatggcagcttgggatggtttaagatccaaagagaaccaaaggatccttattcttggtgcaacaaaccgtccatttgatctagatgatgcagtaattcggcgtttacctaggcggatatacgttgaccttccggactcacagaatcgaatgaaaattctgaagattttacttgcaaaagaaaacctggaatctgatttcagatttgacgaactagccaatgcaactgagggttactctggtagtgacttgaagaacctatgcatcgcagctgcgtacagaccagttcatgagcttctagaagaagaaaagggaggcgttagtggcacaaaaatatctttgaggcccttaaagttggaggattttgtgcaagcaaaagcaaaggtaagtccatccgtcgcttttgacgccacgagcatgaacgagttacgaaaatggaacgagcagtacggggaaggtggaagcaggagtaaatcaccatttgggttcggcagctaacattgttctgtcagtatttttagttctcacattgtatcatctgcatcattagcgagctccaactttagccataggaagccagcaataggcgcttctttctttgatgtgcccgcctcctttccttttcacctatatcctatttcagagttatgtgatccctgtatcaatagagaaacccctaatcacaccaaattttcctgagcctttttgaacaagtgctccgtcctcctgttgtaattttgatgcatccctctgttgaaacctgaccaaactgtaaatagccgaagaagaaattttgtcccgagacaacagataatatgctgttcccccaaaataaatcccatattctttcccccc

SEQ ID NO: 88262 - DNA, 312 bp, Oryza sativa
  Clone ID: PAT_MRT4530_8712C.1
attagataaagttttttttgtgatatataatggagtgtgggtttaattttggggggggtattatgatggtttgtaatttaaagttggaaaatattaaagatgggaatgtataagtacacaaaactgacggagagtaggtttgtgaacgaccggaggattatgttcacacaggaaggatggatggttgggtgacagaatctcgaatattcagacagggaggaagagggtagccagattgaacgatagggagaagtattctttgtttgaaaaggctttcttgtaaaatttgaatgtggaaaaccaatgggaggc

SEQ ID NO: 88263 - DNA, 478 bp, Oryza sativa
  Clone ID: PAT_MRT4530_87130C.1
aaggggcaaaaaaacggggaaaaaaaacaaaacccggggttttcccgccccccccccaccgggaaaaaaaaaaccaataactatttcggaaggggggccgacccaacaacccctggttttaaagaaatcaaaaaaaaggcccggggagccccccgcttttttgctctcaaatgggcggggggaaaaaacggatcccctaaaaacattcattgggaacaaaatcccccccccaaaaaaaacgggaaacaaaacagggggaaactttggaaaaaactccgggaccaaagggcccccctctttccctaaaggaaaatttttggccgggctcagggggaacaggggaaatcaacccaaatccgggggttcctttatccccaggcataaccatttccaccccattaggaaacaaaacttttccagggacatgggcagtcctaaagaaaaaccggggcccggaatttgacaagaaggggggggg

SEQ ID NO: 88264 - DNA, 302 bp, Oryza sativa
  Clone ID: PAT_MRT4530_87131C.1
tggcgcaaaagcttggaaatgcgcaatttggtggatacaaggtgtcacacaaatggaagagcacagaatatcgtgacaaaaatggatgtggcgctgtgtacttctgaacaggggaaatttgtgcacaacgagtgctgagcttcacaaatgatgaaattgtgtgcccccaattgtgtggtacaaatctttttggggggttagtccagcaaatcaaaaagagaggattgccttgccttccaggtccaagttaacttcccagtggttgtccttgtttttttaagttggccctttggggggggttt

SEQ ID NO: 88265 - DNA, 1354 bp, Oryza sativa
  Clone ID: PAT_MRT4530_87132C.1
gtctcccacgccctctaccgagctctccacgccgatccccatcgccgccgctcgccggcgatctccagccgcccgccaccgccgctcccgtcgctgccgcgctgcgccgccaccacctatagcatcacaccaccccaccgcaccccggcatccactccatctccctcctccaccgccggaaccaccttcccatcgcgaggccgagccactaccgccacacaccgccttcagccggccgctgccgccgcgctagtcgtcgccgcacctcgccgcttgcgccgccggcaacgccgtgccaagctctaccccggcctccgctccgtttccccattccaccaccgcaaccacccttccaccgtgcatcccgagccacctccaccatacgccgcctccagcccgccgtgcagcacctcggtcaccgttgttcatcgccggaaacccaccggaacgtggtatctctcggtcgccggtcttgccggccctcggccgcggctccgccagggtcgggcgtcgtcggaacgccgttcccgtcgcctcccgtgccggccgccgccatcctttccgccgccggtcgcctccccatggttgtcccgtcgccggcgcccctcggtgaggaccccctccatctcctctccttttccctctttgcgccgcctcccgcgcgtgccgtcgcgccggtggtcgtcgccggcgaccatcgggccgtgcgccgtcgctcccggccggccgaccgccgtccgtcgtggccgccacgtgtctgccacgtggtgcgcccgcggaccagcgcgtgcgtggactcggtccacggtgcgcccgccacccttgacatacctagaggaccagccgtcagcttcatgtctgttcggaagtcaattcaagcctcaagcttcgtgcagcaggagcaagaagttcagcccagagtcgtcgttccgcgaagatcaattgtaggttcaacccagtgcagcaaattggttagtaattaaaggagtcagttgcgaaccattagcagagtcaccccaatctcaggtcgacaggttcaattctaaggttaccaaaattgccaacctcaacagttcagtccaagataaccatcccagaatctcgggacgagattcctgttcccacgccctctaccgagcttttcagccggatacccattggcggcggttgccggggaaatttcaaccggcccgccccggcggttcccttgttgggcgggcttgggcccccccacctttagaattaaaccaccccccccggaccccggggtaacctccattttccttctcccccgggggggaacccctttcccttggggggggggggcattaccggcccaaaccgcttttttcgg

SEQ ID NO: 88266 - DNA, 721 bp, Oryza sativa
  Clone ID: PAT_MRT4530_87133C.1
atgaaccatgctgtacaaaagcggctagggtttgcggtggaccgggcgcacggcagcggttcacgggaacgaacggccgagatcgatcctatccaaaacggacggccgagatcgaccggtccacggccggaccacgagggacgacgacgatgacgtcagtgacgacgtcaccaccggcggcggctcggcggctcgggcgcgcatgctcgccggcgaacgacggcgcgaggacgcgaacggaggacaccaaaacgatgcggacatcgcggcgaactcaccggtgaccaaagcgacgacggaggagcaacggacgacgtcggcaacgaggtcgaagcggcggagaagatcgggtcggcggcggcgacggtgctccggcggttgacagcgacggcggaggggcggacgaggacggcgacgcgacagcgaccacgatggcgatcttcccgaacgacgacgacgactggagcgacggcgacacacggctggagcggcggcgacgatggcggcgctaggtcacacggcgctagggcgctaccgacggcgagaggcgaaggcaagagtggcgacgggtagaggagacaccggggatccttttataggggcaaggaggcggcggcgaaggcccacggcgaccggcgacgcgaaggaaacctcggtgtcggtgacatgggaccgggagtatcatgacttagagacttgaggcagacacgatcacccacgt

SEQ ID NO: 88267 - DNA, 183 bp, Oryza sativa
  Clone ID: PAT_MRT4530_87134C.1
atgggtctattaggaattttgaatttggtcaaaattcatccaaaccatatcaccggtttcctgtaccgtatccctacgtttcagcagcagagcaatcctcttgagattgtggttaatctaaccggcacaactggtggtagtgattctggagtggataaagaattcactgctgcaaatggataa

SEQ ID NO: 88268 - DNA, 579 bp, Oryza sativa
  Clone ID: PAT_MRT4530_87135C.1
gccgtcgtcgccgccgctccagctatgcgccaccgtcgctccagtcgtcgccgtcgctcggagaggtcgccatcgtggtcgccgtcgcgtcgccgtcctcgtccgcccctccgccgttgctgtcgaccgccggaacaccgccgtcgtcgtcaagccgaaggtcgccgccgcttcttcctcgacgccgtcgccgtccgttgatctttcgccgttgctttggtcaccggtgagttcgccgtgccgtccgctacccgtgggtgctctccgttcgcgtcatcgcgccgtcgttcgctggcgagtttgcaagcctgagccgccgccggtggtgacgtcaccgctgacgtcatcgtcgtcgtctctcgtggtccggccgtggaccagtcgatctcggctgtccgttttggatggagagatctcggccgttcgtttctgtgagccgccgccgtgcactcggtccaccgcaaaccctagccgctgacgcaataaacccatttttccttttgtatagcatggttcattgcggagcaccagactgagaagtggcggagataagcccacgggggtcgctggggagtccat

SEQ ID NO: 88269 - DNA, 2260 bp, Oryza sativa
  Clone ID: PAT_MRT4530_87136C.1
atggagattatgcaacagctcgccgccgccgccaccgccaccgccaccgccacggcaacgcccctgtgccttcctgaaccccctccgacggcgatgacgacggcgcaggtggaggccgccatcgcgacgctgcacggcaagaagcagggcctccgcgaggcctacgacagcctcgtcctccactcgcccatccccctccccttccgctggtccgacctcgactcccacctctcctccctccagtcctccatccacgcccgcttcagccagctgcaggccctccaggcttcccgccccgcgccccccgccgccgccgccgcgagccacgacgaggacgtcgagatggaggacgtccaggaacagggagaggacgaggtgatggcgcctccgtctacggtgcaggtcaaggaggagcctgtggaggcggcggcatgcgcgtcgaataccgccggcgagcgtgccggtgtcgggcaagatgggttcgttcgacccggcgggatggcggcggcgaagatggcgtctccgtcaaaggtgcaggtcaaggaggaacccgtggaggtgagtccatctcctccggccggcgccacgggtcttacggcggcggcatgcgcgagcatggacgccccgagactaaccgacgtctgcaagcgcgccggcggtggcggcggccaaggtttgtgcgcgcgaaacggtagtggtccagcgcagtcacccccgttccctagttgccctgtgctccagcagcagcacacggccggcgccccgaacggcagccaccctgtgctacgccaacacgccgctaacgccatgaacgccggccactcggccgcgttccgcccgcagcagcacatgggtaaaccccgggacacgtgtgacttgcggaagcccgccgcaccgaacaccggagatcgcctgccgctgcaatggcggcagcagcgcgtgcacgctaatctcacgtgccccttgccgccaccggtggtcgcgggctcctcctcctcgccgccacagcaagcgcgtgggcgtgttcccctcgccaacgccgcagatcgtgggctcctcgccgccgccgccatcacaggcgcgcgtgggagaggctaatgtaacgaacccatcgcggcagcagttcacagctagcgcgccacacgcgggcgatggccagctccagaagcggccgccgtggcagcggctgcagcgcgtgggcgtggctaatcccatgaacgccggtgacctgccgccccagaagccgcacttcacggccaacgcaagaaacgccggagaacacccgttccaggagcagcagcagccgccgcccgtggccaaacccacggacgccgccgccggtgacctgcttcctcagcagaagcagttgatggccaacgcaccaaacgccggagaacacttgctcccggagcaacagaagcagcagcccgtgacagctgcaaaacccgcgaacgcgccgcctctgcagcacgcggcgaacgccaccaacccagccgttctccggcggcagcggcagcggcagtgggttcgacttcgaccaccgaccgccactaacctgccgcaaacgaagcaggagcagcatcatctgttcatggctgacgacggcgccaacgcccgcaatcccctgtcgccgccgccgccgtgcggcatggccaaaccccccaactccggtgacccgctgacggatcagaacaatcagcagctcatggcgaacacccactctgcccctacaccggtttccacaccattggttgcatcgaaccagagtgaatcatcagccatgacgacgacgacgacgacgaacagcaaccaaaactccggcggcggtcgcaccggcccgcaacccgtagcggccggcgctgctccaaatccggccggcaaccagcagcaagggcagcggaaaggtggtgcaaacaggcgaggcggacgaggccaaggcaacaagaacaacaacgttgctaataccaatattagcaacatgagcaaggtgattggcaagggcaacaaggggcagggcaatggaaacccccagctcaacaagaatgggaacccccagttcaacaagaacgtgccgggtgatcatcaccagaagaacaagaatgcagggcagctttgctacaggtgcgggtgcagggggcactggtcgcgcatctgccgcactcctgagcatctggtgaagctttatcagcaggacagaaaggccaaactgcaagcaggagcgaatacgaatacggtttatgtgggagccatgacggattag

SEQ ID NO: 88270 - DNA, 2028 bp, Oryza sativa
  Clone ID: PAT_MRT4530_87137C.1
atggcgagggaggacggggatccagcaccacggtggccaaatccggtgctctcgcggccggatgtggtcgcgcggcttagggctgcggccgaaggccgtcggcggcagcggtggcgaggggaggactgccgcccgcttagcgtcggagcctctttccggcctggtggcccaaccattctgaacaaccatacccggctgtacagatctatctccaaaccaggaatataccattccaaactaggagctaaacaaattattaccagttatagcatcttttattatggcatggactccccagcgacccccgtgggcttatctccaccacttctcagtctggtgctccgcaatgaaccatgctatacaaaagcggctcacggaaacgaacggccgagatcgatcctatccaaaacggacggccaagatccaacggtccacgaccgggccacggggaacgacgacgatgacgtcagcggccgacaggtgggacccgtggaccccacctgtcatccccaacctccggccagctccaaccgccgcccacgccgcccactccctccgccgatcccgcacctcccctcgtcccaaccggcgtggacccgagaccccttccacctcgcgaccacatcccgccccactccccctctctccccgcgggaatcaacgccacgccgagccgccacacccgccacgatgccgccccactccccctcgaaatccgccgctccccggccctctcctcgcccccttgagctataaaatcaatccccgtggcctccttttcttttttcaccgttttcccgagtcccccacgccctctaccgagctctccacgccaatccccatcgccgccgctcgccggcgatctccagccgcccgccaccgccgctcccgtcgctgccgcgctgcgccgccaccacctatagcatcacaccaccccaccgcaccccggcatccactccatctccctcctccaccgccggaaccaccttcccatcgcgaggccgagccactaccgccacacaccgccttcagccggccgctgccgctgccgccgtgcagcacctcggtcaccgttgttcatcgccggaaacccaccggaacgtggtacctctcggtcgccggtcctgccggccctcggccgcggctccgccatggtcgggcgtcgtcggaccgccgttcccgtcgcctcccgtgtcggccgccgccatcctttccgccgccggtcgcctccccatggtcgtcccgtcgccggcgctcctcgccgtccgtcgtggccgccacgtgtctgccacgtggtgcgcccgcggaccagcgcatgcgtggactcggtccacgagtttttcctcgttttgcgtgccagcgtgtagtttccgtcgtttcggaagtccgcggtcgcgaggaaaagagttcagaagatcaaagtgaagaagcaaggcaacaacggcggaagatcaacggacggcgacggcgtcgaggaagaagtggcggcgaccttcggcttgacgacgacggcggtgttccggcggtcgatagcgacggcggaggggcggacgaggacggcgacgcgacggcgaccacgatggcgacctccccaagcgacggcgacgactggagcgacggcggcgcacggctggagcggcggcgacgacggcggcgtgaggtctcacggggctagggcgctaccgacggcgagagacgaaagcaagggtggcgacgggtagcggcgggcttgggggtccttatataggggttggaaggcggcggcgaaggcccatggcgaccggtgacggcgaaggaaagtctagggttcggaggagagagatcgatccgaatcgaactcgaatccacggatttccaaacgattttagccgacgattccaaaagagaaaagatagaggggatcccgaagatcatttcccctctagtgatttcaccggaaacggaaaggggtggccgaatttggaaggagacgacggcagcgcggcgctagggttcgggcggcgggcggccggaggaagacgacaggcc

SEQ ID NO: 88271 - DNA, 792 bp, Oryza sativa
  Clone ID: PAT_MRT4530_87138C.1
atgaggatggtggcgccttttcggcgagggctggcgatcttctccctctccatcctctcgggcccggccgccctccttttcccctcctcccttctctttgggccgtcggcccggcttgccccctccttcgcgcaagtccgtttcgcctccctcatcctccctcctctccccgagccgccgacagtccccccgccctctaccgagctctccacgccgatccccttcgccgccgctcgccggcgatctccagccgcccgccaccgccgctcccgtcgctgccgcgctgcgccgccgccacctatagcatcacagcgcctcgccgcaccccggcatccactccatctccctcctccaccgccggaaccaccttcccatcgcgaggccgagccactaccgccacacaccgccttcagccggccgctgccgccgccgccgtgccgcacctcggtcaccgttgttcatcgccggaaacccaccggaacgtggtatctctcggtcgccgtcttgccggccctcggccgcggctccgccatggtcgggcgtcgtcggaacgccgttcccgtcgcctcccgtgccggccgccgccatcctttccgccgccggtcgcctccccatggtcgtcccgtcgccggcgctcctcgccgtccgtcgtggccgccacgtgtctgccacgtggtgcgcccgcggaccagcgcgtgcgtggactcggtccacggtgcgcccgccaccccgtgtagaatccgtcgtttcggaagtccgcggtcgcgaggaaaagagttcggaagatcaaag

SEQ ID NO: 88272 - DNA, 870 bp, Oryza sativa
  Clone ID: PAT_MRT4530_87139C.1
atggcgaggcacgaggcggcggccggggtggtggacttccacctgcccgacgagatcctggctgtgatccccaccgacccgtacgagcagctggacgtggcgcggaagatcacctccatggccatcgcctcccgcgtctcccgcctcgaggccgacgcggcgcgcctccgccgcgacctcgccgaccgggaccgcgccgaggccgacctccgcgcccgcctcgcggactccgacgcccgcctcctcgccgccctcgacgagaacgcgaagctggcgaaggagagggactcgctcgcctccacggccaagaagatggcgaggaacttggcgaagttggaagcatttaagaagcagttgatgaagtcactgagtgaagacaatttattacaattgtcagaaataggtgatgaccgtgattttgatgcaaacaacaatttgactgctcgagttccctcttggaaagaacatcagttctcagtcacaccatacacagctcctaaattaactcctggttcaacacctaagttcttatctggtccaacatcacctacaaaatctctgtcagaagtccactcaacattttcatcatggcatggatcgtcaagccatcagtattcagcacccacctcccctcctcagcatcgttcgttcgcagggcggccccgtatagacggaaaggaatttttccggcaagcacggacacgactttcgtatgagcaatttggggcatttttagctaacatcaaggagttcaatgctcagaaacaatcacgagaggacactctctcaaaggcagaagagatttttggaacagaacataaagatttgtacatttctttccagaatatgcttaaccgcaaccattcttga

SEQ ID NO: 88273 - DNA, 1035 bp, Oryza sativa
  Clone ID: PAT_MRT4530_8713C.1
atggtggcgggggcggtcgacggcgacggggaagccggaggcggcgacgtctgtggcggcgcgaggcgacggcgacaacggcgcgaggcggagcaagggtttgaggggcgatcgacggcgacggcgacgcgaggcgacggggaagccggaggcggcggcggcgggagagggagagaaagaggggaggacgagggagaacgggcggcggcggctagggttatgggtggtaggaagcgctctcgagaacacaacaaagtaaaactaagccggccggctgtcatggctgctgctgctgataatcttcccgctgaggtcccccaccaggcccacccccgctcggggtcggggtgcacgctgctggttcttcaccgccatggcgacaccgccaccaacttcgtttgcgacgggtgcagggagcccggcgaaggcacgcggtacacctccggcgacctcgtcctccacacgcactgcgccctcgcggcacccacgctgcggcacccaccggccgtgacgccgtcctctgcgacgcctgctacggcgccgtgcgcgggcgcgggttccactaccacagctccaccggcggcctggacctgcacccgggctgcgccaagatgccgctgtccatcacgctgcaggagggcggcgccaccaccttcgagctccaagaacactgaccaacgcatgtacctgcacgtcaagtgcatcaaggagatcatggctggcttgggccacggcggcggcggcggcggcaacaacggcgagggctgcagtaaaatgcatcatcatgagatcatggctgctggctcctgccgcggcggcgccgacgctgacggcgagggcgccgaccgtgtgaatcgtgtgatcgcccggctacaagagcgcgccggcggcggcggcggcggcggcgggagcagtaagagtaagctggtgaggcgcgtgtgcgaggtgcttgtgatgttgatgcgtgtcgtcatcggggtgctccttggagaccccacggtgccattgatagcatttaatttcataatgccgtag

SEQ ID NO: 88274 - DNA, 2149 bp, Oryza sativa
  Clone ID: PAT_MRT4530_87140C.1
agttccaaatcgtgacaaatctagtaatcacaaggaaaggatatgtacatatactacacatcacaccgaaagcgacacaattacacaccaaaaaagctgtaaataattcgtgttcacgattcacgaaccatgaaaagacagcaagcctaagcttaggtaaagctactacacgacgacgacacgcgacgcgtgcgtgctactgttgctgcacgcgccgccggaggccgtcactcgcgtcggtcaggtcagccgcgcaccacgccgacgccgacgcccggtcccatcctcatggcgccggcgccggcgccgaacccgacgccggcgcgcccggcgccgaccgcgacgctgcggctccgccgcacgtgcggcggcgccgccacggggccgaggcgcgcgtcttcggcgccgaactcgcacggcgcgtcctcgtcgatcctcccgaccgccacgctgcggctcctcaccggcacggacgtcgccgccgacgccgacgacgccgcctgccgctgggacagcgcgcggacgagcgccccgacgtcgtcgtcgtcgccgccgccgtcaacgccaccgcgccgcgaccgcgagctgaacgtcgccgcctgcatcgcccccggcgcgaacccgccccgccccatggcgcccgccgcgtgcgtcggcatgtgccccgcgcacgccgacatcttccgcacgtacgagtcgcacgccctcgacagcgcccgcaccggcgcccccagccacctccccagcttgctccctgcccctgcctccttcttcatctcccactcctcctcttcctcttcctcttcctcttcctcttcctcctcctcctcctcctctccgacgacggctcccctcgtcccaaccggcgtggacccgagaccccttccacctcgcgaccacatcccgccccactccccctctctccccgcgggaatcaacgccacgccgagccgccacacccccacgacgccgccccacttcccctcgaaatccgccgctccccgggcctctcctcgccccctgtcatccccaacctccggccagctccaaccgccgcccacgccgcccactccctccgccgatcccgcacctcccctcgtcccaaccggcgtggacccgagaccccttccacctcgcgaccacatcccgccccactccccctctctccccgcgggaatcaacgccacgccgagccgccacacccccacgacgccgccccacttcccctcgaaatccgccgctccccggccctctcctcgcccccgagctctccacgccgatccccttcgccgccgctcgccggcgatctccagccgcccgccaccgccgctcccgtcgctgccgcgctgcgccgccaccaccccggcctccgctccgtttccccattccaccaccgcaaccacccttccaccgtgcatcccgagccacctccaccatacgccgcctccagccgtgtgccaccgtcgccttagccgccgccgcgtcgctccgtcttcacctctcgcctcgcagcgccgtgcagcacctcggtcaccgttgttcatcgccggaaacccaccggaacgtggtacctctcggtcgccggtcttgccggccctcggccgcggctccgccatggtcgggcgtcgtcggaccgccgttcccgtcgcctcccgtgtcggccgccgccatcctttccgccgccggtcgcctccccatggtcgtcccgtcgccggcgctcctcggtgaggacccccttcatctcctttccctttcccctcttttcgtcgcctcccgtgcgtgccgtcgcgccggtggtcgtcgccggcgaccatcgggccgtgcgccgtcgctcccggccggccgaccggtgagctggctcccgctcgcccgtggccgcccgatcctccttcggggcgatctgggccgtccacgtggccttcccgtgccgcccgcgtcggtgcctctgtggcgccacgtcggcgccacctccgctagccgtccgtcgtggccgccacgtgtctgccacgtggtgcgcccgcggaccagcgcatgcgtggactcggtccacggtgcgcccgccacccgtgagtcaccgtcaggggagggttatgcgaagggtctcgtcacaatcactcgacatggtgacgtgtgcatcatgggcacatga

SEQ ID NO: 88275 - DNA, 481 bp, Oryza sativa
  Clone ID: PAT_MRT4530_87141C.1
ctgcaggtgaacctgcctatggagatggagcagtcatcaacctccatgcgagtaccgccgctgtcatcgtcatcgtccgatagctggccggacaacaacgagagagctcactccgttgaaaatttgctgacaagtggggccaccgtatgccacgtcagcgaaccatgggaaattttggtgcatattgccatgggaccaaatttacatagtttttaatagttgaggggtagagatttctggtattgtggtttggggatctcagacaaacttgatgtaaagttgagggacgtccggtgaacttattcctgagaggaaagggggaggggagtgggaaatatggggctaatagagaaggaatggtgaaatagggcccaagataagtaatttaaggcttcttctttattttttaatacatatatgaagcatagaggcttcttctttgtttttccaaaaatcttgggtatacatctgaatacccttg

SEQ ID NO: 88276 - DNA, 459 bp, Oryza sativa
  Clone ID: PAT_MRT4530_87142C.1
gttgacggtggttatcgatcagtttcgaccgtcaatattaccaaaatagaggagaactagtaatgcttgcaatgcatatacatgttagaataataatattccactagtattaggttcactaaccttttgcagagaataaccataaagtggaggagaatcgacatcaactcaaacgataaatcaatcggacgatgtcgagaatcagtcttatgcatgaatgggccaagaactcagaattgacatgatgaattgggccaaaattcacaagtctgtgaaagagagcaaaggaggaggccacctgccgattttgggccaggtcgacccagcccatggtttggccaaaccccccgcagcgccactcgatccagggttctcctggatggctgagatgactccccaatgatggttggcggagggaggatcccactcgttcgggtggttcggctctctctccgcccc

SEQ ID NO: 88277 - DNA, 307 bp, Oryza sativa
  Clone ID: PAT_MRT4530_87143C.1
atgacggttgtgacggttggaatggtcggaaataccctccaaccgtcattgggagctaatccacatagtccagccgcaatcctgcatccaacggcgccaagatgggttcagccgaaccagcggttcggccttcggccgaaccatggactgggctatcctagcccatcttcgattggcggcctcctctattgctcttctctgcaaacttatgaattttggcctaatccatcgtgtcaactctgtgttcttggcccattcatacataagtctgattctcgacatcgtccgattgatttatcgtctaatt

SEQ ID NO: 88278 - DNA, 517 bp, Oryza sativa
  unsure (1)..(517): unsure at all n locations
  Clone ID: PAT_MRT4530_87144C.1
ctgcattaaccattcacggtcgcactcgagaatgcctttttaatggacaggcagagtatgaaagtattaaagcggtgaaacaagccatttttatgccgattattgctaatggggatattacttccccacaaaaagcaaaagatgtcttgaatatacaggggcagatgcagtgatgattggtagagggagtttcggacgcccttggttgtttcaagaactgaaacagtttttagagacgggtgacataatgatttatcaatcgatgaaaaatgtcaattgatgttgaagcatatcgaaaatctttatcatttttatggtgaacannnnnnnnnnnnnnnnnnnnnnnnnnnnnnnggttggtatttagatcaattaacgcccaggctcaaattttaaacgtactttcaatgcattaagttcaacaacagaacaattgatagcattgaaagaattggtcaaatccattcgttagaatcctttgttaagttggatagaggacaatgttagaacaacaacc

SEQ ID NO: 88279 - DNA, 356 bp, Oryza sativa
  Clone ID: PAT_MRT4530_87145C.1
acccacccacgcggccgttccttctccccttggcacatcaagggaccaagggcagggttggattcaactctaagggccgtcaacaagctactgccactaaagacccagctgccagactaaagtggctctgctaaccctacaatgcttactaagaagcaaccgcttgcataggacaacttccagtacttcccacccaaaagccctgccctaaaatggttggaaaccctaaagtgcgaccaactacataatttgcatgaactgtgcgccattgccgcagcccggaatccttgcccggacaaggctgtgccgacaacaagatagaactccatgcccccaaactcaccacaccccagtat

SEQ ID NO: 88280 - DNA, 166 bp, Oryza sativa
  Clone ID: PAT_MRT4530_87146C.1
atggccgacaatcccctactccttcgagccatatcctacaccgccgtcgctggatctggagatctagcaagctacgaccgccccgtcggccccaatgtcctttctaacctccgcgcccatccactgatccacacctccatcggctctgccaccctcttttccgggg

SEQ ID NO: 88281 - DNA, 2276 bp, Oryza sativa
  Clone ID: PAT_MRT4530_87147C.1
gccccacccacacaaaccctccaccaccaccacccacccacccatccgttggccaccggcggcgtgggcggagggcggcgggccggcggccatggggaagaacctgcgtatcaagaccggcaaccgcgccccgctcctcgcccagggggagacgtcgagggcgctctccgatctcgaggaggggagcaacgtccagccggagaacgtcgggttctgccgcgtcatcaagttggcgaggcatgacgcggggaagctggttattgccaccatggcgctgctcgtcgcttcgctcagtaacattctcgttccgaaatatggtggaaagataattgacattgtttcaagagatgttcggcgtccagaagataaagctcaagccctagatgatgtgacgggcacaatattgtatattgtcataatcgtcgtaactgggtatcttcttgaaaaccttgaatcatggctattcaattctgctagtgagagagtagttgctcgactgaggaaggacttgtttagtcatctagtaaatcaggaaatagcattttttgatgtcactagaacaggagagctattaagcaggctttctgaagatacgcaaataataaagaatgctgctacaactaacctttcagaagcattgcgcaatattactactacgtctattggtcttggttttatgtttgcaacttcatggaaattaacattgctggcacttgtaattgttccggttatatcaattgctgtgcgcaaatttggacgctttcttcgtgaactttcacatcagacacaggcagcagctgctgttgcttcatccatagccgaggaatcttttggtgccattcgcacagtaagatcgtttgctcaggagagtcatgaagtcttacgatatggtgagaaagtagatgagacactgaaactcggtctcaagcaagctaaagttgttggcatgttttctggagggctcaatgcagcatcaaccctatcagtggtcattgtagttatttatggcgctaacttaaccatcaacggttacatgacaactggttctctcacatcgttcattttgtacagccttacagttgggtcgtcagtctctgccttgtcaggactatacacaactgtaatgaaagcatcgggcgcaagccgacgagtatttcaacttctggaccgtgtttcctcaatggcaaattccggggacagatgcccaacaaatgaaaatgatggggaggttgagctcgacgatgtctggtttgcatatccctctcggccttctcatatgattctgaagggaataacgttgaagttaacaccaggttcaaaggtagctcttgttgggccaagtggtggtgggaaaactacaatagcaaatttaattgaacggttttatgaccctctaaaaggaagaatcttgcttaatggagtgcctttgccagagatttcacatcagtttctccacaggaaggttagcattgttagtcaggagcctgtgctctttaactgctccatcgaagagaatattgcttacggattagagggcaaagccagctctgctgacgttgagaatgcagctaaaatggcaaacgcccacaatttcatatgcagttttccagaccaatacaagactgtagttggagagcgaggcatcaggttatcaggtgggcagaagcagagagtcgccattgcaagagctttgcttatgaaccctcgagtgctcctcttggatgaagctaccagtgcactagacgctgaaagcgagtatcttgttcaggatgcaatggactctctgatgaaagggaggaccgtgcttgtgatagctcaccggctatccaccgtcaagagcgccgacaccgtcgccgtcatctccgacggccagatagtggagagcggcacgcacgacgagctcctcagccgcgacggcatctacacggccttggtgaagaggcagctgcaagggccaaggttcgaaggcaccagcaacgcaacagccgagatagaacccataagcaatggccaatagacaaatatagcctcttctgcatagtacttgatttttgtcccttctccgggcaggtggacaccgtttcctgatgatccactgaatgtaaacggatatgaatgcatccactctgaaaatgccacgcagtcccgcacaacagtacaaacacattctaattgtcacgagctgctgctgtgtcttacacaattaactcgcttatttttttatagaatgtaattatgccttgatggcgtgatgttgcgcgaaaaaaaaaaaaaaa

SEQ ID NO: 88282 - DNA, 2421 bp, Oryza sativa
  Clone ID: PAT_MRT4530_87148C.1
ctacacgctctccactgctggctccctcggtgacggtggcatttctccagcctttggctccctcgatgacagccctccgctcgccggtgcatccgcgccgctgctccctcccccgtgagccggcactgccgcagatcccttccagccccagcgcaggcacagatcacctccctccgctgccgccgccgccggtccctccgcgtccggacaccgccgacgctgctgccggtccctccgcgagccggcgccagcaaagatcccctccatccgcgttccatcgccgccgctgcttcctccacgtcccgccgccgctacccgtccctccctcgacgagccgtcgctggcgcggatccgagcccctccgccgccggctcccctccctgctgtcgccgcgcgcagccgccgctccatccttcgacgagcctgcgccggccctgctggaccaagtatggagagcaagaggcgcctaatgtcgcagctgaagaagtgttggatcaggatgtagagaacaccgccgcagttcgagaaggcatgttcgtaccttctcctttaggtggagagaccataaatttggacactcaatgtctatctataatgttgcatgacattgaagacacagaggacaacgacagagattttgagaagtttagtaagttggtggaagattgtcagatgcccttgtatgatggatgcaagtcgaagcacatcaagttgtcatgcgtgttggaactcatggagcttaaggctagtaatggctggccggacaagagttttacagaacttcttgagctgttaaaggacctgttgctagaggggaacaatttaccgcaaacgacatatgaagcgaagcaagtattatgtccgttgggcctggagagatacagccggacccccggcagagctaacagggacagaggtgcacaacttagtgatgggaataaccaacaagtttggaaaaaagaggaaagttggaaagacaaaagagaagagcacgtcgaaagaaaaacagaggagcatatggaaaaacaaaagacaaaagagaggagcatgtggaaaaagaagtcaatattttggagactaccatactggaaggatcttgaagttcgctactgcatagatttgatgcatgtcgagaagaatgtatgcgagagtttaatgggattactgcttaacccaggtagtacaaaggatggtctcaacgcccgacgagatctggaagaaatgggtgttcgctcggaactacatcccataaccacggaatccggcaaggtttaccttcctccagcctgctacactctctcgaaagaagagaagattgatttgctaacatgtttgagtagtataaaggttccatctggttactcatcaagaatcagtaggcttgtttcactgcaagatcttaagttggcaaacaaagtgctgtggtctagcattcatggctcgcagatgtatccttatgaaaggtacctggggatccttaagggttatgtacggaaccgttcacaccccgaggggagtatcatcgagagttacaccaccgaagaggtcatcgatttttgtgtgaactacatgtcagaaacatcttcaattggattaccacgatctcatcacgaagggaggcttgatggtgttggtactgttggaagaaaaactgttaggttggatcagaaggtgtacgataaagctcatttcacggtgctgcagcatatgactgaggtggtgtcgtacattgacgaacaccttgcagttctccgacaggagaacctaggccaatcagagagttgggtcagaaataagcacatgtcttctttcaacgagtggctgaagaaccgaattgccaggttgcagaacttgtctagtgaaacacttcagtggttgtcacagggtcctgaatggagtgccaccacctggcaaggatatgacataaatggatatacctttcacacggtaaagcaagacagcaaatgcacagtgcaaaacagtgggttacgcattgaggctgctagtgacagtggtcgtcgtgatcaatactatggtagagttgagcaaatattggagctagattacttgaagttcaaagtcccgttgtttcgttgtcgatgggtcgatcttcgcaatgtaaaagttgacaatgaaggtttcaccactgtcaacttggctaacaacgcgtacaaggatgaaccgtttgttctcgccaaacaagttgttcaagtgttctacatagttgactcgtgtaacaagaaactacatgttgttcatgaagggaaaaggagaattgttggattggacaatattgcagacgaggatgattacaaccagcacgtccacagcataggtcaagaaatacctctagaagaggaggaagaagaagatgacgttcaatatgcacgcgtcgaccatgaggaaggattatttttgtaa

SEQ ID NO: 88283 - DNA, 246 bp, Oryza sativa
  Clone ID: PAT_MRT4530_87149C.1
atggacgatcttgacgacgagctgtccgagagaggctccgacgagcccccgtcgatcggaacagccaaggagtcatcgccgcgtggaggagacgccggctcgggcgcactgtcggagacacgcgacgaggaatggctggagccgcggagtgcccgggccgcccgccgagcagaaaaccatgggtgttttgctccaaaatttgccctgttcgcccagaaatttcagcagcagcatctgcactcgtag

SEQ ID NO: 88284 - DNA, 888 bp, Oryza sativa
  Clone ID: PAT_MRT4530_8714C.1
atgtcactcgttaagtcaacatgttctacatgctgcacacaatctggcttgatctccgcaactggtgatattgagtcacaaagcacagttactgaagaacgtgaactaggcacttgctgtaaaggaccaaatataatggcaatcgctggtcaagaatcatcgcagaattatttacgagccgtgtcactattttacttccttatgcacaataccgagtgtattcatgctagcgtagcatcccatgatgctgtcccatccagcaggaaattgtcaaatcctgccgtcagccagaaatatgtgctttacaagtcactgaagcaaatgtttcatagatgtggactatgcatggctgtgcaagctttcttcccttgtggtgcagcttatgtaaatattttgtcaagttacgaagatggaagcacacttttgtgggatgtacgaaatcctggtctacctgtatcctcagtgaaatatcactcagaatcagctttatccattgctattgatgggctatgcaatggggggatctcaggaggtgctgatgataaaattgtcatgtttggccttgatcatcaaaagggtgcatttattctcaggaaagaaataaaacttgagcgaccgggtatagcaggcactgcaattcggccagacaacaagattgcagcgaccgctggttgggatcacaggattcgtgtgtatagctacagtaaaggaaacgctctagcagtgttaaagtatcacagtgcttcgtgtaatgcagtgacattctcatcggactccaagctgttggcttcctgctcggcggatactacggttgcattatgggagctctatcctcccaaaacagatagccaagttggtctcaaaacgagagatgaaatatcccaataa

SEQ ID NO: 88285 - DNA, 579 bp, Oryza sativa
  Clone ID: PAT_MRT4530_87150C.1
ctacttcattacattcatggcaacaaacataacaaaagcagtcacaaatgcaatcccaaacatacaaattctactcattgcctccttcatctcacatcttatcttctcaattccatcatgtagtcctttcaatgaagccttcactgattctgggacatcatcttctatcctgtgagcattgcaatctgtccatccatgaaggaaaccttccttcaccaaccaaacagcataatccccttgccacatgaaaaacttacattgtgcacttgtatattgtccggtgaggcatcgataaaacttgcggttgaaattctcttccttcttgcatgtccgctccactaccgttgaatcgcccttgcagaatggacatttcacaagaggcaactcactgacctgtgaatcacgccgaacccgagaggaagaagcacgtgagaaagaagaagcggaagacatcgtcgctgccaacgagctccctcccctctacgtctaccaaagggaccacgccgacttcaagcggtcgccgcctttgacgaagacgatcctcgccgccgccgtccagctacaatgccagattcactg

SEQ ID NO: 88286 - DNA, 500 bp, Oryza sativa
  Clone ID: PAT_MRT4530_87151C.1
atgtcttctttcaacgagtggctgaagaaccgaattgccaggttgcagaacttgcctagtgaaacacttcagtggttgtcacagggtcctgaatggagtgccaccacctggcaaggatatgacataaatggatacacctttcacacggtcaagcaagacagcaaatgcacagtgcagaacagtgggttacgcatcgaggctgctagtgacggtggtcgtcgtgatcaatactatggtagagttgagcaaatattggagctagattacttgaagttcaaagtcccgttgtttcgttgtcgatgggtcgatcttcgcaatataaaagttgacaatgaaggtttcaccactgtcaacttggctaacaacgcgtacaaggatgaaccagaggatgattacaaccagcacgtccacggcataggtcaagaaatacctctagaagaggaggaggaagaagatgaagttcaatatgcacgtgtcaaccatgaggaagcattattttt

SEQ ID NO: 88287 - DNA, 335 bp, Oryza sativa
  Clone ID: PAT_MRT4530_87152C.1
tgtatagatcacatcttggttggctgctctgaatcccgtcaactctggtggtgggcactctcggcaatcaatcaactggattgcctacccctgcaagaggcctccttccatcagtggctctgccttagcaggaagaaagtcgtgaaggatcggtgtcggggattcgacaccattgcgaccttggtagcatggatgatctggaaagagaggaacaacctggtgttcaatctccagcggcagccctgggcggaaattgcaagagctatggccgcggaggcggagctgtggcgcctggcaaaggcggcgattccggcgcttgtcgggcatgggccgtc

SEQ ID NO: 88288 - DNA, 1731 bp, Oryza sativa
  Clone ID: PAT_MRT4530_87153C.1
atggcccgtcacaggtatcccctcacctgtgacaggccggaagaaaaagccgtcacaggtaggtcaatacctttgacgggcaactcaattgaagcccgtcaaagggactgtaagaatgaacagatgatcgaagatagcgatgaagtgcatgctcatttgataatgaatggattcatgaagaaatatacctgctggaccaagcatggagagcaagaggcgcctgatgtcgcagctgaagaagtgttggatcaggatgtagagaacaccgccgcagctcgagaaggcatgtttgtaccttctcctttaggtggagagaccatagatttagacactcaatgtctatctacaatgttgcatgacattgaagacgcagaggacaacgacagagattttgagaagtttagtaagttggtagaagattatcagatgcccttgtatgatggatgcaagtcgaagcacagcaagttgtcatgcgtgttggaactcatgaagcttaaggctagtaatggctggtcggacaagagttttacagaacttcttgagttgttaaaggacctgttgccagaggggaacaatttacctcagacgacatatgaagcgaagcaagtattatgtccgttgggcctggaggaatacgctgacttggatgtctgccctgtctatggggcatcgagatacaaacgagcaaagagtgaaggtgaaggaagtaagtcaaagaggggaggcccagcaaaggtggtgtggtatctcccaattgcggagcgcatgaagagaatgtttgcgaataaggatcaagctaagctaaaagtatattatgcttgccatgctcattcaaggtacctggagatccttaagggttatgtacggaaccgttcacatcccgaggggagtatcatcgagagttacaccaccgaagaggtcatcgatttttgtgtggactacatgtcagaaatatcttcaattggattaccactatctcatcacgaagggaggcttgatggtgttggtactattggaagaaagactgttaggttggatcggaaggtgtacgataaagctcatttcatggagaacccaggccaatcagagagttgggtcagaaataagcacatgtcttctttcaacgagtggctgaagaaccgaattgctaggttgcagaacttgtctagtgaaacacttcagtggttgtcacagggtcctgaatggagtgccaccacctggcaaggatatgacataaatggatacacctttcacacggtaaagcaagacagcaaatatatagtgcagaacagtgggttacgcatcgaggctgctagtgacggtggtcgtcgtgatcaatactatggtagagttgagcaaatattggagctagattacttgaagttcaaagtcccgttgtttcgttatcgatgggtagatcttcgcaatgtaaaagttgacaagaaaggtttcaccactgttaacttggctaacaacgcgtacaaggatgaaccgttcgttctctccaaacaagttgttcaagtgttctacatagttgactcgtgtaacaagaaactacatgttgttcgtgaagagaaaaggagaattgttggattagacaatattatagacgaggatgattacaaccagcacgtccatggcataggtcaagaaatacctctagaagaggaggaagaagaagatgacgttcaatatgcacgcgtcgaccatgaggaaggattatttttgtaa

SEQ ID NO: 88289 - DNA, 1453 bp, Oryza sativa
  Clone ID: PAT_MRT4530_87154C.1
atggatcgtagatggatgtactatgcgcatcgttcgtctaccgagtatagagaaggggtcactgaatttgtcacatttgcggataatgacagaaaaagtaggatgagcatgcacatgttgtgcccatgtagggactgtaagaatgaacagatgatcgaagacaaggatgaagtgcatgctcatttgataatgaatggattcatgaagaaatatacctgctggacaaagcatggagagcaagaggcgcctgatgtcgcagctgaagaagtgttggatcaggatgtagagaacaccgccgcaactcgagaaggcatgttcgtaccttctcctttaggtggagagaccatagatttggacactcaatgtctatctacaatgttgcatgacattgaagacgcagaggacaacgacagagattatgagaagtttagtaagttggtggaagattgccagatgccgttgtatgatggatgcaagtcgaagcacagcaagttgtcatgcgtgttggaactcatgaagcttaaggctagtaatggctggtcggacaagaattttacagaactccttgagctgttaaaggatctgttgccagaggggaacaatttacctgaaacgacatatgaagcgaagcaagtattatgtccgttgggcccggaggaatacgctgacttggatgtctgccctatctgtggggcatcaagatacaaacgagcaaagagtgaaggtgaaggaagctatggaatgagggcacacgaacatgggacgcaaatgcacaacaacctccatgcgatgctgttttgtaccatcaacgataatccggcccttggcaacctttctggccaaactgtgaaagggaaatgggcgtgttcggagtgtatggaggaaacaagaagcaaatggttgaagcattcacacaagacggtctacatgggtcacaggagatttctcccaaggtatcacccgtataggaatatgagaaagaatttcaatggacacagaggtacacccggacccctgacagagctaacagggacagaggtgcacaacttagtgatgggaataaccaacgagtttggaaaaaagaggaaagttggaaagcgaaaagagaagagcacatcgaaggaaaaaacagaggagcatgttgaaaaacaaaagacaaaagagaggagcatgtggaaaaagaagtcaatattttggagactaccatactggaaagatcttgaagttcgccactgcatagatttgatgcatgtcgagaagaatgtatgcgagagtttaatgggattactgcttaacccaggtactacaaaggatggtctcaacgcccgacgagatctggaagatatgggtgttcggtcggagctacatcccataaccacggaatctggcagggtttaccttcctccagcctgctacactctctcgaaagaagagaagattgatttgctaacat

SEQ ID NO: 88290 - DNA, 383 bp, Oryza sativa
  Clone ID: PAT_MRT4530_87155C.1
gggggcccaaaaaacacccctacccattatatacatatgggagggggcccatgtttacatatttgtttgggcccatcctaattcgggcaaaaaccaaaatacttgtttttaaaaaaaggtcctacttctgtgctacaaaacaacaattttcactttaattaattaattataagccgataaatcgggtctttttacaacccatttagagtaaaataatccggctgcaaaggacacggtaattttttaggaaaaaaaaaaggcccccccccttgtaaaaaaaaaaaaccgactggataattctttggctggcaaaaaaacccacgcaacgcctttggtttaaaaatttaccttattaaaaacccttcgccatggccttttttttt

SEQ ID NO: 88291 - DNA, 1662 bp, Oryza sativa
  Clone ID: PAT_MRT4530_87156C.1
atgagatcgatgatgcgtctcatgatttgctgcctcctggtctctgcgggggtcgggggaatcacaggcgagggcaactcggaagtggtgctcctcctgcagcgcgtgaagccggtgctgcggagggaaggcgggaacgcgcagctggccacctggaccgcctccaccccgctctgcctgtggcgtggcctccgccaaatcccaggaggccgttgtacatcccctatcgtcgtccctgctgctgcatcccagtcgcctcggcttgaggatgtccttccccttcatcatgttacagagccggtggccggcagagtagaagagcggcggtggcgaagacgggctgaggccgggggagaccggaggccggcgccgccgccctccccttctcccacgtcgccggtgacctcctccggaccctgcgagaacagaaaaatgaccgtcacctttgacgggtcgctaggtttgctgtcatcgatggggcatccggccgtggcccgtcacagatggatgtactatgcgcatcgttcgtctaccgagtatagagagggggtcactgaatttgtcacatttgcggataatgacagaaaaagtaggatgagcatgcacatgttgtgtccatgtagggactataagaatgaacagatgatcgaagatagcgatgaagtgcatgcttatttaataatgaatggattcatgaagaaatatacctactggaccaagcatggagagcaagaggcgcctgatgtcgcagctgatgaagtgttggatcaggatgtagagaacaccgccgcagctcgagaaggcatgttcgtaccttctcctttaggtggagagaccatagatttggacactcaatgtctatctacaatgttgcatgacattaaagacgcagaggacaacgacagagattttgagaagattgtcagatgcccttgtatgatggatgtttacaagttgtcatgcgtgttggaactcatgaagcttaaggctagtaatggctggtcgggcaagagttttacagaacttcttaagctgttaaaggacctgttgccagaggggaacaatttaccggatacgacatatgaagcaaagcaagtattatgtccgttgggtctggaggaatacgctgacttggatatctgccctgtctgtggggcatcaagatacaaacgagcaaagagtgaaggtgaagaaagtaagtcaaagaggggaggcccagcaaaggtggtgtggtatctcccaattgcggagcgcatgaagagaatgtttgcgaataaggaacaagctaagctagtgcgctggcatgccgaagaatggaaagtcgatggtatgctgaggcacccagcagattcagtacagtggaggacaatcgataggatttaccagaaattctcaaatgacccaagaaacatgcgtttcgcaatgtgtaaggacgtcattaatccatttggtgatttgagcagtcgtcatagtacatggccagttctgcttgttaactataaccttcctccctggttgtgcttcaaaagaaagtatattatgcttgccatgctcattcaaggattgagacaacctggcaaggatatcgatgtgttccttgaaccgataatcgatgacttcgaaaggctatggaatgagggcacacggacatgggacgcataa

SEQ ID NO: 88292 - DNA, 430 bp, Oryza sativa
  unsure (1)..(430): unsure at all n locations
  Clone ID: PAT_MRT4530_87157C.1
atgggaaaatcattannnnnnnnnnnnnnnnnnnnnnnnnnnnnnnnnnnnnnnnnnnnnnnnnnnnnnnnnnnnnnnnnnnnnnnnnnnnnnnnnnnnnnnnnnnnnnnacccaaaagcggtagtgaaaaagcggaaaaagtcaaaccaatctcaactaaaggtttaacagcagagcagaaagcaaaagtaaaagcggataaagcgcgagcggcattagttaaacggatgggcattgatccatatcacgattggaaagcaaattatcaaattctaccggataaagataaagtggtttccgaattgaaatccttagccaaaaaagctgaccatatttatcttgcgaccgacttggatagagaaggggaagcaattgcttggcatttgcgtgaagtgattggcggtaaagaagagcattttagtcgagttg

SEQ ID NO: 88293 - DNA, 714 bp, Oryza sativa
  unsure (1)..(714): unsure at all n locations
  Clone ID: PAT_MRT4530_87158C.1
ggttacctcatcaagaatcagttaggcctctttcactgcaagatctttaagttgnttggaatgaagtcgcatgattgccacgttcttatcacacagctgttgcccgttgcaattaggaatattttgcctcctaaggtacggaaccgttcacaccccgaggggagtatcatcgagagttacaccaccgaagaggccatcgaattttgtgtggactacatgtcagaaacatcttcaattggattaccacgatctcatcacgaagggaggcttgacggtgttggtactgttggaagaaagactattaggttggatcgtaaggtgtacgataaagctcatttcacggtactacagcatatgactgaggtggtgccgtacgttgacgaacaccttgcagttatccgacaagataacccaggccgatcagagagttgggtcaggaataagcacatgtcttctttcaacgagtggctgaagaaccgaattgccaggttgcagaacttgcctagtgaaacacttcagtggttgtcacagggtcctgaatggagttcaatatgcacgtgtcgaccatgaggaaggattatttttgtaatttatgtacgtagtttatgtctacatgtctgttatctgtatgactctaatatgttcgcaatgatcaatagtatattgcttatgaaatagtcaaatgaaatagttaagtgaaaaaaaaaaaaaaaa

SEQ ID NO: 88294 - DNA, 2169 bp, Oryza sativa
  Clone ID: PAT_MRT4530_87159C.1
atgggcgtgttcggagtgtatgaaggaaacaagaagcaaatggttgaagcattcacacaagacggtctacatgggtcacaggagatttctcccaagcggttgtgttccttcttccatgcaatcggccagaagatcattgatcccgagggactagatgaactacaggcagaacttgtgagaactctatgtcatcttgagatgtactttcctccaactttctttgacataatggaacatcttcccgtgcaccttgtgaggcaaacaaagtgctgtggtccagcattgatgacgcagatgtatccttgcgaaaggtatctggggatccttaagggttatgtacggaaccgttcacaccccgaggggagtatcatcgagagttacaccaccgaagaggtcatcgatttttgtgtggactacatgtcagaaacttcttcaattggattaccacgatctcatcatgaagggaggcttgacgatgttggtactgttggaagaaagactgttaggttggatcggaaggtgtacgataaagctcatttcacggtactgcagtatatgactgatgtggtgccgtacgttgacgaacaccttgcagttctccgacaggagaacccaggccgatcagagagttgggtcaaaaataagcacatgtcttctttcaacgagtggctgaagaaccgaattgccaggttgcagaacttgtctaatgaaacacttcagtggttgtcacagggtcctgaatggagtgccaccacctggaaaggatataacataaatggatacacctttcgcatggtaaagcaagacaacaaatgcacagtgcagaacagtgggttacgcatcgaggctgctagtgacggtggtcgtcgtgatcaatactatggtagagttgagcaaatattggagctagattacttgaagttcaaagtcccgttgtttcgttgtcgatgggtctatcttcgcaatgtaaaagttgacaacgaaggtttcaccactgtcaacttggctaacaacgcgtacaaggatgaaccgttcgttctcgccaaacaagttgttcaagtgttctacatagttgacccgtgtaacaagaaactacatgttattcgtgaagggaaaaggagaattgttggattggacaatattgcagacgaggatgattacaaccagcacgtgacatcacctgtgacgggccagagtattgggcccgtcataggtggcctcacctgtgacggctccacagttggcgcccatcacagatccggcacccactctcactcattcactctctcgatccagatccaccgccctcctctccaccgcctcgacctcgacctctccgccaccatcaaagtcgaaaaagccattgcaacactcttggcgtccgtggcattccgcagcaccaacgaccggccggacttctccaacctctccaagtaccagaatggaaatgggatgaaattgggatggatttcatcaccggacttccaaaaacccaaggctgatatgattctatatggcaccgcgtatcacccgcagacagatggacagaccgagcatctaaatcagatcctagaagatatgctccgtgcttgtgttctagattttgggaagacctgggataagagtctcccctataccgagttctcctacaataacagctaccaagccagcatacaaatgacaccctatgaagcgttgtatggaccaagttggggaaagccaaatacgaaagggaagatcgcccctcggttcgtgggtcctttccgtatcattgctcgacgcggagaagtcgcttaccagttggagctgcccgcctccttgggcaacgtgcatgatgtgttccatgtgtcgcaactcaagaaatgtcttcgagtgccatccgagcaggccgattcagagcaaattgaagttcgcgaagacttgacctacgtggagaggccagtgaaaatcctggacaccatggagcgcaggaccaggaaccgggtaatccgtttttgcaaggtccaatggagcaaccacgctgcggaagaggctacttgggaacgtgaagacgagctgaaggcagcccatcccgatctcttcgccagcccgcccgccaccctcgctgacgggtggggcccacccgtcatccccttcctcccgccgctcccgcgcctcccccgcgcctag

SEQ ID NO: 88295 - DNA, 1386 bp, Oryza sativa
  Clone ID: PAT_MRT4530_8715C.1
atgcttaaaggattcaatgtgcctcaaggcaaatattatctcgttgatggtggatatgctaacacgccatccttccttgcaccgtaccgtggtgttcgataccatctgaaagaatttgggcgtggacagcaacgaccaagaaattgtaaggagttgttcaatcataggcatgccatattgcggaatcacatagagagagcaattggtgttcttaagaaacggttccctattttaaaagttggaacgcatcattctattgaaaaccaagtgaagattccagttgccacagtggtgttccacaatcttatacggatgcttaatggggatgagggttggttgaatcaccaaggaagcaacatatctccagaaaagtttattgatgtccctgaagcaacaatatttggaagagggtccccaaagttcaatttaatccaagctgcagctgtccaaagaaagccatctccaaagatttcaagacatcaaaagaaaaaggcatcgccaaaagctgtacttgatcgttcaagagctagttggaatgcaggacttgaaaaagctttggttgacctactacatgatcacaacaacgactgctataggagtcagaatgggtggtccacagaagcatggaaccgaatagtcaaatccttccatgagaagttcccctatgtcaattttacaaagtctcatcctaaggccaaaaaatttcggaataaatctttcccattgtttgaggctttaggagagctatatgatggacatactgccgagggaaccatgaacttcacctccattgccccttcccaagttcctatcacaaagccttttcaagttactgtcacacaaccttctcatattcctctcacacagccttctcaaacttctcaagctactgtcacacaacattttatgggagaagatgagaatttcccttttgactctcatgtacacaatgctgaaagtgatgatgacctgagaatagtggaacagccaattgcaagtgatgccactacaaggtcaagaatgggaaaaagagttgcaagtgcaacaaacaagcatgctggtacaagtgacaaaacagaaaaggcaacacaaaggcgtcgccaggatgggaaagttgttgagatgatgggaaaatttctggagtttaaagagaagcaagccgagactgaaattatgcagcaggaaagggcaagaagtaatgtgcatgaggatgagttcccgatcccagtatgcattgctgttgtggacagcatggaagatatgtcggatgatgagaaggtccttgcttatgatgtcttcaaagatccacaaaacagggccattttcatgactgcaaaagactctacacgactcaagtggttaaggaggaagattacaactgcgtaa

SEQ ID NO: 88296 - DNA, 378 bp, Oryza sativa
  Clone ID: PAT_MRT4530_87160C.1
aaaagatggaacactataactatattgtcactataatgacacagagaagtacagagtgcaaagtcaaataatctacggaaagaggggagaagggtcacacgagcaagctaatagagctagatagcacgcactacagggagaccaaatgaatgatctaacacagaccgtcacaaccctctatctagctagatacgacctcgtccgtacaatttgcaatttaatatcaacacaatcccaactcacagcatgcgtgccacgagctatacatcatgcttaggtcgaccgatcagctggtcaccctacaatttggcctgatggcgccggagatgtcgtggagcacgccgatggagacctatttgaccatggatgcgtcgaaga

SEQ ID NO: 88297 - DNA, 2574 bp, Oryza sativa
  Clone ID: PAT_MRT4530_87161C.1
atggtgaagaaaggttgcaaacttgtgaaagtcactgtcttggacttcttttcaatttcaggatggaacattagagactactgtagtctagtgtcatcattcttttgttcgttagttatatggttcactacgccagatcctcacacctctgacgggatacctgtgacgggcaaacaatcaccgtcactagtgaccattacctttgacgggttatacgggatgccgtcaccggccaagacattacaagccgtcacaggtgatgggccgccacctgtgccggctttcatttctggcccgtcacagatggatcgtagatggatgtactatgcgcatcgtttgtctaccgagtatagagagggggtcactgaatttgtcacatttgcggataatgacagaaaaagtaggatgagcatgcacatgttgtgcccatgtagggactgtaagaatgaacagatgatcgaagacaaggatgaagtgcatgctcatttgataatgaatggattcatgaagaaatatacctgctggaccaagcatggagagcaagaggcgcctgatgtcgcagctgaagaagtgttggatcaggatgtagagaacaccgccgcagctcgagaaggcatgttcgtaccttctcctttaggtggagagaccatagatttggacactcaatgtctatctacaatgttgcatgacattgaagacgcagaggacaacgacagagattttgagaagtttagaccgagacaacttggcaacgatatcgatgtgttccttgaaccgataatcgatgacttcgaaaggctatggaatgagggcacacgaacatgggacgcatatgcacaagagtatttcaacctccatgtgatgctgttttgtaccatgaacgattattcggcccttggcaacctttctggccaaactatgaaagggaaatgggcgtgttcggagtgtatggaggaaacaagaagcaaatggttgaagcattcacacaagacggtctacatgggtcataggagatttctcccaaggtatcacccatataggaatatgagaaagaatttcaatggacacagagatacagccggaccgccggcagagctaacagggacagaggtgcacaacttagtgatgggaataaccaacgagtttggaaaaaagaggaaagttggaaagcgaaaagagaagagcacatcgaaggaaaaaacagaggagcatgtggaaaaacaaaagacaaaagagaggagcatgtggaaaaagaagtcaatattttggagactaccatactggatgaatcttgaagttcgccactgcatagatttgatgcatgtcgagaagaatgtatgcgagagtttaatgggattactgcttaacccaggtactacaaaggatggtctcaacgcccgacgagatttggaagatatgggtgttcgctcggagctacatcccataaccacggaatccggcagggtttaccttcctctagcctgctacactctctcgaaagaagagaagattgatttgctaacatgtttgagtggtataaaggttccatttggttactcatcaagaatcagtaggctcgtttcactgcaagatcttaatttggtaggaatgaagtcgcatgattgccacgtttttatcacacagctgttgcccgttgcaataaggaatattttgcctcctaaggtgcgacacacgatccagcggttgtgttccttcttccatgcaatcggccagaagatcatcttgagattgcaccttgtgaggcaaacaaagtgcgctggtccagcattcatgacgcagatgtatccttgcgaaaggtacctggggatccttaagggttatgtacggaaccgttcacaccccgaggggagtatcatcgaaagttacaccaccgaagaggtcatcgatttttgtgtggactacatgtcagaaacatcttcaattggattaccacgatctcatcatgaagggaggcttgatggtgttggtactattggaagaaagactattaggttggatcggaaggtgtacgataaagctcatttcacgggtcctgaatggagtgccaccacctggcaaggatatgacataaatggatacacctttcacacggtaaagcaagacaacaaatgcacagtgcagaacagtgggttacgcatcgaggctgctagtgacggtggtcgtcgtgatcaatactacggtagagttgagcaaatattggagctagattacttgaagttcaaagtcccgttttttcgttgtcgatgggtcgatcttcgcaatgtaaaagttgacaatgaaggtttcaccactgtcaacttggctaacaacgcatacaaggatgaaccgttcgttctcgccaaacaagttgttcaagtgttctacatagttgacccgtgtaacaagaaactacatgttgttcgtgaagggaaaaggagaattgttggattggaaaatattgcagacgaggatgattacaaccagcacgtccacggcataggtcaagaaatacctctagaagaggaggaagaagaagatgaagttcaatatgcacgtgtcgaccatgaggaatga

SEQ ID NO: 88298 - DNA, 458 bp, Oryza sativa
  unsure (1)..(458): unsure at all n locations
  Clone ID: PAT_MRT4530_87162C.1
gccttttggaaaactgaaatcgcagtttcaacaccgtggcggaagatccaaattaatatgataatcatgtcactagataaacttttgaatcagcagtagctaaagtagagtgttccctgaaagattctcctgctcattcggtggacggcacaccggctatgcagatacaaactatgatattcagaaagaagatgcagtaaaccgaaacaggttggcagtttcttaccatctctcagggatatttttctccttcggaaatcatggttaacatgtttgatgtagtgttaattgcttctataatgtgtaatttaaagataagttgtgctcagcatgcttcacgaggananaaaggaaatagctgcacaaggaatcagatttgcgctttgatactgtagtagcaagaacacgcataaattactagcaagtaagtcaatngaagcaggactgagttttggcag

SEQ ID NO: 88299 - DNA, 245 bp, Oryza sativa
  Clone ID: PAT_MRT4530_87163C.1
ccgcgtgggggaggttgggaaggttaatgatgacggccaagctaagcgtcctaccgaagctttccggacgcacggaagagaagggaaggggtcacctcgtctcgtctcgagcgtggccgcttcgtggtggagggttctatactttttaccattacaccccttcgagttcatgtattttgtatttcaaaggtcttccttttcgattttgtctatttagaaaatacaatataaaaaaaaaaaaaaaa

SEQ ID NO: 88300 - DNA, 2799 bp, Oryza sativa
  Clone ID: PAT_MRT4530_87164C.1
atggcggagatcgccgtgagtttggttgggagtttgatcgccggcatctcgacgctggtggagaaggaggccaccttgctgcagagcgtgccggagaataccagaggcagacagacctcccgtcaaatgttgccattttactcctctatggcacatcctctgtctcttctctttattgtcattgagattttaaaaatcgaacataattatcgtttggattcatttttactttctagaagtcccgccaaaccgttcgtcaaggatgagcttcaaacaattggagcatttcttggtgttgttgaaaacatgaaggaggattccccgaagtatcagatggctagagtttgggcggagcaagtgaaggatttggcttatgatatggaagattgcctagaggaacaaatcactgccctcactactagaaattcaagttggtctcaatatgtaaccaattacagagctctccgtccttttgctgccaagttaagtgatctcaaatcaaggatagttgaggtgagcgagagaaatatgcgttatcatcttgtcattgctgaccaagtcatcgacaatcatatgaattttatggtggctttgaacaaagtgttgtctcgctctgtggaaggcactactgacaattggacgcaaaatgtggttacatgggctgaagctcctgaagaatctgcatcaaacgacaaaacctgtgctcccaaagtgactgcagtagttggcatgtttggctcaggctctactcgtgtttctgagatatacaagaggcataaagctgataaaaaatatgattcctatgtgtggatcgaattgtcgcaagatgtgaatgtcacaaaggtattcaaggatatgatgaagcaactctttgatgattcttcaagtcagcctgaatatactggagaagatgagctagcccatggtattcaacacgaactcaaacaaaaacggttcttggtcgtgtttgatgagttgtggacgacacatgcatggcatagcataaaaaaggcactccctcatgttagtagaagtggcagccaggtcattgtaacaacagagatcgttcatgttgcaaaaggctgcaccgaatcagatgatcatgtttattgggtccaactgttatcaaaacaagaatcatttgagcgttttaagaatttgattcttgtaacagaaaactcaaaaatgactcatgaagatagagaggacttcgaagacctggacctaaaggaactagacagactcaagatactaagaaaatgtcgtggactagaattggctataggaactgtagccaataaccacccaatgctcaaagatatatggaaagtaatgattcagaggtacaaagatctaccgccttatctcaagccatgcttcttatacctgagcattttcccagagaactctgacatcaatgtggagactataatagaccgatggttagctgaagggcttgtgagggatagaactggaatgagccctaggactgttgcaaaatggtatttgttgtggctcattgatcgaagcatgattatggtatccaacctgagaaagaacagatcatttaagacatgctggatccatcccatgatgcgagatatcctggtcatgatttcacaagaggagaaattttcaatcactgttggtccaagaaagagttcaagtttgttagtaaagcgtttgccccatgtaacacttgatggtgggagtggcaggaagttagctagatatgtggatctttctggcatcaggtcactaacagtgttcaacgaaccatcagaatccattgctgcacttatttgctcctctaaacttagagcagtacgcattttagatttgtcaaatgccaatgagtttaaaatcactagaagagatatagagcgcgtaggagaactgtgtcacttgaggtacctaaatctttacaaaacaaatatttgtgagcttccttcgtcaataggcatgctcccgttcctgcaactgctaaacgtgagaaagacaaggatcacaaaacttcctaatgaggtcactcaactcggcaagctacaactccttcgtgctagcagaagaacagaagattcctgtcacaatagaaggaaccgatgctgcattgattcagctctaacagtgcctaaagggatagagaacctgcaggacatagaaaggctggatatcatggatatcaaggacaacagtggctcagaaattgaagctttggggaaacttgctaggttggagcaccttggattggcaggcattacaattggcaacagcaaacaagtctccaaaaccctaaaaaggatttcttcttcgctgacctatttgtacctcggagcatgccaaagtgatggaacacttgcttgcctgcccatctctgaaaagaaaaggaagaagccactggagtttccacgcctccaaaccataaagcttgacggtcatattggaaaaatgccatactggatttctaactcatggacacttgcggttattaaactttacaggactaatctccaacagaatcatataatgtcccttgagaaactaccctgcttggtcacacttgctctcctagacaattcatatattagcgagacattggttttctatgataaggccttcagagagctcaagaccctggagattattaggctaaccaagttgaaaacagttatatttacagaagaagcagtgccccagcttcgaagtttagccatcagatgttgcgaattgagattaaaaggaaaaaacaaccttaaactccggaaggttgatcttgatgatggtgtcgaagaggtataa

SEQ ID NO: 88301 - DNA, 271 bp, Oryza sativa
  Clone ID: PAT_MRT4530_87165C.1
gcgttccttggctggctccaaatagattcaatacgagactggacagtggcggcagctgtgagagtacggatactgcggcaatctgacctggtctaaggatttactgcgtctgccgagaacaggtcataggacagagtatgcgaatgaaagtgcacacatggttgcagtgatagcaggaggaatcaaaaaagatccaactggaaacgtgtgtattgcaagggctctgatatcaactacgtttggatgatcggttactgatgggcaggatacg

SEQ ID NO: 88302 - DNA, 318 bp, Oryza sativa
  Clone ID: PAT_MRT4530_87166C.1
atggaggcaccgaggtacgactgtagtttgacagaagatggtgccagagatgaggacatgccaagtctcatcttccggacagccacgatagtctcaaaaataggacagggagaacaaggtggagctcttatgttcctctgcaacggcatttgcacatggcgcttaccaacctcgataatggagatgtggtcgcagcgatgtcttggcaacgagacgcacggagaagatggcacatcagttagaactcccggcgacagtggcggcactgcaaatgggacgttaggatggcgacgagtcgcgcaaccactcgatgtttga

SEQ ID NO: 88303 - DNA, 378 bp, Oryza sativa
  Clone ID: PAT_MRT4530_87167C.1
ccacaacgctcccaagtcacatcgcttcttcttctcctccttcccacagccagttgttgctcttgattcttgggcacaaccacctgaccgatcaaagcttgggccatgtcgaacggcaccgagaagcagcaagcacagtctgcggcgggggaacagaggcccccggcggtgtcggcggagatgcagaaggtgttctcccgcttcgacgcggacggcgacgggcggatctcgccgtccgagctggccgcggtctcgcgcgccatctccccgccgccgagctcctcgcacgggggccgggaggtggcggccatgatggacgagctcgacacggaccgcgacggctacgtggacctcggcgagttcgcggcgttccacgcg

SEQ ID NO: 88304 - DNA, 354 bp, Oryza sativa
  Clone ID: PAT_MRT4530_87168C.1
atggtggtcccctacattcgcctgtctggcaaacccgatgtgacgtctcgtccttcatggttcgacaacatcgactcttcggcgtcatcttccttaacaactgcagcatcacgtcatcgtcatcgtcttcaacacgtcctcgctcacgaccactctacggtgccccatgcacaccctgcggctcggctatctcgacatcattggctccccgatttcgactacatcgaccacaactactttacacatggcttcatcgatcatgggtccctcatgtccttcgctttggttatgtcgagtatggcacaaagggttatcatccgtattgagcactctcgtctttcttctctagtctaa

SEQ ID NO: 88305 - DNA, 421 bp, Oryza sativa
  Clone ID: PAT_MRT4530_87169C.1
tctatttcatccaggtcggttcacgaggtcatgcccaggctgtgatcctggcggctgggacatgcctgctttggcaggtgtatgagctggcataagatggcgtggacacgggctgtaatgtcgagcagcagcagaatacgtattacgtagtggcaattggacgaccaaccaatggaagctgattggttgctatgggcaaaggaactccatacacacatcattcatacaaagtacgtgaatcctttgcttacaagtggattaacaaaaagctgaaagaaggtttgcatgttacatgtatggctactgctggaaaccattggggagttctaatgtcaagaaatgcacgctattcccatcaagtagctgagatggactatctatatccacatgtagggatccatcgtcgatgagagacaggtta

SEQ ID NO: 88306 - DNA, 584 bp, Oryza sativa
  Clone ID: PAT_MRT4530_8716C.1
gcacgagggctgatcaaggttaaaagtcctctcctccttcatctcatctcattttctttgccgagcttctttcatccacttgttttgctgctaggaccttcaagatccggaaagtacagccatcctgctagggtttgacgatctgcaagagaaatattggagactagcaacaatgtttggaagagggtccccaaagttcaatttaatccagggctgcagctgtccaaagaaagccatctccaaagatttcaagacatcaaaagaaaaagacatcgccaaaagtacttgattgttcaagagctagttggaatgcatgacttgaaaaagctttggttgacctactacatgatcacaacaacgactgctataggagtcagaatgggtggtccacagaagcatggaactgaatagtcaaatccttccatgagaagttcccctatgtcaattttacaaaggttcaaattcaagacaaagagagagagagagttgaagagggaatatagagttctaaaagaagcgagaaaacaaagtggtgtgtcctgagatgataagctgtgcatgattgaaggagatgaagctgtttg

SEQ ID NO: 88307 - DNA, 1320 bp, Oryza sativa
  Clone ID: PAT_MRT4530_87170C.1
atggccgatcggcgccgcagcgacggcggcggcggcatgcagcagcagccgttcacgtcgccggggcaggagagggtgttcgacggcggcggtgttcctgggcaggtggcggcgccgtatgggagtgattttgatcagagctcttacatggcgcttctcgccgccggcgccgtcggcgtcggcgtcggggtccagccgacggcggcgccgtgggctgtcgaagaggacgtcgccgcggcgcctcctgggattagcttggcacctcagttctccatggcgaactatgcgccgccgccgtcgtaccaacaccctgcaaccctcgtctccccgccgctcgccgccggcctccacccctacccgccgtatctccacggagtcgacgcgccaccgccgcaatggcctccacgaccggcgccgccgcccagcttcagcgtcctcgacctcgccgccgcggctgctccgcacgagcagcgccacagcatgcaacagctgctcctccgcgccgcggcgttcggcggcggcatgcacgcggcggcggcgccggcgccggcggccgccgccgccatcgagcagccggcgaaggacgggtacaattggcgcaagtacgggcagaagcagctcaaggacgccgagtcgccgcggagctactacaagtgcacccgcgacggctgccccgtgaagaagatcgtcgagcgctcgtccgacggctgcatcaaggagatcacctacaagggccggcacagccacccccgtcccgtcgagccccgccgcggcggcgccgccagcagcagcagctccgccatggccgccggtactgatcacaatgccggcgccgccgcggacgacgccgccgccgccgacgaggacgaccccagcgatgacgacgacacgttgttgcacgaggacgacgacgacggcgaggaagggcatgacaggggtgtagatggcgaggtggggcaaagggtggtgaggaagcccaagatcatattgcagactcgcagcgaggttgatctgctcgacgacggctaccggtggcgcaagtacggccagaaagttgtcaagggcaacccacgaccaaggagctactacaagtgcacggcggacggctgcaacgtgcggaagcagatcgagagggcgtcggccgatcccaagtgcgtcctgacgacgtacaccggccgccacaaccacgacccgccggggaggccgcccgccgccgctaaccttcagatgcctggcccggcggccatgaggttggccggcggtggcacggctcatcagcaaccgagcggcggcgctcaccagatgaaagaggagacatag

SEQ ID NO: 88308 - DNA, 459 bp, Oryza sativa
  Clone ID: PAT_MRT4530_87171C.1
atggagaacgtcgtcaccgacaactttgccgctccaccgccgcggcggctcaagaacggccgctcaacctcgccttggatttctgtgttcttgatttttcttgttctgccattgttgccgaggccccgccacaagcccgcagtccgttgttgtcgccgaggcctcggtgctcccaaggccgaccccgccgtcatggagccacataatcgttgccccgtccccgctacgccatatcaagctcctccaccaccggccctcccaaccccttcgccgccagcgttggatccggccatcgagggctggatacgcccaccgcagggctacagacgctacctcaagaccgtgctgctcctccagtgtcgtcgtggcctctcccatcgctgccccttcagtgtcgttgtggttgcttccaccgccatcgtcatggccgctttcgtcgctcctggcgacaatcagtag

SEQ ID NO: 88309 - DNA, 612 bp, Oryza sativa
  Clone ID: PAT_MRT4530_87172C.1
atggaattacgagagattttccagcgcccatggaagattttactccgtctccaaagctccaaaagcagcatggtctctactctacagggagatgagaatgagatgacgacgtggaggccttcgtgtccagctgattgtctcgtgaaactggtgcaacttggtgttctcgtgatggcgtggcgcatgcagttgtgccttcgcttgtatgaggggccggggacctcgagccaccggagcgacgaaagcggccatgacgatggcggtggaagcaaccacaacgacactgaaggggcagcgatgggagaggccacgacgacactggaggagcagcacggtcttgaggtagcgtctgtagccctgcggtgggcgtatccagccctcgatggccggatccaacgctggcggcgaaggggttgggagggccggtggtggaggagcttgatatggcgtagcggggacggggcaacgattatgtggctccatgacggcggggtcggccttgggagcaccgaggcctcggcgacaacaacggactgcgggcttgtggcggggcctcggcaacaatggcagactgcagtgacaatgatgatggctaggacggatgggagctag

SEQ ID NO: 88310 - DNA, 239 bp, Oryza sativa
  unsure (1)..(239): unsure at all n locations
  Clone ID: PAT_MRT4530_87173C.1
aggcacctgtatgtggtgnatgtgcccanaccccatgtgtgccccatgcgtgtgccgatgctggtgggctgtggtgatgccatgccaatggtggtgatggaaagtgaaagtntgactggaaagaaatgggatggtgtggctgtgccctggtgtggtgaaagtgtggtgcccacnctntgcgccagaaagngcctgccccaaggccccatgtggtgtagtgtgggaactgttgccatgtg

SEQ ID NO: 88311 - DNA, 220 bp, Oryza sativa
  Clone ID: PAT_MRT4530_87174C.1
ctacgggaggatggcgagcccaacaacaatggtgggagtggcaacctcggcgcatctccacaccaccaccaccggccgcctcaggtgcacgtatgcactaccgacgaggggaacaaggctgctgctgctcgcggtggcggtgctggtgcggatgcggttgcggtcgtcggcttcagtggcgatggctacggagaagctcggcgtctgtgtggtgcgcatc

SEQ ID NO: 88312 - DNA, 104 bp, Oryza sativa
  Clone ID: PAT_MRT4530_87175C.1
cccgaatccgattagaactcgcggggtttggtggtcgctcaccatacctggaaaggagttccatccaaccaaacaccactgttttcacacattccgtcataccg

SEQ ID NO: 88313 - DNA, 652 bp, Oryza sativa
  Clone ID: PAT_MRT4530_87176C.1
cgggctgcaggaattcggcacgagggagagagagagagagaactagtctcgagttttttttttttttttttttttttttttgttttttttttttttgcacaaaacgaatatgtacataaatcatagcaagtttatagttccatggcacgctggcaaggttaccaaggcagctctaagcctctaatgcattactgacaatattgacatgtaccacaagccatagcaggggtagctttgtatccactcgaagactcagacacattgattaaatggacagcaaaggatctctgaacatcacatggttcattcatcgatccattcgtgttaagacgaaggggcttcaacttcggtactccattgaactgaacagcttgaatagttagcatattctggtgccactatggcagatttccacaaaatagacaataatattttgagcagatcataacctcccaatatcaggcactattatactgcctgaacaaaagatcgttgttctgtatccattttgctgattgaagaaccactggactatccttatcataccattaaccaccacctatgctgttcctggagtactggaagaaaaaccagtgacagtttgatcccaagttcccaactaaccactaagcttaaactagtaactatttca

SEQ ID NO: 88314 - DNA, 453 bp, Oryza sativa
  Clone ID: PAT_MRT4530_87177C.1
atgagcatgatagttaccaagtttggtccatggggaggaccaggcggagattatagagacgttcaggtggctccttatcggctcgttcgcctaacaatccgcagcggagacaccgtcgacgggatctccttcacctacatcggcaacgatggtctcgtgtaccacatgggtcattggggttccgatggtggtgttccgcatgagattcatctcggccttatggactttgtgatggaaatctctggcacaacgggcatgtgggtcagtggaatgagtaacgtcctacgatcactcaagatcaccaccttgaaaaggacttatgggccatacggcaaccctaaagctgggatcccttttagcttctcagttgatggcagtgatcggatcactggctttttcgtacgcgctggctttataaccgatgcaattggagtctatgttcgtcactgctag

SEQ ID NO: 88315 - DNA, 393 bp, Oryza sativa
  Clone ID: PAT_MRT4530_87178C.1
atgtgggcccacgctgtcagtggctcagggtgccctcgagggatctcgcggattcatctgggccgtaggcgcctgatcggacggtggacgacgtgccacgtcgtctccgccgtagacggcgccgccgccgccggagaagggcggccgccgctcagctgcggcgaggtggcctgccgttctctgcggcgcctccgctatgtgcttcgtatcgatcccaactccggcgtttcggaggtgcagggagaggcaaagccgccgccgctcccgctggtggcgatcagccggcggcggcggcggcggcagctccggtccggccggaggagcagacaaggaggatgtgaaggtgatgaatatgattctcttccaggtttgcatactggagtggagtactag

SEQ ID NO: 88316 - DNA, 452 bp, Oryza sativa
  Clone ID: PAT_MRT4530_87179C.1
gttctggtgtaatgttgtccatgcccacgcgtacatcaacgcgtccgattatgtgtgaatcatacatattgtaacagctgcagtagtttaaaactgggtttttgtaggtcacaacaatcccaaacccaaaaaaggatatatctgatatctgtcagaactttactagaccaaaataaccatattttcatttcatggcataatttactcataccttagttttctttcaatatggtgtttcaataacacattacatccagtgctcagtccagaggttctttccatggtgtttcaataagttattacatcaagtggtcaccccaaaggatcaatgcttgcatttcccataggtacttttatgctagaaaagtatcaaccttagttgatttgtattaatgaccatgatttattgaatttcttatcagtgttcacatcaagagtatatgttatacctc

SEQ ID NO: 88317 - DNA, 666 bp, Oryza sativa
  Clone ID: PAT_MRT4530_8717C.1
atggaggcccagccgatccgacggcccagaccgaccgtggctaggatcaaggggaggcggccagccggcggtggcgcggcacggcgcgtggcggcggcgacccagccggacggccaccggtggcggcagcgcaacgcggcggccggcgaaggagggaaaaagagaggggagggaggcagttctcaccgttgggcacggcgacggagggaggcggccggcggagcgcgggatggatgggaggcggcggcgttcctcggggaggcgacgcggacggcgctccggcgacgaccagcgaaggcggagaagcggccgaggcagtcctcccgcgaggccgaaggaggcgacagagcgacaccaggtggagtttcggtgaggggttggggaaatggagccgcggttgggcttgccctcacggtggtggagctaacagctgcggcggtgtggtgtgaggtggccgggaacggcggcaatggtggtggtggctcgggtgcacggtggggtggcggttctagcggcgaaatggaggagcggaggggatgccgggccttggaatggcgggatcgagcccgggagaggcggaatcggccggtgtcgtgggacgccgacgtgggctcgtggcggcggttcggcaccgatcttcgaggggcgagtgggggtttcggttga

SEQ ID NO: 88318 - DNA, 392 bp, Oryza sativa
  Clone ID: PAT_MRT4530_87180C.1
gttcttgctactttgctctctctctgatctgcttgtgaaacaatgatatgatcacaattattggtggcatattagcacgtagtaactagtaacaacaatacaaatggcacatgagagaattccaacatgttaagaaaaagaaagaaattatttctttggttcatatttacagctgatttactactagtcgtctcaaatatggttcgattcaactgttgtttcttttcaccgaccatgtttttcttatggtgagattttgtccatggtgtcatgattcattgtcctcatctatgtgctctaaaaaaaaaatcttctttttctttttctcaaaaaataaaaaaaaagcggagaatactactgtggtaggactagctcttctcatttctgaccac

SEQ ID NO: 88319 - DNA, 1748 bp, Oryza sativa
  Clone ID: PAT_MRT4530_87181C.1
tcacacttccactctccacatgatcttgtcgccgcggcggccgacgttggcgccgccggcattgtggtggggaggcgcgcggtccacggcggcgacgcgcgccgggtgcctggcgcgctcgccgtgcggcgccgcggccggcggcggcagctcgcaggactcgccgacggggccggagcggatgtcggcgggcgggatgaagcagtcgacggacaggccggggacgttgaacgccacctcctcgatgctccaggcctcctccatccgcgtcttggtgtggctcatggcggcctcgccgaagcggaacagcgtgacggcggagcgccccgcgtgcgcgatcatgatgccctcgacggggcggtagtcctccagcgcggagctgatggtggtctcccagtagacggcgtcgccgccggagtgcggctggatgcgggtgaggtgggagtcctcgatgtgcacgatcaggccggtgcgctggctgaagtagccgaacaggacgtgccggatgatctccgccggcccctcgctccgctgcttcagcgtctgcgggtcggccgacagcttgaggatgaagcagtcctcgccgttcaccttcttctcgccgacgcaccgcgcctccgcgaacagccccgccgtcgtcagcggatcgagcccctggaggacgcggcggagcgggcgcacggggcccttggcggcgtgggcgccgagccacggcgtgtggcgccagacgaggcggccgttggatcccgcgtgcaccttgctgccgccgacggcgagctcgacgtaccacatgtcgggcgccatctgccagaggacgaagcccccctgctcgacggaggcggcgccgcggccgctgggcccgcggttcttgacgacgcgcgtcgcggtctcgaactcggacgccaccatccgcaccttgcccatggcgtacgcgttccgcaccgactgcagcagccggtagccgcccgacgccgccatgtactgctgcaggatgtactgcgccgacgacgactcaatgggggtccccttgatggagaggagaggcaggggatctgctagcttcgaagggatgggggccagcggcgcgcccatgacgccgaggaggaggcggaggtcggagcggcggaacgagtcgcccgaacccccgggactggcggcggcggcggcggcggcggacgacgccacggacggcgtgcgcgccagctggccgcggacccatcggccgaacccctcccgccgcgccgactcctccccgccggcgaagtcccccccggcggcgaggcgctccgggtcgggcccctcaatgaggggcgcgagggcctcccctccgggccgcaggctccccgaccgcgagatgagcggctccgcgaagtactgctgcagcagcttctccggcggcggctgctgctgcttctccttgcggcggcgcgggatcagcatcctccccggcgacgcgctcctcgccggcgacttcccccgcgacctcgccggcgacagcccgcgcaccacctcctccttcagcgccgcgaagaacccctgcttcctctccttctccatcgcccaagaatcacaaacaatgcagccgcctcaaagaaaaacccaagaaagcttccgcctccccggacaaagactgccactgccgaccttgcttcaagacgagggcatggagagtacggcgcgaggagtggagtagaaggtgagctcgctcgctcgctcgctggctagctggagtggaagcaagcgagctt

SEQ ID NO: 88320 - DNA, 289 bp, Oryza sativa
  Clone ID: PAT_MRT4530_87182C.1
gtaaaacatattatcaggaaccggttacacattcatttcctaccaaatcacaacttatactcctagtttttaatataaaccttatcaaaagtcacgatttacacacatcaactaaccatagtcatcctaacgattctccgtatgacaaatatgtactctttcatttagcaaaatactctttgctacacatcactttttctttacacccatcacccaaataaatactttcaccaatgctaattctcctacaagcacttcaatcataaacccgagcatagtcctaatgtat

SEQ ID NO: 88321 - DNA, 605 bp, Oryza sativa
  Clone ID: PAT_MRT4530_87183C.1
ataaggtttagtaggttggtactcctagagatggaatgggctgggcggcccagctgcaacagcaatggtacaaatagccaagcccacctctctctctctctctctctctctgtctcgttgttaagttaatggtgcccttttgagtcaaagaagcagcactcttgcctgccctgctgctggtggttacaactaataattgtggtgtggtttttgtgcgccgccagcgcgagcgcatctatctaatcggaatcggcccttcgttttagtatcttgctaaatttgattttatggatactaatctgctagtgcgactagggtaattctaacatcgtttggctgcgtaatcctatttttgcctatgtcatctcatctcaaaagtggggaaagaaaagaaagcaggtcagaagagtactctaaaggagtcatgtgaatattcaggattctcaccagtcaccacctaggagtatttgcagagtagtaggagtaggaccgtatcgtatagcgatgaggacccttcttcaagtgctgtttagttcctcaaggactttttccaaaaacattctatccaatcattggacatatatacgaagtattaaatataagat

SEQ ID NO: 88322 - DNA, 525 bp, Oryza sativa
  Clone ID: PAT_MRT4530_87184C.1
atgacgcgacgacgacgggaagccggcttcgaggtggtcagcatcctcctctgtgtccccgcctacgacgccgtgctgatgccgctcgcccgccgcgtcaccggagtccgccgctcgcccgccgtgctgatgccgcctcgcagctgcagtggctcggcgtcggcggagccgccggcgcccacagaggagccgcgcaggcgcagcaccagccaccgccgccaggagaaggagcgggtgggccgggccagcggcggtggcgcggaggagttcagattgtttctcggagaaggagaaatttctcgtcttgttgtggccaatgacgacgacgacgccgtcggcagcagcaagaacgtcggcgcagactggatttttggagggcgaatttgggatttctccgagcggctgcggcgcaaggacacgctgcgtcaaagaacggacgcgcgtggactcgtcaaagcgtggtaccgtgtcgctatgtttggggacgaggggccaagcttagtcgcgattcctagctccacctaa

SEQ ID NO: 88323 - DNA, 729 bp, Oryza sativa
  Clone ID: PAT_MRT4530_87185C.1
atgccacagatcgaggtcacatttgacatcgatgccaatggaattgtgacggtctctgcaaaagacaagtctaccgggaaggagcagcaaatcaccatccgatcctccggtggcctctcagaagctgagattcagaagatggtccaggaggctgagcttcactctcagaaggatcaggagcggaaagccctcattgacatcagaaacaacgctgacactaccatttacagcgttgagaaaagtctgggagagtacagggacaagattcctgcagagatgacatcgagaagatcaaggccaatatcgaagcggccaacaagggctgtttcaaagattgggcagcatatgtctggtggtggtggtggcgcaggcggttcagagacaggaggatctcagggcggaggcgagcaggctccagaggctgagtacgaggagcggttgatgtttgtttcaaaatattctgggtgggatcttccgcggcgaaaattaggtacagtgacagggtcaaacacaagtgctactacgtgttcatcttatctacgtgttccaggatgtagctgcaactgcaagcgcggaaaaagggtcaggcgcggaaaccgtaggttaggagagaaaggtatcgaggctgggaaggagagtgtcaatggagatgatggcaagaagcgcactcaaacccttgcagaaaagaggagggaagatagtggaacgagagaatgcaaccgggaatag

SEQ ID NO: 88324 - DNA, 533 bp, Oryza sativa
  Clone ID: PAT_MRT4530_87186C.1
ctgaattagcaccaaccacgaatcttgctaagatcagtcatgggctagaaccccgtagaggctctactcctcctcccacggcggctagccagtgctgcgctcgagggcgccatgcgcatactacttcagcaggcagcgaccaacacccgacgaggttcgccataatccgacccccaacatcattgaacattggagcgccatgtttcctccaagacgatacgacatccaaggctgtgccattcatactggttgcataaccataactgtttataatcgtctgctggggaagaaaggtacgccagtgagtacataatccaatgtgtgcattcgatcactcgccttggtttcgagtgcatagggtaccgctaccaagtgactgcacccgaccgtccgtgagacgatgtgctaaggtacatacgttctacccagttgcactacgacaggctgcccgccaccgcctttcgtcagtcgtgtaacgactcccatgtaagccccagggcaccgggcgacgaacgtccgtcaaggtcccccgt

SEQ ID NO: 88325 - DNA, 261 bp, Oryza sativa
  Clone ID: PAT_MRT4530_87188C.1
atggacagaggccatgacgaggaggcggcggcaacgcgggatggacggacgaaggcggggacggcgggggacgaggaggccgtggcggcgcgggacggacggacggaggcggggatgcaaggcatcttgaggcaactggaggtggaaatgggcacacatgggggcgttggcggcaggggtagggcggcgatgtcgtgtaccacggcgaccacacctgcgcgcacggagcaacatcagcagccgacgctgccacagaagtag

SEQ ID NO: 88326 - DNA, 759 bp, Oryza sativa
  Clone ID: PAT_MRT4530_87189C.1
ccggccgggaaaaagggcgggttcgatccccaatcgcgatgtgctagggtttggaggcccgtgctcagtcctcgccgccgccgggcgccatcctccccccctgcacctgctaagcccctttttttttcttataagcagcaagcgctcgccggaaattccaagcagagagacgcacggatcagatcgccgacatgtctaggcgtttcttgtttcagaaattttcagtgctgtccggatcgatgcctaatcgtcctacctccgctcaaggaggagacgtttctgctatccacgatgctctccgtcgttttagcacggtgcttcccaattaccatggccttcctgtctctcaagcaaagtgcctgaattctattcaaagccctcacgcagccaccaaattaaaccacccaacaattggtgtggttccttttgccagccggactttcttctcttatacaaaaccctaccacctgccttctctgggtgaaaccaattaccctgattatgtagcagcagacattaaagcgtttgccttgctaagcaaagcctaaaactctaccaatgttaagtgaagggaaggagctaaatatgaaggtaaacaataaggaagtagcattatttactgggacacagtatagtttacagatgattcttctttttgtctgtaatacatccattatggtcatcctaccatgaaaaccaaagtgataggacacgcaaaatagaagtaactattgacgagctataggaaaagagaactgg

SEQ ID NO: 88327 - DNA, 1752 bp, Oryza sativa
  Clone ID: PAT_MRT4530_8718C.1
gaccttcaagatccggaaagtacagccatcctgctagggtttgacgatctgcaagagaaatattggagacgagtattccttctagttagaagtaatggagggatagagaaaagagtaaggcatacttcaagtcagtacggtgaagaacaactcagaaatattttagagggacatgaaaagaattgccttgttgcattccgcatggagcctaacatatttagagcaatagcgacatatcttcgaacagaacatctcctacgtgacacagagggatctacaactgatgctagggttcttaggtcagccatgcttaaaggattcaatgtgcctcaaggcaaatattatctcgttgatggtggatatgctaacacgccatccttccttgcaccgtaccgtggtgttcgataccatctgaaggaatttgggcgtggacagcaacgaccaagaaagtatacggagttgttcaatcataggcatgccatattgcggaatcacatagagagagcaattagtgttcttaagaaacggttccctattttaaaagttggaacgcatcattctattgaaaaccaagtgaagattccagttgccatagtggtgttccacaatcttatacggatgcttaatggggatgagggttggttgaatcaccaaggaagcaacatatctccagaacagtttattgatgtccctgaagcaacaatgtttggaagagggtccccaaagttcaatttaatccaagctacagctgtccaaagaaagccatctccaaagatttcaagacatcaaaagaaaaaggcatcgccaaaagctgtacttgatcgttcaagagctagttggaatgcaggacttgaaaaagctttggttgacctactacatgatcacaacaacgactgctataggagtcagaatgggtggtccacagaagcatggaaccgaatagtcaaatccttccatgagaagttcccctatgtcaattttacaaagtctcatcctaaggccaaaaaattccggaataaatctttctcattgtttgaggctttaggagagctatatgatgccaagcatgttctattcagttctcctaaacattacttgacttcactttctgttgtgggacatactgccgagggaaccatgaacttcacctccattgccccttcccaagttcctatcacacagccttttcaagttcctgtcacacaaccttctcatattcctctcacacagccttctcaaacttctcaagctactgtcacacaacattatatgggagaagatgagaatttcccttttgactctcatatacacaatgctgaaagtgatgatgacgacctgagaatagtggaacagccaattgcaagtgatgcctctacaaggtcaagaatgggaaaaagagttgcaagtgcaacaaacaagcatgctggtacaagtgacaaaacagaaaaggcaacacaaaggcgtcgccaggatgggaaagttgttgagatgatgggaaaatttctggaatttaaagagaagcaagctgagactgaaattacgcagcaggaaagggcaagaagtaatgtgcatgaggatgagttcccgatcccagtatgcattgctgttgtggacagcatggaagatatgtcggatgatgagaaggtcctggcttatgatgtcttcaaagatccacaaaacagggccattttcatgactgcaaaagactctacacgactgaagtggttaaggaggaagattacaactgcgtaa

SEQ ID NO: 88328 - DNA, 726 bp, Oryza sativa
  Clone ID: PAT_MRT4530_87190C.1
atggaggtgaatgcgaccgacggcgttctacttctgtggcagcgtcggctgctgatgttgctccgtgcgcgcaggtgtggtcgccgtggtacacgacatcgccgccctacccctgccgccaacgcccccatgtgtgcccatttccacctccagttgcctcaagatgccttgcatctgcaccagctccgccaccagcacgcatctctcggcaccgtccacacccgcccacaacctacccccgcctccgtccgtccgtcccgcgccgccacggcctcctcgtcccccgccgtccccgccttcgtccgtccatcccgcgttgccgccgcctcctcgtcatggcctctgtccatccgtcccgtgccactgcggcctcctcgtcccccgtcggcgccgccgccacctcctcctcgtcccccgccgccgccgacccatgaccgtgagagagagagagagagagagaggaagagtgagacagagagcgagagagagaagagagagagaggaagaatgagagagtatgacatgtgggtcccacatttttttataaatataatgctgactgggctgccacgcgtatgccacgtagaccaaaaccaccgcaaattgggtcgaggggggtaattcgtccggtttgcatagttggggggtgaagaatgtccggttttgtggttcagggaggtaagtcggtcgaccgcgatagttcgggggagtaattcgtactttttc

SEQ ID NO: 88329 - DNA, 887 bp, Oryza sativa
  Clone ID: PAT_MRT4530_87191C.1
aggaggaggaggaggaggcggcggccggcgatgttcgcgccggcggccgcggcgaggccgcacaagcaggcgccgctggcgcgggtgcccacgcggctggtggccgcgctctgcaccgcctgcttcttcctcggcgtctgcgtcgtcaatagatattgggcggttcctgagcttcccgattgccgaaccaaggtgaattcggataatccgggggctgtaatgaaccaagtgtcacaaactcgggaagtcatcatagctttggatagaacaatatctgaaatcgagatgcgcctggctgctgctagaaccatgcaagctaggagccagggcttatctccgagtgattcgggtagtgaccagggaagcaccagggctagattgttttttgtcatgggcattgtgaccacgtttgctaatcgcaagcggagagactccatccggcagacatggctgccacaaggcgagcatttgcaaaggctggagaaggagaagggcgttgttatccgttttgttatcgggcgcagtgcaaatccaagtcctgacagtgaagtggagcgtgccattgctgcagaagataaagaatacaatgatattttgagacttgatcatgttgaacgaaatggcagtcttcctttgaagattcggatgtttctgtcaaccgctctttccatttgggatgctgatttctatgtgaaagttgatgacgatgttcatgtcaacataggtattaccaggtcgattttggcacggcacagatcaaaacctcgggtgtacattggctgcatgaaatctggacctgttgttgataaaaatgaatctaagtattatgaaccagatcattggaaatttgggactgagggtaacaactactttaggcatgcaacacg

SEQ ID NO: 88330 - DNA, 461 bp, Oryza sativa
  Clone ID: PAT_MRT4530_87192C.1
ctacagcctggtcctgtccttgcattccgcgaaccgcaggagcggccggggggtcggggcctcggggtgccacgtcatgcccctcgggcccttgcactgcttcgccctgaggccctcgcccagccgccatttggcggggggagcaagcgaggagggggcccaggctgaacttcctttaatgcgcgcagcgccccaactgccccctgtcgcatttaatgcagtggggcagatgtgcggcgtgctaaactgacgcgcgatggtcaagaatgaccggtctgtgaccggcctgacgccggtcacgtctgactggacggacaaccgtgctcccacgtcgcatctgcttccggcggagtggagggctgtcccccgtgtcaggcgagggacggcgctgggccccgctcaaggacaagctgtggtttagcttccaggcgaaggcacggatcgagttccggtcaagatag

SEQ ID NO: 88331 - DNA, 267 bp, Oryza sativa
  Clone ID: PAT_MRT4530_87193C.1
atgccaccgacccgaagccagaagccgccgcccaccgtcagccgccacccgagcgtcgaacagccggccaccacgaacctcaatgaccacaccaccacgcgccgcagcagccaccgccggacgcgccgcctccacatcgcgcctgccgtcgccatcgctggagaagatccggtggcagtggggctggatctgccgccgcctagcctggaggcctcgccgccgccggcgaacgtgtgtaatattttgcctgtgagcatacctgcctga

SEQ ID NO: 88332 - DNA, 433 bp, Oryza sativa
  Clone ID: PAT_MRT4530_87194C.1
aaaggaatatatcaggatcccccatatttatgacaggccaggttcttttttacattacaggacacgttctttctttttgacccccaagggggggggggatgactcacatgatagcaaggcacatgggacacatccccaacaaaaaaaattttttagcaggcatgcatgcatatgcatatttttgcccccatgggcccataacggatgacacactggattggggggccaggttgcaaaagaaaattttgttcatcacttgcccaaattgcacccgggccaagaacacccgggggggcacttgcacttgccggggttttcctggtagccgacctcctcaaccattttgaaagggtttttttgggggtcaactatgacgaccccataggtggttccttttttaacccactggcttttgtgaacgcaatcccaattg

SEQ ID NO: 88333 - DNA, 121 bp, Oryza sativa
  unsure (1)..(121): unsure at all n locations
  Clone ID: PAT_MRT4530_87195C.1
tcgcccacgctccggcaatggctaccccatgctggactgcacacctaacattgctagttgctggctgggaccanacacgacgatccgcggactggaagacccagttctaacggagctgatg

SEQ ID NO: 88334 - DNA, 368 bp, Oryza sativa
  unsure (1)..(368): unsure at all n locations
  Clone ID: PAT_MRT4530_87196C.1
agttaaaaaaacccccccccttttttttaatattttttaagcttccatgtagataggagattgtaagcaggaccagaaaatgcgactagagggagaaaantgaaggaaaaannaaagaaagtgatattgattactgaaaaagcagcaatcgttgatttattacgcgcaacccgaccagctgtagtgatgaacggggtgacaactattccgggaggaggagatcagctcgacccggattacggaggcatcggtaggtcttacaccttgaacctaaagttgaggaggaacttgtttaggccgtccttacagccgtcgacggaccgttgattgcaggcattgcaggtcgcgacattcggcagctcaggccg

SEQ ID NO: 88335 - DNA, 411 bp, Oryza sativa
  Clone ID: PAT_MRT4530_87197C.1
atggtgccggaggtgggggaggccgctcgccgtagtcgccatcatgggccgcgccgcgcgccatcaccacccccgcaacgcccaccgccggcctggcgccttgccgcagttgccgccgctcgccatagtcgccgcaactggacagacgacggcggcgccaccctgcttagctcgcgggatggaggatcggcgcagcctgctcaggccgccgccggcctcggcctccgcgcccgctcgccttcggcctccgcccctgcaacgcctaccatccgcagccatccccgccgccggctgcccatcggcgtccgctcctcgcccgccgccgcctccgcgcctgcccgccggccgcccgtcggcgtcggctcctcggtcctcgcccgcccgccgcccgccagccgcagcatgtgttga

SEQ ID NO: 88336 - DNA, 666 bp, Oryza sativa
  Clone ID: PAT_MRT4530_87198C.1
caggaattcggcacgaggagaatctcctgctacaaatatttttgaaagtctcgcagatttcagggttcaagaagattgaaacatgctaattttgaacaactaaacgaaatgctattacccttgtttacttagagcaatgttccacctgcaaccagagaaaaagaaagttagtccatgagtatcccagaacatgagaagtcaaagcatagatgtcatctaaggaaaagaaaataactcactccaagaaagttagtcataaggatcccagaatatgggaagtcaaagcacgatagatgacacctaagtatagaataactcagtccctggatattctgcaacttatatgaggtatgacctttgagtaatgcttgagacacgaaagaatacagttcatgtatttgctggagattaagcacaatagagcgtgaaaacacatcaataataatattagcatgtcagagcaaacaattgcttttcagttttgttcataacttcatatgaggaactaaagttgctccaatctcttgtatttctcttctattatatcatgaaggtgcatagttaggattaaccattcctttcagggtgaaacacacttatcaaaggttgtttctaagatcatttagcgactctttttgcacccttgtatcaagtgccatcagagga

SEQ ID NO: 88337 - DNA, 1400 bp, Oryza sativa
  Clone ID: PAT_MRT4530_87199C.1
atgggttcaagtggacaaggaaacctcattagcttcttcatcatcaatgtttggtcctcattgtatggtcagcctgggtcagggaaaacccatcttgttaaggatgtttatgctagtgagaagaagtatttcagtacttctgcgtggatttccattgctcaatgtcccaatgctgacactgatgctttgaaaagaatgatgatggaagaactaggaaggcaagttggcacttccactgagagtacctcactgagagtaatgacggaaaatcaggatagcaagttcctgtttgtatttgacgatgtatgggtgccagacatggttcacaaggtacaccgtgcagcttctgataataaaatgggcagccggataatcataatcgctcggatgccagaggttgcttttgtaagaaagggtttcatcgagaaccagggatcattgcaagtggaggaaattggtgagcgctatataaaggagctaatccactggggatttctgcaggttgtagatgtggacgaacaagagatggataccaatgtccgctgcctatttatctcggaaaaccctgaagatattggtgcattagtagattttccgtaccttcggactcttatggccagcagaaatgctgctgcaaatttgaagtccttaccggcatcactgacagccaaacttaagtatcttactgttctgaaactgcaagaatctccacttgaagaattgcccagaggtattggctaccagctgtttaatttgcgatatcttggcttgcgaaaatcacaaatacgatgccttccatcttccatggccaatctctacaacctgcaaactttggacctcagggggagcagaataaatgaactgccaagttggataggcaaactcataagattgaggcatctttctgctgacacattggatggccaaggcccagacatataccgagctgtgaaagccccgaaaactgtgaactacctgaaagaattgcggactctcgagacagtgcaggcaagtgatacctttgagaagcatgtggagaagctgacccatgcaagtcgtgtggacgaggagtctcttgactttgaaaccctgaatcctactagtcttgaaaaacttgttatcaggggcggtggcatctccaagctggtatttcaagcaattaacagttttgccaacttgaggacacttttactacatgaaattgatggagtggatgaacttgagattccaaatgacattcggtcgatcgtcgactgtttactggaggaggctggaggcgaggaggagacgaggagaagcgagttgctgggcgccggctgcaagcggcatcgggccagtcgttggtcgtcgctaggcgccgggcggtggctaggcgtcaccgtcgcgtgcaccggtggccg

SEQ ID NO: 88338 - DNA, 2862 bp, Oryza sativa
  Clone ID: PAT_MRT4530_8719C.1
atgccgcgctacaagcctgagtatttgttcggtactgaaggttttgtccaagagttgcgtacgatgtccttcctcataggatttgggattgcccctttgtatgcccagatccctcatgaccgtgatgaagagaagtgccgggtcaaagttaccttgaacagcaatcgtgaagatattccatcagtgatgttcgaggctggaggaggaagctacatccatgcttgtcaggaggtagcaaggatcgccataggagagctccgtgaaagctacaatgatcggttggccgacaccgagtatcgctaccatcctcgtcaaccccagggaagtgatcatggcagctaccttgaaccggctgggatcgagaatgatgctaccacaaggcacttggttgagatgctatgggctatggatgaaacccgcgctgagatcgtgatagccgctcaagatcgtgaagaccagaatcggggaaagatctgcaagctagaagacaagctggatcgtttggagaaagagctagcagcattgaagggagaagcaccaccgcagaaggccagggttcgtcttaccgcaaggaagagagctctattcgtccctcgctaccagttggcaccaaaggttcgtgtggtggaaaaagaagctaccctagccccagcggatcctccggtcgtcaatatggtgctcactcgcagcaacgggaatggccccaacaacaacaacaataacaacaatgcggagaatcccacgctcgctcaagtcctggcccaacagacacagttgatgaatctgatgatgcagcaacttcaaaaccagcagaaccaagggaacaatcatgcgcctcctcagaacaagcttgcagagtttcttcgcgtgaggccacctgttttctctagcaccactaatcctgtcgaagctagtgattggttgcacgccatagagaagaagttggatctgctccagtgcagagaccaggagaaggtctcttttgcgtcacaccagctgcatggccctgcttcggaatggtgggatcactcctgccttaacaggactactgctgaacctatctcttggcttgagttcaccgctgctttgcgcaagacgcatataccatcgggagtggtgtccctcaagaagaaggagttcaggtcgctcacacagggttctcgcacagtcacggagtatctgcacgagtttaatcatctggctcgttatgctccagaggatgtgcgcaccgatgaggagcgccaggagaagttcttggaaggacttaatgatgagctttcttacccactcatgactggagattatcacgatttccagaagttagtggataaggctattcgtcaggaggacaattataatcgcatggagcagaagaaacaccggattgctcacttcaaggcacagcagggaaatagtcagaggccgcgtattgcttcgggacccctgtccatgccacagggagacccaggacattatgctgacaagtgtccgaagccctgccgcgcgaaggtcgtccctgcccagaacaactcctccgcaccagcagccaaggctcgtgtcaaccatgttgctgctgcagaagctcaaggtgctccagatgtgattttgggtacgttccctgttaactcagttcctgcaacagtgcttttcgattctggtgctacacattcgtttttatctatgagttttgcggaaaatcatgggatggaggtagaggagcttagacgtcctttgatggttagtactccgagtaaccaagcactctcctcacaacgtagcccctctgtcagaatagagatccgaggtgtacctttcctggccaaccttattctgttagaatctaaagatcttgatgtcatcctagggatggactggctagccagatataaaggtgtgatagattgtgccaatagaaaagtaactctcaccagcaatgatggtcaagttgtaactgttcatgcattgccctctgaacctcgaaggtcaagtctaaaccaaataactttggaagagattcctatagaccgggagtaccctgatgtgttccctgatgatttacctggtatgccgcctaaaagggatatagagttcagaatagatctggtgccaggaacaactccgatccataagcgaccatatagaatggcagccaacgaattggcagaagtcaagaggcaagtagatgatttgcttcagaaaggatacatcagaccgagttcatctccatggggagctcctgttatctttgtagaaaagaaagaccatacccagaggatgtgtgtggactatcgtgcacttaacgatgtgactatcaagaataagtatccactgcctagtattgatgatttgtttgatcaacttaaagaagagcatgaagaacatcttcgtcttgcattagagaagctgcgagaacatcagttgtatgccaagtttagcaaatgtgaattctggttgtctgaagtaaagttccttggtcacgtcatctcagcaggaggagttgccgttgatcctagtaatatggaatctgtaaccaactcgaaacaaccgaagacagttacagagattcgcagtttcctaggtctcgcaggatattaccggaggttcatagagaatttttccaagattgccaagcccatgacacgactgcttcagaaggatgtgaagtacaagcggttagaagaatgtgagcagagttttcaagagttgaaaagtcacttaatatcagctcccattttgattttgcctgatccaaagaagggtttccaagtgtactacgatgcatccaagcttgggctaggttgtgttctgatgcaagatggaaaggtggttgcctatgcatctcgtcagttacgtccgcattag

SEQ ID NO: 88339 - DNA, 599 bp, Oryza sativa
  unsure (1)..(599): unsure at all n locations
  Clone ID: PAT_MRT4530_871C.1
ggggggggccttttngggggccnannggggggggaaaaaatttttttccccggggggggccaaaccccgaaaaaggggggttttttgggntttgggttttgggnaaaaggggggggggnaaactttcgggnaaaaggcaaaagcccttnaaaagtttggggggttgggcccnaacntnanaaggcccttggggggctttgggttgggaaaaatttccttaaagcccccaaattgggggctttccttgggttcccaaccggtttttncccggttcccccttttgggccccggtttncctnttgggttcaattggaaagcccggggccgnccccgccccgccccttttggggccccgccgaaagcctccgcccggggcgnaacaggggcgccccgcccncccntncnncnggcggggccgaacgttgggccccatgggcgttcnaaaggcccnaaaaanttgggaatgggcgaaaccacgggaaanaacttcnaggggaacaagaagaaaaaggcccgnccggtnggaagttttccagggcaaccccnaacttantcaacccttccaccccccccccgaaaaagaacgggggcgggggccc

SEQ ID NO: 88340 - DNA, 445 bp, Oryza sativa
  Clone ID: PAT_MRT4530_87200C.1
cgcgcgagcgcggggcctctatatcgggcgcgctctttttttttttggtttttttttttctttttcctttttattttattttgtttttttttttttgtggcaaaaacattacgtttttcaaaatcttcttaggggacacaacaccaacccgaacataaggtcggggcactaaacccaagttccccaacccaaagtcaacgaactctggggccagaaaatcagccaaccacaaataaccaatggtaaggtacggacccccactttaattgccggggacaaaattgggggcctacccccaggccttattgttgccggggtccgcgaggggggccgctaggttctcgagggggcccttgccggggacaacggcctggacaaaaaaaccggacatggaaaacatggccagggggcccgtctcaaaccgctttaccttgagctccgagaa

SEQ ID NO: 88341 - DNA, 585 bp, Oryza sativa
  Clone ID: PAT_MRT4530_87201C.1
ctccggcctacccgtcggctgccagcgttgctcctctcggcaacggcggtgcgccggcttgcaattgcataggaggagggggagccgaccgccgccgggagtccgacctcgcttcgttgcgctcagttgcaaccgcaggattcaccaagagtgcggcaagcttagatccgcggggatggaatcgtcatcggcgggatcgagtcggctagatccgcggagccgtccgcgtcgtcagtggatggccggggagggagggacgccgccgtcggctgattgaaggccgtggttgcggtcgagcatagcgaggcagaggtcggactcgctgcagcactcggctccccctcctccttccatggctccatggcgagagagataggcgcttggcgaggacggcgaccaccgtcggtgcaaacgacatgagcacaaccttgcacgtccagtccagcgcgtacatcctcgactacggtggcgctcggctccccctcctccgttgccgcgagccagcacgctgtcgctgccgctgacatggttcgcctccgggaaagagaggagcagcgctcggctccccctcctccgcagccgcga

SEQ ID NO: 88342 - DNA, 1182 bp, Oryza sativa
  Clone ID: PAT_MRT4530_87202C.1
atggcggtgccggagagcggcggcgccggcaaggggagcaatggagaggcggtgggttccggtgcagtggacaagcacgccgcggtcgtccgccgcgcggcggggatagccagcgtggaggccaagcggagcgccaccgcggatgtccgccgcgcggcgggggcttccgggaccgtgggttaccccgacggcggcgggcgccgggacgacgagcccgtccgcgaggagctgcacggcagcggcggcgactacaacgacccctccaagtccaagcgtgtccgcggcgagccccacgtcgagcgcgcgctctccgcggtgttccgcggcgaggagacccacgtcgagcgcgtgcccagcgaggaggtcttcggcgaggccgacgtcgagcaggacctcggagatgccgtgaactacctccgcggcgatgaggactacgtcggccgcgagatcaccgtcgatgttctctgcggcgcccacgtcaaggtcaagcgcgccgccgagttacccgacgaggtcctcgtcgaggagctcgatggccaaaacgactgcgcgctcaccgcggtgttccgcggcgaggaggcctacgtcgagcccgcgctgggcggggaggtccgccgcgagcacggcgaggaggtccacgtcgagcccgcgccgggcggggaggtccgccgcgagcacggcgaggaggtccacgtcgagcacgtcgttgtactggaccacgagccggtggaggctactgcgggcttggttctcggtgctcccgttccggcggctgtacgcgcggccgtgttagaggctcgcgctctcaagaacatggagggtgccaaagcggctaaagaagcaagaaaactttgggagcgcgggaacttaaatggtagcaacaatggttgcaattccaattcaccctcgccttctgagaaaagaaggtttgctgaccctaaagaaaagatttttcagaaatttgatgtagaggcctcctaccttactgggaatgaagacagtgatagcaagtacagacgtttggttgatttattcaaccaaatgatctctctgatggaagccgttgaacatggtctgtcacttgaagattctaaggacctcgaacgtgaaatgaaatcaactattcacgagataagaaagatgttgagttctttgttactcgatttctgcatacttggataa

SEQ ID NO: 88343 - DNA, 438 bp, Oryza sativa
  Clone ID: PAT_MRT4530_87203C.1
atgagggggctcgccggagaggtcttcgttgtcgtcgtcggcggaggaaggccactcgtctacatctcctcttctccatcggaagaagctcgccggaggaaggaggaggtgcgacttgcacccctgatatggaccacgctcaagaagcggtttgagaagtcaaagtacaccatcctaccccaagaaaatcagcagagagctcgcttgaggctcgccgactacaactctaccttgcacctgatctgtacctacctctccctttgtggaaaagtagtcacaaaattggacaagattgagaagatgctctccaccttccaccctaacgcacttggcaagagcattggccttgatgtcaatgctagcagttacaaggtctgcaagcccatccaaaagaagaggggcaagcaaggtgggagaaaggcagccgagaaggcatag

SEQ ID NO: 88344 - DNA, 573 bp, Oryza sativa
  Clone ID: PAT_MRT4530_87204C.1
atgccggcctccgccactggcacccgagcctccctgcgcctcctagcgtcgcggccacgagccagacacgcctcgccagcctccataccggttgcgcctcctagcgcctcaccagtctcctccgccatcagccgcccctccgcacgtgcaccgtgccgccccatcaccgtcgatgtcgtgcccgaccgcgccactgcgaggcttggccgagccgcactaaaaggtcgccgcgaccggatccgccccgtcattgccatcccggccgccgttagccaccgatgcctagcgcagctcgcccctcctgtcgccttcgccatacccaccatcatcgctgtccccgccgccagccaccaccccaccaaatccagccatagcgacgcggatctggcggtcaccaccgccactaccctaggcggctcccttggccgcccgagcgcgagaagcgagaagccccgccaccgccgtccttgtggccgcgcagctttgccgacggccactcaggtggcagcgaggcggaggaggaaggtgggggagagggggcaaccgggtcgtcgcctcccaagccgcccctag

SEQ ID NO: 88345 - DNA, 411 bp, Oryza sativa
  Clone ID: PAT_MRT4530_87205C.1
caaggacggggaaaaccgcttagaattcgtttttcataacatgtggagcaaacgctacagcaaattatacgctttgaacaggcccagatttagcagggctcttggctggtacccaaattacatcacatgaacaggtgactttctacgcaacggggaagcctgtggtgaccacaaaatatctcaagcattttgcatgggatgggggtggctattccatggttggcgagacctatttgtcccagccatgcttgttgtgatcgccaaacacgccattctttgggggcagagggtccatatagtggaggctgcaccttcgccaagccatttcgttctgaggacatagcgcctatgcgggtctcggctaataacaactgaagaaagcttggaagcgccaatagcccaagccggggg

SEQ ID NO: 88346 - DNA, 642 bp, Oryza sativa
  Clone ID: PAT_MRT4530_87206C.1
atgcaatcagaagatggtgaccttacacgaatatgcaataatgcaaagcaatctgaagatggtgactggccttttacagagcttggcaacgccggcggcgagccacgagcagcggcgtgcgtcccgtccctctccctcccggcgaggatttcatgtcagattctgacgcccgaggaggtcaggccacgcgccggcgtgccgcctgacatggacgagttcgtcaagagggcatgggaccgcgcgcctctccctcgccgccgttcacggcggttcatcgccggcgcatccccgcggtggcgggaaggaaagcctgaactggtaataaactttctctgcggcccaagcccctgttttgagtggctcatcgcgtttcgctctcgcctccggcggcgcccgccgccggcatcgccgtgggagccccgcccaaccatgctcctcttctccgcgggaagagaaaggctcctagatcactgcgagagctgcccccaacccaatcatcgccgctggccgctgcagccggagagggggggggggggggaaggacgggaggtttccggcgagaagcaagcgcgctacgtctacgcgcggttagtcccgccgtatctcctccttgaaggtgagctccgacgccaaggcagctag

SEQ ID NO: 88347 - DNA, 157 bp, Oryza sativa
  Clone ID: PAT_MRT4530_87207C.1
gcaaaagaagaagaagaagaatagaagaagaagaagatgcataccgctgctagcagtgtcgctggattgtccgccgcgtcgcccgctgctgttaaggggctcaccctgctgatttaggctcctcggcgtgttgcgttgcgcgttcacgcggcggatg

SEQ ID NO: 88348 - DNA, 1721 bp, Oryza sativa
  Clone ID: PAT_MRT4530_87208C.1
cagtgggccccagggctgcacgagttcgcccgccgagcgccggcaatacgaagctctcctctccggcgagaatagccaagaacgcgacgcgagcacacccaagaggccgaacagatcgagctcaagaaggttttagcccatggggatggattactacaagatcctgggcgtcgacaaggccgccagcgacgacgacctcaagaaggcgtaccgcaagctcgccatgaagtggcaccctgacaagaaccccaacaacaagaaggaggcggagaacaagttcaagcagatctccgaggcgtacgaggtgctgagcgacccgcagaagcgagcggtgtacgaccagtacggcgaggaggggctcaaggggcaggtcccgccgccgggcgccggcggggccggcccgggaggcgcgacgttcttctccaccggcggcgacgggcccaacgtgttccggttcaacccgcgcaacgcggaggacatcttcgcggagttcttcggctcgtccagcccgttcggcggcatgggcggtggcatgggcggcggcatggggggagggcccgggatgcggacaggcggcacgcggttctcgtcgtcgatcttcggggacgacatcttcggctcggcgttcggcggcggcgccgacgggcaccacgggatgcacggcggtggcgccgggagggcgttgaaggcgccggcgatcgagaggaagctgccgtgcagcctggaggagctctacaaaggcaccaccaagaagatgaagatttccagggaaatcgctgacgccagtgggaagacaattccagtggaggagatcctgaccatcgatgtgaagcctgggtggaagaagggcaccaagatcaccttcccggagaaaggaaacgagcagccgaacgtgatcccggccgacctcgtcttcatcatcgacgagaagccgcacccggttttcaccagggagggaaatgatcttgttataacggagaaaatatctttggtggaagcgcttactgggtatactgcacgtatcattacacttgatgcgcgaagtctgtcagtgcccattaattcagtcatccatcctgactatgtggaggtggtccctggagaaggcatgcctaatccaaaagggcccaataagaagggagatctgaagattaaattcaacatcaggttcccttccaggttgacatctgatcaaaaagcagggttcaaaaggctcttgggttcttgagcctgtttgaacgaatttcgtaaaagtgactgtgaatattggcggtacctagcgaggtagatttctattggttctgggggacaaaaggcaagaagttagaaaaaagaaagatgatttcataacatatcagtaataggttgttatgttgttttttatccccataatttactgatggtttgacatgtgctataccatgctatggctttttgattgctcttcctcttggctacctgcgggttgcagggtacacacaactacacaaggtgaggctccatttggaacctgttttttttctttaaaatgtatttcttgaggcattactgcttccatatgaatcctgtaaaatcatgcattgcaagtaggcaccgctcttgagtctggcaagggttatgcctcctttgaatcgcaggctgtttttagaatttttatagaaatatgttgatttcccatatgaatccaggggaaaaaattgtgcgctccaaaaaaaaaaaaa

SEQ ID NO: 88349 - DNA, 1177 bp, Oryza sativa
  Clone ID: PAT_MRT4530_87209C.1
atcgtaccaaaccacacaaccgcagcgacggcaacacgaagctctcctctccggcgagaatagccaagaacgcgacgcgaccacacccaagaggccgaacagatcgagctcaagaaggttttagcccatggggatggactactacaagatcctgggcgtcgacaagggcgccggcgacgacgacctcaagaaggcgtaccgcaagctcgccatgcggtggcaccccgacaagaaccccaccaacaacaagaaggaggccgaggccaagttcaagcagatctccgaggcctacgaggtccttagtgatccccagaaacgcacaatctatgatcaggtaggggaagaagggctcaaggggcagccgccccctggtgcgggaggtcctggagcatctcccttctaccctggtggtgcccattccaactcttttcacttcaacccaaggagtgcagacgacatttttgccgagttctttggattccgtggtcctttctctagcatgggtggcatgccaagtgtaagtggaggcatgagaggggacccaaggttcccagggtttggcaatgaatatttctcttcacgctttggtggtgagggttccaccagtatgcatcagccgtcacaccaactagcgaaacctccgcccattgagaaccggcttccagtcagccttgcagatctgtacaagggtgtaacaaaaaagatgaagatctcaagagagattatagacttcaacgggagagtttcacagcaggaggaaattttgcagatagaagtaaagccaggttggaagagggggacaaagatcacttttgaagagaaggggaatcaagctccaaacatgaaacctgctgatattgttttcataattgaggagaagccccatgacattttcaccagggagggaaatgatcttgttataacggagaaaatatctttggtggaagcgcttactgggtatactgcacgtatcattacacttgatgcgcgaagtctgtcagtgcccattaattcagtcatccatcctgactatgtggaggtggtccctggagaaggcatgcctaatccaaaagggcccaataagaagggagatctgaagattaaattcaacatcaggttcccttccaggttgacatctgatcaaaaagcagggttcaaaaggctcttgggttcttga

SEQ ID NO: 88350 - DNA, 363 bp, Oryza sativa
  unsure (1)..(363): unsure at all n locations
  Clone ID: PAT_MRT4530_8720C.1
agggaaacccccggcggcggcagcgacggcaaccaccaccacaaccatggcggtgcggcggccacaancgccggtgaganctgagacccgccgtcgtccttccctgccgctggcagctcgtcgatcttttctccgtcgacgagtagtagaatcagcttanctgtgtgtggtcgccggaatatttcctccctttnccggcgatgagtagaaacagcttatctgtgtcgtcgccggcagtgcttgtcggtcttgtacattttctccctgagaattaacttaaattaancctgctgtttttgctataatccaatcaaaccagatcgtgattatacaaaaaaaaaaaaaaaaaaaaaaaaaaaaaaa

SEQ ID NO: 88351 - DNA, 577 bp, Oryza sativa
  unsure (1)..(577): unsure at all n locations
  Clone ID: PAT_MRT4530_87210C.1
gggtcgnaccagcgtccgtgcctctantatggtatctaccctgagtactatggtgcacccagtaccattaccacccttggcggtgtcttgtaatgagttttaacagtatagtggttcggagttaaaaatagctcantatcatcattgtgacatgtgaaatttgggtgatataaatagaaaaaaattgtctttcattttaaaaaaaaaaaaaaaaaaaaaaaaaaaaaaaaaaaaaaaaaaaaaaaaaaaaaaaaaaaaaaaagggggggccgttttaaaggaaccaaagttaactacccctgccttgcaacttaaaactttttttttggggcaccttaaattaaattaatgggccgcggtttaaaaacttcggaatggggaaaaacctggggttacccaaattaaaccgcttggaaaaaaacccccttttccccggttgggtaaaaaccaaaaggcccccacaccaaggcctttccaaaaattggccaacctggaaggggaaatggggaaccccccctgtaacggggcatttaaaccccgccggtttggggggtttccccccaagggggacccgtta

SEQ ID NO: 88352 - DNA, 645 bp, Oryza sativa
  Clone ID: PAT_MRT4530_87211C.1
agaaggctaccatgagcagagataacaggggcataggatgaaagcatgacatcgagaggccaacctacaccaacttgaacaggctcatctcacagatcatatcttcactcaccacctctctgaggtttgatggcgctatcaatgtggatgtcactgagttccataccaaccttgtcccataccctcgcatccatttgatgctttcctcccatgccgcggaccctgatgctgagggcgcttaccatacctggaccctgactaacgtggttattggactttggtgagagcaccatcaaggctaacgctgactatgaaaagattgccggggatacacgccgtgacatacgttatgtatcaggtgatgtcggcctcgatgctgaccactgcacggtgcttgtgaacatcgaggaacagacccctgaccttggacaaggtgtgcacggccactttaccaagcgccctgaggagattgccgctggtgaccagggacacttgttggcatatacaactgatgatacccctgagttagagcccctgcaacatgtccttggtaccaagcttgacgctcgtcttaccgaggttcgcaggaatggcatctgcgcatggcttacgcctgactacaagacccaagggactggtgagtac

SEQ ID NO: 88353 - DNA, 1347 bp, Oryza sativa
  unsure (1)..(1347): unsure at all n locations
  Clone ID: PAT_MRT4530_87212C.1
atgacgctagggccactaattcaccccgtgaccgtcctagagcaatgccatgtctcgccatctccggcgccggcggccggccagccacggtcgctgccgctcacgttcttcgacctcgtcttcttggacttcccgcccgtgcagcgcctcttcttctacgacaacgccgacctccgcgacgcccatgacttcctcctccgcgagcttcccctcttcagggagtccctggccgctgccctgcaccatttctaccccttggtcgggaagctgccgtgcgggatacgggagcgcatgtcgccgccggaggtcgcgtactcggatggctactccgtctgcctgaccgtcgccgtcagcagcgacgacttccaggacctcgccggcgaccacccgcgcgacaccgcgaggctacgcccgctgctgcctccgctgcccaagcatggtagctcgcaggacgtgctcgccgtccaggtcaccgtgttccctcgcgccggcatctgcgtcggcacgacgctgcaccacgccgtggccgacggttcaagatacgtgcactacatcaagacgtgggcccgcattcaccccctcggcgacgagcgcaggaaagcggtggtggtggaccacacgccgccgctgttcgaccgtggcgtcgtgcaggacggcgacggactccggaggccgtttatccgcgaccaccgggatctcgtggagtccggtgacaagcggctcgacgactgggacctcagccggaggccggacaccgtgctcgcgacgttcaggttcacggacgagctgctccgcaagctgggaggacatgtcgagcaggagacctcggcgcggtgctcgccatacgcgctggcgtcaggcnccgcgtggcacggcatcgtgcgcgcgcgaggcgtggcagcagacgacgtcgcgcggttcgggttcgtgaccgggtgcaagccccgcgccaagcgaagacacctcaccgcggcaagcgcatcggcggccatctggcgcgtgatcgcggggctcgccgagcaggggcgggcgctccgtgacgcccacggctgggtgcccggcgcgcgggagtacgcgccggcgcgcgcggttacggtggcgggttcaccgaagctgggcgtgtacgcgacggcggatctcggcgcgacgtgggggggtcggccccggaaggtgcagatagcgtcggtggagcggacgggcgcgctggcgctggcgaagagcggccgccgtggcgaccgggacggcggcggcatcgaggtcggggtggcgctgccgcgcgcggagatgcaggcgttccgcgcgttccacgtcgagctggtccggctgctagacgccactacccactag

SEQ ID NO: 88354 - DNA, 1553 bp, Oryza sativa
  Clone ID: PAT_MRT4530_87213C.1
gcacgaggcatgcgcccccgggcccggcacatgacgctagggccactaattcaccccgtgaccgtcctagagcaatgccatgtctcgccatctccggcgccggcggccggccagccacggtcgctgccgctcacgttcttcgacctcgtcttcttggacttcccgcccgtgcagcgcctcttcttctacgacaacgccgacctccgcgacgcccatgacttcctcctccgcgagcttcccctcttcagggagtccctggccgctgccctgcaccatttctaccccttggtcgggaagctgccgtgcgggatacgggagcgcatgtcgccgccggaggtcgcgtactcggatggctactccgtctgcctgaccgtcgccgtcagcagcgacgacttccaggacctcgccggcgaccacccgcgcgacaccgcgaggctacgcccgctgctgcctccgctgcccaagcatggtagctcgcaggacgtgctcgccgtccaggtcaccgtgttccctcgcgccggcatctgcgtcggcacgacgctgcaccacgccgtggccgacggttccagctacgtgcacttcctcaagacgtgggccgccattcaccgcctcggcgacgagcgcaggaaagcggtggtggtggaccacacgccgccgctgttcgaccgtggcgtcgtgcaggacggcgacggactccgggaggcgtttatccgcgaccaccgggatctcgtggagtccggtgacaagcggctcgacgactgggacctcagccggaggccggacaccgtgctcgcgacgttcaggttcacggacgagctgctccgcaagctggggaggcatgtcgaggcggagacctcggcgcggtgctcgccctacgcgctggcgtgcggcgccgcgtgggccggcatcgtgcgcgcgcgaggcgtgggcggcggcgacgtcgcgcggttcgggttcgtgaccgggtgcaagccccgcgtgagcccgccgataccgtcgagctacttcggcaactgcctggggctgtgcttcgtggaggccaagcggagacacctcaccgcggccagcgcatcggcggccatctggcgcgtgatcgcggggctcgccgagcaggggcgggcgctccgtgacgcccacggctgggtgcgcggcgcgcgggagtacgcggcggcgcgcgcggtgacggtggcgggttcaccgaagctgggcgtgtacgcggcggcggatctcggcgcgacgtgggggggtcggccccggaaggtggagatagcgtcggtggagcggacgggcgcgctggcgctggcggagagcggccgccgtggcgaccgggacggcggcggcatcgaggtcggggtggcgctgccgcgcgcggagatggaggcgttccgcgcgttccacgtcgagctggcgccggccggtctcctcccccccgtgccacgaggaatgatcctttctggtgcaccagagtggctggcgccgtactccaacatggcggcgccagccaccctggcgccgtgaccgtgccaccgtggcacaaaggcgagcgtggaagg

SEQ ID NO: 88355 - DNA, 266 bp, Oryza sativa
  Clone ID: PAT_MRT4530_87214C.1
agtaaaaattgacaagcaagctttgggagagtcctattagatttaacagcgtactcatccgaaacacaggatactttttttcacaaccaccacgtgcataatccatataagtggcagagcccccaacatgaaagactctcgcttattcccacacaaatcctaatctcccacggcatccatacgtcttgattttaataagtgccacacgccccctaaaggcctctagggccaaggcaacgcctcctctcccttcttgtatccttcgg

SEQ ID NO: 88356 - DNA, 1776 bp, Oryza sativa
  Clone ID: PAT_MRT4530_87215C.1
atggatgcggcggggatgatcatcggcggcggcgggcggcggaggctgacgagggtgaggacgctcgggcgcggggcgtcgggggccgtggtgtcgctgttcgcggcgggggacgacgagctgctcgccgtgaagtcggcggcggggccggcgggggcggcgcagctgcggcgggaggcgggcatcctcgcctcgctctgctcgccgcacgtgctcccctgcttcgggttcggcgccgtcgccggcggggagtacgggctgcttctcgagttcgcccccggtgggtcgctcgccgacgaggttgcgaggaatgggggccgcctcgaggaggacgatgtccgggcttacgcggcggatgtcgcgagcgggctcgcgtacctccatggggtgggcatggtgcatggggatgtgaaggggaggaacgtggtgatcggcgccaacgggcgcgccaagctcgcggacttcgggtgcgcgaggcgcgccgactcggctgggccgatcggcggcacgccggcgttcatggcgccggaggtggcgcgcggggaggagcaggggccggcggccgacgtctgggcgctgggctgcaccgtcatcgagatggccaccggccgcgccccctggagcggcgtggacgacgtggtcgccgccgtgcgcctgatcgggttcaccgacgccgtgccggagccccccgagtggctgtcgccggaggcgaacgacttcctggacaagtgcctcaggcgccgcgccggcgagcggtggacagccgcgcagctgctggagcatccgttcttggcgctcgccggatgccgcgccgtggccgccgaggagacgaagcccaagtgggtctctcccaagagcacgctggatgccgcattttgggagtcggacgccgacgacgaggacgacgacatgccggagagctgggccgagaggatcatggcgctggccgtcccctgctctgccgtgccggattgggaatcagacgatggctggatcgacgtcatgagcagccaatccgaacttcccatcgcggcggctgaaacgccggccgagcagacgcgcagcgaagtttctgaatcgccggtggcttcgccggctttggagacgacgagctacgcgagtgcttgggatgaaagatcggaagctgtaatggatgctgacgtggacgatgacgatgatgagctcgtgcacaatgtacgaactgttgatacctttgtggatgaacagctccgccaagatatttatttagattttactactagtgacccaattgtacttcatgttgatgtttctgatgaaagaaaagtaaaattattgcctccaattcctgactgcctctgttcctccccttctctttcttttttcgattttattcactcaaatctgataacactacaaactcaaactacaaatctgaaacttcaaacctccaaaaatgtgaaatcgagggcagcggcatcagcattaattcttcagaacgatggaacgaaagctggggagatgaagatgatgcagatcaggggtgacacttggccaaaatctctggattacctcaccccggacagagtgcctctcaagaaaaataagggcatcactgcatctacacttctactacatctgagagtagtagtagattcagtaattcggttgccagctcaacatctgataaaaactgtcaaaagcatcgccatgtgtcattgtcacttataccttgatgctatgaacaaccttgtagttgtagtactacttggcatgaactttctccatgtttcttga

SEQ ID NO: 88357 - DNA, 507 bp, Oryza sativa
  Clone ID: PAT_MRT4530_87216C.1
cccacgcgtccgcttcaattgtagattttagtattgagcgaaaggttacacctacaggataggttctgtattacaggctaatcctactctactagtactaataggtagcataggggataaaagcactacacctagaaataggaatcaacaagagaaaaactttgttagaaattaaccctttcctgattggtatcagggctgggaagaatggttgggataacaaacaaccatcaagtttgtactttggatacccctataaccatcaaagatcgttgaagtggctaattcctctaaataggaggcgttgagaacaaagaaattcttggagctatcgttttcctctagcattaatagaattcattggtgttaagaaaaacctcttgtgggaaggttggctagagatttcttggaaaaataccagcccctttcggtccataatgagatggaactaattctatttttattctctagattttttcgcttagtactatgtacagaagggaggag

SEQ ID NO: 88358 - DNA, 873 bp, Oryza sativa
  Clone ID: PAT_MRT4530_87217C.1
ctatcgttggtcccaccctcttgtagagttgtaggcttgcacattagtgcctgactgcccaatccatccattccagcgcgtgacggcatcccagatccatccatcgcgcacgcgcttcgccagtttgcctcccgtcaccgcgagccagctgggagactcgccgccgccgccgtgaccggagaccgccgcgagtggggagatgaccgggcgagcaccgcgcgaggcgtccgcgctcgcctcgcccgcgtccagccgtcgccgcgagccagctgggaggctcgccgccgccgtgaccggagatcgactcgccacgcccgcgtccggctttctggccggggccctgtcgtcccgccgcggcaagggaggcgccaggccgccctgcccgggcctgacgacgcgctggtgcaggcaggcggcctcccagcccgagcacggcacatggaggaggcgctgggaagcctggtcctgccctgcctccagccgcagcgcggggcacgcggtcgacaccggcagccgcacgaggaacgcggtcgacggtagcagccgcagcacgcggcacgcggtcgacaccggcggccgcagcgcgaggaacgcggtcgacaccggcagccgcacggggaactcggtcgagccagcccgaacccggatcattgggctggaaagggtcgcttggatccaccaacatctctgcaaaaatgaaaaaatgaagacaaaatcagggtattgcacaatcaggtgcatggaagcgaactcagcaaggacgaagaagaaggagaaatcaccggcggtgctggtgatcaccgcgtaggcgacgagcagcgccgccaactgcaggagcgccagggaacgggcagatcgagcgaaggacgccat

SEQ ID NO: 88359 - DNA, 579 bp, Oryza sativa
  Clone ID: PAT_MRT4530_87218C.1
ctagctctgtatcgcacatatggcccatcggctcacatgacgaaacgggccggaaattccactctcctggactcctgcgcttggagccggcccaaaccaaaccaaatcccaatcttgcaaaagtttttaccgctatcattctatcaagggctgttctgcaaaatttgctaccatcagttcgtcggaccgggagcgacttctaccattggatgtagcatcaacggtgggcgagagcccgcgccgctcgccggaggtctcctcgcctcgccgcctccttctccggcgtgtgcccctcctccgctcctcgtccccaaagccaatgccgcctcgatctcctcgccgacctcctccacagtacagctgggccgccgccgccgccgcctcctccccgcgctgcctccctctcgcggtctcgttccaatattggcctccctctcaggtctccgcggccgtctcctcctcaaccccaccatggagcgtcacgaggaggtgggttggagcctggacaccgtacctggctacctgtttgctgctgtaaactgccaacttgttcttgttgatctctgcactaagacctaa

SEQ ID NO: 88360 - DNA, 360 bp, Oryza sativa
  Clone ID: PAT_MRT4530_87219C.1
atgacgctgggggtgttcttttgccgcatgtgctcaactgcagttttgtcactcgtcagccagggaaaaccgaaggaaaaggctatactgccgctctctctgtcgccgaactccttgtactatgtgaggtcatgccgcacggtgcacaacaagatatcaccactcttcgcggtggagctcgagctcctcctctgtagcaaccactacttcatctccacctgcggcaagggttacatgttcccatccccactcagctacgctatgtgctccttcttcgtgtttggctctggtgcaacgacaaaggacatgatgcaccaatggggtccgtgtgcacatgaggaagaagtgtggaaaacatga

SEQ ID NO: 88361 - DNA, 657 bp, Oryza sativa
  unsure (1)..(657): unsure at all n locations
  Clone ID: PAT_MRT4530_8721C.1
atggagcccgagagcgccgcgccggtttccttcccctccggccgccctctcccccttccaaccctatataaaccctccccgcacctcctccattcgtttccgcctctcgccgccctttctcctcgcagattcgagctcgcgccgtcgctctctctctccgccgtcgccgccgagctccggtccgccgccgtcgtcgccccggaccacctcccacctcggcgccgccttcttcgggttcgccgcatcctcgccaacctcgtccacctctccgtttccgtcgccgacccgccgaacgccgtcgaccccgtcgacccgagccgcgccgnccgctnccttcgntccgggccgctcctccgtcgccgccatcgccccggggtgagccgtggaccatcgcctcctttcccccttcccacccctctctcggccgccgctccgccgcgccggtggtcgccggcggcgaccatcgggtcgcgagcacgccgtctcccgccgaccgtgccggcatggccgccctcgggcgcgccgagtggctaccgcgtggggcccggccgtcagccgcccgcgccctcggacgttgcagcttcggaagatccgctcttcgtggaggttgaagccgacgtttgggaaagtgagcaaggcaagtcacatcatccttga

SEQ ID NO: 88362 - DNA, 456 bp, Oryza sativa
  Clone ID: PAT_MRT4530_87220C.1
atggcggcggagcggaggcagcggagcggcggcgggctgcgggcagagcgaaagacgggcgagcgcggcgacgaagcgcggcagcagagcactgggattagtgcgctcatggaatctgtcgaggaacaaggaaccacccgcggcgaggaagccttacgcgccccaccgccgcccgccgcccgctccgcccgcagcccgtcgccgctccgctgcctccactccgtcactcgctctgcccgcggcctaccgctgctccgctgcctacgcaccgccgccgcgctcgcccgctgtccgttccacccgcagcccgccaccgctctgctgccgtgctggcccaccgccgcgggatctagcactgtctctgattccgtcgggcgcgaactcgaggaggaaggctaccctgttgtcgactacgagtcagaccttcagaccgccatgtcgacaacagttagatag

SEQ ID NO: 88363 - DNA, 639 bp, Oryza sativa
  Clone ID: PAT_MRT4530_87221C.1
atggcggaggaggaggacctggcggacatgccgcgggtggtgggcgtcctcgccgcgctcctggagcgcgtgaccgagcggaacgacgcggcggcggcggagctggagctggcggtggcgggagctccggcggcgtcggcgttccgggcgacgacgaagcccgacatcacggtgcgcgcgtacatggcgcgcatcgcgcggttcgcggggtgcagcccggcgtgctacgtggtcgcctacatctacctcgaccgcctcctccgccgccgccggcgcgcgtgcgcgttctccgtggactcgtacagcgtgcaccgcctcctcatcaccgccgtgctcgccgccgtcaagttcatggacgacatatgctacaacaacgcctacttcgccaaggtcggcggcgtcagcctcccggagatgaactacctcgaggtcgacttcctcttcggcgtcggcttcgacctgaacgtgtcgccggagacgttcggccactactgcgccgtgctccagtccgagatgctctgcctggagctggagccgccgccttctccttcccctgctccggcggcaaggctgcattgcttcctgtccgaggacgacacaagcagcagcggcagcactcagcatcagttagctgcgtga

SEQ ID NO: 88364 - DNA, 1014 bp, Oryza sativa
  Clone ID: PAT_MRT4530_87222C.1
atggctgcgtcgtcggcggcggccggggcgggcggcgagccccagaagcagctcctctccatcatccgcgacttcgccgccgagaagtcccacggcgggttttcgcgtgatccgctcgcggcatccgagttgcttgcagagcggagggtgacggatctgaagcggcggctcgacgacttgcgcgccgcctccgacgcggccgtggcggagctcgaggccgccaagcgcgcgcgggagggcgcggagcaggagctgcgcgggggccaggtgcaggtcgccatcgccgccgcgtccatccaggcgctcgaggcgacgatctcgcatctccaagaggaaatttcgaaggcgggatctgatctggacgcgcttaagggcaagggagacattgagagggatgagttcatcagccagatggatcagttaaacacaaagataaggcagtttcaacaaacagtttctgtagagtttaaacgacagaagtgctctgagctgccctcaggagaaggtcaacatgtcagagacatgagcaaaatcgaggagtcagaaggtattttgaaagatttgattgataaggtgaacaatgctgatgccgagttgcatgtcttagaagaagagtataaaaaagatctgctccatcatgatgaggttcgtcgggagttggctgatacccaggcgaagagagctcttatggaggctgtgatgggagagacgaagcagctgcaggagcttggagaatatccttttcttgggttcgttcagaagttttcgaactcactacatcttgtgctattccctgtgcaaattcaccaagcgttttgcaaaaggcgtttctttaacgggaagcaagcgggcagccgaaatggagaaagcgcacgcttcgcttgcggaggagttgcagaggcggtacgcgtgcccaggctgtggagtcaacaacatggttgggttggaggaggcggcggcggccagctgaagatggcgctcgctggttggttgctgtacatagacaaagcttga

SEQ ID NO: 88365 - DNA, 798 bp, Oryza sativa
  Clone ID: PAT_MRT4530_87223C.1
atgtgggttcctagggagaagaaacagtccatatctgcgctagagaaggagatccggcgagccgccatcgcccgcagctgctccgctcagtgccctcaccgctgcttcgcccggcgccctcaccgctgctccgccccgctccatcgccgctcggctggatctggccgccctgaagctgctccgtcgtcgctggatccatcgctccgcccgccggatatccacgccagagctctgggaggaggggagcagcaaggcacgctcgaggtgggacttggtggtggcaagcccttggagcgggaacgcagcagcagggccgcgagacgcagccgcacccgggcctcggtgagcgggaggagcgacgcggcgggcagcggggccagcgccacctccaggcaccgcgtggcggcaccgaggtcacgccgctgctccgcctcctcccgccgccgacctcacgtggtgtcgcgccgccgccgctcgttccccgccggcgcatcgctgctccattccccgctggcacatcttggtctcctctcgcttcgtccgacggtggggaaaggtggagagagaagaggaatgaagagtggtgggacccactataatagatggaaggtcacatgcactgtggagggggttgcttgcacagttcctggcttaggtggcggttttggcttctcaatcgtggcctcaggggatgaacaacactgtgacgtggcgagtggtagaattatttttatgctagaggctgatatgaaatatccggtcccatcattccacttattcggggtattcggggaataa

SEQ ID NO: 88366 - DNA, 183 bp, Oryza sativa
  Clone ID: PAT_MRT4530_87224C.1
atgcaattccaccaaggacgtcatcatcgacatcccaacgtcggagtcgtcctcttcagcgtcttcttttgggagaagccaacgcaacacaccatcattggtgttggcgagggagggcagaggccggccacgacgaggtggagaatagggatagagatgactaatgagtacggactaacataa

SEQ ID NO: 88367 - DNA, 4057 bp, Oryza sativa
  Clone ID: PAT_MRT4530_87225C.1
gatcaccccaacttagcacaaatgctcgccaatcaaaaccaactcatcgcagctttgctccaccaaatgcaaaacccataagcacccgctgctcaagctcccataaacgctctaccgcagtcaaagttgtcggaattcttccgagtctgacctcccactttttcaagcacaaccaatcccgtcgaagcaaactactggctgcacgtggttaacaagaagttggacctcatccaatgtaatgatgaagagaaagtcgccttcgccgctcaccaactgcatggacctgcttccgagtggtgggaccacttccaggccacccagccagctggacaaattattacttgggctcgttttctactgcttttcgcagagctcatgtacctgctggagttgtagctctgaagaagaaagaattccgtgaactcaagcaagatggcaggaccgtcactgaatttttgcacgagttcaacaggttggcccgctatgctcccaaggatgttcgtacagatgaagagaaacaggagaaatttctcgaagggttgaatgacgagttgtcagtccagctcatctctggtgaatacgaagacttccaaaagctagtcgacaaggcgatccgcttggaggacaagcaccggaagatggaaagcaagaaacgcaagttggctaatgccaggatgtttcaaggaccaagtcagaaaccgcgttatgtgtttccccctcaagttggttcttcatcagcagcacagcgtgcatcctgtccacagatgaacaacaagctgcagaactcaggatggaacaacggtcagcgttctacccctgctcagggtggatccacacgcaaagatagctccgggaagatacttgtctgctacaactgctatgagcctggacactttgccgacaagtgcccaaagccaaagcgtccgcaagctcctgcacctgcacgcaatgccaaccagagcaacaatggcaaccgcaacaacaacaacctggtgaggggacgtgtgaatcacgtctcggctgaggaggcacaggctgcaccagaagtcatacttggagctacgcattcctttatatcaagagattttgtggcaaaacaccaaataaggatagaagatcttagcaaccctatgataatatcaaccccgggaagccagctaccgactaagctcttcagcccatcagtaaccatagagatccaaggagtcacttttctggctaatctcatccttctgagctctaagaacccggatgttattcttggaatgaactggttgaccaagcacagtggtattatagattgtgctatccgatccatatctttgattgggggtactggccaacgagtcactttccatgctaagctagcacttccttgtaagcaagttctgaaccaggtcagtatggaggaaatacccatcgtgaaagagtatccagatgtttttccagaggaactaccaggcatgccgcccaagagggacatcgagtttcgaattgacttagtgcccgggacagcgccaatctccaagagaccgtaccgcatggctgccaatgagctagctgaagttaaaaagcagttggaagaactcaaaggaaaaggccacatccgaccaagcacttcaccctaaggagatcccgttatcttcgtggaaaagaaagacaaaactaagagaatgtgcgtggattaccgtgcactcaacaaggtcaccatcaagaataaatatcctcttccgaggattgatgacctctttgatcaactgaagggagcaaccgtgttctcaaagattgatcttcgatccggctaccatcagctaaggattcgggaggaagatatccccaaaacggcattcacgaccagatatgggttatatgaatgcacagttatgtcgttcggactaacgaatgcaccagccttctttatgaatctgatgaataaagtgttcatggaatatttagacaagtttgtcgtggtcttcattgatgacatcttgatctattccaagatagcagaagaacatgagcagcacctccacctagcgctagagaagcttagagaacatcaattgtatgctaagttcagtaaatgtgaattttggcttttagaagtgaaatttctcggacacgtcatttcagctcaaggagtggcagtggatccaactaacgtagaatcggtgaccaattggaatcaacccaagtcagtgacccaagtccgtagtttccttggacttgcaggctattatcgcagattcatcgaaaacttctcaagaatagcaaggccaatgactcagctactaaagaaagaagagaaattcatatggacctcgcagtgtgaagatgcatttcaattcctcaaaaagaagctagatttccaggtatactgtgatgcctctaaacaaggactagggtgtgtcttaatgcaagaaggacaagtggtagcctatgcttcccgccaacttcgccctcttgagagcaactacccaacgcatgacttggaactagctgctgtggtgcatgctttaaagatctggcggcactatcttatcggtaaccgttgtgagatatatacggaccagaaaagtttgaagtatatattcactcaaccagatctgaatctccgtcagagaagatggttagagctcattaaagactatgatgtgggaatccgctatcatccagggaaagctaacgttgtggctgatgctttgagtcggaagagttactgcaatgctatcatccatgaacagtgtccgcctggattatgccgagagcttgaggccttgaatttgggaatagtcaattatggctacgtagcgaccttagaggcgaaacctctactccttgaccatattcgagaagcccaaaaaggtgattctgatatccaagagatcaagaagaatatgaggaggggaaaagcaattgggttttccgaacatgaacatgggaccatttggtacggggaacgtgtttgtgttcccaatgatcctgagatcaagaagcttattctacaagaggctcactagagtcaatactcaatacaccccggcagtacaaagatgtatcaagacttgaaaatgaaatattggtgggtcagtatgaaacatgaaatagcagaatttgtggcactctgtgatgtatgttaacgggttaaagccgaacaccaaagaccagtcggactgctacaaccactcaagatcctagaatggaagtgggaagagattgggatggatttcatcaccggtcttccaaggacccaacctggatatgactctatttgggttgttatcgaccgcctaaccaaagttgcacatttcatcgtagtcaaaaccacttatcccggcagaagaaatgggaactcgtttgaactttagcaccgcttatcaccctcaaacagatggccagatagagcgggttaatcagattcttgaagatatgctcagggcatgtgctgaattttcgtacaataatagctaccaagccagtcttcaaatggcaccttttgaagccctatatggccggaaatgtcgaacccccactcctttgggaccagaccggagaacgtcaagtttttgggaccgacattataaaagaagtagaggagaaggtcaaggttatccaagcaaatctgaaagttgcccagtctcgacagaaaagctacgcagatacgcgtcgaagggagttagcctttgaagaaggagactttgtatatctcagagttacaccgcttcgtggagtacgtcgtttccacaccaagggaaagttggcaccacgttttgtgggaccatacaaagttcttggtaggagaggggaagttgcttatcaattggaactaccggcatctctgggaggagttcatgatgtattccacgtgtcgcaactcaagaaatgcctccgagtcccgacagagcaagcagatacagaacagattgagattcaggaagacctgacttatgtggagaagcctataaggatcttggaaacatctgaaaggcatacccgaagccgggtgatccgtttttgtaaggttcaatggagcaatcactcagaagaggaagcaaca

SEQ ID NO: 88368 - DNA, 2530 bp, Oryza sativa
  Clone ID: PAT_MRT4530_87226C.1
tgtttgtttttttttttttttcttttttttatattaagaagaagacacataaccaggctcattgcactcatggtattaacagcgtcagtgggatgaagaagatattgtacaacattctcaaacttgatgtacaagcacaagaactgccccaccatgtatacgcgcccccaagtttcattccttcgacagccggctgtatgctggtaactgctagtctgctactgatcacaagctttacagaacaggtacagatgaaatcaaaataactctccgatccaacggggacgaaccaagcaacagtaggacaatacagcactgggatatgaagtgataagaaagccaactatacacaccgagctgataattctctccaaaatagtctgtgttcatgcgcgtgccatcaatggagttgttgactccgaggatgtctgaacgatccgcttgcatagagcatctgataaactggctttatcctcgctatgaaaaccacactcactagggttccacagcaacaaacgatggcacaaacgtagaaggtaagcctgaaacagtcaggcccaaggcaggttgaaggttccaacacgcctggctgctgcttcgccgcttccttgtcatagatataaccagcgagaagagctgagaagaagaatgcacctaggggattcactaacaacatgaagttgtacatcaacccaaagtccttcaacccaaaaagttctgagactgtcgggatcatgacagcaaattggacaccgtaacatatgcccagaaatgttgttgacacataaatcaagctatgaaggccagttgcgaaaaggaggaaggttatcaccatgattatttgtgtgcacatcatccagaaagggcgaggaagcattcttgaccttacgaaatattcagagacagacccaccaaggatacggccaacaaagttgcagaagccgaagaggcacaacaagatagtagtatcatcagcaccaacagccatcccaacctgagctaggttgttcagaacagtgacaccagttccaactccacaaaagtacacaataaatagtagccaaaagtctgccttaaccaatgcttctcggaatgtgaaatcgtccccccttctaggccctcttttctttttcaaattcacggctccctcaccctcggccaaaagaagatccacatcagtagcctcatcagaatcgttggctccagtgacaaatgttgaagtgccaccaagaagtggttctgaattctcttgatccggaccagacaaactatcagtcgaataagacagtgcaagggtgctagtcttttccctttttggtttgtttggataaatagtcatttttattggtattgccagtggagaaaggagcaaaagtatcattataccaaacaaaaggtaggtaatagcgtcacttagttttaaagtatcaccgagaattgtagctaccataagatatacaccgagaaccacactagagatctgtgtgaacatgaaatgactgtgctctgctgcgttgtcctcatccagtgatggagtgcaaggcctaacaaaatacatcaccagaacacatgcggtggggatccccaaagcaagcaacagcaaaaggtttgtgggagagttctgaagcattccattaaatgtttctgtgtagacagcagcactcacagcaacatagcccttgatcagaccagcaacagttccccggctgagaggaaagttcctcatattggtcacaagtgcagcggtgcccaaccatgcgctgctgtttgtgccaatacataaggctatgcacaaattgtcaatgtattttgtaatggaaaaagtcccaacaaaaattgtgttcataccaacttcagcaataaccttccagtggtcacaaacaccaatgaatgacatccccaggcgttgcaggtcagatggcacccagtacggcatgacgagggtcttggtgacggcgagccagagcgtgccgaacccgagcagggcgcaggcggagccgataaggaggatgagccacggcgggaggcggttggcgagcaccccggggacgagccccacgttctcgccgacgtcgttggcgacgccgagcatggtgagcgccttctggttgtaccccagcgcctccttgatggcgtgcgagtagagcgggaacacgtacgcgctccccgccgccaccacccagtacggcatgacgagggtcttggtgacggcgagccagagcgtgccgaacccgagcagggcgcaggcggagccgataaggaggatgagccacggcgggaggcggttggcgagcaccccggggacgagccccacgttctcgccgacgtcgttggcgacgccgagcatggtgagcgccttctggttgtaccccagcgcctccttgatggcgtgcgagtagagcgggaacacgtacgcgctccccgccgccacctgcacccacaccgccgccgccagccccacccacggcggccggctccccgctttcaccttccccacccctccccctccccctccccctcctccggccat

SEQ ID NO: 88369 - DNA, 4097 bp, Oryza sativa
  Clone ID: PAT_MRT4530_87227C.1
gatcaccccaacttagcacaagtgctcgccaaccaaaaccaattcatcgcagctttgctccaccaaatgcaaaacccgcaagcacccgctgctcaagctcacgtacacgctccaccgcagtcaaagctgtcggaattcctccgagtccgacctcctagtttttcaagcacaaccaaccctgtcgaagcaaatgactggttgcacgcggtcaataagaagttggacctcatccagtgtactgatgaggagaaagtcgctttcgccgctcaccaactgcatggacctgcttccgagtggtgggaccacttccaggccacccagccagttggacaagttattacttgggctcgtttctctactgcttttcgtagagctcacgtacctgttggagttgtagcacagaaaaagaaagaatttcgtgaactcaagcaagatggcaggaccgtaactgaatttttgcacgacttcaacatgttggctcgatatgctcctgaggacgttcgcaccaatgaagagtagcaggagaaatttcttgaagggttgaatgacgagttgttagtccagctcatctctggtgactgcgaagatttccaaatgctagtcgacaaggcgatccgccaggaggacaagcaccgaaagattgaaagcaagaagcgtaagttggccaatgctaggatgtttcaaggaccaagtcagaaaccacgttatgcgtttccccctcaagttggttcttcatcggtagcacagcgtgcaccccgtccacagatgaacaacaagctgcagaactcaggatggaacaacaatcagcgttctgcccctgcccaggttggatcgacacgcagagatagctctgggaagatacttgtgtgctacaacagctatgagcctggacacttcgccgacaagtgcccaaagccaaagcgtccgcaagctcctgcatctgcatgcaatgccaactagaacaacaatggcaactgcaacaacaacaacctggtgaggggacgtgtgaatcatgtctcggctgaggaggcacaggctgcgccagaagtcatacttggagctacgcattcctttatatcaagagattttgtggcaaaacaccaaataagggtagaagatcttagcaaacctatgatagtatcaaccccaggaagccaactacctgctaagctctttagcccattggtaaccattgagatccaaggagtcacttttctggctaatctcatccttctaagctctaagaatctggatgtcattcttggcatgaactggttgaccaagcacagtggtattatagattgtgccagctgatccacatctatgactaggggtactggccagcgagtcactttccatgccaagcctgtatttccttgtaagcaagttctgaaccacgtcagtatggatgaaatacccattgtgaaagagtatctagatgtttttccggaggaactaccaggcatgccgcccaagagggacatcgagtttcgaatgacttagtgcccgagacagcgccaatctccaagagaccgtaccacatggctgccaaagagctagctgaagttaaaaagcagttggaagaactcaaagaaaaaggccacatccgaccaagcacttcaccctggggagctccagttatcttcgtggaaaagaaggacaaaactaagagaatgtgtgtggattaccgtgcactcaacgaggtcaccatcaagaataaatatcctcttccgaggatagatgacctctttgatcaattgaaaggagcaaccgtgttctcgaagattgatcttcgatccggctaccatcagctaaggatccgagaggaagacatccctaaaacggcattcacgaccagatatgggttatatgaatgcaaggttatgtcgttcggactgacgaatgcaccagtcttctttatgaatctgatgaataaagtgttcatggaatatttagacaggtttgtcatggtcttcatcgatgacatcttgatctattccaagacagcagaagagcatgagcaacaccttcgcctagcgctagagaagcttagagaacatcaattgtatgcaagttcaataaatgtgaattttggctttcagaagtgaaatttcttggacacgtaatttcagctcaaggagtggcagtggatccaactaacgtcgaattagtgaccaattggaatcaacccaaatcagtgacccaagttcgcagtttccttggacttgcaggctattatcgcaggttcatcgaaaacttctcaagaataacaaggccaatgactcagctactaaagaaagaagtgaaattcatatagacctcgcagtgtgaagaggcatttcaattgctcaaaaagaagctagatttccaggtgtattgtgatgcctctaaacaaggactagggtgtgtcttaatgcaagacggacaagtggtagcctatgcttcccgccaacttcatcctcatgagagtaactacccaacgcacgacttggaactagctgccgtggtgcatgctttaaagatctggcggcactatcttatcggtaaccgttgtgagatatatacgggccataaaagtttgaagtatatattcactcaaccagatctaaatctccgtcagagaagatggttagagctcattaaagactacgatgtgggaatccactatcatccggggaaagttaacgttgtggttgatgctttgagtcggaagagttactgcaatgctatcatctatgaacagtgtcctcctggattgtgctgagagcttgaggccttgaatttgggaatagttagttatggctaaatagtgaccttaggggcgaaacctctactcctttaccaaattcgagaagcccaaaaaggtgattatggtatccaagagatcaagaagaatatgatgaggggaaaagcaattgggttttctgaagatgaacatgggaccatctggtacggcggacgtgtttgtgttcccaatgatcctgagatcaagaagcttattctgcaagaggctcacgagagtcaatactcaatacaccccggcagtacaaagatgtatcaagacttgaaaatgaaatattagtgggtcagtatgaaacgtgaagtagcagagtttgtgacactctgtgatttatgtcaacgggttaaagcccaacaccaaaggccaaccggattgctacaaccactcaagatcccaaaatggaagtgggaagagattgggatggatttcatcaccggtcttccaaggacccaatctggatatgactctatttgggttgttatcgaccgcctaaccaaagttgcacatttcatagtagtcaaaaccacttatcctggtagaagaaatgggaactcgtttgaacttcagcactgcttatcaccctcaaacggacggccagacagagcgagttaatcagattcttgaggatatgctcagggcatgtgccctggactttggcaaaagttgggataagagtctcccatatgctgaattttcgtacaacaatagctaccaagccagtcttcaaatggcaccttttgaagctctctatggccgaaaatgtcgaactccactcctttgggaccagaccggagaacgtcaagtttttgggactgacattctaaaagaagcagaggagaaggtcaaggttatccaagcgaacctgaaagttgcccagtcccgacagaaaagctacgcagatacgcgtcgaagggagttagcctttgaagaaggagactttgtgtatctcagagttacaccgcttcatggagttcgtcgtttccacaccaagggaaagttggcaccatgttttgtgggaccttacaaagttcttggtagaagagggaaagttgcttatcaattggaactactggcatctctgggaggagttcatgaagtattccacgtgtcacaactcaagaaatgcctccgagtcccgatagagcaagcagatccagaacagattgagattcaggaagacctgacttatgtggagaagcctataaggatcttagaaacatctgaaagacatacccgaagccgagtgatccgtttttgtaaggttcaatggagcaattatttagaagaggaagcaaca

SEQ ID NO: 88370 - DNA, 241 bp, Oryza sativa
  unsure (1)..(241): unsure at all n locations
  Clone ID: PAT_MRT4530_87228C.1
ttgcacggtttcagaattccaacgnctgaatatgtcatcccccaaaagtgatggatgtccctgtanacatgacttgagcacagaaagtagatagaaccntacaagtacgtacttgtcaaaaccaaaggaaaccatgattatggatatcaaattattgtttgtgttggtaagtggtaactatgtaaccatggtaactatgaccagggggagttgtgaacacctcatcaaaaaaaaaaaaaaa

SEQ ID NO: 88371 - DNA, 429 bp, Oryza sativa
  Clone ID: PAT_MRT4530_87229C.1
tgttttggcgagcccgcagtgctgcgcgaacccaccgacgctgaacccggccggcggggaggggaaggtggtggagagcttcggcgggatcaaggcgtacgtcgccggcgccgcggagtccaaggccgccgtcgtcctcatctccgatgtcttcgggtttgaagcgccgaacctgaggtacagatctttgtgttatctgatagtactagtttttcgattccacctgtacaggatatgccactgttctgatatattttgggggaaatggattatcgattcccacctatacaggatatgccactgttcctatatagtttgggaaatgaattattcattattgcgtttgttagaaacttcgaaggtcttccgggcactttggggctgactgatgccataccgtgtgctgggatttttacatggttaataagt

SEQ ID NO: 88372 - DNA, 362 bp, Oryza sativa
  unsure (1)..(362): unsure at all n locations
  Clone ID: PAT_MRT4530_8722C.1
aaatgcacctgttcttncgaggttcaacgcagtccaaacccagtanctccgaggaggagagctcatcgtcctanncgttggagcctccntgttattgtctgaagaaaagcgctccaggctaggactttagaatcacataagtattttgtaactgtagcagataagtgtagatcaaagtctatatgtactagtacatgattcagcatgctaagcatcatcccagccaatggcctaccaaaggtgaaagtggcattgtacatgattcagcatgctaagaatcactagacaggagcttttgtgatcatgctgaatgcttgaatctcatgataaaagtaaagtactcctagcaatagccccctttt

SEQ ID NO: 88373 - DNA, 2002 bp, Oryza sativa
  unsure (1)..(2002): unsure at all n locations
  Clone ID: PAT_MRT4530_87230C.1
ttaagagaaacagcagcgagcaagccgtcaaggagcgcagtcgtgacgtttgactggacttctaaaaagaaaaaaaacaacgataatcataatatcatattacgcccagtgcgtgcgtgctacacgctccggagtctgcacccatcttccccacgtgcgcgcccatcgccgggccaccggaacctgcacggccgtggctgtggacttgcagttggagctagtagctagctcggggagtagtagctaggtgtagttcatcggatcaagggggggatggccacggcggcggcttgcatctcgttcgcgtcgccgtcgccggcgcgcgtcgtgatcaggcggcagacgcgggcgtcggcgtcggcgtcggcgacggaccggcaggaggtggtgtcgccgaagcggcggctgccgctgcggaaggtgccgggggactacggcccgccggtggtgggcgcgatccgggacaggtacgagtacttctacggcccgggcggccgcgacggcttcttcgcggcgcgcgtccgcgcgcaccgctccacggtggtgcgcctcaacatgccgcccgggccgttcgtggcgcgcgacccgcgggtggtggcgctgctcgacgccgcctccttccccgtcctgttcgacacgtcgctcgtcgacaagaccgacctcttcaccggcaccttcatgccgtccaccgacctcaccggcgggtaccgcgtcctctcctaccttgacccctccgagcccaaccacgcgccgctcaagaccctcctcttctacctcctctcccaccggcggcagcaggtgatccccaagttccgcgaggtgtacggcgacctgttcggcctcatggagaacgacctcgcccgcgtcggcaaggccgacttcggcgtccacaacgacgccgccgcgttcggcttcctctgccaggggctcctcggccgcgacccggccaagtcggcgctggggcgcgacgggcccaagctgatcaccaagtgggtgctgttccagctcagcccgctgctcagcctcggcctccccaccctcgtcgaggacacgctcctccactcgctccgcctcccgccggcgctggtgaagaaggactacgaccgcctcgccgacttcttccgggacgcggccaaggccgtcgtcgacgagggggagcgcctcggcattgcacgggaggaggccgtgcacaacatcctcttcgcgctctgcttcaactcgttcggcgggatgaagatcctgttcccgacgctggtgaagtggctgggccgcgccggggcgcgtgtgcacgggcggctcgccaccgaggtgcgcggcgccgtgcgggacaacggcggggaggtgacgatgaaggcgctggcggagatgccgctggtgaagtcggcggtgtacgaggcgctgcggatcgagccgccggtggcgatgcagtacgggagggcgaagcgggacatggtggtggagagccacgactacgggtacgaggtgagggaaggggagatgctgttcgggtaccagcccatggcgaccaaggacccgcgggtgttcgcgcggccggaggagtacgtgccggacaggttcctcggcgaggacggcgcgcggctgctccgccacgtcgtgtggtccaacgggcccgagacggcggcgcccaccctgcacgacaagcagtgcgccggcaaggacttcgtcgtgctcgtcgcgcgcctcctcctcgtcgagctcttcctccgatacgactccttcgacgtcgaggtcggcacctccacgctcggctcatctgtcaccgtcacctcgctcaagaaggccaccttctgaccaccgccggtcaangtctccggcgcccggtcatcttattttccgtcctcttcttcttcactaaatattttagtngtattagtatttttttcactctgtatggtgtgatcaatcagcttgtacggatacggngttgcactggtngtgattttctttgntgncntaaaaaaaaaacaaaaaaaaaaaaaaa

SEQ ID NO: 88374 - DNA, 1556 bp, Oryza sativa
  Clone ID: PAT_MRT4530_87231C.1
gtggatccccgggctgaggaatcggcacgagggacggactctcctctttataacccgtctcccttctcatctttttctccacagtcgcctcctcccctgccaaaccagtctcccccaaatctcctttgcgtcctctcgattcctcagcgaccatgtcggcctactgcggcaagtacaaggacgagctcatcaagaatgctgcctacattggcactcctggcaagggtatccttgctgcagatgagtccactggcaccattggcaagcgctttgccagcatcaatgtcgagaacgttgaggagaaccgccgctctctccgcgagctgctcttcaccacccctggtgccctccagcacctaagtggtgtgatcctcttcgaggagaccctgtaccagaagaccaaggacggcaagcccttcgtcgatgtcctcaaggagggtggtgtcctccctggcatcaaggttgacaagggtaccgttgaggttgccggcaccaacaaagagaccaccacccagggccacgatgatcttggcaagcgttgcgccaagtactacgaggccggtgcccgcttcgccaagtggcgtgctgtcctcaagattggccccaacgagccatcgcagctttccattgacctgaatgctcagggtcttgctcgctatgccatcatctgccaggagaacgggctggtgccgattgtcgagcctgagatccttgtcgatggctctcatgacattgagcgctgtgcctatgtcaccgagaaggtcctcgctgcctgctacaaggccctcaacgaacaccatgtcctcctggagggttccctcctgaagcccaacatggtcaccccaggatctgaatccaagaaggtttcccctcagctcatcgccgagtacaccgtccgcgccctccagaggactgtccctgctgccgtgcctgccattgtcttcctctctggtggacagagcgaggaggaggcgaccgtgaacctcaacgccatgaacaagctcagcaccaagaagccgtgggctctgtccttctccttcggccgtgctctccagcagagcacgctcaaggcctggggcggcaagacggagaacgtggtgaaggcgcagaaggccttcatcaccaggtgcaaggccaactctgaggctacccttggtacataccagggtgatgctgtgctcggcgagggtgcctctgagagccttcacgtcaaggactacaagtactgatctgcctctggtggtggctgaagatccgattggacatcctccgtatgcatatttagggttctgagtgtggtttggctatcaagcgtccaatcttacgggtatcaaaaacttttgtcgcaataatctgaacctgtgctttttaataattaatacctgtcatcggtagtagttttttggtattcctgtaatcaaatgctgcgtatggtaaattggagcagcggctttaattccatgctatctttttattgttattttctgctgtactcctatgttaattaaaccttttacctaaaaaaaaaaaaaaaaaaaaaaaaaaaaaaaaaacac

SEQ ID NO: 88375 - DNA, 646 bp, Oryza sativa
  Clone ID: PAT_MRT4530_87232C.1
cggaatgcataacagacggtacagtaagatgggattagaggcctttcaaaggcagaaagagaaattatgctcctccagttggcctaggcttcaactctgggtttttatttctattgctggtcattcatacacaagatttcatgagcccacagttcaccttttggtcctacctcatttatcagcataggcgatagtagttgatgattatataccatttcccagactattccgaaagagcctaatgttggggatatttcaaggatgctaattgttgtaatgggtgcaagccatgttattaatgggtcatgaggaattagtctctgaccaaagtatctaaaaaatgctaagaaagaccaatttgtggtgctacttgatcccaagaaacaaggtgtacaggaagggaatgtgaaatcggtttctcactttttatggtagtcagtatctaaatcttacagtagaaaccaccttgaccgtgctgaaatggcatgagttattgaggctgctggtagaacacttgaaactttgcctcaagatcttcagaagggaatagatcttggtgtagtctctccttagatgctacagatgttttttttaccttgagaaatgccctgttagggcatgtttaataaaccgatttcacattccc

SEQ ID NO: 88376 - DNA, 209 bp, Oryza sativa
  Clone ID: PAT_MRT4530_87233C.1
cgggtggcctcgaggtgggccagtggcctaggcggggcatcgaggtgctggttgtgatgcctcacccagaagaagaggtagacggtgggtcgatgtttttaccttggaagatcgctgttggaattgttaggacattgtgggaggtggtggtggatccgacagctgaagttaccatggacgaggccagaggcgcaggggcatgtgagtaa

SEQ ID NO: 88377 - DNA, 147 bp, Oryza sativa
  Clone ID: PAT_MRT4530_87234C.1
cgcccagccgtcccgaacttctttggctccccccgcaagaaggcggggtccccctacttctcgcgggcaatccctctgcgctcgcaaagcgggcgacgcatgcccgcttggtccccgcgctcgccggcctcgactgcgcgctgtctc

SEQ ID NO: 88378 - DNA, 936 bp, Oryza sativa
  Clone ID: PAT_MRT4530_87235C.1
atggggaacgaagagggagagtgggatcgtgggaaggagggtgtgcagtggaggtcatcgctgacaagcggtggtgatgtcagcgaggagctatggggcgacggttggttagggttagaggagaaacacatgttcatagtaaagagcacaacaagagagcagcgaggcaacaaaggctgtgaagcataccaggacgggcagatgtccctcaaccaatctcaagtacacgacgacgacacgctcgaggacagagtctgtatggcatccctaattcctaataccaaaaatcttgacccctcaaatcttgaaaaccatgcaaactgtaacagtatacccagcttgctgcagccagtgcaaatgaccaaagccaatatagaccatatttcccttgttttgctgacgtggcatatagcgggcccacttctcagtgtgtcgtcggtgctgttgttagacaaatcgatagcaaaaaacagtttccagcgagcaggaggctgcactgctggaggttgcacaaccgcctctctagcgagttgccggagtcattcggccgcctcgccgagctcaacacagagatcccgagggaggtccagtaccacctgcagctccggcaagcggcaactaccccagctctggcgggattggcccctccagcgagttctccaacagccgcaactcgtacagcctgttgcagcgctggagctccgatggtataacgccggtgaagccattcttctgcaggttcagaatgttgagagatgccagctttgcgatctccggcaggatgctcctgatcccaaagccgcttatggacagcttgagcaggccagagcaatcgctaagctccactggaatgccgccggtgagcacgttcgaggagaggtccaggtcgccgagcaaccaaaggtcatcgagccacggagggacggcgtcggttag

SEQ ID NO: 88379 - DNA, 727 bp, Oryza sativa
  Clone ID: PAT_MRT4530_87236C.1
ttttttttttttttttttccgatgtgaacttatttgtaaaacattcattgctcaacgtagatcgttgtaaaacagtgcatgttgggacactcaaaaatcaattgggagaagcagctagccaagaaagggctcttgcgcacagtcaaaatggactggatcatgaaggcagtttaagatcctgatatcctgtccatatgttccaggtcaggatatgtactccactttcatgctgcatctgagtagtcatctgaattttgctggccttgctgcctctcttgtgcttactacttataagttttaactgaatggataaaaaacataacaactgtttttttcccctagcatgttgcttcagcctttggtcaattgagctcaggctgtttcatgaaacatatgcttgcatttctcctttttggtggcaagcaagcacgtctatcatctgaagtttgcgtacttgattcgggtagtgatggcgacgcagaagcatttcctcgagtccctacgcgccgccggcgagccgaaaagaggcggcgggtgcgccggcgaccgagaagcgggggcggcgtcgccgtggagactagacgagacggcgatgtggccaaggaatgtttgggttccgaaggtccgcgtccgcgaccgtgaaagccaaaaaccaagccgagtgatcagacttcagagacggagaccgggagatggagtgcctgactgcctgtgcgccgttgcctga

SEQ ID NO: 88380 - DNA, 849 bp, Oryza sativa
  Clone ID: PAT_MRT4530_87237C.1
gcacgaggccccccttttttttttttttttttttttttttttttcactcataatggaaggtacgtagaaatttttttttttttttaatatcacagacgttttcaatatgaaaagatgttaggaaaaaatgaaggggaccttacagggtaacagtacctgaaaggtcataggatgcacgggtggtaaaagttaattaagcctgaaaatgatcaaatacagatgtttcactaattacagcttaatacatgataaaaaaaagtactagtagggtctaattaatccatcttctcaagctgacatacatgccggggcacagaacaatgacacaagtacttagtcaattggaacttcaacctccatcttcacatcagaattgtcaagaatcttcataaagtctggcagagtaaaatttgaatctttggtatagccagcttcttctaaaacatggatcaaaactttctgcctctgctgctcagtcataaaagaaccagtcagatcccgcaagatgctcaagatatcatcaaatgccaccttcccattgcagtcggtgtcataaaccctgaaaataaattcaatttttgggcccggctgcgccggggcgaaaacccgctgagtaggccgccacgctctgctaggcaggcccatccagcttcctcagaagctctcggaggagagggggccgccggcccgccaggctgcggacccccggggggatcctccccgccccgtcggccaacccggcacccgggggccccggcggccgatgcttggtcccctcgaaccacggagctccgccgccgccgcttgctgccgcacgacgagaggaagggagaggcggaggcgaatccc

SEQ ID NO: 88381 - DNA, 1077 bp, Oryza sativa
  Clone ID: PAT_MRT4530_87238C.1
atgctgcggcctgtggataatgtgcacactgaaaagagagcacaaaaattggattgcacagatgaaacttacataagcctgagtgtgtggatattccctatctctttcgaaagacgcacgagggctgcgcattttgcattaagaggtagaaaactcatagtacaggtgatgaacctgcttaaagaaaaagagagaaagccagaacctctggctggagctaagacaattatacaaacaacaattgcagagggctcactcaacaagtacttgggaaagaacaaaccaccgttaccactaaaaaaagagggagaagacctgcagactgtacggcacaagagcacagtacacaaggttcaggacttcgagctactaatggttgtcaacgttagaaaagaaaacaacaagatcgaactcacactagaaacaaatcctgaacaaaccaaccgcacaatcctcgaggaatcgaagaagcgaacctgcaatcaaacgcagaccgaccggccgctccaatccgaacagcgatttgcagcagccccccgatcggggagcaccagccgacgaggcgcccggccggagattgccctcaccaacgaactcgggaaaggcaggcgagagcgagcaccgcaccttcacccacagcgacaacccccgcggcgcggggggacatatactactactgctgctgcaacttttcagcccgtgcagctgtcgcattcctcccccaatcccatccgcaccccactccctttcctcctggatcgcggcagctacagcgacgaaggcgaaggcgaggtcgaggcgaagctctgggtgcggacctcggaggatagagtatttacgcgaataggtccccgtgctcgtgtgaaagaaggaagcgaggaggaaagtagagttgggaaggagtccgccgcggttcaaccatcggcgaccgcattcgcctcgtgcggccggactgagtccgtatttgacactatccaagtgaaaaataaacgagcagactgcttctccaacaacctgtggaacgacttcactaagaacactacctatgatttcataccgaacaacttgggacttagc

SEQ ID NO: 88382 - DNA, 310 bp, Oryza sativa
  Clone ID: PAT_MRT4530_87239C.1
gcgcctcccgtacagaagtgagcaagattacacacttcttcaaaaagaactgaactgaccccttgtcggggcggttggaggcggaccgggtccacatgtaccataatattgatctgtcgatacccaaaatgcgtaacgacctttctatatgatggacgactactatgtctgtatctatgctggtgtaaacatctgatgtctcaatggggatgttaagctttttttcttgtgtgctccatagttgtccttttcagttggtattcatcgtttgtttactaatttttggtcttgattttacttatttctctta

SEQ ID NO: 88383 - DNA, 958 bp, Oryza sativa
  Clone ID: PAT_MRT4530_8723C.1
tcacgcgaacggacggccgagatcgaaccaatccaaaacggactgccgagatcgatcgggtccacggcggctcacggcggacgaccccgatgacgtcggcaatgacgtcaccgacagcggcggcggctcggcggagcggacggctcggacggtgcacgcttgccggcgaacggcggcactaggacgcaaacggaggccaccagcacgtagaggacgacgcggcgaacacaccggtgaccaaaacggcggcggaagaacaacggacgacgacggcgacgaggaggaaacggcggtaaccttcgggttgacgacggcgacgaagctccggcgatctccggcgacggcgaaggggcggacgaggacggcgacgcgacggcgagcatgacggcggccttcccgagcgacggcgacggctgaaacgacggcggcgcacggctggagcggcggcggcgacggcaaagctagggcacatggcgctagggctcttccgacgacgagaggcgaagacaagggcggcgacgggtagaggagacaccggggaagcttttaaaggggctcggaggcggcggcgaaggcccacggcggcggcaacggcgaaggaaagctcgggcttggagagaggaaagccgatccgattcgaactcgaatccatcgatttccaaaccgatttagccgaagcttccaaagaagaaaaggtagaggagatcccgaggatcatttcccctcttttgattcggccggagaaggaaaggagcggccgaatttggaaaggaacggcggcggcggcacgctagggttcggccgggcgacggcggctcggggaagacgaacctgacaggtgggccccacctgtcagcgggcggacgcgcgcgcggcggcggactgggccgactgggccgaggagagagagaagagaggttttgggccgactttcggcccaaagccaaaagaagacttt

SEQ ID NO: 88384 - DNA, 716 bp, Oryza sativa
  Clone ID: PAT_MRT4530_87240C.1
ttaggatgccacgtcatcaccctccctctttcccctctcccttcctcctctctctctctcacttctctcctcttgggcaggctggccggcgggtggggaggaggtcgccgggcgaggcgggtgaggtggtccgacggagcgagcaagccgccgctcttctccactgccggccaccggccgcgcatgcgcctccggtctctctctctctcttccctgggtagggcagccggcggggcgagtgcgggagaggaggagggcgtcggcaacacaccaagctgcagagaggacgggctcgaacatgacggcggtgcggacggccaaggaccatgtgtggttggagcaaccgccgccgggagctagagcggcagtgacgatggtcttattggtcttgatgtcgtctcgtcgcagccgatgctggagatggcgaggctgccgctggtgccttgtggcgacgtagctgatgccgatgaggagaccgcgcttctcgccgcagacgcgcgggtagctcgccgccgcccgcaccccgatgacgtcgtcaacggcggcggcggcgcaaacgcgctgatgagcgaggacgagctccgcgtgcttgtcgacgccgtgatgatgcactacgaccaggtgttccgcctcgagagcttcgccaccttggccgacgtattccatagccgctgacggatcagcagttgatgggcatctgcaacctgcagcagtag

SEQ ID NO: 88385 - DNA, 357 bp, Oryza sativa
  Clone ID: PAT_MRT4530_87241C.1
atggatatggcagagaagatggtggagtgcccggcgagcggcaagacgaaggccaggagttgccggcgcatgcggcaacaagcagagatggagttcggtcgtgcgcgatcgattcgtgtccacgccatccgaatgcggaggagcgagctaaccacgtcaatgattgcgaggacagcgatggatgccgaaacctgtgatgacagcgtggttgaatcgacgatcatgggcgaaggtctcgcggccagcgctgatcatttaatcaactccgacgatgtacggtatgttattgattcactagcgaacgacactattgttccatattcactcgaacagaccgatgacaaggaagacagctag

SEQ ID NO: 88386 - DNA, 586 bp, Oryza sativa
  Clone ID: PAT_MRT4530_87242C.1
tcagttaaaaaaaaaaacacggtcaatacgcacacaagttttgcgcccccacccgctgcgcgcatccgaggcagcagcgctcacgccctttgccttggccacacgccagcgaatgaccgagtccacgagagacgagacgctggcacgctgctgcggtgctgccctctccgcgaggcggctcggctgtgacgacgcacacaacgtccgcgacctcacccaaccaccatcaattcgacgcatcggtgtactaaactcggctactttccccatctcctcctcgtcctcctctcccggtggtcgattagacgaggcgtcgtcgcctcgcttgccccccgcaaaccggatcggcagatccggccgcgcatcccgtccaccacccggatggcttgcgcctccccacccatcgcggccccggggatagcgtagcatgggccaatccccctcgactccccgcctcgccaaatccagctcctcctcttcctcttccacctcctccgcctcaccctcccctcctcctcctcctcctcctcctcccatggcgccgtccaaggcgcagcgtacgatgctggtggtggcggtggacgcg

SEQ ID NO: 88387 - DNA, 501 bp, Oryza sativa
  Clone ID: PAT_MRT4530_87243C.1
ctccaccgccaccgccaccgcgaggaagacgcggtcgccgtagcagccacgtctcctccaccacctcgtctccctctcgagagagacaccgcgcgtctcgtctcgtctcatggcgccgccgcctcgggctcgcttggtgcagatcgggacccgccgccgccgctgccggggccggatcccgccttgcaccaagtgaatcggagccggcgtagcgccctccttccgccgatccgccgccgatgctgcgctgcttggttgtttttattgtctctccttcgtttctgggtcggtatcgggacggggttagcgatgaatcggatcgaattgctgatcctcctcgtgttcgtgttcgtaggtgtggggcgtacgcgtttgtattagatttaatttttttttcagatctagatctggtgcctaattctcgattacttattctatctatgattcgtgtcggcgttatcaagttggaatttcccctaaaaaaaaaaaaaaaaaaaaaaa

SEQ ID NO: 88388 - DNA, 702 bp, Oryza sativa
  Clone ID: PAT_MRT4530_87244C.1
atggcgaccacgccgcccgcctcgtcccagccgccgccgccgctgcctcgcgcgcttccttctccaccttctaccctcccgcgatctccctatccctctcccgctccgccgccgccagctgccgcggccgcctcgccctcgcggctccaagtccaagggcgcaagagcggaggagaacaagaaggggcaagagcaggagcagcaggaggcgtccatgacggtggtggacggcgcagaggaggccgggaaggaggaggaggggagaagagccccgagacggtggcggcggagctgaaggaggccgagaccgcggccatcagcagcgggtggtgggtcggcgtcgcgcaggagatgtcgaagatcgagtggccggtgcccgggaaggtggtgggcaccacaggcgtcgtgctcggtgtcatcgcgggctccaccgccgcgctgctctccgtcaacgcgctcctcgccgagctctccgaccgcaccgccgctcgagcccccacctgccgccggctcatgtcaaggggagagagagaaataagggagagaggaggaaaaagaagggtgcataagtgtcacgtcaacgccacgtgggacgaagaccaagtcaacactgccacgtgtgcgctacatcagcaaaaccactctccaaaaccaccaaaagagtcaaattgtaccggttttgtttcccaaaatgctaaatag

SEQ ID NO: 88389 - DNA, 1734 bp, Oryza sativa
  Clone ID: PAT_MRT4530_87245C.1
tcagaagaaatcctggagtccccggccggcgaagacgcggtcggagagctcggcgaggagcgcgttgacggagagcagcgcggcggtggagcccgcgatgacgccgagcaccacgccggtggtgcccaccaccttcccgggcgccggccactcgatctccgacatctcctgcgcggcgccggcccaccacccgccgccgccggccgcggcctccgcctccttccgcgcccgcagcacctccttcagctccgccgccaccgcctcggggctcttctcccctcctcctcctcctcccgccaccacctccccggcctcctccgcgccgtccaccgccgtggcggacgcctcctgctgctcctgctcctgccccttcttgtcctccgccgcgcctgcgcctgcgcccttggacttggaggccgcgcgggcgaggcggccgcggcagccggcggcggagcgggagagggatagggagatcgcgggagggcggagggtggagaaggaagcgcgcgtggcggtgggtggcggcgtgcggcggcggcgtgaggggtgcgaggaggcgggcggcggatggggtggtggtggtggtggtggtcggcgtggtcgccatggcttcccggtttggttggtccagcggcctaactttcccaactcacgtctctcgttttccatgcgcacacgctttttaaaccctttctggatgggtggtgagttccatgactgtagaggcctcccgatcggttgaacagatgccagaaaacctggaggtgcttcggctttgcgcattactgttagaactcttgagaaaaatgatgacccactcaatgatactgccttctcaacagattccttgtcagtgaaagtaacaaatgcagcccctttagggtgcccagaaattgcatctgtcaatatatttatcttaagcacagtgccgcacttcataaaatgccctgacaatgcttcctttgttgctgcaaaatgtacatttgtcacgagaacagttctggagtcagcatcctcatctagattagcatggggaccttcttcaaccctgttaatctgtggtgttgctgatgataggaaaccttgcttcacattgtttatctgtgcctgcttggaacgaagcttgagcacatccagttccacttgtttgagctttagtttcacatccagcatttcatggcatgctgactcagagactgctgttactgagctcttcacttcagatatgaattcattctgactttgtagtggaacacttcttgctggcaaatttggactggacttttggcgaataacatctctaacttgaagctgattacgctcaatatcaccaaaatttatccgaccaatcaacctgcttctattggacttctctgtgtgctcatgtgcttgtactgtgttgacatcttgatagcttctgggaaatcttctggaatttgctatatcaaataaatctccttctgtacttgagttcatacggcatcttagctcatgctcagtgaccattaacttcgccttcttatgtagtccattttgaacatgcatgtcatcatcttctgtagcacaaatacgatcctttatggcaggctttcctagcctatcccaaacattgccacgttttttaatagattctggatctagcacatcatcacttcttacagccaaaggaaaccgtcttgcagaagcatttcttccaatgcacacttcatggcggagttcatctttgaactccat

SEQ ID NO: 88390 - DNA, 381 bp, Oryza sativa
  Clone ID: PAT_MRT4530_87246C.1
ttgtttttttaattttttgggtttttttttttgtttttttttttttttttttttttttttttttttttttttttttaggcccaaacttaatacattcattttacaagaaaaatgtttaaacaaaaaagttttttaatttacaagtttttaaatgacccgtaatcaaaaatgaaaaccaaaaacccaaaaaaaaacagttaacaagttttttttgccaataccagccccaattaaacctggggagagttatttagggcattaaatttaaacttgggacaaaaatttatgcaaattcgggggctttaatccaaaacctggggggatattaacttttggaaacccaaaatttatgcccccatgccacgggttccccattcaagg

SEQ ID NO: 88391 - DNA, 806 bp, Oryza sativa
  unsure (1)..(806): unsure at all n locations
  Clone ID: PAT_MRT4530_87247C.1
cgtaatacgactacctattatgggcgannattgggtaccccctcgagnggccggcccgggatgttcccaattactactactctctgcctcatcctcatccccatccccatcccgactacctcatccccatctactccgactccgagagagagagaccgcgagaggcggcagcgtggcggggtggcggcgtcggattggcgatgacggctgttgattcggtgacggagtgacggcggcggtggttgatccggtgacggagtggtggctatgtgcgaccgcgcgcgcgggcaaatccggtagcggtcctaagtggatctccggcggcgtcggcgatggtcgacggtggatccagcgtcggggacggtggtctcgagcagatccggcagccgtgtgagcgagcggatctggcgggagtcgtgggcagatctccgacggcggtcacggcctcgcgggtggatctccagcgacggagacgacagtggcgggcggctctccggcgacggccatgcaggtgctccccgtcctctttcactctcccatggtgggctcgttgctgcttctcctctcccatggcggtaaccaactactttggagagagacaaagctagagcaaataagatcggattgtttattccttatgggtggttcttatgggtggttcttatgcataatgctacctcagaaaaggatagctataagaaccacctctcacatatataagtagacctatgagcaaaaaaaaaaaaaaaaatttgccattgtgaatgcccttatatgtagaaagggagtcngaggacggagccgga

SEQ ID NO: 88392 - DNA, 249 bp, Oryza sativa
  Clone ID: PAT_MRT4530_87248C.1
aaaaaagcctggtactttcttgggggttaggtttctttttaactttcttttgtaattttaacccttttctttcaatctggtataaactacaaagcaagtctggacttccttttctttcatctggtataaactacaaaggaagtccagactgagccaagctgactatcccagacgatgcgggggggttactcttacataagatcgcctaaaagaaacccaccccccaagatagttccaaggctttttact

SEQ ID NO: 88393 - DNA, 458 bp, Oryza sativa
  Clone ID: PAT_MRT4530_87249C.1
actggccgggtcgacgagttcactaatgagtgggccccctcgtttggttgtagaaagggagggggccgccttttttttttcaaaaacaaaatgccatgcttctcagcaagaagagttaaggcctttttacccccatgggaagatctggccaaaacttttaacctgcagagcccacccccttttaggcccccaactaaaaaaaaacccgaacccccaaaaattttttcattgcccaaaaataccagcattggggggaaaccaccgcttgacagcccaaccccctgggaaacagaccccaaaaaaaaaaaagaaataagggggggaaaaaaaaaaattcaaaccccccttgttggttgtcctgccccccgtcgggctactggcggttttttttttcaagccagtccccaaattttttaacaaaaggctggcttttttgggccggtagaggttccaaagga

SEQ ID NO: 88394 - DNA, 402 bp, Oryza sativa
  Clone ID: PAT_MRT4530_8724C.1
atggtcgccgccggcgaccaacggcgcggcggagtggcacccgagagagaggagggaagggggaagcgaacggaacggtcttcggctcaccccggtcgacgagggcggcggaaacgacggacggagcggaggaagacggcggcgcggttcgggatgacgatgacgacggcgctccggcagtcgacgggcgaagcggagcggcggacggggtcggcggcaacacggcgaagcggacggaggtgtcgccgagtaaggaggaagtccggagcggcggcggcggcggaacggagctcggcggcgatggcggagagagaggagcacggcgcgagcacgaaaccgacggcgagagcgagcggcgagcggcggaaacggaagagcgaagctcgggcaacgtttaaatag

SEQ ID NO: 88395 - DNA, 989 bp, Oryza sativa
  Clone ID: PAT_MRT4530_87250C.1
gtgttttattatcttttaattatagctcacgcttcctctgatccctctcttctcccaactctccactcccgcaccgcacgcacacgaaaccgatttccctccgccgcaaccggagctcacctcacctcgccggagaagatccgccatgcctcgcgtgcctctccccctcctcctcctcgtagccctcctcgtcgccggcggcggcggcgccgcggcggagacgaagccgacggcgtacgaggcgctggcgacgttcgacttcccgccggggattctccccaagggggtggtctcctacaccctcgacgacgccaccggcgacttcaccgccacgctcaacaccacctccacctgcgccttctccatccagggctcctactccctccggtaccagcgccgcctctccggccgcatcgccgccgaccgcctcaccaacctccagggcgtctccgtcaagatcctcttcctgtgggtcaacatcgtcgaggtcacccgccacggcgacgagctcggcttctccgtcggaatcgcctccgccgacttcggcatcgacaacttcctcgagtccccgcagtgcggctgcggcttcgactgccacgaccaccgcgatctgtcgctgccgcttccgctgccggagccccagcctgcggctgcgaggtgcgttctagaatcctcctcctcctcgatccttggaggttgctgctctaaagcaaattcttggataaatgctgttggtgtgagctgcaagatccaaatctatctttagatgggttaataaacaagaattggtagatccccaactttttgatgggataggaaattcagagctcgatttcgtatgtttctgcactgtttcagacagtttagagagaatcacaggagaaagtaagatcagctgaattttcttgtatgcaaattctttgggaactataccgagaaaaaaaaataactcaatggaattatgttctttaaaaaaaaaaaaaaaaaag

SEQ ID NO: 88396 - DNA, 259 bp, Oryza sativa
  unsure (1)..(259): unsure at all n locations
  Clone ID: PAT_MRT4530_87251C.1
cctttatcgcttttactaattatatatatatgcgggcgggcgcataaaaagagatcgatcatatacatcgatcgaagagagagagagagagagagtaattaacatggcgacgagcaagaaggaggtgaggcacggcacggcccaggcgaaggtgaacggtgactactatattctactgactggggggatcaacngcacccctctcgaggccgtcaaagtcgctgactcccagcccgtcgatctcttctaccaggctcgc

SEQ ID NO: 88397 - DNA, 1948 bp, Oryza sativa
  Clone ID: PAT_MRT4530_87252C.1
gcacgagggcgggggccgaatgaggcgctggttctctcttcttctccaactccacctcgtcacttccagaccaagggagaaagttaaaaaaagatatatacagtgagagatttttctctctccggtctggagcacaaatgggcatcttcagtggagcgggagcacatcgccctagctgcccgtcggccgcgaattgcgcaaaatgggctcaaacctacctgaagtactgcctttgtagcacgagggatggcatggcactgacgcttggactgttaagcgtcatcagctggggagttgctgaggtgccacagatcataactaattacaagcataagtcaacagaaggcctttcccttgcttttctaatgacatggattgttggggacttttttaaccttattggctgcttcttggaacctgagacgctgccaacacaattttacatggctctggggagcgatacacgatcacaactcttatactcactggacagataggatagtatagccccttgcttctaggtgttaaggcgaaagtagttttggcttcaatcattgttcattattcttcagtttcttttatttccattattggaagcgacacgttcctgatgagcctgacagtgctgataaagtttaatggatagcaactgagaatattattaccttcttcgacataacagacctgaagggaggtgtttcctacgttgagctccatgaatttgtgaaacggcatttttgcgtcggaggccgtcttatacagtccgcatgcagctgtagagcctaccacacgctgtttcatatgcgtcttgctctgtgtcgtggcaaagccatcttcagaacagagtgggtgtcatatggagaacctatagcttatcgcaattgtttggtggtatcaaagcgtgccaagtatcatatatggtttacccttttctttttttgcatcattatctcctttcccctttctctgttgtggtgataagtagtattattatttgtcagttttgaagtgtgtaaagattatctcggtttaactgctcgccagttttgaaatagtataaatatcccagttttcggaaaaaaaaaaaaaaaaaaaactatacaccatcacaactgttattctcactggacagacagtatactatagccacatatatcaccgtcttaaagcaaaaaaagccagggcaacaagcaagcctcagaggcatcagcgtgctgatgcttcattgagagaaaagcttttggggcccaagttaccatccttcgtttgcttggataagaacttagaatatcgctttgtttcatccatatggtcagcaagatctctctcaagcagcccagtgccaatgtcaggcacatggtcggctaattatcatcaaacaaattctccaccagaaatagatgaccaaaaggaatccttggtcagtgagttttccccagcacaatatgcagcatctcctttaataaagaattctctctcagtggtaccatggatgtcccttctcttgggtatgagtgttttgcattttttagttggaacaacccatcaagaggtgccaaatggtattgtcatacctgtcgggagaaggcttttactgttggcggatgaccatgcagattcatctgtcagcaatggcagtggaagtggaattggaagcttccttggttgggctatggcgggactcaatccactaatgtttacttttgcattagtgggaaatgtgacatacgttggaagtatacttgtgaaaagcatggattggtcaaaacttaagccgaatctaccgtggcttgtagatgctggaggatgtgttttgcttgatacttttgtatccttttgcaagctttttacttttagagccaatacttcctacttgctttatgttctttcactgaacccgaaggcaggaatttatgcacatcctagatctgaactcatatgtaactga

SEQ ID NO: 88398 - DNA, 347 bp, Oryza sativa
  Clone ID: PAT_MRT4530_87253C.1
gtcgttttttcgcctgcttctcctcctcctccttgattcggatcttcacgcgcagccatggctaagaactaccccgccgtgagcgcctggtaccaggaggtgcgggagacagccaggcataagctgcgcgctctcatcgccgagaagagctgcggccctctcatgctccgtctcgcagggcacttggcggggactttcaacttggcggcaaagaccgctggcaccgttcggacatgaaacccaaccgagctgtgcacgccgccaaccggggtggacatggtgcggatgctcagctcatcaaggaggagatacccacgatctactacgtccgatattctaccagactt

SEQ ID NO: 88399 - DNA, 321 bp, Oryza sativa
  Clone ID: PAT_MRT4530_87254C.1
tgatgatcgacctctcctctccgcgtcggggcgtggtggtccattgatccaaggtgtctttcctctgccggggagtggtgcgaccgggttgtattggtgggagtgcctgtataatttttggttggatgttcagtcggagggatcggcgattggctgcacggggtccaggcacgcgttccggggtggcgaccggagcggcaagacggcgaacgcgcggagccattccggacccgacggcgtgcaccacaccgtctcgctgaagtcctgcacactgtgtatagctcaggcttgagcgggaccgggacgaggagatgatgaaaa

SEQ ID NO: 88400 - DNA, 510 bp, Oryza sativa
  Clone ID: PAT_MRT4530_87255C.1
ctccatcatttgatggtgttggaaattttaaagttttgccagagtctgtctgacgcatgattgcttgctgctgtatttgagtatccactttaaaacaaatacacaaatctgaaacaagatgaaaaaatctcagatatcaaatggtttgcatcaagtttattaccttacgttcctttagtaacatgctttactagatgcctagatctactttaagcagctgagtttgaagcggcataaagagctgtgttccgctatgcatgctcactatcccaaaatcttaagaatagcttctctcttcggatacgatcttccatctgaacattcaataaaaaaaagtatctctcggacatttataggagattccaagcattatacgtcagccagaaccttgtctcatctggtggggatattgatgaacttgttggccacacttatctctatttgaaagaacagcttgagcgcccagttgttgctccttccagcatactccatggcaccatcatcggtgag

SEQ ID NO: 88401 - DNA, 321 bp, Oryza sativa
  Clone ID: PAT_MRT4530_87256C.1
atgaacgaacaacgctacttcagccccacatctgtaaatgtcgtcgtcaccatcaacttcatcacacaattgccgaaaatgattctgatgaagcatgctagaagagaatctccaggtcccccaaacagtccagattgccactcaaattttgagagtccaaaagctgaaaaacccagctttctagattctcagaagttagctaccaaccagcggattctcagaatcttccccaacctaggccttagaggcatcgaggatgattgcattttggagttgttccagaatttcgagacgcgggtcgaatggaatatgaacttgaaa

SEQ ID NO: 88402 - DNA, 1290 bp, Oryza sativa
  Clone ID: PAT_MRT4530_87257C.1
atggctgtgattgtcgtacaacgtcagtacgtccaggggtgggaagggtgcagcgagccacccatatgcagcgagtctgcggagcgtaacggatcatccaggttcacaacgaaaggtacatcaagagtaagggttatgatgcttaggcaaaaaaatccgggaggccagaagaagagctttgatggaacaggcgagcctctatatcttgggatagactttggaacttcaggtgccagatatgctcttgtcgataagcaaggggccatacattctgaaggcaaaagaacttaccctcctgtttctgttcctcagatccttacacattccacatcgcttcaatgcaaaattcagtcagacaaaaggaacaatggagggattcttgctggcccatatctctacaacgagagcttcgcagacgcgctgccagcagtcgaatcgattgccccggcaaatcatacggtgcgttctggttcgtccaccctgtgcaagcttgtgtcatggtggaattcgagctcagcaggcttgagcagtagagattcagcgatactgatgcaccagtcagactggttgctctggcttttgcatggagaatatggtgtttctgattataacaacactctgaaggtgggctacgatccagagattgactcgtacccaagttggttgatgtcacagccatatgcttacatgttgccgtctgttagagcacccggagctccaattggctcaatcaaggaggatgtgacgtcgttgggttcaactctggcgatcaagctgctgagcaacgcccgcgtggacgacgcgcggttcggcgtgtacagccatcggctggacgacatgtggctggtcgggggcgcgtccaacaccggcggcgccgtcctcaggcagctcttcaccgacgatcagctcgtcgctctcagccacgagatcgacccgtcggttccttcccttctcgattactaccctctgcctaagagaggagaaaggttccctgtctccgaccccaacatgatgccaaggctgcagcctaggccggagagcgacacggcgtacttgcatggcatactggagtcgatcgcgcggattgaggcaaaggggtacaatctgttgaaggagctcggcgcgagcatggtggaggaggttttgacggcgggtggaggagctcggaacgataagtggacggcgataaggggaagggtgcttggcgttccggtgagaaaggcggagcagacggaggcggcctacggggctgcactgctagcactcaagggtgctaatactacgcactag

SEQ ID NO: 88403 - DNA, 354 bp, Oryza sativa
  Clone ID: PAT_MRT4530_87258C.1
ggtgaccgtacgccagtgccagcacacagctgcagcgtcgtgtagatgaaggcgagcaccccgatcgcgaccacgtacctgtactcactcgtagtgctcgaactgccatcacagtcagccagtggtcagttggcgcccatgacagacgaaggcgaggagggagaaggcccacgcggcgacgcggagcccgacccggacttctccaggaggtcacatgccaccagccagcagccgcaccacggcagctcacaacgccctcgccacgacgccagccagccgccgccggggcaccaccagccgtcgacgttggcgtctccgccgcttagagaatccaagctacgtacgcgtgcatgc

SEQ ID NO: 88404 - DNA, 1137 bp, Oryza sativa
  Clone ID: PAT_MRT4530_87259C.1
atggctgttcttgctaagataaaactgcataacaaggtccttcttgttcaacctgggcacaggcagctcggtaggcagaggcgcggcggctcgggaagggcagcgtcgcggcttttgcgcggctttgcagtagcgcgcgcagctttgcaggcgtggtcggggtcgttgtgctgctgcgtcgccgcacgggcagaaggagagagagagaccggcggcattggagtggtggcgaggggcggcggcttcgggttggccgcggcgggctgcgaggtcagcgcctgggcgcggcagggcatcgggcagggaagcaccagccttgcctcagctttgccagcgggaatcgcgggcagaggttgcttgggcaatgagatcaactttagcaaactctacctgcaccacacgccggctggtccaagaccaaaccagtccggggtcacaagcacaaacaaggaaaccgggttgggttccttggttgttaacaactggcaggtatacgacggaatcggctgtgacgccaaggttgttgcccatgcacaaggcctgcacgtttatgccggtaactggcacaactccttcaccctagtgtttgaggatgaaaggttcaagggttccactcttgaggtgatgggaatagttgttgaacaaggtgaatgggctattgtcgggggcacgggacaatttgctatggcaaatggtggccttgtcaccaagattgggccttggggtggaattgatggaggcagagctcaagacattacagctactccaaagcgtctagaatccattacaatacacagcggctggactattgattcgatctcatttatttactttgaccaagctggagagaagcacagagcaggtccatggggtggtcctggtggggatccttgcacgattgaatttggcagttcagagtttctcaaggaggtttctggaacgtttggcccatatgaaggctggaaagttataagatctattaaatttgtcaccaataagaaaacatatggtccatttggacgacaggaaggaaccccttttagcgtcccggtgcagaataactccactatagtgggcttctttggacgcagcgggaagtacctcgacacagttggcatctacgtgcatccgagataa

SEQ ID NO: 88405 - DNA, 1742 bp, Oryza sativa
  Clone ID: PAT_MRT4530_8725C.1
tcttaccagcgagcctgcgcccacgccacgggctccttcccgccacgccacgccgtccagctccccaccctccactccctcctccgcctccgcgccgccgccctccgccgccaccccgccttcccctggggcgcctccacgcacctcctcatccgctccccggccgaccccccttccaccgtcaccatctcccgccgcaagctcgaagcccgcctcgccaacgcgccgcccccgttccaggaccgcgtcgtccaggagctcctcctcctgctcctcgagcccgtcttcgagccccgtttctctccgaagtcccacgccttccgccccggccgcgggccccacaccgccatccgctccgtccgctcccacttcgccgcctacctctggttcatctccgcggacctcaccggggtggtcgacgcactctcgccttataccatactctcctgcgtccagaaggccgtctctgaccgcaaggtcttatctttgctgaagtcggcgctcaatgcccctgtccggcctgggtctgtgccaccacgggagaaggagcttgatggcctagctaagaagaggctgaagaggaaggttctcaggaaaagcaggaagaagaaggtgctcaatgagaacgagcccaagcctgatccgtattggttgaggttattcttcgggtttgccccagaacaggcgtgccatgcaccgaattatgggcattgtgggatattagccctttgcttgccaatgggaccaagggaggacgcagttgagataaggagacaactgatggagttctgcgagagcacgtttggtttgaggcctgagaattcgatggtagagattgagcacatcacaagagggattgagttcttggatcatgtgatcacccgccgggtcatctacccaaccttaagatataccgctagtggagggaacattgcgcacactaactctcagatgaacaaatttcttgagaccatggctgattggtacagatatgcagacaaccggaagaagattgtagggttctgtgcatatgtcattaggagttccttggcaaagctttatgcggcaagccgcccattgagagagagcacaaggaatgatgcaccagaatactctgatctcttgagaatgggactagttgatattattgagggtgtacaatttgcacgcatgtcatcaattccatcgtgtgactacacacctttccctagaaactgggtgcctcaccacgagcttgtattgcgtgagtatattaaactgcaagatccaaaattcttctgtgaacttcataagacaatcaaaaggaaggagataaattcaccgcaggatgatgtatcaaggatggtgtggtattataaagtttatggtgtttatgatgctaaaaggtccctacaaaaactaaatgattggaagaatactgatgaagctgccaataaggagaatcagattctgttgggcagtgtatcaatgagctctttattgtttgtagaaatgctgatgggcagtgtatcaatggtacattaggcttatgttttgtgaagaaagttttattggataaaccgtcttagacagcctttttttcaatagagaatactcatggatggtatatcaacacacatagctaaagatatctatcgtctaggagatattctattgtgccagggtatacttttaattgtatacatgaataatgaccatatctcaccggtaaattcatccttttcaaaaaaaaaaaaaaaaaa

SEQ ID NO: 88406 - DNA, 158 bp, Oryza sativa
  Clone ID: PAT_MRT4530_87260C.1
atgttttacatgctgtcttttgatatatggtcaacgttgcacgcactggaggtgcttactgtgattataagccgaactccaccaccaccctgcttgctcttatataaggatattggatgctgtatgctcgtatatagaacgaatatggtcctgcggta

SEQ ID NO: 88407 - DNA, 360 bp, Oryza sativa
  Clone ID: PAT_MRT4530_87261C.1
ctacacacacaattgtccatgttaatcagtagacaatattcaattattgccaggcataaattgtgtcattgatcacaggctgaatcaattcactaatggaacagagcagatgataatgtggacactggacaggaacacctgatccctcatctattacagtattattggaaactttttttttcagtgacaattagatcaagaacagtagcagcaagacggcgccggctgttcactcctgagcatctggtgcacggtaaagatggggaagccggtaaggttcgtcattttcaaagcctgccttcttgtaggatacaacgctgtcgacaagacgactcttcgagtttcctagtttttcagccc

SEQ ID NO: 88408 - DNA, 427 bp, Oryza sativa
  unsure (1)..(427): unsure at all n locations
  Clone ID: PAT_MRT4530_87262C.1
cgaccggccggaatcccgggcatccactcgccggttagttcaccacccaaaggccgcgcgccgaagacgggtccgggagagaccgagcaaagtgaaccangcaaggcggaaaagcacacgagcgagcaaccagcccaagccgagaacacagcaaggaccgggagggacnacaggggagccaaaagcaacaccaaggacacaccaagacaacgnggagacagcagcagaaggaggggggcacacggacagccggagaggcgaagaggaagcaaggccgacaaaccaggacnggaggaggggcccacggcgnggccaagcccccagaccgaaaggagcaaccaaggaaccgggagaaggcccccngaacagcccaggccccgcaaagcccgcacaggacgcaaaggagaccacgcccgggacgggaccc

SEQ ID NO: 88409 - DNA, 457 bp, Oryza sativa
  Clone ID: PAT_MRT4530_87263C.1
acggcacgaggccctttcgtcgtcgtcgtcgtcgtcgtacgtcccaatctaccgcataccctaccataccccccctacctacctacgatagctacgcctacctacacgcaaaccctaaaccctaaaccctaagcccgcccggcggcggaggcgcccctacctaccctactaccgcggcctacgccaccaaggtcgaggtacatacgagatacgacctacgccgaggacgacgacgccgcctaccacctacgggccccgcctacctacccccgcgtacggtaggaggtaggtacggggtacaggcgcctgaaggaggcgataccacggcgtacataggtagcgccgcgcggcgcccgactaggctacccctatacgtaccccgggggctacgtaactagggttaccccccatgcggcggccccacggggtcgcggacctcgtcggccggatcgcggac

SEQ ID NO: 88410 - DNA, 815 bp, Oryza sativa
  Clone ID: PAT_MRT4530_87264C.1
aggtaaccctggaagaattatcgtagttaccacaagccagcgtgggcaatggctggacttgtagggtagcttttcctagccgacgtgcctgggcaagggtgggcgtgatggagttaggatgggacctgcgacggtctatgctgcttccagattcacctaggcacgagagggggttacccgacttggcttaaggagggggcgaaacctgaggtgtggtgcgattggttagggagggttatgcgaagggccctgtgacagtttctttccagtatgtcatggtggcatgttggctcatggtaacgtgttgtgagattgtatcttgtgggtacagttgtacacctctgatcaaagtaaaactattcgaatagtcgtgcccgcggttatgggcgatcaaccagattcaccgtgattagtctcatccctagtttagcttaatgaactggtgtagttcaggtggttggctgggcctgttgcaacgtggtgtagcgttggacagtgtttggttaatattgattaattactacaactgtcttactgctttcaactactgcttttaaatgctagctttatgcaaaagaacctctagcttcctttggttatatcctgcatcatacctcctcttccggtatgacttgctgagtacagtgggtagtactcagtcttgctctcttttcccccacaccagagctgaagatcttcctagttggagctgttttgtcaaagttggtttcgtcgctgccgtcaagcttagaaattctggtttgagaatttctgggcgtgacaagttagcatcagagccgaccttgaccgtaggg

SEQ ID NO: 88411 - DNA, 2403 bp, Oryza sativa
  Clone ID: PAT_MRT4530_87265C.1
atgctggctgccgactcagtagtcggcctgatcttgctcctctctctctctctcgctcacttctctgcgcaggttggcgggtggagagaaggcctgcggggcgaggcgggagagaaggagggcgtcggtggctggcgacgcggccacaggccaccacgcggagtgaggaggccggcggggcccatgttcatctcgtcgaggatcttgtcgccgtgctcgaccagcttgttggagtaccacgtgaggaagaacctccccgcctcggtgagtatgtcacaaattatgaaatcggtgtacctggatgggagttctgccgtggaacagaggccggtcatccacgccgatggtgagacttcatccgtgtgtgttggagggagtgagctgagggctttatatagcttgagaataacggttacgacggttggaaaggtgcagggaaaaaccccaactccaaccagtcttaactcaagctccactcaaccccagcctcatcaaaccctaaccccagcgtgtccccaatggcgaccctccgcgcgcgcaagcgggggcggggcggcgccggcgccggcgcggcggcggtgctcggggcgctcgggctcgggggcttcgcggggctcgaccttccaccgcgcggcgcccgcgggcgaggccgagctcgagcagctcgccgcggcgtacgaccgcgcctcgggccgcatttccgtctccatccgcggcgcgggcgtctccgcctcgcccgcggacctcgcggccgccctcgggctgccgctcggcccggccgcgctgggccccgaggtggacgcgtccgtgttccgctccgaggaggcgatcgccgccgcgagggggttcctccgcgatcgcgtgctgctgggaggcggtggtggtggtggccgggagttgccgggggaggctgcggtggcgctgcggctggtggaggaggggaaggcttacgcggtggattggtgccggttgttttgggagttgctgaagatggatttggtgagcgggaagccacggcgctacgcgccgcacctcctccgtctgatcgagtaccaaaggcccgagcttttcgccgaggttgatgggagttcgcctcttgggaaaagaaggaaaagcgcggcgttttcgcggcaatgccagtgggaagatgaaaaggagacggacttgattgacgcagagtgtggagattctcgtacccaggcggctgaagcagaggtggagaggagcagccagagcattggagacttggaggagatgccagtttttggagagcgcaagcaattcaatgctgttgatcttgtgggttacaaaagttcaattgttggattgggggaatggatccatggagtgaacgagggaaatgcggagcttggatctcagaaaagcttgccttcagaaatcgaggtttcgggctgtgagatgggaggtaatgctgctgctggtttgaccgccaaagatcagagctcgaatgattcgtctctccttagccttcttcgcacaatggatgagcaagatgactcctcaagccatcagaatgtgatctccggggccaagccccaaccagggccaaatcagcagagcataattgagatcgaagatgaagaggatgacgatgatgatcaggtgggtgttggtcatgtccctcccaacattcaaaatggacattttggcctcaacaattattttgtgcaacagagggcaacagaaggctttcaaaatgatcaaacgcttccatctttccttgcctgcacacagcaaattaaagcttgcatggatgacaacttcttggataagatgaaggctctcatggatgctcgagctgctaaccagcgcatgattaacatgataacacaaaaggattatatgattgcagccaccaagagggacatactggaggatcttggagcaaggcacgttatgatcagtcaattcgaacatgacattgaattgatgcgtctcaccattcaacaataccgaaagttgtttgagaacacttctgctgcatatctagagtataggaacaggatgtcacgtgaggagggtgatggttcatctctggaagttattggcatagctgatgagacggagcaatttgttaggatgcagcaactggacatttatcagaggcttaataagtttcaaaagctttggctcacgaaatattcagatcttgttgggcatttgacaagagtagcagaatgcatgacatacctcagcttggaaggcgaagaattgggcaaagaattgctgagtaagacaaaagatgcagagcgggaaggtgaaggggatcattgcagtagcgctgtagtgatagatgaattagcacaacctgatcagaggaatgataaggagagcatgattgtcaatggagtttctggaatctgcaacgaagatgaggtgtag

SEQ ID NO: 88412 - DNA, 1995 bp, Oryza sativa
  Clone ID: PAT_MRT4530_87266C.1
atgtccccccctatgccgctgccacacctcactgtacttctcgtcctctttgcgacgtccgccgcccaggctgccgccgatcggagcagcagcagcagcagctgtggcggtggcgaacgctgcggcgatctcctcctcccattcccgttccacctcaactcctcctgcgtctccagcaccaccaactcttcctcacgctttcgcctctcctgcgacaccaccaacgccacgctcaccctgccgctcggctcggcgacgttccgcgtcctcggcttcctcccgtcgggatcgatcctcctcgactacgcccccgccgcgtcgccgtcgccgtcgtccccgtgcgaccccgcgtacgccgcgttctcccgcccgtcctccccggcggccgctctcgatgccgccgcggcattcctcgccgtcacgccggccaacgttctccgcctctacgcctgcgaggactcctccctctgccgcgctggctgcgaagacgttgccacctgcggccgcggtggcgccgccgcgggcgctaagtcggggtgctgctatccgctgtccgacggcagcgtgtggaagcccggcgatgggcttggcgccttcgcggagttcggatgccgggggttctcgagctgggtcaagaaccggtcggccgccgcaccgggtgtcgtgagggggatcgaggtggagtgggcggtgcccaagggcagcgagatggcggcgtgcgccgacggtgcggtcgccgtcaatgccacggcggtgcgaggcggcgtgcggtgcgcgtgcgccgcggggctcgtcggcgacggcttcgcacatggcaccggctgctcaaaaggcacatcgtgcagcaattctgggcaggcaagtgacggcagggagtgttgccagggaaggttttgctccaagaagtcagttgctcttgccggtttcttcgtttcgctcttcttcctcgcggcggccgtctcgttttggttgttcctaaggcagccttccaaggacaccctgtgggacatcgacccggcgtgcatccccaagatcctcggtggcgtgtgcaacgcgaggcagttcacgtacgagcagctggacgaggcgaccaagaggttcgacgacagcgagaaggccgccgtcaacgtgcaggtggacggcggcggcacggtccacgccggcgtcctcgacgacggcaccgtggtcgcggtgcagaggatcgggtacgacacggcagagaagctcaggctggtcctggacagggtggagctcctctccgaggtctcgcaccggaacatcgcccgcgtcgtcggcttctgctgcaccgccgccgccgactccggcaccggcaacgcgctgctcctggtgcacgagcacttcgccggcggcacgctggaggaccacctgcggcaggtgaagggccggctcctcagctggtaccaccgcgtcaacatcgccatcgagctcgccagcgcgctcacgtacctgcaggcgcacgacacggccccgaccttcctccacgacctcaagtccagcgacgtcttcctcgacgacaacctcaccgccaagatcgccggctacaagctcgcgaggccggtcgcctactactactacgcgccgtcgtacgaccacgacgtcgtgcgcaacttcggccacctcctgatcgagctactgacggggatgaggcaccagcacccgttcgactcggtggcgcccaaggtgagggaagggaggctgcacgaggtcatcgacgtgacgctcctggcggggaagcagctgccggcgccgaacgaggacgtgaggaaggtgttcgagctcgccgtcgcgtgcctgctgagcgccgagaacgggctctgcatgctcggcgtcgccaaggagctgatgcagatcgtgaggaacaacatcgggagcagcagcaagatcgagatatccctcgaggagacgttctcgagctccagcctgctgcagatgatctccatgtcgccggagacgctgcatcaccatcttccttga

SEQ ID NO: 88413 - DNA, 1841 bp, Oryza sativa
  Clone ID: PAT_MRT4530_87267C.1
atggacggcgattcttcatactcaccggcattggccgccgtcgccggcgccgtcgcgctggtggcgttctgctcctactacctggccgtcacccgcgccaccggcgacggcgaggcgaggcggcggcggcggcggcacccgccggtggtcggcacggtgttccaccagctgtaccacgtccggcggctgcacgactactacacggcgctgtgccgggagcacacgacattccgactgctcgcgacgcccggccgccggaacatatacacgtgcgatccggccgtcgtcgagcacatcctccggaccaacttccccagctacggaaagggcccgttgaactccgagatcctgaatgacctgttcggggaaggtatcttcgccgtcgacggcgagaagtggaagacgcagaggaagatcgccagctacgacttcaccacgagggccctccgcgacttcagcagcgacgtcttcaagaggaacgccgcgaagctcgccggcgtcgtctccaaccacgcggcgtcaaaccaatccatggacttcaaggggttgttgacgagagcaacgatggactccatcttcaccatcgccttcgggcaagacctcaacacgctggatggctccggcgaggggcgccacttcgccaaggcgttcgacgacgccggcgagtacctcctgctccgctacctcaacccgttctggaagctggccaggctgctcaacgtcggcgccgaggcgacgctcaaggagaggatcaaggtcgtcgacgagttcgtgtacaagctcatccgtgccaggtccgacgagctctccaacaccatggcacaagatcatcgttccagggatgatctcctgtcaagattcatccaggcaacgaccagcgattctgggacggttgattacaagtacctgagagacattgttctgaacattgtcatagccgccaaggactcgacatcggggtcgcttgcttggttcctgtacatggcgtgcaagcgcccggaagtccaggagaagattttcgacgaagtcatggagaccaccaacgccggggactgcgcttccatcgacgagttcttgacgagccttaccgaccaagcactgaacaagatgcactacctgcacgctgcactgacggagacgctcaggctgtacccttcagttccactggagaacaagcagtgcttttcggacgacgtgttgcccaacggttttagcgtcagcaagggggacggggtattctacatgccctacgcgatggggaggatggagttcttgtggggtaaagacgctgaagctttccgacctgaacgttggctcgacgagcacggcgtgtttcagcaggaaagcccattcaagtttacagctttccaggccggcccaagaatctgcatcgggaaggatttcgcgtacaggcagatgaagatcttcgcggccgtgctgatccgttccttcgtgttcaaacttcgcgacaagaaggacaacgtcagttacaggacagcgattacgcttgccatcgatcaggatctccatctgactgctacggcaagatgagtgcatgtcacactacacagcctgggcacatactgcagctgtcacctgtacactgtactcaatgcaagtgacagctcttgtgtgccaaatcgaatgatatctgtagaccttaataacgtctgatcgcgaatgatccgtattgcactctggaataataaagctgccggtgcatgtacctgcagtcagggtcaaagtaacttattggagtgaactggtgttgtagggaacttcaattgtacaacttggagggggcaatacaaatgaatgggtttaatagtagccccaacccc

SEQ ID NO: 88414 - DNA, 432 bp, Oryza sativa
  Clone ID: PAT_MRT4530_87268C.1
ggaaaccaataaccctttttgcctggaaaacgttttgaaaaaaaaaaatttttcctatggggattccccaaagcgcaaggggggcccaggggcaaattaattagtaaaagacccccaagggcaatgcccttttggcaaaaaagggttctccccttaaaaaacgggcagaaacattggttcctataaaaaaaaaatccgggcgcccccaattttgaaaccccttgggggttttgaaaaacgggaccccccagggtaaaaccccttttggggggtaaaaaacccggactggggccaccccctgcctttggggccgggaaccccctgctcctgaaaccttgggggcagcaggcacctttaaaaatttttggtttttggtgggaaacccccccccttggggaagggagggaaattttggtcccgccccaattttcc

SEQ ID NO: 88415 - DNA, 300 bp, Oryza sativa
  Clone ID: PAT_MRT4530_87269C.1
atgacggttgtgacggttggaatggtcggtaataccctccaactgtcattggggcttcatctcaaccgtccagccaatacctggatccaatggaggcgagggaggttcggcgaaccccctggtttggccgaacctggggccggcccaaccagcccatggtttggctggcggcctcctctgttgttcttctccacagacttgtgaattttttgcccagtttgtcgtgtcaattatgagttattggcccattcatacataagtctggttctcgacatcgtccgattgatttatcgtctgagt

SEQ ID NO: 88416 - DNA, 918 bp, Oryza sativa
  Clone ID: PAT_MRT4530_8726C.1
cgggctgtcggcagatcgggcaccggcctagcgccgccgccgccgcggattgcgccgcatcccgccgtccccgcgcgcattaaagagaggggaatcactccccgcgtttccctctcccgtttccccctcttttccctctctctctccctcggattcgtccggattcatcccgcgaagttcgccggcgtcttcaatggcgcccgagatctccgcgcgcggtttcctctctccccggccgcgctctccccctcccgttgctataaaatcgtccctcgtgcttcgctcttccgtttccgccgctcgccgctcgctctcgccgtcggtttcgtgcccgcgccgtgctcctctctctccgccgtcgccgccgagctccgtttcgccgccgtcgtcgctccggtcctcctcccgactcggcgccacctccttcggcttcgccgagtggttgccgaccccgtccgccgctccgcttcgcccgccgaccgccggagcaccgtcgccctcgtcatcccgaaccgcgccgccgctttcctccgctccggccgccgttctcgtcgtcgtcgttgtcccggggtgagccgaagaccgccgttcgctttcccccttctctccgctctctcgggcgccgctccgccgcaccggtggtcgccggcggcgaccatcggggcgcgggtgcgcgtcctcctcccgtcggccgtgccggcgaggccgccttcggcgcgccctcgcggctgccaagtgggcccggccgtcagccgcccgcgcccggccgcgtgcacccggtccaccgtggaccgtggggctgacgcgtgggccccactcccgtggacccgggcaaatgaaggctacacgagctgcggcccggtagtcgagatgtcaaaaagcacagggttggtgccctgctgcgaggggctcagttcc

SEQ ID NO: 88417 - DNA, 351 bp, Oryza sativa
  Clone ID: PAT_MRT4530_87270C.1
atgaaccgcaatattagatataacgggtgggacaatggttttgagggcaacagcggcacacggccgcacgaccacctaggaggggaggggtgtggctgggaagaagccggtgagaagatccgcggtgaggatgaggaagggaggggagagaagcacagtctgggtctcaagacaaatatggtgttcgcctatgccggcgccggcgacaaggagggacacttcgcaacggcaaattttgagcctccccgagtccccgcgcgtgaagacgaagacgggatagaccgagagcgaaatccagaattgggccgaacgtacttgcggatcaagagctgggcaatgatagagaagtga

SEQ ID NO: 88418 - DNA, 299 bp, Oryza sativa
  Clone ID: PAT_MRT4530_87271C.1
atgacggttgtgatggctggaatggtcggtaataccctccaaccgtcattggggcttcatctcaaccgtccagccaagacctggatccaacggaggcgagggagtttcggccgaaccccctagttcggctgaacctggggccggcccaactagcccatgctttggctggcggcctcctctgttgttcttctccgcagacagtgaattttggcccagtttgtcatgtcaattctgagttcttggcccattcatacataagtctggttctcgatatcgtccgattgatttatcgtctgagt

SEQ ID NO: 88419 - DNA, 414 bp, Oryza sativa
  Clone ID: PAT_MRT4530_87272C.1
atggcatcgacgtgggtggggaaggctgctcggctcggcggcgcagctggggacggagacggcaccgccgctgctgtcctcatccccagccgcgtcgccgccggcgttgcccaccatttgcaatggataggaggaagagatagagggagagatgagaccatccaagggcattttgaagacgtccgtgcacaagtacggcagaacgagggtgcggccgacagacagaacggggcggaccttgctgcgatgagaatggttgaagagagaacgcagaggatactgaggctggagacaatgcttggggaagccagggatgatgcaagggagaaggttgaggcgacaacgaggagattaattggctggaagctttttagcttgttgctagccgttactcttttgttgctgcccgcgtaa

SEQ ID NO: 88420 - DNA, 382 bp, Oryza sativa
  unsure (1)..(382): unsure at all n locations
  Clone ID: PAT_MRT4530_87273C.1
naattgttggtgcctgctggcaacagaagcccacccaactcctcgacagctgatgttttttttcatgtaagaggcatctctagctcagctaatgattgtaccatcatgtcccgattattggcggcaaactcagctgcacgagcgggttgcttagtgttgaattcaagttcaagatggtgagaccaatgaagcatgcaatgaaatgggagaatcaatcatgcggtttctgcactagcatgttactcctgcctgccgtgctaaactgcaaaatgttcttatcagttgtgagttgtcatgctgcaaaataaggacacattgtgacattgtcaaccatctctaacaagttgatgcttcatgtcaaaaaaaaaaaaaaaaaaaaaaa

SEQ ID NO: 88421 - DNA, 905 bp, Oryza sativa
  Clone ID: PAT_MRT4530_87274C.1
attttgggatcggcggccgacgctgtcgagtaccggagtaggggagctcgccggagtaagctcttctcaggctgtgcgggggtggcggagggcggcgcggcgcggcgagggggcatggacacgatgaggggggcgctggagcgggcgaggatgctggtggggatggaggtggacgaggagtcggcgccggaggagcagtccttcttcgacgacgtcacccgcaactgcgccctcaccaccacccagaggctgtacggcttcgcgatatgcttggctgccggattgacgtgcaccttcttgtcaatgcttgttttcttcaatcctgtgaaattcggggtaacattcacccttggcaatttgatggcacttggaagtacagcgtttcttataggtcccaaaaggcaatttgacatgatgcttgattctgtgcggatatatgcaactgctgtatacattgcaagcatcataattgctctgttctgtgctctctttgtgcacagcaagctgctgactctacttgccattatcttggaatttggtgctcttgtttggtacagtctaagctatataccctttgcacgctcggttgtttcgaaggtgatgacgtcttgcttcgacactgaattctagaatgaccatcctgatctacatgttgttgctggacgcatagatgatatatctgtaatatactgtgtattttgatggagaagtggagtgggggtcatcttctccgattagcctgtgtagtcattctgatgttgtgaagacacacggatttgtgcgtcttatgctcagagatcatgtcatcttttcctcacttcccccccttcttccccacatttgtacatggtaaccacttacactccgcattcgaacgtttactgtgcagtttgtttggattgtcc

SEQ ID NO: 88422 - DNA, 486 bp, Oryza sativa
  Clone ID: PAT_MRT4530_87275C.1
ggtggctgccacatgtgctccgggccgccgcaccccttctcacttgtgtctccttctgcgtctcatctatcagctagggttccgcggtgtggtcatccgggtggctgaggagaacggcggcgcagcttgcgcgtggccgtcttccgcaggctggctccgcacttcctctcgctgtgctagcagcagatgggcccatctgccgattcagagggcggtgtactgttggcctgcgccctgcacgtctcatgagggccacgggttcgccaccatgaattcgtcggttcagattagcatttcaggaccaaggcgaaagtttttcatgaattggtgtttatctatttagtagattctggatatcagttccattactcaggggcaaatctgaggattttcatagcaccggataaaattatcgcaccattggataagcttccaagcaaagaatttgactaagagcaaataacctttatcgggactgtaacccac

SEQ ID NO: 88423 - DNA, 1056 bp, Oryza sativa
  unsure (1)..(1056): unsure at all n locations
  Clone ID: PAT_MRT4530_87276C.1
tcagttatcaccaacgcttaaggtctgcctggtagagctaagccaaacgagataaattccaaagttgcactctggaagaacttgagaagcaggaaaatccaggagcaaccaaacaagagcaccaaattccaagataatggcaagtagagtcagcagcttgctgtgcaccatggcaaagttaaagtacaggttaacatttatgtagacataattcaacaagttgaaaccccatcttccaagtgccatcaaattgccaagggtgaatgttaccccgaatttcacaggattgaagaaaacaagcattgacaagaaggtgcacgtcaatccggcagccaagcatatcgcgaagccgtacagcctcagatctgagcgaggaacccggatcgatccgggctgggtgggtggggtggggatggagcttgcctgggtggtggtgagggcgcagttgcgggtgacgtcgtcgaagaaggactgctcctccggcgccgactcctcgtccacctccatccccaccagcatcctcgcccgctccagcgcccccctcatcgtgtccatgccccctcgccgcgccgcgccgccctccgccacccccgcacagcctgagaagagcttactccggcgagctcccctactccgccgccggggctacgcggcggcggcggcggcagagttgcagcagcgcggctcctcgatggcggcgaggatctcggcggcggagggtggcgccggcggtgcggcggcggcggcggcgtcgaaggagatcttctggatgagggatcccaagaccggctgctgggtccccgagaatcgcttcggcgacgtcgacgccgccgagctccgggcgcggctgctgtcgaggaagaactaggccacccatctctgattcgaaatcgaggaatttcccgatccaataaagaacccatcccggccaaaatcgagcgatctgaacatcgtttgaaacggatcacactattcttttgatagttgatacgattatgccttgtgttgtgcctcaaagnttgatatgaaattgagttcgagttcagtttactagct

SEQ ID NO: 88424 - DNA, 694 bp, Oryza sativa
  Clone ID: PAT_MRT4530_87277C.1
ggcacgcgtcgcgcacggagttcgcccgcggcggcggcggcggcgccggccaaacggcgcaaggtcggggtcgctttttcgccggaaaacgaggtgcgtgccgcgtcctccatccttgtctgggcattcggctcgactgctcgcttgtttcgtcgccgcaacgggactacgggtgtccatcgatggcgcccccgctgcacgccatatgtttgctgaaatgccggagaggctcgccgtcgccccggcgctgggtttctctcctgcagggggacgtttcctcgtttgtgcggatgtgccgctgtgatagatcgttcattcgggacgaggttgtgtctcaggagtcagaaatatgtcgtcgatcgacttctggtcacctcttggggagagggcttctttcaactcttcgatctctatgtacccgctgccgttcttgtcgaagaagctgaacaccttcggaaggtgctcatcgctacggattttcttcaggtttgaagcacactgagaggccgaagtcgatgaccttgagaggggagttctcagatgcattggcatacagaaagttctcaggtttgaggtcccgatgcatgacgccgttcttgtgacagtgctgcaaaaagttgtactaatgtatcaaatatttttcactctctacattgagcaatcaattcaaagaggtatttgtttactttgcagt

SEQ ID NO: 88425 - DNA, 273 bp, Oryza sativa
  Clone ID: PAT_MRT4530_87278C.1
atgcctagatttgaaaaataccttgttacctctggtggtgattcctctcgatggggataccttgttgcacttacctctggtgatcatttcctatttgacaaatcaacaaggctagtcgatctatactatggtaacgatccaatgatcttaatagattgcactagttataacttgtccatccgaaaggtgtggtgcaactatctttcaatgatcaaaccatgggatatcaccattacccaactagctgttcagatgaaagaatttgtgggataa

SEQ ID NO: 88426 - DNA, 285 bp, Oryza sativa
  Clone ID: PAT_MRT4530_87279C.1
gcacgaggcctcgtgccgaattcggcacgagggcttatgcaagcatagccttatcctggagtgagcttgagctacttgatccatggctcgtgccaagtctagctctagctgctcaggccgcggtggcgccagcctcgcgctgcgcattgccacggtggcgctgtcggtggtgtcggcggtgatgacggccacggcctgccgctgcagcccgccgccggcggctgccgctccgacgagcggctggctgtctcctacagctgactacagctcgctgagtgtactcgc

SEQ ID NO: 88427 - DNA, 1149 bp, Oryza sativa
  Clone ID: PAT_MRT4530_8727C.1
ataaatagagtgtccactagatggggttttgtttaatctagggtgaacaagccgagggagagggcgcgcggaccgggtccacgggagtggggcccacgcgtcagcctctcggtccacggtggaccgggagcacgcggctggcggcggtcggcgccgtgggtcccacgcgtcagccgcacccgcgggcgcgggcggctgacggccgggccccacctggcagccgcggggcgcgcccgaaggcggcctcgccggcgcggccgaagggagggggacgcgcccgttccccgatggtcaccgccggcgaccaccggcgcggcggagcggcacccgagagagaggagggaagggggaagcgagggggacggtctttggctcaccccggtcgacggcgacgacgggaacggcggccgaagcggaagaagacggcggcgcggttcgggatgacgatgacgacggtgctccggcggtcggcgggcgaagcggagcggcggacggggtcggcaaccactcggcgaagccgatggaggtggcgccgagtcgggaggaggaccggagcgacgacggtggcgaaacggagctcggcggcgacggcggagagagaggagcacggcgcgagcacgaatccgacggcgagagcgagcggcgagcggcggaaacggaagagcggagctcggggattgattttatagcgccgagagggggagagcgcggccggagagggaggaaacggccgcggagatctcagctccattgaagacgccgacgacgattgcgggcgcgatttcgaacgaatccgagggagagagagagggaaaagaggggggatcgggagagggaatcgcgggggtgattttccccttcattaaggcgcgcggggaaggcgggatgcggcggaatccgcggcggcggcggcgctagggcacgggcgcggcggcgggcgcggcgggaggaaggcgatgacaggtgggccccacccgtcagcgagagtggcgggcgggcccgcctgtcagcggcgcgcgcgcgcgcggggaaccgatgggccgcgggagaggagagagagagggagagggaagtgggccgagccggcccaagagggaaggaggggggaaaagaacttcttttagggtttttctttttataaaccttttc

SEQ ID NO: 88428 - DNA, 511 bp, Oryza sativa
  Clone ID: PAT_MRT4530_87280C.1
ctatgtctgaaacagtcgctggcattggttcacgccgacgtcgacgacgacaaggttctcttcgtgccgtgggtgtgagtggagaccgacttcaggactggcgacaacccgtggtgggcgtaagcgcggcgccggctccggcgccccccaccgcagcaacgcagccggcgacgacgttctgccgctgctgctactgctgttgctgctcctgttcgccatcgacacgccggacagaataaccagacccgcggacgccaccgcgatcggtgccaccaccaccaccatagttcccttgtgtgatcagcttgtagctataagtcccctgtattttaaaaacgctgctgtaaatccatcttccctttgtttttcccaattatatggaccccccctgtccccctgtatgaaaaagcataaaacccttttccctgcataagtaaccctttttgaggattaaaaaaaaaaaaaaaaaaaaaaaaaaaaaaaaaaaaaaccaaaaaaaaaaaaaaaccaa

SEQ ID NO: 88429 - DNA, 572 bp, Oryza sativa
  Clone ID: PAT_MRT4530_87281C.1
ttccccttttttttttttttttttttttttttttttacttagcatcaagtattatttgtcatgattagtcaatatatggtaattacaacagagacaaaatggagcagcaagagcagcagaggagatgttatctctctctctctctctctctctctctctctctgtgtgttttcacctagaagaaaagctaaccaatatccaagtgacaaaacgaaagaagaaactacagaggaggaggtgctcatttcatttccaagcttctgaagtcgagcatggctgtcctgagtcccaggaagctgctgcacttgcagtctgtgctcttggggagccccaggctgcagctgaagcagacgccggtctccctcttcaccggcttcatcatcatgggctcttcttgggaagggaggctgatgcagaggtccagattgaggtcagggcacttgagtggcttcccatggccccaatcggcggctgcctgctgctcctgtgccactgtcaccgccttcggctgatgaggatggtcctctcgccggaacacggcggccttgtcgtccctcgccgccgccgcggcc

SEQ ID NO: 88430 - DNA, 255 bp, Oryza sativa
  Clone ID: PAT_MRT4530_87282C.1
atggccggaaagtgggctcaagttgcagggaacaagatggccattcgcaattcggctggtgacagggataggatgtgtctgccaagggagctgggccgcctcccgaggataatgggcttcccgtgcgtatttatgagtacccactatgcccccctgctccgcacttggcttcgtcttcatggcttctctgctgcctgcgacagctccggaggccttgtggtgctccagaattccgaaggttatgcctccttctag

SEQ ID NO: 88431 - DNA, 554 bp, Oryza sativa
  Clone ID: PAT_MRT4530_87283C.1
gcacgaggggtaggttctactcactgatggcgctttcgatgacagtggcacttatcctctgcactgtcctgaagcatgaggtccagcttccatggtggggtctactatttgcctgtggcatggccttcatcttcaccctacccatcagcatcatctctgcgacaaccaaccagacacctggtctgaacgtcatcacggagtatgccattgggttgataatccctggtcatcccatcgccaacgtctgtttcaaggtgtatggctacatgagcatgtctcaggctattgccttcctctcagacttcaaacttggccactatatgaagattcccccaaaatccatgttcctagttcagtttatcggcacaattgtggccggcacggtcaaccttggggtggcatggtagctgctcggctccatccatgacatttgtcaggattcgctcccagctgacagcccatggacatgccccaacgaccgagtcttcttcgatgcatcggtcatattggggcctcattggcccaatccgcatctttggaccacatggcaacta

SEQ ID NO: 88432 - DNA, 276 bp, Oryza sativa
  Clone ID: PAT_MRT4530_87284C.1
atggaagggggcctccaccaccacctgcctaacgagattgaggtggtggcctatgggctagatccccctccccccttccaagcagcaagctcgtggcatgctatccgatcaaaggggagcaaggcggtggccccttgttcggagagtaaggaagtgacggcacatcagttggaggtcccagactcccagtacatcaagaatgtgaacggaatcgagcctggaatccatgagaggttcatttcacttggcatcatcacggacctaagcaaacattag

SEQ ID NO: 88433 - DNA, 438 bp, Oryza sativa
  unsure (1)..(438): unsure at all n locations
  Clone ID: PAT_MRT4530_87285C.1
ccttggctgcaggattccgcattaggangctctcactcctcgctaagcttggtttgttctgctctcncngctgctgcttcttgctgctatcttgctgttggtgttcttgctcccgcntcntcatctgaagccgttnccgccggggtcgccgccngtgaacgcctccgacccccacaacatcctggcgtttgatttctcnccgttccttatactntacnacaatgggcncgtccaccggatngattggacngancgcntccccnccggngtctaacaagccncccgggtgacttccaaagacctcntcntcgaccggaacacagcntccgcgcccgganatncctgccnccggcnanntntntngggaaaaangacntacggccgcacccgttcttgtgttcttcnacnggggngcgttcgtcttccaatcggggttca

SEQ ID NO: 88434 - DNA, 1433 bp, Oryza sativa
  Clone ID: PAT_MRT4530_87286C.1
atgaacaggtacgacaacaacgggcatgcggcagcggcggcggcggctgcggtggcgggaggaggaggaggaggaggagggaataaggcggcgggggaggtagatgggcatgaggatgacctggtgatgcccgggttcaggttccacccgacggaggaggagctgatcgagttctacctccggcggaaggtggagggcaagcgcttcaacgtcgagctcatcaccttcctcgacctctaccgctacgacccctgggagctccccggaattgagcatctaattaacaagctcgatgggggtgcagcaatggcggcgataggggagaaggagtggttcttctacgtgcctcgggacaggaagtacaggaacggggaccggccgaaccgggtgacggcgtcggggtactggaaggcgacgggggccgaccggatgatccgagccgagaacaaccgccccatcgggctcaagaagacgcttgtcttctactccggcaaggcccccaagggcgtccgcagcagctggatcatgaacgagtatcgccttccccccgccgacaccgaccgctaccacaagactgaaatctcactatgccgcgtgtacaagcgcaccggcatcgacgacggccatggccaggtatccacggcgcggtcgtcggcgcactcccgcggcggcggcgcggcaccggtacaggacaacaagcaaggctcctcgtcgacgtccacgccgacgccgcctccaactccgtccaagctccacctcctcagcagcgagtgcacgtcgccgcccgccatcgtcacggaccacgccgccatggtggcgcacaaggcaccgtcgccgcggcaccatcagcagcagcagcagctccacgctgccaagccttgcggcggctacctgcagaattcctcgatggcttccgctgccggcggcgatcagcagcagcaatttcagcaagacttcgcggcggcattgtaccagcagtactccaagaacacgagcggtgccttcgcctccacgtactcgctgctcaacctcgtcaacgcggcatccatgggcagctccgccgctgccattgatgagctgagctcgctggtgggccacggcacgccgtcctacattaaccccgcggccggcagccacaactatagtcaattccttcacctgcctacgacgccgtcgtcgcatcaaccaacgccggcgccgctcgggacgacgacggcggcagcggcggcgacgctgccgatgtcgctcgccgccttctccgacaggatctgggactggaataatccgatccccgaggccggaggtagggattacagcaccagtactggattcaagtgaatcagcaatagctacagttcatgcacgcgtgcatggcattctgatcagatggtaccaccatgtactacctctgtctctctctctctctctctctg

SEQ ID NO: 88435 - DNA, 545 bp, Oryza sativa
  unsure (1)..(545): unsure at all n locations
  Clone ID: PAT_MRT4530_87287C.1
actcttttctttgcccattactctactccactgattattctgtcttgttagtattagctagttagctaggcatggcagtggaggaggttcttgatcgcgccgcgccgatgctgtcgtcgtcgccggcggcgagcggcgaggaggtgggggcgcggaagccgcagcaacggtgcggcggcgccgaggggtggtccaagcggaagcgctcgaggcggcgccaccgcgaccgcgccgctgcgccgccgcctcacggggggggggaggagcacctcgcgctcagcctcctcatgctggcgcgcggccaccgcgacccctcgccggcgccgcaggagcagcacgggtgctccgtgtgcggcagggtgttctcgtcctaccaggcgctcggcggccacaagacgagccaccgccccaggacgccgccgacgatggcggccgttgtcgtcgtagacgagccggcagcgacgacggcctcgccggccgtgtcctcgtccaattccggcttctgcngcggcggcggcggcggtaacatggtgcacgagtgctcc

SEQ ID NO: 88436 - DNA, 427 bp, Oryza sativa
  Clone ID: PAT_MRT4530_87288C.1
gacgaatggtcatcaacggcatcaaatatctagggatggagggagtactattctaaatttctataatgttttctaccaacaattacataacccttcaactattgtggagtaacagacagagctcccgtgagtccgctgacagatcgagaatagtgttggcaagctagcaagttttctgcactcgagtacaggcaatgtggccaccgatggtatctcgtgtgtgaccgcaagagctagctagcaatgcattattattaacttggcatcgccatcaaaacgagcatctatctcgtgtgatgtttgctccgatccactgcacatgcacccgccaaccgacccaacatacattccttcattcaaattgccttttcaccaacttcttcacatgtagtacaagcgcgccacagtgatcacatttttgattatc

SEQ ID NO: 88437 - DNA, 375 bp, Oryza sativa
  Clone ID: PAT_MRT4530_87289C.1
atgtgcaagcaagcgcgagtaaaacatggtgcctcaaagacggtggaaaaacggtcggcaagcacgtacgagagccgagagcggtcacgggtggacggcagtacagcacggtgcacatcgctgttacacggagagaacccaaggcggcagagcaacggccgcctggataaacaggctaggcaggctagccacgggccgcgcgcgcagtattacgcatactacgcactagtgccctacgccgtcaagcatgcgattaaccgttgcaaaggtcgtggacggcagtacgtacgcaacgcggtgcacatcgctgctaaacggagagcgcccgaggcggtggagcaacgggcgggccgcgccggcagagatctgacctaa

SEQ ID NO: 88438 - DNA, 207 bp, Oryza sativa
  Clone ID: PAT_MRT4530_8728C.1
atggcggacggctatcgacggcgggtgctcaccgcggcttcgaccctcgtcccggccgcgtgcagtagcgcgggaggcatgcagtgcgtaccggcagcgaggggaggcgggcgtaagctcttcggcgtcgctacgggcggtgaccgtcaattgcgttgcggatggcctcgaaaggccgtcgagtcggcgtttcagatggcggattga

SEQ ID NO: 88439 - DNA, 2237 bp, Oryza sativa
  Clone ID: PAT_MRT4530_87290C.1
gcacgagggttaggcgggagtggagtggactggttatcgtccacgcgagacgacgacgacgacgacgacggccggagctcgccggagaatcggtgtcgtcggagatgagggtcatgaagctcggaaataggccggacaccttcttctcgtcaggccccgtcaggtcggtctccacggatttggccactgacatgcagattcttgtggatggttgcctgtttcgtctccacaagtttcctttgctttccaagtgcatgtggctgcaagcgctgtgcgtggagtccggcgacggcggcggcgccgtcgagctgccggctttcccgggcggcgcggaggcgttcgaggcgtgcgccaagttctgctacggcgtggccgtcacgatcgggccgcacaacgtcgtcgccgtccgctgcgccgccgcgcggctcggcatgtccgaggccgccgaccgcggcaacctcgccgcgaagctcgacgccttcctctcctcctgcctcctccgccgctggaaggacgcgctcgccgtgctccactccacgcgccgctacgccgcgctctgcgaggagctcggcgtcacgtcacgctgcgtcgacgccgtcgcggccctcgccgtcggcgatgcctccggcgccgttccggccggttcgtcttcgtcgtcgccgccgtggtgggcgcgtgacatctccgagctcggggttgacctctactggcgcgtcatggtggccgtcaaggcgaccggcaccgtgcacgcgaaggccattggcgacacgctcaaagcctacgcgcgtcggtggctgccgatcgccgccaagaaccaccacgcggcagagcgaaccgccggcggcggcggcggcggcgcggccaatgccgagcgggccaccaagaaccaccgcctcctcgtcgagaagatagtgagcttgctcccggcggagaggaacgccgtctcctgcggcttcttgctgaagcttctcaaggcggcgaacatcctaggcgcttctccggcgtcaaaggcagagctcacgaggagggtggcgtcgcagctggaagacgccaacgtgagcgacctcctgataccggcgccgccgccgtgcgcgggcggggtgctgtacgacgtggacgccgtggtgaccatactcgaggaattcgcgctgcggcaagcggcggcgtcggggagcccgaagggcagcccggcgcgcgcgggcaggcaccggcgatcgatgtcggccgagagcggtgagctcgagggggcgcgccgttcgacgtccatggcggcggtgtcgcacggcgcgatggtccgggtggggaggctggtggacgggttcttggcgatggtggccacaaaggacgcccgcacgccgctcgacaagatgatcgccgtcgccgaggccgtgccggacttcgcgcggccggagcacgacgatctataccgagccatcgacacatatctcagggcgcacccggagatggacaagagctcgaggaagaagctgtgcagggtgctcaactgcaggaagctctcggagaaggcttccatgcacgcggcgcagaacgagctgctccccctccgcgtcgtcgtgcaggtgctcttcttcgagaacgcgcgcgccgccggactctcgtccgggcacggcaaccgcgtcgccgcgcgctttcccggcgacggcggcgacgtcagtgcgctgcttggcactggcaggccaagaacgacggaggagaacggcaaggacgggcagagccccgccgccgccgggagcgtggcggcggacggcgactggagcgtggaggggctgaggcgcgcggcgtcgagggtggcgacgctgaagatgaggctggaggaggaggacggcgaggacgccggcgacgaggcgttcgtgcataggacgcgcgcggggttggcacggagcgcgtcgtcgcgtgtcacggcggcggcggggaggtccaagcggatgctgagcaggctatggccgacgagcagaaccttcacctaaggggcatcgagacacttggcggccagcaaagctgatccgtacataccgtgtacaaatatgcttgaatttgtaagtaaaattttttccttcgagatttgattttgttccaactagttcttgaagtttggggaagttgtgtgcactgatatgactgcgtgtacactccctccatttaaaaaaatacattttgtaaggacgaatatgaacaagggtttatccaaattaatccctaaaaaaaaaaaaaaaaaa

SEQ ID NO: 88440 - DNA, 249 bp, Oryza sativa
  Clone ID: PAT_MRT4530_87291C.1
atgagacgaagaggaaccgatctattgcgcaaaaagagaggatatagccaatgggtacttatctctgtgtattcggccgatggcgcggcgaacggactggcggaggacgacatctctgcgagcggaagtttggccggagaggaaatcgccttgtgcgccgaggggatcgccggagagagagaagacgaagttggcttaagcggtgaaaatggagctaacggtgtgaaatttctcggggacgacggttag

SEQ ID NO: 88441 - DNA, 960 bp, Oryza sativa
  Clone ID: PAT_MRT4530_87292C.1
tcatcatcagtacggtaagggtaaagctcctatcctgagtttcttgtgccgctcaggagggcctcgtccctattgaggcagggaatgaaggagtttattgccgaggtggttagtattggtcaacttcggcaccggaaccttgtgcagttgcttggatattgctggcggatgggtaagctactgttagtctataattatatgccaaatgatagtcttgataagtatctgtatgctgagaacagcaaaatcatgagtttggctcaaaggtttagaatcatcaaaggcatcgcatcgagtatatattgtatctccatgaggattgggaacaagtcgttctacatcgagacatcaagacaagcaacgtgttgttggatgccgaaatgaactgtcgactaggtaattttggccttgcaaggttatatgatcgtggcaccgacccacacaccacacacacgtggtcagcacaatagggtacctagcctccgagctagggcacactggcaggccatcaaaggcatccgacatcttcgccttcggtgtgttcatgctagaggttacttgcggacggaggcctgtctcacaagacacgaacacggcggtaacctcttgttggtggacatggtgctggagcattggcggcaagggacggtcactgacgctgtggacccaccgctgcaaggcgactttgccgtggaagaagcaagcctggtgctgaaactatgcttgctttgtttacatcctctgcccagtgctcgtccgggcatacggcaagtcgtgcagttgctagacggtgccatgccactcccagagctatcacaagctcatctaagctgtaacatgctggctttgatgcaaaatcagatgggcaactcatgctctgttggctgttgcgtcgtcggtagctggtaatatctctgacactcctcgagcgagatgaccacaaggttttagtctcttcgc

SEQ ID NO: 88442 - DNA, 2025 bp, Oryza sativa
  Clone ID: PAT_MRT4530_87293C.1
atgcggcgtcccgagctaatcatgcggtcccttcctctaattctcttcctaagccttgggagtttccacctcgccgcagccgccgttgatgaccagttcaccttcgacggcttcgccggcgtgaacctcacactcgacggcacggccgtggtcacgccgggcggcctcctcatgctgacgaacggcacgactctgctgaaaggccacgccttctacccttctcccctgcgtttctttcacgaggcgacgagcggcggcggatcctccaccgtgcggtccttctcgacggcgttcgtgttcggcatcgtcagcgagtacgccgacctgagcagccccggcctggcgttcgtcgtcgccaagagccgcgacttctcgtcggcgctgcagagccagtacatgggcctggccaacgcgcgcaacaacggcaacgccagcaaccacttcctcgccgtggagctggacaccatcgtcaacgccgagttcggcgacatgagcgacaaccacgtcgggatcgacgtggacggcctcgcgtccgccgccgccgacgacgcgggctaccacgacgaccgcaccggcgcgttcgtgaacatgagcctgctcagccgcgcggcggcgcgggtgtgggtggacttcgacgcgcgcacctcgctcgtcaacgtcaccatggctcccctcgagctgcccaagccgacgacgccgctgctctccgccgccgtgaacctctcggccgtgatcgaagacgaagcctacgtcggcttctcctcgtccaccggcgtcgtcgcgagccgccactacgtgcttgcctggagcttcaagatggacgggccagcaccatcgctaaacgtatcaaagctgccggcgttgcctgtcacgatcgccagggctccgtccaacgttctgaagatactattgcccatagcctcggccgcactggtgtcggcattggccattgctgttcttgtgattcaccggagacgacgcaggtatgcggagcttaaagaggagtgggaggttgcgtttgggccacaccggttctcatacaaggatctgttccgtgccacgaatggtttctccgatgagcgattgcttggctttggaggatttggaagggtgtacaagggagtactactggtatcccgagtggagattgcagtgaagaaggtatctcacgagtcgaggcagggaatgaaggagttcattgccgaggtggttagcattggtcaacttcgacaccggaaccttgtgcagttgcttggatattgtcggcagaagggtgagctactgttagtctatgattatatgccaaatggtagtcttgataagtatctgtatgctgagaacagcaaaatcttgagttgggctcaaaggtttagaatcatcaaaggcatcgcatcgagcatattgtatctccatgaggattgggaacaagtcgttctgcatcgagacatcaaggcaagcaacgtattgttggacgccgaaatgaactgtcggctaggtgactttggccttgcaaggttatatgatcgtggcaccgacccacacaccacacacgtggttggcacaatagggtacctagcccccgagctagggcacaccggcaggccatcgaaggcgtccgacatcttcgccttcggtgtgttcatgctagaggttacctgcggacggcggcctgtcttgcaagacacgaacggcggtcaactcttgttggtggacatggtgctggagcattggcggcaagggacggtcactgacgctgtggacccacggctgcaaggcgactttgccgtggaagaagcaagcctggtgctgaaactatgcttgctttgttcacatcctctgcccagtgctcgtccgggcatacggcaagtcgtgcagttgctagacggtgccatgccactcccagagctatcacaagctcacctaagctgtaacatgctggccttgatgcaaaatcagatgggcaactcatgctctgttgcgtcgtcggtagctggtaatatctctgacattcctcgagcgagatga

SEQ ID NO: 88443 - DNA, 420 bp, Oryza sativa
  Clone ID: PAT_MRT4530_87294C.1
atgggtctcgtcctctcctgcggttgcctctgccgcagccgtagccgtagccgtagcctgtcgccgccaccgccctcggataggctggatgttcatccatcgttctggaaatgggagaccgagccggagcgcggccgcgtcttccgctgcttcgacaccgacggcgacggacgacacctctcggccgcggagataagggaattctacgggtgcgggaaggccaaggagacggtcgccgcggcggataggcagaacggggacgggttcctcagcatcgaggagctccgcgcggtgatggaggacggggattcggaggcgctgcatgcggtgttcgacgagtacgacgaggacagcatcgaggagctccgcgcagtgatggaggacggggattcggaggcgctgcaggcggtgttcaactag

SEQ ID NO: 88444 - DNA, 404 bp, Oryza sativa
  Clone ID: PAT_MRT4530_87295C.1
aaacaccaactttttttcaacgatttttgggggggggggcaactgggtgggggaacaaaccccaaggtggcccccaaaagccggccggccgcccccggggataggccactaaaaacaaaggggccccggccccaaattaaggccccccggggaacctttttaaggaattccccggggggcccaatttttaattcccatttagggggagggccccccccgagggcacgcccgccttattagctagggccaaaccgggaacaggtggggtctggtgcaggggacagccaaaggggcccggggggccttggtgcaaaactggggggggccccccgggacattatggggcgggggtaacccgaatgaaaatccgggggccccgagaggggccccccccccaattgggg

SEQ ID NO: 88445 - DNA, 1707 bp, Oryza sativa
  Clone ID: PAT_MRT4530_87296C.1
tttcttggcccgccctttttttttttgttgggcatatgaattcatggaatattttttttggagggtgggcatccatctccagatacatacataacacaaccataaacaaaattaagatcttgttagcgaaatgacgcccaacaatcttcatcggaccaagaagggattattccttcttttttgacgaactgcctcgattagctgctctgatttaagcttattccatcctaatcagcaacatcatggtcttgtgcaccaatggtctctgcaaactttattaccacttatgtaccaaatctagcggcaagcagcatctccattcctggaactctgatccttactggccttgatgttggcagcatgccggcatgtcctactgcttaatcaatcagtttcaagttcacggaatggtaatgggacagtcttcactgctctgaacttgccaacgttgttcaaatgttcattctccaatctatagaagttccaatggcctcgtctgattatctctagtgaagcgagcgagaaatccagtaagcgcgactcaaccttaccaatatggatcttcattacactctcagtccatgctaggcgaagtgcaagattgagcatcatggatacgtagtagattgatttattcttcaagatgagctcgttacgaagccatcggttctttgattttgggtttaagaagccccagtccttgacaaagtcccagtagagctggtaaattgtggcacctgaggatgaaatgatgaccatccacacccagaatggtgttggtgttgcagcatatttgaacctaacagcagctgctaccattgctgatacatattttccagcattagcaagttggttgatatcatgtccttcctccaagtaccttcttaaacactgcaaggctctccagaagtatgggagaaaggagatcacataggccagatgcttatattgttggccactagtacaggtctcatatgggtgagttctaaagcttccagccatgaagtagcacgctgtaaattccatgtgccgtaatagtggaatctggctagttagttggtcagccatgaagaaatcagccatcagaaccttatagaatggtgaaaatatgatattgcgcatgacacgcatgaagcagtatcgcgtcgagcggtagaatatgtcaaatggacagaatagtacacctgttgacagtagtaggagtgctccaggcaaagcattggcataggctacaccggcgttcttgaggaaaagattgatgaccagtgcagcgacaacagtgcacattatcgatgcagacatgaggaaggcgtcccggtgcgtcaaggcggtgtttgaggagaaatcgaatatgaagttgtgattgatccttgtgttcttccacatgaagaggttgcacccatacaggaagatgtggaggctgatgagagcaaacatgctgaaaacatggtacacaatttccatgtaggctgagttcccagtggaagtaaaaataccactaacatgggctaaaatcgcgtatatgatgaacagtgaaacaaaagtgcccgtgaacaaaccagatgataccttgtcggagctgctaaatggcgacctcttcaccttctctgaaaacaggtctgtagctcgctgttgctcggacaccttgacaaatttcttcaatattttggtgaaagcctttacattgagagagctgctcccatccat

SEQ ID NO: 88446 - DNA, 691 bp, Oryza sativa
  Clone ID: PAT_MRT4530_87297C.1
gagaagatgaagaagaaggagagctcgaggtgacgacgacgaggcggcaatggcggcggctgcggcattgtgcggcgtcgcgttgctgatgctgctgctggccatcgaggtgcgcggcggcggctacggcgaggaggagaaggtgccgctgtcggcggtcatcgtgccggacccttccccggagctgcgggagcccacgtcgccgtcgccgtcgctggcgcccgcgccgacgccggtgtcgggagccggcggcggcgacgacgacatgcggcccaggctgccgacggagcggtggcgacgtggtggtgggcgtggcgaggagcgacacaccggcggcggcggaggcggtagccaccacgcgcactacgcgcacgggcacggccacgcccacgccgcggcgccatcgccgtcctcgtcgtgggcaccagcgcgcgccccgtcccccgacgcctcggcgtcggcgccggactccgccgccccggggcagagcggcggcacggcgttcatcaggagcagccccgccgtgcccgtcccgcgcggcgtcaccgacacggccaccatcctccccatgcccacgcccggtgacaagcaccaggaagtgggggcagcagctgcttctgctcgagccgttatggcaccggttgtggttggcctcatcaccatgatggcgtctttctgggcattacactag

SEQ ID NO: 88447 - DNA, 1851 bp, Oryza sativa
  Clone ID: PAT_MRT4530_87298C.1
tcggcacgaggcctcccatagctcgcattcgcattcgcatcgcactcaccctctcctgcaagcaaagctaaagcttcggtttggttttttcctttcctcgccgcttttttctttgcttcttgcggtggccatggcggtaaggaggaggaggaggaggagtagagccgcggcggttctggtggccgcgctgcttctcgccgcctccgccgccaccgcctccgcggcgtcgtcttaccccgcgaaggtggtgaccgggttgctgtccagcacggcgtcggcggtggtgaagcagctctggtcgctcaaatcgaccgccacaaggacggggtcggcggcggcggggaggtcgatggtgaagtacgagggcgggtacgcggtggagacggtgttcgacggcagcaagctggggatcgagccgcacgacgtcgaggtcaccccctccggcgagctcctcgtgctcgactccatgaacagcaacgtctacagggtccagctgcctctgtcgcgatatagcagaccgaagcttgttgctggttcgccggaaggattatccggccatgtcgacgggaggctgcgggaggcgaagatgaaccatccgaagggatttacagtggacgataggggaaacatttatgttgcagatgctatgaatatggcaataagaaagatcagtgatacaggggttacaaccattgctggggggaaatcaatgagaggtgggcacctagatgggccaagtgatgatgcaaaattttctactgattttgaaattcgctacatcagcagtagctgctccctcttggttattgatagaggaaaccaagcaattcgcgagattgcactccacaatgatgactgtgaatatcagtatgaagctggttttccactaggcattgcattgctttttgctgctggtttctttgggtacatgcttgcattgcttcagcgacaggttttagggatggtatcaacagcagatgtgcattgtttcaaggacactgaaaaggaacctcagactcctccaagacccagcattgcaagcatccctccatatcagaagccactaaagccttcgcttcggcctccactgatcccaaccgaagatcaagctgggaaacatgaggctgaagaggggttcttcaccctcaatcggcaagctcatcggaggagcaaaatcatctgcggtagagatattctcacgaaagaaacgcccaacccatcagtaccatcatcaccttcagcagcaaagagccaacccttggccggtgcaagaaagttacgccatcccacatgatgagacaccgccaccattggacatgagagcagctactcctcggaagaactacgccttcatgacgaaggagcctgaaaaagttcaccatgtccgccatggccggccttacttcaacggctgggacatgcagcatgcccctcagcaacagccagagcagcagatgtaccaccagcagcacctgcagcagcacaggcagtactccgcaggcccgcaaactttctacgagcagagctgcgagacgacaaacgagatcgtctttggtgctgtccaggaggtggacaccaagcggcgaatggtggagatcaaggccgtgaactatggggacacattctatgagcagtacgggatgcggtatcgcaacaattacatcggctacaacaacagcagcaacggcaacaacaacagctactactattaaacaaccaacccttctgccctcaattttccccctctctctttatccctgtttctttcctatatgattagatttaccgctcgcgttttcgcttctcctgacctccgcgacgcctgtaacaaaagaaagaaaaagcgggggg

SEQ ID NO: 88448 - DNA, 362 bp, Oryza sativa
  unsure (1)..(362): unsure at all n locations
  Clone ID: PAT_MRT4530_87299C.1
tcgcccacgcgtccggntttgcttatctgggcggagtacgagacgagaaaacatatcagaaatttggattccccacgcagagtctcgagtatgaggcttgtggaagaaactcatttttcagtctatgtattgtaatgactagcggatctttttttttctgttgttgttgctgttggtggggggggggtagcanatccttttttgattgtctttgcnaatagcantctacanagaagatatgttatgtgaatatagaagattatggcctcgcttgagatggctcattatggatggttaatctggttttgtgttggctttttgcggttctgtgcgcttgttttgaccttctgctgtgcttctct

SEQ ID NO: 88449 - DNA, 921 bp, Oryza sativa
  Clone ID: PAT_MRT4530_8729C.1
atgtcgaccgttttccgccgtccgcggggtgcttttcgcctctcgttggtccggtcgcgcggtggggtcggcggtcttgcgccgtcggtccgcccctgccgccgcgttagcacgccggccgtcttcagccgcccctgccgccgcgttagcacgccggccggccgtgccgtcgcctcctccagcgtcgccgccacctcctcttcgccggcctgccctccgtttcgcgcggtgaccgccggaggtgcgttcccaccgtcgcccttctctttcctccgtgccggccgcctccagccgcctctccctcctcgcccaagcgctgcccggccgtgccgtcgccttccccggcgtcgcagccgcctcctcttcgccggcctgccctctgttttccgcggggacctccggaagtgcctccccgccggcgacagtggtgttgccgccactgttccgccttcggccacctctgccgcgtcgccggtacgccgatcgacgtcgccatctcctccgtcgacgtcgcagcgttgtcctcacctccagctgctcctctgtttcgccggaacgccgtcgcccgtgccggcctccatcctcgtcgtcgccgacgtcccttcggccgccccgttcatcctcgccggctcgtcgtctcgcggcgccgcctccgtcgtcggcatcgcagcggcgtgttccacgccagcctcgcctccgtgcagccgctgccggctgccctcgtcgccttctcgccggccccgccccgtcgtcgtcttcgtcctcggctccgcgtcgtcaagcctcgtgccggccgcgtctcgccttcgtccaaggatcgccgccgaagccgtcccctcgccgttcgtctccgttgtgcccgtctgtctccaccgcgcccgttcgtcgttgtcgttcccacgcctcgtcgcgtggtggtaa

SEQ ID NO: 88450 - DNA, 435 bp, Oryza sativa
  Clone ID: PAT_MRT4530_872C.1
atggcagcagcccagctaggcaatggcggcagcacagcagctccgcgcgaggaaacgacagcagcggctcggggtggaggcgatggcggcgacggctcggcgcgaggaggaggcgatggcggcggtggctcggtcaggggaaggagcggcggcgcggcggctctacgcgaggaggaagcgacagcggtgactcgttggggcgacggcggtggctcggtgctgaggcgatggctggcagcggctccgcacgaggatgggtcggaggtagcttgccacgggttggagatgacagtgacgagcgggccaagaggcgatgacggtaacaacacactaaggtgcatgcatgtagagtttttaactagcatgagtgttggttttgatgtgcacctgaccacctataccgacagaggcctgggtgtggtgctcgatccatag

SEQ ID NO: 88451 - DNA, 585 bp, Oryza sativa
  Clone ID: PAT_MRT4530_87300C.1
atggcaaggacgccatcaaggttgaagggcggcgcaaagatggaggagacgcggaagagcaagatgtggcgcgcgtcctcctccttctcctcgaacccgtcgccatcatcgtcgttgtccaccactgccccgctccgcgccgccagcttcgcgtgccaccgccttgcaggcctatctactccgcccaccaccgcctcgctccacgtcgtcggcttcgagcgctgccgctctgcccaccgtcgcccctcttcacctacctggtccgcccaccgtcggcttcgcgcgccgtcgtcccactccgcttggctgctccgctcaccgctactccgctccgccctacctgccgtcaccccattccacctgccttccccagcccaccaccgcctcgccggcttcgtgcgccactgctacgcctcgccgtcgccccactccgcccgccgccgccgccccgctccatcccgccggctttgtgacgcggatagatacagagaagaggggaggagagcgaagaggagcgaggaagaaacatggagaggggagggaaagaagaggctgacgtgtggggtcacgtgggtaccatgctga

SEQ ID NO: 88452 - DNA, 161 bp, Oryza sativa
  Clone ID: PAT_MRT4530_87301C.1
gggggggttgtgaaaccaaaaccgttttaaagtttttgtgtaaaaaggaaggcctattgaaccggggttcctcgggcccaagttgtgtggggcccaaaagaacccggggcccgggggtttaaccccggggtttataaaaaaagggcgcccttgttgggggg

SEQ ID NO: 88453 - DNA, 1338 bp, Oryza sativa
  Clone ID: PAT_MRT4530_87302C.1
atggacaagtcgtggcgtggttggaaaaacacattgaacacaaaattcgtgaagacgggccggacaccatttgagacatatgccaatataacaccgacacagtggaacgactatgttaagttgaagacctccccgaaagaaattgccaagagcaagaagtttgctgagttggccaagaagaacagatttcctcatcgcttaggctccggggggtatgcaccaaaggtggcgcagtgggcaaaagaggaggaagaaatgaggaaggcggggcttcagggtagggttcgaggtgtatcgtccaagctcagttggaaggaagggttcaaacatgacccctacaagaaatgtgacgcctacaaggatagcctaagggatgaaggggctaaggaatttgaaaggcaaatgatggatttctgcattaggcatcttattttgcctgaccccgcaaccaaagaacctgagccagattacccctttgatgacctgaaggagaatacaccctgtaagttgcacgttccaattagatgctttggaagaactcttgaggccgctacagccattgctatccctggcagaacatataacggagagttcatacccgatgagtatgccaaagtgcagtcgcaagtggtccaccaagggtttgagtcgtacgacatcgacatccctactcctgatgtgcaagatgtgcccatggagatttcagtgccacaactagatgtgcaacttctggcaatagtcggtacagatatagaagttataccaggtttggaatgggacggtacagatctagaaatctttgaagtccctaatcctgcgaaagaccctgaggtgcaagaacccccggtcaatgacaaggccactgagaagtctgaagtgcctagagtgcttaggagccacaattccaagtccaaagatgatcaaaaggagaagttcatggtatccgtctttagaagggatgctttcggcggcaacggttacttctggctagattttgaagatctccacgccatatatcgtcgggaaaagatggacgtcaactatgtcgctgctgggtgcctgatgcaatacatggatgctaaggagaaaaaagaacttatcggattcctggatccaattaggatctgtcaaacacaacatacccgatcattacatctgtttaatcatctacccgaagcacggaaccgtgacaatcttggaccctctcgattatcgtcaccagtcatacagagaatttctaacaatcttacaatatgtcacaagcaacctagaggcactgtcctctatgggtattacgcgtgcgaattcctcagggttaatgggagttgccaagaatag

SEQ ID NO: 88454 - DNA, 3598 bp, Oryza sativa
  Clone ID: PAT_MRT4530_87303C.1
ttttttttttttttgtttggtgttcttcctccccttccttccgggtccttaattgctcggatatgaaaaccaatggtacgataaccattgtttaacatgttaaacgtttgtagtgttaaaagtgttatttctcgaagagttcatgcattgcataaagtcaaacggatacatacataacaattcctacataaataaccgtgcaattttgaggcagggtatctagaacctagaggtggacaagttagttgttctggataaacgggagaacaatcgctttcagtgccagatcgggctgcaagatcaaatgagcgaccgaaactgaatgctaaagctgtgatgaactgttgttgagcatgctaagatgaccagagattttctccttgcacgccggacagatgaagccaagtgaatcagcctgctgatcggcaacggtgccaaaatgctggaactgagtgttgcaccatacacacatggacgactggagcacacacccgccaaccatctttgacatggacatgtcccatcctaactggacaggagggcagctgccaatgtgcggcgcataacctaacatcagtgttggttcgggtacaggtacatgattatgcctgttcatagtcccaaactgtggagctccagctgaggccatcctcagctgctcctcgaaggtaggatacatctgtggtttctgaacaccaaatccaagctgcaaatcacactggtcttgaataattctactcattggaccatcttcaacagaacgaaccagagaggtcaggctaccaaaattggtttgcaaggacataaaatcatctatacttccacttgtgccagctgtagggagtgagccacaaggacgagtgctgccattgtattgattctccaggtcactgtcagatttttccagtgcctcaagcatggaacccttgatatcaaaatccagtgtgcaatgttcatttggttcatttcgactggtggagctattaacaaaactattcctcatactgtgaatatcaatttcatcagttgcaggaccaccagtcagtgtgttcagatcagataacgaatagcagcttgaataatcagctttcatgtttattgcattattcagctgggcaagactactttctgtgatagcgccattgaagatattgctgtaagcttcaacatcaaaacctgcatcattgctagtaatgttccgtggattcaccaactgttctttggcattatcttcacgtctgttgctattgttcttaatttcagatgtcattgaacaagaagtaaaacaatccacattaatttgagcaggagagataggatccatggtcaaattaggttgatatatcatgtcattgttctggttgaagctttcagccttggatacactgctctggttgtttacaaaattttcctccttacaagcattgtcatcggcagaattagcaccaaagcattgggcaatgatggatgatctattattgtcatctatggcattagatgtttcataatttgcaccagaaacaggaggagacattgcatctaaacatgaattgaggttgacatctcttatcctgacatcggtattgatctcatgatctttcaaagcagtcattctgcaatcaataatctgatcttcaatatgtttgccattttcaggactagtagaatcgcctgcattcccgtacttgcattctacattgtcattgtctacctccatgtcaatcgaatttagatcaggctcattcaaagcagcagaaagtgggctattttcctcctgaccattaaaattagctccttcaggaaaactactaaatttgtcatccagtagatcacaaggctcagaaacttttttggatggtttcatatcagtacactccatcggatcatcaatacacttgctttcaccttgaggaattgtaggattaggagctaaatcctttgtgatgttgtcattctgggtgcaatctgcattggaaagtactaaatccttcgtgctgtcagtctgctgtaagtttgcagagttaccaatattaaattcgcttgcagcttcaacagcatgaggctcttcagcattatgacatgctccatcatggattttgtggtcactgaaattgtcaatggggtcctcgtgattcccagtgacaggttctccagcagatcctttttccttctcaggtacaccagccatattgtgaagaggatcacaatgtccagagagaagttcaccagcagaagattcttttccctgttcagttaagccattcgtctcttgaaaaccaactggctctggtgccatggatggtcgaccacctaactctcctgaaatggtctcgtcaggcattttttctggtgtttgaccttgagattttgtggtggctaaactatggtcaatattgcccagtttatcttcagaagttatgtgacattcttgagtcacaattgttacatttttgttggctcccacttcaccagacttattaaccttgcgccttttagccttcctttggtgaaaggacaactgatgttgcacataggcactctggtcctgaaaagtcaaattgcacttttggcactcttttccatttgcttccacctgagtttcattcttatcaagttgcctctgaggatcaccatggtgactggagaaaggcacagatgtaactggaggcgcactctgcttttcctcagttgaattaggctggcaatggcctacagaattaacagcgtttaattcaagcacttctgcatcgctgctctgaatggcagttggctttgcctccacatatccaagaagagacataagataggtagaaacttctttgcaagtagcaaactgatgtccgctggggctgacataacgccggcaattgatccaagcaacacgctccttccgcttgaggccaagtagcagcttccacccacggggcaggtggtcaccaaacatagaggcatccacgaatttcctccgccgccttcggctcccccactgaccctcaagcccattcatgaaacctaatagctcggattctgcccctaatcccgccgtccgcctccgcatctcctcttcgtagggatccaccagctccgcgagcctcgccagatcgaccgccaccccattcggattcatcacctccatgtcggcgttcgagggaggcggcgtcggcagggagggcgcgggggtcacggcagcggcaatcgcgggcgtgattagggtttgcggctggggttgcggtgcaatctggggcggggatgcgaatgaggggtcctcgcccgcgaagaggcgctggaggtggaacgcgatgaggcggttctcggagtcctcgtcggcgggggcgggggcgggggcggcggcggcggaagcggtggccggggtcaggctgtgggagaggttggtggcgacgcggtggcgggagaaggtctgcttacgggagccggcgctctcattgaagacggcgcgatcgatcttcggtggcgggaggacgtcggcgtcgcggccgcggcgggggtcggcggagtagggcgaccccgccgccagcgccacgagatccgactgggacagcgcccgcatgtccaccatcggggccacctccgtccccat

SEQ ID NO: 88455 - DNA, 1784 bp, Oryza sativa
  Clone ID: PAT_MRT4530_87304C.1
atggacgcagatgggtcgccgccgctgcgggttgtgatcttcccgtggctggcgttcgggcacctgctcccgtacatggagctcgcggagcgcatggcgtcgaggggccaccacgtgtccttcgtctccacgccgcggaacatcgcgcgcctcccggcgccggtggcgtcggcggtggagctcgtggcgctgccgctcccgcgggtggacggcctcgccgacggcgccgagtccaccaacgacgtccccgacgacgagcaggggctcctcatggaggccttcgacggcctcgccgctcctttcgccgacttcctggccgccgcgtgcgccgacgacggcggcggcggaaggaggaggaggcccgactgggtcatcgccgactcgttccaccactgggccgcccccgccgccgcccggcacggggtgccatgcgtggccctcctcccgagcgccgccgtcatggctgcctacgagtgggagaagctcaaggcaagcttcctcgccgccaccagccatggcgcgtcgtcgtcggcgtcgggcggcatgtcgcgggcgacgcgctgctccctgacgctcgagaggtgcacgctggcggccatgcggagctgcgtcgagtgggagcccgagcgttccgggcggtggccgcggggctcggcaagccgctcgtccccctcggcctcctcccgccatcgcccgccggatcccgccgccgccgcgccgtcgccggagaagaagacgacgactccaccaacccccctcctccgctggctggacgcccagccgcccagctcggtgctgtacgtcgcgctggggagcgaggtgccactgcgcgtcgaccaggtgcacgagctcgccctcggcctggagctcgccggcgcgcgcttcctctgggctctcagaaagccccgctcctcctccgccgcctccgccgccgccgccgccgccgccgccatcctccctcccggcttccaggaacgcacggcgagccgcggcgtggtcaccatgggctgggcgccgcagatcgccatactggagcacgccgccgtgggcgcgttcctgacgcactgcggccggaactcgctggtggaggggatctccgccgggaaccccctcgtcatgctccccatcgccggcgaccagggccccaacgcgcgcctcatggaggcgaggaaggtggggctgcaggtggcgagggatggcgcagacggctccttcgaccgccacggcgtcgccgccgcggtccgggccgccattgtagacgaagaaacaaggaaggtgttcgtcgccaacgccctcaagctgcgagaggtggtcgccgacgaggagctccatgagaggtacatcgacgagttcatacaccagcttaggttaagctctcctacgtacctcgccagctcatgaatgaaccccctcttgggcccatggattgtaatccctacaaataataatgtccttcctccgtttcagaatataagtcattttagtttttgccacatatatatggatgttattatttcgtggttgtttttgttcggtcctgattcattaacatcaatataaatatgagaaatattaaaatgacttacattgtgaaacagagggagtacgtacgtacgtgtgtatgtgtgtctgtctgtcattttggatcatgccattgcaaatttattgtattaaaaaaatacatgcatgtacgtacgtacgtgcgtctgtcggtcattttggatcaaaaaaaaaaaaaaaaaaaacgcgagactagttctccctcgtcgattcctcagcccggg

SEQ ID NO: 88456 - DNA, 265 bp, Oryza sativa
  Clone ID: PAT_MRT4530_87305C.1
ccggccgggacctcgagggccacgcccaacgcggacctcgcccttgcacgacctcggtcggcagacgcgtcgtcttcttccaggtgcgctgcctccgcccctgtgtcgccaacttctgccttcgggcggttcgatgactccttcagcgcggcctccctcaaggcctacgtcgccgagttcatctccaccctcgtcttcgtcttcgccggcgtcggctccgccatcgcctacaccaagttgaccggcggcgcgccgcttgacccgg

SEQ ID NO: 88457 - DNA, 1970 bp, Oryza sativa
  Clone ID: PAT_MRT4530_87306C.1
atggagcaccgcctggatggaccgccggccacgccggccctcctccccgccgcatcgaaggagacggagcggagctccacggagtcgtccgtggcatcggggctcgacttcgaggacaccatcctcaccctctgccccccgtgctcccttgccgtcggcgtcccgaaccccaaccacaagcgctcctcctccaaagccgtcaccgcggacaactcctccccccgcggcacctgcggttacgacaagcggagttcccagagcgcgtgctgccgccagggtgacgcagccgccgctgccaacgcaggccgccccgcgcctcgccgccagcccgagggcgacacagtcgctgtgctgcctgcgccttcgacgagcttcaccacccccgaggcggatgcgaccagggcgatggcccggcgctcttgtggggggctctcttggaactttgggaggccgatctgtctgtatggtcatggactcttctagttagtccatcggtgggctttctgtttcatgtgtctcgcgacgtcgtgcgatccatctcggcgtaccctttgcttccgctacgcttacaacaaaatacccgcgcctcgccaccaccacctgggcgagaccgacgccggcctcccagcgcctcgccgccaccgcctgggcgacgccgacgccggcctccccgcgcctccgccatgcttccccactacggccaccgccgtcgccgttgcggaccccctcataccaggcatggaggagagcgacgagaccgccgtggaggcggcgctggggctgagcgcctcgttcttcgtcaactcggtcctcaacgcggtcgacgacgtccgctacggggccttcgagtactgcctccaggaaggcgcccccgaggccgtcggcgccgccatggcgacccagaaggccgaggagctggagcggggtgtaatcagcattcacaacttggtgaaggatgtattggataagagaatgagcaattgggagaaatactgccttcgacattgtttcgcaatacctgaaggattcctgacacgtgaagatgatattcctgcaaaaaaatcactcaatgatgggaattctgattcggatctcgatgctgaacttgtttctcttaggaaaaaacttgaagatgctaacaatgaatctgaagaacttcaaaaagagctttcttccttagaaagacaagctgagtgccagagaaatttggattcctctatggctgaattattgaaggtgtttgaaagcaaggcctttcaagacaattttcaagatcttgtgaacgtaataccactatttcagcggaaactggaaggtatgaaaaggaagattgttgagaacattgacgatcaaattgattggaactggtcccgcaaaaaccctagccatcccgccgcctccgccgccgacgacgacatggacgacgacgccatcacggcgctgatggacatcgacgactccccccgcagcagcggcgccggcgccgtcttcctcgacgacgaggaggacgcggaggtcttccccggccaccgcgcggcccgcgccaacgaggcccgcgggcccctccccttcgccggcttctacaactccttcgacggcgccgacttcgacgacaccgacctcgcctgaaaggaccccacaagcggttagcatcaggtttcactgccagaacagaagacagtcaagatgttgtgaatgtcttaaaaaagtattagtagctcccccttttatgcgacctgtgcgataacaggacgcctgctatgtgctatccttcgtagcacgggataagctggttatatgtttggactcttgctaactgagtaccgccaatgcagattttcaatgtaatcctgaactgcgattccttccgaacaatttgtacgtaaacgtaaagtacatgggctttccataattggtttatacgtggttatttctccggaaggccggatagaacccctatcgtattgttc

SEQ ID NO: 88458 - DNA, 570 bp, Oryza sativa
  Clone ID: PAT_MRT4530_87307C.1
atggcggtggtgaggagaaccgagggagcaagctcagcggccgacggcggcaaggagaaccgaccgatgagttatctggatgttgcattggcttacaaggattacatacaagttggattcaatatcggcttacaaggaatacatacaagctttttgattgccaataacctgctttttgatttcatcggtgtttcagccgatgagttatctagatgttgcattggcttacaaggattacatactagcctgcttgatgttgcattggcttacaaggattacatactagcctgccttttgatttcatcggtgtttcagccgatgagttatttggatgtgatgagttatctggatgctgcattggcttacaaggattacatacaagttggattcaacatcggcgcattggcttacaaggattacatactagcctgccttttgatttcatcggtgtttcagccgatgagttatttggatgtgatgagttatttggatgttgcattggcttacaaggattacatacaagttggattcaacatcggcttacaaggattacatacaagttggatttag

SEQ ID NO: 88459 - DNA, 989 bp, Oryza sativa
  Clone ID: PAT_MRT4530_87308C.1
agatgaagaaaaaacagacttagactcaggcaccaagtcgtgtgccactactgacggggcaacaatggatgatgcaaacattaggaaatggacctcaatgcaggagcatgtttcgtatgcatcctccagtacaattacaacttgagagcgtcccagtacaattacaacttgagagcgtcctatgaggttagcactttggaagcagtaagatttttcctgtagacaatgtcgggggtgaagttaacaagagagcgaacaataggttcgaaagatccggattaactatttccaaatatttcagccgagtgcttcacgcgatagtctgtatggcatgtgatgtagttcggccaatggacccaacgttcaataccgtaactaggttggtgaaactacaccaaatgtgttggtcatttcagactggagcgaccgcgtaatttttgatgtaactggatggccggggtcagtgcacgatcaccgggtgtcctgatcgagtgctatgaggaagtatcttgatcggttccccagggtaccgccaggtaaatattttctcgtcgataaggggtatgcgaataggtaggggtttctcgcaccgtatcctgaagtgaggtactagcagccgcaatttgaacatgcggcacctccccaagatagggatgagattttcaatttctaccactcctctctgcgcaggtcggtcgaacgacttttcggacgtatcaaggtgaggtggcaaatattggacagtattccggcttacacaccacgtgcacacaacatgattattcatgctgccatggcattgaacaactttattgttgatagtaccgaaccaaactctatcagtaccaaccccctataccatactcatatccacccggtaccggatgtctctccagcacatcacacataccatgcgcgtgataccaaggctgtgatggatatggtccgtgaaaatattgctaatagcatgtattagcatttcatattta

SEQ ID NO: 88460 - DNA, 356 bp, Oryza sativa
  Clone ID: PAT_MRT4530_87309C.1
agccatcaccaaactaccaaaaccaatcccctcccaatccaaccttcaacaccgccaatatgcctgccgcgtggagagccgctggtcttacctacaaccgctacctggccatcgccgcccgcgttgtccgccgcagcctgaaggacgacaagagaatcgttgccgagcgccgaggcgagatggatctccgattttccaagtgggagaacggcaagcagggcgagatgcagaaccttgccaaggccaacgctgccatcgccgccgagaacgccgcttaaggaatttgactcggatggatgattgcgtacggaatattggaagcatggcgcctgaagggggattgctggaatgggatg

SEQ ID NO: 88461 - DNA, 6259 bp, Oryza sativa
  Clone ID: PAT_MRT4530_8730C.1
aaagtccaccgatgggaagattcctacccgtataggactgggtcgtcactgtatcgtgtagggtccgatgtctccgagttctacttggaaaccacctgacctgcgatataaaagggacctccgggaggacctagggcattgaatctcatagccaagacaaccaccacagcctacgaaatcctcgtaccagcgtaccccaataccctctatatccagtctacgggtatcccccgtcgacagtggcgcgccaggtaggggatcttggtgctcaaggttctactactatgacatcaagcctcgtcgacaacagcgtcaacaccagcctcatccaaggagtccctacttcaacaatgctggtgtggacacaagtaggtgaaatcgtcttcccggtttacaccacggtaccaatctcggctggtccatcaatgaccggaatcgagaacgccgtggctataatcccgggcgactccatgtcgaaggatcctcccgccgtagcgaagaacgaaacgccgacatcatatgagcccgagaaggatcctagtgcggccaaaccttgcccttccgacaagaaccacgagccgacaaggacaacttccgaggtaacaaagccctggtgtcctatccacaagaccaggaaacacaacttgcatgcttgctgggtttttctcaacgtacaagctgaaattcgtgcctgtaaagagcatggaatccagtgtgcttctccaactcgtgatgtctattgtcctattcacaagatgaagaatcacgacttctcaagctgcaaggtccttctctgcaccatgaagacgccgcttcctaaggtccagcaatcaaaaatctctgttagggatgcagacaaggaacaaggagcgacgctgacctcggatcgattcgttggagtaatcgacatcgatccccacgagccgtcagtcctacacttgctcgaagactatggctcatcatcctccagtacactacgcgacgtatttgccatcggtgggaccagcacgtctgcgcacgctaacacagaggcggagaatcaagcggtcacaccggcccaacacctcggcaccatcaacgcaatactgagagaaaccccctatgatcccgtacttaacgatgatctcgcacgatggacagaacgactacgggaatcggtagccaatctcagtaacgcgttcgaggaggccgctaccagagcacaaccagaacatccgacagctggcggtgctgacggcaaaccaccggagcaacggacgtcgcctagacgagccacccctccacctcgcggcaccggcgatctccgcgaccatttgaatggccgccgagaagcacgacgcgcgcgagacaacgagaatcgttcccgacatcatgtctcttcacgacgttaccgacaccatgataatcgtcacaaccgccacgaccgcgacgatcacgaacattggacgccggacgatactggtcgaggacaccgacatgacggtgatgataatgggagtcggtgccaggacaacaatggtggacgacggcaggactctcgagaacccgaacgtcgtcctcggaatcggacaccggagctgagtaacccatcgtcatcgtcatcatcttcttcatcctcgtcatccgatagacatccacggaggacatacgatcgccgacaacccaccgcccccatggccgggtgtagagctttcaaccgttccctacgtgatgtccgatggcctgagagattccgacccggggcaatagagaagtacgatgggagtactgacccagaagaattcctttaggtctactccacggtactatatgctgctggagcagatgacaacacgttagcaaactatttgccgacagcgttgaaaggttttgcgcgttcatggctgatgcacctcccgccctactcgatttcttcatgagcagatctgtggcagcaattcatcgctaacttcgaaggaacttacaagcgccacgcgatcgaagacgatctacatgcgttaacacaaaatccgggcgaatccttgagggactatgtatgacgctttaatgagtgtagaaatacaatccctgaaatcaccgacgcctctgtgattcgcgctttcaaaatcggtgtcagagatcgctatactacccaggagttggcaacaagtcgaatcacaactactcgaagattgttcgaggtcatcgatcgatgcgctcacgcggacgacgcactgagacgcaagaacgacaagccgatgatggggggagagaagaagccagctaaggacgcacctgaaccgagcaagaagaaaagcggcaagagtgggaaaaggaaagctcaagcggaagtcctcgcgtcggaatacgagcgccctcccaaacacccagacccacaaggcagtgacacgaagagaatatggtgccccatacataagtcggacagacattctctagaggattgcctcatcttcaaaaagtcgctggaaaagcaacaagcattggagaagggcaagtgagtacatgtagtcaagaaagccgccaaggctaccactcaggactcagactcggcatacccagattccgatcttcatgtctcgcacatcttcggaggttccacggcgacaatatccgatcgtggtcgaacccactattcggaatatcaaggtagcgcgagtcctcatcgatagcggcagctccatcaatcttctcttcgccagcaccttgtacgcaatggggattccacgaagcgagttgacacccaccgatcaacccttccatggaatcacacctcagtcatcgtccaagccattgggcaagatcatgcttcctgtgactttcggccaagcgagcaacttctgaatagagcagatcatgtttgatgtcgctgagtttgacacaacatacaatgccatcatcgggagaactgcactcgcgaagttcatggccgcatctcactacacgtatcaagtactcaagatgcccaggccgaagggaacaatcactattcaagggaacgcaaagctggcggtccaatgcgataagcggagccttgacatggtcgagcacactcccagcccacccgccacagctgagccaccgaagaaagtaagcaaaacaaccaagacgccgaaaccaaacggcgcaatcaaaatcattccactctccagcgccaaccccgacaagacataactcgtgctcatcaccttccttcgcgacaatgctgacgtgttcgcttggcagccgtccgacatgccggaggtccccagggaggtgattgagcacaaacttatggtgcaacccgatgtcaagccagtaaaacaaaaactgcggagatttgcaccagaacggaaacaagccatacgagaagaacttgacaaacttctcaaagctggtttcatcagagaggtacttcatccagagtggctagccaacccagtcatggtgtagaaggccaatgggaagtggaggatgtgcgtcgacttcaccgacctcaacaaggcgtgccccaaggatcacttccctctccctcgaatagaccaactagtggactcaacagctggttgtgagctgttaagtttccttgacgcttacttcggctaccaccaaatcagcatgttaaaagaggacgaggagaagacagcattcatcatgccgttcggtgtattctgctatgttaagatgccgtttggactgataaccgcaggaaacactttccagtgcacggtccaaggggcacttaacgatcagttgggaaacaatgttgaggcctacgtcgatgacattgttgtcaagaccaagacaggcgactcattaattgacgatctacgggaaaccttcgacaacctccgacgatatcgcctcatgctcaatcctgagaagtgcacgttcggagtaccatcgagcaagctgctcgggttcctcgtctctggcagagaaataaaagcaaaccctgagaagatcaaggcaatcgagaacatgaagtcgcccacgagactcaagaaagtacagaagctaaccggatgcatggcggcactaagcaggtttgtcgctaggatgggagaacaaggacatcccttcttcgctctgctaaagaatcaagacaaatttgtatggacacaggaagatgaagaggcgtttatcgcactcaagcgctacctgtcgaatccccctgtacttgttgctccccaacctaatgaagaattattcctctatattgccgccacgccctattctgtgagtacggtcattgttgtcgagagagaaaaggtgcaaagaccagtctactacatcagcgaagctctccatgacgcgaagacatgatacccacagatccaaaaactactctatgcagtaatcatgacgtcaagaaagctacgccactacttccaagcccacagggtcacagttgtctcctccttcccccttggtgaagtggtaagaagcaaagacgttgtcggccgcattgcgaaatgggtagtcgagctaaccaagtttgatgtccactttgtaccacgaacagccatcaagtcccaggttctcaccgacttcgtagccgattggactatgcctgaaaattggttagacagtcaaacagacaacgaaacatggacaatggcgttcgttggcgcactcaacagccaaggagcaggtgcggggttcatcttgacatcacctttgggagatcagtttaagcatgcaatttaccttaacttcagggcgactaacaaaacagccgaatacgaaggactactcgctgggataagagttgcggctgcacttggagtcaagcgactgatcgtaaaaggggattccaagctagtcgcaaaccaggtgcacaaagactacaagtgctccagccccgagttgtccaagtatctcgcagaagtcaggaagctggaaaaaagatttgatgggatcgaggtccgacacgtatatcgcaaggacaacatcgagccagacaatctagcatggcgtgcgtccaaacgagagccactcgaacccggcacctttctggacatcctgacaaagccatcagtgagagaggccaacaacgaagatagtccagtcgccccagacatcagctcgggggctacagaggcagaatgcgccgttgccgacatcgagactacggacgactggcggaccccactcattaaattcataagcagcgacgagttacccgaggatgatgcagaagccgagaaaataacccgtcaagcaaaaaactactgtatgatcggcgacgatctatataagaaagcgccaaacggggtacttctcaaatgcgtctcgtccgacgacgggaaacacctcctcctcgacatacacgaaaggatctgtggatcacatgccgccggtcgtacattggtcggaaaagcatttcgacaaggatttttctggccaactgccctcaaagacgcttgcgacatgcaaacacacaaggctaccagcgcaagcactgcaaaccatccctctcacttggtcgttctcgtgctgggggctcgacatactcggaccattcccacgaggatagggcggctacaaattcctgttcgtggcgatcgacaaattcaccaaatggatcgaagcaacacccacggtggaaatcaaggccgacaacgccatcaaattcattaaagggatattttgcagatatggattgcctcaccgcatcataacgaataatggctcccagttcatcagcgctgatttccaggattactgcatcggactgggagtcaagatctgcttcgcctcggtttctcaccctcagagcaacggacaagtcgagagggcaaatggcatagtactacaagggatcaagaccctactctgggccgtgcgcaccacaccgacaacgtcgaacaaggagacacccttctttctcgtgtacggctcagaagcaatgctccctactgagctacaacatcagagtacacgagtacagaagtactctgatgatgatcaggaggaacagcaaaacgatgacgtgaacctactcgaggaacatcgagaacgagttgccatcagggtagctagctaccaacaggcccttcgctggtatcacaagaagcgcatccgagcacgcatactttcgatcggcgactacgtcctccggctagttcaaagccaagggcaaaacaaactctcacccaaatgggaaggatcgtacacgatcactcaagtcttgcggccaggcgcattcaagattgtagacggcgatggtcgcgagttagcaaattcttggaacattgaccaattgcgcaaattctatgta

SEQ ID NO: 88462 - DNA, 453 bp, Oryza sativa
  Clone ID: PAT_MRT4530_87310C.1
atgggagagccgaaacggaaagcgcagcaaggggagccgttttatgcgtggaagccgccccgttggactagtcttctgcggcgtcaccttcgcctgcagaagcacggaccgcgtgtgtgctcagctaccctcctcccctttgcctcgccgtttgaacgtgacatggcaccgtcacggcacggcagagcacgaggcaggcgacctgggcgaaccactgagccagccaagccgaaggtgtctgacctgacctggactggcgtgccgggtcggtgggtattggcaagttggcaacggaaacggacggactttcggtgccgaaaccggaacggccacgtcggagtcggtttcttaatggccggtgggccaccggctggtttggacggggcgtgctggcgtgcggtggaagccgaccgcgcaacctactcccgtgaccccgtcagccttcgccggtga

SEQ ID NO: 88463 - DNA, 1552 bp, Oryza sativa
  Clone ID: PAT_MRT4530_87311C.1
ccggccgggacacaagccctataatagccaattaacccccgtctctctcctctcacagtctcacccacatgcgcgccattgcctcctcctgccgacacacgcagacagcagcagcaatggcgcccggcagccggtgcagccggcggcagcagctgctggtcgccgtcgccgtggtgctgcttttggcggcggcgccgacggggtgctcggcggcgaggagcaagaagtcgtacgaggccatcttcagcttcggcgactcgctgtccgacgccgggaacctcatcgccgacggcatccccaagtcgctcaccaccgcccgcgccccctacgggatgaccttcttcggccgccccaccggccgctgctccaacggccgcctcgtcgtcgacttcctcgcggagcacttcggggctgccgctgccgccggcgtcgaaggcgcacggcgcggacttcagcaagggcgccaacttcgccatcaccggcgcgacggcgctggagtactccttcttcaagcagcacggcatcgaccagcgcatctggaacaccggctccatcaacacccagatcggatggctccaggacatgaagccttccctctgcaagtcggaccaagagtgcaaggactacttcggcaagtcactgttcgtggtgggggagtttgggggaaatgactacaatgcccctctcttctccggcgtcgccttctccgaggtcaagacctacgtccccctcgtcgccaaggccatcgccaacggtgtcgagaaattgattgaacttggtgcgaaagacttgctggtaccaggagttctcccaattggatgcttccccttgtacctgacactgtacaacaccagcagcaaagctgactacaatgcccgcaccgggtgcctccggagatacaaccgtctcgccttccatcacaacagggagctcaagcagcagcttgatgagcttcaaaagaagtacccagagacaaaaatcatgtatggtgactacttcaaggcggcaatgcagtttgtcgtcagccctggaaattttggtttcagctcgactatgcaggcttgctgtggtgctggaggccagggcaactacaacttcaacctgaagaagaagtgtggtgaggagggtgctagcgtgtgctccaacccgtcgtcgtacgtgagctgggacggcatccacatgaccgaagccgcctaccgctatgtcgccaatggctggctgaatgggccatatgctgagcccccaatcctcaagtgagaatttgaggggttttgactgtatgtaacacagctgttggtgcaaaaatatatatgaatgaagaaggtttcagtcactgaagaattaaaaaaaatgggtaaaagttgtttagttttttttgttttcatttggaagaatgtgtaaactgtgccagtatagatatgttccaaaatgaatgttgaaactggtgccagtatagatatgttccaaattaaactgagaagatgtagtacagatgtaccatgtttgacatgttctctgattcttttcatttgtcaaaaaaaaaaaaaaaaaa

SEQ ID NO: 88464 - DNA, 1580 bp, Oryza sativa
  unsure (1)..(1580): unsure at all n locations
  Clone ID: PAT_MRT4530_87312C.1
gcgattccctccactccccactcggcagctcgccattccaccaccaccgcgccgccgcggcgcatcgggccatggcgcccgccgccgccgccgcgtgcgccgcctccgtccgcgccgacccgccgggcatcctcgactacggcgccatccacgcctgcctcctgggcggggaccgccgcgcctccctcccggcgctcgcgctcctcctcctcctccacttccgcgtcctcgccgccgccgcggggacccacttctcccccgcggtctcccgcctcgcggcccgcctccgcctctccccgtccatggccgccgtcacgctcctcgcgctcggcaacggcgcccccgatgcgttcgcctccgccgccgcgctcggcggggccggcgggatgcggcgtgcggggctcgccgcgatcctctccgccggagccttcgtctccgcgttcgtcgtcggggccgtcgcgctcatcgccgcgccgttcgctgtcccgcccgcgtcgttcgcccgcgacgtcttcttctacctcctcgccgcctccggcctcttctacatctaccttagcgccgagatatacctctggcaggccatcgggctcgtgctcttctacgtcttcttcgtgggcttagtggtatacatggatttggatgctgaggggaaggcggtgagcaccaccgagctggaggtggtgaatggcattggtcgcgtggtgatggacttgccggtaacagtggaggatcgcaagcaacaacaccctactttgtgcacgatgttcagtaaggtgacaaaagtttgggagtggcctgtagcatttcttcttaagctcacaataccatcaacgcttcctactgaatggaacaaattttatgtttgtgcaaacatctgtctatgtcctctcctactcctgtattctttcagttcattcattccatttgatagccgaatagtatttcttctccctcaaagtcgtttccccatctggtccgtggtgcttttcgtgagcatttctttagccctgtcccacttcatttttgagaaagaagccccaataactgaaaacattgcaagcaccacaatttcctttgtaatgagtgtcttctggatctcaaccatggctggagagctcctgaactgccttgcagcaatcggagtcattatggatttccctccagctatacttggcatgacggtcttggcttgggggaattcggtgggtgacctcgttgctgatgtagctttggcaaagtctggccagccgacaatagccattgctggctgctttgctggtccaatgttcaatatgctggttggactgggaactgcacttgtaatacaaacagccagggtgtaccccaaagcttatgtactcgaattccatgttggaattgttgttgcatttgtatttcttcttttgagcctgatgggcaccctgttgatggtcacctggactaggtttcgggttcccaggttttggggttactgccttatggggctttacatcttgtttacagtagtgagtatagctatagcgagctcttctggatgatacatanttttatacataatagcaactagtccgttgcag

SEQ ID NO: 88465 - DNA, 1901 bp, Oryza sativa
  Clone ID: PAT_MRT4530_87313C.1
tccccgggctgcaggaatcggcacgaggcagcttctcatcaatgttgccaacactttctccactccactctcgcgttcttgtggagtcgtgctccactccgggaaggaaggagtgggtgggtaggtgagtggagttggtcgatggcgattggggcgttcgtggagagcggcggcggcggcggcgggggagggggaggagggtacggcgggcgggtgacggcgtacgtggtgctgacctgcgtcgtcgccggcagcggcgggatcctcttcggctacgacctcggcatctccggtggtgtgacctcaatggactcgtttctgaagagattcttcccggatgtgtaccagaagaagcaggacaccagagtgagccactactgcgcgttcgacagcgagctcctcaccgtgttcacctcgtcactctacatcgccggcctcgtcgcgaccctcttcgcgtcgtccgtcacaaggaggtatggccgccggacgtccatgctgatcggcggcaccgtcttcatcgccggctcggtgttcggcggcgccgccgtcaatgtgttcatgctgctcatcaaccggatcctactgggaataggtctcgggttcactaatcagtcaatcccactgtacctgtcagaaatggcgcctccacgataccgtggggcgatcaataacggcttcgagctctgcatcagcctcggcattctcttcgcaaatgttcttaactattgcgttgtgaaaatcacagctggatggggctggaggatatccctatccatggctgcagttcctgctgcattcctaaccatcggtgcggtcttcctcccagagacaccgagcttcataatcgaacgcgatggcgacactgacaaggcaaggatcctactccagagacttcgtggcaccacttcagtccagaaagagcttgatgacttagttgctgctagcaacctctccaggacagttcagtatccgttcaggaatatattcaagaggaaatacaggccacagcttgtcatagcactcctggtccctttcttcaaccagcttactggaatcaatgtgatgaacttctatgcaccggttatgttcaggacgattggtctgaaggagagcgcgtctctcctatcctcagtggtcaatcgactctgcgcaactttcgccaatatcatggcgatgatcgttgtcgacaggtttgggcgtagaaagctcttccttgtaggtggtattcagatgatcctttcccagcttgctgtgggtgcaatcctggctgcagagttcaaggactatggatccatggacagagagtatgcttaccttgtgttgatcaccatgtgtgtgtttgttgctggctttgcatggtcatgggggccattgacattcttggtcccaactgagatatgtccacttgagatcagatcagcagggcagagtattgttgttgcagtggtcttcctgatgacatttgtgattggacagacattccttgcagttctatgccgcatcaagtcagggacattcttcttctttgcaggatggatctgcttgatgacagtgtttgtttatttcttcctgccggagacaaagaagctgcccatggagcagatggagcaggtctggaggaagcattggttctggaagaagattgtaggggaggaggaggaaaaacaagcagagaaaacagctctccctagcatgtaaagccctatgaattggaatgtatttgaccatacaaaaaccatacaaagtgtagggttctaattagcaaatgtaagtttgtaattcttctgtctaaatgtagtgtgttgaggtggtcagttgccgtgactggctctttcagatggtaattacaaagaaatgtaacattaatgttgtaacaagggtgccattttgtttctgattcc

SEQ ID NO: 88466 - DNA, 486 bp, Oryza sativa
  Clone ID: PAT_MRT4530_87314C.1
atgttctcaaagtccgcctacatccgcatcttctcactgccgttgccggtggtccatggcctatcggagggcaccgagtcgacggtaaacgtcctatcggagaaggttgacctccttaagaaggtgttcgacagcctcactatgcctcactatgtccttcactgcctttctcgctgccagagtctgggtagttggacaaggagtgaggaccaaatcctttcagcaagaagcccgactgagtcatcatcaactctgcccatggttggggatcacccatcaccagtgaacaccacgcatcaacttctccatcttgttagtatcgtcgccttcttcggcccacactcgcatagggatatgtgcgagactgaggtaaaagagatggggacgaggatttttatacaggttcgggcccctgagttgtcaggtctgactcgtaatcgacaacagggtagtcttcctcctcgaatccgtgcccggcgagattag

SEQ ID NO: 88467 - DNA, 570 bp, Oryza sativa
  Clone ID: PAT_MRT4530_87315C.1
atgggggatcggtcgatcaggtcaaacgagatgtgccatgtaccaactctcaacacacggttcttcaactgttccaaggctttgtcaccggcagccttgttcttctgtgaagcacatatcagtggccgtttcttgaaggaagcagcatggcggttgttacagtcacaggctcacagagacagtcacagtaattattgttgtaatgtactcacaactcatgtggtagggcattaccatggcaagtacacacgccacatgcctcaaaggaggctacagatttggcatccctactgccaaaaccttagaggagacaaaagtgagatgagcaagagtacctgctcatttgacttctgttgtgttgaggagcatggcagcggtgggaggaagagcacggcagtggtggaggaggagcacggcgacgacagcaatggaagagcccagcagtggtgggaggagcacgacggtggcggaaagagcacgacggaggcggcgggaggagcccggcagcggtggacggacgtgccctcccggatccggcggcggtatttttctcacgtcaagtcctacatt

SEQ ID NO: 88468 - DNA, 2616 bp, Oryza sativa
  Clone ID: PAT_MRT4530_87316C.1
atggcgggcgggtcgtcggcggggactccgtggccgtccccgtccaccgccctcaccctcggcctcggcctcggcccccccgccgccgacggatccctcaagtcccccggcctggcgccgccgcctcgccgcagcctgcgcctcgcctccggggcggtggcatccggcgtcgcgagcccgaccactaccccggcgtcgtccgctcctgctgcgggggccgatggcgcttcctccggctctggttccgcgtcgtccgggaggaggaaggggagggcacaagcgattcctgcccccgttgcttctccgaccagcgctggtgagtttgggggcggcggcgaagttagggtttggggcggcggtaatcgtagtggtgaagcggcattcataagcttgcaatcggggtctagggttgcgaaacggtcgatggagcttggtgttcaaatgggtggggagatgggtctcggatcgaatggaggtggcggggctggaggccaggtgcatgatgaaatgccacaccggaatgtggatagttcggggaagcgtcgtaagatagggatggagatcccatacgtctctgattcagagagtgacaatgatgatgactgcatacttccaggggaggatggcagtaggatgccggtacagttatgcgctgcttctgatttgattgaactgaatctgttcaccatgagcatgggcaggacagatgaagggagaatgggtgattctgtgaagacaggtaaaaagaaagctagtggagttactattcgagaaaatgacatccccattgacgagcatgtgcacggacagagttcggcaattggtgagagtattgagctattagcatctcctatgcgaagtgcattaggcgaaaaccatgcaggtatgtattccacagaagaggagagaaggcagaaggctaggtatgatgttaaaggcaaagggaagctgtatttggggaacgatgattctggtgctggtaccgggattggtaagtttagtcccgatagtaaaggaaaggctaagatggttgtggaagagagttcattgtctgttagctcaggtgcggatcaaatggatttgaactcagtgatttctgaagaggtgcagagtttcccagcagatcattgggaaccacgtcggagagaaagggcaagacagagagctattgaaatggctcctaggtttgcattcttcaaagcagatgaagatggacatagtgatgatggtgatgatgatgatgacaatgcagaagagttggaaccggttcctgatcctcaggactggccaggtccattttcaactgcaatgaggatcattactgacagagaagctaaactgagagctcgggagttgaattcttccaacttgaacaagtctgctaataaggtcatttcgtggataccttccaaagataggaaatctccactgcgatctgctccatcgcttactagcttgtgcttgcaaactctttcaaataatgctgaagctatcgaatcacttgctggcattccagatgagctaaaaaatagactcttatctagtctatgccattctagaaagatgaatgtccatcttcttggtgaactcatgtgtgataatcctgtgacagtgcaactcagtgagtgttcatggttgagtgaggatgactttgagaccatttttgggaaatgcaggacagaaatcttgcaggttttgcagcttgacttatctgggcgatgcatgcctgactacatgttgcctgctaccttagcaaaggttcctaacagcatgccattattgaaaaaaatatctctgaagggaaattaccgtctttctgatagtgggttagacacaataatctctgcagccccttctctgagttcgctaaatttgtgcgagtgttctcttctcacttcaactggaatcgagaatcttgctaacaagttgagtttagtccttacggaactatatattgatgactgcttaaacgtggatgccatgatgattcttccttccttacaaaagattaagcatttagaggttttatcaatgtctggcatacaatctgtcagcaataagtttgtcaatgagcttattcctgtacacggttcaaatctgaaggagttggcatttgctggttgcttgcaactgacatcatcttccattaagactattgcggggaactgcccacaattatcttcattggaccttcgcaacctgaatagattgcgggattcagcaatgagacatcttcgcaatggttgccggcttataaaaaaaataaagctccaaaggaatacattcagtgatgaagctgtgtatcggttcttggaacagtctggaggatacctaactgagttatgcctgaacaatgttgagaaggctggaaatcttactgcttatgcaattgctcgcaactgttcaacgcacttggaggttctggatctttccttttgccgtgaactgaccaatgaagcgttggggctgattgtcgacagctgctcatcattgagaattctcaagctatttgggtgtacccagatcacagatgttttcctgaaaggccactcaaattcgctggttacaattgttgggatagaagggaatatactgaagcaaacggggagtctttag

SEQ ID NO: 88469 - DNA, 528 bp, Oryza sativa
  Clone ID: PAT_MRT4530_87317C.1
atggcgtggtcgaggattgcgaggggctcgcagctcacgcagccactccggcggcatacacgctgcacaatccggcggcgctgggccagcgcgcctcgtcggcgttggcgttgtcgttgcttgccgacaagtacacggccgccgccgccagccgagcagggggtcagcacgacgtcacctgcgctgcgccccgtagcggaggcggcgacgagggtggtggagtgctcggacaccgctgacaagacggcgacggcggcggtgccggacctcgggccgacgcggctgggggagaagccgcgcgaggtggtgctcgagatggggtgggcgacgtgcaggttcctcaaggcgacggccggcgggggagcccgcccgccgctccttcccccgccgcccctcccccgctgcccgccccgcggctcatcgcccgtcgccggtcgccgacgcccttttcctctgccgtctcgcagagaagggagagagatagagatgaggaagggtgagaagaggggaaaggagagaggaggatga

SEQ ID NO: 88470 - DNA, 449 bp, Oryza sativa
  unsure (1)..(449): unsure at all n locations
  Clone ID: PAT_MRT4530_87318C.1
ctcttctcgtgctcatcttcctctcctcgcgtgcttcctcctcctccttcctcggcgagcgtgttggttgatccgtgagagcggcgatggcggcgacggcggcgcacgcggtggcggtgaaggggagcgtggcggtgccgccgtgcgggagccgcggccggcggaggggcgccgttgcgtctgttcgcatggcggctgcggcggcgacgtctgcgttgcggatcggtacgatgagcctgttcctcggccggaggctggcggttgtgccgtggagatgcaagcctctgtccacgcatctcgtcaagctgatgcacatgcatctcgcctttgtacaagccagagctcggtgggagaagggattgtagcccaacatgcngtaggtctagttcgcgcaagaccttgntgacttcttgaccaacgccggcgacaattctcgcatcgatgacttt

SEQ ID NO: 88471 - DNA, 874 bp, Oryza sativa
  Clone ID: PAT_MRT4530_87319C.1
tcgatcatgggcacgccggccgtcgtcgacgacgacctccgcgagctcatcgacgagctgatgaacacgggcccggaggacgaggccgacgaccgagatttcgaggaatccatggcgacagttttatctatggtcaccgactatctcgacgaccccgaccctccctcgccggagctggcggactgggcagccgccgcagagtccggcgcccagaaggtggcggatggcttggcgtcccgtgtcgagaacctcaggaggggcctgtccgtgttcgccgggaccggtcggcccgaggaggcggtgctccggaagcacgccgcgtggaccgacgcgcgccgcgcggaggcggcgggcatcgcctcggccgcgcgccgcctgcgggagaaggacctcaggagcctcgcggctagaggcggcctcgtcaatccgaggatggcggagctgatcgcctccgtaagcgacgccatggagtccgacgtccggcacggccacgtcccttcgcccgcgcagttggccgaggtagagaggctcgagggccgcgtcgccgtcgcctcggtcagggccatcctgttgaaggtgaagctcacgcggggcgcggccgcgttcgcggggaggcccggcgaggaggcgctcgcgcaggcgctgcgcgggcacgccgcggccgcggaggcacagcttgcggcagcccgagcgttcgccggagccttgcgccgcttcagggctttatctgcagacgctaacagcaacccaacagcaactcgagtgcacaagcggccgtcgccggagacggaggacgatcttgcagcgccgccgccgcgacagaggcgccgcacgttggacagtggttctgtgtcgtcatctggcgtgccttggg

SEQ ID NO: 88472 - DNA, 505 bp, Oryza sativa
  unsure (1)..(505): unsure at all n locations
  Clone ID: PAT_MRT4530_8731C.1
ttcgcncacntgcnnatgccngatcctgcacgngcntctngagccanaacaaaatttngccngngcctaancctgngnctaagcncnnatcaannccagnncctctgccgttcnctgnnccnaancntgntcctannccggnggcgnanccggnnccnnaaccagaaccccnncctangctgnncccnaaccnctcccngnncctaagcctgntccgnaacctgngcnttagccncacccncngcctgngccttngcctgancctnagcctgngccctancctcnccctgagcctgnnggnnnngcctgngcctnagcctgannctaatccngaanctaagccggagcccctctctgaacccaaacctgagccngagccnganccanagcnaaagctgngcccnngcctttccctgagcctttgcctntgctgancctatgcctgngccctagcctgagccnnagccagnaccntangcnggngcctcaacctngaaccncattc

SEQ ID NO: 88473 - DNA, 672 bp, Oryza sativa
  Clone ID: PAT_MRT4530_87320C.1
ggcccatgaggactacggggcctaagaagcagcgagcccaacaagcaagcaaccgcctttttagcctttattccttgcctccccacgacgcgtttcttcgtgagctgtagtaactagcaacagcaaagccaaagcccctctcgtcaacgacctcgtcgcgcccgaggcacccaattcgcgccggccatggcggtggcgacgctgtcgtcgaggtcgaggcgcgcgtgcgcggaggcggcgtccgtgctcctcgtcctcctcgtcatcgcgccgtcggtggcagccgggggcgacaccaacggcgtgtacgagccgtgcgcggacgcggcggtgcagcgcggggacgggttcaccttcggcgtggccttcgcggcgcgcggcgacttcttctccggcggcgtgcagctctccccctgcgacggaaggctgtcgctggcgtccaagggcgccaagctcgcggtgttccgccccgaggtcgacgagatttcgctcctcaccgtcaacacctccgccgccggtggcttcgacccggcaacttctggtggctacatggtagcttttgctgggaggaaatatgcagcaagatcacctccggttttcgtcagtaacagctcatacaccgtgaccagctttaccctgtgtttgagttcacaaaggcacacttcagaacct

SEQ ID NO: 88474 - DNA, 402 bp, Oryza sativa
  Clone ID: PAT_MRT4530_87321C.1
gacccacgcgtccggattgtacatcagcaatgccaacagtaggttacattctttctccaggttgattattattttatttccaagcaagattgtacagcagcaatgccaacactaggttacattcttgtatgtgatccatgtctattatctattacagtgattgtaccaaaaaaaaaaaaaaaaaaaaaaaaaaaaaaaaaaaaaaaaaaaaaaaaaaaaaaaaaaaaaaaaaaaaaaaaaaaaaaaaaaaaaaaaaaaaaaaaaaaaaaaaaaaataaagaaaaaaaataaaataatataaaaaaataaaataaataagggggggcctgaataaaaaaaaaaatttaaataacggggttttggagaggtaatatcttttttatggggggccccaaaataaaa

SEQ ID NO: 88475 - DNA, 771 bp, Oryza sativa
  Clone ID: PAT_MRT4530_87322C.1
atgaagatccagtgcgacgcgtgcgagagcgcggcggcggcggtggtgtgctgcgcggacgaggcggcgctgtgcgcggcgtgcgacgtggaggtgcacgcggcgaacaagctggccgggaagcaccagcggctgccgctggaggcgctctcggcgaggctcccgcgctgcgacgtgtgccaggagaaggcggcgttcatcttctgcgtggaggaccgcgcgctcttctgccgcgactgcgacgagcccatccacgtccccggcacgctctccggcaaccaccagcgctacctcgccaccggcatccgcgtcggcttcgcctccgcctcgccctgcgacggcggcagcgacgcccatgactccgaccaccacgccccgcccatgggctcctccgagcatcatcaccatcatcagcagccggccccgaccgtcgccgtcgacacgccctcgccgcagttcctgccgcagggctgggccctgcagaaggagtcgtcgccgccgctcgggttccaggagctggagtggttcgccgacatcgacctgttccacaaccaggcgcccaagggcggcgccgccgccggccggacgacggcggaggtccccgagctcttcgcttcgcaggcggccaacgacgtggcgtactacaggccgccgaccaggaccgccgccgccgccttcaccgcggccaccggcttccgccagagcaagaaggcccgcgtcgagctccccgacgacgaggaggattacctcatcgtccctgatcttggttga

SEQ ID NO: 88476 - DNA, 299 bp, Oryza sativa
  Clone ID: PAT_MRT4530_87323C.1
attgacggtttcctactccgttgaggaaacgacagcaaccgtgtgtcgcagtactcctgcggcacggtcttttctagctgaacttccttgttagccgagtcatgaatcttccccggcaacggcgccagaaatgcttgttggtatttcttaatgacattactagaaatataattcccagcaatggcacataaatacttctggtatattatggttacagagttcatccgcaagcgcacggatataccattatagcatttcacccaagagtattttaagggtatcgtatttattttatcccg

SEQ ID NO: 88477 - DNA, 1197 bp, Oryza sativa
  Clone ID: PAT_MRT4530_87324C.1
ccttcttctgccgctcgttttccattgccgacgcgcacacgcagctgcgcagccacacctttgcggctgtcttatcttgttcttgagttgtgttcttggttggggaggaggaggaggagatgaagatccagtgcgacgcgtgcgagagcgcggcggcggcggtggtgtgctgcgcggacgaggcggcgctgtgcgcggcgtgcgacgtggaggtgcacgcggcgaacaagctggccgggaagcaccagcggctgccgctggaggcgctctcggcgaggctcccgcgctgcgacgtgtgccaggagaaggcggcgttcatcttctgcgtggaggaccgcgcgctcttctgccgcgactgcgacgagcccatccacgtccccggcacgctctccggcaaccaccagcgctacctcgccaccggcatccgcgtcggcttcgcctccgcctcgccctgcgacggcggcagcgacgcccatgactccgaccaccacgccccgcccatgggctcctccgagcatcatcaccatcatcagcagccggccccgaccgtcgccgtcgacacgccctcgccgcagttcctgccgcagggctgggccgtcgacgagctcctccagttctccgactacgagaccggcgacaagctgcagaaggagtcgtcgccgccgctcgggttccaggagctggagtggttcgccgacatcgacctgttccacaaccaggcgcccaagggcggcgccgccgccggccggacgacggcggaggtccccgagctcttcgcttcgcaggcggccaacgacgtggcgtactacaggccgccgaccaggaccgccgccgccgccttcaccgcggccaccggcttccgccagagcaagaaggcccgcgtcgagctccccgacgacgaggaggattacctcatcgtccctgatcttggttgaatcttgaagaggagttcgttccagaggagaagatcctcctcctgtgttcttgggttttgccatgtccttgtgttttctgcttgtatgctagcttttgtgtttaacgttagtcctgctcaactgtgacatatttgagccactctgcttccgtcccatgccatcagtgatcaatctgatataagtttttctgaaaatgagctccaggctctgctcttatgtttaatcttccgagattaccagtacagaaagagattaccagtac

SEQ ID NO: 88478 - DNA, 339 bp, Oryza sativa
  unsure (1)..(339): unsure at all n locations
  Clone ID: PAT_MRT4530_87325C.1
gctcggccggtggaagcgagccggggttttggggccggtaggacgaccacggcccacgagtgttgggccccaccctgtgaaaccacaaggaggaaccacggggagcccacaagttggctccaccgggttcttgggacaangccgcgctggatttgccgaacgctggggacgaatatttccgtttctagggggtgaggctgaatgccaacagtgggagcacttgtgaatggcctaagagcaagtttaatagtataatcaactattaacctccaaatcatctatatccatgtaatagccatttatacatagttgcttgctacactaaaaaaaaaaaaaaaa

SEQ ID NO: 88479 - DNA, 258 bp, Oryza sativa
  Clone ID: PAT_MRT4530_87326C.1
atgaccggagcggcggtggcgcacggctgggctcccttcggcggtggcggtgcacgggctaaagtggaggcggcgctacaggcggcggccgattcctattttcgcaggcggaccggactagccaacgtctgcctgcgaaaattatcttcgcaggcggacggccaccccgcctgcgaagatcggcgatcttcacagtcgttggcttacaggcggatggccgccccgcctgcgaagacccttttcggccgcttgcgataa

SEQ ID NO: 88480 - DNA, 130 bp, Oryza sativa
  Clone ID: PAT_MRT4530_87327C.1
gggttgtgttagtttcacgaaaaacctttcataaccctcgtagtttttagtgggagaaacagatgttcacatgatgttacaggggtacctaatattgggagaacagaaccctgggggattgcactcatgg

SEQ ID NO: 88481 - DNA, 834 bp, Oryza sativa
  Clone ID: PAT_MRT4530_87328C.1
tcagctttttgagctttgaccatggtgctcattgccggcgaggtcgtaagcctccttcgccgagcgaatgcaagaatccaagaacgaatttattgcagctagaggctcgcggcaatctccctttttaaggggctcatcagctgcggattcttgcacaacacatcgaatttgcattcgcattagcattcgcatcatcgcttgttgcctcagagagaagagagaaagaaagctcgagctctcggctcccatggcggcggcggcgtcatacgcgcacctcgtcctcgctgccaccctcgcgttcctggtgctgagctcgccgccgcagtcagcggcgagccgcgtcgacgtcttgaaggaagtagtagcaggcgagccaccagctgcggccatcgaaccagttgtcaacgatccgtcgtcgtcgccgccggcggcggtggcggcggcggtccacacgtcggagccatggccgccggtgcctccgtcggccccgtcaaacaagttcaactagctcaccagccgctaccaccaggatgtccggtcgctgtgattcggcggacgtcgccggagacgatggccggacagtcaccgtcatttcttgattcagataaaatcataaaaagcttgcatttgagcaagccgtataggtgtttgtgcgaggagtgcttctatgctctactggagagaaaaatcttcagattttagggggcgtctaggcttctagctggttgtgattaaactctgagttcgtcgagaaatctgtaaatcagtttcattttcagttgataatggaagcattttcttgctcccaaaaaaaaaaaaaaaaaacccgcggcc

SEQ ID NO: 88482 - DNA, 429 bp, Oryza sativa
  unsure (1)..(429): unsure at all n locations
  Clone ID: PAT_MRT4530_87329C.1
atggtgggggtgggggtggggaccctcattcgggccgggaagcacggggaatgtcatcccggcgggaaggccccgggcggcgatctcacgatctccggggcgaagagaagggcatcgcttatggggtctcggcgcgccttgtcgggttcgggaacccgttggggatctgggcttcggggacnaggaggagaggaggggaatggagcgccttttaacggcagcgcggggtgcccggggacaccgcgggcaggatccgtaccgtcggttccgaacctaatggcagatcggacggcccagattgtcccgccgtgtgaccgcgggcagcgcggccgcggagggtcgggatgcgggagggcgacacgtggcgggcatctgggaggtggcgtggcttttgccccggggaaaatggctacagatcatagggcctag

SEQ ID NO: 88483 - DNA, 1136 bp, Oryza sativa
  Clone ID: PAT_MRT4530_8732C.1
atgaatagagtgcccactagttggggttttgtttattctagggtgaacaagccgggggagagggcgcgcggaccgggtccacgggagtgggacccacgcggcagtctcacggtccacggtggaccgggtgcacccggctcacaccggccggcgccgtgggccccacgcgtcagccacacccgagggcgcgggcggctgacagccgggccccatgcggcagccgctaggcgcgcccggaggcggccacgtcgacgcggccggcgggaggcagcgcccgcgtcccgatggtcgccaccggcgaccaccggcacggcggagcagtggccgagagaggggagggaagggggaaaggaggcggcggtccacggctcaccccgagggcaacggcgacgacggaaacggcgaccggagtggaggaaggcggcggcgcggctcgggtggacggggtcgacggcgctccggcggtcggcgagcgaaacggaggggtggacgaggtcggcgaggatgcggcgaagtcgaaggaggcggcgccgaggtgggaggtggtccggggcgacgacggcggcggaccggagctcggcggcgacggcggagagagagagcgacggcgcgagctcgattccggcgaggagagagggcggtgagtggcggaaacggaggtggggagctcggggagggtttatatagggttgggagtgagagagggcggccggaggagggggaaatgggcgcgggagacccggccgccattaatggcgccggcgaggttaggggagaggtttccaaacgaatccgagggagagagggagggaaaaatgaggggaaagagggaggggatcccggggaataattccccccactttattgcgcgcggggacggcgggaggcggcgggattcgcggcggcggcggtgctaggcgtgggcgaggcagcgggggcggcgggaggaaggggatgacgggtgggccccacccgtcagcgagggtggcgggcgggcccgcccgtcagcgacacgcgcgcggggaggaggccgagtgggccgcggggaggaggagagagggggagggagatgggccgaattcggcccattagagagaaggagggattttagggtttttctttttataaaatcattt

SEQ ID NO: 88484 - DNA, 1182 bp, Oryza sativa
  Clone ID: PAT_MRT4530_87330C.1
atgggggtacccgtggcccagctcggcaagagcagcggcgccggcgacgcggcgaccggtggcggtggcgaggtggcggatttcttgttggccgacagctccccgagacgttcctcatccgcggccaaggagaccggattggatggcacggagggcacgcatgacggcggcgctgcaggcgaccacggcgaggcgggcgaggccggcgcggcggcggcgcgcggtcatggcggcggtggcgaggtgggcccggatggtgatggcgcggatggcgttcaggaggaggcgctcgtggcgaggtgcgtcgtctgtcgtcggcggcaggtggccgatgagggtgagggaggcgtctgctcagtatgcctgaggaggaggatgctatcatcggtggtctgcgtcgacgacatgagcgccgtcgccgacgcgaccgcaggagtgggcatgctctactactgcccgtcctgcgacgcgttcggccgtggcggcgtccacgatcacgaggtgctcgtcctcggcatgttccgaggtgactggtgcgcatggttgacaggggccgagaggatggcgcccatcttcctaggaatcgagagtgaccggctcccgtctccgtttcttggccggccgtacttgcttcagccatcaccgggcacccgctgcagggtctgctccgacattgcctcgctcgatggtctctacagcaggctggccacgctctgtacgatatcttgctgggcgcatgctgaccacgctgctgctgcggcggcgcacccgtgggttctgtctctcttggaagttggctgctcagctcagcctgagcagctgctggacctattctgcaccacgtgtcgcgaggcctttctctatggggactgccactgcgacgaccaccatcaccatctgctcccactcgtgttccactcaaggatgggtctgtgcgtgcagatttcgcgtggtcattggctatggtccgtctgggagagcatcgccgacgccgaactcgccgcggacattctccacagcagcgccaccagcacgagattgatccccatccgtggcaggacggcccagcggtgcagatggtgccagaagcgccttctcgacggaggcgggaccacctgctcgctccgctgtcgtctttccctgcccactttgctccccagggcactcagagtacctgcctag

SEQ ID NO: 88485 - DNA, 1914 bp, Oryza sativa
  Clone ID: PAT_MRT4530_87331C.1
atgtcgatgctgccgcgcttcctcctcctcgtcgtgctgctcgcggtgccgatgacggcggcgcagcagcagtacgaggccaacgcgcagggcgactgctacaccgacaacggcagctccgtcctcggctacacctgcggcaccgccgcctccccgccgccgccgccatgcacggcctacctcaccttccgctccgccccaccgagctacgcctccccgatcaccgtctcctacctcctcaacgccagcgtccccgccgtcgccgccgccaactccgtcccggtctcgcctccggtcgcccgcgacggcctcctcctcgtccccgtcccctgcgcctgcaccgccgccgggtactaccagcacgacgccggctacgtcatccagttcgacgacgagacctacttcgtcatggcgaacgacacgtaccaggggctcacgacgtgccaggcgctcatggcgcagaacccggcgcacgacagcctcgacctctacccgggaatcagactcaccgtgccgctgcgctgcgcgtgcccgtcgccggcgcaggccgccgccggcgtgaggtacctagtgacgtacctcctcggctgggacgacgactcgtccaccgtcgccgaccgcttcggcgccgactaccaggccgttctcttcgccaacaacctcaccgacgactccacggtgtatcccttcaccacgatgcttgtcccgctcaagcatcggcccaagcccgacgtgacggtcttgccggagccggggcctccttctccggctccggctccggcagtgtcagctccgccgccgccggcggtgccttccagcgaatcgggcagtgggaggtggaagaaatcctttcgcggtaggtgtatcggcattggagttggtgttgggttcgccgttcttgcgtctggtgctctgcttgctctgttcttgctacggcgtcggtggcggtggcgtggcaacggcgagcttcacgatgtgccgttggctccggataaggagggagcgaaggcgacgccgccgccgtggatgctgccgacgacggtggcggacgtcgacgtgcgcgatgccgtgggatcgatggccgtgtacgagtacggcgagctggagcgggtgacggccgggttcgcggaggagcggcgcatcggggactcgtcggtctaccgcgcggtgatcaacggcgacgtcgcggcggcggtgaagcgcgtcgccggcgacgtgggcgccgagctcgccgagaacggcgcgctcagcgactggatccgcggcgacaacggcggccgcgccctctcgtggaggcagcggatgcaggcggcgctcgacgtggccgacgggctcaactacctccacaactacaccaggccgccctacgtgcacaagaacctcaagagcagcaacgtcctcctcgacgccgacttccgcgccaaggtctccaacttcggcctggcgcgcaccgtcgccggcgccggcgggcagatgacgtcgcgcgtcgtgggtacgcaggggtacatggcgccggagtacctggagcacgggctgatcgggcctcacctcgacgtgttcgccttcggtgtcgtcctgctcgagctcctgtccgggaaggaggcagcgcctgcgcgagacggcggcgagggtggcgatggcgaagcattggcgttgctgctgtgggaggaagcggaggggcagctggtggtcgacggcgacgatgacgacgcgcggggcaaggtggcggcgttcatggactcccggttgcgtggcgactacccgtcggaggtggctctcgcgatggctgcgctggcgctgcggtgcgtcgcgcgggagccccgcgcgcggccgtcgatggtggaggtgttcctctcgctctcggcgttgcacggcacaacgttggattgggccccccatgcaaccctgagttga

SEQ ID NO: 88486 - DNA, 1839 bp, Oryza sativa
  unsure (1)..(1839): unsure at all n locations
  Clone ID: PAT_MRT4530_87332C.1
atgtcgatgctgccgcgcttcctcctcctcgtcgtgctgctcgcggtgccgatgacggcggcgcagcagcagtacgaggccaacgcgcagggcgactgctacaccgacaacggcagctccgtcctcggctacacctgcgggaccgccgccttcccgccgccgccggcatgcacgggctacctcaccttccgctccgccccaccgagctacgcctccccgatcaccgtctcctacctcctcaacgccagcgtccccgccgtcgccgccgccaactccgtcccggcgctcatggcgcagaacccggcgcacgacagcctcgacctctacccgggaatcagactcaccgtgccgctgcgctgcgcgtgcccgtcgccggcgcaggccgccgccggcgtgaggtacctagtgacgtacctcctcggctgggacgacgactcgtccaccgtcgccgaccgcttcggcgccgactaccaggccgttctcttcgccaacaacctcaccgacgactccacggtgtatcccttcaccacgatgcttgtcccgctcaagcatcggcccaagcccgacgtgacggtcttgccggagccggggcctccttctccggctccggctccggcagtgtcagctccgccgccgccggcggtgccttccagcgaatcgggcagtgggaggtggaagaaatcctttcgcggtaggtgtatcggcattggagttggtgttgggttcgccgttcttgcgtctggtgctctgcttgctctgttcttgctacggcgtcggtggcggtggcgtggcaacggcgagcttcacgatgtgccgttggctccggataaggagggagcgaaggcgacgccgccgccgtggatgctgccgacgacggtggcggacgtcgacgtgcgcgatgccgtgggatcgatggccgtgtacgagtacggcgagctggagcgggtgacggccgggttcgcggaggagcggcgcatcggggactcgtcggtctaccgcgcggtgatcaacggcgacgtcncggcggcggtgaagcgcgtcgccggcgacgtgggcgccgaggtgagcgtcctgggacgcgtcagccactcgtgcctcgtccgcctgttcggcctctgcgtgcaccgcggcgacacgtacctggtgttcgagctcgccgagaacggcgcgctcagcgactggatccgcggcgacaacggcggccgcgccctctcgtggaggcagcggatgcaggcggcgctcgacgtggccgacgggctcaactacctccacaactacaccaggccgccctacgtgcacaagaacctcaagagcagcaacgtcctcctcgacgccgacttccgcgccaaggtctccaacttcggcctggcgcgcaccgtcgccggcgccggcgggcagatgacgtcgcgcgtcgtgggtacgcaggggtacatggcgccggagtacctggagcacgggctgatcgggcctcacctcgacgtgttcgccttcggtgtcgtcctgctcgagctcctgtccgggaaggaggcagcgcctgcgcgagacggcggcgagggtggcgatggcgaagcattggcgttgctgctgtgggaggaagcggaggggcagctggtggtcgacggcgacgatgacgacgcgcggggcaaggtggcggcgttcatggactcccggttgcgtggcgactacccgtcggaggtggctctcgcgatggctgcgctggcgctgcggtgcgtcgcgcgggagccccgcgcgcggccgtcgatggtggaggtgttcctctcgctctcggcgttgcacggcacaacgttggattgggccccccatgcaaccctgagttga

SEQ ID NO: 88487 - DNA, 1032 bp, Oryza sativa
  Clone ID: PAT_MRT4530_87333C.1
ggtatccttaatgctgtgaagaaatgggcacatgaggctgagcataggaactatgctaggcacatttataccaattggaaaaggcatttccatgagaagcagttccaaaagaagttctggagggttaaacttgcacaggtcactcaagctggagctcaagctatactgaacacacatcctgagcattggagtagagcttggttcagatggatattagaatctagatttcatccaattatcacaatgcttgagacaatttggagaaaggtcatggttaggatcaatgatcaaaaagcagctggtgctaagtggactactgttgtatgcccaggaattctcaaaaaacttaatgtttacatcactgaatcagctttttgccatgctatttgcaatggaggtgatagttttgaggttaagcaccatgaccataggtttacagtacacttggacaagaaggagtgctcttgtaggtattggcagctcttaggattaccatgccctcatgctatatcatgcatattctatagaacaaataagctagatgactatattgcaccttgttactatgtggatgcatttagaagcacatatgtgcattgccttcagccattggaaggaatgagtgcttggccacaggatgatagggaaccactaaatgcacctggatacattaagatgccaggaaggccaaaaactgaaaggaggagggagaagcatgagccacccaagccaaccaagatgcccaagtatggtactgtaattagatgcactaggtgcaagcaagttgggcacaacaaaagcagttgttcaaagcatcagtctagtggttctggcacagtgggttctcaacagcaaaatccttcaccaagccagcagatgagtgttatcaaacacactatgcagttctgctcacagcaagaagaggaaatttggcagcctgactaccacaaacactacaagccaatccaggaccaaacactccaaagagcaagggtaaagccaaaaaatattcattccaaagttattctttaa

SEQ ID NO: 88488 - DNA, 2046 bp, Oryza sativa
  Clone ID: PAT_MRT4530_87334C.1
atgctcgccgccggctatggcgtcctcgccgtcgccgccgccgtcgtcctcacgctgccctcggccgtgcgtgccgcgccctcgaacatctgcgacatgggcgtcgcgacgtacgctgccaacagcacgttcgaggcgaacctggaccgcctcggcgcggagctccccgccaacgtctccgcggcgcgcgccaccggcggctacgcggtcgccaccgtcggcgcggcgcccgacctggtctacgcgctcgcgctctgccgcggcgacgtgaacgcctcggcctgcggcgcgtgcgtcgcggcggcgttcgccgacgggaagcggagctgccccgggatcaagggcgccaccgtctccgggcccggggacggctgcgtgctccgctactccggccagagcttcatgaatttcctcagcaccgagcaatggcaggtctcagagatactttggtatcccgaccatgccacggacagcatcaaggtgccggacgttggctggttcaacgccgccgtcgcgaagatcctcgccgccctggtcgagcacacttgggccacgacgacgagcaacgcgaccgccaagaagtatttctccacgggtgaggaggaattcaaccccaagatctacggattcgtgcagtgcgtgccggacttgtcgccggagcagtgcaaggaatgcgttaggacgctccacgatcaggcgaaaatccactacatgggcaacagccttccgtgggctagtacttattcggtgtggtgcagtctgatgtatagcgttcggccgttcttcggtggccgggcgatgctgcagctctcgccgccgctgccgccggcggtcgatactccggttggtactcatgagcctggagcagggaagaaaaagagcgtagcaggactcgctgcaggcctcgcttgttcagttggggtactcttgatcctttcagttcttgtgttcgttcgtttcaggagaaggaccaaggctgccgagactgaccaccctttaaagaagataacgagagcacagtgcatgatttttgatctgcctacactgcaagaggcgaccgagaacttctcggagaacaataagcttggtgagggtggttttggtactgtatacaagggagtactctcagatggacaagaagttgcagtgaagaaacttttaggaacaactgggcatggattggatcaactacataacgaggtcctgctattggcagagcttcagcacaagaaccttgttaggctacagggattttgcttgcatcaagagcagacactgctggtttacgaatacatcaagaacgggagcctggacaacattctattcgataccaccaaaggaaattcactcaattgggagcaacagtacaacatcattcttggaattgctaagggtatactgtatcttcacgaggattcaagcttgaggatcattcaccgtgatctgaaatcaaataacattctacttggtgaggacatggaaccaaaaattgcagattttggattggcaaggctgctaggagaaggtcatactcattctaggacaaccagagttgttggaacattcggttatatggcacccgagtacgtagcagacggaaatgtgtcaaccaagatagacatttttagctttggtgtgttggtccttgaaattgtgatgaggagaaggaactccgattctggtgatcatgataatgtgaatctcctgactgatgtctggaatagctggacaaaagggacaatttcacaattcattgaccaatcgcttgatgggtactctcgaagccaagccatgcgatgcatccacattgggctattgtgtgtccagccggaccctggtgagaggcctcatatatcatctgtcattttcatgttaaccagggaaaacatggagcttcagccaccagcacaacctgcattcttctttgggacagaatcggcttcctcttctacatcatgtgggcaacgcagctatgtgtatgaccgctatggttttgctagcgtttctgtaaatgatgttacactcaccgagccatatcctagatga

SEQ ID NO: 88489 - DNA, 1282 bp, Oryza sativa
  Clone ID: PAT_MRT4530_87335C.1
tcagagcttcttggtttcccatggaagaagaatgagagctcctccagctttcttctttggcagattttttgtaggctcttcagctgagacagacacagttgccttgccagatgtcagcctcacagatgcagttgtggagctttcggaatggggaactattgcttgcagatcaacttgagcagatccaccatgttctgtgcaaactttggcacttgcagcaaccctgaccagctcctggctctccattggtgccttgctcttgtagtgtttggtcctggattggcttgtagtgtttgtggtagttaggctgacagatttcctcttcttgttgcacctagtgcatctaattacagtgccatacttgggcatcttggttggcttgggtggctcatgcttctccctccttctttcagtttttggccttcctggcatcttaatgtatccaggtgcatttagtggttccctatcatcctgtggccaagcactcattccttccaatggctgaaggcaatgcacatatgtgcttctaaatgcatccacatagtaacaaggtgcaatatagtcatctagcttgttcgttctatagaatatgcatgatatagcatgagggtatggtaatcctgagagctgccaatacctacaagagcactctttcttgtccaagtgtattgtaaacctatgctcatggtgcttaacctcaaaactatcaccttcattgcaaatagcatggcaaaaagctgattcagtgatgtaaacattgagttttttgagaattcctgggcatacaacagtagtccacttagcaccagctgctttttgatcactgatcctaaccatgacctttctcctaattgtctcaagcattgtgataattggatgaaatctagattctaatatccatttgttgaaagattcacataagttattgtcaactgagtcacagttagaacctaacctgaaccaagctctactccaatgctcaggatgtgtgttcagtatagcttgagctccagcttgagtgacctgtgcaagtttagccctagcaagattaaatagcattctgcatggagcttttgcacacctccagaacttcttttggaactgcttctcatggaaatgccttttccaattggcataaatgtacctagcacagttcctatactcagcctcaggtacccatttctccacagtattaaggatacccttttgttgatctgaaatgaagacccagccaactcctgtgccaactttgatgtctgttaacaaccaaatttggtaacat

SEQ ID NO: 88490 - DNA, 251 bp, Oryza sativa
  Clone ID: PAT_MRT4530_87336C.1
tgcaggaattcgcacgaggctctcctcactcccccacacgagctccgccgcctccccatcccccccgggaaccctagctcctccccgcgcggccggtgatggcgtcgaccccgccgccgccgccggtgataggcaatgcgggcaacctcacggtcttcatcacgccgcctgtcgccggctggagtgcggagtgcggaggggtcgcctgtgactccccgcggtcggagttcaccacccccagcggatccccc

SEQ ID NO: 88491 - DNA, 330 bp, Oryza sativa
  Clone ID: PAT_MRT4530_87337C.1
atgaaggtagtatctaataggtcaagtggcctactacaagaattagcacaaaagaagaatagaaaagtttgtgagcaagcatacaacatggaacagaaccttgaccccagcagcgatggccaaggagtttatcagttcaagacaggtttagcttctgtaatcaagttccaacagaatgacatgcaagtcctctggaacttctatcaagagtataacagtcggcaccgggttgctgatatgcaacgtgagcaggagaggctcctggagtcgagaactttcagtacagaatatgccctctctttaattgctgttaacgaccaaatttggtaa

SEQ ID NO: 88492 - DNA, 1051 bp, Oryza sativa
  Clone ID: PAT_MRT4530_87338C.1
agtgatatctcccaaaatttcaagctcctgtaggattgttgcccccgttttgacccatgctcttccttcctccttgttctttgataggattgaggacgttggtgacgcagagtttcggaaaattcttgcattgtgttcacaccagatttcccatgagactaggataatcatagtcctgagaggcttgcggggggtgtttggggattccgttacgagagtccaccactgcccaaccgagtgacaagtttcccaattgcccatctgaaggtcggtgcctgtccatctctggatttctgcccatattctctttgttagtcttcatttggccaggaggtgtagggccgattcatccaccgtgcagcagagtgggcagatcttttggttttgccatcctcttttctccagtctgtctgccgtccataccctgttttgagtgaccaaccaggagaagaatttgcactttggcggcgcccatccagattgattggttgaagacggatcgcgcagccccaaggaactggagtctataggccgattttgcagagtactgcccgtctgttgtgaggttccatcgaatgttgtcttgattttcgtttagcggcctcatgtctctgatcattgtccagaggcggacatactgttggaggtggctcgcctccgtgatacgagagatttcgatgtctcggatccagttgttttctgttatggcatcgttcactgttctgttcttccttccagaggccatgaaaatatccggggcgatctgttgcggagtttgatcctccggccatttcgagctccaaaatcgtgcagtcttgccattgcccaccgttattgttgttgcggccacgaagaggtctctatctagctggttgcacggcagcgcggtccccgcccaaggtttttctggcgccacccattcgttccaaagccatctgagccgtagtgctgctgcgcctcgtcgcagatccatcgatcaccacgcccaccttcatctcctccacgatgaacaccttgttcatcctctgctccgcgtacagcggccagcaca

SEQ ID NO: 88493 - DNA, 219 bp, Oryza sativa
  Clone ID: PAT_MRT4530_87339C.1
atggggattgggggcgctagatttgccaacggcgacatcagattgactacgcctaattcagtttgggcggtgcatctctttgccatcgttgagctggtttccatcgtctacaccgtgatccactggtggaccttgtcaccgccgtgcagagacaaccacctgcgtcacacacccatggcctgcccgccagggttcacaattccgacgaaaatcggttga

SEQ ID NO: 88494 - DNA, 1599 bp, Oryza sativa
  Clone ID: PAT_MRT4530_8733C.1
atgggcatgtcccctgagccatgcaactccatctcagactgttcccagcagcagagccatcatctgactctgacacagcaacaagattcaacgattatttgtactaatcaagaacttgattattactaccgattctacgacgtggacgaagcggcgtttgatggcaacgaggtagagctcgtctccaggttctccaaggtcaccaggatggaccacatgatcagctcgccgtatcagccgacgtggtcgccggcacaggccgccgtcgacgtcgtcgggtcgtcggagacgtcgcgcgtcaggaagaagaggttctgggacgttcttgagagttgcaagcagaaggtcgaggccatggaggctatggacacaccggcgacggcgacgttccgggtcggtgccggtgatggcggcggcggcggcgggggtggcgcaggaggaggaggaggaggagctgacgggatgcgtctcgtgcagctgctggtcgcctgcgccgaggcggtggcgtgccgcgaccgcgcgcaggcggcggcgctgctgcgcgagctgcaggccggcgcgcccgtgcacggcacggcgttccagcgcgtcgcgtcgtgcttcgtgcaggggctcgcggaccggctgccgctggcgcacccgccggcgctggggccagcgagcatggcgttctgcatcccgccgtcgtcgtgcgcggggcgcgacggcgcgcgcggcgaggcgctcgcgctggcctacgagctgtgcccgtacctgcggttcgcgcacttcgtggcgaacgcgtgcatgctggaagccttcgagggagagagcaacgtccacgtggtcgatctcggcatgacgctgggcctcgaccgtggccaccagtggcgcggcctcctcgacggcctcgccgcccgcgccagcggcaagccggcgcgcgtgcgggtcaccggcgtcggcgcgcgcatggacaccatgagagcgatcgggcgggagctcgaggcgtacgcggaggggttagggatgtacctcgagttcagaggcatcaaccgtggcctcgagagcctccacatcgacgacctcggcgtcgacgccgacgaggccgtcgccatcaacagtgtcctggagctccactccgtggtgaaggagagccgcggggcgctcaactcggtgctccagaccatccgcaagctgtcgcccagggcgttcgtgctcgtcgagcaggacgccggccacaacgggccattcttcctcggccggttcatggaggcgctgcactactacgccgcgctgttcgacgcgctcgacgcggcgctcccgcgctacgacgcgcggcgggcgcgcgtcgagcagttccacttcggcgcggagatccgcaacgtggtcgggtgcgagggcgcggcgcgcgtggagcggcacgagcgcgccgaccagtggcgccgccgcatgagccgcgcggggttccagtcggtgccgatcaagatggcggccaaggcgcgggagtggctggacgagaacgccggcggcggcgggtacacggtggcggaggagaaaggctgcctcgtgctcggctggaaggggaagccggtcatcgccgcctcgtgctggaaatgctag

SEQ ID NO: 88495 - DNA, 592 bp, Oryza sativa
  unsure (1)..(592): unsure at all n locations
  Clone ID: PAT_MRT4530_87340C.1
ggcnccaggtcacacgggccgggccacatccgcctccgcccgaggcccttctcaccttcgagacggagcccgtgacgaccgcaaacgtttcgagccgccgcctgtggctgggcctcaagtactgggagaacaagcccgtcatgagccagcttcaggtcgtcagcaaaccgagtcgcctggtccactgcgagctcgaggggctcgaaaagatcgcgagggggttcccgagcgggtacatcaaggggctttacttgggagagacgttgttngtcagcacgcgggccggtgtnttggaggttagggaagcgctggacaagcgcctgggcggtgtagtcctgtgcagggtgtcataacctggaggagtcgttggcgatttaaagcaggatttttgacctcaagacaacggtcaaccaatctggcgctttacggttctggggatcaacttgttgctgcaagtccccttggtgtgctgggtgctggcaaaactggctggacgcctgcacgcatcaactgtatgtaactcttatctactcctgtaccaatccatgtataatgttcagcatatttcagacgaaaaaaaaaaaaaaaaaaa

SEQ ID NO: 88496 - DNA, 478 bp, Oryza sativa
  unsure (1)..(478): unsure at all n locations
  Clone ID: PAT_MRT4530_87341C.1
ccccgctcacttgcttcctccatcttgtttacctccattgcgctacacccctaacttttcaaactacactgtcagcaacaacttaatgttagaacacttgactcatattttcccctaatttcaatcgacccctaatcctagattccaaatctgtgacttggtgtttacctatatggtgcagcttggctgtcctgcagaccggtccaggccccagggcaataccagctgcactgcacccagttcaactgattcaatagttctgctaaactgttgatgggaagttctccatcatgggaactatttgcctgtacctatgctagactgttactaataatcatgtttcagatgtggatatattaggtagttcaatgctctatactgcatatactagaaatcttgnttcagatggcagacattagnattattggtcagaggtcagncagtggaggtgtttgtaaggggtatagtaattccctgg

SEQ ID NO: 88497 - DNA, 654 bp, Oryza sativa
  Clone ID: PAT_MRT4530_87342C.1
tccgtcaccggtggatgaatctgggaggaaggcagggaggattggagcaccgccgccgcctcccttcctcatcgccaagctgccgccaggccgggagagggaggagcccgctcgtgccatgatgaatccggaagcagcaaaggccgttgcagggcccatccatactccatcacacccaccctagcctgggaacgtcggccagaggaaagctatactacatatcaagcagttaaccattcccgcttgtggtaagcgcggtaagtcttccagtgcatcctccgaaccggtccttaattgccatgggtgcgactagcaaaactatgcacccacagcccaccattcaatcacattttagttggataattatgaccaatgaaacttagccggatatcccgagaacacaactcatcaagatactaagaagtctaaaactgtaattatcccatcatgtgagctagtggcaacgacagccctgcaacgactagtggcgacgacgacgggctcaagtgtcctcgggaggccggtggcaagcagcagcgcactcagcccagcgatggccggtggtggcggcaagctcgagctggggaggccgcaggcggctcggtgacctcaggtgggcagcagtcggtggatctgccgccgccggccccacga

SEQ ID NO: 88498 - DNA, 156 bp, Oryza sativa
  Clone ID: PAT_MRT4530_87343C.1
atggtggggctcaccggtggccgagagataccgagctccggtgggtttccggcgatgaacaacggtgaccgaggtgctgcacggcgctgtaggcaagagaggcggtttgagggagaggagcggttgccggggtgctacgcgatgcggcgaagctga

SEQ ID NO: 88499 - DNA, 301 bp, Oryza sativa
  Clone ID: PAT_MRT4530_87344C.1
taagtttaacaaatcagaacgatagcttcgtgtaggaggcacagaaaaatgggctcttttctattaactcgatgtataaatctatcatgtacagggacgtcattccaaaaaatgatatgatctggaaactcaaggtaccgctaaaaattaaaaaaaatttgtggtacttaagaagtggagtaatcctaacaaaagacaatttggtcaagagaaaatggaaaggtagtgttaaatgctgtttttgtgattctaatgaatcaatacaacatcttttctttgattgtcctcttgcacgatttat

SEQ ID NO: 88500 - DNA, 143 bp, Oryza sativa
  unsure (1)..(143): unsure at all n locations
  Clone ID: PAT_MRT4530_87345C.1
cntcaacntacttccanttnaggattttaaaatggtgccccntatnaggtaggattcacccgagctangcantctnntattttaaaggaggngtgaagcttgaacaaacnttcttaacctatacnagtctggatgatccatcc

SEQ ID NO: 88501 - DNA, 1450 bp, Oryza sativa
  Clone ID: PAT_MRT4530_87346C.1
caggaggaagcgtgcaaggggttttttaccaggaacaataaaccaaagctgacattattacaaataatcaaacaaataatcaaagcatatttgtccttcagtttacagaagaaaacctgtagttgcagaatactcctgggtcgcagtacagcaattgcaggaatttgggatgacgggatgttagactttttacaaactatatatatcccagaatttttgttgagcttttttcacatgaaaaccaagcaacctacctacaaagaaatccgtggttaagatttacatttctgtactcaccagtttgaaggaacaatttgcaagggcacattggggatccctggactgatctaatggattggatggtactgtgtgatcccccgtttaggtggtagtttccttaatatgaacagcaccaaagctgaaggtacaatctcaaccaacaagtagtagaagaagtttaggattggatggttcagaacatcaagatcggcttctttatcaaacgcatttaagcacatcattacgcatctgatcaagaagccagaaaagcatatggttgtcacatatccaacctcattcaactttttacgccttccttttgattcaactggaaaacgctgtaacatcagaaatagcctccctccatagagaagaaatccaagggcagcaaataaagatgtcgctgcaaagaacatcttagacaagatgaccattgctcgaactggtttccaccacaacgccatccaaagtattatctggattgcatagaccactccattgattgtataaaaagctggtctgagcccatcagtagacattgcccgtgcctgatagtaaatctcagcccagaagagcactaacagagcataggttgtgaagaatgcaagccccggaaaatcaatgagcacatgttgaaatacctcaggctgcacaagttgcacatctcgtcggagcacaaacacgattgaccgcactccattcacaataaagttcatgaaatggaacaccttctgtgtcgtccatccgtactcaggtactctacattcgattctgatcaattggaccagcgcgacgaacgagacggcgccgtatagcgtggcgagggcgtggaaggagcggtcctgccacatcggcgagttgttcacgtcgttccaccagtccggtgccaccgccgccgccgtcgaagccgccatggccgcacccaccaccaccaccaccacctcctcgccaatcaggggcgcgccggaggcagcagaatcaaatcaaaattcagggctacgagatgcggcgcgcaaggcgtgatgcgtgcgagaggattgcgaaggtttcgacgcaatcaacagaaattttatcgaaaagcgagtggattctggattggggattggggatttcgggaaatcggcgtcgatttcgtcagcgtgggagccttgcgggaaaggggaaaggagac

SEQ ID NO: 88502 - DNA, 4248 bp, Oryza sativa
  Clone ID: PAT_MRT4530_87347C.1
ggcgagccacgaattaacacctgtgacgaagggaaacatgattgttcttgattatacaacactactgttgtttgcttaattgctttcctcccacttgggctgcatattctatgtacaggtaatacaactatatcctagtaactactgtatttacaccaaaactgtcagcagcagcccttctcgctgcacttcgctcagccatatcgccaatgccgcctattggtaatcacagaactttccaaggttgcaatccaaatgacacccatttcgtggatcgcacccatccaacaaggcagcttccaggcattacagccctgcatgtccactaaaagcagaagcaggttctcgtttacaatacacaatttggcatctccgccatggctggtgctggatcatggctctacttcgcaaagatggaacttcagtgtagcagtagtatcattccaagactttctttgcagacaaagttgccttttccttgtccttttctaatttctttttctcaagttccgcagttcgagcattttcatcacgtgattttttgaacatattcacaaatataaccagaattgatgtcacttgctcaaaagggcatcgtgctggatcctcgccaaaatactgagctagtgaatcagcgtttcttcccacttccgagtacaaggaaattagggacctaacctcagcctctgctgcatcaagaaagcttttcaatgcctcacggaaaccaacagaaattgcaccgtcattcactgaagcagctaattcttgctcaaccttctctagacctttgtttattgcttgcatttcttccgcaagcaactttagctggatcttagaagcagcttccaaatgaattaaatctttgtcaaaatcaagaagctcaggcaatttctcagaaagaagcttgcataaataatgcattagtgtcatcttgttgtttctagctcgagtatctgataatttaagaagactgtctaatctgaagccaaccgcagatcctcgagctgttccttggttcaatgcattccctaatgtaagaatggtctgcattatctgccttaacttcagagactctttcacctgcacaaagtgatcaataactgaataagccagccagaaggaaaagtcataacttgaaattttgcaggatgtaacactgacctcttttgttgcatcatttatggtggttaggttagttctcagctcttctacctgtgttgaaaatgtaatcctaaaagcaaacactctcagtttggactccacgcgaggtactttcattagctccagaaaaaactgttcgcatttcccaagcatttctttattgccattgtagttctggtgaacaaagggaaatccaaacttcaacatctcaatttcctcctttgtagggcaaaacttaatgagattttccacttggtcattatcaagaacagacgtatccaaagccaatattgcattaatcatatcaggaagaggcattttaattttagtaagcatgatctcgcaattgtttgctcttctcatatcaaccagatgaacgatttctggcttgctaatagctgaaccgcgctttgttcctcctttttcacttgcattggttgcaaccgcagtggagaacaagctctccaattctgataaatcaatatcaggagccctagcctgatttccttgtttttgcgcatcctcccagagactgccttgcattgctcgtgtaacttttacccaatgcaaaggttttagtgaagctttctttggagggttactttgctgtgccaatccaattccacgaccttttgctgatccagttgcttctcttccccttcccaatagtggaggtggtgcaggtgcgtttaaaccctttgagcttggggggtgtggtcgacctgatgcaccatgcaatggtggcggagggggtactgttccaggaggttttggtgcttgaggtggcggaggtggtggtgcaggagctttctttcctgtcatcaggggaggaggtggtggtgctggaggatttcttttattagcagctgcaggcaatggtggaggcaggggtggggctggagcactagggccattactgcgattagctggaggtggaggtggaggaggtgggggtgcagatggaacaccagggccattggtgcgattagctggaggcagaggtggaggtggtggaggaggtggcccttttgacgaagtggcagcaccggtaggcgttctgctagaagagcgagggggaggagggggtggaggaggtgcagggaatttattacctattcccggagctggaggtggtggaactaaacggtttggcaaggatggtggtggcggtggtgggggtggaggtggcaggactgaatgatttggcaagggcggtggtggcggtggaggtggtgggactgaacggtttggcaagattggtggcggtggtggaggtggaggtggagatgggactaaacagtttggcaagggtggtggtggtggcggtgggggaggctgagaagatgcatagttactctgaggaagtggtggtggtggtggcggcggtggtggtggtggtggggaaaaggcaggtttgtttccacttggaggcggtggtggcggtggtggcggcggcggtgcagcagctgttggtgatggagatggtagcttcctgtcacttggtgactcatgctgtacttctgggggcagctgattttcatcagtggaaaggatagataagctaccacaaggaggtggtgtcgtgggaggtaggacagatggagtgttcaccaagacattgcccatggatgcagtatcttcagtggtaagatcatgattaatgttctccgagtcagatgagttgccaccaggctgaaccttctcatgctcagatgaagaaaccgaatcagaagccactgaatacttttcttcatcagaatccagaggagacattagcggtatttggagaccaactttagcttgaaactttgaaagctcttccatatcactgagtattagcttttgaaatttctcttggagggaatttgctgagaactccttgagcaaccaaaaggcagcattgtcactgctttccatccagtcaactccattgaagagttcttgaacagctgaaaaggcttcaattggtaaacctcctttcatatcaccattcaatgttgctgttggaggtcttgcaggagatatgcccccaagctcacaaaacagcatctctgctctaaaatttcttgggtactgatcctttgaaccccatactatatctatatcgtcgctgttcagcattagtacattcgaacgaataaaagcagtgttgaacattatccggaacatcataacttccttttctggatcaagatcaagatgtacacactccagaacaacatctccttggactggacattgtatatctatttttatcacgtcacaatcctcctgccgatagtggcgcaaagtcttcttcttaggcattgaaaaaatcatgttgctcgtactagcgttcttgccaataatatttcgcccaaatattcggactaatggcctgcatccattatcggaatcgaaacttggaatggctcgaagaatcaggcagtcaaaggagagtgcccgctccattggaggccactctggagatatatttcttctagctacatactgcaggtatctgagctgagagggcattgggttgagggcagaaaagagctgcaaaaaccctttaggtgcctcacggtaaataaggtccagagttttatgctctgcactctgcagtttcttgaaaataaggagacacgataacataaatgctaatgatggccagcctcccctctcacaatgtagcagtatgatattttgattatttccggtggataaccagtgttcacagacacgaaggaaatgctggataagagataaaggaagcacagggcagccttcaaaatgacgagggtagtcaattactggaacattgtattcacgcaggacatcagcgagttggcttctcttatccccgtctctaaaattaatacccagaaatgaagactggctatgttcttcatgcaaatctgtaagaataccagtcaaatagactgggtacatgccatgtggcaagacttctgtgcagaagcatgaatcaaaaacagaaacgcgcaagctggtgtggccgctagggcttgggagccccccctgcgcctgaaaccctgacctgacctcgtacggcacggaaatggatgcggggaaggagtcgagacgcat

SEQ ID NO: 88503 - DNA, 720 bp, Oryza sativa
  unsure (1)..(720): unsure at all n locations
  Clone ID: PAT_MRT4530_87348C.1
aatccaaaatagaaaattgaaataattcagtttacgggaagcattacaatcaccaaatgtgacttcttattattatacaaattgtaaaactgtgtgggaaggattgcatcatctcatagtgatcccttcctcaatttaagggaactgctacattgcattaattgtatagcaacaaaaaagaagcaaaaaaggctcaaaagctcaagggcacttacatttggacggtgtaaaaagacagagaactatggcagtaagctatgatccaaaaatacagacaaaaatgaagtcaagttagctttttgcaagtccaaggaaaaactgtgtagtatgtcatggcacaaaaagacataccaaaatgatgtcaccattttgtttctctaaacactaattncataaggaagttgttttctgtagctcaatgtatggacctttttacacggatagttcaccaactttatgccatgaatcttagccaagattatttcaacaaaagtagagtctggtgagaatacagtataccacagtccacatataaaattagttttggtaaaaactattgttctcttcagcacggccactaattgcacagcaattgcagagcaacaaggaccagaaactttcacatcgatcttccatcagtttgtttcacaggcataactcttcagcacttatattatggtgatgtcaccatcattctcatatttatagggaaaaacgttc

SEQ ID NO: 88504 - DNA, 124 bp, Oryza sativa
  Clone ID: PAT_MRT4530_87349C.1
gcaatgtacctccctaagtgtgaggattagcaccatggattcatgatgtcataaaaaaaagatgaggagttcggattgagtctgttgtaatcattctcctcatgcaaagattcagcctcgatcc

SEQ ID NO: 88505 - DNA, 439 bp, Oryza sativa
  unsure (1)..(439): unsure at all n locations
  Clone ID: PAT_MRT4530_8734C.1
gtgttttttttttttttttttttttttttttttttttttttttttttttttttttttggcggaccaattaattcaaattccagtttccacttggaacgaaaaaacaagcagaggggagtccatgagagcccaaaggcgatgggaatccgggaaccaagggggggggcccttggggaatcctggggctttgaacaacgggaagaaagaagaaagaaagaaaaaaagaaaaaaaaccccatccatggcgaactttctaatgaaagaggaactgggaggcctgggcgacggggtcgtcgagccaccggggaggctcggccatgagggcggggctgagcccgcccctgggggcccagaaccccctctcgctgggggccccgcccgccngnnnnnccccccgcccggcgcgggcgccccccccccccgggcccccccccccccc

SEQ ID NO: 88506 - DNA, 1740 bp, Oryza sativa
  Clone ID: PAT_MRT4530_87350C.1
cgggccgcggggctctttttttttttttttttttttttttattttccaagaactacaaaaggtaggacttggggtcttcagcgccattcacaaaccaaaaggtttctcgaacagtctaactgacaagtagacaagttctaaaataaagcacagattgtagctaatctactacgatattagtttagttcgttccgtgatgcacgcgtgcatcaaccccgtatcttctaccaagtcctttgatcatttcgcagcagctttccctcgtttcctcggatgcctgataccgcggcaatatttgcttccacatagacactgaaatgctttaacaggatctttgccatcaccaaaatcaataccatagtcccatgtgagctcctcaaatgcctccaccttcttggttgtgaaaaatgcaagatgataataatgatgatcaggcgtctccacttcaacaggtatctcaactaaattcgcatcatagcatctatggttgataaatactcccaaattcccataaaatgttgaatccaggggataaagcttcttcatctttcaacacaccttcagaaccccaatcagcatccaagagaacagggtaggtatgcctaccattgttcatgttttgaagtgtcctttcatgcagttctgtactagttagtacttccccaacatattcacaaacaaaggctccttttggcagttcatcaagagtgcgaagaccccaacccttcccttctcctgtgaaaaatacctgcagattgcatgtgatgccacgttgaaccacacggttaccacattgcatgttacaaccacatttactccagcattccttgataaatttcctagcaagatgtcctctgcaaggctctggtgaagcttcattcctagatctctcgagtgggcaggatgatttacagaagaacttgtgacatttttctgggaaacgattcatagaaacacattcatcaaggaatggtgtcctaaccagaccttctggtgtatacacatattcgcccccggtttctcttgtgcaagcacatggtataggtgcagacaagcagttgccaaagcaatcagcacaacaatcttcatcaccaattcttgcaacggagatgttgacataagcattttggaaaacaaggtttcctcgtatataataaaaggaaggaggacatttctcacttgcaaattcattggccaccgatatcctcactctctcttctcccttggatatatcagttacatcatggataggcttcaagttggcaagtgccaaatgagtctgctgtttagcaacacttgaattttctgagtcttccacaataaatgattctcctgcagatttacatttcctatttccaccatcctcgcatgctattggcttcacaaatggaatgctacctgtcattggctcattttgtgagcatctcccattgccagcaacatctgattctgtattatgttctgcaatatgatcactacccagttgtacaacacattggcatatctcattcatgaggctaccaatggaaaactcaggaggcagaatcttgtatgagtgaagatatttatcctccaccatcttgaaaactgcttctaaggaaggcatgcggaactttgggtcaacactgcatttcagtgacattttgacctcacccatagtggatgatgctacatcaatgactgaagatccttcccccgtgttcaccttgctacaaggttgaattgccctttttttaggac

SEQ ID NO: 88507 - DNA, 338 bp, Oryza sativa
  Clone ID: PAT_MRT4530_87351C.1
ggtatctaccaccctgaaaatcacacaaaaccataatctctagcccgcttcttgattgctaataaggatttcattgaggtttcagcagattttatgacatcggacattcagccgatgtatgttttaaccttcggatcagtgcttattctattatatcattgttagccgattggtttctactggatgttattattgttttattacattgctatcaatcaattgtatttatatcgttatctatattggacatatatccgattgctcaaaaccctattgacatcggctggtatcggcatcagctgaattactccatcggcttgacaaccaattggcttatt

SEQ ID NO: 88508 - DNA, 306 bp, Oryza sativa
  unsure (1)..(306): unsure at all n locations
  Clone ID: PAT_MRT4530_87352C.1
cacggtgcccatgaacgatttgttgatggagggctcactgctgagctgaaagggggaaaacctcacgctaanatggatggatgggattgaggttccccgccatcgaatgcncgttgcctttgtcattaacatgtgggctcaggaatcatcgggctcacatgttagtgacaaagtcacatgacttcgaccncgaaggatgctgatctggattgttgatggaagttttgaatagttgtttttgaagaatgattttttttctttttgttaaaaaaaaaaaaaaaaaaaaaaaaaaaaaaaaaaaaaaaa

SEQ ID NO: 88509 - DNA, 3618 bp, Oryza sativa
  Clone ID: PAT_MRT4530_87353C.1
atggagtcgacggtgctgagccttggcaagtccgtgctgagtggagcgcttggctacgcccaatccgctgtcgcggaggaggtggccctgcagctcggcatccagcgggaccatgccttcatcagggacgagctccatatgatgcaggccttcctcatggccgcggacgaggagcgtgacaagcacaaggttgtcaaggcctgggtgcagcaggtccgtgatgtcgcctacgatgtcgaggactgcctccaggacatggccgtccgtgtcgggaagccatcttggtggcgcaagtgcagcccaagaatgctgcttgagcggcgtcgtgtggctcagaagatgaaggagctaagagccaaggttgaggatgtcagccagaggaacaaccgctaccgcctcatcgatggttctgcctccaaggcaactgatggcatgcagtctaggattgccggtgcaacgaccatgtctgaattggaagaaacaaggcggcaacaggacaaagctaaaatggatcttgttggactgatcaacaccaatgacaaggagcttagagtgatcggggtatggagaaaaaatggtcttctcgatgataaatctattatcagaagggcctatgatgatctcaagatgaggaagtttgagtgctacgcttggatcaggctaaaaagtctttgcaatcaaacatggttgctgcagagcattagcaggcaattgtacgagaattctcttcaagagactagggaatttaaaatggaagcaactgatttagtggaccgaattctacagaagatgggaaacatggaggaagatgatttggtgagtgcatttgagggatatctgaatgagaagagttacttgattgtgcttactgacttatcctctctggaagagtggaataagataaaaatatgcttcccaagcaatgatagagggagccgaatcatattgtgcacagagcatgttgaagttgccagactatgtgtaccgcaagacagtgtacccccagagcacaagaaattgctcgatgatcagattatctatgctttctatgagaagggttctcaagacggaacactcttagtggagccaagttctagctcaaacataaccacgagtaatggtaacaacaatctcacagctaataaaaagcttggtcgcactgagacgatggtatcaaccttggaggaatctcagctcatcggtcgtgcaaaagaaaaatctgacattatcaagctaattaaaaaccaagtgagtcaacaatctcaagtgatctctatttggggaatgggtggccttggaaaaaccgctctagtccaagatatatatcgaagtcaagatgttagcagttattttgatgcacgtgcttgtgttacagtattgcgcccttttaactctgggcaactcattcacagcttagctaagcagtttggaaatgaggaaaagagagatttgtccgaactcttagaaagaaagagctatttggttgttctcgatgatctatgggataccaaggaatgggatgatatggtggcacaatttcccaacaaagctggaagctgcatcatagtcaccacaagggaagagaatattgctaagcattgttcaaaagaaacaactaatgcacatatatacaagctcagcggaatagaaaatgatcaagcactccaactcttcactaaaaaggtattcaaggaaaagacaaatttggatgaacaatatccttacttagttgaacaagcgaatctgatcttgaagaagtgtaatggacttccccttgcaatagtcaccataggtggtttcttggcaaaccaaccaaagactgctttggcgtggaggaagataaatgagcatattagtgctgagcttgagatgaatccagaactcaagaccattagcacagtcctgctgaaaagctacgatggtttaccatacaaactcaagtcatgtttcttgtatctgtccatcttccccgaagaccacaaggttagccgaaaacgtttgatgcagcgatggactgctgagggttacacaacggaggcacgtggcaaatctccaatcgaaatagctcatgacaacttcattgagctcataagtaggagcatgacactaccggttgctcaaaacgcaagtagacctgagggaggaatagactattgccagctacatgatctcatgcgtgaaatcagcatcacaaagtcaatggaggaaaaccttgtacttaggctggagaaaggttgcagctcaaagacacagggcacagcccgtcatcttgccataagcagtaattgggaaggagacaaacatgagtttgagaacacagtggacctgtcccgtgtaaggtcattaacggtgtttggaaaatggaaaccttttttcgtttctgaaaagatgaggatgctacgagtgctcgacttggaagacactgaaggtctagttgatcaccaccttgagcacattggaaagcttgttcacctaaggtacctttctctaagagaatgtcacaacatttgtcacctgccagatttgttgtgtgacttgaggcaacttgagacactagacattagaagcacgtttatagcgatgctgccgaaaaccatcgtgaagcttcggaagctaaaatatctccacgctggtaaaatcggaattgtgggtcagcaaagtatagcagagagaagtctagagctttgtactggagcatgctgcgcatgctacgtacctcgtctcgtgggagacttcaacaggcgtgatgcttgcaactacaattgctgcatccagccccgtgttctcatgatggacttagataatgatttccctatgctaccacgagggagcaggaaactaaaaagcctgcatacactccgacacgtgcacttggcgtggggaaacactgttatacaagagatagagagactcacccagctgcgtaagttaggcgtggtgggcatcaacaagaagaatggtccatccttctattcagccatctccaagctcagccagctagagtcattgtcggtgtgtgcaggttggtgtcaaggcctacatggcacgtcgtcgtcgtcgtcaacctcgcctcctccggagaacttgcagagcctcaagctgcagggtgcgctaggcaaactgccacagtggatcggaaagctccagaatctcgtgaagctgagactgatgtggaccgaactggaggatgccgatgccgccatcaaagtcctcgggacactgccaaggctggccatcctgcgcctgtgggagcattcgttcaacgatcatgtggtctgtctcaacttccgccaggagcagcaggaggccaccgcagtagtattgttcccgagcctgagggtgttggaggtaagtaggatatgtagtcatgaccgcctcgaatcagtgcagtttggaggaggcgcaacccccaagcttgagctgctgcagtttagtcatttcattggctcacgcgttggattttcgtcggggctagaagagctcgaaaatctcagggaattcatgctgagtggtaggcagaggcagtacagggacgactttgtgaaagacgtggaggagcagcttgccaaccacccaaacccaaacaagccccttctcaggttcagtctatataactaa

SEQ ID NO: 88510 - DNA, 288 bp, Oryza sativa
  Clone ID: PAT_MRT4530_87354C.1
atgagcagaggagatagtgttagacccttatctgacgtcaaccaggaagatgttggtgagaagactgaagctgctgaggaggaggcgccaacagagctgagtgctgaagctgagcaagaagcagagcaaagaggagaggaggacttcaagctcaagaagcattgctcatcaaggcctgtcaaacccaaccctatgtatcatgggccacagtgggccgtgtatgtcctgtcaacatggcttcatggcttagctcgtttcacaatttctgttggttttttaggctcatag

SEQ ID NO: 88511 - DNA, 258 bp, Oryza sativa
  Clone ID: PAT_MRT4530_87355C.1
atgccgagctgtgccgcgggccgccgccgctcgccggtgtcggccgtggctgggagcgccggagcgggcggcaccaccaggtcggagaggcgcgtgccgctctggaacctcagcaatgttgtcggcgggagggcccgcgcggcgaaggccgagaaatcgagtttgactggtagagttgctaatgtgaagaagggatttttggcagtggcggacgtaggattttatagatgggggtacgataaaataatttatttataa

SEQ ID NO: 88512 - DNA, 144 bp, Oryza sativa
  Clone ID: PAT_MRT4530_87356C.1
atggggagctcaaggcggtggtggcgactaggatgtggaggtgacggcgacagggagcttgaggcggctaatggaatggaaggggatcaagtaagagttttcaggctgagcgctggcagtgggtatgatggcaaaggtgggtaa

SEQ ID NO: 88513 - DNA, 348 bp, Oryza sativa
  Clone ID: PAT_MRT4530_87357C.1
atgcacacatctttaaattgcactaatcagatacaaagaacatataatttaagaaaattacagttgtatataactaaaattgcattttgctatattactaaagttacatttgtaaatacatttgatttagcatgtcccgaatcagtacaagatgatgatgaaaagagacaagaatcagaaaaaagcaaaatgaaggcaaagcagcttgacaacatcaagcctcaaggaatgaaatcacaagcaggcacgaatcagatttgcaaattgcataagtcaatgactgaagaaattatgaagaaaaaagaacaaacaggatcttatcagctgcatgatacagggaaaaattaa

SEQ ID NO: 88514 - DNA, 811 bp, Oryza sativa
  Clone ID: PAT_MRT4530_87358C.1
gtaaagaaacgtcgggaaagacggcgtgtcgtgcgccggcgttagatttggagaaaaaacaggattagttccacgatcgcgtacctccggtcggtcacccacgccgcgtccgcgctcacccgctttgagatcggcgagccgctcccaatgttcgaccacggcccgcccgccgggattgtccaccgcccggcctgtcgtcgcaccctccatcgagcaacagcaacggcgcgcgcaggaggaggaaggcgctgttgtggatgatcatcttgttggcgacgtggctggggcgccgtcgatcggtcacgcgagaggaacgcggcggcggcggcggtgaggagatgaggatggtggtgaggaacagtagcctcgcggaggtcgcggcggggttggaggaatacttcctcaaggccagcgtcggctgcgtcgccggcgacgccatgtcgagccacctcgagtcgagcatggattttgttcatggtggaccgaacaacatcttggacgcgctttgctgcgtgtcagcgccatcagtggcgcacgaccacgtcgacagcatcaatggcgagcagaggcatacccccaccatgtagcagcagctagcctgggagaagaagctgtattgggaagtgaaggcgagagagcggctgcaggtccagaacgataagaagctggcggagctgagtgaccaggagtacagcaggaagattgacgtggatgtgttgaaggctatggaggcgtttgaaccagatcgatcctagctacgaccttcctgccctggaggatctgcacttcttcccagttctcacgaccaccg

SEQ ID NO: 88515 - DNA, 582 bp, Oryza sativa
  Clone ID: PAT_MRT4530_87359C.1
ttacgacggaggaggcggaggccactgcgacggtggcgcagcccacggtgcgaccgagtggaggaggcatagggcgtgggcagccccagcgttcctaaggagggagaggcggcgagggtagaggaggatgagcgggcagcggggctgagagcgcgaaggcgacgcgaggaggagagaaggcggcaggcaaagggagcacgtggaggctccgatttgacgccgtggcatgctcacacggaggaggcgtgggtcagtgcctctgaggagggtgaggcggtgagcaggccgtggaggtgggggggggggcgggcgtgtggcaaggtggcgtgacaggcgggcgataggccaacatggcgttagatgcgtggctggcagtgtagtgcgtaggagtccagcatggagcgcgcaaagagagtgcccgtgtggcggcacgcggaggctggccgccagtggtggagcaatggcgtgtaggtgtggaatcataggcggcgagtgaaaacctagcccggttttggtcaggtcggcaacattggcgttttcgagctcgcttctcctcttgagggcgttgtcgtaccatctcat

SEQ ID NO: 88516 - DNA, 6233 bp, Oryza sativa
  Clone ID: PAT_MRT4530_8735C.1
tggagttcacagatggaaggagtcctactcggtcagaactgggtcgtcattgtgttgtgtccggtctggcgtctccgaatcctacttggagacagttgacctgtgatataaaagggacccctcaggaggacctaaggcatcgaatctcagagccaacacatccaccacagcttatgaaatcctcgtaccagcgtaccccaataccctctatatccggtctacgggtatcccccgtcgatagtggcgcgccaggtagggggacacatccagcttcgtcgacaacagcgtcaacaccaacctcaaccaaggagttcctacttcaataacattggtgtggactcaagtcggcgaaatcgtctttccggtttataccacagtgccgatctcagttggtccgccaatggctggaaacgagaacgcaatggctacaacccggggcgactccatgtcgaaagatcctcccgccgaagcggagatcgggacgtcgatgacatccgagcccgagaaggatcctagtgcggccaagccttgtatttccaacaagaatcacgagccgacgaggattacttccgaggtgacaaggtcctggtgtcctatccacaaaaccaggaaacacaccctgcaagcctgctgggtctttctcaacgtccatgctgaaattcgtgcctgcaaagagcgtggaattcagcgtacctctccaactcgtgatgtctattgtcctattcacaagacaaagaatcacgacctctcgagctgcaaggtctttctcagcgccatgaagacgccacctcctaaggtccagcagtcacgcaaccccatcagggatgaagacaaggaacaaggagcgacgctgatttcagatcgatttgttggggtaatcgatatcgatccccacgaaccatcagtcttgcacctgctcgaagactatggatcatcgacaacgagtacgccgcgtgaggtattggctatcgatgatgtcggcacgtcagtgcgcaccaattcggaagcggagaatcaagtgactactccggcccagcacatcagagccgtcaacgcaatactgagggaaacccctactatcccattctgaatgacaatctcgcatgttggacagaatgactacgggaatcagtgaccaacctcagcaacgcgttcgaagaggccgctgctacaacgcacctggaacagccaccaaccggcgatgctaatggtgaagaccctgaacgacgagaatcgcctcatcgagccacccctccacctcgcggcaccggcgatctccgcaatcacctgaatggccgccgagaggcacgacgcacacgagacaacgagaaccattcccggcgtcatgtctcttcacggcgtcatgataacggtgataaccgccacaaccgccacgatcacgatgatcgcgaacggcgggtgctgggcgatactggtcaaggacgtcgccataatgacgacgatgatggagatcggcgccgagacaacaacaggagacgatgacaggattctcgagaacctggccgacgtcctcgtaatcgtatgccggaaccaagtgacccatcgtcatcgtcatcatcctcgtcatcttcatcatcagatagacatccacgaaggacatatgatcgccgacaacccaccgcccccagcactgggtgtagagctttcggtcgttcacttcgggatgtccgatggcctgaaagattctgacctggagcaatagagaaatacgatgggagcaccgacccagaagagttccttcaggtttactccacggtactctacgatgccggagcggacgacaacgcgttggcgaattacttgccaaccgcattaaaaggctctgcacgttcatggctgatgcatctcccccctactcgatctcttcgtgggcagacttgtggcaacagttcgtagccaacttccaaggaacttacaagcgccacgcgatcgaagacgacctacatgcgttgacacagaaccagggcgaatccttgagggattatgttcggcgctttaacgagtgcagaaacacaatccccgagatcactgacgcttctgtaattcgcgctttcaaatatggtgtcaaagatcactatactgctcaggagttggcaacgaggtgcgtcacgactactcggagattattcgaaattgtcgatcgatgcgctcatgcggatgacgcattgagacgcaagaacgacaaaccgaagactggaggagagaagaaaccagccaaggacgcacctgagtcaagcaagaagaaaaatcgcaagagtgggaaaaggaaagctcaattggaagttctcgcaacagaatacgcggaccctcccaagcgcccagacccacaaggcagcgacacgaagaaagcatggtgccctatacataagtcggacagacattctctagaagattgcctcgtcttcaaaaagtcgctcgcaaaacacatggcatcggaaaaaggcaagcgagtacgtgtggctgagaaggactctgaggcgcctactcaggaatcggactcagcatacccagattccgatctccatgtctcacacatcttcggaggttccacggcggcgatatccgatcgtggtcaaacccactattcgtaatatcaaggttgcacgagtcctgatcgacggcggcagctcaatcaaccttctcttcgccagcgccttggacgcgatgaggatcccacgaagcgagttgacacccaccgatcaactcttccatggaatcactcctcagtcatcgtccaaaccattgggcaaaattacgttgcctgtgactttcggccaagcaaacaacttccgaacggaacagatcacctttgatgtcgctgaattcgatacaacatacaatgccatcattgggagaattgcactcgcgaagttcatggccgcatctcactacgcgtatcaagtgctcaagatgccaggaccgaagggaacaatcactattcaagggaacgctaagctggcagtacaatgcgacaagcggagcctcaacatggtcgagcacacgcccagcccaccggccacagctgatccacccaagaaagtgagcaaaacaaacaagatgctaaagccagacggcgcaatcaagatcgttccactctccagtgccaaccccgacaagaccgaactcgcgctcatcaccttcctccgcgacaatgctgacgtgttcgcttggcagccatccgacatgccgagggtacccagggaggtgattgagtacaaattcatggtgcgacctgatgccaagccagtaaagcaaaaactgcggagatttgcaccagatcgaaaacaagccatacgagaagagctcgacaagcttctcaaagccggtctcatcagagaggtactccatccagagtggctagccaacctagtcatggtagggaaggccaacgggaagtggggaatgtgtgtcgatttcaccgacctcaacaaggcatgtcccaaggatcactttcctcttcctcgaatagaccaactggtggactcaacagccggttgcgagttgttgagcttcctcgacgcttactccggttaccaccaaataagcatggcaaaagaggacaaggagaagacaacattcatcacgccgttcggggtattctgctatgttaagatgccgttcggactaataaccgcaggaaacactttccagcgcacggtccaaggtgcacttagcgactagctcggaaacaatgtcgatgcctatgtcaatgacattgttgtcaagaccaagacaagcgactcattgattgacgatctgcgggaaacattcgacaacctccgacaatatcgcctcatgctcaatccagagaagtgcacgttcggagtaccatcgggcaagctactcggcttcctcgtctctggcagaggaatagaagcaaatcccgagaagatcaaggcaatcgagaacatgaagtcgcctacaagactcaaggaagtacagaagctaaccggatgcatggcggcactaagcaggttcgtcgctaggatgggagagcgaggacaacctttcttcgctctgctgaaaaagcaagacaaatttgtatggacacaggaggccgaagaggcattcattgcactcaagcgctacctatcaaatccacctgtacttgttgccccccaacctaatgaagaattatttctctatattgccaccacgccatattccattagcactatcattgttgtcgagagagagaaggtgcaacgaccagtctgctatgtcagcgaagctctctacgacgcaaagacaagatatccacagatccaaaaactgctctacgcagtaattgtgacatcaagaaagctacgccactacttccaagcccacagggtcacagttgtctcctccttccctgtcggtgaagtcgtgagaaacaaagacgttgtcggccgcattgcgaaatgggtagtcgagctaagccaatttgatatccacttcgtgccacgaatagccatcaagtcccaggtactcgccgatttcgtagccgattggaccatgcctgataacaggtcagacaaccaaatctacaacgaaacgtggacaatggcgtttgacggcgcactcaacagccagggagcaggggcaggattcatcttgacatcaccttcgggagatcaattcaagcatgcaattcacctcaacttcagggcaaccaataacacagccgaatatgaaggactactcgccaggataagagctgcagctgcactcggagtcaggcgactgatcgtgaaaggggattccgaactagtcgcgaaccaggtgcataaagattacaagtgctctagccccgagttatccaagtatctcgcagaagtcaggaagctggaaaaaaggttcgatgggatcgaggtccgacatgtataccgcaaagacaacatcgaaccggatgatctagcacgacgtgtgtccagacgagaaccacttgaacctggcacctttctggacgtcctgatgaggccatcagtgaaagaggcaaccggcgaagatagcctggtcgccccaacatcggctcgggggctacagaggcagagcgcgccgttgctgatatcgagaccacagacgactggcgcaccccactcatcaaattcataggcagcgaagagttgcccgaggacgacgcagaagccgagaaaatatcccgtaaagcaaaagtctactgtatgatcggcaacgatctatacaagaaggcaccaaacggggtactcctaaaaatgcgtctcatccgacgatggcagacacctcctcctcgacatacatgaagggatctgtgggtcacatgccgccggtcggacattagtcggaaaagctttccgacaagggtttttctggccaatcgccctcaaagacgcctacgacatggttcagcggtgtgaagcctatcaattccacagtaactatccctctcacttggttgttctcgtgctgggggctagatatactcgggccattcccacgaggacagggcggctacaggttcctattcgtggcgatcgacaaattcaccaagtggattgaagcgacacccacgggggaaatcaaggtcgacaacgccatcaaattcatcaaagggatattctgcagattcggatttccccaccgtatcataagacaacagctcccagttcatcagtgccgatttccaggattactgcatcaagctgggagtcaagatctgcttcgcctcggtttctcaccctcagagcaatggataagtcgaaagggcaaacatcatagtactacaaggaatcaagaccctattatgggtcgtgcgtaccacaccgacaacgtccaacaaggagacacccttcttcctcgtgtatggctcagaggccatgctccccaccgagctacgacatcaaagtacacgagtacagaagtattccgatgaggatcaggagcagcagcgatacgacgatgtgaatctactcgaggaacatcgtgaacgagttgccgttcgagcagccagttaccaacaggcccttcgccgttaccacgagaagcgcgtccgagcacgcatgctttcgatcggcgactacgtcctccgacgggttcaaagccaagcagggcgcaacaagctctcacccaaatgggaaggaccgtacacgatcacacaagttctgcggccaggcgcattcaaaatcacagacggcgatggtcgcaagttggcaatttcctggaacattgatcaattacgtaaattctatgta

SEQ ID NO: 88517 - DNA, 915 bp, Oryza sativa
  Clone ID: PAT_MRT4530_87360C.1
atggcagattggcaggacgatcagcacagtgtggtcgagctactgcgtgcgtcgccgttgctcgcgccgtgccccggccgccgcccaccgagcctgcgccgaagccgcgtcgaggccgccgcgctttcgccagggagccgcccgccgtgcttgcgccggccaccgcaccaccctgcgcccgccgtcgcccgcagcgccgccttgtgccgggctgccggccgcacgtccgcggtgtgcgcagaggagttccatcctctcctcggcgaggcgggagacgaggccggctacaagaggatgggcacagcgcccgatggcagctcggggatcctcgccaacgcgcatcgcgatgctgcccctggcgaggtccacgcggtcttcttcagcttcaagccttcaacacatccaccaaagcgcgtccaagatgttgttcggtccaccatgaacaaaatcaattcatgtggtggtgatcagtggcatgaaagcttctattctgcaacccatgctcgactcgaggtggctcgacatggcgtcgccggcgacgcagccgacgctggccttgaggaagtattcctccaaccccgccgcgacctccgcgaggctactgttcctcaccaccatcctcatctcctcaccgccgccgccgccgcgttcctctcgcgtgaccgatcgacggcgccccagccacgtcgccaacaagatgatcatccacaacagcgccttcctcctcctgcgcgcgccgttgctgttgctcgatggagggtgcgacgacaggccgggcggtggacaatcccggcgggcgggccgtggtcgaacattgggagcggctcgccgatctcaaagcgggtgagcgcggacgcggcgtgggtgaccgaccggaggtacgcgatcgtaggcgtgggtgaggggggcggctaa

SEQ ID NO: 88518 - DNA, 646 bp, Oryza sativa
  Clone ID: PAT_MRT4530_87361C.1
atggtttctttaagcatagtgacagcacacttgcaccctttgcatataaaggtgcccggccggtgccatcaccagccttggtttcttctcattgttcatacctcagcagaacattaagcctttcccctcctccactccattcacagcttccagatggctcagcagaaggtggtgctgagggttccaaccatgaccgacgacaagattaagcagaaagccattgaagccgttgcagacatctacggtatcgattccatagctgcagatttaaaggacaataagatgaccatcatcggtgaaatggacacagtggcaattgcaaagaagttaaagaagattgggaagattgacattgtgtctgttggacctgcaaaagaagagaagaaggaagaaaagaaagaggagaagaaagaagagaagaaggaagagaagaaggaggagaagaaagaggaaaagaaagaagagaagaaatgataaaattatgaaatatataacaccattgcatagtgtctctcccatctgcaagtgaaacagccaataccttggacttttgatcgatgttttatgtgaaattactctgtaccataatactgtaaagaacatattggtacacgtaagtaatattgcttacagttacaaaaaacca

SEQ ID NO: 88519 - DNA, 227 bp, Oryza sativa
  Clone ID: PAT_MRT4530_87362C.1
gcgtccgcgtagcgtagatcggcggcggtggcggctgcggcgagagcgtatagagacaggagggggcaaccgcggctgcagctgcgggggagcgcgtagatgacgctgaacgctattcctctacaccacactgcttacgagatcacgagctacatcgacactccgaccactaccaagagctccagaacggcctcctataaggactcgatggcgcatgacacggtcaa

SEQ ID NO: 88520 - DNA, 261 bp, Oryza sativa
  Clone ID: PAT_MRT4530_87363C.1
atggcacctgctgcattacatcataagctctacactactgaaactgctcaagaaactgaaggtagtaggattcacttacagaaacgccactgcaccatcctgctgctctgttcttggacctccctggagctcaaaaccccaaatgattttaagaacaagaacaagaagaagaagaagtcccaagaacacgagcagtgcaatggatgtgaggtgagaggtgaaggctttgcatttgcttttgcttctcttggagatgactga

SEQ ID NO: 88521 - DNA, 376 bp, Oryza sativa
  Clone ID: PAT_MRT4530_87364C.1
atggcagtttttccccgtatcccttcctctcccaagaacactgttcaatctaatccccaaaactttacctcgcatacaatggctgatctcaaccctaacccgcaacattttcttcgtcaagggcaagtggttcatcacggtggtaacttgcgcgtgctgtgtgttgatcttaccgtccctcaatgtccgcctcgtcgtcatgaggatgtctgcatcgccatagtggagcctggcgtccccgagcaagactggtatcatcatcgggcactcatatcggatcatatctttgaagttcacatgtatgaggaaaataacttggcgactgacgtccggtcatgccgatcagagaaacaactcggcgacgacagtgattgga

SEQ ID NO: 88522 - DNA, 183 bp, Oryza sativa
  Clone ID: PAT_MRT4530_87365C.1
atggccgggccggacatgccgtgcccgagcgccatgcccgggctggcctcggtgccggccgtccccagccgcctgatcggccctcggccgatcgtggccgtccatcccgtggcccgcgtggccagccacgtggtgccacgtgaaaagacgttgtcgtcgtcgtccctcaagtcggagtggtag

SEQ ID NO: 88523 - DNA, 3141 bp, Oryza sativa
  Clone ID: PAT_MRT4530_87366C.1
atggccgcgaagaacagcaagctcgccgcgcagttcgaggctgacgcctccacgtccgccgcggaggttaccggcggcgtcttcgctggcgtctccatcttcgtagacggcttcaccgtgccctctagccaggagctgaaggagattatgctgaataatggtgggcggtttgtcaactacttctcgaggaatacggtgacgcacatcatctgcacccatctgccaaatagcaaaatgagtaatctgagagcattcagtaagggacttccagtggtcaagccagcctgggtggtggattcccttgcagagaacagactcctcagctgtagtttcagttcaccttcccttactaacagtttactgctggagggatcacaagaccataacagtggttgtgaaaaggaagggtcactattgaaggaggaggcatcaaaggactcactatcctctgatgatcataaagcttcaatgtttgaagaacaagatagtgaagactttgttgatgaggctggtaatgcttatgaaacagcatgttcagagaggagggataatgacatggatggtaaacttcatgttgctgagtccccagatattaggtcaaggtgttcaaatttgtgcagtacaagctctacgggcagtcatttgtcattggattcgttggatagaaatgcaactaaatcttctagtcggacacattcaaccctcacagatccaaattttgtagagaactatttcaagtattctcgactgcatttcattgggacctggagaaatcgataccgcaagcgcttctcaaatttactaggtgataaaagcagtaaggggaaccgtgatcattcagggaagaataacacgatcattcatattgatatggactgcttttttgtatcagttgtcatcagaaataagccagagctgcatgacaaaccagtagcagtttgtcattctgacaatcctaagggaactgcggaaatatcatctgcaaactatcctgcacgaaattatgggataaaggctggcatgtttgttagagaagccaaggctcggtgcccccacctaatgattgttccgtatgacttcgatgcatatggggaggttgctgaccagttctatggtattttgcataaatattgcagtaaggttcaggctttgagttgtgatgaagctttcctggatatgaccgaatgcttacatgataatccagaggaagtaacacagaaaataaggaatgagatttttggtacaacaaagtgctctgctagtgcaggtatttctggaaacatgctcatagctcgtttagctaccagatctgcaaagccaaatggacagtgttttatttcctctgagaaggttgatggatatttaaatactctttctatcaaagcactcccaggcattggtcatactgtttcagataaactaaagagcaaagaagtggaatactgcggccagcttcgcaacattccaaaggaatctctccataaggattttggtaaaaaaattggtgacatgttatggaactattgcagaggaattgatcattcagttgttgaagctgttcaggaaacaaaatctgtcggtgctgaagtcaattggggagtcagatttaatgataacaaagatgctgagaattttcttgtcaacctcagcaaggagttgaaaacaagaaggaaaggtgcgtgagagccaatcaagtttatgggatgtggtgactgtgaaactgttagtcgatctatgacgattgcaggtgcaactgacaatccagtcacccttcagagaatcgcaaaacagttattctcatcattctgtgttgatgtgaaggaagttcggggagtaggactaaaaatttcaaggcttgagcatgcagatttggctcggggagcaccacaagggaatatgcttgaatcttggcttgcttcaccatctgacaagctcaagaaacacagcaccgagaaagcttgcttgctcaaaaatcgtgatgatgcagcaactagcgagcggagaggttttggaagtatcagaccatcaggtataggagggacttctcgttcatcagaagtgaaccctccaagtgacaggtccactcgagttggtgttgagctgccaccattgtccgaacttgatttggaggtcctaaagaaccttcctccagagataatatatgagatgaatgacatgtacaagggagaattgcatggttttctggggataaccagtggtgacaaagccaaggaaagcaatacaaaatctcttgtttttccagcagttgatcagaatcttgtgcctgttcttgacacgaagctgcatggagatggaaagcacaaagactccatacattttaaaaaggaggcagatattaaggggccttcaggtgaacaactctctgaattaaaacaagccaatgctccacgttcaatagccagtgaattggttgatataccaactaaaagtgtcatacagcatgatttcatgccaaattctttaagccaggcagacgtcacagttcttcaggaattacctgaggatgtgaaggctgatttgtttaatgcgcttccattgcacagatcaggagatcctacatgcagcacttcacatgtttctgaaaacaaatttccccaggatggaagaagcgatgatccaaaacaacatccacagatttgtcacctgccagggaattcccaaaaatggattgaagagttcagagttagccattgcctgatactgaatgttattgcagagcaacacacagactccatctccagtcgacctttatcttctgttttagaacctgtaatttcctaccttcccctgtgccctaactcaggcactgaagaatggaacgaagcatttgcaagcctttctgaacttctgacacaatatatacaccaaaaggttgaatctgatattgaagagctccacaaatgtttccggcttttaaaaaggctgcaacttgcaaagaaatttgttcttgaagtatccttgtgtttgtggaacacaagatggggaattggggatgagtttggcaattgctctcaaagtctcgttatactgatacattcagcagatgttgacaccctaaaatcctcaattcagcagaagatcgtgacgcttcagatcgacaatatatatcaattagattag

SEQ ID NO: 88524 - DNA, 249 bp, Oryza sativa
  Clone ID: PAT_MRT4530_87367C.1
atggcggttccagtcgccggctccggcgaggcggcgacacctgccggcggggctctctccgccctagcattggtttttgaggttggagtcacggcgtgcattgcccctgaggtggtgctttcagatggcgctggttcaagatgtaaggagtacgccgtatctgctaaaattgttgaagtggaagagtgccagtgtttcccggactgtcatttctccagtgtgaagatcatgatgcccaatttaagctga

SEQ ID NO: 88525 - DNA, 1355 bp, Oryza sativa
  Clone ID: PAT_MRT4530_87368C.1
cccttctccagaactgccgcaccaaggttccacttttctttggttatatttgtggatcagaagaaactgtaagcaaaatggaaaattacctacttcttgacctgactcgtaaagtatccaagttgcttggggccttagcttcgcaagaactgaatcaaggtgtttaccgtgcgggtcttgtccttgacatgaatagtgcttctcacgatttcaagtgcacaccctctacctctttagttggatatattttactcggtggttgctttacaagtgttaagcatgaatctctttggatgttgggtggatggtgaagcagcaatagattccattcccttttgtcattctttggttcaagtcgcggttgctacaaacaatgaaaagctcaagcgatttattaaagatgatatgcttcctgctataatccgacgcctatatgatgatcttccatgtgcagttcaaaagaccatcagaaagttatctcccttgatgaactcaatcaattgcaggaaagccaccaaggatctcttggttctatgtcaggagatctataaagtttacatacgatgtcagaatttggaaggtgaagaccaggatactgataacatagcatactggtttgatgattggttaacaaagcagaagaaagaactttgtgtaaaggcatcctatgctattcctgatgaatttccagctacgctgtggaattgggagtttgaagaagaatttcaaaggtatcttcctacatatcttgatgtgctgcatgaagttgatacaatggattgtcaagagtgttgttgtttggatagcgccaagatttttgagaatctgagcctggaatttcgatccaggcatggtgttaggagccatacagatcatgttgtttggatgatatcaaatttgttacaacggaagatgcctggagcatattcagagcaacgtgctgatcgaatttccaaatggacttgtgaacttattaaatcgaagccttacatcaagctctctaatggttggaacaatgctatgaatcgattgaaggaaaactttgtgataaatgtagatactaaaccggatgcaatagatgcagttaattccttctacaattcaatattgcttctttgggaacctcagtttcatcctttaatcagggagggtcaaatggatgttcttgtagagatagctcatcagttagcttttgcagaagagagaaaaaactacgagccattggaaccagattcattagatttcttggaccatttgcaaccttatgcaaaattatacatctatagaaagaagacagaatctgggtattttacagcaatagaacaagtccagttgcataaagaatttgacagata

SEQ ID NO: 88526 - DNA, 1143 bp, Oryza sativa
  Clone ID: PAT_MRT4530_87369C.1
atggtcgcggcggaggcggcggcggcgccggctccaccgcatgacgccgtcgcggcggtggcggtggggatggtgggggcggcggggacggtggacgagcagaaggcggccggggtggggatcctgctgcagatatcgatgctggtggtctccttcgtgctcggccacgtcctccgccgccgcaaggtctactacatccccgaggccagcgcctccctcctcatcgggatgattgttggcggccttgctaagatatcaaacactcaaagaagtattagcttagcaccaaaaccattcttttcaaattttggtgccattataacatttgcaatcttgggaaccttcattgcttctattgtcactggtcttttagtatacgttggtgggttaatatacattgtctataagttgcctctggttgagtgcatgatgtttggtgctctggtgtcagcaactgatcctgttactgtactgtccatatttcaggaacttggcactgatgtgaacctctatgcgctggtttttggagaatcagttctcaatgatgcttccttaattctatcaaacctcttcaagtatgcagctctaggtgttgagaaccttcataatctggagagttgcttgtttgtccttttcccttacttctcgtacatgctagctgaaggctttggtttgtctggtattgtctctattctgtttactggaattgttatgaagagatacaccttctataacttatcagaagattctcagcgttttacagctcgttttttccatctactttcatcactagcagaggctttcgtatctttatattacttgcaaggtcttaggggggcaatggcttttgcccttgcacttcagtctattcatgatcttcctgaaggacatggcgagacaattttcaccgctaccacatctattgttgttctaactgtgcttctaattggaggctcaactggaacaatgcttgaatccctgcaacataactttgatgggaacaatgctggctaccctgggcaacgttacggggaagaaacatcaacatcaagcaatttcacaatgaaactcaaagagctccagagaaggtacagcagttcacatttgatattgaagttgtatctactcattgctcttctttag

SEQ ID NO: 88527 - DNA, 828 bp, Oryza sativa
  Clone ID: PAT_MRT4530_8736C.1
atggagatggacaaattcagctcgtcgtatcagccgtcgtggccaccagcgcaggccaccgtcgacgtcgtcgggtcggtggagacgccggcgcgccgggcgttccagcgcgtcgcgtcgttcttcgtgcaggagctcctggaccggcgagcatccgccggcgctgggccctgcgagcacggcgttctgcatcccgcagtcgtcgtgcgcgaggcgtacgcggaggggttagggatgtacctcgagttcagaggaatcaaccgtggcctcgagagcctccacatcgacgacctcggcgtcgacgccgacgaggccgtcgccatcaacagtgtcctggagctccactccgtggtgaaggagagccgcggggcgctcaactcggtgctccagaccatccgcaagctgtcgcccagggcgttcgtgctcgtcgagcaggacgccggccacaacgcgccattcttcctcggccggttcatggaggcgctgcactactacgccgcgctgttcgacgcgctcgacgcggcgctcccgcgctacgacgcgcggcgggcgcgcgtcgagcagttccacttcggcgcggagatccgcaacgtggtcgggtgcgagggcgcggcgcgcgtggagcggcacgagcgcgcggaccagtggcgccgccgcatgagccgcgcggggttccagtcggtgccgatcaagatggcggccaaggcgcgggagtggctggacgagaacgccggtggcgacgggtacacggtggcggacgagaaggtctgcctggttcttggctggaaggggaagccggtcatcgccgcctcgtgctggaaatgctag

SEQ ID NO: 88528 - DNA, 444 bp, Oryza sativa
  Clone ID: PAT_MRT4530_87370C.1
atggtggacatcaagtctaccgaggtggatccagacaatgtgattccaataaccatggacatgctaacatcagaacagaagcaaggacacaaggtggatttgccaccggttgatgagaagcctgagtcaagctctgctaatgatgataaacttaaggaagtcaaagctgaaggactcaaacgggaggatgatggtgctccagagttcaacaatctacaagatcgatcagtgtggtcaaatcaaattgatgaaaacaaatatgaggatacataccaatttacctattggcgagggcggcgtcgcttcaagtccgacgtgcaagaccgtacctccgacgttcatttcacggatttttcacccgtctccggaggtgatggagtgggcgttttctgcttcgcacgccataccttctttgttcttggtatgggcggcggcttcttctga

SEQ ID NO: 88529 - DNA, 455 bp, Oryza sativa
  Clone ID: PAT_MRT4530_87371C.1
tcgtaaggcggccggggtggggatcctgctgcagatatcgatgctggtggtctccttcgtgctcggccacgtcctccgccgccgcaaggtctactacatccccgaggccagcgcctccctcctcatcgggatgattgttggcggccttgctaagatatcaaacactcaaagaagtattaggagatggttcaattttcgggaggactccttccttcttttcttacttcctccaattatatttcagtctggattcagcttagcaccaaaaccattcttttcaaattttggtgccattataacatttgcaatcttgggaaccttcattgcttctattgtcactggtcttttagtatacgttggcgggctaatatacattgtctttaagtcgcccctggctgcgtgcatgatggttcggcgctctggtgttaggcacctgatcctggtccagcactgcc

SEQ ID NO: 88530 - DNA, 669 bp, Oryza sativa
  Clone ID: PAT_MRT4530_87372C.1
ccggccgggattgctcttctttccccttcctcctcggcctcggcgggcggcctccgataccgatacgccgtcggagtcgattccgattgcgattgaaggtctgttcttctatttattatagtatatatagatccagtcggctgctgcgttgaaaaccaggagaggatcagatcatggcgcaaatgggcgtcatggacgcttccctgtgtcctcctttccacggccggtccgtcgacaaggggacgcggcgcaggccaagatgggtactcctcgacaagctcgcctacttcgccggcgccgacgtccgcaacgccaccactgctacttccaaaacaagggagggccatgaaatccaggtgaccctgtgcaccgccgcccagccgcagctcgtctcctacgtgtgcgtccactctcccaccctcaatcctgcatccgatgactacgccatggagccccagatcatcgccgcacacgatgacctcctcctcatccgcctcatcctcggcagaggtaaaaagagaaaacagaaacagcctgggatgttgctgggatcctcaagcaaaaggaagtccgaaactccctatttgacaaatgtggtgctgccactgccaacgaggcacggtgtgcaaaaacaaccggatgcggaaggaggtagcatggaagctgaat

SEQ ID NO: 88531 - DNA, 1626 bp, Oryza sativa
  Clone ID: PAT_MRT4530_87373C.1
atggccggatgtggaggaggaggaggaggaggggaggcgtgcgtccggcgaagaagggggaagacacgagtgagatacagtgctacgccgaagctcgtctcctacgtgtgcgtccactctcccaccctcaatcctgcatccgatgactacgccatggagccccagatcatcgccgcacacgatgacctcctcctcatccgcctcatcctcggcagaggtaacaggtttactgtatccctcgccgactacttcgtttaccaggcctccattgctgatgatatcccgccgtctctcacgcgcatcacccatcccggccctatgatcaccttcactaaccacgaggtcgccatcctgcactacatccctgaggacacccaccaccacccgtacgccctcagaccgcacaaccccctcagcagcagcagcaaacaacactatatcgtcaccgcgttttctgtcaacaggtataggccaccaggggaatacaagctccatctctaccactcccacactcagcaatggaccaccacccacttcaaccttgcggcaacaatgccagatctctctcccttccaccatcgcacaaccaacgtcatcaacctcactcaccaatctcctggtctcatggctttcgtcgacctctggcagggcctcttgctcatcaatgtgcttgacaaggtacagcctgccgcacctcgctacatcccattgccaccaccgctcaagcagggtaaagtcatttccggcagagtcgacccaacagatgttcgtgacattgccgtcgacgcaaaaggtcacatcaactttgttgagctggaggtcgatgctattcaacacgagtcggatagaaccggttacatctctcagggctggacggttgccaaatggagctgcagtaatactgaatccgacgattgctgctggcacatggactgcaagctcaacgcttctgacatctctcatctgatgcctcctgagctacccaactactgtcacccaaccccaaccttggagagactccacataggtcatcccttgctcagtttggacaacaatggcgatgttgtttacttcatggccaaggtcgaccaccgtgattacaaggcatgggtcattcctgttgacatgaggaaaaggctcatacatgaaccagctgtttttgagggtgctccgcgtactcttggcataggttccaccttcatacaaaccaccatctccaactatccacaacctgctccaggtaaaaagagaaaacagaaacagcctgggatgttgctgggatcctcaagcaaaaggaagtccgaaactccctatttgacaaatgtggtgctgccactgccaacgaggcacggtgtgcaaaaacaaccggatgcggaaggaggtagcatggaagctgaattttcagataatatgttattataataagctgggatatgagtaatagtggtaattatcatattttattgatatagtgtgatcccgtatcaagactatgatccctcggttattctctcctatgtcgtgcttgtatgtgtaagggacgacctgaatgaattcagttcagacatttttctgtcctatctatgtggtacacttgttttatcaaaaaaaaaaaaaaaagggcgg

SEQ ID NO: 88532 - DNA, 155 bp, Oryza sativa
  unsure (1)..(155): unsure at all n locations
  Clone ID: PAT_MRT4530_87374C.1
tagatattcaccagtgggagacagaggaatagaaacaatatccactagactcaacgtggacggccaggacccggatggagctgcatgcgcatgtgtgtcngtttgactggatgaatgataccgaattgactgaccaattgggcatatggacttat

SEQ ID NO: 88533 - DNA, 4098 bp, Oryza sativa
  Clone ID: PAT_MRT4530_87375C.1
atggctaccagccccagtgccctgcacatgcaggcggttgccttaggcgccgccgtgtttctcctctcctgccttgcgtcggctcagcagccgccggcgccgggctgcctcgacaagtgcggggacatcaacatcacctatcccttcggcgtcggcggcgcccattgcttccgcgataaaagcttccagctcgagtgcaacgtcgtcgtcaacaattcccatccacgcctcatcatgcctgcctataatcagcagctgctcagcctgtcccccgacggcgaggcgctcgccgccctcgacatccaacatgaggcctactactacaactgcaacgcgagccatcccaccgccagcgccagcagccagccgaacaacatgacgtttgcgaccctcaacaaaagcactgtctaccgcttccccgtgtccacgtaccgcttcaacgccaccaccaacagctacgtcgtgcccgtcgcgctggactgggccatccgggacgtccacaactgcagcgccgccaagctcaacgccaccaactacgcgtgccggagcgccaacagcaaatgctccgacaccaccgatggcgccgggtaccggtgcagatgttccgggggctacgagggcaacccctacctccatgccggatgccaaggattaaccacgggatcaattattggtatcggagttggcagtggcgctgggctattggtcatggcactcggtgcagcctttttaacacgtaacattaagaatcggaaagcaagaatactgagacagaaattcttcaaacagaaccgtgggcatttgttggaacaattggtatctcaaaacgctgatattgctgaaagaatgatcatccccttggcagaactggagaaggcaacaaacaattttgatgaatcacgggagcttggaggagggggacatggcaccgtgtataaagggattttatcggatcttcatgttgttgcaatcaaaaaatcaaaagttgcagtccaaagggagattgatgaattcataaacgaggtagccattctctcacaaatcaaccatcgtaatgtggtcaaactttttggatgttgcctcgagacagaagtaccattgttggtctatgaattcatatcaaatggtaccctttacgaccatcttcatgtggaaggacaaccatcattgccatgggaatataggctcagaattgcaaccgaaaccgctagagcacttgcctaccttcactcggcagtatcgttccctataatccacagggatatcaagtcccataacatcctattagatgtctcactaacaacaaaagtgtcagattttggagcttcaaggtgcattcctgctgaacaaaatggggtcacaaccgctattcaaggaacactaggatacctagaccccatgtactactacacaggacgtctcacagagaaaagtgatgtttttagcttcggtgttgttctaatagagctacttaccaggaagaaaccatactcatacagatcgcctcaggatgatagtcttgttgcacatttcactgccctactcacacatgacaacttgagtgacatacttgatcctcaggtgaaggaagagggaggcaaagaggtgaatgaagtagccgtgttagccgtggcatgtgtaaagttgaaagcagatgaacgaccgactatgaggcaggtggagatgacgcttgaaactgttcgatcatcgttgctgcggcaagaactggtacctagtgtggccgcggaagaatccaaggagaaacatgtctcatggagctatccgtcatatcggctgattctcgctttagagtttatgtcaatatcggctaaatcgccttactatattagattagctaagccggcatccaagcaagcaagccgaacaacgtacgaggtgagagctaagatgtcagaaatggcggtcgccttagctatattgctcgtcggccttgcgccggcgacaccattgtcgtcggctcagcagccgccgggatgcccctcaacgtgcgggaacatcagcatcccctaccccttcggcatcggcgccggctgcgcccgcgacgagggcttccagctcgagtgcaaccacacctcctcacccccactcctcatcgtgtccaactctaccggcggccggcaccggcaacagctgctgagcctgtccctcgccgacggcgaggcccgcaccttcctcaccgcgaaacggcggtgctacaacagcagcacgggggacatggtgagcgagaacgatcagaacgccaccgagatgtccctctccggcacgccctaccgtttctccaggtcgaggaaccgcctcgtcgcgctcggctgccccaacctcgcctacctggtcgacggcaggggctcctacatcagcagctgcacgtccatctgccggacgccggagtcggtcgccgccggctccacggtgggcttcaccggcgaggggtgctgccagagcagcataccctacagcgtcgacgtctacaagcccgacatcatcggcttcaagcaaggccaagctggggactccgttctgctgaacagcacggcggcttcttccatcttgcagagcagcacggtttgccggtacatgtacctggcggaggacaggtggatcgacgccgcgtaccgcgacggcgccgtcgacttcaaccgcaccgacgacttcgccgtgcacgtcgtgctcgactgggccgtccggaacgccggcaactgcagcgccgccaggcgcaacctcgccgcggccaactacgcgtgccggagcgccgacagcgtgtgcgtcgacaccggtgacggcgacgggtaccggtgcaactgctccaagggctacgagggcaacccctaccacgatggcgggtgcaaagctaatttcattcgatttgggcgatccgcgaagacatcaacgagtgcgagcgggcaaaggagtacccgtgcttcggcgtgtgcatcaacacgctgggatcgtaccagtgcagctgcccgccgggtactagtggcaacgcgaccattcaaactggctgcgttaaaactaatcaagttggtatctcaaaaggctgatattgctgaaaggatgatcatccctttggcagaactggagaaggccacaaacaattttgatgaatcgcgtaagcttggaggaggagggcatggcactgtgtacaaagggattttatcggatcttcacgttgttgcgatcaagaaatcaaaggtagcagtccaaagggagattgatgagttcataaacgaggtagccattctctcacaaatcaaccatcgtaatgtggtcaaactttttggatgttgcctcgagacagaagtgccattgttggtctatgaatttatatcaaatggtaccctttatgaccatcttcatgttgaaggaccaacatcattgccatgggaatataggcttagaattacaaccgaaaccgctagagcacttgcctaccttcactcggcagtgtcattccctataatccacagggatatcaagtcccataacatcttattagatggctcgctaacaacaaaagtgtcagactttggagcttcaaggtgtattcctgctgaacaaaatggggtcacaaccgcaattcaaggaacactaggatacctagaccccatgtactactacacaggacgtctcacagagaaaagtgatgtttttagtttcggtgttgttctaatagagctacttaccaggaagaaaccatactcatatagatcgcctgaggatgatagtcttgttgcacatttcactgccctactcacacatggcaacttgggtgacatacttgatcctcagatgaatgaagagggaggtaaagaggttaaagaagtagccatgttagccgtggcatgtgtcaagttgaaagcagatgaacgacctactatgaggcaggtggagatgacacttgaaactattcgatcgtcatcactacaacaagaagtggtacctagtgtggccgcggaggaatccaaggagaaacatgtctcatggagctatccggtatgtgagggcacaagcatagagtcgagtagacaatatagctatgaggaagagaatttattgtcatcgaggtaccctcgatag

SEQ ID NO: 88534 - DNA, 702 bp, Oryza sativa
  Clone ID: PAT_MRT4530_87376C.1
atggcgatggagcaggtgatggtggaggggttggcgtcgttcttggtggtgttctggtcgtgcgtggcggcgctgatgcaggagatgtacgggacgctgacgttcccgatggtgtgcctggtggtggcgatgacggtggcgttcgttctcagctggctcggcccggcgcacttcaacccggccgtcaccatcaccttcgccgcctaccgccgcttcccggtctggcccaagctgccgctctacgtcgccgcccagctcgccggctcgctcctcgcctgcctctccgtcaacgccgtcatgaggccgcgccacgaccacttctacggcacggcgcccgtcgtcgtccacggcacccgcctccccttcctcatggagttcctcgcctccgccgtcctcatgatcgtcatcgccaccgtcgccaccgacggcacagcggggaagacggtgggagggatcgccatcggagcggcggtgggagggctggggctggtgatcgggccggtgtcgggagggtcgatgaacccggcgaggacgctggggccggcgatcgtgctgggcaggtacgacggcgtgtggatctacgtggtggcgcccgtcgccgggatgctggtcggcgcgctctgcaaccgcgccgtcaggctctcccaccgcatcgtcgccttcctctgcggcacctctgttgggatcgccggctcgccctag

SEQ ID NO: 88535 - DNA, 1800 bp, Oryza sativa
  Clone ID: PAT_MRT4530_87377C.1
atggagtcggagtcgaggctgtgttcatatggagacaggcgtgatgggctaaggcgacgtgcgacggactcaccaaccatatggcatgccaaggggcgacgagcacctcgagcttcctactctacggccgccgcgaactgccgggcgctagggtttcgggttcctcgacctctcgccgccgtcgtcccgcgcgcttggaggtcggcctgctcgacggttgtcgccatgatcatccccaagaagaaccggaatgagatctgcaagtacctcttccaagagggggttttgtacgccaagaaggactacaatttggcaaaacacccacagattgatgtgccaaaccttcaggtcatcaagctcatgcagagcttcaagtccaaggagtatgtcagggagaccttctcctggcagtactactactggtacctcactaatgatggcattgagcacctgaggaattaccttaacttgccgtctgagattgtacctgctacactcaagaagtctgcaaggccaccaggccgcccatttggctctggcccccctggtgatcgcccaaggggcccacctcggttcgaaggggacagaccaaggtttggagaccgggatggctaccgtggtggacctcgtggtgcgcctggtgattttggtggtgagaagggtggtgctcctgcagaattccagccatcattcaggatctccaccccctcggctccggctcactcgcctctggccgacgaggagggccacgggcggagcgaagcgaagcggcggacgggcgagcgaggcgggaggggcggacccagcagcctctcctacggtgactacaacgattggtggacgtgggctgacccagttcccggcatctgctgcggcggcgacagcgaagttgccgaggatggcatcacgtgcgacttcctgctcaagctgctccgggcggggagcatggtgggcgccgacgcggctctgctgcaggagctggaatccagggcgctgcatacctcgcctagtcagctctcgaggccgggctacggccgactgacttcgaggagatctcgcccgcgccgtgcctgccagcgaccgatgtccttgactcgccgtcggttccagccacaaccgcctagtttgccaaacatttatgtggcatcaacatctatcttggaagttgaagctatagataaacattatcaacaacaaaagcaggatgtatcttctcaaaaacaatggaaaaagatttggatacatattggtatgagcagacagtcctcaatccctgcactgcacaactgcattgccctttgcagggttgagttcattgataacctggaatcgacattgattggaggtgccttgacgtcctagaggaagagccttacgatctatattttcttgtattttggcctgagaaaaaaaatctgtacaatcatgttagtgggagtgctagctaaaaatagcggaaaaaaagctggatagaatctgactcgggatagaatctgactcctgaaagctggagtaggaaacagtgtgggggaaccagcctgactcgacgaaagaaaagcgggatataatctaactcggggtagaatctgactcctgacgtcggctgggcaaattccctgacgtgggtatattcctgtgttctattttgaacctgatttgtgcgtgaacctgaacctagactcatgtgttattttttgttttttatttgttcctggactcctgtgcttttgaacctgatttgtaagtgaacctgaacctggactcctatgttttttttgttttttatttgttcttgaactg

SEQ ID NO: 88536 - DNA, 504 bp, Oryza sativa
  Clone ID: PAT_MRT4530_87378C.1
ccgtgcctgccagcgaccgatgtccttgactcgccgtcggttccagccacaaccgcctagcatggaagcacaccagataagcacatggattttgttgggctattgtgctgtaacacaagtttgccaaacatttatgtggcatcaacatctatcttggaagttgaagctatagataaacattatcaacaacaaaagcaggatgtatcttctcaaaaacaatggaaaaagatttggatacatattggtatgagcagacagtcctcaatccctgcactgcacaactgcattgccctttgcagggttgagttcattgataacctggaatcgacattgattggaggtgccttgacgtcctagaggaagagccttacgatctatattttcttgtattttggcctgagaaaaaaaatctgtacaatcatgttagtgggagtgctagctaaaaatagcggaaaaaaagctggatagaatctgacttgggatagaatctgactcctgaaagct

SEQ ID NO: 88537 - DNA, 550 bp, Oryza sativa
  unsure (1)..(550): unsure at all n locations
  Clone ID: PAT_MRT4530_87379C.1
cggggtcattgactggccttggagctccaccgccgtggcggccgctctagaactagtggatcccccgggctgcaggaattcggcacgagaattcttgagctcaatcagcaacaacatctatctccttcttgcttagttaagtccttcgccctcccaagaagaagaagatgtcttgctggcgggcggcaactgcggctgcggcagcgggtggcctattgccggcggcgggctgccggcggaatgccaaaaatgtttcccctgattgttggaaggcccacagcccacccacccaagaaaccttccggttcctccgcctggctccctttcccaacaaagggggaaactccttggaaaggaaattgggaaaaattgggggggtggaaaaaaaccgggggaaaaaaaccggggcggggtttccggggttttgccaacaccccttgggccaattttttttgggccccccaattttggccaacggggttggctccctgggcttggcccccctggggaaactgggaaattctttttctttcctttcctttnccccccc

SEQ ID NO: 88538 - DNA, 407 bp, Oryza sativa
  Clone ID: PAT_MRT4530_8737C.1
gtctctcgatctagtgccgatgcagaatatcgtgcagtagcacatgctattgccaagtgttgatggcttcgacaacttcttctcgaactacatattcctcttgcttcggctaccgtcgtttagtgcgacaatgttaacactgtctatatgaccgctaatccagttaatcatcgtcgaacgaagcatattgagattgacattaattttgtttgagagaaggttgctttggaacaagtttgggttttacacattccgtcctcccatcagtttgctgatatcatgatcaaaggcttgcctagttcagttattcactaagtttaggtccagtctttgcgttcgtgacactcccgcttcgactacgggcaggtattagaattagtttagatctgtatagcctagatatctat

SEQ ID NO: 88539 - DNA, 369 bp, Oryza sativa
  Clone ID: PAT_MRT4530_87380C.1
atggatgtaattggagtggacgagatcgacgacgtgggtggaggcaaggggccggagggaggcggccggggaagggcgcagctaaagccggcctaccggccctgcgtgcgcaactgcgcaggcgtgcgtggacaagggacccgaccgccgagcgcgacgggccgctccgtgctgcgacctgcgatgcgattgggcagcggcagcggcagcggcaggggtgacgaagacagacgggcgtttggtttgctgcaagcccacttgcgcctgccgactgattgccgcctttttgctctgcacgcacgccgcaccgcccagcgggttctcgtccctgctacgagcgtcgttcggttgcgaatcaacggttgctag

SEQ ID NO: 88540 - DNA, 332 bp, Oryza sativa
  Clone ID: PAT_MRT4530_87381C.1
ttttgtggttttttttttttttggggtttttatttttttttttattgttttttttttccctttaacattttcaacaacaacatctactaaaatgaagcctgcagatgcaaacagcaataaccaaaccaaaacaaaaccaaaaaaaaaaaggaaaaatgacaaccatggaaacccagagtaccccagacgccgaaaaaaaaaaaaagaaccgcaggggggcaaaggaggaagagaaagccgtgtttgaggaatcggcaactcgcaggtcacattgtttatggtaaacaccaaactccaaaggggaacgaccggaacgcagcaagaggggggga

SEQ ID NO: 88541 - DNA, 1338 bp, Oryza sativa
  Clone ID: PAT_MRT4530_87382C.1
atggggtttgtggagagcattgggaggtacagggttggccggaccatcggcgccggcacgttcgccaaggtcaggctcgccgtcgacgccgacaccggcgccaccgtcgccgtcaaggtcatcgacaagaggatggtgatccgcaacaacctcatgtaccaggtcaaaagagagatcacggccatgaagctcctcaaccaccccaacattgtcaagatatatgaggtgatcgcgacgaagacgaagatatgcctggtaatggagtatgtctcaggagggcagctatctgacaagctaagttacctcaagaggttggatgagaaggaagcgaagaagtatttctaccaattgattgatgctgtagactactgccataggagaggtgtctaccacagagatctcaagcctgagaacttgttggtagataatcaaggcaatctcaaggtatctgattttggcctcagcgtgctaaaaaagccaggacagtttctatccacatcttgtggctcaccatgctatgtagctcctgaggtgattcagcacaagagttatgatggggcagctgcagacgtctggtcttgtggtgtgatcctgtttgaacttcttgctggttatctaccatttcaagactgcagcttaacaaacttgtacagaaggatatctcgagctcagtttgtttttccacaatggctcagtgtccctcagaagaagattataatcaggatactggatccatctcctataacaagagcaaagataagcgatatttttgatgataagtggctccaagatcactgcaatccatcagcaaggattgagaatgatgatgattgtgatgttattgaagaggccagcacagacagtgatagcagtcacaacacagaggtaaaggaaactgaagagatgacggcagaaactgaccgattcattaatgccttccaattgatagcgagatgcagtgatcttgacttgtcaggtctcttccaggagcagaaaacaaagctcgcctcgccacacccagtacaggaaaccttcgacaagatcaaggttgcagccaaggatgtgagcatggcagtgaagagaatgaacagctctctggtggagattcaggacagcaaattactaccaagaagcaatcttgatcttactctgtcggccgagatcaatttggctccacctcaagatagtacgatgcacaatttactgaacggaaatgcaatgcatatgatgtcaacttgcagttctgtagaagcctatcaagcttgctcaatggtggacagctgtctgcaagctcatctgatatggagtgtgattaatcaagttatgttctatgagtag

SEQ ID NO: 88542 - DNA, 440 bp, Oryza sativa
  Clone ID: PAT_MRT4530_87383C.1
tcgccgcccaacttcacactcgacactttcactaatcacagctcacttcaggtggctcgctctcactactactcgctggcaccattcaggcggatccaatgcccgccgcctcctcgcctcttcccctcccccttctcctcctcctcctcctcgccgtcgccggcgccggcgccgcgggtgcgggggcgggggtgggggtgagcggcggggggcagctgtggtgcgtggcgaagaacaacgcggacgacgcggcgctgcaggcggcggtggactgggcgtgcggccccgcggggggtgccgactgccgcgccatccagcagggcggcgcctgctacgacccgcccgacctcctcgcccacgcctcctacgccttcaacgactacttcctccgcgccggcggcgcccccgccgcccccgccgcctgcgacttctccggcgcc

SEQ ID NO: 88543 - DNA, 2009 bp, Oryza sativa
  Clone ID: PAT_MRT4530_87384C.1
atggcaaagattgaggggacaatgagaacaacgggcagcgccggctggcgacaggagattgaggccgcacaagatcaatgcagtgtcgagcggcacggctgtccaatggtgcttggaagcgtctcaggtaaaacagagatcaacgtcagcgcttagcgggctatcgggtggctggcgtcaaacgaaacgtccgcaagaagaaagatacctcggagcacgcagtccgccatcgtcacaccatcctgctcgtcggtcgttgacgtctcagattcaagcccgggatcgtctgcaatggcgaagaagcagcggagggatccggccgcgaggttgcgtttggcgcagaagcccaaggggcgggaggagcgccctgacaaccaccaccagaggaggccgctccggctgcagcagcgggccgcgccgccagggtcctgcccctcgtgcggcgacctcgcccccacccaccagggctggcactccgggtgttcaaagcagagattgaagctggccccagggacttggtgggataagaagggtccagcccgatcgcctaaacactgcagcaactacagatgtctgcagtgaatgtggccgtgacgggaagagcagtgcggactataaagaatgtcagcggtgcacgcggagaactacatgctcaagctcgcgggcagaagcagacagagacatggtcgtctcaacttggtaaacaagaacgatttgaacgtcgtgagcaatctcgctgattgctcctccatcatttgcctgcaggaggtgtggctgggaaacgatgagctggtcgacatgtatgagaagcggctgggggacgcgaattacagtctgttcaagctcgcgcgcaccaacaatcgtggagacggtcttctgactgctgtaaacaagaactacttccatgtcttgaactaccgggagcttctcttcaatgattttggagatagagttgcacagctgttgcatgtcgaatcagccatgcctttctggcagaaccgaagcagcagttgcatccagcagcagagcctcattgtgaacacccatttgctgttccctcatgaccacagcctttcaatagttcggctgaagcagggctttgtttcgtcatatgacactgctcatcagtacagtgatagcgaagaagatgcccacaagtgggtgagtcatcggaaccatagaggaaacatctgtggtgttgatttcatttggcttctaaatccaaataagtcgaggaagcccctgaaaactagctggaatgaagctgtctttggtatcatcaagtatcttctcctccaagtagcgtccctttcagaggagaatgcatttgcactcctcaaggctgacagtcctgatgatcagatcacatattcaagcttctgccaggcactttgtcagttagggatggtccatcctgatcgcctaaactctgaagaaattaaagatctgtggagtgaagctgaccatgacggggatgatattgttgactacaaagaatttcagcggtgcatctggagccctacatgctgcagccaagaggaggaggatgataccgaaatcgacatctccgatggaagccttgtcacgtttgaggcgaacgatgaagcctttggctttactgtgaaggaagctgttctcttccccccagaagtagagaagggcatgtggcctgagaactatagcctttcagatcatgctccccttactgtggtattctcccctgtaagaatgccttgttctccacgcacccctcgaaccccctagccatcaattgtcaatacttgcgtgcatacaggaaaaaagaagccttgtacagcattagggtatactttcagaaatagtgagatatacagcagatccagagtttaggtacaaaatggagtaacatagggcgactgaatagttttctttccttttttttgtttattcgttcgccttgagttgctgtctgttgtatgtatctaaacatggttccatgttcataaatgtaaattttgctctgtttttgt

SEQ ID NO: 88544 - DNA, 472 bp, Oryza sativa
  Clone ID: PAT_MRT4530_87385C.1
cacgaggcctgggagatctgcttaactccaaaaaatatttattgaaaagtgatatatgtatacttttatgaaagtatttttcaagacaaatctattctgtcagggttacggataaggtataccctctattcttggatgtacattgtatactgacacggtgtacccgcgcgtatacggatagtttccgtatacattaagaaaatatgtcacgtggtagatatggtatctatgaacggaaagagttctactcgaacaatattgggtctttaccatatcgtgagtggtctgatatctcctagttctacttgaagatcaactgacccgcggtatataaggaacccccgggcaggacctaagggatcgaatctcacggccaacacacccaccacggcctacgaagccggagcgcacaggagccaagtcgccgggagatctagtcggaccaattcgactacgatctcgtcggtatcat

SEQ ID NO: 88545 - DNA, 351 bp, Oryza sativa
  Clone ID: PAT_MRT4530_87386C.1
ttgcttttcttcagtgtcgaatactctcttctcctcgggcccaccaccaccaccgtagcaatggcgggcaacgggccgaacaacaaggaggacccgctcaactggggcgcggcggaggccgatatggctcggcaggcacctggacgaggtgaagcgcatggtggcgcagattcgcgagccgatggtcaagatccagggcagccaccctccgcgtcgggcaggtggccgccgtccgctaagccaaggacgccggctgggttgccgtcgagctccactagcaggcccgcccccacctcaaggccaagatcgagtggatacagaactgcatcgtccacagcggaaacatctaca

SEQ ID NO: 88546 - DNA, 308 bp, Oryza sativa
  Clone ID: PAT_MRT4530_87387C.1
aagcttaaacacagaagaaaaccatctttatttatgttgaatcacaagaacaaaacatcaggccgtgcttacaacaattgtaacgtacacaccgacacactcagaaaaattaaacgagcaaattaaatggcacaaagtgaatgggcgatcaagcaacgaaatcaacatgggctttcaactatttgtcactcttacgaatggtgcttaacgatttaccactagacccatacgtcatagacacatgaggacccacatgttatagacagtgaggggtaaatcgttaattgtcatatcataagagtgacaaa

SEQ ID NO: 88547 - DNA, 777 bp, Oryza sativa
  unsure (1)..(777): unsure at all n locations
  Clone ID: PAT_MRT4530_87388C.1
ctttctccttcccctgctttgcggcgcgccagccaatgaccggattcccctcccagtcccagcgatggatcagcgcaagggcagcggcagcgacgccaacggcggcctggcggaggcgacggcgtctaggctgaggttcgaggaccccgacgagggcatggaggagaaccccgccgccgccgccgccaccgtcagggcggaggaggaagggggagaggngantanncactgactctttcaggacatcgacataactaatggaggtaagagttatgaggtattaaaggcctgagattcatggaaaaacatatcctcgggcaacatgttcattaatgtaccaatgtgcttgatagaatcccactgcaaggaaatttgtattgttctgatcaaggcacaagtacaggagaaaattgacgtatttttggatatgcaagcactgggcattcaaataagatctttttgtcatgctttctattttctatttaactactggagtataacgtctattttcccctgagccaaaatacagatgaattgttctgcagagtgtaaaattgggcacaaaaatgctgagtaattgcaccataaatcaataaatcactacgtacttatacagattggagctgtttattttccttccactcaggcttcttgctgttggtgcaaatggacttgcaatcaaatcaaatgccctgtcatgagaaggaagaggtggcctggccagccgaggtcgcgaccgatgtgcttgcaatcagcggcaaagtggaagctagagca

SEQ ID NO: 88548 - DNA, 242 bp, Oryza sativa
  Clone ID: PAT_MRT4530_87389C.1
gggggggtggttttgggggacactcgggttttggtgcggttcgggccggagtcccgggtggaccccgcggccgcctggctctgctctggcgccctcttcgctgcccggcggttattcagttcacaggagcggcagtcgcgagatacttggccaccagccgagacggccttcctcgaggtcggcctctcactcggcggcgagctcctggccgtgcgcatggcgagcacgcctcgtcagggggg

SEQ ID NO: 88549 - DNA, 720 bp, Oryza sativa
  Clone ID: PAT_MRT4530_8738C.1
atggccgccaccaccaccaacggcgtgccctcccggcggcggcggcggccgcacgtcctcgtcctccccttgccgtcgcggggccacctcctgccgctcctcgacttcgcccaccgcctctccacccgccacggcgtcgccctcaccgtcgccgtcacggcctccgacctccccctcctctccgccttcctcgcatccacccccctcgccgccgccctcccgttccatctccccgacgcctccctcccggagaactccaaccacgcgctcctcgccgtccatctctccggcatccgcgcgccgctcctctcctgggcgcggtctcgcccggacgatccccccaccgtcgtcgtctccgacttcttcctcgggtgggcgcagctcctcgccgacgacctcggcgtcccgcgggtcgtgttctacgccagcggcgcgttcgccgtcgccgcgctcgagcagctctggaatggcgcgctgccgctggaccccaagatttcggtcgtcctcgacacgctccccgggtcgccggctttcccgtacgagcacgtgccgtcggtggtgaggagctacgtcgcgggcgatccggattgggaggtcgcgcttgaaggcttccgcctcaacgccagagcttggggcgccgtggtgaattcgttcgacgagatggagcgcgagttcttggagtggctcaaacggttcttcggccatggccgcgtgtgggcg

SEQ ID NO: 88550 - DNA, 495 bp, Oryza sativa
  unsure (1)..(495): unsure at all n locations
  Clone ID: PAT_MRT4530_87390C.1
gacgggtttttggtgtaaatgttagaatgtttctcgngtgtaaattgattcccacgcattgctatataatcttggccaatggtttttagtgcctgttttcaaatttggttagctgtcagtcaggaggtgcatgctattaaatttacttttgccgatgcgaaactgtccattttcagtttttgaattcataaaactccatactagcttgaagtatacatgtatatattagcaatactagctttcttccaagctaaccattagttgttagagaagaaggcaacgctcaaaatgtcctttgcatgtttgttctgcagacacttgtctgtaaatttgaaattaattaagcgggtttggataagctgcttacttttaatatgtatagacttcaaatatcgcctgaataggtttggataagcagtgtggatttgcgtggtcatcctgaaatgtcagaaggtgttgaatgcttaataaggtggatattgactctattatatg

SEQ ID NO: 88551 - DNA, 803 bp, Oryza sativa
  Clone ID: PAT_MRT4530_87391C.1
atgacgaggacacagcagcataggaagctggacaaggcatttcagagatcacatccatttcaaggttggagaagagcagtaaacagggacaccacatcgtcgtcactcgcgtctgcggcgatgagcagcaacaagaaggagctggaagccctcccaatcgtcgacgccggcgaggttcgtgagctcatgagctccggccaccattacctcgatgtcaggcttgggaaggattttgacaaggcgcatgctgacggtgctcgcaacatttcctactacctctcagtgactcccagtgggaaggagaagaacccacactttgtagatgaagtggcttcactcttcggcaaggatgagcacctgattgtggcttgcaacacaggtgtgcgatccaggctcgcgactaaggaccttttggacgcgggattcaagaatgtgaggaacctgaaaggtggttaccaatcatttctccgaagtgaaagccagcaacctgcagctcatcaacagtaattatcagctgcagttcccctgctcggtgctcgctatccgggagatggaaaatcgttttcttcttatgcataatttcaatggtcgtgaagacgaataaatcaggatcagttgaatccaagctttgcagtgtgtacggtttagcaagaaaatctcataatgtcatcaatcaataaaccttcagaaaatctttaagaagtgttgccatcagtgaggctaatgccatgtcaactgcttctgttgtactcatctgccgctatattatattcagtaacttgaccttaattttattccatttt

SEQ ID NO: 88552 - DNA, 513 bp, Oryza sativa
  Clone ID: PAT_MRT4530_87392C.1
atgggtaagaaactgacgtcgtcgtccttccgccgtgtctctagaatgtactcatgggctgtctggctggctgagatgggggcccaaactgatcgaggtcaggaaggccgttttgttgcccgaaatgcgaggggggcccaaatgatgagaggatgtcagaaatggcctttctccgactacaatcctcccccagacaacggccatggtcacacagcagctcctgaggtacgagttgaaccatacctcgcgacctcggagcgcctccacggcccggtccctcttcacttccaatatagtcctctcaagttcggcgacatcgaacttcgtcttccagtactggatgcgatggtcgcgatcagcaagcgcactttcgagcggcacatacggctcaagctcaagtgccggaacgactataggcaattcaggctgcccgcgctactggacatcctcgacatcggcatctctacaaacaacaaacaaagtacccggaatcaaaacgccaaagaaaactaa

SEQ ID NO: 88553 - DNA, 373 bp, Oryza sativa
  Clone ID: PAT_MRT4530_87393C.1
gggaagcccactttcacttaattcactgcacttttcctggcccttcattaccccctaattaccaagccccctggacacccccccaacacaaaacaggtttaccggcccaaattatctgcaagaaccggttaatctcttcaaccgggggggcaacaaagcgggggccccaactggagggccccctcaccccttcctaaataacagccctaattaaataaatcccctatggaaaaaaaaagggggggcccctttgaccccttggaaacgagaactcccaagctcaccccttccgggggggcttttccggccgccgccgccgccgaaaccggtggaaaaagcggggctgacagagacccccccccatgctgaccca

SEQ ID NO: 88554 - DNA, 1143 bp, Oryza sativa
  Clone ID: PAT_MRT4530_87394C.1
atggattccacggcctgcctccgcctcccgttcctccccgcccggacccgcccctcctcctcctcctcgtcgtctccccgacgcgccgctcgcgcgtcctccatcaaatgctgcaccgccgcctccgacgccggtgccagttcggcctccatctcttccgcgtcgccgcggcggccggacgtggtgaacggcgtggggcccgccggcgtagacggcctcgcgggtccgcccgtgcccgtaccggacttacccgccttcgcctctcactatctccactgtctgccatgccctctcaccagcgccgacctgatgggcgtcagcggggaggggctcaaggttgcctaccagggttgccctggagcgtacagcgaggcggcagcgaagaaggcgtacccaaattgccagactgtgccctgtgagcacttcgatactgcattcaaggctgttgaaaactggttagctgacagggcagtattgccacttgagaattcattgggtggtagcatacataggaactttgaccttttacttcgtcatagattgcacattgttggagaggctcttgcacaatgtgagcacacattgacagagttcggaattgaacatagagaagctgttgatgatactgctggtgcagcaaagactgtagcagaacaaaatctccaagataccggtgcgattgccagttcactggcagctgaactttatggactgaatgttcttgctgaaaatattcaggatgacaaagataatgttacccgttttatgatgctggctcgagaaccaattatacctcgcaccgataaaccattcaagactagcatagtcttttcacttgaagaaggacctgggcaactctttaaggcacttggggtgtttgcactgagggaaatcaacctaaccaagatagaaagccgcccacacaagaaaaggcctcttcgtataactgacgacagcttttccacaccgtcaaagcagtttgactacctcttctatatggaccttgaggcatcaatggctgatccaaaaactcagaatgctcttggaaatttgaaggattaccagggatggattgagcgtgggctgtcaatttcacagcgagttgggaagtcatcaataatttctagactgatgctaatttga

SEQ ID NO: 88555 - DNA, 2929 bp, Oryza sativa
  Clone ID: PAT_MRT4530_87395C.1
atggcgagccacggcgccggggtggtggctgctggatccgatgccgctcctgccgaggtcagcattgtggggcagacaaatccatctacttatccacctttagctttagggcatcattcatggtcctcttcaactggggcagctacagtcccgtggagctatccagtgaacaatcaaagccaagatacagtttactatgatccacaaagggatgtttcggtttcgggagacaatcagagtgtggcaagcagtgcacctcataatgctcagccaactatgggcacagaaaatgcgactcattctcacatgccttactcaagttcacttcaacatgggtacactgctgcagaatatgcaaactattattatagttacccacaaactacaaatggttcttctgtccagcaaggaggaacaaatcaacattcaggtgcagctcatcagcctcttacttcatttcagaattcagagtcttacgttggtcccacaagtaacacatattacaatgctggtggtcatcagactgctccaggatatggaactagcaatagctattatcagaacagcacctggaatggtggaagctttgaaaataattatgctcagtcatatcagaactacccgtcatccaataccaacacagtacagcattccatttcagtgcctaccaattctttctcataccaacagcagtacaaccaatggccatactattacaatcacaccgtgccaaatcctgctggtgatccagtcgggaacagtaactcaattgttaacactacttctagctactcctatcccagtatccagccacctcctccaggaactacatcatggaaaagtaattcaagttcttctattgcgcctcctattcaggcttcaggtggtccagggcctcaagatcaatatatcaaccaggcgcacgctccggtgttggaaaaccagtatgctggccaggttcctcgaattgctccaggtttttctatggtaataccaaagagcgagaagaaaattttaggtgctgatttgtcaaagaagcctgcttatgttagtgtttccatgagatcactccctttttcattacataattatgctacgaggaatctcaactgttgcaaggatgaggcccagaaggctgcttgccagagtatgatagaagagataaaaaacagcgccattgctgatggaacccttcttactaagaattgggacactgagccactgcttcctttggtacaaaatgttgcaaccattccagaaacaagtgcaaacaattcaagtccctccttgtcgacatctaccaataggagacgccaaaaaagtaggtgggagcctgttgtggaggaaaaggttacagataaggtggaaccggtaaaagggttggtgaatggtaccacccacaataatttggaagccaaaaacagaatgagtaataactgggattccagaaaatttttccagtctcatcatgcgactgcaaacaaagtcagtcagcggcctgccaagaagcaaaagatcagcagttactcagatcaaatgcaaaatggaaatgcttcaagtgatagtgataaggagcaggatctaaccaaatattatgccagtgcaaccgcactagcaaattcacctgaggagaagaagcgcagggagcataggtcaaagcgttttgagaagaaccagaattcatcatctaaatcgaggaattctgcagcaagtaaagatgtaatggctaatatacatgcacgaagagctgtttcagctcttcttgccagaagctgtgaagatggcactaccttggctgtggaggatatggattgggatgcattgacagtaaaggggacatgccaagaaattgagaaacgatatctccggcttacatcagcacctgatcctgccacagtaagaccggagcatgtcttggagaaggccctttccatggttgaaacatctcaaaagaattatctttataaatgtgatcaactgaagtctattcgccaagatctcacagttcagagaatccagaatgaacttactgtcaaggtttatgaaactcatgcacgtttagcaatgcaggcaggtgacctacctgaatataaccagtgccagtcacaactgaagaggctatatgcagagggaatcaagggctgttactttgaattctctgcgtacaatttactctgtgtcatgttgcactctaataataaacgagacttgctgtcatcattggcaaggttatcgaaacaagccaaacaagatgaagctgtcaagcatgcccttgcagttcattctgctgtttcatctggaaactatgtcctatttttcaaactatacaagcaggcaccgaacttgaattcttgcctcatggatctatatgtggagcgaatgcgttttgaggctgtaaaatgcatgtctaaatcatatcgcccgactataccagtgggatatgttgcacaaattttgggattctcaagaattgatagtgaagcatcagaagagtgtgaaatgtggttaaaagctcatggtgctattctttcaatagacaacagcagagacttgcaattagacacgaaggcttgtactactacactttacatgccagagccagagaatgccgtcgcacatggtgatgcctcacttgcagctaatgactttttggcgcggacatagcgactaaaattgctaccatgatagataagtccagtatgtctgtgccgatctgtgagcctgtgatgtactgcaaatgtctccagtacacatcgagccagttatggagctcaatgaaatggagcagcagatgaagggcattatgctttcggagctattgagttggagcaaatatgacagtgctgactactgagtgctcaacttgttcccgggtgtttgcacctgatgcaacaactgcaatgctcaatgcatcggtgaggcatatact

SEQ ID NO: 88556 - DNA, 1696 bp, Oryza sativa
  Clone ID: PAT_MRT4530_87396C.1
gtcaacaccctcgcacctcaagaaactggaggaccgcagcaagccgatgatcttcgtcggctatgaaccaggctcaaaggcgtacagggcctacgatcccgtggcgcggcgggtccatgtctcgcgtgacgtcatgttcgacgaggtagcccagtggaactggaatggcgaactgggcgcccctgacgacaccgactttgtcatcgagtacacctccgtgttccagcctggcacaatgccagtgacgcacgcggacgcgggggagctcgcctcgccgatcacgggggggtcctcacaagctgccccgagccctgtgacaccatgtcgaacacctgtagtgcgtgctgctgcatcggaggttgagttcgtttcgcccccacctgggggagaagacgacctcaacgcggaccacgacgatgctccacttcgacacaggcgccttgatgatttgctggggccggctacaccgccgggtctcgcagtgcgggatgtccaggaggaactgatgatggtcagtagcgaggaacccacctcgtttgctcaagcagcaaaggaggaggcatggcggcgtgctatgctcgacgagatcgcctcgatcgaagagaaccgcacctggcggcttgtcgacttgccggctggacaccggcctattgggctcaagtgggttttcaagctcaagaaggatgcacagggagtcgtcgtcaagcacaaagcgcgcctggtggctaaaaggtatgtgcaatgtgccagagtggacttcgatgaggttttcactcctgtggctcagctcgactctgttcgcttgcttcttgcccttgccgcacaggagggatggatggcgcaccacatggatgtaaaatcggcttttctaaatggggagctcacagaggaagtgtatgttgtccagccgccgggatttgaagtggaaggagcagaggacaaggtgtataggcttgacaaagcgatgtatgggctgcgccaagcccctcgagcctggaacactaagcttgatgccactttgaagaaaatcggcttcgagcaaagcccgctggagcatggtttatatgcacgtggtactggccgcgggaggctgctggtgggtgtgtatgtggacgatttggtgatcgttggcggagatgaagacacgatcactgtgttcaagaggcagatgatggaggaattcaagatgagcgatcttggctctttaagtttttatttagggatccaagtgcatcaagaaggaggtgtcatcactctgaaccaggcagcctatgcggcgcagatcgtggaaaaggcaaggcttgaaggttgcaatccctgttctacgcccatggaaccccggcttaaactcagcaaggagagcatggcgtcgctggtcgacgccaccgagtacaaaagcctggtgggtagtctccgttacttggtgaattctagaccagatttggcgtttgctgtgggctatgtgagccgtttcatggagaagccgacggtcgagcacatggtggcagtgaagcgcattgtcaggtatgtggcaggaacaattcagtttggatgccgctacatgagaggaggagaagggaagctgcacggctacagcgacagtgacatggccagagatcttgatacccgtaagagcactacaggggtcttgttcttccttggcaacaatcctgttaggtggcaatctcagaagtag

SEQ ID NO: 88557 - DNA, 1498 bp, Oryza sativa
  Clone ID: PAT_MRT4530_87397C.1
gcacgagggcaggaatcaccaaatccagagcagcaaaagagacaaacggaaccaaaaaaaaaacagggttgtgatcgatcagtggtcacacggtggcatcatggtggtggggaggccgtcgtcatcatcggtggctcgtgcggtcgtgctcctcgcggcggccatgctgctgtccacgctgagcccgtgctgctgcgcgtcggcgggcggcggcggcggcgcgcggcggcgtgagaagcagcagcagctgcacccggtgatcctgatccccggcgccggcgggaaccagctggaggcgcggctgacggaggagtacgccccgtcgagcctcgcgtgccgcgtgtggcccgtggtgcgcggccgcggcgggtggttccgcctctggttcgacccgtccgtcgtcgtggcgccgctcaccaggtgcttcgccgaccggatgaccctcttctacgactccgtcgccgacgactaccgcaacgctcccggcgtcgagaccagggtctccgacttcggctccacctccaccctccgctacctcgaccccaacctcaagttgctaacggggtacatgaacgtgttggcgagcacgctggagaaggcagggtacgaggaagggttcgacctgttcggcgcgccgtacgacttccggtacgggctggccgggccggggcacccgtcgcgtgtgggcagcgcgtacctggagcggctgaggaagctggtggagtcggcgtgcgcggccaacggcgggaggccggcgatcctcgtggcgcacagcctgggcgggctgtacgcgctgcagatggtggcgcggagcccccccgcgtggcgcgccgcgaacgtgaagcggctggtgacgctgtccgcgccgtggggcgggtcggtgcaggagatgctcaccttcgcgtcgggcaacaccctcggcgtgccgttcgtcgacgcgtcgctcatccgcgacgagcagcgcaccgccgagagcaacctgtggctgctgccggcgccgcgggtgttcgggaacaccacgctggtggtgtcgcggcaccacaaccggtcctactccgccaagaacatgacgcagttcctccgggacatcgggttcgccgaaggggtggagccgtaccgggagcggatacggccgctcgtcgaggtgctgccggagcccggggtgccggtgacgtgcctcgtcggcacgggcgtcgacaccgtggagagcctcgtgtacggggagggcgggttcgaggccgggccggagaaggtggtgtacggcgacggcgacgggacggtcaacctcgacagcctcgtcgggccgatcaaggcgtggtccgactcgccggagcaggtggtggaggtggtcgagctgcccgaggtgtcgcactccggcatcctcaaggacaagagcgcgctcgaccagatcttgaggatcatcgacgccatcaatctgaacgccacgacctcaagctcctccatcaatcgatcgtctcaggatgttttgtacaattag

SEQ ID NO: 88558 - DNA, 414 bp, Oryza sativa
  Clone ID: PAT_MRT4530_87398C.1
tttttggtactttaaatttttttccattccattcattattcattgtttaatcattgttttatatagttcagttgttagcagtttgttttataaaagaaaaaacctgggagcatccgtctacaaaagggagcaaaaaaaaccagctttggaaaccgcccatacacattgaaggggacaagaaaacaaaataccaccccacttctacgaaataaaggacccgaaaatgtacccaaaagaaataggattttagagaaccgagggggggcctctgcagcgccccttggcaaaaaaaaaactggcgggaaaattttgggcccttagggggcaaaaacggccatgagcaaattacctcggctggagaagaccataatggtaggggccgcttgtgttgggtaaaaatttaaaaaggagaaa

SEQ ID NO: 88559 - DNA, 477 bp, Oryza sativa
  Clone ID: PAT_MRT4530_87399C.1
cccccccgaaaacccaagagctttttattaaaaaaaaaaggaaaaaaaacccccaaaggttttccccggggggcacctattttagcccccaaaagaaagatttgaacccccccaagcccctttttttttttggttaaaacgaagcggcccctaaattaaatcgccctaaaattccggggcccccaaggggggggatcggcaacaaaaccggggggctttaggggggggccttggggagaaaccccccccccacgggaaaggggggcacccccgggaaggccccctttttggggggggaaagggctcccccccccttcaaaaacttgagcgcccccctcaatttttccttgtgggggaaaaaggaaacccccttggcgaccttgacaaggggggggccgacaaaggggtcccccgccccggggggggtaacggggttgacggaaaaaccggggacggaccccttaaaatccttgggga

SEQ ID NO: 88560 - DNA, 2448 bp, Oryza sativa
  Clone ID: PAT_MRT4530_8739C.1
atggggtacctcctcctcgcgccgtcgccggcgccgcggccgctcgcgttccggtgccgccgaggaggccgcgcgcggagaggcgcggccatcgtcgcgtcgagctcggcgtcgtcgtcgtcgtcgtccggtgatgccggcccatcccactcggcggcggcggcgggggcgtacgtgctggcgcggcggggcgtgctcctcggcgtctcggcgctcccgctcctccgcgccagggaagccgcggcggcggccgcggtggccacgcctaacagcggggatctcgcaacggtttatggcatgtcatttccccaaggatttattagaagaaagcgggttgatttcccaaggatagatcatcaagctcagacttgctacaaaactttcaagattggacgtaatactgtcatatgtagacctaatgaggctattgtcgatgagacaaaggatattcaaaagcctgatgaacctcagcctggggaaactcaggctgaatctcctctacctgaagctttgcaaccagaatcatccctgcccgtcacgcaagaacaaactcctgggaatccactttctggtcttttgaatgcaattgcagttgctgcctccggtgttcttgctggactgtatggcacttctcaacaggaaaagaaggccctggaatccgtcgtctcatctatggagagcaaactggctgaaaatgaggcagcaatctcattgatgagggaaaactacgagaaaagattgctggatcaacaaacagcacaaaagaagcaagcaatgaagtttcaggagcaggaagcctctcttttagatcagttgtcttcaacaaaaaagacggtaacttcgctaagtgaagaattcagaagggagaagacactggctgaggagcttagggaagaaatacgtcgactagagagcagtcttgcacaagctggggatgacaaagatgttcttgaagccaaactgaaggaaaagttgggtgatgtcaacattttgcaggaaaaagtaagtttgcttagccaagaaattgataataagggtatacgcatcagggaactcagttcattactttcgtcaaaggaagcagactaccgtaatctgtgctctttctctgaccaaactaaagagagtctagaacttgcagaagctaaaatacagcaactggaggaagaggttcatagaactagaaatgatctttcttctaagatatcttcaattgatttactgaatgaggaacttcaagcactgaactctgcaaagaatgaagctgaggaaaagctaagtgagttaacaaaagattatacagacctgaaggcttcttctgaagcaagagagagccgcaactctgagctactattagaaaaagataatatgatcaaacagcttgatggaaaactctctgatgcattaagtgattctagcaaagaccgtgagaacatcgctgcgctgaacaaggaattggatgcaacaaaagcaatgctagagaatgaagttgctgcagttaaaagtttaagagaatcacttcaatccacagaggaggcactgacagattccagaagtgaggtatccaaactttcagtggaacttgatgaagcaaatagaatgaaccaggacctggtgctgcaaatttctaaactccaggatgagttcaatgaaatgcaagagggccttactaacaaactaggagaggtagaatcagtatctaaagctctgtcagacgaacttgtctctgttaaggagatggttcacaagggacaggaagaacttgaagccacttctaatgagcttgcatccattgtggaagctcgtgacaacctgaagaaagaattgctcgatgtgttcaagaagttggaatccacgtcacaggagcttgttgatgaaaggaaaactgtcactactttgaatagggagcttgaggctttggtgaaacaactacagatggattctgaagcacgaaaagctcttgaagcagacctggatgaagcaacaaagtcactagacgagatgaacaggagtgcattatcactatcaaaggagctagaggaaactaattctaggaaggacactcttgaagcagagaaaaaaatgttatcaaaggctcttgctgagcaacagaagatcacaactgaagctcatgaaaacactgaggatgctcagaatcttatctctaggcttcagactgagaaggagagttttgaaatgagggctagacatcttgaagaggagttggcgttagcaaagggtgagatattgcgcctaagaaggcagattagtacaagcagatcacagaaagcaaaaactcttccaaacacaaatgcatctccagaggtcagtcaggctccagacgagcagcctgtgaatgataatcagaataccagcaaagttgctgctgggtctcaatatactgcaaagaggacgactaggagaagaaaaggtggtgcatcaacgtga

SEQ ID NO: 88561 - DNA, 580 bp, Oryza sativa
  unsure (1)..(580): unsure at all n locations
  Clone ID: PAT_MRT4530_873C.1
ctctataactagtggatcccccggctgggggattccgatattgcacagcagccccggggactgcgactgcctatacagagccagcccgtgcacgaacggcaccctctgtcgcttcgtaccagctgaaccacgatctcatccactgtcaggaggagcccgcttgcaaggacaacggccgctacgatcatttgccccaaggcacattgtacccactgcgcctgcgatccgtganncaangnntcatccnaacnctngncnccggttatacncctaccnttactattnnncngttnanancacncatattactntggaatncngntgggcccnttattgctgnnttnaacccntgcggaactaattattaattgccatgtgacataaatcgactatgcatgtanttgangtttntacatacggaggtaacggctcgattaattatagnnaaancgaacanatgcactggtgccacccatnngcttaacganctnnaggaggccttttttacattccnggatccattttttacancctcggggggggaaccccccccaatncgcnctttattagctncatcnnc

SEQ ID NO: 88562 - DNA, 510 bp, Oryza sativa
  unsure (1)..(510): unsure at all n locations
  Clone ID: PAT_MRT4530_87400C.1
catctctcttccaacctctctctctctctctcggcgtcgggatgatgccgatgccgccgtcggggcagcggcggctggagttcagcttccaggggtcgtcggcgtcggcggtgggtgggggaggaggggagttcgagagggttaggatgcggacccgctggggaacccgatggcggcgagggaaggggaggaggagtcgcggtggctgcaggcgtcgcgggtcggctcgccggagtccggcacgccgtcgccggagttctgggggcagcagcagcagcagcagctccagcggctatacccggcgtcggcggggagctcgccgtcgagggcgcaggcgatcgccgggtaccgacgcgagatgctcgacctcgtccgcggcctccccgagtcctgctacgagctctccctccgcgacaatcgtcgangtccccttcctcctcccccgccgcatcctctccctcctcctccccccaccccaccacctcccaccgccgaagccacgatcaccgc

SEQ ID NO: 88563 - DNA, 594 bp, Oryza sativa
  Clone ID: PAT_MRT4530_87401C.1
atgtctaatgaggtcgacgagccaaaaatcatgcttgtgggtaagggctctagaaaatctcttttcagctttgttcccttaagtaaatggctccaagaggcatctaatcaagacactgtttctagacacaaagatggtttgctccaagccttgccatgggttgaatctggtgagcatgaggagaaggactgtctgttcaacccgtgtactggttaccgcatgatctattggaacaggcacaaagagctgctgcagctgcagctgcacccaatgtggaaagcgcctatcagttgctgtgaacaagaaggcaatccttttgctattgacaataagaatgttggcttggcattcagccagaggatgttgtgtgtatgcctctcagatccagttgcagatgagttagatatatggaagtgggatcatgcgacggtgccctggagttcgtcagaagtgcattaccagatgtgggatgttcctagcaagttctcttcattgaaactatctatggctccatgtgacaacattgctagcccttcaagtgcttcatcaaggaataaggagctaaattatgtgagcccaaagattatgcctgtg

SEQ ID NO: 88564 - DNA, 1599 bp, Oryza sativa
  Clone ID: PAT_MRT4530_87402C.1
atggagctcaaggcgatgtacctgtacgccgccgtgctggccgtgctcctctgttcgtcggtcaacttcatccagagccccaccgacgtgctcggcccggtcgcgctcctcgagccgacgccgtcctccgcgcgggacttcggcgccgtcgtctccgacgcgccgttcgccgtcatgcggcctgagtcccccgacgacatcgcgctcctcctgggcgcgctgtcttcgacggctccgagcccgagggcgaccgttgcagcggtcggcgcgggccactcgctccacggccaggcacaggcgcgcgacggcattgtggtggagacacgcgccctgccgcgcgacgtgcacgtggtgtcggcgcgggcgcacggaggcgacgacgatgccaccgtgcgcgcgtacgccgacgtcggggccggcgcgctgtgggtggaggtgctggaggagtgcctcaagctcggcctcgcgccgccgtcgtggacggactacttgtacctcaccgtaggcgggacgctgtccaacggcggcatcagtggccaaacgttcaagcatggcccccaaatcagcaatgtcctgcagcttgaggtcgtcacaggtaaaggggaggtggtgacatgctcccccaccgagatccccgagcttttcttcgcagttctcggtgggctcggccagttcggcattataacaagggcaaggattccactccaacttgcccctcccaaggtgagatgggtgagggccttctacgacagcttcgagaccttcaccggggaccaagagctgctggtctcaatgccggagcaggtggactatgttgaggggttcatggtgctgaacgagcagtcgctgcatagctcctccgttgccttccctgctcagctcaacttcagcccggacttcggctccaagggcaggaagaaggtctactactgcatcgagttcgcagtgcacgatttccagcaagacagctccagggcagaccatgttgtgaagctggtttcagcgaagctgagttacttgaggccccacgtgtacagtgtggaggtgtcctacttcgacttcctgaacagggttaggatggaggaggagagcctgaggagccgaggactttgggacgtgcctcacccatggctcaatgtgttcgtgccaaagcacggcatcacccagttcaagggcttgctcatggacaccgtctcggcggacgacttcgagggacccatcctcgtataccctcttctcactgataagtgggacgggaacacgtcggcggtggtgccggcggcgccggacggggtgatgtacatcttcggcgtgctccggtcgaccgacccagcgcggtgcggccgcgcgtgcgtggactcgatcatggcgcggcaccgccgcgtcgccgacgaggcgtgccgtgatggcggcggcggaggccgcggcatcggcgcgaagcagtacctggcgcggcagccgtcgccggcgcgctggcgcgaccacttcggcgcgggctggggccggttcgcggcccgcaaggcccgcttcgacccgctgcacgttcttgggccgggccagggcattttcccaaggacggattccgcgggttcgatgtga

SEQ ID NO: 88565 - DNA, 792 bp, Oryza sativa
  Clone ID: PAT_MRT4530_87403C.1
atgtctaatgaggtcgacgagccaaaaatcatgcttgtgggtaagggctctagaaaatctcttttcagctttgttcccttaagtaaatggctccaagaggcatctaatcaagacactgtttctagacacaaagatggtttgctccaagccttgccatgggttgaatctggtgagcatgaggagaaggactgtctgttcaacccgtgtactggttaccgcatgatctattggaacaggcacaaagagctgctgcagctgcagctgcacccaatgtggaaagcgcctatcagttgctgtgaacaagaaggcaatccttttgctattgacaataagaatgttggcttggcattcagccagatctttgatgttatcccttgcccttcatgcattgcaatgtgggacaatgaaagtcgctgtcacgcatttgtggtcgagcttcagaggatgttgtgtgttgttctttcagatccagttgcagatgagttagatatatggaagtgggatcatggtctgtggactagagcatacacaatcaatttaaaactctggccagatttttcgcttgcgacaaatgttgtagtgcctctcgcagttgatccaatagatggaagggttctactgaatactgggaggaagcttggtttatataatccatttaatcaagcgattgaaaacttgtatgcacttgatcaggcatcacttatgactctaaagtgcagcgacggtgccctggagttcgtcagaagtgcattaccagatgtggggatgttcctagcaagttctcttcattga

SEQ ID NO: 88566 - DNA, 527 bp, Oryza sativa
  Clone ID: PAT_MRT4530_87404C.1
actagtggatccccgggctgcaggatcggcacgagggccgtcgccgtggctcccgcgcgttgacgtgtcgcggccggccggggatttcgccttcatgggaggatatgccctcatgtcatgcctctgtgccttgctaggcgtgacccgatttccaacgtttcccgtgtgctagctacctgctccacttttctagtaacaccgtaacacgcactccaggaggggaatgccgtgttgtttcacgtaaatcattcacccgtctcatggatcgctgatagctctgccatttttcttttttttgattgagatagttaagcagctcagattcactaactgtcttactgaaagctcgggtgctccagcatggtaatctaccaagactgggatgagctcactattcatcttcgggagacaaggctggcctaaatatgctacttttatgtggccccaagcaaatgctagcgtctgtttaagattcgggagaatgctgcatgcatttccgggttgtcgatttggaaacattctgctca

SEQ ID NO: 88567 - DNA, 135 bp, Oryza sativa
  Clone ID: PAT_MRT4530_87405C.1
atgtctgtcgcgtcagcggtgaacttccacaagattgcgagggagaaaactcccaacgggcgcgagctggatgcatttttctctgaggaggagatctatgacatgctcgacagaggtggacgtaggaacacatag

SEQ ID NO: 88568 - DNA, 1789 bp, Oryza sativa
  Clone ID: PAT_MRT4530_87406C.1
ggcgtcctcccccctcccgcgaccgccgccgccgctccggcgaggatgcccccgctttaggtgcatccctgcatcagggattcagtgagtttctgatgaattgaggacgaggtgaagattgatgagatggacggtaccattgccgatgctgtgggtgcgccgggtatagagaaagaggtcaatggaaagcctgcattgcctgatagcatggaggagcatgaggaagcacatgaggtgcaagccaatggtgaccattccggggagagcgatgtgatcaacccgcccgaagaggcgggcggggaatccacctcgcatcttgatggcaagaagcctcgccctgccaaggcaacccaaagtcatggtcctaaggttgtaaagtctaggagcccgaagagtggaggcgagggtcaagctaggagaagcactcctagttccactctttctaaagcaccggttgctcgagtctctcatgcagattcaagtactggatcaaagatcaatggtgactccagtgttgataggaataaagctgagaagcaagagcctcgctccagtactaaggagacatctctcgaggactcaaaggagaaaaggaaaacacaaaagccattaggccagaattcttctgtcaaaaaggatgatgagtcaaatcctgaatcacgaaaggctggaggcactcctgcctacgggttctctttcaagtgtgatgagagagctgaaaaaaggaaggagttctattcaaagctcgaggagaagattcatgccagagaaatggaaataagcaatttgcaagcaaaatcaaaggagactgaagaagctgaactcaaaatgcttaggaagagtttgaacttcaaggcaacaccaatgcccagcttctaccaggaaccaactcctccaaaggtggagttgaaaaagatccctcccacgagagctagatcaccaaagctcggtcgctccaagaacaaatctgcgggagagaccgaggaaactgtcactcccccaggacgtccggtccgtctgagcctcgacagcctcgacgaaaaggtttctcaaaacggtgtaaagaaagcaaacccatcaaatgctgtgaagaagccccagaggaagtcactcccccccagaggaagttccccacaattccatcggaggaaaccgggtccatttgattcaagtcatctgaagaacactgaactgagcacaggtaacattcaggaatcagggtcgacgacaccaaatcaacaagaaactgagtcgaacaccagcatttccgagtcgatccaagacaggattgcaacaggtgggcaagaactcgacgaacagataattgcctagagaagatcgaagagcccggtggtcaaatccttttggtccgtgatggatggtgtgctgaagctttgcccccatattgtgctttaactgtttgagtagtaactagttgccagtatttcttttttctttttctttttttttttgtgacgaaccctacctcttcttcctgtgtattgcgttgtcgcgatggcttttgttcatatatcgctagtgaggctccagttgtccttcgctgtgtctatttactcctttgctgtaagtgccctgcttcactgttatgtataatcaatcagtgagaattttgttgcaaaaaaaaaaaaaaaaagcttttgaggtgctacttgacggcttaggcagagtcagagtcattccgacaggcgattcgttctactatgacggatggaagaagtcagttaagcctgacaacctgccaacaatgtggtcaagacatgtcaactga

SEQ ID NO: 88569 - DNA, 1532 bp, Oryza sativa
  Clone ID: PAT_MRT4530_87407C.1
ccgtcgcgttgctccggtgctcgatcggtctccccgcccggccgccagacgacgcgccacatatgaagccccgctcctcgcgcgacggccataatgccgccgccgccgccgcgctcctcctcgcggcgctggtcctctccggcgacgtcctgccggcggtcgtggccggtggcgccccctcgttcaactacaaggacgcgctcaccaagtccatcatgttcctcgaggcgcagcgctccggcaagctgccgcccaccaaccgcatcaagtggcgcggcgactccggcatggaagacggcaagctcgccaacgtggacctgactggcgggtactacgacgccggcgacaacgtgaagtacgggctgccgctggcgttcacggtgacgacgctggcgtggacggcgatggcgttcgagaaggagctgaaggcggcgagggagctggagaacgtgcacgcggccatcaggtggggcaccgactacttcctcaaggcggcgaccaagaaaggaccaccttgctgggtccgcccggagaacatgcccacgccccgcaccctctaccagatcaacgacaagacccccggctccgagattgccgccgagaccgccgccgccatgaccgcctcctccatggtcttccgcaaggataagccctactcccgccgcctcctcaacaaggccaagctgctgttccagttcgccaagacgcaccagggaacctacgacggcgagtgccccttctactgctcctactccggctacaacgatgagttgctgtgggcggcgacgtggctgtacctggcgacgaagaggcaggtgtacgcggacttcatcgggcacgaggcgatctcgtcgagcgtggccgagttcagctgggacctcaagttcccgggcgcgcaggtgctcctcgcggagctcaacatgacatccagcggcggcctccagagcttcaagtcccaggccgacaacttcgtgtgcgccgtgctcccggacaccccgttccaccaggtgtccatcaccccgggcggcatgatccacctccgcgacggcgccaactcccagtacgtcaccagcacggccttcctcttcgtcgcctacagcgacatcctccgccggatcaaccagccggtgatgtgcggcgcccaggccgtgcagcccgcccgcctcctccagttcgccaagcagcagatcgactacctcctcggcgccaacccgcgcggccgctcctacgtcgtcggcttcggcgtcaacccgcccacgcagccgcaccaccgcggcgcctccaccccggtgctccccccgggctaccaggtcaactgcgggatgagcttcagcgagtggttcacccccgaccggcccaaccccaacgagctcaccggcgcgatcatgggcggccccgacggcggcgacaacttctccgacaagcgtggcaactcgtcctgcaccgagccttgcacgtacatcaactccctctccattggccccctcgccgccctcgccatccgtggcccaaacctcatcgccacccagtaa

SEQ ID NO: 88570 - DNA, 486 bp, Oryza sativa
  Clone ID: PAT_MRT4530_87408C.1
atgcgcgcgctcgctcgtctcgcctggcagggcaggcggcgcgcgtgcacgacgtacgcgtcgaatgactactccatcccgctcgccggcgtgcaccggcgatcgggagagcaggtctccggaacctctgtcttcgacgttctgcaccgggagaaggcggcaataaggtttttgggaagcgcttcgcgcgactgctccctgttcgttcgcgacggctcgccttcctcttcgctcgcgtgtttcgtgccttcgtagacgcttacaaccgcgagtagttcctaccgagcaaccgcgccgcacatccgcccttgcattgatggcggttcagcctgggtctccgccccactcactcccctcgccacatggcggtcgggcgagggcctcgaggcgaggcagcgcgaggacccgaggggtgtgacgtggcaccccgaggccccctggctgcctctgcgtcgttcgaggtgtggggggagagctaggctgtag

SEQ ID NO: 88571 - DNA, 387 bp, Oryza sativa
  Clone ID: PAT_MRT4530_87409C.1
gcgcccacgcgtacgggtacagatttatagcggtctgtatacaggatggtaagttaccatcacaaacatgcggcgtgatatgtcatatatagtgttagctaaagtgaattgactggccgtcaatgtaccacaacatgacagttaaagcctttgatggaccgaacttattgaacttgcatgacatccacctatatacagatggcaatatatctatgaggaccataccgatcgctgtttcgatcagttgcaccctactagtggcgaatggcacgctctctggctcggcacattatacgagctctatgttatggttacgcgcatcgtgaccgatccatttgcgcagatcctactggcgcgctattgctgtatttagccttactttctcgc

SEQ ID NO: 88572 - DNA, 232 bp, Oryza sativa
  Clone ID: PAT_MRT4530_8740C.1
gtcgtttcattccggttgagtgagttggtgattatctgtagggggtgaaaatggcgcaggcggtggtgccgtcgatgcagtgccagttcggtgccgttcgtttgaggcctgttttggctgcttctgcttctgtttggagtatttttatctctctgtcttttttatcttgacttaagctatgcttgatcgtgttatttttatatctttttttttctttgtttttttttttatt

SEQ ID NO: 88573 - DNA, 1906 bp, Oryza sativa
  Clone ID: PAT_MRT4530_87410C.1
atgcaggttcctgtgggttttctctccaagctctggagctttgtttccttcctgccattcttcctcttgctcctcctccttggttccatcaaagctgtgctaattggtccaattgctgccgccatcatctttttggggaattctgctgttattatcggcctgtggcctgctcatttcatatggacatactactgtgttctgaagtatgtacttgctatttctgggagccttctgggtggtataggatatggagttttcattccactaatggcaactttcgaggctgtgggtgagggtgtcgcggacaagctcacccattgttttttggatggcacggtcagtacaacagccggagcttgcacggtggtgcgtgatgctaccgatttctgcttccactcatacttctctcttatggatgagctcataagaaaattgggagataatgaaactcctcttgacatcaaactgtcttatctaccacacagcatgcttgctgttcttattgctgttcctttcgacgtattcatgataagtggagtggcattgtggaaaagcccctgcatgttgttgaaaggatggcaaaggctgtgcgaggacttggttggaagggaaggaccgtttctagaaacagtctgtgttcctttcgctggtttgtctatcatattatggccacttgctgtaattggggcagtagttgcttcatttcttagcagcttcttttttggtatgcgtgctggattaattgcttatcagatatgtactctagctgccagtaaactacttttgacagacaggcccaagtaccgaaaaaccgataggatgaataacgagactggtcagaacaatgaagtgcgcaatgctacatctccattgggagaaaagaaacaccaccataaaaccatgaaggctttgcagcgatcaaagacatttatggaagctatccagcggcttagaccaattcaaatatgggattggctcttccgatcttgtgagctgaatggaaggatattactgggtgagggattgattagtgctgaggacatggaagaatgtatcatcaaaggaaaatgcaagaaattaagcataaagttgcctgcctggtgcatccttcaatgcctgatacgatctgcaaaacatgattcgcatgctgacgatgttgaagtgacaaacttcaactggcctaaagacaaagtgtttgactggatgcttggaccacttcttgttattaaggagcaaatgaagcaattagagctaactgaagatgaggaactatgcttaaggaggctcatcatgacaaataacaatgataaaccatctgactgggacgattgtggtttcccgtcaagcgataatataaggagagctcggctgcaagcgataatcagaaggttgcaaggcattgttgtcaatttgtcgtgggtaccgagcttcaggagacgattcatcgatctggttaaggcattgtatctcgaggcggtcgaggcaggcgcgatcgacggctcaaggagcgtgaagcgcaaaatcgaggctgatgctgcttctgctcctggaagcaagtttgatgacaaagatggggagggctcatcaaagggcgcagcagcagtgggcattgatgcagtgtgatatctcctgtttgtgtacacgaaatttacctggcttccatcatgcattttggtgggcctttttttttttggtaactgcctatgcatgttaatgtactggagacatcctgtaactctgtaagagatggcagaaaagggtcctatttggctgtatggcacctccaagtctccaacttcaaatctaacttcaaaacattttggagttggatctgggattaggttaggtgctaatgtgagactttctgttcatactttgtattaagattagattattaattcccttt

SEQ ID NO: 88574 - DNA, 288 bp, Oryza sativa
  Clone ID: PAT_MRT4530_87411C.1
atgggaggaggccggtggcggcaacgtggcagagtcagcagcggtagcatccttgccctctgctcttctctttctcctaagatcaagctggaggagaggaggctgccggcggtggcagcatcagtagagggggtggtggcagcagcccccactccccttcctccctcttccagatctggcagcagcaataaagatgatggcttcggcggtgattcgtccctttgtggcttcagcgacctccaaggccaccagcgagcttgtctatcgctgctaggatcgaagaggtga

SEQ ID NO: 88575 - DNA, 1386 bp, Oryza sativa
  Clone ID: PAT_MRT4530_87412C.1
cggacgcgtgggttcaaatttatgtttttatttaggaccgtttttgttcttgccattttttcagtaggaaaaccagaagtattttaatcaatactatcatactgtattaagatttggtaatttcaagagctttcattcttatgaacatctccaaaaattgatgtatgggtgtgtttagttctttgggtgtaaagttcggttatccttcgcctgtccatggacctggctgccctgactgttccctacaggaccacggctcctccccttccagagtccgacgggaatgaagacggctcatcaggcggcggggtccacctcgccaggtgctgccgcatcgctgacccgcccagcgccaacgccggcgtgggcaccgggaggctccggattgagcctccaggcgaccttccaccccgcccgcccggcgcctcgtgcacgtgctcggttccagtgccacggcctggtcttccgccccggcgtccccaccgtcacggttcgcgttgccgcagccagtggtggaggcgtgccggcgtatgctgattctgctgcagaggctgcagcatgagagtgatcttggtagacgccctgccagaagtaggtcccacttcttgcgacggggttggcggggtcgtcctgcctcctagatcctgtccccgtcccatggacagggtgcgtttggtgtctgctattgatgtgaggaagaggacgctgcatggattaaccaagtttgaggtccagccgcgcaaccccgttcgcttggtcgacttatgcgccagttaggtatgcagggatctgtgttgtattataggcagcgcgatgttcttagtgtaatgcatcttagcacgtagatcggccaccacactgaagcgtgtcagatgttgcaacttgagcggttgtttttgataattggccgtgtttgtgcagcccaattttatgtacacggacacacatttgaaatattaaacgtagtctaataataaaacaaattacagaaagtagaggatgcacaaaagatcaggaggaatgtgatagactgctttgaaaaagcttcacttcctaacattttcatctgtaaactgcgatacgaatttattaagcctaattaatctatcattagcaaatgtttaatgcagcatcacattgtcaaatcatgacgtaattaggctcaaaggatttgtctcacaatttacatgcaaactgtgcaattgttttttcctcacatttattgttccatgtgtccgaacatttgatgtgatgtttttgatcaaaaatttttaaatctaaataaggccataaggcttaagaccaaatactcctgaaatttaacattgctaaatttcagtgggggttcaaaagtggcagcaatctctaaacattggatagaacttt

SEQ ID NO: 88576 - DNA, 1551 bp, Oryza sativa
  Clone ID: PAT_MRT4530_87413C.1
ttctttttttttttttttttttttttttacagcataacgataagtctccattttcaggtaacgagttcatcaggttctcagtagcaaacaagacacagcaaacaactgaacagcgacaaaagtccaggagttttgccttgctgcatcaaggacaaaagcgtcaggcccgcttctaagaagcgctatgtgcaaggtaaaaaagaaaaagaccaaacccggtaacggtttcccccctccgttgcaagtgtagatacttactaacggtacagtaaaaagaaggccgagcagataaaacaaaagacatatatcgtaacttctctttcatatatgtctatctctatatataagcagtgccatcagcacctcctgtacctacaacacctagtgcatcagctggcgaggtgcacggggacgcacgggagtctttgaggggctcacccttattggcaaggaacccagtatgacaccactgcagttgagagcagcagtggcactttcagccatcacaaactccacaaaggcaatgcgagtagaatgatggtagtcaccaagcaacctcagccgatatacctctccacatatcgactcgaagaacaatttcacatctgcctgagagaccttcttgtcaatgtttgtgcagtaaatagtccttgcacacatctcacgctcatcatcggacctgggcagaaatgttgggttaacaggtgcaatcgcagtttttgatggcagcaccctgacaggataatatccaagcacggttcccgacaaatttagagcagcccttgcactctcctcatcagtgaactctatgaaagcaaaacgaagaacagaattcggatccccacacatacgacagtccacaacctgtccacagttgataaatagtgctgccaattgctcttcagtgacctgaacaccaagaaaatgaaagctatcaacatgcttacaatttctgatttgcaacatggacataaaacgtaaagcatctgactcgtgattcagcgttacattaggaacaatgctaaacatagagactaaaggtacacttggcttggatatccacacaatcccatgaaaaacaataatgtgacaagttgtcctaagattatctattagggaaaatactagatccaagaagggagatgtataactaatggaacattgatcatcctggtgatcgatgtcggagacgtagacggtgcggcggatgacctcgtcgcgctgcgccatgctggtgcggctgttcatccggcgcttcccggcgtggccctggccaccgaaccctcctcctccacctcctcctccgccctttttcctgggtcggggtccggcgaggccatcgacggcggggaagacgtgggagggggtgggggtggggtagtaggcgtaggcggtgggggaggcggcggcgagggaaggcgggacgaactcctcggccatggggttgagcttggagagcaggtcctccagatcccgcatctccctctccccggcgtccccctcgggcggcggaggcgcggcgtggtcggcggaggtctcgacgacggccat

SEQ ID NO: 88577 - DNA, 228 bp, Oryza sativa
  Clone ID: PAT_MRT4530_87414C.1
atgtcggcgacgcgaggagtagtgagatatcagcagcgcgaggaggagcaagatgccggcgatgcgaggaggtgcaggcatctggcgctgcgccgcaatcgcgagaagaggacttctggactagcggggtgggtggaaccctttatccggccccgcccccgcaaatgtggtgggtcctgtccccagccaacccacgggtggaaaaccagccccgtcccgtccccgtag

SEQ ID NO: 88578 - DNA, 205 bp, Oryza sativa
  Clone ID: PAT_MRT4530_87415C.1
ggtattagaagtactagtactaggtgttattgacatatactcaggtatagtaacagatatcggcgcagaacactggggcgtatgcgcgcatatacgtgcgtacggggcgtgacctcagtatatacatatgcgggcacaggcttttatttggacacattatgtacgatactggggaaaaagagtgtaaattagtgaggatttaggg

SEQ ID NO: 88579 - DNA, 156 bp, Oryza sativa
  Clone ID: PAT_MRT4530_87416C.1
atgccggatccagccgccgctccggaccccacgcgcacgaatccggccacgccggggtggatccggcttggctacgagcgcacgagtgattgtggtgacctcgacctccgatggttggcgctggccaaggagaaaggggaggggcggcggggctag

SEQ ID NO: 88580 - DNA, 657 bp, Oryza sativa
  Clone ID: PAT_MRT4530_87417C.1
cacgagggagtaatctgtgcactaattgaggatggctacacattaaatagctactcatctcttgcaattaccaacataagtaaagtacttagcacaatgttagccttttgtgcttgcttcatcccttgtgctttaggcatgatgaacaatagaataatagattatcatcccggccaacacacgggaactggctttacgtcgccactgcttgtgacctgcttgatggaatgcttgccttggagttcttaaatatattatcaaaatgtacatatatgccttaaattacatcttatagtacccatatgaatgtatatacttatacttatagtacccatatgaatacaagcatgtgtttagtaaaatgctaacaaggtgcatagacctgtctagggcattgggcaatgacatgtcatcatttcttaagtcttgtttactgtccttctatgcatctatctaattagctccatgataaataattttgagttacatggatgcttcattgaacagaagcttctacagctttgattatttatcatggcttaaaacctttcatttcttctatcgttgtgcaaaagttagaaaaggatattagcaacatgaacatcatgccatcatggatattccaattttttgaccaaaatttagatgtgtatctat

SEQ ID NO: 88581 - DNA, 348 bp, Oryza sativa
  Clone ID: PAT_MRT4530_87418C.1
gactacttttactgggtggcgcacaaggagatatggaaggagctatttaaggtgctgcaggcacaaacccagtggcagataagacaagagggcattcctttgacttcattcggcccaccaaatggggctcataaacctggggtgcacctatatgcgtatgatttacctcgtatggctttccattcatttgctggtggtaattctcaaccctatgctattacaacccggggatcattgcactgaccggtgggagctgttccacctgtgcctcaacctgtaatcagacactttggaccttgtggacatactggcggccctattggtgggcacctttatcaccaacagagt

SEQ ID NO: 88582 - DNA, 323 bp, Oryza sativa
  Clone ID: PAT_MRT4530_87419C.1
aaggaaaaagagaggctttatcatccttagccgaaagactggccagcccatagcagcaaaacaatggctggcaatttatttatttaggtattctttacccccaaccccccctaaaaggattccgccccattaaaaacgcctggggagcccttggtttggatgggggggaatgccccgaacccatcccccctattatgctgggccccctgagccccttctcttgggatgcgatatgcatttgctagaacatcatttgggagaccccggaaaaaggaacccttccccgcaagggggctccccctagagttaggattggccttcga

SEQ ID NO: 88583 - DNA, 1242 bp, Oryza sativa
  Clone ID: PAT_MRT4530_8741C.1
atggagagaacagtcgtcgttgagaatgtggactacaatatcatgacaagcaactacagtgatttcatcatcgacctccaaagcaggctcgctgagcatccagaacaggctaacttccacggccgtcccgtgctagcaaggcaatgccatcctaaacagccggcgagatggttgtacattaaccttgtgggcgagaacaacgatagggcaaccctagccgtccgggatgacaatgtctaccttattggcttcaggaacctgaacggaaaatggttccatttggggttctcgctgaggagcgttccgattcttccggaaccatccacgtttttggagtgcgacgtcacttatcgaagcttacttggtggaaatgtgaaagatgttctggtgagggtggacgtgcggaagatttctgtgatacatgccgtccatagactatcgggctacgcgcagcgtcgatgtggagtcgatggagccaccaaacgggatctagcacgcctgattgtcgtgatctgcgagtctgctaggatggctgcacactacaacacggtaaacgatggttggctcattcgcaacaggcaaattagactcgacctttggcacgtggattacctgtggaactgggggcttatgtcgtgggtggtgcagcagcagggagggaagatgtggcccatcaggcttataaactccggaatcaacagcataagtgaggcgctcgcagtactccaactgctgcttaacacggcgagaaggcctttgccagatctaccacgagcttcaccgccgccgccagtgctctatctgccacgtcaggcggcaccggcagtaccctgcccaccggcgcctccgttatggttgccatcgccatcggtgccgtcgtcattggcgttacatgtgcccctctttcatgcgtcctccttagaaagatggagtcctacagcattagctatggcgccgccgtcattgccgttacgtgtgccgttctttcatgcgtcctccgtagaagaaaagactcctgcagcatcaactgatggcgacgaaggatctaccgtcgactactgtgttggacgcttattagtggaggtgttggccgtgtggtccagctttgacagctgtaccatcgcagtatttgacgggaaacgcggccagatcatctacgagaaccaccgaggagatcacgatggcatccacgattctcagaattacctgctggagattgggttcaaaaattatggtatctag

SEQ ID NO: 88584 - DNA, 143 bp, Oryza sativa
  unsure (1)..(143): unsure at all n locations
  Clone ID: PAT_MRT4530_87420C.1
acaagagctagcggtcnaattgccttccctttgagggcccacccaataattccccccttgctcatgctctactttccccaaaaaagcctccgggccnttgctgctctaacagtatgagaggctacggggggttggcaaaggcc

SEQ ID NO: 88585 - DNA, 390 bp, Oryza sativa
  Clone ID: PAT_MRT4530_87421C.1
atgtcgtcgctgccgctgctccgcaccatcatgcactccctcagcttgtggctgtcatcagggaggctgatcgcatcccacaccatcgacgtcctctccctcagcgactccatcatgggatccatgtacgaccgcgtgtttagcgggccgtgtgctgcatggctgatattcgttgccaagtacgcggagaggatatgggcgctctacaatggaaacatgagcagcatccagagcactctcgagaatcagaatgacaacgatgacgacaacgagaaggaagaagagcatcctgaatttgatgtatgcaagaccaccttggttgaatcctctcttgcgctgttctcgatcccgacaggtactgggatggatgagatcggcgttgcagcatag

SEQ ID NO: 88586 - DNA, 299 bp, Oryza sativa
  Clone ID: PAT_MRT4530_87422C.1
gggaatttacatagttgcccttatgaaagggacatttacatgggtacattgcgtaattgcggtccatggacccttagcgggccgacgggttattgtcgacccaattaacccctaggctagatgggccaggatagcctcttcggccctcccggggccgaacttgctacggcgaagtcgtcccccttcggcatatgctcttcgccttgcgcccttcgccctggaggcctatagcctcggcaggtttgatcgaaaggcctcatgccatatcgccaacaagcccctcacgggcaagggtgaga

SEQ ID NO: 88587 - DNA, 1130 bp, Oryza sativa
  Clone ID: PAT_MRT4530_87423C.1
ttttgttttttttttttttttttttttttttttttttttttttttaaagtgaaacacacctgctagcttttatttaaggaatcggacgatcgatttgtggttttctcttgaacataatgtgcagtatatgcacatcgatcagccgtatacatgcaaatatttgcattagccataagccattacattaattagtagcagtacaaaactcggttcgtatgaaacaaccgatcgatcgaactcgacccaatttcacgtacttgatcgaatacaaattaaactgaaaattagcagtacaggtcaaaggtgatggtatactagactggtaatgcgccgtacgtgtcgtcacacattacgcctagccgtgcgtggttattgcgctatccaattccaaacttgtacgtggacggacgagcgcgtcgatcggcgtcgaccttgccaccggcttacttagggacatcggttgcctttggctccgtggcgggcttggccgcggcttcgtcggcgtcgctggacttcggcttgacctttcccttgccgcccttggcgcgccggccggggccgccgctgccaccgagcgcgggcggcaggatggcctcgctgacctccatgatggagatggcgtaggggcgcgcggcgacgaccttgacgagcttggcgacgcaggccgcgccgggggcgcccaggtacatctgcccgtcgctggccttggtgtagttgacgacgccgagcttcttgtcggtgttggacagcagcgtggggagcatggcggtgcggtccttcatctcgcccagctggatggggtcgaagtacttgaggaggacgtggttggccatggccatccgctgcttgtcggcggggagcgacgtgatcggcttcatggccttgtcttggaggaccagcagcgacgccgacttgagccggttcgtctcctccgcgaccttcgtctgcgtcagcaacttcaggaacgacccgtactgggacttgtcggcgagcatctggttcacgtcgaaggcgcccagcgccgccggcgaggccgcggcgaggaggaggaggacggggagcagcgtcatcttggaagaagccatatttctggtgctaattaaattagcctgtggcggcgggacgcgtgg

SEQ ID NO: 88588 - DNA, 372 bp, Oryza sativa
  Clone ID: PAT_MRT4530_87424C.1
atgggggcgaaggggatcgttgaggggattgacacggtggaggaaccaccacggtgccagcaggggcagtggagtgcggcggcggcggggaaggactttgccggcggtaaccaccacagcgtcggcgaggggaggctgcagtgtagtgcggcggaggtgggaagacctcgccgtcaggaaccaccacggcgccagcggcgactgaagaagtcggctccggcgagggtagcggtgggcttcggcggcggccgccgctggggacgacggcggctccggcgtgggcagcggaggagcgagacggtggcaacagtacatgtgaggaggagcgaggagaaggagcccccagtcacgcctggagagggtgaggcgtag

SEQ ID NO: 88589 - DNA, 270 bp, Oryza sativa
  Clone ID: PAT_MRT4530_87425C.1
cgaggagcggtcggagcagacaacgcggagctgactgttcgcgcagctcgtcgcagcatcgacagggctccgtatggcccaccggggttcagcgcccgggagcagcgcgggggggggggggaggctggcggggcgggcctgggataggcagtggcctttttttttgcttcgtggatctgtgatttttacgggagatggattgtcagaagcattgcaagggaattgactgagaaaatgaagaacattggaaataattcagctcattcaatt

SEQ ID NO: 88590 - DNA, 534 bp, Oryza sativa
  Clone ID: PAT_MRT4530_87426C.1
tcaaattttagggctgttacacccttcattgatgaaatgttggaacgactggcaaatcattcctttttctgtttccttgatgggtattcctggtatcatcaaatttctatccatccggaggaccaaagtaaggctacattcacatgtccgtacagtacctatgcgtatcgtaggatgtccttcgcactgtgcaacgctcctgcatcccttcaaaggtgtatgatgtctattttcttggacatgatcgaggacattatggaagtcttcatggatgatttctctgtctacggaaataccttcggtcattgtcgctgccctccccctcttctctacctggctgccacgccgccttcttctcgtgtcgccgccatcgcgcaactccagccacccctcgccggcggtcaggacctcctcggagcccggtgtcgccaccatccgatccgcagtaacgtcatcttccccggcttcatctccgtttcgcccagaggatgccgggagtgcatcctcgtcggcaactagtggcgccaccgccat

SEQ ID NO: 88591 - DNA, 375 bp, Oryza sativa
  Clone ID: PAT_MRT4530_87427C.1
atggaggggagcttcgccgtgtcggccgccacggcggcggtcgtggctatcgaggaaggtgccgccgagacggcctccgcgtcggcgtcgccgtcgtggccaaggaggacacccatgctccgcgcctccatccccgtgcgccagcgtgtcgccgtctgcatctggcggcggcggcggctacagcgaggcggcagcgaggaagggcggcgcagggggcgggagcgagcggcgactgggtggcgagcagcggtgggtgtccctcagatccgcccgcccgcagcgcccccgcctcgctcgtcgcacgcagtggggctcgcggggatggccgtggacggcggcacgagggggcgggcgcagctgggtaggcgaggctag

SEQ ID NO: 88592 - DNA, 1618 bp, Oryza sativa
  Clone ID: PAT_MRT4530_87428C.1
atgagaggcgccattgctgcggcggtgtgcgccgtgctgctgctgctggtcggcggcaatggcggcgggtggtcggcaatggcggcggccaccatggaggaggacaggatcgtggcgctgcctgggcagccgaacgtgagcttcgcgcagtactccggctacgtcacggtggacgccgccaggaggcgggagctcttctactacttcgccgaggccgagctggatccggccaccaagcccctcgtcctctggctcaatggagtgggagtgggagcattctcagagaatgggccattcaggcctagtggcaatgtgctggtgaggaatgagtatagctggaacaaagaggccaacatgctgtatttggagagccctgcaggagtgggcttctcctactccactgacccttccttctatggtggtgttggtgatagcaggacagctagggacaacttgagattcttgcaaggctggtttgccaagtttccgcagtacaagggcagggacctgtacattacaggagagagctatgctggccactatgttccgcaattagcgcagcgcatggtcgaattcaacaagaaggagaagctgttcaatctgaaaggcattgctctgggcaacccggtcctcgagttcgccaccgacttcaactcgagggccgagttcttctggtcgcacggcctcatctccgactcgacctaccactccttcacgacggtgtgcaactactcgcgctatgtgagcgagtactaccatggctcgcttagctcggcctgtgacactgtgatgacccaggtggccagggagactagccggtttgtcgacaagtacgacgtcaccctggacgtttgcgtctcgtcggtcttgatgcaatccaaatccctcgcccctcagcgagggagcagggagctggacgtgtgcgtggaggacgagacgatggggtacctgaaccggaaggacgtgcaggaggcgatgcacgcccgcctcgaaggcggcgtgcccaagtggacggtctgcagcagtgttctggagtacaagcagctggacctgcagatcccgaccatcaacatcgtcggcggcctcgtcaagtcgggcgtcccggtgctggtgtacagcggcgaccaggactcggtgatcccgctgacggggagcaggacggtggtgcagcggctggcggggtggctgcggctggggacgacggcggcggggtacagggtgtggttcgaagggcggcaggtgggcgggtggacgcagtcgttcggcggcggcgcgctgtcgttcgccacggtgaggggggcgtcgcacgaggcccccttctcccagcccgagcgctcgctcgtcctcttcgccgccttcctcgccggccgcccccttcccgactccttccagtgacgtcgtcccgaacgacgatgatcacgtctcatgtcaagcgcggaggtgcattgttgttgcgttgcaaatgcgtacgagcgatttcgtgtgcgccaccgctatatatagtactccgtattgttgctgggaatcgaattgtttctcggagaaaatctcatctggaaaatgctgatgtggggtggggaacatgactccatgccgggcctaccttgctctttagttc

SEQ ID NO: 88593 - DNA, 193 bp, Oryza sativa
  Clone ID: PAT_MRT4530_87429C.1
ggtaacatggtgcggcttgggaaaggttttgtcgagagcctctgacaccgggcaagtgtctggaaccgttggttccgctgctgctgctgttgctggtgtttcctccgcctgcgtcttccgcgtgattcccaggtttggaaaactcgcagtgccagctgcatcaatgaatcgggccaactcctggcagaaggcg

SEQ ID NO: 88594 - DNA, 358 bp, Oryza sativa
  Clone ID: PAT_MRT4530_8742C.1
gattgatacaaagtggcatgatttagctaactgaatgctgtagagtttggggatttctgttgtttcttgcaggcctcttgtcagagtagcatcatgtacagattcccttgaaaaacagatgttgtgcaagcagccttccgaacgagcaaaaaaatgttggtatgaatcgtttggtggcaactgaatgtttagcttcacattcagtcagttgctagctaccaaacgattcaggcaaatggcctcttcgacaaatatgccattcactactggtctactaccacataaaatctggttgtcaaacctatacaatggatctgaccattgaaatccttggtgactacctgtcaccattttttta

SEQ ID NO: 88595 - DNA, 1277 bp, Oryza sativa
  Clone ID: PAT_MRT4530_87430C.1
aaaactactactcctctcgaggcgacgacgaagaggagaggagaaatctagcggcggaagcagcagctgcgagaggcggatttttcgattcggttcgaggcgaggcggagcggaggaggaggattcgaggcgatggatcggtaccagagggtggagaagccgcgggaggaggcggccatcggcgccaacgagatccgcatcaccgcgcagggccgcacccgcaactacatcacctacgccctcgccctgctccaggacaacgcgacagatgaaatcgttatcaaagctatgggaagggcgatcaacaagaccgtcgcaattgtggagcttctcaagagaaggattgttggtctccatcagaatacctctattgaatcaatcgacataactgacacttgggaaccattggaagaagggcttaacacccttgagactacccgccatgtttccttgattaccattacattgtcaaagaaggagctggatacgtcatctcctggttaccaaccaccgataccggctgatcaggtcaggccgccaactgactttgatcaggaggcagaggccgtgcccagtggtcgtggaagaggacgtggtcgccgtggaaggggcaggggaagagggttcaacaatgaagattatgatgatgagcatggagatgcagaggtcccacagcctcagggatatcgtggcaggggaagaggaaggggcaggcgtggatcctttggacctggcaggggttatggtggagatggttttgcaatggaagaagctggtggatatgatgatggggagcctaatgcacctcctatgcaagggcatgaaggtggcagaggaaggggccgtggtcgaggccgaggctgtggacgtggtcgtggtggaggccgtggccgtggacctcctcctcctcctcaagagtagagattggctggctcgtcaactatccaatgcagtgactcgtcttcattagattagtgttatcttctgctgtaacttaatctgtttaggtttttatgttcaaaagtttgacatagtgacttcagtgtgggggatgcggctagttatgattttgtagctaggttattcttccatttgctttttcctcagttctattaccattccaactgtgcattgtagcatctttttagtgtgttgtcctcaaatctagctcagaagatccatttgttatggtgttggaagatcgcacagcattttctatgaatgtgcaaatcgtatcgaactcgcttttgaattggatatggtgacgttgcatatgt

SEQ ID NO: 88596 - DNA, 459 bp, Oryza sativa
  Clone ID: PAT_MRT4530_87431C.1
atgggccctgaagtcctaggttaccgagacgcaaagaaagtaccctgttctcgtcaggatgccagcactccacaccagttcgtcgacgtctacaacaacaaccgcttaaacgccagcatgttctcaagtaacgaggacctgtgcggcaagcctcccgacgccttctgcgatacgttcgcgtttcgcgcgcctcgccgtccaacctggcgacccggaaagaatggaagaggccagccacgacaggcgtccggcgagacgcccaattcaactcgaagccatcgccgccgggtccggtggcagcgcgggcggcgaagcgcagcaggacgagaaggacttctcggagcacatgcgccgcctctcacccaccccaacctcctccccgtcgtcgcctacctctacaagaaggacgagaagctcctcgtcatcgtcatcgactacatcacgttgaaaagcggctga

SEQ ID NO: 88597 - DNA, 411 bp, Oryza sativa
  Clone ID: PAT_MRT4530_87432C.1
atggcgcctgcaatagcagaagcagtggcggagcacctcctcgcctccttttccctttcctcctctcacaagtccaccttcaccttcttctctggtagccgtggcggcgccactaccctctatcagagtcctctacaggctcgtacttgccggtctccatggaaaatgagggacaatgcgatccaccctctacgagctcacttctcccaccgccctatatggatctacttgttgttggtgtggagagagcgtaggaggggttccgatgacagcagccactacgtcgccgtcgccttcctctgccggccatggagggcgctcgccggctcgccacctcttcaatggtctagcctattgggattggagatggagactgagagatggaagaggatggggcgagtaagagggtga

SEQ ID NO: 88598 - DNA, 216 bp, Oryza sativa
  Clone ID: PAT_MRT4530_87433C.1
atgggccgggattatttcctcgccgggatcgagatccttccacaaccgccggtcccggccgccgccgccgccgctcccggccaccgccggccgatctctccgctcccgcaccgcgcgttgctgccggggaccatcgtcaccttcttccaccagatcggacccgaggacgccagccgtgacctcccctccccggccttcctccccggcggcgattcg

SEQ ID NO: 88599 - DNA, 628 bp, Oryza sativa
  unsure (1)..(628): unsure at all n locations
  Clone ID: PAT_MRT4530_87434C.1
tcgagtcgacccacgcntcccggtctggagaggtttgccgtcaacgatggaaacgagatggtccgctatttaggtggccacaaggagaagcccttcattgaacaagtggaagtgttgtcgaagcgctactgcccagaaatggttgactatagggaaggggaagcgtaggaaatgtcatccaccaaaaccttcccaatccgttgaaaggatagcaatagccgtcttagttacatctcgcctcgttcaaaggatagcattagccgtcttacatctcgcctgttgttgaaatgtgttctgtggcctgtacaaaatgtttggcttttggaatgcatggcactgatgtttagccgcccaatgcacttgggaattgtttggataggccatctatgtgcacacgggcgacgacactcatccagcaaccagggcaccccctaccccctctccccgggccatggtaagcatggctgtggcgtccaatcatcttcgtatggaaagtgctgaacattacgatttaaactatgatggatggagtcatgaaccctgtaatttcgtcacaccacaggtgcattctttgttgatctgcctgcttttgtgatcttccgttttctttttcaaaaaaaaaaaaaaa

SEQ ID NO: 88600 - DNA, 911 bp, Oryza sativa
  Clone ID: PAT_MRT4530_87435C.1
tttttttttttttttttttttttttttttttttttttttttttttttttttttttttttttattttttatccagcatatcagtgattctgtgataaatttattgtattcaacaaatgcgacggatgtagtacacattgcctttacccgtatttgtagaaacatttcacaccaacatctgttgttacagttccaaattcagacctaacattgctgtattcatctcgtggcatttgacgaagtggagtaatacatgtaagcagtaatgcacaagcacaacaacatgaggcaaaatagagttgtactagcaacatctaatttactgaagctcattcggcaggacgcaggctctcaggcacgtcacattcatcaagcagagctaggatgttattctcaggggcacttacagagggtaatatggcgcgcttcggtactgcggatcgcgaccttgctccgctgctgtcggactcaagctgcgatccttccttcacgactggcaggtctgtcatcaccctcacacccgctgtagcgatcctttctttccatatcctcccatcatgaagtatagatggttcaggaagtggacatttcacaggttgatcaaggttgacaggctccactgggtgctccaccggcttgaactcgacgccgacctcaatgccatgcggactatctgcaggaacagcttgtgaatcaggctctccgctgttcatgttgggtgccaacgtctccacaacctcgacggcgctcttggcgcggcggtgtgcgccggcggagaacctggagaagattccaaccatcgtcccccgctcttgctccgtacctcgccggagctcaagctgggagctcccttttctctcgctatggggggcaggcagctactgatgatcgcccgcgcgaaccctcgtgccga

SEQ ID NO: 88601 - DNA, 334 bp, Oryza sativa
  Clone ID: PAT_MRT4530_87436C.1
ttttgtttttttttagagaatggttgctgaaaatggcaacacctaaaggcatgcaactgattttgtaaacgtatgaacctaccaagcgtgtccaacatgaaataaactcacatcattataactgagttcggcttagatgacaacaagcacactactgtttaaaccatctatgaacaggagccttaaaaaggtgacctaacccgtcccatgaagcctaaggcggcgggtgacacaggcccgccttggagaccatcttgcccatctctttaggggagcacacctggcactgaccctccccggtgccgggctgcaggaacacatcgccgagcttcag

SEQ ID NO: 88602 - DNA, 757 bp, Oryza sativa
  Clone ID: PAT_MRT4530_87437C.1
ggccgcttaaatttttttttttggccgctggcctctttttttttttttttttttttatgatgtcccgtcaactgaaacaaccttttattgagtacccacaaacaagttggacatcgacatgtcacacaagttgataaaaacaagtaaaaagctttgacaaacatggctatcagcggctaaaacgatatcgtcaaccattttatacagatgattaacaacagccagaaactagagaagaagagataagagttccttccaggcatcacaatttattgtggagatagtttgagtgagccaacgccactggggttctctctaggaggaaatttgttctagtgcattatcttaggtcttcagctagttcttgcccattgctgctctgtcctgttgcctaagcctctcaccttcacggcaaagatagttctggaatttctccttgccgccgaagaggaagatcccggcgaggccggcggtggcgacgccgccccagatgacgacggtggaggagagcagcgaccagttgcggtagatcatcgtcgccggcggtcgtttgctccgggcgccgccgatcggtcgatgggagattggagacgacgaagaggggaaagaggaatcggaccaaaggtcccggccggatcaaaacgtaagccgccaccgcactaggctccagatccgtcgtccgacaccgcgcctcatctcgaccctgacggatctggcgtaagggacagcgcagcccaagcgtcggcgcaaccatgcg

SEQ ID NO: 88603 - DNA, 412 bp, Oryza sativa
  Clone ID: PAT_MRT4530_87438C.1
gcccagctcgcgtcccaccgtaacaggagtccaaaagcgagaaggacgagagcgcacgtaccgccgcgccatcgagcgatccatatggctgtcgctctgctccatctctgttgctgctgccgctgccgccgccgctcgcgccctcgcggggagggtgacgacgacgaggggtaacaccaggggggaggcgtcgtcggcgatgaggcgggcgatgacggcggcggaagggaagggcgctgggaaggtgactcaggcgaaggaccgggcgaaggacggggcggcgagggaggtggcgagggagccctaccccgtgaccgaccactacccggcctactacttggcctgcagcttcgacggcggcgacctccgcgccgaccacctcgccggcaacttcgcccgcgcgtgatgcgcg

SEQ ID NO: 88604 - DNA, 345 bp, Oryza sativa
  Clone ID: PAT_MRT4530_87439C.1
aaaaaggaattaagggtgccaaattttccttttgcaaaaaaaggggtttttttttcctttttacccaaaattggggaaaaaattcccctcgggggttcctgaattttttggggaacaaaactaaaaaacaaattttgcctcacaattccttcctgggaagcgtcgtacaaattggcgatctaatctttttacaaaaaaaaaataatcggggagtcggaacaaatgatctttccccccaaaaaaattatttttttaggcgtcccccggttggtttttaacccaaattgggaattcctgcattagggccttcctggggggggctgggcccccctaaaccctttgttt

SEQ ID NO: 88605 - DNA, 4584 bp, Oryza sativa
  Clone ID: PAT_MRT4530_8743C.1
tttttttttttttttgaacaaatacttgacaatattatggaaaaaattacatcatggaactattgcatatttttacagtttacatacatgcctcttatctgtttgataaatgccaaactgaacagatagagatgtcaattgcctacgaatgaaacaaatactgaatacattctctcctcatttacagtgctgtgtgccagtactcaacagcaaacttatccaaacttgaatcaagatgagatggtgctcttatcttctttggaaattgaagactttgatggagaaggcaaagacgaacgcgaagagagcagcaaacccaacaacggcagttgctacataacctaagtagtcatgcctaaacccaaagtatcgtctgatgtaatcttgcaccacttccccgtcctccagtgtagagtttgtgatatcaccatattgtgaggcaacaagtccgtacagtgtccatgccactgggcatgcccaggaataccacctccaccatattggtatccttggtcgggggattaggaagccggcaaagatattccatatgcaatagaatgcagtagagactatggcagcaatgtcgctgtttggtgtcatggcgactgccatcatcccatagaatgtgaagtacatgaaggtgaagaacatgaagaacatgtaccagaagaatttttcaactgtccagtcaaagccaatcaggctgtagacgatcagaccatacacgacagtctggaggaagatgtgtggtatctcaataagaacctgcgcaaatgcatatggtagagcggagtacattccagcggccttttctcggtagaacactgttcgctcaacgtctacaattggttggacagtctggccgttttgaattccaatgaaaaggactgctgcatacatggatcccaaagagttgaacagatccaatctcttgtttattttcttccctaggttcaagaatatagtgccgaaaatgagggctataactgttgtgaagaagattctagttgctgtatacgacggatttctccagtatgatttgtgctgcttccacaggcaagccatgcattgtgtgaagaagggctgtgaaaattgagttgggaagtgtaggtccgttgatccaggtggaggtgtgcttaattcacttatcaatgttttattcctctggtatagatcagaattcctgtatacttcagcaaagttgatgccaaggatatcttcttgggctagggtggtaacctccaacatccatgttgcaggattgtaaccatccttgattttcctcactccttgtataccctcaaagtaattgatgagatggcatgagttgtgtcccagggggcccacatatatttcttcacctcctcgtttcatcagaaacagctcatcaaaagcttcaaatatgtcaatgctgggctggtgaattgtgcagacaacagttcttcctgtgtctactgtgtttctaactgttctcatcacaattgcagctgcccttgcatctagtcctgaagttggttcatccatgaatatgatggatgggttggcaacaagctcaacggcaatagtgagcctcttcctctgttcggtggataaaccattcactcctggcagtcccaccagtgctcccctcagtgatgtcagctcaacaagttccatgacttcttccacaaacatctttcttgcttctgagtctacttcagagggtaaccggagccatgctgagtacagaagggactcgtaaacagtgacatgtggagagtggatatcattttgctcacagtaaccagcaatccgagcaaaggtctcttgcttctttgggtatccagagatggagatgtctccttcaatgtaaccgcctgttttccttcccgccagcacatccattagagttgttttaccagctccgctaacacccatcagtgctgtaaggactcctggcctgaaagctccgcttacacctttcagcagcagtagccgatcttcagtaacacctttatctttcatttcctgaggcatatccacagagtatctgatattgtcgaaggtgatcgacagaggagtaaatggaagtaccattcctctcttcctggtgtcagctcctgtaatctctcctcttcctgcatttgcatcagaaggtgaattctgggaatctgttccaagagtcagcagctcaacattttctccggtacggtttacatgtttttccctcaattcctcttcagaaacaacagcctgaccttttccaagtgggtcaagccattcaaggaacagaatgaagaggatgttgaagagcatgatgtatccaagtaatgcgccaacgccaatccagtaccagtttgcatcgacaaatatgccacgtaccttaaggacttggacaccaagcgtgtcgttgctttgtgtcggatcaacaaccttgttccagctgtggccaaggaactcattaactgctatggcattctgtgcatacatcagaggagaggaccagtagccccaaatccaccatttcttgatgttttctctagatatcaagaaaccaccgagaaccagaagaataagctgagcaaatgacccaaacgtgtctgcaacaaccatctctcttcctagtgcagcgagaagccggaagagaccggacgccatctggctgatcagtaccagcagcacataatggcggaagaatctctctatgtttggatcgaagcccatgacatagtatgtcatgcaaatccacacagcacattctaagaatgatattgggattttgagcacccatgtaggtaatgcatacgcccatgatggatagaaaagcaggtccctctgcttatagaatatcggcagctttgcaatgctcatggcgagctccgcaaatccattgaacaaatgtgtgactaatccaaggaacatagcacccaggaagatcgcaccatcttctacactgcgtcgatgcatctttgtacgcaggaagaccgtcattccgatgcttccaaggattatgagctggagaattttgaagatgtaaacaaatgaattcctcttcatcagcagccactccctcgagaagcatgccttggtaagctccatcttgctgatgccatacctggaagttgtgagagcagcaggatggttcctggttcggtcaaagggcaccctgagctctgagcccagattacgcccaacatggaattccttgaaggcctccgaaaagtcgttcaccgagatgtaccggtatggttcatctctgcggcaccagtactgatgctgatccttcctcgatgtaacttcttgcaagaagtctgcaacacctttcctctccggacatttgaagcccattgcctcaaagaactcgaggatgttttctcgaggtccctggtatacgatttggccctcggagaggagaacaatgtcatcaaagaggtcatacgtctcaggtgcaggctgaagcaacgcgatgagcgcggttcctcctaagatgtggacagattgcctgagggagttgacgatctggtatgttgtggagctgtccaaaccggtggagatctcatccatgaacagagcctttgctggaccgacaagcatctcaccagttgtgacacgtttcttttgtcctcctgagatacctctgatcatagcgtctccaaccattgtatcagcgcagatttccagacccagaattttgagaatgtaatctgtgaccacgctttcctgaccttccacggagatggccttcatgtaaacatcaatatcaggatctggtttaatgctggcttctttctcccttcttgacagttcagtaagcatgtcgtaacgagttccaactccttgacatcttgcagagaaggccagtgtctccctcacagtcatctcgccgatgtgaagatcatgctgcccgatgtaagccgatgtcctctgagggacaaattcgtccatgtcatgcccattgtaagtcactcttcctgataccttcagtgttgagtccagtttccctgccagagctaggagcaggctggttttcccagaaccaggagggccaagcaacagagacatcctgccgggtctgatgattccactgatgtcatgaaggatggagataggcctcttcccgctcgaaacgatccgcatcgcgctcagcacatccatgattttgttggagaagaagttggtgaacgttgggattccccggttgccgacgtatgcctccgcgtcgatgctaaggttctcaaacctcacttcaatcgtcgggttgtcaatcccaactcgctccatccggtcgcggagcttgaggaggaagcgctcgttgtcctcctcggcggtgcggacgaggcgctcgatgaggttcctcctctcctgcagcccgagccccccgatgtccacctcctccacgccgccggcggtgaggatgcccttccgcatccggtcgtacgtcgggagcttctcgatcgccgcccacttgagcgcctcctcgtcgtcctcctccctcaccgacctcccgaacgcgtcgctcctccccgacgtccccctccacgacgacgccgtccgccgcacgctcccgccgccgctcgccacgctccccatcctcactatatccat

SEQ ID NO: 88606 - DNA, 1215 bp, Oryza sativa
  Clone ID: PAT_MRT4530_87440C.1
atggagctctcgccgccgtcgccggcgccggcgccggaggggaggtgggccgacctccccggggacatcgccatctccgtagcttctcgcctccaagaggccgacgtgtgcgcgctcggcggctgctcgcgatcgtggcgccgcgcctgcgacgccgactgcgtgtgggaggccctcttccgccgccgctggccgctcgccgccgcggcagggggaggaggaggaggggaaggggaaggggcttctggtgtccagggttggaaagctctatacattaaccatcatagaagaactgctgttgctatatctggtgtggctgaatttgtggagaataatttgcgtaatgggtcacttgaagctgaatactatctgaaagctattgctaatttggcctcgatgagggatataggttttattgatgcccagttctttttgttgtcaaggaattacagtgcaatcatgaatctaattggattgcactactcaatttcatcactaaatataccgccaaatgaagtgtataaagcacttcaagctcggaaagtggaggaaaggaaagtgtgtgtgagcttatacaagcttggtagatggttctacggtttccggttgcctgatgaatccgagtctcatgaaatttcattgagtgagctcaccatgtcagagggggcaacaattctagccattcttaagcgtggtgctgttcatgaggtatttcgcctccagaaatactttatagtgccatactgcttcctcaatttatctcgtgacattgacaacccacactataaccctgtctgtaaagacggttacatcaggctatccctatcaagatgtgctaaagtgtttaggcagagccaatgccttgccttcctgctttctccaacaaccttcaccctgcacatctttgattcttcagagaagcaatcaagcttctcccatcagaggactcacagtcctgcagatgagcatcagcaccaaggcgatgatcgcagcgacgagaagccccatgaggttgaatgcggcctcctcttcggactcctcggtgcagcacaccttgcccatgtcagcactggcagagaaagatcaaagaacaaatctcttggtgattggtgtatgaatgatctgagatccttcaccttcttcactgtcagttgtgctactggcgattttgtcgcagtcaattcgatgatggttgctgatggtgagatgagatga

SEQ ID NO: 88607 - DNA, 1117 bp, Oryza sativa
  Clone ID: PAT_MRT4530_87441C.1
tttttttttttttttttttttttttttttttctaatttacacagcacaatacttttattatatatgagctatcaaggaacagttacaatcctagatggtttcaaacttccatccttatctatgatcccatttacatgaagagtgccacaaaagcatcaacatcaaaacagaagagggtaaacatatttacaaaaacgcacagctggtcaagttgatagggcttgcatgcttttagtttacttatttatgtccaccaaactgacctggaggcgaaatacctcatgaacagcaccacgcttaagaatggctagaattgttgccccctctgacatggtgagctcactcaatgaaatttcatgagactcggattcatcaggcaaccggaaaccgtagaaccatctaccaagcttgtataagctcacacacactttcctttcctccactttccgagcttgaagtgctttatacacttcatttggcggtatatttagtgatgaaattgagtagtgcaatccaattagattcatgattgcactgtaattccttgacaacaaaaagaactgggcatcaataaaacctatatccctcatcgaggccaaattagcaatagctttcagatagtattcagcttcaagtgacccattacgcaaattattctccacaaatctgccagtgctgacatgggcaaggtgtgctgcaccgaggagtccgaagaggaggccgcattcaacctcatggggcttctcgtcgctgcgatcatcgccttggtgctgatgctcatctgcacaccgccacggcggcgctcagtcaccatctacccttgctgctgaggtggaggagtacctgcaggactgtgagtcctctgatgggagaagcttgattgcttctctgaagaatcaaagatgtgcagggtgaaggttgttggagaaagcaggaaggcaaggcattggctcctgatttttcaagttaaataattgcttaattgtaatgcgtcctattgtaagtcatgtttcattggtataatagtctcttcatctttagccccaaaacaaagccggcgaaagagacagagacgagagaaaaaagtcaaagacaaaaaagtcctggttcccttgct

SEQ ID NO: 88608 - DNA, 155 bp, Oryza sativa
  Clone ID: PAT_MRT4530_87442C.1
atctggttttctttaactagtgcgattgcatatcacctcatagaaatggagtctatgtctacccgagacgcagaagaccaccttctcaccgggtatgctagcttactcttctggatagcgagacttatatgagatctaactgctatggtacatgg

SEQ ID NO: 88609 - DNA, 1110 bp, Oryza sativa
  Clone ID: PAT_MRT4530_87443C.1
atgggaagaaaggattcacgcagcaggtctggaaatgccaagaggggaccacatctcacactggacaggctcccacaggatgtgttgcatcagataattgctctcctgcctgtgcctcacgagaacttttacggtcctggagacattatcctgagctcaaattcagtgccaaaacattatccatggatggacaacacaattgtatacaagctgcttaatttcttgcgggtcagacgatgcaacttgctgcagttaataatgagtgatgctccaaatctctccaccttttactatgaagggcccctaatacagttgtcacttggagattcactgcaactgaagcatgtaaacatatcaatctacccttggtttaatttgtttgaatatgctcgcaaggagctcccaacagttgccccaaacgttgaaactctgttcctgatgtctgcgaatgaggttggttatttctatccactcatagttcaaccgcatggaagattcctgcacctcaagtatctggagcttgcgattgttggaccaagggattatggctttggctatcagtacgcttatctggttactttcctcagagcttctcctgtgctggaaacttttatcttgcacgtggaggagtctgctaaagaaccctatccattggtttttaatcctaaatacctaaaaatacatttgtcaccagaacatagccaccagagcatcaagcatgtgacagtaaccggtttttgccacaagcaggaactagtggagctgatattttatatccttgagaacgcaacttcgcttcagtgccttacactggacaaccgaattcgtggttttgggaaggacttggtggcgtgcatcacacaagacactggaacccgtgattatcaagaatggtggaataattttggtgtcaaagagagaattctacatttttttaggagagaattttatccaaagtcagactgggaggcttactgttcttatgttgctatcagaaagtatatcattgaaagggttccctcatccgtagaactgaagatacccgttgtgccttcagatgaaattatatcccgtctttctaaggtagaaagtgagctgctgaaagactag

SEQ ID NO: 88610 - DNA, 1840 bp, Oryza sativa
  Clone ID: PAT_MRT4530_87444C.1
cggcacgagggagacgaggaacgagtctttcttcttccccggcaccgtcgcggcagtccgttgctgccgctggccgccgctgtgcgcgtgtcctcaaggctgccgcttccgatcttggagaagcatgggcgggcgacctcatctcggttttggagaagccggcgtcatcaggagtagtacagcactcggaaacctctccgtgtctctgagaattacaaccaagatgaagacgggcccccatggggatgctggtttcggagaagatggatcgagtgctttagacatgggaagaaaggattcacgcagcaggtctggaagtgccaagaggaggggaccacatctcacactggacaggctcccacgggatgtgttgcatcagataattgctctcctgccaatgcaagatgctgcacgtgctgcctgtgcctcacgagaacttttacagtcctggagacattatcctgagctcaaattcagtgccaaaacactagccatggatggacaacacaattgtatacaaggtcaaatggattcatatatcaagaggattgatattgctctgcaaaactgcactggtggttgggtgaagaggtttaggtttgaactacaattttttcatgagttgtctgcccatcatatcaaccattggcttgatgcagctatccctgggatcgaggagctcaccctagagctgccccgggatgataaaatgaaatataaattcccatgtaaactcttgtttgaaaagggatgctcaattcagtctctgtgtctctattcctgcgcttttcaccctgatcaaggagcttgttccttcagaaacttgaagagagtgtactttagcttggtgcatatcaccacagaagaactatggatctttctttataattctcttagtctagagcatctggaacttgggttttgccataagatagcttgccttaaaataccttgcacactgcagctgcttaatttcttgcgggtcagacgatgcaacatgctgcagataatagtgagtgatgctcctaatctctccacctttcactatgaagggcccctaatacagttgtcacttggagattcactgcaactgaagcatgtaaacatatcaatctacccttggtttaatttgtttgaatatgctcgcaagcagcttccaacagttgccccgaacgttgaaactctgttcctgatgtctgcgaatgaggctggtattttctatccactcatatttcagccgcatggaagattcctgcacctcaagtatctggagcttgtgattgttggaccaaggaattatggctttggctatcagtacacttatctggttactttcctcaaagcttctcctgtgttggaaacttttatcttgcacgtggagtctgctaaagagccctatccattggttattaatcctaaatacctaaaaaatcatttgctaccggaacattgccaccagagcatcaagcatgtgacagtaaccggtttttgccacacgcaggaactagtggagctgatattttatatccttgagaacgcaacttcgcttcagtgccttacactggacaaccgaattcgtggttttgagaaggacttggtggcatgcatcacacaagacgctggaacctgtgattatcaagagtggtggaaaaattttggtgctaaagagataattctacatttttttaggagagaatcttatccaaagtcatactgggatgcttactgttcttatgttgctatcagaaagtatatcattggaagggttccctcatccgtggaactgaagatataccagttgtgcctcctgatgaaattatatcccgtctttcaaaggtag

SEQ ID NO: 88611 - DNA, 331 bp, Oryza sativa
  Clone ID: PAT_MRT4530_87445C.1
ttctgttacctctctggctggcccctatccaaccccgagacgctaggcagaccatgccatctctctgttgtactggaagatatggctggagcagctcaacctcttgcttttaggcagcaacgcactttagatgttacaggaatttcacacccacttcaagttgctgttcacgaatctgttttaagacaagcgctgagtaatcttatagagggtgctcttctacgcactcatcttggaggccgagtttcagatatatgctggtgaagcacctgcaggacgcattctccgtcgccattgatgatgaaggcccctgcatgcaatacatgacaca

SEQ ID NO: 88612 - DNA, 369 bp, Oryza sativa
  Clone ID: PAT_MRT4530_87446C.1
ctatttaactgttgtcgacatgtcggtctgaaggtctgactcgtagtcgacaacagggtagccttcctcctcgaatccgtgtccggcgagatcagagatagcgctttcgtctctctcgccatagtcgatcttggtgtagaaccatagagacatagagtcttcgtcaatgtcgaatagaattttccggtgagtaggtgtccctcgatcatttggagtcgtggtacgaggaccactacgctgccggtcgaagaccagtcgtagctgttcctcaaccatatcttttggtacggcgcggagcttgaggcttgggtgatctcgatagaccaagttgtcgatgacgatgatggttctgatcttgtcggaagacat

SEQ ID NO: 88613 - DNA, 689 bp, Oryza sativa
  unsure (1)..(689): unsure at all n locations
  Clone ID: PAT_MRT4530_87447C.1
aaagtgtccggtaanatgtgaaaaggaggaccatggcgtncaccgaaaagtgccgaaaaatggaaagggttgaaaagaagtgcgtgattggttgccaggttccatctgtcaatccgaagggaaattgtactacctcagtcaatacaacactgtccccataagcctgtcaataatggcttcttgaggactactcgaaggatgagtggacattgaagcatagtgtgactaacgaactgctgtatgagaagataaactccaagtacaaatctagcgagttctgctatgtggtcatagttcacctggattgcaatttgatttactatattactagagactacacgctgatggcatatgacatggatcataaggagtcacgtgttattcaagctcttgggtcagattgtatactggagtgtcttccctatgttccactctatgcagaaacactgtccaataggagctaagtcagtttctttgtagtacaccagtgttgcttggcatttgttcccatgaaatgatatttagacctttttcaaaatctatgtatttgggccttttgtgaggatcagcatgaacacatttccaattgtcatttgtgaaatgttggtctgcaacttattgtatcgtatgattaatgctgatgtttgttagctatgatgtttgttagaatgtaaaaaaaaaaaaaaaaa

SEQ ID NO: 88614 - DNA, 608 bp, Oryza sativa
  Clone ID: PAT_MRT4530_87448C.1
ttttttttttttttttgatcaaaacgtaatgactaaagttaactgtgtcaaatatgtatgaacagaagaaacacttactaaatacagtagtatggaagcatattgagtagctagccagcagcacactgaacatacacacagcatacagatagctagagtacaacacaaaaaacagtctccggctagtacaattatacaacacaatactagctagctagctacccacatgtgtatatactatatagtacattagcaacttcatttttccttgaagcaggaaagccggtactactggtttacacttcttcggcagttgaaaaaaaaataacaaaactatagaatcacgagcactcattaccacaaattatttggcggccttccgtgattatttcttctgaataataacttaacttaactgaaccaacgaacgcttgtagaatttgagtacgtacgaattaagtatgtgccaacatgcatgcatgcgtgcacatgcagagttgcagtagatatcgatggagtcgatcgagatgcagaacggagaggagacatcgacgaattgaattgaagcaatttaggaatctatcaagctcagtcgaatccgaacctac

SEQ ID NO: 88615 - DNA, 1557 bp, Oryza sativa
  Clone ID: PAT_MRT4530_87449C.1
tctggtgtggcctcggcctcggcccctctagggtggtggtccacctcctcctcctcgagtccctcttatagcccaccgccaccggccgccgcgcgcccatggccgccgtgttcttccaccatgttgtcggcgacctcaccgtcgggaagcccgaggtcgtggagctgcacgacaccgacacgctcgacgccgccgcgcgggccatcgcggccagccccgagggcgccgtgcccgtgtggcggccccgggcggcgcccgacgagccgccgtcgggcgccaggttcctcgggatgatctccgcgctcgacatcgccacgttcgtggccgcttccggcgtcggtgaccgggccatggccgccgtggtcggggaggtcgtgcagcccaaccctggcctgctccgggaggtcgatccaggcacgaggttgatcgacgcacttgatttgatgaagcaaggagtgaagcgcttccttgttcgaaaaaatggcgcctggagaggcatctccaagaggttttcagtgctttacaacgggaagtggctgaagaatatggaagcaacatctccaacctcagctagcagcagtagagagctttcctcctctaccagttccacctacaagttctgctgcctctcaagggaagacattctccggttccttattggatgcctcggtgcccttgcgcccattccactgtctccaatctcttcccttggagccatcaatccacattactgtcatgttgatgcatctgtcccagccatggaagcaattcagaaggtccctccagatccaagtgccgtagctgtagtcgagactacaccagatggaactcgcaagatattaggagatatctctgcctacaagctgtggaaatgtgactatgttgcggctgcatgggcactgataaacctatcggcggggcagtttgtcattggtgccgacgataacgaatcaacaccgatctcagccatcccagtgcctcccatcagctcatcactagtggaagagatcggacctgggcgctcacccagggcaaagaagttcagcagcaggagcatcgggttcctgaacagccaggcgcaccagatggcgttcggtcgaatgaggagcatgtaccgcgggaggagcgcgccgctgatgtgcaagagcacgagctcactcgcagcggtcatggcgcagatgctgtcccaccgtgccacgcatgtgtgggtgacggacgcggagtcggaggaggatggcgtgctcgtcggcgtcgtggggtacaccgacatcttcaacgcggtcaccaagagcgtttatccggcagcatcttgaatctctggatgcttgatccgtaccgtttgctccgttggtggttccttggttggccctagtgcgtgccgtgaactgtacactgcgcctggttggttcttttttgtctttcgagagttggggagttttttgtccgcatgagactgaaactgaagggtatattgtgaattccttgtggatcggtgctactatggcagactcaggcttgtgctttggtacggtggaatgatagtctactcattcgtat

SEQ ID NO: 88616 - DNA, 849 bp, Oryza sativa
  Clone ID: PAT_MRT4530_8744C.1
atgtcactttgcttcatacacttgaaagctaatggccagtacaccgaaaggcctacagaagttcaatcaattggagcaatatacggccaggagggtgcatgtctttcaaccttcgggctcgatgtagtcgtacaaaccgtctcctcctaccgtggagatttcactcgcttcgactaccggaccaacggtcgcgacaacgggtgctcggattacaacgaaactgacacggatggattcggaataattctaggagtttggaataggaaaatcggatttttcttcttcttctcgttctgcacaggaacggccgaccactccatggcgtcagtggtggagatggccggcagcggcggcgaggctggcgacggcggccaggagctggaggcggcggcggccatggtggcggtggttccggcgaactccggtgagggcaacgggcctggtaagcatcagggaaggaaggggagcgcggtggtggcggcaactcggcctggggcggtcgggagcggcggcgcgccgtacggctggcggcggccgaacagagggcgacgccgggaggcggcaccggtggcattccggcgacggattggatggggaaagagaggggaaagggacggaagtaggggcggacttgatgaggtgaaagaggttgaaaatgcgcttcttttgcctccagtcttgagccttctagttgagagacgaaggagttacagaagcgggaagatggaggtgtcgcggcggcattcattcgtcgttcgtcctcgtgcgagcgtgtgcgggcgtgtggcgcgcgcggggcggcatgagctcagcgcgagcgcggcgcgaggcggcacagggttggcgtga

SEQ ID NO: 88617 - DNA, 1612 bp, Oryza sativa
  Clone ID: PAT_MRT4530_87450C.1
ctaagcagtcgagcaagccagagcacctggtcacttattgtacttacaatgtgttattttgaatctattcaggggaagacagttgaagttgggagagcacactttgagacagaaactacaagatttaccattttagatgcaccgggccacaaaagttatgttccaaacatgataagcggtgcatctcaagcagacattggtgttcttgtgatatctgctcggaaaggtgaatttgaaactgggtatgaaagaggcgggcagactcgcgaacatgtgcttctggcaaaaactttgggtgtttctaagttggttgtggtcataaataagatggatgaatctactgttggctggtcgaaagaacgatatgatgaaatagaaggaaaaatggttccttttcttaaatcatcagggtacaatgttaagaaagatgtccacttcttgccaatctctggtcttttggggactaatatgaagacaagaatggataaaagcaattgtagctggtggagtggtccatgtcttttcgaagttctagattgcattcaagtccctttacgagatccaaaaggtccagtaaggatgccaatcattgataaatacaaagacatgggcacagtggtcatgggaaaaattgaatcaggaactatctcggagggtgataacatgttggttatgccaaacaaggtaacatcttttattgttgatgttttcaactgtgatgaagatagagtgagaagtgctgcacctggtgagaatgtccgagtcaaactgtcaggaattgaagaggatgacatcactgctggttttgtgctatcaagcattaaaaatcctgttagtgctatatctgaatttcgtgctcaactacagatattggagttgcttgacaatgtagcaatttttactgctggttacaaggcagtgctgcatatccactctgtagttgaggaatgtgagattgttgaactcatagaagaaattgatttgaagaggaggaaagaaggtgacataaaaaaaaagaagtcaaagaggaaacctctttttgtgaagaatggagctgtcgtcgtttgccgtgttcaggtcaataatttgatttgtatcgagaacttctctgagtttcctcagcttggaagatttacgctccggactgaaggtaagacagttgctgtaggaaaagttgttgctgttccacctgctgggagctcaacatttaatgtttagaccttccagagcttgaggacaaatagaaggttccttgcctcaggtaaaactgttgactagtccggataagttggagcttttgcacaaaagagggaattggagcaagaactgagttggagcgttgattactgatttcgtggcgttcgtggggtttcctcaattcagcatctgatcccatttccatttctctactacttacaaatttcatagtggtggtggcgagtctacaaatttcatagtggtggtggcgacatcccggataatctaagggttaagattgctagttgctgttgagttctcaagaggtcctagattaaaaacgcaattacattataaaattctttccgattcttggttgatatttttttattgaaaaagaggtgttgatccctcc

SEQ ID NO: 88618 - DNA, 1639 bp, Oryza sativa
  Clone ID: PAT_MRT4530_87451C.1
acccgatgcctcgcctcgccaagaagcccgtacgtaccttcccggctgctccacagttcgggcaccaaaaccgcctcttcctttctccgggtgcagtcaggatggcgttagaggccgtggtgtttccgcagggccatttcggctacgggtgcggaagggactcgccggcgtacgggatgccgtggtgcgacgtcctggctgctgccggcggcggcggcggcttcggtgagttttacggagtggacgagtgggatgaccagctgcaggtcgcctccgtggatgagtgggaggtggcatccaaggataactcggatgcttccacggagggcaaggcggcggcggcggagcgggcggagccggtggccgccgggaggaggaaacggaggcggacgaaggtcgtcaagaacaaggaggagatcgagtgccagcggatgacccacattgccgtcgagcgcaaccgccgccgccagatgaacgagtacctcgccgtgctccgctccctcatgccggcgtcctactcgcagaggggtgatcaagcatcgatcgtcggaggagcaatcaactacgtgaaggagctggagcagctactgcagtcgctggaagtccaaaagagcctcaagaaccgcagcggcgccatggacgccgccggcgattcccctttcgccggcttcttcagcttcccacagtactccacgtcgcctcgcactggctgcagcgccgccgccagcgccgggagctccggcagtgcgagcagcgtcgtcatggacgacacggcgggctccgcggagagcggccggcagtcggcggccatcgccgacatcgaggtgaccatggtggaagggcacgcgagcctcaaggtgctcgcgcggcggcgaccgaagcagctgctgaagctggtcgtcgggctgcagcagctgcgcatcccgccgctgcatctcaacgtgaccaccgtcgacgccatggtcctctactccttcagcctcaaggtggaggatgattccaagctgggctctgtggaagacattgccaccgctgtgcatcagatcctgggcagcattcagcagcaggaggccgtcctctccatcagctgacggcgcgatcgatagctgctgaggatgatggcagggccatgagaccaccgcctcgcgtccgtccacctcatcgtcgccagcgccggccatcgatatctctactcccttaaatgtgtgaatgtgattgtaccctagccaacagagtgctgcatgcatgcagtatctctacacgccttaatgagaaatctataccaacagcagcagcagcagcagaagcagagctgtagctagatcagctagagtattttcttagaacatttagcaatggcaaaaatggtcaatattaatatgcgccaaccgtgtgtaatgtgtgcactttcgattcttctagaactctgtacgctggatgcacatgtaccgcagttactacacccacgtacatttctgtagttcatcttcacttcaattaatgcatcatggtctaccactctgtacttataaaagaagtcgtttagaataatatttaagtcaaccttgagaatataaaaaaaaaaaaaaaaaaactcgagactagttctccctcgtgccgaattcctgcagcccgggga

SEQ ID NO: 88619 - DNA, 204 bp, Oryza sativa
  Clone ID: PAT_MRT4530_87452C.1
atgtgcttgccgttctcgtcctgctttggcggcaagaacgagctggacttcggcgaaaccagcagggaccccgactaccatcccctctcaaccacgcccagcggcaacagctaccaaggtggtgacgccaccgaaacgaggcttgtagctcccttcttcttgtatgatataatcgaagtggatcttgtgtacattcagtcctaa

SEQ ID NO: 88620 - DNA, 272 bp, Oryza sativa
  Clone ID: PAT_MRT4530_87453C.1
atggggtcctatcaagcagtagcagcattgtggcgacgggttgctcctgttcggtggacaacctgcttccacgcacaagatcgagaaattttcatccgacgtcatgtgctgcgggtgccagagtcggtgaccacggcggcggctacatcagaaaactacactgttggcgttgcaagggatccaaagagcacagccaagaagatggtcatcatgtacacccgcatgctgctcctcgatcatgttggagcttcatttcttgttcgatctaacga

SEQ ID NO: 88621 - DNA, 166 bp, Oryza sativa
  Clone ID: PAT_MRT4530_87454C.1
aactttgccaatggtgaggatgtgctaatggcttggtggttgccaatggctaggtgcttgttgttgtgttgcttttttagcattaatgcatgtaatagaagtaaatttaaacgatttgaacgaagttatacactcagtatgtaacgaaaaaaaaaaaaaaaaaaaa

SEQ ID NO: 88622 - DNA, 283 bp, Oryza sativa
  Clone ID: PAT_MRT4530_87455C.1
aacccgttgatgcccgtccgtttccttaaatgcagtctctgcgaccaaaattttatctactatcatcttccattcctataattacttacattcacttattaatcaacactattatctacgtcatcagattctaacatacaaccctcctatttttcacctattatctgagcttatgaggaaccaatatatctcatatacacattaaatccacgctagtcctttaaatacttttcttaaagcaactgttttacttctagattaatttaaatcttttacctttacc

SEQ ID NO: 88623 - DNA, 717 bp, Oryza sativa
  unsure (1)..(717): unsure at all n locations
  Clone ID: PAT_MRT4530_87456C.1
ccggccgggggatactcctccgctcgctttgcgccatcgccgccaccgacgccttcctccgtaagccctccccctcctcctccgccccattcctcctcctcctctccccgtccacgccgcgcctccacatccgctccacccgccgcctctcactcgcgcagctcgctgcatccgactccttccaatcctcttcatcctccgccgccgcgcttgacttcgctgagcccggcgccgccgacgagtccgatgtgccggaggagtctgaccaggaggaggggtacgcgccggaggccgaggaggcggcggatgagatgatgatgaggaggaggaagccgtcgaggcctccgcggaagttgcggaggagcctaaggacgtagaggaggtcagcgagtacgtggagccgcctgcggaggccaaggtatacgtcgggaacctaccctacaacatcgacagcgagcgcctcgcccaactcttcgaacaggaaggcgtcgtcgaggtctccgaggtcaatcagtgactaaatggacgcagntttatattgacccctcatcatcccagaaatagcatacaatctagatgatattgttggtttggataagttaattaaagttgtcagtattttaaatagctaaatgggtaatccctctggctgaacaaattaaaaaatctatggttttttttttccttggccaggaagggcaaacaaccaagacttcc

SEQ ID NO: 88624 - DNA, 375 bp, Oryza sativa
  Clone ID: PAT_MRT4530_87457C.1
atgactgaggtctgtagagagcttcgagtcgaacgccctgctcctattgagtcaacagcgggttacatctccttgaaaaatggggcttctgctcagctggccggtattggcaatcgcatcgacaacagcttgaagggagaacgtcgtcaagcgagccgatacaccggtggtcacgtcctcgcctgtttccaagatcaccgcacacagatgaacctcgacttcctcagggaagggtttggacggtcgtacctatccttcatcgaaatagatcgactcgcacagtctctagtgcctttagccgagaaagtttttgagtcccatctgacaaagccttatcagctctgctttcttggaggttttgttaaagtagtgtaa

SEQ ID NO: 88625 - DNA, 405 bp, Oryza sativa
  Clone ID: PAT_MRT4530_87458C.1
ctaatatccgccgtccgatctcgaggtagggtcgatctggccgtccacgttcctcactgtgctggcccttccgcacccgtgggatcgtcggatctctaacggacggtgtggatttcgcaagcctcccctcggtgccaggatggggagagcaagagcagcagcttgggcaccaaagccacgacggcggaaggcatgggctatggcaaagtacggcgacgacggcagcaaggcacaaactatggcaaggtatggtgacgacggccgcgccctgatcgggggcgcccagcccaatggctggtgggcctccgtcacccgatcaagggggcacagccagtgacgggaagactccatcgtcgcgccatgacctcgccggaatcgcctacgaccgccactgccgcgcagcat

SEQ ID NO: 88626 - DNA, 297 bp, Oryza sativa
  unsure (1)..(297): unsure at all n locations
  Clone ID: PAT_MRT4530_87459C.1
ccnggggttggagggantcgggcacgagctcgtgccgaattcggcacgagcccaatccaatcttcttggtgccattcatttctcagcacatcaacacacatccaaattcatttctgagctcatcagctcgcatcatcactcacaagatgctgcaacggcaatccaactgaattcgatccccaagtaccaggctatataaatcgaagccattctcgccatggatgagcacacaacacacacaagaaagaagaagaagaagaagacgacggcgaagatgaagggagcggctgcggtggc

SEQ ID NO: 88627 - DNA, 496 bp, Oryza sativa
  Clone ID: PAT_MRT4530_8745C.1
atgttgcttggagtgatccagtccaagaaaagcgctggcggtgaggctggcggcggcgggcagtaacaggaggcggaggcggccatggtggcggcaactccggcgaactccggttcgggaggcggcctggtgaggttcaatgaggcgagaggagtcccagggtggtgacggccaaagctagcgggccctggagcggtggcgcaccatgcggctggcggcggccgaacagagaggcgacgccgagaggcggtgccggcgatgttccgacgatagattggatgggtaaagagaggggaaagggatggagggacgaaggaaatacggaggctggaagctggaggtgtcgcggcggcattcgttcgtcgttcatcctcgtgagagctcgtgcgggcgtgtggcgtgcgaggggcggcacgagctgggcgcgagcacgacgcgaggcggcacagggttggcacgaggcagctcgagcgcggcttgcatcgggctggctcag

SEQ ID NO: 88628 - DNA, 579 bp, Oryza sativa
  Clone ID: PAT_MRT4530_87460C.1
ctaatggtccatcgaaagatcatttttcccatggttaataggatctgtcaccccagaaaagagttgttgccacgtggctagcttgactcggtcttcatctgacgtggcattgacgtgccgcttacgtggcaattcgatcgggattggagggcacggtcgactcccggcggccccacctttggttacaatctctctagccttgactacctcctctgctactggaatcatgcgcttgattggatcataggccgaagctgcttccagtccaagaagagtacagcctgcggctggccacaggaggagtcggagcgcccgactgcgggctccaacgacgaggacaacgactccggcgccatcgccacggcgcacgccaagaagccgttgtccaccattgccaccgcgctcgagaaggagatggagtttgagtggcgtcaaagtattgagggcggggatgcggccaccgcagctcgactgcttcttgcgcttcccgccgtcggccagcaggggccacatcggccggggcacgaaaggcggcggcgctgccgccgcgagctcgatggccttctcctttactgccat

SEQ ID NO: 88629 - DNA, 312 bp, Oryza sativa
  Clone ID: PAT_MRT4530_87461C.1
ggaaaccgaatccatccatccaaacgtgcttgatcaatttaagggcaaaatcggatcaaacagggggacacaaattggccaggcatatggggaaaatcaagatagacagatgctactaatattactggcatatacatattttcctttttttagcttgggaggagggagggggtgccaaaagaaacagctttttggggaggcacctgctaaggctaaatacctggcccaattgacaaatttggccaaaacaccaaattggaaaacccgagctaggggcccccctttggctaaatcttttcggttaggggatgt

SEQ ID NO: 88630 - DNA, 685 bp, Oryza sativa
  Clone ID: PAT_MRT4530_87462C.1
tttcggccgtttcgtcgatctgcggtttctcgccttgtccaccaccacttccagagccacctcctattgcagaacttgttgatccaaccccactacctcctccgcttccgctactaccaatcacgctaccagaacccccgccgcctcccactgcattcccagcacggccaactccatttcctccaccaaatccacctccgctacttcccgcactttcacctccaccagcaccaccaccaccccctgtgcttatactcactccaccatgacctatatggacaccaacaccgccacctcctcctcctcctgcgtgcacgccaccaccgttaaccgcggcacctcctcccccaccaatccccacatccaccccaccatgacccacatctatgccaacacctccacctgccccaccacccacacttgcgccaccaccacgtgtagtgccggctccacctccaaagccaccgcctataccaattgatatgtcgtgacctccatggctaatactcacaccaaaaccccgcccacctcttgcgccatcgccaccttgcccccccggggccttgctcccggtgggggtgtttttatcggaaaggaggagccgcgcgtgcgcaagagggagaagtgagaagcagcacaatagtataactgagatggccagtctgcagggtgtggaagtagccat

SEQ ID NO: 88631 - DNA, 1296 bp, Oryza sativa
  Clone ID: PAT_MRT4530_87463C.1
atgtcgctgcccgacctcttcgagaagcttctcggcgacgatcgccgcgacgctggacgacgacggggaggggatcgcggccaccgtggcgcgcacggcttccacggcatgaacgcgctgcacgccgccagaagcctgcacgtctaccgctacttgctcgaggtggccaacatggacgtcacaagccggacaccactccaggtaggaagactcccctcgagcgagccattgccggtggggacctgccctctgtcaggtatctcattgatcatggtgctgatatccatcatgaacgtgaaggaaacatcacttttcttcattcagctgcaaagaaaggggaatatcctatcttcttgtaggattccctgctacatccaatctgcattctgtcatgatgagcagccttacgttgaatgtggagaaaaatgcagacaatactggaggactgaaatagtaaaattgctgctttctagaggagctcatgttgatggcaaatcagatcatgggacacctctgcattttgctgctattaaaggatatgaaagtactgtgaagattttgttggagcaccaagcagatcccaacaaggttatgccttcttctcaagcaacacctttatctgcggcgttattcactacttccttaccttgtgtgaagctattgatccaggctggagctgatgtaaatgctacaaacaaccccctggcgagagctgcagggagtggattaactgaagctataaagttgttgttgaaggctggagcaaacccaaattgtcctgacacgcatggtagaatgccaatagagctggctgctgtgtatggtacaagggaagatgttgagattctatttcctttgaccaacccaattccaactgttgctgactggagcgttgatggggtaattacttatgccaatctggaacgcaagaagctagaggatgatgattacgttaacacgaaaatgtctgacctgaaacaaaaagggaatgaagcatttgatgagcaggattatgaaaaagcatcagtgtggtacacacaggcactggaagttgatccttgtgatgccacaactcttctaaagaggtgtctttgctggcttcgcatgggtgagggaaaaaaggctgtgaaagatgcaaccacatgcgcaaaacatcacccgaagttgtcggaggcctaccatcggctaggagaagctctaatgcttgagaaggattatgagaaagcttgcgtggcgttgacccatggtatagagttggatcctgaaagtgatgagatggacaaactgttctggtaa

SEQ ID NO: 88632 - DNA, 1726 bp, Oryza sativa
  Clone ID: PAT_MRT4530_87464C.1
ggagagaacttgtctccacttgggttgtttttgcttttaggtcatcattccaaccagcagtttcttctccatctggagcaaataaaagccatcattcctgcggtctcgcatgctaaaatcaccacaagcttactgggacagtctgggctgaatgttgtaagaatccatatctcaaacaggatgtcaaagttgccattaacctatgcttcagttctaattcttccgaagaagacgccgttctccatactcccaccatgaattcaagcctaatgccaagtactagtactgcatatgcacaaaattgcagctgagctactagttaaactgtctctaaaccaacaaaaaagggcttcgggtcactcggcattactcagttcttcaggtccatcgcttaccagaacagtttgtccatctcatcactttcaggatccaactctataccatgggtcaacgccacgcaagctttctcataatccttctcaagcattagagcttctcctagccgatggtaggcctccgacaacttcgggtgatgttttgcgcatgtggttgcatctttcacagccttttttccctcacccatgcgaagccagcaaagacacctctttagaagagttgtggcatcacaaggatcaacttccagtgcctgtgtgtaccacactgatgctttttcataatcctgctcatcaaatgcttcattccctttttgtttcaggtcagacattttcgtgttaacgtaatcatcatcctctagcttcttgcgttccagattggcataagtaattaccccatcaacgctccagtcagcaacagttggaattgggttggtcaaaggaaatagaatctcaacatcttcccttgtaccatacacagcagccagctctattggcattctaccatgcgtgtcaggacaatttgggtttgctccagccttcaacaacaactttatagcttcagttaatccactccctgcagctctcgccagggggttgtttgtagcatttacatcagctccagcctggatcaatagcttcacacaaggtaaggaagtagtgaataacgccgcagataaaggtgttgcttgagaagaaggcataaccttgttgggatctgcttggtgctccaacaaaatcttcacagtactttcatatcctttaatagcagcaaaatgcagaggtgtcccatgatctgatttgccatcaacatgagctcctctagaaagcagcaattttactatttcagtcctcccagtcctaaataacacacaaaaagagcagttcactcttggaggaacatgtttcagtggagtattgtctgcatttttctccacattcaacgtaaggctgctcatcatgacagaatgcagattggatgtagcagggaatcctttctttgcagctgaatgaagaaaagtgatgtttccttcacgttcatgatggatatcagcaccatgatcaatgagatacctgacagagggcaggtccccaccggcaatggctcgctcgaggggagtcttcctacctggagtggtgtccggcttgttgacgtccatgttggccacctcgagcaagtagcggtagacgtgcaggcttctggcggcgtgcagcgcgttcatgccgtggaaggccgtgcgcgccacggtggccgcgatcccctccccgtcgtcgtccagcgtcgcggcgatctcgtcgccgagaagcttctcgaagaggtcgggcagcgacat

SEQ ID NO: 88633 - DNA, 392 bp, Oryza sativa
  Clone ID: PAT_MRT4530_87465C.1
agaaacgaacacacatgtggcctggatcaaaagcacgatatgtgtgacatggagctaacgctcgtcgcgcgtagaattgagcgctagataccatgcatgcatgcacaagcacttaatcgaaaacctacataaattatgctaaagccggcgtaccaaatggtatattgttgtgtgagggcacgtacgtgctagcctgctcgccatgagcaggccgcgccgttggacggcggcggcttcttatcctggatgaacgcgcagcccgcacgccacgccgcgtgcgatccgcagacgggccttcaatctcatctgtagtggcgactatgccccgaatcgtctgctgaaggggatgttgaccatgctgccattgatggcgtactcatggatgaggagct

SEQ ID NO: 88634 - DNA, 916 bp, Oryza sativa
  Clone ID: PAT_MRT4530_87466C.1
ggaaagtgtggtgcccctgcacgtactcggtcggggaatacccacgcgtaccaacacgtgacgcctctggtgtatcaggctcacatgatgcacacagaccgcctagctctgccatggttgaatgacactggccatggcgggtcgccgtgttcgacgccgccgtcgtgacgccggtggctgccgaggagaggctggtggtgggcatgactctcctccaagctgccacatcgacaggagcagtgtgcctcgacgggagcccgccggcgtaccacctccaccggggctctggcggcggcgccggcggctgggtgctccagttcgagggcggcgggtggtgcaacgacgcgccgtcgtgcgcggaaagggccggcacgcggcgaggctccacgcgctccatggacagcctcgaggtgttctccggcctcctcagcaacgatccggacatgaatccagatttttacaactggaatcgtgtcaagctgaggtactgcgatggtggctccttcgccggtgattcagaactcagaaatggctcttcagtcctctacttcagaggtcagaggatatgggacgctatcatcagtgatctccttccaaaaggccttgcaaaagcccaaaaggtattgctctcaggctgttcagcaggaggcctagctacattcttccactgcgacgacctcaaaggacgtctcggagatgctgtcactgtgaaatgcttgagtgacgcaggatttttccttgatgtgtaacagtggagtctaatcaagcaaaaaaaaattactttggttgactgattcttgaactcattgggttgaaacacaaaaatttactttggttggtgtcctgcagggatgacattactggcaacaacactgttgagcctttctttaggagcctagtagctttgcaaggagct

SEQ ID NO: 88635 - DNA, 373 bp, Oryza sativa
  unsure (1)..(373): unsure at all n locations
  Clone ID: PAT_MRT4530_87467C.1
gattgaatcataacttttggtagaggtctcacaacggttgcagtcctaatcaattaaacttataacaccttggaaccgtgctggaataacaatgtggactaaaagtacctgaacacgaggtggctttaatgagaatcacgaactagcacaaatctatctacaagctggcaagcctaactagaagagcgcatatgcatgccttatacacgacgcattattacacgtntgagcagtggcacaaatcacagtgactatcacccgaacgagatgcattcactgataccagtgcctccgggcatggctatccctgttaccaaaaccacactacatgctcatacagcgacagcaaatgacactcaacattgcaagtgct

SEQ ID NO: 88636 - DNA, 1296 bp, Oryza sativa
  Clone ID: PAT_MRT4530_87468C.1
atggctcagcgacactggccatggcggctcgccgtgttcgtcgccgccgtcgtgacgccggtggctgccgaggagaggctggtggtgggcatgactctcctccaagctgccacatcgacaggagcaggcgaggaattcttcttgttcttcttcttcttgttgttcttcttcttcttcttctctgtgtgcgatttcttagtgttcgatcgattgcattgcaccgccgcgaatcgctggcgagtgtgcctcgacgggagcccgccggcgtaccacctccaccggggctctggcggcggcgccggcggctgggtgctccagttcgagggcggcgggtggtgcaacgacgcgccgtcgtgcgcggaaagggccggcacgcggcgaggctccacgcgctccatggacagcctcgaggtgttctccggcctcctcagcaacgatccggacatgaatccagatttttacaactggaatcgtgtcaagctgaggtactgcgatggtggctccttcgccggtgattcagaactcagaaatggctcttcagtcctctacttcagaggtcagaggatatgggacgctatcatcagtgatctccttccaaaaggccttgcaaaagcccaaaaggcttcagagcttgccctgttgcctttgttcttaacaagttctgaatttttcagggatgacattactggcaacaacactgttgagcctttctttaggagcctagtagctttgcagggagctgagaagaatttgaacaaagactgtttaagttcaacagactatccataccagtgcttctttccgcaatatatacttccatacatcagaaccccttacttcattttgaattcagcttacgacgtatatcaggtgcaagtctattgctcttacgaaattcacactaaagattattcagatttagattccattgaacaggcatatagtgagctgcaggaaacatggttagcaccaaattcgcccaggttgcataacaaggcagacatagatgatatctggtttgtttcagacaattgcagagctggttggaattggggatttaggagtttggcaggggagcatccatgcccaactgtgatcaaaataacaaagatttcatttagtttggtgaataaactgaaggatgaacactgttacaataatggagactcaggcatccacaatggaggtccctgcatgaacattcctcccaaattctacagcatcagcctacagatgattctttacctgtctatattgcacattgcagaacaattcataatttcatacgacatttga

SEQ ID NO: 88637 - DNA, 618 bp, Oryza sativa
  Clone ID: PAT_MRT4530_87469C.1
atggaaaacactattcgagcaataaagatgccaggagaagattccatggggaccactcaggccagctggtgccaaaagaccgttgatcagatcatcgacttaatttggctgcatctctgccacgtcgacgagagtcgagactggattgataggaacgagctgataagtgatccacgcattcatgcatgtctagtcgtccttggccaagccgcgaatgtggcgaaggtgaagccgtcactggtcgcctgcggcggcgctgcctttggatttcggctccgtcatgctggaggtggccatggcgaccaaaggacgtcgtcccgcggccgcagccgcaagatggctgcgacgatgacgacgacacctgcaagaaccatctgggccggcaacgctggcaacggccagtcggccatcaccgtggatcttatgacaattaacaccggcagcaatgacgactatggacgttactacagttacaacagtgaccaagactgcaatacttacgatgagcacctccggaagattgggccggcatatcttgacattgacgaagtcaccacaggcgcctcgctgtcgacgggtcgctatctgagcacccagacaaaggcagacaaccactga

SEQ ID NO: 88638 - DNA, 358 bp, Oryza sativa
  Clone ID: PAT_MRT4530_8746C.1
atggaggcggctcaggctaggaggacaatcccggaaacgagcaccggcatcaggactcaggagaatagatgtgcctcatccttcatcttgaatctatgcagcagttgcgccccctaccatcactggatgtcgctccctaggagcgtgccatggaacttccatgagcaggaggatgaagagcgtgacttgaggtcagccttggtcaatggtgagaaccgggtctatgctcagggtggagcagagggaggagttgaggtccagacggtcaaggataccgagacatgcgcaggcggcagggagacggtccgaccggcggcgtgcgagcggtccgaccggcggcgacaggactacgttgagg

SEQ ID NO: 88639 - DNA, 615 bp, Oryza sativa
  Clone ID: PAT_MRT4530_87470C.1
atggacagcgaggaggaccctttgttgaggttaatgaacaaagtcagcttcctgttctggacgacactgttaccagtttttctgctagggatcttcgtcggcgcccttctttccaaagaatgcgagaaggccaagtacaccatggatctcgccgccgtcgaggggatggacgtcgccgccgtcagcacggttgtctcccccgcgttcaacctcaagctgcgcgccgagaacccgcgcgccttccggccatggtgtctcgaccgcggggacgtggtggtgtcctactccggcgtggcactcgcgtgggggcgcgtcccgggcttctgcgtgaggaggagggcgatggccgagctcacggtggtgccctggggcaaggacgtccggttgtcggaggatctacgcgaccttcttgtctcagagttgcagcagggcacagcgaaggtttccgtcgagatgaagctgcactactacgctaatttcggcatggctgccttcgcgcccagctctgggacgacgtcgatttcacaggagcttctcctggactcctgggaggacaacatgaatagcagtttgctcaagacgaaggctggtctcccgggaagacaagatgaataa

SEQ ID NO: 88640 - DNA, 272 bp, Oryza sativa
  unsure (1)..(272): unsure at all n locations
  Clone ID: PAT_MRT4530_87471C.1
taagatcgaggaggtagantaagcgggaaatttgttagtgaccngtgtttnaagttatnttattgnattattagtgtattttttatgttgtgttaaaaaattttgttgctatgatttatgatgataccttggtttgtttgggnagtctttttgaattgaagaatgngttgggagttttatgagaattntgaattgngtgagaaatttaattattgtggtgttgcagngtttattaaaaaaaaaaaaaaaaaaaaaaaaaaaaaaaaaaaaaa

SEQ ID NO: 88641 - DNA, 1137 bp, Oryza sativa
  Clone ID: PAT_MRT4530_87472C.1
atggatttcagctgcttcaatccccaaccagcaatctctcatggcattccatttgattcctttctgctgcaagatgagctccatcatcatgctgatcttgatcatccatttgaagctgaaggcatcactgttcatgggtctgaacttgaaggtggatctgtgcttccttttgcaactcttcatgatcttgatcatgagttcttcagaagaggaagtaggaaggatttcatcgacaatgcttcgtcgatctttctgttgaaccccaagactgaggtttctcatcttgtaagagatgttcaagttggagcatttggtgcgtatgagatgaatggcaggttgatttcaagaaacaaggcgtcaaggaaaggtatcaagaaggctgatgctgtcaaaggccactggacagtggaagaagacaggaagctggtgaaattagtggaacaatttggactgaagaagtggtctctgataggggggatgctgcctggaagagtaggaaagcaatgcagagaaagatggttcaaccatttgaggcctaacatcaagaaagatacttggagcgaggaggaagacatggttctgatacagatacacaaggaagttggcaacagatgggcagagatagcaaaatgcctacctggaagaactgaaaactccatcaaaaaccactggaatgcaacaaaaagacggcaatttgcgcgacggcgcaaccgttctacctccaaatcaggaagtacagttctgcaaaactacatcaaaagtcttgccatttctccacaagaatcacagatgaacaatgagaggtcagaatctaatccatctgacatgatgatcacccaagggacaccctgctgctttgatgggaacaattgcagccaaagtcacacttctgaagagaatatagttcctagctgtggtgattttgcagctgaaatgtggagtggtttgtttgacacaaaggaagatgaggaggatgaagcacaatacctgctctatgacatggacactcatgttgacatgaactgtattttcagcaatatggattatggtagtaacattgagcctggattagcatcagttgtgaaagcagaatgttcagcagaaagctgggctgtgaatttgaaggagacggattag

SEQ ID NO: 88642 - DNA, 543 bp, Oryza sativa
  Clone ID: PAT_MRT4530_87473C.1
gggggtggttttttttttttttttttggagataatacgtactgtacagttttatcactgtcaggtggagagatcaacgtgtcatagtcaaagatgaataatggggagttcgagatggatctccccgcgtatgcacagaatatagcctgtgtttgcaagttcagcttcttcacgcgtgaaatcactccaccatagccatctaaactcaatctcattcctacagtgactacatgaaacgcgatacatccatattgcatcaaattgtacacaaatatcagcaatagctcgtgcaacccaagtggctcttagactgtgcctagtacctattagttgcatctgcagccgcaacacgtggagatcgacgagtgctagatagcaaattactaggacgggctcctcttttagtaggattatcttgatttttcgcccgacttcgagagtgactttggctggtggtagtggtactttcacgtccagtatcaattgataaagccggtggtgatgaatctgttatggatgacgacatgtctgggcataatgagct

SEQ ID NO: 88643 - DNA, 417 bp, Oryza sativa
  Clone ID: PAT_MRT4530_87474C.1
atggggagctcgcatggcgtgagagggcctgggaggggagggctctcgccggcaagctcgcggggagtggatggatctcgtcggtggggtggactgagaagagaaggtggagaagatctctctgtggagaagaaatcgaagagagataccgggaggtaccaaaaactatgttggacgctagccagaaaattccgtgctgaatgcccacctgcagccgtggatgttgcggctacacgttgtctccgtgtgcgtctcttacacccggtgagcggcagtgcagctaaggtatacgcggatgatgaagatggcgcacgagggcaagcaaacaaggcttggaagttggaacaatgtgactgtcacattgtgacaggtgctcatcgactgctaccatatactgaaattttgaagagcatttga

SEQ ID NO: 88644 - DNA, 386 bp, Oryza sativa
  Clone ID: PAT_MRT4530_87475C.1
ctctcgccgcacttccccttcctcctccggcgcggcggcggcgccgaaccacccagttgcggcgtcgagcggcgcggcggacgggcggcggcgtggagcagcgcagtggaagggtggcggcacgaacggcccgagcggcaacgccagaactggtcaacggggtggctcaagcgcctcccctcctcctcctcttctggcgccgcggatcgaggggcagcggcggcggccggcgggacggcccgagcggcggcggggtggtcgagcggcggctcacatgatcaatactccctccggccacctccctcggctccctcccctccccgtccccttcggcggcgctgggcacaggcctcaccctctcctctttccggcggacgacgggtgcg

SEQ ID NO: 88645 - DNA, 1296 bp, Oryza sativa
  unsure (1)..(1296): unsure at all n locations
  Clone ID: PAT_MRT4530_87476C.1
gatctccccgcgtatgcacagaatatagcctgtgtntgcaagttcagcttcttcacgcgtgaaatcactccaccatagccatctaaactcaatctcattcctacagtgactacatgaaacgcgatacatccatattgcatcaaattgtacacaaatatcagcaatagctcgtgcaacccaagtggctcttagactgtgcctagtacctattactttagtccccagagcagaccgcataacggcataagatcagaggagccccacgacctgccggatccagtcatgtcatgtgtaggcagcgcgtccaacatttgatccgcaacacgtggagatcgacgagtgctagatagcaaattactaggacgggctcctcttttagtaggattatcttgatttttcgcccgacttcgagagtgactttggctggtggtagtggtactttcacgtccagtatcaattgataaagccggtggtgatgaatctgttatggatgacgacatgtctgggcataatgagctagcaggaagaaacccgttgattgcagcagcctggaacctctctctcatgattctcacaaacttgaatagatcattactgcagtttagatccttcaccaattcttcagaatctttcagaaatggagtacattgaagtaggttgtatctatctttgttgagctttatgcaaaacgaatattcattgtcagggttttgaatgtcaattttgctgaagacaaatttcaccccttcaccaccaacaacttgaaaaccaagaaactttttgtaccacataaaagcttcatctaggttctttttccctgctgcgtcagttttagcttcaagggcttcaatagcttcaagttgacttgatatgacatttgcatattcatctctactggccctcttatcagtgaccaaacagctgagctgatcattagttgcaattgcgttcgtaatggattgaccagtaaggtcatactttgtcttgttgctaccttggactgcagaggaagtttgaagggtctcagaccttccatgactggacagagcttgtgcaaaatctgcttcaagtttgcgcagctgatcctttagttggttggatttttctcgctgggaaatggtgtggttggagagggagcgggcggagaggagggcggcgctgaatgcggaggccgctgccttggtgcgctcgcggccgtcggcgatctgccgctcgaacgccaaacactgcgccgccatcctcctgcgcaactcgatggctcctcctcctccgccgccgccgccttccatggtgaag

SEQ ID NO: 88646 - DNA, 666 bp, Oryza sativa
  Clone ID: PAT_MRT4530_87477C.1
gcacgaggcctcgtgccgaatacggcacgaggccaccacgctagctgctccgccgctctttctcccgtggtgaacgaaagaaggtggttggaggggggcatccgagcatggaggggctgacgtccagcgagatcgccggcttcggggtgggagccctgctggtgtgcgccaccatcgccgcccagagagtcgacggcttcatcgcctcctcgcagagaacgtcattgggcatgtgcaagaagtgcggtgatcttcgtattgtggcttgctcacaatgcaaaggagtaggttctgttaggaaaggaggactattcacatttggcatgctagatgatatttatgaatcacttggagctgaaacaaagacaagtaacttggttccttgcacaaattgccgttctaaaggccgccttttgtgtccagagtgctccaaggttaggtgattcagttctggtgatgtacagagatacaattttctatcaccacacatgtaggtattgtttcagaactgtggtttaagatatactatatcatcttcatcaaagaattatggcatgtactgaactaaggatgcttattccattttcttttacaatttgattgaaagaattaagccatattatatttttgtattaaaaaaaacaaaaaaaaaaactcgaggggggg

SEQ ID NO: 88647 - DNA, 165 bp, Oryza sativa
  Clone ID: PAT_MRT4530_87478C.1
ccaaacccttgctgggactcaacacactcataggaatttgccagttctaccaagtcatgaccggttcctcaccgagagaacactcaaagaatcgacgttttaaagggatatgcttgatcacggaccacagcgtggggcgtgaatagagacatgcatgcatgcatg

SEQ ID NO: 88648 - DNA, 300 bp, Oryza sativa
  Clone ID: PAT_MRT4530_87479C.1
gcgtgccttcagcctattccaacaaggattttggaccaaaattcatctctaggtcacccaccccacagtgctgtacccacgtcttcctcctcatcctaatccccacgccgcttttctcggcttttcatccccacacgctgattctcgccagaccgcctctttcctctcccctctccacctcaccgacggcggtggcggcgtcctcgatggcggaggcggcgcggtggcctcgctggcggaggtcctcgaggcggcggctcagatctggacggacggcgacgcggcggcacacgtggcggc

SEQ ID NO: 88649 - DNA, 522 bp, Oryza sativa
  Clone ID: PAT_MRT4530_8747C.1
atggtgattagcgtccgtgcattaggtcatggggggcaggtgtcgattcccaacctgtcgttatcgcgtcgtttttctgaggatcattttggctacgaagaaccagtccgcccctacctccctccccactcctctcctcccacctccctcttctcctctcctcccactcctgccgggctgtcgctcggccggcggcgcacggtgccttcctccctctccctcgaccgcggcgacaccgcgcaggcggcggtggtggcggcggcgggcgaccacaacaccccctcccctccctacccttccagatccggcggaggggaggcatgggggcggtggatccggcggcgcgccccccctccccttgcagatcggagcggcggcggcggttgggaggtgtctttagcggccggcgtggaggtggagccgtcggcaggaggtgcgatggcgtcggtggctgccggcaggaggtgcgatggcgtcagtggccgccggcaggaggggtcaacggcggcgggcctcggctag

SEQ ID NO: 88650 - DNA, 417 bp, Oryza sativa
  Clone ID: PAT_MRT4530_87480C.1
gtagacacaggagttgaactaggatatataggttgttaattaaccgtactttcagattcatggcgtacgcttttgccggtgatgtatctgacacaggcttgcatgcatacatgacaccaaaatgcgatgggctactgataagctggtgcagcataacgttcatccatgtaaacatcaaccagttacccttggacacgcctgtgttcggatatctccatcaacatatacgctcgatagacttcgttcgcatcacgtagggaccacgacgttatatccttaattgatcaactcaggaccgcatgcagacggatcgagagatatatgaatctggagctagcttgattgattaaatgacgtcgctctcctcgtgggtatagatgactacgttcgccttggcgcacgcgttacaagccagga

SEQ ID NO: 88651 - DNA, 138 bp, Oryza sativa
  Clone ID: PAT_MRT4530_87481C.1
atgaagaacatagtcggcgacgacaaacgcaaccatgacgatgtcagtgatccagtcaatagcggtgtagcagttgatgataatgacaaagacactcatcagcgtttgcacagtaggtcaaccgtgaaggcgaaataa

SEQ ID NO: 88652 - DNA, 175 bp, Oryza sativa
  Clone ID: PAT_MRT4530_87482C.1
acggcacgagggcaaagcggccgatagtatctactagcctacaagctatctatgaagcaactaggaatatccactagtaccagggtacaggtatacggaacaaaaagaaggggtagtaccacctagaaggacgaccatacctgccagctagaggaaggacatagcctagccatac

SEQ ID NO: 88653 - DNA, 128 bp, Oryza sativa
  unsure (1)..(128): unsure at all n locations
  Clone ID: PAT_MRT4530_87483C.1
aaccaagcaaaaaatatagcacttgagcagggggaaattaacagcaattcgttaacactccaaccactttgctctcaccaattcattagnacagcaaaaatctgtggactcaagcacttaagaaggta

SEQ ID NO: 88654 - DNA, 214 bp, Oryza sativa
  unsure (1)..(214): unsure at all n locations
  Clone ID: PAT_MRT4530_87484C.1
cccacgcgtccgcccacnacttccaccacgctaacacttttagatcgttcgtcatatacgactcacgcgaggacatcagtgacggcgtgtgccttcgctccctgctgcatcgctcctcctaaccggtagccataatccctatcgtgcatcaatagctccggtctgcggggctctactagctgaagcgccagtccacttatagcaccgttttctt

SEQ ID NO: 88655 - DNA, 306 bp, Oryza sativa
  Clone ID: PAT_MRT4530_87485C.1
atgcaaacaagatcaagttttgcacgggtgctgggaggccagaatgcaaaccaaaacacgcctgcagaaaatgcattttatgcagagatgttccagtgcacttctgatgatctgcaattctacatggccttctcaattgtgaccataagagaatacaagctatctttagctgttgcattttcgctgtcgatagaatgttctcccatctttccaaaggttactataggtaacaagatggtgaaacgttgctatctaaaggtcactgagcttggtgatgaggagatgctggcaaagtggcaagtgtga

SEQ ID NO: 88656 - DNA, 1271 bp, Oryza sativa
  Clone ID: PAT_MRT4530_87486C.1
tttcgctgagcaagagaattaaggcaccaggatctacagcatgttctaaaagccggagagacggtggacgaccagtccgcgattcggcgggtagccctctgatcgagagagagagcctcacacccgaagcgccggagagcgagagatcgacaaagcgcgccgcgccggggcagcatgtactcgaaaccggaggacgtcggtggaggcgtcaccaccgccttcgccatgcagggcaaggtccccctcgccgcctggtccaccggcctcttcaactgcttcgacgactgcggcaactgttgcgtgacgtgcctgtgcccgtgcatcacgttcgggcagatcgcggagatcatcgaccgggggtcgtcgtcgtgcgggacgagcggggcgctgtacgcgctggtgatgctcctcacgggctgcaactgcgtctactcctgcttctaccgcgccaagatgcggtcccagtacggcctgcaggagaagccctgcgccgactgccccgtccacttcttctgcgagctctgcgccctctcccaggagtaccgcgagctcaagaagcgcggcttcgacatgaacctcggatggcacgcgaacatggagaggcagggtcacaagccggcgatgaccatgccgccgcacatgttccccgggatgacacgctgatcgatcgagtgatcagcggcttctctgcaagagatgggcaaggcagggcagggcagggcagcttgctatatatgccctacatacgactatacgagccagatttttcttgcgggtttgtaaaaaataattcaaaatgtctataacttattacgcgtaatgcaaattgcaagaagaatttgatggttcgtagatcacatagccaggcttagcagatggggaacttgttcttgttggtttccctcggttcctttttatataaacctaccagcaggtagttgtaatatgtatgcatgtatgtgcaattttcatttcttgatgtgtatgctgtttcgtaaaccatggcacatagaaatgatttccgaattcagtataatacaaatttccactcggtagttgtattatgcatgtatgcaattttcatttcttgatgtgtatgcagtttcgtaaagcatatggcatatcaaagaaatgatttcgattatgccctttcttaattcaaccgaattcaatataatacaaatttcccctttttgtgcaaaaaaaaaaaaaaaaagggcggccgctatagaggaggcaagcttatgtacgcgtgcagtgcgatgtcatag

SEQ ID NO: 88657 - DNA, 301 bp, Oryza sativa
  Clone ID: PAT_MRT4530_87487C.1
atgttgacaaccagcgacaacaacaacactggagacttggggagcctcccgtcaacaccaacggaggcaatactgcctcaaactccagtgaagggccattctcgaggtataatgtttcacaattactgtttgttcttcgtttcctacaactgtcagtcacaatattattgcgttctcttgtctatgttaatgcttattctatattaagcatgctcatgttgtacacatctagcactgtcactagatctactcaaattacaaatattaaaatataccgaattatgaccaaatttccaacagt

SEQ ID NO: 88658 - DNA, 520 bp, Oryza sativa
  Clone ID: PAT_MRT4530_87488C.1
ccggccaacgccgccgccgccgccgccgccatcgtcttgcgccctcgtcggccgccgcccacgcgaggaaacgagcatggacacccaggtgaagctggctgttgtggtgaaggtgatggggcgtaccggctccaggggtcaggtgacccaggtgagagtcaagttcttggatgaccagaaccgtctcatcatgaggaacgtcaagggcccggttcgagagggcgacatcctcaccttgctcgagtccgagagggaggccaggaggcttcgctgaaccttcttgcacgaattcagacatgtctgtcgtactgtggttgtctgattgtctttgagctctagacctgatgacaatctcgcattttttgttttatataactgagctgaatttcacttgatgcaatgtgacatggttgtgctcgataataaaagaaaaaaaaaaaaaaaaaaaaaaaaaaaaaaaaaaaaaaaaaaaaaaaaaaaaaaaaaaaaaggggaaaaaaaaaaaaaaaaacccgcggcc

SEQ ID NO: 88659 - DNA, 520 bp, Oryza sativa
  unsure (1)..(520): unsure at all n locations
  Clone ID: PAT_MRT4530_87489C.1
ccagtcgggccacgctgtggggggcgtggtgtgaccacatgttggtgggggtccccacatgcttatgggggtttgnttganntatgtatggctatatatatggtatgcagtaggcgcgccgttgtgtgcgagtgttgagccccacggagaggagttttgcgagttttagnccacgtgtggntgcagccacgtgcagtgcgccgctggcgctgggtgagtcagcncttaggtgtgtgttgtagttgtgttggtgctgtgtggcacagaggagagtggttagtgtcgccttgtgcacggtgcaagagagaaaaggtgttaggttgtaccgcgtggtatagtagtctgtttgtaagtgccgcgtgtgcantagtagccacgtgttgtcttggcaggctggcgctgctgcgtgtgcccaagccagcgagaacagttctgggcagggagagcgcagtgctaagctaattaagcttctcattccttgtcggtgtgttattcttcggaaaaaaaaaaaaaaaaaaaa

SEQ ID NO: 88660 - DNA, 2516 bp, Oryza sativa
  Clone ID: PAT_MRT4530_8748C.1
atggcgttcttgggatgggcggtcgacatcgcccgcgactccggcgcgtcgagctccgtcgtgctcacctgcgacggctacggctcggcgctctacttctcgccgtgggacagtgtcccgcttccggcgacagcttcccccgacgacggcttcctgctgccgcgtttcccggacgtctgcgtgcagcgctcgcaattcaccaaccacctcgcgccggccaacggcactggcggcggcggctcaagaacgggcgtcaaggaggaagcgagcgaggtgttgtcctggccaccgacttcgaagcaatctgtgcgccggttggaggtggcggagcactggtaccgactctacaagacggacaatcaacggctgtctcctgatagtcaacaggtctcggtcctcgcagagtcgcactgcgatttggcctctggaaactggaaagagatctcgatccaccacaagaaaatgccaagcagcacgacgacgaagacgacaacgccttccagagatgcctggattgtctccgcaagatctgatccatttcatctccttctagaagcacaagcgccgctcggtataaaggcagacgcattgtcacaaatagctgcagtgcaccagagtcacagaaacacatcacacattcgtgagctcagcttagccatggataacgcctacattattgccattctctctgtagctatcctcttcttgctccactactacctcctcggccgcggcaatggcggggcggcgcggctgccgccgggtccaccggccgtcccgatcctgggacacctccacctcgtcaagaagccgatgcacgccaccatgtcccgcctcgccgagcggtacgggccggtgttctcgctgcgcctcgggtcgcggcgcgccgtggtggtgtcgtcgccggggtgcgccagggagtgcttcaccgagcacgacgtgaccttcgcgaaccggcccaggttcgagtcgcagctgctggtctcgttcaacggcgccgcgctcgccacggcgagctacggcgcgcactggcgcaacctccgccggatcgtcgccgtgcagctgctctccgcgcaccgcgtcggcctcatgtcggggctcatcgccggcgaggtccgcgccatggtgcggaggatgtaccgcgccgcggccgcgtcccccgccggcgccgcgcgcatccagctgaagcggaggctgttcgaggtctccctcagcgtgctcatggagaccatcgcccacaccaaggcgacccgccccgagacggacccggacaccgacatgtccgtggaagcccaggagtttaagcaggtcgtcgacgagatcatcccgcacatcggcgcggccaacctgtgggactacttgccggcgctccggtggttcgacgtgttcggcgtcaggaggaagatcctcgccgctgtaagccggagggacgcgttccttcgccgcctgatcgacgcggagcggcggaggctggacgacggcgacgagggcgagaagaagagcatgatcgccgtgctgctcactctgcagaagacagagccggaggtgtacaccgataacatgatcacagctctaacggcgaacttgttcggagcaggaacagagacaacctcgacgacatcagaatgggcgatgtcgctactgctgaaccaccccgacacactcaagaaagcgcaagccgagatcgacgcatccgtcggcaactctcgcctgatcaccgccgacgacgtgactcgcctcggctacctccagtgcatcgtcagggagacgctccgcctgtaccccgccgcgccgatgctcctcccgcacgagtcctccgccgactgcaaggtcggcggctacaacatcccgcgcgggtcgatgttgctcatcaacgcgtacgccatccaccgtgacccggcggtgtgggaggagccggagaagttcatgccggagaggttcgaggacggcgggtgcgacggcaatctcttgatgccgttcgggatggggaggcggaggtgccccggcgagacgctggcgctgcgcacagtggggttggtgctgggcacgctgatccagtgcttcgactgggagagggtcgacggcgtggaggtcgacatgactgaaggtggcgggctcaccatccccaaggtcgtgccgttggaggccatgtgcaggccgcgcgacgccatgggtggtgttcttcgcgagctcgtctgaatattttttggcggcgtttgcatctccaggacgaactcatgtactgaaagcaccaaaagtaagtagcaaataagcttctcgtgagcatacacataacacatgtgagcttgtaatgtggaataaattacacgtagaggatttggaagagagtgactgcgctagcaatcgctctttgagagttgtgttttacagttttagtgagggaccaatttgtatgaatgtgcaataatcatgtataaagtataattgtacacgccaggtatttcaatttcaaaaaaaaaaaaaaatgtatgcgttcgaaaaaaaaaaaaaaaaaa

SEQ ID NO: 88661 - DNA, 198 bp, Oryza sativa
  Clone ID: PAT_MRT4530_87490C.1
gtttcacaaacacggtgggctctgatggcgggtgatcgtccatgcggcgacggggcccatgcaagcagaccccagggactggctgctctgcattgaccataggctcctacgtcgatacatcgcgactctcggacttataaggagcgatgcacaggcgaggtactacactaggcaagttgcacatggtattccaacatg

SEQ ID NO: 88662 - DNA, 1849 bp, Oryza sativa
  Clone ID: PAT_MRT4530_87491C.1
atggagagggagaggatggagtccacgattctcccgcggctggcgctgctgctggagcacgctgagaggacgatccctcctgagcagaagcagctgagaacagacatggagcagtgggcttgcaggcttcgctccgccttctacgacatcgaggacatctaggagctccggctgcgtaaacccccccccggcctgctacagaaaaaacccgaaacctcacttgctacagaaaatcccctttctcgacccctcttcctcctcgattccggcggactcgtcgccggcggcgggagggagaggggtcgtcccccctcccctagtatagctaagtagtcgggctagtctcgttaggtcgggttcttcccgttctcttctcgttggtgcggtatggaagctggagatggaggcggattcgacgcggatgcagcttgtgacggcgatggcgacgcggaaacgacccgagacgatggcgacagcgcggatccggtccgcggcggtggcggcggcttggaggcggtccacggaggcggtagctgctcggatgcggttcacggcggcgacttggttgcggtccacggaggcggcggctgtgcggttgcgacccgcggtcgaggcggcggctgcggctgcgcggctgctgcccgtggcggcggcggctgcacggatgctgctcgcggcggcggcgcctgcgaggttgcggctcccggcggcgaaagctgcgccgttgcacctcgcggcggcgacggctgcgccgttgcagtccgcgacggcgtcggtggtgcggatgtgtcctgcaatggcggcgtggatgcgactcggatgatctccttttcttcaaccttctccatcgagttaccaagacagcatgttcttcgccaccatctttggattaagtctttggttggctggatttggggaaattcttcctctttatctcttggcagcaataaccatgcaggatttatcgttcgggttgagcccagattggatttgcaactttggtttgcaggtttgcagtccaagcttgtcagattcaatgatgaaccccgtggaaatcttttgtggagtccggtgatgttcacaccaaaatctacggcttcgcaccaaacctctcatatgtgtcgtttccgtggaggcagccgaaggggtttaccagttcgtcaagcggagtacatatcaatagaggcccttggatgcaattgtcgcggccctgccacagtaccctatcgatttgctccttcattgctgcttagtttcattataaagtttgcttctttttttcagttgacctctctcttgttaaatatggtccaactcttatgtttatcctgggcgatgtattggggaattcaattcccctaaacgctgtggtttaacaaagtgtgttgtgttttaaaaaaaaaaaaaaaaaaaaaaaggcgaggcatggccgagcgaggaggaggcggcggcgcaggtggagggggtcatcggtaacgaggaggcgaggcatgaccgagcgaggaggcggcggcacgggcggagggggtcattggcagcgaggaggcaaggcacaaacgacgaggagccgacagcgagggcggagggggtcatcggtagcggcgtgggcggagggcgtcggccgcacgatgatgacggcacctaccgcgcacgcgacgacgacgactaccgccggccgcattgctacccctcccctctcctctcctcccagattcggtggaggagaggggcgtcggtggagatgcaggcggaggggtcgatggcggcgcgggtggaggggaagggcgtcggcggcagcgcagccggaggggatgaagagggggagccagctggcggcgctcacctctag

SEQ ID NO: 88663 - DNA, 900 bp, Oryza sativa
  Clone ID: PAT_MRT4530_87492C.1
acctctcacgactcacgagcgctctctctcgaaacctacttgctacagaaatcccctctctcgacccctcttcctcctcgattccggcggcctcgtcgccggcggcgggagggagaggggtcgtcccccctcccctagtatagctaagtagccgggctagtctcgttaggtcgggttcttcccgtttcctcctcgttggtgtggtatggaagttggagatggaggcggattcgacgcggatgcagctcgtgacggcgatggcgacgcagaatcgatccgagacgacggcagcgacgcggatctggcctgcggtggtggcggcggctcggatgcgacctgcggcggcgacaggggctcggatgcagtctgtggcggcggcggcgactcggtttcggtcagctgcggcggcggcctcacggatgcggctcgcggcggcggcggccacgcggatgcggcccgcggcggcggcggccatgccgttgctgccctcggcggcgacggcagcgcggatgtggcccccggcggcgaaagctgcgccgatgcaccccgcggcggcgacggctgcgccgttgcagtccgcgacggcgtcggtggtgcggatgtgtcctgcaatggcggcgtggatgcgactcggatgatctccttttcttcaaccttctccatcgagttaccaagacagcatgttcttcgccaccatctttggattaagtctttggttggctggatttggggaaattcttggtgtttatctcttggcggggaggggcatgcaggatttatcgttcgggttgagcccagattggatttgcaactttggtttgcaggtttgcagtccaagcttgtcagatttaatgatgaaccccgtggaaatcttttgtggagtccggtgatgttcacacc

SEQ ID NO: 88664 - DNA, 1575 bp, Oryza sativa
  Clone ID: PAT_MRT4530_87493C.1
atggagctcatcctgcagctagaagcaaaaactgcagcacaagcagtggtaaccgtcttcttcttcttcctcctccctctcgctcttctgttctactttgcacgagccgcaataagttccagggatagtaaaactcgtgagttaattctgagcaagctcccttcgccgccgttcaagctaccggtgatcgggcacatgcacctcatcggccccctcccgtacgtctccctccgagacctcgccgccaaacatggccgcgacggcctcatgctcgtccgcctcggctccgtccccaccctggtcgtctcctcgccgcgcgcagccgaggccgtcctccgcacccacgacctcgccttcgcgtcgcggccgcgctccatggtcaccgacatcatcatgtacggggcgctggactcctgcttcgccccctacagcgaccacttccgcagcgtcaagaaggtggtgaccgtccacctgctcaactccaagagggtgcaggcctaccgccatgtccgggaggaggaggtgcggctggtgatggcgaggctccgcggcgcggcggcggcggcggcggcggtggacttgagccagacgctgcagttcttcgcgaacgacctcatctgccgcgcggtgtcgggcaagttcttgtgcgagcaagggaggaacaaggtgttccgggatctgatggaggcgaacagcaatctgctgggagggttcaacctggaggcctacttcccggggttggcgaggatgcctctcatcagcaagctcatctgcgccagggccatcaggatcaggaggaggtgggaccaactcctcgacatgctcatcgacgaccatgtagcctcagctcgcgatcgcgctaaaaacgacgacgacgacttcatccatgtccttctttccctccaggacgagtatggcttcaccagagaccatatcaaggccatatcaatagacatgtttgaagctggtacagatacatcacacctagttctagaatatgctatggtcgagctcacacgcaaaccacacattctaacaaagctacaagatgaggtgagacgcatcacaccgaaaggacaacatatggtaaccgaagatgatatcgtcggcatggtctacttgaaggctgtcatcaaggagacacttcggctacatgcaccgggaggtttcactattccccacctcgccagagaagattgcaacgttgatggctacatgatcccagcaggaacacgtgtacttattaacttgtgggcacttagtagggatgctaattactgggacaagccagatgagttcttacccgagagattcatggatggaagtaataagaacaccgactttaaggggcaagacttccagttcttgccatttggatcaggacgaagaatgtgccctggaattcattctggaaaggtcacactcgagattatgttggcgaacctcgtatactgtttcaactggaagctaccgtcagggatgaagaaggaggatatcgatatgacagatgtgtttggattggccatacatcggaaggagaagctcttcttagtcccgcaaattgctaattattga

SEQ ID NO: 88665 - DNA, 583 bp, Oryza sativa
  Clone ID: PAT_MRT4530_87494C.1
gacgaggcctcgtgccgaattcggcacgaggtcgcgtcccccccgaggtctggtcgtgacgaattaaactagccagctgagctctagctacctcctagcctatcgatgatggccacacctagaagctgcagcggccggccgctgatgctgctcgtcctcttcacggtgatcgtgatctcggcgacgaagctgcatctgcacgaggcgcccatcatcatggcctccgcgaggactttggaagaagcagatttaggtcctcctcagggaacttgcaccaatcctccagggctacaatgcccgccaacggcggttccgaacccacccccatccccgcctgcgcagccatgagctcatgtgaacattaaatatattctacttctatactccatttcaccacgtacgtgaaaaataagtaaacaatcaatgctctcagtttgttattcctagcgcattaaaaattcgatgtcagcgatttgtgtcattggctgctgtctctttgagtacaatgcgtgtatgtgtgtttttatgtaatagtggaaagaaataaatactcatcagaaagctgctgttgtttgagcagcac

SEQ ID NO: 88666 - DNA, 349 bp, Oryza sativa
  Clone ID: PAT_MRT4530_87495C.1
ccttgcaattcgttggatctttaaagccatccacatgttgtggcatttacaaagtcaaaggtgccctatgaggctttagactgtagagtcatatttctctattaactataaaaactataaaggactaaaacgtatctccattctacttttccatttaaaaactttgacaacccttatcaaaccgtgctttgattcccaagccttaattttttgtcaaggtgccaatcattttcaaatcttttacaactaataattaccacacctatcctttgacctcacatttttggaactttccagtcattaattctgggtaactgcttaagttatccttgactaacattttggactt

SEQ ID NO: 88667 - DNA, 843 bp, Oryza sativa
  Clone ID: PAT_MRT4530_87496C.1
atggctgcaggcagcggcagcggcagcaatcctaaggactaccaggatcctcctcccgcgccgctagtggacaccggcgagctaggtaagtggtcactgtatcgcgccgccattgcggagttcacagccacgctgctgttggtgtgcatcagtgtgagcaccgtgatcggtgagaagcggcagtcgggcgagggcggcgccggcgtgcttggcattgcctgggcctttggtggcctcatcttcgtgctggtgtactgcaccgctggcatctccggggggcacatgaacccagccgtgaccttcgccatggtgctcgcgcgaagggtgtcgctgccgcgagcggcgctgtacacgatggcgcagtgcgtgggcgccgtgtgcggcgcagggctcgccagggcgatgcacggtggcgggcagtacgcgcggcacggcggaggtgccaacgagctggcggcgggctactcggcgggggcaggggtcgtggcggagatggtgggcacgttcgtgctggtgtacacggtgttctcggcgacggacccgaagcggaaggccagggactctcacgtgccggtgctggcgccgcttcccatcgggttggcggtgctggttgtgcaccttgccaccatccccatcaccggcactggcatcaaccccgcccgcagccttggccccgccctcgtcctcggcctcggcaccaccaaggcctggtcccacctctggatcttctgggtgggccccttcgccggcgccgccgccgcaatgatctaccatcactacatcctcaggggcgctgccgccaaggccttcgcctcctcctcctaccgatcaccccatttttaa

SEQ ID NO: 88668 - DNA, 216 bp, Oryza sativa
  Clone ID: PAT_MRT4530_87497C.1
ttttgttgatgggataatataaatgcttaatagtaatcgagtctgtgagggagttttacatcatgcaagagtggctttatttcgccacttcattaactacattacacatattgaagctgcattgcggttgctcttaccttatcgaattacagaatgggtgtcgccctcctgatgatcacttgaaggccccgtccttgctaggggcaataggatgca

SEQ ID NO: 88669 - DNA, 2831 bp, Oryza sativa
  Clone ID: PAT_MRT4530_87498C.1
atggtcggcgatgaggttgcgccaggaccggcagacgcacttgaagcggcacacagagcgaatggggaggcggcggaggatctcgatgacgagatcgtcggtgaggcggcctcaccgggttccgctcaccggggagattctccatcaggtgaagctgcggagaacgttagcctgcaatgcatgaagaaggattggtcggcaaaagcaggtcgaacagaggggaggaggaggaggacgaggacagctcaggggagtgcttgcataccagagggggaggacgacgcgggagccaaggctccgccggagagtaggcggcgcggcaacctagcgctctcgccgccggtaaagcccctcctctatctttcctccctcgaggacttgggaggcgacggcgctccgccgccgcagcgtcggaacgaatccccggcggcggcggcggcggccaacaaggggaagaagaagaagaagaagggcggcgctgccggcggcagaggcgataacggaggaagaacaatgaagctgcaacggggagtggtccacctaaagaaagtagcagacaatggggaccaaccatcaagtacatcaggaaagatggccagtagtatctttgacaaattgcaagtggagttcatcgaccaagatgagggtgtgcaggttgttgcagacaccattggaagctctggcgaggttcctgaaaggtatgtgaggcatgagattgaggccaatattgtcataattgacaacgccaatggtggggaagctctcccccccggtgatttagtcaaaaaaaaaaatcctgacttctctgaggaggagatcgcgaagcttggatctgcatgtgaggattggggatacttccatcttgtgaaccatggggtggatgcagggttgctgcaacagatcaaggctgacatcacggaattcttcagactccctctgcaggagaaggccgtggcgatcccacccaatggcttgcaggggtttggccaccactttttctttccaaaggagcagaagctggactgggcagatttgctgttcctcgtcacacggccagttgaggaaaggagcaatggatttctggcctacaaagccttccacattcagagattgcatgtgtctactaagctgttcaagttcatggccatcaacctgggagtcgatgaggaagcactccttggagtattcaaggggcatactcagagtgtaaggatcaaccattacccccactgccgtcaggctgacaaggtgctgggcttttcagcgcacaccgatggcgtcggcttgacactgctcctccaagtgaacgacgtgcaagggctgcagatcaggaagaacggcaggtggttcgctgtgaagaatctccctggagccctcgtcgtcaatgttggtgacattcttgagatcctcacaaatggcaagtacaagagtattgagcacagagcggtaataaaccccgataaggaaatgatcacccttgctgcattccataaacccccgctttcctgcacagttggagttggcccactccaggagcttctaatgaaaggtaaggcgcactacaagacggttgatgtcgttgagttcaccaaaggctactttactgcgaagctggaaggcaggagctacctggagagattgaagctgggagttccgctccagaattcgctgacaacagatgaggcgtgctacaagcctacaactgctagcaaaaagaataaccacccactgaagaaactcgggaaaagcaatggcggaagaacttgcaacggttcagacgaacagattcctgaaaggtacatcaggacagaggctacttgtgaggaggtcatcagcaactaccatggtgacatggcgattccaatcattgatctcaataagttgctttctccacaatcatcagaagaagagtgtgtgaagctgagatctgcctgccagtattggggattctttcagctcatcaaccatggagtgccagaggaagtgattgaaaacttcaggagcaacattattgagttcttcagcctgccactggatgccaagaaggagtactcacagctgcccaacagccttgaaggctatggacagacctttgttttctctgaggaccagaaactagactggggagacatgttgtaccttcaaagatctctgaaaattaggcaatcccttgatcaatactcatcggagactaaaagcctgtcgctctgcttgtttgagttcctggctaaggccgtgggtgctgagccagagtcgctgttaggcatctttgaagagcagcctcgaggaatgaggatgaactactacccaccatgccggcaatctgacaaaggtaattggcctgtgaacgatgttcagggtctgcagatcaagagggatggcaagtggttctccgtggatgctctgagtggcgcattcatcgtcaacataggggacacacttgagatcctgagtaacggaaaattcaaaagtgttgagcacagggccatgatacatccaaataaggagcggatttcaacggcactattccactatccgcgcgatgatctgctgctgagccctctgcctgagtttgtgaaagatgttttttaatggtaaagtgaattcaagatcaatcagttacaatgatttcatgatgcagttttttaatcaaaagcgtgatggaaggaatcggctgcagagattaaagttggaacagtagccatcgactatgatgcctgagatactctctgaaatgagcatgcttctgggttgtgtcctacatatatatttcttactgtatgtactatctggagatcacgaataatgaaataaccatatcttatgatgac

SEQ ID NO: 88670 - DNA, 123 bp, Oryza sativa
  Clone ID: PAT_MRT4530_87499C.1
atggcgaagactatggagcaaggatggcgagaggcagggaatcgcagccaagctagaggcctcctgggcgaaggacgcaaggcgaagagcatatgccgaagggggacgacttcaccgtatcag

SEQ ID NO: 88671 - DNA, 362 bp, Oryza sativa
  Clone ID: PAT_MRT4530_8749C.1
ccaggagcagcaggcacacagcatgcatgtgcaccaggtcatgacaggtgtacaagcacacactgatagcacttcagggcttgattgtcagccaggtcatcacagcaggcaggcagtcacatgggggcatcagcaggcagtaggggcacatgggcagtgaaggtgcacaatcagatggggcacacacagtgacaggtgatcagctcgtcggcgaggaagcagcaggcgaggccatggacagacctgggcagccagacagcactacctcgtcagctccaacacgcggcagatgcagccagctttagagatcacaagcttacgtacgcgtgcatgcgacgtcatagctcttctatagtgtcaca

SEQ ID NO: 88672 - DNA, 1533 bp, Oryza sativa
  Clone ID: PAT_MRT4530_874C.1
cccgggctgcaggctgatttggagttttgatgtttccaagagagctgcaactttcaggggagtcagccaagttagtgaagcttggggaagcagtttcaaagggaactgttaataatgagacacttggttacttcattgggagggtctatcttttcctaacacgtttgggtattgataaaaaccggctacgcttcaggcagcatctacctaatgagatggcccattatgctgctgactgttgggatgcagagattgagtgctcttacggatggatagaatgtgtgggcattgctgacagatctgcgtatgatttgcgagctcattctgacaaaagtggtgttccacttgttgctcatgaaaaattctcaaagcctagagaggttgagaaacttgttatagtgccctcaaagaaagacctggggcttgcttttaaggggaaccaaaagatggtggttgaagcattggaggctatgagtgagaaagaagcaatggacatgaaagctgctcttgaatctaagggagaaacaaatttccaagtgtgtactcttggaaaggatgtggtaataaccaagaaaatggtatcgatcagtatggaaaagaagttggaacaccaacgagtcttcaccccatcagtcattgagccttcatttggcattgggaggataatctactgtctatttgagcattccttctacacaagacctagcaaatcagaagaggaacaactgaatgtcttccggttccctcctattgttgctcctatcaaatgcactgtgttccccctggtgaagaatcaggagtttgacgacgctgcgaaagttattgataaagcattaacaacagcaggcatctcgcatattattgacactactgccatttctattgggaggaggtatgcaaggacagatgagatcggtgttccattcgcggtaacagttgactctgcgacaagcgtgacaatccgggagagggacagcaaggagcagatccgagttggcatcgatgaggtggcatcagtggtgaaacagctgacagatgggcaaagcacctgggccgatgtttcatttaagtatcccagccatattggtccccagggtgatcaggagtgaaaatcctgaaccctgttccaaagaagcaccccaaatggccgttgattgacttgaggagaaatagttcttcctcgtttcatgcaatctggcaagaacaaagtttgtcatacacaaatatacaactcttggacgcccttacatctctccattgttctttttgctctctttcaaaagtttcacctgatttacatgttcacaatacagaacatagcatttgattttctgctgaattcgtcctgttaacttgtaaggtcgcaccaagaattgttcacctaccttcaaagttccaacaaacgagctgaagctttgagttattacttttcttaaacacttagtttttgtactcagattgtcttgtctctagtattgcttaaggattaaggtgaatcttttgactgcctaacatgaggagaatttgcacccc

SEQ ID NO: 88673 - DNA, 287 bp, Oryza sativa
  Clone ID: PAT_MRT4530_87500C.1
aaaccgcactagaatggaaagaattaaccaatcctggataaataggggctcctagcaagagaacgcattctaaaaagttaacatatttgccatgtatgtgcattgcattgacaccgggaactactgacaaaataatcattaactaaagaactacttataaaccaagaggtaatagtcaggtacattgaagctctatatgtaggaactctccagagctaaaatgtcatatcatgtataaagggcagacaaagcctaacgggattttgagaatgcaccatgaatcatct

SEQ ID NO: 88674 - DNA, 420 bp, Oryza sativa
  Clone ID: PAT_MRT4530_87501C.1
aggcaatcccttgatcaatactcatcggagactaaaagcctgtcgctctgcttgtttgagttcctggctaaggccgtgggtgctgagccagagtcgctgttaggcatctttgaagagcagcctggaggaatgaggatgaactactacccaccatgccggcaatctgacaaaggtaattggcctgtcgccgcacaccgatgtggttggcctgacgctgctgctccaggtgaacgatgttcaaggtctgcagatcaagagggatggcaagtggttctccgtggatgctctgagtggcgcattcatcgtcaacataggggacacacttgaggtaatgaccgaacaaactatgccgttacttgtcaaagcaccaaacaaacagttctaacttcatttttttttcatcttttgggtgagtcctac

SEQ ID NO: 88675 - DNA, 222 bp, Oryza sativa
  Clone ID: PAT_MRT4530_87502C.1
acgcgacgcgtgtggtcgacgagcgagacgtaccttcttttttcactctcttgagaaagctaaccccatctctgtaaagtcgagcatatatcgaattcaatacgtggatggagtgggtgccaaataatgtgacggcgcagaatattcttgaatcatctactggtagtcttaaggcaaaaagatctaatacttcatacccacgtgattctaatattacaccac

SEQ ID NO: 88676 - DNA, 250 bp, Oryza sativa
  unsure (1)..(250): unsure at all n locations
  Clone ID: PAT_MRT4530_87503C.1
ccggccgggcccgatcggatgcggcccggctccttctactacgacggcgccaccggcggcgcaaataggagaagatggctcgtagcttgagtaccttcctctttacgcttggagtatgtgaacgagggctcaatctgacaagatctgataccaagtcttagatgctaggcttgatgcctgccttaccgtggaccgtgacagcaagggcgtttgagagacctgcancaagacaaacatggtaatagtcttt

SEQ ID NO: 88677 - DNA, 404 bp, Oryza sativa
  unsure (1)..(404): unsure at all n locations
  Clone ID: PAT_MRT4530_87504C.1
ctcgatcccgtctcctagcatggcggcagccgccttttcatggcgactacctcttcttctccctaccacggagttagcggaacgggagtggcgcggctattcctctcctcggcaccacgctgtagcagtgcctcttcctctccctggcgccacggtggtgacctcttcctttcctctgtgcggcggccaccggatccggctaccacgagctcgggggtgaccagatccagccaccatgagcctcttcctctttcccgcgcggcggcgacagcctctttctttcccctaccagacgcggcagccacaagatccagccaacacgacagtgagcgtaggttactccaacgcggagagtggggcacttctaaattgagtgccaaaaattngggagtggatttttaatg

SEQ ID NO: 88678 - DNA, 381 bp, Oryza sativa
  Clone ID: PAT_MRT4530_87505C.1
gaagatactctagtatttattcaaaaccatatttatcatcggtgtagtacatgtacaccaataaaggggtgcaaattctattaatggcttaaggttaggcaggcatggcaaccaagaacggtgggttcgcagcgttgctgttgcagctatcgttactgatgagctcgcaaatgccggtgcgaagccacgaatctgtactatacaaggacagtgctaagccgacaatcatggtttgtaatgcgtcacaaatatgcaggcgtgtgttcagctgcggtcacggtcatggcaggtcaggctaacaaggcgacctttttttgatgtgcggcgtacggcggtgtcgcggacgaggctggcgatggtgttgacgggaagccttgatgt

SEQ ID NO: 88679 - DNA, 417 bp, Oryza sativa
  Clone ID: PAT_MRT4530_87506C.1
atggatctggatggctcgtgtgtgcagcggcggcagcaacggcgggatagggtcgtcatggggccgatggctgctcccagccacctcctcctcgttgtagtcggcggcggtggcagcggcgcagatccggccatcgcggggctggtggtgccgctctcggccgcctcctcctccttgtcgtcgacggtggtgccgggtggggacggggatggcaccgctcccgaactgcccaccgcccgctcccggacgctacccgaagtcacgccgtcacccgtcgagccgacacccgctcactgtcagccgctgcccgatgtcgcgccgccggtcgttggccaccgcctgatgcgccaagccgacgcccgcccgcccgctctcggccgccgcgcagccgtctgccctctcctggccaccggatga

SEQ ID NO: 88680 - DNA, 339 bp, Oryza sativa
  Clone ID: PAT_MRT4530_87507C.1
atggaagtggaggcggccggctggaggcagcacccggcgatggaggcggaggcgggcctgctggaggcagcgctcgccatggaggcggaggcgcactggctggaagcggcgtccggccatggagggcgaggtgggccggctggagttggaggcccggcgacggaggcggaggcgcgccgactggaggcggcgcccggccatggaggcagaggcggaggcgggaggcggcgcacggtgaaggagcgaaggagcgaagaggatggagacgggacggcgcagtgctctgatggggaagaaacggcgcacggtgtggtgtttgcctgtagggttttttattag

SEQ ID NO: 88681 - DNA, 332 bp, Oryza sativa
  Clone ID: PAT_MRT4530_87508C.1
aaaaagttcaattttttttaagcctgaaaattcaaagccttggggcaattttttatacataaaattttcaacgggtgggagttccggagtatttaagtttggacgaactggttgctttggttcccttggtgggacaaaaattacagtaacatttttacaaagttgaaaaaaaacatttaatgttattttttttttccgggcatttgaccgaaaaagggaccatttcagggtcgactgggataaacaaagatgcttaatttttaacggaagagcctgggaacagtccgccgggggatctttctttaaagtttaaattttttgtaggttttttt

SEQ ID NO: 88682 - DNA, 4261 bp, Oryza sativa
  Clone ID: PAT_MRT4530_87509C.1
cacgcgtccgagaccttcaccatcgccccacctacgcctcgtttcatcgcaccacctcctcccgcacgacgccgccgccaccgccgcgatgcagagcctcctcctccccaccttcgccgaggactccgccgcccccccgcggagggggcgcgtgcctcccgccggtcgcgcctcgctcggagtccgcggtgacaggagcccaccgtcgccatgggtgaggagaagaaggataaggcgagcggcaaggacgccggcgagaagaaggacgccgccgccgccgccgtctacgccgcgtgaggtccggattggttgaaaggctgatcgagtttcttgataccaaggcaagtagcttataagaagatttggactttggtggcataaatggatgaactaactggcggcttcaacgtggtgttgattacaggctcttgagctaccaagtatgtcagcttcaaatgagaagtggattgatgggctccagttctcatcactgttctggcccccaccacaggattcacaacaaaaacaggcacaaattctggcctatgttgagtactttggccagtttacagctgacagtgagcaattccctgaagatatagctcagctaattcaaagttgctatccatcaaaagaaaagcgccttgtagatgaagtattagcaacttttgttcttcatcatcctgagcatggccatgcagttgtgcatccgattctgtcacgcatcatagatgggacactcagttatgatagaaatggtttcccgttcatgtccttcatctctttatttagccatacttctgagaaagagtactcggagcagtgggccttggcctgtggagaaattcttagagttctaactcactacaacaggccaatcttcaaagttgatcaccaacatagtgaagcggaatgtagcagcacatctgatcaggcctcatcatgtgagtctatggagaaaagggctaacggttctccaagaaatgaacctgaccggaagccattgaggccactatctccttggatcacagacatattgcttgctgcacctctgggtattagaagtgactattttagatggtgtggtggagtcatgggaaaatacgcagctggtggagaattgaagcctccaacaactggttgcttacagccgaggatctgggaagcacccacaacttatgccatccacgcccagatgggctgttgccaatggagctggagttatactaagtgtctgtgatgaggaagtagctcgttatgagacagcaaatttgactgcggcagctgttcctgcacttctattacctccaccgaccacaccattggacgaacatttggttgcggggctccctcctcttgaaccatatgctcgcttgtttcatagatactatgcaattgctactccaagtgctacccaaaggttgctttttggtcttctcgaggcaccaccatcatgggccccagatgcacttgatgcagcagtacagcttgttgaactccttagagcagcggaagattacgattctggcatgcggcttccaaagaactggatgcatcttcatttcctgcgtgctattggaactgcaatgtcaatgagagctggtatcgctgctgatacgtctgctgctttacttttccgaatactctcccaaccgacattactttttcctccactgagacatgccgaaggagttgaactccatcatgagccactaggtggctatgtatcatcgtacaaaaggcagctggaagttcctgcatctgaagccactattgatgccactgcgcaaggcattgcttccatgctatgtgctcatggtcccgatgttgagtggagaatatgtaccatctgggaggctgcgtatggtttgctacctctgagttcatcagcagttgatttgcctgaaattgttgtagctgctccacttcagccacctactttgtcatggagcctatacttgccattgttgaaagtatttgagtatttacctcgtgggagtccatctgaagcatgccttatgagaatttttgtggcaacagttgaagctatactgagaagaacttttccatcagaaacctctgaacaatccaggaaaccaagaagtcaatctaagaaccttgctgttgctgaactccgaacaatgatacattcactctttgtggagtcctgtgcttcaatggaccttgcgtccagattactatttgtagtattaactgtttgcgtcagtcatcaagctttgcctgggggaagtaaaaggccaactggtagtgataatcattcctctgaggaggtcacaaatgattcgagattaaccaatggaagaaacagatgtaagaagagacaaggaccagttgctacattcgactcatacgttctagcagccgtttgtgccttatcttgtgagctccagctgttcccttttatttccaagaatgggaaccattcaaatctgaaggactccataaagatagtcatacctggaaaaaccactggtatcagtaacgagctacacaatagcattagctcagcgattcttcatactcgtagaatacttggcatcttggaagctctgttctccttgaagccatcatctgttggtacttcatggagttatagttcaaatgagattgttgcagcagctatggttgctgctcatgtttctgagttatttcgtcgatccaggccatgcttaaatgcactgtctgcgctgaagcaatgcaagtgggatgctgagatttctaccagggcatcatccctttaccatttgattgacttgcatggtaaaacagtgacctccattgtgaacaaagctgagcctctagaagctcacctgacccttacaccagtaaaaaaggatgaacctcccattgaggaaaagaacattaactcatcagatggtggtgcattggaaaaaaaggatgcttcaagatcacacaggaaaaatggttttgcaagaccactcttgaaatgtgcagaagatgttatactaaatggtgatgtcgcaagtacttctgggaaagccattgcaagtttacaggtggaagcttctgatttggcaaacttcctcaccatggaccgaaatgggggttacagaggttctcaaactctcctaagatctgtactgtcagagaagcaggagctatgcttctctgttgtctcattgctctggcagaagctcattgcatctcccgaaatgcagatgtctgcagaaagtacatcagctcatcagggttggagaaaggttgtggatgcgctttgtgacgttgtttcagcctcaccgaccaaggcttcagctgctatcgttctgcaggccgagaaggacttgcagccctggattgctcgagatgatgagcaaggtcagaagatgtggagagtcaaccagcgaatagttaagctgatagcagagcttatgaggaaccacgatagcccagaagcattggtgatccttgctagtgcttcagatcttcttcttcgagcaactgatggaatgcttgttgatggtgaagcttgtactttaccacaattagagctattggaagtaaccgccagagcagtccatctcatcgtcgaatggggagattcaggtgtatccgtcgctgatggcctctccaatctgctgaagtgccgtctatcaaccaccatccgctgtctttcgcaccccagcgcgcatgtccgtgcactcagcatgtccgtccttcgcgacatcttgaacagcggacaaataaactccagtaagctcatccaaggggaacaccggaatggcatccagagcccaacctaccagtgcttggcagcaagcatcatcaactggcaagccgatgtggagagatgcatagagtgggaagcccacagccgccgcgccaccgggctgacgctcgccttcctcaccgcggcggcgaaggagctcggctgcccactcacttgctgacaaggccacaccatgactgtcactgcaagcagctgctgtaggatcagcgagtaggaaaggatgacttgccggtcagtttcctgagatgtgatttaagactgatattagctgatgttcccaagcatgatacggggcttgctcccaagatgtgatttttactttacttttggttaatgtgctaccgctgacattagatgttcaagcatatgaaaactgcttgtgctgtaacttgtatgtctgtaacgtaaaaatctttccatatggtaaccggggaagcagaggtatatccttttctgctgttgtatctaaaaaaaaaaaaaaaaaaaaacaaa

SEQ ID NO: 88683 - DNA, 237 bp, Oryza sativa
  Clone ID: PAT_MRT4530_8750C.1
cccacgcgttcggcaagcaggccaccggcggcggcggttgtggtaggcccagccgtaccaccgagcgctgcttttggaaggccaccggatgcgaccgatccatccgatgaagaggctaccctaatcgcatgatcgggctcaataagacgctcggatactacgagggccgagcccctaccggcaccaagaccgactgggtcatgaacgaagtctgcctttgcgaatgcgacaccatta

SEQ ID NO: 88684 - DNA, 563 bp, Oryza sativa
  Clone ID: PAT_MRT4530_87510C.1
aggaagagatggaattatttggttgcctgtctgctcgatgcgaaatgcagtcactcgcgagagagaacgggaaagtacgtctcgtgccgtctttgctaggccttaagggcggatgcggcccagccgcccgatccccgccgccaccgccccaccgcgccgccacccgcctcgccggctagccggaaggcgtcaacggcgccgacgaggccccccgaccagcctcctcccccctccttcctcctcgagccgtcggcggcgagatcatccctctaagcccagcgaactcccccttcttcccctccccctcccacccttcccagttcccaccccaccccaccccaggaccctaattcgtcggctcttcgccggagtttgggtcatcgctggcgccggagaagaataggagtttgtcggagttggagaataagcaactggagcacgaatcgcgaagcacatccagcgtgggtgcagcttgcgcgtacgcgcgcgcgccgagactgacagaccgaccacgccgcgggtggcccggccggccgaacagcaagcactgtccttgtcgccgc

SEQ ID NO: 88685 - DNA, 3848 bp, Oryza sativa
  Clone ID: PAT_MRT4530_87511C.1
ctttttctcgcctctccttcctccgagccgtttctctccctctctctctcctcctccttcccctgcgcctcctccaccgcccgtgtcgccgccgcgcgcgtctatcccctcgccgccgccgccgtctacgccgcgtgaggtccggattggttgaaaggctgatcgagtgtagagactctgaagctcatatggttggcattggttgatatgataacgtgtcacgttgtgagatgcagacccccgttatgggggttgattgaatgaagtggatagcactcttataactttcttgctcgaagtttcttgataccaaggtgcttttattgatggatgaactaactggcggcttcaacgtggtgttgattacagaattctctcagtttcttgggcaggctcttgagctaccaagtatgtcagcttcaaatgagaagtggattgatgggctccagttctcatcactgttctggcccccaccacaggattcacaacaaaaacaggcacaaattctggcctatgttgagtactttggccagtttacagctgacagtgagcaattccctgaagatatagctcagctaattcaaagttgctatccatcaaaagaaaagcgccttgtagatgaagtattagcaacttttgttcttcatcatcctgagcatggccatgcagttgtgcatccgattctgtcacgcatcatagatgggacactcagttatgatagaaatggtttcccgttcatgtccttcatctctttatttagccatacttctgagaaagagtactcggagcagtgggccttggcctgtggagaaattcttagagttctaactcactacaacaggccaatcttcaaagttgatcaccaacatagtgaagcggaatgtagcagcacatctgatcaggcctcatcatgtgagtctatggagaaaagggctaacggttctccaagaaatgaacctgaccggaagccattgaggccactatctccttggatcacagacatattgcttgctgcacctctgggtattagaagtgactattttagatggtgtggtggagtcatgggaaaatacgcagctggtggagaattgaagcctccaacaactgcttacagccgaggatctgggaagcacccacaacttatgccatccacgcccagatgggctgttgccaatggagctggagttatactaagtgtctgtgatgaggaagtagctcgttatgagacagcaaatttgactgcggcagctgttcctgcacttctattacctccaccgaccacaccattggacgaacatttggttgcggggctccctcctcttgaaccatatgctcgcttgtttcatagatactatgcaattgctactccaagtgctacccaaaggttgctttttggtcttctcgaggcaccaccatcatgggccccagatgcacttgatgcagcagtacagcttgttgaactccttagagcagcggaagattacgattctggcatgcggcttccaaagaactggatgcatcttcatttcctgcgtgctattggaactgcaatgtcaatgagagctggtatcgctgctgatacgtctgctgctttacttttccgaatactctcccaaccgacattactttttcctccactgagacatgccgaaggagttgaactccatcatgagccactaggtggctatgtatcatcgtacaaaaggcagcttcatattgacttatattttcatatgtgctccttcaactgcacaaagctggaagttcctgcatctgaagccactattgatgccactgcgcaaggcattgcttccatgctatgtgctcatggtcccgatgttgagtggagaatatgtaccatctgggaggctgcgtatggtttgctacctctgagttcatcagcagttgatttgcctgaaattgttgtagctgctccacttcagccacctactttgtcatggagcctatacttgccattgttgaaagtatttgagtatttacctcgtgggagtccatctgaagcatgccttatgagaatttttgtggcaacagttgaagctatactgagaagaacttttccatcagaaacctctgaacaatccaggaaaccaagaagtcaatctaagaaccttgctgttgctgaactccgaacaatgatacattcactctttgtggagtcctgtgcttcaatggaccttgcgtccagattactatttgtagtattaactgtttgcgtcagtcatcaagctttgcctgggggaagtaaaaggccaactggtagtgataatcattcctctgaggaggtcacaaatgattcgagattaaccaatggaagaaacagatgtaagaagagacaaggaccagttgctacattcgactcatacgttctagcagccgtttgtgccttatcttgtgagctccagctgttcccttttatttccaagaatgggaaccattcaaatctgaaggactccataaagatagtcatacctggaaaaaccactggtatcagtaacgagctacacaatagcattagctcagcgattcttcatactcgtagaatacttggcatcttggaagctctgttctccttgaagccatcatctgttggtacttcatggagttatagttcaaatgagattgttgcagcagctatggttgctgctcatgtttctgagttatttcgtcgatccaggccatgcttaaatgcactgtctgcgctgaagcaatgcaagtgggatgctgagatttctaccagggcatcatccctttaccatttgattgacttgcatggtaaaacagtgacctccattgtgaacaaagctgagcctctagaagctcacctgacccttacaccagtaaaaaaggatgaacctcccattgaggaaaagaacattaactcatcagatggtggtgcattggaaaaaaaggatgcttcaagatcacacaggaaaaatggttttgcaagaccactcttgaaatgtgcagaagatgttatactaaatggtgatgtcgcaagtacttctgggaaagccattgcaagtttacaggtggaagcttctgatttggcaaacttcctcaccatggaccgaaatgggggttacagaggttctcaaactctcctaagatctgtactgtcagagaagcaggagctatgcttctctgttgtctcattgctctggcagaagctcattgcatctcccgaaatgcagatgtctgcagaaagtacatcagctcatcagggttggagaaaggttgtggatgcgctttgtgacattgtttcagcctcaccgaccaaggcttcagctgctatcgttctgcaggccgagaaggacttgcagccctggattgctcgagatgatgagcaaggtcagaagatgtggagagtcaaccagcgaatagttaagctgatagcagagcttatgaggaaccacgatagcccagaagcattggtgatccttgctagtgcttcagatcttcttcttcgagcaactgatggaatgcttgttgatggtgaagcttgtactttaccacaattagagtgccgtctatcaaccaccatccgctgtctttcgcaccccagcgcgcatgtccgtgcactcagcatgtccgtccttcgcgacatcttgaacagcggacaaataaactccagtaagctcatccaaggggaacaccggaatggcatccagagcccaacctaccagtgcttggcagcaagcatcatcaactggcaagccgatgtggagagatgcatagagtgggaagcccacagccgccgcgccaccgggctgacgctcgccttcctcaccgcggcggcgaaggagctcggctgcccactcacttgctga

SEQ ID NO: 88686 - DNA, 4381 bp, Oryza sativa
  Clone ID: PAT_MRT4530_87512C.1
cgtacgcgtgggcccgcgcaggctcaggcatccggtgcggctctaccttgggtgatggccgtgacttcgccgccgctgctccggcgaggagggtgggcgatgggcgcgagcgatcacgccgcggtggtgagcgaaacgagcgccgacgataagcttcatgccagggacaatgttgctgtgctgggtctgatttgtgcatgagcgtatgtatgatgagttcctggagaaggccaatgctaggtactaagttctcctcctccttcccctgcgcctcctccaccgcccgtgtcgccgccgcgcgcgtctatcccctcgccgccgccgccgccgccgccgtctacgccgcgtgaggtccggattggttgaaaggctgatcgaggtgcttttattgctaactggagcagtttgtgtagtttctttctttctctttgagaattctctcagtttcttgggcaggctcttgagctaccaagtatgtcagcttcaaatgagaagtggattgatgggctccagttctcatcactgttctggcccccaccacaggattcacaacaaaaacaggcacaaattctggcctatgttgagtactttggccagtttacagctgacagtgagcaattccctgaagatatagctcagctaattcaaagttgctatccatcaaaagaaaagcgccttgtagatgaagtattagcaacttttgttcttcatcatcctgagcatggccatgcagttgtgcatccgattctgtcacgcatcatagatgggacactcagttatgatagaaatggtttcccgttcatgtccttcatctctttatttagccatacttctgagaaagagtactcggagcagtgggccttggcctgtggagaaattcttagagttctaactcactacaacaggccaatcttcaaagttgatcaccaacatagtgaagcggaatgtagcagcacatctgatcaggcctcatcatgtgagtctatggagaaaagggctaacggttctccaagaaatgaacctgaccggaagccattgaggccactatctccttggatcacagacatattgcttgctgcacctctgggtattagaagtgactattttagatggtgtggtggagtcatgggaaaatacgcagctggtggagaattgaagcctccaacaactgcttacagccgaggatctgggaagcacccacaacttatgccatccacgcccagatgggctgttgccaatggagctggagttatactaagtgtctgtgatgaggaagtagctcgttatgagacagcaaatttgactgcggcagctgttcctgcacttctattacctccaccgaccacaccattggacgaacatttggttgcggggctccctcctcttgaaccatatgctcgcttgtttcatagatactatgcaattgctactccaagtgctacccaaaggttgctttttggtcttctcgaggcaccaccatcatgggccccagatgcacttgatgcagcagtacagcttgttgaactccttagagcagcggaagattacgattctggcatgcggcttccaaagaactggatgcatcttcatttcctgcgtgctattggaactgcaatgtcaatgagagctggtatcgctgctgatacgtctgctgctttacttttccgaatactctcccaaccgacattactttttcctccactgagacatgccgaaggagttgaactccatcatgagccactaggtggctatgtatcatcgtacaaaaggcagctggaagttcctgcatctgaagccactattgatgccactgcgcaaggcattgcttccatgctatgtgctcatggtcccgatgttgagtggagaatatgtaccatctgggaggctgcgtatggtttgctacctctgagttcatcagcagttgatttgcctgaaattgttgtagctgctccacttcagccacctactttgtcatggagcctatacttgccattgttgaaagtatttgagtatttacctcgtgggagtccatctgaagcatgccttatgagaatttttgtggcaacagttgaagctatactgagaagaacttttccatcagaaacctctgaacaatccaggaaaccaagaagtcaatctaagaaccttgctgttgctgaactccgaacaatgatacattcactctttgtggagtcctgtgcttcaatggaccttgcgtccagattactatttgtagtattaactgtttgcgtcagtcatcaagctttgcctgggggaagtaaaaggccaactggtagtgataatcattcctctgaggaggtcacaaatgattcgagattaaccaatggaagaaacagatgtaagaagagacaaggaccagttgctacattcgactcatacgttctagcagccgtttgtgccttatcttgtgagctccagctgttcccttttatttccaagaatgggaaccattcaaatctgaaggactccataaagatagtcatacctggaaaaaccactggtatcagtaacgagctacacaatagcattagctcagcgattcttcatactcgtagaatacttggcatcttggaagctctgttctccttgaagccatcatctgttggtacttcatggagttatagttcaaatgagattgttgcagcagctatggttgctgctcatgtttctgagttatttcgtcgatccaggccatgcttaaatgcactgtctgcgctgaagcaatgcaagtgggatgctgagatttctaccagggcatcatccctttaccatttgattgacttgcatggtaaaacagtgacctccattgtgaacaaagctgagcctctagaagctcacctgacccttacaccagtaaaaaaggatgaacctcccattgaggaaaagaacattaactcatcagatggtggtgcattggaaaaaaaggatgcttcaagatcacacaggaaaaatggttttgcaagaccactcttgaaatgtgcagaagatgttatactaaatggtgatgtcgcaagtacttctgggaaagccattgcaagtttacaggtggaagcttctgatttggcaaacttcctcaccatggaccgaaatgggggttacagaggttctcaaactctcctaagatctgtactgtcagagaagcaggagctatgcttctctgttgtctcattgctctggcagaagctcattgcatctcccgaaatgcagatgtctgcagaaagtacatcagctcatcagggttggagaaaggttgtggatgcgctttgtgacattgtttcagcctcaccgaccaaggcttcagctgctatcgttctgcaggccgagaaggacttgcagccctggattgctcgagatgatgagcaaggtcagaagatgtggagagtcaaccagcgaatagttaagctgatagcagagcttatgaggaaccacgatagcccagaagcattggtgatccttgctagtgcttcagatcttcttcttcgagcaactgatggaatgcttgttgatggtgaagcttgtactttaccacaattagagctattggaagtaaccgccagagcagtccatctcatcgtcgaatggggagattcaggtgtatccgtcgctgatggcctctccaatctgctgaagtgccgtctatcaaccaccatccgctgtctttcgcaccccagcgcgcatgtccgtgcactcagcatgtccgtccttcgcgacatcttgaacagcggacaaataaactccagtaagctcatccaaggggaacaccggaatggcatccagagcccaacctaccagtgcttggcagcaagcatcatcaactggcaagccgatgtggagagatgcatagagtgggaagcccacagccgccgcgccaccgggctgacgctcgccttcctcaccgcggcggcgaaggagctcggctgcccactcacttgctgacaaggccacaccatgactgtcactgcaagcagctgctgtaggatcagcgagtaggaaaggatgacttgccggccagtttcctgagatgtgatttaagactgatattagctgatgttcccaagcatgatacggggcttgctcccaagatgtgatttttactttacttttggttaatgtgctaccgctgacattagatgttcaagcatatgaaaactgcttgtgctgtaacttgtatgtctgtaacgtaaaaatctttccatatggtaaccggggaagcagaggtatatccttttctgctgttgtatctatttccagtttcctgctgaacttgcaaatgaatattcagcaatttccgttttgctcgtaaaaaaaaaaaaaacaagacaagcacgagctatatccctcgccgctgttgtggcggaga

SEQ ID NO: 88687 - DNA, 399 bp, Oryza sativa
  Clone ID: PAT_MRT4530_87513C.1
atgggcattagcagtcatcatgatcgttatggtgttgatcgtcccacagatgatgaaaaaaatgatggggcaactaaagaccatttgggtgattgtaaagaaaatgtaaggaccacaacagatagcgaagaacacgacaagaccatagaatatcccgagatggcaaccagtagcgatgaagatgcatcggatagtgaagaagaggcagggatgtcatctgatagcgaagatgactcctcttacaatccccctaaaattgcaaatactgcgtttatattggaagatagcagtcaccgtgatggttctatatacaagggcaatagcgagtggaaaaggacttatcgtattgcagatcttgaggagagtaaggatgatcccatcatagtggagaaggaatag

SEQ ID NO: 88688 - DNA, 4339 bp, Oryza sativa
  Clone ID: PAT_MRT4530_87514C.1
gcctcctccaccgcccgtgtcgccgccgcgcgcgtctatcccctcgccgccgccgccgtctacgccgcgtgaggtccggattggttgaaaggctgatcgagtgtagagactctgaagctcatatggttggcattggttgatatgataacgtgtcacgttgtgagatgcagacccccggtgtgggggttgattgaatgaagtggataccgctcttataactttcttgctcgaagtttcttgataccaaggcaagtagcttataagaagatttggactttggtggcataaatggatgaactaactggcggcttcaacgtggtgttgattacaggctcttgagctaccaagtatgtcagcttcaaatgagaagtggattgatgggctccagttctcatcactgttctggcccccaccacaggattcacaacaaaaacaggcacaaattctggcctatgttgagtactttggccagtttacagctgacagtgagcaattccctgaagatatagctcagctaattcaaagttgctatccatcaaaagaaaagcgccttgtagatgaagtattagcaacttttgttcttcatcatcctgagcatggccatgcagttgtgcatccgattctgtcacgcatcatagatgggacactcagttatgatagaaatggtttcccgttcatgtccttcatctctttatttagccatacttctgagaaagagtactcggagcagtgggccttggcctgtggagaaattcttagagttctaactcactacaacaggccaatcttcaaagttgatcaccaacatagtgaagcggaatgtagcagcacatctgatcaggcctcatcatgtgagtctatggagaaaagggctaacggttctccaagaaatgaacctgaccggaagccattgaggccactatctccttggatcacagacatattgcttgctgcacctctgggtattagaagtgactattttagatggtgtggtggagtcatgggaaaatacgcagctggtggagaattgaagcctccaacaactgcttacagccgaggatctgggaagcacccacaacttatgccatccacgcccagatgggctgttgccaatggagctggagttatactaagtgtctgtgatgaggaagtagctcgttatgagacagcaaatttgactgcggcagctgttcctgcacttctattacctccaccgaccacaccattggacgaacatttggttgcggggctccctcctcttgaaccatatgctcgcttgtttcatagatactatgcaattgctactccaagtgctacccaaaggttgctttttggtcttctcgaggcaccaccatcatgggccccagatgcacttgatgcagcagtacagcttgttgaactccttagagcagcggaagattacgattctggcatgcggcttccaaagaactggatgcatcttcatttcctgcgtgctattggaactgcaatgtcaatgagagctggtatcgctgctgatacgtctgctgctttacttttccgaatactctcccaaccgacattactttttcctccactgagacatgccgaaggagttgaactccatcatgagccactaggtggctatgtatcatcgtacaaaaggcagctggaagttcctgcatctgaagccactattgatgccactgcgcaaggcattgcttccatgctatgtgctcatggtcccgatgttgagtggagaatatgtaccatctgggaggctgcgtatggtttgctacctctgagttcatcagcagttgatttgcctgaaattgttgtagctgctccacttcagccacctactttgtcatggagcctatacttgccattgttgaaagtatttgagtatttacctcgtgggagtccatctgaagcatgccttatgagaatttttgtggcaacagttgaagctatactgagaagaacttttccatcagaaacctctgaacaatccaggaaaccaagaagtcaatctaagaaccttgctgttgctgaactccgaacaatgatacattcactctttgtggagtcctgtgcttcaatggaccttgcgtccagattactatttgtagtattaactgtttgcgtcagtcatcaagctttgcctgggggaagtaaaaggccaactggtagtgataatcattcctctgaggaggtcacaaatgattcgagattaaccaatggaagaaacagatgtaagaagagacaaggaccagttgctacattcgactcatacgttctagcagccgtttgtgccttatcttgtgagctccagctgttcccttttatttccaagaatgggaaccattcaaatctgaaggactccataaagatagtcatacctggaaaaaccactggtatcagtaacgagctacacaatagcattagctcagcgattcttcatactcgtagaatacttggcatcttggaagctctgttctccttgaagccatcatctgttggtacttcatggagttatagttcaaatgagattgttgcagcagctatggttgctgctcatgtttctgagttatttcgtcgatccaggccatgcttaaatgcactgtctgcgctgaagcaatgcaagtgggatgctgagatttctaccagggcatcatccctttaccatttgattgacttgcatggtaaaacagtgacctccattgtgaacaaagctgagcctctagaagctcacctgacccttacaccagtaaaaaaggatgaacctcccattgaggaaaagaacattaactcatcagatggtggtgcattggaaaaaaaggatgcttcaagatcacacaggaaaaatggttttgcaagaccactcttgaaatgtgcagaagatgttatactaaatggtgatgtcgcaagtacttctgggaaagccattgcaagtttacaggtggaagcttctgatttggcaaacttcctcaccatggaccgaaatgggggttacagaggttctcaaactctcctaagatctgtactgtcagagaagcaggagctatgcttctctgttgtctcattgctctggcagaagctcattgcatctcccgaaatgcagatgtctgcagaaagtacatcagctcatcagggttggagaaaggttgtggatgcgctttgtgacgttgtttcagcctcaccgcgtaaggcttcagctgctatcgttctgcaggtcaagatattgttattgttatatttacatacttgttatcatatttaaaagcttcatattgtatgtacctttgaaaaaaaaagttccatactgtagcttcttttgttctcatttcttggtttcaaagcatcagcatcattaccgatataaaatatacccatttcctcagtcatcttccccgactcttgtatctttcacaggccgagaaggacttgcagccctggattgctcgagatgatgagcaaggtcagaagatgtggagagtcaaccagcgaatagttaagctgatagcagagcttatgaggaaccacgatagcccagaagcattggtgatccttgctagtgcttcagatcttcttcttcgagcaactgatggaatgcttgttgatggtgaagcttgtactttaccacaattagagctattggaagtaaccgccagagcagtccatctcatcgtcgaatggggagattcaggtgtatccgtcgctgatggcctctccaatctgctgaagtgccgtctatcaaccaccatccgctgtctttcgcaccccagcgcgcatgtccgtgcactcagcatgtccgtccttcgcgacatcttgaacagcggacaaataaactccagtaagctcatccaaggggaacaccggaatggcatccagagcccaacctaccagtgcttggcagcaagcatcatcaactggcaagccgatgtggagagatgcatagagtgggaagcccacagccgccgcgccaccgggctgacgctcgccttcctcaccgcggcggcgaaggagctcggctgcccactcacttgctgacaaggccacaccatgactgtcactgcaagcagctgctgtaggatcagcgagtaggaaaggatgacttgccggtcagtttcctgagatgtgatttaagactgatattagctgatgttcccaagcatgatacggggcttgctcccaagatgtgatttttactttacttttggttaatgtgctaccgctgacattagatgttcaagcatatgaaaactgcttgtgctgtaacttgtatgtctgtaacgtaaaaatctttccatatggtaaccggggaagcagaggtatatccttttctgctgttgtatct

SEQ ID NO: 88689 - DNA, 2307 bp, Oryza sativa
  Clone ID: PAT_MRT4530_87515C.1
gtggaggcggtggtgatgccggagaggtacgcgctgggtggcgcgtgcagggtgctcgccggaatgcccgcgccgctcggggccaccgcgctcgacggcggggtcaatttcgccgtctactccgccggcgcatccgccgcgtcgctctgcctcttcacccccgacgatctcgaggcggatgaggtgactgaggaggttccgcttgatcctctgttcaatcggacggggaatgtgtggcacgtcttcatcgaaggcgagctgcacaacatgctgtacgggtacaggttcgatggtatgttcgcccctcactgcggccagtacttcgatgtctccaatgtcgtggtggatccttatgccaaggcagtgataagccgaggagagtatggtgtccccggtcctggtggcgattgctggcctcaaatggctggcatgatccctcttccgtacagtacgtttgattggcaaggtgacctacctctgagatatcctcagaaggatcttgtaatctatgagatgcatttacgtgggtttacaaagcacagttcaagcaatgtagaacatccagggacttacattggggctatatcaaagcttgactatctgaaggagcttggagttaactgtgtagagttgatgccctgccatgaattcaatgagctggagtacttcagctgctcttccaagatgaacttctggggatactccacgataaactttttttcaccaatgataagatattcatcaggtgggataagaaactgtggccgtgatgccataaatgaattcaaaacttttgttagagaggctcacaaacggggaattgaggtgatcatggatgttgtcttcaatcatacagccgagggtaatgagaaaggaccaatattatcatttagggggatagataatagcacatactatatgcttgcccctaagggagagttttacaattattctggttgtgggaataccttcaactgtaatcatcctgtggtccgtgaatttattgtagattgtttaagatactgggtgacagaaatgcatgttgatggttttcgttttgatcttgcatccataatgaccagaggatgcagtctttgggatccagttaatgtgtatggaagtccagtagaaggtgacatgactacgacagggacacctcttgctactccaccacttattgacatgatcagcaatgatccaattcttggagatgtcaagctcattgctgaagcatgggatgcgggaggcctctatcaagtaggtcaatttcctcactggaaaatttggtcagaatggaatggaaagggcatgggttatggaaagtaccgggacattgttcgtcaattcattaaaggcacagatggatttgctggtggtttcgctgaatgtttgtgtggaagtccacatctataccaggcaggggggaggaaaccttggcacagtatcaactttgtgtgtgcgcatgatggatttacgctggctgatttggtgacatataacaagaagtacaactcttcaaatggtgaggataatagagatggagaaaatcataacctcagctggaactgtggggaggaaggagaatttgcaggtttgtcggtcaaaagattgaggaagaggcaaatgcgcaatttctttgtttctctcatggtttctcaaggtgttccgatgttctacatgggcgatgaatatggccatacaaaaggaggcaacaacaacacatactgccatgaccattatgtcaattatttccgctgggacaagaaagaagaatcctctgacttgcaacggttctgctctcttatgaccaaattccgcaaacaatgcgagtcccttggcctcgcagacttcccaacagctcaacggttgcattggcatggccatcagcctgggaaacctgactggtctgagacaagccgtttcgtggccttctccacgaaagatgaaacgaaaggcgagatctacgtggccttcaacgccagccatttgccggcggttgttggactcccagagcgcccaggctaccgctgggagccgctggtggacacaggcaagccagcgccttatgacttcctcaccgacgacctgcctgatcgtgctcacgccgtccacctgttctctcatttcctcaactccaatctctaccccatgctcagctactcctccatcatccttgaattgcagcctgatgattgaaagaacaaagtatagcatagtatagcagagtaaaaaacatatgtttatagccctttttgcgtatatgttgaagttgtgcggtccttcaattttgaaaaaaaaaaaaaaaaa

SEQ ID NO: 88690 - DNA, 339 bp, Oryza sativa
  unsure (1)..(339): unsure at all n locations
  Clone ID: PAT_MRT4530_87516C.1
ctcacgcgttcggtagcgacggtatcgaaggacacaatgggcgagcgtgcgctgtctacgactccgctgctcgccgggatcgactatgagagcggcttctgagtgtggaccccgatcttggacggagactccctgtggtgaccaccanggcgaggcggtgcgcactactgctgggggctacgtattctgcgttctgtggtgggtgactctcctcgggcgtgctgtgctcgttgtacttggcactgggatgggcatatcgtaggcgtgcttccttggcgccgtccggtggattgcgggggggctttggggctctctcgggctcgcggccggggacgtcac

SEQ ID NO: 88691 - DNA, 1011 bp, Oryza sativa
  Clone ID: PAT_MRT4530_87517C.1
ggctgcaggaattcggcacgagggttcgatctttcttgctgtggggatttcgccatgaacgccttcttcacgtcgctggcgagagggctggacgacctgagcagcggcggcgggctgtcgtcgctgccggcgctgctgcgggcggcggcgctgctcagggggctgcactcgcagctcacgctgctggtggggcagctccacctgccgcccggtgggcggtggctcgacgagtacatggacgagaccgcgcggctctgggaggcttgcctcgccgtcaaggtcggccttgccgccgtcgagcggtattgcgctgccgcgtcttgtgctgcggccgccatggatgactggctccaggacccttcccctctctccactcgccaggtgatgagggcgatctctgcgtcgaggagggaggccatggcggcggaggaggagaaccgtgcgctgtcggaggcgaggatcgcgccgctgtcgctgcagctcgacgagcggctgctgctgcgcgccgcggacgccaggttgagcggcttcaacggcttccgcggcctgctctacgcgctgcacaacgccagctcgctgctgctcctcgtcctcgcctccggcgccgtctcctgcgccgccgccgcagcggggccgtgctccgcggatggcgccgcggacgccggcgggttcgtggcgtccatcgcaatgctgcagcagaggatggcggaggaggccgacgccgacggtagcgccggcgcggcgcgggggggcatccggatgtacgagttccggtgcgcgcgcgccgccgtggaggcggcgcacgaggaggtggagcgcgccgtggcggcgggcccccgcaagcagcagtgcgaggacggcgacggcggcgtcaaggacaaggtcgacgagctcaaggcgtggctcgacgtgctccggaccggcaccgacggcctcgtctgccagctcgacgacttcctcgacgacattgtcgagggcaggaaggagctctccgacctttgcagccactga

SEQ ID NO: 88692 - DNA, 171 bp, Oryza sativa
  Clone ID: PAT_MRT4530_87518C.1
atggctggcaggtgggacccacctgcgacgcgggtacacgtgtcggcgcggccgtggctggcgcggttaaggagacgggaggtgacggcgtcaacggggaagcgcgtcggctgcggggtttgggctggcggtgagctggcccgggtggaacggaacggacgtcggtggtaa

SEQ ID NO: 88693 - DNA, 330 bp, Oryza sativa
  Clone ID: PAT_MRT4530_87519C.1
atggccatgtggggtgcccaggaaggggtcgctgttgtcgaaccgggccgcgtggtcggccggcctgtgttgctggtgcggctgtggtgccagcgcgaaggtctcggcgtgcacgcgctcgtgctctgcatcggcgacgccgtaccgggtgtcggcccaaacttgtcgtccgccgtggtcgatgttgttgaggccaatgaatccggccgtgcacgttgtgcgagcgcggcaacagcggcatccccagtgggtgggggttgcaggagagtcgagcgccagttgggcttggagggggaagaagtcgtggtgcacatcctgcatcctagttga

SEQ ID NO: 88694 - DNA, 171 bp, Oryza sativa
  Clone ID: PAT_MRT4530_8751C.1
atggagcgggtgcggcggatcagcagagcggcgttcggattccgcgcgaggtggggtggggagaggggagaagcggcggaggagacgatcgagagggagaagaagatggagggaatggtgaagcctttcgcgccgctttctcccgccacctcgcgctgcttcctcgtgtaa

SEQ ID NO: 88695 - DNA, 254 bp, Oryza sativa
  Clone ID: PAT_MRT4530_87520C.1
gagtgatgaacactaccaggcgaatacgtatttcaccatgtatgccaggtgttgctgcactttctgggaacgcaacacagagaggagccctcatgtgcgctgggcctttggctcgagacaagcgatgacaaggagaataggctggtcaaaggtagaaaagctcagcttaactctcaacagtaaaaggattcttccaatattgcaaggcggcacatatctttgtaagaacatatcctgcctttgaaaaattacca

SEQ ID NO: 88696 - DNA, 277 bp, Oryza sativa
  Clone ID: PAT_MRT4530_87521C.1
atgtgtataaatttactaaaatagtaaagtaatgcggtgcaaaaaaagaaaccaggtagagagagagagggagagggggattgatcgctacccccggtcccgggcgatcgatcgccgattaggattttcgagtccaagttctagtacgtggagtagttacgtggcaggagatggaaacaggtctcatgagaggagaattcttgagcacagagacatttacccccagattacaccacagaagccatcgttacgccattctcccttggctcagttggtc

SEQ ID NO: 88697 - DNA, 601 bp, Oryza sativa
  Clone ID: PAT_MRT4530_87522C.1
gcacgagggagaaatatgattgttctaggagaaattcgtatgttgctattgttttatggcacctaagatacaacattataagcacaagctgaagctcctccgtagccatcttgaagaaagatctcctgatactacctcattgcatggttgttagtgctgctgcttcgtatgcaatatattgttgttagatagcattaaccaccacacggagaggggcttgacatctctcaagggtgttgacatgttatgttgtaaaatgtaacctggaggcaatattgaacgagtagcatctctatcaaaattttgagagggggagtattttaagcagtaaccaatgtgtttccgttgtataatcttaccatgccttctgaaatctgaaccgttattgctatgaaattacagttgatgctgctacaacaacagtgaggcagttggtagaggtgagatactctggtgttagtgtgttactgtattgcatgtccggtgtccggcctgcattgctgttgggagaactgaatgaagcactctcactcttaactgtcacagtgtcactgctcatcgaacagctcctgctcctgcatgcgtctatggcagcacgcaa

SEQ ID NO: 88698 - DNA, 970 bp, Oryza sativa
  Clone ID: PAT_MRT4530_87523C.1
tttttttttttttttttttgtgtggaaaaacttggtatacatggttgatagatatatacaacatatacactattgtgatcatgaggcaatccttatacatacagaaatcaaaacaaattaaataaaaaagcataactgtacattggaggatacagagaaaagattttgtagagacaggaagaacataaacacgatatctggaggctaacaacatgcatccatctagaactcgtgtatactagtataatctgtgcttcgagccttcgatcagttccaatttattcaacagtgtccgtctccaaccgcgccaagattgaggaccttaaaaaaaggaactttaaatcttaagaactacgtcaccccccctccgcggcctcctgcatactgggctgacccgtgcttcgggccttcaatcacttccatttttttcaacagagcccgtctccagcagcgcatccattgacgccctctcagaatgggactgcacgcgcatgcatgtcaagcacatgaagtgacttttgtaaagcatccatcagcttgaatcatatctcatcccaatcccttgtggaaattaatggtgtagttgctgccttggctggccattaaacatgaatgatgacctttatctaagatgcgagccagatctggccaaacgcatagcgaaacaaccttgcatgccaaatatgggtcatctgttagcctcttccatgctccatttttgaccaagcaataacttgatgaaccccaccaccatggccaacaaccacagtgctccagtgtactggcagcatctccatgcttcagctcccaacgcaaggagtagtactaccacattatcaccagcatccgtatcactctcctcggtagtagttccggcgacagcacggctgatcgagttgtccgtcgacgcctgggaatggccgttgtgggcccatcccgaccgctgcccctgaggcttggagaaagccat

SEQ ID NO: 88699 - DNA, 2042 bp, Oryza sativa
  Clone ID: PAT_MRT4530_87524C.1
ggcggtggcaatggggtcgccatggctgcgcatcaggctgctcccggaggtgccgccgcgcctcctgcggccccacctccgccggaccctctccgtccgcgcctccgcctccgcctcggcgtcaccggacggcgccggcggcccggtgcgggtccgcttcgcgccgtcgccgacgggcaacctccacgtcggcggcgcccgcaccgcgctcttcaactacctcttcgcgcggtccaaggggggcaagttcgtgctccgcatcgaggacaccgacctcgagaggtccaccaagaagtccgaggaggccgtgctcagtgacctcgcctggctcggccttgactgggacgaaggtcccgatgttggtggggaatttgggccgtatcgccagtccgagcgcaattcgatgtacaaacagtatgccgagaagctgatggagtctggtgcagtctatcagtgcttttgctccagtgaggaacttgaacagatgaaagaaactgcaaagcagatgcaacttccacctgtatacatgggcaagtgggggactgcttcagatgcagaaatacaacaggagttagagaaggggacaccttacacttaccgtttccgtgtaccgaaggaagggtcgttgaaaattaatgaccttattcgtggtgaggtcagttggaacttagacacgcttggtgatttcgtgattatgagaagcaatggccagccagtgtataacttctgtgtcacagttgatgatgctaccatgcgcatctctcatgttatcagtttgcaatcctcttgtttctcccccagagctgaagaacatctgccaaacacattacggcaggctcttatttataaagcacttggatttccaatgccttcgtttgctcatgtatcacttattctagctcctgatagaagtaaactgtctaaacgtcatggggctacttctgtgggacagtacaaagagatgggctatttgcctcaggcaatggtaaattatttggcacttcttggttggggtgatggtactgaaaatgagttcttcaccattgatgacctagtggaaaaattcactataaatcgtgtcaacaaaagtggagcagtctttgatgctgtaaaattaaaatggatgaatggacaacatctaagatcatttccccctgatgtactcatcaagagttttgaggatagatggaaggacacaggcattctccaggagtctgaaagtggttttgctaaagaagcggctgagcttttgaaggatggcatcgatttgatcactgatgctgacgcagccctttcaaacctgttgtcgtatcccctccatgctacattaagcagtgatgaagctaaatctgtggtgcaagacaagctttctgaggttgcatcaggactcatttctgcttatgatagcggtgaactttgtcaagcactagctgagggccgtgatggttggcagaagtgggtgaaaatttttggcaaatcacttaaaagaaagggaaagtcactctttatgccgctccgtgtactgctgactggcaagcttcatgggcctgacatgggcggcaccgtagtcctcatacacaaagccggcacctgtggagcggtcactcagcaatccggtttcgtaaatctcgacgagaggttcagaatcctgaaggaggtggagtgggagtcactggtacaggagcaagagtccccagctgaaactgccgttcctgcttctccataggctgcaagattcagatcaatcagggagagtttttgttttctgtaatactccactataaagcataggatatgttccattttactacccatttctacagttgtgaggaaactatagtttcggttttctgtagttaataaagcggaattttgcttagctgttctgtaattgtcgatttgaattggattggatggcaaaggttacgaggtgatgctgcttgtctttttcagaaaaaaaaaaaaaaaaaaaaaaaaaacagaagaacataaaaaaaaaaaaaaaaaaaaggggggggcccgcgtcccgttccccccctcgt

SEQ ID NO: 88700 - DNA, 229 bp, Oryza sativa
  Clone ID: PAT_MRT4530_87525C.1
ttttcaaccaaccagcagccagctcaacttggcacaacacaaaaccactcatggttcccagatcattcagcacagtgccagtgcacacagtcacacatttcaccacatccaccagatgcatccaacatcttctttgcacacatcaacagccaccaagatattatacaatcgtcacagcacagatgcagggcatcagggcaacagcacatcacacaccccacagattgca

SEQ ID NO: 88701 - DNA, 648 bp, Oryza sativa
  Clone ID: PAT_MRT4530_87526C.1
atgacggccgccctgcaagcgctgctcgacccgacggcgctgtccctgggcctgcccacgccggtgatcaacaaggaggtgtacctcgccatctgcctcaccgtgctcgccggcacgcgggcggggaaggccctggtgggcaaggccgtcctaggggtgtgcgggccaccctgctggtgggagtgggagaccagcaggaggtgcagccatgtaggcctgcaagcggttgtccccgaggtggcgagcggcggcgcgcaccgtggactggaggccaccctccgcaacattgtccgccgacctcttgccttcctctccgcctccggctcgtgcggccccgccaatgctgacatgcgccacctcatcgctcgcctccttgcgaaggaccccgccgcccgtctcggctcccacgcggcgccaccgactgcgccttgtggaagtaatcggtggtttttgatgccgccggcgccggtgcggatgaagatgtggcgggcgcccaggcttgttggcagggcactggctgcacgcgccactgatgcctcgccgcggcgcgccaaggttggacacgtcagtgctcgtggcggcctccacggtcgcccatgcatgatgcgggtgcgccgtcaactcagcatcaatgtagtggaggtgtag

SEQ ID NO: 88702 - DNA, 678 bp, Oryza sativa
  unsure (1)..(678): unsure at all n locations
  Clone ID: PAT_MRT4530_87527C.1
catttctctcctccccctcccctcacccccgtctcctctcaactcttgttctttttctacttgctcccttgagactaatggctttccttagtagatgatacgattattttcctgtttttgcattttcctttggctcatggttgcaggagtcgattgttgatggtggcaagcaccatcggtcaaaccgtcgtgcttctcatcagtaaatgatctaaccactagaagaattatgtcggaatttgacagtatgacatatgatcttcatcatccaaggggtttcaatgttgtttctgagtttttttgttttacatggaggataaggaaaagaacctgtgtaagtatagtcacaatatctttttagaaaattattaagttctctataaggacctgtgtagtggattccctttcctatatattctatttttttatataaaaacattatcagtactatcaaattataatgtttcatgatatttttatatgaaaacacttagcatagtttggtagaatgggaaaatattgttttttataatgagcacaaatcatattttaatacttaaattaagaaagtatttgtaaggatattttttgaaacttgcatgttaaaaaatctcatatctattattctcttgnataagagaaattggttttgctatttacagaaacacacatgcctac

SEQ ID NO: 88703 - DNA, 1106 bp, Oryza sativa
  Clone ID: PAT_MRT4530_87528C.1
gctgcttcttctcctccattgccatctatcacctcacctgagctgaaatcaagaactggatctaggagaaggtcatggttccaaggatactcatcgttctcctggttgtgctgcttggattggcattccaggcaattctccggccaccacctcaaaaattgtgtggctcacccggtggacctcctgtgacatctccaagaatcaagctcagagatggaagatatcttgcttacagagaagatggagttcagaaagacaaggccaagttcaagatcatcagtgtccatgcgtttgattccaccaaggacttccccttgcaggtttctaaggaactggtgcatgaactgggaatctacattgttggtttcgacagagcagggtatggggaaagtgatccgaatcctaagagggatgtgaagagtgaggctttggatattgaggagcttgctgaccagctcgagcttggacacaagttctatgtgttgggagtgtccatgggaggatactcaatttggggatgccttcagtacataccaaacaggcttgcaggagctgccatggttgtgccaattatcaactactggtggccttcattcccagctgagctatccaggcaagccttcaagaggctcatcgtgccagagcagaggacactctggattgcacacaacatgccatctttgctctaccagtggatgacccaaaagtggctcccttcttctgcggcagccatgcgccaccctgaaatattcagcaagcatgatttggaggttcttcagaagatgatggcaatgcctctcattgagaataaatctaggcagcaaggcatttatgaatcaacacatcgtgatttgcttgttgcttttggaaagtgggagtttgatccaatgaatattaccaatccatttcctcaaaatgagggttctgtacacatctggcaaggttatgaagacaggttggtgctggttgagctgcaacggtacattgcccagaggcttccttggatccagtatcatgaattccctgaaggaggacacatgttcatgctggtagatggatggactgacaaaatcatcagagcgctcttggttggagaacagctctga

SEQ ID NO: 88704 - DNA, 597 bp, Oryza sativa
  Clone ID: PAT_MRT4530_87529C.1
ccatcgccgccgccgccgactcgtctccgcctccatcgacctccatttctcctcaacaccgcctccgcctccgcctccgccgccgccaccgccgccaccgccggcgatctctcccacaaaccctagcaaacacgctcctcttccgcccatcgctctccgcctagcattgccaccctcttccttgtgtgcttctcctcctcctccctcccctcttcctccttgtccgagccctcatcctgtaccttcctgctcctcctcgtcgtcgtattcctcctcctcctcctcgctgccgctgtcgctcaccgcccagccgtcgtcggagtcctcccccgccgccgccgccgccgccgctgactcgtctccgcttccgtcgatctccatttctcctcaactccgccgcggcgctctcccgcaaaccctccaccaccaccacccacggagcccacggatcttctgcgcccggccagccggcctcatccgagcaccacagcaaattcgtctccgccgctgcattctattccatccatcccaccgtcgcctcgacgtcggcgcggcggaccccggcccgagcctcctgtccctgccaccggcttcccc

SEQ ID NO: 88705 - DNA, 1308 bp, Oryza sativa
  Clone ID: PAT_MRT4530_8752C.1
atggaagccaccgccggcggatcacgccgcagtccaagcatcttccgcatcctatggccgaagaagtccatcgtagccccacccgccgcatcacgccgccgtccacccctctcccccctcctcctcccccctatcaccgtcgtcgccgcccccagctctttccccggcggggcctcctcccccgatctccagcgagaagcagtcaaggtcacgggattgctcctcagggggtccgacatcgtgtgggccgtgcacgtcgagagcgcggatgccggggtcgcgcgagtgctggcccgggcgttgagggagaggcggtacggggagatggggagccatggcacggtcggggcctgcgagcaagtcggggccgggaaggttaggtttttcgtttataagggggacggggtggaggcggtggaagtgacggagtttgggaggggggatgatccctgtattgtttctgagggggacggggtggaggcggtggaagtgacggaggttgtgtgggaggatgatcccgggaggttgctgtgggagaagggatgccttctccgctgcgagctgctgctgaaaacagcttctaagctcagagatcctcatgtttcttacctaatcgaaggcccacgaacaactcctggtgaatcacattattctattatcttgcatggcaatgatctgaattctgttccccatttatctcgaaatggaagcacagaggagtatgatgcaaatattgtatcttgttcaaaattcttcccagcaaagaggagcctctcattgacaagagagaatgcagatgcaattcaaataaccatattgtccaatcagtcattcaatagctcaaaggctagcaccccagcagttgagtactttccagcacctgcattggctagcctgagagcaatcaacttgaagctagatatactttgctacacttcagtagatttccctgtagctgctgctgtgtctgagcttgttattccaggattagctgatcagctgagcattatgaagaaggctattgtatcagagctcacaactcaacaaccccaggtttttttggaacatggacttttaataccaaatgaacaagtaaaagataaaggttgcatgctttctccgtaccattttgttcctcctggactgttaatcccagtaacaactatatatgacacaagatatggggagattgaggaaaagcaaatatctggaggaattatatcattgattgatggttcctatgagtactaccattaccttcatgatggtattgatgataatgtaatgcctggcttccatctatgctga

SEQ ID NO: 88706 - DNA, 298 bp, Oryza sativa
  Clone ID: PAT_MRT4530_87530C.1
cgtgtatgttagtacaggtaattaattaatgtaataagaagttcagagcttgtaatgggtgctggttgtgtacatgtaaattcttcaggacaaatctttaacatagggagttggggattttgtatgtatgatgttgaattgcaacaggaaacgttgcagacagattaataggtgaaaatctagctttagatacttttgtgttaagaaacgtgaaaagttctttttttgagttttgagcatggcctgtctgtttgtgtatgttactacaggtaattaatgtaacaagaagttcagaacc

SEQ ID NO: 88707 - DNA, 1387 bp, Oryza sativa
  Clone ID: PAT_MRT4530_87531C.1
cgcttgcccaagaaccaccaccaccacctcctcctcctcatccatggacgagccacctctcctcctcgccgccggcgaatagcaccggcggtatatccgatccgatcatctggtggtgtgttctacgggttgcagcttctttcgctggatatagggatcgatcggaagtttttttgggatatgtcggcggcggcggcggcggcggctgggcaggaggttaatccgggcgttgtggtggcggcggtggtggaggtggaatgggcggagtgcgcgtgctgcgggctgagggaggagtgcacgccgacgtacgcggcgggcgtgcgggcgcggtacggcgggcggtggctgtgcggcctgtgcggcgaggcggtgggggaggagctcgccgctgccgggggcggcgccggggacgacgggtcggtggtggtggaggtggaggcggcgatcgcgaggcacgccgccttctgccgcgcgctcggctgcaggtcccccgccgcggcggagcggctcatcgcggcggtgcggcggctgctccgcggcgccggcgagggcggcaggaaggagaaggccaaggccgtggtggtgctggagttccatgacgcctgagacgacagatcgaagatctgttgctctcccatggcgctagctatagctagtcctagcctctttctcttttaatttgaatctctctaccttaattgctgcttaattttcctagcttgattatatttagctcgcaataattacgtgctcaatttgtacgcaaaatcctgcaagttctccagctttgtgtaactgtgaaggaatgggaaacaacattctggaggacaatgagagattgagagctaaggtggaaaaaagaattccatttttctctcgcttcgccttctcctctccttgtccttgacctcccctgctccgccgcgccgcagagcgagcggccatgaccaaggtgcaccccaacgtcgcggtggtggcgccggcggtggtggctcccgcccgtggtggaggatgagaatggggaggcggtgtccttgaccgtgtggcggcggtcgcttgtgttcacgggaagggtttcacggtggccgaccggaagggggaaccatctgttctcggcgtcagagctaccccggggggtcgcccaggggaggtcgtgcttatgggaggccgacgggccggcccttcttaacatccgccgaaggaagctgaacttcccggaccatggggttatttaccaacggggacgcggggtttcccggggcgccggggccaaaaaggttacggggcgggcccaattaggcggcgcccaaccaagttctttgcccacttttgacgggcccggcgttttattccacgcccccgcgggggataagatacccccccgggg

SEQ ID NO: 88708 - DNA, 321 bp, Oryza sativa
  Clone ID: PAT_MRT4530_87532C.1
gtacggattcccggtccacgcacgccccacgcgttcgaccacgcgtccgcttcagacaagctcgtcctctcagccatcgtgctcgccgacctcgccgccgtgaggggagcgttgtcggtcttacggtacgttggcgagtactgccgcttggggaaggttgtgtcccagaacccgatcccgtcgtgccggaactacatcgcgcggtggcgcgcctccgtcgggggccgcatggactcccaaatgcagtcgccgctggagttcctggagccttgctgcctgtagctcatctatcgtgccaatgcattcgccatttgccattct

SEQ ID NO: 88709 - DNA, 501 bp, Oryza sativa
  Clone ID: PAT_MRT4530_87533C.1
atggaaaagaaagggagaggaagcaacccggcgccgaggggtaggtgcatttataggaagaggaggaggaggaagacggggaagcgcggggggcagaagcgggatttcgcccgcgcgagcctggtatgccacggctcgacgctggcgggtgggccccgccctccccccgcgggcgtggggcccacctgtcagcgcgtgaggcgggacgggagggagaagggggaggagaggaagtgctctacacgcgctcgcgccgcattactgacatgtgggaccaggcgaccgcggggcccacgttacagtgggtgcgtatgttctggggggggagcgtggcgggctgaccccgatcgggcgcactggacgggacgccgcgtgtgcgggcggcggaacacgtggacggcgggggaaaggggggagcgtgtgggccctgtcctgtcggggtcgagctcgagagcctcgggatcgggcaggtggatcgcgtcgtggcgcgacgaggggaga

SEQ ID NO: 88710 - DNA, 495 bp, Oryza sativa
  unsure (1)..(495): unsure at all n locations
  Clone ID: PAT_MRT4530_87534C.1
tgttcgtgtccgtgtcctagaaaaacttctgcacacgcagccgacgcccttctctatctagctaaatctccattttaattcctctctctctctctttgtgtctttctcaagggaaaattaaccatcaaatcaatagatacaatgagcttgatcagcatgatggaggcgaacctgccgccggggttccggttccaccccagggacgaggagctcgtcgtggactacctctaccacaagctctccggcggcggcgagttctacggcggcgtggccatggtcgacgtcgacctcaacaagtgcgagccgtgggagcttccagacgccgcgcgggtgggcgccacggagtggtacttcttcagcctgcacgaccgcaagtacgccacggggcagcgcaccaaccgcgcacccgctccggctactggaaggccaccggcaaggaccgcgccatcgtcacccgnctgcgagccgtcggcggtgaggtggtcgggatgagga

SEQ ID NO: 88711 - DNA, 216 bp, Oryza sativa
  unsure (1)..(216): unsure at all n locations
  Clone ID: PAT_MRT4530_87535C.1
aggaccataatactactagcatccagagntactaactactcttcaacctcaaccttaaagggggggaaagttcatctgctttcctccagcattgctaaacataacatacngcttgacgcccaaaccttcggccaccacatnacaactttgagtcatgctagaaggctaganccgcccatgcgacnccatattatcaactagtcacacacacgaggt

SEQ ID NO: 88712 - DNA, 1418 bp, Oryza sativa
  Clone ID: PAT_MRT4530_87536C.1
tttccttctctatctagaattctagatctccaggtgaatttgaaatctctatcggggtcaaaggagaatgaaccatcaaatcaatatatacaatgagcttgatcagcatgatggaggcgaacctgccgccggggttccggttccaccccagggacgaggagctcgtcgtggactacctctaccacaagctctccggcggcggcgagttctacggcggcgtggccatggtcgacgtcgacctcaacaagtgcgagccgtgggagcttccagcatatttcttgcacaatctgatcatcttccctgcacgcgcacgcgcacgcgccgccggtcgccggcgacgagaagacgccgcgcgggtgggcgccacggagtggtacttcttcagcctgcacgaccgcaagtacgccacggggcagcgcaccaaccgcgccacccgctccggctactggaaggccaccggcaaggaccgcgccatcgtcacccgccgccgcgccgccgccggagaggccgtcgccggcggcgaggtggtcgggatgaggaagacgctggtgttctaccaagggagagccccccggggcagcaagacggagtgggtcatgcacgagttccgcgtggacggacatgccgttgccgaccacccctcctcgtccacctcctcctcctcatctaatcttctcaaggaggactgggtgctgtgcagggtgttctacaagagcagaacggctacaccaagggcagtagtctccggtgaggctgccgtgtcactgtccggtgagctcagcttgccgccgccgctgccgccgcccgttgcccccgccgtcgtcgacggctacaccggcggcggctattacgagcaagacagctcagctgggtaccaccaccaccaccaccaccggccgccgccgtcggcagcattgccgttcaaggacctgacggacttcagggacctgctgagcaacatggcacaaggcggcggcggcggcgctgccgccgccaagacggaggggttccatcttggctggagcgaggaggagtcctccggctacgtgcagcagagcgccatggcgtcgcaggcgtggaacccgttctagcttagctagagctagagctatatatagctgatataagctgatccagttctgaacttttttcagaaatggtgatgatatacaaaggcaaagtttgtaggtgtagcttagacaatgtaaatgtaatatatcttcgttgtttcagtaatttttcctttgttaattagcgtggttgattcctagttgtgctactgctagttaacagcgtagtgacaaacaatttgtaaatgtggaaatggcttggtttacagtaacttttgagatgtacaaaggattgctccattcagttcattggttgctaaagaagagaaatagattcgatcgttactc

SEQ ID NO: 88713 - DNA, 728 bp, Oryza sativa
  Clone ID: PAT_MRT4530_87537C.1
atggtgtccgcttggaccatcgtccccggcatcatcgtttcgctgatcgtgcttgtggtcaccaagctgtgggatccaatcgcccaggtctacgggtacccgttcgatgcggaaaggcgcgtgcagaaactcgtcgatgagttctccaagctgcaagatcagttgggcgagctggggattttggatcccaaaccctcgtccgcagtgctctcgggttggctgcagcgggcggctggatgcaaggacaaggtggaggagataaagcgccgacatgaatctgtgaagagcgtgggggtccagggcctcctaccccggatcaacgtggtccggcacctctgcgccatcggcagggatgcagatctggagctagaagaagtcaaggatctcatcgccaaaggagagggccacttgaaggaggcgggtgctgctccccatccgattccgattccgattcctctactacctccaccggcggcagaattcgacaacggccagcttgcccagtcaatcctcgacacggcagcggccggcacatggggagttgggatccaggcaatgaaacctcacctgaccagcgtcctagattttgtccgggaagacggcggcggagctcctggcgtgctaggagtatggggcatgggcggcgccggcaaaaccacgcttctcaagctcgcgcgcgatccacgagtacaaaccttggaccatattgttctcgctgaggctggcaa

SEQ ID NO: 88714 - DNA, 342 bp, Oryza sativa
  Clone ID: PAT_MRT4530_87538C.1
atgatctttctgccctccccgagtcgaggtcatttgccggaaactgcagcccaccacccatccagcacatcgttgctagtcggctatcaaggagctcggtcaccgacgcgctccgaatccatccacgcaattggtttcgagagggagagggtaagagagaagaatggatcccctctcccctatactagcccaccaatgcggccattttgtggcgggcaaggcaccgccgcaagatggctagtgtttggatcgtggcctgccacaggcctgcaccacccacctcacgatgtcaccgtagatgccgcctcggtcggacaacccgtggtacctccggccgcctaa

SEQ ID NO: 88715 - DNA, 238 bp, Oryza sativa
  Clone ID: PAT_MRT4530_87539C.1
aaaagtaacgggggaaggggttagcagatttgcgagaacaatatgtgcattttaaaggcccttctaatctctgtccagtatattaccaacattagtatcattttgccaaagcaaaggtgacacgtatatatatgggaccactatcacaaatgggcccagtcacggtgattcttcctttaaatacgggcacaaattaaaccccccaaagctatggcgaattcaattacattcccacttc

SEQ ID NO: 88716 - DNA, 582 bp, Oryza sativa
  Clone ID: PAT_MRT4530_8753C.1
atggagccgagatccccgcgcccgtttcctctctctccggccgctctttccttcccccggcgctataaaaacgttgcccgaactccgctctttcgtttccgccgcttgccgctcgctctcgccgtcggaatcgtgctagcgccgtgctcctctctctccgccgtcgccgtcgaccttcggttagccgccgccgtcgctccgctcttcttcccggctcggcgacccctccttcggcatcgccgcatcgccgccgaccccgtccgccgctccgcttcgcccgccgaccgccggagcaccgtcgtcatcatcttcccgaaccgcgccgccgtcttcctccgctccggccgccgttctcgtcgtcgtcgttgtcccggggtgagccaaggaccgccgttcgccttccccctttcctcctctctctcgggtgccactccgccgcgccgttggtcgccggcggcgaccatcggggcgcgggtgcacgccgctcccgtcggccgcgccggcgaggccgcccttgggcgcgccctcgcggctgccaagtgggcccggccgtcagccgcccgcgcccgcgggtgcggctga

SEQ ID NO: 88717 - DNA, 141 bp, Oryza sativa
  Clone ID: PAT_MRT4530_87540C.1
atgggccccgagagttcaaaactaccctatgggtccacgaagttctgggctgcccatcgagtaacgaacaatgatcatgaggaggaagatgcttgtggagaacctgttgatctgttagagtgggacagctatggtttctag

SEQ ID NO: 88718 - DNA, 428 bp, Oryza sativa
  Clone ID: PAT_MRT4530_87541C.1
ttcgtaggggacgaccccgttgtgacggcgacgtccgccagggccgggggtttctcccatcgccggcagtgcagctgcactccgtgcaggggaatgtgcaggctcatccgtggagcaaggagaggaggaggacagaagaagaagaagagagaccgccacgttgatggccgtgagacaagcatcaggtgccgaccggcgccaaacccggactccaagttagctagcaagtaattaattagctaattaacactagtaaagaacactgcgagagctctatttgcaccactgccatgcattgtgtgagatgtgatgagatgtcatgagcgatctaccgtgtatgtatgtatgttttagcttgcttgagcctaatatgttattttcgtcttatttaattgtattagtgtcatgatttcaaaaaaaaaaaaaaa

SEQ ID NO: 88719 - DNA, 411 bp, Oryza sativa
  Clone ID: PAT_MRT4530_87542C.1
atgggcgagggcggagcagcaagcggcggtgaggcgccgcctctttccccctctcaaccggcctcattttccccgactccgcccggcctcctctccccctctccggccgggcgcggggagaagggtggtcacccgcgggtggcgtggacaggggcaacttgcagcgcaacggtgatgaggaatacagccgtcgccgtgaagccgcacgcgtggggcccgccgccgctccgcccgccactcaccgaccgctgccgggctcacttgctgccagcctctaaggcccactggctctacaccttcgcccgcatcccgcgctcggccatcaccaccctccgccggcgaagagagaagagagaaaagagaagagaaggagaagaaaagaggagaaaaaaatgtgcagctgacatgtag

SEQ ID NO: 88720 - DNA, 399 bp, Oryza sativa
  Clone ID: PAT_MRT4530_87543C.1
atgacgtcatgctcacgtctagttagtcgttggcaggtggggccgcactttcaattcgctgacaggttggccaagggtgggggccacatgctcgcctcgccggaggcggtcgcacgcgctgctgttgctgcacgccgcgcgctcaccgacgtccacggcgggcggccagcgtcgtcgtcgacggctacggcgccggcgatcaacagggggagaagactaggagaacgccatgttttgccatggcgcgagccaaagcagcgcatgcgcatgcagaggcctcaggtcggagccgaactcgtccctgtcgcgaaggcagcgagcggcaatgtggcgatgcccatctgcgctctgctagtgccggttgagggcggcagcggcggcaggaaaaagttcacatga

SEQ ID NO: 88721 - DNA, 249 bp, Oryza sativa
  Clone ID: PAT_MRT4530_87544C.1
atgaacagagttctacatggaaataacaaggactactcggattataagatccgcaagcgcacggatataccgatgtatcacttcccctacagagtattccaagggtatcgaatccaagggaacgtgtatgtctatatcctcgtcacgttcatccaaggacacaaagctaatgcactgtcaacccgctgtttccacctctacacccacctcaaacgtactgtgcgatacgcagcaaccactgaagattaa

SEQ ID NO: 88722 - DNA, 1551 bp, Oryza sativa
  Clone ID: PAT_MRT4530_87545C.1
tcaaagccagatggccctcttcaacccagcgaccctcaaagtacatcccacttcagactcaatcctcaaaagtacctcctcaaaatgagccaagtcctccctcacaccacttgtcttcgtgaacttacctaggtcaatacagagcttgtacagttcagaaagctttttgagcataacatcatcaaagtcatcaccaaagaggtcctcattactactcccaaaaacatcttttaacttcatttggtttatgttagactccaatgaagatgcaaccagctgaatatccaaaatcttcttataacacacatgtacttccccaggaacgtatgttttcattaagttggcaagatcaacacaaaaaccgtgaattagcttagctttctccaaaacaaattcatcacaaaactctgatttttcttcacttctctttcccctagatcgtttcgaaccagacctacatgcaaccatatcagttttcttccttttgagtttcttggttgctgatgaatatttgcttgacatagaagatgctgtcatttcaaacttgccaaccaactgagtaaaatctagaataggcttaccatcaatatttttcaatctattcaacagatcttgagtcacccctgaacagtgcttaacatggtgtgcgtatacgaagtgaggtctcatcttccacatacccaaaacttcccacccgcaagcaaggcaaatcatgcaatctttttcagatgaaatgttctgcagctgatgtttctccacgaattgctcacacgtagtgtattcctcccgtccaattgattttggaaagtaaagtttcacatagcgcgagagctcttcttgcgtgcttcttctaataggaaccgacgaagaattagatgggtccaaattttttatcctaacaccgagatcaacaggtaagaaaattccatctctgtcctcaagtgaaacgattgagtgttggtagaagatatgagcttcatcaatcttgttttctgccaatagctgaaacagtttctcttcacgaaacatgagatataacgcaggatgaagtctagcaaagtcatcgacacagtgctcttgattatcacaaagaatactccatatatatccttcaaccgcatcccagtcttgctcttttatcagagttttggcacggtccatatctaaaactttcaccagcgaaggcggaggcggaggcgcggggatggaggtttctggcgacgtcggcagagcaggagcgggtgaagcgccgaggatggttgccgccgctgacgtcggcgaagcaggaggctcgacgacgacgagggaggctgccgccgccgctgacgtctgcaaagcaggagacgcggcgggggagcttgctggccccgtcggcggagccgcagcgggtgacgcgccgagggtggttgccgccgccgctgacgtcggcgaagcaggaggcgcggcgcgagaggcagctggggcggcggcgcggggcccgggcggccgacgagacccaccgccggtggaggcatccgccgccgcgtcttccgcccccacgtctggttccat

SEQ ID NO: 88723 - DNA, 265 bp, Oryza sativa
  Clone ID: PAT_MRT4530_87546C.1
acgcaaacgctgatgagcgtcttcgtcattatcattagctgctacactgctattgactggatcaccgacttgttactcaactttttaggagttggtacaatgcatcttaaaaggtgtcaaacagtaaagctttatatagctgttccgctgacttttttatataagtcaaggtgttgtttgggtttttaagcaatcgattggatacaatatcattgctttttgccacccagtaacaatcgaatgaacatgccagattaaccgacgt

SEQ ID NO: 88724 - DNA, 2413 bp, Oryza sativa
  Clone ID: PAT_MRT4530_87547C.1
gagggtcaccaagtgaacttattcccaaaatccaataatacatggttcgaacatgggctggctatatatagctcctggagtttagtcgtgacagagaagttgcatgggccatacatgattctgtcacgcgtcgttattactacggcaagcctagttgccatcccagtatctaaacaggagccgtcacgagttacaggcccgaagcctaaacgtgcacggtgatcttgttcgccttctcctcgttgctgtcgagcttgatgcccttgtaccacacggcgcacgcgacgtacacggcgaggtcgaccagcgagagcgcggcgaggaggaagtagaacctgtcgaggtggccggagttgaggttcccggggatccacccgggccgcctgtcgccggcggtgaggctggtgaccacgctcaccagcatgatgctcacgtagttccccagcgagatggacgccatgcacagcgagctcccgaagctcttcacgccgtcgggggcctgcccgttgaagaactccagctgccccacgtacatgaacacctccgacgccccgatcagcgcgtactgcggcacctgccacagcacgctcagggagctcggctggtccggcgcgcccacccgcttcagccgctccacctccaccacgccggcgaccaccatggccgccatgccgaccacgagccccacgcccatccgctgcagctcggtcagcccctgcgggttgccggacaggcgcgacatgaccggcacgagcacgcgccggtagatggcgatgaacgccagcacgctgaggatgtcgaacaccgacatgctcgccgcgggcacgtggaacgacccgatgttggtgttcatggtggttccctgctccacgaacagcgacgccatctgggtgaacaccaccgagtatacgatcgtgcacagccagatgggcagcatcttcaggatgcacttcacttcctccacctgggtcaccgtgcacagcctccacggatcctgcatgttctccggcgtgcagtagtcctcctcggtgaccgtcgccgccttgtcaaggaacctgatctggtcgctgtggaggatctttcggatgccagcaatctgggactcgtcgccgtcaacctcgtgcaggagctcgctgcgtggcacctcggcgcgccacttgcggaacgcggcgacgaacacctgcgcgatgcgggtcaacgggttgccggtcggcttgaagtggcggtagttgggggtgccgagcaagaagagcacgagcgccatacccgccgccgcggccgagacccagaaccccatgacccacctcccctcgtcctcgtagtacaccagcaccgtgttggagaagagggagcccacgttgagcgccaggtagaagtagctgaagaaggccaccttggagcgggcctccctggggtccgtctcgtcgaactggtcggagccgaacgtggcgatggacggctggtaccctccgttgccgaacgcgatcatgtaggtcgacaggtagaagagcgcgacgccggcgctcgacggcgcgtcgcagtgctcccccgcggcgccgcagccggtgggcttcaccagcaagaaccacgacgcgagtgacagtatcaccaggcccgtgacatagatcatctggaagattgcacacgtgatgtatcggccccagtaggagtcgctcatgaaggcgccgatgagggagaagatgtagaccgtgccggtccacttgctgatgctgttggctgcctctgcgttgtcctggtggagcacccgccgcaggaacaccacaaggttcaccccgacgccgaagaaggcgcatgtcacgagcccatagttgactagcaagaggatggaagatctccaattcccagtttttgctttaactgccggatttcctcgcctgtccattgatccatcttcagtgatgtcagaaatccttttcgaatcgacagcagttggagccattgccttgctctttctgtttgttgttatcgtcgcccttgtggatactttctcgtgtttttttttatcaagggaaaacttccgggccttttttgctttaaccttcgctgatgaaccctccggtgcgcacgcgcagcggcggcagctcgcacttctccggcgacggggacgacgacaggcacgtcacaaaggaagcgacgacctccacgacgacgacgacgcagctagctaaatctcctcaaacaacaacgcggtagctcgatcgcgcgcaacgacgcgatcggtgaaacgccgtgctgccgcgcgcgcgcgcgcgtcggctgctgtgatcacccgcgctccctgatggaacgatctcttgtaccgcgcgcgcagacgcagccggccggcgcgagcgcgacggagacgcgcgtactgggaggtgtgggaaatggagggggggggggaagctaagcc

SEQ ID NO: 88725 - DNA, 367 bp, Oryza sativa
  Clone ID: PAT_MRT4530_87548C.1
ggctacttcgcttgagagaatttccatgttttcatctgcagccatgcagcagctcaaagacgatgggtcgtccgcgaggcagctgcagctgctcgtcgccgcgctgtcgacggccggagctgtggcggccgccgccgtcgtgcgacgcaggcacgggaggaaggccgccgcagccgcagccgcagccgccgcggcgccgccgccggtggtgatgagggaaatgccgaggctggtgatggcggagtccggccgcgtcgagcacatcgagaagttctctcactacgtcgctaggcagatggggtttcaggacataaatgagtgcccacagctgtgcaaattagcaaataactacctcaagaggaccaag

SEQ ID NO: 88726 - DNA, 282 bp, Oryza sativa
  Clone ID: PAT_MRT4530_87549C.1
atgatcggcaacgagtcgacacaccacccccaaaaagacaaaaaaaacaacacaaacgacacagccaaagaacacgaggcgagaccgaaaaacaataaggtgaggggcagggttcgggccacacgccgccacgcccgcgcgcgcgactcacgcgcgggacccacggcgccgaccgccgccagccgcgtgcgcccggtccaccgtggacccgagcggctgacgcatgggccccacttcccgtggacccggtctgcgcgcccgctccctcggctgacgcaataa

SEQ ID NO: 88727 - DNA, 404 bp, Oryza sativa
  Clone ID: PAT_MRT4530_8754C.1
atctggttgaccgcccataaccgcgggcacggctattcgaatagttttactctgatcagaggtgtacaactatacccacaagacacagccccataacacgtttccgtgcgccgacatgccaccacgacataccggaaagaggccgtgacaggacccttcgcataaccccctctaaccaagcacaccacacctcaggtttcacccccactccttgcaaagcagcgggcagtcccctctcgtgcctaggtgaatccagaagcgacagaggccgtcgcagggcccgccccgctccatcacgcccacccttgcctggatgcgtcagctagaggaaagctacactacaagcccagccgttgcccatgctggcttgtggtaagtatgataagttcttccagggcatcccg

SEQ ID NO: 88728 - DNA, 230 bp, Oryza sativa
  unsure (1)..(230): unsure at all n locations
  Clone ID: PAT_MRT4530_87550C.1
ccatcccctcctacccaagttccaccatcgatgtgagcccggagctcccctttgtcaccacgcttctcaacgatcaagtgggagaggttgctctcaagatcctcctcaagcgcgacaaggtggctgtagatgtagagctcgcgctgccggtgtcgaccacaacctcgtcggctaccaccctcggccagagcttatgcctccttcaaccaatctggtacggacgacnatag

SEQ ID NO: 88729 - DNA, 471 bp, Oryza sativa
  unsure (1)..(471): unsure at all n locations
  Clone ID: PAT_MRT4530_87551C.1
gaatgccnacttaaatcttggttcngcaagccgcaaaccaccccccattttgccgaagaatcaaggaagcttgaagggtttgaaccggccgaaggttgggtttgaatccccgggcttggagggaaaattggggccgggtcccggaacaagaatgttgccaggagggtaaattcctcccaaaagtaaacccctcaaagtccccagcccaccctgatttgttctttgttgcccatccctcaagagcaatggaatctagcgagtggaatctgcctgggaacttgttcgttcttgatggcattctgagagcactgcatctagcgagtggatctttgctttcatccactttctgctgtgacgccactctgctggtatttagtgaaaaaaaagacatgtatactttcttccctttccggccttatggtttgtgcctgcaatggagcaatcaatctgatcaaaaaaaaaaaaaaaaaa

SEQ ID NO: 88730 - DNA, 371 bp, Oryza sativa
  unsure (1)..(371): unsure at all n locations
  Clone ID: PAT_MRT4530_87552C.1
nnnntnnnnntttgttttttttaannnnnccggggnggcccaaggcacctcctttaacacatagggatgatatacaaaacagtacgcacacaatacgtccttttttcagctttgtcttaacacctgaccatgcaaatttagctatctcgaaccatttacaatccaaagctgaatctttctacggattgctttgtaaagcaccttctttcgaagagaaaattgttgcagtctagtctgaaacaattgcagcccactgcgattaattgcttcataaccaatggagtactagttttcttctctagggaaaacgtagaacttcagaaccttgaacctcacgtcgacactgatctaaggggggggttacatccagg

SEQ ID NO: 88731 - DNA, 572 bp, Oryza sativa
  Clone ID: PAT_MRT4530_87553C.1
ggagaaaaagggggaaaagggaaaaaaaaacagcatgatactggggggggcagcgccctgacacatacgttaatggcttttttttttcttttctccaaataatttgagacggatacggagtaaaaagagagggcaaagacaggagcagcatgaacaggccaactgcatgctgaatgagcagcaacagactggagacattattgccaaatcacagaccagaacagctgaacgatcctgtagtacaatgggactcacacaggcatacatcaattgaccaaaccatgggaccaaatcaccacaagaaatgagaaaagatagcccagggaagcaattaagtttacacatcaaatgccaatatgccaagcactgtcattccatccaaagatggcaagttgaagattgattttagcggacaatgtgacagcgaaaacggagggtatgggggcgaaggaaatttcacaaattccatgccacaagaagacaggaagaattctgaagaaattttaaagacacaggtacattaccggctgtaaaagaatttgtttaccttgaaatctcccaccttgaaaaat

SEQ ID NO: 88732 - DNA, 5511 bp, Oryza sativa
  Clone ID: PAT_MRT4530_87554C.1
atggccgaacgggcagtggcgcacaacctctctccgaaagctagcggtgacgacggggagcagaacccgcgccgtcgggctcgcaccccaccgtccccctctcgccgaaatcctgggcggggggaggcgctcagggaggtcggaggatccgcgacttcgccactcgcgggcgacgggggaggacggcgagacggggcacgtcgccgcctcgtctacggcgatggcggcacgccccagggcgcgctccaggctgcgggcgcgctcctgtgtcacccacccgtcgtccccgatccagagactccagcccgacgttggctggatgacgtggccgacttggtcatgacggcgcagcagcgactaggcgccggcgggcggtcctccgccaccgaggcctctggcgctgccgccgccagctccaagtcgtcgaggcggagggcgcggcgagcggcggccgttacccgccgttcgtccgccattccctcgtcaacgcctccaacccaagaagatgtgtgtggggggccggatgcccgcctcgatatcgagcgccggcgcgacgctcgtcacgccgcccacgcaacggagggcgcttcctcgtccggagcgccacttcggtccgggcacgggggccggccccccgtgtccccggttggcggtgccggctgtcgagcctttgtggcgagccttcggaacgtccgttggcccccaaggttccggcccaccatcaccgaaaaatacgacggaaacgtcaaccccgccgagtttctccagatctacacgaccgggatcgaggccaccgggggtgacgacagggtcatggcgaatttcttccccatggccctgaagggtcaggcgcggggttggctaatgaacttgccacccgcgtcggtccactcttgggaggatttgtgccaacagttcaccacgaacttccagggcacatatccgcgcccaggcgaagaagcggacctgcatgcggtacagcgaagggacgatgagtctcttcgctcgtacattcagcggttctgtcaagtccgcaacaccataccgtgcatccccgcacacgcggtgatctacgcgttcagggggggcgtgcggcacaaccgcatgctcgagaagatcgcctccaaggagccccagaccaccgcgcagctttttgagctcgcggaccatgtggctcgcaaggaggaggcctggacatggaactcctccggttctggtgtggcagctccggccgcccccgggtccgccgctcggtcagggcggcgggacaggaggaggaagaaggggtcggcccgttccgacgacgagggtcatgtcctcgccgtcgagggcgcttcgcgggccccccgaagggggaggcctgcgagcgacaaaaagaaggaggccgacgctcccagcagggagcgaccgaccggcaagtggtgtaccatgcacaacacctccctccacgacctcgcggactgccgcgcggtcaaaagtttggctgagcggacgaggaagtgggaggaggagaagaggcaggagcgccgtgatggcaagaccccggcagctcctgccgacaaccggcgaggtgaggccaagcagaaggccaccaccgaggacatcgacgatggcgacgatgacctggggttccaggagcctgaggccaccgtcgccaccgtcgatgggggagcgtgcgctcacgcttctcgccggagcctcaaggccatgaagcgagagcttctggccgcggcccctacccatgaggcgacgcggcgggcgcggtggtcggaggttgccctcaccttcgaccagaccgaccacccgccgtgcgttgcccggggaggacagatcgcgatggtggtttcccccaccgtttgcaatgtgaagttggggcgtgtcctcatagacgggggtgcagccctcaacatcctttcccccgcagcctttggcgccatcaaggccccggggatggtgctctggccgtcccagccaatcatcggtgtgacgccggggcacacctggccgctgggtcatatcgacctcccggtcaccttcggtggttccgccaacttccgcatggagcgggtggacttcgatgtggcggaccttagtctgccctacaacgcggtcctggggaggcccgcgttggtgaagttcatggcggcggtccactacgcctatctccagatgaagatgccgggccccggtggccccatcaccgtccatggcgacctcaaagtcgcgcttgcttgtatggagcagcgcgcggaccaccttgccgcggcgtccaagcccgcgggtggcgacgagaggctcagcacctccgtcccggccgccccaaggcagaggatggtcacgtgcgacgaggaagacgcgctcgtctccttcctgcgggcaaacgccgacgtcttcgcctggagatcggcggacatgcccggggtccccagggaggtgattgagcaccgtctcgccgtgcggccgggcgcaaggccggtccggcagaaagtgcggcggcaggccccggaacgtcaagccttcatccgcgaggaggtggcgcgacttctggaggccggattcatccgtgaggtcatccatccggagtggctggcgaatccggtcgtcgttcccaaggcaaacggcaagcttcggatgtgcatcgactacaccgaccttaacaaggcatgtcctaaggacccttaccccctgccacgcatagatcagattgtcgactccaccgcggggcatcgaggccaaccccgagaagataagtgctatagagcggatgcgccccccagcaagcttagggatgtgcagtgcgtcaccggctgcatggccgccctaagtcggttcatatcaaggctgggagagaaggcactacccctatttaagctcctcaaacgctccgggccgtttacctggacggaggaggctgagcgggccttcactcagttgaaagcgtacctcagttctcccccagtcctggtcgccccggagccagatgagccgttgctactctacctggcggcaaccccgcaggtgctcagcgcggcgttggtcgtggagcgcgacgaggacaaccctcactccgtgcatccccaccctgtgtcgactcgacccgggagagagcagggaggagaggcccccgagccgaacggcggcccgaggcccccgacggccggagctggccctccgcctgcttgtccgacggtgccaggcgcccccgacccccaggatggccccggggccaccgcgggaaggccgcgcctgtcgccctctgaccccgaggtcgtcggcacagaagccgagtgcgccccgcgtggcctctcggacgaagagcgccgtggaaatgcggcccctggcgaagaggatcggccccgccgaaaggtgcagcggcccgtctacttcgttagcgaggccctccgggacgccaagacccgatacccccaggcccagaagatgctttacgctattctgatggcttcgaggaagttgcgccattatttccaggcgcatcgggtcacggtggttacgtcttaccccctcggccaaatcttgcataaccgagagggtactgggcgggtggtgagatggacaatcgaactctctgaattcgatttgcgctttgaatcacgccacgcgatcaagagccaggccctcgccgactttgtggcggagtggaccccagctcccgagcccgtctccgcccccgaggccagctcgggcccctcgcagctgccccacaccgcctactgggtgatgcagttcgacggctccctgtctcttcagggcgccggtgcgggggtcacgatgacctcgccgagtggagacgtcctcagatacctggtccgcctcgactttcgggcgaccaacaatatggcggagtacgagggactccttgcgggactcagagtggcagctggactggggatccgccgcctcctggtgttaggcgactcccagttggtcgttaaccaggtctgtaaggagtaccagtgctctgacccgcagatggacgcttacgtgcgccaggttcggcgtatggagcgccattttgacgggatagagcttcggcacgtgcccaggcgggataacgcggtcgccgacgaactctcaaggctcgcttcttcgcgagcccagaccccaccgggcgtctttgaagaaaggcttgcccagccgtcggcgcgacccgaccccctaggggagacggacgcgcctgaacggcccccgaggcccgtcggagtccaggcctcgggacccgaggggagcgctcccagctcccctagattgattgcttggatcactgagatccaggcgtacctcgtagataagactctacccgaggaccgcgaagggagtgaacgcgtccggcgcatctccaagcgctacgtgctggtggaagggaccctctatcggcgcgcggctaacggagtcctcctgaagtgcattcctcgggaacaaggcgtcgagcttctcgccgatgtccatgaaggcgagtgcggagcccactccgcctcacgcaccttggttggcaaggcctttcgccagggtttctattggccgacggctctcaacgatgcggtcgacctagtccggcggtgcaaggcgtgccagttccacgccaggcaaacccatcagctggcccaggccctgcagaccatacctctttcgtggccgtttgctgtctggggcttcgatatcctgggtccgttcaggcgggccccgggcgggtttgagtatctgtatgtcactgtcgacaagttcactaagtggccccaggcttatccggtcatcaagatcgataagcactccgcgcttaaattcatcaggggcatcactgctcggtttggggtgcctaaccgtatcattacggataacggcacccagttcactagtgagctcttcggtgactactgcgaagacatgggcatcaagctctgcttcgcctcccccgcccaccccagaagcaatggccaagtggagcgcgccaacgcggaaatcctcaagggcctcaaaaccaagaccttcaacatcctcaagaagcacggcgactcgtggatcgaggagctgccagcggtgctctgggcgaaccgaaccacgccaagccgagcaaccggggaaacgcctttcttcctcgtctacggcgcggaggcggtcctcccatctgagctcaccctgaggtcccctcgggtcaccatgtattgcgaggctgatcaagatcagcttcgccgagacgacctcgactacttggaagaacgaaggcggcgcgcggccctccgagccgcgcgctaccagcagagcctgcggcgctaccatcagcgccacgtccgggcccgatcactctgcgtcgacgacctcgtcctacgccgcgtccaaacgcgtgctggactgagcaagctctcaccaatgtgggagggtccgtatcgagtgatcggcgtcccccggccgggctccgttcggctggccacgggcgacggcacagagctgcctaacccgtggaacatcgagcaccttcgtcgcttctacccctag

SEQ ID NO: 88733 - DNA, 4998 bp, Oryza sativa
  Clone ID: PAT_MRT4530_87555C.1
atgacggcgcagcagcgactaggcgccggcgggcggtcctccgccatcgaggcttctggcgctgccgccgccggctccaagtcgtcgaggcgaagggcgcggcgagcggcggccgttacccgccgttcgtccgccattccctcgtcaacgcccccaacccaagaaaatgtgcgtggggggccgaatgcccgcctcgatatcgagcgccggcgcgacgctcgtcacgccgcccacgcaacggagggcgcttcctcgtccggagcgccacttcggtccgggcacgggagccggccccccgtgtccccggttggcggtgccggctgtcgagcctttgtggcgagccttcggaacgtccgttggcccccaaggttccggcccaccatcaccgaaaaatatgacggaagcgtcaatcccgccgagtttctccagatctacacgaccgggatcgaggccgccgggggtgacgacagggtcatggcgaattttttccccatggccctgaagggtcaggcgcggggttggctaatgaacttgccacccgcgtcggtccactcttgggaggatttgtgccagcagttcaccacgaacttccagggcacatatccgcgcccaggcgaagaagcggacttgcatgcggtacagcgaaggaacgatgagtctcttcgctcgtacattcagcggttctgtcaagtccgcaacaccataccgtgcatccccgcacacgcggtgatctacgcgttcagggggggcgtgcggcacaaccgcatgctcgagaagatcgccttcaaggagccccagaccacagcgcagctttttgagctcgcggaccgtgtggctcgcaaggaggaggcctggacctggaactcctccgtttctggtgtggcagctccggccgcccccgggtccgccgctcggttagggcggcgggacaggaggaggaagaaggggtcggcccgttccgacgacgaaggtcacgtcctcgccgtcgagggcgcttcgcgggacccccgaaaggggaggcctgcgagcgacaaaaagaaggaggccggcgctcccagcagggagcgcccgaccggcaagtggtgtaccgtgcacaacacctccctccacgacctcgcggattgccgcgcggtcaaaagtttggctgagcggacgaggaagtgggaggaggagaagaggcaggagcgccgtgagggcaagaccccggcggctcccgccggcaaccggcgaggtgaggccaagcagaaggccaccgccgaggacatcgacgatggcgacgatgacctggggttccaggagcctgaggacaccgtcgccaccgtcgatgggggagcgtgcgctcacgcttctcgccggagcctcaaggccatgaagcgagagcttctggccgcggcccctacccatgaggcgacgcggcgggcgcggtggtcggaggttgccctcaccttcgaccagaccgaccacccgccgtgcgttgcccggggaggacagatcgcgatggtggtttcccccaccgtttgcaatgtgaagttggggcgtgtcctcatagacaggggtgcagccctcaacatcctttcccccgcagcctttgacgccatcaaggccccggggatggtgctccggccgtcccagccgatcatcggtgtgacgccggggcacacctggccgctgggtcatatcgacctcccggtcaccttcggtggttccgacaacttccgcacggagcgggtggacttcgatgtggcggacctcagtctgccctacaacgcggtcctggggaggcccgcgttggtgaagttcatggcggcggtccactacgcctatctccagatgaagatgccgggccccggtggccccatcaccgtccatggcgacctcaaagtcgcgcttgcttgtatggagcagcgcgcggaccaccttgccgcggcgtccaagcctgcgggtggcgacgagaggctcagcacctccgtcccggccgccccaaggcggcggatggtcacgtgcgacgaggtcccggtcaaggagagaccggcggacatgcccggggtccccagggaggtgattgagcaccgtctcgccgtgcggccgggcgcaaggccggtccggcagaaagtgcggcggcaggccccgaaacgtcaagccttcatccgcgaagaggtggcgcgacttctggaggccggattcatccgtgaggtcatccatccggagtggctggcgaacccggtcgtcgttcccaaggcgaacggcaagcttcggatgtgcatcgactacaccgaccttaacaaggcatgtcctaaggacccttaccccctgccacgcataaaccagattgtcgactccaccgcggggtgcgaccttttgtgttttctagatgcatactctggttatcatcagattcgcatggctagggaggatgaggaaaaaactgcattcattacccccataggaacttattgttatacgacaatgcctttcgggttaaagaatgcaggtcctacttttcaacgtactactcgaatttctttgggtagccagataggacgcaatgttgaggcctatgttgatgacttggttgtgaagacgcgcaaccaagagaccttactctcggatctagcggaaactttcgaaagtctccgctccgcctgcataaagctgaaccccgataagtgcgtgttcggcgtgcctgcgggcaagcttctcgggttcttgtgcgtcaccggctgcatggccgccctaagtcggttcatatcgaggctgggagagaaggcgctacccctatttaagcttctcaaacgctccgggccgtttacctggacggaggaggctgagcgggccttcactcagttgaaagcgtacctcagttctcctccagtcctggtcgccccggagccagatgagccgttgctactctacctagcggcaaccccgcaggtggtcagcgcggcgttggtcgtggagcgcgacgaggacaaccctcgctccacgcatccctaccctgtgtcgactcgacccgggagagagcagggaggagaggcccccgagccgaacggcggcccgaggcccccgacggccggagctggccctccgcctgcttgtccgacggtgccaggcgcccccgacccccaggatggccccggggccactgcgggaaggccgcgcctgtcgccctctgaccccgaggtcgtcggcacagaagccgagtgcaccccgcgtggcctctcggacgaagagcaccctggagatgcggcccctggcgcagaggatcggccccgccgaaaggtgcagcggcccatctacttcgttagcgaggccctccgggacgccaagacccgataccctcaggcccagaagatgctttacgctattctaatggcttcgaggaagttgcgccattacttccaggcgcatcaggtcacggtggttacgtcttaccccctcggccaaatcttgcataaccgagagggtactggacgggtggtgagatgggcaatcgaactctctgaattcgatttgcgctttgaaccacgccacgcgatcaagagccaggccctcaccgactttgtggcggagtggaccccagctcccgagcccgtctccgcccccgaggccagctcgggcccctcgcatctgcctcacaccgcctactgggtgatgcagttcgacggctccctgtctcttcagggcgccggtgcgggggtcacgttgacctcgccgagcggagatgtcctcagatacctggtccgcctcgactttcgggcgaccaacaatatggcggagtacgagggactccttacgggactcagagtggcagctggactggggatccgccgcctcctggtgttaggcgactcccaggtggtcgttaaccaggtctgtaaggagtaccagtgttctgacccgcagatggacgcttacgtgcgccaggtgcggcgtatggagcgccattttgacggcatagagcttcggcacgtgcccagacgggataacgcggtcgccgacgaactctcaaggctcgcttcctcgcgagcccagactccaccgggcgcctttgaagaaaggcttgcccagccgtcggcgcgacccgaccccctaggggagacggacgcgcctgaacggcccccgaggcccgtcggagtccaggcctcgggacccgaggggagcgctcccagctcccctagattgattgcttggatcactgagatccaggcgtacctcgcagataagactctacctgaggaccgcgaagggactgaacgcgtccggcgcatctccaagcgctacgtgttggtggaagggaccctttaccggcgcgcggctaacgaagtcctcctgaagtgcattcctcgggaacaaggcgtcaagcttctcgccgatgtccatgaaggcgagtgcggagcccactccgcctcacgtaccttggttggcaaggcctttcgccagggtttctattggccgacggctctcaacgatgcggtcgacctggtccggcggcgggccccgggcgggttcgagtatctgtatgtcgctgtcgacaagttcactaagtggcccgaggcttatccggtcatcaagatcgataagcactccgcgcttaaattcatcaggggcatcactgctcggtttggggtgcctaaccgtatcattacggataacggcacccagttcactagtgagctcttcggtgactactgcgaagacatgggcatcaagctctgcttcgcctcccccgcccaccccagaagcaatggccaagtggagcgcgccaacgcggaaatcctcaagggcctcaaaaccaagaccttcaacatcctcaagaagcacggcgactcgtggatcgaggagctgccagcggtgctctgggcgaaccgaaccacgccaagccgagccaccggggaaacgcctttcttcctcgtctacggcgcggaggcggtcctcccatctgagctcaccctgaggtcccctcgggtcaccatgtattgcgaggctgatcaagattag

SEQ ID NO: 88734 - DNA, 2280 bp, Oryza sativa
  Clone ID: PAT_MRT4530_87556C.1
tcagccttttttttccctcaacgatccacccttccagagtcctgcattatcttgtattcttgtgatgaattttatctacaatcaaattaatacccagacttgaaatcgtactgaatccatgagctcaacaggagcgctcctgcgcgctccagggtggcgggatgggcaatcgaactctctgaatttgatttgcgctttgaaccacgccacgcgatcaagagccaggccctcgccgactttgtggcggagtggaccccagctcccgagcccgtctccgccctcgaggccagctcgggcccctcgcagctgcctcacaccgcctactgggtgatgcagttcgacggctccctgtcttttcagggcgccggtgcgggggtcacgttgacctcgccgagcggagacgtcctcagatacctggtccgcctcgactttcgggcgaccaacaatatggcggagtacgagggactccttgcgggactcagagtggcagctggactggggatccgccgcctcctggtgttaggcgactcccagttggtcgttaaccaggtctgtaaggagtaccagtgctctgacccgcagatggacgcttacgtacgccaggtgcggcgtatggagcgccatttcgacgggatagagcttcggcacgtgcccagacgggataacgcggtcgccgacgaactctcaaggctcgcttcctcgcgagcccagaccccaccgggcgcctttgaagaaaggcttgcccagccgtcggcgcgacccgaccccctaggggagacggacgcgcctgaacggccctcgaggcccgtcggagtccaggcctcgggacccgaggggagcgctcccagttcccctagattgattgcttggatcactgagatccaggcgtacctcgcagataagactctacccgaggaccgcgaagggagtgaacgcgtccggcgcatctccaagcgctacgtgctggtggaagggaccctctatcggcgcgcggctaacggagtcctcctgaagtgcattcctcgggaacaaggcgtcgagcttctcgccgatgtccatgaaggcgagtgcggagcccactccgcctcacgcaccttggttggcaaggcctttcgtcagggtttctattggccgacggctctcaacgatgcggtcgacctggtccggcggtgcagggcgtgccagttccacgccaggcaaacccaccagccggcccaggccctgcagaccatacctctttcgtggccgtttgctgtctgggggctcgatatcctgggtccgttcaggcgggccccgggcgggttcgagtatctgtatgtcgctgtcaacaagttcactaagtggcccgaggcttatccggtcatcaagatcgataagcactccgcgcttaagttcatcaggggcatcactgctcggtttggggtgcctaaccgtatcattacggataacggcacccagttcactagtgagctcttcggtgactactgcgaagacatgggcatcaagctctgcttcgcctcccccgcccaccccagaagcaatggccaagtggagcgcgccaacgcggaaatcctcaagggcctcaaaaccaagaccttcaacatcctcaagaagcacggcgactcgtggatcgaggagctgccagcggtgctcagggcgaaccgaaccacgccaagccgagcaaccggggaaacgcctttcttcctcgtctacggcgcggaggcggtcctcccatctgagctcaccctgaggtcccctcgggtcaccatgtattgcgaggctgatcaagatcagcttcgccgagacgacctcgactatttggaagagcaaaggcggcgcgcggccctccgagccgcgcgctaccagcagagcctgcggcgctatcatcagcgccacgtccgggcccgatcactctgcgtcgacgacctcgtcctacgccacgtccaaacgcgtgctggactgagcaagctctcaccaatgtgggagggtccgtatcgagtgatcggcgtcccccggccgggctccgttcggctggccacgggcgacggcacagagctgcctaacccgtggaacatcgaacaccttcgtcgcttctacccctatgccctcagtggcccgggccggctaaaatcgccaaacggggcccagaaccgagccgtgccccggggcgtggtgaactccggggggaaatcggcaaaggcccacaatagggtcatccataaccctcgatcaccacgctcccggcctggccagtctcgacacgcggatctccccaggcac

SEQ ID NO: 88735 - DNA, 2284 bp, Oryza sativa
  Clone ID: PAT_MRT4530_87557C.1
gcccgccgcctcgtgccgagcgcggcacgcgccaacagaatgttgcgcgggcgcttgctaaatgctaatccatcatcattttatgcgctaatccactccagatcacgccgctaatccttatccaaacgaattaacaacaaatcagtcgcgcgtttgaaacgagtccactccacctccatccagatcagtgtatataaaccgccgcgccgtttgttcgtgctgattctctctctctctctaatcagtagtaccccagatcagtttgttgctttgctgcttcttccggttccaatctgagaggggggattcgcgcgggaggcgaggcgaggcggcagccatggtggggcggagctccctcccggagggttccctcttcctcggattcgacagctccactcagtccctaaaagctaccgtgctgaacaacgaattgataatagtagcttcagatattgttaactttgattctgacttaccgcactacaaaacagaaggtggtgtttacagagatcctgcagatgatggccacatattttcaccaacaataatgtgggttgaagcctttgaattgctacttgagaagctaaagccaaagatcaactttagcaaggttgtggccatttcagggagtgggcaacaacacggcagtgtttattggaagaagggtagtcatgcggtgttgtcttccttggatcctactaagagcttgttatcccagctgaaggatgccttttctaccatggactcaccaatatggatggacagtagcacaactaagcaatgcagagaaatagaaagtgtagtaggcggcgcattggagctatcaaagttgacaggatctcgtgcctatgagaggttcactgggcctcagatccggaagatataccgaacagttccgcaagtttatgatgatactgagagaatatctttggtgagttcgttcatggcatcaatcctggtggggaactatgcaagtattgatgagactgatggtgctgggatgaacttgatggatataaaccagagaacctggtcaaagactgttttagaggcaacggctcctgggcttgaagagaagcttggaaagttggcaccagcatatgcagtagctggtcgaattgctccttattttgtagaaaggcttcagtttgataagaattgcttagttattcaatggtctggagacaatcccaatagccttgcaggtttaactctgaatactcctggtgaccttgcaattagccttggtactagtgatactgtttttgggataactgctgaagctaaaccaagtcttgaaggccatgttttccctaaccctgttgaacctgatggttatatggtgatgctgtgctacaaaaatggttcattgacccgagaagatgtgcggaacagttgcgcggagaaatcctgggatgttttcaacagttatctagagaaaactccacctctaaatggcggaaaattaggattctactacaaagaccatgaaattctgccgccacttccagttggcttccatcgatacattgttgaaaacctcaatgatgtcacatccaacaatctggtggaacgtgaggtggaagaatttgatccaccatctgaggttcgcgccataatcgaaggccagctgctgtcaatgcgaggccatgccgagagattcggcatgcctaaccctcccaagcggatcatcgcaaccggtggcgcatcctccaacgagcgcatcctccactcaatcgcgcagatctttggctgtcctgtctttacagttcagagacctgattctgcctcgcttggcgcggcactgagagctgcccatggctggctgtgcaatgaggaagggagcttcgtccccatctcctgcatgtaccagggtaacctggagaagacctccttgggtgcaaagctcgccgtctcaaccggagagggtgtggaggacaaggagctcctggagaagtacacggtgctcatgaggaagaggatggagattgagaggcggctggtggagaagattgggcgcgcgtaggtagcagcattgcaaagctgctgtcctcgagtcacagttaattagagggaaatgaaatcattggtagaaacttatttataatatatagttagtagtgtatcaagatcatgttattatgttcttgtgcacggaataaataataaatgtaaatttgcaaactaaacaagctcgtctgttctttctgttcatcaattagatgaaactttaaatcttctttaaattctcatagatgaaacttgtttgggtggcttaaaacaa

SEQ ID NO: 88736 - DNA, 5736 bp, Oryza sativa
  Clone ID: PAT_MRT4530_87558C.1
atggccgaacgggcagtggcgcacaacctctctccgaaagctagcggtgacgacggggagcagaacccgcgccgtcgggctcgcaccccaccgtccccctctcgccgaaatcctgggcggggggaggcgctcagggaggtcggaggatccgcgacttcgccactcgcgggcgacgggggaggacggcgagacggggcacgtcgccgcctcgtctacggcgatggcggcacgccccagggcgcgctccaggctgcgggcgcgctcctgtgtcacccacccgtcgtccccgatccagagactccagcccgacgttggctggatgacgtggccgacttggtcatgacggcgcagcagcgactaggcgccggcgggcggtcctccgccaccgaggcctctggcgctgccgccgccagctccaagtcgtcgaggcggagggcgcggcgagcggcggccgttacccgccgttcgtccgccattccctcgtcaacgcctccaacccaagaagatgtgtgtggggggccggatgcccgcctcgatatcgagcgccggcgcgacgctcgtcacgccgcccacgcaacggagggcgcttcctcgtccggagcgccacttcggtccgggcacgggggccggccccccgtgtccccggttggcggtgccggctgtcgagcctttgtggcgagccttcggaacgtccgttggcccccaaggttccggcccaccatcaccgaaaaatacgacggaaacgtcaaccccgccgagtttctccagatctacacgaccgggatcgaggccaccgggggtgacgacagggtcatggcgaatttcttccccatggccctgaagggtcaggcgcggggttggctaatgaacttgccacccgcgtcggtccactcttgggaggatttgtgccaacagttcaccacgaacttccagggcacatatccgcgcccaggcgaagaagcggacctgcatgcggtacagcgaagggacgatgagtctcttcgctcgtacattcagcggttctgtcaagtccgcaacaccataccgtgcatccccgcacacgcggtgatctacgcgttcagggggggcgtgcggcacaaccgcatgctcgagaagatcgcctccaaggagccccagaccaccgcgcagctttttgagctcgcggaccatgtggctcgcaaggaggaggcctggacatggaactcctccggttctggtgtggcagctccggccgcccccgggtccgccgctcggtcagggcggcgggacaggaggaggaagaaggggtcggcccgttccgacgacgagggtcatgtcctcgccgtcgagggcgcttcgcgggccccccgaagggggaggcctgcgagcgacaaaaagaaggaggccgacgctcccagcagggagcgaccgaccggcaagtggtgtaccatgcacaacacctccctccacgacctcgcggactgccgcgcggtcaaaagtttggctgagcggacgaggaagtgggaggaggagaagaggcaggagcgccgtgatggcaagaccccggcagctcctgccgacaaccggcgaggtgaggccaagcagaaggccaccaccgaggacatcgacgatggcgacgatgacctggggttccaggagcctgaggccaccgtcgccaccgtcgatgggggagcgtgcgctcacgcttctcgccggagcctcaaggccatgaagcgagagcttctggccgcggcccctacccatgaggcgacgcggcgggcgcggtggtcggaggttgccctcaccttcgaccagaccgaccacccgccgtgcgttgcccggggaggacagatcgcgatggtggtttcccccaccgtttgcaatgtgaagttggggcgtgtcctcatagacgggggtgcagccctcaacatcctttcccccgcagcctttggcgccatcaaggccccggggatggtgctctggccgtcccagccaatcatcggtgtgacgccggggcacacctggccgctgggtcatatcgacctcccggtcaccttcggtggttccgccaacttccgcatggagcgggtggacttcgatgtggcggaccttagtctgccctacaacgcggtcctggggaggcccgcgttggtgaagttcatggcggcggtccactacgcctatctccagatgaagatgccgggccccggtggccccatcaccgtccatggcgacctcaaagtcgcgcttgcttgtatggagcagcgcgcggaccaccttgccgcggcgtccaagcccgcgggtggcgacgagaggctcagcacctccgtcccggccgccccaaggcagaggatggtcacgtgcgacgaggtcccagtcaaggaggaagacgcgctcgtctccttcctgcgggcaaacgccgacgtcttcgcctggagatcggcggacatgcccggggtccccagggaggtgattgagcaccgtctcgccgtgcggccgggcgcaaggccggtccggcagaaagtgcggcggcaggccccggaacgtcaagccttcatccgcgaggaggtggcgcgacttctggaggccggattcatccgtgaggtcatccatccggagtggctggcgaatccggtcgtcgttcccaaggcaaacggcaagcttcggatgtgcatcgactacaccgaccttaacaaggcatgtcctaaggacccttaccccctgccacgcatagatcagattgtcgactccaccgcggggtgcgaccttttgtgttttctagatgcatactctggttatcatcagattcgcatggatagggaggatgaggaaaaaactgcattcattacccccataggaacttattgttatacgacaatgcctttcgggttaaagaatgcaggtcctacttttcaacgtactactcgaatttctttgggtagccagataggacgcaatgttgaggcctatgttgatgacttggttgtgaagacgtgcaaccaagagaccttactctcggatctagcggaaactttcgaaagtctccgctccgcccgcataaagctgaaccccgataagtgggtgttcggcgtgcctgcgggcaagcttctcgggttcttggtctctgcccgaggcatcgaggccaaccccgagaagataagtgctatagagcggatgcgccccccagcaagcttagggatgtgcatcctggtcgccccggagccagatgagccgttgctactctacctggcggcaaccccgcaggtgctcagcgcggcgttggtcgtggagcgcgacgaggacaaccctcactccgtgcatccccaccctgtgtcgactcgacccgggagagagcagggaggagaggcccccgagccgaacggcggcccgaggcccccgacggccggagctggccctccgcctgcttgtccgacggtgccaggcgcccccgacccccaggatggccccggggccaccgcgggaaggccgcgcctgtcgccctctgaccccgaggtcgtcggcacagaagccgagtgcgccccgcgtggcctctcggacgaagagcgccgtggaaatgcggcccctggcgaagaggatcggccccgccgaaaggtgcagcggcccgtctacttcgttagcgaggccctccgggacgccaagacccgatacccccaggcccagaagatgctttacgctattctgatggcttcgaggaagttgcgccattatttccaggcgcatcgggtcacggtggttacgtcttaccccctcggccaaatcttgcataaccgagagggtactgggcgggtggtgagatggacaatcgaactctctgaattcgatttgcgctttgaatcacgccacgcgatcaagagccaggccctcgccgactttgtggcggagtggaccccagctcccgagcccgtctccgcccccgaggccagctcgggcccctcgcagctgccccacaccgcctactgggtgatgcagttcgacggctccctgtctcttcagggcgccggtgcgggggtcacgatgacctcgccgagtggagacgtcctcagatacctggtccgcctcgactttcgggcgaccaacaatatggcggagtacgagggactccttgcgggactcagagtggcagctggactggggatccgccgcctcctggtgttaggcgactcccagttggtcgttaaccaggtctgtaaggagtaccagtgctctgacccgcagatggacgcttacgtgcgccaggttcggcgtatggagcgccattttgacgggatagagcttcggcacgtgcccaggcgggataacgcggtcgccgacgaactctcaaggctcgcttcttcgcgagcccagaccccaccgggcgtctttgaagaaaggcttgcccagccgtcggcgcgacccgaccccctaggggagacggacgcgcctgaacggcccccgaggcccgtcggagtccaggcctcgggacccgaggggagcgctcccagctcccctagattgattgcttggatcactgagatccaggcgtacctcgtagataagactctacccgaggaccgcgaagggagtgaacgcgtccggcgcatctccaagcgctacgtgctggtggaagggaccctctatcggcgcgcggctaacggagtcctcctgaagtgcattcctcgggaacaaggcgtcgagcttctcgccgatgtccatgaaggcgagtgcggagcccactccgcctcacgcaccttggttggcaaggcctttcgccagggtttctattggccgacggctctcaacgatgcggtcgacctagtccggcggtgcaaggcgtgccagttccacgccaggcaaacccatcagctggcccaggccctgcagaccatacctctttcgtggccgtttgctgtctggggcttcgatatcctgggtccgttcaggcgggccccgggcgggtttgagtatctgtatgtcactgtcgacaagttcactaagtggccccaggcttatccggtcatcaagatcgataagcactccgcgcttaaattcatcaggggcatcactgctcggtttggggtgcctaaccgtatcattacggataacggcacccagttcactagtgagctcttcggtgactactgcgaagacatgggcatcaagctctgcttcgcctcccccgcccaccccagaagcaatggccaagtggagcgcgccaacgcggaaatcctcaagggcctcaaaaccaagaccttcaacatcctcaagaagcacggcgactcgtggatcgaggagctgccagcggtgctctgggcgaaccgaaccacgccaagccgagcaaccggggaaacgcctttcttcctcgtctacggcgcggaggcggtcctcccatctgagctcaccctgaggtcccctcgggtcaccatgtattgcgaggctgatcaagatcagcttcgccgagacgacctcgactacttggaagaacgaaggcggcgcgcggccctccgagccgcgcgctaccagcagagcctgcggcgctaccatcagcgccacgtccgggcccgatcactctgcgtcgacgacctcgtcctacgccgcgtccaaacgcgtgctggactgagcaagctctcaccaatgtgggagggtccgtatcgagtgatcggcgtcccccggccgggctccgttcggctggccacgggcgacggcacagagctgcctaacccgtggaacatcgagcaccttcgtcgcttctacccctag

SEQ ID NO: 88737 - DNA, 5990 bp, Oryza sativa
  Clone ID: PAT_MRT4530_87559C.1
atggtcgaacgggcagtggcgcacagcctctctccgaacgctagcggtgacgatggggagcagaacccgcgccgtcgggctcgcaccccaccgttcccctatcgccgaaatcctgggcggggggtggcgctcggggaggtcgaaagatccgtgacttctccgcccgcgggcgacgggggaggacggcgagacggggcgcgtcgccgcctcgtctactgcgatggcggcacgccccaaggcgcgctccaggctgcgggcgcgctcctgcgtcacccgcctgtcgtccccgatccaaagactccagcccgcgttggctggatgacgtggccgacttggtcatgacgcgcagcggcgcctaggcgccggcgggcggtcctcccacaccgaggcctctggcgctgccgccgccggctccatgtcgtcgaggcggagggcgcggcgagcggcggccgttacccgccgttcgtccgccattccctcgtcaacgcctccgacccaagaatatgtgcgtggggggccggatgcccgcctcgatatcgagcgccggcgcgacgctcgtcgcgccgcccacgcaacggagggcgcttcctcgtccggagcgccacttcggtccgggcacgggggccggccccccgtgtccccggttggcggtgccggctgtcgagcctttgtggcgagcctttggaacgtccgttagcccccaaggttccggcccaccatcaccgaaaaatacaacggaagcgtcaaccccgccgagtttctccagatctacacgaccgggatcgaggctgccggggctgacgacagggtcatggcgaatttcatccccatggccctgaagggtcaggcgcggggttggctaatgaacttgccacccgcgtcggtccactcttgggaggatttgtgccagcagttcaccacgaacttccagggcacatatccgcgcccaggcgaagaagcggacttgcatgcggtacagcgaagggacgatgagtctcttcgctcgtacattcagcggttctgtcaagtccgcaacaccataccgtgcatccccgcacacgcggtgatctacgcgttcagggggggcgtgcggcacaaccgcatgctcaagaagatcgcctccaaggagccccagaccacagcgcagctttttgagctcgcggaccgtgtggctcgcaaggaggaggcctggtcctggaactcctccggttctggtgtggcagctccggccgcccccgggtccgccgctcggtcagggcggcgggacaggaggaggaagaaggggtcggcccgttccgacgacgagggtcatgtcctcgccgtcgagggcgcttcgcgggccccccgaaaggggaggcctgcgagcgacaaaaagaaggaggccggcgctcccagcagggagcgcccgaccagcaagtggtgtaccgtgcacaacacctccctccacgacctcgcggactgccgcgcggtcaaaagtttggctgagcggacgaggaagtgggaggaggagaagaggcaggagcgccgtgagggcaagaccccggcggctcccgccggcaaccggcgaggtgaggccaagcagaaggccaccgccgaggacatcgatgatggcgacgatgacctggggttccaggagcctgaggccaccgtcgccaccgtcgatgggggagcgtgcgctcacgcttctcgccggagcctcaaggccatgaagcgagagcttctggccgcggcccctacccatgaggcgacgcggcgggcgcggtggtcggaggttgcccctcaccttcgaccaaaccgaccacccgccttggggcgtgtcctcatagacgggggtgcagccctcaacatcctttccctcgcagcctttgacgccatcaaggtcccggggatggtgctccggccgtcccagccgatcatcggtgtgacgccggggcacacctggccgctgggtcatatcgacctcccggtcaccttcggtggttccgccaacttccgcacggagcgggtggacttcgatgtggcggacctcagtctgccctacaacgcggtcctggggaggcccgcgttggtgaagttcatggcggcggtccactacgcctatctccagatgaagatgccgggccccggtggccccatcaccgtccatggcgacctcaaagtcgcgcttgcttgtatggagcagcgcgcggaccaccttgccgcggcgtccaagcccgcgggtggcgacgagagactcagcacctccatcccggccgccccaaggcagcagatggtcacgtgcgacgaggtcccggtcaaggaggaagacgcgctcgtctccttcctgcgggcaaacgccgacgtcttcgcctggagaccggcggacatgcccgtggtccccagggaggtgattgagcaccgtctcaccgtgcggccgggcgcaaggccggtccggcagaaagtgcggcggcaggccccggaacgtcaagccttcatccgcgaggaggtggcgcgacttctggaggccggattcatccgtgaggtcatccatccgaagtggctggcgaacccggtcgtcgttcccaaggcgaacggcaagcttcggatgtgcatcgactacaccgaccttaacaaggcatgtcctaaggacccttaccccctgccacgcatagatcagattgtcgactccaccgcggggtgcgaccttttgtgttttctagatgcatactctggttatcatcagattcgcatggctagggaggatgaggaaaaaactgcattcattacccccataggaacttattgttatacgacaatgcctttcgggttaaagaatgcagatcctacttttcaacgtactactcgaatttctttgggtagccagataagacgcaatgttgaggcctatgttgatgacttggttgtgaagacgcgcaaccaagagaccttactctcggatctagcggaaactttcgaaagtctccgctccgcccgcataaagctgaaccccgataagtgcgtgttcggcgtgcctgcgggcaagcttgtcgggttcttggtctctgcccgaggcatcgaggccaacctcgagaagatacgagctatagagcggatgcgcccccccagcaagcttagggatacggaggaggctgagcgggccttcactcagttgaaggcgtacctcagttctcccccagtcctggtcgccccggagccagatgagccgttgctactctacctggcggcaaccccgcaggtggtcagcgcggcgttggtcgtggagcgcgacgaggacaaccctcactccgcgcatccccaccctgtgtcgactcgacccgggagagagcagggaggagaggcccccgagccgaacggcggcccgaggcccccgacggccggagctggccctccgcctgcttgtccgacggtgccaggtgcccccgacccccaggatggccccggggccattgcgggaaggccgcgcctgtcgccctctaaccccgaggtcgtcggcacagaagccgagtgcgccccgcgtggcctctcggacgaagagcgccctggagatgcggcccctggcgaagaggatcggccccgccgaaaggtgcagcggcccgtctacttcgttagcgaggccctccgggacgccaagacccgataccctcaggcccagaagatgctttacgctattctgatgacttcgaggaagttgcgccattatttccaagcgcatcgggtcacggtggttacgtcttaccccctcggccaaatcttgcataaccgagagggtactggacgggtggtgagatgggcaatcgaactctctgaattcgatttgcgctttgaaccacgccacgcgatcaagagccaggccctcgccgactttgtggcggagtggaccccagctcccgagcccgtctccgcccccgaggccagctcgggcccctcgcagctgcctcacaccgcctactgggtgatgcagttcgacggctccctgtctcttcagggcgccggtgcgggggtcacgttgacctcgccgagcggagacgtcctcagatacctggtccgcctcgactttcgggcgaccaacaatatggcggagtacgagggactccttgcgggactcagagtggcagctggactggggatccgccgcctccgggtgttaggcgactcccagttggtcgttaaccaggtctgtaaggagtaccagtgctctgacccgcagatggacgcttacgtgcgccaggtgcggcgtatggagcgccatttcgacgggatagagcttcggcacgtgcccagaagggataacgcggtcgccgacgaactctcaaggctcgcttcctcgcgagcccagaccccaccgggcgcctttgaagaaaggcttgcccagccgtcggcgcgacccgaccccctatgggagacggacgcgcctgaacggcccccgaggcccgtcggagtccaggcctcgggacccgaggggagcgctcccagctcccctagattgattgcttggatcactgagatccaggcgtacctcgcagataagactctacccgaggaccgcgaagggaatgaacgcgtccggcgcatctccaagcgctacgtgctggtggaaaggaccctctatcggcgcgcggctaacggagtcctcctgaagtgcattcctcgggaacaaggcgtcgagcttctcgccgatgtccatgaaggcgagtgcggagcccactccgcctcacgcaccttggttggcaaggcctttcgccagggtttctattggccgacggctctcaacgatgcggtcgacctggtccggcggtgcagggcgtgccagtttcacgccaggcaaacccatcagccggcccaggccctgcagaccatacctctttcgtggccgtttgctgtctgggggctcgatatcctgggtccgttcaggcgggccccgggcgggttcgagtatctgtatgtcgctgtcgacaagttcactaagtggcccgaggcttatccggtcatcaagatcaataagcactccgcgcttaaattcatcaggggcatcactgctcggtttggggtgcctaaccgtatcattacggataacggcacccagttcactagtgagctcttcggtgactactgcgaagacatgggcatcaagctctgcttcgcctcccccgcccaccccagaagcaatggccaagtggagcgcaccaacgcggaaatcctcaagggcctcaaaaccaagaccttcaacatcctcaagaagcacggcgactcgtggatcgaggagctgccagcggtgctcagggcgaaccgaaccatgccaagccgagcaaccggggaaacgcctttcttcctcgtctacggcgcggaggcggtcctcccatctgagctcaccctgaggtcccctcgggtcaccatgtattgcgaggctgatcaagatcagcttcgccgagacgacctcgactacttggaagagcgaaggcggcgcgcggccctccgagccgcgcgctaccagcagagcctgcggcgctaccatcagcgccacgtccgggcccgatcactctgcgtcgacgacctcgtcctacgccgcgtccaaacgcgttctggactgagcaagctctcaccaatgtgggagggtccgtatcgagtgatcggcgtcccccggccgggctccgttcggctggccacgggcgacggcacagagctgcctaacccgtggaacatcgaacaccttcgtcgcttctacccctacactttcgatttcctgaggactgtgtttgtgccatcgtttccttttgaaggatcttggcttgaattagcacgctcgtgcccgaccctgccctcggtggcccgggccggctaaaatcgccaaacggggcccagaaccgagccgtgccccggggcgtggtgaactccgggggggaatcggcaaaggcccacaatcgggtcatcataaccctcggtcaccgcgctctcggcctggccagtctcgacacgaggatctccccaggcac

SEQ ID NO: 88738 - DNA, 711 bp, Oryza sativa
  Clone ID: PAT_MRT4530_8755C.1
atgccgcgctacaagcctgagtacttgtttggtgttgagggatttgtccaggagttacgtacgatgtcctttgtcattggatttgggactgcccctttttatgctcagattcctcatgatcttcatgaagagaagtgccgagtcaaagtcaccttgaacagtaatagtgaagatatcccctcagtgatgttcgaagctggaggaagaaactacatccatgcatgtcaggagggaagtgaccgtggcagttaccttgagactgaaggaattgagaatgatgctaccacaaggcatttggttgagatgctgtgggctatggatgaaagtcgtgcggagactgtgttagcagctcaagatcgtgaagaccggaatcgtggtaagatttgcaagctagaagacaaggtggatcgtttggagaaggaactagctgcattaaagggagaagcaccgccacagaaggccaggattcgtctcaccgcaaggaagagagctctatttgtccctcgctaccaattggcgccaaaggtccgtgtggtggagaaagaagttgccccagccctagcggatcctccggtcattatcataagtgatgatgaaggagaagaatcaaagcgcacccattccaagattgagtgggtagcaactcaagatgatgaagacgagccgaacgagccttcaatcgacctccgatgctcggaagaactagagtga

SEQ ID NO: 88739 - DNA, 324 bp, Oryza sativa
  Clone ID: PAT_MRT4530_87560C.1
gggaacacatagttacacacacatgatggagggacctttcaatcatacacacataccaacacaaaaagcgacaggcacgcacagagtgtcgagatgcacatgttggcacatttgctagtcggtaatcgcaggattagacacactattgttcgcacccaccacaacattagtgcatctgctcttgatcagttagctagtgcgtatcaagctgttgaacatgcttgacaagaggagcacacactacttagccacgaccagtgctaggaaggaaggaaggatgcatagttcttaagttaagaaggttaaatgaacctagtaaagaat

SEQ ID NO: 88740 - DNA, 319 bp, Oryza sativa
  Clone ID: PAT_MRT4530_87561C.1
acacatcatcagcattcaccagggtgcactgcgagccccaacatccttccacagcattcaacctgtgtgccatctcaaattcattgggctctccagacagccgactcggtgtgacctccagcacagtgcgtcatctccattcagctgggatggtgttgctcttgaagcatagagaccccagcgggtgaagagatgtcctgcatatccttgtacagccttagctggtccaaaccgccaatcctcaaacacacctcaaattgggggcaaccaccgtgcacgcagctctcttacttgggggaaggttggagatcctctccag

SEQ ID NO: 88741 - DNA, 465 bp, Oryza sativa
  Clone ID: PAT_MRT4530_87562C.1
cacgtcatacccctcgggctttcggggcgtgctaccccgaggccctcgcacggccaccacgtggcgaggagagcgggcgataatcccatgcacaggagtagggtattacgctcgatagcggcccgaacctgtataatcctttgtcttccacacagccccgagagcgatttagaggcgaccgcatctgcacgccgtcaagccctcctcaccgccgccatgcaccgcgcactgagccacgcaccagatcgagaaaataagagaagggggaggagggaagaaagaagggggaggaggatggggttgttggtatttcttaacgacattactagaaatataattcacagcaatggcgcagaaatactcatggtatattatggctacagagttcatccgcgagcgcacggatataccattttagcatttcacccgagagtattccaagggtatcgtatttatttaatcccg

SEQ ID NO: 88742 - DNA, 204 bp, Oryza sativa
  Clone ID: PAT_MRT4530_87563C.1
atggagactggagaggagatcaatgccaaattgccaaggcgatggtgtactggtgtggaaccacaagccagcgacgcgggacaagagcagtgggcggtggcgcatggtgattgccctgcggcatttgcggtagtcggacatgacggcaatggctcggggacctcctactgccagtgcatggagaacgactgcctctggccctag

SEQ ID NO: 88743 - DNA, 1978 bp, Oryza sativa
  Clone ID: PAT_MRT4530_87564C.1
gggtgtttagaggctgtcagtagagctcaggatccaccaacttctttggctggcccctctcctccatctctctctctctcacattgcaagccattgaccactcatcagagccagagcagctgccattgttgagcatttagccatttggaagcttgggcttttctctctgtgagtgaggaggtttggggttgggggtggtgccatccatctatccctttgtgtgtgttactgcttccatccccatcattgcagccttttccttcttctttgccatgttgctttaaagctggttgttttgtggtgtgctgctgtggtgtgtggcaacaaaaagaggacgatgggctgtgttcttgaggttgatgtggatggtgaagaggtcttcctcgttgataaggaggttcttgcaccgttctgtggtaggatcaagaatttgggtggcggcggcgccggcggcgagggggtggtcggagctgcggcggcggcgagggtcgtgttgcgtgggttccctggcggtgctgaggcattcgagctcgtcgcgaggttctgttacaccggcggcggcggcggcggcgtcgcggtgaccgcgtcgaacgcgtgcgcgctgcggtgcgcggctgagttcatggacatggcggcggcggcggcggaggtgtcgacaccgccgagcctggtgaagatgacggagaaggctctcgacgagatgccgcagtggtcgtggcagagcgtggtggacgccgtgaggcagtgccagcggctgctgccgacggcggacgccacgggggtgttcgaccgggtcgtcggcgcgctggtgtcccacgtggccgtctcccccggggacgcccaccccgacgagctcctcgccggagagctcggcgttccggacctcgccgtcgtcctcggccccggcatggtggagcgcgtcgccggggcgctcctcgccaggggcaccgaccacggcgtcgtctcccggttcctcttctactacctcaagtgccgcgtcgccggcgccgccaccgccgacgacaagagggcgatgctcgaggcggcgatcgccgccatgtccggcctcgaccggagctcggtctcctgcaggggcctcttcggcatcctccgcatctcctcaccgctcaagctccccacctcctgccacgacagcctcgtcgccatgatcggcgccaagctcgaccacgcgacgctcgacaacctgctcgtcccggcgccgcccgggacgacgagcagcctgtacgacgtcaccctcgtcctccgcttcctggacgccttcctccaccacgccgccgccaccggcgcgcgcggcgagacgccgaggctgaagaaggtgggcaagctcgtcgacctgtacctcgccgaggtcgccccggacccgtcgctgcgcccggccatgttcgtcgagctcgccacggcgctgcccgccgcggcgagggactgccacgacgcgctttaccgcgccatcgacgtctacttccaggttcacacgcggctgacggaggaggagaagatgaggatctgcaaggggataaactacgagaagctctcgccggagtgctgcaagcacctcgcccggaacgccggattcccgacgagggcggcggtgcaggcgctggcgtcgcagcacacggtgctcaagagcctcctccgcggcggcggcccggacgaacacctgaggccggtgtccgcggcgaagcaccgcgccggcggcgaggaccacgacgacctcgtcgccgccggcggccaggtcgtcctgtacgccgggaggctcgacctgtcgctggagagccagaatctcaggtcgctcctcgacgggatgcactggcgggtgatggagctcgagaaggtgtgcagccggatgaagacgcagatgagcaagatgaaggcggcgaggagagccaccggaggcggcggcggcgccgccgccggccgccgcgctgcttcaagatcacttccccggatgtgttcttga

SEQ ID NO: 88744 - DNA, 1719 bp, Oryza sativa
  Clone ID: PAT_MRT4530_87565C.1
tcaccaaccccgcccactaccggcttccatccccgcaactccgatggcaccctggctgcccatctcgttgtttgtccaccagccacccaaggccatctctctaaggggaaaccaccccttgttagatggatctccctccccttgagcccaacggctcaagggggccttgacccgcgccctgatcgggggcgcccagcccaatggctggtgggcccccgtcacacatgtgccatataaagaggggtggaggacgggacggcaagagacacaaggaacgaggttcgtcgccgccgccgccactccaccccataaaccctaaccgatcgagggggcgcacagatgacgggaagactccaccgccgcgccaccacctcgccgggatcccctacgaccaccactgccgcgcagcaccgtcgccgtcacgaccaccatcgccgccgccgccaacgtcaagcagagcacgacaacgacgatggctgggacttcctcttcatccaacgcgtcaaccgatggctactccttgatgggttacattaaagatattccgaccctgaaaggagataactacgaagaatggaaaagagaactcgaccttgcttttatcttgggagaggtggactgggtgttgactaccccatgtcctatagaacctgctgaaattttcagaggtgaaaaagagtcagatgctgaatggcaaaagagagagagggacaatgcttccctcatcatgtcgtatgacattgagcatgcgaaatggtcttcagccaacaagaattgtttggctgcggtaaagaacacgattgagccaaccatattgggctcaatcccagagtatgacactgtctctaagtacctcgaaagtataaagagccggtttactggttcttcaaagttttatgcgacacagctgataaagcagcttgttacagagaggtaccatggaggtggtgtaaaagaccacattcttaggatgagcaacatggcttccaaattgaagcaaaaagatttgggcatctcagatgactttctggtccatctggttttgtcctcattgccaaagaactttgacaaccttgttgtcaactacaaaataagtacagagaattggaatattgaagagctcatctctaattgtgtgcaagaggaggaaagacacaaagagaccaatggtgactccattaaccttgtcaaagataacaaggaaaagagccacaggtcaccctcctcaaaagaaaaacagcctcagcatctgcctcagaagcaacagtttacagttgagacaagatcagtgtctacattgcaagaagacaagacattccaagaaagatcatcctgacttcctgacagtgatcatggcaaagaaagggattccgttcaatgaggactacgcaaagaagtgaaagatccattagagttgccaatagagttgaagcaaaagttgaggctgttggagatcttcgcctagaactcgcgaatggcttcacacttttacttccagacgtttttatgtcccttctttgcaaagaaacttgataataagtgtatccaaattggattttgatagatatgattgccattttggaaatggcaaatgtgaactatggtataataatgaatgtattggtcttatgttgcaaaaaaaaaaaaaaaaaaaaaaaaaaaaaaaaaaaaaaaaaaaaaaaaaaaaaaaaaaaaaaaaaaaaaaaaaaaaaaaaaaaa

SEQ ID NO: 88745 - DNA, 708 bp, Oryza sativa
  Clone ID: PAT_MRT4530_87566C.1
ccgccccccctcatagtctcacctaggccgaccttcgaagatctcgttcgcgagatcgtaggacacccggcatgttttactaatcaagctcagacggggaacactccggcgagccgaactataacactaccgccacaagaaggaagcgcggagaatatagataggggtccctcgccggcgaaggccacaacgttttcccacccatgataacaccgatccccggaagaagtccactgacctcgggatctaggaacaaacagcgcctccagtccgcacttgggggcgccctcattgaagaatatgcccggggtaaaaggctcccgactaccccgcggcccacgtaggcctgctgcgcggccttcctccgcggtgtctcccccagcagcagcggcggggaggggtgcttctgccacttgctccgcgacccgctcctcctcgtcttccctgtcaacaccgcgaggctcggcgcgctcctccccacttgcgccgccgccaacgccaacacctccgcggccgccatcgtcgaggtcaccacgctcttcgccgacacctgccgaggtcattactgaggcggcgacgcgagtggactggggcaggaggaaggagaggagcaggtcagggagtggcgggggccggcaccggcgccggagccggacccgatgcggaggcgcgacgatgtcgccgctgccgatgtcgctcctcctcagt

SEQ ID NO: 88746 - DNA, 251 bp, Oryza sativa
  Clone ID: PAT_MRT4530_87567C.1
cttatataggggttgatcttaccctctacaggccctcctccatgtccaactcggggtagaaactaaaggaaacccgaaacatgccttcccgagcaaggaaacctcgagacccgacgaaacacagtcggactcggacctgccagtcagaccggccacacaccgccggtctgactggccttcaaccggcggtctgaccgcccaacacacggcggtcggacctgcctacttgaaggaaaccggtagacttctaa

SEQ ID NO: 88747 - DNA, 813 bp, Oryza sativa
  Clone ID: PAT_MRT4530_87568C.1
atggactccccagcgacccccgtgggcttatctccgccacttctcagtctggtgctctgcaatgaaccatgctatacgaaaggtggctactccttgatgggttacattaaagatattccgaccctgaaaggagataactatgaagaatggaaaagagaactcgaccttgcttttatcttgggagaggtggactgggtgttgactaccccatgtcctatagaacctgctgaaattttcagagccaacaagaattgtttggctgcggtaaagaacacgattgagccaaccatattgggctcaatcccagagtatgacactgtctctaagtacctcgaaagtataaagagccagtttactggttcttcaaagttttatgcgacacagctgataaagcagcttgttacagagaggtaccatggaggtggtgtaaaagaccacattcttaggatgagcaacatggcttccaaattgaagcaaaaagatttgggcatctcagatgactttctggtccatctggttttgtcctcattgccaaagaactttgacaaccttgttgtcaactacaaaataagtacagagaattggaatattgaagagctcatctctaattgtgtgcaagaggaggaaagacacaaagagaccaatggtgactccattaaccttgtcaaagataacaaggaaaagagccacaggtcaccctcctcaaaagaaaaacagcctcagcatctgcctcagaaacaacagtttacagttgagacaagatcagtgtctacactgcaagaagacaagacattccaagaaagatcatcctga

SEQ ID NO: 88748 - DNA, 1246 bp, Oryza sativa
  Clone ID: PAT_MRT4530_87569C.1
atgggggagaagagaaaagaggcgtcgacgacaccgctcggcgcggccgagcccgcccgagagagaaagcgaagagaaaaggagggggcgccgcggcacagccgctcgacggtagcgcactcacccttgagtgagtgcgcgcaccggcgagggggagtgcgacggcgctgccgtgtcgccgttccgccgccgcgcggtgactactccttgatgggttacattaaagatattccgaccctgaaaggagataactacaaagaatggaaaagagaactcgaccttgcttttatcttgggagaggtggactgggtgttgactaccccatgtcctatagaacctgctgaacttttcagaggtgaaaaagagtcagatgctgaatggcaaaagagagagagggaaaatgcttccctcatcatgtcgtatgacattgggcatacgaaatggaccttagccaacaaggaatgtttggctgcggtaaagaacacgattgagccaaccatattgggcttaatcccagagtatgacaccgtctctaagtacctcgaaagtataaagagccagtttgctggttcttcaaagttttatgcgacacaactgataaagcagcttgtgacagaaaggtaccatagaggtggtgtaaaagaccacattcttaggatgagcaacatggcttccaagttgaagcaaaaagatttgggcatctcagatgactttctggttcatctggttatgacctcattgccaaagcactttgtcaaccttgttgtcaactacaaaataagtccagagaaatggaatattgaagagctcatctctaattgtgtgcaagaggaggaaagaatcaaagagaccattggtggctcaattaaccttgttaaagataacaaggaaaagagccacaggtcaccctcctcaaaagcaaaacagcctcagcatctgcctcagcaacaacagttcacagttgagacaggatcagtgtctccactgcaagaagacaagacattccaagaaagatcgtcctgacttcctgacagtgatcatggcaaagaaagatctacatggtggatttattctagagcaactattcatatatgtaattgtttaaagggattctgttcgatgaggactacgcaaagaagcgaaagatccattagagttgcaaatggagttgaagcaaaagttgaagctattggagatcttctcctagagctcgcgaatggcttcacacttttacttcgagatgttt

SEQ ID NO: 88749 - DNA, 1061 bp, Oryza sativa
  Clone ID: PAT_MRT4530_8756C.1
atggatttattgcgtcagccgaggggaggggcgcgcggaccgggtccacgggagtggggcccacgcggcagcctcaaggtccacggtggaccgggcgcacccgggctcacaccggccggcgccgtgggtcccacgcgtcaaccgcacccgagggcgccggcggctgacagccaggccccacgcgacacccgctcggtgcgcccgaagacggccacgccggcgcagcggcggcacggcggagcagcggccgagagaggggaagggaagggggaaacgaatcggcggtccacggctcaccccgggtcgacggcgacgacgggaacggcgaccggagcggaggaaggcggcggcgcggctcgggtggacggggtcggcggtgctccggcggtcggcgagcgaaacggaggggtggacgaggtcggcgaggatgcggcgaagccgaaggaggcggcgccgaggcgggaaatggtccggagcgacgacggcggcggaccggagttcggcggcgacggcggagagagagagcgacggcgcgagctcgattccggcggggagagagggcggcgggtggcggaaacggtggagggaggcacggggaaggtttatatagggttgggagggggagagagctgccggacgagggggaaacgggcgcagaagatccggcctccattgatggcgccggcgaggttaggggagaggtttccaaacgaatccgagggagagagggagggaaaaatggggggaaagagggagggaatcacggggaatatttcccccctcttgattgcacgcggggcggacgggggcggcgggattcacggcggcggcggcggcgctagggcgcgggcggggcggcgggagcggcgggaggaaggggatgacgggtgggccccacccgtcagcgagggtggcaggcgggcccgcccgtcagcggcgcgcgcgcggggagaggccggatgggccgcggggagaggagagggagggggagggagctgggccggatcggcccaagagggagcgggggagggaaagggaactttttagggtttttctttttt

SEQ ID NO: 88750 - DNA, 1233 bp, Oryza sativa
  Clone ID: PAT_MRT4530_87570C.1
atgacgccggccacggagggggggaggggcaaagaggcaccgccgaggagccactcgacggccgcgcgcgcacccgcggcggcgacgccgctccgctcggccgctccgcccggcggcgcgctagagaaaaagtgggcgagcggcagcgcgaggtcgccggccatggcgcggcggcgcaagggtggctactccttgatgggttacattaaagatattccgaccctgaaaggagataactacgaagaatggaaaagagaactcgaccttgcctttatcttgggagaggtggactgggtgttgactaccccatgtcctatagaacctgctgaaattttcagaggtgaaaaagagtcagatgctgaatggcaaaagagagagagggacaatgcttccctcatcatgtcgtatgacattgagcatgcgaaatggtcttcagccaacaagaattgtttggctgcggtaaagaacacgattgagccaaccatattgggctcaatcccagagtatgacactgtctctaaatacctcgaaagtataaagagccagtttactggttcttcaaagttttatgcgacacagctgataaagcagctttttacagagaggtaccatggaggtggtgtaaaagaccacattcttaggatgagcaacatggcttccaaattgaagcaaaaagatttgggcatctcagatgactttctggtccatctggttttgtcctcattgccaaagaactttgacaaccttgttgtcaactacaaaataagtacagagaattggaatattgaagagctcatctctaattgcaattcggttgatgatgatgctattgctgatgatgatgtatgggatgatgtttcggattctcctggtcatggatccacattagacagagagtgggttcacaggcagaaccagtttcataagatgggatacagggatggtatagcagaaggacagaaggacatcgcccaagaggggttcaatgttgggtttgggcaatctgtgcatgttggctataagtggggtcttgttcgtgggattaccagtgcattagctagtctccctgacagcttgaaagaaaaattgttgcccaatgtccagtgcagaggacaactccaagaactgaataattctgtgcaagaaatttcagcagaagacgcacttcagatgtttcatgagagcattcttcagagtagccattcatcagaggaaccagatgcaacattatag

SEQ ID NO: 88751 - DNA, 1357 bp, Oryza sativa
  Clone ID: PAT_MRT4530_87571C.1
tcactgaggaagaagagcatagcaaaagagtggtcgatcgtcatcaatggagcacgacggcacggcggcgctcggctgggcggcgcgggacgcctccggccacctctcaccgttcagcttcacaagaagggttcaggaggaagacgacgtgacgatcaaggtgctctactgcggcatctgtcacaccgacctgcacaccatcaagaacgagtggggcaacgccatgtaccccgtcgtccccggccacgagatcgtcggcgtcgtcgccggcgtcggcgccggcgtgaccaggttcaaggccggcgacacggtgggcgtgggctacttcgtcgactcgtgccgcgcctgcgacagctgcggcaaggggtacgagaactactgcccgacgatggtgatcacgtcgaacggcacggactacggcggcgccaccacccagggcggcttctccgacgtcatggtcgtgaggcaggactacgtggtgcgcgtcccggcgagcctgccgccggacggcgcggcgccgctgctgtgcgccggcgtgacggtgtacagcccgatggtggagtacggcctgaacggtcccgggaagcacctcggcgtggtcggcctcggcgggctgggccacctgggtgtcaagttcggcaaggcgttcgggatgaaggtgacggtgatcagctcgtcgccggcgaagcggggggaggcgctggggcggctcggcgccgacgcgttcctgtcgagccgcgacggcgaggggatggcggcggcggcggcgacgatggacgggatcatcgacacggtgtccgcggggcacccgctggtgccgctgctgtcgctgctgaagcccaaggggcagatggtggtggtgggcgcgccggcggcgccgctgcagctgcccgcgatcgccatcatcgatggcgggaagcgcgtcgccgggagcggcgggggcagcgtggccgagtgccaggcgatgctggacttcgccggcgagcacggcatcgccgcggacgtcgaggtggtcgccatgggcgacgtcaacgccgccctcggccgcctcgagaggaacgacgtgaggtaccgcttcgtcatcgacgtcgccggcaccctgcacgccgccgccgcgccgtcctaggctcctagcaatgttgccttcgtgtcaacgtgcttgcgtgtcattgtgcggtcgtgtgtgtaaccgtgaaaggaaaggcgtttggtaatggagcaataacgttgtttttggaccgtgatggtccgtgggcttgtgatgggttatgtgggccacctcgagttgggcccttctcttgtccgattctttgtccaaagattgaaataagttcatctaagatcccttatgttatcc

SEQ ID NO: 88752 - DNA, 288 bp, Oryza sativa
  unsure (1)..(288): unsure at all n locations
  Clone ID: PAT_MRT4530_87572C.1
atcgcctccgtngccgtcgngcggcnggtnagctgcttnngccggcggtagcgccgtggtgatgatgaaggcgccgggccgacacntnnctcatctcccgcatngccttcgaggaacccgcagctctactaccacctcctccacaccgccggccgcgtcgccgccgacgccgccttcgccgtgtgacgtgacgaatcgacgaccttaattattacttccactgttttatattataagaatttttagaattgctatgaatatattatgtctagattcactaacattcan

SEQ ID NO: 88753 - DNA, 1180 bp, Oryza sativa
  Clone ID: PAT_MRT4530_87573C.1
ttttttttttttttttttttgtagagacaaagcttacagcatcatgtattcttcatttatgctccaaaatggaggtcaccttcattcgcaatgaacaaaaccagacgaaaatttcctaatgtcatttccagacttgacggcaagacgttctgaagaactctaagttcagtatacatagtaaaacaatcaggatggcttatctgcagctaagcaaaccatgtcggcgcactcggattcatccttgaattccacatcgctgaagcagaatgttcttgctaagctctgcacgagctgatcattagcccctcagagttccagctgcagactgcatctgggaaggcagtctccatctgctttgaatcatctggggctcaagaaccaatgaccaatgccagctcaccttcttcaagcgcagcacggcgtagcacaccttcagagaacaagaatcagcctcttccacggcattcggaagcctattcttggggggttggtgttgtagaacaaaagccgtcctgcactgagctccaatcttgcagcaccgaatgtcaggatgcattttcagctggtacgattccatgtcggcgcactcggattcatccttgaattccacatcgctgaagcagaatgttcttgctaagctctgcacgagctgatcatggatcacctcgtcgggagggagctccaccgccgcctctcgccgcagagaggtgacctccttgtcggcgataccgcagggcacaatgtgctcgaagaaacccaaatcaggatcgatgttgaaggccagaccatggcaagtaaaccctgacgagatcctgaccccgatggcgccaatcttcctgtccccgacccacacgccggtctcgccggcggcacccgggcacgcctggacgccgtacagcgccgccacctcgatcatggcggactcgagcccctccacgtacctccgcgcgccgaggccgatggcccggagcgagaggatcgggtagagcacggcctgccgcggcccgtggaaggtgacgtcgccgccgcgctccgtgcggtggatgtcggcgccgagcgccctgaggtcggcctccggcaggagcaggttgtggtcggtgcgccgcttgccgagggtgtaggtcggcgggtgcaccccgagcctccacgcctcgagcaccctcctcgcgccgccgctcat

SEQ ID NO: 88754 - DNA, 609 bp, Oryza sativa
  Clone ID: PAT_MRT4530_87574C.1
ctacgatgggcgatacatcagcgtcaccgagagtcgcgggttgggcgggggcgacggcgcggaggaggaggtggtcgagggtggctcggaggcccgccgcgacggcctcgttctgtgggcgaggccgcaccacgcctggctctcggcggtggcctgacggagctgctcctccagctcggcggcgcggcgtcgggcggcatccagctcgacctccttctcccgcagccgccgtgccgcggcgaccgacaccgagcgaaccagcgcttgacactgctcaagcccgacgcacatccgctcgcactccatccgtacaaccgcatcgatcttcgcgctctgcatgcacagctccgacaccagcgcatcccctaccgccgcagccgatgccaccgaccgcccacttgttgacgtcgtcgccgactccaccaaccggctcactggtgtagccacctgcctagcgctcccgtcgccggccgccgcagccaagcatcctcccgcgctgccgacctgtacgggctccaggtgctcgccgacggcatccagcgcaagagagagatgaagagaggggaggtggggagagaggaggaagaagagaatgggtgaggatgacat

SEQ ID NO: 88755 - DNA, 1641 bp, Oryza sativa
  Clone ID: PAT_MRT4530_87575C.1
atgacgaagccatcatccagaacggaggtggagccatctaatgtgatgccggtcacattggatgacttcgaaggagaggatcgtaaagctgtggaggagtacatcaacgagctcacacgggaggcgttgatgagattaactactaggactcatcaagttgtgatcatcaagcccgggccacgtcctatgctcgctcccgacgtggagtggaaggaatcacctaggacagtgccaaatcgttcatctaactcaagacaagactgttttccacaagagaatcggtccggtggatcaaaggtgaaaaaaatgaaaaaggtgaagaaggtgtgggtgaggaaagaagccaaagctccggaggtcgttgctgccaaagaggagtctcaagaggttcatgtacctactggagatgcggtggaaaccacgcaggcaaaggagattgaagctgatgccgtgactgccaacattgggggtctaaccgagacagctggccggtctaaccgccagtctatggccggtctaaccgaccttaccggccggtctgaccgacggcttgtggccgacgtcatcgacaagcgtttaaagactttgaaggagatgaagacacttcaagacggtgttttcaaagagcaattaatgggaaatagcttgaagaaatacttcccgagcatttggatggcagtcaacgagctagcagaggtcaagaagcaggttgatgagcagctgcagaaagggtacattcgaccaagtatttcaccttggggtgctccggtcatttttgtggagaagaaggacaagacgaagagaatgtgtgtcgattaccgcgcactcaatgagttgagaattcgggaagaggatattccgaagaaagccttcaccactcggtatgggttgtatgagtgcacgcttatgtctttcggacttaccaacgcacccgcattcttcatgaatctgatgaacaaagtgttcatggaatttctggacaagtttgttgtggtattcatcgacgacatacttatctattcaaagtccgaagaagaacatgagcaacatctctgtcgggtactcgagaagttgaaggagcaccagttatatgccaagttcagcaagaaaagctactgcaatgccctatgcaccgaggacatgtgtgaagaattgcagcaggagcttgaacgtctcaacgtgggaatcgttgaacacaggttcgtagccactctagaagcacggcctacgctcgtggatcaagtcagagcagctcaagtgacggatcttgagatagctgaactgaaaaagaatatgagggtcggaaaagcccgggacttccttgaggatgaacatggcacagtctggatgggagaaagattgcacatgcctgatgacaaagagctgaaggatctgatactcaccgaggctcatcagactcaatactccattcatccgggtgggtcccacctgtcgaggtcgtccccttcctccggccgcccgccccaggtcggcaaccgccgccgaaaccgccgcacccacctcctccgctcctgccgcgcccacgccgcgccgtccccgcgtcctccccacgtcgccgccgtctcccccgcgtctcccggcccgcgcgcgcgctcgcaaggggcgggattcgcattttga

SEQ ID NO: 88756 - DNA, 1833 bp, Oryza sativa
  Clone ID: PAT_MRT4530_87576C.1
atgacgaagccatcatccagaacggaggtggagccatctaatgtgatgccggtcacattggatgacttcgaaggagaggatcgtaaagctgtggaggagtacatcaacgagctcacacgggaggcgttgatgagattaactactaggactcatcaagttgtgatcatcaagcccgggccacgtcctatgctcgctcccgacgtggagtggaaggaatcacctaggacagtgccaaatcgttcatctaactcaagacaagactgttttccacaagagaatcggtccggtggatcaaaggtgaaaaaaatgaaaaaggtgaagaaggtgtgggtgaggaaagaagccaaagctccggaggtcgttgctgccaaagaggagtctcaagaggttcatgtacctactggagatgcggtggaaaccacgcaggcaaaggagattgaagctgatgccgtgactgccaacattgggggtctaaccgagacagctggccggtctaaccgccagtctatggccggtctaaccgaccttaccggccggtctgaccgacggcttgtggccgacgtcatcgacaagcgtttaaagactttgaaggagatgaagacacttcaagacggtgttttcaaagagcaattaatgggaaatagcttgaagaaatacttcccgagcatttggatggcagtcaacgagctagcagaggtcaagaagcaggttgatgagcagctgcagaaagggtacattcgaccaagtatttcaccttggggtgctccggtcatttttgtggagaagaaggacaagacgaagagaatgtgtgtcgattaccgcgcactcaatgaggtcacaatcaagaacaaatatcctttgccgcggatcgatgatttgtttgatcagctgaaaagagctaaagtgttttctaagatagacctgcgatcaggctatcaccagttgagaattcgggaagaggatattccgaagaaagccttcaccactcggtatgggttgtatgagtgcacgcttatgtctttcggacttaccaacgcacccgcattcttcatgaatctgatgaacaaagtgttcatggaatttctggacaagtttgttgtggtattcatcgacgacatacttatctattcaaagtccgaagaagaacatgagcaacatctctgtcgggtactcgagaagttgaaggagcaccagttatatgccaagttcagcaagtgtgacttctggttgtcggaagtcaaatttctgggtcacgttattacagctcaaggcgtggcagttgatccatcgaatgtggagaaaagctactgcaatgccctatgcaccgaggacatgtgtgaagaattgcagcaggagcttgaacgtctcaacgtgggaatcgttgaacacaggttcgtagccactctagaagcacggcctacgctcgtggatcaagtcagagcagctcaagtgacggatcttgagatagctgaactgaaaaagaatatgagggtcggaaaagcccgggacttccttgaggatgaacatggcacagtctggatgggagaaagattgcacatgcctgatgacaaagagctgaaggatctgatactcaccgaggctcatcagactcaatactccattcatccgggtgggtcccacctgtcgaggtcgtccccttcctccggccgcccgccccaggtcggcaaccgccgccgaaaccgccgcacccacctcctccgctcctgccgcgcccacgccgcgccgtccccgcgtcctccccacgtcgccgccgtctcccccgcgtctcccggcccgcgcgcgcgctcgcaaggggcgggattcgcattttga

SEQ ID NO: 88757 - DNA, 492 bp, Oryza sativa
  Clone ID: PAT_MRT4530_87577C.1
atgccatcgccaacgactgccaacacgctgcttcacattttttccattttcaccggattaaggcacaaatttgctaatgttgtgaccaatgtgcccctggctcaattgtatgtgttaacgaccaaattcggtaatccaaggatcggaggtgaagaagaaatcgagatggagttcgaaatagaaatcatcccggaaacagagatcaaatcaactagcacgctcgcatacctaaaggcaagttttggacctgcactggagttaagtaaatctcccaggcctcgtgtttttacgtcaacagtatgacaactcaagcaggcggtggcagtgaccattctgcaagctgactggggttgccgcactgctctggtgctggcagtagatcaacattgccgacaccctcctccctctcgtcctcattgccgacaccgagtgcagcctcccaaagctgtcgtcatccgccttagccggatttgtgcagatgagaggaaactc

SEQ ID NO: 88758 - DNA, 933 bp, Oryza sativa
  Clone ID: PAT_MRT4530_87578C.1
atggcggcaacggcggcggtggcggcgatagcctcgtcggtgaaaagggcgaccaacaaccggaggaaacaacggcgcgccaaagtgcaatctggccgccagcatcggcagaggaagcggaggctcgtctggacagacgagctgcagaagatgttcagggaagcatttaaccagctctcgctgacacaaaatttgaattcttatcactctgttttgataataaagatccaagaggactatgaaaaaaatacccggtgcccacaaaaatactttaagttgatgaaattgatgattgatccgatgaatgatttaagtctaacccgagataacattgctagttatctccagaagcataagaaacgtcttcaaaaagaatatcagaaacatcagaatcttcttgaacaaaaagaccaacagttacctattgttgacaataccaataccagttctatccaacaaaaaaatatgcattatgaatcctgctacaatgaacatagtaacaagcaacccaagttgaaggaacccacgttgttgacagctaattatcatgggcttagaaacatgcatcatcatcacaaaaacatcatcaacatggaaccttccaatgtactgcggcctcctaacttgaacaatgcaaagggctttaatatgcccttcaacaaggaaggagtcgatgaagccatatatcagagccaactaatggcacatcaagtttatgcaaatcatgttgatgcaacagcacaaaccacctgggaagtaacgatgacgcaagatatgcgccccatatctcaagtacatcaacatggttgtgaaacaacacctgtcgattcctctaataatacaaatggcatatctgaaaataataattaccatgttgggaggaagaattctagagcaaatatggttggcatcctttggccattgttgagatag

SEQ ID NO: 88759 - DNA, 2383 bp, Oryza sativa
  Clone ID: PAT_MRT4530_87579C.1
aggcaggcaaggcaacgcaacgaaggcgaagctgcctgcctctgccgcgccgcgccgcgcgagatctgggcggaagggaaggcgcggcgcgacgcgacgcacgagagaaacaaaaggaaaagggaggggcgggggggacaaaaaccttcgccgcacaaagcggttaccgcgtccccccagatctcgtcgccgtgccgtgccgtgccctgcccttgccccgctggataccggcggcgcaccggcgcggccgcgcgatccgatgaggcggcggccgttcctcgaccagcggcggccgtcgtcgttcaagcgccggtggcagcagcgcccgtggtggttccgcctcgcggtcaccctcctcctcgccctcgcctgcctcttcctcctgctcgcgctccggggctcgcccgaccccgacccggtggtgctcccctccaccgactcgtccagatccgcggccaccacctcccctctcctccatcagagatcttacctcgatggcgttacggatgcgttcaacatgaccgacgaaatgctgagtgctcactcgttttcaaggcagcttatggaccagatttcccttgcaaaaacctacctcgtcgttgcgaaggaagccaataacctgcagtttgcagcagagcttagctcgcagatacggcgggcgcagagcatccttgcgcatgctgcagcccatggtggcacggtgacggagcaggatgcggagaaggcaattagggacatgtcggtgttgttcttccaggcgcagcagttccgctatgatagtgcagttacaatcatgaagttgaagggtcagattcaatccctagaggagaaatcgaaagctgaggcggaaaagagcaccaagtatgggcagattgctgccgaggagcttccaaaggggctttactgccttggagtccggttaaccatggaatggttcaagacaactgagctccagaggaagtttactgagaggagcccagcagtacagagcaacctaagggataacagcctttaccattactgtgttttctcggacaacatccttgctgtttctgttgtcgtcaattctacaactctaaattcaatgcgccctgaaaagattgtttttcacttggtgactgacgaggtgaattatgctcccatgagggcgtggttcgccctgaatgattacagaggagccactgtggagattcaaaaggtagaggatttcacttggctcaattcatcgtatgttcctgttcttaaacagctccaggatgctgccacccagaactactacttctctggcagtggtaatcgtggaacaccagtcaaattcaggaaccctaagtacttatcaatgcttaaccacctgaggttctatatcccagaaatctatccagaattgcgtaaggtcgtatttcttgatgatgacattgttgtccaaaaggacttgtcggaattgtttaccatcaacctcaatggaaatgttatgggagctgtagagacttgcatggagacatttcacaggttccataagtatcttaaccattcccatcctctaatccgtgctcattttgatcctgatgcctgtggctgggcatttggtatgaatgttcttgatcttgtgatgtggaggaataagaatgtgacaggtatatatcattactggcaagagcgcaatgctgatcataccctatggaagcttggatctttaccacctggtcttcttgctttctatggcttggttgagccattggaccccaaatggcatgtcttgggactgggctacacaacagtggatcccgctactatcaaagaaggtgcagtgttgcattacaatggaaatatgaagccatggctaaaaattgggatggagaagtacaagggcttctgggataactatgtagactattcacaccctctgcttcagcggtgcttcacgcactaatgaatgtgtatcaacattagaattttttgtgaacttcctagtggaaatgcttcaatgccttactcaacagccacacgtgaacacagtaacagaactgattaactttgtcctgaaattacatcctcagattagacatgggcggccgtttatactacctgtagttgatgaagtacagcaaccacagatgtgactggcacaggtaaacatcagaaagagccaagattgccatggattaggctgttatttgagcagcgtccattatatacattcataactcgcaaccaccaatgtaattttttcaattttgattttttgggtgagaaaattgagggcataattgtagatttgatttaaattcttgtggtgtcacagcaagttttgagatatatatatttattggatgttcagagtaaagcttattgtttaaatgtctcacaaagcataaaaaaaaaa

SEQ ID NO: 88760 - DNA, 753 bp, Oryza sativa
  Clone ID: PAT_MRT4530_8757C.1
ttttttttttttttttaatgaagaaagtaattttattggtgcacaagacatcaagggaggaaacaatatcataatatcgtgaagacgggtgcggtctagctctactccttcgttgtcgagagaaacgtccggaactcccctccctcggcccctcttccccctcgttcccagcggctcgccaccggcgacggccggaagaggggtctagcctcctcctagcctagtgtgagtcgggtcccttccgttttctggtctttcccgtagttcgggctctgtcccgtttagcacaaggtcgccggtgccgtccccatgcatggtagcccgaggtggtgctgggttctggaggcggtgaatctggctgcttcaacttccaggcttggcaaatggacgaggtgagtggttgccggtgctctcttctgatagaatctggcatcagcgatcccttcgcttgtcggcttcgttggtggggagccgcaacacctgcacacccattcggtggtcccaggagcggcggccattgggcacggcagatccaacaaggcaggagcttaattcaatgcctaggtgttgatctcccatgttgattttgccgttcgggttgagcgccagccacaaatgcgactctggtgccgccgccatcgctctatccagcgccatccgccatcgcgacgccacctcctctctctcacatcgttccatcgccctatccagcgccatccgccattgcgacgccgccacgccaacaacggccat

SEQ ID NO: 88761 - DNA, 331 bp, Oryza sativa
  unsure (1)..(331): unsure at all n locations
  Clone ID: PAT_MRT4530_87580C.1
gagagggttttatcaccaaacgccggtccggataacgtcctcctcctcccctcgcctcgccacctcgctcactacctacctctccaccaatggcgancaccaccaccaccaccatctcctcctccctcataacccctccggccgcggccttcaacaccgcagcagctcctgccggtgccccttccgctcaccgtcggggccgcgcggtggtgggcgaagcgccggnagcggcggtggtggtgcgggtngtcgctcctcgtcggtgctcaagcgcccaagaggttgcggcgnggaactctacgttgggganatcccaggaccgttaccaaga

SEQ ID NO: 88762 - DNA, 170 bp, Oryza sativa
  Clone ID: PAT_MRT4530_87582C.1
ggttgttttgggtaccatggactgacgaggagcgcagcgggtttttaaaaaggctggggcacctagacaacggggactggagaggcatctccaaaaactttgtgaccagcaggacggcgactctggaggccagtcaccccctgaagacctttcttcggcagaccaaccct

SEQ ID NO: 88763 - DNA, 171 bp, Oryza sativa
  Clone ID: PAT_MRT4530_87583C.1
atggcaaatggcatacttttcaacagagctgagcatcgtgtattacgtgccatcaaagctttgagaactgagacttcaacgtttttcctgttaatgcgtgttgaaaagggatacaagatgatgtattctgaaagcatgattgaggacggactgaaggaagcttatttgtga

SEQ ID NO: 88764 - DNA, 205 bp, Oryza sativa
  Clone ID: PAT_MRT4530_87584C.1
tctttttttttttttttttttttttttttttttttttttttttttttttttttgtttaacagtaataatagtaactaaatagtggcagtaagtcgcagtaattttacatgacactggacaaaccaagcagtacaaactagaaagagagattaatatgatgcgagattattcgattaattttggctcctacgttgagttttttctc

SEQ ID NO: 88765 - DNA, 702 bp, Oryza sativa
  unsure (1)..(702): unsure at all n locations
  Clone ID: PAT_MRT4530_87585C.1
ggggggttgggangggaatttccngggccccgaaaccngaaacccanaannaaaaggggaaaaaaaaacntttggggntggaaannttggcnanaaaaaaattgggccccccncccccntngaaatggggngtttccttncngggccaaccaaaccgtncngcntccccttccccaagggggggttcaaagtttccacccgcccggggatttgccccgttccccccgcccgcttnccggggaaaattcccaagctttnccggcaaacgttcangcaaattgggcgggcaagggaatcaaaggttgncattgccaaggttgttngggcccgaatttgaaaggggcattccaanaaaatttccgaanaaaccctcttctttaaccttggccaaccggcttcacccggtgggaaaggaacctcccttgaaaaccanaattcgaaattacctccctccccgtttccccaaattggggtttgcccctgccctccnaanttttcaancaaaaggttcgggaattttgttcttanccgttgnaanaaaancaacaangttcccccccngggaatncttnacnnaaanggnnggggtttcttgggaaccaatnttttgaaaaacttnccccattgtttccgggaattnccacccnaacnncccncccccaannntttcttcctnnnggaaacttccnaanggaaaggncc

SEQ ID NO: 88766 - DNA, 1623 bp, Oryza sativa
  Clone ID: PAT_MRT4530_87586C.1
atgaagccaccgcacgcccccttcgtcaaggggtgggcaaggtggaaagcaggcccacggggaggactacccaagcctcgatcactcgtgactggcctcggcttggtcagaccgccctcagctcggtctgaccgaatatggcttcatcggctctgtatcggccaccttgagcaacaccatcccagcctccagggggccggtctgaccgcacaagtgtcgtcagtcagaccgaccttgtgcgccggtcggaccgcccgcttggggccggcagggcgctacgcggtggggcggcgtgtggcggaggcggcgcagagggcagcgtcggcacagccgtgcccggctgcgcgccggccggcgcagcggccgcctgaaggcagcttgtcggcgtcgaggaagggggcggaggcaggagtgaggggcgccgacggtcgcggcgagcgaaggatggcggctggccggcgagcggaggccggtggctgcagcgccgcctcgctgcaatccgccgccctgccaccgccgctcgcatgggagaggatgcgcgcacggatggcggcctcgtcgttgtcgtcgccgttgtccaccatcacaaggggtggccctctgctcctcgccggccttgcctgctcctccgctgcctcatcgctgtgtctcgtccacgacacctccgcctccaccgatgatgactacttcttgtcggacgacgtccacgatagcgccttcctgatccagtcctcctcctcatcggtggcgcgccaaggaagccgaggcagagagaatgctgagaaagagaggggagagaaaacgctgctcgccggcggcgagcatggcgtcgtcgtcgtcgagccgaggcaagtggagatcatgttcgacctcgccacgcagtcatggtaccacgagctctacaggcccctcaaagccgcgctcaccgacgacggggccggtccggagctcatgggccacgccgtcgtggacctgctcgacgacgaccagccgccgtcgaagcagatcacggtccgcctgttcgccagcggcggcggcggcgacgaggcgaagctcctcgtcgcggaggacgacgcctacgtggccggcttcgccaaccggacgggccactggcacacgttccgcggcgggcgctgccaccacccggtgatcatccccgccggcggcgcggcgccgtgcacggagctcccgttcgggggcacgtaccgcgaactcatcggcggcgtggccaacctgcgcgccgtgccgctggggagggcgtcggcggagagcgccatgcgggtgctgtcccgctacgacccggcgaccaccccggccgccgacgccaagatggtcgtggccaagttcatggtgatggtcaccgagcccatgcggctgaaggccgtgtcgcgcgccgtcggcggccggtgggaggaggagagctacctgagctccgacgaggccaagtacgtgccgtactggggcgagatatcggccatgctggtggagtggaacagcaccggccggtggggtgagctcggcccccggagcaagatggacagggcgcggtgcccgcggcccgccggatgcgaggacgacggcggcgacggcgacgacggcggaggcaagctattcatgatataa

SEQ ID NO: 88767 - DNA, 496 bp, Oryza sativa
  Clone ID: PAT_MRT4530_87587C.1
ttatttttcttgctgaactgaaattcagttactttcttttagtgaacagctatgcatacatttctacttggttaattattggtgctatttgactatgtcgctgtgacagaaaccggtaattactgcacggcttgagatcatcttgtacctggtggcgcatgcagatggtgcagcattgctgcatggaggatctttggatttttatttttttcccttcagttcttagttttctgctcctgcttctatctgtgctgtcaaattgctttctaaagaatacatttcagcactaagattcacaggtagttggttccatgacagagtatcctaacacatcctattctcccctatcggtttttataaccaattatgcctcttctacactgtaatgagtggtagaccataaattaaagatctgagttaagactgaagattgctaacaccctaatcaaaatggaggagatgttctgttaattggtgcttgcatcttcttctatcg

SEQ ID NO: 88768 - DNA, 809 bp, Oryza sativa
  Clone ID: PAT_MRT4530_87588C.1
cccgcccgtgccacaagccatccagtcctaattagttataccgtgagttgaaaattaattaagatcacttaaggtcttaaagctagcagccatggcggcatcgtccaagttggctttactggtgttcactctcctgctcgccgccgctgctttcatccacgtcgcctccgccgaagaaacacatgacgatcacgacggcggcgatcacgacccgtcgccatcgccgccggaccacgaggacccgtcgccgtcgccgccggaccacgaggacgaaccgccgccgccgtcgtctccggggaaggaggacgtctgcaaaggcaaggggtgctgcgactggtccggcggcgactgcaagcactactgcgacggatacgacgacaaatcctgctgcgacgactggtccggcgactgccacaagtgctgctccaagtagcccggcccgccgtatatacgtcgatatcgccgtacgccgtactatgtgtgtatacgactgtatacgcaacacaagctcgatcgtagtattgcttattgcactcttcgtcgtcatcaataaattaaggcacgcgtgtcagcgtgtgtacgcggtgccgacgtgcgtttgtacgtacgtgtacggcttgctaggccatgagtgtgagctctttccaaaggctacatgtactatgcgccagtcgatggcttataatattgtaataacataagttgtgcgtgagtgtaacatgatataatataataataataatatgatgtgcgtgtatgtttgaacgtgaataaaaaaaaaaataaattaaaaaaaaaaaaaaaaaaaa

SEQ ID NO: 88769 - DNA, 156 bp, Oryza sativa
  unsure (1)..(156): unsure at all n locations
  Clone ID: PAT_MRT4530_87589C.1
cttcctaaatagtgcaaatcccaccagctaaatcaatcaatctccccatcaccaccacaccacaccaaccctcccaaatggccatcacccttatttcccccactgacaggttgggcccnnctggaatactaataaaccgatttcacaccttcccac

SEQ ID NO: 88770 - DNA, 1387 bp, Oryza sativa
  Clone ID: PAT_MRT4530_8758C.1
atctggttgactgcctgtaaccacgggcacggctattcgaatagttttactctgatcagaggtgtacaactgtacccacaagacacagccccacgacacgtttccgtgtgccgacatgccaccacgacataccggaaagaggctatgacagaaccctacgcataacccctctagccaagcacaccacacctcaggtttcacccccgttcccagcgggcaacgggcagtcccctctcgtgcctaggtgaatccggaagcgacagaggccgtcgcagggcccgccccgctccatcacgcccacccttgcatgctcaaggggaatgtgtgacttgccttgcttcttcacttggagcttctgaactcttatccttgcgaacgcgatcttccgaaacgacaggaacggggtgctcaccacggggcgacgccggagagaggcggccgacggagggaggcgagatggcggcagcgcgagagaggtggtgcgcgaggcggcgatgttccggaggcggagaggggagatggagtatgggtcggggtagagctcggcacagcgatgccgacgacacaaacggcacggcgcggcgacccctagggcggcagtagcgggcggctggaggcggtgaatggcggtggtttcggcttgcacggtgggaatggtgctgcgggggtggaaggggaggacggagtggatgccggggtgcggtgtgacgcggcgaagccgttggaggcaaaagcacggccgggcgaggcggcgctcgccggcggggagcggatggaggcggctaaaggcgaaggtggctcggggtggcggtggaagcggcgttgcggcggtggattggggaagaggagcggtggacggggtgcgcacggcgactgcggtaacggggagggcgacggcgcagtgcggggtggacgggagcggcggcgcggcgcggctggagttcgccggagagcggcagcgcgtgggctcggcgcggggagagcgagagagggcgcagcggcttggggaaaatgggggaaacggatgagggaaggcgggatcgagcccgggagaggcggcaaccggcgacggagtggggcggcatcgtggcgggtgtggcggctcggcgtggcgtcgattccctcggggagagagggggagtggggcgggatgtggtcgcgaggtggaaggggtctcgagtccacgccggttgggacgaggggaggtgcgggatcggcggagggagtgggtggcgtggccgacggttggagctggccggaggttggggatgacaggtggggtccacgggtcccaccagatccgaccggataggaggcggcacacctcggcaacagtagcggcagcggcagcccgacggaagcggtagcggctgctgtgcccctccat

SEQ ID NO: 88771 - DNA, 312 bp, Oryza sativa
  Clone ID: PAT_MRT4530_87590C.1
atggattcattgggtctatgcatcatcaatggccactgccgggggttccttggcccatgtgttggtagagtaacctgcacaagtttgccattagcgaaaatgataacactttttgtcgcgaaagctattagatgtgcacaaattatcgcaaagtccttggagaagctcaagccacaagggatgaaagaaaagcccaagaagacagtggagattttcaaattgccaaagttggccattcttccaattcattttataaacacaattccgcctaatgaaccgatcttcattaggagagacacggtgttggtctaa

SEQ ID NO: 88772 - DNA, 357 bp, Oryza sativa
  Clone ID: PAT_MRT4530_87591C.1
gtataccctctatccttagatatacgttgtatactgatacggtatacccgcgcgtatacggatattttctgcgtacgttaaggaaatctatcacgtgatagaaacggagttcacagatggaaggagtcctactcggacagaactgggtcgttgccatatcgtgaggggtccgatatctccgagttatacttggagaccaactgatccgcgatataaaagggaccccctgggcaggactgagggcatcaaatctcaccgccaacacatctaccacagcctacgaagccgaagcctacaggagccaagtcgccgggtgatctagtcgaaccaactcgattacggtctcgtcggtatcat

SEQ ID NO: 88773 - DNA, 279 bp, Oryza sativa
  unsure (1)..(279): unsure at all n locations
  Clone ID: PAT_MRT4530_87592C.1
atggccgggtgggngttcaaccccgttttcaacgggtcgctgctcgcgcttttcctcgacttccacggngccgcctacgccnccgccaagggcaaaaaaagcaaaancgaggtggttaaaaaanagtaatgaggtgnttaataatcanaatgcaanaaatgtgataatctgtgggtcnccgttttcctctaatttattggtttccttttttttacatcatgatttcattgngttcccnaaaaaaaaaaaaaaaaaaaaaaaaaaaaaaaaaaaaaaaaa

SEQ ID NO: 88774 - DNA, 294 bp, Oryza sativa
  Clone ID: PAT_MRT4530_87593C.1
atgacaccgctgccgcgccaatgcctcctcgcacgctcctgtcgccgctatagcacatgctacggaagccgctacgcctcccaccacctacctgcaaatcgtgcgctagctgccgccgtgcgccttctctcatcgcaaatcacgtcatcccaccgcagatcgcagcctcccccgccagcgtcgaggtggtcacttatttctacctttctctgtctactaaaatggatagcgccactggaagctccacaccaaatccagcggattgaacaggttgacattgtagacaacaactga

SEQ ID NO: 88775 - DNA, 582 bp, Oryza sativa
  Clone ID: PAT_MRT4530_87594C.1
atgcccctgactaccaaatcaattatatccccaaatttctcaccagtctacttcaccccagccggccgggccttctcggcggcgcgcgtgggggctacagaggcgctgcgcggcggggctgtggcggcggcgcgcgataggagctacgaaggcggcgctcggtgggggctgcggtggcggcacgcagagaggacttcggcggcggcggcggcagccggcaggagctgtggagacagagatgcggaggcggcactcggtgggggctgtggcggcggcgcgcggagtggtcttcaccggcggcggcggcagcaggagctgcggaggcgacgcgcggagaagagttcgacggcgatggtgcgcaggagctgcggcggctacacgcgagtgcagcagcggcggaggcagcacgtagtgggaactttagcggcgacggcgcacggagggagcgaaagcggcatgtgggagctgcagcagcgcgtaggtgcggccacgacgacgcgcaggtgcggccgcaacggcaacacgaatagggtcaagtttgatctttattttttaaaaagagggtcaaataagcaaacttaa

SEQ ID NO: 88776 - DNA, 1553 bp, Oryza sativa
  Clone ID: PAT_MRT4530_87595C.1
gcacgagggagatactttgtcatgacataaatgtacatgttccacaccatatttctccaagaattccaagttataaccttcgtgcggcctatgattccataaaacagaactggggcaagtacatcaatgaagccagctggaactggcgcttgatgaagacaatactgactaaatgccatgtttacgacaaggatagatactatgttccctttgatgaggttgcgcctgaggaatcccaaccaattaaattcctcaagaaggtcatgccagattatgcatgatgaaatcaatactgttggctggtgtttgcatagagaaacaatcacaattacttagtgagtcacatcctaaattctaactagaacggcacatgcccgaaattttgactgcaaattgctttgttggattgtgttacacggcttcagagcggttgccaaaagttcatttagaagaaaggctgtcagaagttatcctataaatttaaaaatagtgcgcttccaaaccaagcgcctttttcagttgttcggtacatcaaatatgtattgtataccttggaggcttggaatataaatatgggcacggatgaaaggtatttgaaatcgatctaaaatcttgcttatgctcttggtattttcttgatatcaaaagctccctggtatcttcttcccttagcctgggcatggactggtacagcagttacggggttctttgtcataggtcatgattgtgcccacaaatcattttcgaggaataagctggtggaagatattgttggaactctagctttcttgccattgatatacccctatgaaccttggagatttaagcatgacagacatcatgccaagacaaacatgttgatagaagatactgcatggcaacccgttttttcaaaggagttcagaacaaattccttactgaggaaagcaatgatatttgcttatggtcctatcaggccatggatgtctattgctcactggttaatttggcactttgatctaaaaaaattcagaccaaatgagctcccaagggtgaaaataagcttagcatctgtgctagcgttcatggcaattggatggccactgattattctcaaatcaggaatagctggatggttcaagttctggttcatgccatggatggtttatcacttttggatgagcacctttacgatggtacatcacactgctcctcatataccattcaagacatcagaagagtggaatgctgcacaggcacaattaaacggcacagttcactgtgactatcctcggtggatagagatactttgtcatgacataaatgtacatgttccacaccatatttctccaagaattccaagttataaccttcgtgctgcctatgattccataaaacagaactggggcaagtacatcaatgaagccagctggaactggcgcttgatgaagacaatactgactaaatgccatgtttacgacaaggatagatactatgttccctttgatgaggttgcgcctgaggaatcccaaccaattaaattcctcaagaaggtcatgccagattatgcatga

SEQ ID NO: 88777 - DNA, 578 bp, Oryza sativa
  Clone ID: PAT_MRT4530_87596C.1
tccataaaacagaactggggcaagtacatcaatgaagccagctgaaactggcgcttgatgaagcaaatactgactaaatgccatgtttacgacaaggatagatactatgttccctttgatgaggttgcgcctgaggaatcccaaccaattaaattcctcaagaaggtcatgccagattatgcatgatgaaatcaatactgttggctggtgtttgcatagagaaacaatcacaattacttagtgagtcacatcctaaattctaactagaacggcacatgcccgaaattttgactgcaaattgctttgttggattgtgttacacggcttcagagcggttgccaaaagttcatttagaagaaaggctgtcagaagttatcctataaatttaaaaatagtgcgcttccaaaccaagcgcctttttcagttgttcggtacatcaaatatgtattgtataccttggaggcttggaatataaatatgggcacgctagtgctacagccatttgctactgatgtaccagcaaccattggtttgtaccttgattaattcatgacgaaggtcaacttctgttgcctctt

SEQ ID NO: 88778 - DNA, 514 bp, Oryza sativa
  Clone ID: PAT_MRT4530_87597C.1
tagcagttacggggttctttgtcataggtcatgattgtgcccacaaatcattttcgaggaataagctggtggaagatattgttggaactctagctttcttgccattgatatacccctatgaaccttggagatttaagcatgacagacatcatgccaagacaaacatgttgatagaagatactgcatggcaacccgttttttcaaaggagttcagaacaaattccttactgaggaaagcaatgatatttgcttatggtcctatcaggccatggatgtctattgctcactggtatttctttttcgaacaccttttcatataacatggacatcttctttaggaattattttccttcaacttgttcaagcaatatcattgctgttcactacgattgcttgtcaggttaatttggcactttgatctaaaaaattcagaccaaatgagcttcccagggtgaaaataagcttagcatcttgtgtagcgttcatggcaattggatggccactgattattctc

SEQ ID NO: 88779 - DNA, 279 bp, Oryza sativa
  Clone ID: PAT_MRT4530_87598C.1
agcccgcactcctctaccaccattccccgcatctcggaggggggggcttttttaaatacccaggggggtaatacaattagaaacacataaaccctaccctttatcctgaccctcatatttctgccttcgccctgcaggttccacatccccccacgaccatgatgacctgcgaatcccaacttcattcccgatgaaattacaccaacccgagccactcacggattccaccgctgccataaccaatcctagcaggcttcctcctgtcccgatccaccaacc

SEQ ID NO: 88780 - DNA, 380 bp, Oryza sativa
  Clone ID: PAT_MRT4530_87599C.1
cacaaaaaaggggaagtctgaacctcaatgggcataatacattccaaaacctccttaaaaaaaaccgcttgggccacaactgggggcaaaaataatatcccccgtgggggggcaaaacccaaaacaaagcccggaacaagggagggacccccttggggctgtttatagcacaccttgtccaaataaaaaatcccctgcaaaacttgggataacggcaaagaaagcccccggcccatctttttcaaaacatgaccaaaattgctggcaaacatggcctttaacgtaccatggccccaatcaagcaaaactgggaaacatggcggcctttggagggggaaagaaatatatgcttcaaaaaaaaccagggttgcttttgggga

SEQ ID NO: 88781 - DNA, 1298 bp, Oryza sativa
  Clone ID: PAT_MRT4530_8759C.1
gtcaacagcgtcaaatatttagagacggagggagtacatgggtagagagaaggaggaattagaaatatgaaaaacaaccatacacccgccaccctcgctgacgggtagggcccacccgtcatccacgacctcccgccgctcccgccgcctcgcccgcgccctagcgccgccgccgccgcgaatcccgccgcctcccgtcgtccccgcgtgcaataaagtggggggaaatactctccgtgattccctctcccttttcccccatttttccctctctctctcgcgttcaaacgggcggatttgcccccgcaaatctcgtcggtgccattgatggcggccgacctcccgcgccggtttccttcccctccggccgctctctcccccttccaaccctatttaaaccctccccgcacttccttcgcccgtttccaccctttgccgcgccttctcctcgccggaatcgagctcgcgccatcgctctctctctccgccgtcgcagccgagctccggtccgccgccgtcgtcgccccggaccgcctcccacctcggcgccgcctccttcggcttcgccgcatcctcgccgacctcgtccacccctccgtttcggtcgctgaccgccggagcgccgccgtccccgtcgacccgagccgcgccaccgcctccctccgctccggccgcctcctccgtcgccgccgtcgccccggggtgagccgtggaccgtcgcctcctttcccccttccctcccctctctcggccgccgctccgccgcgccggtggtcgccggcggcgaccatcggggcgtgggcgcgccgcctcccgccgaccgcgccagcatggccgccctcgggcatgccaagtggctgccgcgtggggcccggccgtcagccacccgcgccctcgggtgcgactgacatgtggggcccacggcgccggccggtgtgagcccgggtgcacctggtccaccgtggacccacctcggccatataaggaccggtcttcgggcctctgttgcaaagcactaccgtacttccacatgtctagtggggcaaatgaaggctacacgagctgcggcccggtagtcgagatgttatggcacagggccggtgtcctgctgctaggggctcagtcctgcctacctgtcccagaggtcctggccgtaggtggggttgggtcgatgtacacctctgatcagagtataacctattcgaatagccgcgccctcggttatgggcaagccgagcaatgtacccaagttagtggctccccgagcgatcaaggcaacaatctgcaaggagtccacg

SEQ ID NO: 88782 - DNA, 713 bp, Oryza sativa
  Clone ID: PAT_MRT4530_875C.1
tcgttcgatccctttgctccatggaaggtggacaactttggcacagtaaacccttgttgaaagcatgcccgcaaggctggggttacaagattcatactcgtaagttccattttggtcaatggggctgcgatgggtcaactgttgaatccagcatatactgtgctcaacttgtttggtttagtgctggtcgcaaagctgcaggcggagaaacatatcaggtcatcaggaataaattacaccattataaggcctggaggcctgactgaacaaccaccaacagggaatatagtcatggagccagaggatacactttacgagggctccatatcgagacagcaagtcgcagaagtagctgtggaggcattgttatgccgagaggaatcttcctacaaagttgtcgagattgtcacccgagctgaagctcacaatcgtcctctcaaggatctgtttgcttctattaagcaaagctgagtaacggagcacaactgaacaagttgttccggccctgaacttcaaagggggctagcattattccagaaattgtatagtgatgtgtcagggtgttcatacctagttaggaaaaatagttgtcctaatatagtgatttaatgttctttactataaaatggaatacgcacacccacatcatcgttataaaaaaaaaaaaaaacatcatatcaccgagcaaaaaaaaaaaaaaaaaaaaaaaaaaa

SEQ ID NO: 88783 - DNA, 471 bp, Oryza sativa
  Clone ID: PAT_MRT4530_87600C.1
atggaggttgtcgtcgccgtggaaacggcttgctgtccgcgaacctcctccaccactgctgcctctggccgtggaggcgccaccgccgttagatctggaggggggatgcagaggaagaggatagggggggggcgctgggatgcgagaaaggtcaaaagagagaccgccgcttgtcgtagagaccacccgcggcctccccttgggcgccgctgcccaaccaactcccctctcaccggatccggcggaaggaagggcgccaccaccgcgcgccgcctcctctcgagcgccgccgcctgcctcctgccgcctcccctcccaccagatccggcggaagggagggcgctcccgctggcgggacctccgcctgccactgcccctcgggcgctaccaccgcccacggctcccggcacgtacagagagagggaggggatggaggacaaggaggacaaaatggagaaggagaggagctga

SEQ ID NO: 88784 - DNA, 366 bp, Oryza sativa
  Clone ID: PAT_MRT4530_87601C.1
gcaaagaaaaggcctgtttcaatgatagggtactcacaccttgctctcctttggggcggagaaaccaggagcgatggagcatgctactctcctcaagtcatctatactttccaagaacactgaatgctctgccacagaacaggctgccgccgacaagccggtgactgtctccatggtcggccgcgctggcgcctactactatgagctttgcaagaccgagaaaaccatggcatcaccgggaaggggtatccctgccttgggatcaatcaacacgacctgcccttaaaggcttgctgtacatggcctatgaaacaccgaggcccacgcgcatgcttaccggaccctccttgtcactcgaccgggctt

SEQ ID NO: 88785 - DNA, 1368 bp, Oryza sativa
  Clone ID: PAT_MRT4530_87602C.1
atggggcagcagcagcagcaggagaacctcaccctcctccccatgtcctcctcctccgccgccgccgccgccgacgccgcggctgcgtcttcaccggcggcgtcggctgggaggctgttcacggcggggctggtggcgtcgtggtacgcgtccaacatcggggtgctcctcctcaacaagttcctcctctccacctacgggttccgctacccggtcttcctcaccgcctgccacatgtccgcctgcgccctcctctcctacgccgccgccgccgcgtccgccgccgcgccgcgggctgcgcggccgcgccgctccagggggcagctcgccagggtggcgctgctcggggcggtgttctgcgcctccgtggtcgccgggaacgtctcgctccggtacctccccgtgtcgttcaaccaggccgtcggcgccaccacgcccttcttcaccgccgtcctcgcctacgccgtcgcggcccgccgggaggcgtgcgccacctacgccgccctcatccccgtcgtcgccggcgtcgtcatcgccaccgggggtgagccaagcttccatctgtttggtttcatcatgtgcatcggcgcaaccgccgcgagggcgctcaagactgtcctgcaggggatcttgctgtcatcggaggaggagaagctcaatcccatggagcttcttggttacatggctccggtggccgtcgttctgctgattccagcaacgtttatcatggagcgcaatgtgctcactatgctaacaatgttcaacgcgttgcttgattcttaccaggttcttggaaatgcgaaaggggctgttgctgttgtggtttccatcctgatattcagaaacccggtaaccttcatggggatgctaggctacgggataacagtcgcaggcgttgttctttacggggaggccaagaagaggagcaaagccggaatgttctcctttgctgtgtctgctgctgctgctgctgctgctgctaccactgggcagggctggggcatacgcagaccagatggtttggaaccttttccctgggtgtctgcatctgctcttgttggagcgtggtcattgctatttctgagggaaggggataatgaagaagaccgtgtactgaagctctcagatgtatggctcatcttccctacagtggaagctgttgaagccccagaaaccacagaactcaagctgtccacagaactgctaggcgaaatgcttggagatacacgattacttttgcccccagttggaatattatttctcgatgctcttgctggcatattaccaattgaagctgctgttgctgctgctgatgatgataatgatgatggtaaggcacctgattttgaagttgaaatcctgaaatag

SEQ ID NO: 88786 - DNA, 1104 bp, Oryza sativa
  Clone ID: PAT_MRT4530_87603C.1
gtgagggggctgccgccgccgtcgccggcgacggggccgcacgccggcggcggtaggtcgcgcggggcgcggcggcagggggagaccatcgccaagggccacaagaactatgagcttatgctcaacctccagctcggcatcagacatgcagtaggaaaacaaggcccgattacgcttgatttgaagtcatcagcttttgacccaaaggagaaagtatggacaaggtttcctccagaaggatcaaagacactacgcaagttattcaaggttgatgcggcagattatatgttgtccctttgtggtgatcaggctctccgggagctctcatcccccggtaagagtggaagcttcttttatctcacgagcaatgatcagtacatgataaagacgatgaagaaatctgaagtaaagatatttcttaagatgcttcgagcttactacaatcatgttcggtcatttgagaacactctagtcaccaaattttttggtctacattgtgtaaagttagctggagctaaccaaaagaaggttcgtttcgtcatcatgggaaacttgttttgttctgattattccattcatagacgatttgatctgaaaggctcatcacttggacgtacaactgacaagccacaaacagaaattgacgaatacactactttgaaagacctcgatcttaactttatctttcgattgcaaaaacactggcaccaagagttcctaagtgcatgggttgaaggttcctttgatagtgatagtagcagagcgtcatcgcctcacctgtctagaggagatactgatccaaacaggttttcgaagataaaacttgggtccaacatgccaacaagagctgagctaacagtacgaaagagtgagtgcgagcctcagatcatcggagagcctactggggagttctacgatgttatactatattttgggattatagacatccttcaagactacgatatcagcaaaaagcttgagcatgcatacaagtcctttcagtatgacccaacatctatttcagcagtagatccgaaacagtattccagacgcttcaaagattttgtgtacaaagcgttccaagaagagaagatagacatctga

SEQ ID NO: 88787 - DNA, 507 bp, Oryza sativa
  Clone ID: PAT_MRT4530_87604C.1
atggagcccactaaatggactatcaaggaaattaacaaaaaccataagagggttccttttagagaaaacattgtggaacgttatgagaattctctaacagcacaaaagggagtacatggcaggcgcactccggaaaagggcaaggattttcatgttcccaaggaaacaacagataaagggtcgaacgatgatgacatgcgatctattgatgaaacagacatatccacattgaacatggaccagcttagccaaattgaaagattactggaagatgaactaaggtggacaagggcaagaaaggtggtggtggatagaagtgccagattacaaaaaaaggtgcaggggaaagcggcgattgttgaggttgagaggggctccatggagattcccatagaatctgggcaggagaaggaacagataggaggggaggctgtggaggagcaacggagccggactacgccgttggacctcaacatgccttgctgggacgcaggtcctctgcagtaa

SEQ ID NO: 88788 - DNA, 286 bp, Oryza sativa
  Clone ID: PAT_MRT4530_87605C.1
ctttgttttttttttttttttttttttttttttttttttgttttcccccaaaaaaatttgttcgagaaaaaagaaaccggaaagagttaaaagcacaaatgttatccctgccccccagcgcatggagcacgcccaccctgttaagggggcctgcccgtttaaggggttacacatatttggtcccccccccaacgtccccatgcatgaatggaacctctgatcctttcgggcaaatttcccatgcccacggccatgcctggttccccccttttaccccatgtggggg

SEQ ID NO: 88789 - DNA, 412 bp, Oryza sativa
  unsure (1)..(412): unsure at all n locations
  Clone ID: PAT_MRT4530_87606C.1
cgaatatcttggcacttcaacatgcactactatgaagttggttgccaagaactagagtgcctttatgaaagaccgcttcacacattacaacttcgagttagtacgccaaacaatgaagaagctacatagcgtatagaaaacattgtggaacgttatgagaattctctaacagcacaaaagggagtacatggcaggcgcactccggaaaagagagacactcattggtgaaaattttcctgccggtgctgatgataattattttaccataccaagggcaaggattttcatgttcccaaggaaacaacagataaagggtcgaacgatgatgacatgcgatctattgatgaaacagacatatncacattgaacatggaccagcttagccaaattgaaagatactggaagatgaact

SEQ ID NO: 88790 - DNA, 467 bp, Oryza sativa
  Clone ID: PAT_MRT4530_87607C.1
ttttttttttttttttttttaactgaactgatacatctttaacacaagtaactgagctgttacaaatttcacaagtaatcgagatgttacacctttattgacctgccctctatcttgtacaattctatatggataccagaggtaatcaaatcagaagaaatgaggcacagcacggcgtcgaataatccgccttcgctagcagcaaatgcacattctacagggaccaagcctttttccgccttgagatcacggggagaaagacactgcaattggcatgcttggtgtccagcccacacacgacaaggtggcctgatcctctgtttctattctatgatttctatcattctaaggctacaacaatgttagtaagtgaccgaaccaattaaagaatggttggctaaatggctacctgtctcgtttcacccccattttgctaaaaaaaaattacagcggggatgaaacggtga

SEQ ID NO: 88791 - DNA, 637 bp, Oryza sativa
  Clone ID: PAT_MRT4530_87608C.1
cccgggctgaggaattcggcacgaggctctctcctctcccatgctcgcgcgttctcctactatgtaccatgccggactagagcctctgcaccgcgcctcctaacgccaccgtcgctgccggcgcaccgcctgaggtcgccgccgcctccccggccgccgggcgccgagctgcgccccgttgccgcggcgccttgccgccccgggccgagcagcgcgtgcaggaggaagaagaagccgagccgcgccctctctccaagcgccgccgccggacgccgagccgcgccgagccatcgcggagcgtcgccggaggtcgccgccgcctcccctggccgccggacgccgagccgcgccgagccatcgcggcgcgtcgccgcccttgtcccaggccgagcgagaggaagacgaaggagaccgcccagtcgttgacggccgggtcccacgtccccttccctcctcaagccgctgacagcccggtcccgcgccccttttccttctatcagccgccgacagagcccgagttcgaggaagctctggacaccgctttcgagggagaagaccccaatccagtgcaagagtgtatgaagatcaagacatcgacccgaccgacgaggagtatctccaggagcaagccgagtat

SEQ ID NO: 88792 - DNA, 206 bp, Oryza sativa
  Clone ID: PAT_MRT4530_87609C.1
ggagacgagttagtcagtagtgagtagtctctcgagtccgtctttgtgggttgctcgatcgatatatcgatatcatgtatacgtcgccgctccgatcgattgctgattgattcggttactggttagttggtagccagaaacggaaaccaactaggagtcctccaccgccggcgctgggcttctcccgggagaggctccaagagggc

SEQ ID NO: 88793 - DNA, 1046 bp, Oryza sativa
  Clone ID: PAT_MRT4530_8760C.1
gaagtcttcttttcccccccttcccttcttgggccggctcggcccaattccctccctctctctcctctcccccgcggcccatcggcctcccccgcgcgagcgccgctgacaggcgggcccgcccgccaccctcgctgacgggtgggacccacctgtcatcgcctacctcgcgccgcgcccgccgcccgctcgtgccccccgtgattccctctcccgtttccccctcttttccctctctccctccctcggattcgtccgatttgaaacccgcaatcgtcgccggcgtcttcaatggagccgagatctccgcggccgattcctctctctccggccgcgctttccccctcccggtgctatataatcgtcccccgcgcttcgctcttccgtttccgccgctcgccgctcgctctcgccgtcggattcgtgctcgcgccgtcctcctctctctccgacgtcgccgccgagctccggttcaccgccgtcgccgctccggacttcctcccgactcggcgtcacctccatcggcttcgccggcgtcgttcgtcgaccctcgcccgctccttcgtttcgcccgccgaccgccggagcaccgtcgccctcgtcatcccgaaccgcgccgccgcgttcctccgctccgttcgtcgtctccgccgtcctcgtgtctcggggtgagctgtggaccgtccctttagcttccctctcctctcggctctttcgggcgccgctccgccgcgccggtggtcgccggcggtgaccatcggggcgcggtcgtgccgcctcccgtcggccgtgccggcgaggccgccttcgggcgcgtcctcgcggctgccaagtgggcccggccgttagccgcccgcgcccgcgggtgcggctgacgcgtgggacccacggcgccgaccgccgccagctgcgtgctcccggtccaccgtggaccgagaggctgacgcgtgggccccactcccgtggacccggtccgcgcgccctctccctcggctgacgcaataaatgggtttttaattaaaatttaaatgaagaaattcgtaaat

SEQ ID NO: 88794 - DNA, 2082 bp, Oryza sativa
  Clone ID: PAT_MRT4530_87610C.1
atgtcggtttgggcgagggaaaccgacattgaacggtcaaggcgcgagctggcgctcggcggtcgcggccaaagcggcgacagggaagttactgatggttataaacaagaccctttttccactcaattgcttactgaattagctgttaatgccaccggcaggaaacattttacactcaattctggtctaatcagatttaagggcagagtctggattggtgataatcctacactacagtccaagcttttaactgaattacattccagtccaattggtggtcactctgggttcccagttacatacagaaaactgaagcagctatttgcatggcccaagatgaagaaaatgactaagacctttgtgcagcaatgtcagatatgcttacaagccaagcctgacagggcaagatacccagggcttttgcagcctctacctgtacctgagggtgcttggcaagttatttcactcgactttattgaagggttgccaagggataaggttttcacaagtcagttatgggagcatctctttgaaggggctgtgcaagctactccttttgaagtcttatatggccattctcctagccactttggtattgggtcgcaagattgtgccattcctgatctagctcagtggttgaaagaaagaagattgatgcagaatttggttcagcaacatctccaccgagcacagcagcagatgaagcactttgcagataagaagcggagttttcgttcctttgaagtaggcgactgggtatatcttaagttacagccttatgtgcaaacttctgtggctgtgcgagcaaatcataagttggcttttaagtactttggaccctaccaagttacagccaagattggcactgtggcttatcagttgcaattgccttcttctacttctatacatccagtttttcatgtatctcaattgaaatccgcaattggttttacaggcccggttcaacatcaattgccggcatccactgctcctttacaagttccattgcgtatcttggacaggaggttaacaaaacgaggtaattctgctgttgctcaagttcttattcagtggtctgcatctgttccagaggacgctacttgggaagatctggacgatcttcgctcaaggtttcccgcagcattggcttgggggcaagccaattctcaaggagaggggcttgtcagggactctcaagatcatccaggagatatctcgcaaggctcaactgcagaagaaccagaagaagaagaaggaagccgtcctgaagttgctgatgaagctggtagcagagaagataaggaggaggtgatccagacttcaggtgacaatcaagcctgggttgcaactcggcgtccagtccgtgagaggaggcccaatccgaagcaaagactgcttctaaaccccttcctgttggggactgacgtcgaccaggagctacgtatgctgaaatctcaaagacgcttttgtgctgggtgccaaactcttgctagattgcaaggagatatacaagttgaaggcatttatccaactcaatttttaagtacgaaggtggaagcggtttcttggggtttggatatgctaaagcggtcgcatggagggttccggctggggcggaagctgctcagtgcctggcgatgggcgctctgctgccggcgccggcgccggcggggctacctgcgcctgcagacgacgtcgggtgggtgcggcggcgcttgcaaggaggggagcgaagaagccaagaggctggccccggtgctgcggtgggggcggtcgctggtgcggcggctgagcctcgggcggaaggacggcgggcggcggcggattctggacgagcccgtgtcgacgcccaaggggcaggtggcggtgtacgtcggcggcggcaaccccggcgagtcgctgaggtacgtggtgccggtggtgtacttcaaccaccccatgttcggggagcttctgagggaggccgaggaggagttcggcttccagcaccccggcggcatcaccatcccctgcgccgcgtcgcggttcgagcgcgccgccgccgtggcggccgccgggaagaaggcgttcggcaggtggtag

SEQ ID NO: 88795 - DNA, 195 bp, Oryza sativa
  Clone ID: PAT_MRT4530_87611C.1
accagatcagcatctgtgcggcatatagaagctggagcagctaactgtccacggatgatgagcatcattcacttctgactgggacatgctactggacattgatgacatcatctatcaggagccactggctttggaagaacgcataagccatgctaacactggccatgctgctgagaaaatatctggctgtgtgat

SEQ ID NO: 88796 - DNA, 561 bp, Oryza sativa
  Clone ID: PAT_MRT4530_87612C.1
atggttccaaggattggcctgctggttgtgctggttggattggccttccaggcaattctccatccaccacctcaaaaattgtgtggctcaccaggtggacctcctgtgacatctcccaggatcaagctcagtgatagaaggcacgcctacaaagagggtggagttcaaaaagacaaggccaaagcagggtatggggaaaattatccaaatcccaagaggaatgtaaggagtgaggcattggatattgaggagctcactgaccagctcaagcttggacagaagttctgtgttgggaatgtcgatgggaggatacccaatttggggtgccttcagtatataccaaacaggcttgcaggagcagcgttagttctgcccattatcaactactggtggccttcttcccccgctgagctatccaggcaagccttcatgggtctcatcatgccagagcagaggacactctggattgcacacaacataaacttccttgctctacctctggatgacccagaagtggctcccttcttctgcggcagccatgcatcatcctgcaatatttag

SEQ ID NO: 88797 - DNA, 522 bp, Oryza sativa
  Clone ID: PAT_MRT4530_87613C.1
atggcgagctcaccggcaaacgtgggaaacggagctccggcgtcgatcggcggcaaccaaacgacggccgaggtgcgggcgggctcggtgagcgcgacggcggcggttgcgcggcgcgacgacgactctagcggcggcggcgcactgccggagatgggcggcggcagcggagctcggccgcccgccacccaggcgatctcctctccgccggcgacctctcgggcgagctccgcgtcagtcgccagctgcccgtcctcccgagtgaactccacctccgccgccggcctcctgggtgttctccgcctccgctgccagccacccgatccacctcctccgccacgcgagcgatctccgccgctgccgtcggaccgcctggacgagctctgcctccactgccagtcgccaggcgagctcctccttagccggccaccgtcggccacccgttctgcctgctcctccatagctagtcgcccaagtgtgtgcgcacaagagagattgcgcgacagggaaggattaggttga

SEQ ID NO: 88798 - DNA, 156 bp, Oryza sativa
  Clone ID: PAT_MRT4530_87614C.1
atggaggttgagtgcgccagatgtcatgctcctacttgttggccaaccgtcgacaaggcgccggcgcagtggctgcgtgttgaaggatgggcggcggtggcgctctcgacgttgtattctccctggagacgtcatttgaagttgccattcccttag

SEQ ID NO: 88799 - DNA, 245 bp, Oryza sativa
  Clone ID: PAT_MRT4530_87615C.1
ggtagggccaaaaaaattaaactccttttttttctttttgggaaaagaaaatgggggggcccacctcggcggggaactttaaatccgcaggcccctggtgggaaaaccaattttccgaagggggcaattgaattgcacccccggcgtgggttggaatacattggatggatgccaacccctaatttgggatcctgggcctgctttgggaaggggggaacttcattttgaactataaatggggcacc

SEQ ID NO: 88800 - DNA, 539 bp, Oryza sativa
  unsure (1)..(539): unsure at all n locations
  Clone ID: PAT_MRT4530_87616C.1
tgcgagactgagacgagacgcgagaccaaaccctcccctccccgaccgcgccccgcccagatctcgccgccgacgagatgcatcgccgcggcggccaccacctccacctcctcctcgccgccgccgtcgtcctcctcctcaccgtcgcggggctgcccctcgcttccgcctccgagtccgaccacaagtacaaagctgaagaaacagttaaactctgggtaaacaaggttggcccgtacaataacccgcaagaaacttacaactattacagcctcccattttgtcagccatctgaaaaccccgcacacaaatggggtggtctcggagaggtccttggcggcaatgagctgatcgatagtcaggttgatataaagtttttaaaaaatgtggagaagggtcccatttgcacaattgaacttgatgacaacaagattcaacaatttactgatgccattgaaaggtcatattggtttgaactcttcatagatgatcttncattatggggttttggtggtgagactgacaaaaacaacgaaaat

SEQ ID NO: 88801 - DNA, 1199 bp, Oryza sativa
  Clone ID: PAT_MRT4530_87617C.1
gcacgaggagtcgtagaaagcagcagcagccgattatatatagctagctactagctctaactgatcggccggccatggggaagacggagcacaagaagaagcagcagcagcacggcggcgatgaggcggcggcggcggccaaggagaggctggatcgcttcaaggcgtggctgatgcatttcgacggcgacggcgacgagcatatcagccggagggagctccgggacgccatccgctccggcggcgcccggttcgccaccgtccgggcgtgggtcaacctctacctcgccgacaagaaccggaacggcgtcatcgacgacggcgagatcaagcacctcatggacctgaccgagaaggacctcgacctcagcaagctgcagcccacgcctgcggcagcacggccgacggcgaccggcgccccgccggccatggtggtggtctcggcgtgccagttccagacgactcctctcgtctctcgtaccattgacctacgcaaattaactgccaaaccagtactttctagtaccgccaataattagatcttgttcagtttggaggggggttaaaaaggattaagagggaataattcctcaccgggataataaactctattcgatatttcgattaatgcccagacgagaaggattgaaggagatttattccacactaaattatatggtatagaattattccctctataatccactagtcattttttatccctgccatcggtccttctgctctacgtgtgcactcattcagctcacgaaccaaacaagctaacaaacgaattgagtcaaaccagcttgttattctaatgagctaactgatcgagtcggacgatattcacccctgcatgcatacggtattattatatgtatttaaaaatatttttgcatgatgttagttttatagttgttgataatgtgttgcgaaagtaaccaaatagttcaagtataatattagagagcatgaaaaactaatattaaaatctgattagacgtcatttttaatactacaaatctggacaggttaggacggagggagtgggtcttgtatcctatatacttatatagttcatccccactaagtgtagttaatgctatttctctcttctcttatgaagccacatcattctaattatttttagcctttggatgatagatctatggtacaaatagtctcttctttcttgtatc

SEQ ID NO: 88802 - DNA, 533 bp, Oryza sativa
  unsure (1)..(533): unsure at all n locations
  Clone ID: PAT_MRT4530_87618C.1
catcgatatcaaactcgtcctagagagatcaatctcctggtgctgtgcgtcgtcttcttcntgtcgttgaatcagcagcaacagcaccagcgacctccacacgtgcccggccagtcccttcatatacactgttccgttatcaagggggtagacggggctnntcccaantccctnctncccttaaacccctcaaccccaacctcatcccctcacnnccnnatcttttcatccctcnccaaccatcnatcccnccncccaatctnnanaacaaactcnccacctccttctcnttcancccaaattttctccaacaccctnccatcnactcctctncantcatcaccnccactcttaattaccaccactanccctcacctnaattccaccnntcnancacncctncccnnccccctcctttatcnacttcanccccnatctcctctncttnncnccctccaccancccccacaactctnnnatcctctactccatncccacttactttctcctcccaactatcaaacctaacaaac

SEQ ID NO: 88803 - DNA, 258 bp, Oryza sativa
  Clone ID: PAT_MRT4530_87619C.1
atggagaactccgccgagatgcagagattcatcgagttcacagctgattcttacctgaatataactctgcagcaagagcagcagaaggcaatggtgagcgagatggtcggcaagctcacaagcgtgtgctgggacaagtgcatcaccagcactccaggaagcaagttcagctccggggaaacgacttgcctgaccaactgcgctcagaggttccttgacatgagcgtgatcatcgccaaacggtttgagatgcagtag

SEQ ID NO: 88804 - DNA, 1153 bp, Oryza sativa
  Clone ID: PAT_MRT4530_8761C.1
acgagtagagtgtccactagttgggggttttgtttatcctagggtgaacaaggccgacgggaggggcgcgcggaccgggtccacgggagtggggcccacgcggcagcctcacggtccacggtggaccgggtgcacgcggctggcgccggccggcgccgtgggtcccacgcgtcagccgcacccgcgggcgcgggcggctgacggccgggccccacttggcagccgcgagggcgcgcccgaaggcagcctcgccggcacggccgacgggagggggacgcgcccgcgccccgatggtcaccgccggcgaccaccggcgcggcggagcggcacccgagagagaggagggaagggggaagcgaatggagcggtcttcggctcaccccggtcgacggcgacgacgggaacggcggccgaaacggaggaaggcggcggcgcggttcgggacgacgaggacgacggcgctccgacggtcggcgagcgaaacggaggagcggacggggtcgacgacgacgcggcgaagccgaaggaggcgacgccgagaggggaggaagtccggagcgacggcggcggcgaaccggaactcgtcggcgacggcggagagagaggaaagcggcgcgagcgcgattccgacggtgagagcgagcggcgaacggcggaaacggaggagagaggcacggggaacaattaaatagcgtcgggagagagggaaagcggccggaggagatggaaaccggcgcggagatctcggccgccattgattgcgccggcgaggatcgcgggcacaaaatcggacgaatccgagggagagagagaggggaaagtgggggaatcgggagagggaatcgcggggaatgattcccccctcattatggtgcgcggggacggcgggatgcggcggaatccgcggcggcggcggcgctagggcacgggcgagcggcgggagcggcgggaggaaggcgatgacaggtgggccccacccgtcagcgagggtggcgggcgggcccgcctgtcagcggcgcgcgcgcggggaggagccgatgggccgcgggggagaggagagagagggagggagagaattgggccgagccggcccaagaagggaagggggggaaagaagacttcttttagggtttttctttttataaaacctttt

SEQ ID NO: 88805 - DNA, 3174 bp, Oryza sativa
  Clone ID: PAT_MRT4530_87620C.1
atgggctctgcggcggcggctcgcacgccctgggctctgcagctcggcgtggcgctggccttcctgctggccactacctgccatggcctgaaccatgaaggctggcttctcctgacgctgaggaagcagatagttgacaccttccaccaccttgacgactggaaccccgaggatccatcgccgtgcgggtggaagggcgtcaactgctcgtcggggtctacgccggcggtggtgtccctcaacctcagcaacatgaacctgtcgggcaccgtcgacccgagcattggtggcctggctgagctgactaaccttgatctgtcattcaatgggttttctggcactatccctgcagagattgggaattgctcgaagttgacggggctcaacttgaacaacaaccagttccagggcacaatccccgctgagctcgggaagctggctatgatgatcacattcaacctgtgcaacaacaagctctttggtgcaatacctgatgagattggtaatatggcatcactcgaggacctggtagggtacagcaataatctctctggctctatacctcatactattggtaggcttaagaacctgaaaaccgtccggttaggtcagaatgcaatatctggtaacattcctgtcgagataggtgaatgcctcaacctggtggtgtttggtcttgcacaaaacaagttaggaggcccattgcctaaggagattgggaaactgacaaatatgacagacttaatattgtggggaaatcagctttctagtgtgattcccccagagattggaaactgcataaatcttaggacaattgccctttatgacaataatctggttgggcctattcctgcaacaatcgggaacatccagaaccttcagaggctatacctctacaggaatttattaaatggtacgattccgttagaaattggcaatctttctcttgcagaggagattgacttttcagagaatgttttaactggaggggtaccaaaggaatttggcaagataccacgattgtatttactctatctcttccaaaaccaactcactggccctattcctaccgagttgtgtgtattgaggaatttgagtaagcttgatctttcgatcaatacactcagtggcccaattccagcctgttttcagtacatgagcagactaatccaattgcaactattcaacaatatgctgtcaggtgacatacctccaagatttggtatctatagccggctttgggtggtggatttctcaaataataatataaccgggcagatacctcgagatctttgcaggcagtcgaaccttattttgttgaatttgggggctaacaagctgattgggaacatcccccatggaatcaccagttgtaaatccttggtgcagcttcgtctcgctgataacagtctgacaggaagcttcccaactgatctctgcaatctggtgaatttgacaacaattgagctgggtcgaaacaagttcaatggtcctattcctcctcagataggcaattgcaagtctctccaaaggcttgacctaacaaataactatttcacatcagagttgcctcaagaaataggtaatctgtcaaagctcgtcgtcttcaatatatcatccaatagactaggcggaagcataccattagaaattttcaattgcactatgttgcaacgcctagatctcagccaaaatagcttcgaaggttcattgccaaatgaagttggcagcctgcctcagctggagctgctatcatttgctgacaataggctctctggagagataccacctattcttggtaaactttcacatttgacagctctacagattggtggcaatcaattctctggtggaataccgaaggagcttggactactctcaagtttgcagatcgccatgaatttgagttataacaatctctctggcaacataccatcagagcttggtaatcttgcattattggaaaatttgtttctcaataataacaagctgacaggtgaaatcccagatacctttgcaaatctgtctagtttgcttgagttcaatgtctcctacaataatctcaccggcgctctccccactataccactttttgataacatggcgtcaaccagctttcttggaaacaaaggactatgtggcggacaacttggcaaatgtgggtctgagtcaatatcttcttcccagtcatccaattcaggcagcccccctttgggcaaggtttctaccaaggatgcatatacatttcaggaattggtttctgccacaaataattttgacgagagttgtgttattggaagaggtgcatgtggaacagtgtacagagccatcttgaaagctggacagacaattgctgtaaagaagctggcttctaacagagagggaagcaacacagacaatagttttcgtgcagagatccttactctaggaaagataaggcatcgtaatattgtgaagttatatgggttcatctatcaccagggttccaaccttctgttgtatgaatacatgccaagaggaagccttggggagttacttcatgggcaatcttcgtcttcacttgattgggagacacgcttcatgatagccctaggatcagctgaagggctatcttacttgcatcacgattgcaaacctcgcatcatccaccgtgatataaaatcaaataacattttacttgatgagaactttgaagctcatgttggtgactttggattggcaaaggtgatagacatgccatactcaaaatcaatgtctgcaattgctggttcatatggatatatagcacctgaatatgcatacaccatgaaggttactgaaaaaagtgacatatacagttacggcgtcgtactgctggagctgctaaccggacgtgcccctgtacaaccattagaactgggaggtgatctggtaacatgggtaaagaattacatcagggacaattctttgggtccagggattcttgataagaatctgaatttggaagacaaaacgtctgtcgatcatatgattgaggtcttgaaaattgcattgctatgtactagtatgtctccatatgacagaccaccgatgcggaatgttgtagttatgttaagtgagtctagagatagggccaggatgagctcttcatcctcgcctgcttctgatcattcttcaaagaaggataacttatga

SEQ ID NO: 88806 - DNA, 2307 bp, Oryza sativa
  Clone ID: PAT_MRT4530_87621C.1
atgagaattggtcgacggcccgggcggccgcaaggggttcgcgttggccgattcattaatgcagctggcacgacaggtttcccgactggaaagcgggcagtgagcgcaacgcaattaattggcccaattccagcctgttttcagtacatgagcagactaatccaattgcaactattcaacaatatgctgtcaggtgacatacctccaagatttggtatctatagccggctttgggtggtggatttctcaaataataatataaccgggcagatacctcgagatctttgcaggcagtcgaaccttattttgttgaatttgggggctaacaagctgattgggaacatcccccatggaatcaccagttgtaaatccttggtgcagcttcgtctcgctgataacagtctgacaggaagcttcccaactgatctctgcaatctggtgaatttgacaacaattgagctgggtcgaaacaagttcaatggtcctattcctcctcagataggcaattgcaagtctctccaaaggcttgacctaacaaataactatttcacatcagagttgcctcaagaaataggtaatctgtcaaagctcgtcgtcttcaatatatcatccaatagactaggcggaagcataccattagaaattttcaattgcactatgttgcaacgcctagatctcagccaaaatagcttcgaaggttcattgccaaatgaagttggcagcctgcctcagctggagctgctatcatttgctgacaataggctctctggagagataccacctattcttggtaaactttcacatttgacagctctacagattggtggcaatcaattctctggtggaataccgaaggagcttggactactctcaagtttgcagatcgccatgaatttgagttataacaatctctctggcaacataccatcagagcttggtaatcttgcattattggaaaatttgtttctcaataataacaagctgacaggtgaaatcccagatacctttgcaaatctgtctagtttgcttgagttcaatgtctcctacaataatctcaccggcgctctccccactataccactttttgataacatggcgtcaaccagctttcttggaaacaaaggactatgtggcggacaacttggcaaatgtgggtctgagtcaatatcttcttcccagtcatccaattcaggcagcccccctttgggcaaggtcatagcaattgttgctgctgttattggaggaatttcacttattcttatcgttataattgtgtatcatatgagaaaaccactagaaacagtagctcctttgcaagacaagcaaatattttctgctgggtctaacatgcaggtttctaccaaggatgcatatacatttcaggaattggtttctgccacaaataattttgacgagagttgtgttattggaagaggtgcatgtggaacagtgtacagagccatcttgaaagctggacagacaattgctgtaaagaagctggcttctaacagagagggaagcaacacagacaatagttttcgtgcagagatccttactctaggaaagataaggcatcgtaatattgtgaagttatatgggttcatctatcaccagggttccaaccttctgttgtatgaatacatgccaagaggaagccttggggagttacttcatgggcaatcttcgtcttcacttgattgggagacacgcttcatgatagccctaggatcagctgaagggctatcttacttgcatcacgattgcaaacctcgcatcatccaccgtgatataaaatcaaataacattttacttgatgagaactttgaagctcatgttggtgactttggattggcaaaggtgatagacatgccatactcaaaatcaatgtctgcaattgctggttcatatggatatatagcacctgaatatgcatacaccatgaaggttactgaaaaaagtgacatatacagttacggcgtcgtactgctggagctgctaaccggacgtgcccctgtacaaccattagaactgggaggtgatctggtaacatgggtaaagaattacatcagggacaattctttgggtccagggattcttgataagaatctgaatttggaagacaaaacgtctgtcgatcatatgattgaggtcttgaaaattgcattgctatgtactagtatgtctccatatgacagaccaccgatgcggaatgttgtagttatgttaagtgagtctagagatagggccaggatgagctcttcatcctcgcctgcttctgatcattcttcaaagaaggataacttatga

SEQ ID NO: 88807 - DNA, 536 bp, Oryza sativa
  Clone ID: PAT_MRT4530_87622C.1
tttttggtttttagtctccaactataaccttttttatttccaggctcagcacatggcaaatcaaacatcgatatgcacaaagtccatcccgtcatactatggcctcttattccaaacgatcagaacagatgggcgtgtcatgcgtatgcgcatattacattacagcttggaaggggatttgtaccatccccacggctcatcggaggcgtactccgtcacttgcttgacgcttaggtagttgtcaatgcccccttctccgagctcgcgtccaaagccgctgcgcttgttcccgccccatggagcttggcagaagcagggttgcgagcagttcacccagataattccggcatcgatctcctcagttaatctctggcatcgctcgcggacaccggaaagcacagcaccagccagaccataatgagtatcgttggccaattcaatggcttcttcttcagtgctaaattctttcacacagagcactggaccaaaaacttcttccctccaaatttgcattgatgtatcgacatcagtaatga

SEQ ID NO: 88808 - DNA, 471 bp, Oryza sativa
  Clone ID: PAT_MRT4530_87623C.1
ctacaacaagaacgctgcacacatcctatcctatggatatacaaacaaaactggtaccacaaataaaatttgttattgtggtgtgataaaaaaaacattcaaagagttctgctccatcaccaaagaagccatcgtgccaagaacagctccgtgaacaacttcaattgtattggggatcacaaattcacaatgcctgaacatacaaaatgcatttgtaagtattctcagggccataagttcatcagcaaccatcaacaaagacagaacatattttgatgcacttgtgtaatgatttggaaggacaacatcaaatattctaagcagtttgcataaactcccaacaaaaaaacatttagaggaatgcgacattactaaccattcttgtcttggtagttgaagtttctgagtgccaatcacagctataacaatatcattagatgtatataatgcaagaaattctaggtaacaaag

SEQ ID NO: 88809 - DNA, 429 bp, Oryza sativa
  Clone ID: PAT_MRT4530_87624C.1
ggctaatccgggatctcaggtctgagaacgccatcctgtttttcaggcatcaaagctgcatctaccaaggtcataattgttcaagagaatgcactcatcaacttactgaaagactgtctgcaaaacatagcaacatagttgaaacaaattgaatctcgaccgattccttcgatcaatcccagccaattgcttatcactcaccatggcggaaggagaatttgatgctgaggagggcctatcatcagatcataatctattggtcgaacggcccatcgttggtggctacgcttttggtcccaagaagatgagcacgatgaatgtcctcatggcagaagcatccaagacaagaattgcagcatgcatgaggcgttataaaacagagtagcccttcctgaaagaaacaacactttattcaacattggaacgtgt

SEQ ID NO: 88810 - DNA, 777 bp, Oryza sativa
  Clone ID: PAT_MRT4530_87625C.1
ccacgcgtccggtcgttaagaaataccacattgagttgatcgaggttataaggttgagccgatacggtcaatgttgtataacatgggctcagcatgggcccagattgtaataacagccatggccaaatagagatagagctcatttgaagcaattgtatctattaattaggatgtttaagtcggttttgttagatttggcaagagaccaccgtatatggtcttgtttgtattttatatttagaaaggcttgagtagtgtccatagtggactaagtttgtactcggggtataaatatgaatcccatagcattttaataggggatacaatccaatacaacttcggctcatcgccacccttttttgttcttctttttggcaagttctctcgacaagaggtgacccgtctcgatggtttgtgctatcggggccattatgtcattttagatgttttagtccttttatcataaccatctgctaccatatgtcctatttaatctagtcttagtatcttaatttagcccctatcagccgattctcattttaaggttcctgccagtatcgattaaattgccttactagattagattaactaaggcatctaccatcttgaaaagtgattaattcctttgattgtttagactttaggtttctctacttactttgagatgcatcatccctagtcttgtcttgaaccccaaaaactaacctgcaattaattataattagagatagtatcgggagtttcaaccgatcttacctaatatacatgctattctta

SEQ ID NO: 88811 - DNA, 632 bp, Oryza sativa
  unsure (1)..(632): unsure at all n locations
  Clone ID: PAT_MRT4530_87626C.1
ccgtgccgcggacgcccgtgggtngcccgtttgcaccctcctctgcgcatcgtccattcgttgtcttgagtgtcccctcgtttgcttccgccctctcttttcacttcagtgggcgagagattaagaatcggaatcagatgggtgtcggcccgcatttcggcaggcctggtgtgcccaggtgtggcgccctgcagagcgaggggatgtcgagcctcgtttgccgtcaaccgatccccttcatcatccaccgagtacantgacatacantgttcaagtatgacanccgtccacggtccagtggatagcatcattgaggtgcaaggtcaagtgactccatagaccctcatcttntggcaccgaaagaaggtttgcgtgtgttcggctttgcaggaaccccctgaggaggatacctcatgggcctgctggcnttggtgccctgaatacccgttgnttgagtctttactgnngtgttttcaactcgacaatggaccaagggcatgcatgcttcacctttgatagggttgggtgcncaaaggaaggtgcgtcatattctggctcccaagcaaagacgccccccatgttccgttgttggtgtcaaccgagaaggagtactaagtctgacgttaacattg

SEQ ID NO: 88812 - DNA, 396 bp, Oryza sativa
  Clone ID: PAT_MRT4530_87627C.1
atggggagcgagcgcgtggcacgacgaaggggcaaaagaagagacacgagagagcagcaagggtggcggagaacgcaaaatcaagcgtcgcgacgcgacgaaaaagatatcgggaaagaacaagtggggaacaaggagcaggagaggctagaagaggaaagtgacgacggcgtgataggaggcggtacggcgatccgcgacgacacgagctcggacagcgaacgagagagcgagcgaggcggggaaggaagagagatgcaacgaactgccgataagaaaaagaggggcgccctcctcctgccacgtcggttcgcgtacgccacggtggcaggaggacggcgccagatgacggcgccagccactctggcgccccaaaaaggaccatttctaggataa

SEQ ID NO: 88813 - DNA, 401 bp, Oryza sativa
  Clone ID: PAT_MRT4530_87628C.1
gcccgtgccaccgtcgcaggagaagagatgtgagagagagttgaagagatgggagatgaggggagaggacaggaagaagaggggtgggaatgatacgtggggcccacgtgggccccaccattttttattaatttctgggtgaaacttacaagtgggtcccatgaggtttattaaaaagggggggaaacacgggccccacatttttttccccccccttttttcggagcgttccccccctgcataccatttttttttattttgaagaacattatttcctcccgggaggggggccccccctgccccctttgtgaccccgatattccccccccgttcccccagggagcccattttttatttttgggggtaaattttaaagtggccactgagtaaaaaaacttttt

SEQ ID NO: 88814 - DNA, 165 bp, Oryza sativa
  Clone ID: PAT_MRT4530_87629C.1
tttaaatacctcgataggaacatgagaagcgtcgctatagatagcttccacgtggaccacgacaactatcgtaccatggacaccttgagtagagtgccacgaggagcccgaacccatgtcgtcggtatcgtagaccacatcgtcgtcatcacacgcggacatctt

SEQ ID NO: 88815 - DNA, 1838 bp, Oryza sativa
  Clone ID: PAT_MRT4530_8762C.1
atgcaggcacggaccgcaggggagaggctcgccggctgcggcgcacgtgtaggacagcatggtgcctcctctatggtcagctccgccgacggcgatggctacagctgcttggcggcggcgttgccgacaaccttgccggtgtctggctgcttgagctcgccatgggaggagacctccgaggaatcctccttgagcttcttctccttcctcttggtgattagcttcttcagtcacctcttcttcttcctcttggtgggatgggtcatcaaatcgccgttgcagccgacgatgagatggctcctctcatcgctgtcggtccaaagggaggagatggagacctcgctccccttgtcgagatttgcagagctcaacctggtcattaccaacgccacctcccggatcgacgagaaaacgcgacagccacacaaatccagtagctcagcggtggtctccgccatgggagggcatgccggccacgtgggcgcgcacccgacgctccggatcggctggggccgatcggacggccgggggcagccgagcggcacgaccaggcaggcacgcccacaggcggcggcgaccgccgagcctagaccaccggcgacgacgccggcggcgagcggcgacggcgcgagagccggcgagagagtggagagggaggcggttctcaccgagcgaatggggcggcgagacgaagacgaggagggcgacggcagaggtgcgactggaggcacaaaagtggctgtggctcgggttcaccgtggagcgggcggctcgggggtggaatggaggagcggcgtggtggccgggcttgccggcggagcagcgaagctagtggtggtggcggcgcggcttgaggtggacgggaacggcggcaagaggctgccgaaggcggcgaaacggcggcggtgctcggggaaacggagttgcggacggtgtgcgacaatgcgtcgcgaggccggtggcgcaagcggcgtggcgcggggacggctacggcggcggaggtggccggccggagatggcaaccggcggcggcggagggaggttggtggtggcggagtggtttcgggcatggggaagcttgggaaagagggggaaacgaaggaggggagcccggggatcgtttttatagcctcgagagtcgacggggaggccggttggcgacggatttgaagggggaaaggggcgccggcgacgtgggtgagtgggggcagtttggcgccggttttggaggggagaagtgggggaaatggtggaggaaggggatgacgtggggtggaccgcgcccacacgcgcgcgggaatcggaagacgcgcggggaagggcggcgacgtgggcggctcaggcggccatggcagttgccggcccgggcggtctatggcggacggcaacgatgacgtcgacgatgatgtcatcaccggcgacggctcgggcgcgcaagctcgccggcgaacgatggcgcggcggcgcgaacggaggacaccaacacgttgcgggcgacatggcgaattcaccggtgaccaaaacagcggcggaagatcaacggacggtgacggcgacggcgacgaggtcgaagcggcggagaccttcggcttgacgatgacggcggtgctccggcgacctacggcgacgacggaggggtggacgaggtcggcgacggcttggcgatcacgatggcgaccttcccgagcggcgacgacgaccggagcggcggcggcgcacggctccgggacaggtaggcaagactgagcccctagcagcaggacaccagccctgtgccatgacatctcgactaccgggccgcagctcgtgtagccttcatttgtcctagagatgtccat

SEQ ID NO: 88816 - DNA, 571 bp, Oryza sativa
  unsure (1)..(571): unsure at all n locations
  Clone ID: PAT_MRT4530_87630C.1
ccgggntcgacccatgcgntccgaaaaaaaaaaaaaaaaaaaaaaaaaaaaaaaaaaggggaaaaaaaaaaaaaaaaaaaaaaaaaaaaaaaaaaaaaaaaaaaaaaaaaaaaaaaaaaaaaaaaaaaaaaaaaaaaaaaagaaaaaaaaaaaaaaaaaagcagaccgaaaaaaaaaaacaaaggagaccgcaaaaacaaaaaaaggggggggggtaaaacaactgcaggacaggaaaaacacggcaggtgccaaaataaaaaacaggccagaacagaccgccctccccaacaggagaaaaaccgaaaaggccaaaaggacccgccctaaaaaagagtattaaacccagaaggggaaaggggaccccccatgaagcagcgcaataaacgccaggggctgagggccccccccttagggtgaccaaaaaacttgcaagggcattagggcccgttccccccggtaagctccaaacctggggccccatttagggcggctatccagggcaagacaaaaactggagcccaaaaaaagggtttagggtgagggtttaagaagagggccaccccaaaaa

SEQ ID NO: 88817 - DNA, 325 bp, Oryza sativa
  Clone ID: PAT_MRT4530_87631C.1
ttgaataattcgcttcgcgagattggttgattcatctcgcgattgatcgagctcgagcggcggtgaggtgaggtggaggaggaggaggaggaggagatcgggatggggagagggagggaggagctgaagaggatcgagaacaagaacaacaggctggtgacgttcgagaagcggaggaatggtctgcacaagaaggcgaacgagttttacgtgctatgcgacgccgaagtctgcctaatcatctacagcaactagtggtaaagctatacgagattttagatacggccaaagcatggatccagtaactttggaaagattccaaaaa

SEQ ID NO: 88818 - DNA, 231 bp, Oryza sativa
  Clone ID: PAT_MRT4530_87632C.1
cctccgggccccggggagttcctcccgagcagctctgtatgttcaccatacagctcttacagtagagacgcttcttcatcgcgacactactactaacgtgtacaacaagagttatagaagactcatagaagaccgcgaaattcaaccataatgtcagttatcaaaagtacaacaagaccgatgatctgagtatgttaatagtcaatattcgagaggtgttctctcaccata

SEQ ID NO: 88819 - DNA, 364 bp, Oryza sativa
  Clone ID: PAT_MRT4530_87633C.1
ccccttaaaaaagagaacaaactggtttttaacatgggttccctcatgggccgggcccccaatcaaaaggggggggggggctccatccaaatttccttcccaatccccccccccctttaacggcctactccgacccaaaaaaaaaggggaaggtcgggtcaacaaacagttttttaatttccctccatgggcggccttggttacccctccacccccggaaaaccccctatttgggggggaaaggcctgaaaaaggggggggtgggggtccttgggaataaaaatttccttccccaggggccccgtgattttaacgcccaacccaggtttagggccccctaaattatcccccattaattaccccc

SEQ ID NO: 88820 - DNA, 321 bp, Oryza sativa
  Clone ID: PAT_MRT4530_87634C.1
atgactgctgcgaaccagcaggtgagcccacctgtgccgcctgctgtaacggagagcccatttgttgttgctgctgctgaatttgctgctgctgctgctgctgttgctgttgctgctgctgctgctgctggatttgctgttgttgttgttgctgctgctgttgttggagttgctgcagttgctgctgctgcagcgggttctgttggaactgttgctggagttgcatttgctgttgcggagtcaacggctgattcatcatggacaaattggcagaaccaggaagaatcggagaactgctcccaggcattccgaccatgctag

SEQ ID NO: 88821 - DNA, 4203 bp, Oryza sativa
  Clone ID: PAT_MRT4530_87635C.1
ttcattgaagttcctcctcacaggttttttttttgggcaaaatttccacaatcaaatgaagatacttattaataagcaccacggttacatagctattacacaaacttgataattaatttaaacaagaaagtagtcccattgaacaaaactttcatcagtaccaatcccctaaaggtactaatttcattatctaaaatctacaacatcagaaatccctgcgtaaggctgatcctccataatatcttcatctattggctataacttacaggacacctaactttaacatcatttaccacaacaaataagaaaaagtgctgatcactgccgatatttataccttgcattattttgtatgtccatcacagaaacaattatttgccgtcactacatgctccctggacctcctttattggcaccttgcaactgctccattggggagtttgcgatgctgttgaccgacccatgggtctgtgagctgagctgcgggctaggaggagggcctggtgtggctacgtggttgataacattgttattcacttgctgcatggtgcctgagctcagctgtggactcatcgcggccatttgctgtgggcttatttgctgatgctgcgacatcaccaatgactgctgcgaaccagcaggtgagcccacctgtgccgcctgctgtaacggagagcccatttgttgttgctgctgctgaatttgctgctgctgctgctgctgttgctgttgctgctgctgctgctgctggatttgctgttgttgttgttgctgctgctgttgttggagttgctgcagttgctgctgctgcagcgggttctgttggaactgttgctggagttgcatttgctgttgcggagtcaacgggtaattactgcctggcatctttggtggacccatcatggcccgctgcaaagggttaatgttgcttctgtttagctgattcatcatggacaaattggcagaaccaggaagaatcggagaactgctcccaggcattccgaccatgctagtctgggggtaaatgcctgctgctctttgctgctgtatcaaccccattcgcatcttggcaatagcagcatgtgtcatacctggacgaatcccaggtgcagagagactggataccattccaaggctcatctgattggggttgttccctaagcctgacatgtttcccattggggacgacattggccgcacattgcccattcccataacatttccaatattgttgaggccaacaacattgttaaccatattacccatgttggcaggcgagccgaggcccatcatcattttcctcgactgttgctgctgctgcatcatctgaagctgcacagaattaggagcgaccttgttacccatgtggcttgaggccatcggaagattggagccagtattccccagcatctgagataatgggttcgttggtagaagttgaggtctctgcatctggttgagaggaagagatgctggttgctgcagttgtgcttgtgcattttgctgcagctgcggcggctgctgttgctgctgctgaatcaaattctggtcaagctgttgactcctcggaggcatgtttgccccctgcatgtatccttgctgcattaacgcttggttattcacagatggaagcatcctattggcagggtgttgttgtaaaggggttccaggtgtcatatttgcatgagctgcagcatttagctgatggctaataccaccttcttgtttcacatcatttaccgtgttgtctggtaaaattcctgataatgcactgaggttaccaggaggggtgctaagcgcaacttgatcgtctgccttggtatggccttctcggtccatccggataataagttgcttcgcaagcagatcagcgtggtacttggtgggcaatatcagtgtacactcatatgagttctgattgtcaaaatcttctggatctccatattgcatcgccactgttccatcatgcttctccttgaaaatgatacggaatggctttgtagggccttggtacatgcggttgttgaccacaaagtttagtattctagtcttaaaggaattcattgttccacccaacatagagttacaaagaggttttatttcatctctaaaatcttcagcatgaaagcaattggagagaactgtagcaactttctcttggcttgcattgataatcggttttctctgaggtatattgtcaactttgttcttcttgctgtgcagcttgcacctttgagatatggcatcaattttgacaaatctctcaaggattgcttgatcacccataggtgcagtcccaattgatgggctgctagcattcagtacagcatgcatgtttgaaacactggctggagaccctacaccactcacaggcggttgagttttgggaacagaatttgattttctctttgaaggagcaactgaaggctgctgcatccggtgcattgaatcactagggctagaagcaacagggggatagcccactactgcaggattggaatttgcagggaacttgtctttctgtgatcccattacagcagatgtcacagcagcgccaaactgggcactcattgaactgcttgatatctccccagattttgaggagactggagactgaaccattggtacagaagagacacgagaagtagcagctatcttccttctctgaagcatttcttctttcttcaagtccttctcacctgaaaaacgaggattctgccactgttgcatgtttcgtgggcctgcttgctgtgacaaatgtggggcctgaggttgttgttgatccagcacagaattttcaggtgccatagcttgcaaggtgtcttttgacttgtccatgccatccatctgctcttgcttagctccatatctcatacctagctggttcgaataaatggaagctggttcttgcacatgaggatgagtatatctctgcccaaccgaagcagcatactgcatgcccttgacatctaattgctgcagctgttgattcttccactgcatctcctgcccaccaagtccagctggctgatgccttgtttgctgctgctgctgcatatcatcaacactgaccgttgtttttactctcttagggtcttgtagtggggcatctgccatttctctcttcacagataaaaggccattggttgtctcattgtaagccatcaagttttgtggagatgaaatgcttgaattgattccagcatagttcataggagtccctgccccacgatcattaccaatagcaggataattgacagtttgctggatactggtttgggacagcattgaaaaattagctggtctaaatgtctgagagccacctgacatattttggatggcagtgttatcaaggccttgatgaacagcattgccacctgaaatacccatctcatctgatttcatattttcagaaaccctgtctatgcacacctttttgccatgagacatgttattggatgtgacaacaacttcaggattctgccttagccttctcttttttccaataccaaggttcagcttatgaggaacaggatcctgacaaagtcggtccaacttaggagtaggatctaaacaaagtgctggttgtagaactttcacaatccgtgcctcagcttccatgaaatctcggtaactccaggaatcatcagatagccgaggaatgtcccttacaacattttcaaaagtcatttgcagcctcactttattcacaacaggtagtcctagctcagcagatggtgcaggtgcttgattggaagcatgctttcgataatcacgtatctcacagatgactgatccattgtagtacttgcttggtatctcatcaagtatatcttcaggcagtctcccagattcaattgcagaaaacaatttttcagacgccttgtcatagggatgaagtgtttttccatcctgtattgatggctggcaaggatccatcgctgctgactttgcaatgagatagcctctatcatacagactgaaagtgaaggaaacctcgtgctctggcaaaattatcctagagcatgctggtgaaatcgtgatgccattggcatcactagctctttcaacaacaccatcctcgcgcttcgcctccttctcggccgccttctccgccgcgaccgccgccggcgccggggcggccacccgcgcggcggggtggacccggacgcccaccttggacagcttgaacgagatccccat

SEQ ID NO: 88822 - DNA, 1059 bp, Oryza sativa
  unsure (1)..(1059): unsure at all n locations
  Clone ID: PAT_MRT4530_87636C.1
cttttntttttttcttttataacaagaatagcgattttatgggatgattaattgttattgttaagcatacaaaactgctttcctttttccgtattccttcatacattaagaacacccaaacatctcggggcccacgtcctccagaatggatttcgccgtaatttatgtcaatttgatcatcaatctaccactacaacttaaaaagtgtaccgacaaataactctcttcatcagatctaaacaggtaacaataattccagtgaaaatgggatgtacagataaattcctcagttggagccagaaatgtcgttcagaactaactgcatctcaagaactacagcgcgccgcctccctctcactctgatgagcctcggtatgtatcgatcttgccaactccaggagtaacaactgcaagtatgacaagagcccccaatagcaccagcaacatccccaacgagttcataaacatagcttctgtcgagaaacgcccgatcatttttgcgctctgcatgaagatcgacttctccagaagtcccgaaacgcttgtggcgatggcgagaacgtaaaggaagaggccgaagaagacatgccaggggagcagggaggctcttccactcctagatccaccagggtaccaaaatgtataaaatccagtagcccactgcaagctgaagaagatgatgcaagaaaggcccaaccaggagtgaagcgtatataagtggtcgatctgtctctcatcgtggaacttccatacagtccagagcccaatcagactcaggagcatggcgaggaactgcaaggcaaggtgtactagcttcttcagtttcttggttcctggcactgtcttgtaggccaaaattgcttccccattcaggactaccaatccaatcagcatcaatactgggtgaacgttgaagatgaggagcttgtccgtctcggaggagagcgccatcccgccgcggaagtggacggcccagacgacgatggccgccgcggccgccaggcccagcagccgcacgatcccgaacaccgggaacctcgccgccggcgccgccgccat

SEQ ID NO: 88823 - DNA, 3597 bp, Oryza sativa
  Clone ID: PAT_MRT4530_87637C.1
tcacgagcgcgtccacttcacatgcttctcgtccacgtcggacagggtgcatgtgcccatgtttccatgaacgcatgattctcggctctctagccctcttgcctcctgtatgaaagtagcgaagacatcatcaaccttgtctagttttgacacctcaacagaccacggtgcctcctcagagaataatcttttctgcctttgagcctctagcaatatagagtcacggtagaagaacctctgccatatctggcgcacatttctcaacatgaactctacttgtgtttcgtttatccctcgaagtattctgatgaggtttgggatatcatcttcttgtatgcggactgcaaaactgttgtaattaagcatattctcatagggaagcaaaattccatcctgaattattacaggaatgcatccttgaagcatgctatcctccatacgcccactccagccatcccctggcaagacaccacagaaaatagagcttgctagttcctcatagtacttctcagttcgcaaataggtaactgtaacattggctgtgtgctgccttccaagcttcccctgcttatctggtgtggaaccaaattcagcggccagcttttgccgaatccccatgctataggtgtcttcatgacggccatccttataggctggtcctagattaccattgaaatagaatagtgttgtacggttgttccttgtcctcgcccatagttttaaccagatggctgctgggttaggttgcttccatgctggaagcacaagatcctttcttggatcaaaacagggatggttgcctcttctgtcaataggaatataattccagttgtctgcccaataagctgtcgttgaattcttatgttttgtgttagtgtttccccagtggacgagcatcatgctgttccagatctctttaggagcatagcaggcaccttcatcccatgagaagaaccagatatgatctcttccagaagtgcggttccagtaaggataccgctgagctatgtgatcataagtcattctgtagtactccagagtatggtagctcctgaggcgcaagtccctcggcatctgcagatgcggggcatcatcagatctagttattagacacgagtcaagagctggcacatagaaataatcagcttcatcaccatttagtgtgcgatgagggctagcaaggatgctctcatagagtgctatctgagcaccatacagttgctgggtccatatggttctgttcttgtcatcatatattctgttcacacactgaaacttgtaatgccgtccttcaagaagatgactgtcaaattctgctggcaaatcatatacataaataagtggtctttttttcttagcaacaaccttaacattgatggagctggagcttatatttttcaagtctggtaaattcattggtggttggagccatgagggcatgccatatgcaactgaataatttgatggcatgctgacagaaaccaccacggcaatgtccatgcccttggaagaataagcatcctcaggattcacgttgcaccatcctggcttactcttgtttgtcgtgaatacatccggatcaggtgttttccagtcagtgagcttcgagtcatcaggttttttaggcaagattgttttaaagccacaagcttcagcaacagggcgatctggatattttgttccgtcccacaggccattcttgagaacttggtaagttgcattccaccttctgaacctcctcacatcgttttccagcatatccatgaaagcatctgcattctcccagctcatagttgcacacaccttgcccattgcagtcttgctcgcaccgctttgtacttcagtaatattgacaaccgacaagccggcatcgcatccagcaagccatctgccaatctcagctttccacggcgcaccacggtatgtcactgcaccatacgaatcagaagggaactgcccactgagacgtgagtccaccactccaacgcctggcagcacattccttggcttgccaatgccgtgaccagcaccaaagaaatcgagcgaggaagggaggattggcaccatgaagacatggaccgcggcgacgagcatcaccagggcgccagccacgcccaggaatgcccatggacatttcgtcgaacgcattgtgcgcatggtcaaaccatcatccccaagcagtggcgctgtggcggcggagccaacaaattcccggagcccggtcctcgccggcccctcgattcgccgccgctgccgctgccgctcccgcccgtgccctgccgctgccgccgcggcaaagagaaattgcgctaaagccttggtgttgttcatgtccttgacaccaaaaggttgcctcttagcatctttgctgttctccagatccttactaggtgtccccttctccttcagtggcttcttgagtggtgagcttgccatcgacatgcctcctgctttcacgttcttgacacggttcgtcgagggagatgggaaccgctgcggagtcggtggtgtggccttcacctccttcaacacagaggacctggtgggcttcgcagcttccactttcaatcccatcttcttccccttcattgtgcttggactcttttctgctgtttcttgccttgatttctccttgatggcttcttcagagggaacctgatcaccagtgccacagccacaatcgaccttcttctcggccacatcgccctcatttattgggtttgagcttaattcctccatggcctccgacccaggccggctgccattgccgccggccatccgcttgagctcattgtagaagtctgatatctggccaagtatgtccttcccggagaagaggttcctcgccgagagggtgctcttgagctgcctcggcgcggcgttcttgctgagcagggcctccttctctgcattgcccggccgcttctccgcgctggacttgatggcgtccttggcgttcttggcccaccgtgccgcgccgaacggtggcctactcgccgccggtggcggcggaggtggagtggccaatgccgggtcctggttctcgctgtcgtcctggaacctcttcttggccgcagccttgggcttgggcggcgtgaaggtggcggcgatgccgctgccggcgacggctccccgcctcttgagattgttgttgccgtctctaaggttggtgtccctctcgccgaacggcatcatcatggccgacactgatcgcagtagcttgcccttggggctggggctcatcttgaggaagtcctcgaccgtctttggatgccggcaatcggggcggcagaaccaggcctcgtcgtcgacggcggcgacgccggcctcgggatcggtgaggtcggcccagtgcggggcctcgatgccctcgtaggtctcgtcgcgcacgtaccgcgacaccaccctgctccagtcgatgtccttgggctccatcgactccatcgcctccgcctcccctccccaagcagcagagctctcccccgagctctccggcggctcgtccaggcgagagaagaaagagagtttgcggtggcggcggcggcggtgggtggtggtggctcctccgcggcgagcgcctctgcctcgtctcgtgag

SEQ ID NO: 88824 - DNA, 204 bp, Oryza sativa
  Clone ID: PAT_MRT4530_87638C.1
cttgtctggaagttgattttgctgattggtactcgtgataataaattcgacaagtggtcgccaaattggggaggaccgttctagattcaaaaggttgtttctaagggagcatatatgctgcaagggcttgatggtgaagtttatggccgagctcttaattgtaaatacttgaagaaatattactcgagtgtatggattaactcg

SEQ ID NO: 88825 - DNA, 886 bp, Oryza sativa
  Clone ID: PAT_MRT4530_87639C.1
gattcggggagtcggcagggtggcgccgggtgcggcggcggcgggggcggccgtcggggggatggcggcggcggcggccgagaggcagctggtggtggccgtggaggggacggcggcgctggggccgtactggcccgtcaccgtggcggactacgtcgagaagatcgtgcggagtttttgtgcacatgaaatggcaggacagaagctcgcagggacaccccctgaacttgcattagtcgtcttccatacccatggtccttatagcgctttttgtgtgcaacggagtggatggacaaaagatatgaatgtgtttctttcatggttatctggaatatcatttagtggtggaggctttagtgaagctgctatttctgaaggtcttgctgaagcattgatgatactccaaggcagttctagtaacagtcagaatcatcaaagccatgaagtacaaaaacattgcatacttgttgcagcaagtaatccttatccactgcctacgcctgtctaccgcccccttgttcaaagtagcgatcacaaggagaacaatgatggagcaaaagaatcttgtcttgctgatgctgagactgttgcaaaatcatttgctcagtgctccgtttcattgtcggtggtatctcctaaacagcttccaactctgaaagcaatatacaatgcggcaaagaggaatcctcgagcggctgacccatcagtggatcatgcaaaaaatccacattttcttgttttgttgtctgacaattttttggaggctcgaactgctctaagtcgccctttacctggcaacttggtcacaaatcaccccattacaaaaatggatacagctgcaacatctgtgccagtaccaacttcaaatggcaacccctcaggttga

SEQ ID NO: 88826 - DNA, 3106 bp, Oryza sativa
  Clone ID: PAT_MRT4530_8763C.1
ccctagcgccgccgccgccgcgaatcccgccgctcccgtccaccccgcgtgcaatcaagaggggggaattaatccccgcgttcccctcccccgtttccccctctttcccctctctctctccctcggattcgttcgaatcaagcccgtaatcatcgccggcgcaatcaatggcggccgaaatctccgcggccggtttccttcctccccggccgccttctctcccttccgacgctataaaaacgttgcccgagctccgctctttcgtttccgccgctcgccgctcactctcgccgtcgaaatcgtgctcgcgccgtgctcctccctctccgccatcgccgccgagctccgttccgccgccgccgccgctccggacttcctcctactcggcgacccctccgtccgcttcgccgcgacgccgtcgatcccgtccgccgctccgcttcgcccgtcgaccgccggagcaccgtcgtcatcgtcatcccgagccgcgccgccgtcttcctccgctccgtccgccgtttccaccgccttcgccgtcttggggtgagccgtggaccgctccgttcgtttcccccttccctcctctctcttgggtgccgctccgccgcgccgttggtcgccggcggcgaccatcggggcgcgggcgcgctcctcccgtcggccgcgccggcgaggccgccctcgggcgcgccctcgcggctgccaagtgggcccggccgtcagccgcccgcgcccgcgggtgcggctgacgcgcgggacccacggcgccgaccgccgccagccgcgtgcgcccggtccaccgtggaccgagcggctgacgcgtgggccccacttcccgtggacccgggcaaatgaaggctacacgagctgcggcccgatggctgacaatgagaagggcaataaggtcagaagtcaggacattggtacctcaagctcccgagtgaatgaagcaccagacaccagttgtgtagcagtggtccaacacctgattaaccagaacaaattgcttatagagatactacagcagcatcggatgccaattttgaacccgagtcggatgcaacctcaagtacagttggaggcagtccaagcactcacaccacaagtcagcgcaccgccaacatcccagaaggcccctcatgccatgccacatgttgacccaaaagaagcaagtatcatctgttttatgtgtgatgagcaagggcactacgcaaggaactgtcctcagcagaaaagaaaagcaccaatgcgaaccgaagatgaagtccgtaagatgatcattaccagcacagaatggcctccaccaggaatgaccagacgtcagagaagaaataccttccgaggtgcaccacagttgacagaacatcttttagctaatggaggtagagtgtctgatagtgaagattcagatcaagtctcctcagatgatgaagatgaaatggaacgtaaggcatgctctcgttgtggagaaatcggtcatgtcgccagctcatgtgccactatatgcgttcattgcgaggaagaccatccacccgacaggtgtccaacgagcaggatcacttgtttcttttgtgaaggaactgatcatgtaccaaaagattgtcaattcagttttctgctgacgaagaagatggctaaccaacccgccagttccaacggagagaagcatcaaggcaacaccaatcctcgccaagattacagttccagcctaactccagtgccaggacagaggaatcgaaatgagaaaagaaaatgccgagtccgggaagacatctgttgcttcaattgtcaaggaatgggtcatttcgccgacaagtgcccaaaaccgagaaacatagctgccggcacgacagtccacgcaactccctgcaatcagaagcttgctcctcaacgaattgtcatccatgcatcccgaagcagtcctatagcccgcgttgcaacagctccaattccaatgaatgcactaccacaaggtgtcaatgctcaatttcagccccagccaccagctgacaagacagaggccagtatctgcgttgtacctttggaagttccaatacagcagctgagaaatcaagtacaagatgaagaacccgagtgtaagaaagttattgtttgttacaactgcagtgaagaagggcattactccgaaaactgtccccaaccaaggcaaaatcgacctccacattaccgccaatttacacgaagcagacattccaatcgtattgtggtcactggagcaaacgccgtacccgttcggatatacctgcaaacagttaagaagatccaggaagacatcaatattctagaacataatagtcgatggttggtaattagtcgatcaggtatcagaaaacggtcaaaggtgatatggcagaagaacaatatggatgctccccatctcgaggaagcactaaaccctagtggcatagatacagatagcaagcaatgtatttccctgaaggcagcaagccaaaggacctcatcgtccccagaagcgtccgcaatccacattaaagaataccacctgttagagataagccgaaagatgattgataaaaagagattggcaaagatgttctctagcatgaaagaagtaggccgaaaggtgattgataaacagaaacatgctctgcatcgctcaaggaagacccctgattgtaattgccccgcaacagtcaccttgtcattaagtcagcaagatgacctaggtaaaagtgtttctatgaaggcaaagagtgaaatcttccactcggtatcagatgctacacggagtgaaaaatgcaagcaccggttaccaggcgacgccacgtcctgggagatgatccaacgggaaagaactcatcaagttgataacttgtccgaggttgactccgaagatatgaatcatgagaagttctggaacggaagcatcactgaactaccgcaacctagtctgagtcagccaaaaggtgcaccctggtccaagtcaggtgaagagaagattccatccgcaacaggaggtcaagccaagcagttccgagtggtaaagttttgctggaagtttgtcaagacgcaacggaagaagtcagacaagaagagaagaccgcccaacctatcctcttgctag

SEQ ID NO: 88827 - DNA, 1131 bp, Oryza sativa
  Clone ID: PAT_MRT4530_87640C.1
atggaggacaacgacctggtcgacgaggtgctcgacagcgtcggccttcacctcttcaacaacgtcgacgacatcaagatcctgctcgacgccgcgcgcgccgacctcgacgagaacgccgcccacatcgccgaggcgcaggctcgtctcagccatgtccggcgcctggttggcgaggtcgcgaccgcgcccatggccgtggagcagcagcaagccgtgcgcgccgccctcgaggaggtcctcgacgatttcggcgcgtcctcgcttctcctcctggagcgcggccggcagctgcgcctgctcatcttgatgctccagttactccgggcctccgtcttcatcgttcgcgccgcgcgccacctccccgccgtgctcgcctcggttacggccggatccgccgccgcgctcgtgtacgccgagtcgaggcgcggcgtgccggcgttcaggagcctcgcgaggatcttcgccgtggtgatgtgcggcttcttcgagtgctaccgggtgggcctgtccaaaaagcatcccccagaacagaaaaggccagaagatgagaagaacactgaaccacgccaaaagcgcaagaacccacgcacagcaatggaggtgaacaacttggccgacgagctgctcgacagcctcggcgtttacctcatcaacaacgtcgacgacgtcaagatcctgctcgacgccgcgcgcgccgacctcgacgacaacgccgcccacctcgccaaggcgcgggctcggctcaggaacgtccgccgcctggtgcgcgaggtcacggcgtcgccgcccatgatcgtggacggcgtggagcagcggcacgccgcccgggtcaccctcgagaggatccacgacgatatcagggcctcttcgcttctcctccgggagcgccgccatcagctggaccaggtggtctgcacgctcctcatgatccgggcctacgtcttcgtcacgcgcgccgcgcgcctcatccccgccgtgctcctctcggttacgcccggatccgcggccgtggtggcgtacgccgagtcgaggcgcggcgtgcccgtgtccaggagcctcgcgaggatcctcgctctggcgatgtgcggcttcttcgagtgctaccggttgagacaaggtgatttctga

SEQ ID NO: 88828 - DNA, 349 bp, Oryza sativa
  Clone ID: PAT_MRT4530_87641C.1
ctaaacctcacatattttggttttgtaccacacaccggggtcttaatgaagtccacacatccactatggtgatacaaacacacgcattttaacataacagtttttacgaatctaacaaatttgacgtagcctttgccccgacaatggctcttatcactttgaaaatcatttttgagataaaatccctcacccgggggccttaagctcaaccaggcggctgaagatgtccatttcatcaacagccttatccttatccttggcagctggtatggcgtgagcgggggcctgcggaaacccaacgggtacctaaaggccgtagtcggaaggaacttgctgcatgaggctttta

SEQ ID NO: 88829 - DNA, 236 bp, Oryza sativa
  unsure (1)..(236): unsure at all n locations
  Clone ID: PAT_MRT4530_87642C.1
gcccatgcagacaagttgaggcgagagatgagtacatcataccggagctttngattttgatttggantttgagttttgatccccacaattagaattgtgcaatattttgtaggattatatgtttaatatatacatgntttatgaactgtttggaaatgagcacttatattatgtaccaagatttgtatataatgtttggaggaagaccgaattggagggtatgcttcccanttaaa

SEQ ID NO: 88830 - DNA, 1845 bp, Oryza sativa
  Clone ID: PAT_MRT4530_87643C.1
atggaagcagcgaggatggacgccggattggataatagtgaatcccttgctagcccaaacccatccaatgagcatgtgagtgttgatgatgaatgcttgtatattgacattggtcctgcacctcccattcccactagtcaatctgaaccagacacattgttagatgatgaagtagaggaagatgaaatagaggaagatgacattgttacatatagagagccttcccagaaacctgatgcagactatgacaagaatgatcctcctatggcagtaggcactatgtattcagacatgaatgcttttaagttggctttagctacacatgctaccaaatatgagttccaatataacattgaaaagagtgataaatctcggtacagggtgtattgcagtggcaagaatgtgggctgtaggtggagaattcataccactcttttgagtgatcaagtcatagtgaagatcacaaggaacccatacgatcatgagaattgtcaaagcactaggagggcaggcacttgtgtaggagtgacacagttttgggtctgtgaacaagtgcttgattggttgaaggaagatgaaacattgggtgccaaagagctgaggaggaggttgaaggagagccacaaagttgaggtaacctacaggaaagtttatctaggtaggcaacgtgctatggataaactttatggtccttggtcctgcagttttgacaacctgtatagatttaaggctcagatagaggatactaatcctggatcctttgttgtaattgatcaccataccatcaacaacaaaataaggggccggttgtgtgtagcttgtgcagttgatggtcacaattggatgtacccagtagctattggtgtcattgactcagaaacaaatgagaattgggagtggtttatgaataggttgaaagaagctataggcaacccagttgggcttacattcagcactgattgtgggcaagcagtgatgtatggggaaaatcacaggaaattgtggaccaggagccaattttccactttgtcaaaagtggattatgttaccaataacttcgctgaggcattcaataaatggtttgaaggaaagatcttgcctcatatagtgcagaagttgagaggagctagctataaccttgacattgaagtaatcacaagctcacctgatggcattgcagaagtttgtgctaagggaaattctgctagtaccttcaggtttgtagtgaacataaaagagaggacatgctcttgcagagcttggcaatggtcaggaataccatgcaaacatgccattgcctacatcacatcaatccctggggccaatcttgaagactatgtggatgagtgctattcaattgagaaattcaaaattgcatatgaaggttctgtgccctctattcctgacaagtccatgtggtccaaacccacccatggcttcttcatgcatccttcattgcttaagtcaactgcaggaggaagaaggaagaacatgatgaaatcagctttggagggaggtagtagtaggaagaaattaggcactaagggaggcatggtattcccacacaatgaggtggtggccagtgctacacagaagccaaagagagttaaaaacgccgccaaaaagaaggggccaccaacatcagcaagtactgacaattcggtgacgagcaggtctgtaactagatccaataacccctttgctctccaaattgaacaccctccagttgttcatgacgacattgcatcctatgaagtctctccacggacagtggagacaccaaggaagaagcaagccatcaagaagatttttcccacattttcccaatttttcccagatttttaa

SEQ ID NO: 88831 - DNA, 412 bp, Oryza sativa
  Clone ID: PAT_MRT4530_87644C.1
ggggagttcagttcccagtttaccaaaagtaaattctttgttggaggggggcaatccattacaaacacatgcataaactttcagtttttttttccattttctaccattttactatgaaaaattttgggaaaaaatggcaacattggaaatgttttacataggcaaaaatttgaaggctctggatatttttcctttcattccaaacaaacaaaaaatctacggtttttgaacctgaatacctttggggcgttagagttttgaacaaacctggttaaaaaggtttactaaacattttggctcaaccaaatggggatggtttgggataaactatgcctaacacaaggtttgtttgagctttgttaaaggtttttagcattttaaccactacaaccccaaagccgttttcttggag

SEQ ID NO: 88832 - DNA, 411 bp, Oryza sativa
  Clone ID: PAT_MRT4530_87645C.1
atgccggcgaagatcaatcttcgcaggcgcacgtcgcctgctgcctgcgaagatcgatctttgcaggcgacgcttatatggtctgcctgcaaagatcgatcttcgcaggcggacagccccctccaccccggtgacagttatatggtggttactaaagtcaatgcgctggtagtcgtcatttggagtccattaggagcgtccatgtgtaaggtggcgatgagaggggccatgcttggtttggccgaaccaagggttcggctgacccctaggccccatttctcgccaccgaccatcaccagggactaccatgctgccccaatggttgcggtggtggatccgtctgctcccgagcgcctggtggttgagagagttgcggtcacccgggccggtcctgaggtttcgatggcctag

SEQ ID NO: 88833 - DNA, 1488 bp, Oryza sativa
  Clone ID: PAT_MRT4530_87646C.1
atggctgctgctgctgctcgatgcgccggccatggcggcggcggcggcggcggcggtttcttactccggcgacggctgctcgccaccgcggcgttcctggcggcgtttgggctctgcactgctgctgctgatgacgctgccacggggagaggacaagggcatgatcatgtgatgctgagcgtggaggacatgttccctgactcgtcgtcgtcgtcgccgtcgtgcgacgcgccgccgcgagatcacagacatgacgccacgtcatcaaccactaggatgacgatcgtccaccggcacggcccgtgctcgccgctagccgccgcgcacggcgagccgccgtcccacggcgagatcctcgccgccgaccagagccgcgccgagtcgatccaacaccgggtgtccaccaccaccaccggccgggtgaatccaaagcgcagacgccaccggcagcagcagccgccgtcggcgccggcgccggcggcgtcgctgtcgtcgtccaccgcgtcgctcccggcgtcgccggggcgcgcgctgggcacaggcaactacgtggtgaccgtgggcctcggcacgccggcgtcgcggtacacgcgggagaagctgttcgacccggcgagctcgtccacctacgccaacgtctcctgcgccgcgccggcctgctccgacctcgacgtcagcggctgctccggcggccactgcctctacggcgtccagtacggcgacggctcgtactccattggcttcttcgccatggacaccctcaccctctcctcctacgacgccgtcaaggggttccggttcggctgcggcgagaggaacgacggcttgttcggcgaggcggcggggctcctcggcctcggccgcggcaagacgtcgctgccggtgcagacgtacggcaagtacggcggcgtgttcgcgcactgcctcccggcgaggtcgaccggcacggggtacctcgacttcggcgcgggctcgccgccggcgacgacgacgacgccgatgctgacgggcaacgggccgacgttctactacgtcggcatgacgggcatccgcgtcggcgggcggctgctgcccatcgcgccgtcggtgttcgccgccgccggcacgatcgtcgactccggcacggtgatcacgcgcctcccgccggcggcgtactcgtcgctccgctccgcgttcgccgccgccatggcggcgcgcgggtacaggaaggcggcggcggtgtcgctgctggacacgtgctacgacttcaccgggatgagccaggtggcgatcccgacggtgtcgctgctgttccagggcggcgcggcgctggacgtcgacgcgtcggggatcatgtacacggtgagcgcgtcgcaggtgtgcctcgcgttcgccggcaacgaggacggcggcgacgtcggcatcgtcgggaacacgcagctcaagacgttcggcgtcgcctacgacatcgggaagaaggtggtcggcttctcccccggagcttgctga

SEQ ID NO: 88834 - DNA, 1791 bp, Oryza sativa
  Clone ID: PAT_MRT4530_87647C.1
atggctgctgctgctgctcgatgcgccggccatggcggcggcggcggcggcggcggtttcttactccggcgacggctgctcgccaccgcggcgttcctggcggcgtttgggctctgcactgctgctgctgatgacgctgccacggggagaggacaagggcatgatcatgtgatgctgagcgtggaggacatgttccctgactcgtcgtcgtcgtcgccgtcgtgcgacgcgccgccgcgagggaccgggatgacacagtcgaacaagtttgagaacctgaatagtcgatttgcgagtttagggaccgggatgacacagtggtacaagtttagagaccgacatgacgccacgtcatcaaccactaggatgacgatcgtccaccggcacggcccgtgctcgccgctagccgccgcgcacggcgagccgccgtcccacggcgagatcctcgccgccgaccagagccgcgccgagtcgatccaacaccgggtgtccaccaccaccaccggccgggtgaatccaaagcgcagacgccaccggcagcagcagccgccgtcggcgccggcgccggcggcgtcgctgtcgtcgtccaccgcgtcgctcccggcgtcgccggggcgcgcgctgggcacaggcaactacgtggtgaccgtgggcctcggcacgccggcgtcgcggtacacggtggtgttcgacaccggcagcgacacgacgtgggtgcagtgccagccgtgcgtggtggcgtgctacgagcagcgggagaagctgttcgacccggcgagctcgtccacctacgccaacgtctcctgcgccgcgccggcctgctccgacctcgacgtcagcggctgctccggcggccactgcctctacggcgtccagtacggcgacggctcgtactccattggcttcttcgccatggacaccctcaccctctcctcctacgacgccgtcaaggggttccggttcggctgcggcgagaggaacgacggcttgttcggcgaggcggcggggctcctcggcctcggccgcggcaagacgtcgctgccggtgcagacgtacggcaagtacggcggcgtgttcgcgcactgcctcccggcgaggtcgaccggcacggggtacctcgacttcggcgcgggctcgccgccggcgacgacgacgacgccgatgctgacgggcaacgggccgacgttctactacgtcggcatgacgggcatccgcgtcggcgggcggctgctgcccatcgcgccgtcggtgttcgccgccgccggcacgatcgtcgactccggcacggtgatcacgcgcctcccgccggcggcgtactcgtcgctccgctccgcgttcgccgccgccatggcggcgcgcgggtacaggaaggcggcggcggtgtcgctgctggacacgtgctacgacttcaccgggatgagccaggtggcgatcccgacggtgtcgctgctgttccagggcggcgcggcgctggacgtcgacgcgtcggggatcatgtacacggtgagcgcgtcgcaggtgtgcctcgcgttcgccggcaacgaggacggcggcgacgtcggcatcgtcgggaacacgcagctcaagacgttcggcgtcgcctacgacatcgggaagaagtccttctcccttcttccatggcgtgacctgaccaccggcctcctcctgcacgtcatctccctccacctcggcccgccgctggcctcctcttgcatgccagcgtgtcccagatccagctgcctttcctcgctccgagctcccgcggtggacatcgccggcgacaggatttag

SEQ ID NO: 88835 - DNA, 456 bp, Oryza sativa
  Clone ID: PAT_MRT4530_87648C.1
atggggaaaaagccggttaatagaagtccaaaggccactcatctgtcaataattcttgtgggaaaattcggtccatcaaatccaaaccccatatgtggctgggcttcaggaagcttttgcctagagctagttgggcctgaccatggcaacgagctactcccagtctcccggacaagaccagtcttgcaacgtgaggtttgcatctgtgacaattccataaacttaggagacaagcaaggacaaaatacccgattcttttcagattatttaactggattattagaatggattaattgctgtacgcttcaaaaaatatggggtgatgtcaaccatctagcttgtgatgtcaaggtttttgctgttcttggtgcttgtggggtaaaggggacttctatgcattattcaagtgcaggcatatttgggaacataaatagcaaaatggctagtatcttctag

SEQ ID NO: 88836 - DNA, 821 bp, Oryza sativa
  Clone ID: PAT_MRT4530_87649C.1
ctatctaactgttgtcgacatgtcggtcggaaggtctgactcgtagtcgacaacagggtagccttcctcctcgaatccgtgcccggcgagatcagagatagcgctttcgtctctcccccaccgaaatgcaccgccgcccatgagcctctccccatcgagatcccatggcgctgccaccgccgcgccgtcgcccaacggcgtctctactagcgacgacctggcactgccacaaccgggcaccacgcccccatcaccccaatcgcagacatcctggtggcgtcgtccccaggaccccagcaccgcagcaagcgtctgcccaccgcgcctccaacgccgccggcctccaggcgccaccgtccccatcgtcaccgatagcagtgccgcagcaaccatcgctcaccatgcctccaccaccgtgtcctggcacttccattcccaacgccgccgcaaccgccgcaatcctcccaccacgccccgaccgccccaatcatcgatgtcctggtggcgtcgtcaccggtgctgcggcaagcttctgccttccgcgcctccaccgccgatggtctcctggcgctgctgtccctagcgcagccgtccccatcgccgtcagcagcggcgccacaaccgtccgcccgcagcatctccaccatcgggacgcgccacttccgtccccaatgcgacagcaaccggacgtgggccgtgcctcccaggagctggacacagggaatgactccctggagctagctgtcgttgatgactgcatgccatgcctgttgctattgctgctccctcaattgtgtatgaactgcatgaacgtgtgttga

SEQ ID NO: 88837 - DNA, 1143 bp, Oryza sativa
  Clone ID: PAT_MRT4530_8764C.1
atggagcggtgggcggacgacggcggcgctcaggggcgggcggcggacggtggcgagtgcgggcagcgccggagccgcggacgacggcggcgcgtgggggcgcgcggcggacggcagcaagtgggggcgtcgcaagtgcgcacggcgacgcgggccgcggacgatggtggcaagtgggggcgacgcaagtgcgcacggcggcgtggagccgcggatgacagcggcgcgtggggcgtgcggcggacggcggcgcgcgggggccgtcggggtcccgcatcatctttccagatccgcgcggcctccacccccgtccgccgcctgtcccgcgcgaacatgctcgctggcccagccttctccctccgacgtccgactccggcgaggccgcgctaccgccgccgcctccgcgtcaccctcatcccccaccgccgccgcctcagcgtcacccgccggctgccgccgccgcagctccgtgtccaccgcctcccgcccgtgagagagaggaagagctcgcagccgccacctcctccgcttagtggccgcctctccccctacccccacctctcctctcgtcctcgttgccgcctctcccatgacgtccccagtgagagcagggcgaggccctctcctcgcacgcgccggcgaccctccatctcctcctcatcgtcgcttgatgggggcgaggagctcggtgacggcgcgcagggacttggggagcagcacgccggcagcgacgagatccgacgaagacaatgcctctcccctctcaagctcggggcagcatggcgacggggctcctcgagcggctgcggctcaaatccggcccgccgccgtcccctcctcctggttgctggattgggggaggagctcgatggtggcaagccgaggggattcgtgtccgccgcacagccccaccacgccgtctcggcctccacatcgcacggagccgccgcacggcctcgtcctcgccgtcgcccggccgcgacgcccacggccggccgcagcgtcgtttattgctgtaccactttgaatgacaccaccggatttggactgcaaatccacctcgccatcacaggcatactacctctacctgccatgtggattttgatgcaggggcaagataccatggatcttggggagatttaa

SEQ ID NO: 88838 - DNA, 433 bp, Oryza sativa
  Clone ID: PAT_MRT4530_87650C.1
ggtgggttggcttctcctccccctctttaccttttcctcctcggttcggttccggggttcgcctagggtttagtgggttgagatggccgcgccggatgtcgagtaccgctgcttcgtcggcggtctctgctgggacaccgaccaccgctccctcgaggccgcacttctccacctgcgggaagatccttgactacaagatcatcaacgacagggggacagcagaggtgacgaggctaagggtatgacaccttgtgctacgagcagtgagaagcgcgaacacaattgagggcactgagactgaaggagcgtcgacggacgcaacatcaccgataatgaggtccagacccgtccatcctgtggcagaagcggtggctaccgtaccggtggtggcggatactgaggatgccgaggaggcggagcatactgaggaagt

SEQ ID NO: 88839 - DNA, 441 bp, Oryza sativa
  Clone ID: PAT_MRT4530_87651C.1
atggcggtcttcccgagcgatggcgacgactggagcaatggcgaaggacggctggagcggcggcgacgacggttgcgcaaaagctacacggcgctagagctctacggacgacgagaggcgaaggcgagggtggcgatgggtagaggagagctcgggggtccttttaagggggctcggaggcgacggcgaaggcccacggctgccggcgacgagaaggaaaggaaattgaccggagtttctataagagaaaaggaagaggagatcgaggagattatttcccctcaatctattcggccggagaaggaaaggcgcggccgaattggaaagcggcggcggcgcggctcggctagggtttcgggcggcggcggcggctcgaggaagacgaacctgacaggaattgagctccgaaaaatccgagaaaatttcagagagttgacttaa

SEQ ID NO: 88840 - DNA, 727 bp, Oryza sativa
  Clone ID: PAT_MRT4530_87652C.1
aattcggcacgacatcggctcatcctcctcgattccggcggccgactcaaatccgaatcgccccaagagagagagaatggcggcggcggcgctccgaccggcgatcctccgccgcatccgcctctccccctcccctgcggcggctgcgggggccgcggcggcgtcccagccccacgccctggcgcggtggctcgcgcggcccatgtcctcccacgacgcccacctcacccgcgacgaggtcgtcgaccgcctcctcgacgtcctcaagtgccaccccaaggttgacccctccaaggtgagtcccgaggcgcacttcgagaaggatctggggctggacagcctggacacggtggaggtggtgatggcgatcgaggaggagttcaagctcgagatccccgaccaggaggccgacaagatcgactccctcccgctcgccatcgagtacgtcgccaaccaccccatggccgcctgacctcaccgatccgtcgtgccgtggtgaggcttttcttgatttactatttttgttctgcgggggatgaataattttgctggagtggttcaggaaaacttgtccctggtactctagattatgtgttatgttgccatcgatgtcgatctctaatgtaacatccacaatttcggttttgtgacaatatgatgctagattcttgctcttttgctcaaagaaaaaaaaaaaaaaaaaagcggccctctctctccctcgtgc

SEQ ID NO: 88841 - DNA, 261 bp, Oryza sativa
  Clone ID: PAT_MRT4530_87653C.1
tcgtggacgcgtgagctcgacgatcatccacatggatggaggcatctacagggagctaggtgccaccgatgctgggcaccccatggtctaggtagttacccggactgacgtatagcacacttgtagctgtcgtagcctagccatcaggtcttgtggacctaggacatcctaaacgggacaagacacgacttgtactattgtggatgtcctaggaccacaacaactggaggctaggctactaacgctagatgtgtgttttac

SEQ ID NO: 88842 - DNA, 195 bp, Oryza sativa
  unsure (1)..(195): unsure at all n locations
  Clone ID: PAT_MRT4530_87654C.1
cacgcgtgccgcgttnctggcgctggctattattttccacggtcaccggttcacccccattcccacccccggaggtttgcatcggaaattccaccccggcttttccttcctcttccgcagatcagatcagatcagatccgatcaggtgaaaaagaggaggggggaaagatggggttggcgttcgggaagctgttc

SEQ ID NO: 88843 - DNA, 990 bp, Oryza sativa
  Clone ID: PAT_MRT4530_87655C.1
atgcatcccaagtcatcactgctgttcttcctcatgatcggagcattgctcaccaatgccatggcaaaccatgcaccggctccagccgccgtcaactgcgtgccacgagagagggaagccctgctggccttcaagcgaggcatcactggcgaccccgcagggcgcctcgcctcgtggaaggaagacgaccatgactgctgccggtggaggggcgttaggtgcagcgacaacctcatcggtcatgtcctcgagctccacctccagagtaacctcaccggtgttgtttatgtagattatagccctttggagttcaacgcggtagctttggtcggccggataacgtcttctttgctttctctggagcatctagagcaccttgacctcagcaacaacaacctcacggggccggatggccgtttcccggtgtttgtggcctcccttcgcaacctacaatatcttgatctctctggtttgggattcactggtatggtgccatatcagcttggtaacctttcaaagctggaatttcttgacctttcgggaacagtaaatcttagcgcgatatctgattgggctcatgtagtaaacaagatcccatcactaacggttgaaatatttgagcaccttggatttatccaacaatcttttgaacgggaaacttcctcgatgcattgggatgagaaatcttcagaagcttctactaagtgcctcaaggaaagtagtcgtattcagaggtacagcagcgttgatgagaatgccgtgccatgttcaatgatgaggatcaaactgcttatctggaaccttgtcaacaacacaaccgtcttcgctgatcctacatcactagtagtcttcatcaacttgctgccgccaacttgtccacatagatggacaactcgcgtcctctacgacggcaacgaccgcgacaccgatggcattgatcacatcatctataatgacaacgactacatcaacactgcatcaccattgtga

SEQ ID NO: 88844 - DNA, 187 bp, Oryza sativa
  Clone ID: PAT_MRT4530_87656C.1
gacgccatcggttgccgtcgacgacggtggtggcaaggcggacaaggaaggcgagacccgggagcacggtgtcgtcttcccctcactgcacccctcctcccctattcttccccagacctgcatgggagccagcctcaccacccaccggaggcagcgtcccatccctatttcactcgggagccgctag

SEQ ID NO: 88845 - DNA, 672 bp, Oryza sativa
  unsure (1)..(672): unsure at all n locations
  Clone ID: PAT_MRT4530_87657C.1
gttatcttttccccactccgccgccgccgccgccgccggtcgatcggtcggcggcgatggtcgagctcgatgcctcctgctgatggtgccaaagagcccccactccatcgtattaggactaggagagccagccgatttgatatttgggagcaggcagaggcaggcatttcttcaaccaggaatggatccctagcggcttagcaatttgcctgcagtgagttggagggagttcaagctggttgtgtgagtgtgaagcttctcttttcttttgcggagtagcaagcaacggcgggagttggagggagatctcccgtcgcggtcccatgtacgttacgtgtatggatcattgattcttatatgaaggaagctgcgccaacttgacctgaacctgaatctggagaagaacaggaaatgtgaatctcaagctggagaagaaaggcaaaaaaataaatgtagtcgatcagcccataggcctgcctcatcaacgcagctcgttggtgcatttccaacggaaggactgattcctgaagaccacgtcgtggcaatggttccattggacccagaacagaggaggtagaactctggagtgtttgaccatttgtttggnggcttggggagatttgataaagagacaaggatggtgatggtgggaattgtgactgtcatctgggc

SEQ ID NO: 88846 - DNA, 510 bp, Oryza sativa
  Clone ID: PAT_MRT4530_87658C.1
atggtgacacacatcttcatcgccaccactcgtcgtcacgccacccacaacttcatcaacgactgcgcagtgcatcgggcaaacgttcccctccaacctcactccagcctcagcgccgcaatggcgaacgtcgaccgcgtcaactcgcaaggacagtgcccaccccagcacgtcaccatcggtgcgcacgcattcatcatcgacttctatgcccactcggctacgacatcatcctcggcgttaaagggcgcagcaatgtctctgccttgcctccgacgcaacatggtcgggtttgtctgcaaccagcagccgttcctcagtcatttggcacgaggcgttcgtgaagttttggtggaatggaaagataagccggcagcagaggcttcttggatgtgcctggacgaatttcgtgctttgtatccagattttcagctagaagacgagctgctcctagagggagggaaagatgtcatgaggggatgccactacgcctcatgggtgcatcgctga

SEQ ID NO: 88847 - DNA, 1413 bp, Oryza sativa
  Clone ID: PAT_MRT4530_87659C.1
tcaccgctggcggcagtggacagtgacggtgatgacatgcatcacccacaatgacaacgagcactgccgtcgcacacgctgtcccatactcgtgcttgaagagccccccgtggcggcgttgaagttgggtccggagacggcagtgtggttggcgacggcaggggtagcaagggaaagagagtagcgaagaagatttactgcttccccatgccaccggcctgtctcaccttctgagcgtcctgctgatatgagagtatcacctacctctgattggctcgccagggaagagaggaaagagaaagaggaggagaggtgaggaagaagatgaaagaggaggaagtcattggcatgtgggtcccacttgtccattgggcgcccccctataccttgggcttccaaccaatccatgggccgggaaggcatcggacggccgagatcctcccatccatcgcggtgtcccgatcgcggccgtcgcaaagtcgcgcacgggacacaagccgaggagggttttgaaaccatcctgggttttccaccttttccagcggccgcgacaagtccagcgaggcgcttcctcctctcctcgcctctcctcgcgcgacttcgcggcggctcgctcgcctgatccatccgtgtctcgcgcggcggcgccatggcgggggaggcttcgccgcccgcgccaccggagatccccacgaggtgccaccactgcgccggccccctctccaaggacatggaaacgagcagctggacggtgcctccactggttcgagatagcttctccatgattggttctgctattgggggtacagctggagcattttatggtttcaaccacactatgccttttgttcgacggtacataaaagggccaatgtggatgcattttcttgttggtgcacctccagttattgtcttctcttctgcatgtgctgggttagcaggtgggacaataccagcgcttgcacagctggtatcatcatcctatcactcagccacagcgtcgtcctttgcccacacaacttctcgtgatgaaatgcataaggccagaagctcctcgacattgtgatctacagtggcagcaaattgttaactggaatcctaactatccaaaacaccatatactattataaatgtgcatgtgttaccacatatcatctgttttatgaggaatgctcttgtaaatggtaaaactttcccctgtggaatagtgcttatatatgttcccaattttgctatttatcaccatgcacaggctgttatttttgttatggtgtcgcaataagcctggagtgttgcgaattgtgatctgctttaaccttcaggatgccattttcgtttgcaatataaaaaaaaaaaaaaatttgctctaaaaaaaaaaaaaaaaaactcgagactagttctctctcctcgtgc

SEQ ID NO: 88848 - DNA, 544 bp, Oryza sativa
  Clone ID: PAT_MRT4530_8765C.1
ccgagaaccgcgtcatgggtgaccgtcaccgaaggtctgtcgacacgacggcgacatcctcaaccatcgggcacatgccagtcgttgatgcctcgcatcatctgcctcaaccatcctgggccaagacgatagccactcgggacctaaggtagctccaaggtcaaggcgcattgcgggggattgaacagcttgcacgctggacaggcgaatcggggatttcttttgttattttgtggaatttctagcgtgcggataccctcgttctggaattcagactgtaccatgctatagtggtattttttctggccaagccggcataacaacgtatgtcagttgaaaagcctgttcaatcataaatttgtggaacagaattaccaggatggctgacatgccaatgatggtgaaagggtccatgtcatccggtcaaaccccatgtgctcttattcaattagcgtcgaacgtttgtttggctttgatggtctactctagtctagtctagaaatgacacatcgcgttcacctgaaaaaaaaaaaaaaaaaaaaaa

SEQ ID NO: 88849 - DNA, 237 bp, Oryza sativa
  Clone ID: PAT_MRT4530_87660C.1
atgggcgaggtcacgaggactaagcgatctgtggcagtggcacctggccacctgaggcccgagcaacggagatcatgccggccggtggacgctggatctttcgcagtgcccgcattgcgccaatgcgccggaactagatccgccgcattggttgctgacactaacatgaccacctctgccttccagatgagggttacagcagcagctcgagaagatgagattgagaatctaaattga

SEQ ID NO: 88850 - DNA, 435 bp, Oryza sativa
  Clone ID: PAT_MRT4530_87661C.1
atgtggagcaagctcgctggaggaaggctgctcgtccgcgacttctcttctcactatgttgcatgcgcggatgggtggcttcctatcctgacgaccaacacacaacggcttacacggatctacctcccaacgaggccattgaccatgacgatgaggtgctccaggaagcccccctccctacactacctcggcctcggccatccgcgtgctccactcgtcctcccctccactacactctgtctccccctccacgggtccacctccggccgcttccctttcacctccttcacggccactgccagccagaaacagctcatccatcccgagctactagctgctcaccatagccacagccgcggccgcggggacaggaacatcaggcggagtggtccgacagcgcgtggtaactatgaccgggtcccaatgttagagtag

SEQ ID NO: 88851 - DNA, 1455 bp, Oryza sativa
  Clone ID: PAT_MRT4530_87662C.1
atggagatgacgacgaccaagaggcagcaggatcatcaggtggagacgatgacgacgaagaagattgatgaagaagatgaagaggtggacgacgacggtcgggcgaagcggagggggacggtgtggacggcggcgtcgcacatcatcacggcggtgatcgggtcaggtgtgctgtcgctggcgtgggcgatcgcgcagctgggctgggtggtgggccccaccgtcatgctcctctttgctgccgtcatctacttcacctccaacctcctcgccgactgctaccgcaccggcgaccccgccaccggcagaaggaactacacctacatggacgccgtcaaggccaacctcggcggtgccaaggtgaaggtttgcggatgcattcagtacctcaaccttttgggagtggccatcggttacaccatcgccgcctccattagcatgatggcgatccagcgttccaactgcttccacgcgagaggagagcaggatccatgccacgcctccagcaacgtgtacatgatcatgttcggcatcgtccaggtgttcttctcccagatccccgacttcgaccaagtctggtggctctccatcctcgccgccgtcatgtccttcacctactccgccgtcggcctcgccctcggcgccgcccaggtcgcccagaaccgcacgttcgccggcagcgccatgggcgtcgccgtgggcttcgtcaccaagaccggcgacgtcgtcacccccgcgcagaaggtgtggcgcaacctgcaggcgctgggggacatcgccttcgcctactcctactccatcatcctcatcgagatccaggacacgctgcggtcgccgccggcggaggcgaggacgatgcggaaggcgacggggatcagcgtggtggtgacgagcgtgttctacctgctgtgcggatgcatggggtacgcggcgttcggcgacgacgcgccggggaacctcctcaccggcttcggcttctacaagccctactggctgctggacgtggccaacatggcgatcgtggtacacctggtgggggcgtaccaggtgtactgccagccgctcttcgccttcgtggagaggagggcggagcggcggtggcccaacggcctccccggcggcgactacgacctggggtggataaaggtgagcgtgttcaggttggcgtggcggacgtgcttcgtggcggtgacgacggtggtggcgatgctgctgcccttcttcaacgacgtggtgggcatcctgggggcgctcggcttctggccgctcaccgtctacttccccgtcgagatgtacatcgcccaccgccgcatccggaggtggacaaccacctgggtcggcctgcaggcgctcagcctcgcctgccttctcgtctcgctcgccgccgccgtcggctccatcgccggcgtcctgctcgacctcaagtcctaccgtccattccgctccacctactaa

SEQ ID NO: 88852 - DNA, 471 bp, Oryza sativa
  Clone ID: PAT_MRT4530_87663C.1
atggaaccaccaccaccttgcaacttcggccgccgacgcaccaaccaccgccgccaccaccaccaccttgtcaccgcggccggcaccaccgtgcttgtcaccaagtcgccgccatggaccgaagcacatcccaaggtgctgtcattttatgtgaccggtcagaccgggaattgtgtgctggtcagaccggcggtgcggcaggcgacttcggcggtcagaccggttgatctataccggtcagactggcggcatccgagcggtcagaccggcggcatccgagcggatgagaaaaaccttttacgatccttcaattggtatcagagactggctagttcaatatctctggtccaagggacacagtatgtgaaggcccgatggaccgtgggtgcctgcgagatccgtatacctaaggaactgttagtgtacggtgaacagctgagggacaccaatgtgtctcacctcattggctag

SEQ ID NO: 88853 - DNA, 352 bp, Oryza sativa
  Clone ID: PAT_MRT4530_87664C.1
caagcacgttcacgcgccgtccggctcgctggacttgacgtgtggcgccggccggcggccgcgcggctgctcgatcgcgggatcgatccgttcgttcatggaggcaggccgaacccggtctgaccttagcttggccgcggcggcttctgctcctgacgccgtgacgcgtgcacactcttcggcaataatgagcctccgagtctccgacgtgtggccaggaggagagaaaaccgtagcgttcagagacggcacccggctcgccgcaaagcgtatacagcttcacgggacgcggcacatcaacctgttcagtggcgcgactccacgggcggcacgcgcgcgatacctgcgctga

SEQ ID NO: 88854 - DNA, 232 bp, Oryza sativa
  Clone ID: PAT_MRT4530_87665C.1
acgggatcccttccatggttgtgatggtcgacaaattaataaaatttgctttaaatccaaatttggggggattttagccggagcttggttttaacatttcctaacccaacgataatggaggacctttaacaataaaaccgcccgaaaagggagggaagagatatttacttatgggttaaaagcagaggcctttgaaatggtccttaaccaaactgtaaaataaaaattttta

SEQ ID NO: 88855 - DNA, 511 bp, Oryza sativa
  Clone ID: PAT_MRT4530_87666C.1
ttcagagctcccatgcctgtgggatgtggaggtgaggaaacaccacatgtgtctgtgtgtgtgtgctcatacgactcctgcttcttcttcttctcctttttgtgggggaggaggggtgtcatgttgtgctgcttcttgtgagcttgcagctgtgctgtgctgttccaggttgcatgctgcaatgtatagtaggagtaggaggaggagcaccagtgtgtgtgctgagctgtgctgtgctgcggctgccttctcctttagccgaggagaggggattatcttaaagattccagcttttgttattaatctcctcttcttctggcccactgctccccccctccccttcctaccaccccctatttctgggggaaatgccgggggcctcgtgatttcatctttttctttctcctagcaagcactctctcgttcttgttcttcttccactttttggagagtggcgatgtggccgggcttgatctctcgaatccgtacgtgtttctttgatcccgaatcg

SEQ ID NO: 88856 - DNA, 635 bp, Oryza sativa
  Clone ID: PAT_MRT4530_87667C.1
gcacgagggcggcacggggctgcgttgggccttttgcggtgccacggagccgccctcttggccgccttctcgaggggtggctcgggggccctgtgtagtgctggtttggtggacagtcccagctgaaaaggtcggccagcggccaattgcagcgtgaagggacatgagatctcaccgtgttcctactccaatttgtgatgatggtgatggcaagagcataagagaatggtgcaaataaagctaggctaggttcttacccatggatacgcctacatcatctatgctaaaattcactccgctaagccagaagcgttttagacagccgtagcaagcttcccctgcgtgctaactccacctatggcataaaaaacaactcgatgatcatcacttcagacatgcagttctcagggaacaagctcctgcaaaaaacaaaacagttatcgtatctaacagctcaactgaaggcttccttttaccatttcatatttacaattatccatatatgtgtttatctgtttatgtttacgtttaactccatgtgtctatagacagctctacttaaaactaactgaatgttaacgcctctgcctccgcacctcacactgacacggaatttcccgccccgttcctttgtc

SEQ ID NO: 88857 - DNA, 1786 bp, Oryza sativa
  Clone ID: PAT_MRT4530_87668C.1
ggtctcgagaatcgggatcatatcatgcaccacatatagcgcatactaatacagggttacaaaacatgtttttgttcacgcgcaatgcaaccacagaatgccgtgaaaaaaaacaacgaataaaacgtcatgattggcctcatatggccaatacagaaacgtttctaaaactacccttgctattcctgggactgactatgagcaaattaagtttaatatgcaccttgagagaatcgtttatagggatatatattgctgacggccataaaaatgtggtcgagaatcaagaatactcctaaaccatgtgtcatcataacatttccatgttgagattcaatagccaccggcaaagaactgcctccctgccgttgttgaaaacttgaagttgattctctactggcagtctgtcactcaagctatcagcactcgacagcatgtttactatacaggcttctctgtccatggtttgcttctcgaatgatgctgcaaaaagagtttgtgttttatagaacgggaattttctgtaccagtagcagcagtctttagggtggtattgagcattgccacccagggtctccttctccatacagccatacatgtgtgttccttcaaccatcaactgccagataagagcaccactacccgcctgcagctttcttgccgaatcatagattttatcataaacaattcttagaataatgtctctatcaactgtgctgttactgtttgcatctgaatgctggaggtagcctacttctgtaaataggacaggttttttcaagatttgttcactgtcattcaggtgtgaatcaacccaattggaaagatatctgactttttcttccaagcttgcccttggtaaccagctatcgggataagcatgaacagaagcaaaatcaatatgttcaactgctgagttttgtatgaagtctgagcaaagtgaagctgcccattccccgggattaacacccagtctttcagctattccaggaccataaaacccttcagttccaactgtaactagatgattagtgtccaaactttttacatatgcagccatctctgcaatccaagcctgaaggtaggggccagatgagttggacacacacctaggctcattcatgagttcccaagcaaatatagcaggttcatcagagtatcttattcgactgtaagagtttcttctggtcaatattgccttcacataatccttgtagtaacgcttaatagttggatgtgaataaaaagaatcagttgaatttgtcatattagctccagctgcttgtgcccactggacatattgagccttccctccaaggttatcgaggttgttcacaaggcaaagaatcaatctaatatgatttctccgggcttcatatatgacataatccaatacctggaagacggcctcgctgaagcggccgggggagatctggagcgcgccggggccgccgtcgctgaacgcccaggtgcggcagacggagagccccatccggcgtccccggcgcagcatctcggcggcgagcgccggggaccgcgcggggaggagccagtaggagttccagccgttgacgtagagcggcgaccccgtgtcggcgtcgacgaagtgggtgccgcggcgcgccgcgaagggcatccgcggctggagccacggcaccggcagcttgacccaccccccaccaccgcccccgccgccgtcgtgggtcgtcgggaaccaggtgaggtagacgacggcgaggaggaggaggaggccgaggaggctgtacagccgcctctcctgccgcat

SEQ ID NO: 88858 - DNA, 1434 bp, Oryza sativa
  Clone ID: PAT_MRT4530_87669C.1
atggcgcccgaggagggtggccccggcggtatcggcggcgagggtggccccggaggggatggcggcccccacggtatcggtggcagcggcggggacggtggttgcggcggggtcggcggcctcggcaggaaaggtggccgcgggggtcacggtggccgcggcgggaacggcggcttcggcggtggtgacggcggccgcagtggggacggcggggaaggtagaatttttgagaaacaggagaagaaaataagccaatgttgtatttctgtttctatggttgaaattaaacaagcagcacagcatcaggccaatctatttcttttgatgatggataaaagtattggtggctcaagtgctcgcgctggtgaatctgaagaaatatttgggacaaatcagtgggcttttggtttttctgccgctttgcattcttttgatgttcctccgaacccccagttcaacatgcatggctcgtcccaaatgtcatgcccacctataaatgagcaacctagccaggggttctccattgacaacaacattggctctgaggaccctccatcattgaaatcacagagggctgcaaagaagaagaaggtgtccaggagaggaactgcattcaccaaagaggaggacatggtggtgtgttcggcatttctgaatattagcaaagacgctattacaggtgtgaatcaaacttcaggtggttattacaagaggatgcatgattatttcaatgagcacaaacctgaagggtccaaccgtagccagattgctattcagcacagaaggtttaatctatattcatatttgcagatagatgatgttgtacaaatgtacgagaagacagaaccttttaccttcatgcattgttggaaactacttcacaacgaggccaaatggaacaataagtttcttgagctaaacaactctacatcacctgatcgaatggaacctccttcaactcaaggccatactgtagccggccatgcagaatctgggaatgagaatatagacacagcacggcctgagggtagggatagtgcgaagaggcgtagatcgaagagctatgcagagacatcatcatctagtacagcagttgaagtcctccagcggttgcaggagaaatcagagaagaccgaactgaagcaagaccagcagatggttgaaatccttagtaggaaggacggaaaaattaaaattcagagggatcttttcaaccttcagaagaagcatatgaagatgagtgtgaagcagcacaagaaggaaaatgagattagggagaagcagactgaggctcaactgatgtcagctgagtctagtattatgtccattgacattgagaaggtccccccttatctgaagaactattatctaggcatgcaacgacaaatcatggagcgcagaggattcagtagtcccttgaacaacggagactaa

SEQ ID NO: 88859 - DNA, 471 bp, Oryza sativa
  Clone ID: PAT_MRT4530_8766C.1
atggcagctcatggcggtggagacctcgaagctgcagctgcagcgcagtaccatgcatgccgtcgagggcgccgatccgcacgaacacgaagcgcctggtggtcgtcgttcggtcgtcgttgttcgcgagattgcctcctgtggacactggccttgctggggctaaccgtgctgctgctatccacgaggctggccacgacgacgacgctgcgcgggaggttccgtaaccacgacctcggcctcggcgccttctccgtgcacctcgccggctacgagggaacgcctaccgctgctcgagagagaggaagagtgagcgtgggcaaggaggggtggcgcgcggcggctgggagtggagggaggcggcggcgccgccgcgagcactcgccgtcggagttgatagatgagctccctccgccaccttcctccgtcgccgtcgctaccacgctcaccacaggacaccctaaccgctag

SEQ ID NO: 88860 - DNA, 2510 bp, Oryza sativa
  Clone ID: PAT_MRT4530_87670C.1
cttccgaacaattgatattgcacagacagtatggtacaccaacagtcacaacacacattcttctctgtttaacccaaacgccgtttcatattgcatcagatgcccccacattattatcgattttactatgcatctggtgatctggaacttatgaagaaatctagattattagctacaactaacagcctcagtttttccaaggctgttttacttatagtctcttcaagctcttcttcctcgcatcaatcttcttcttctcaaccggagctttcacagcatgtagcccatccttcttgggtactgctgatgctcccaaggcaggatcagaaggagcagcattctgatcctgcaaattagagccaaatgctttatttgcagtggaggtagataatgctgctggacccaatggtgtgttcttgctgacagcattgtttgactgatccacatttagagctgtggttgattcagaaatagtcccgctcttggtcttattcttgggtttaagtgcatggatgctagtgtatagccttgcatgccgtgcatactcctcatagttctcaagcaacaatttcccagcttgctcattaagggcagattcaggaaatggttctatcagaaggcatctcactaccagcagaacatgtcttaatccaaggctaggattccaatccttcttcagtgtgttaacacatatttcaccactagttgctatatttggatggaaaatttttgtcaagaagaatcctttaggaggagactgagggaagtcacgagacaacaatagcttcatacggaatactccattctcatatggagttccagcaggtccctcaatatcagcaaaaatggtggtgaagtcatcgtcattaacaataactttaatcccttctggaggtgactcatcaagactcttcagttccttagccaattgcctaacgacatttggtgggaggttctcgttggttgccatggaagcaataacagcagataggtaattgtttggcaacttcacttggaatttgatttctacagtgtgatcaatcgccaaaacaagcctgcgctaaaagggcaaagggaagcgtaccacgcggagtcccgccgctaaaatgccgcctccgggtgacccgcccacgagatcgacgcagcagcacgcaaccagccaacggtacgacgatcgggggggaacggcggcgccgggcgattcccttgcagcagcggcggaggcggcggccgggcaattggggcgggcgacgggcaggatgaggaagctccgcgccggagagaggatccccggaggtgggcggccgccggcgagaggccgcgaggggggagggggaggaaaccctaggggcgtggaggaggcgctcttcgatttggggggagaagggggggaggaggaggaggaagaggggatgatggataaaagtattggtggctcaagtgctcgcgctagcgaatctgaagaaatatttgggacagatcagtgggcttttgggttttctgccgctttgcattcttttgatgttcctccgaacccccagttcaacatgcatggctcgtcccaaatgtcatgcccacctataaatgagcaacctagccaggggctctccattgacaacaacattggctctgaggaccctccatcattgaaatcacagagggctgcaaagaagaagaaggtgtccaggagaggaattgcattcaccaaagaggaggacatggtggtgtgttcagcatttctgaatattagcaaagaccctattacaggtgtgaatcaaacttcaagtggttattacaagaggatgcgtgattatttcaatgagcacaaacctgaagggtccaaccgtagccagattgctattcagcacaggtgggcattgattcagaaagcgataaacaagttctgtgggcacaaagcagctgttgataggctaaatgagagcggaaaaaatgagcaggatcgggccaaatggaacaataagtttcttgagctaaacaactctacatcacctgatcgaatggaacctccttcaactcaaggccatactgtagccggccatgcagaatctgggaatgagaatatagacacaacacggcctgagggtagggatagtgcgaagaggcgtagattgaagagctatgcagagacatcatcatctagtacaacagttgaagtcctccagcggttgcaggagaaatcagagaagaccgaactgaagcaagaccagcagatggttgaaatccttagtaggaaggacgaaaaaattaaaattcagagggatcttttcaaccttcagaagaagcatatgaagatgagtgtgaagcagcacaagaaggaaaatgagattagggagaagcagactgaggctcaactgatgtcagctgagtctagtattatgtccattgacattgagaaggtccccccttatctgaagaactattatctaggcatgcaacgacaaatcatggagcgcagaggattcagtagtcccttgaacaacggagactaa

SEQ ID NO: 88861 - DNA, 205 bp, Oryza sativa
  Clone ID: PAT_MRT4530_87671C.1
cacgcgtccgcgcacatctttttctctctcagctttcacagtctcactgcattaatggacgcggccaccatggggctgggcttcctggtgatgaccctcgcggctccttcaaccttctacgcgctctttggagaggcgcggatcaccatgcgcaagaccgctgtgaagcttatgctggaggagacctttgggagcccgagaaacg

SEQ ID NO: 88862 - DNA, 409 bp, Oryza sativa
  Clone ID: PAT_MRT4530_87672C.1
ggccgcccctttttttttttttttttggtttttttttttaaggatagaagagaggctctatcatgattagacgaaagactggacagagcatagccacaaaacaatggcttgcaatttatttattaagtaattactttatccgcaagccaacctaagaggaatctgccgcattataaacgccttgttagctcttgcattggattggagtggaagcaccgaactcatctccaatattatgcttgaaccactgagcatcttctgttgcgatgcgataggcattggctataccatcatttggccaagcacggaagaaggaactatttcctgcaacgtggcttaccatagagttacgattgagcttgaatgcaatgtaaacacaaccttatctttgggccgtctttacaactgc

SEQ ID NO: 88863 - DNA, 1450 bp, Oryza sativa
  Clone ID: PAT_MRT4530_87673C.1
cctgcaccccctgacgaagcttacgctgaggaattgtccccctggcgtcgacgatgccggtcgcgctcaccattcttgtcctggaggacctgccgaggtcgacgcagggtttcgtctacccccgcctcttctcctcctcgggcttcccgcacctgaagaagctccacctcaagaaatgccactgcagggacctcgccctggtggtggacgcgccaccgccatcgtcggcggcggcggcggcgccgatcacggagctcgtcgtcgagcgctgcttgttcctcggcatccagcggtggtcctgttcagggacgtcccgcgcctccggcgagtccacctcagcttctccctcgactccagcaccgtcgacgacgcccagcaccctctccccgggccggacaagtacaagctcgactggcacgtccgcagcgagcgcatggccagcctcgtcgtccggttcaccgggccggagaggtggatcctcccgtggcgcgtcagcacgcggctgcgcagcctcaggcggctcctcgtcgccgatgtgccgcccacctgggacgtctcgtggccgcgcctcctcctgcaggccgcgccgtccctggagtaagtggtgaaggtgtgcaaggcgctacggcaggtggagctgctccggcacggggaggttaggtacgatgggctgtgggagtgggaggtggtgaggcagcaggaagacctatccctcccttagctttagccgatccccctccccctccggcttcgccaccgcaaatcgtgcccaattcaacacaccacgctgcctcctccgcctccccatcatcgcgccagcggcgtggcaagactcaaaatctcatacacatccgcttccctaccttctcctgctcctcctcctgcacctcaagaaccgccatagcaaggacctcgccctagtggtggacgcattgctgtcagtgtcagcggtggcgatgctgcaggggtggagggctcgggtgtggcgctcgccttaccttgctcctcccgcgagcaccccccccccccccccgcgcgtcctccttcccaggacgccacaccagcgccatacggaggcgagggcggtgcaaccggagacacggtcgatggtgaaggtgcggcggcggaggcggccatggcttgtgtcagcaccgtgacagcgacgcatcgccagctaaccaccgcctgcgccttggtcctctcgttcgccgtctttgtctgcgaccacagctccggcgtcgttctcccccggaagaggttgtggtggtggcggtggcggcagaggctatggtggtggtggctctctatctccgccgccccaccttcgctgtcgaccgcgcggccctcgcctccgcctccatgccactggccgcgccccgccgcgtcaagcggcggcgattccgtcgggcgaagcggcggcgtttccgtcgggaggagcggcggcgattcc

SEQ ID NO: 88864 - DNA, 369 bp, Oryza sativa
  Clone ID: PAT_MRT4530_87674C.1
cacgagtgtgcatgcggagaaatacggtggcgcgggagaggggttgacgcggcggggcgcggccagtggcatggaggcggaggcgagggccgcgcggtcgacagcgaaggtggggcggcggagatagagagccaccaccaccatagcctctgccgccaccgccaccaccacaacctcttccgggggagaacgacgccggagctgtggtcgcagacaaagacggcgaacgagaggaccaaggcgcaggccaccaccacgcacaacgccatggaccacgctctccgccccatggacttccggcagccaatgcccgtcgccccaccgacggcacggtggttagctggcgatgcgtcgctgtcacggtgctga

SEQ ID NO: 88865 - DNA, 720 bp, Oryza sativa
  Clone ID: PAT_MRT4530_87675C.1
gaaatgcctgcataatatttggagaatcagaatactggcttggttctcaaaggagaaataatagcgctcagtatgttcattgtcgatcatctggggaaaggatcatcatattctccatattaagcagcaccaaataaattttcaccacaacatgctaaaagaatcaactcatgcattaaaattggaggatagtatgttcattgtctatcatctgggaacaggatcatcatatcctccagtacggacttatccaaaactaaaatgtagacaacagcacaacaataacatacaggaatcaagtacaatgaacacagcaaataaaattttgcaaaaaaaacagcagaaagatccaggagggaaaaaatgaaacaagaaaaatgtggaggaagatgatcagatagagctaatacaatttgaggccatcatggcggccaatcaaaccaatagggaatcaaatttgatcatcatatcatcaatccccagcgttttttcttttcttcgaaagactaaaagaacaagggctaatagaggaaaactttttaaaagaaaataaaagttaatcgaggaaaaaaaaagaaggcagaagatttgtagatgcatcagatctccaaggtgaaaaagggtgtgacatcacagagatgcctcagacgcaaattacccattaaatcttgtgcctcctcatctgcatcatccatcatcctcaagcccaaacaaaatccc

SEQ ID NO: 88866 - DNA, 366 bp, Oryza sativa
  Clone ID: PAT_MRT4530_87676C.1
atgaccgacgccgggggaggaactgatggagaagagccggagtcggaggagagggccgccgctcgcgaccggagtgacgacgagagcagcgccgcgccgcgcctcgccgccgccagagctaggagagtcgggcagaaccgacacgacgccggcaccgagcagcccaatcggcagcggagcggctcgaagcagccggcggtggaggcgaaggcgcgccggctggaggcgacgcccggcggatctagtggcgggggaccacgacaagcggcggcgcagaatgggcacggcaacgaggcgacgcagttgcggcgggcggaggtagctccgagcgacggcgcacgatgccagtgctgggcgcagccctag

SEQ ID NO: 88867 - DNA, 526 bp, Oryza sativa
  Clone ID: PAT_MRT4530_87678C.1
atggcgcggggcggcggcgacgacgacgcgcggggcgcggcggcgggctcccctcccccctccctcccagatctggtcagaggagggaggagggagatcggcggcggcgactacggtggctacggcgcggggcggtggcgacaacaacgcgcggggccgcggcggcggctcccctccccctccctcccagatctggtcggaggagggaggggggaggccagcggcggcgactacggcgcggggtggcggcagcggcgacgacgacgcctggcgctgctcccctcccctcccctcctgaccggcgcggcgacgctggaggaggacgagagtgtaacctccccaactccgattacatcgtcggccaccgtctctcactccgattatatgatggcattcacttactgccccgccttctcactaccggccaccgcctataattccagctgcgccatccggacaccaccttcacgcaagcgcgccaatcagcaaggcaacgaggacaatgaggttctgcccgcggcgacca

SEQ ID NO: 88868 - DNA, 1184 bp, Oryza sativa
  unsure (1)..(1184): unsure at all n locations
  Clone ID: PAT_MRT4530_87679C.1
atggagttcatcgacgacgactgggactaccagccacgcgcgcgagtcatccactcccgcagcaacgctaactccaacggtgccaccaccgcctcgtcgtcccaaccgacccgctccctcccccacaccgccgcctgcgccgccgcggccgtggcgctcctcgccgcggcgtactacctcctcccggactaccagagctcgagctcgaacccgacgcctccgcccccgaagccctcagatccgatcgcgcctccgccgccgcgacacgcggcggctgcggctgcggctgcggcgacggccgtgtcggatggcggcgaggcggtggaggacgccggcgagtggaccgaccaagagatggacatcctccgccgccagatggtgaagcacccggcgggtgagccgcagcggtgggagaagattgccgcggcgttcggcggccgccgcacgccggagagcgtaatccgcgcggcgaagtccggcggcggcgctgctgccgcgggggcctcgttcgaccagttcctccgcaagcgcaagccgctcgacccgaggtccgaggcgaccgacgcaggaagtggcaatgccggaggaggaggaggggagagtggtgatgggtcttggagcgccggcgatgaccgggcattgctcaacgcgctcaaggagttccccaaggacacggcgatgaggtgggagaaggtggcggtggcggtgcccgggaagacgaaggcagcttgcatgaagagggtcaccgagctcaagcgcgatttccggagcagcaaggcagcatcggaggcagctccatagctgcaaatgctacctagttgcctgcaattcttctttgagagtaaggttttagacagagatttaccatgatgaaacgagaaacgaaaagccatttgctccggggtgatgccaaatgaaggagacaactgaattatagaacagatggtgtacttttattgttttgagaaaggtcaggaaaaaaatccttgattcttgaagatactgggacacacgaaaacaaacagattgccagattgtaaaagaaattgtagccccttgtttggttgtagtgtcactcaagcctccatccaacatgtgttaacattacgtgactgtttctgctcatcttttgatanggctaatacgatacacactgttctcttccaaaaaaaaaaaaaaaaaaa

SEQ ID NO: 88869 - DNA, 1143 bp, Oryza sativa
  Clone ID: PAT_MRT4530_8767C.1
gacgtgccatcgtcgtcacacgcgtacggcgtaccggcaccttcgatggcggccaccaagcccccgagctgctccacccgcctcagatctccggccaccaccgccgcctgcttcctcccggcgtccctccttctcttcctcctcctcctcctcctccgccgccctcccatgggctccttccctcccacaattccaggtggctccgtgtcgtcgcggcgggcggagctgtacgggaggatggcgagggacctcgacgagcgcggcgcggcgttcttggacggcggcgagacgtcgcagtcgctcacgctgtcggagctcttcgacaccagggacggcgccgtcgtgcccatgctcaaggctgccaacccgccggtgcgcgcgaatgtgctctacctggatcctgagtttgcttccgtgatatcgaaggctgtgaaggaagtgtttcttccttattttaatcaagctatctggttccaaaatatgagcatctaccacttcagtatgtttcacacgtcgcatcacctggaaccaattgtagcaactgaagatgagattgaagctgaagtggatgctgtaaaaagagtcaccgacgatgtttgtccacttaaaattatcttggatcaagtggttttgacatcaactggagtgcttcttggcctgtggcaggttgaatctggtactgatcccgctgatatccgctcaagattgagagaagctcttcctcgtgcaccccaaaagcagctttatgatcctgttatgcttcacacctctttggcacgtattctgggacatccaaagctcccacaagagggtaatgcacagtctcttgatcatgtcaagttcttccatgacctggttgcacaggttaattcaaaaatccgtggcttccaggccacggtaaaagagctatggtttgtagaagagtatgatgtacttgcgctggcattgaacggaaagatgaagaaaatcgtatgcaaccatatgtatgtaatttctttcgctgtgaagcattcacaaaatcttgaatacgtaaatccgtgtcaacctggactcacaatggtagttaaaaaacgaactttcacaattgttggatctcaaaaacaacatgacgcccatgatctcaatcaggttaacaagacttga

SEQ ID NO: 88870 - DNA, 307 bp, Oryza sativa
  Clone ID: PAT_MRT4530_87680C.1
aggcggagatgcctacggccaacctggagcaggcgttccctacgtacgacgcgaacggtgacgggaagatctcggcggaggatccggcctccgccctgaaggcacttgcggcgcccctcggtcctaccgaggcgcgcctcatgatggacgagattgactccgaccgtaacggattcgtcgacctctccaatttcaccgcctctcactgaactcacacgccggcgcacgatggccaaggcatctacgcctatgaccaagatgccatgttcaacgcgcaactgatgtaggcgttccggatgtacgacac

SEQ ID NO: 88871 - DNA, 357 bp, Oryza sativa
  Clone ID: PAT_MRT4530_87681C.1
atgaggcagctcatccggcggctctcccgcgtcggcgactcctccgccgccgccgcctcgtcgtcgtcgccggggaagcggcggggcgcagggacgaagaagaaggcggcggcggcgggggtgccgccggaggggcacgtgccggtggacgtcggggaggaaggggaggaggcgacggagcggttcctcgtgcgggccgagctgctggggcggccggcgctggccgagctgctgggccgcgccgcgcaggagtacggctacgaccaccgcggcccgctccgcatcccctgctcccccgccgccttccgccgcgcgctcgccggcgccggggatggagaccacgacgacgacggctag

SEQ ID NO: 88872 - DNA, 314 bp, Oryza sativa
  unsure (1)..(314): unsure at all n locations
  Clone ID: PAT_MRT4530_87682C.1
gcgcaaactggtttgaantcacttaaattccatgtgaattaattaaaggaaaattttccctccctgggcctgatcacaatgtcttttgaataactccttaatgaaattggtggcctgtgataattccatatccttcaaattgttttagctcttcctcttgttgggatagcatcctgtcatatactgtttgataatttcacttctgccatttctggtcatcactattgtttctacatcctgtataatgccactgatatcctcatccctgatgtccttctgagaatctccatcccactgtattcaaacttaaatcc

SEQ ID NO: 88873 - DNA, 403 bp, Oryza sativa
  unsure (1)..(403): unsure at all n locations
  Clone ID: PAT_MRT4530_87683C.1
tnttcacaagagaggagctccgaggaggaggaggagagtacagcaagttnttcagaagagaagggttcagaggagtaagaggtgctgatcatgtgtgattattttcagttgttggggagttcaattcttttcagtgtgataggggagatcaggagttgtgttctttcgatttgatgattgtcttaggatgaacaatatgatgttcggtagcaggacttagcatttccatagattcaagaagcatatactttgcatgtctcatggtttcagctgtgcttgttgatcatttctcatagccataaacatgcagtttgcaacagattacaaatatttnttcaacttgtaatgctgaaacaagctgcccatgaacatacaagatcagattttcaaaaaaaaaaaaaaa

SEQ ID NO: 88874 - DNA, 306 bp, Oryza sativa
  Clone ID: PAT_MRT4530_87684C.1
atggatgtggcggtggagaccgtagttgcggaggagacagtggagatggtggagtccgaggattctcaagctacagcgtcaacgaagcgggcgtgctgccctttccacgccggcaggatctggcatcattacagcaacaacttcatgcggatggtgggaaccaacaagtggtgcaggtgcgtcgtgcacctggagagcaacaagtcgatgcggggcccgacggcgatgctcgaccaccgcacgcacgacgaggcccgatggcgatgtgtaggcatgctgcaggatgacccagagatgtggccttga

SEQ ID NO: 88875 - DNA, 351 bp, Oryza sativa
  Clone ID: PAT_MRT4530_87685C.1
atgagaaatgtccaggatgttttcctcaacatgaccagacgaagtgcaggacttagtagctctgtgcctccccaaggtggctctggtgcatccaaaaggcatacggacactcatcatgaagtgacaaaccttccaggatcgaaaggttttctgacacctcggaacaacaaccagcagccctacaatggtcaaggtgctcacagcctcacatacgggttcaaaacatttgccacaaaagcaagggcaggtccaaattggttgtataagccaagaaccaaaatgagcagggattatcaacacttattcattgttcattcctctgtgaagattacactgtacatatgtatatag

SEQ ID NO: 88876 - DNA, 732 bp, Oryza sativa
  Clone ID: PAT_MRT4530_87686C.1
gtgaaagcactacaccacaaatactatctcaacacactttatataccttcctcctcaccaagacccctcgatccatctggtccctccccgggccgctggtccaacacatatgcatgattaaacagcagcaagccagatctaaggagaatacctagctagctgcatcgatccatcttcttccacctcgatgtatccagatctcatcaatccggctaggtagcttgttcatcccaagaaatcatgagctgcagaagtgagattcatgagctatagagaagtgagatccacacatatatacatatatatgagatgatggagttgttccctcggcagctggacctgtccctccatatcagcacgcccagctgcttctcgccgtcgccggcgtcggcatcgacaaccgctagcagctggccgtggacgacgaagcagcagctgcctgaagaagaagaagccgctgccacgacgtcgacgacgacatcctcaagatcagctcctcccctgctactgtgtaactccgatgtgttctctactaggggctccagtaccaccaacaccaaccaccacgccgacggcggccttgcgaattcgcagcagctcaaggcggcggcgaggcagccgatacacggaatcccggtgtaccatggtcaccagcagcagcaacggcgacagttgcatcatccgtacgacgtggtgggaaccagacaaagcgacggcggccgtcgcctcttc

SEQ ID NO: 88877 - DNA, 2323 bp, Oryza sativa
  Clone ID: PAT_MRT4530_87687C.1
atggcgagcatgaatgatcaacacggcggcgccaccgcccacgtcctgctcgtgccgttgccggcgcagggccacatgaacccgatgctccagttcggccgccgcctcgcctaccacggcctccgccccaccctcgtcgccacccgctacgtgctctccacgagccctcctcccggcgaccccttccgcgtcgccgccttctccgacggcttcgacgccggcggcatggcctcctgccccgaccccgtcgagtactgccgccgcctcgaggccgtcgggtcggagacgctggcgcgggtcatcgacgccgaggcgcgcgtggggagggccgcgaccgtgctcgtctacgacccccacatggcgtgggtgccgcgcgtggcgcgcgccgccggcgtccccacggccgcgttcctgtcgcagccgtgcgccgtggacgcgatctacggcgaggtgtgggccggccgcgttccgctgccgatggacgacgggggcgacctccggcggcgcggggtgctcagcgtcgacctcgcgacggcggacttgccgccattcgtggcggcgccggagctgtacccgaaatacctcgacgtctcgatccggcaattcgaggacctgctcgacgccgacgacgtgttcgtcaactcgttcaacgacctcgagccgatggaggccgagcacatggagtcgacatggcgagccaagaccgtcggcccgacgttgccgtccttcttcctcgacgacggccggctgccggcgaacaagaaccacggcatcgacatcttcaccggtgatgcgccgtgcatggaatggctggataagcaggcaccctgctcggttgttcttgcctcctatggcacggtctactctctcgacggcgccgagctcgaggagctcggcaatggcctctgcaattccggcaagccattcctctgggtggtgaggtcgagcgaggggcacaagttatctgaagagcttcgtggaaagtgcaaggagaaggggttaattgtgtcctggtgtccccagcttgaggtcctgaaacataaggcaacaggttgtttcttgacgcattgtggatggaactcgacgatggaagcaattgctacggcggtgccaatggttgcgatgcctcagtcagcggaccaaccgactatagcgaagtacgtggaaaccgcatgggagattggtgtgagggcacaactagatgagaaaggctctgtcacgaaggaggaggtggagatatccatcaagaaagtgatggatgggaagagggcagtggagtacaagaggaatgcagctaagtggatgcaaaaagccaaggaagcagcacaaggccacaccaacccgatgctccagttcgggcgccgcctcgcgtaccacggcctccgccccaccctcgtcaccacgcggtacgtgctctccaccacgccgccaccgggggaccccttccgcgtggccgccatctccgacggcttcgacgacgacgccggctgcatggccgcgcccccggactacggggagtaccaccgcagccttgaggctcacggtgcacggacgctggcggagctgctcgtctccgaggcccgtgcggggcggccggcgcgcgtgctggtgtacgacccgcacctgccgtgggcgcgccgcgtggcgcgcgacgacggcgtgggcgccgccgcgttcatgccgcagccctgcgccgtcgacctcatctacggggaggtgtgcgccgggcgcctcgcgctgccggtgacgccggcggacgtgagcggcctgtacacgcggggcgcgctcggcgtcgagctcgggcacgacgacctgccaccgttcgtcgcgacgccagagctgacaccggcgttctgtgagcagtcggtggcgcagttcgccgggctggaggacgccgacgacgtgctcgtcaactccttctccgacctcgagccaaaggaggcagcatacatggaggcgacatggcgcgcgaagacggtcggcccgttgttgccgtcgttctatatcggcgacggcccgctgccgtcgaacacggcgtacgggttcaacctcttcacgagcaccgtgccgtgcatggaatggctggacaagcagcctcctcgctctgtcgtgtttgtgtcgtatgggactttctccagctacgacgcagccaagctcgaggaggtcggcaatggcctttgcaattcaggcaagccattcctttgggttgtgaggtccaatgaggagcacaagttatctcgagaacttcgagagaagtgtgggaagagaggactaattgttcccttttgtccccagctggaggtgcttgctcacaaggccacag

SEQ ID NO: 88878 - DNA, 374 bp, Oryza sativa
  Clone ID: PAT_MRT4530_87688C.1
ttggttttttttttttttttttttttttttttttttttttttttttttttttttttttttttcccaaaaaaaaaggagtcccttcctttaattaacgggataatgaaaaaggggaaaaaaacaattccatgattatcacggggccttttatgggggaaaggggggttggcctggaaaaaaaattggaacaaaccggatcccactttttttaggatttttgaggcatacagaaacaacagggccataatttccccacttaaaataatcccaatttctgagaaaccattttaaaacattcttggggaaaaaaaaaacccaccccattttatcccaaggggaaaaaaaatccccaagccccaagcaatttttccgag

SEQ ID NO: 88879 - DNA, 1841 bp, Oryza sativa
  Clone ID: PAT_MRT4530_87689C.1
ctatctgtcaataccggacactttacctcctagagctgtttttgcggtggtttttgcacacgtggatgacactttggatgccacatcagcgaacaggatgttttgaccaactttttcatgagctgcagcggcagcggcgcggggaaggagcatctccgacaagctgttgcggtcatcggtggaggaggtttgcgcgccaagccgccgaaggagataggagaaagaggaggaggaggagatgggccccggcctgatccaccaccaccgcctcctcgacgccgatgtcggcggcggccggcggggggagcagcgccggcctggtactgacggccgaccccaagccccgcctgcggtggacggccgacctccacgaccgcttcgtcgacgccgttgcccagctcggcgggcccgacaaagcaacacccaaaactatcatgaggaccatgggtgtgaagggtctcaccctttttcacttgaaaagccaccttcagaaatacagattaggaaagcaatctggccaagagatggcagagccatccaaagacgcttcttatattttcgggagatcgtggggacgaggaaatacacgttcccgagggacctaaccaggacgtcgtcgttggtcatgatgcgcgtgatcctagtcgccgagatggaccacgagagaaacttgaatgacccggtcggggtcgtgaggattacctcctctccgagggtcaccagcgatcgcaacatcgactggctactggagatgttgtacaacatagtatctgaggcaactgaatggcttcagcatatctgaccatgatctaacctctgctggtgtcatgttgagctcttcagacaccttgagcccctccatcttccaccagctctctgtcagctcgatcagcctgcacagtcccggaggcaaatcctccccttttgcagctgatgctgacctgttctttcagaaggcgcctgaaaaacgcaagtcatattgagatacagataggtgaagatccatgacctgcttccttctggaaaagccagggggaattctgatgatatcttgcaggacgcccagcaattgtcctgtttctagtagctagactagcactgaacaaggctctcttaccttgatctatttcagttaatctagactgacctttgttaatatcctgtggctagtagtcgtagactgatcaagaacctttatcgatgcgtaagtatcttgtaattcagagtcctagctcccaaattaacacacttcggttatttgtatgcttttaaccccatataattgggaatactgaaagtgcaactcatattacatggatgtctcaaaagattatcaacctatgcggaacgaggcgggcggcggcggacagcaggctgctgtgcgtggggagtagtgcctcggcgtccttcgcggcgacgttgtggccgagacggaggtgggggtggagaagagccgcggctgggggcgacgtcgacgccgccggtacaggcgacgcggcaggacgtgcaggccgccatcgccatggcggtcgagctgcgggcgctccacgccgcggtggtggcggcggcgccggcgccagccgcagcccggcctcccgccggccgcgtcccccgcgctctccaggacggcagcggcagcggtggccaccgttggcgaggactacccggtgtttactccggtgatgatgcttttcttgcatacagtcacattgcatgctcttcttgccgacgaggaagatggcaatgacgaccaccgtcagagtcacctgcggaggtgacgacgcggatgacgcgacgaagacggcgacgtcggcggcggggttcctcccggcgaggtccat

SEQ ID NO: 88880 - DNA, 213 bp, Oryza sativa
  Clone ID: PAT_MRT4530_8768C.1
ggcatggatcggatctgcgccaactcaagaacaggaagggagaaagggctcactggcctcgtcaagaccaaggcgacgatctccgccggcgatcttggtgcaccctttcttacccgctatggagcctgcacggacaagacgacgacatcacagggttttccccctgactcccccaatccccaagctcttggtgtagttgggtttgtgttgtga

SEQ ID NO: 88881 - DNA, 826 bp, Oryza sativa
  Clone ID: PAT_MRT4530_87690C.1
gagcagcaacagcagcagaagaagagaagagcaagaggaggaggaggagatgttccccggcctgatccaccaccaccgcctcctcgacgccgatgtcggcggcggcggcggggggagcagcgccggcctggtactgacggccgaccccaagccccgcctgcggtggacggccgacctccacgaccgcttcgtcgacgccgtcgcccagctcggcgggcccgacaaagcaacacccaaaactatcatgaggacaatgggtgtgaagggtctcaccctttttcacttgaaaagccaccttcagaaatacagattaggaaagcaatctggcaaagagatggcagagcaatcaaaagacgcttcttatattttgggagctcaaagtggaacaaatctatctcctacagttccaactccagatttgaaagagagtcaagaactaaaagaagcactcagagcacagatggaagtgcaacgaaaattgcatgaacaagtggaggtccagaggcatgtacagatccgaatggaagcgtaccagaactacatcgacacgctactggagaaggcatgcaacatagtatctgagcaactgaatggcttcagcatatctgaccatgatctaacctctgctggtgtcatgttgagctcttcagacaccttgagcccctccatcttccaccagctctctgtcagctcgatcagcctgcacagtcccggaggcaaatcctccccttttgcagctgatgctgacctgttctttcagaaggcgcctgaaaaacgcaagtcatattgagatacagataggtgaagatccatgacctgcttcctt

SEQ ID NO: 88882 - DNA, 686 bp, Oryza sativa
  Clone ID: PAT_MRT4530_87691C.1
gacaaaattgatattatcactgctggaatggggaatgcattagctactgatggtggcttttgtacaggaagtgttagagttgttgatcatcagcgtctaagcagttctggctatgttttctcggcttctctgccaccttatcttgccagcgctgcggtttctgctgtcagctacctggaggggaacccgtcagttcttgcagacctgaggagcaacatttctttcctgcataaagaactgtcaggtactccaggacttgaaatttccagccatgttctgtcacctatcgttttcctcaaactgaagaaatcgacgggttcatcaaacaccgatatagatcttcttgaaactattgctgagagggtattgaaggaagattcagtttttatcgtggcgtcaaagcggtcacctttggataggtgcaaacttcccgtcggaatacgcctcttcatgtcagccggccacaccgattcagacatctccaaagtgtcctcatccttgaagcgggtctcagcatcagttccgatgattcccgttgccgctcatacttgcaaacacttcgaaaaatagacgtagaacagtgaaattaggtgtgctatgtatcgttcggtcttctggtagtggtttcccggtagcattccttctatatctttaattttgtcctctattcatcacttttatcattt

SEQ ID NO: 88883 - DNA, 2016 bp, Oryza sativa
  Clone ID: PAT_MRT4530_87692C.1
ggcccgggcggccgcaaggggttcgcgttggccgattcattaatgcagctggcacgacaggtttcccgaccgtttaatagaacaccaaggattgggtctcttctctcttgacttgtcacatccggcttgcgctggccgtcgcaaggccgccgcatactcttctcccctctttgactcgttttgcgcccaagtcgatccccaacgtctcctcctcgctggttcgcccgccgcgccgcgccgatctccatccgttccacgagcagcggtgaccgggtgctgtcgtcctgctccccgcttcccttccggctccgatttgaggcgctaaagtttccattccgtgttacgaaaagctgcattaggacatggacatggcattgccaatagtgaatgccaccgcagcggtgcttgctcgtgtctcagctgcattcaatgccccttttgcccgcgcagttgtctttggggttcatatcgatgggcacctggttgttgaagggctccttatagcggtcatagtgtttcagctttctaggaagagctacaaaccgcccaagaagccactcagtgaaaaggagattgacgagctatgtgatgaatgggagccagaacctctgtgtcctccgatcaaggatggggcccgaattgacacaccaatgttggaaagtgctgctgctccacatacaaccattgatgggaaagaagttataaactttgcatcagcaaattatcttggtttgattggcaatgagaagattattgattcttgtgttggttcactggagaaatatggtgttggttcttgtggtccacgtggcttttatggaacaattgatgtccaccttgactgtgaggcaaaaatagcgaagtttcttggaactccagactcaattctgtattcatatgggatttctacaatatttagtgtgatacctgccttttgtaagaaaggagacatcatagttgctgatgaaggtgtgcactgggcagtgcaaaatggtcttcatctgtcaagaagcactgttgtttattttaaacacaatgatatggcttcacttgcaaacactttggaaaaacttacacgtggaaataaacgagcagaaaagatcagacgatacattgttgtagaatctatctaccagaattctggtcaaattgctcccttggatgagattgtcagattgaaggagaaatatcgattccgtgttattctggaggaaagccattcttttggtgtgcttggccagtctggacgaggccttgctgaacattatggagttccaattgacaaaattgatattatcactgctggaatggggaatgcattagctactgatggtggcttttgtacaggaagtgttagagttgttgatcatcagcgtctaagcagttctggctatgttttctcggcttctctgccaccttatcttgccagcgctgcggtttctgctgtcagctacctggaggggaacccgtcagttcttgcagacctgaggagcaacatttctttcctgcataaagaactgtcaggtactccaggacttgaaatttccagccatgttctgtcacctatcgttttcctcaaactgaagaaatcgacgggttcatcaaacaccgatatagatcttcttgaaactattgctgagagggtattgaaggaagattcagtttttatcgtggcgtcaaagcggtcacctttggataggtgcaaacttcccgtcggaatacgcctcttcatgtcagccggccacaccgattcagacatctccaaagtgtcctcatccttgaagcgggtctcagcatcagttctgtcagattacatctgatcccctttctctacgagctgtgcactaatctctgtgtgcatgtttggttaatgtacataacctgtacatttgtaggttccgatgattcccgttgccgctcatacttgcaaacacttcgaaaaatagacgtagaacagtgaaattaggtgtgttatgtatcgttcggtcttctggtagtggtttcccggtagaatcc

SEQ ID NO: 88884 - DNA, 276 bp, Oryza sativa
  unsure (1)..(276): unsure at all n locations
  Clone ID: PAT_MRT4530_87693C.1
gcacgaggtctccctatccacagctttttctgtctctcgtctcgtactctcgtgtgcacataaaattcttcgtccaccactgcctcccccgcaagcccccacgatnacgagaataacggccacaccggccgcctcgccctcgccacgccacgccgcgcgcgctctcatgttcctatatcgccgcgcggctgccgcgtcgtgcctggtcgccgccgtggcgatagtggtggtgctcgggctccccgtggtgcacgggccacgggcacgggcacggcg

SEQ ID NO: 88885 - DNA, 708 bp, Oryza sativa
  Clone ID: PAT_MRT4530_87694C.1
tccccgggctgcaggctcgctggttcgcccgccgcgccgcgccgatctccatccgttccacgagcagcggtgaccgggtgctgtcgtcctgctccccgcttcccttccggctccgatttgaggcgctaaagtttccattccgtgttacgaaaagctgcattaggacatggacatggcattgccaatagtgaatgccaccgcagcggtgcttgctcgtgtctcagctgcattcaatgccccttttgcccgcgcagttgtctttggggttcatatcgatgggcacctggttgttgaagggctccttatagcggtcatagtgtttcagctttctaggaagagctacaaaccgcccaagaagccactcagtgaaaaggagattgacgagctatgtgatgaatgggagccagaacctctgtgtcctccgatcaaggatggggcccgaattgacacaccaatgttggaaagtgctgctgctccacatacaaccattgatgggaaagaagttataaactttgcatcagcaaattatcttggtttgattggcaatgagaagattattgtaagccaaaactctattatttaggagttattttgacacttcttccaggatatttgacatgggtgaattgcaggattcttgtgttggttcactggagaaatatggtgtcggttcttgtggtccacgtggcttttatggaacgattgatg

SEQ ID NO: 88886 - DNA, 597 bp, Oryza sativa
  unsure (1)..(597): unsure at all n locations
  Clone ID: PAT_MRT4530_87695C.1
attgaaggaagattcagtttgcacctatccaaaggtgaccgctttgacgccacgataaaaactgaatcttccttcaataccctctcagcaatagtttcaagaagatctatatcgtggcgtcaaagcggtcacctttggataggtgcaaanttcccgtcggaatacgcctcttcatgtcagccggccacaccgattcagacatctccaaagtgtcctcatccttgaagcgggtctcagcatcagttctgtcagattacatctgatcccctttctctacgagctgtgcactaatctctgtgtgcatgtttggttaatgtacataacctgtacatttgtaggttccgatgattcccgttgccgctcatacttgcaaacacttcgaaaaatagacgtagaacagtgaaattaggtgtgttatgtatcgttcggtcttctggtagtggtttcccggtagaattcattctatatctttaattttgtcctctattcatcacttttatcattttggcttcaattcatcactttctggtggattaaaaaaaaaaaaaaaaaaaaaaaaaaaaaaaaaaaaaaaaaaaaaaaaaaaaaaacaagggg

SEQ ID NO: 88887 - DNA, 361 bp, Oryza sativa
  unsure (1)..(361): unsure at all n locations
  Clone ID: PAT_MRT4530_87696C.1
aaaaaaagggaaagagacatatcaatattatttgaaaaaaaagggtggctcacgttacaacttacaacatctaaaaaatatttggggggggggacatatcantaacatcctaactcctaacctaaaaaacagcatcccaggggcaaatgcgctgggcctggggccataaaatccaaaacacatgtttgaagaacaaccctggagccaatcggtgcccccaattttttaaccccagccctcctttttttggggacccccttaaggggataaggaacacttccttggggggggcccctgcgggaaaaaataaaaggggggccaaaaaaaaaaaccctggccaaaaaaggaccccccggtgggg

SEQ ID NO: 88888 - DNA, 375 bp, Oryza sativa
  Clone ID: PAT_MRT4530_87697C.1
gctgccattgagggaggaggtggcggcgtggtcagggactgcaagacgctagaggcggtggtggtcaaggcggccacgcagtcttcatcgtccggaggcggggcggagcaagtggccgcgggtggtggttggaggcaagatggcgagctcgccagctctcctcccctctcctacgcctccgtcctctcctcatcggctgccgcttgccacgaacgggtccgcgacctcctcctcaccaacctccaactgccacagcagcctctcctcatccgccgcggaacacatggctccctcctcgccgagcacctcccgtcaccactgccttccatgccggccaccgtcgctgcacactcgtttggaacttgggagaagtag

SEQ ID NO: 88889 - DNA, 327 bp, Oryza sativa
  Clone ID: PAT_MRT4530_87698C.1
atggtcaaaagaaaaagaggaaacgagggaaaggctagcagctatccgaccggcaaggacggtgacccgacggccggcgacaacgacgaccggtcggccggcgagcaagacggcacacacaccaaggggacgatgacgtcagtcggctcgcccaccccgcagggggggggggggacggcctcgcgacgggtggcgatgcattctaccgccagcggcctcgcgatgaatggcgaacgtacgacatcgggaggcggcgtcgcgacggacggcggaggagtcggacggggggcgacgaaggctttcgtggccactcagcgcttgcagttg

SEQ ID NO: 88890 - DNA, 528 bp, Oryza sativa
  Clone ID: PAT_MRT4530_87699C.1
atggcggagacgggcccggcggccatcgtggctgcgctgacgcgcgccattgccgacgacggacgtggaggtggcgcgacgttgggcggcgtgcgaggtagtcacgcccggcgaagcaagcgagggatcagtggtggcgccggatgcggcggcggcggcggagcgcggggtcaggtgacggctgtgggggcaagtggggcggcggccgaggacgcgcgcggctacgacgccgccgcgctcagcttcccggaggaggcgtctcgcccgcgcgccccccgtggcagggtcacgtattcacgtgtcgtgctcgccgtcgatcgatcgcgcaccgggatggcgcggaagatctcggttcgtcgtcgccggcgcgaacacggtgtcttggtgggttcttggacctccacctccgccgccgtcgccgtccgcgacgcgcctggccgcgcgcggctgactcctctgcttcgtgggagccatgggtgcaacggaagtacggaacagagaatgggtgggatactgggatgggaatag

SEQ ID NO: 88891 - DNA, 317 bp, Oryza sativa
  Clone ID: PAT_MRT4530_8769C.1
ggaattcggcacgagggaaaagcttgagagaattacaggacatgacacacaagtttaagattagctcaggaggctcaagaaaagtattccattatcaatgctgacttaacatcaaggcttgcagaaatggaaggtcaactgcagcacattaccagtgagaatgaagctcttgttgagaagttgaaggatatcgctgctatagttgaggaacatggaggacactcttcaggagtgcactgaggaacgcaatagaataagggtggagcttgacctggttaaaaaattggtagagaacatggcattaactgacaatccca

SEQ ID NO: 88892 - DNA, 2354 bp, Oryza sativa
  Clone ID: PAT_MRT4530_876C.1
atggcgacggcgacgcaagctcccacctcgcccgccgccgcgtccgggcgtggctccgttctccccctcctccgtggccgcccctccacccgcgtccgcctcgccgttggccggcgaccgcagaccgccctccgcgcgcagccgccgggggcggcggaggtggtggagcagtcggtgaacaccatccggttcctcgccgtggactccgtggagaaggccaagtccggccacccgggactccccatggggtgcgcgccgctgggccacgtcctattcgacgagttcctccggttcaaccccaagaacccctactggttcgaccgcgaccgcttcatcctctccgccggccatggatgcatgctccagtacgcactgcttcacctcgccggatacgacagcgtcacgatggatgatctgaaagctttccggcagtggggaagcagaactcctggtcacccagaaaacttcgaaacacctggtgttgaagtcactactggtcctctggggcagggttttgcaaatgctgttggcctagcgcttgctgagaaacatctagctgcccgtttcaataagcctgatttgaaaatcgtggatcatcacacgtatgttatacttggggatggctgccaaatggaaggtgtgtcaaatgaggcatcctcccttgctggtcactggggtctcgggaaactaattgccttctacgatgacaatcatatatcaattgatggtagcacaggcattgctttcactgaagatgcacttgcccgatatgaggcactaggttggcatactatctgggtgaaaaatggtaacacagggtatgatgacatccgtgctgcaattaaggaagcaaaggcagtcaaagacaagccaactcttatcaaggtgactactactattggttatggatccccaaacaaagcaaacacttatagtgttcatggtagcgctctaggtaccaaagaagtagaggcaaccaaaaacaatctttcttggcatcatgaacctttccatgttcctgatgaggtgaaaaggcactggagtcaccatattgatgagggtgcttctctggaagctgaatggaataaaaaaattgttgaatatgaaaagaaatatcgccaggaggctgctgagttaaagagcataatttcaggagaactgccttccgggtgggacaattctcttccaaaatatactcctgaaaatcctgctgatgctacaaggaacttatctcaacaatgcttgaatgctcttgctaaagcaatacctggatttcttggaggtagtgccgatctcgcaacatcaaatatgacattactaaaaatgtttggtgattttcaaaaagacacacctgaagaaagaaacatccgttttggtgtgagagagcatgcaatgggtgccatttccaacggcattgcattgcacagtcctggactaataccttactgtgcaacattctttgtgtttactgactatatgagagctgccattcgtctttcggccttatgtggatcaagggtgatctttgtaatgactcatgattcaattggccttggagaagatgggccaacacatcagcctgttgaacagttattcagcctccgcgccatgccaaacatactaatgcttcgacctgcagatggaaacgagacttctggagcttacaagattgcagttcttaataggcaaaggccctctgtccttgccctttctaggcagaagcttcaacagctgaaaggaacatcagcggaaggcgttgccaagggaggatacattatttctgataattcatcaggaaacaaaccagatatcattctcatcggcactggttctgaacttgagattgtagaaaaagccgcagatgagctgaggaaagatgggaagactgtacgagtagtttcactggtttgctgggaattgtttgaggagcagtcggagaaatacaaggagagtgtttttccaagtgaagtaacttctaggatcagcgtcgaggctggggtcacatttggatgggagaaatatatcggagaaaaaggtaaagctattggtgttgaccgttttggttctagtgcgcctgctgggaaaatatacaaggagcttggtttgacagtggaaaatgtcattgcaacggccaagtcactgtgaagtatcgtttgctttaatgagcatatatataggaatgccagtttcaataatatattggatttgaataaagcggcaggctttcaagtagtttgtgcttgaggagtccgtgtttaggctttctgagtgtaaggcactttttttttgaacgaaccagtcagtgtaaggcactttacatgctgtttcaattcactctttaattttgccgttgc

SEQ ID NO: 88893 - DNA, 377 bp, Oryza sativa
  Clone ID: PAT_MRT4530_87700C.1
acggctttttaggtttcggcgggccgaggatagcctactattgcccacccaggtgccgtccatagcacccacggacggctagcaacgctccgaggtccacatcatcccggacagctacgtgttctacatccgccataaagtgatgtctacaacagaagtaccactgagagtgaaaatattgagcccggtcttttactaggcttgcgttgcgaccttggcgggattgcagggtccagaaggctaaaatcttccacactcgtggccaacatgaaaatatacgacaggcttgacttgtcaatttcacatatggttctgccggcccaggtcaggaaaacagaactttctactaattcaaacgatgcaatcccaaggaggga

SEQ ID NO: 88894 - DNA, 457 bp, Oryza sativa
  Clone ID: PAT_MRT4530_87701C.1
ccacccccacccccaccatctgcttaccaaggcaacaaccctggataccagggaggagggccaggttaccagggcggcaacccgcctccttaccaaggtggcaaccctggctatgcaccaggctaccatggccaaggaggcaaccctagctaccagcaaggcggcgataactacaatgccggtgtgccggcttatgagagggacggacaagggaggaattaccagtagaacactgctagaataaacgatatgtagaatctagtacgagcgtaacttcatttgtttcctgttgttatcgcatgtatactcttatgctgctttgtgaactcggtttcgtatgtgtcgagcaatcacttcaatgtgtctggaactagcggttgtttgaagcacttaaaacattataaatgtttggtcaactagtgcattttgtcccaaataaaaaaaaaaaaaaaaaaaa

SEQ ID NO: 88895 - DNA, 713 bp, Oryza sativa
  Clone ID: PAT_MRT4530_87702C.1
cccgggctgaggaatcgacgaggagagagagagagaactagtctcgagtttttttttttttttttttttaaacaaaatgtactagatacttttatgaaaacagagtatgtacacagcacagaatgaacaatcagaaagggaaatgaaacagatgatttactgaatactcactaacagaaggaagaagagagcattttatcttatcctgccactgctccagatagacatatcacatatgtctgtatactactatagccacacccccaaaatgagacccaaaaaaaaaagaagaaaaaattacatgattttttttcccagaacaaactggaaaagaaaagagggcagaaagagcagagaaagctcctccccttcatcttcttcctaccaggctaccaccagagattttcagagggatggcagcccatgcattattctcacaaacacagctccagctttaatttaaattcttttccctgccctagcaacagcaacaggaggaaggaagaccctctaggctgcatgattactgtgggacaaaggtatgtgcacctcaggcccatgcagccatgctgttccacagcttagcaagctgatggtggatcgggccgacccgcgggtacgcgctggtcggcactcggcattggcaggtcgcccacgcgtccgggggcgcgcttcctctcgctggcaatgatgaggaggcgcgccacgccttt

SEQ ID NO: 88896 - DNA, 231 bp, Oryza sativa
  Clone ID: PAT_MRT4530_87703C.1
gggacggaaaaagcgggccctcatgataaacttaattttttgcataaaaacccacagggccttttgccatgatggggagtcagggcataaaaccctgatcatttgccattatttgccaaaaccattcataaattttaaaaaccatttaaaaaaaaccccattttgcataaaaaaaatgccggggaaaaaaatcccttccctaatcactacaaaggaaattgcctcgggcca

SEQ ID NO: 88897 - DNA, 770 bp, Oryza sativa
  unsure (1)..(770): unsure at all n locations
  Clone ID: PAT_MRT4530_87704C.1
attcggctcgagggttattaaagggcccgagccagcttaactctttgggagtgagaaaaacccttagccgccagcagtcggtgaactcattcttcttcaactcaacagagcaagggttcgcactcgcagattcttgagcaagaataatggggaagaaaagaaaacacagtgagactactcaagctgtagcacaacccaaaaaggaagaggctgctccagagagaccggctaggacccttttggggtggaaggataagaatcaagttgaggatgattcaccaatatttaggaacaaagagaagctattggtcacttgctctaggcgcatcaattacaggtaccggcatttgatgttgaatttggtcacacttttgcctcattgtaagaaggataacaaagttgaatcaaaggaaactaaaggagccaccctcaacgagcttgttgagctaaaaaattgttcctcttgtttattttttgagtgcaggaagcataaagatctttatctctggatggcaaaatgccccaatggcccatctgtaaagtttctagttagtgccgttcacacaatggaggaattgaagctaacgggaaatcacctacaaggttcgcgtccaattttgacattntcagcaaattttgaaaaagatgcacattggaaactattaaaggagatgttgttacagatatttgaaacacccaaggaccacagaaagggccaagcctttccatgatcacggtttttgttttctcaataagtgatgaccatatat

SEQ ID NO: 88898 - DNA, 629 bp, Oryza sativa
  Clone ID: PAT_MRT4530_87705C.1
gcacctgggggaacgccgcgaactccttccaagctcctcgccaatggcgtctcctccgccctcgcttcctcccccttcgctcccacccctctcaaccccaaaccctagggccctctccctccgcctccccgctcgccgcctccccgtggcgtcctccgcggctccctcgggcgctgccgcggcggcgtcggcgagggagcgccgccgcttcctggagcggtacggcctcaaccccgacgacttcgaggacgatgccgaggcggaacccagggaagagaggagaagggataggcggaaccggcggtcgggtagaggggaggcggaggatgctccggcgaaggcggcggctgagcctcgggagacgcataaaatgcttcaggtgttaggaggaaaagtacgcagaagaaaattactttcaccaaaagataggaatgttcgtccaatgatggaagttgtacgaggggcagcctttgacattttacagtcagctggtggttttccggcttcgcttagacctggtcgatggttagacttgtatagtggtactggatctgttggaattgaggctatgagccgtggatgttcagaggctctccccggtgagatggatccttgggttgtttctgagg

SEQ ID NO: 88899 - DNA, 423 bp, Oryza sativa
  Clone ID: PAT_MRT4530_87706C.1
atggctccagacctccagagtacacaacatggctttcctgaaaccctgataacccccggcaatatatcagcaaaagcagcagtactacctgcaggggagtgtctgtcgtctctacacaccatgcatggtgcaatgcaagtgacacaccatgcaatgtcggggaccgtcaaatcggcacactgggtgaaaggcaaaaagcccggaaaagagaaaaaggcggccatggatggccagactgcgtgccgagagatcagtgaaagcgccaagctggtcaccggcgttggcgacttggcggtgtgggggagactactacaccacaccacacgcaccagcgcgcgacgacgaacgttctacttggataaggggacacctatgggtataaatagaagaccccctaagaggagaggggacacggagcaatag

SEQ ID NO: 88900 - DNA, 569 bp, Oryza sativa
  unsure (1)..(569): unsure at all n locations
  Clone ID: PAT_MRT4530_87707C.1
agcattctatttatatatatgttggtgtaataaatgtatgaacttcaatgtttcttctgaatataataaaaaaaaaaaaaaaaaaaaaaaaaaaaaaaaaaaaaaaaaaaaaaaaaaaaaaaaaaaaaaaaaaaaaaaaaaaaaaaaaaaaaaaaaaaaaaaaaaaaaaaaaaaaaaaaaaaaaaaaaaaaaaaaaaaaaaaaggggcggccccctttaaaaagaccaaacttaccttcccggggccttccgaangtaaaaccttttttaaaggggcccccaaaataaaatcccacggccccgccttttaaaaacggcggggccgggaaaaaccccgggggtccccaaataaaatcccctggaaaaaaatccccttttccccggttggcttaaaaccaaaaaggccccccccctttccccttcccaaaaggtggccccccctaaagggcaaagggaaccccccctttacgggcccaaaaaccccggggggggtgggggtcccccccagggggcccttttaatttgcaagccccctacgccccgggctttgggtttttttcccttccttt

SEQ ID NO: 88901 - DNA, 619 bp, Oryza sativa
  unsure (1)..(619): unsure at all n locations
  Clone ID: PAT_MRT4530_87708C.1
gccgccggcgccgatctccatcctgcgagcagagcagaggtggcgccgtcgccgcagaggagcgggagcatggccggaggcgggaggatgccgttgttgggatggtggctgatgctggtcggctccctccgcctcgcctccgtctggttcggcttcttcaacatctgggcgctccgtgttgccgtcttctcccaaactgacatgactgaaatacatggtcgcacttttggggtctggacacttttgacctgtactctgtgctttctgtgtgcattcaacctggaaaacagacctctctatctggccactttcctgtccttcatctatgctcttggtcatttcctcaccgagtacctgatataccatactatggctgtggcaaatctgagcactgttggcttcttcgcagggacatcgattgtatggatgctgcttcaatggaattcacatgggaaatctcgtggttctcactctgttaagcagtcatgagtggtcgtctttgctttgcccgtgctgtcctcagtgttggaatcgggatgcttgnagacccatcccagacggccctctccctgtggttttgtgcccccttctctctatgccctttgtccccttattccct

SEQ ID NO: 88902 - DNA, 122 bp, Oryza sativa
  Clone ID: PAT_MRT4530_87709C.1
accttgttgttgcgccgtttccaaatattccaaattgcagcgagaaggatggtgcgccagactcgaggagtgacgaagtgttcgtgtggagggatgtcccagacgtcttcgagtcgtggtag

SEQ ID NO: 88903 - DNA, 346 bp, Oryza sativa
  unsure (1)..(346): unsure at all n locations
  Clone ID: PAT_MRT4530_8770C.1
tttttctttaaacatatcacatcttcatttcaccatcaatatgattttcctcaatccaattaacatatatcaatatttttaattatattattacacaaaaaccttctaacaaatcacccaccaacaccatccatccaccggccacctcgttaatatactcactatgaatccatccatgccaaatcctctaaacatccgataaatacagcagtccaccacagaccactatgcagacccattgaccaaaatcctccattagttatacagaagcacactaaagttcaaatatctcctttatgacctcctctttgtctgcctcaaagctttcatcctntttnncaatctt

SEQ ID NO: 88904 - DNA, 357 bp, Oryza sativa
  Clone ID: PAT_MRT4530_87710C.1
aaccagtctggagaattgtatttgcaatgacaacatactggacttgggtatatacaaattttttactggttcctgacacttttattcctaaacatgcaatgcaagatatcactgcaatgggggtcccaattgaaggccatgcttagaaacagccaaagggggatgaattgacctggttaacactgttttaagacttgatgtagccaaagttattggagagcttcccaaggggggaccagagggggctcccgggggaggacctcggcctttcctggccctccgccgccgggggtgccgccggcgttgccaccgccggagccgttttgggggggggggccggcacccttgtttttctca

SEQ ID NO: 88905 - DNA, 743 bp, Oryza sativa
  Clone ID: PAT_MRT4530_87711C.1
cacaatacaactttgctacattattctacattgaatcattacaaccgtttgcattactagatatatttactgtgttcctctattgtaaggcagaggatatgcttttgtaagcattagcactaccatgcactagctttgggtttgttcaaaaggtaaacaatgaattgtaatttactctaaatattacaaacatttacaccaaggaaataaaacttttcgtaggataaaaaaactaacaagtaggtgctactgtactatcttcctccagagaggccactcatcgtgccaatggtcatcatcgtctctgatggaagcgatgttgacatgacaaaagagtcaaagccttcattttgcataagagctagcatgctaaagcttagatgtgttggcgttagctcagggaagggcatgtcaccttcaagatactgcacaacctgtcgcatgctaggccttgcaccgggcaatggatgtgaacacaacaaccctaacttcaacactaggattgcctcatcaatgttgtagttgccatggagccttgcatcaattacctttgtaagtgatcctttctgccaatgctcaagcacccaatcgaccaacatgacttggttgtcttgcatggcttgctcaacaggtcttcgtccacatgtaacttcgaggagaaaggcaccaaatgcaaaaacatcggttagaggggatgcctttcctgatcgtgctaattctggggctagatatcccattgtgcc

SEQ ID NO: 88906 - DNA, 246 bp, Oryza sativa
  Clone ID: PAT_MRT4530_87712C.1
atggctgcttgctcggttgcgatgcgcggataccgcaacggcgcacgtggggctgtggcttcgtccgccgcagtttctgcagccttccacccggttcgggctgcgcacctagcgggtggtttcgcctcggactcaggtcggcaggccgcaggtatccagaacacgtactacgtggcgtcctccgacgtccgccgagagtccgagaccgcagtttcttcagccttcctccccagtttcgaggcctga

SEQ ID NO: 88907 - DNA, 1806 bp, Oryza sativa
  Clone ID: PAT_MRT4530_87713C.1
atggcaaatgaggagcagcggcagtggatggacggggagtttggctgccagccggttgctaacattttctttgatttccttgatttgcctggagaaattcaccattgcaacttcttttcattctatgatctcttttgctcatctgatgaggaggaaggtccatacacaggcaatggatcagttgatgtcaaaggcaatccagcatctaaaacacacactgggaaatggaaggcatgctactctattctaggtggcgaattttgcggcgcattggcgtactacgcagtagggaccaacctggtgagctacctgaccaaggtacagggacagagcaatgtcactgctgctagcaacatcgctgcttggcagggtaactgctacctcaccacaatactcggcgcgttcctcgcagactcctattggggaaggcaccgcacaatcgtcgtctccctgaccacctttacctttggaatggttctactcacactttcagcagtggttccaccaaacatgcacagatcaatggcaacctttcctcaggaggcattgtcctctcttggcctctacatgacagctctgggcttgggtggcatatggccatgtgtgccgacattcggagccgatcagttcgacgacaccgacgtttcagagaaggcgcagaaggagctcttctacaactggtactacttcgctgtcaatggcgggttcttcgtcgcgagcacggttatagtgtgggttcaggataactgtggttggggactgggttttgggatccctacactgttctcggtcatcggcgttgtcggattccttgcgagtatgaggttttacaggtaccagaaacccggcggtagcgcgcttactaggatctgccaggttgtcgtggcggcgtttcgcaaggtccacgtggacgtgccaagtgacagctctctgctctatgagatgccagggaaggagtctgccattgttggcagcaggaagctgatgcacactgatggactcaggttctttgaccgagctgccactatcactgcatccgatgaagcatcagctagtcgtccatggaagctgtgcacggtgacgcaggtggaggagctcaagatctttgcgaggatgctccccatcttcctcaccggagtaatcttcaacaccgccgaggcctgcttcccgctgttcgtcgagcagggaggcgccatggacaaccacgtcgccgccgccttcgccttgccaccggcgtcgctgacgaccttcacctgcgtctgcatcctcgtcctcgcgccgacatacgacagggtcctcatgccggcggtgagcaggctcaccggcgtcaagcgcggcctctccgagctgcaccgcatcggcgtcggaatggtcttcgccgttctcgcgctcgccgccgccgcggccgttgagacggcgcgcctccgcagcgtggaggcggatgctccggcggtgagcatcctgtggcaggcgccgcagtacgtgctcgtcggggtggcgaaggtgttcggcgtcgttgggtacatcgagttcgcgtacgagcagagccccgacgccatgaggagcttgtgccaggcgtgctcgctcatcatggtcacccccgggagctacctcctctccgccatgctcaccatcatcagctccgtcaccggcggcggcggcggccatggcggatggatcccggagaatctgaacgagggacatctcgatcgattcttctggttgatggcggcgttgcagctcatcaacctcatcgccttcgtctgctgcgctgccacctacaaacgcaagctgcctaccacttga

SEQ ID NO: 88908 - DNA, 2180 bp, Oryza sativa
  Clone ID: PAT_MRT4530_87714C.1
ctagatgcttgcgctgcctgccttcgtcgccaactcctgcggccactggaccaccgccctcagcctcgccggcgtcgacgcacggccgccgcggtctcccacatccgtcgcacggtccccgtcacccctcgcctgcacggctgacgccatctccgacgcccaccgctctcttccgcctccgccgcgcggcccggccaccgtcgtctccgacgcccaccgcacggccgccgccctcttccgcctccgccgctcggcccagccgccgccgtctccaacgcccgccgcacggccgccgccatctcctgcgtccgccgccgctattttccaccccgccgccatctcgattcggccaaccgagttggacacgttccagattcttgcccactcatcattgatcagcggggaaggcgagaggatgaaccgatgaacaccgagcaccaggggttgtatcagttgctcggccttgtctccagttccaacaccgctccgccacggcatacttttcggctgagacgaagtattcaaatttgctcgatgtgggcgcgccatgggcagcccatcaactcgtgcaaatagcttctctttcatcggcaagccaccctccatccgcagcgtaagcgcgaccacgagcccagggtgccccttggcgtcgccggcgtaccggaggctgaactgctcgagcacgcacgccacgatggacttcatctgtatgtaggccatctccttgcctaggcacatcctcggccccgcgtggaacaccgggtacttgaacgtgctctccggccggaacgcgcccgcctcgtccagccaccgctccggcctgaactcctcgcagtccgcgccccagatgtcctccacgcgccccatggcgtatgcgcagtacgtcaccagccaccctttccccgcgaacgtgccgtccggcaggaactcctcctccttgcagctgtgcgtgtcgaagggtaccggcggatacagacgcatggactcggtgatggccgcgtggaggtactgcatgtccctcagctcgtccaagctgaacgtcgcgccacgcgttccctcgctgccggccgacgactgtctcaccgcgcggatctcgcgcacgatcttgtcttccacgtcgggccggccggagagtagccagaagaaccaggtcagcgccgaagacgtcgtgtcgcggccggcgaggatgaagttggtgaccacgtcgcggaggctctcgtcgctgtgctcgccgctcgcggcgaagcgcgacaggaagtcgtcgcggcgctccagccgggcctcccttctctccctgcgctcccggacgatccgctccgcgtagccgtggatcgtggcgagcgcctccctcatccgcctctcgggctccatgttgaagagcttcttgacgcgccacagcgacttggccggcgagttgaaccgggccaagatggcgttctgcgcgtcgttgaacgcgcgcatgaactccgcgctctggggcgcggccatcctctcctcggtgaggcacgccgggtcctcaccgaaggccacgcggcagatgttgtcgaacgcgaagcgctcgagcacgtcttgcacgtccagcgtccgtccgtcgcgccccgcctgctccagcagcggcagcagcctctcgacgacctcgaaccggacggtgtccaccacgaagttcctcagcgagcgcttgttgaactcgtagctggcggccttccgctgccatagccactgctcgccgtcggaattgaagatgccgtggccaagaaagtcctcgagcatggacacggtgagctcgcccttggggtagttaccaaagttagtcttgagaatgtgctcgacgttggccgggttggcggtgatgacgccgccggtgaggccgagctccttgaacgacatggtgtgcgtggggctgcgcttcatgacgccggtcgaccactcaaggaaacggtccttgttcttgatgaaatgcggcagcgtgccgaccacagggtaggacttgagtccatgggtgcgaggcttcttcttgggatcctggtgcaggtagaggaagtagacgagggtgagcaggaggatgagcaggagagaagctgaggttgaggagagttccatggcgactgtgatatgattttggcttgagacttgcgagtggctcaagtggttgcgagaagaggtgtggaccttaacggtaa

SEQ ID NO: 88909 - DNA, 120 bp, Oryza sativa
  Clone ID: PAT_MRT4530_87715C.1
atggttgccgcgccacacggcactgggctcgagctgcagcctgcagggcgcatgcaggggctggggcagggcatgcagccggccgtcagcctcgtcacgtgctgcgcctgcctacctgtg

SEQ ID NO: 88910 - DNA, 1657 bp, Oryza sativa
  Clone ID: PAT_MRT4530_87716C.1
cgggtaaaaaaccggagcacgacaccagttctattttatttctccaaacaagcgagagcaatgatacacagagtaaagtatggagtcgacaagtccagctagcctagcatcacgcttgtttgattactccctgagtcactttcatcggcaagccccacttcatacgcagcgtcagcgagagcacgggccgagggcgctcgttggcgtcgctggcgtaccggagactgaacttctcgagcacacaagcgacgatggacttcatttgtatgtaggccatctccttgccgatgcagatccgaggcccggcgttgaacaccgggtacttgaacgtgctctccggccggaacgcgcccgcctcgtccagccaccgttccggcctgtactcctcgcagtccgcgccccagatgccctccatacgccccatggcatacgcgctgtacatcactagccaccctttccccacgaacgtgccgtccggcaggaagtcgtcctccttgcagctgtgcgtgtcgatggccacgggtgggtatagcctcatggactcggtgatggcggcatggaggtagtgcttctcgcgcagctcgtcgaagctgaacgtcgcgtccgtgctcccgctcgacgcgcgcaccgcgcggatctcgcgcacgaccctgtcctcgacgtccggccggccggagacaatccagaagaaccaggtcagcgccgacgacgtcgtgtcgcggccggcgaggacgaagttggtgaccacgtcgcggagactctcgtcgctgtgctcgccgctcgcagcgaaccgcgacaggaagtcgtcaccgcgagccagcccggcctcccctctctccctgcgctcccggacgatccgctcagcgaagccgtggatcgtggcgagcgcctctcgcatccgcctctcgggctccatgttgaagagcttcttgacgcgccacagcgatttggccggcgagttgaaccgggccaagatggcgttctgcgcgtcgttgaacgcgcgcatgaactccgcgctctggggcgcggccatcctctccttggtgaggcacgccgggtcctcaccgaaggccacgaggcagatgttgtcgaacgcgaatcgctcgagcacatcttgcaagtccagagtccgtccatcgagccccgcctgctccagcaacggaagcagcctcttgacgatctcgaaccggacggtgtcgaccacgaagttcctcagcgagcgcttgttgaactcgtagctggcggccttccgctgccatagccactgctcgccgtcggaattgaagatgccgtggccaagaaagtcctcgagcatggacacggtgagcttgcccttggggtagttgtcaaagttagtcttgagaatgtgctcgacgttggccgggttggcggtgatgacgccaccggtgaggccgagcgccttgtacgacatggtgttcgtggggctgcacttcatgatgctggtcgaccacttaaggaaccggtgcttgttcttgatgatgtgcggcagcgtgccgaccacagggtaggacttgagtccatgaatgcgaggcttcttcttgggatcctggtgcatgtagaggaagtagaggaggggtagaaaagcgagcaggatcaggatgagcaagagagaagctgagattggggagagttccat

SEQ ID NO: 88911 - DNA, 342 bp, Oryza sativa
  Clone ID: PAT_MRT4530_87717C.1
atgggcttatcattctggcatagttggtcgttgtctggtgtatattgacaccatgttttttaccggcacgcaagacaagtgcacggcgtgcgacaagaccgtacagtggattgactctacttacggtgacatctgcgttgccgttccacaagacctgattcaagtgcactcactgcaaagggatttttctcgatgcgcagatacttatccatggacggttgtcctctactgcaagacccactttgaggcagctttttaaggagacggggagctttttcaagaagtttgggccagagttgtatacttcatacaaggaactgggctgggccccaagcaagaata

SEQ ID NO: 88912 - DNA, 234 bp, Oryza sativa
  unsure (1)..(234): unsure at all n locations
  Clone ID: PAT_MRT4530_87718C.1
cttcatcctccctggagccattctgttacacaatttgttagtggnccctacgtgtgtgatctagccctgtaggcttgctcgtgccggtctttcggtttgtggtggagaggaccgtttgttaagctggaagagccttttttagtgaccccggaaggccaattgttttttagggttagccccatgatctttgagagttagtttactaccctcggatgccttgcgttgcacactttg

SEQ ID NO: 88913 - DNA, 345 bp, Oryza sativa
  Clone ID: PAT_MRT4530_87719C.1
atgacacagtcgaacaagtttgagaacctgaacgcccgaggggaggggcggtgggagaggagatcgcgggggcgcggcgctgtgcatgtttggcggaagaagacggtcgacggctcccgtcgatccaaaggtggtgcgtgtggaggtgctgccatcggcgagggaacgagggagggggagaagcgggaggaatggatgcgggagggaaggggcgcgaggggtggatgcgcaggcagaggcgatcagcggctgaagcggctcccgtcctccgcgatggtagtgcggttgaagggatggtggtgcggcgatgtgcggaggggatccgatctgacccccgctgtgtga

SEQ ID NO: 88914 - DNA, 602 bp, Oryza sativa
  Clone ID: PAT_MRT4530_8771C.1
acgatctaagctctgctctcctgagccagccgcctcgcaaatccgcggaccacgcgactgcccgccgtcccgcaccggagggcgtgctggtatgaaaatacgggccgaggcaccatccgccgattctacctgcggggctagcgatgatgagataacgagggaataaacttcctgtgtgccactgaacctccttgagatgggtctgctccacctgtggctacctgtgatatggaaggccttaatgataaagccagaaagcaaggcatcaaggaatgccatggcaagaaaccctcaaggtttgacacatgctttgttcactatacaacatgggttcaaggttcttcgcacaaattcgaggatacttggcaagaacagcattgaatcgaactagtacttggaaaacagaaaaaggaactgactggtctaagccttggtgccactaacatgaaaagaggggagcgtgcattgttacatggtaactgcgagcttggctatggtaaacaaggaagctttttattcccaaatgttcctccaatggcagaccttgtatatgaagtggaactcattgggcttgatgatgtcacagacggaaaagcccgaag

SEQ ID NO: 88915 - DNA, 297 bp, Oryza sativa
  Clone ID: PAT_MRT4530_87720C.1
atggactcaatcacccaatgcctgacgcgagcagcagagagaactgcaatcatgcccgctgcagcgagtagtccaaaggtggcacactggatgagggaaacggcagccgcagggatcagcatagaggacgccaatgagcgtggtgacaggatggacgaggcgaaggcaacatgctcccgtggaaggcagccagccggctgggccggcgaggaagatactcaaacagcgtataagatattgacatacttagctttcctgaaggatgttacaccagaacattaccttgcaggaagttag

SEQ ID NO: 88916 - DNA, 240 bp, Oryza sativa
  Clone ID: PAT_MRT4530_87721C.1
atgatgcgactgtgtgggatacttctgaggactcgcagccccacgacatcactccatttggcagcgatcaaatcccgtggcaagcagcatgtcccgactgggtggcctgcccctctccagctccttctcagcgacgtgtggcatcttgctccagatcttctaacagcgtgggtggttggtcgactacacacgctcgtcggagttattggctgggagagaggggaaaggaagaagggataa

SEQ ID NO: 88917 - DNA, 479 bp, Oryza sativa
  Clone ID: PAT_MRT4530_87722C.1
ctctccttccagatctcttttgggaacaccctgtgtgtttgcaagcgcttagcttcattttcatgcatgatatgatctctggatagaagataagtagcccccacacatgcacttcgccacctatagccagcctcgagttctcatctgtttgatccgtcgcacatgtggagcaacgaagctctagagtacgtctcctaatctctacttacttttgcagtttgcacacatattgagaaatgcttatcaatccttcgatctctcacagacaatacctacaagcgtcgtttacactttgcatgtatagctagccattgttacatacgtggagcatgtagcgatcattcgttcctagcacgtaaattaatcgccgtaattttgcccatgcagacacagcacacacagctacaaatcgactgtaattaaggtacgtatatataggtgacaatgcacaaccagcagctaccccacgccggtcagcc

SEQ ID NO: 88918 - DNA, 296 bp, Oryza sativa
  Clone ID: PAT_MRT4530_87723C.1
ggggggggttaatttaattgccatacacatgcccgaaagaaatggaagcatgcattcactagctccaacctccgacccataatcaccgaagctccaacccaaacacacggccaaccaaacaaacatcggcgcagacaacaaacacctttgttcggacagaggagggatttttgaataaagaattaggaaaaagaaagcattggaaagaacaaacaaagctcggacggcaaacaaaaacaaaacgaaccaattttttgcttgaattaattatctgtgacttactaaaacaaacccgc

SEQ ID NO: 88919 - DNA, 273 bp, Oryza sativa
  Clone ID: PAT_MRT4530_87724C.1
aaatatgatttaagaaacaacttaaataacaaaacagtcgggggaaacaaactaccaaactgaaaaggacttcacaagggagggtacatataagttcaactgggcacaaaagcccttaaaaatccatttattctttgttgggggggaaggggggacttgtgggttttttaaggaaaaacccccttggctttcgaccccccccccaagttggctggatttaacccaggagagaacttttgggcccaagaacaaaagagggattcaaacttgccc

SEQ ID NO: 88920 - DNA, 1371 bp, Oryza sativa
  Clone ID: PAT_MRT4530_87725C.1
atgccgccgccgccgccgccgtcggtgcgcacgaggagcgtcacctccgtcgcgctcccgacgcacggagatggcggcggctgtcgccgcgtgccgctctccccgttcgacgcgtactgggtcgcgctgccgcccgtccgccgcgtcttcctcttcccgtccccgccgccgttcggagacgtcgtacgcgcgctcagggactccctcgaggcggtgctcccggcgttctaccccttcgccggcgcgctggtctactcgccggaggaggaatcgctgtccattgtcgtggaggccggtggcggcgtggcgttcgtggaggccgagacggacctcgacctcgggaggctcgtcgacgaaggggaggagcacgacgaggacgcgctgcggcagctcgtcccggacatccgccgcgacgagctccccgcgcccgtcatggcggcgcaggtgacggagttcgtcggcggtggcgggggcgtggcggtcggggtggccatgcaccacgcggcggcggacggccgcggcctctggcgattcttggagatgtggtccgccgccgccgcagcggccgtggccaccagtgtcagggaggccctcccaccgccgctccacgaccggacgctggtgcggttcgacggcgacggcgagctggcccggctgttcttgcggcagatcgcgccggacttgcccaagatcgttcacgcgcccctgcgccaatgccctctcagccggcgaacgttcacgttcgccgcgccggcggtgaagctcctgaagcagcgcgccaccgtcggcggcggcaagacgccgtccacgttcgcggccatggcggcgcacgggtgggtctccatcgcgcgcgccagcggcctcgccgacgacggcggcggccccgtgttcgccgtcttcctcgcggacgcccgcgcgctcatgtcgccgccggcgcccggcgcctacgccggcaactgcgtcgcggtgtgcgcggcgtcgctggaaggggcggagctcgccgccggggcggacgcgcacgcgcacgcgcgggcggccgcggccgtcgggggcgccgtcgacgccgcgaggcgcgacccgctcggcgaccgcgcgcggtggcacgacaagttcgcgcgcatcccgcccgggcgcgcgatgatcatggccgggtcgccgtggttcccggcgtacgcggtggagttcggcttgggcaggccggcggcgagggcggagctggcgtccatgaaccacgacggggaggtggtgctcgtcgccgggagggaggctgggtcggtccaggcgtcggtggcgatcgccgccgacaagatgccggcgttccgtgagatgtttgtggttgggtgcggatggggcgagcctgactcgaactag

SEQ ID NO: 88921 - DNA, 1239 bp, Oryza sativa
  Clone ID: PAT_MRT4530_87726C.1
atggcggagggggagggctcctcttccaggaggtgggcgttgggcgatccggatgtcgtcgagactgttgctcacgaaataattgatctcgacgccaatgatgatcctgatggagttatgataatttgtgagaaggcgtcgagtcacaagagtaatcattctgttagtcatccttcggattggccaaagcatccaaagagtggcttggctgaggatgttcctggtccaagccatcaacctggcacgagcacagttctaccatggggatgcacaactcctgggagaccacggaagcataaggaaattaaaaccgtggataataaaattgatgagaagtataaggcatttaagcagtttgatactgttaccgaccacagtgatcactattattcaatgtcaggcaaagggaatgttcctgaagtcaagaagccatccaaggactgggtgaggcggattcaacatgaatggaaagttctggagaaagatttgccaggtacaatttttgtacgagtttatgaggataggatggaactacttagggctgtcattgttggaccggcaggcactccttaccatgatggacttttctttttcgatgtatatttcccttcccagtatcccaagaaacctccactagtgaactaccgctcgggagggttgcggcttaatccaaatctctatgatagcgggaaagtctgtcttagcctattgaacacttggtctgggcatgggtgtgagaagtggaacccatccaattcaaccatgctgcaggtcctagtctccattcaggccttggtgttgaatgcgaaaccttattttaatgaacctggttatgcagcttctgctaacacaccccagggggagaaaatgtccatggcttataatgaatcgacatttctcctatcctgcagaacaatgctgtattctcttcggaatccaccgaagcattttgaagacttcgcaagggttcatttttgcaagtaccggcgcaatatcctcgtaggatgcaaggcctacatgaatggtgcccaagttggatgccttgcaggaaacggagtgcaggatgttgatgaaggcgacaaaagctgctcagcgaacttcaaaggctccttgaagacgttatttgatgaactcatcaaggaatttacccggataggagttcattgccatgaattccagcctcagagggtgaatcctgggtctaccagagccaaggcggacaccacattgaggctatga

SEQ ID NO: 88922 - DNA, 393 bp, Oryza sativa
  Clone ID: PAT_MRT4530_87727C.1
tgtcagggttacggataaggcataccttctatcctacgatttatggaatattttgataaggtataccttcacgtacacgggtcatccccataaatatcgtattgaatccacctcaaattatcaaaactatctctatgagtcaagtgatttcccaagtcttggctcaaatctttcttggaggtcaagatgatccacggtataaaagggaccccgagggaggggtgaaggacatctaattctatcgccaacacccccaccatagtttacgaagccggagtacgcagagccaagtcgtcgggggatctcatcgaatccctcgactacgatctcaccctcgttccaacgtaccccaatactctaatcattcggtccgcgagtatcactcgtctgaca

SEQ ID NO: 88923 - DNA, 2950 bp, Oryza sativa
  Clone ID: PAT_MRT4530_87728C.1
cccgcgccgcgggcttcggccgaggtctgtgactgcgcgaggactagtctcgggttttttgtttttttcttttttttttttttttttttttttttttttttttcttgatcaacatgagtgtggggaacattacataaaattgccattgccaaccattcacaataaaaactagttatgccaggtcatacgaaaatgatacagagaagattctgaaatgaaatgaaaaaaaatgcacattgaaaaaaatggtacaagctcatacccgagtgcagggtacaatggttaagatatttacgaggaaaagtagctgccttatagcctatccaacagaatcttcaaccatggcctcctcactgtcgctatctgtatcattcgcctcactgccttcctcagtctccgcatcagacatcagatcatcttttccaacaccacttcctgggagttgctttctgaaatctggatcaacaatttcgatcatagcattaagaacacgatgatgatcggttattttactgatgacatgatcaatattactctggctcccagcagcctgtccatcagagttcactaaagcatcagctgctgagctccctctgacattttcatcctgctccccggcatggtctgtagtctcccccaagctcctaggagactcattctccccattgacagatggacctgtttccactgcccagctaccagcaacttctgaggccaacaaatcagctgtaccaatggttctggtctgggtatcctcgtgttttctctcagaacagttaacctcaagtttttcttcagaatagtgaccaatgccatctttgagggttaacgaggcttcctcatttccttgtggttgccctctatctttgcaaatcaagatggactcatcattctcttgtggttgcacttcatcatctagctgcatggtatcacctcccatttcactaaatctttgaagagctgaattgtgatcaccacagccaacattaccagcttggctttctgtctcgggaacttgctcagtatctgttggctctagctcaggagctgtagcagccagatcaccatgagaatcagacctgaatctctctgttgccatttctggactattgcactctacctcttgagtgtttgccccttcaactctggtaaaatcatcctgttgttcagtctccttggaatcatcacttgaactttgttcacttgcctgggtattctctgttgaagcaccagaagcttccattgtattttttgagtagtttactctcgtgcgggcatcgtcagcagttacagttgccagtggcactttattgagatcatcacccatgatactgttctcataattctcttcatcctccagagttctctgcattgctttaagctgttcctgctgttttgcaaacagagaagatatttcctctgtagttgaatagaaagcacgcagctgagtctcccgtaaaataattctctctcttgctccttgatacctctgtttctcgattgatagatctctaattgtagcagctatttcaagctcaagagctgagacctttgcccatgcttcttcccgagcagccttctcgtgttcaagttctttcttcacttttctcagatccatttccagtttatctgatttcttctgattgttggcggatacaagctgttcatcctgaagttgagcttccagctctcttgcttttttctcagatgtgacaaggttctctcgagtatcttccagcttagatctcaatgtttccacaagcaaacggatttccttttctgattcctgaagcttgctaataacttctttctgttcccgttgttgtctaaggtgagcctcagcttgtctcttgatttcttcttgagcttctgcattcactttatgcagtgcagactttaagtcttctgcagccttatcacgctcctctcttcgcaagtctctctcctcacttagctgtgcctcaagctcacatatatttgatttctggctctgaattatctcatcagcctcagcacgtgattgcttatatgcgctaagcctctcatcgagatcttttattgaattctgtaactctgtatttgatgtactaagtgaatctatttgtttctgcttgtactctaatgtttgctgaagagatttagcttgatcaacataagtactcgatgtaatctctttcaactccttcaattccttttcatgctgtgcttcagatattttaatttgagttctcaaagtctcaattgtgacaacatgttcctcaagttgttccctgagctcagcattagatttctctagccgacgaacatcatctagtgaaacaggaccatcagaggaaccaatcccaagaccttttagtctctttctttcagaatgaatatcctctttaagatcaaatacaaattgtggtacatatatcattacttgtaatgtagctgacttccttttaaggatggtaacttcattctctgcacgactgacagcattaacttcacggtagacaaatgcaaaggaagtatatgacaagataaccagaagcacaagaaacctcgagtccttgaggaaaacaggtacaggttcattgcggttaagctcccccaacacagtgtccctatatatcttgcaatgtttcccactgatctgcaaagaggaaatcttgaagctggattcctgaacggcacggcctatgtagtgctcatcggcgcttaaaagaatgttcattccctcagggcgcaggcgagcattcttggagatggccgtcaggacagcccagacaccgtcgtcggggttctgtacgggttgctcggcgaacttgcgcgccaccgcgcgcatctcctcgggggacaccggcgagggcttgggcggggtggccgcattgcaggaggcggcctcgtccttcctcgccgtcttcggcgtcaccaacagctcgctcggtgggtccagcgccgccat

SEQ ID NO: 88924 - DNA, 486 bp, Oryza sativa
  Clone ID: PAT_MRT4530_87729C.1
atggccgcccttgccctcgccgcccttgccctcaccgtcgccctcgccgcccgcgcgcgacgccgtcgccctcgcctcccgcccgcacgcgtgcgacgcccttgcccgcctctccctctcgccgcaaggccgctcgccgtcaccagcggccacgaggccgctcccagcgccgccgcccgtctccgcgcggtggccgacggagggccgcacgcgggacgcgctagtcgacggcgagcggcgcgaggggcgggggtggccgacgcgtcgtcaccatccgcctcctccgcctcgcgccgtccgcctccccaatctcctccgcctcaagccgttgccggttgggggcggcaaatccggcgccctagcgggaggatctggccctaccttgccaaatctgggaggagatggtggcggccgtcgctcgtcgcgctggccgcgggttcgtcactgccgccgtcacctccgactcctccccactgccagcgatga

SEQ ID NO: 88925 - DNA, 1419 bp, Oryza sativa
  Clone ID: PAT_MRT4530_8772C.1
atggcggcggcggcgggggagcgggggcaggtggtggtgctggagtgcgtggcggggagctccaaggcggaggagtggggcggcggcggaggggtggtgcaggaaggggacgtggtggaggcggtccgggtggggcgcggcggcggccccggccccggcgccgcggtgctggaggcgccgttcaagggggggcgcgccgcgctgcacaaggcgatgcacgccgcgttcaagcgcggggacacctccgtcgaggtgcgcgtccgcggaggcagcgagctgcaggcctgcatcctccctcactccggcggcggcggcggcggcggaggcggtggcggaggcggaggaggaggcggcggcggaggtgggaataagcagtacgtgctgcgttccctgcacgaccccaactacgttcttggcttcgtcgaccgcctcgaaagcgagtgcctcttgttgcaaggcactaggagcacaagagtggcatcagccctgagcagggcacaacttcaggatggttatgttgcatacccatgggagaagaagatgcgtgactcgttgcgcatgcccaactccagcagctacctctcgatgctcgtcctccccaaagctctggacctgaattcatgtcgatacgagtcctttgaggacacccttgcccgtgccaacgcgtggatctactcctcgcaggtctcaggaatccccatcgagttcatgaatgtgcagagtgaggctcttctcaccaagatatctggagagacagcgtctgcaactgttaactcaggttctttgtctgatctgtctaacgtcacgaatgcgaccctgtatggttttgaggattaccatggggtagatattggggtggtgaaagcagcccgactttggtacagctccatagcagaagagatgccgctggagattccacttgaagaaggtgacacgaggctaggattcgccatcagccgtactgaagagggttttatcttcatatcttcagtggttgacaatgacaaggacaatgaggcgccatcgacacggtcagggctccgcgatctgttcaaccaggcaagggaggcatcaaaactgctagttatctcaagggtgtccaatgagaaggtccttccctggatgatctccagctcaggagcgatccgctgcttcgacaccatctccctcagccaaaagctttccttgcaccgccttgcggtgcgccccatccagctccacctgctcatgtgggagaaacctagtggtcctgtagaaaggatcattcgctctccgaaacttcccccacaatctgagctacctcaagtaccctggaatctaattgagagcattgaacctagagtagatgttgatgaggactatgtgggggatttgtcatttcggattgatgatctttcagtgggaaccagctgggtgtga

SEQ ID NO: 88926 - DNA, 384 bp, Oryza sativa
  Clone ID: PAT_MRT4530_87730C.1
atgtcgggccaaacgggggatggcaaagatggtgataagggagatacgtttccttatgactatccatccacatctacttcttatcgatcactatatactattcctagtatatccaaaggaccatttgttcgtagcattggacccaacacactacgacaaggaaacgttcatggagttcctcactattctgattttatcccgtcaatcccttacgtagcaaatcggttcgacgacacaattatatggaacatgtgcgctgagcactgccgtttcacccatcatgatgcctacaatgcacttgggctattctacgaaaaggagagtcaaatcgcaataaaagacatattcaacccactaggagagtgggaggaagaacatatatag

SEQ ID NO: 88927 - DNA, 661 bp, Oryza sativa
  unsure (1)..(661): unsure at all n locations
  Clone ID: PAT_MRT4530_87731C.1
tacttatcctatcatattattattagccgactgtatagaccttgtccgaagaaccccnnnncannnnngggcgagagcnatcgggctgcacaggnnnnnnnntctagacattggaacatacttggcactagcgatgttaattagtgcatgccgacaaaaatgtcataacagtcccttatgcttttaccgatcactatatactattcctagtatatccaaaggaccatttgttcgtagcattggacccaacacactacgacaaggaaacgttcatggagttcctcagtattctgattttgtaacatatgtattaccgcaaaacaggtgggccagtaaaagagccgacaaggaataatctacacgccaagacaggcttgtcatgttttaagcaacccccaagacttccgtatgtaaataacacatgtgcgagatggttagagtcaataagaggtacacaactaacagtgatgaaatcccgtcaatcccttacgtagcaaatcggttgtacgacacaattatatggaacatgtgcgctgagcactgccgtttcacccatcatgatgcgtacaatgcacttgggctattctacgaaaaggagagtcaaatcgcaataaaagacatattcaacccactaggagagtgggaggaagaacatatatag

SEQ ID NO: 88928 - DNA, 209 bp, Oryza sativa
  Clone ID: PAT_MRT4530_87732C.1
ggaggaactcgttctccatcgagcccaagcgccgccgctccgccgccatcgccgtcggcgtcgacccgcccccgcggcggagaggaactgcaagccctaggagctagcgaaacaccttccagaacatacaaatgaagagttctatgtccgagactcaaagtttgtgctagtgaatatctgacggccgaggtggcagcggctctgggtgg

SEQ ID NO: 88929 - DNA, 355 bp, Oryza sativa
  unsure (1)..(355): unsure at all n locations
  Clone ID: PAT_MRT4530_87733C.1
ggcgggcgtccaagaggaggcgtcttctgtatcngccttccaggggctaacgaatccggggatattcatccgggggggcctttatcagaggggggcgggtctccaactataccctctcattctacgntcactactacatctacctttaccgcttgctcctgtctggccctgcaactgacatctggttcttgatctttcacacgcttctcatcacataccgcctcaccaacttgaagggcgttgacaacatatgctccaactatttctacttctcgagggtcacaggcatcaatttgatggacatgatttatcttgaggggggggggctttttgttatcttcttcgacctgaatgt

SEQ ID NO: 88930 - DNA, 323 bp, Oryza sativa
  Clone ID: PAT_MRT4530_87734C.1
attagtgtatatggcaccagagtcttgtcatggaggagatatctcaactacgtgagacatatatagtctgggtattctaatcctagaaattgtgacaggagaaaaaaaccaccaaagcagtgccgatctttctggtcagcggattattcatagcgtacgtaacaaatggtcaaggatgtcgaaaataacatcaaggtatccattgctggatacacataggcttcaacaagttcattcatgttctaaaattgagctgaattgtgtggggatagatcctaaaagaccgacctccgcatgaaaaactgtcaatatgctatcatggg

SEQ ID NO: 88931 - DNA, 293 bp, Oryza sativa
  Clone ID: PAT_MRT4530_87735C.1
gagaatgggagctacataaaacaatgtctacaccggggtgggctattactccaaccctgggctgtctcccatgtccggcgccgtcgcagaatcaacccaatccgccgccatgagggagtgcatctagatccacatcggccaggccggtattcaggtcgggaacgccagctggcagctctactgcccaaagcatggcatccacgctgaagcacagatccccactaacaagaccggtgggcaagaggctgccgccgaacgcagtctaaacactcagactgtctccaagaaacatt

SEQ ID NO: 88932 - DNA, 189 bp, Oryza sativa
  Clone ID: PAT_MRT4530_87736C.1
atgggctgccttcagttcgtcttcgcgctcccaagtagcttcttcttcggcgtggttgctccactggaccttgcaaaaacggattactcggttcctggtcctgcgctccatggagaactcggcataggggagactcttatcccaagtcttcccgaagtccaggacacatgcgcgaagcatatcttctaa

SEQ ID NO: 88933 - DNA, 675 bp, Oryza sativa
  Clone ID: PAT_MRT4530_87737C.1
atgacgccctccaggacaggtaggggaccggcggcggcgggagccgcctcgcctcgcctccgccgcgctcgcctcctccgcggcacctcgccgccgctcgcctcctctgccgccgccgcctcctccgccgcatcctcggccgccgccgctcgcctcctctgccgccgctcgctgcctcatccctcgccgccgctgccgctcgccgcctcatcccccaccgccgctcgccgtcccctgcctgccgctgactgtaggagagatatcgatctgatggccacctgcaggagccgtggcgtcgagaggggcggcgcgccgcacgtcctcgcggtggacgacagctccgtggaccgcgccgtcatctccggcatcctccggagctctcagttccgcgtgacggctgtggacagcgggaagagggcattggagctgctaggctcggaaccgaatgtgagcatgattatcactgactactggatgccggagatgaccgggtatgaactcctgaagaaggtcaaggagtcgtccaggctgaaggagatccctgtggtgatcatgtcctcggagaacgtctctacaaggatcaacaggtgcttggaggaaggagcggaggatttcttgctgaagcccgtgcagccgtcggacgtgtcgcggctgtgcagccgcgtcctccggtga

SEQ ID NO: 88934 - DNA, 249 bp, Oryza sativa
  unsure (1)..(249): unsure at all n locations
  Clone ID: PAT_MRT4530_87738C.1
cgcccaggccgaggccctcttccgccgctacaagtggtagcagcagcagcagacttccccccccttgtaatgcaatgccctctgcttcaattcagcttcagaatttgctttctcttcttgtgagtngtgatcaatgcaagttgtatggtagtagaacatgctagatttgggttattgtttgtactgttgtagatttggagtagtagttaagattcatggccagattgtgatctaaaaaaaaaaaaaaaa

SEQ ID NO: 88935 - DNA, 1278 bp, Oryza sativa
  unsure (1)..(1278): unsure at all n locations
  Clone ID: PAT_MRT4530_87739C.1
tccgnattcccggtcgaccccgcgtccttcccgggtcggcccacgcgtccgcctctcccatggcggcgatctcgcgcgcgatccgggcgtgcgccgccgcggggtcccggcggagcatggcgtcgtcggcgaaggaggtggcggcggccggggcgcgggcggcggcggcggtggcgcggcgcgggcgggagcgggagcgggaggaggacgggaggcgcgtgcagtgggtgttcctgggctgccccggggtggggaagggcacctacgccagccgcctctcgcagatgctccgcgtgccccacatcgccaccggcgatctcgtccgcgacgccctcgcctccccgggccccttctccgagcagcttgcggagattgtgaataatggaaagctagtgtcggatgagatcataataaatcttctgtcaaagcggcttgaagagggagcagaaaagggtgagctgggcttcatccttgatggttttccaagaaccataagacaagcggagatacttgaaggagtcacggatattgatttggtcatcaacctcaaactccgagaagaggctctgcttgcaaaatgccttggtagaaggatgtgcagccagtgtggtggaaattttaatgtagcgtccattgatatggagggcgaaaatggtggtcctcgaatgtacatgcctccactactgcctcctccacagtgtgaatcaaagttgataactaggcctgatgatactgaagaggtggtaaaggagcgattgcgtgtttatcatgatttgtgtgagccagtggaggacttctacagagcacgtggtaaactattggagttcaatctaccaggaggaattccagaatcatggccgaagttactgcaagcattgaatttagaccctggcaatgaaagatctgcagcagcatgatttttgctttaggaatgttcgttatgtatttgtagccctacgccagaagtagttaagtaatgagtattccttgtacctctagaagtagttcaatcgggttaccaaaattatattgatatagcactcaattgtataggtgattcatcatcgatcttgcatgatgccatgatcgatgagtgtgctggttgttattcttaaatgagaaagcttccaataaaccaatacacatttatttgtagccaactatgcttgttgaaagcaacacaaggcaagccttgtgatgacagtaatattttccttgcaactatgcctgtttgaaagcaatacagagcacccattgtaatgaaaaaaaaaaaaaaaa

SEQ ID NO: 88936 - DNA, 457 bp, Oryza sativa
  Clone ID: PAT_MRT4530_8773C.1
tttgtttttttttttttgttttttttttttttttttttttcttttttttttggaacaaataaccaggggcttttggcaattgccaagtgaagtattttcctaaaactggccctgggatttacaatctttcctgaccccaacatggtttacaaataggatggtcacaattttgaacttgcttgtcttgtaaatatccatggcaaatgaagaggctttgaaaagccgggggaccaaacaaggcgaaaaaaggaggggtccttcccgatagcaggggtatgggtggggattttactttaagggcatgcatatgcgggtcagcacacaagggggattgggggggattcctaaacattcgagttcggcaaatttggcagttttgggcttatggagaactttagccacggtgttttttccacgtacaccagaaccgggtgcggtactaacccaaccggattgc

SEQ ID NO: 88937 - DNA, 222 bp, Oryza sativa
  Clone ID: PAT_MRT4530_87740C.1
atgggctgccttcagctcgtcttcgcgctcccaagtagcttcttcttcggcgtgattgctccactggaccttgcaaaaacggattacccggttcctggtcctgcgctccatggtgtccaggattttcactggcctctccacataggagaactcggcataggggagactcttatcccaagtcttcccgaagtccaggacacatgcgcgaagcatatcttctaa

SEQ ID NO: 88938 - DNA, 1998 bp, Oryza sativa
  Clone ID: PAT_MRT4530_87741C.1
ctgcaaacaatagtagttaaattctttaccgtgtagtattcacttcacagatcgttcaacacaaatttctcgtgaatttcttcgattccactccacactctccgcgtgaatgaatgaatcaatctaatggcgggaatgcacaagaagaacgaagagctatgatgcttccatggatggatcatttcacaggtgtcctcggatccacagcagcgtccgccgcgcgaacgacggcgcctcgtcggccctcgagctgagcccgttgccggcgcctgcgccggggacggccgccgtggcggcggcggactcgaggtcccagtccgcgacgctgccgctcgcgctcttctcgctcttgtcccacgccgacacgttgtactccgactccgtgacggggctcacgacgtccgggcgcagcggcttcggcgccgccgttgccccgacgtcgctcgccgcgcgctgcagcacggaggagagccggaacgacgacgcgcgccgggaggacgcgccgtccttcctgatccgcggcgcgccgcgcatccatatcttggagaaggagaagctctccttcttccccaccttggccggcggcttcggcggctgcgcctgcgcgagcttgccgccgggcagcgcgtcgaggccgcggaagctctcccgcttggagtggcagtcgcactccgacatggcgacccggtggcccggcatctgcgtcgtggggcgcttcttggccggcggcttcacggcgacgcggagcagagacctctcgtccatgacgtactcgtacgtccccatggagtagcaacgccgcacgtcctgctcggggttggcgctgctgctgccgccgcagccgccgccggcggcgacttcggtggcctgactccgaaacttgccaagcttgacggagacgaccacctcgtccgccttctccgccgcctctgcatgcttctgttccggctctgcttcttcctcctgctccatgacgaggctgagatgagccgacgacgccgcgtcgaggcgatcggagatggagccctccgagccggactcgagcacgaacagcagcgggctgcagccaccgccgtagggggagaagtcggcgaggaggctgcggcggcagagcgggcaggtggagtgcgacagcagccacgtgtcgatgcagtcgacgtggaaggcgtggctgcacttggggaggagccggaggcggtcgtcgtcggcgaactcgcagaggcagaccgcgcagtcgaacgggtccttcctgccggcgccgacgacggcgccgtagaggaacaccggcagcgtgtcgatgaaggactggtccacgccggcgtcgtggaggtggaacagctgctggagctgcccctggaaggcggtcacgttcgcgtcgccgctgtcggcgtcgccggcgtcacgcggcgccgggcggaggatgaaccggacgagcagatgcaggagcccggagacgaagaaaataacagccaagatcaagattatcagcaggatgctagggctgatcctgctctggaacgccgtgtcaaatgacaccggcgacgacggcggcggcggcggctggagctgcagcaatggcggctgcggcggcggaggaggcggcgggaggtacggaagcgggagctgcagcggcgacgtcggcggcagggcggtgtagttgatgtgcgcatgcattgtgtagtggctcatggcggcggcggcgtgcaagcgagggaagaacaacggggaggaggtacgacggcgacgacgacgacgagctcaccagtcaacaccaacaatggcggcgtggccttaattaggctctcgtcgcagcgcatctcctcttcctccgcgaaatggaggcgacgacgcaagtgaagagagaactcatcatcatcatcatcctcgtacgtcaactccggtggagcttgatctttgcagatgagggaaaggaacgaggtggtggtttaattggcgtactgcaagaacagggtgtgtagtgtatgtcgagatcgagag

SEQ ID NO: 88939 - DNA, 408 bp, Oryza sativa
  Clone ID: PAT_MRT4530_87742C.1
atggacaccccggcgttgctcccgttggcgcttgcccttgttgccatcccgatcaccatccttcttgatcttcaatcggatccgcctcggcaggctgtcccccgggccccgggcgtggccggtggtaacctgttcgacatcacgctggtgcggtgccggtgcttcatggagtgggcaggcaagtacggacccatcatgacggtctggctgggcacgtcgccgacgatcgtggtgtcgacgtcggagctagccagagaggtgttcaagaacgtgcggaagctgtgcaacctggagctctttgcgccgcgtcggatggaggctctcaggcccatcagcgaggacgaggtcaatgccatggtagagtccatctacagagccgtcactgctcctgttaattccgtattgtag

SEQ ID NO: 88940 - DNA, 890 bp, Oryza sativa
  Clone ID: PAT_MRT4530_87743C.1
cccacgcgtccgcccacgcgtccggccgcgtctcctcatctaatccaacgccaccgtgatcatcgatggcatacgagacgtcgtctgaccaccagcttgcggcggcggcggagtttctagccgcgctgcaggtgcacctcgccggcgccgaggcgtcgtcgccgacgtgggggggccggtgcgcgtacgacgaggacttcatgatgtacgagttcaaggtccggcggtgccctcgctcgcgggcgcacgagtggacgtcgtgcccgtacgcccacccgggcgaggccgcgcggcgccgcgacccgagccacgtcacctacaccggcgagccgtgcccggacttccgcgtcgccgcccgcgccgcatgcccgcgcggctccgggtgcccgttcgcgcacgggaccttcgagacgtggctgcacccgtcgcgctaccgcacgcggccgtgccgctccggcatgctgtgcgctcgcccggtatgcttcttcgcccacaacgacaaggagctgcggatcgtgggcgacgacgctgccgccgccacgccctcgccgaggtccccgttcacgacgtcggaggactcacctccgccgtctccgatggacatgaagcagattgtccttgcaatgcaacagatggatgcgaggaaggcgacgcgatcggtcgctccaaaaacggacatgttacagcaggagctggaagaggacgctccggaactgggatgggtgtctgacctgttgatgtgaaacttgcattttgagatgtacaaattatttatataatttattttcaacagaaatgtattctgtattctatattctgtaacgtaatttcaagtatatatataggcttggtcctcgtgtaagagaactacatgatgtagactttttatt

SEQ ID NO: 88941 - DNA, 382 bp, Oryza sativa
  Clone ID: PAT_MRT4530_87744C.1
ctcagattgatactgatagacttgtcacacattaacatacgcgcgaatatcatcagcctaatccagttcagcctctggagacaatactgacttcaaacagacctagcgtcttcatgccaactccgatttagatgatcttggacttgatggaaagcttatctcgtcaactttcaaacgtatctggtctcatatccaaattcaacttgaggatcatcaaccacgcgtcacggttggtacgacatcgtttgtggtgtagccattgcatggcgttctggacttgttctggttgatatccacatcgcaaaacgtcgcactcgatcaaagcgaaagttatcgcctcactagaatatcggaccacgagagagagcgtcatcacatacgc

SEQ ID NO: 88942 - DNA, 168 bp, Oryza sativa
  Clone ID: PAT_MRT4530_87745C.1
atggaagttgcggtaagagagatcgctacgtgctggttcgagaaccagcgagcgagtagagttatctctcgaacaccaatggaagttgcggtgcgagagattgctacgtgctggttcgagaaccagcgagattgctacgtgctggttcgagaaccagcgagcgagtag

SEQ ID NO: 88943 - DNA, 477 bp, Oryza sativa
  Clone ID: PAT_MRT4530_87746C.1
atggacaccccggcgttgctcccgttggcgcttgcccttgttgccatcccgatcaccatccttcttgatcttcaatcggatccgcctcggcaggctgtcccccgggccccgggcgtggccggtggtaacctgttcgacatcacgctggtgcggtgccggtgcttcatggagtgggcaggcaagtacggacccatcatgacgctcgccgaccgcccgcggaaccactcggcggagcggttaagccgcggcggcacggacctcatctgggcggactatggcccgcactacgtcaaggtgcggaagctgtgcaacctggagctctttgcgccgcgtcggatggaggctctcaggcccatcagcgaggacgaggtcaatgccatggtagagtccatctacagagccgtcactgctcctggtaggttgtacagcacgatgaatgaatttaatgtgttttgcacgcaacatcatgtgtcttaa

SEQ ID NO: 88944 - DNA, 1460 bp, Oryza sativa
  Clone ID: PAT_MRT4530_87747C.1
ttttttttttttttttttttttttgcgaaaaggcgtgtgtttgttacaaacacacactgtcatttgatcaaaaatttcaaaattgatacactcgtttaaccattttttttcctcgcaaaagttgctgtacaaactcgaactctgctactcacacatatgtgatatgtacatagatggatacacaattatacacggaatttagtttctgtaatacgcttcagatttctagaaggcaggcggcctggacgtgcccggagaactcgggcggcgccggcgcgcgcgcccacgacgcgggcttgccggcctcctcccgcagcgtgtacaccgtctggtcgccgccgtggcagtcggacccgatgaccacgacgcggccgtcggggatgacggaaacggccgccgcggtgcgcgcgtcctccggcaccggcgccacgggccgccacgccgcgggggcggaggagatggcgccgtggcgcgccacgaggtgcccgtcgcggagcatgtacatgcggtctccggcctcgggggcggcgctgcaggttctcgggcacgcgccgtcgtcgacgaagccttcttggacggcggaccaggtggacgtcgccgggtcgaaccactcggcggagccgacgaatcgcccctgcgccggcgtcgggtacccgccgacgaccaggaacttgccgtcgacgcagagcccgcgcggctcgtcgcgctcctccgccatgtcggggagcgcggcccacgcgtcggcgtccgggtcgtacgccagcgccgatcgaagggcgttcttctcctcgtcgtggccaccggcgacgaacaccttcccgccgacggcggcgcacgcgaagaacgaccggcgcgggcccggcatggccgcgccacggcgccacgcgcccgtgaggaagtcatacacgagcaccgagtccgtcggcgcccacgtctccgggtcccagccgccgacgaccaccagccgcttcctcccctccacaccgccatccaccgccgccacctggcagaacagcggcaagctcccactcgctccacccacctccggcagcggcgtccacctcccctccgccgggtccaacagcaccatccggtacgagttccccggcacaccgccggccgacgactgcttgtccgccgccgggcccgcctcggcgagctcacgccgcgcctgcaccagcgcgagcgccgggcgcgccaggccctccgccttcctcaggcggttgtacgccggcgactccacctccgccttccactggcgcgagatgcggcgcaccgccggcagctggtcgaaccccacccggatgaggcactccctcgccacctcctccggcaaccccggaatcagctcgttgtaacccatgatgctcaatcgagctggaattcgagcaagaaatgcgtgagatgatgatgatttcttggcttctcttctcttctctcgtctgagcttggcctgctgg

SEQ ID NO: 88945 - DNA, 594 bp, Oryza sativa
  Clone ID: PAT_MRT4530_87748C.1
atggactccatccttctcctgcctctggttgctctcctagttgttgccatctcatggctatgggattacaccgtcgtgcgactgatttggaggcctcactgcatagccaaggaattcagagagaagcaggggatccgtggacctgcctacaagttcttgggaggcaacaatggcgaaatcagcaggttgaaggaggaggcagatggccaggtgttggataatcttcgtgaccacaactacctcccaaggatagcacctcacttcctcaaatggagggctcagtatgaagttttcaactcagggtcaaggtatggagaagcgtttctgttttggtatggagcaaagccacgcatctgcattttcgactatgagttggctaggcagattctctcgagcaagtctggacattttctgaagaatgatgcgcccccaactctggtggccctaatgggcaagggattagtactcttggaaggcactgattgggtgcgccatcgcagggtaatcaaccctgcttttaacatggacaagctcaaggtaacagtaacaccaccatcaatctcttctcataccaacagatttcgaacttcacct

SEQ ID NO: 88946 - DNA, 224 bp, Oryza sativa
  Clone ID: PAT_MRT4530_87749C.1
acattattacaaggtaccactcattgtttaagagcaaagacaaatacaaaactgatgcatccaacgtaccaaaaagaaagcgaacagcagcccccacagtgctaaaaaaaaagaactaggagagggagaactaccagggacagaagggcatgcatgggcccatgacgaaaaaaccaccccctccatcgggggcgggcgagaaaacaccccaacctcgaccagtg

SEQ ID NO: 88947 - DNA, 453 bp, Oryza sativa
  Clone ID: PAT_MRT4530_8774C.1
atggcgagcacaagacacagcgatagttgccgggttacagagtccgactctaactccacccctaacacctattacaactccaagtccaactataaccaaataggactagtatattcgacacctattctaacagagctggcgtggtcaaggtggggcgagcgcgtcagagcggcgacgtcatcggcgtgcctgcctccgcgtctccccgagctagaggacaaggtagaggcaaggaggaaaaaggaaaagcgcgaggcgaaaaagcgaggcctccctctgcttgactgcttctggtggcgcgactggcaaggcggactgaccggcgtcgacgccttggacactagcggcggggccatgcacgtgatgagcagccgtggcgagtcgggctcgggcagaccggagcttcggcacgcgagcgtaagggagagggatctgctgggctgtcctgcttag

SEQ ID NO: 88948 - DNA, 680 bp, Oryza sativa
  Clone ID: PAT_MRT4530_87750C.1
cccacgcgtccggccgccgccaagacacaggggaggggcggcgatctccatttggcgaggagagcagagcagggaggggaggggaggggatcctggtcatattttactgcccagagcacagaaaataaaagatggttaatgcaatcaagggattgttcatctcctgtgatgtgccaatggcacagttcatcgaatgcttcaatgcccgcatcagacaagttcatcttgcacatgcttgatccaacgcacatgttcgtccagcctcacgtggcggatatgatcagaagtaagatatcagagttcagggaccagaacagctacgagaaaccatcatgaactatcaaggatcatcctgtcctcagactcccatataaacataccaccgtttgttgttaagcctgtaatgtggagtagtgataagttctgagcatcacatctcactcatgataatcaagaatgattgacattcggtatcagaatgccacttttagagtgatagataatgcaactgtgagattgtaatggaataactgtattttaatatcagaaacaagtcgagttgtgatggtggaattcggccgaataaatcttcctgactgactgtctgtctgtccgccgcgttcttgtggaattttcagctgatatttttactttggtccaggttaacgacgtaagcattc

SEQ ID NO: 88949 - DNA, 722 bp, Oryza sativa
  Clone ID: PAT_MRT4530_87751C.1
accaagaaaatctggtagcctttgtactgtgattagagaaagaaaatggtgcgtgcatgacgaccatatatgacaggccctgaactttctttcctgctcctatatgggatcagatcaaataacattctggttatctggtataattaaaaataacaacgcactaacatggatttgacgctatacgtgcctacattcatggcatgaaagccacaatgccgtattgacaactttatgataagtgagcttttttattccccatttctccttgatgctatctgcatgtgtcaacttttcctctgaaccaacagtgatcaaggttttacggcgattgcttttttattccccactctgactcggccactcggaccggttgccgcttggaagtggcatatggtgcgggagtgacgaaacccatcgagaaccggcttaatctgcccggttcgatcgactcgttcgttggattttgacgtgaaccggtttaaacttgttcaatgttctttgttgtccgagccgcagccgcagccgcttccggttcgaccgtgacgtgatcgctcacggtttgcagcttggcatctgcttctgttgttggcttttcgtcgtcgtcgtcgtcgtcgtcgtcagctgatctgaacgccgcgagggtggcgagcgtgtcgacggcgtccacgacgccctcgatcctcgccgacacctcgatcagcagcgaggtcaccgtgagcagc

SEQ ID NO: 88950 - DNA, 225 bp, Oryza sativa
  Clone ID: PAT_MRT4530_87752C.1
atggctgatatgggtgggcagcggcgccaaagccacggggttgaaggacggtggacaagcagtgggggtgtgggatccgtagtgcttaggaggcgggacggggcgggggcaggggcggctggtggtgtctttgacgatgagggagccactgaagatggggataaggtggggcggggcacctcgcaggcgcttgggcttatggacttggagcaaagtgttgcgtag

SEQ ID NO: 88951 - DNA, 2485 bp, Oryza sativa
  Clone ID: PAT_MRT4530_87753C.1
atggatcaacgagatattatcatgctcactagagattattgtgaaaacataaactgggtgaacaaaccaactattttgctgcatgatgctctacctaatttactagaagatcctgaatatgtggacttgcgagatcgtggacgaactatcttcatgcatgatgaggagcacactttaaattcaaaaatacagagggcattctgtcctccaaaagtagtggtacacaacccatgtctggagtatatcaaatatatcatcctaccttggtttgggaacttggaggtagtccagaatgaatggaatggtagtaccaagacatttgtaagcatggaagaacttagtgttgattatgaaagaggttatctcaattctgctgatgttaagatggctcttgagaaagcaataaacaacattctagagcctgtccgtgactacttcagtggtaacactaaagcccaagctctaattatggcctgccagttgcagaatgaaattactggagatgtcctgaagattcaaatgcagaacaaagagatgcgccatcataggcagagactcagggactcaggagccacctcctacctcctgccggtggctctgcaggaccccacttcacagcgggccccacgtgtcccggataccgcgcacagtgagaagtctgatcgtctgagggtgcatttgtggagaatgtcagagagcaatgtcgacggcatcgaaatatcagctagtaacgatgagaggagggacagaggggacgctgagatttcggaggatgagccaaggcagacgaggatacggtcgttgaagaagaaggcgctgcatgcatctacgaggctgacgcattcgctgaagaagagagggaagaggaaagtgggctgcagagtgccgaagatcacgatagaggatgtcagggacgcggaggaggagcaggctgtcagctcttttcgagaggttttgtttgccagggacatgctgcctgagaggcatgacgattatcacacgatgcttagattcttgaaagctaggaaatttgatgttgaaaaggcagcacatatgtgggctgacatgctgcactggaggaaggatttcgggactgacacaattttggaagactctatggatatgaacaattgcttcccacataatttctttactacaacatgtatactgattgcatctaactcttctctgttaaaggattttgaatttcatgagctagaggaggtgctgcagtattatccccatggttatcatggtgttgacaaggaaggaaggcccgtctatatcgagttgcttgggaaagttgaacccagtaagcttgtacaaattacaacagtggaacgctatattaaatatcatgtacaggaatttgagagagcattccgagagaagtttcctgcatgctcaattgctgctaaaaagcatattgatacgacaactacaatactggatgtccacggtgtgggttggaagaactttagcaagatcgcaagggatttggtgcgctgtatgcagaaaatagatggtgattattatcctgaggttctaggaacaaaataccaacacagacttcttgaagctattgactcaagccaactaccagagtttcttggtggttcttgcacgtgctctagccagggaggatgcctgcgatccaacaaaggcccctggagtgatcctttaattatgaagcttgtacattgcatggaatcatctgcgttgaaggacattggccaagtatctgatatagaagaagcaattacaggctctttaccagaaagaattagttatacatcaaatgctgaatctggttcagatgttgatgatcttggatctcctataggacaggaagattttgagtatcatagtttggctccagttcatgaggaggccagggagtcaggatcaacatgcagtggttctgatgataaagttgttgagacgaatacaagatacaaccctcctggaaatggatcgggacagtacagcgcaagacaaaatccctcaataaacagagtttcgcctgagccagggtcacgtcccaaatgatggtgaaggaaatgcagatcatgggatcttgaaatatatttctaaaaaagttctcggtgtaattcttgaagtactctcttttttgcgtattttcatccgtcatcgacaacagttggaaaatgtcccccagcatactacaacagtgcacagtaatcaggcagatcttcagataattaaggaagatcgtgtaaatccttgtctagagcgtcttgaaagacttgagacaatgtttaatcagctcagcagaaagcctccagagattccacaggataaggatcgtgctatacaggattcttttgacaggataaagtgcattgaatttgatctggagaagacaaagaaggtattgcatgcaacagtgattagacaaatgcagatggctgagacattggaagctgtaaaggagtccgatcttaggtacgtcatccgtgtttga

SEQ ID NO: 88952 - DNA, 336 bp, Oryza sativa
  unsure (1)..(336): unsure at all n locations
  Clone ID: PAT_MRT4530_87754C.1
ctgcatgttataatcctccattcttttngctcttcctcgcactcgcagcgccaccaacgaaaacccaaggcaacgcaccacgctgcacgcgtccgtggtcgccgcgaaacttgcgccgcgatggggaggccgattcacccccaaatcctgccatcgggatacagtttgatttctccgtcgagcagcaacagcagcagcgaggattgggtgtgcgaaaaggagtcgcctttgagggatcgtgagcaatggcgccggcgtgggatcgcgccaagcacgcgctcgccaccaggctctgcattcgcttcccggcgcggcagagggccgtggaggatgcac

SEQ ID NO: 88953 - DNA, 406 bp, Oryza sativa
  Clone ID: PAT_MRT4530_87755C.1
aggatgctcaacaagaggatgattgaaatggaagaatgccaacgattcccttaggaaatagcttttgtgttgatgcttattgggttaaaggaaatgcaggaattggaatattttttcacatgtcaaactcacataatgctttggaccttaaagccactactactatggctgattctcctgtgcaggctgagcttgtagcattgcaattgacaatcgaggtcgcaaattttttgaatattgcaagtaccacctttctaacggacaacataacaattgtggacatcataaagaagagaagttttctacgagaccctggatattggagtcttagaccactgctgagccaaatgcaacgagtgatcttccgcacgacttaatgcatagtatcatttgcattccaagagaa

SEQ ID NO: 88954 - DNA, 482 bp, Oryza sativa
  unsure (1)..(482): unsure at all n locations
  Clone ID: PAT_MRT4530_87756C.1
gattcggcacgaggagcctcccctntctgttngcnancntgggcaccaacgagtcacnncctccacgangaactccttcgccggcgtgcgcctccccgccgccggncgcaaccccaccgtctccgtcgcgccgcgcaccggangngccatctgcaactccatctcgtcgtcgtcgtccactcccccctacganctcaacgccatcaggttcagccccatcaaggantccatcgtgtcccgcgagatgaccggcggtncatgaccgacatgatcacctacgccganaccgacntcctcctcctccgngccggntccgcngggntctcctgcgcgtncgaactctccaaagaacctccgtcagcgtcgccgtcntccaacaatccgtgtnccccgcgggggggcgttgntccgcggnaacttttctcccccatggtggtgcgcaagccngggcacctgttcctccaanaactcggngttccntt

SEQ ID NO: 88955 - DNA, 231 bp, Oryza sativa
  Clone ID: PAT_MRT4530_87757C.1
atggtccagatcagcctcaaggctgatctgacggcggcggaagcggctgcctggctcgggcacggcactagaccgccccaccggccatggcacacggtggcacgagcggccactggcggcacagccggcgcggggaaagatgacggcgaacggcgacgacgggcggtagacggcaagacgagccgcggatggcgtccggagcaatctaggggagcaaataagaggaattag

SEQ ID NO: 88956 - DNA, 479 bp, Oryza sativa
  Clone ID: PAT_MRT4530_87758C.1
ctctccctctctctccgagcagcgagcaacgccgccgttttcttcgcctctcacagagacgactcctcgctctcgttgtcaagcagagggaggttacgaagagcgccgttgaggcggctgtaatggtggacgtggacagcaggatggccgggctcgcccacccggcggcgcacgcggcggggctgcgacgcctgtccacgcgcgccgccgcggggccaccgtcggcgtcgctgtcgccgcgccacgggttgcactcttttgacggcgtggcggcggccgtgctgtcgcatcttcggaagaccggcggtggttgttcttcccgcgctctccgacgcggagttcgcccccctgggggccgagatggggttcacgttcccgcctgacctccgcgccgtgctggcgatggggctcccgtcgggggctgggttcccggactggcgcggccgggcggggctccgcgcggcgttcgacctgcccat

SEQ ID NO: 88957 - DNA, 181 bp, Oryza sativa
  Clone ID: PAT_MRT4530_87759C.1
gagctacatttgggggcatttggtaaattgggttcatgccctatttacattccaccttgttgctgtaatggcacatctatgtatttacatttggcaacatttaaaattgcctgtttctattttttattattcaccttattttctattttttatatttgtgtacttctttaattttttagaa

SEQ ID NO: 88958 - DNA, 406 bp, Oryza sativa
  Clone ID: PAT_MRT4530_8775C.1
ggaccaaggaattgttctcaaaaatcttaagaggggaaatccccccaaaagagagggccggtttacaaaactttattttttttaagtacaacaaattttccattcctccatgatcctattaggttttacccccaaaccaaacaaattaccttgcccgagcccttttcctccactggcaaataaacttccctggggcttgagtagccaagcatccatggggggaccaaaatcccatgtcagtgttttctacaacaaggttgccggtgataagctcacggtggggggggacgggccaaataaacccccttgggaggggctttacggcaagccctacctctatgatgatcccccttatgggcgggtttttttccccccttttgggaataaggtttttttttgccaaccc

SEQ ID NO: 88959 - DNA, 503 bp, Oryza sativa
  Clone ID: PAT_MRT4530_87760C.1
ggccatggcattaccgccatggcctaagcttgttgctgcacatacaccccaaaaaaaaataacctaagaaaacatcacctcctcttcttctccaccatggatgcccaaaaaaaaccacaaaaaagcttttcttggattcttggtggagaggggaggagagtgaggaggagagagattaagccctaaatttaaccctaaaaaaaactactactacataatcaatccatcatcccatccttccatataatcccacaagtataattgagagtttaggtaatttaccaagaaaaatctttttgtatgtaaataaatctcaggtgtcaaggtccttgatgtaaattctatggggggtttagaaaatttagagggaggagacagggacaaaaggggttcatcaaggagagcccttttggatttaatcaaaaaaaatttttctcttcatctgtccctgtaaactctctttgggatttagtagctaattgaattagtaggtgggaaggggg

SEQ ID NO: 88960 - DNA, 189 bp, Oryza sativa
  Clone ID: PAT_MRT4530_87761C.1
attatttcaatggtgtgcaccaattttatatttgtatcttacttttcaaagaataacttacttcaggctacttcagtggacaacgcaggaagctctacatccatttcaagttcacttatgtagtgctaatacatatataatgcagatgtaaaatagctgatgaggacagataacacatttatatgttac

SEQ ID NO: 88961 - DNA, 450 bp, Oryza sativa
  Clone ID: PAT_MRT4530_87762C.1
atgctagacgatcggttatcatcgagtttagagcctaaaccgagaattagaccgtttgaccatctagttagtcaaagacgccactcgcagccacgaaatcgcaatgcttctcctttgctagttgctaccgtggaccttactcccacctccctccgacccacgactctacgagaggggctacatcttgggacatgtgatcaatcgacgcgacccccgggagaaagttactactcgtactccgtcatctcatctctctctctacctcgtcgtctccatctgctattctgcatgcatgagccaatcgatatactcctacgccatgaccatgatcaagcaaagcaatgtacacctgctgctgtgagagttgcaattctccacggtgcatcatcgatcatcaattactgctgctgctgctgccaggctgccccgcagcacccgacgccgccgcgc

SEQ ID NO: 88962 - DNA, 1046 bp, Oryza sativa
  Clone ID: PAT_MRT4530_87763C.1
ccctttgcccgagggcccgaattggcagcccaacgacggcgacggcgccggcgacgacgacggcgatggcggcggcggcggtaacggtcaagctcggagggtggagtagttactgttactgccctaccaccacgaggaggagcaaaccggcggcggtgaagatgatgatggcgctttgccctaccagcttccggatcgaattgcctcgacgaaccattcgggctgccatactgaacaagagacacaccgttccttgctaccagaggcaagaaggagcttcatctccagctccgcagatcgaagccaagtcaatggaggaggtatatgatgctttggctcgagcaccttttttctgttttcaagaagcattagaaccatcttgactcaaaatacattgttggtattagctggaccacctggcgcgggaaaagtcttcagcagatcggtggatttgtcaagataagagtccatgtcttcaattgctgattagatatctgctctaataatgttcagagaaagacactaccaatggttgtttccatggagatctctgtacatataataagctcaatgcatctctcgaggatccaaaagaagcacatgcaagaagaggagcaccatggacattcgatccatcccggtttttgaaatgcctacagaccctgagagaagagggttcagtttatgctccatcatttgatcatggtgttggtgatccagttgaaaatgacatatttgtaaagccgcaacacaaaatagtgattgtcgaaggcaattatctattactggaagaagatgcctggagggacattagagccttgtttgatgaaaaatgcgatataattgatcgtgccatgagccagtttatcgatattgacattgatgtctccatgcaaagagtgctccagagacatgtcgccacaggaaaagagccagatgtagcagcatggcggatctcgtataatgaccggccaaacgcagagcttatcatgaagtcaaaaaagtctgcagatcttgtaatcagatcggtggatttgtcaagataa

SEQ ID NO: 88963 - DNA, 676 bp, Oryza sativa
  unsure (1)..(676): unsure at all n locations
  Clone ID: PAT_MRT4530_87764C.1
gggtcctcaagcctatggatgaactgaggtttcccttagagtttaaggtntacttagctagtagcgttctgtggtcantggtggctgctgcgtgcctgtggtntccttctcgggttgagagacttntctggttacgggggttgtcgcggtgtggcgccacttgtgctgtggttgtgtgtgatctgttgtcgcgcncancccccccatagggctttgangcggtgtntgattgaggctgggtntgtttgtgtgttggagcgatgaattggggatatatatatnatgtgccggccctgctgtgggtgtgccagagataggaactgacccacggccacatgtgagtgtgaccccaaagagtgccacctgcccctacgatagaggagtggtgagtgttgataggaccacagttgggagtaccacaccctcaacacaggaggaaaggagataaccccatactggaggatatatacgccatatcccaaatggtggaggctagaaggtgctcgtcaaggcttaggactggaagtgtcggaagcccatggtnatagatccgatgataatatctttgtacgaagaggtttctctaaagcggtaatctcatattctcattccccggttggatcaatatatatatatatatatatgagtttgttgctaaaaaaaaaaaaaaaaaaaa

SEQ ID NO: 88964 - DNA, 1326 bp, Oryza sativa
  unsure (1)..(1326): unsure at all n locations
  Clone ID: PAT_MRT4530_87765C.1
cgatcgccatctccaattctccatcgatcatctatctctcacgatcatctcgccggagctgtgtagtggtggtgaggaggagaatgatgatgaggtgtggttggtcgtcggcggcgttggttgcgntggtcgtcatggttggtgtgatggtggcgtngccggtgggggggagctagctcgggtggagcacccgacgaaggaggacgggtcgctggcggtgctcgtcgttggcgactgggggaggaaggggcagtacaaccagacgttggttgccacccagatgggcgtgatcggggaggagttggctgccgacttcatcctctccaccggcgacaatttctacaacgatggcctcaccggcgacaacgacacggccagcttccaggagtccttcaccaacatctacaccgctgatagcctccagaagccttggtacattgttctcggcaaccatgactacactggagatgccctcgcacagcagagccccgccattcgcgccgtcgatagccgttggacctccattaacaagtccttcatcgtcgactcagatatcgcggagttcttcttggtggacacggtgccattcgtgcagaagtattggaacgagagcaagttcgactggagacaggtcgcccctcgtgacacctacctctccactctactcacagatttaggagacgcgatgtcgcagtcgaatgcgacgtggaagatcgtggttggacaccacaccatcagcagcggctgcgagcacggcaacaccaccgacctcgtcgccatgctcctccctgtcctcaagacctatggggctgacatgtacatcaacggccatgatcattgtttgcagcgcatcaccagcattgacagcccacttgaattcatcacgagcgggggcgggtcgagggcgtgggcggggaagtttaagcaaacctcggacaagctggagttcatctacgacgggcaagggttcctgtcgatgcagctgacgatggcggaggccagcttcgccttctatgacgtcaccggcgccgtcctgtacagctggcagctcgccaagtcaacctccaccaactagtgatcaaagtcaacacttaattattgtgttaattagctgcttatgtgtgtgaaattggaacagtcaatgtactgcttcagttatcgatatatatactgtgacaaaagatgcacggtgtataaatagtgtgtgtgtttgtatacgtaagtatgcaagaatgttgctgtttgtaattgcatcctaagttcatgggataagttataatggctatctaaatgatattcagtgtgcgtaaaaaaaaaaaaaaaaaa

SEQ ID NO: 88965 - DNA, 2869 bp, Oryza sativa
  Clone ID: PAT_MRT4530_87766C.1
atgaggaggcgctgcagcggcagccatggcaggcagctgctgctcctgtattggctggtgatcgcgtgttcttgggttgcagctgctcaggctcagcaagctccaagaactgatccagttgaagtggcggcgctgaacgcgatcctggggagatggggaacgaatccgcccaagacttggaacatcaccggcggcgacccctgcaccggcaccgccgtcgacgacaccaacatcgacgacagccccgtcgtcaaccccggcatcaagtgcgactgctccttcaacaaccgcaccgtctgccacatcaccaagctgaacctgcagcaaaattacttgactggccctgtgccatcattcattgggaagcttactttcatgcaatacctaggcattggctcaaacaattttactggtgaacttcctgaagaactgggcaacttgaccaaactcgaacaattgtacactgatagtgctggcttgagtggtccattcccttcaacgttctcaaagcttaagaacctgaagctcctgcgggcatcagataacgattttacaggaaaaatacctgattatattgggagcttgactaatttggaagatctggctttccaaggaaattcttttgaaggaccgattccggaaagtttgtctaatttgtccaacttgacaagcttacgaattggtgatattgtaaacgggagctcttcgctggcctttatcagtaacctgacgtctttgaatatcctaatattgaggaactgcaagatatccgataatctcagaacagtaaatttctctaagcttggaagattaaccttgttagatttttcatacaatcaactcacgggaagctttccttcatgggttaccaataacaatttgcaatttattctaccttcaggactaaactgtttacaacaagacactccatgtttgctaggttctccagaatactattcttttgcggtagactgtggcagtaataaatctatgaaaggctcagataatactatatatgaagtagatgctgcaaatctcggagtcgcatcatactatgttaccagaaatacaagatggggtgtcagcaatgttggaatattcaatgatgcctcaagtcgaaactatgtaataaatagttcccaacagtttcaaaacacattggattcagaattattccaaaccgcgaggatgtcaccatcatccctaagatactatggtctaggacttgagaatggaaattatagtgtcaagcttcaatttgcagagtttgcttatccagattcaaagacttgggagagcacaggaaggcgaatttttgacatatatgtgcagggtgttctgaaagaaaagaattttgatataaggaaagcagttggtggaaaatcttttactgcagttaacaaaatatataatacaatcgtgtcgaaaaacttccttgagatccatctcttctgggctggcaagggcacttgttgtattccaactcaaggttactacggaccaatgatatctgcactaagtgtcaccccaaattttactcctaccgtgagaaatggagagccaaaaaagaaaagtaaggcagagctgtacaaccttgctggaaggcctaatgtctttagtaatgctgaactaaagttagctacagagaatttcagttctcaaaatatggtgggagaaggtggatatgggcaagtatataagggtaagctacctgatggaagagtcatagctgtcaaacaactttctcaatcatcccatcagggaaaaagcgagttcgtgacagaggttgcaacaatttcagctgtgcaacatcggaaccttgtgaaattgcacggctgctgcattgatagtaacacacccttgttggtttatgagtacctcgaaaatggaagcctagacagagcactctttggaagcaaaagctttaatctagactggccaacacgctttgagatcgttttgggcgttgctagaggcctaacttatcttcacgaagagtctagcgttcgcatcgtgcatagagacatcaaagccagcaatgtcttacttgacactgatctcacccccaagatctctgactttggacttgcaaagctctatgatgagaagaagacccatatcagcacaaaaatagccggcacgcttggctatctggcacccgagtatgcaatgagaggccatctgactgaaaaggccgacgtttttgcatttggggtagtcgccttggagactgttgctggtcgaccaaacaccgacaactctcgtgaagaagataagatctatctctttgaatgggcctggacactatatgagagcgggcaagcactcgggatcgtagacccaaaactcaaggaattcaatgagaaggaagccttgagagtcatctgtgccgcactcctttgcactcaagggtcaccacaccagcggccatcaatgtccagggtcatggctagtgctagctggagatattgaggtagttgagatggtgacgaaaccgagctacatcactgagtggcaatatagagatggaaacagcaccaactcagaatctaccacctcagagttcagcaggcagaaggagatcgaccctctcaccatgtcgccaacaatcaccggatctagtcatgatggaaggtgaatgctgcaacctgcaggtgatcttggtttgaaatgattgtatgtaaatgtaagacggagctaatagtggaacttaattattctgaagtatgtatgatgataaaagtatttactccttgtaatttgtaacaggtcaaatagagtagtatcctagtatatatcttagaaattaatcaacgtattcgcatgtttatgagcacattctccagcaaaatagtaaaaactgtccatg

SEQ ID NO: 88966 - DNA, 156 bp, Oryza sativa
  Clone ID: PAT_MRT4530_87767C.1
agagttcttaaaggaagtggactgagaaaccatgaaggattctctaaatggaaggcagaacatgtgctgcggggtcattaacgggttttaactacacgtatgcacatactacatatagcagggcggaagaacggatggctaaacattattacaaat

SEQ ID NO: 88967 - DNA, 1080 bp, Oryza sativa
  Clone ID: PAT_MRT4530_87768C.1
atggcctcctcctcttcctcctccagcctctgtgataatcatctcttgcaagatgacctgatcccatggccttccatgccctttgctcctgctcccaacacctttggattgaaccaccaatggagccagcctccaatgctaagcagcagtactgatcagttaagctcatatgagcttgaatcactccaatcagttgaaagtcagctggcagctgctgctcctccgacattaagcccccatctgcaggctcatcaactcagcacggtgctaatgatgcaggagctagggttccaatggagcagctgcgctgcgccagcagatcaacatagtattgcaagctccacgaataataatagtaatgtgatgatgaacgaggaggagctacggccacgtcctgatcaatccctaatcagcaatccaaggtcatgcagcgccaccacgcttcttcctccgccgcatctacatctggacggcgctgtgctcccgagcatcaacgtctcgcggctgcagaagctggccgccggcgatgagccgctgcagatatgttgcaagaggcaggctgctgctgctgcagtggtcggccatagcagcataagagatgagcatgtgccctgcccctatgctggccctcctgctcatctaattcaaggaccatccaacaccctgcagcttttaagggtgacatgcgtcatctttttgccccaaaaagtactgatgaagaggaatacgaatgcagcagctcaagggagaggtggccgccatgggagttcaacggagcacagatcatcaacagcgctgccgccatcgtcaaagaagccccggctcgagtcacactcctcctcaatgcttccttcattcaaggtaaggaaagagaaactaggggatagaattgccgcccttcagcaactggtctcaccctttggtaagactgataccgcatcggtactcatggaggccatcggttacatcaaatttcttcaggaccaagttgagactttgagcggtccatacctgagatcatccaagaacagcaagaaattagcctgcagggcagcacaacaacaacgggtaaaaagataa

SEQ ID NO: 88968 - DNA, 593 bp, Oryza sativa
  unsure (1)..(593): unsure at all n locations
  Clone ID: PAT_MRT4530_87769C.1
ataacaaacatatatatttgattgctgttaaatgggtacaaacaaccccggaacaaaaacaacggtcccaaacaaaatttgctacaaggccgactccccaattttgaatgcaaccccttcaatccagcaaaaaaatccctgaaacaaatggcaaacaaaggggttttgttttgttcatcaactgacaaatactccattccctttgggttcccgtatccccccgtgcatacagtgttgttgctgcttaggtttgttgggtaccctgaataaaaaaaaatttgggggtgaaaattggcccccctttggaattgggttccttttttggaanaaagattccccccccanantggtnggccaaaggtccccccccanatttttttttttttcaaaantaaccccnaaaaaaanaaanaacccccntggccccccaaaaaaccggnttttnnctnttattttgggcccccggaaaaaaaaanntggaaangccccnntnccncccccccctnngnaaaccccccccctttaattttcccnaatttctcccttaccccctnatttntcctttttccccccccaanaaaaaccntnggnaa

SEQ ID NO: 88969 - DNA, 1533 bp, Oryza sativa
  Clone ID: PAT_MRT4530_8776C.1
ggaactcggcacgagccgcgctgccaaagccgaaaaatcgagagagaaagagcaaaaccctaaccgcggcgctccgcccccttccgccgccggattcctcctcctccttcgtccgccttcgccggcgccgccctgctccgaaggagcccaggccttgtcgccgcgtcgcttgccccgccgccggtttcagcagcagccacccccaccaccatgtcttctcaggtcgacaaccgtagccaatctgctggaaagcgtgcccgcaccgacggtgggcggcgtgaggacgactgggtttgccccagctgccagaacgtcaacttcgccttccgcaccacctgcaacatgcgcaattgcaaccaatccaggcccaccgactatacgaaggatatgcagaaacctatgcagacaccgccgccccatttccccatgtcagggggatacatgagcccagggacgccgccatccatgtacctcgggggtggtgctcccccttatggcacctccctctatggcggacctgctttgccacgttatggtattgctcagttccctgggggtggaatgtatgggatgcccatggacagatatagcttgggcttacctgctggtcctggtccaatgggcgcgagggctggttcatattccgaggaaggatcccagaagaagcctgcaggagctgggcgtgataatgattggaaatgccctaattgcaacaacattaactttgcattccggacagtctgtaacatgagaaagtgcaatacaccaagacctgaaaaccaggggtccaaacctgatggtgcaagaggtccaaaaccaaagatgccagaaggtagttggaagtgcgagaagtgcaataacataaactatccattccgcacaaaatgtaaccgtccaagttgcgaggttggaaagacattaaagaccaacaatcctagagagtcatctgctgatcccgaaaatgaggtgggaactttgatacatgtagatgtgctactatcaggagcagctggcgatatggcatacaataaacttgctaaggacgttggaaatgggaaccgtccaagttgcgaggctgaaaagccatttcagacaaacaatgctaatgagtcatctgctgatcaggacaatcagtgagtcctagaacagttatgagggtcaagaaggtccagcgtcgtcgtcaaggttcagtctgaatgtctggggtctatctgtgtcagtagtcgctgctgtatccccttgagaccttagttgagtcgtcgtcctaatggtaaacgttttggagtggcaactggagtcatggatttctttattgctacagattttggttaagaacatcccttgtgaatttgtcatatacttctgaagcttggttgctttgtcttggttactggtactctgggaaaatggcaatttatgatataaatttcaattagaaaaaaaaaaaaaaaaactccgtaccatatctgtgtggagtgtgcacaccggaagcatagtcattttttgaatggtcgattgcttcttccacagtaa

SEQ ID NO: 88970 - DNA, 244 bp, Oryza sativa
  Clone ID: PAT_MRT4530_87770C.1
agcatcctagactgttactttggaggttgccgcctcctagacggcttgtggaggtgttgcccggtgacctctccgaggagattgtggaggaggcccgtccccgtttgtgagtggtttggagttcaccaccctcggagtgaaggaagaactaccccgagtgatcgaggcttgggttgtcctctccgtgggccggctcccgccttgcccaccccttgacgaagggggcgtgaggtggcttcgtggt

SEQ ID NO: 88971 - DNA, 1215 bp, Oryza sativa
  Clone ID: PAT_MRT4530_87771C.1
atggcgagcgcggcggccgaggtgccgtcctacttcgtctgcccgatctcgctgcagctcatgcgcgaccccgtcacgctccctacggggatctcgtacgaccgcgccgcgatcgcgcggtggctcgccgcgccgggggcccgccggacgtgtcccgtcacgcggcagccgctcgagcacgggctggagctcacgcccaaccacaccctgcgccgcctgatccagtcgtgggcggcctccgtctcccccgggtcggccgtggacgaggaggtggccgcgctacgaccggtttcgagcgacgaggttgcgtcgctcctgtccgacgccgccgcggcgcaggtgggcgcgctcaggaggctgcgggagctggcggcggagtgcgaggatagcagggcaatgctggagtcccagggcggggtgttcgacgtgctatctcgcgtcgtgaccagcggcagcgcctgctcgacggcgcgggaggaggcggttggtgtcctcgcgtcgctccggatcccggagcaggagctgatcggcgtctcgaccaggcacggcaacctggcggagtccctcacggccgtgctccgctcgtcgaatctccagtcgcgggcgcacgcggtgcagctcgtgaggacgctcgccgacgcggtggtcccggcgtgggtgatcggcctcaacgcggagctcctcgccgaggtggtcggcgtggtccgcgaccgcgtctcggcgcgggccaccaaggcgtccctccacgcgctcgccgcgctctgcccgtacggccggcaccgcgtgaagatcgtgggcgccggcgcggtggcggcgctggtggagctgctgctggacgagcccgagcggcgcgtgtgcgagctggcgctggccgtgctggaccggctgtgcacgtgcgcggaggggcgcgcggagctggtggcgcacgcggcgggcgtggccgtggtggggaagaaggtgctgcgggtgtcggaggcggcgagcgagcgggcggtgcgcgtgctgcggtcggtggcgcggcacgcggcgacgccggcggtgctgcaggagatggcgcagtgcggcgtggtggggaagctgtgcctggcgctgcggtcggagcagtgcggggtgaagaccaaggagaaggcgcacgaggtgctcaagctgcactccagggtctggagggcctcgccatgcttgtctcccagcttcttggcgctttacccatcatga

SEQ ID NO: 88972 - DNA, 1974 bp, Oryza sativa
  Clone ID: PAT_MRT4530_87772C.1
atcaccttgagtccttgacgccgcgtctagggtttcttcgatccacttgacgccgcgtcgcaggcactcctcgtcttcctcggtcgaagaaaagcggcggcggcggcggcggcggcggaagctgccgccttccttcaccccaaggcccaacagatcgaggacgctgacattatgttgcagctacctttctcccccggccacccatgcctacgggccgtcaattcagccattgggcacgtgcggaaaattaggaggagggctggtcattttctctcaagaagctccaagaataaggctgctcacagcgacttacattcgggctctattcaagatgtctgggctactctcagcgctgaagttgcatcaaaattgtctaaaagcgttgtttctctggctttgtctgatggaaacataccgatatatgcatgctcaggcacagctatcagttgccaggaggggtctggtacaatttttctgacttcggctagtttggttagagctttctatgatactgaagaaatttatgataacttaaagattgaagtgcgccatgaaggcaatgaagtgtacaagggttatttggcaaaatatgatttagacaagaactttgctgttgtctacaccatggagtctcttgatgttcatgttgtactttccgaacatttgaaggataggtatgccaaaaagaagctagtagctgtatcgcgtaacaagtatggcggattaattaccaaaagtgtgatggtgggtagtcatcataattcaaacagatctgaagtttgccatgacatttcggtgatggctgaggactgggaaggtggacctctctttgactttgatgggaaatttgttggcatgaataagtttttggctatggatacaacctttatcctgtcatggatgtcaattctcattatctttaagcattatttgccaaccctgcaaaacaggattcttaaacggttacaaaatttgaaaagagtcagggatggagagggaccgggtgagctatctgactgtcatccagaagcaccagttcatagaggtggtctcgataaggaacacgttgagtatctaaactccttgggttatcccaagccaccagtaaacgtgttagatgatggcttgatattggcttattcttttgaggagaattttggctttgtatatggtgaagtcattaaaaagtttccttgtgacatacatcaaagtgttgttgcacttgcttcattcaaaggagaaaggagatttttcgcatgcacgggtttttttatagaatggaagggatgtacaattattctgacatcagcgagcttggttgcagagtctggtgacagaaacaagattgatgaaaacttgaggattgaagtgttgcttccaaacgaacaacgcagacaaggaacattacagcattatagtttacactacaatgttgctctagtcagtgtcaacgacatggatttccatgctcgtccagcaaatatgaagcttgacaatgagtgtccacctcaagtagcagctctagggcgttgcttcgaatcaggcaaaataatggctgtatgtggggatttggttgactggactggcacacttgattgcaatttccttatacgttcctcatgcaaaactactaaggctggaatcggaggacctcttattggtttggatgggaaagttattggcatgaacttttatgataaaaaaataggaaccccttacatgccatgggatgtaattcttaaaattctggcatgttttgagaatgaaagtagtgctgctgaagttggcaatggtagtgatccatctgatgcgcctggctggaaaatccctggagatggcagtgtcaagctaaacaggtggcctgtgcccttgccatattggcgtcctcatgacgatgtggaagagcaagaacccccagagggctgtgaataccagtgcacatacagaaatggtgaaagatggtgctaccggtag

SEQ ID NO: 88973 - DNA, 222 bp, Oryza sativa
  Clone ID: PAT_MRT4530_87773C.1
atggatgtcgttaatattggtcgaaaaaccaacaagcaaacagccaatcagccaaaaaaagccaatgcaatgcacagtcaaatcgacacgacatcaagtatcggtaattttatcgatatcgataagaaaaaagataatcttaattatcgatcgtacaccattgtagcacatacagagtactataggagtatttacgcaaacctgcggctggcggctataaag

SEQ ID NO: 88974 - DNA, 1641 bp, Oryza sativa
  Clone ID: PAT_MRT4530_87774C.1
atgggcgacgagggggagccgtcgcgtgagcgtgatctggggaagaagccgatggccatggacgaaggggcgtcgccgtggcgtggtcaggcgaaggagggaaacaatctggaggcggcgccggtgcggtgctgctcctgctcgccgtgggtgatcggcgacgagaagaagcacctgcctctgctgttcgtgtgcccgccgcgcccgcgcgccaccgtgctcaccgcgccccggcgccttcaccccgactccggcaagtcaagctgcgtcccctacgtcatcgtcgacgacgccctcccctccggccgcttcctcctccgcgccaccgacgggtggtacggcctcaacggcgcctactacatctgctgcgactgcgacgcgcgcacccgtgtcgccaccccgccgcctccctccggctccctcgaccacctcaacttcccgcggcggcgaagcgtggaggactctcgccaccgcggctactgcctggtcgcgcaggcgcagctccacccaacgtcgacgaccaccacccagcagcacgagaccgtcgtcgactacccagcgcgggacaacaagtgggacgtcaaggagtgcccgcaccaccagcgcgcgatggggggttgccacggcggcgtgctctgttgcgcggatctcccctacggcttcctcaccagctgcgtccccttcgccgacgagctccgccgcctgcgctacgtcgagcttccccaaggctgcgtcatggtcggcgacgacgagaagcaccaccgctggctcttcgccacggtgcgcgtgaagatccatggcatcccggacgcgccggtggtgagctcgtggacgttggtcgatccggaggactcggagtggacgcttgagcatgaagttgcgagctcatctcatttctcaaacgggcctcacttatggtaccatctggactttatgtcggcgcaattggagagtctatgggacaagataaagcaatgtgttctaaaagctgttgggtggcctctgcctgtggagcactcttggctcaatgttcttggccctcctatcaagcaaattggcaaacctgatgaaggtatcccagcaatcagagtaattgaagtgctcagcaaaacaggaggactgacaacaactaatggcctgattctgcctattaccggccgtatcccacattggattgaacacgaaggctggagcatgaaagaagtcgcagaattcatctatgagcatggtccggtcatcgccgtggtgtgggtcgtcagacatgaattccgtgcatgtattggtgatgtagtctactacggtctccctgacagatcactgagggaccgggaagacaaggaccaatacacccttgaaattgatccagataatgtcatctccttgcaagaaggactgcagctgctcaggctcgacaagcggtttaccgagttcgtacatgcggtggagcttggggggcccttgacttggaaggtgccggacgaggagcttgcggaggagtcggtgcaggagcctgaggaggagtcggtgcaggagcctgaggtggagatggtgctggagcatgaggaggagacggtgcaggagcctgaggaggagatggcggagccggaggagatggtgcacgagacgccgcttgtcgcctag

SEQ ID NO: 88975 - DNA, 483 bp, Oryza sativa
  Clone ID: PAT_MRT4530_87775C.1
gttggcatctacccttatcattcacagctgtagaagtaatcccctgaatttgttttgctatctgaaggtgtcagcttatgggtttcctcctctaataatccgtgaaatgttgaatgttggttagttcatgtgtagtattatttggatggataggcggttagttcatgtgtagtattatttggatggataggcaagattggttgatcaattagattatcatcctatgtaaggttgcataatttcgatggcattaacaaagagattgcaatcaatcaacaaataaatgaaggcatcatttagtttagtggaccaccatcaaattgcccacatgttgctgcatgccagtgtatgattacaactgtccaattatttataaagttgcctgatataaactattcattgaaatgctattaaccctgcggtgatttgcatcaactcagtcgatttccaaacttacgagcgtgctgttttcccccctttttt

SEQ ID NO: 88976 - DNA, 317 bp, Oryza sativa
  Clone ID: PAT_MRT4530_87776C.1
atgtccggctgccgctccgtccactcgcgccgttcagcaccgacgagggcggcgaggctcctcgtccccgctcagccgcggctcttcttggatagtcccgactggaggcagtcggcggcggggagggagtgggaacgggagcgggacgatggcgacgacagaagaggaagctggctcgcgtcgggatcttggtggttcgtcggcgatgatgccgcaaaagctgcgctgactgattcagtgaggctgagcgtgtgagttgtgagcgaattgcaagtttcctgacgacggtggtggtctccccctctcccccgccgtag

SEQ ID NO: 88977 - DNA, 348 bp, Oryza sativa
  Clone ID: PAT_MRT4530_87777C.1
aaaaaaaaaaaattttggccttttattggggtttatcaaaaacaaggcccaaaacaagggggggtcccttttttaggggggggaacccccccgggggggggtggggcttagcttaggggcccccagacccctggaaaccgggggggttgggggcgatgaaactaaaaaactgcccccgcctggcgttggcaaaccccatgatcccgccaaggggacgggggggggccttttgggcccccccgggcccctggggccccggggggggaagggggccccccaaccggggggggttccacaggggccaaaccccgccattgaaaaacccgggggacccggggttcccccggg

SEQ ID NO: 88978 - DNA, 1641 bp, Oryza sativa
  Clone ID: PAT_MRT4530_87778C.1
atgggcgacgagggggagccgtcgcgtgagcgtgatctggggaagaagccgatggccatggacgaaggggcgtcgccgtggcgtggtcaggcgaaggagggaaacaatctggaggcggcgccggtgcggtgctgctcctgctcgccgtgggtgatcggcgacgagaagaagcacctgcctctgctgttcgtgtgcccgccgcgcccgcgcgccaccgtgctcaccgcgccccggcgccttcaccccgactccggcaagtcaagctgcgtcccctacgtcatcgtcgacgacgccctcccctccggccgcttcctcctccgcgccaccgacgggtggtacggcctcaacggcgcctactacatctgctgcgactgcgacgcgcgcacccgtgtcgccaccccgccgcctccctccggctccctcgaccacctcaacttcccgcggcggcgaagcgtggaggactctcgccaccgcggctactgcctggtcgcgcaggcgcagctccacccaacgtcgacgaccaccacccagcagcacgagaccgtcgtcgactacccagcgcgggacaacaagtgggacgtcaaggagtgcccgcaccaccagcgcgcgatggggggttgccacggcggcgtgctctgttgcgcggatctcccctacggcttcctcaccagctgcgtccccttcgccgacgagctccgccgcctgcgctacgtcgagcttccccaaggctgcgtcatggtcggcgacgacgagaagcaccaccgctggctcttcgccacggtgcgcgtgaagatccatggcatcccggacgcgccggtgttctatgttcttacagcacttatggtaccatctggactttatgtcggcgcaattggagaggtagcagaacgccctacagccccaactctttggcacaagatattgcattggcttgcaagaccatttcttaattggcctagtctatgggacaagataaagcaatgtgttctaaaagctgttgggtggcctctgcctgtggagcactcttggctcaatgttcttggccctcctatcaagcaaattggcaacacatgctctgtttctgccgttgctctctgcatcgaagctaagttccacaagtatgggttcagatgtaccatcgaaaggccaccacacaaacttctgcaggactgtcttgatagttcctttttagaacctgatgaaggtatcccagcaatcagagtaattgaagtgctcagcaaaacaggaggactgacaacaactaatggcctgattctgcctattaccggccgtatcccacattggattgaacacgaaggctggagcatgaaagaagtcgcagaattcatctatgagcatggtccggtcatcgccgtggtgtgggtcgtcagacatgaattccgtgcatgtattggtgatgtagtctactacggtctccctgacagatcactgagggaccgggaagacaaggaccaatgtatgcacgtggtcgtctgctttggctacagatttactcaatctttcgatctccatctcagtatcatggatagttctacagatgacggaccaacccggtggctacactacacttcggttgatggtctgtattcgccggagattgccaagcctcttttaggttga

SEQ ID NO: 88979 - DNA, 448 bp, Oryza sativa
  Clone ID: PAT_MRT4530_87779C.1
catggtcacccaggctgttaccactgcacgtcgacgacccgacctccgcctccaggaccccggagaggaagaagctggcggcgatgctacgtgacaacgcctacaatggcgatcagaatgtgaggaccatggcgtcttcgccggcgctctgctcgccgacgagctgctgctgaaggagaaggaccgcgcggatgtcgtcggacgcgcggccgggtgttgttgccggtgatcttcgaggtgtgggtggagatgctgctgtacgccgcaaccggtcacagggagtcgcatgcgaagcagctcaacacgtgggggtgagctcatcaccgctggtgtgctttggctgaacacgctgggctgtatcgtataacaacctaacagcatttcaagtgtgctgaatatgctagtgatatggtataatttactgaggtaaaaaaaaaaaaaaaaaaaa

SEQ ID NO: 88980 - DNA, 1711 bp, Oryza sativa
  Clone ID: PAT_MRT4530_8777C.1
ccggccgggggaaatcagtttccactttcttccaaagccgaaaaatcgagagagaaagagcaaaaccctaaccgcggcgctccgcccccttccgccgccggattcctcctcctccttcgtccgccttcgccggcgccgccctgctccgaaggagcccaggccttgtcgccgcgtcgcttgccccgccgccggtttcagcagcagccacccccaccaccatgtcttctcaggtcgacaaccgtagccaatctgctggaaagcgtgcccgcaccgacggtgggcggcgtgaggacgactgggtttgccccagctgccagaacgtcaacttcgccttccgcaccacctgcaacatgcgcaattgcaaccaatccaggcccaccgactatacgaaggatatgcagaaacctatgcagacaccgccgccccatttccccatgtcagggggatacatgagcccagggacgccgccatccatgtacctcgggggtggtgctcccccttatggcacctccctctatggcggacctgctttaccacgttatggtattgctcagttccctgggggttctggatatccatatggctatggtggccgcctgccaatggggagcccctatgggccgccgatgcatatggcagggcctccatattctgctggatccatgatgggaccaggtggaatgtatgggatgcccatggacagatatagcttgggcttacctgctggtcctggtccaatgggcgcgagggctggttcatattccgaggaaggatcccagaagaagcctgcaggagctgggcgtgataatgattggaaatgccctaattgcaacaacattaactttgcattccggacagtctgtaacatgagaaagtgcaatacaccaagacctgaaaaccaggggtccaaacctgatggtgcaagaggtccaaaaccaaagatgccagaaggtagttggaagtgcgagaagtgcaataacataaactatccattccgcacaaaatgtaaccgtccaagttgcgaggctgaaaagccatttcagacaaacaatgctaatgagtcatctgctgatcaggacaatcaggtgcataattagaacctccagtatgatcatcattatatgccatgcctttctttagaacaattcaatataaattgcatatcttatgttttctatcaacagtttcgtttatttgcttgtcttcatcatctcttgtgcatggcttgatatatcatgtccttactgttacagtgagtcctagaacagttatgagggtcaagaaggtccagcgtcgtcgtcaaggttcagtctgaatgtctggggtctatctgtgtcagtagtcgctgctgtatccccttgagaccttagttgagtcgtcgtcctaatggtaaacgttttggagtggcaactggagtcatggatttctttattgctacagattttggttaagaacatcccttgtgaatttgtcatatacttctgaagcttggttgctttgtcttggttactggtactctgggaaaatggcaatttatgatataaatttcaattagctatctgtgtcttagattgctacctgtgtgctatgaagtactattagactgttcattgcggtctcagttttgtcaattgtgtttgtggtcttttgtttcaacgtaagggtttggtatctcagataagttggttcttgctgatgcctatatcttttt

SEQ ID NO: 88981 - DNA, 1698 bp, Oryza sativa
  Clone ID: PAT_MRT4530_87780C.1
atggacgcaaagaaccaacaatccggcgacgggcagcagcgaccggcgcagcaggctgcggggatggacccggcgaaggcggcggcgcaggcggcgacgcggcggaagaagatgacgaagcagctgacggggaagcgggacgacacggcgctgcatggggcggcgcgcgccgggcagctcgtcgccgtgcagcagacgctgtccggcgcgccgccggacgagctgcgggcgctcctgtcgaagcagaatcaggccggcgagacgccgctgttcgtcgccgccgagtacgggtacgtggccctggtggccgagatgatcaagtaccacgacgtcgccaccgcctgcatcaaggcccggagcggctacgacgccctccacattgccgccaagcaaggggatgtagaggtggtgaacgagctgctgaaagcgctgccggagctgtcgatgacggtggacgcgtcgaacacgacggcgctgaacacggcggcgacgcaggggcacatggaggtggtgcggctgctgctggaggcggacgcgagcctggcggtgatcgcccggagcaacggcaagacggcgctgcactcggcggcgaggaacgggcacgtggaggtggtgcgcgcgctgatggaggcggagcccagcatcgcggcgcgggtggacaagaaggggcagacggcgctgcacatggccgccaagggcacccgcctcgacatcgtcgacgcgctcctcgccggcgagccgacgctgctcaacctggcggacagcaagggcaacaccgcgctgcacatcgccgcccgcaaggcgcgcaccccgatcgtcaagcggctgctcgagctccccgacaccgacctgaaggcgatcaaccggtcccgcgagacggcgttcgacacggcggagaagatgggcaacaccgagtcggtggccgtgctggcggagcacggagtcccgtcggcgcgcgccatgagcccgacgggcggcggcggcggcaaccccgggcgcgagctgaagcagcaggtgagtgacatcaagcacgaagtgcactcccagctggagcagacgcggcagacgcgcgtgcggatgcagggcatcgcgaagcagatcaacaagctccacgacgagggcctcaacaacgccatcaactcaacgacggtggtggcggtgctgatcgcgacggtggcgttcgcggcgatattcacggtgccaggcgagtacgtggacgacgcgggcagcctgaccccgggtcaggcgctgggcgaggccaacatctcccaccagacggcgttcctcatcttcttcgtgttcgactcggtggcgctcttcatctcgctggcggtggtggtggtgcagacgtcggtggtggtgatcgagcggaaggcgaagaagcagatgatggcggtgatcaacaagctgatgtgggtggcgtgcgtgctggtgagcgtggcgttcctggcgctgtcgttcgtggtggtgggaaaagccgagcggtggctggccgtcggggtgaccatcatgggggcaaccatcctggtgaccaccatcggcaccatgctctactgggtgatcgcgcaccggatcgaggccaagcgcatgcggagcatcaagcgatcctcgctcagccgctcgcgatccttctcggcgtccggcatgtccgaggccgagtgggtcgaggaggagttcaagcggatgtacgccatctga

SEQ ID NO: 88982 - DNA, 1980 bp, Oryza sativa
  Clone ID: PAT_MRT4530_87781C.1
atggcgggaggaggggtgatgcacctcctgaacgaatgggcgatcgagatcctgctgctggtcagcttctccctccagctcgccctcctcttattcgccgggttccgccgcgtgggcgcctccgccgggctcgggagctggtggaacaggcacgtcaacgccggcagcatcgtcatctccgacgagctcgacgccatcaggacgacgagaggccagcgcgcgctccggcgccacggactccacggcgacctcgccgccagcctcggcgaggagttccaccaaggcatcctcacctggcacgtcgccacggacatctacctcgccgtcagcggcggcggtgaccgatcttctgcagccatagccaacgccggagacagggcggcggcggcgcggcggctcgcggaggccgtccgcgcgctgtccaactacatgatgttcctcgtcgccatccgccccgacatgctcccgggcctcgtgctccggaggctgtaccaggtgacatgcgaagacatggccagaatatggcgggaacgcaaggacacccacgaatcatcgtcttcttcctccagcggccgcttcatcgacgtcctaagcatggtcaccaagctgttccagctgcacgtcgacgacccgacctccgcctccaggacgccggagaggaagaagctggcggcgatgctacgtgacaacgcctacaatggcgatcagaatgtgaggagccatggcgtcttcgccggcgctctgctcgccgacgagctgctgctgaaggagaaggagcggcggatgtcgtcggacggcggcggcggcgggttgttgttgccggtgatcttcgaggtgtgggtggagatgctgctgtacgccggcaaccggtgcagcagggagtcgcatgcgaagcagctcaacagtggtggtgagctcatcacgctggtgtggctgttggctgaacacgctgggctgtatcgtataaacaaaactaagcagcattttaagtgtgctgaatatgctactgttatgatgatatgcaatcaacgaggggacatactccgggtctggtggtggcactaccacagggtgctggagttggagagacaaaaaagccagttggagaaccaaaactggcagttggagcaacaaaactctagactgtccagtgagaagcgtgacctggagagcagggtgaggaggttgggttatgaaaacaccaatctattagatgagaagatgagggtggctcatgagtcctcaagaaaggtctccgcactggagtaccgggtgcgggagttagagcaccaaaacaccaaactgtccagtgagctagtgaagcaacgggagaacacgaggaaggcgggccagctgttcatgaatgctgccgatacgtaccaacaagtagcagagaagcaaattagaacaaagaaagaggaattggcaaacacgagaaaggcaggcctcctgttaataaacgctgctgatacgtaccaagaagtagcaaggaagcaaattaaaacaatggtggaggacctggaggatgcgaggatggcggttttggtggtcatgaatgctgccgatacataccaactagaagcggagaagaaaattaaggataagatggaggaattgagggtccttggggtccagaaggcagaaatggatgcgagggccgcatctttggaatctgggcttaagacagctctagcaaagattcaggaattggaggctgactgtgataaggtgatgattgaaaataataagctttggttggaggttgagaggctcatgatggaactgagggtaatggcacacaagaaagaggtagctgcaaatgcatttggtgctgaaaaggcagaaactatgaaggaattggaaaaccatttgatgaatgtggaggaaattccgactagcatggatttgatgaaggatgaaaatgataagattcagttggagatcttgacagcaggcagaaacattgcttgcttgaattag

SEQ ID NO: 88983 - DNA, 360 bp, Oryza sativa
  Clone ID: PAT_MRT4530_87782C.1
atggcgcaacctgcagccttggccttactgcttccagtcctcctcctcgtcggagtcgacgacatcgagccgctgccggagctgctggtgaactgcacctcaaggttgtgccctgcaggcatcgctgtgtttctgatgggttacgcctacgcgtacgcacgctccagaggcaacacggcccccttgaagaaaaccacaaacagtactacagtattattgaagatgatgcctcttcttcttcttcttcttcttgtcgcgccggggcttggaacagctgcccgccctcaatctacgaactgccttctagaacgtataattgtctcaaaagggccaatatccatgcactattggaccttttga

SEQ ID NO: 88984 - DNA, 587 bp, Oryza sativa
  unsure (1)..(587): unsure at all n locations
  Clone ID: PAT_MRT4530_87783C.1
gaataaaagcggcaatactaacttgggcataaagagggtaatactaacttgtgcataaagagcataatattgttggagccttggaggaccaaattatgttcctgcgactggaattcctaaataatgaagtcgctgggtgcaaaaaacatacatctaatttctcatgcagcagtttgactacggcattcaaaatttcaaaatttcaaatacaatacgtcaaaaactacagttagcaggttatgaggagacatccagttgggattttcctccccagcttcctttcccgcgaaagaaaaattgctgtccctcccccttatttgccnccgggngtttaaacaaaaagggacgggtttttttaaacccaacncnttgcaataaaaantaaaaaacatnnttcncccccttaantcnngggccccccntgggcnaaaaatttccttnnatttccccccnaaaaaatngngnttttttgaggcnaacccccccttttttcccccaaaatnccccctttgnccncaaaanccncccccngggaaccccnccaanaaancaacccccttcaccccccanatnngggngggccccgg

SEQ ID NO: 88985 - DNA, 2541 bp, Oryza sativa
  Clone ID: PAT_MRT4530_87784C.1
caacttgttgttcaccacgtcattcatcattcaaaaccttagtttgcaaccagcgttattgtatcttctgttatcatgctcccggtggccatcgccctcgagccgacctccatcgaggacgagggcgccggcgtgaagcgcccgatcatcctcatctccgacccgaagggcgtggccgccggcgtggacaaccgccgcccgccggcctccccgtccgccatcaccgtggtggtgtccgtggccatcatcctcgtggccctcgccgcctccgtgatcgccacccagaccacctggtccgagtccaacgtgccggtgatgtccggcgaggccatcgagccgggctccgtggacatcgacctcaccgtgtccaagggcgccaccgacggcgtgtcctacgagcgcaccaccgccgtgtccgacgtgatcaagatcgtgaccggcgccatcgagcaggcccacacctgggtgtggaccaacatcatgctcgagacctggcagcgcaccgacacctaccacttccagccggcccagaactggatgaacgacccgaacggcccgatctactccaagggctggtacgagcacctcccggacaccgccgtgtggggcgagcgcatctcctggggccacgccgtgtccaaggagctcctccactggcaccacctcccgatcgccatggtgccggacaacttcgagtacgacctcaacggcgtgtggtccggctccgccaccgacaacctcccggacggcaagctcggcatgtacctctacaccggcgagaccgtggagcagaacaccgcccaggagcagcagctcgccgacccggtgaacatcaccgacccgctcctccaccagtgggccaagaccgacgtgaacccggtgatcgccccgccgccggagggcatcggcgcccgcgacttccgcgacccgaccaccgccttcaaggaggtggtggacatgaacgaggtggacaacaagcgcctcatcgccatctacggctccaaggagaaggagaaggtgggcctctccgtggtggactaccagaccgaccagtggtcccacttcgccgaggcccgcccggtgccggtgatcatgcacaaggtggacgtgaccggcatgtgggagtgcgtggacttctacccggtgacctccgagaccgacgtggccgacgtggccaccgacgagggctccgactccaccgagtactccgtgccgcagatcggcgtgaaggagcacgtgttaaaaagtagattggatgacgataaagatgactacaaggcacttgcaacatatgacccggtcaaaaagaaatttacagccgataacgcagatttgaatgtgggtattggattgagacttgattatgggaaatgttatgctgccaggacgttttataatcagaataagcagagaagaattttgtggggatgtataggtgaaactgagttagaagctgtcgatctcatgaaaggttgggcatctcttcaggcaatacctaggactatggtttttgacgagaagacggggacaaatgtgcttcaacgaccggaagaagaagtggaaagctggagctcaggggatccaataacccagaggcgaatctttgagccaggctctgtggtaccaagccatgttacaggggcgctgcagttagacattaccgcttcattagacgtggatgaaaccctgcttgaaataacgtcggaatcccatgatgctggctgcgactggagcaataggggcggtgccggtacgatgggcagtttgggaccgttcgggcttctggttgtagccgaggaaaaactttctgagttgatgccggtctacttatacgttgctaaaggcggcgaaggcagggcaaaggctcatttgtgcatctgccagacgagatcatccatggcttccggagtagacaaggaagtatatggtagcgcaatgccggttcttgatggtgaaaactactctgctagaatactggttgatcattcaatagttgaaagctttgctcaagctggaagaacgtgtgtaagatctcgtgataagcctagtaaggacacctatggagctgctagatggttcttcttcaacaatgctactgaggcgagcgtcagagcctctctcaaagcgtgccaaatgaaatcttttatacgcccttaccctgtcatcccagatcagacgggctttaggtcaaattggagatgaaagatttatagtcacaaaggattgggaaccctctcgggttgggcaatatgtgcttatcaacatctgtgaggtctgtgatggtcgtgtgtggatggctgccttaaacccagataaaggggttcttgttcaatgccgattctttcatttttgcccaataatattcatcaagtgtttagtgcaatttgttagcggggtgtgggggggctcaaaggaatatgttctccagttctgtaaaatctttttttacctaatgttgtacatgatccagttgtgtgtgtgagtaatattatacttttggattcattcaaaaaaaaaaaaaaaaaaaaaaaaaaaaaaaaa

SEQ ID NO: 88986 - DNA, 1657 bp, Oryza sativa
  Clone ID: PAT_MRT4530_87785C.1
atgccaccaatgagagcgccagctctagttgcaatgctggttgttgtactcgtcgcgttggtgcggcggcggcgtcaccggagcaagggcgccggcggccggctggagtcgttgccaccggggcccgtgggtttgccggtgatcggcaacatgcaccagatgctcgtgaacaagccggtgttccggtgggtgcaccggctgctcgcggacgccggcggggagatcgtgtgcgtgcgcctggggcccgtgcacgtggtcgccgtcacgtccccggagatggcacgggaggtgctccgcaagaacgacgccgtgttcgccgaccggccgacgacgttcgccgccgagtcgttcagcgtcggctaccgcagcgccagcatctcgccgcacggcgaccagtggaggaagatgcggcgggtgctcaccgccgagatcctctcgccggccaccgaacaccgcctccgcggcgcgcggggggaggaggccgaccacctcgtccggtacgtcctcgtgcggtgcggccgcgacggcgccgccgtcgacgtgcgccacgtcgccaggcacttctgcggcaacgtcatccgccggctcaccctagggcgccgccatttccgcgagccgcgggcggacgacgaggacgccgcggcgcccgggcgcgacgaggcggagcacgtggacgcgctcttcgcgacgctcaactacctcgacgcgttctgcgtctccgactacttcccggcgctggtcggcctcgacctggacggccaagagaaggtcatcaagaaggtgatgaggacgctgaacaggctgcacgaccccgtggtggaggagagggtggaggagtggcggctgctgcggaaggccggcgagcggcgcgacgtcgccgacttcctcgacgtgctcgcctcgctcgacgacgcggcggggcggccgctgctcaccgtggaggagatcaaggcgcagaccatagacatcatgatcgccaccgtggacaacccatcgaacgcagtggagtgggcgctggcggagatgatgaacaagccggaggtgatgcggaaggccatggacgagctggacacggtggtcggccgcgaccggctggtgcaggagagcgacgtccgcgacctcaactacctcaaggcgtgcatccgcgaggccttccgcctgcacccctaccaccccttcaacccgccgcgcgtcgccatggccgacaccaccatcgccggctacaccatccccaagggcagccaggtcatcctcagccgcgtcgggctcggccggaaccccagggtgtgggacgacccgctcgagttccggccggagcgtcacctgtcgccgtaccctgcaggcggccgtggcgacgccggcgtggtggcgctcacggaggcggagctgcggttcgtgtcgttcagcaccgggaggcgggggtgccccggggtgtcgctgggtaccctgatcaccgtgacgctgttcgcgaggctcctgcaggggttcgagtggagcaagccggccggcgtggagagggttgagctgcgggaggaggcggcgagcctggtgttggctcagccgctggttttgcaggcgacgccgcggttggctgctcacctctacggcgccggcaagtagttttgcgcgccgattaggtgttaaatacgtgatggtg

SEQ ID NO: 88987 - DNA, 363 bp, Oryza sativa
  Clone ID: PAT_MRT4530_87786C.1
atggcgttgcgatcggtgttggccggaaggttgatggtggcggctaaccgcgccttccgcggcaggcccgtctccaccaccaccaaggaacggctggagttgaagatgagcagctatccctggacgcaaaacgcgatggacaacaggctgcgggagggctgtgccatggctgtcgataaccacaatcggaggatcatgaggcttgctaacccttacagtgggccagctgatggagacatcctgtataactgggcttggagtaacaatatttctttccttatcattctctgctcgtgctttggattgtgtcatgctgtgctccatctgccgcatcacgcgtccaacaatgtgtccacagcataa

SEQ ID NO: 88988 - DNA, 630 bp, Oryza sativa
  unsure (1)..(630): unsure at all n locations
  Clone ID: PAT_MRT4530_87787C.1
aaggcagaatgnattaggtgacactatagaagagctatgacgtcgcatgcacgcgtacgtaagcttggatcctctagagcggcgcggcggcggcggaggacggcggcggaggcaggttgaggtcttggtggccgacatggacgccctggagccgaggagtcaagaacgtcttccctgactgcaagaagaagaacaaaaaaaaatcagtaaactccatttcttcaagatcaaaccaagaacatggcaagatcagagcctcatgaaactaaattcagatggaacaagttttttttatgttcttcatattaagaacagagtgcttaatctcctaatattcggaagaaatacagcatgcaacacatgaaccgatctctaatcgttgcaaacattgcagaatttgtctccgatcaaagaaaaaaaaacaataactgaacgaagtggaacagttcgtctcaaatttcgtcagaggcagaaacataaaccgaaactcagaaatcaccagcgctcacgagatcagagagagcgaggactcaccatgagatcaagccgctctcccacccgggggaaccttcagctcgaggtcgacacctcgtcctcccctccgcggcgcgacgacgccgccgggatgtc

SEQ ID NO: 88989 - DNA, 478 bp, Oryza sativa
  Clone ID: PAT_MRT4530_87788C.1
aaagcatttgtctacagctgagattgttgagcaggctgtgtttgctcgtagactgttttcagatgaatttggatccatcacaaatgttgtatttatgggcatgggtgagccgttgcacaacattgacaatgtactaaaagcctcagctattatggttgatgagcagggccttcagtttagtcctcgcaaggtcactgtctccacaagcggtcttgtcccacagataaaacgcttcctacaggaatccaattgtgcgctggctgtgagtcttaatgcaacaactgatgaggtgagaaactggataatgcctattaatagaaaatacaatctcagcttgcttcttggcacattaagggaggaaattcgtttgaaaaagaagtacaaagtgttttttgaatacgtcatgcttgctggagtgaacgacagtgtggatgacgcgaagagactagtagatttagttcgcgggatcccttgcaag

SEQ ID NO: 88990 - DNA, 547 bp, Oryza sativa
  Clone ID: PAT_MRT4530_87789C.1
tggatcccccgggctgcaggtttatacaacaaaacaaggcgaaactgccaaagcagcagcttagctagcggaatggcagctgatgattgtaagcgtaaaggtaagcatcggcgcgtgaagctcataccctcatgcttgcttgctgctgctgcacgttgctgttcccgtctcgccatcggttcgatctagacgggtcgacggcgagacgggaggcgatcgattatcgataccaccagcagcaatactggtgctctccatcggtgggcaccgtgtcggacttcggttggtcgccctcatcatgccggatctgaaacctgacgcccacgccttcttcttcctcgtctcctcttcttcttctttagcggggccttcttatgtcggtatagtctaacagagatggagaatttcagttgagatgcgcttgatattacagtgataactgacaagagtatgtgatttcaaccttaagatcgtgtttaattctttaagacgctcacagtttcttcttatttatttgacaactaagtttcacgccaagtagtttaat

SEQ ID NO: 88991 - DNA, 380 bp, Oryza sativa
  Clone ID: PAT_MRT4530_8778C.1
gctccgccactacaccttctcttcggcagcgggatacggcctctcctgcgccgtcgtcaccgctcgcctcctcactgctatggcgaaggtctcgtggctgcattccgccatcaacactgcaccatggttgtgccacaattgcggatttaaggggtgtccgcaacacggccccgcagcttctcaacggtctccttgttgccttctccgagtaggggcctttacgataggtggtgatggatgtgaagtgggaagcggagccgcggagggagctcctgaaggattgcctcaaggtggaagccaaggactcggagggtttgcttgtcgttgccaaagatctcttatctgggtccgctaggacttcttcacgccacaacgaactt

SEQ ID NO: 88992 - DNA, 1422 bp, Oryza sativa
  Clone ID: PAT_MRT4530_87790C.1
atggcggcgctgcctctcctccggtggggcgcttcctccctccgaggaggccactcctccgctccgccttcgagccgcctcttctccgcgctccgccgacctcccgccgccgcccgctgcgagcccggctcgagggtcatgctcaaggggatggactaccctgagctcgagaattgggtgcggtcgcagggcttccggccagggcaggccatgatgctgtggaaatgcctctacgggaacaacgtatgggcgcattgctatgacgagctggctgtctacaggttaattcctctattagtaaccttgagagcacatatatactacaaatctacaatggtgtctatcctgaaggaaatgaatgccaaattgtcaactgccaaggagataaaatctactcataggatttctgaagttttgatgtgtcagcaaagttgtttatacatgaaaactgctaaattagaagtaggtttaaacaaggacttcaggaaaatgctaacagatcatgctgatcttaaggcattaactgtgaaagacattcttaacgcgtcagatgggacccgaaagatactgttctctcttgaagatggatcagtgattgaaacagttgtcattccttgcactagtggcaggacaactgtctgtgtttcaagtcaagtgggttgtgccatgaattgtcagttttgcttcactggaaggatgggcttgagaaagcatttgtctacagctgagattgttgagcaggctgtgtttgctcgtagactgttttcagatgaatttggatccatcacaaatgttgtatttatgatacttctacaacctttcattaatatcaaacttttacagggcatgggtgagccgttgcacaacattgacaatgtactaaaagcctcagctattatggttgatgagcagggccttcagtttagtcctcgcaaggtcactgtctccacaagcggtcttgtcccacagataaaacgcttcctacaggaatccaattgtgcgctggctgtgagaaactggataatgcctattaatagaaaatacaatctcagcttgcttcttggcacattaagggaggaaattcgtttgaaaaagaagtacaaagtgttttttgaatacgtcatgcttgctggagtgaacgacagtgtggatgacgcgaagagactagtagatttagttcgcgggatcccttgcaagatcaacctcatctctttcaatccccatagcgggtcacaattcaagcccactcctgatgagaaaattattgagtttcgtaacattttaattcaagatggccttgttgtatttgttcggctcagcagaggggatgatcagatggctgcctgtggacagctaggagagcctggggactaccagctacccctgctccgtgtacctgagaaattccaggtcgctttgtga

SEQ ID NO: 88993 - DNA, 237 bp, Oryza sativa
  Clone ID: PAT_MRT4530_87791C.1
gttttcaccgatgcaaccgtgcacaacataaggggggccatactaaaaggcatcgggggcgacatagacgcgcgccatcgccactacctaccacccaaggggaaggggtccaacgtaaacgaaagaaagtggactctactgatcacagaccaaaacatcctcaggctggtgattacggacaaatggctatgcaacgactcctagtccttgagaccgaccaacctgcatcgcgaaggc

SEQ ID NO: 88994 - DNA, 3966 bp, Oryza sativa
  Clone ID: PAT_MRT4530_87792C.1
atggccggaggactagctcaactctggaaagagtggcaaattcaaatactaatcatcctcagcttcactctacaagttatcctccacctcttgtcatggatccgtcgacacaaaggttacaaagtgttaaggatcatcctatggctttcctatctatctgctgactccactgacatctacacgcttggccagctatccatgaccacaagcagcagctcacgtgttgggtgtagcgttatgtatctctacagatacattgccggcagtaggactttggtcgaggccatcatcctaatgtttgccgtcggtgttgtcaagtatgggaagagggtatgggcattcatgtgtgctaacatggacagcatccgaagctctcttgattttttagatgattcaagtgctcacaatccttaccttgagcaggccagaaaagagaggatgaacagagatctaaagcaggctctgttgggtgctcattacagtgttcgatttttgcaagagcctattcgtagatgctctttcgatgtcagagccccaaagaaatgctgtcgaattgtgaaagcaggacgaagtagattatggctggattctattggacaatataacttgctagatttctgtacccgtgatatgacggatctgagaggcaggattgccatgaaagtggggcttgagaactggtttaataaactgcattactcaaacacaacctcaatttcaagtgatatcaaggagtttgtgctaaaagagatacaaaagagaggccgaggggacatcaggaatgcacggcgtatgtgcatcctctatgagaataaaatggatgaggaactcagctggagcacggtagacattgactttgaaaaaagcatccttgtgtggcatgtcgcaaccgatgtctacctatgttgtttcaaagaagaggtggaacatacagagaaacctgttgtaaaggtgatcaaggagatctccaactacatgttgtacctccttctgcagcacccggatatgctacctgggccaattcgcataggtctgtacccaaaggtatgtgcaagtttggttgaactctggcaggagcactccaccagtagctcggagggtggagacaacaaccgctcaaaaagcaagaaactagcaagcttgttgttccaaaaatttggcagtgagagcacagataatgaacacggccaggtttaccttgatgggactgcagtcgctgggtacctacttcgcaacgaatgcaatgtgcccaacatgctggggttgattgctggggtgtggttcgagatgttgtgctatgcggcgcaccactgcagcgaggagtcacatgccaggcagctgagcactggtggtgagttcctcactgctgtgtggcttcttgtggagcacatcaaatttcccaagtctgaggatgatgggggacctagtcatgtgtcaaccgagatatctcaacagcagttagataacgtgaaccgagggcaagttaccgctttcctctttatttttctatatagatcagagcaggaaatagtttctaccgatcccctaccatctaatctgccgagcaacgccactatggcgagttcgttcaaatccttgatcgtaaatcctatccgtgagaagtacaatggcactgaacaaatccaaatggcaagtggtgcaggtgactcgatgcctcgggagagtatttgcggtgatggaccgggagtcggcttggtgttcttcgatttgtgtttcatcgggttacggcggtctaaccggcgatatatggccgctcaagaaccgccggcaagcggtggtcagactggcagcgttaagagcggtcagaccggcggcggcgatagcaagcgccagctgatcaggcggtcggaccggagttccaatctcggtcagaccgacgatatccaggcggtacaaaataacattaaagaacttcatcgtgatcttttcaaaaaggagtacattaaatttgagatgaaacctggagaagctttggatgactatctttctaggtttaataaaattttgagtgatcttagatctgttgattcttcttatgatgctaattatccacaatctgagatttctcgccactttttgaatggtcttgacatgtctatttgggagatgaaagttacatctattcaggagtctgtgaacatgactactttgactttggattcgctttacacaaaattgaaaactcatgagatgaatattctttctcgtaaaggtgattctaagtctagtgctttggtttcgtcttcatcttctttggatgttggtgttttttcatcaaagtcttctgttcttgctttatttaatgccatttccgatgatcaactcgaacagttcgaagaggaggacttgcttgggagaggcaagaaggaagatgatgggagagtcaaggatgatgacgtgaacaagaagaagaacatgaagcagaaggagaagaagaagcattgcatgcagtggttaattcaagaactcataaaagtttttgatggatctgaagatgaagatgagggcaaaggtaagcaagttgttgatctagcttttattgctcgtaatgctatttctcatgttgatgaatctgatgatgataatgaggaaaagcttagttatgatcaattagaatatactgcttacaaatttggtaagaaacttcaaacatgttctattgcacttgatgagaaggatcacactattgagattttaaatgctgaaatttctagattaaaatctttgattcctaaagatgatgaatgtaaatcttgtgaagttttgttttctgaaattaatgctttgcgagatgtcaattctattaattgcaaaaaattagaatttgagattgaaaaatctaaaaagttggaatcttcttttgctcttggatttgctttacatgctcgtgttgttgatgagttaattttgacaaagaatgtgttgaaaaaatacaatgttgctttctgtgcgagttctttggtcaatgcttcatgtgcaaataaggcaaaacaaaacaatgatgttttgatttctcaagattgttcaaagtgtgttttgaatgagatgaagttgaaagatgctttagggcatgttaaacacatggaagaaattgttaaacaagatgaggtgttttcttgctcaacttgtagaaaacaaaaaggtcttttggatgcttgcaaaaattgtgctattcttactcaggaggtttcttatttgaaaagttctttgcaaagattttctgatggtaaaaagaacctcaacatgattcttgatcaatctaagctttttcatatgctagtatttgagaattttggtgatatcgttgagaataaaaatatgaaaaaaaatgaataccgaatccttggaaacagtcttgacgacaaggacgtattcgatgtgactcgatgcctcgggcacagtatttgcggtgatggaccgggcagtcggcttggtggtaaggcgaagtccgtggtgagaagcaataaagttgtcatctactttgagagttcttcaatttgtgtttcatcgggttacggcagtctaaccggtgatatactggcggtcagactagcgccgggtctacaacagtctgacgatatgcccagtactctggttatttttactaataaatcttgtgaagaatcacagtgtgaacaggtgattgaagtcaaccttaatcaatggagaggatcaggactatacttagggaggagtagaggtctggcacggtcgaagcgccatgtgacaggaaagaagttgagatacagaatgatcaaggatgttgggccacgtgattggatacaaggtgacacacagtggatggacatcatatcgggagatcttcataatgggtttcacaagttcacggaggagaagaaaaaggggcttgcacaggggctgtgcatggctgcatgtgggctggcaggcctcggtaggcagggagcccaactcgagctggcctga

SEQ ID NO: 88995 - DNA, 3420 bp, Oryza sativa
  Clone ID: PAT_MRT4530_87793C.1
tcacctcaatatcagtagaatagcaatttgccaaacatttccaagaattagtaccgaagtagatgcaccggtgtaaccgcctagttgccgtcggtctgaccgagattcaatctccggtccgacctccgagatcagctgccacttgctgtcgccgccgccggtctgaccgcccgtatgccgccagtctgatcgccgcttgtcgccggtcggaccgccgttgggtcgccggttggaccgcagcacccgatgaaacacaaatcgaagaactctcaaagtagatgacaactttattacttctctatcgaatacgtcattgtcgtcaagactgtttccaaggattcggtattcatttttttcatattttttattctcttgacgcttcacaaaagtctgatttgaattatgcgataacttgccccgaggctggtctgaccgccgctgagactgcgatatgacctggcctggtaattggtctgaccgcccgttcacctgcggtttgaccgctggccggtctgaccgactggacaatgtcggtctaaccgtgctcctcgaattaaaacctctcctagcaacacccaaaacagtaggaggatgtctagtatgatgatcataagaatcaaaacctaaaccacggttgtgcgtgctaactttggattgatcaagaatcatattgaggttctttttaccatcagaaaatctttccaaagaacttttcaaataagaaacctcttgtgtaagaacaacacaatttttgcatgcatccaaaagacctttttgttttctacaagttgagcaagaaaacacctcatcttgtttaacaatttcttccatgtgattaacacgctctaaagcatctttcaacttcaactcattcaaaccacactttgaacaatattgagaaatcaaagcaccattgttttgttttgccttatttgcacatgaaacattgaccaaagaacttgcacaaaaagcaactttgtatttttccaaaacgttctttgtcaaaatcaactcatcaacaacacgagcatgtaaagcaaatccaagagcaaaagaagactccaaccttttagatttttcaatctcaaattccaatttcttgcaactaatagaattgacatctcgcaaagcattaatttcagaaaataaaacttcacaagattgacaattattagcattaggaatcaaagattttaatctagcaatttcagcattaagaatctcaatagtatgatccttctcatcaagcacaatagaacatgtttgaagtttcttagcaaatttataagcagcatattctaattgatcataactaagcttttcttcattatcatcatcagattcatcaacaccagaacttgcattacgagcaataaaagctagatcaacaacttgcttacctttgctctcatcttcatcttccggttcatcaaaaacttttattaattcttgaattagccactgcatgcaatgcttcttcttctccttctccttcatgttcttcttcttgttcaagtcatcttctttgactcttacatcatcttccttcttgcctctcccaagcttaggacaatgcgagcgaagatgatcaagtgcaccacacttaaaacaacgattcggtccacctcttttcctgttcctaacattattcatagctcgagaaaatttgttagatagcaaaaccaagtcctcctcgaactgttcaagttgatcgtcgaacatggcattaaataaagcaagaacagaagacttcgatgaagaagcatcaacatccaaagaagttgtagacgaaaccaaagcactatacttagaatcacctttacgagaaagaatattcatctcatgagttttcagtttagtgtaaagcgaatccaaagtcaaagtagacatgttaacagactcctgaatagatgtaactttcatctcccaaatagacatgtcaaaaccattcaaaaagtgacgagaaatctcagattgtggataattagcatcataagaagaatcaacagatctaagatcactcaaaattttattaaacctagaaagatagtcatccaaagcttctccaagtttcatttcaaatttaatgtactcctttttgaaaagatcacgacgaagttctttaatgttatttgtaccttgatgaaaatttctcaaagcaatccaaatctcatgagcagtttgaagatgagcaacacgatcataatccgaacgagaaatcccactcaaaagaatattgcgagcctcaaaatcgatggatcgtggtctgaccgaagtagatgcaccggtctgaccacctggttgccgtcggtctgaccgagattcaatctccggtttgacctccaagatcagctgccgcttgctgtcgccaccgccggtctgaccgcccgtataccgccggtctgaccaccgcttgtcgccggtcggaccatcgttgagtcgccggtcggaccgccgcacccgatgaaacacacatcgaagaactctcaaagtagatgacaactttattacttctctcaccaagccgactcccggtccatcaccgcaaatactctcccgaggcatcgagtcaccggcaaccaccgcccggtctgatcggtcccgacacacctgaaaatcaattatctccaaaaccacttcaacagtaattttgataatggatcgaaaacctaacactgggctaatcttgtacttagtgaacatcttgaaccactcttcctcgtccctttccttccctggtgttagaaccgaaatattcagatcaaccaaatgttgggttccttggcatattgcttcagaagaagatccaactacaacatctataatgatgatctttcctcctgcatctttagaaggaataattgcttccttgcaacattttagtatctttatgcagtcctcatcactccaatcatgtagcacagacttaagcaggacggcatctgctttgaggttgaaatccatcatatcacctgcaacaaactgagcaacgtcgctatgatcagacgcgatggaattgatcacatgtggaaggtccagcatggtgcatgcaccatgtctcctctggttaccaatcgtgcattgtccagttgaccttgccgagaaggctaacccaattggggttccacaaaccgaactaatggtgaaacggtgcttgtcgtcacgccctagggaccatgcgcatgacctagcgttgatgcaccgatagacccccgtataattacttatgatactcttcgattccaccttactcttatcccttatcctctcccacattctaccatagcatttactgaatctgcatgccttatcaccctgtacagtctcattttcaaatttattcacttcacctataactttcattatccgttcatcattgtttcgcttacagatacaaccacatataatctcatgctgcat

SEQ ID NO: 88996 - DNA, 1959 bp, Oryza sativa
  Clone ID: PAT_MRT4530_87794C.1
atggtgaggaccgggactatgctcagggaggagcagaggtctactgtggtcgggataccatgtgagaaggtgactagagttaggattcttggaggtcaacttcggtcaacggtggagatcgggactaaactcggggaggagttgaggtccagacggtcaagaataccgggtgacgaagttggatacgagatggcacacggtggatggataccgtgtgggagtgatcttcgcaacgggctttacgaggtgtgcgtatctgttgattcttcttatgatgcaaattatccacaatttgagatttctcgtcactttttgaatgatcttgacatgtctatttgggagatgaaagttacatctattcaggagtttgttaacatgtctactttgactttggattcgctttacacaaaattgaaaactcatgagatgaatattcttgctcgtaaagtcgattctaagtcaagtgctttggtttcgtcttcgacttctttggacgttggtgcttcttcgtcgaagtcttctgttcttgctttatttaatgccatgtctgatgatcaactcgaacagttcgaggaggaggacttggttttgttatctaacaaattttctcgagctatgaaaaatgttaggaacaggaaaagaggagaaccgaattgttgttttgagtgtggagcacttgatcatcttcgctcacattgtcctaagcttaggagaggcaagaaggaagatgatgggagagtcaaagaggatgacgtgaacaagaagaagaacacaaaggagaagaagaaacattgcatgcagtggttaatccaagaaatcataaaagcttttgatgaatcggaagatgaagatgagagcaaaggtaagcaagttgttgatctagcttttattgctcgtaatgcaagttctgatgttgatgaatctgatgatgataatgaagaaaagcttagttatgatcaattagaatatactgcttacaaatttggtaagaaacttcaaacatgttctattgttcttgatgagaaggatcatactattgagattcttaatgctgaaattgctagattaaaatctttgattcctaatgacgataattgtcaatcttgtgaagttttattttctgaaattaatgctttgcgagatgtcaattctgttaattgcaaaaaattggaatttgagattaaaaaatctaaaaagttggaatcttcttttgctcttggatttgctttacatgctcgtgttgttgatgagttgattttgaccaagaacgttttgaaaaaatacaaagttgctttttgtgcaagttctttggtcaatgcttcatgtgcaaataaggcaaaacaaaacaatggtgttttgatttctcaagattgttcaaagtgtattctgaatgagatgaagttgaaagatgctttagggcgtgttaaacacatggaagaaattattaaacaagatgaggtgtttatttgctcaacttgtagaaaacaaaaaggtcttttggatgtttgcaaagattgtgctattcttactcaggaggtttcttatttgaaaagttctttgcaaagattttctgatagtaaaaagaacctcaacatgattcttgatcaatctaaagttagcacacacaatcgtggtttaggttttgattcttatgcttatcatgctagacatcctcctactgtaggagagaaaaaggaaacagaaatttcttttggaaaacgacggtggcaaaaatcaggtttttgttcgaggagcccggttagaccgctgggacagcagcggtcagaccggcctcagggcaactttgcatataattcaaatcatgcttttgtgaagcgacaagtctttgacgacaaggacgtattcgatgtgagcaaaaataataggtgccgaatccttagaaacagtcttgacgacaaggatgtacccggaataattgagagaaaaaaactaatttga

SEQ ID NO: 88997 - DNA, 1396 bp, Oryza sativa
  Clone ID: PAT_MRT4530_87795C.1
ttatttgcacatgaagcattgaccaaagaacttgcacaaaaagcaactttgtatttttttcaaaatgttctttgtcaaaatcaactcatcaacaacacaagcatgtaaagcaaatccaagagcaaaagaagattccaactttttagatttttcaatctcaaattccaattttttgcaattaagagaattgacatctcgcaaagcattaatttcagaaaataaaacttcacaagattgacaattatcatcattaggaatcaaagaatttaatctagcaatttcagcattaagaatctcagtagtatgatccttctcatcaagctcaatagaacatgtttgaagtttcctagcaaatatgtaagcagcatattctaattgatcataactaagcttttcttcattatcatcatcagattcatcaacatcagaacttgcattacgagcaataaaagctaaatcaacaacttgcttacctttgccctcatcttcatattccggttcatcaaaaacttttatgagttcttggattaaccactgcatgcaatgcttcttcttctccttctccttcatgttcttcttcttgttcaattcatcatctttgactctaccatcatcttctttcttgcctctcccaagcttaggacaatgcgagcgaagatgatcaagtgcaccacactcaaaacaacgatttggttcacctcttttcctattccaccaagccgactcccggtccatcactgcaaatactctcccgaggcatcgagtcaccttgaaagaaattcgtgtggcttgatctgattttgaatcattgaaacctgctttgtatgctgccaaattggcttccccaatgacgggggcaacaaggtttttagctacctctgcatccactgtagctcttgttttcccatacgttggctggttgtaataaccctcctggtacttgaagaatctctcgagcaggggatacacaaacgacggatttatcttgttcacggcatgaattgaccggcaggaaatgaaggcattgctgtgataaggtagtgggaagaggtgcacgacgacggtcacccgcgaggcgtagtgctcgaccgccttcttcagctccggccacgcgtcgcggctgtccgggcagacggggtcgaagtacgcctccaccaccaccgtctcccccagcgccggcgccttcccaccgtacacgaacccgtccgtcctcgccgggacgggcacctgcgccgcgccagggcggcagccccaggcgcagcagccgatcaccagcaccagcagcagcgacatcacacggtgtctggcctccatggtcaaggcttcttgcagcagctagccgatcgctcgcactttggtttcttcgacgagctagctagcaattcgaatgtgcata

SEQ ID NO: 88998 - DNA, 1458 bp, Oryza sativa
  Clone ID: PAT_MRT4530_87796C.1
atgaaacctggagaagctttggatgactatctttcgaggtttaataaaattttgagtgatcttagatctgttgattcttcttatgatgctaattatccacaatctaagatttctcgccactttttgaatggtcttgacatgtctatttgggagatgaaagttacatctattcaggagtctgtgaacatgtctactttgactttggattcactttacacaaaactaaaaactcatgagatgaatattctttctcgaaaaggtgattctaagtctagtgcttcggttttgtcttcaacttctttggatgttggtgcttcttcatcgaagtcttctgttcttgctttatttaatgccatgtccgatgatcaactcgaacagttcaaggaggaggacttggttttgttatctaataaattttctcgagctatgaaaaatgttaggaacaggaaaagaggagaaccgaatcgttgttttgagtgtggtgcaattgatcatcttcgctcgtattgtcctaagcttgggagaggcaagaaggaagatgatgataaagtcaaagaggatgacatcaacaagaagaagaacacaaaggagaagaagaaacattgcatgcagtggttaatccaagaaatcatagcagcttttgatgaatcggaaggtgaagatgagagcaaaggtaagcaaattgttgatctagcttttattgctcgtaatgcaagttgtgatgttgatgaatctgaagatgataatgaagaaaagcttagttataatcaattagaatatgctgcttacagatttgctaagaaagttcaaacatgttctattgtgcttgatgagaaggataacactattgagattttaaatgctgaaattgatagattaaaatcttcgattcgtgacgatgataattgtcaatcttgtgaagttttattttctgaaattaatgctctgcgagatgtcaattctgttaattgcaaaaaattggaatttgagattgaaaaatctaaaagacttgcccataaacacaaaaaggaaagcgaaattgcttttgcaaaacgacgttggcaaaaatcgggttttaattcgaggaccacggttagaccgacactgatcagtcggtcagaccggctagcggttagaccgcagttgaaccggcggttagaccggttgccaggcccggtcagagcgcaggcacaacggcggtcagaccggcctcggggtgattttgcacgaaattcaaatcggacttttgtgaagcaaaaagagattatcgtcgaagtggttttggagataatcaattttcaggagatgaacagggtttgctgttttgtcgggaccggtgactcgatgccccgggagagtatttgcgatgggccgggagtcggcttggtggtaagacgatgtccgtggtggtcagatatcatgcgggatactaaggctagagttgatgcacatggttga

SEQ ID NO: 88999 - DNA, 364 bp, Oryza sativa
  Clone ID: PAT_MRT4530_87797C.1
gggtataaaacatttgccaatcggaagcgtgatttaactgtcgtagaactcaattccaccgttgtattgcaccaaatcctcgtacaggacaaaaccggcccacatggaaactcagtaatgcatgtcggagtctcataggagagcacgtcccatgcatggtcgggggtaacattgaaccaacaaccctttacatcaataatatgacgacggtgatgaacaaaactaggacgactctttattatcttccaccttcgctttcttcttctactcaggctccttatactctgcagccatggtcgagcgtctgtccagggacatgctcagctacatcctactcgtccgcctacgcgttacctgccctggc

SEQ ID NO: 89000 - DNA, 195 bp, Oryza sativa
  Clone ID: PAT_MRT4530_87798C.1
atggtgttcgccacgctgttcgccttggccgtcgtgatggcgctcgtgcctgccatgcctgtgctgcaaccagacgaagccacgtccgcgacttcgaccgcggcggcgacatggaaggcctcgacaagaggcccgccggtgtacatggtgaagctggcgccgacaacagggaagcggagcactgatgagatttaa

SEQ ID NO: 89001 - DNA, 1801 bp, Oryza sativa
  Clone ID: PAT_MRT4530_87799C.1
cgattccaaactcccaactctcgactagaaccgactccaatggcggcggcggcggctgctgctccgcccttcgccgccggcgactcgccgcccccgaccgccttgctcctcccccgcaccaccaccaccaccgccggcgccgcccccgcgccccggcgttcctccgcctcctcccgcctccacctcctcctcaccgccgcgctcgccgtcgcgacctcctacctcctcctcatcctcccccgcacgcccctctccgccgcgccggcgcctgcggccgccgcgcgggcgcaggtgaagctcgagaagccggtggtgatcctcatctcctccgacgggttccgcttcgggtaccagcacaaggccgcgaccccgcacatccaccgcctcatcggcaatggcacctccgccgccacgggcctcgtccccatcttccccacgctcacgttccccaatcactactccatcgccaccggcctctacccttcctcccacggcatcatcaacaactacttccccgacccaatctccggcgactacttcaccatgtcctcgcatgaacccaagtggtggctcggggagcccctgtgggtcaccgccgccgaccagggtatccaggccgccacctacttctggcccggctcggaggtgaagaaaggcagctgggattgtcccgacaagtattgccgccactacaatggctcggtaccattcgaggagagggtcgatgcgatccttggttactttgatctcccatctgatgaaatgccgcagttcctgacgctttattttgaagatccagatcaccaggggcatcaggtgggtcctgatgacccggccatcacggaggcggtggtgcggatcgatgagatgattgggaggctcattgctggtctggaagaaagaggagtgtttgaggatgtcaatgttatattggttggtgaccatgggatggttgggacttgcgacaagaagctggtgtttctcgacgaattggctccatggattaagttggaggaagattgggttttatcaatgaccccgttgctggccatcaggccgccagatgacatgtcgctgccagatgttgtggccaagatgaatgaagggcttgggtctgggaaggtggagaatggtgaatatctaagaatgtacttaaaggaggatttgccttctcgacttcactacgcagatagttatagaatcccaccgataattgggttgccagaggaagggtataaagtggagatgaagcgatcggacaaaaatgaatgtggaggagcacatggttatgacaatgccttcttctcaatgagaaccatatttatcgcgcatggtcctcgttttgaaggtggtagagtcgtgccatcctttgagaacgtggagatatacaacgttattgcttccattctcaatttggagccagctccaaacaatggttcatcttcttttcctgacacaattcttttgccgagtgaatgatcacatatacatgtgactgctgtggttttggatgagaaaggtcttgctgttggtatcctcctttagtcgtaattgcacttgtacacttatcatattagattcgtgtcactagtggctattcactgcctgaatgcaaatgctgctagtagagagtatctttgtccttatggacaacatttgctgttgttatcatgtcttatccttagcggttttcttatgcttaaattttcatgcaagttcaattaagctcgcattctctgcttaaaatgatgtccatcctgttgataagagattaaccagtcctagttctatatttaatttc

SEQ ID NO: 89002 - DNA, 170 bp, Oryza sativa
  Clone ID: PAT_MRT4530_8779C.1
cccacgcgtccgcgagaccaccggcggcggctccaacgtcgtcatgcccggctacaccaagggcgacggtctcggcgccgagatcgtaggtacctttatcctcttgtacaccgacttctactgcaccgactactagaggtactccagggacttccacgtttcgattcttg

SEQ ID NO: 89003 - DNA, 363 bp, Oryza sativa
  Clone ID: PAT_MRT4530_877C.1
atggccacatcgccggctcctctactgctcctctcctccatctccctgcgctcaccgttcctgatgagggcacggcgactcgaggcgacggctgcggcgactcggtcttccagactcgtcccgccaccggctacggcctcaacgggcgatgacgggcgacctagccgacggatccatcggcgtggaggtctggggccgtcagatttagccgcatccgacctccatggtgacgggctgacggcgacagcgggttgcaggatctggggcattgtattgggggattggggcattgaggagtcaatgaagagaatcgggctcaataaaatggctcaattcgagccagtcaaggttttttctgtgtga

SEQ ID NO: 89004 - DNA, 1200 bp, Oryza sativa
  Clone ID: PAT_MRT4530_87800C.1
atggaggtattgtgtgcgtatgggatgcggagtcgaatttggaaagagtccaaatttgctattaatactgctgctgaaaaaactgtttttgaacaaaattgcaaagctcgcaatattcttttgagtgggatttcttgttcggattatgatcgtgttgctcatcttcaaactgcccatgagatttggattgctttgagtaattttcatcagggaacaaataacattaaaaaacttcgtcgtgatcttttcaaaaaggaatatattaaatttgagatgaaacctggagaagctttggatgactatctttctaggtttaataaaattttgaatgatcttagatctgttgattcttcttatgatgctaattatccacaatctgagatttctcgtcactttttgaatggtcttgacatgtctatttgggagatgaaagttacatctattcaggagtctgttaacatgtctactttgagtttggattcgctttacacaaaattgaaaactcatgagatgaatattcttgcttgtaaagtcgattctaagtctaatgcattggtttcgtctttgagttctttggatgttggtgcttcttcatcaacgtcttctgttcttgctttatttaatgccatgtccgatgatcaactcgaacagttcgaggaggaggacttggttttgttatctaacaaattttctcgagctatgaaaaatgttaggaacaggaaaagaggagaaccgaatcgttgttttgagtgtggagtacttgatcatcttcgctcgcattgtcctaagcttgggagaggaaagaaggaagatgatggtagaatcaaagatgatgacatgaacaagaagaagaacatgaaagagaaggagaagaagaagcattgtatgcagtggttaatccaagaactcataaaagtttttgatgaatcggaagatgaagatgagagcaaagttttattttctgaaattaatgctttgcgagatgtcaattctgttaattgcaagaaattggaatttgagattgaaaaatctaaaaagttggagtcttcttttgctcttggatttgctttacatgctcgtgttgttgatgagttgattttgacaacgaacgttttgaaaaatacaaagttgctttttgtgcaagttcattggtcaatgcttcatgtgcaaataaggcaaaacaaaacaatggtgctttga

SEQ ID NO: 89005 - DNA, 1650 bp, Oryza sativa
  Clone ID: PAT_MRT4530_87801C.1
atggtgaggaccgggactatgctcagggaggagcagaggtctactgtggtcgggataccatgtgagaaggtgactagagttaggattcttggaggtcaacttcggtcaacggtggagatcgggactaaactcggggaggagttgaggtccagacggtcaagaataccgggtgacgaagttggatacgagatggcacacggtggatggataccgtgtgggagtgatcttcgcaacgggctttacgagatttctcgtcactttttgaatgatcttgacatgtctatttgggagatgaaagttacatctattcaggagtttgttaacatgtctactttgactttggattcgctttacacaaaattgaaaactcatgagatgaatattcttgctcgtaaagtcgattctaagtcaagtgctttggtttcgtcttcgacttctttggacgttggtgcttcttcgtcgaagtcttctgttcttgctttatttaatgccatgtctgatgatcaactcgaacagttcgaggaggaggacttggttttgttatctaacaaattttctcgagctatgaaaaatgttaggaacaggaaaagaggagaaccgaattgttgttttgagtgtggagcacttgatcatcttcgctcacattgtcctaagcttaggagaggcaagaaggaagatgatgggagagtcaaagaggatgacgtgaacaagaagaagaacacaaaggagaagaagaaacattgcatgcagtggttaatccaagaaatcataaaagcttttgatgaatcggaagatgaagatgagagcaaaggtaagcaagttgttgatctagcttttattgctcgtaatgcaagttctgatgttgatgaatctgatgatgataatgaagaaaagcttagttatgatcaattagaatatactgcttacaaatttggtaagaaacttcaaacatgttctattgttcttgatgagaaggatcatactattgagattcttaatgctgaaattgctagattaaaatctttgattcctaatgacgataattgtcaatcttgtgaagttttattttctgaaattaatgctttgcgagatgtcaattctgttaattgcaaaaaattggaatttgagattaaaaaatctaaaaagttggaatcttcttttgctcttggatttgctttacatgctcgtgttgttgatgagttgattttgaccaagaacgttttgaaaaaatacaaagttgctttttgtgcaagttctttggtcaatgcttcatgtgcaaataaggcaaaacaaaacaatggtgttttgatttctcaagattgttcaaagtgtattctgaatgagatgaagttgaaagatgctttagggcgtgttaaacacatggaagaaattattaaacaagatgaggtgtttatttgctcaacttgtagaaaacaaaaaggtcttttggatgtttgcaaagattgtgctattcttactcaggaggtttcttatttgaaaagttctttgcaaagattttctgatagtaaaaagaacctcaacatgattcttgatcaatctaaagttagcacacacaatcgtggtttaggttttgattcttatgcttatcatgctagacatcctcctactgtaggagaggtgaaattttga

SEQ ID NO: 89006 - DNA, 2330 bp, Oryza sativa
  Clone ID: PAT_MRT4530_87802C.1
cctcaaattcgacggatcgcggtctgaccaaagtagatgcgccggtctgactgcctggaagccgtcggtctgaccggtatagatcactcggtctaaccaccaaaacctgtcgccacctcctgtcgccgctgccggtctgatcaccgttgatccgctggtctgaccgccgcactccgggaagcctcacactccctctctatttatacatgaggtaggcagcctaaagtcacgaaccaaactcatactagaagtcctaatccacctaggaaatcttctcgtacaagaaacaaactttacaaacaacaatcataccaaatttggactccttccaaattcgactccgcatcccatacgcagacaatacctccatcgtatgccatatggaatcttcaccaaccacgtgcattgaactgtagccggcaagcacagcccggtttgaccggtcctgacaaaaacagcaacactgttcatcacctgaaaatcaatcatctccaaaaccaataatctcatatgccaattattcatcacaaaataagaataaaaaatactttgattttacaaccaagagaatttttatcttttatttgaacctttttgctcatatttttttctctcaattattccgggtacatccttgtcgtcgagactgtttccgaggattcggcagccataatttttgcccacatcgaatacgtccttgtcgttaagactgtttccaaggattcggtattcattttttcatattttttatttttttgcttcacaaaagtctgatttgaatttcgcgcaaaattgccccgaggccagtctgaccgccgctgtacctgcggtctgaccgggcctggcaaccggttcagtgtcggtctaaccgtggtcctcgaattaaaacccgattttcgccaacatcgttttgcaaaagcaatttctctttcctttttccctcctagcaacacccaaaacaataggaggatgtctagcatgatgagcataagtgaaagaacctcatcttgtttaataatttcttccatgtgtttaacacgctctaaagcatctttcaacttcaactcattcaaaacacactttgaacaatcttgagaaatcaaaacaccattgttttgttttgccttatttgcacatgaagcattgaccaaagaacttgcacaaaaagcatctttgtattttttcaaaacgttctttgtcaaaatcaactcatcaacaacacgagcatgtaaagcaaatccaagagcaaaagaagactccaactttttagatttttcaatctcaaattctaatttcttggaattaacagaattgacatctcgcaaagcattaatttcagaaaataaaacttcacaagattgacaattatcatcattaggaatcaaagattttaatctagcaatttcagcattaagaatctcaatagtatgatccttctcatcaagcacaatagaacatgtttgaagtttcttagcaaatttataagcagcatattctaattgatcataactaagcttttcttcattatcatcattagattcatcaacatcagaacttgcattacgagcaataaaagctagatcaacttgcttacctttgctctcatcttcatcttccgattcatcaaaagcttttataatttcttggattaaccactgaatacaatgcttcttcttctccttctccttcatgttcttcttcttattcacgtcatcatctttgactctaccatcatcttccttctttcctctcccaagcttaggacaatgcgagcgaagatgatcaagtgctccacactcaaaacaacgattcggttctcctcttttcctgttcctaacatttttcatagctcgagaaaatttgttagataacaaaaccaagtcctcctcctcgaactgtttgagttgatcatcggacatggcattaaataaagcaagaacagaagacttcgatgaagaagcaccaacatccaaagaagttgaagaaaaaaccaaagcactagacttagaatcaactttacgagtaagaatattcatctcatgagttttcaattttgtgtaaagcgaatccaaggtcaaagtagacatgttaacagactcctgaatagatgtaactttcatctcccaaatagacatgtcaagaccattcaaaaagtgacgagaaatctcagattgtggataattagcatcataagaagaatcaacagatctaagatcactcaaaattttattaaaccgagaaagatagtcatccaaagcttctctaggtttcatttgtttcagaggataatcaatatgtaatatatagtactttaagatggtagggaagaa

SEQ ID NO: 89007 - DNA, 396 bp, Oryza sativa
  Clone ID: PAT_MRT4530_87803C.1
atggccggtggacgtggtaggggctatggacaacgagtcagagttgtacaggtggggagttggaggtgcatgcggccgatggtggagttggccagtgagttggagctggtgaaggagtcaggaggccaacgaggtgtaagtgccttgcactttcgggtggaggtggctggcaaggtggccggagaagcagttggccagcggagtgcatttggtgctaggagatggtcggtggtgttgccgcttggtgaggccgttgttgggttggtcactaatgtagtttgtttgtttggaaagccactcgacacggtgaacaactgtgtgggcgacgccctggtcaacatcaaaggatccctcacaaccgggtccggtctcgcccagttccaggacaaggtgtga

SEQ ID NO: 89008 - DNA, 1629 bp, Oryza sativa
  Clone ID: PAT_MRT4530_87804C.1
atggtgaggaccgggactatgttcagggaggaacagaggtctagtgcggtcgggataccatgtgagaaggtgactagagtccagattcttggaggtcaacttcggccaacggtggggatcgggactaaactcatggaggagttgaggttcagacagtcaaggataccaggtgacgaagttggagagatcttcgcaacgggcttcacgagctgttcaggcggcagggaggcgagaaaagtttctcatgcttatgtgattcctgaagctattaatactgctgctgaaaaaactgcttttgaacaaaattgcaaagctcgcaatattcttttgagtgggatttctcgttcggattatgatcgtgttgctcatcttcaaactgctcatgagatttggatttttttgagtaattttcatcaaggaacaaataatataaaagaacttcgtcgtgatcttttcaaaacggagtacattaaatttgagatgaaacctggagaagctttggatgactatatttctcggtttaataaaattttgagtgatcttagatctgttgattcttcttatgatgctaattatccacaatctaagatttttcgccactttttgaatggtcttgacatgtctatttgggagatgaaagttacatctattcaggagtctgtgaatatgtctactttgactttggattcgctttacacaaaactgaaaactcatgagatgaatattcgttctcgtaaaggtgattctaagtctagtgttttggtttcgtcttcaacttttttggatgttggtgcttcttcatcgaagtcttctgttcttgctttatttaatgccatatccgatgatcaactcgaacagttcgaggatgatttggttttgctatctaacagattttctcgagctatgaaaaatgttaggaacaggaaaagaggagaaccgaatcgttgttttgagtgtggagcacttaatcatcttcgttcgcattgtcctaagcttgggagaggaaagaatgaagatgatggaagagtcaaagaggatgacgtgaacaagaagaagaacatgaaggagaaggagaagaagaagcattgtatgcagtggttagttcaagaactcataaaagttcttgatggatctgaagatgaagatgagggcaaaggtaagcaagttgttgatctagattttattgctcgtaatgctagttctgctgttgatgaatctgacgatgataatgaagaaaagcttagttatgatcaattagaacttgctgcttacaaatttgctaagaaacttcaaacatgttctattgtgcttgatgagaaggatcacactattgagattctaaatgctgaaattgatagattaaaatcttcgattcctgatgatgataattgtcaatcttgtgaagttttattttctgaaattaatgctttgcgagatgtcaattctgttaattgcaaaaaattggaatttgagattgaaaaatctaaaaagttggaatcttcttttgctcttggatttgctttacatgctcgtgttgttgatgagttgattttgacaaagaatgttttgaaaaaaatacaaagttgttttttatgcaagttctttggtcaatgcttcatgtgcaaataa

SEQ ID NO: 89009 - DNA, 236 bp, Oryza sativa
  Clone ID: PAT_MRT4530_87805C.1
gctgttgttggccgcgcgcttcatcaccatccattttcggggctagttgattcggcatgcgagttgttacacactacttagaagatttcgacttccatgaccaccatcctgctgccttaatcgaccaattctctttttgggatttacgttaccgcagcagctctgcaccgaaccgcattcttgcatctcactcccgcatcgccgataggtgcttaccaaaaatggaccacttggag

SEQ ID NO: 89010 - DNA, 1659 bp, Oryza sativa
  Clone ID: PAT_MRT4530_87806C.1
atgccaccgaaattgcggaggaggtcgacgggggcggcactatcccacgccgcgagtggagaagaagctcccaaatcatcggaaacgagtcctgctccagcggcggcggcggcgggcagtggaaggtggactcgatctagatcagcgaggagtcacctagggttggattcggattctaccgaccaccctagggtagtgtcgggctcttctgatcaaccgccgaagaagaggaagaagacgacaacggcggtggccgccgccgccggcagtacaaggctggcctcccggccggtccctggtcgctacccggattaccccagtttacggccagggcaacatgctcttagcaagaaacacatgagtgctgttcaagaatggatggaggagtgcagcaggatcagcaagctcgagaaacaagctcgtcctgaagatatccccactctcagagataacccccgggatcccctcactcctgatgccgtggtcagctcacaagacaaggccatggtgctgcgtgtggctcgttccgttgtcagtgtttcatcctcaaagcctgatggggaactgatttcccagtgcaccggcatcgtgattggttgggatggggccaacaagtgcgccaagatcctgacctcttgttctacgctatccgttcgtatgccaaataggacaattacagaaggacggttgttattcttcaatgtacactatggtatcgctcttttggaggtcaagggagacttccagttgcaggtcccttcttttggcttgggcataaactatggccaggatgtatttgcattggctagggatgaaaacatgtccttaatggttaggcatggaacaatttcatggctggattatcctgggttattgaccaatccctatatgtttctgagttgtgatattcccgagggtggttcaggagggccggtggttgaccatgatggtaatatcattggaattgcatttgatagaaacccgggtccggttgttatctctatcactacaatcagaacttgcattgagatgtggcatcagtttagccgtgttgctcgtcccatgcttggcatgcaattgaaggctgtggaactactggatgtctctatgcgggaggaactttgtcttgagtacaatatcaccggcggtttcattgtgaatctggtaaaagttgattctactgctgagagaatcggtattagacgaggggacgtgattgtttttaaggataaccgttgttctactttacctcagttagaagattacctcctttctcttggttggggatacctgcagggcttaagctttacagtagatctcaagtactggaaggttgaagttcataatctcgccgactcatataaggaaagcattactttccctgtaccgttctctgatgcttctaagcggatgactcaatcagcatttgatttggatattgcgaggacatttattttttgggatgtatggttgattgcacaaaggttgatgggcctagatgacgaggacaaaatgtggagtcttatagaagaagtgtgggtggagatgctcttcttctccgctggtagatgtcgaggatacttgcatgccaagagccttggatcaggcgttgatattgtggctcctgttggcacatgcaggaatggaggcattccctga

SEQ ID NO: 89011 - DNA, 1969 bp, Oryza sativa
  Clone ID: PAT_MRT4530_87807C.1
atggtgaggaccgagactatgttcagggaggaacagaggtctagtgcggtcaggataccatgtgagaaggtgactagagtcaggattcttggaggtcaacttcggtcaacggtggggatcgggactaaactcggggaggagttgaggtccagacggtcaagatgccaggtgacgaagttggatacgagatggcgcatggtggatggacaccatgtgggagagatcttcacaacgggcttcacgaggtgtgcgtgcaagcgtaagtgttcgcgaaggaaattggttatatgtatgcatgtacggtgctgtacatgtatcttttcaaaaatgagtatattaaatttgagatgaaacctggagaagctttggatgactatctttctcggtttaataaaattttgagtgatcttagatctgttgattctttttatgatgctaattatccataatctgagatttcttgtcactttttgaatggtcttgacatgtctatttgggagatgaaagttacatctattcaggagtctgttaacatgtctactttgactttagattcactttacacaaaattgaaaactcatgagatgaatattcttgctcgtaaagtcgattctaagtctagtgctttggtttcatcttcgacttctttggatgttggtgcttcttcatcggagtcttctgttcttgctttatttaatgccatgtccgatgatcaactcgaacaattcgaggaggaggacttggttttgttatcaaacaaattttctcgagctatgaaaaatgttagaaacaggaaaagaggagaacctaatcgttgttttgagtatggagcacttgatcatcttcactcgcattgtcctaagcttgagagaggaaagaaggaagatgatggtagagtcaaagatgatgacgtgaacaagaagaagaacatgaaagagaaggagaagaagaagcattgtatgcagtggttaatccaagaactcataaaagtttttgatgaatcggaagatgaagatgagagcaaaggtaagcaagttgttgatctagcttttattgctcgtaatgcaagttctgatgttgatgaatctgatgatgataatgaagaaaagcttagttatgatcaattagaatatgctgcttacaaatttgctaagaaaattcaaacatgttctattgcgcttgatgagaaggattatactattgagattcttaatgctaaaattgctagattaaaatctttgattcctaatgatgataattgtcaatcttgtgaagttttattttctgaaattaatgctttgcgagatgtcaattctattaattgcaagaaattggaatttgagattgaaaaatctaaaaagttgagtcttcttttgctcttggatttgctttacatgctagtgttgttgatgagttgattttgacaaagaatgttttgaaaaaaaatacaaagttgctttttgtgcaagttctttggtcaatgctttatgtgcaaataaggcaaaacaaaacaatggtgctttgatttctcaagattgttcaaagtgtgttttgaatgagttgaagttgaaagatgctttagagcgtgttaaacacatggaagaaattgttaaacaagatgaggttttgattcttatgcttatcattctagacatcctcctgttgttttaggtgttggtgctagaaaaaaaggaaagagaaattgcttttgcaaaacaacggtggcaaaaatcgggtttttgttcgaggagcacagttagaccgcaggtgaaccggcggtcagaccggctgccaggcccggtcagaccgtagggacagcgacggtctgaccggcctcggggcagtttttcgcatacttcaaatcggacttttgtgaaaccaaaaggtaagttttcagaaaaaaataaataccgaatccttggaaacagtcttgacgacaaggacgtattcgatgtgagcaaaataatgg

SEQ ID NO: 89012 - DNA, 126 bp, Oryza sativa
  Clone ID: PAT_MRT4530_87808C.1
atgacgaagaagtatgttgttgcactaaaccgcattcttatccatggttcagctcaccgggacacaaacgccaagccatggtccaagaagatgaagagcctgctagagcaatttgctagaaattaa

SEQ ID NO: 89013 - DNA, 546 bp, Oryza sativa
  Clone ID: PAT_MRT4530_87809C.1
atggcggggtgtggcggcggcgccgccttcccccatggcgagtggcggtggcggcggcgttgcccttcccccagcggcggcggcgccctcctccccacgagcggcggcgacagcgcctctcccgcaccgagcagcggcgacggcggcggtggcggcgggagggccggcgacgccctcccctccactagatcggggggaggggagggatgccaggggtcgaggatcagaagtggggaggtggatatcatcacggtggaggatacggatacggtggtgggtatggtggaggatatggacgtcctgcatatggtggtgggtatggtggaggatatggccatccagggtatggtggaggatatggccaccctgggtatggtgatggctatggaggtggatacggtagtggatatggtggcgggtatggtcatcctggccacggtggaggatatggtggtgggtagggaggtggttacggtggtggcggtggctatggtggtggtggaggctacggaggaggacaaggtggtggttggccttgataagtag

SEQ ID NO: 89014 - DNA, 1194 bp, Oryza sativa
  Clone ID: PAT_MRT4530_8780C.1
atggccgcccgtcccttctccgcctgctcccttcctcagcgctgctccgtcctcctccgcctgctccctcgacctccgcgaccgccactgcctcgtccgcgtccgacctccgcctccacgaccggccgtcgcctcgtccgcaaccgcctccgcgaccgaccgccgccgctcgtcgtcagctcccgcagcctctcgctcggctccgccgcggcgccgccatggcgcccgcccgtccctcctccgcctgctcccacccccggcgctgctccgtcttcctccgcctgctcccttcacctccgtgactgccgccgccacatccgcgaccgctgccgcctcgtccgcatccgcctccgtgaccgaccgtcgtctcgtccgcgatcgaccgttgttgctcgtccgcgctcgtcgctccgggactggctgccgctcgtctatgcctcgcatcgcctcgtccacgaccggagaattgattcgatctcccacgtgagagaatgcactcctttttcatccacttccatttctattgctgctatggtgatcccatcccgacgagtacgtgcacactcgctgggagaatatgcctccttgatattgcatcgagaggaggaggcgaaccaggcttttgggagcgcatcgtgcaactgcttgtttgtgcttgagtacgacaacattgactacatcctcttcatcatgtcatctacctactcggagaaggcaacaaggagaccgttgagaagctgcggggccgtgttgcggacaccccttaaatccgcaattgtggcacaaccatggtgcagtgttgatggcggaatgcagccacgagaccttcgccatagcagtgaggaggcgagcggtgacgacggcgcaggagaggccgtatcccgctgccgaagagaaggtgtagtggcggagccgcggagatcgttgagaggagaccaggtgggcatgtgggaactgcaggcggtagcctccactcgttcctactacttcctggttgcattcgccgcctccgcacttgccccagccggcgccggtgatgacggccagcacgtcgcaagtcgtcgtactcgtaccattgccccatccggtgctgcgatgtacagtagagacaagtaccgtggggaatctgccatggcagcctggcaggaagcgtacagggccgggccggggtggcgtgggacgtgtttttgttga

SEQ ID NO: 89015 - DNA, 1640 bp, Oryza sativa
  Clone ID: PAT_MRT4530_87810C.1
ctgttcagtggattttcaggtatctcagaggcacagctgatgcttgcttgaagtttggcaggactgataaggggcttgttggatatgtggattctgattttgctgcagatttggataagagaaggtcagaagcctactggaaagccaggggttgatgatcagaagtggggaggtggatactaccctggtggaggatttggatatggtggtgggtacggtggaggatatggtcgtcctgggtatggcggtgggtatggtggagggtatggctatccaaggtacggtggtggttatggcggtggatatggatgtgggtatggcggcgggtatggaggttacggtggagggtatggtggtgggtatggaggtggatatggaggtggatacagtggtggaggttacggcggaagatatggtggtggtggtggttggcatgggtcggcggcaggcggcggccggtcggggtcggcgaccgccgggctagggaggagtgcacggcggcctcgcgctcccctccgccagatccggcggcaacggtggagcggaggggatggcggcggcggcggcggccagcggatgggagggcaacggcggatgggagcgcggcgatcggggtcggaggggatggcgcggcgacaggcggatgggagggcggcaacggcggcgggcgcggcgatggcggggtgtggcggcggcgccgccttcccccatggcgagtggcggtggcggcggcgttgcccttcccccagcggcggcggcgccctcctccccacgagcggcggcgacagcgcctctcccgcaccgagcagcggcgacggcggcggtggcggcgggagggccggcgacgccctcccctccactagatcggggggaggggaggtacagcggcggcggtcccggcggagcaggaggggcggcggcctggacggcgtggaggtggcatcggcgggggtcgaggatcagaagtggggaggtggatatcatcacggtggaggatacggatacggtggtgggtatggtggaggatatggacgtcctgcatatggtggtgggtatggtggaggatatggccatccagggtatggtggaggatatggccaccctgggtatggtgatggctatggaggtggatacggtagtggatatggtggcgggtatggtcatcctggccacggtggaggatatggtggtgggtagggaggtggttacggtggtggcggtggctatggtggtggtggaggctacggaggaggacaaggtggtggttggcggggtcgaggatcagaagtggggcggtgctcatggaggaggatatggatatggcggcgggtatggtggaggaggatatggtcatcctgggtatggtggtggctatggtggtggatatggccaccctggatatggcggtggctacggaggtggatacggccaaggatatggctgtgggtatggtcatcctggtcacagtggaggatatggtggtggttacggaggtggttatggtggaggatacggtggtgggggtggctacggtggtggtggaggttatggaggaggacatggtggtggttggctgtataagggtgggcaggggttcagaggttttctcgatttaggagtggggggccgatttggccgaa

SEQ ID NO: 89016 - DNA, 367 bp, Oryza sativa
  Clone ID: PAT_MRT4530_87811C.1
atggagaggcggcgagtagggcttgcctcctcctactgcctgccccatccctggcggtgcgccttgccccaggtctgctggtgcgcgggaatgacagaagaggagaaaaggaggacaaatcgaatcaatcctggtttgcggcggcccggggcgcggcgtgctcacggtggctggcagcagcggcggtagcccatgtgatgaaggaaggggaatggagcggatttctcttgattcgccgtttctttcgaacgacaaaccgactggatttctctcgatcggggtctgaccgaataacagagacactaggacagtacgtagctacctctccactgctctgctcatttgcttggcttttggctggaagtat

SEQ ID NO: 89017 - DNA, 358 bp, Oryza sativa
  Clone ID: PAT_MRT4530_87812C.1
ccctcccgccgtcggccgacaccgcgccatggctccaaccgtcgtccgccaccgcgcctcccctcgctcctgccggatctggcggccaggccgccgccgcgcctcccctcccgcccctgccggttctggcggccgggccgccgccgccaaccccgccggcccggcgccgccgcgcctctcctcccgcccctacacagagaacgagaggagagatagagaagaagtggaagagatagaggagaagtggagaagagggagccggccggccttatctcctcctgtgggccccgctgggagaggagatatatatatagtggcagaagtcatctcaaacgggctaggacttaaagccatttga

SEQ ID NO: 89018 - DNA, 676 bp, Oryza sativa
  unsure (1)..(676): unsure at all n locations
  Clone ID: PAT_MRT4530_87813C.1
gtttatatattctcttcgttccatccttttttttttactgcaacataagtttaactcgaacctgctattatatgcttaggcaataaactcatcttgatccagggagatgagtaacaagggaagactccccattctttgtttgaaaagaggctaactttgttcttatgcactgcaacagatgattattaaccagtttgttttagcttttttgttacttgaaccctatatgtgataattattatgttatttgacattttgaacagttctggtatggggtttggttttgtcaatcagtgtgaccatagagttgttgaaatatgctaccttatgcagctcatcgtctgatcgatgttttggcgaaatcattagttattgtttgaaggttgacaatggagattgttcaatatttacctgttgtatatttcaggaggatatatgttttaaaatggaaaaagctttctgccctccaaaactagcagaaggcaatccatgtttggagtacataaaatatatcatcttgccttggtttggaatgtttgaggtggtccagaagaaagggaatggtggcaaaaagacttttctgagcatgnaggaacttacagctgattatgaaagtggcgctctgcatcctgctgatgtgaagctggcccttgaaagtcattgaacgagatattgc

SEQ ID NO: 89019 - DNA, 508 bp, Oryza sativa
  unsure (1)..(508): unsure at all n locations
  Clone ID: PAT_MRT4530_87814C.1
atggcgttcaggcattggcggctggtctgctactgctacccgtgctgctgcctgctagcccgtgatgaaaggtttaaaaatgtgaaaaatctggttgagctttccaccatgcttgttgcaacaaagaagcacaccgcttatgaatttgtttacaagcttctcaaattggtcttaattcttcctgtggcaactgctagtgtagagagggtgttttcttccatgaattatgtcaagaacaagctaagaaatagaatgggagaacaatatttgaatgttgtttagtaacctttttggagcgtgatctttttgtgcaagtaacagatgatgacatcatttntcgcttccaagccatggctacccgcaaagttaaattgtaatttgtttcagttttcatgtaattcattcaaaccattttataatttagacatttttaccattgtgctactgtttgtacctttaaacatgtcattatcagtttactactatattgttaaaaaaaaaaaaaaaa

SEQ ID NO: 89020 - DNA, 360 bp, Oryza sativa
  unsure (1)..(360): unsure at all n locations
  Clone ID: PAT_MRT4530_87815C.1
atggagaatgaattccacgttgaaaggcgcgcgaaatcaggagggcgatcgatcgagagatcaacagaagaaaccggctaccggctgctcacctccacgacgcccacgtggtgcgcccggtggcccggcgaccccgccgcggggcaggaggaggaggaggaggaggaggaggaggaggantangatgatgaagcgtttgtcacctggagcgttatgacggctgcatgggcggtctgcctaggtctaagccggggaaatgtggtggcgacggaagtgcgcggggggggagaaaagattatagtggccatgagcgggggaagttggggattggcccttgagtttagagggggtggacgatga

SEQ ID NO: 89021 - DNA, 432 bp, Oryza sativa
  Clone ID: PAT_MRT4530_87816C.1
atgaactctgcagatgaacaagaagaacatgttacttggctgatagacctcagaggctggagtatatcaagtacgccattatcgacatcccgtgaatccatgcacatagttcaaaactactatccagggattattgcagtagcaatactcagcaacactccaaggatttttgaatctttctggaagattataaagcacttcttggaagcaaagatgagcgagaaggtgaagtttctatatactaacaatccagagagccacaagatagtgtctgaaatgtttgacatggatctgctggagactgcatttgggggcagaaattcaattaccattgatatagacaattatgctgagagaatgaggagatcagatcttgcgagaggagttttaatcatccaaacggacataaatctgattagtcgacatcactga

SEQ ID NO: 89022 - DNA, 856 bp, Oryza sativa
  unsure (1)..(856): unsure at all n locations
  Clone ID: PAT_MRT4530_87817C.1
attcggctcgagcctcgttaaattttgattttgattagaagagctcaaatttttagcnaganaaaggcaaatggtaacacgcagcagcctggtagctattgaaaagtgcccgtctgctgttcgatttcgaccactcaaaccctaacgtttccaacttgcaagggcttcgctccagaagggttacgatggattttgacgagtatgagtatttagagaaagcagttgaaaaccctgaagttaatcacagggctaatggtggggacaaaaatgtgaaatccgaagagagagggcgtaatgggagttcaaagcataaggatgatgatgatgatgatgttgttgatctccatcccaggcattcaaaatctggagacaattctcgtgatcgcgagaggcagagagaaagaggctcaactcttcatggttcaaagtccagagatggagacaaggacagaaactccgggggcagcagggataggaggagggatagggacagagaccatgagaacaaggataggaagagagacaaggagagagaccatggggacaaggatatgaagagagatagggagagagacagagatcgcaatcgtgaccaagaaagggacagaagggaccgtgggagtgaggctgagcaggaacagcgaagcagaagtagatctgataggcttcgaactgatctggatgacaaagacagagaggcaagtcgtgacagggagtatagagatagagaaagaagtcgggataaggattacaaagacagagaaagggtgagggaatcaagggaacatgatagagaaaacagtcggcataaagagaaaaaaaaaaaaaaaggaaaagccgccgagcaagtgagctc

SEQ ID NO: 89023 - DNA, 1974 bp, Oryza sativa
  Clone ID: PAT_MRT4530_87818C.1
atgtcgacttccgccagcccgttcgcagcgccatcagccgagtatgcagaggtcactggaaagatactttcaagtcttggccttcgcttgagaaaagttctcctgagaaaagttagcccgtatgatgtcacctattcggccaatctgatgaccctaaattccaagaaccagtttgaatttaaaacaaaaacaataggtggctggtctggctatatcgccgcaaacatgggcataggatctgtcaccccccaagagcacacagcctttctactaatgtggcttgagaaatttcttttctgtggatcaagttgtggccctactaccaactggcaattcctagcagaagcccttgaagcaaagaagcaaatccctttgggcaaaatcctcctcggctatctgtatcagatgttgaacaacgcatcggccaagatagccgcaggctcagtagtaggtgcaggtggaccatcgtggttactgcaaacatggcttaacttagttgccaagaaagctgtgaatcggccagctctgttagagtcccaatttccaagactagaactgatcacaagtgacgatggggaagtactaacccatcgcagatgcatgtcatatggagaagctgcatcaacaccagccgattctggagcaaagctatcggctgaactgctcaaagactggttctgcagattctatgagggcttccagaaagatgctcgagtttggtttgcatatgaagactcaatgagctttgaactgccatcagactttagatttgaagaaatcaattctgaaagatatgataagtctagagagctgccaatcggcttttattttgccgataaaattcaatttagaggcgaaatctcatcaacattgatgatggatcggctgttgaacatcccaggaccccctttgggcagcatcaaaaatgtagaactagcaaagttcaggagcaggaactttgacagatggtggggtgaatggaagcagcacttgttccaccaatcagcttccatgtacatgacagatctattcccagatgttatccctcagacaatagaatcttcccatcctcgcaaaagcaacagcggcaaggacatcgagtatgcttcaggcctcttaccaaatggaggtggactaactcccccgtcatcggctaccatgcccccaggacctcaaccttctcctcctccttcgcctcctgtgcagtcgacgcccagtgatcgtactccatcggctgcaggcagccacaatattgaggaggaagaacaacgagctgctcctgccataccagctttagccgatctgttcttgtttgacatcaaggattactttgatgaagaggtagaagaaaaaataacaagcaaaactctagtccctctagatgacgatgtcaaaagaactcttgaagacatatctcatcggctagagacatcattagacaacttggtggttgactgcggtacaatccgggcaagatttgcagagattcaatccctaatcccgaatgatctggcaaataccatttctccagctgtatacctcgagcaacatcaattcaaggtagaaaaggccaagcaaaggatagccgatcggcgagagcgaagggatattgaagccactattcaaaccaatcggcaaaccgttcatgaagagaaagctaagctagatcaactcttggttgggccaattcaaactaaaatagatcggcttgaggctcgcagaatagatctcatagctcaactagaggaatgcaacgccgaaatggctcttgagcagaagaagttaactgatatcccaaaggctgtcgaagaacaaaagtccagactaaaattggctatcaggaacgtggccgatttgaccaagtctctcaaggtcattcctggaaccgacgcccaagatatccaagctattgaagaagtagatcaaattagccaacgggctgtatcggcaatccagcgtaacttgtctagatga

SEQ ID NO: 89024 - DNA, 1491 bp, Oryza sativa
  unsure (1)..(1491): unsure at all n locations
  Clone ID: PAT_MRT4530_87819C.1
atggcggacaacggtggccacgaggatgctccgccgaacggagaccaccacccaccggccatcgtcgcgaacggagacgaccaggagccggcggcgaacggagacgaccaggcggaggcggcggcgaacggaggcgaccaggctgcggcggcgaacgaccaggctgcggcggagaacgaccaagctgcggcggagaacgaccaggctgcggcggagaacgaccaagctgcggcggcaaacggaggggaacacgaggaggcgaacagggacttgccgaatgtagcagggattcgtgccccgcgcgaactgcggcgcgtcgaggtggacgcgctccaccaggtcctcctccgcatgccggccgccgaggtggcccgctgcagcggcgtctgcaggcggctgcgcgacctcatcgccacggactccttccgccgcggccaccagcgccaccgctcccgccaccccatgccgctcttcttctaccgcctcgaccactgggccttccccgaccgcgtccgcgtccacctccgcgccgtcgacgtcgccgccaacgagacccacccggtcatctgcttctcccacgccgacgccgacctccgcagcgccgacccgcgcgtgttcacgatcgagggctcntgngacggcatcctcctcttctcttaccacaccaggctatacgcctcaaacccctccacgcgccggtggcgccgcctcccgccgctccacgacgaccacgtcatcgtcggcttctacggccacggcgccatcgacgagagggagtacagggtgctgtaccacacggcgcgccccggctgccgctactgggtcttctccctgagcttcttcccggaccagccgccgagggacatcgggcgccccgccgacctggagaccgtccgcgccgtgctcgccgaggggatctccccttcctacgagatgccgcccgtcgccatcgcgcacaggctgcactggcgcgcgcaggcggccagcctcaacgtgctggtgttcgacacggtcgccgagtccttcgggtggatacctcccccgaatcaacaggaaggtaatcagatgatcccggtggagggagaccagctgcttgagatcaacgggaggctcgccatgacgctcgtctcgcagaccaccgtggatgtctgggttcttcaggaaggggaggcttgggaacaccattaccagatctcgctgccggtggatctgctcaacgttttcggtggctacgacgacgaaggcttcgtatccgcagcagtgttcgccgtgtcccaggagaggaatgtgctggcacagtgcccggcgatgatgctccagtgcgacaccgaggggaacgtgctcatgttttactccctcgccggccacctcaccgtcctgtccagatatatgctccaggaaagccttcttgcgcatgcgttccttccgatgcggcaggaagatgcaatcgacggcgacccgccgttcttccaagttggactgaaatactga

SEQ ID NO: 89025 - DNA, 956 bp, Oryza sativa
  Clone ID: PAT_MRT4530_8781C.1
cgcaagtcgccgccgatctccttccaaaatccggccgcccatttcctcctccggccgaatttattgaggggaaatgatcgtcgagatctcctcttccttttctcttttggaaacattggctaatttcgtttggaaaccgacgtatttgagctcgattcggatcgatctctctcctctaaccctagaccttccatctcgccgccggtcgccatgggcctccgttgccgcctcctagcccctataaaaggatccccgggacctcctctatccgccaccaccttcgccttagcccgccgtcgtttgtagcgccgcctccgcgttagctcgtgtgtcgtcgtcgccgccgtcggtccagccgcgtcgcgccgccgttgcagccaccgcctttggtcgtcgtcaccaccgtcgggatcgtgaggttgccgccgtttcctgctggagcaccgccgtcaccgccgacccgaagaccgccgccgcctcaacctcgctgccgtcgtcatccgtcgtcgtttgtcgtcgtccaagtgctcggtgagttcgctgcgtcgccctctgcccgttggtgccctccgtttgcgccgccgcgccgtcgttcgccggcgagcacgaggtgctgagccgccgccggcgataacgtcatcgtcgacgtcagcgccacgtcagccgtagacccgcggtggatcgattcgatatcggccgtccgttttggattagattagatctcggccgttggtttggtagaccgcctctgtgcactcggtctaccgtggaccgtctttgatgatgcaataaatccctttttcagactgagaagtggcggagataagcccatgggggtcgctggggagtccatgcctctggttattgaggggtggtacacctctggccagagtaaaactattcgaatagccgtgcccgcggttatgggcgagttgaacaatgtttttcgtgattag

SEQ ID NO: 89026 - DNA, 1509 bp, Oryza sativa
  Clone ID: PAT_MRT4530_87820C.1
atgctccgccgaacggagaccaccacccaccggccatcgtcgcgaacggagacgaccaggagccggcggcgaacggagacgaccaggcggaggcggcggcgaacggaggcgaccaggctgcggcggcgaacgaccaggctgcggcggagaacgaccaagctggcggcggagaacgaccaggctgcggcggagaacgaccaggctgcggcggagaacgaccaggctgcggcggagaacgaccaagctgcggcggcaaacggaggggaacacgaggaggcgaacagggacttgccgaatgtagcagggattcgtgccccgcgcgaactgcggcgcgtcgaggtggacgcgctccaccaggtcctcctccgcatgccggccgccgaggtggcccgctgcagcggcgtctgcaggcggctgcgcgacctcatcgccacggactccttccgccgcggccaccagcgccaccgctcccgccaccccatgccgctcttcttctaccgcctcgaccactgggccttccccgaccgcgtccgcgtccacctccgcgccgtcgacgtcgccgcccgcgagacccacccggtcatctgcttctcccacgccgacgccgacctccgcagcgccgacccgcgcgtgttcacgatcgagggctcctgcgacggcatcctcctcctctcctaccacaccaggctctacgcctgcaacccctccacgcgccggtggcgccgcctcccgccgctccacgacgaccacgtcatcgtcggcttctacggccacggcgccatcgacgagagggagtacagggtgctgtaccacacggcgcgccccggctgccgctactgggtcttctccctgagcttcttcccggaccagccgccgagggacatcgggcgccccgccgacctggaggccgtccgcgccgtgctcgccgaggggatctccccttcctacgagatgccgcccgtcgccatcgcgcacaggctgcactggcgcgcgcaggcggccagcctcaacgtgctggtgttcgacacggtcgccgagtccttcgggtggatacctcccccgaatcaacaggaaggtaatcagatgatcccggtggagggagaccagctgcttgagatcaacgggaggctcgccatgacgctcgtctcgcagaccaccgtggatgtctgggttcttcaggaaggggaggcttgggaacaccattaccagatctcgctgccggtggatctgctcaacgttttcggtggctacgacgacgaaggcttcgtatccgcagcagtgttcgccgtgtcccaggagaggaatgtgctggcacagtgcccggcgatgatgctccagtgcgacaccgaggggaacgtgctcatgttttactccctcgccggccacctcaccgtcctgtccagatatatgctccaggaaagccttcttgcgcatgcgttccttccgatgcggcaggaagatgcaatcgacggcgacccgccgttcttccaagttggactgaaatactga

SEQ ID NO: 89027 - DNA, 879 bp, Oryza sativa
  Clone ID: PAT_MRT4530_87821C.1
atggaggaggagtggtgttgtgtggcgccgggattcaggttccacccgacggaggaggaactggttggttactacctggcacggaaggtggtcgggcagcaggacgacgggatcatccaggaggtggatcttaacagcatcgagccatgggacctgctgcaagctcagcagcatgatcaggagtactactgctacttcttcagctacaaggaccgcaagtaccccagcgcgcgagggacggggacgcggaccaaccgcgccacggcggcgggcttctggaaggccacgggccgtgacaagccggtgctctcctcctctcgatcatcatcgtcgccggcggtgatcggcatgaggaagacgctcgtcttctaccgcggccgcgcgcccaacggctgcaagaccgactggatcatccacgagtaccgcctcgtcgcccaccatcagcagccggacggcagctgctgggtggtgtgccgcgcgtttcacaagcccaccaccaccaccaccctgcagcatcagcttcacctgcacaggccgcctcctctacttcatcatcccggctattacgccgaacaaaatttatatcctcctctcgctgctgctgctggtggcggcggcttgctctgctcacttgccttggacatggagttggaggacgaggaggatgaatccaagatgatgatcttaagcaatgataatattccgctggtggtgagtccgactgccgtacacacacaaggcaccggcggcgacattattaacgacgctactaccgcgcctgctgctgctgctgctgctgctgatcatcgtcgtcatcctgaattgctagctgcaggtcccatcgacaccttgctccaccaccaccacttcacttgttag

SEQ ID NO: 89028 - DNA, 473 bp, Oryza sativa
  Clone ID: PAT_MRT4530_87822C.1
gtggaggtcgagggagtagtgaggctccgaccactagaagggagaggaggggcgccggctctccggtggatgaaagactgtgacaccggcggcaacacgtgttcccaagcaacgcgtactcagggagggtagtttccggtacatagcgttagggaggtgaccggaacggcggcggcaagagcttgctccggtaacaagaggaggtgactgtgatggttggtttcggaaggggaaaggaaggggaaactaggaaaatgagttcgcctcgtcgaggcaaacccgatggcgcaagggcttggtttgggatgctctagggatggagatcgatcgatggtggccatggcctaacatggcccggagagagagagaaaagctcggtttgtgcgatgaaaggcggttgccgatggcggttgtggaggcggtttcagagttagcggcgaccggtggcgtgagggagaggaacacggcgccgg

SEQ ID NO: 89029 - DNA, 1495 bp, Oryza sativa
  Clone ID: PAT_MRT4530_87823C.1
agagtgtgtataaccgtgcacacttgatggaccatttaacgatgagttaaacaaaccccacatatagcgggggtatttggccacatttcccagcgtgagagagtcacatttgggttgaaaacacaccaaacaccctcatgttttagatggcggcctatacaagaggagggttcccaattccaataattccacggacgcgtgggccgcagccgccgccgccgccgccgcgttccaccacctaccacccccaccggagaagaagaagaaaaaggagaggaagatggtgtcgggttcggggctgtgcacgcggcgggtggtggtggacgcgcggcaccacatgctggggcggctggcgtcgctggtggcgaaggagctcctgaacgggcagcgggtggtggtggtgcggtgcgaggagatgtgcatctccggcgggctcgtccggcagaagatgaagtacctccggttcctccgcaagcggatgaacaccaagccctcccatggccccatccacttccgcgccccctcccgcatcttctggcgcaccgtccgcggcatgatcccccacaagaccccccgcggcgaggccgccctcgccaacctcaaggccttcgacggcgtcccccctccctacgaccgcaccaagcgcatggtcgtccccgacgccctcaaggttcttcgcctccagcccggccacaagtactgcctcctcggccagctctccaaggaggtcggctggaactaccacgacaccatcagggaattggaggagaagagaaaggagaaggctaaggttgcatacgagaggaggaagcaattaacaaggcttcgtgtcaaggctgagaaagctgctgaggagaagctgggttctcagatagatattttggccccaatcaaatattgattggcctgattgtcatcaattttcttttcgcctttataatatttctgcttatcggtaccatgagaagtgaaatgatatgtctgtcgaaacatgataattttgttccaattgaatactagagagttatattggcttgatctgattttccctcttaaaaaaaaaaaaaagaactctcctaactggacaaatgacccctctggtttgttctgggttattttgatcctacttaacgagggagtaatttggcctgtgatttttaccctgtggttcggaactaattttctcattctttgcaatgttgtctgttaatattatgctcggctaggttccttctactacgttttatcccctagccctagcaccttcgcttgctcatttcttcctttctattcaccaattgtaccgtgtaattagctctgttgtgtatttttttaaaattgtttgtgcagaacaccagattatagactgtataatatagatagaatcaatactcctcctgaatattttaatgtcagacactttatgcctgaatattttaatgtcagacactttatgccaaaaaaaaaaaaaaaaaaaaaaaaaaaaaaaaaaaaa

SEQ ID NO: 89030 - DNA, 1291 bp, Oryza sativa
  Clone ID: PAT_MRT4530_87824C.1
caacatccaaagaagttgaggaagaaaccaaaacacttgacttagaatcaattttacgagaaaaaatatttatctcatgtgttttcagttttgtgtaaagcgaatccaaagtcaaagtacacatatcaacagaatcctgaatagatgaaactttcatctcccaaataaacatgtcaagaccattcaaaaagtggcgagaaacctcagattgtgtataattaacatcataagaagaatcaatagatctaagatcactcaaaattttgttaaacctagaaagatagtcatccaaagcttctccaggtttcatctcaaatttaatgtactcctttttgaaaagatctcgacaaagttctttgatgttattagttccttgatgaaaattactcaaagcaatcctaatctcattggcggtttgaagatgagaaacacgatcataatccgaacgagaaaacccactcaaaaaattattgcgagctttgcaattttaattttgttcaaaatcagtttataaagtagcagtattaatttgttcaggaatcacataaggatgagaaacttttctccaaatatcataatcctcagccattatgtaagattgatcctactacaccaatgagaaaaatctgttccatcgaaaacatgaggcttagttgtaaacttagcagctatggcaaaaataagtcaaccagagagggggtgaatggttggtatgcccagaaacacaaacttttcgcggaataaaaagttaccctcaaattcgatgtagatcggtctgaccgaagatgatctgccggtctgaccgagctcgtgccgccggtctgaccggtgttgatccgccggtccaaccgcctgaagattgcctgccgcgtgtgaagtcgccgccggtctgaccgcctctcctccatcggtctgaccgccgcctgccgccggtctgaccgccggtatgtcgccggttagactgccgaaacccgatgaaacacaaatcgaagaactctcaaagtagataacaactttattacttctctccaagccgactcccggtccatcaccgcaaatactctcccgaggcatcgggtcacgtatagtatccatctagaagctataaccatgaaacaatcacagatatccaaagaaacaacccgaaaccgaaaccgacacagcgtcggccggtcagaccgcgggccggctggtctgaccgctcgatcacccaaccagtactaaagattgattttagtccctattcaacattgtcagaccgtgttgtactaaagattgtatagtaccgttg

SEQ ID NO: 89031 - DNA, 1983 bp, Oryza sativa
  Clone ID: PAT_MRT4530_87825C.1
cggttcaggacggcgacggagtacagtgaatcgggcgtccggttcagggtcaggtcagattcagagcctgcccctcgtttcgggctcctcgacgtggacttctcgtggggcgtggtgaccatgtcgcgccacgtgatcgacgagaagatgagctgcgtgttccgcaacgtgctggcgttcgagcaggacagcggcgccggcgtggagcgcgacgcgtacgtgacggcgtacgtggtgttcatgtcgcagctgctggggagcgctggggacgtggcgttgtggcccactgtagctcaattttgttttatgtccatcatgaatacctgcatcttcaagatatgaaacctggagaagctttggatgactatctttctaggtttaataaaattttgagtgatcttagatctgttgattcttcttatggtgctaattatccacaatctgagatttctcgtcactttttgaatggtcttgacatgtctatttgggagatgaaagttacatctattcaggagtctgttaacatgtctactttgactttggattcgctttacactaaactgaaaactcatgagatgaatattccttctcgtaaaggtgattctaagtctagtgctttggtttcgtcttcaacttctttggatcttggtgcttcttcatcaatttatttaatgccatgtccgatgatcaacttgaacagttcgaggaggaggacttggttttgctatctaacaaattttctcgagctatgaaaaatgttaggaacaggaaaagaggagaaccgaatcgttgttttgagtatggagcacttgatcatattcgctcgcattgtcctaagcttgggagaggcaagaaggaagatgatgggagagtcaaagatgatgacgtgaacaagaagaagaacatgaaggagaaggagaagaagaagcattgcatgcagtggttaattcaagaactcataaaagtttttgatggatctgaagatgaagatgagggcaaaggtaagcaagttgttgatctaggttttatttctcgtaatgctagttctgatgttgataaatctgatgatgataatgaagaaaagcttagttatgataaattagaacttgctacttaaaaatttgctaaaaaacttcaaacatgttctattgagcttgatgagaaggatcacactgttgagattttaaatgatgaaattgctagattaaaatctttgattcctgatgatgataattgtcaatcttgtgaagttttattttctgaaattaatgctttgcgagatgtcaattctgttaattgcaaaaaattggaatttgagattgaaaaatctaaaaagttggaatcttcttttgctcttggatttgctttacatgctcgtgttgttgatgagttgattttgacaaagaatgtgttgaaaaaatacaaagttgctttttgtgcaagttctttggtcaatgcttcatgtgcaaataaggcaaaacaaaacaatggtgttttgatttctcaagattgctcaaagtgtgttttgaatgagatgaagttgaaagatgctttagggcatgttaaacccatggaagaaattgttaaacaagatgaggtgttttcttgctcaacttgtagaaaacaaaaaggtcttttggatgcttgcaaaaattaaaaaggaaagagaaattgctgttgcaaaatgacgttggcaaaaatcgggttttaattcgaggaacacggttagaccgacactgaaccggttgccaggcccggtcagaccacagggacagtggcggtcagaccggcctcagggtaattttgcgcgaaattcaaatcggacttttgtgaagcaaaaaggtaagaaatatgaaaaaaaaatgaataccgaatccttcgaaacagtcttgacgacaaggacgtattcgatgtgagcaaaataatggattggcatatgtgattattggttttgttatttggagattatcgtcgaagtggttt

SEQ ID NO: 89032 - DNA, 3459 bp, Oryza sativa
  Clone ID: PAT_MRT4530_87826C.1
atggagccatcgccggagattccgccgccgccacccgccttcgccgccggcggagaaggcgatccgcatgctcccaccacagccgccgcccgctcctcctcctcctcctctctatttcctctcttccccctctcggcgcccgaggaatcctccgcccccgcggcggggtcccagtggctctcaaaccctagcttctccttcgacgcctcctccctcaacatccccgccactgcctcctcatccgtaccgccgccgctaagcgcctcgtcggacgaagaggaggcgccacggcccgcacctgctaagtatgacctgctgccctactcaccgtcgcctccggcctccgacgaggagaggagggacagacggaaggataggaagaggaggaagcggaggcgggagaaggagcggtacaatagcgcggaagcctcgcgaaagccgggggttcgcgcttgggctgggtcggagacgaagttggctaaggattactacttcgacgccaagggcgaccaggataacttggcgtttggatcgatatacagaatggatattgcacgctacaagtctcaaaacatgccagaggcacgtggtctaaaacggcttttgtttcataacttgggtgtctcggtacatatgggtcatgagtcagatttagatggactgaatagcaaagcaagagctggaggtcgctactactcggcgaaatatgcagttgtagaaagaaataagggtttcaaacacctaaaagtattgaaaaaggataactctgcaattctcccagaagattttatccccctagggataccatctcttcctgaaaataacactactggggaacaggaacttgaagaatcttgggaagatgaaatacttcggaggacacgagaattcaacaagatgtctcgggagttccctcacaatgagaaaatttggttggactttgcccgattccaggataaagttgccagtactcaacctcagaaagcagcccgtttgcaaacaactgaaagaaaaattagtatattggaaaaagctgtagagcttaatccagataatgaagaattattgctttatcttctgaaggcatatggtgagagggatagcacccagaatctcctggataaatgggagcagatactcatgaaacacccggatagttgggaattctccagattcaaagtatctgacctacggaagtcttacgcttatgcagtacaggctttatctgcagcttgtactaagctatgtaggcaggatacacaatatgatcgtctcgaacctaagtattcttccttaattcatcttgaactcggtctagtggatatatttgtgaatttgtgtcggttcgaatggcatactggacatcgggaattagcaactgcactatttcaggctcaaatagaatttagtttattctcccctccccttcatctgaccacaagcagtaagcaaagactctttgagcacttctggaacaatggtggtgctagaatcggagaagatggggctcttggatggtccagatggttggcaaaagatgaggagagtagacaaaatatagatatacaagaaaatacccaagaaactgaaaggggtggttggagtggttggtttgatccttctctaaggactaatagtgaaacaagcaaagtggaaccatcgacatctgatggaaatgatgcagaaaatccagatgatgaggacccatctgcacaagaagatgttgaatctttgctgaaaaagcttgggattgatggagatgctgattacaatagtgaagttaaagatccaaaaacgtggaatagatggtcatttatggagttatcaagggataatgaacaatggatgcctcttcatgaaaaacttggatcactttattctgatgatgctccaactggagaagacaatgatcagctttccagagtaattttgtttgaggatataactgagttcctgttctctctatcttctgaagaggctcgcttttctttgatatgccaattcattgatttctatggtggaaaaatttctagatggacatccaccaacagttcaagttggattgataggaatttgagcctagagatgattacagatgacattcaggaagatcttagtacggtgtctaaccttatagacaagaaccaaacttcagttcataataaaatggtgtcattgttaggaactatgcatgaattttctcaaaggcctggcactgcgaaatttctgaaaaatgcaatattgcttttccttgatgtattccctcgtaatcatatcctggaggaagctgttcttgttaccccccaaattcatacagctcaagaaaaatatctggctactccagccaccgcatcccgggctttggccaaaaatctattgaagaaagacagacaggatcttttgctttgtggaatatatggacgaattgaggctatgaatggggactttgtcaaagcaaggcatatattcgacttggcactatcaacttctcaaggagcttcagaggatctcaggaagaaggttcctattctttatttttggtatgctgagatggagctagcaatatatgcttcaagaaacaattctgactctgtggatcgtgcaatccacgttctgtcctgcttaggggacaaggcgaagtatgcttcttttgatgggtctatatcacgacctcaggtgttaaaggctcgtcaaggatttaaagagcagattagaagcttgcgatcttcatttgcaagtgatggtatgaaagaagagtctgttgctctaatctgctcagcatctttgtttgagagtatgacatctggttttgcttctggtcttgaagttatagaagagaccttttatatgacaccttcagagaacaaccatagcttagaattcgaagaattgtggatgcactacatcaagcagcttcagaaaaatcttaatcagttgagtctctcaagggtttggccaaaaatatcgcaaggaatacaaacatatccgtacaacccaaaatcatatgcagccatgttaactctaggttgcctttacagtgtttccaataatctacgtctcacactcgacaaatttaatcaaagggatccttccataattggcttgctctttgctttgtcctttgaattgtgcaaagctggatcagacaatagaatacacaatctgtttgagagagctctgactgatgataagttacagaaatccgttctgttgtggcgctgttatctagcttatgaggcagagatagcttgcaatgcttctgcagctcggcgtgtgttcttcagagctatacatgcctgtccatggtctaaacgattatggcttgatggatttgaaaaactgagttcaattttgacactgaaagagttgtcagatctccaagaagtaatgcgtgacaaggaattgcacattcgaactgacatttatgagatactcctgcaagatgaaacagatacgtga

SEQ ID NO: 89033 - DNA, 1697 bp, Oryza sativa
  Clone ID: PAT_MRT4530_87827C.1
tagatctgggttggttaatctaaaggggattctattgctagtgctttggtttcgtcttcgacttctttggatgttggtgcttcttcatcgaagtcttctgttcttgctttatttaatgccatgtccgatgataaactcgaacagttcgaggaggaggatttggttttgttatctaacaaattttctcgagctatgaaaaatgttaggaacaggaaaagaggagaaccgaattgttgttttgagtgtggagcacttgatcatcttcgctcacattgtcctaagcttgggagaggcaagaaggaagatgatgggagagtcaaagaggatgacgtgaataagaagaagaacacaaaggagaagaagaaacattgcatgcagtggttaatccaagaaatcataaaagcttttgatgaatcggaagatgaagatgagagcaaaggtaagcaaattgttgatatagcttttattgctcgtaatgcaaattctgatgttgatgaatctgatgatgataatgaagaaaagcttagttatgatcaattagaatatgctgcctacaaatttgctaagaaacttcaaacatgttctattgtgcttgatgagaaggatcatactattgagattcttaatgctgaaattgctagattaaaatctttgattcctaatgatgataattgtcaatcttgtgaagttttattttctgaaattaatgctttgcaagatgtcaattctgttaattgcaagaaattggaatctgagattgaaaaatctaaaaaattggagtcttcttttgctcttggatttgctttacatgctcatgttgttgatgaattgattttgacaaagaatattttgaaaaaatacaaagttgctttttgtacaagttctttgttcaatgtttcatgtgcaaaaagggctaaataaaatgagggtgttttgatttctcaagattgttcaaagtgtgttttgaatgagttgaagttgaaagatgctttagagcgtgttaaacacatggaagagattgttaaacaagataaggttttgattcttatgcttatcatactagacatcctcctactattttgggtgttgctaggagagaaaaaagaaagagaaatagcttttgcaaaacgacgttggcaaaaatcgggttttaattcgaggatcacggttagaccgacactgaaccggttgccaggcccagtcagaccgcaggtacagaggcggtcagacctgtttcagggcaattttgcgcgtaattcaaatcggacttttgtgaagcgaaaagaataaaaatgtgaaaaaaatgactaccgaatccttggaaacagtctttacgacaaggacgtattcgatgtgacttgaggtcagccttggtcaatggtgaggaccgggactatgctcaggaaggagcagaggtctagtgcggtcgggataccatgtgagaaggtgactagagttatgattcttggaggtcaacttcggtcaacggtagggatcgggactaaactcagggaggagttgaggtccaaacggtcatggataccaggtgacgaagttgaatacgagatggcacacggtggatggataccgtgtgggagagatcttcgcaacgggcttcacgaggtgtgcgtgcaagcgtcggtgttcacgaggaggaacgagagaagatagagatgttcatgtacggtggagtacat

SEQ ID NO: 89034 - DNA, 324 bp, Oryza sativa
  Clone ID: PAT_MRT4530_87828C.1
cccttccttaccttaatccacaccatccccatcccaacaaggacacgagcccaaatcgcccaaccaggccataagcagcacacgggccccggcccccggaccgcccgcccacgaggaccgcccgatttgcaccacccatacacagcggagtgggccccacccatactcacccgaccccatccgggccgacacagcaaaccacactcacgaagaaaccccaagacacccgcccccaatggaccgcgaccccaggggccccgccagctatatacggggggccacaacccggaccgacagagccacccccacccgcatgggccccca

SEQ ID NO: 89035 - DNA, 253 bp, Oryza sativa
  Clone ID: PAT_MRT4530_87829C.1
ttggtatggggaggggtggggaaggtgaagggggggggttgattcaaaatggggggggctttcaacaacactgtgggtacatgtggcggcggggagcactatacttatctcccactatactcccaccccatcaaagaggctctgggacacaaccagaatgcgctcaccatgctctgcgtctccaacgacttctgccagaacgcggggctcgtaccttgggtagttctccaacccccttccaccgtggctcatc

SEQ ID NO: 89036 - DNA, 819 bp, Oryza sativa
  Clone ID: PAT_MRT4530_8782C.1
atggtgccagttcaggacggtgaactccggaatgatgtatgtactcaaagtacttcacttcggctaacaacccatgttacaagttctatcgtcaatgagcaatcaagcaacatcacatatggagagaatcggaagcatgggcagatataagcgtatctgatggctcggctgtccgagactgtagcaatgttctatagacaccttcacttcggctaacagccaatcatacaagttctctcgccaatgaatcactcaatcaacatcagatatgaagaatatcagaagcatgaacgcaggaaagcatatgatgagcttctttatgttgacttagacaacatctgctgatctaaggttcactcagcaggaaggataagtttttccacacccaccaaagattgttgccggctgcacatgactcgatgaaaaacagctatctttatacacacaaaaaagcatacacatgagtaccaggctcgaaaaacatcgacaatcaatctacgtccctaaaggattgtcaaaagttgtttaacctactgagaatcgtcagcgaacacccaacttctggtacagcacttttcaaaaaggtaccctatagaccatctggagcagctcatgactggcagaacagaagatattgaagtgcagacattagtaggcccttcagtgaacatggttcttcacacatcaacagaccatcgttgcaacctaaaaaaaggatggacagatttcgccctcagcaatggcatcaagttgaacacagtgtgcattttccatttttacaagacaacccatctaggagtgattgtcgatatcttctga

SEQ ID NO: 89037 - DNA, 1576 bp, Oryza sativa
  Clone ID: PAT_MRT4530_87830C.1
ttatttgcacatgaagcattgaccaaagaacttgcacaaaaagtaactttgtattttttttaaaacgttctttgtcaaaatcaactcatcaacaacacgagcatgtaaagcaaatccaagagcaaaagaagactccaactttttagatttttcaatctcaaattccaatttcttgcaattaatagaattgacatctcgcaaagcaataatttcaaaaaataaaacttcacaagattgacaattatcatcattaggaatcaaagattttaatctagcaatttcagcattaaggatctcaatcgtatgatccttctcatcaagcacaatagaacatgtttgaagtttcttagcaaatttgtaagctgcatattctaattgatcataactaagcttttcttcattatcatcatcaaattcatcaacatcagaacttgcattacgagcaataaaagctagatcaacaacttgcttaccattgccctcatcttcatcttcagatccatcaaaaacttttatgagttcttgaattaaccattgcatacaatgcttcttcttctccttctccttcatgttcttcttcttgttcacgtcatcctctttgactctcccatcatcttccttcttgcctctcccaagcttaagacaatatgagcgaagatgatcaagtgctccatactcaaaacaacgattcggttctcctcttttcctgttcctaacatttttcatagctcgagaaaatttgttagataacaaaaccaagtcctcctcctcgaactgttcgagttgatcatcggacatggcattaaataaagcaagaacagaagacttcgatgaagaagcaccaacatccaaagaagtcgaagaagaaatcaaagcactagacttaaaatcaactttacgagcaagaatattcatctcatgagttttcaattttgtgtaaagcgaatccaaagtcaaagtagacatgttaacagactcctgaatagatgtaactttcatctcccaaatagacatgtcaagaccattcaaaaagtgatgagaaatctcagattgtggataattagcatcataagaagaatcaacagatctaagattactcaaaattttattaaacctagaaagatagtcatccaaagcttctccaggtttcatctcaaatttaatatactcctttttgaaaagatcacgacgaagctctttaatattatttgttccgcctcgctctagccgttctgaccgctggagcgtcgccggtctgaccgccggtgagtcgccggttaaaccgccgaaaaccaccaagtcgactcccggtccatcaccgcaaatactctcccgaggcatcgagtcaccggcatacacagccctgtcagactggtcacataaaataacagtgaatccgatcatcacctgaaaattaattatctccaaaaccacttcgacgataatctccaaatatcaaaaccaataatcacagatgtcaattgttcatcacagaataagaatcaaaacacactttaatcttacattacgttattatacgttcaccggtacgtgtcgcctctcgcgacatgtaaga

SEQ ID NO: 89038 - DNA, 1582 bp, Oryza sativa
  Clone ID: PAT_MRT4530_87831C.1
tatattaaattggagatgaaacctggataagctttggatgattatctttctaggttcaacaaaattttgagtgatcttaggtctgttgattcttcttatgatgttaattactcacaatctgaggtttctcattgctttttgaatggtcttgacatgtctgtttgggagatgaaagttacatcaattcaggagtctgttgatatgtctactttgactttggattcgctttacacaaaactgaaaacacatgagatgaatattctttctcgtaaagttgattctaagtctagtgctttggtttcgtcttcaacttctttggatgttggtgcttcttcatcgaagtcttctgtccttgctttatttaatgccatgtccgatgatcaactcgaatagttcgaggaggaggactgggttttgctatctaacaatttttctcgggctatgaataatgttaggaacaggaaaagaggaggaccgaatcattgttttgagtgtggtgcacttgatcatcttcgttcacattgtcctaagcttgggagaggcaagaaggaagatgatggtagagtcaaggaagatgacgtgaacaagaagaagatcacaaaggagaagaagaagaattgcgtgcaatggctaatccaagaattaataaaagcttgtgatgaatcagaggatgaagatgagagcaaaggtaagcaaattgttgatttagcttttattgctcgtaatacaagttctgatattgatgaatctaatagtgatagtgaagaaaaagcttagttatgatcaattagaacatgctgcttacaaatttgctaagaaatttcaaacatgttctattgtgcttgatgagaaggatcacactattgagattctaaatgctgaaattgatagattaaaatctttgattcttaatgatgatgaatgtgaatcttgtgaagttttattttctgaaaattaatgctttgcgagatgtcaattcaattaattgcaagaagttggaatttgagattgaaaaatctaaaaagttggagtcttcttttgctcttggatttgctttacatgctcgtgttgttgatgaattgattttgacaaagaatgttttgaaaaaatacaaagttgctttttgtgcaagttctttggtcaatgcttcatgtgcaaataaggcaaaacaaaacaaagatgttttgatttctcaagattgttcaaagtgtattttgaatgagttgaagttgaaagatgctttagggcgtgttaaacacatggaagaaattgttaaacaagatgaggttttgattcttatgcttatcatgctagacatcctcctactgtttttggtgctgctaggagagaaaaaggaaaaagaaattgcttttgcaaaatgacgttggcaaaaatcgggttttaattcgaggagcactgttagaccgacgttgtcgagtcagtcagaccggccagcggttagaccgcaggtgaaccgacggtcagaccggttgccaggcctgctcagaccgcaggcacaacgttcaagattcaatcgaagatacaaattccggaagtctggcagagaacaaatattatcaaa

SEQ ID NO: 89039 - DNA, 1143 bp, Oryza sativa
  Clone ID: PAT_MRT4530_87832C.1
ttttttttttttttttttttttttttttttttttttttaatgaaaaccaaggaatgtaacactgcttccttatcaatgtagtttggcataacatccgaaatcttaaaatgcatactatatttcatacaagtcttgttggtagcacactgggataccattgtatgtgagagctacatctcttttgtattatagaaattcttttctgtctcataatacaaggtaaagacaatatatgtcattagagtagggttgcccttttatttgcctaactaaacttgatctttgtgatcaatatcgttccatctatatcttggcgaaatcatactgtttttgcgccaagcttatttgtcttgagtcttgtatttaacaccaggcagaggactttagttgaaacactctctacatcttgccaaccaatggatcaaggattgatttccacttgttgtattccagtggggaaccagagtcactaataagggggatgccattcacaaagaagtacggtgttcccgtaacacctcgtgcgcaaccatacttgaaagaaattcgtgtggcttgatctgattttgaatcattgaaacctgctttgtatgctgccaaattggcttccccaatgacgggggcaacaaggtttttagctacctctgcatccactgtagctcttgttttcccatacgttggctggttgtaataaccctcctggtacttgaagaatctctcgagcaggggatacacaaacgacggatttatcttgttcacggcatgaattgaccggcaggaaatgaaggcattgctgtgataaggtagtgggaagaggtgcacgacgacggtcacccgcgaggcgtagtgctcgaccgccttcttcagctccggccacgcgtcgcggctgtccgggcagacggggtcgaagtacgcctccaccaccaccgtctcccccagcgccggcgccttcccaccgtacacgaacccgtccgtcctcgccgggacgggcacctgcgccgcgccagggcggcagccccaggcgcagcagccgatcaccagcaccagcagcagcgacatcacacggtgtctggcctccatggtcaaggcttcttgcagcagctagccgatcgctcgcactttggtttcttcgaccccggccgg

SEQ ID NO: 89040 - DNA, 361 bp, Oryza sativa
  Clone ID: PAT_MRT4530_87833C.1
aacttcatgtggggtttttttttccatggcgtgttccaccgagcgcgcaacgacgggctgggcggggtgtaccccaccttgttccagctccggcgatccgtcgtgtcgctggggtgcacctcgtcgtgcatgccagagcaaggtgttggtgttggtgctgaagccatggacacatcatcttcagacaatgctagttgtcaaaacaaaccccttcccccgactgcgtcttcaggcggcggatgagggtggcctccggctaactgcagcatgaaggagcagccgccgctgcggacgctccggtcgctgacgatgcggacgactagcaccggcgacctgaggaagagcatgatggaagacatgc

SEQ ID NO: 89041 - DNA, 2719 bp, Oryza sativa
  Clone ID: PAT_MRT4530_87834C.1
cacatcgaatacgtccttgtcgtcaagactgttttcgaggattcggtattcatttttttcatattttttacctttttgcttcagaaaagtccgatttgaatttcgcacaaatttgccccgaggccggtctgaccgccgcagtgcctgcggtctgaccgggcctggcaaccggttcagtgtcggtctaaccgtggtcctcgaattaaaacccgatttttgccaacgttgtattacaaaagcaatttctctttcctttttctctcctagcaacacccaaaacagtaggaggatgtctagtatgatgagcataaggatcaaaacctcatcttgtttaacaacctcttccatgtgtttaacacgctctagagcatctttcaactttaactcattcaaaacacactttgaacaatcttgtgaaatcacaacaccattgttttgttttgccttatttgcacatgaagcattgaccaaagaacttgcacaaaaagcaactttgtatttttttcaaaacgttctttgtcaaaatcaactcatcaacaacacgagcatgtaaagcaaatccaagagcaaaagatgattccaactttttagatttttcaatctcaaattccaattttttgcaattaacagaattgacatctcgcaaagcattaatttcagaaaacaaaacttcacaagatttacattcatcatcattaggaatcaaagattttaatctagcaatttcaacattaagaatctcaatagtatgatccttctcatcaagcacaatataacatgtttgaagtttcttagcaaatttgtaagcagcatattctagtcgatcataactaagcttttcttcattatcatcatcagattcatcaacatcagaacttgcattacgagcaataaaagctagatcaacaacttgcttacctttgctctcatctttatcttccgattcatcaaaagttgctatgagttcttggattaaccactgcatgcaatgcttcttcttctccttctccttcatgttcttcttcttgttcacgtcatcatctttgactctctcatcatctaccttcttgcctctcccaagcttagaaaaatgcgagcgaagatgatcaagtgcaccacactcaaaacaacgattcggttctccttttttactgttcctaacatttttcatagctcgagaaaatttgttagataacaaaaccaagtcgtcgtcctcgaactgttcgagttgttcatcggaaatggcattaaataaagcaaaaacagaagacttcgatgaagaagcaccaacatccaaagaagtcgaggaagaaatcaaagcactagacttataatcaactttacgagcaagaatattcatctcatgagtttttagttttgtgtaaagcgaatccaaagtcaaagtagacatatcaacagactcctgaattaatgtaactttcatctcccaaatagacatgtcaagaccattcaaaaagtgaagagaaatctcatattgtgaataattagcatcataagaagaatcaacagatctaagatcactcaaaattttattaaaccgagaaagatagtcatccaaagcttctccaggtttcatctgaaatttaatatactcctttttgaaaagatcacgacgaagttctttaatattatttgttccttgatgaaaattactcaaagcaatccaaatctcatgagcagtttgaagatgagcaacacgatcataatccgaacgagaaatcccactcaaaagaatattgcgagctttgcaattttgttcaaactcagtttttgcagcatcagtattaataccttcaggaatcacataaggatgagaaactttcctccaaatatcataattctcagccataatgtaagattgcatccaacttctacttgttaggtattctctgagcttattgattagttgtttctcatcatctgatttttctgccttgatcccaacaacttttttgtgcttctcatcattagaattgtttttgttgatcatatctttaagcaaaacaaataagatcttcttaatgtcaggactccgtgaaatagatactaaagctgtgcaatcaaactgatgcttgatttttttaagtacttggttagcaagagtagtcttgccaaggcccccaaagcccacaatggaaaccactttcagctgttgtgaggatccatcctgttttgtcaacagatcaatgatcttctccatagggccatggatgccaacaagtttctctgcttccacatagagtgctggtagtccaggatcaatttcaactatgcgggcattgctttcaccaaatctatacctcaaacgacgggcactctcttcgttaacacaatccttaagttgatggatctggctagcaatttcatgacgtgaccataacattcctatcttttttgctgtcctgcggacaaagttggcatccacatccccatgattgaatttgcgcatgaataaatcgatgcaatcctcgatttctcggaccctgtttctccactccttctcctgctcacccaggttctcctccatatttgacatgttgataagaaagttgttgatggcagtcagctcatctctcaagaacctaatgtcagagttgacacctttcagaagcctgtattcctctcccagcaaggcagatagcttggcaaggagggaacccatcaccccagtggcagcactaactgctgctccgtccat

SEQ ID NO: 89042 - DNA, 402 bp, Oryza sativa
  Clone ID: PAT_MRT4530_87835C.1
atgggcggaccttccaatatagcatgccatggcgtccgccatacctacttgccggcgagagtacacctatgccctatatcctatctatcctcttcgtcttccccgagcatcaagccgtccctctcgccgcctgaggagaacgagattgcagagctgcagcgcctgggccaactcttggatatgggccgacgcgccattgtagacgggactcgttccgcgagaacttacggcggcgggccggcggctcatgaaccctataatttgggcgcggcggcggccgacgaaatcgcggccgagccggtcgggcggtcagatgcggctgccgggcggcggtgtcggggaggcggatcaacctatggaaacctcggtcgtgggggtgtgggggtttggttgggcgcgtga

SEQ ID NO: 89043 - DNA, 1706 bp, Oryza sativa
  Clone ID: PAT_MRT4530_87836C.1
tcacacagcgaacaagagggagctgcgcagcaccgtttggccgccgaacgccttcgcctttgccggctgctgtctttgcttccacggttgttggtggacgccgccgctattgttgggcatctttgtcatctcccggcagccgagatcaagaccaatggctatcatctcgatgcgtctgcccaatgcctcgtgttccccgatgcactgtgggactataggcagcgccgcccgtgtcggccacctttgttgttgctgactgatttctttgccttcacggttggcgttcgccgatgccgactggtgccctcgccctcggcctgcctccatcgccaccgactggtgtctctgcctacacggctgacctattatgccgccgttggtgggcatcttcgctttcaccgtcaaccgccttcgttgccgccgaccggatccagatccagatatgcataaaagggattcatggctttaagcttatctcttacgctctaggaatggatcagtcagaacatcaccaccggcttgccgttgccgccgccgagtggcgcggtaggcaactttggcggtcagaccgaagattcaacactggtcagaccggtggcatccagtcgttcgaggaggaggacttggttttgttatctaacaaattttctcgagctatgaaaaatgttaggaacaggaaaagaggagaaccgaatcgttgttttgagtgtggagcacttgatcatcttcgctcgcattgtcctaagcttgggcgaggaaagaaggaagatgatggaagagtcaaagatgatgacgtgaacaagaagaagaacatgaaggaaaaggagaagaagaagcattgtatgcgttggttaatccaagaactcataaaagtttttgatgaaccagaagatgaagatgagagcaaaggtaagcaagttgttgatctagcttttattgctcgtaatgcaagttctgatgttgatgaatctgatgatgataatgaagaaaagcttagttatgatcaattagaatatgctgcttacaaatttgctaagaaacttcaaacatgttctattgcgcttgatgagaaggaacatactattgagattctaaatgctgaaattgctagattgaaatctttgattcctaatgatgataattgtcaatcttgtgaagttttattttctgaaattaatgctttgcgagatgtcaattctattaattgcaagaaattggaatttgagattgaaaaatctaaaaggaaacaaaaaggtcttttggatgcttgcaaaaattgtgctactcttactcaggaggtttcttatttgaaaagttctttgcatagattttctgatggtaaaaagaacctcaacatgattcttgatcaatctaaggttagcacacacagtcgtggtttaggttttgatccttatgctcatcatactagatatcctcctacggttttgggtgttgctaggagaggtgaaattttgattgaaactgagcctaagaacactgtgtttaaatctgctggcatcatgtcttctttgaatgcatcttcttcgaaatcaaatgttatgaatgcaaaaccttctgttgatgcaaaaccatcaatttcaaaaccatcaaatcggactgaaccaactatttgtcaggcaactattctcctattctctcgaatccatgcagttttcaaaaccatctacttcacaaacctgtcgtga

SEQ ID NO: 89044 - DNA, 4102 bp, Oryza sativa
  Clone ID: PAT_MRT4530_87837C.1
gtcgcccgcgcctatcgcggttatcctcttctgtcgcgccgtctcctttgaccgccagatctggccgcggtggcgccggagatgaggccacgagccgcattgagcaaccattagtggaatcaacttatgactttccttcgtcacaagttaattttcttgctggcaattctgataaagatgagttgtgtgataatgcttcacttatctacatgccacaacttgtaaatgaccatgctaattcagttgttgatttttcatgtactgattttaaacatgttgttcaccttgctagtgagaatgaggaacttaaattgttgtcttccttaaatactttaggctatattaagtttgatgatccttgtgagctcagtgatttaaaggataaattatttgccaaagataatttgccacgcccagctaatgcgagatttcacattttaggcacatataacgatagagaagtatatttggtgtatatagttttcatatgttgagatatggaacctcctgtagttgtgaaagaaaataggaaggtaaagggttgtaatatgaccaatcacgttatgtctagcgtgtgttgtgttgttttgatttaaagaagtaggttggctatcatccactacgcgaagagcaccatatggcataaccgaggacggttttccgtgaaggaggaggatgtgaccatgcctactacagatagaaccattgctcacatcatacatcaagaggaagtcatgaagatcccacacaacttcggaaatctaattcggccacctgcaatagcgctggattcaaacgggcgccaaatttgcatacgagctccatttagtttatcctcctctcatcgaaagattgggaacccccgttgctgcatcacaatctctggtctagtaacttcagaagtctcaacaattttgttagttttcaaaacaagtacacgatagccacgtgaatgtgtggggcaactaagaaacattccatcagcacagcgtgcctcaaacttattcaaatttccagatttcaagacaaagcacttgcaaccaaaaacacgcaaatgtgaaactttgggttgacgtccaaaccgaagctcataagaagtttttccaagttttgacctcaagaaaacccgattttaaatataacatgcagtgttaaccgcttcagcccaaaattttctaggagtgtgatactcatccaacatcattctagccatctcaaccaaagaccgattctttctttcaacaacaccattttgttgaggaacacgaggagaagaaaattcatgttcaaaacctttttcgttgcaaaattgtttaaaacaagtattcttaaactcaccaccattatcacttcgaattattttcaaagaaccaggaagttcaagatccaatcgaagatacaaaccacaaaagtgttgaaacgccacatccttagttgccataaagaaaacccaagaatatcgagaaaaatcgtcaacaataaccaacacataccacttttctccaacagattgcactctagctcgaccaacagtgtccatgtgtaatagctgtcccggtgtatccatcatcacagaaataataggagcatgtgaagaagcaaccatcttagcatgacgacacggtgtacaaaccaaatcaagatgtttcttaagtttagcaaaccatgaacaagattcaaaccacttaaccccttgagatgatcaaaaccaacatgtccaagtcgacgatgccaaaacatcacatctttattaaatttagcaaccaaacatgttatcacaggtgaaacaggattttcaaaatcaactttaaatactcttccatatcaagaaatattcaacacagagtctccacaagaatcaaatactttacttccagtattcttaaagtgaacctcaaaattttcatcaataatttgtgaaactgaaagcaaattatactttaagtcctcaaccaaagctatgttttttaattcaaacttattactttccttgactaaacccgtagcaacggtcatgtgttgcgaacaaccggaatccacgatccacacgttctccttcctcgccaccaaagctttagattgttccaaaatcatgttaagttatttcttaccattagaaaatctttccaaagaacttttcaaataagaaacctctttttgcaaattggcacaattttcataatcaaccatgatatctttgcttttacgacatttggggcaagaaagcacttcatcagattttacaatttcctccatgtactcaacacgacctaatgcatcttttagcttcatcttgtttagtgtgcatgttgagcaatccaaaacaccatgttgttgttttaaatctctaatttttgaaatttcatgcattaaaacctcacaatttttgcaataatcatcattaggaataagagattttaatctagcaatttcagcatttagagattcaataataaactcctattttctatacatcttctcacacttcttattttttgcactcaaaataagaatagcttcctcaaaagaacggacctcattgtcttcacactctgaatccgattcaccaggtgccatgaagcaaacaccagagatgttctttcccttatcttcatcttccccactctctccatctacatcgcttagtggctcaaaagcggcatagacttgagtcaaaagccttcttgaggttctccttggttttccttcccttgaacatgctcttggacttgggcttgtcgtccttgttcatgcctccaccattttcttccttcttatctctcccaagcttaggacaatgcgaacgaaggtgatcagacgaaccacattcaaagcaacgatttggtccacctcttttcctgtacctaacattattcatagctcgagaaaatttgttagtaaccaaaaccaaatcctcctcctcgaactgttcgagttgctcatcggagatggcattaattaaaacaagaatagaagacttcgatgaaggagcaccaacatccaaaaaagtcgaggaagaaaccaaagcactaaacttagaatcaactttacgagaaaagaatattcatctcatgtgttttgagttttgtgtaaagcgaatccaaagtcaaagtagacatgtcaacggactcctgaatagctgtaactttcatctcccaaataggcatgtcaagaccattcaaaaagtagcgagaaacctcagattgtgtataattaacatcataagaagaatcaacagatctaagatcactcaaaattttgttaaacctagaaagatcgtcatccaaagcttctccaggtttcatcccaaatttaatgtactcctttttgaaaagatcccgacgaagttctttaatattggtagttccttgatgaaaattactcaaagcaatccaaatctcattggcggtttgaagatgagaaacacgatcatcatccgaacgagaaatcccactcaaaagaatattgggagctttgcaattgttattaaactcagtttttaaagtagcagtattaatttgttcaggaatcacataaggattagaaacttttctccaaatatcaagatcctcagccataatataagattgcattttactacaccaataagaaaaatccgttccatcgaaaacatggggcttagttgtaaacttattagaaatagccatggcaaaaattcctcgaaatcgatgaaccgcggtcttaccgaagtagtagcaccggtctgaccgcctggatatcgtcagtcttgtaagatcataaagggcaatcgagtcggagagtgggccgacagagacgaactcacttacgacgggggcggcgcatcgaggcgtgcggatgaactagccagcggtaagggcggcgtatcgaggcgggcacagaagacgcagacttcggtgagggctggagcgcatgagtggcggcgggggagcgcatgagtggcggcggcgcaaccgtggcggcgatagttgacgcgtgcgcggccagcaggagcgcgtgggcgggcacgcatggggcctccatcccgccggcccgcaccgggcctccgccggccgtcctccatcccgcgcctagccgccgccagcccgcgcccggccgccat

SEQ ID NO: 89045 - DNA, 3244 bp, Oryza sativa
  Clone ID: PAT_MRT4530_87838C.1
atggacctcctcatgaagcgattggacgaccacgagaaacggccacaaggcaccgtcaaggccttggactctcacatcacatgtgactcgatgcctcgagagagtatttgcggtgatggaccaggagtcggcttggtggaggtttcctatgggattaggactcttagtatgagtttgagaagtaataaagttgtcatctactttgagagttcttcaatttgtgtttcaccgggtgcagcggtccaaccggcgagatacctgcggtcagaccggcgcgaagcggcggtcagaccaacggtggctagtcggtcagaccagcggcggcgacaggcgcagcaggcgacatcggcggtcagaccggttgacctataccgtaggatgcaatcttacattatggctgaggattatgatatttggagaaaagtttctcatccttatgtgattcctgatcaaattaatactgatgctttaaaacttgaatttgaacacaattgcaaagctcgcaatattcttttgagtgggatttctcgttcggattatgattgtgttgctcatcttcaaactgctcatgagatttgggttgctttgaataattttcatcaaggtacaaataacattaaagaacttcgtcgtgatcttttcaaaaaggagtacattaaatttgagatgaaacctagagaagctttggatgactatctttctaggtttaataaaattttgagtgatcttagatctgttgattcttctcatgatgctaattatccacaatctgagatttctcgtcactttttgaatggtcttgacatgtctatttgggtgatgaaagttacatctattcaggagtctgttaacatgtctactttgactttggattcgctttacacaaaactgaaaactcatgagatgaatattctttctcgtaaaagtgattctaagtctagtgctttggtttcatcttcaacttctttggatgttggtgcttcttcatcgaagtcttctgttcttgttttatttaatgccatgtccgatgatcaactcgaacagttcgaggaggaggccttggttttgttatctaacaaagtttctcgagctatgaataatgtcagcaacaggaaaagaggaggtcctaatcgttgctttgagtgtggtgcacttgatcatcttcgctcgcattgtcctaagcttgggagaggcaagaaggaagatgatggtagagtcaaaaaggatgacgtgaacaagaagaagaatatgaaggagaatgaagaaaagcttagttatgatgaattggaatatgcagcttacaaatttgctaagaaacttcaaacatgttctattgtgcttgatgagaaggatcacactattgagattctaaatgctgaaattgatagattaaaatcttcgattcctgatgatgataattgtcaatcttgtgaagttttattttctgaaattaatgctttgcgagatgtcaattctgttaattgcaaaaaattggaatttgagattgaaaaatctaaaaagttggaatcttcttttgctcttggatttgctttacatgctcgtgttgttgatgagttgattttgacaaagaatgtgttgaaaaaatacaaagttgctttttgtgcaagttcttcggttaatgcttcatgtgcaaataaggcaaaacaaaacaatggtgttttgatttctcaagattgttcaaagtgtgttttgaatgagatgaaattgaaagatgctttagggcgtgttaaacacatggaagaaattgttaaacaagatgaggtgttttcttgctcaacttgtagaaaacaaaaaggtcttttggatgcttgcaaaaattgtgctactcttactcaggaggtttcttatttgaaaagttctttgcaaagattttctgatggtaaaaagaagctcaacatgattcttgatcaatctaagaaaaaggaaagagaaattgcttttgcaaaactacgttggcaaaaatcgggttttaattcgaggagcatggttagaccgaccttgtccagtcggtcagaccggccagcggtcagaccgcagttgaaccggcggtcagaccggttgctcggcccggtcagaccgcaggtacagcagtggtcagaccggtctcggggcagtttttcgcacaattcaaatcagacttttgtgaggtgtcaaggtatttttgtggcatactccccatgtgcgttcaatgttgagatgatgattgcttttcaaggtgactcgatgcctcgagagagtatttgcggtgatggaccgggagtcagcttggtggtaagacgatgtccgtggtggtcagatatcatgcgggatactaaggctagagttgatgcacgtggttggtgaagattccatatggcatacgatggaggtattgtgtgcttatgggatgcggagtcgaatttggaaggagtccaaatttggagagtttttcgatttatgtttctttgggttcaggcggcagggagacggttagatcggcggcgtgcaaacggtccgaccggcggcgtaagatgcaatcttatatccaggctgaggatcttgatatttggagaaaagtttctaatccttatgtgattcctgatcaaattaatactgctgctttgaaaactgaatttgaacaaaattgtaaagctcacaatattttattgagtgggatttgtcgttcggattttgatcgtgtttcacattttcaaaccgctcatgagatttggaacgctttgaaaaactttcgttcgcgttgtcccaagcttgggagaggcaagaaggaatacaatggtagagtcaaggaagatgacgtggacaagaagaacacgaaggagaagaagaagaattgcatgcagtggttaatccaagaactcatagcaacttttgatgaatcggaagataaagatgagagcaaaggtaagcaagttgttgatctagcttttattgctcgtaatgcaagttctgatgttgatgaatctaccgattgccaggcccgatcagaccgcaggtacagcggcggtcataccggcctcggttctactggtcgtgtgactcagtgttggattccaaaatttcttatttctaaccccaacacggaggcctcgacatcttctcccatagaaccaattgtaggataggatgagaatgaatgagaagcatcaggatgaaacgagagacggcgatcaacgaccacgtggataattctgtgatcccaagcttctttctacgaacctcgggt

SEQ ID NO: 89046 - DNA, 658 bp, Oryza sativa
  unsure (1)..(658): unsure at all n locations
  Clone ID: PAT_MRT4530_87839C.1
agagaagaagggctccatggccttgatggtgtgcgtgaaggaaacggcgaccttgcnccagctcatgttggtgaacacattgcccatcgtgtgcaccaatgccaatggcaggatctttgcataccatgtaagtaggtgcgtacgtatgccgcgggaggagaggtgggacctcgtagtatttagtttgttctaggatcaatttaatgtaatggtttataatattagacctaacgatttaagtgaaaatcaagaaatagatactttgatttttttttccttagaatttctaatatttgccctaatttattagagcaccacgtcgcagcttgagagcattttcatgaattttaaatgacttaacacatgtaattagaatattaactgtgcaatatatatgtatgggacatatggtaatatttgttccaacttcgtccatctttatatacatgtagagtgaaattaattttgtggcttgcaagccattagatgtctaattaatagcaattaattttgacacctatttacaattgttcagagtaactcttacatattaattttacgactttaatgatttatcaccatgactcgcatgaaaaaaaatatgtagtacttaaggttcaggatagctgaaattaatgaattatatcggacgcgtggg

SEQ ID NO: 89047 - DNA, 223 bp, Oryza sativa
  Clone ID: PAT_MRT4530_8783C.1
gacgtgccaatgctaaataacagcgtgataaaaaaaaagtggtggcatcccatcaaattgcttttcaacaaacaatcccacgatggcgccatttaacttgacattagcatcaatctatccaatccactcacctaatagctccattcacactgcactccggaaacctcatttaccaacattttcagcactcaacaccgccgcactcagcactgcaaaacctctt

SEQ ID NO: 89048 - DNA, 1270 bp, Oryza sativa
  Clone ID: PAT_MRT4530_87840C.1
gacaaaggtaaatggttcctttgtttggctcacaaattttgtaacaggaaaatggaaataatcgatcactcaagaaaattaaacttatcagtgcatcagttcaaacagcacatgaattctaactgctacctcaaaccaagccaacataattaacttggcaggagcacatcttattccaatccaatgtaataacacaaaacacagagcactcctattcctattctctaagctctaatagtgacaaatacaaacaactctttaacctggaatgcaatcgtgtttgcaaagtggggcttcaatcttgcgagtagatggtgaaatttctagctttcaacatgccagcttgtactagtgttgacatccttccaatcagtaaaaatgatggttgttccttcggaaaacatgtttatgcggcaggctgggaagtgggaactaataaccgaagtatgaatctggagaaaacggtgttgcatttcctaggtcctcccgagcacgcaatgtcaggcattactaataacgatcgaagaatactagagtttcctctctaggtccaatatccatgttgtcatatgacgaattcacatgataaatggtagattcttatatgtagtcacgtaataagttttacggcatctgttccagaaacaagtgtatcttctatgaatggaacggtcttccatactttcaatcctagtggtactgaaccattttcagaacctcttgagttgtcctctatacaaaccgccatataataagaactgtttagctctgtaagtgcaaaccgccagttctcagaaagataatcaccagaatcagaatcattacacacttttggtgccttagtaatctgaattcggctatttgttttcaattggattgaaaacctattaaaaggagcacctgaaaacccccttccaagagccttaacatatgcctcttttagggtccatagttttatgaattccttttgctgagcatcagaatcagcaattttagctagagaatcaacttctgaaggggtaaagtaacggcgagcaagagataaaatactcttggttgtctttctcttcttttcttcaacatcaatgccaataggagcatccatcgcaatgccgcaggcaatcagagaagatgtgtgtgaaatattaaaatgccaaggccactccatattgctatcatcagaccgccacaatataatgcgcaaatcaaatttggggcccaagggaaaattgtcaataacacatggggcaatgtcacgacccgaggccat

SEQ ID NO: 89049 - DNA, 294 bp, Oryza sativa
  Clone ID: PAT_MRT4530_87841C.1
atggcgaacaccaagccactcataatcaacactgggcctcctccacaaccttctcggagaggtcaccgggcaactactccaaaccatctaggagataaactaagtgcacaagggtgtggggctggtcagaccggccacgactcggtcagaccgccaacatctcggtcagctggcctcggctctagcggctctggatcaccaagacgagacctctcttcaaattcagggcagcggtcagaccgctatgggagctgcggtcagaccggacaacacactccggtcaaaccaccataa

SEQ ID NO: 89050 - DNA, 396 bp, Oryza sativa
  Clone ID: PAT_MRT4530_87842C.1
gtgggtggggggatggatgggtttctttgtaaatttttttatgtgtgttggaagcttttcatgtattctaatgggacgtagaaagtatattggagaattagaggtaaaggggggcacgggggaaagggggaaagaccacaatgacaaaaatccaaaagaaaaaaggtaaaacaaaaaagcgcgaagaggggaaaaaagaaaaaaaagaagaaaaaggggaggagatccgtctggccggagagaaaataggaaaagccgaaaaccccaaaaaaaaaaaaaacacaacaacaaaggaagaaaggggggggggcaaaaggagaaacaagaaataattagatgaccagagaaaagaagaagagtaaaaaacaaaacccgcgggggcttaaaaaaataaaa

SEQ ID NO: 89051 - DNA, 685 bp, Oryza sativa
  Clone ID: PAT_MRT4530_87843C.1
tcacagggatctgtcttctaaaataactgactttaagtttggagcacgctcaatgatagctcttatgaaatccaagtgttctcttattatttggttgaatccaccaaattctaacctctctagttgcaaataatgtatcgagccatccaactgtgcagcatcccacaaatcatttctttcatacaattgttttctattctcagtaccctcgtcacatgcatggttccacaccttgacaccaaaaaccttaacggatggtgcggattcaaggagaaccaatgtccataggagatcaaatttcacatagatcccatgcagaaataactttgttatcttgttcaaggcggagcgtagcttttttccttcaggtgtaatccaaatcacctctccttggaaatccaaagcaatatctttaccactgtcaatagcattgcaaactagctcaccgatgttaaacaaataatctaatgatgtctccaaatcagtgagcaagcagaacctgaggtttagctttttaatgatagattcgctccgaggagaaccaaataaactgctcatcaatttaactagaacagccatcgcttcatcggccgacattgaggaattttggtggatgaattcatctgcatctaagtcgacatcagagagcaaaagaggcaggtgcttccaccgtgtcgacaggaca

SEQ ID NO: 89052 - DNA, 358 bp, Oryza sativa
  Clone ID: PAT_MRT4530_87844C.1
ccaatatatctcataaatttatcacttgaaaatttttaccctactaaaaaccttcatatcatactccccataaacaaccctcaaacaatttccaaccctaacatacccatcacatacttcatacccagctctgatgccaaaacaacctgcacccaaaaactgaacataattaaaaatggaagcaaaaaacaaattaaatgtacatttataccaaaaacaacaggtgaggtgaacatttttctgaaaccaaaaaatgatatccatacaagtcattcaatgttcttgagcaatttcccttttcccaaagtgctcatattgttcacaatttttctccaacgtccttcagggcaaaaatcaa

SEQ ID NO: 89053 - DNA, 375 bp, Oryza sativa
  Clone ID: PAT_MRT4530_87845C.1
atggctgccttcgccaagtcagccgtgttcggcacctgcgtagaggcggcaggagccgaaggcggtagtgatggcgcagtcctatgggtggtcactcaggttaacttgacagaagcaaatacccagggttgcttcagccactgcctatgccagatggggccggcagagggtttcactaaagctgtcaaccccagcttactgcattgggtcatctcaagatccagtggatattcatggcactcgtcaagttctgaagggaacctgcccttgcctgatgatatacaggggagcgacaagctggaggagcatcaaacttctatagaaaagacaggtcgtactcgtaaatgtaatcctaaagagtatgttccggaatag

SEQ ID NO: 89054 - DNA, 1150 bp, Oryza sativa
  unsure (1)..(1150): unsure at all n locations
  Clone ID: PAT_MRT4530_87846C.1
cgtaaatcaggcaggttgcccctattgggaacaatttaagcaattgtttttgcccagtggataacactgttcactaagcaagcaagcacactagacaggtggataggtaaagtacagataccagctgctgccctacaaagcttgatcagtgtgtcgatcgtcatatataggaacagagatgacgatcgacacactgatcaagctttgttcctatatatgaccgagtccttgttccacttactaggaggtactcaaagaaccctcgcggtatcacaacgttgcaaaggattggaattggattgattatctcagtaattctgatggttgtcgctgcccttgtggagacgagaaggctcatggtagcaagagattttggcctggtggacaatcctgaagccacaatccccatgagcttctggtgggtggtccctcagttcatcctgactggtttggctgatatgttcacaatggttggcctgcaagaattcttctatgaccaagtaccagatggtttgcgcagtttgggccttgctttgtacctgagcatatttgggattgggagcttcatcagcagctttcttgtgtatgcaattgacaaggtaaccagcatgactggggatagctggttctcggacaatctgaaccgaggtcatcttgattacttctactggctattggctgtgctncagtgttcttggtttagctgcttatctacacttttcgcgagtgtatgtccacaagaagaagggcatctcagtacagtgaggatgtgtcaaaagatgctgaaaatgcattggctatcacatgttggttgttggcatatcactttcgaagaccttcaggcggtaaaaggcttgcagcttgcttatgctgctgtagtagtgctgtacagtaccttcaagagtgaatgcccgtacgatgcttttctgttgctgcttgaagccttgaacgattcgcatggagaaggagatctagcctaggtgccacagcaagtaaaaattgctgtggagaaatgttgattttcttttttcaggggtggttgtacaatttgtggactgtgaaagttatggcagttataaataatattaaaaagcatcatgtgacagttttgcaaaaaaaaaaaaaaactgcagcccggggatccactagt

SEQ ID NO: 89055 - DNA, 229 bp, Oryza sativa
  Clone ID: PAT_MRT4530_87847C.1
tctttctacccatccagcaaaaataaacattacccaaactataaaaaaaaataaaattttatctccgggagctttgaaaacaaactgcgttgccatttaatatcacgaatccccatttttaatatcgattcaaaaactcatcccctaaaaaagaacataccacgagagagaaaccccgcgaaaaagtgacgggcccttttataaaaacccgcaaaaaaaaaaaaaaaaa

SEQ ID NO: 89056 - DNA, 327 bp, Oryza sativa
  Clone ID: PAT_MRT4530_87848C.1
ggatcaagggcctcgctagaagggtttaaatatttcaacttttttactacaaccacacagatgtcttcctaaaatagggacaaaaaaattggatgttacatatttcttggagccatctttcatgcactattcccacatttcatgggctggcctcatgccactcattgtttaatttgggtcatcaaatatatttccttatgtattatatgggaaaatgtttctgaaataaataaaaattacagtagcaactatagtactcacaagccattgtttgtaccatcatgaatcaaggcatgttccattgggtatacatagtagtatggttaa

SEQ ID NO: 89057 - DNA, 120 bp, Oryza sativa
  Clone ID: PAT_MRT4530_87849C.1
atgggaaacacgtattgcagcttgtcatgctcgaagctgatgacctgcaactgtggcgtcgggtgctgcaagaaggcgccgctgttgccgtcgccggaaaaaagtggtccggcctctaag

SEQ ID NO: 89058 - DNA, 351 bp, Oryza sativa
  Clone ID: PAT_MRT4530_8784C.1
atggcgcgcggtgcggcagtggagccgacgcaacggcgacagcgacggcgcgtggcgcgacgggacgcgagggggcgcggcaacggatgcacggcgacgggatgggcgatgcggtggtgcgcagtcgcgagggcgacaggcggcgatgcatcggcgcgatggcgatggcagcacgacaaccacggtgacgcgacgttcgtgcggcgcacgcgcatgactcggtggtatgggggcgcggggctcaagggcgacgcgacgggcgacgacgacggcgcggcagcggcgcggggctcggcgcggcacgggcgacggcgacacgagcggcgcggggctcgagggtgttacagctaa

SEQ ID NO: 89059 - DNA, 303 bp, Oryza sativa
  Clone ID: PAT_MRT4530_87850C.1
atgggtctcgtttttatgacaagggagacgcaggtcgcagcttgggatcaggatcctctgcagtcactgcaccgtgcctttataattgacatcatccagtggcggccggctgccaccgaagccgacgtgcacgagatgcagcaggtggtatccatggatgcgctctgtgtggtgtgctacgccgacgatcgccaccatcgttacccgccaccgcaatgctcctcgccgctgtcaagcccgcactcgtcgagccgctccttctcccggagaaggttctccatcgtcttcgactactccgtctaa

SEQ ID NO: 89060 - DNA, 4415 bp, Oryza sativa
  Clone ID: PAT_MRT4530_87851C.1
atgccgccccagcctccgccgtcgtcatccatattattattagacagcaatgtgctcactgagaccatgagacattaacacatttttcaaatggtacttggaagttatccaagtgatctgtattcataaactttacggactgaagaaagaatgaatgatcccatgtaaatgggaaagatcagctgcttatgaaaatctacgttgatgcatcagggggtacaatccttaacccccaactatttctctactttctacactaaacacattgctaacgaaggaacaaacactaggcctatcagacgtcagggtggttatctacgtgatctggtataacaggcatggcctcaacagctagggcctctgcccccagctatgagctcggctcagtttccttgacagtggtgacccagcatgggtgatacaaattcgtactttagcgacttgaagatgaaacttatatgaacccctctccatagtctggagacgacgcttgatacgaaggatcgactggcatcgcgctgtaaatcctcacatagatcacatgtgctgccggtcgtaactacaataccaaggccaatgatgaggttggtcctaatattcctgaaagcctgggggagcttggtcagcacacccagaagaaaaacattgctccgaaggacgtatgggagaggagttcaggctggaggctgtcaaaaagccaatggaagctgcaagcaattgcgcgggctcctggttcgctcacacggtttatgcctgacgatgttcctggggtgacttctccaatggtttacattggcatgctgttcagctggtttgcgtggcatgtggaggatcatgatctgcatagtctcaacttcctccacactggcgcacctaagacgtggtatgcggttcctggtgatagggctgttgagcttgaggaagttatccgtgtacatggctatggaggcaacactgatcggatcgcgtcactagcagtgcttggtgagaaaacaacactaatgtccccagaggtccttatagacaatggtgtgccctgctgtagattggtgcaatatcctggtgagtttgtggtgacattcccaagggcttaccatgtcgggtttagccatggattcaattgtggagaagctgccaattttgcgactccccaatggttgaagtttgctaaagaggctgcagttcgaagggctgtgatgaattatcttccaatgctctcccatcaacaactattgtacttgctagcagtttcatttatatccaggaaccctagagaactactgtctggaatccgaacttctcgtctaagagatcgtaaaaaagaagaccgagaactgttggtcaaacaggaattcttgcaggatatgattagtgaaaatgaacttatatgttcatttcttggaaaaaaatcggttgataatgttgttctatgggagcctgacttgctgccatcgcttaccgctctacacccctgctcgtcttgctcaaaagctcctgaaaagaagggtgaagatggtcccagaattggatctacccaatccagctcaaaagatgacagctcatctgatggtactgcatgtatgactgggacacaatctaaaggcttgtctatggatagcaaacaagctcctgagggagaaaagcttgataccgatgacggagatgacctgccttttgatttgagcattgattctggttcattgacatgtgttgcatgtgggattcttggctatccatttatggcgattttgcaaccttccagaaaagcactggaagaaatttcccttgttgataaggaaagatataaactgagttgtgaaaaagagatttgttcaaatgtgcttccgtgctctcctaatgatggtagctccggatgcccactcatcgccaatagatcgtccagccctgtggaaaatgctaacctcagtcatcaggatgtgaagccaattagaagtgacatttctttgatgggaaaggagtttaatggaaccctagggaaacatattggcacttcctgttcttgtagcagtgaaaataccattcatccttacggtgacacagaaacccctgagaagaaaataccaagtgattgccctggctcagagttgagtaaacaatcaggcagaggtgatgttaatgtaccagatgtcgaaggtagtgaggaaactatcagctggaatacaggctgtgcatttgcacggcctcggatcttttgcttacaacatgcccttgagattgaggagttgcttgcgagcaaaggtggagttcatgccctcatcatatgccatgcagattatgtcaaactaaaagcacttgcaatatcaatagctgaggaaattgagtttcagtttgactataaagatgttgcactagcaaatgcgtccaagtctaatttgcatctaattaatatttcaattgatgatgagggatatgaggaagagggaacagattggacatcacggatgggtctaaacctcaaacatagttccaagattaggaaagaaacaccagagagtcaagaacagcctcctttatcattttggggattattttccaagccatcacctatttcagttgtttcaaacttgaaatggctttgcaggaaagcacggactccatataaggtcattggttatgcttccagccctgatgttgtggcaactccagacaaagttaagcccgcagttacaaaaactcagatagacacttctggaaatgctcatgaaaacattggaagtgaacaaactctgcaacaagattgtgtcctgcaagaatccaatgatgtagctgatatgtgcaagcgtcccaaggtgaatgatcaggatggacattctcttattaatattccaattgctgttgctgaatatcctatgatgcatcaagtttgtgagcgtccagattcacccacaactgttgcagtgtcagctggcaaacctaccagagaacaatgtggtgctgaatcaactgagttgagtactgtaaaacagttcctggacaatgggcttatcgctgagggaggcagcatgaacttcataagtaatcatgagcacttagaatctgacaatgcaacttcagtgtgcaaagatgaacaattgcaagttcaacaagatcagttggccatggtactttgtaataatcccaacacagaattggttgcaggagaattacatgggggggcagcatcatcaacccttgaaaatgaggatagctgtggtaatacgtcttactgttctgacactgtattaaagaacagcgaacctgatacagatgatcaacctgaaacatgtgatcgtagtgttgttcttgtaacaccaaagtcgagctgtgaccagatgatttctagcagtgacagaagttgcagtctgaccttggactgccctgtctccactgatgctgccttttcaagcgaaaagctgtctatggctcatgatttgatgggcagtgagttgcaggcagtccataattcaaaggctgaggttgtggccagtttgactgatgtcaagggtgctaagctcaatagcattcataccacacaattacctcatgaatctccaagcagtgatttcatcatttcagaaggtgcgcaatctgcttcaacaactgcaattcccagaaaaaatggaacatccatgcacacagagtcaaattcaattgatattttacttggagttctagccgatgaatctaaggtctcttctggaaaggatgaggttggcaaagcttccttgacattgatgacactggctggcaatgaccaatctgcagatgatgtaactcaggatgaagttgcagagatcactgatccgtcgcatggcttctgctcatcagacatagtgtctagaagcattggaagttcaaacagaacaaatatcatatgttatgccagacgcaaacacaaaagaaagagcggatctgagttcaatattaatagtccccaaagcttggggagctttgtccgctctccatgtgaaagcttgagaccaaggactagacctgcgattgttgaagacatgacaaacgaaacaaaaactgcagaagcttcaactgcaaataagaggaagaaggcaaaggtggaagcatttcagtgtgacatagaattttgtgacatgacatttgagactaaagctgaacttcgtgctcaccaacgcaatatctgcaccgacgagtcttgtggcaagcgcttcagctctcacaaatacctgaagcgtcatcagtgtgtacacagagatgagaggccattcaaatgcccctgggatggttgtccaatgactttcaagtggttgtgggcgcaaactgagcatatcagagtccatacaggcgagcgaccgtacaagtgctcggctcctgactgtggccagagtttcagatatgtctcagattatagtcgccatagaaagaagtttaatcattattga

SEQ ID NO: 89061 - DNA, 456 bp, Oryza sativa
  Clone ID: PAT_MRT4530_87852C.1
acgcgttgggtcagatagacactgctggaaatgctcatgaaaacattgcaagtgaagcagacgtctgcaacaagtattggctgctgcacgaatccaatgatgtagctgatatgtgcaagcgtaccaaggtgaatgatcaggatggacattctcttattaatattccaattgctgttgctgaatatcctatgatgcatcaagtttgtgagcgtccaataagtgtgagtgcatgtgatgaccctatctgttcatttgattcccaggattcacccacaactgttgcagtgtcagctggcaaacctaccagagaacaatgtggtgctgaatcaactgagttgagtactgtaaaacagttcctggacaatgggcttatcgctgagggaggcagcatgaacttcataagtaatcatgagcacttagaatctgacaatgcaacctcagtgtgcaaagatgaac

SEQ ID NO: 89062 - DNA, 413 bp, Oryza sativa
  Clone ID: PAT_MRT4530_87853C.1
catgaccacaacagcaccattctaatgggcaacgtctgtgttggcacaacctgtagtttgtcgaagaacggccttctttgcgccatctggcgaaatggatcaaccaccacttcctccaccccatcccaccccaccatctcgcgctctgtccccgtcgtccagccctcttccccctcttcaccgacctccgagccgccaccgccacagcagcagctcacctctactgcccctccaagaccaattgttatctctgagccagtcaagaagcacatctccagcgccgggttgcaggtggagtcagtgctccaacaaaaggcggagaatctcaaggataggtacaaccttgggcgcaagcttgggcatggcctgtttggcacaacatacttgtgcgtggacaaggcaaccaggaaaga

SEQ ID NO: 89063 - DNA, 1618 bp, Oryza sativa
  Clone ID: PAT_MRT4530_87854C.1
atggcgttttccggtgactcgatgcctcggaagagtatttgcggtgatggactgagagtcggcttgatgatttctcgtcactttttgaatggtcttgacatgtctatttgggagatgaaaattacatctattcaggagtctgtgaacatgtctactttgactttggattcgctttacacaaaactgaaaactcatgagatgaatattctttctcgtaaaggtgattctaattctagtgctttggtttcgtcttcaacttctttggatgttggtgcttcttcatcgaagtcttatgttcttactttatttaatgccatgtctgatgatcaactcgaacagttcgaggaggaggacttgcttgggagagtcaagaaggaagatgatggtagagtcaaagaggatgacgtgaacaagaagaagaacatgaaggagaaggagaagaagaaacattgcatgcagtggttaattcaagaactcataaaaatttttgatggatctgaagatgaagatgagggcaaaggtaagcaagttgttgatctagcttttattgctcgtaatgcaagttctgatgttgatgaatctgatgatgataatgaagaaaagcttagttatgatcaattagaatatgatgcttacaaatttgctaagaaacttcaaacatgttctattgtgcttgatgagaaggatcgtacgattgagattcttaatgctgaaattgctagattaaaatctttgattcctaaagatgataattgtcaatcttgtgaagttttattttctgaaattaatgctttgcgatatgtcaattctgttaattgcaaaaaaatggaatttgagattgaaaaatctaaaaagttggagtcttcttttgctcttggatttgctttacatgctcgtgttgttgatgagttgattttgacaaagaacgttttgaaaaaaatacaaagttgctttttgtgcaagttctttggtcaatgcttcatgtgcaaataaggcaaaacaaaacaatggtgttttgatttctcaagattgttcaaagtgtattctgaatgagatgaagttgaaagatgctttagggcgtgttaaacacatggaagaaattattaaacaagatgaggtgtttatttgctcaacttgtagaaaacaaaaaggtcttttggatgtttgcaaagattgtgctattcttactcaggaggtttcttatttgaaaagttctttgcaaagattttctgatagtaaaaagaacctcaacatgattcttgatcaatctaaagttagcacacacaatcgtggtttaggttttgattcttatgcttatcatgctagacatcctcctactgtaggagagaaaaaggaaacagaaatttcttttggaaaacgacggtggcaaaaatcaggtttttgttcgaggagcccggttagaccgctgggacagcagcggtcagaccggcctcagggcaactttgcatataattcaaatcatgcttttgtgaagcgacaagtctttgacgacaaggacgtattcgatgtgagcaaaaataataggtgccgaatccttagaaacagtcttgacgacaaggatgtacccggaataattgagagaaaaaaactaatttga

SEQ ID NO: 89064 - DNA, 1688 bp, Oryza sativa
  Clone ID: PAT_MRT4530_87855C.1
ccttatacaccatacaaatatataggacatatgaaacctatagaagctttggatgactatctttttcggcttaataaaattttgagtgatcttagatctgttgattcttcttatgatgctaattatccacaatctgagatttctcgtcactttttgaatggtcttgatatgtctatttgggggatgaaagttacatctattcaggagtctgttaacatgtctactttgactttagattcgctttacacaaaactgaaaactcatgagatgaatattctttttcgtaaagttgattctaagtctagggctttggtttcttcctcgacttctttggatgttggtgcttcttcatcgaagtcttctgtccttgctttatttaatgccatgtccgatgatcaactcgaacagttcgaggaggaggacttggttttgctatctaacaaattttctcgagctatgaaaaatattaggaacaggaaaagaggaggaccgaatcgttgttttgagtgtggtgcacttgatcatcttcgctcacattgtcctaagcttgggagaggcaagaaggaagatgatggtagagtcaaggaagatgacgtgaacaagaagaagatcacgaaggacaagaagaagaattgcgtacagtggctaatccaaaaattaataagagcttgtgatgaatcagaggatgaagatgagagcaaaggtaagcaaattgttgatttagcttttattgctcgtaatgcaagttctgatattgatgaatctaatagtgatagtgaagaaaagcttagttatgatcaattagaacatgctgcttacaaatttgctaagaaacttcaaacatgttctattgtgcttgatgagaaggatcacactattgagattctaaatgctgaaattgatagattaaaatctttgattcctcatgatgataattgtcaatcttgtgaagttttattttctgaaattaatgctttgcgagatgtcaattctgttaattgcaagaaattggaatttgaaattgaaaaatctaaaaagttggagacttaattttgctcttggatttgctttacatgctcgtgttgttgatgagttgattttgacaaagaatgttttgaaaaaatacaaagttgctttttgtgcaagttctttagtcaatgcttcatgtgcgaataaggcaaaacaaaacgaaggtgttttgatttctcaagattgttcaaagtgtgttttgaatgagatgaagttgaaagatgctttagggcgtgttaaacacatggaagaaattgttaaacaggatgagattttgattcttatgcttatcatactggatatactcctactgttttgggtgctgctaggagagaaataggaaagagaaattgcttttgcaaaacgacgttggcaaaaatcgggttttaattcgaggagcacggttagaccgacaatgaaccggttgccaggcccggtcagaccgcaggtacagcagcggtcaggccggcctcggggcaattttgcgcgaaattcaaataagacttttgtgaagcgaaaagaataaaaatatgaaaaaaatgaataccgaatccttggaaacagtcttgacgacacgaacgtattcaatgtgagcaaacagcagctgatctcggctgtcagactggttaatctataccggtcagaccgacgacacaggc

SEQ ID NO: 89065 - DNA, 207 bp, Oryza sativa
  Clone ID: PAT_MRT4530_87856C.1
atggctagtgagaagaagggcccacctgctatggacgatgccgctagacgctccactaccccaatctatgacgctgctagggagcctgccgccctattttttcccaacgcaaccccgatatgtgtagctgccgaggagttcgtcgaccacactgtcgacgggttacaaagggaacaatggaactcgatggatccggcgagatcgtag

SEQ ID NO: 89066 - DNA, 2328 bp, Oryza sativa
  Clone ID: PAT_MRT4530_87857C.1
ctagaggagcggcgtgcggcggctcctctctcgctgcctgtggtcagcggaggaggcagcggcggccgcgccctcccctccgctagatccggggagggttggcctagcggcggcaggggatgggcagcccaacggcggcagcggcgggaggtgggagtcggccgcggaggggaggcgggatgtggcggcaagatgagaggtggtggcgccctcccctctcgactctctctcgctgcccgcggccggcggctggccggtgaagggggcagcagtggccggagcctctcctccacgaaatccagggacaggcggcccagcggcagcagcggcgggaggcggcatgcggcggcgccctgcctcctctctttctgtgataatttatgtgatgttcttcaaatgaaacctggagaagctttggatgactatctttctaggtttaacaaaattttgagtgatcttagatctgttgattcttcttataatgcgaattatccataatctgagatttctcgtcactttttgaatggtcttgacatgtctatttgggagatgaaagttacatctattcaggagtctgttaacatgtctactttgactttggattcgctttacactaaactgaaaactcatgagatgaatattctttctcgtaaaggtgattctaagtctagtgctttggtttcttcttcaacttctttggatgttggtgcttcttcatcgaagtcttctgttcttgctttatttaatgccatatccgatgatcaactcgaacagttcgaggaggaggatttggttttgctatctaacagattttctcgagctatgaaaaatgttaggaacaggaaaagaggagaaccgaatcgttgttttgaatgtggagcacttgatcatcttcgttcacattgtcctaagcttggaagaggaaagaaggaagatgatagtagagtcaaagatgatgacaagaagaagaacatgaaggagaaggagaagaagaagcattgcatgcagtggttaatccaagaactcataaaagtttttgatgaatcggaaggtgaagatgaaagcaaaggtaagcaagatgttgatctagcttttattgcttgtaatgcaagttctgatgttgatgaatctgatgatgataatgaagaaatgcttagttatgagcaattagaatatgctgcttacaaatttgctaagaaacttcaaacatgttctattgagcttgatgagaaggatcacactattgagattttaaatgctgaaattgctagattaaagtcttcgattcctgatgatgataattgtcaatcttgtgaagttttattttctgaaattaatgctttgtgagatgtcaattctgttaattgcaaaaaattggaatttgagattgaaaaatctaaaaagttggaatcttcatttgctcttggatttgctttacatgtttgtgttgttgatgagttgattttgacaaagaatgtgttgaaaaaatacaaagttgctttttgtgcaagttctttggtcaatgcttaatgtgcaaataaggcaaaacaaaacaatagtgttttgatttctcaagattgttcaaagtgtgttttgaatgagttgaagttgaaagatgctttagggcgtgttaatcacatggaagaaattgttaaacaagatgaggttttgatccttatgctcatagttctagacatcctcctgttgtgttaggtgttggtgctagaaaaaaaggaaagagaaattgcttttgcaaaacgacgttggcaaaaatcgggttttaattcgaggaccacggttagaccgatattgtccaatcggtcagaccggccagcggtcagaccgcaggtgaacgggcggtcagaccggttaccaggcccggtcagaccgcaggcacagcggtggtcagaccggtctcggggcagtttttcgcacaattcaaatcagacttttgtgaagcgtcaaggtattttggtggcatactccccatgtgcgttcaatgttgagatgacgattgcttttcaagcttttcatgtgctagtgtttgagattgtagtttttgttgatactaatgaatgtgacttgatgcctcgggagagtatttgcagtgatggaccgggagtcggcttagtgagaagcaataaagttgtcatctactttgagggttcttcgatttgtgtttcaccgggtttcggcggtctaaacggcgatttatcggtggtcagactggcgcatcagggcggtcagaccggcggcggtgtcgacaggcagaggcgacttcgggacgttcaggacgagcgatctacaccggtcagaccagcggaatag

SEQ ID NO: 89067 - DNA, 2298 bp, Oryza sativa
  Clone ID: PAT_MRT4530_87858C.1
atggtgaggaccgggactatgttcagggaggaacagaggtctattgcggtcgggataccacgtgagaaggtgactagagtctggattcttgaaggtcaacttcggtcaacggtggggatcgggacgagactcagggaggagttgaggtccagacggtcaaggataccgggtgacgaagttggatacgaaatggcatacggtggatggacaccgtgtgggagagatcttcgcaacgggcttcacgaggtgtgcgtgcaagcgtcggtgttcgcgaagggaattggaagaggtatgcatgcatgtacggtgctgtacatgtatgtgtgtgatcgatacatgcatgtgaagcatatgaaacctgaagaagctttggatgattatctttctcggtttaataaaatttttagtgatcttagatctgttgattcttcttatgatgcaaattatccacaatctgagatttctcgtcactttttgaatggtctcgatatgtctatttgggagatgaaagttacatctattcaggagtctgtgaacatgtcttctttgactttggattcgctttacacaaaactgaaaactcatgagatgaatattctttctcgtaaaggtgattctaagtctagtgctttggtttcgtcttcaacttttttggatgttggtgcttcttcatcgaagccttctgttcttgctttatttaatgccatatccgatgatcaactcgaacagttcgaggaggaggatttggttttgctatctaacagattttctcgagctatgaaaaatgttaggaacaggaaaagaggagaactgaatcgttgttttgagtgtggagcacttgatcatcttcgttcgcattgtcctaagcttgggagaggaaagaaggaagatgatggaagagtcaaagaggatgacgtgaacaagaagaagaacatgaaggagaaggagaagaagaagcattgtatgcagtggttagttcaggaactcataaaagttattgatggatctgaagatgaagatgagggcaaaggtaagcaagttgttgatctagcttttattgctcgtaatgcaagttctgatgttgatgaatctgatgatgataatgaagaaaagcttagttatgatcaattagaatatgctgcttataagtttgctaagaaacttcaaacatgttctattgagcttgatgagaaggatcacactattgatattctaaatgctgaaattgctagattaaaatctttgattcataatgatgataattgtcaatcttgtgaagttttattttctgaaattaatgctttgcgagatgtcaattctgttaattgcaagaaattggaatttgagattgaaaaatctaaaaagttggagtcttcttttgctcttggatttgctttacatgctcgtgttgttgatgagttgattttgacaaagaatgttttgaaaaaatacaaagttgctttttgtgcaagttctttagtcaatgcttcatgtgtaaataaggcaacacaaaacaatggtgttttgatttctcaagattgttcaaagtgtgttttgaatgagttgaagttgaaagatgctttagagcgtgttaaacacatggaagaaattgttaaacaagatgaggttttgattcttatgctcatcatactagacatcctcctactgttttgggtgcttctaggagagaaaaaggaaagagaaattgcttttgcgaaacaacggtggcaaaaatcgggtttttgttcaaggagcacggttagaccgcagctaaaccggctgccaggcccggttagaccgcagggacagcggcggtcagaccggccccggggcaattttgcacgtaattcaaatcggacttttgtgaagcgacaagagaataaaaaatatgaaaacaatgaataccgaatccttggaaacagtcttgacgacaaggacgtattcgatgtgactggaggtcagccttggtcaatggtgaggactgagactatgttcagggaggaacagaggtctattgcggtcgggataccacgtgagaaggtgactagagtctggattcttggaggtcaacttcggtcaacggtggggatctggacgagactcagggaggagttgaggtccagacggtcaaggataccgggtgatgaagttggatacgagatggcatacggtggatggacaccgtgtgggagagatcttcgcaacgggcttcacgagatgtgcgtgcaagtgtcggtgttcgcgaagggaattggaagaggtttatgtatggtgctacagtacggtggtgtactgtag

SEQ ID NO: 89068 - DNA, 372 bp, Oryza sativa
  Clone ID: PAT_MRT4530_87859C.1
atggacgccgttggtggcgggaaggtgaagaaggcggcgggcgggaggaaggccggcgggccgaggaagaaggcggtgacacgctccgtcaaggccgggctccagttccccgtcggccgtatcgggcgctacctcaagaaccgtcggccggtcgatctcatctccgccgctccttccccgttagccgccccgaccctcttccccaccacgtcggtgacgccgtcgaccctctttcccatcgcgtcggtgacgccgccgccgccaccgcattgggccctcctctctgcgtcagtgatgatggccgcagccgcgtgtcgccgtcgccgaccgcacgagggggacggggaggccggcgagctcacaccgccttga

SEQ ID NO: 89069 - DNA, 481 bp, Oryza sativa
  Clone ID: PAT_MRT4530_8785C.1
ggggcatttgagtttggcattcctcctgaaaacatcatggcgaagctacttttttgaggaacatctggagagtatgctggattcgatcccactgaacccactacacgaagtgggggtgaagcactagcagcccatcaaattatacagggtagatttagttcatgaccattcggtatggcatttatcacttgttgccagattatttatcttctgcatctgttcagaaccatggatataagacacttgttatgattggagatggtgcaactgatcttgaggtatggaactgaaatgctcctggatattatatacgatgtaaatatgattctttggcaagagaccaactaccgggtgcagcaaagatgtaagcggataactgctttatttgttatattgctgagatattgcactccctttgggcagtgtgggtaataagttgcatgagagttagcatctaccaaaaagaaatgcgttacaaata

SEQ ID NO: 89070 - DNA, 180 bp, Oryza sativa
  Clone ID: PAT_MRT4530_87861C.1
ggcaaaacctgaaaatataactggaagaaccaaagggaatatgagagggttatctttgactctaaaaaaggagaccacaccttaacatcagcattaagccacgtccttaggaaacatcagttataagagcctttagctaaccaaagaagaggccatgaaatccaaaaatcccagatggga

SEQ ID NO: 89071 - DNA, 499 bp, Oryza sativa
  Clone ID: PAT_MRT4530_87862C.1
ccggccgggggtagctgggcgaccctgtcaagcagccatcgaccaattgcagcacctgggagcccgccgtcttctgctccaaggagtctggcagcatcactgagctagcccttttctacctccccgacgacgccgcacgcgtgccgtcggtgctcagcgagctgacggagccacgcctcccgccagcccgctcctggccaccgcctcgatggcggcagcaccgagacaaccgttgcccgccaccgcgccttccaccgtcacccgcgctagatctgatgcgacattgtcggatctgcccgcgtggggcggagcggcggctagatccgcgcagaaggaaggcagtggagaagaaggtgggagcccgccgcacctccctctcacccgccgcgcctcccaccatcgcccgtgccagatccgcagcaccgccgccggatccgcacatgtagggccggagtggcagctagatctgcgcaggaggaaagcggtggaagaaggaggt

SEQ ID NO: 89072 - DNA, 594 bp, Oryza sativa
  Clone ID: PAT_MRT4530_87863C.1
atggactacgggcaaagaggcgacctcttctccctcccgcctgacatcgccaagctcacgggcaggtgctccaacacctcgcttgcacgcttttcgccggagtccttcaccgacaacctccagctctgtgtggctgataaaaagaagtggaagaagagaagttgtcggtatggcggtcgtgaccacagcagcggtgaggattctgtggcggcgggcgtggcctgtgacaacactcgctacaggggacgcacgcgagaggatagtcggaagaagaacgagagaagggagaagaagataagggcaaaactctctctccacctctggcggcggcggcggctcgttgaacacggcgtcatgcatgagtcaatcaccacgatctcgccggtggtgtcgtcctcccacgcattccagaggtggaagcagaagcagccggggacctccacccaccagagctccgacgcgtcggcggcaaccaacgaacaagcaccgggctgggcatgtgtggattctaatgctcaggcacaacggtatcatattgttatgcatccagtagctgaaagcatcaaacgaaatgctactggtgctcaacagtag

SEQ ID NO: 89073 - DNA, 393 bp, Oryza sativa
  Clone ID: PAT_MRT4530_87864C.1
cccaaagggcgcgagagatcaagatggttggaactacttaaattaagcagcaaggggttatgataacaacatagatatacaccgttctatttagctagatgatcaagactgtcaagacaaagatgctggctgtgcacaatacacttgggcatagtgggacctcaaggatgaccattgcgtgcaatcctataggatacctaatgtattgtggaataaacgccgccaaggtgacgcacttgtcactgcacagccgtatgagtgaggaatatgcagcggatatacaccctgaagccaaaattggacacggaatatcgcaagatgatggaactgatctacgtattgccgaaaatggaactgtggtaaactgtgcttgattaacgcatggagctacac

SEQ ID NO: 89074 - DNA, 206 bp, Oryza sativa
  Clone ID: PAT_MRT4530_87865C.1
agcaaccactgacttagcctgttggggtcgaccttccccttgagagcaactgacatatacatccagtacgccagcactcggtgtgcgtacctgacctgtctttcatgaacaatccctatgcccttaccaacaatggcaacactcttactttgacagctgctggcctgatgcctgtggctctgcagatggagcctagctgaccctct

SEQ ID NO: 89075 - DNA, 154 bp, Oryza sativa
  Clone ID: PAT_MRT4530_87866C.1
acgctctacccaggttcgtggcacgaaggagttcgggcaccgagtgacctcaccggcgaagtaaatacgcggtcgccaccggcgagggtagcttgtaaacaaggtgtctgcttgcccatcaacggagcgccaacaacatgcagacccagctggc

SEQ ID NO: 89076 - DNA, 1820 bp, Oryza sativa
  Clone ID: PAT_MRT4530_87867C.1
gcctagttagagaggacgcgaaggcgactatggggtggagggggctagcgagggatgcggcggcagcatatctccggcggggcggcgctcccgcgcacgtcttctccgcggcctcccgcgctccgggccccgttgtcgccaaccctggcggtgagctccgcgcgttcgggttgttccggtcgccgatggccaggcgcgccgatgccttcgaggtcccttcggctgctgggaggcacggggcgcagggcgtgtggtcgcgcagctcggttccggcgttggttcgggctggtgcccccaactccagagctctccctttcctcgtggggagagtggttcgtggattctatccgcagctgtcaggtcacaagctggtaaagggacttgggatgggctccacccttgctgtgacgttttgttcacaaaaagttgcatatgctgaagaagttgctgaacagccatcagaaggcctcatcggcccctcaacaaaacatcagattagcaaattatggactataatcaggaaatatcagctgcctgttggtttgattgctttgatcgcacttggttggcagaatccattgggtcttttcatcaacgttttgcttattctctacagttctaggcctagcccatattcaatatacttgtttcttcaggaggttcgtcatggagagatgcatcaaaatcgtgcattttggaaggaggaggctgtgcttacaaggaaagttgatactaaagattacaagctcttttccattggaacagttgaatcagcagacagagaagtactgcacgtcattgggattctgggcaactggtggatctatcgtgcatcgtatgggaaggttgaaaacaggtcattctcaagggggttgtactggaaggagtttccacatctgactttgtccaagaacctgtttgtgatgggtgggaggaagattggagttgctgtggacttctcgtcatgcagcaaagcagctctgcgatgggcatcaaccaatcttaccaggagcggtgatcagcttgtacttatccatgtcaatagttcctatcataatgagcaaggtgcagttcaactgtgggaacagagtggttcaccgctcatccctctggcagagttctcagatccccatgtcgccaagacatatgctgtgtcacccgacaaggaaacactagaaatcctgaatcaaatgtcgaatcagagaggggttgaagtccttgcaaagatactctacggtgaccctgcaaagaagctgtatgaagcagttgacctggttcccctcaactgcttggtggttggaaacagagggctaagcacactcaagagggctctgatgggaagcgtcagctcctacatcgtgaataacgcgacctgcccagttacggtcgtcaaggagaacatatagctcctcaatagttaactgctctgataggaagcagtaaactgcaagaacagacagcatcagtatctaagtatctaacatatacaacagtatagcagattgaataaattgtgcttgacatgcactggcagtcactcagctcagctgcccttgcctctttacctggaaagatctttcttgatgtaaaccgttcagtatttattatgcatgtaataatataagcgggaaccatacgtgtgtttcagtaaaaaaaaaaaaaattcattctatttctcttttcatatgtacaggaagcatttcattctgtcttgtctctggttacatggcttttgagatgctcctccttttggtcaaaatcagtatccatcacgaatgttctcttgcccattaactatgggctgtggcatgcagaatatg

SEQ ID NO: 89077 - DNA, 2955 bp, Oryza sativa
  unsure (1)..(2955): unsure at all n locations
  Clone ID: PAT_MRT4530_87868C.1
aaacctttagaaccattggtcatggctgctcatgctgttgatctgatgaggcctgagaagtttgctggtgaaaactttaagcgttggcaatccaaagttcgtcattatctggtgtcgcagaacttgtggtatgttattccacaagtgaggccgctgacccaacagcagcatgcggactttgagaccagtaatgatgtggctttaggtgtcatgctttcgctcctgtctgaccagctctacgacgtgtatggtgcttacaccagcgccgcagagctatgggaggcactggaccgtaaatattcggtttcagatgcaggacgttggatatatgtcgtggagcaatatcatgactttaagatgattgacaaccaatcagtggtgaagcaggctcatgatcnttttaacgattatgggtgagatgtctcagtttggtgctattgtgattcctaagtttgtggtggggggcattattgccaagcttcctccattttggagggattttgccactgcacttaagcacaaacgggaggacatgatggttgatgacctgattgcccacctggatgtggaggagaaggcgcgtgcgaaagacacgccgactatggcacaagaagggacatcaaatgccaacctagtgcagaagtcaaatgcaaagaacaagggcaaacaagcagtgcagaaccataaggccaaaaacacaaccaattttaagaagaaaattacttgctatgtttgcggcttggaagggcacaaggccaacaaatgccgtgacaggaagggcaagaagaatgttcagcaagggcagaaaattgccaacatggttgtgagcgaggctgggtcttcagggtatgattctactcctgttgcactttcagcgtatcaatcctttgattggtgggttgatacgggagctaacattcatgctgcaaccggttcctccatcttgatgggcaatggttcaggtgctgctgttcttggagtagggaaggttgatctgaagctcacttcagggaaaatcatctctttgaagaatgtgcagcacgccgaggctgaaaaccaactagaaagaaaaattaaacgtctacggtcagatcgtggtggtgaatatgtgtcagatgagttctcccaattctgtgcggatcatggaataattcatgaaattacacctccctattcaccccaatctaatggggtcgccgaaagaaagaaccgcactttgactgacttggttaacgccatgttagacagtgccggtatgtctaaggcatggtggggggaggctgtattaaccgcctgtcacatcctaaatagagtgcccactaaaaatagtgagatcactccatatgaaggatggaaagggagaaagccatcactatcatatttgcgcacttgggggtgcttggcgaaagtcaatgtaccaataacaaaaaagcgcaaacttggaccaaagactattgattgtgtctttctaggatatgcacataatagtgtggcctacaggtttttagtagtgagatccgatgtaccggatgtaccgataaacatggtaacggaatctcgtgatgcaacattttttgaggatatttttcctatgaaagctaacgaaacttgggagatcactgatcgaccatttggttgcaagccagtggggtgtaagtggatctttaagaaaaaacttagacccgatggtactattgaaaagtacaaggtaaggcttgtggcaaaggggtacacgcaaaaggaaggcgaggatttctttgatacttattcacctgttgctagacttactactatccgtgtgcttctgtcgctggctgccttatatggtttcgttgttcatcaaatggatgtgaaaacggctttcctaaatggtgagctagatgaagaaatctatatggagcagcccgatggctttgtagcactcggacaggaaggcaaggtggttaagttattgaaatctttgtatggcctaaagcaagctcctaagcaatggcatgagaagttcgatcgaacattaacatccgctggtttcattgtaaatgaagctgataagtgtgtgtactatcggtttggtgggggagagggtgtgattttgtgtttatatgttgatgacatactcatatttgggaccaatattaatgtggtgtctgaattaaaatcatttttgtcccaaaaatttgacatgaaggatttgggagaagctgatgttatttcaaacattaaattgatcaaaggcgaggatgggattatgctttcgcaagcccattatgtggagaaagtcctaactcgtttcgggttgatggactgtaaaatagctccaacgccttatgacccaagtcttaagcttcgaaagaacaaaggactaggaaaggatcaattgagatactctcaaatcattggctctctcatgtatttggcgtgtgctaccagacccgacatctcatatgctgttagcaagctgagccggtttacttctaacccggagatgatcattggcaagcactagaacgcatattaagatacttgagaggcacaatgtcatatgggattcactataccgggtaccccgctgtgcttgaggggtatagtgactcaaattggatctcggatgccgatgagatcaaggccacgagtggatatttgtttactcttggtggtgctgcagtttcatggagatcttgcaaacaaacagttttgacaagatcaactatggaggctgaacttgtagcacttgacacagccactgttgaggcggagtggctgcgtgagctcttgatggacttaccggtaggtgaaaaacctatcccggcgatccttatgtactgtgataaccaaacagttctcataaaggttaagagcacaaaggataatatgaagtcctcaagacatgtgaaaaggccggggatcctctagagtcgacctgcaggcatgcaagcttgagtattctatagtgtc

SEQ ID NO: 89078 - DNA, 406 bp, Oryza sativa
  Clone ID: PAT_MRT4530_87869C.1
cacgtcaaactcgaggctcaaaaatgtaacagcactaagctggaacacatcaccaaatacatacaaactagaatacaaagatgcctatccacagatctatcatatgattaacaataagagcaaccaagttcctttcatatttcacagtataaaataaaagaagaaaagagtgattattcgcatcaatatataacactaactttacacccgaatagctgtttgcctgactttacaagacctgccggggttccgagctctactggttagagcatctttctgaggagaaatgcagtgtggccgcctccaccatcttttagccaaaccatttcctttgggattggttaacaacatcgatcaaccggtcaaagctttctaaaatgataagatcatcaccactggggaaaga

SEQ ID NO: 89079 - DNA, 2797 bp, Oryza sativa
  Clone ID: PAT_MRT4530_8786C.1
atggctgacaatgagaaaggcaataaggtcagaagtcaggacattggtacctcgagctcccgagtgaatgaagcaccagacaccagttgtgtgacactggtccaacacctgattaaccagaaccgattgcttatagagatactacagcagcatcagacaccaattctgaacctgagtcagatacaacctcaagtgcagttggaggcagtccaagcactcacaccacgagtcagcatgccgccagcatcccgaaggacccatggtgacgtgccacatgttgactcaaaagaagcaagtatcatttgttttatgtgtgatgagcaagggcactatgcaagggagtgtcctcagcagaaaaaaaaaacaccaatgcgaaccgaagatgaagtccgtaagatgagcattaccagcacagaatggcctccaccaggaatgacaaaacgtcagagaagaaataccttccgaggtgcgccacagttgacagagcatcttttagctaatggaggtagagtgtctgataatgaagattcagatcaagtctcctcagatgatgaagatgagaagtctccccaaggtttcaaccagaataaaatggaacgtaaggcatgctctcgttgtggagaaatcggtcatgttgccagctcgtgtgccactacatgcgttcattgtgaggaagaccatccacccgacaggtgtccaacgagcaggatcacttgtttcttttgtgaaggaactgatcatgtaccaaaagattgtcaattcagttttttgctgacgaagaaaatggccaaccaacccgccagttccaacggagagaagcatcaaggcaacacaaatcctcgccaagattacagtttcagcctgactccagtgccaggacagaggaatcaaaatgagaaaagaaaatgccgagtccgggaagatatctgttgcttcaattgtcaaggaatgggtcatttcgccgacaagtgcccaaaaccgagaaacatagctgccagcacgtcagtccacgcaactccctgcaatcagaagcttgctcctcagcgaactgtcatccatgcatcccgaagcagtcctatagcccgcgttgcaacagctccaactccagcgagtgcattaccacaaggtgtcaatgcccaatttcagccccagccatcagttgacaagaccgaggccagtatcggcattgtacctttggatgttcgagcacagcagccaagaaatcaaaattggaacaacccagcagggacaaccaacgttcaagtacctacagtccagcaacagtgcaagttatcagaatttctcaaaactgagcctccaacctttgccattgccgtcgatcctatggaagccagtgattggttgcgcacaatcgagaagaagctagggttgattcagtgcaccgaccaggagcgggttggcttcgcaactcctcagctggttggaccggcttcagagtggtgggatagctacgaagcatcacagccagaaggacataccatcacctggaacgagttttcatctgtattcaggagatcacatgttcccgcaggaatgatcacattaagaaaacgagagtttcgctatctgaagcaagcagatttgaccgtcacaaagtacctgcacgagttctatcgtttggctcactatgcaccagaagatgtggaaacggatgaagacaaacaagagaagtttctccaggggttaaaagatgagcttgcagtgcaactccttctagaggattatgaagattttgagaaacttgtggacaaagccatgcaactcgaaagtgagcataatcggatgacgaactgcaagaggaggattgtcaacatcccagtatttccatgtggtaaccaaagacagcgcactgagccacttcagatcaccggatcttctgttgtgcatcaagagttcctgccccaagaagatggacgcaatgcagacaacaacactagcaatactaatgatgatgataccaccaacaaccatggttcttgcctcattagcgaccactcgaataaagcgtgcaatgtcagtagcattcaccaagatgtcaacgatagtatcaatgttggaatccagaatgacaaccttagcaattttgacactgagaaagactccaatggtgatagcaactatggtaccactgatgccaatgttagcaaggatttccaaccaccaattccaactccaagtcaaaatgatcgtccccagatggacagctcaacaaagaagacgttgatttgttacaactgcaaagaaccaggtcatttctctagagattgtccacagccgaagcgtaacctacgccatcactccggccattatgcaagaagaagacaagtcactcgccttgtggtcactggagcaaacgccatacctgtttctctgaaaggcagcaagccaaaggacctcatcgtccccagaagcgtccgcaatccacattaaagaataccacctgttagagattgacaccaagggtatgaattatgagaagtcctcgaactgaaaccccgtcttcaagtaccgcaccccagtcgaagtcagctcaaggtgcaaccaaggataagtcaggggccacctccctccctctctctcctctcccccgcggcccaatcggcctcctccccgcgcgcgtgccgctgacgggcgggcccgcccgccaccctcgctgacgggtagggcccacccgtcatcccctacctcgcgccgcgcccgccgcctcgcccgtgccctagcgctgccgccgccgcggattccgccgcatcccgccgcccccgcgcgcaataaagag

SEQ ID NO: 89080 - DNA, 1800 bp, Oryza sativa
  Clone ID: PAT_MRT4530_87870C.1
aaaccacagcatcgcatggcctcaagaggcctatcgccaccggcgcgcgcggccccgagggaagcgaaggtaaggaatcgctcgcgtcgcgtcgcctcgacccccacccaccgcacgccggcgacgggaggcccacatgccgaccgcctcctgcctccgcccgccgctgccccactcctccgccgccgcctccgcctcggcggcgcgggggctccgcgtgcccctccctccgccgccgccgccggcacagctgcagcagcagctgttccaggcggcgctgcggctgccgcgcaggaggctcgccggggtaggggtcgtggcggcgtccgcgtcgcccttcgacgagctctacgcgcgggggaggcccgcccatggctcctccaagaaatctatcctatggaacttgatccaagacatagagcctttggatctaagtgtcattcagaaagatgttcctcctgaaacagttgatgcaatgaagaggactatctctggcatgttgggcctgcttccatcagatcagttccgtgttgttgtagaagccctttggaatcccttcttcaagttgttggtatcttcaattatgaccgggtatactctgcgtaatgctgaatacaggctctcttttgaaagaaacctagagctttcagaagaagattcggaaggtcaaaatagagatatctctgaagacaatcatcataacatcaatttgggtagccctgtcacaattttcagattatctgaagaagacatgctacaagacactgaaaaaaatgatgaagaattaccatgtgaaactgtgggggaagatcttggtaacttgacacctcaagcggaagattacataatccaattgcagtctcgattggatgccatgaaaaaggaattgcatgatcttaggaggaaaaattctgctctgcaaatgcagcagtttgttggagaagaaaaaaatgatttgctggactatctaagatcactaacaccagaaaaggttgctgaactctcagagtctacctctcccggagtgcaagaggctatccactccgtggtgcatggtttgcttgcaactctttcccccaagatacactcgaaggcccctcctccactaggtaatgcttctgggggtgtactgaatcttgggggtgaggatgatgactgtgcagagcttgtggagaatgcatccctaccttttcagcccctaatatctgttccccgtgattaccttgcacgtttgctattctggtgcatgctcttgggtcactacatccgaggtcttgagtacaggttagaattggcgcagcttctgaggatatctaccgatgtagagtctttccccagtggtgatgatcttgtcatttgagaaatctttgaccggttgatcgatgttgttaaccaatcccaaaggaaatggtttggctgagagatggtggaggcggccacactgcatttctcctcagaaagatgctctaaccagtagagctcggaacccggcaggtcttgtttgatgctctaaccagtagagctcggaaccccggcaggtcttgtaaagtcaggcaaacagctattcgggtgtaaagttagtgttatatattgatgcgaataatcactcttttcttcttttattttatactgtgaaatatgaaaggaactcggttgctcttattgttaatgatatgatagatctgtggataggcatctttgtattctagtttgtatgtatttggtgatgttttccagcttagtgctgttacatttttgagcctcgagttaaaagtgaactcgacctccttcccgctctcc

SEQ ID NO: 89081 - DNA, 444 bp, Oryza sativa
  unsure (1)..(444): unsure at all n locations
  Clone ID: PAT_MRT4530_87871C.1
ttcgagccctaggactccaccccgtggcggccgctctaaatagtggatcccccgggctgcacgaattcggcaccaccgacggtgttctgcttaagtggacggctgactatggtaccacacttcggaattgtgtgattctgggaggtaccctgctcgatccaagcctatacgcgcacagcatgactcgtctgtaatgatatggaacatccaaatctttctataccaatggcgggcttaaacttctgtctgtgactatcactcttgatgctgcatcacacaactatctcctccgtcaattacacgacaccactagactggtttacaatcccatgcacggactctctgggatgaccctaaattaaaaacactgtcaccacttcataaaccgtccctcccttaactaattcccacttaccctgtggttaatcaggtcccnttttncac

SEQ ID NO: 89082 - DNA, 1840 bp, Oryza sativa
  Clone ID: PAT_MRT4530_87872C.1
atggccatggacctcgaccgcgaccgcggccgcgaccgggacggatacggcgacggagcggcgctcgtcgcctccaccagcaacgggcgcgggcggggccgcggccacctcaacgatctccccgaggacatcctcgccgtcattttgcgccgcctcttggacacccgcgccgccgccaggaccagctttgctgtcccgcccgctggcgcccacgtctggaaatgggtgtccggcctcttcttgcatcactaccagccccacgactccagcatcgtgcgcgccgccctcgccgcccacgccgtgcacgcggtcaccaacatcaacaagctctacgtcgtctgcctccgcagcgccacgccggacgccaccgcctcctggatccgcgtcgccgcgcccctcatctccggagagctcgccttctgcaacagggcctcggttccgttccacatgctcttcgacgaggtattcagcgatccaatcgaagaaagaggcgcgctcgagctcccctgcttcacgagagccaccaagatagcgctgcgcctggggtttcttggcctatcgctgccgccgtcgggcgtcttcgccgcgctcagggagctgcgcctttcgtttgtccggttccatggcgaactcaccctggacgatactgtgatgccgttcttggaagggctagagatctacagtgcccgtgtcttggcctccctgacgctcaggctgaagcatctcaactggatgaatctgtccgctgtgcggggattgcttcggctcaatgccgtggtgccgagactcaagttcttgactgtatcctgttgcttctgttcttcgacatggctggttgcaatggcgggcgtctgcattgttgcagaggagctgcgggtgctcaggtggctagattggtactgtccaagattgatcaagttcagccagatgccgcgcctctatgtgctaagcgtctccccattttatccttatggacggcatcgtcagcatactaaattcaatccgagctgtgacaggcttctcaagacattttcacgcattcgttgtctcgagatgttggttttcatcgaaccacacctaggtggcgttaatccattgatggaaggcataaccagactccctgacattaggttcttgcacctacaattctcagcacatgggcatgtttatggagctagtgtgttgtatatgctgacaatgtgtactggtatatcaaacctaaaaatcggaggagatcgttacaaggatcaagatgtgtgtccaccgaactgcagctgtgatcggccaccgaactggagagataataaggacatttcgatgaggtctctaagagaagtgcagatgctcaacttcagaggaaaggaacatgagcttgaccttctgagggtcttagtcagggtagcaacaggcattaggaggatcagaataacctgccatcgttcgttcgctgcttgggagagactgtctgcagtcatacgaagttttgcaagaccagagacttctgtggaagtgagtcaagcccctccctctttgcagcgacagtgaactgagaagtaagaagaagctttgttaaaaaaagaagaagaagaagcagctttgttggctgccgacccttgatgtacctggcatgttttggcccgattgtgctgtaaagaaaggaacagagaaactgatctagctgcggccaattttgctgccattgtagtttgtcctcatgaacaattcttagcatttgacattctggaatgccttttgttagtatggtgcagggtgcacttgttgcttagtttggtcagaactgaaaactgatgaagtaaagtgtgagctggacctttggtgc

SEQ ID NO: 89083 - DNA, 356 bp, Oryza sativa
  Clone ID: PAT_MRT4530_87873C.1
acgttggcgcagccgtttcaagcagtgcgccgccgtagtttaagctgtcgcggtcgctgggaaagaccgccgtcgtgcttggcaaagtggccgccgtcctggtccgccctatcgttgcgtcgaagaccaccgaagcatcgtcgcggtcgtcaacccgaaggtagccgccgcttccttcttgtcgcagtagtcgtccgttccttttccaccgccgttttggtcaccggtgtgttcgccgcgttgtcctatacgtgctggtgccctcagttggtcccgtggaaccgccgttcgccggcgagtgtccaccgcccgagccgttttattcgccgagccgccgcagtagtcggtgatgtcat

SEQ ID NO: 89084 - DNA, 510 bp, Oryza sativa
  Clone ID: PAT_MRT4530_87874C.1
aaattaataggacatcaagtttaaactggcacccatgaagaagcaggacttttttttaaacattggaaccattatactattacaattcaggcccaaaccccaccaacgggggaaatgccccccggaccaatggaggagttaggatagatcccacatatggagggcaagtttaaggccaacaaagctggaccttgaccttgagtctgatcaaaggaaacaacaccgacctgctgaagttgtagttgctgcacaatcgcctgaaccctactaatggcctggtagggaaattgtggccctaccacccggagcggggggaaacactggggcggcatgactggggggtttataaatagaaacgaacctggttgccaaaagggggtggccactatgctatgctggggccttacaaactcactggatgggctgaccacttgttgctgtaccaggaaatgcaatggaaggggatatggcctataacttggactaaaagcataaaaccgggcaaaaacg

SEQ ID NO: 89085 - DNA, 342 bp, Oryza sativa
  Clone ID: PAT_MRT4530_87875C.1
atggcgacggaggtcgcggccgccgatggtgcgaacggcggcagaggtcgcggccgtcgactgcggtggaggtcgcggcgggcgacggcgcggacgacggcggcggtcacgtgtgaccacgtcggcgctgggggctatgcgagagagaacagccggcaaagagaagatgggaggagaatcatcaacgactccgtggcccaatggataaggcgctggtctacggaaccagagattctggaaagcaaaggtgggttcgcacaacagagaccaactggaggaatggaagctcatgttccttcagctccaaactgggacctggcaatggagacaaatgccgactga

SEQ ID NO: 89086 - DNA, 373 bp, Oryza sativa
  unsure (1)..(373): unsure at all n locations
  Clone ID: PAT_MRT4530_87876C.1
gcgttcggnttcctgtcgttgcggcgcgggcttggggatgtttttatttgtttcttttatttttgtaagtatcatttttcgtcttttgttctccttgtatattgggtgggttgcgtttgcctgtgttccatgtttatgtttcgcgggcttgggatgggctgtctcttttgtcgtggcctgtgctgctattgcatcgggtgcttgtttcctctgttgggttcgtgaggccgctgtctggcctctccttatgccccttgttgcgcttcgctgcttttccactgggcgtcatccctgtctggcccgcttcgcgctggtggcgcaccggtgtcactgtctggttgttttcttggttgcggcctttttggggcctttt

SEQ ID NO: 89087 - DNA, 1377 bp, Oryza sativa
  Clone ID: PAT_MRT4530_87877C.1
atggcggtgccagcggcggcggtggcggccgacgtcgtcgacttcgggtacgccgcccccatgccgccgccctacgtcggcttcgacccagccggcatgggcggcgagcgccagctgttccagcacggcggtgcatgccatggcctctacgacggtggcctcgacttctccgccgccgcggcgttccaggaagcggccactcttggagttggcctgccgggcggcaatctgctgcagtccctggcgccgcccgccgccgccgccgccacgccgtcgtcgctgcagatgccgatgatgatgtcgctgccgggcctgcctgcgacggcggccgacgtgtacccgttcggcggcggcgggttcgtgaagcgggaggatggccccgtcctggacgtcgtcggcggcggcggcggcgggaggatcgggttgaacctcggccgccggacctacttctcccccgccgacgtcctcgccgtggaccgcctccttctccggtcgcgcctcggcgggatggggatggagatggggatgggcatgggcgtgctcgggctgggcctcgccgcggcggcgcaccaccaccagccgccgcggtgccaggccgagggctgcaaggccgacctctccgccgccaagcactaccaccgccgccacaaggtctgcgacttccacgccaaggccgccgccgtcctcgccgccggcaagcagcagcgcttctgccagcagtgcagcaggtttcatgtgcttgctgagtttgatgaggcgaagaggagctgccggaagaggctcaccgagcacaaccgccgccgccggaagcccaccgccggcggccaatcgtccaaggactcgccgccgccgccgccgtcgaagaaagggactgacgccagcatcgctagctcctacaccagctgtgaccaccacaaggcagctgcgagcaccacgacggccagcggcgtgagctgcctgcaggagcttgcagaccaccacgacgtcggcggcggccatcaggcagccatggcggcggcgccgccgccgacgctgtccctggccgcgctgccgccgcaggaggaggacgacgaggacgaagacggcggcctcggcaacgtcctgatgatgcagcagcaccatcaacggcggcgactgcaacacgacggcgacggcgacgacgatgtcgccgccgccgccgcccaccaccatctgatgagatctctcgcgcggcagcagcagcagcatcgccatagcagcggctgcagcaacaacaacgacggcgacgacgacgaccacaacaacaacaacaacatactgtcgtgctcgtcggcgtcggaccagcagaacagcagcaacaacaacaacatgcatttcttcgaggtggatttcatctag

SEQ ID NO: 89088 - DNA, 411 bp, Oryza sativa
  Clone ID: PAT_MRT4530_87878C.1
ccgctcgccgcccgtggcccgccgggctgccacggcggccccgtgcagcgaaggtggtgtacgcttgaactgcttagaaggatgtagcctatgatctcgataggcgcgaagagaaggacggtgtagaagcgcttaaggtaggagtcggcgagaaaggcggccggaatggagaacatctgcagcgcggcgaagtagttgctcgccgtcgtcgacgcctgcgccacgcccatgtgcatggtgccccgcaggtagctcaccatgttcatcatgttggcgatgttgggcgcgttggtcaacagcaccatcgcatggatgaagatggatgctctgacacctccatgcttcttggtgtccaccggcctccccctccagtccactagccctgatgagctgcccatcaatcacctctct

SEQ ID NO: 89089 - DNA, 1301 bp, Oryza sativa
  Clone ID: PAT_MRT4530_87879C.1
tgcgggaattcagcacgaggagcggtgaaaaaatggcgaccaaagtgcacgcccgccgcctctagcgccgaccgcctcgcgttccccttccccactccgtcccggcagctacctccgctttccaccacgccggccgatccgcctccccaaccctatcgccggcaggcgcgccacgccaggttccgggctcggagacaccgcacgctccgcccgatgggcacccccgggccggagctcgccgctctcgcgattcgccgcagcggcggccgcctgttcgagcggtagggagggactcgtctccccgcctctccttgtcgtggactcgtggtagcgggggtgggaggagccagagaggctgggggcagggagggaggatgctggggtcgggcctgaatctcgtcagcgcggcgctcggcttcggcatgaccgccgcctttgtcgcgttcgtctgcgcgcggttcgtctgctgccgcgcccgccgcgcggacgctagcgcgtcacggccacacccctcgccggtggacttcgacgcggacttcccctcggatttcgatcgcccgatagagcattcccgcagtgggttggaaccattggctgttgctgcaattcctacaatgaagtataactgtgaagctttccattcggaagatgacacccagatgttttgttgtaacaggtgctccatatgtttaagtgaatacaaggagaaggacattctaagaattgtacctatttgtcatcataactttcacctttactgcttagatgcatggttgctgaagcagactacttgcccaatatgccggatctcattgaaagaactgcctgatggaaaatcgaccgtatcctctgctcctaccatgtctcaaccccccaccctccctgagagttctgttaatccaacatctcatttcctcccagttcatcaagaacacagaagccaccaggatggcccagatatgccagaatctgtagaggtggttattgaaatccgacagtgactacggcggaatagtgcaagacaagaatttgcagtttaaattctttgtacgcccttcattgcattgtttgtcgcagtttcaaaatgtttgaagtcaaaattatatgtggtccctttgcaagttgtagactagagaagtcagtcatacaatccacattatcatatgttctttttaatatatgttgtatattgcaagctaagtaaaaataccgataagatctactgatataggagtagagcttatttactgttgagtccctaatttttttatgagtgaatttcagcagggacacctcttacc

SEQ ID NO: 89090 - DNA, 1714 bp, Oryza sativa
  Clone ID: PAT_MRT4530_8787C.1
ttacaaagaagtctccacccaactatagctatcaagcttcttcagacgccgtctcttcaccaacctcttgatcttgaagacatcatcctgcttgccagcgttcgccagcgcactcgagagcaggaggcagctcgccgcattgtctggctcgactgcaagcaggcgcgacgccgcaagctccgcgagctcgatgtttccatggcttcggcacgctcccagcagcgcgccccagacgaagcggtcgggctccaggggcatcgccctgatgaaaccgtacgcctcgtcgagcctcccggcgcggccaagcaagtggaccatgcaggcgtagtgctccagcctcggctcgacgccgtactccacctgcatggctcggtacaggatcttcccgacctcgaccatgccgccgtagctgcaagctgtcaggacggcggtgaacgtcaggtggtcgggctttgcgccgtcgcgcagcatccggtcgaagaggccgacggcttcttggcagtggccggagttcgccagcccgaagatcatggagttccatgtcaccgtgctcctctgtggcatcttgtcgaatagccggcgcgcttcgagcacgagaccgcacttggcgtacatgtcgacgagggcgctgctgacggtgagctcttgctcgacgccggccacgacagagtagccgtggacttccttgccatgcttcacgtcagcgacattggcgaacgcgggcaggatggtactgatcgttgccgagcttggcaggacacggccgccggcaaccatcattgctcggaacagtgcgcgtgctctgccgtactgaaagttcagtacagagccggagacgcgcgatgtccatgtgaccatttttttttttatttttttttgttaggtccaagggttgaattcagcggtgccaaaagattcagataaacaggtgaagctctgagccgacaaaatgcagcaacagataggagtagttaccaacttaccatagttcaactaaaatttatagcccgaatatgggacaaaactggtagaacactttaccaaaccaaagcaaaagaacaaaacaaaaaaactaaagcactgaaaatgacaggagcaagtaactcgagcaaagaagcaccacacagtgatcaaatattgctaccaacacaatactactcctgaaaactaattcctaaacgtgaagggtaaccacaattgtttaatttttttgggcggaaattacttcggcaacatgggtactggtgaaaaatgaatcggaaacaacaaccggtcacggaaccaccgtacgtggcttggcattttatagcctgaccacatggaaaaaaacccactcaaaggtgctgtggtcaactggtggttaaaagattgtgttcaaaatcatccagaaaattcttataaatcgcgatctagtccggtgattcgatctcagatgtactctccccttaccaagccaagcttgacgccaagaccatatgatgacccatgaccaacccgtcggaagaactctgtggggttccctttcacatccttggaactgccaaggtcagtgccatgttcaacaaatccatacacatatgtgttcctcacaggaatacgcaactcactcgcaacctcaagaacattcctggaagcacccagttcacccataccatagcccctaactgagtaaggtcctccaagtgtaaatgcatcatagcttggcagatctcct

SEQ ID NO: 89091 - DNA, 357 bp, Oryza sativa
  Clone ID: PAT_MRT4530_87880C.1
atggcagataccacaggcatctggatgaagttgaatgtggatgggtccttccaagctagcgacgggcaaggaggaatcggtgcagtactgcggaacgcggaaggagaagtaatttttgcagcgtctggatttgtggatcgctacggcagtgcgctggaagctgaactcctctcttgcagagatgggctttccttggcgctacaatggactcttcttccgattgtcgtagagacagacagtctgatggcgaagcaacttgttcagtccgattcaatggtgcgttcagacatggtgttcttagtcagggaggttcgtgacctcttgatgggaagcagggaggaactaaccaagagataa

SEQ ID NO: 89092 - DNA, 528 bp, Oryza sativa
  Clone ID: PAT_MRT4530_87881C.1
gtccgttcgcgcccggccggccgcagcctcccggcgagctcctccaacacacgtgactagccgtggcttctcggcgagctcctcccctgtgcccggctggccgaggcctcccggcgcccggccggccgcggcctcccggcgagctcctcccccgtgcccggctggccaaggcctcccggcgcccggccggccgcggcctcccggcgagctcctcccctgctagtcagccaacaacattcgatcttggtttcggctcccggtcggctgcgacctcccggcgagctcctccctcgcgcccgcccggccacgacctcccggctgcaacgccatcttctccacgagaccatgggagccccgtcgctcatgtcgcccatcggggacgaagatggccatggagcccgtcggtcccgccgcccagtggctcctgccgctccgccgggctcccgcggtctcgccgcccagtggctccgccgcctcatcgctcctgccgttcccgccgagttcccgccgtcccgtcgctcgcgccat

SEQ ID NO: 89093 - DNA, 585 bp, Oryza sativa
  Clone ID: PAT_MRT4530_87882C.1
atggataggaagatagaagttcttgcctttgttctgcttgtgagcattggcttgtccaatgcagcaagagtagctagatacacaactgagggaggtggcggcggtggtggtgaaggaacaatggaggggacaaggagacacttggggaaggacttagagccatggaggatcatcgaggacgtccaagtcaaggtgggggctacggagaaggaggtggagcttctggtggaggttatgggcagggtggaggtggtgggggtggtggtggacagggcggtggtagtggatccgggttatgggcaaggtggtggaggaggtggtggtggagggcaaggtggtggaaatggatcgggttatggatccgggtatggttctggatatggtcagggcggtggagtttgcggcggaagctatgggcaaggtggtggtggtggtggtggcggtggaggacaaggtggtggagctcatgctagaggctatggacaaggtggagggggtggtggaggtggtggccaaggaggtggttctagtagtggctcaggctatggatctgggtatggtggcggtgccggtggaaacccatag

SEQ ID NO: 89094 - DNA, 390 bp, Oryza sativa
  unsure (1)..(390): unsure at all n locations
  Clone ID: PAT_MRT4530_87883C.1
cnncccgtntgaggatcggccgagttgaaaanggcganatcagaagtggancangtatnctttaccattgcnanggacatnaagcncanattgaccgaanctgtngctgcaacagntgagcccccaactatggcaaatcactnngcaagaaccatcatcaggcanctgcctcgtcaagatggtcagcctgctgtaacnccngatcancgctgnggtgcactgcacggcttgtcctgttcgcnncttgcntatgacagcanatttnccactcnnanctnccgtnttttcaatgccnagatgtntntgcncccaattgatntctnggtcnttatatcttctcccccgaccaatctggtgttgtgaaaccctaanntgtnttttnttttttnc

SEQ ID NO: 89095 - DNA, 621 bp, Oryza sativa
  Clone ID: PAT_MRT4530_87884C.1
ccaccggcaccgccaccatacccagatccatagcctgagccactactagaaccacctccttggccaccacctccaccaccccctccaccttgtccatagcctctagcatgagctccaccaccttgtcctccaccgccaccaccaccaccaccaccttgcccatagcttccgccgcaaactccaccgccctgaccatatccagaaccatacccggatccataacccgatccatttccaccaccttgccctccaccaccacctcctccaccaccttgcccataacctacaccagacgctccaccacctttaccttagcctgaaccatacccggatccactaccaccgccctgtccaccaccacccccaccacctccaccctgcccataacctccaccagaagctccacctccttctccgtagcccccacctgatgagggtttgatgtccgcatcaccaccataccctgacccataccctgaccccccaccaccaccttcaccccctcccccgaccaccaccttcaccaccaccgccgccacctccctcagttgtagtggcctctccacccccctgccgcccgtggtttcgaatccggcttatggccggttggggtggtcgtta

SEQ ID NO: 89096 - DNA, 129 bp, Oryza sativa
  Clone ID: PAT_MRT4530_87885C.1
catcacattaaaactttcctacacacatgaacttccaactttttcgttacatcgttcactttcaattaaactttcaatttttgggggaactaaacacacccctaagttttcttttccttcgcaggaaaa

SEQ ID NO: 89097 - DNA, 478 bp, Oryza sativa
  unsure (1)..(478): unsure at all n locations
  Clone ID: PAT_MRT4530_87886C.1
cgtaagnncttggnatnncctctagaagcggggccgcccttnnnttttttttntnntttttttnnttttttttnnttttttttnntttttttttttttttnttttttttttttttttttttttaaaaaaccccaaaccctaaaaaaaaaaagggtccttaaattttggaccaaaaggttagtaaaacaccctgggggtcccaaaaaaaactaaaacgggttaaaagggggggacccccaaaaaaaggcaaacccaaaaaaggggggtttaaaccaaaaaaaccctttttttgggttaagggggggtttcaaggccaaaggggagggaaaaagggccttagggggaattggagaaacccaaaatcctgggggttgtggggaaaaaccggccggaaaaaaaagaccccaaatttccggaaagcccaggggggtccccgaaaacccggaaaaagggggagccggcccccaatttttggggg

SEQ ID NO: 89098 - DNA, 522 bp, Oryza sativa
  Clone ID: PAT_MRT4530_87887C.1
tggcacgaggttttcgtttatttctcgtctttaacataacataaccaaataatcatgggtaaagaaaaaattcatattaacattgtcgtcatcggtcacgtcgactctggtaaatcaacatcaactggtcacttgatctacaaatgtggtggtattgacaaacgtaccatcgaaaaattcgaaaaagaagctgctgaaatgggaaaaggttcattcaaatatgcttgggttttggataaattgaaagctgaacgtgaacgtggtattaccatcgatatttcactctggaaattcgaaacacaaaaatattacgttaccatcattgatgctccaggtcaccgtgatttcatcaaaaacatgattactggtacatcacaagctgattgcgccgtcttggtcgttgccgctggtactggtgaattcgaagctggtatctccaaaaacggtcaaacacgtgaacatgctttacttgctttcacactcggtgtcaaacaaatgatcatcgccgtcaacaaaatggac

SEQ ID NO: 89099 - DNA, 545 bp, Oryza sativa
  Clone ID: PAT_MRT4530_87888C.1
ctgaatacatcttgccaattgggtagcaaaaaaaaaaaaaaaaaaaaaaaaaaaaaaaaaaaaaaaaaaaaaaaaaagggcggaacgatgtgaggattccaagcttacccacgcttgcatgcccagacaatgagggggggtctgttttaaggtacccaaccttacattggctggcttgcaacaacgtagttattgtttaggccctgaaattacccttcttggcccgctttttcaacatgccgcttttggcagatcctggggttgcccaaatttattcgccgttcgcccttcccaccttttgcccattgtgaatggccaaaggggccccccctgtaccgcctttttaaacgcttgggatgcgggggttgcgagtggtacgccccttgtactggccaattacgtagggcgggttgggtgggctcgctcaccttgctttctcgccttgccagccccttttccccggttgctttgaaattggtgcattcttttgcggccccgatggagggctttcccgcgcatgctctacatgggggtttctttttggg

SEQ ID NO: 89100 - DNA, 890 bp, Oryza sativa
  Clone ID: PAT_MRT4530_87889C.1
accagcatctcgtattagtgaagatctggtgacagattacatcaagcaagagagatgaccatgtcagcaggcaatagcgcatcatcatactaggatacgtgtattccatgttcagaatccaatccaataatccgaatagtgtacaacccaaccaagtaatctcatacaacctaacgggatagtaaaccccaaccaattacaccgtaactaaggtaatgtgttaacaagaacaatgcactccacgatcacatgctccaccttgaatccaacaagctcaaggaccggatcatcctgttcagcaagctccttttagctgtaagtgcccatgccaatgttggagccaccgtacggggcacccccagcagcatcgcgggacttggagtagctaacgtagtagaattcgctgaggatggctgtgaagaaggtgaaggccgcaccagcagcaaagacacctttgcgcacagtctcgcaggagacggactcgccaacgaacatccccctgtaccgggtgtggtacgcattccggatggatccggccatcaagcatgcctcagcaatgaggaaggtcaaccatgcgaagaggaagaggatgagggcgcaggcgcgggatccgccgggcttgaggccgcggccgcagcagaaacacttgctggcgagcatgacgacggcctgcgcggcggcgaggaggaggagcgcgccgacgccgtagccggtggcgatgtcggagtcgtagacgcagtagtcgtacagcttctccgagtcgggcgtcaccgtcgccttgctgcggcgctgctcggcggcgacggcgaggccgaaggcgatgacgtcgaggaggaggacggaggcgagcacgatgatggacgccattgctgccgctgctgctgcgtgag

SEQ ID NO: 89101 - DNA, 287 bp, Oryza sativa
  unsure (1)..(287): unsure at all n locations
  Clone ID: PAT_MRT4530_8788C.1
tcgagctgatctactagctacctantactcttatcttcttactagctttgcttggggattcgtcaatggggcgaaggcagcgctcgttctagcggtgagcctcctggtggtggccgtggcgagcgcctgcacctactgtccggagccgccgtcgccgaatccgaagccgccggcgccgaggccgccgacgcccggtggaggcgccgggtgnngcccgcgcgacgctctgaagctgcacgtgtgcgccaacgtgctcggccttgtgaaggccaagatcggcgcggtgg

SEQ ID NO: 89102 - DNA, 1026 bp, Oryza sativa
  Clone ID: PAT_MRT4530_87890C.1
tttttttttgcacttggactacaattcctttattaccatcatcatacacaacaaccaatattcccttcaagacatacagatacaggtggatgagcagcattctgatcctatgatcattttaacatatgctcacaaacagctatggacgtatactacaatctgaatataaatcaactatggacaaaagcttgtgaagcagcgcaaaacggaggtaaggtcgcacctttgttacctcggtcactttactatatctttgaggagcatgtgtggaattagatctctgtggcttgagctgctcgcgatcccgctagggctcgttactacgtctggtgtggtttgatattcccaggtttccatcctagttcacgagctctttcttcccacaaagcagtcagtttcctttgttcaaccaatgcttctgatgatttttcccgggcttcttcacatgtatccatacctgaactgcatttgtcagcctccttttgatattgtgaagctaattttttcgcctccagcaattttacatctgcttgctgctgagcttgtgttgcctcttcttctctctgcttcagttcttctatgagtagctccgtgaaactcttctctgtttcttcaccagacgcacggctcttaacatccttgaattgtttggaacagtcttcggggagcgcgagcagcgggcgggcgtcgcagtcgcagtcgcacgcgggacacgcccccgtggagcggccgagcgcctcgctggcgtgccagtagagctgcgggccgacgatgtaggcggcgaggccgagccccagcagcgccaccaccgcggtcaccagagccgggctggggccccacgacgaggaggaggaggttgagccgcccgccatcgccgacgccgcgcgcgcgcgcgaggatggctgctgctggtatacagttgggtgtctcggcggaggggaggcggcggcgcggggaggttaaaggagtaggagtgtggggggagtggagatggaccggacgcggtcggtggaggtgggaagggag

SEQ ID NO: 89103 - DNA, 495 bp, Oryza sativa
  Clone ID: PAT_MRT4530_87891C.1
ctcgtggtaccaaaaccacttgggcaagcagctagctagtctctgtcaaatttagttagctagtacatgctgccatgagaagctttttcattggtcaagccagccatggccagtcaatcacctggggctttcaccaatttgctgctgttcgtagatgcatgaaactgcctaccagcccattgattcagagtttcagacggaatcaacacgtgcaagtgtgatgatccatctttggtgctctctccgaataacgcggttttttgtttggtgaccggagattggagtgtctccttgcattattgcttgacagatttgaatttctgaaggagaaaaataccatggctcgtggcagcaaatatatatgcatggttgtccatgaaaataacttttagcggtttgtctctgttaggcatttcaacaacgtcatctgatgtgtttgtttctgcatattgatcatcatattgtacaacttcaggcctaaaaaaaaaaaaaaaa

SEQ ID NO: 89104 - DNA, 183 bp, Oryza sativa
  Clone ID: PAT_MRT4530_87892C.1
atggtggagacgatgggaggtgagcaggggcttggcctccctcataatttgagcagaaaaatgaaaatagaatttaggattcttgttgtgtcattggagccgatgaaggacccgatgaagagaactagggatgagcatagatggtgccttcaaaatggtgctgcaataaatgttcataattga

SEQ ID NO: 89105 - DNA, 1457 bp, Oryza sativa
  Clone ID: PAT_MRT4530_87893C.1
ccgagcattctcaagtcagccatgaacacttcaccggatgctgcccccacctattgagagtggtttagcgcctacgtggcagtttgacttggtcttgttaggtgacatggcgtattgtcagatcgaacggggatataccccaagaacctgacgaaccctcactctgtgcgtctacttggcaaggggctcgtgctcactgacggcgatgagtggaagcgccaccgcaaggtggttcacccagcctttaacatggacaagctcaagatgatgacgatgaccatgtccgactgctctcggtccatgatgtcggagtgggaatcggagttaggggcgaagggtggtcttgctgagattgagctaagcaggcgtttcgaggagctcactgccaatgtgatctcgcacacagtgtttggtagcagctacaaagaggggaagcaggtcttcctggcacagagggagctccaatttcttgccttctccaccttcctcactgttcaagttccagggtttagcagctaccttccgaccatgaaaaacttcaagacatggtcgctcgacaagaaggtgaggggcatgctcatggacatcatcaagaccaggcacgccaacaaggatgtagttgggtatgggaatgacctacttgggttgctgctggaggcgtgtgcgccggagcacagggagagccacccacaactaagcatggatgagatcatcgacgagtgcaagaccttcttttttgcagggcatgacaccacctcacacttgctcacctagaccatgttcctactgagcacgcacccagattggtaggagaaactaagggaggagattgcaatggagtgtggtgacgagatgcccactggtgacatgctcaacaagctaaagatggtcaacatgttcctcctagagaccctaaggctgtacagccctgtcttactcatacggaggaaggttggcactgatattgagctcggcggcatcaagatgcctgagggtgcactattgatgatcccgatcgcaacaattcaccgtgacaaggaagtgtggggggaggatgcggatgagtttaggccggagaggttcgagaatggggtgtccagggcagcgaagcaccccaacgcgctactctccttctccagcggaccgaggtcatgcatcgggcagaattttgccatgattgaggccaaggctgtcatcaccatgatcctgcagaggttctccttcacgttgtcccctaagtacgtccacacgccaattagtgtgatcacgctaaggcctaagtacgggcttccaatgatccttaggagcctcaaggtaaaaagagatctgtaagatccaaggaatgttttacttacactgcttttttagcaccgctttgttgtacacgagttgcttcctgataatgttatcgtgtaatgtattgatatatatatttcagttatacaaaattgggatgt

SEQ ID NO: 89106 - DNA, 180 bp, Oryza sativa
  Clone ID: PAT_MRT4530_87894C.1
atgcagcctatgcaggcgtacgacgaggcgtgcaaggagcagcactggggcgacgtcgacgccgccgacgtgggcttctccgccggagcggggttcacgggcctactcctcgacggctccttgaaccagatccagaggccggcgggaagagatgcggaagccgacagagagttccagtag

SEQ ID NO: 89107 - DNA, 3042 bp, Oryza sativa
  Clone ID: PAT_MRT4530_87895C.1
atggtcgtctccttcagggtgtcccgtcgcggccgccgcttctaccctccgccgccgcctccgcctcctgcggccgcagcaaccgccgccgatcgcgcggcagcgccacccgaaggctcgcccctgccgccgcctctgccctgggatgtgagtgccctcggctatctgttcctctccatcgttgtttacttgaagaaaagagcaatcgcgatcgtgtggattgggttggatcttgagccgtcttttgcactgaacctgtttccggatggatactcaattagtgacccaggcaagcgtctgttggtttctgcaaagggaatgcttctgtttctgattggtgatgatcctcagaagaggccgtacagcaaggcatctcgagctttgttttctgatattgagcatggctgcttgcctcaagtcatcttgggcgacatgccttgcaaatttagaaatggaactattgtgtgtgaggtgcgggactaccggccctttctgtctaatgctggcgattcttcaggagatgacttcccaatagtgaatagagtttctcttagattgggcactgaacgtgttgtgaaagatctagcttctgttgttaatgcttcatggacttatcacgatcaattgattgccgagtccaccatcctccgtgccctgcaacccagacttaatttggaccctacaccatgccttgaaagacttcagaattctgttaagaagattgatttaggtctaaataaagggaggcagaaaattaaagctacatctattgacaatacttctgccgatcctcctgaaaattgcaaacccaaggaattcatcacctgtgaaggagcagttgtatgcattgaaaatgaagctccagaaggcttgccacgtggaatattgaacggcttatctatggactgtccactcgctctccaaattaagaaggcccaatcagctgcaggatctgatcctgatactgctattcaatactcttctacccttatgaatagctctgtctcgtgtaacattaaacaaagtgcatcctgtactcctgctcctgaccttttgcttcagagtaagcaggcgcagatagcaattttgcaggttgatcatgaaaacgaacaaccacaaaaggagacagttcaactacagaacagaaaggagcattcaaatcttccacgtgaaatacatgactgccaaagctgcaggccttcaaacaaacattcattgttgagctctgaaagtaccaaatgccactttcagaagtcaataaggtcttcaaacaacaaagggcttaatttggtatctccaaaccaacggcctgtaaaggttaatttagatcagacaacaggcagcaaggacatgagagtacagcaacaaaagtccttgtcagcgttcacagcggactgttcacatccttcctcagagacaaataattcatgtgttgaaaaaatccccaaagaggttaattattcaacagtaaggttaaaagacagaaatctgccctcaactgttggtccagacaattattgtgtagaagagctcaaagacagaacaacgccctctgtaatctcatgcagtgcaagttccagaaaggctcccagtaaacctcctaaggttgttacagagccccaaccttcttcaaagaggaaggtcttaggagtttatacttatttgtatcaggagatcgattcaaatgagaaaaagcagaaaaaagctgatacacagagcaatacaccttgtgagaatgtaagtccaggagaaccagatgttactgatggcattagcagtgaactgggtatttctccagatattgagtcatgtattggagacccttcatataccattgaacctgatattgaaaagattctatctgaggtcatcctgacttcaaagaggcatggactgaatgaaagggctgctaaacttgatggttcagaaagatcatggccattgccaccatccaaattctttctgtctgagaatactgcagacattgcatatacccagaatgaaatcatgtcaaactatccaactgggagaactatgaatactcggaagattagaaggcttagttttcaccctgtacagtatttatgtagaggtgttgttgatgaatgccattacacacttcgtctccttgaatccgaagcaccggatgatcatcaagtagcggtggaaacgatctatggggatgaacatgtatacatttctactcttcctacttctcaccatgcaaacaagcttgtggatcaattcattttgctgatgagaagggatggctacacactttgcaatgatattagagagcaatacgaagacgcccctcagctaggttatctaactggaggatatccacaataccccattgcaagaactatggtgattaatggaagcaacaatatagattgcaccttccataatgggccgccacatgtacatgcaaatactcagcaacagtggatgcaggcacaacagtgtccaaccctgccaagtgttcagacaaatttctggaatccatatcatccaggccagcagcattataccggcggaatcctcaaccatgggggattttatgcaaatagagcgttctcaatggatatggaccagcatcaacatgtccaacaacgtcaaggagttggatggttcccaaatggagtgttctcaatggatctagaccaatatcaacctgttcggcaacgtcaaggagtaggacagtgctggcattgcaggcatgatataccagggttcttcagtgagaggagttatgccacccacgcgagcacaggcagctacaaccagtggcgccagatatcaacacctctgggtggcaaggtgtaccaatgggatctgccagcttttgataggcgagtctgcggttgtcctccagtgaattatgctgggagcagcacaccattgtcgacgctgcatccggttggaagtccaccgatgagctctcaatcgtttggctccaatgatggcagcctcacaagcacgccggttcagctccaggtgcctctcggttaccagtgcatgtcccatgggatgtggtga

SEQ ID NO: 89108 - DNA, 512 bp, Oryza sativa
  Clone ID: PAT_MRT4530_87896C.1
tgaggaattcggcacgaggaggtatctcggcgtatggcgccacagcgtgggcgtttcgtctcgtggagtgcaggcggctgctgctgctggcaacgacacagtcacacacacccacagagacatagcagtagctgcagcctgcgaggtggcagctgcacctgtgtttttctattcgtttctaaacttcgatgcactccagtttttgggaaaaagaaggaaggaagccttttgctcccatcccgacgccgctcgcaccatagtttaattctttttccaccctttttctgactctccccactctcacgatgccatcaacttgacatcatcacttctcctctgagtttctgacttccgagtcctcatcttcagagtacaactgctagtagtagaaggtactctctaggtcccaaaaaaaacacttaatctagtatttgaattagacgttttctagtacaacgtatctggatatactcctgtccaaactcgttgtactagaaaacgttccatccaat

SEQ ID NO: 89109 - DNA, 480 bp, Oryza sativa
  Clone ID: PAT_MRT4530_87897C.1
cccacgcgtccgagataattgaccaggtacaaaactatgtggttaaaggagtggacgtgaagaaccaaaattcagtagtgatggccagtcaagtagatgtagcagccttttctggccggtgcctgcatgcatatgcaattgacattgctgcctgagatagactgaaggtttcagagggctaatggattttgaggcataacaaattggactctgctttttatggtagccttcttctagatcatggaagctggttgctttgaaaattgtcggatggcggtgatccaacagagatgcagagtaacagaaatctactctgccgtagactgtataatctcccgtgtttgttgaactaactaccatatctcaaatctgaatgtataatctgccagtgtcaactgcgtgcttccatttcaacccgaggtgtaacatgtgcacacaaaagctcttctctgaattccgcaaataaactctgcttaattt

SEQ ID NO: 89110 - DNA, 464 bp, Oryza sativa
  Clone ID: PAT_MRT4530_87898C.1
aaagtcaattctatgctatgctgattatcgatccgtacaaacaaatagcaaatacaatgtcctaaaacctttataaaatctataaattaatcatgggcttgatcttgagacatgtaaattctatatttgttctagctcgtctgtttgcaaatttccatatatttgggagttcagtggtcatctgtacaattattgtgttctcaatcattggccgttgtttctactaactcactgatccttttttccgccaatattgcctgtgcctcccactttgttctcatgataatgaaaaatagtatggccatctggagtaatgttcctgtcaacatgcccatccatatccccaatgcaccaagctttagcttgaagccaaagagaaccccaaatgggatccctaccaagtagtagcaaccgatgttcacaaatgccaccagaatttgcaacctgccctactgcccacctga

SEQ ID NO: 89111 - DNA, 504 bp, Oryza sativa
  Clone ID: PAT_MRT4530_87899C.1
tcgtaaaaaaaaaaaaaaaaaaaaaaaaaaaaaaaaaagaaaaaaaaaaaaaaaaaaaaaaaaaaatgaaaaaaaaaataaataaaaaaaaaaaaaaaaaaaaaataaaaaaaaaataaataaaaaaaaaatgaccgaatttatttaaaaaaaaaatgggggggggtggcttttgggggtacccagctttttggggggggggggggagcctatttttttttttttgggggcccgtaaataggtttggggggcccgctttttccacctgttggttgggtaaaccgcggggttggcccaattttttttgggtggcattaattgcgttttttgcggggggtgttttcagggagggggccccacttgtttgctttttaaagcggggtccttccggtttgttttttgggttcccccctttttttgcccctttttgcggggggttttttgggttttcccccccgtggccttttcttttggcggggcccttgcccccggttctttgggttt

SEQ ID NO: 89112 - DNA, 4911 bp, Oryza sativa
  Clone ID: PAT_MRT4530_8789C.1
atgccgcgctacaagcctgagtacttgtttggttttgagggatttgtccaggagttgcgtaccataggatttgggactgcccctttgtatgcccagattcctcatgatcgtcacgaagagaagtgccgagtcaaagtcaccttgaacagtaatagtgaagatatcccatcagtgatgttcgaagctggaggaggaaactacatccatgcatgtcaggaggtggcaaggatcgccataggagagctccgcgatcgctacagtgatcagttggctgacactgagtatcgctaccatcctcgccaaccccagggaagtgaccgtggcagctaccttgagactgaggggattgagaatgatgctaccacaaggcatttggttgagatgctgtgggctatggatgaaacccgcgcggaggttgtgctagcagctcaagatcgtgaagaccggaatcgtggtaagatttgcaggctagaggacaaggtggatcgtttgaagaaggaactagccgcgttgaagggagaagcaccaccgcagaaggccaggattcatcttaccgcaaggaagagagctctatttgtccctcgctaccaattggcgccaaaggtccgtgtggtggagaaagaagttaccccagccctagcggatcctccggtcgtcaataacaagttagcagaatttattcgtgtgaggccgcccactttctctagcaccactaatcctgttgaagctggcgattggttgcatgccatagagaagaagttggatttgcttcagtgcactgatcaggagaaggtctcatttgcatcacatcagctgcatggccctgcctctaagtggtgggatcacttccgccttaacagaactactgctgaacctatcacttggcttgaattcaccgctgctttccggaagacgcatataccatcgggagcggtgtctctcaagaagaaggaattcaggtcgctcacccagggatctcgcacggtcaccgagtatctgcacgagttcaaccgtctggctcgttatgctccggaagatgtgcgcactgatgaagagcgccaggagaggttcttggaaggacttaatgatgagctttcttacccactcatgactggggattatcatgatttccagaagttagtggataaggctattcgccaggaggacaagtacaaccgcatggagcagaagaaacgccggattgctcacttcaaggcacaacaggggaatagtcagaggccgcgtcttactttaggaccccagtccatgccacagggaggttcttcgtctgttgttcgtccgcagtgtcagttcttcaacaacaatgctggcaacaacatccgcaatcaagctccacgccctgttgcagctccaacacagcaacagcctgccaagagggagcaaggtagcaagcccggggtgtgcttcaactgtggagacccaggacattactctgacaagtgttcgaagccccgacgcgtgaaggttgtcccggcccagagcaactctaccgcaccagcatcaaaggctcgtgtcaatcatgttgctgctacagaagctcaaggtgctccagatgtgattttgggtacgttccttgtcaactcagttcctacaacagtgcttttcgattctggtgctacacattcatttttatctatgagttttgcgggaaatcatgggatggaagtagaagatcttatacgtcctttgatggttagtaccccaagtaatcaagcactctctttgcaacgtagcccctctgtcagaatagaaattcaagaagtaccatttctggccaatcttatcctgttagaatccaaagaccttgatgtcatcctagggatggactggttagccagatataaaggtgtgatagactgtgccaacagaaaagtaactctcaccagcaatgatggtcgagttgtaactgttcatgcattgtcttctgagtctttaaggtcaagactgaaccaaatgactttggaagagattcctatagtccgggagtatcccgatgtgttcccagacgatttacctggtatgccgcctaaaagggatatagagttcagaatagatttggtaccaggaacaactccgatccataagagaccttatagaatggcggccaatgaattagcagaagtcaagagacaagtagatgatttgcttcagaaaggatacatcagaccgagttcatctccatggggagctccggttatttttgtggaaaagaaagatcatacccagaggatgtgtgtggactatcgtgcactaaatgatgtgactatcaagaataagtacccgctgcccagaattgatgatttgtttgatcagcttaaaggtgccaccgttttctccaagatagatcttcgatcagggtatcaccagttgagaatcaaagaggaagatatacctaagacagcttttatcactaggtatgggttgtttgaatgtactgttatgtcttttggacttaccaatgcccccgctttcttcatgaacttgatgaataaggtgtttatggaatacctagacaagttcgtggtggtctttattgatgacattcttatctactctcgaacaaaagaagagcatgaagaacatcttcgccttgcactagagaagctacgagaacatcaactgtatgccaagtttagcaaatgtgaattttggttgtttgaagtgaagttccttggtcacgtcatctcagccggaggagttgccgtcgatcctagtaatgtggaatccgtaaccaactggaaacaaccaaagacagtttcagagattcgtagtttcctaggcctcgcaggatattatcggaggtttatagagaatttttccaagattgctaagcccatgacacgattacttcaaaaggatgtaaagtacaagtggtcagaagaatgtgagcagagttttcaagagttgaagaatcgcttaatatcagctcctattttgattttgcctgatccaaagaagggttttcaagtgtattgtgatgcatccaagcttgggttaggttgtgttctgatgcaagatgggaaggtggttgcctatgcatctcgtcagttacgtccgcatgagaagaacaaccctactcatgatcttgagttagctgcagttgttcatgcgttgaagatttggcgtcattatcttttcggtactcgtacagaggtatacaccgatcacaagagtttaaagtacatctttactcagccagatctgaacatgagacaacggagatggttggaattaattaaggattatgacatgggaattcattatcacccgggaaaggctaatgttgtagcaaatgctcttagcaggaaaggctattgcaatgctacggaaggacgacagttgccattggagttatgcaaggaatttgaaagattaaatttgggaattgtcagtagaggttttgttgcagccttagaagcaaagcccactctaattgatcaagttagagaagcccaaattaatgatcctgatattcaagaaatcaagaagaatatgagaagaggaaaagctatcagtttcttggaagatgagcaaggaactgtatggttgggcaagagaatctgcgtccccgacaacaaagatttaaaagatgcaattctgaaagaagctcatgatactttatactccattcaccctggtagtaccaagatgtaccaggatctcaaggaaagattttggtgggcaagtatgaagcgtgaaatcgcagaatatgtagcagtatgtgatgtttgtcagcgagtcaaggcagaacatcagaaacccgcaggtttgctgcagcctttgaagattcctgaatggaagtgggaggaaatcggtatggatttcatcactggtctacccagaacatcattaggccatgactctatttgggtgatagtcgacagacttaccaaagtggctcatttcatcccagtaaagacaacctattccggaagtcggttggcggaattgtatatggcaaggattgtgtgtttgcacggcgtccctaagaaaatagtgtctgatcgaggcagtcagtttacttcaaagttttggaagaagcttcaggaagagatgggttctaagctgaactttagtactgcttatcatccgcagacagacggacaaaccgaaagggtaaaccagattttggaagacatgttgagagcttgtgctttagacttcggtggaagttgggataagaatttgccttacgccgaattctcgtacaacaacagttatcaagctagtcttcagatggctccttacgaagcactgtatggtcggaagtgccgcactccacttttgtgggatcaaacgggagaacgtcaggttttcgggacggatatcctgagggaagcagaagaaaaggtgaaaatcattcaagaaagattgcgtgtggcccagtctcgtcataagagttatgccgacaatcgtcgtagagatctaagttttgacgaaggagattatgtgtaccttcgtgtcacgcctcttcgaggagttcatcgttttcacaccaatggaaaattggcaccgcgttttgtgggaccttataagattgtcagtagaagaggagaggttgcttatcagttggagttacctcaatctttggcaggaatccataatgtgttccatgtgtcgcaattgaaaaagtgtttaagggtacctaccgaagaagctaatcttgaacagatagaagtccaagaggatctgacctatgttgagaaaccaatccgtatcttgaaaatagatgagagaagaaccagaaatcgagttatccatttttgtaaagttcaatggagtaatcactcggaagaagaatcaacttgggaacgagaagatgaattgaagtcagctcatccgcatctgttcgccagttcttccgaatctcgaggacgagattctgtttaa

SEQ ID NO: 89113 - DNA, 1649 bp, Oryza sativa
  Clone ID: PAT_MRT4530_878C.1
ggcacgagtggtgggttgagggcggcggcggcggcggcggagggtgggatggagcagcaggcggcgccgtcgagcagcacgagcacgagcaccaacagcagccggagcacgtccgaccaccacgccgccgccgccgccgccgccgcggcggcggcggcgcaggtggcgcatcagcaccacccgttctactacgccgccgctcagggtggcgcgaataccatgccggcgccggcgtcgttcatggggtcgctggccatagtgcccgctgctgctgctccgggtggtggtggtgggcaggtgcaggcggcggcggctccggtggcgtcgtcggagaagaaagcggtggtggcggcgggggcgggggcgaagcggccgaccaaggaccggcacaccaaggtggaggggcgcgggcggcggatacggatgccggcgctgtgcgcggcgcgggtgttccagctcacgcgggagctcggccacaagacggacggcgagaccatcgagtggctgctgcagcaggcggagccggccatcgtcgccgccaccggcacgggcaccatcccggccaacttctcctccctcgccgtctccctccgctccgccgcctcccactcctcctccccgcgcgccgcgccgttccaccacctccagcagcagcagcagcacgacgtcgccgccatgctcggcttccaccaccaccaccaccagctgctccctcctccgccaccgcaccagcacccggagccgacgccccaagatcccggcgccggcgagttcatgcgtaagcgctacagggaagccgacgacctgttcaaggacacctcacgccaagaccccgtcgatggcgccaccggcgaggccgagcagaaggcccgtgcggccgcagcagcggcggcgccgccgccaaccgccccgtcagcaatgtgggccgtggggccgaacaccaccggagccaccgccgccttctggatgcagccggcatgggcattcccccacggcgccggcgccggcgccgccggtaacacggtgcaggcgccactccagttcatgtcgcgcagcagctttcccacggcgatgaacgtcaccatggcggacaacaacaacagcagcaacaacaacctcggcatgctcgccgcgctcaacgccggcggcggcggccgctccggcgagcaccagcaccagcatgaggggcagtcgccggcggagatggatcatcagcgccgcgccaacggcggcggcggcgaggctggcggcgcggcgagctcgcagtgagctgagctaagctaagctaagctagctaagctgtgatgatgggttaatgggaggtagctgtgcaaatgcaaatgcaaatggcatatgatgatttgattagagagagtacagattagggtgtttggaactgcttgcagctgctctcgttaattaatcatctcaattcatcaatcaatggattgtttgcttctttagtttaccccccttattttttacctgggattattttagtttgctcttttggattaattaattaatcaatgtaaggtgtttgtgatgatgatgatgattagtagtgggtccaattggatcgatcttgagaagcctagctgagtgattaatttaatatgtttcttgttgtcaaaaaaaaaaaaaaaaaa

SEQ ID NO: 89114 - DNA, 1437 bp, Oryza sativa
  Clone ID: PAT_MRT4530_87900C.1
atggaggggcaaggtcttgtgagccggagctggcaggagtcgaagctgctgtggcgcgtcgccttcccggccgtgctcgtcgagttgctccagttctccatcggcttcgtcacggccagcttcgtcggccacctcggcgtggtcgagctcgccgcggtcaccgccgtcgagagcatcctggagggcttcgcctacggcgtcctggcggtgggcgccgggcggctggacgtgctcggcctctacgtgcagcagtcgtggatcgtgtgcggcgccaccgcggtggcgctcacgccgacgtacgccttcgccgagccgatcctgcggtcgctcctccggcagccggccgacgtcgccgccgtggcggggccgtacgcgctgtggtcgctgccgcggctgttcgcgcacgccgccaacttcccgctccagaagttcttccagacgcagagcagggtctgggcgctcgccgccatctccgccgcggtgctcgccgtgcacgccgcgctcacctacgccgccgtggtcaggctccggtacggcctgcgcggtgcggccgtcgccggcaacctgtcctactggctcatcgacgccgcgcagttcgtctaccttgtctccggccgcttcccggacgcgtggaaggggttcaccatgacggcgttcagcaacctcgccgcgttcgtcaagctgtcacttgtgtcggccatcatgatctgcttggagttttggtactacgctgcactactcattcttgtgggtctccttaagaatgccagactccagcttgatatcatgtcaatttgcatcaattaccagttctggaccatgatggttgcgatgggcttcagcgaagcaatcagcgtcagagtatcaaatgagctcggtgcgagaagaccaaaggaggcaaagttctcagtggcagtggcatcattaacatcggccatgattggtgccattttcatgtcaatcttcttcatttggagaacaagcttgccaagcctcttcagcgacgacaaggaggtggtagacggagctgcaagattggggtatctacttgctgtcaccgtcttttttggcaatatcgggcctgtgctttcaggtgtggcagtaggagcaggttggcaaattctggtggcatttgtgaacatcggttgctactacttggtagggatcccatttggggttctctttggcttcaagctaaagcttggtgcattggggatatggatgggcatgttgacaggaacattactccagatggccatactatttttcattatcatgagaacaaagtgggaggcacaggtaccatacttaataaatgaaagtttatttgtttacatggaaattagcttcatatggattaatgaaggaagattattgcaggcaatattggcggaaaaaaggatcagtgagttaggagaaacaacggccaatgattga

SEQ ID NO: 89115 - DNA, 240 bp, Oryza sativa
  Clone ID: PAT_MRT4530_87901C.1
atggcgacggcggcagaggtgacagactcaggaggcaaatctgacaatgctggcctcgagaaggacggatccgccactctgggccctggaaaggcgacgatgactagggtgtcggcgctggcgaacttgagggcagcagatccggcagcgctgccctcggccctgggagaggtgatggcgatggcgggcggcgatgggcggcttaatgttccttatgcgaaaatcctgtttcgcacgtga

SEQ ID NO: 89116 - DNA, 860 bp, Oryza sativa
  Clone ID: PAT_MRT4530_87902C.1
ttgcacgggctattattacatctatctatatctattacctcagcccatctccctctctaaccgcccaagtcggcctagccagcccagccgagccgccaccctctccactcctctgtgggcgcgcatggcgcatgcgagcgccacccgttcaaccgcccggctacaacgacttctgcaaccaatcgtcatggagcacatggctatgccatcaagcttcgggttgctactgcatcgtccccttgggccgcagtgccgccgtccatggtccacctccactagttgttgcaatgctgagaggcgttctcctcagcatggcctcaccgccgatgagttcacgccgctgcatcgacataagagatgcagctgtgttgttccttcggaccacagcctcgtccctctcgtcgtcttcatcgccgttcgcgtttcgatgccctcgtcgtctgcactggtcatcgtcagccactcgggctacctctacatggccaccgacgttgctgtccaggctgttggtcccgttacttcgcctttgtcttcgtccagcatgtctcatcaccagcatcgccgtatcttcctcgattacacttcgctcttctccggcaactgagtgctgctacgacaattctctctctacactgtcttgagttgtccgagggtctggcaaacccggtatgacgtctcgtcctttacggttcgactatatcggatcttcggcgtcatctttctcaacgattgccatgattgtgtcaccgtcttcatctctagcgcgtcctcgtgcaccttggtccacgacgccctcccgtgcgtctatgactcctccttggtgtcccatacgcgcctcgcggctcggctactataacacc

SEQ ID NO: 89117 - DNA, 531 bp, Oryza sativa
  Clone ID: PAT_MRT4530_87903C.1
gggttttgtgatgcacacagcacacattcagatttgaagattgagagatgcttcttattggcagcttgttcagaaagatgactaagcggtttgggataaaatcagctgattgggaaccattagcaggatgataagcatgactggtggtaccaatgaaaagggttgaaatcctttgcattgttcatttgttgtggagcaagagtggccgcagttgcttatcacacaggatgatggaggtgtttgtgtgaagcttattgctgaagctggattgtttttgacctgtgtttctaaaagaaaagggaaaagaagaagctgtggattgaggccggagcagcagagatattacaatcgacatagataaataagatgtaatactaatttagcccaggtggtttgtgtgtggagatgcaatccattgtagtaacagcctaacttgtacattcttgccatctttttcttattaattgaatgaatgaatcgcagacctcctgcgttttcatcaataattgaaatgacttctgcttcctccag

SEQ ID NO: 89118 - DNA, 713 bp, Oryza sativa
  Clone ID: PAT_MRT4530_87904C.1
tagactgggtaccattgcatgcttggttcgactctgactactcgactgactggatgtcattaaaattagttgttgtcatgtaatattgtaaagcttttatcaaagctgcaactttcacatgactttcaagacaataatgagcaaacaaaggtggatcctcccggtggccctgctggagtaccgacaagttcgcacgccctgcgaatggcagctctcagtgagttgcagaacagtgttaagagctgatacccttttcattttccaaacaaggtgagaactttgatccatgtggatgtgcttctatcaggagcagctgacagtattgcatgcagtgatcttgctaaggaagttggagatgggaaacatcgtgtgatggccagccttgatgtaagaatgcaaatcagtcttactccgtaccatatctgtgtggagtgtgcacaccggaagcatagtcattttttgaatggtcgattgcttcttccacagtaaagtctataataccagtgtgcaggtgtttttttccctttctttcagtgtgaaggtgtttttttacccctttctttcgttcattcattctttttctttttccttgttgagacggtatcctggagcactttgtaatactctaatgtgcttcggaaagtagaatataagttgtgcttatgggcgggccaaaatgctttggccgttagttgcatgacagcctttccaac

SEQ ID NO: 89119 - DNA, 428 bp, Oryza sativa
  Clone ID: PAT_MRT4530_87905C.1
gccagcaatggaccaaaattttcatttcaaggaaggaaaaaaggcttccccgattggaatggacaatttcatcgaattcgcactttgatgatcccaatgaacaattggtttacaaatgaatagaaccaccctttagttacaaacatttttttgcaaaatttggaacaaaaacacaaatccgagccttattactccaagcaaatttgttttaattttcccattaaatttacgggcacccccgcccccccacttgttcgtttttccctaaactcggttgtcaaggcatgggcagcatttggccaaaaagctttattttttcttcccccccggaggtttcaaccgggtctttttcggttttgccggaccccccacaaaattttcaccagggtttttccctttggtagcaagcccttttttgttggccccct

SEQ ID NO: 89120 - DNA, 1521 bp, Oryza sativa
  unsure (1)..(1521): unsure at all n locations
  Clone ID: PAT_MRT4530_87906C.1
atgaggaagtgtccatagtacaaattacacacaggcatcttgatatttagaggtctctaatagcagtaagtacatatatagatgtttcttcatattaggaggttccatgattaccatgtaaggcctagaactaatacaggttatcttgacagtgatcaacctggttggtggcagcaaaagaatggctgcaacatagccatgagtattgctatgttctttatagaacatcgaaggtggcttccaggcgagttgttttgttgaaatggaaggtgcatagtgattgtaggtatatgtgattgcgggttgcaaattttgcccatactttcttcaggttgcatcgatcatccgttgacatctggagcatcatattctttgaaacaccacctgccatttgaactccaatgctgatggtttccttgccgtccatcaatggctttaagtagtctttagaaaattctttcgtaaagtaaactctatcctgcttcatgaatgtgttattcacagcaacagcatagaatttgcttgaacggtctaggcactcaagatcttcgatatactttttcaagtcagctgttggatcaacattctttgcacagaaacacagcttaagccgtacgcttagtgttgcctgaagaaatattaagttatgtctcgaaatggggcgccgttcttnaaacgcccgatccatttggactccattcctgctatcttcacaattggtttgattccttatgagtaagctttcatgtncactgaaagtacctgagcaatggcattaatatgacacatanactgttgcaagcttcagttatgatgtcagtaatagaaggaatgaaccttcaggatcagggctttcaggatgagcgaggaaaaacaccgtctaggaaaccttgttcaagcactccttaatctttaccaaacagaaatttagtagaatcagccaaaaatctccttgattgtgcagtaaacaatagcaattggcatggtgtccagtcagctttgcttcgacaatctgaactttttttttccgcctgcagattggtgtattctcaaatgatcctacaggtaaatcacaggaggcctctcatttctaggtcgtcggcgacgcgggcgcgggtgttccagaggtggcacggaggagattggtggggtggccctcgctggcgacgcggatgggagagatcggcgtgggcggagcagattggtgagggagtaccgacggtggcacggaggagatcggcacggtcggagcaaatcggtggagagatcggctcgggcgaaggagatcggaggacgacgaccctggcaactcctgttcagccgtggtggaagacggcgatggcggcgacgaggacggcgggggcgatcgatggcggcggcagtgggggagcgatctggtggaggacggcgtgggcggcggggaggatcgatggcggcggcagcgcgggacggtgggggaggacggtgggacggcggggaggaacagctagtcgaggaggacggcgagggcgagcgggcgag

SEQ ID NO: 89121 - DNA, 401 bp, Oryza sativa
  Clone ID: PAT_MRT4530_87907C.1
cattgtttggtccgtgcatgcttgtggaacggtttgatgatcaaaagcaaacactttgcttggttaagcgataagaaaaacaaacgggccacatatgcgctgcggtactatacatatatgcacacatgaagcacaaagaaaaaccattacaggctagtaggccggacatactaacccatctaacatttgtaaaagttggaccaaatgagtatatgaagcacccctgatcgaatcactgtcgggcacacacttaaaaaacacacttaattacctacttctgacaacacaggtacacaaataaagctgcgatcacatgaaatggagacttaggcacgtctaataaacataattcgtgactatacgtacagcgctggaagagttcacacgaacctgcagggata

SEQ ID NO: 89122 - DNA, 369 bp, Oryza sativa
  Clone ID: PAT_MRT4530_87908C.1
ggccgcccactaactagggtatttttaataagcagcaatacatcatgatgcggactttgaatttggataattcgctacaaaatccccggagcttcctttgctttgatgggctcccactacatgccttggttggatgagccacaattcagggtccattcacatatgtgggctcctagaattttgaactaaaaatttcggatgagatctcggtgagattaggcaaatatcctcatcaaaggctacctagacctcaatctaacttataatgtaccatggcataacatgttcacttgcctaagccctaatattattcttattcaatctaatttccccttaaaagtgcctagattttacataacaaatctgtta

SEQ ID NO: 89123 - DNA, 312 bp, Oryza sativa
  Clone ID: PAT_MRT4530_87909C.1
atggggaggataaagagtagtagtgggcgatgcagcacggcgaggctggaggcggtcgccgtcctcgtcgtcgtcttcggcgtcgcgtcgtcgtcgctgcgaggatgcattgcgcagcagagcggaggagggctaaccaggggcagcttccccgaggggttcgtcttcggcaccgcctccgccgcgtaccaggcggttttggccgtggtccgtggaaaattccgcggaaacgatcggaaccacctccaccaccagcagcggttcacgtgccgcgtccgcttgcgaggagaagacgagaacgcatggggggac

SEQ ID NO: 89124 - DNA, 1477 bp, Oryza sativa
  Clone ID: PAT_MRT4530_8790C.1
aggtccaaggtttgaattcagcggtgccaaaagattcagataaacaggtgaagctctgagccgacaaaatgcagcaacagataggagtagttaccaacttaccatagttcaactaaaatttatagcccgaatatgggacaaaactgctagaacactttatctaaccaaagcaaaagaacaaaacaaaaaaactctagcactgaaaatgacaggagcaagtacttctgtcaaagaagcaccagactgcgatcaaatcttgcttcctacacaatactaatcctgaaagctaacttctcactttggatggaagcaacattgcttcattatttcagcgggaacagaagttcctattcaagttgaatccagaaacatcaacggttcacacaacatgcataggtgcttcaggattctatgcctgcaaatgagctaaacagcccacctcaatgatctattatccactggtggttgactgaactgttttcaaaatctctcgccaaatctgaagaaaactgttccagtaccagcattgtgatctacgatgtactctccccttaccaagccaagcttgacgccaagaccatatgatgacccatgaccaacccgtcggaagaactctgtggggttccctttcacatccttggaactgccaaggtcagtgccatgttcaacaaatccatacacatatgtgttcctcacaggaatacgcaactcactcgcaacctcaagaacattcctggaagcacccagttcacccataccatagcccctaactgagtaaggtcctccaagtgtaaatgcatcatagcttggcagatctcctacacaacctgcataatgaccatgaagaaccaaaacagctggaagtggcttgccagcacctttctcctgcttgtttaaattaacaaactttgtcaaagtaagttggtgacggttgaagaatgggtttttgcttccaatgccaagaccttgatccaactggaaaatacatctgtcgccaataactgcaccatttacaaattctgtattgtctctagttatatttgcttgcagaaaagccatccgatctatgccagtaccactgagggttgtgggaggtccatccatactcaggccaccactaggcattgctcgagaaccatgagtgcagatgctgttggtttcatcacgcgttgtaatctcctctaccacaaggccatatgtgaatttgctctgacgtgtgaagctctctgttatgttggctttgaatccaactctgtcaacccaaacaggtggagcttcatccatattggggccagcaacaaagacaggactcaatttcctggtattgaagcagctagttttgaaggtgcggtttttattagggtcatccacaccatccagataaggattatcacctgtagctaaatgagagatcatcttaggttgagcaggctggtggatgtagcagtaccaaatcacgcgtaggagaacgcgcggg

SEQ ID NO: 89125 - DNA, 2502 bp, Oryza sativa
  Clone ID: PAT_MRT4530_87910C.1
atggcaaaagatgagtccatgatggtagctgccacttacttctggtccacagccatgaataccttccttttctctcaaggaccgatgactccaactcttttggatgttataatgattactggcctagatgtgacctcatcggctaacctgaccatcttgaatatccaatccacccaagagttcaaaatcagaagcataggcggttggtcaggctatgttgccaagaacatgggtactaggccgatctttgcaagggagcatgcagctttcctcatgatgtggcttgagaagttcttttttcatggtccaagttgtggtcctactgcaaactggcaacatgtagacaagaaacaatttccccttggaaagtatctgctaggctatctgtaccaaactctgaacactgccataaccaagatggcctctggagtatcaatcggcacagggggtcctttggagaagcggcatcggttagcattgcatccaagctatcggctgaacccttcagagagtggttcaacaacttttacgatgggtttcccaaaaacactagaatttagtttgcatacgaaggacatggcacttacaacagaatattctcctcctcatcatagcaacagcggtgtagagatccaatatgccccagggctactgctcaatggtagtggactatctcctccggtcatcggctacaatgcccccaagacttcaacactgctgcatggcatgccccgtgtgccaatagcccctgatgctggcagaaaaaagagagcaaaatcggctgctgcaccatcggctgcaaagaagaaacccaagaagcaaaagaccactgccgatgaattgccagccatagattcggatgtagcagaattcctgaagggtgaaacaatggcaaaacatgtggatgaagcggctgaacatgtcagtgaaacaagggaacaaactcctccagccgatccacctgctcctcaaagaacgccatcacctccacctattcgtcctccaaccccaatttccaaatctagcgagccaactccatcggttgcaggcggtcaccatgtggaggaaaaagaagaagtggcagcaccagctcatgctgtcctgcttaaaggctctctggaaaccttggttgcaagctatggatccatccgagacagacacaatgaaatccatgacaagatcccggatgagctagccgatgcccttactccagcagccaaccttgagcagcatcggcttaaacttgaaaaagcccaaaggaggattgccgatcggcgtgaaagaagagatcttgaggcaaccatccaggccaacagggtttctatgaatgaagagaaggccaagctcgatgaattggaggctggtccagattcaactcaaactatcattgatcagcttaatgctcaaaaaatagaactcctggctgagttagagcagtgcaatgcacaaatcgcccttgaacagcaaaagcttgcagacttgccaaaagccattgaggatcagaagtcaaagttgaaggcatctagcaagcacttggccgatctaaccaaatctcgaaagccgtacagcaagtgtttgccaaggcatcgatacatccaacctccattggggtgcttggttgagtcggtgtatgtcacctttccgcttgctttggattgtgcaaggggaaacgagatggtcatgctcaacatctacttcttcaccatcaatgagatatatcgtcttcttctctctttgcatataagtgttgagagcaatattttaaagaacccaagggagaaacaatctatgcttgtgcctcctattactgacattttgcagggagctcagaacattcaccatgaggagaagagcaatatgatcgagatgccatctccatcgctcacgaaggaagaagagaagactgatgcacctacattatctgaagagggcatagaaggtaaattaaatggtgttgatattactcaagagaaacatgttattgctaatcacactacttcgagtttctctggttttgattggatgaaacatgttattttgaatggactatgtgaagagcaccatatggaaaaaccgaggatggttttccgtgaagaaggggaggatgatgtgaccatggctactatggatacatccgttgctcacatcatggatgaacaacaagatatcaagtgcaagtcctccaagtactggaatccgattcggccacgtgctacactgctgacttcaaacggccgccgaatctgcatacaagctccgttttcggcccatgagtgcttgatagaaagctctcagagtcctctttccaacggatctagcctcatcaccaaattccatcctggtcaaccgcagatgaagaaacaagctgctgcatcacctgtcatgggcctttgggcttgtaactatttttgggaccccggcccatgtagggcccatgtggggaataaggttgatctgcaccggcaagatcaacaacccacggagaggtgtatcgatcgctaa

SEQ ID NO: 89126 - DNA, 585 bp, Oryza sativa
  Clone ID: PAT_MRT4530_87911C.1
atggccgacaaatttctagaagtgactgttgaaaggacgctgcagtacggagcgaatagacacggtggtgtggcatcgccggactatgaccagcgtgtcgtgaaccgcgagcgggatcccacatggacaacaaagtcgcaagcggccaagcgcaacgacggcgacacggcgtggcgcgcggagcggtgcgggcagcggcggccccgtgcggcaggcagcaaatgcgacgcgagagatcgcacgattcccttcccggggaaaatatgtagtgcaaaccacgggacgcggttggtgacgacgtatggccgatttaagcaggagcccagccggaggaaggcgcgggcacgtgcaggcccagggagcaggcatggaaagggcgcgatggcacatagaagcattccaggcatcgtccccatgaaggcgaggcctgatacggcacccgggtggcatttccgcaggggagcgggcatggagagtgcatggtggcacgtggaggcggagccaaaatctggtgccctgacggcgcttctgtctgggtggagcaggggagcggcgcggcaagggtgtggcgacaccacaacctag

SEQ ID NO: 89127 - DNA, 623 bp, Oryza sativa
  Clone ID: PAT_MRT4530_87912C.1
cttgactgggtgtccatattttcgcagcgttaggatgcaacccacttgtaaaaagagggaggtgggggggggggcacaacttggacatgacgatcgtcgccggcggagctgcggccgagccggtacgagtcgcagaagcgccgggactggcagaccttcacgcagtacctcgccgcgcaccgcccgccgctcgagctccgccgctgcagcggcgcccacgtcctcgagttcctccgctacctcgaccgcttcggcaagacgcgcgtccacgagccgccgtgcccgtcgtacggcggccgctcgccgtccgccgccggcccgtgcccgctgcgccaggcgtggggcagcctcgacgcgctcgtcggccgcctccgcgccgcctacgacgagcgtcacggccgcgccggggacaaccccttcgccgcgcgcgccgtgaggctgtacctgcgcgacgtccgcgacgcgcaggccatggcgcgcggcatctcctatcacaagaagaagaagcgcaggggcggcaacatgaacggcgcccgcggcggcggcggcggcggcgcgcgcgcgggcgtgaacgacggcgatgcgacggcgccgccggtggcggtgaccccggggctacctct

SEQ ID NO: 89128 - DNA, 398 bp, Oryza sativa
  Clone ID: PAT_MRT4530_87913C.1
accaccgtatagtgcaactgggcggggagggatcttctgagcaaagtgccccaagacacagggcagttggtaatgatatgaggcattcctcatgccggacatggtcgaagatgaacctgcaattgatagcgatctaccggtggcgtggagttaacgtggccgagcgggagctcactactttgcgaagatcgcagaccacagtaacaggagagctcatgaaatcttgccatatgttgcttcctggtcatacgcctaaagatctcaggctgagatactgaaccgacagatgctgacaacacctccacctagtaagatggtgaacgctgcaccaggggctgttaatttaccgagggagcctacactgccggcacagccttctgcgtgaaggaaccaagatc

SEQ ID NO: 89129 - DNA, 831 bp, Oryza sativa
  Clone ID: PAT_MRT4530_87914C.1
atgtcgtcgtcgtccgctgccgcgctgggctccgacgacggctgctcgccggcggagctgcggccgagccggtacgagtcgcagaagcgccgggactggcagaccttcacgcagtacctcgccgcgcaccgcccgccgctcgagctccgccgctgcagcggcgcccacgtcctcgagttcctccgctacctcgaccgcttcggcaagacgcgcgtccacgagccgccgtgcccgtcgtacggcggccgctcgccgtccgccgccggcccggtcgccgccgccgccgccgcatgccagtgcccgctgcgccaggcgtggggcagcctcgacgcgctcgtcggccgcctccgcgccgcctacgacgagcgtcacggccgcgccggggagcccgacgccgtcgcgggcgccggcgcggtcgccaccgacagtacctcctcctcctccgccgccgccgccaaccccttcgccgcgcgcgccgtgaggctgtacctgcgcgacgtccgcgacgcgcaggccatggcgcgcggcatctcctatcacaagaagaagaagcgcaggggcggcaacatgaacggcgcccgcggcgccgccgccggcggcgcgcgcgcgggcgtgaacgacggcgatgcgacggcgccgccggtggcggtgaccccggggctacctctgccgccgctgccaccgtgcctcaacggtgtgccgttcgagtactgcgacttcgggagcgtcctcgggggagcacatggcgcccatggcggccatggcggcggcggcggcggcttctacggcgccggcgtctacttgccatttctgtacaacaccttcagttag

SEQ ID NO: 89130 - DNA, 3420 bp, Oryza sativa
  Clone ID: PAT_MRT4530_87915C.1
cagatttacagagaggggagagaggaaaagctactagaactgaccgaggcttgtgcaagaaaggcttctgattccttccgtcatcgttgccaaaaggaagcacagctcaggtcctagcatctcttcacatggccaacaacatgtcctgaagaattttaatgctcgtcttcatctggtttcttggttcagacttcagagtgttgaagttccctgcgatctctcggttatcacgaaccaaacctgctgcaagaggattagctcaatgaactaaactgcagagaacatcaggcatatttcaattgcaaagtgtagaggaacaagccaactaacatggggaagagaagtcaaagactggctaggcgtcaggagaacataggctgcatgtggggcctcatcggcatgctctatttccgacgtgacgctaagtttctgttggacaggaagcaaggaagcagaaggcacactttcggtgggctttcaggtaggaggcactcaagaaagaaatccagggactttgaagaaacagatgaatatggggaggataacatagaggaatgcgacacaaggaaacaaaccgtcaaaagactcatggaggacgagctgggtaaggtaaaacaggtgaaaaagattcccaaggaagaggttcaaagaatattagctgacctgggacatgatgtctgtctggaaaaaagttcaatgcagagcaccaaacaaaacagagccaaaagtcacagcacaagcacagccatggcttctccgtctggtttgctggatccaagtggttccaaatccatgaaacaggcagaagaagatgatcttgaactttctttagcagattttgtgggagaactctatgggtaccatgatgattgcaaaaataagagtgaactgtgtccagaattgaagtcacatatccatacaaagcttagtgagttgaagagtgtgccctgtcaacgtgcttatgaggaatctccagactgggggcaaagggagcatttctatgaaaaatatatttgtaacagcagatcttatcaatctaacaaactagtagatgcaccagatatgctaagcccagagaaggaacttttcttgaagacacttcagaaaccgagtccgcatactttggagaaggagaacacccaaaataatcaaaacagacaggtagtgaccaagttagagccaaggaaaattcttgaaaaaggtgaaaatactaagaattcaaaacagcacgaggtagccatcaaaacacatagtaaagagggcaggaatatctttttctggaggaaagataaatcaattatgaagggtacatcagaaggaactaatagtagtaagatggttaacaaaatagttatactaaagccaaatccaagagggatcgatactactgtagctacagcctctacatgtttagatcagcaatcatgcacaattcaatctccaaaataccctgcaacagagagttctaaattttcaattaaggaagtcaggaggagattcaaaattgtgactggtgatactagaagaggaagaccatcagtgtatgaagatgatttacaaagagattcacaaaggatcaatgattcagtctttaaagtcagaaaggattctaaacagtcagataaggacaatttgagacctttgaccagtggtaagcaaaagcaaaggaatgatggactaggtgaaattaacggagacataattacatcaaaggatacatccatcttctatgaagaggcgaagaaacatctgacagacattctagagtataacagtcatacaaccaagcatccaacagttcatacctcaaagtccttgataggaatgctttccctccctcaacgcaacgcatcatcacctaggagtagccccaggttaaaaggccgcattgacctttcacccgaagagataaatatttctgccattcaacaggatgagaggacagaatatgcaaaagaaagagatctgtctgacgaagattcagggagtgttgcatgtggtaatagtgaagtactagatggtaaggctgatcaggatagacactccatgaaacaagaaactgcacaagatggtgacattatgcatattgaagaaatcgacaagccggcttgctccgaaacgatttgcagtgaagggatcaccctaaaagagcagtgtacatgtacctcatcactagaactgattgaaggagccgaacctggcagagagcatgcagggatgttgctgagctatcctgagaatgtggttgagagcctagaacaccaagagccaaaaactcccagatcaagtgcatcacttgaacttatatcacaaatttcacccgaagggaaccacgaaaagcaagagcaacccagccctgtatctgtccttgatccattcttctgtgaagatgttgacagtcctgaccatgaaactatgataaaatgtgagatgcatcaagatatgatgaggccccacataccagatgctatatcagaccaatgggtcttctgggaggacgaggatgccaggctaagttacataaaggcaatgctggagctatcagaactatgcacataccaaaatctagaggtgtggtatctagaagatgaattgatcagcccttgcatgattgaagaactacaccaaggcaatcaaacagatgatctaaagctcccttttgattgtatctgtgaagctataacaataatccaggagacatattttagaaaccctccttgcttatcttttctcatgcacaagatacagccacctccaatgggagagaacctcatccaagaaataaataagcatatcgagagacatctccataatcaatttccaagaacattgaaccagctagttaacatagatctggaagatggcacttggatgaatcttcaattggaaagtgaagagattattgttgatacatgggagttcatactagatgaactattagaagaggtcgctaatgatttgttgatttgaagcttcaatttagtcactgctggtatttttctctgctatttgtagaatggatatagaatgggtagagtcatgactcataagtagaagttatgttgatgacagtaagctgtccgcatgacagaatcaagaggaccagtggaccagacaagtattgtgtgattttactgcttgttagtttgattgatacatcttgggagcctaagaacagtaggatcttcctgacactgaaagatgccagtgcagcataaatgcataatgccacagactcctcatccatgcactgcagatagatttaacagagttggaaggtgatagttctgtacaatattatgcagctgactaaagaatcttatgttgtccttccaatccttgtgtgaattcttgttattgtgtgtataagtgtgtaacagtgtacaggacggtgtgaaaaatcgaaggatacgttttcag

SEQ ID NO: 89131 - DNA, 264 bp, Oryza sativa
  Clone ID: PAT_MRT4530_87916C.1
atgcgccgcaactgctatttcaatgttgttgacaacgatggctggtggttgcttgaagatggcgactggctgaggggacgactagcagtggatggcgatgcactagcggtgccgccagaacccaccaataccatggggctggaggagtgcgttggatcaatgttggagacagaggactggcgcatacaagctagtggctacagtacgatcgacttcatggcttccattaacaagctcgatctcaagctcctttggaccatctag

SEQ ID NO: 89132 - DNA, 311 bp, Oryza sativa
  Clone ID: PAT_MRT4530_87917C.1
tctccgccatctaaatggtcgcctacatgttacatcagtaccagatggtgggtagagcgctcccatcaacctgtgatgaacacaccaagatctaccgaatgaagctttgtgccactaactaaggacgctccaaatccaaattatgatacttgctgaggtacctgaaaaaagcgaaaaatagcaacggacagatgctaggcataaaagatatcttttagcgttaccctacaacaatcaagaactacagcatatggctgacttagcataccagaacacgtttccacatcatgttcaaggaataccgtgacact

SEQ ID NO: 89133 - DNA, 267 bp, Oryza sativa
  Clone ID: PAT_MRT4530_87918C.1
atgacgatcagagtgagggtcgaggtggagagacgagaatcaacggtggcgcgagggggcgccggtggcgtcgatgtgaaggtgttcgacatggccctgtggcgccatgagaggagcggcccgtcggcggcggcaaaaagctccagtcgcctccgtgttcaccaggccgatggatgcaggctagatccaccagccattgacatcggcacagccggattcgccgaccctgagctctggaagctgaacgcaggggttgaggagctctag

SEQ ID NO: 89134 - DNA, 1303 bp, Oryza sativa
  Clone ID: PAT_MRT4530_87919C.1
cgccggccgggagacccaaacgcctcagcacctgtttgccgccgccgccaccgccacttcgccggaaccctaaaccagcccggcctcctcccatggcgccgcgcccgcggcctcccttctcctccgctcgccccgccgccgccgccgtctccgcgccaccaagaagcacaaggccccgccgccgtacgtccaagcccgcccagccgggcggaggcaagcagaagaagaaggagtggagcaaggggaagcagaaggggaaggagggcgaaacggtgcgggtacgacaaggacacctacgactgttctactctgccaaggtgcacaagtaccaccccatcaccccctccgtccactccgagagcctcaggatttctctctgagagactcaggatcaacgggtccctggctcgtaggccatcaatgatttcatgacacggggcctaatccgcatggtctcggttcactcaagccagcagatctacaccagggaaccaacacctaagtgtgagggtgacatgcatctttgtttgccctgaatgtgtcgtggcttgctacctagacagtgtaccttgtgagttgcaagttatgttaatgagctacttgtgatggtcagcatctctatatggctgaaacatttcagagattttgttcaatgggtcgctcgctcgacaggccatcaaggatcttgagtcaagaggcgccatcagggtggtgtctgtacattcgagccagctaatctacaccagagccaccaacgcttgaggcataagctttcactaaaaaaaaagcttgggacataatcagtctagactcgcaaccaaaaaaatcgtattgtacgatctttgttgatcttgagatcctgaagaaaaaaaattgggagttctgattcccatgacaattgcaacatgaaattgcttatcttcactgaaattcaatgttcaacaagctggctattttattaaatggaatgcagtgattgttttaaaaaaaaaaaatacattggctctttctgaaccaaagtgttttgatgccagttacatgtataggaagcgagaatttgaatgcttttggggagctactggtttgctgtgatcaccatgtagtttctgttgtaatttttttctttttttgaaaaaacgtactagtaaatcggtatatgttgtatttttggccatcaatttagctcataagttgtgttccctgcccattatttgtgatctctagtctaaaactcgcaaatggtggcaaagtggaacatacagtctgctttccatttcaatttataatcatcctttttctatat

SEQ ID NO: 89135 - DNA, 2743 bp, Oryza sativa
  Clone ID: PAT_MRT4530_8791C.1
atggcgacgagagctcggccgccattggtgctattgctgtgtctctgcttggcttcttgcttgagctcggccattggtggcgtttcagctgccggcaatggctaccggaccacggcattcctggtggatgaggaagggaggcggctcagagccgagctcgccgcagtcgccggcgccggcggcgggtccacggcggcgtacggcgacgacgtgcagaggctagacgtgtatgccagcctggagacggacagccggctgcacgttcgcatcgccgacgccgacggcccgcgatgggaggtgccccaggacgtcatcccgcgcccctcgccggagttcttcctccagacgtcgcgtccgggccggccgcgtcctctccacggcgacctccgacctcaccttcgccatccacgcctcctccccgttccgcttcgccgtctcccgccgctccactggcgacgtcctcttcgacacctcccccaacctcgtcttcaaggatcgctacctcgagctcacctcctcgctgccgccgcccggccgcgcgtcgctgtacggcctcggcgagcagaccaagcgcacgttccggctccagcggaatgacaccttcacgctctggaactccgacatcgccgccggcaacgtcgacctcaacctctacggctcccaccccttctacatggacgtccggtcaggcggcggcggcgcggcgcacggcgtgctcctccttaacagcaacggcatggacgtcatctatggtggatcgtacgtcacctacaaggtgatcggcggcgtgctggatttctacttcttcgccggcccgtcccctctcgccgtcgtcgaccagtacacccagctcatcggccgccctgcccccatgccgtactggtcattcgggttccaccagtgcaggtgggggtacaagaacgtgtctgacctggagggcgtggtcgccggctatgccaaggcgaggatcccgctggacgtgatgtggacggacatcgactacatggacgccttcaaggacttcacgcttgatccggcgaacttcccggccgacctgctccggccgttcgtcgaccgcctccaccgcaacggccagaagtacgtcgtcatcattgacccagggatcagtgtgaacgcgacgtacgggacgttcatccgagcgatcaaggaggacatcttcttgaagtggaacgggagtaactacctcggtgtggtgtggccggggaacgtctccttcccggacttcctcaacccgcgcgccgccgagttctgggcgcgcgagatcgccgcgttccggcggaccctccccgtcgacgggctgtggatcgacatgaacgagatctccaacttcgtcgacccgccgccgctcaacgcgctcgacgacccgccgtaccgcatcgacaactccggcgtgcgccgccccatcaacaacaagacggtgccggcctccgccgtgcactacggcggcgtggccgagtacgacgcgcacaacctcttcggcttcctcgaggcgcgggccacgcacgacgcgctgctccgtgacaccggccgccgcccgttcgtgctcagccgctccacgttcgtcggctccggcaggtacaccgcgcactggaccggcgacaacttcgcgacgtgggacgacctccgctactccatcaacactatgcttagcttcggcctcttcggcatccccatgatcggtgccgacatctgcggcttcggcggaaacaccaccgaggagctctgcagccgatggattcagcttggcgcgttctacccgttctcgagggaccactcggcgatcggcaccgtccggcgagagctgtacctgtgggaatcggtggcgaggtcggcgaggaaggcgctcggcctgcgctaccggctgctcccctacttgtacacgctcatgtacgaggcgcacaccacgggcgcgcccatcgcgcggccgctcttcttctcctaccccggcgacgtcgcgacgtacggcatcgacaggcagttcctgctcggccgcggcgtgctcgtgtcaccggtgctcgagccgggcgcgaccaccgtcaccgcctacttcccggcgggacggtggttcagcctctacgacttctccctcgccgtcgccacgaagaccggcaagcgcgtgacgctgcccgcgccggcggacacggtgaacgtgcacgtcgccggcgggaacatcctgacgctgcagcagcccgcgctgacgtcgtcgcgcgtgcgccagagcgtggtccacctcctggtcgccctcgccgaggacggcacggccaccggggatctcttcttggacgacggcgagtcgccggagatggtcggggcgcggagcaggtggagccagatcaaattcagcggcgcgaccgagagcggcggcagcgtcgtcagagtgaggtcgcacgtggtgcacgactcgtacgcgccgagccggacgatggtcatcgccaaggtggtgctcatggggcttcgatcgccggtgccgcccaaggggttcgccgtttatgccaacggcgtccaggtgaacgcgagcacggcggtcgacggcggcggcggcgggaacccggagaagggagcgctgggcgtggcgcacgtcggcgggctgtcgctggtcgtcgggcaggagttcgatctcaaggtcgttatgacctattaattaagccaaatagaattcgagcatcatctgaaacaaaaacccgacgaaattgagctgaataaattggcctaaatttgaatt

SEQ ID NO: 89136 - DNA, 525 bp, Oryza sativa
  Clone ID: PAT_MRT4530_87920C.1
atgccacacccgccgccgcgcatcgaaaccctaacgcgaccttgttcaaccccaattccgcccccgagaagcgttattaaccacagccccgacaaacgatcgcacacactgttccccggcgtccccatcgaatcgtcccctcctcccaggctccaacgcggaaccctcaccagccacctcccgcggggaccccacgagcggccacaaaccccaaccgcgcgcgacattgcagcaccatccctcgaaccacgcaccaagagaacggagcaaataacccctcccccaccttccgcggcggcaaccccgaggtggtggggcccgatcgccggcgccgccgccgacacgccacccggggaggtgcctcccccgttgctgtcgccctccccgcccccgccgcccgctcctgctcccgccgccatcacggccgccccggcatcaatcaatcagatcagggacgcggcgaggtgcgcgtggagtggagtgggaggagtagggaagaagggaagggaagggaagggaagctag

SEQ ID NO: 89137 - DNA, 465 bp, Oryza sativa
  Clone ID: PAT_MRT4530_87921C.1
gttatcagctgatgataagccattgattgatgtgttgaattgtactacatgtatgtgcttctgaattggtatattacaaaatagaacctgatgaggaaatacaaaacatcaaaacaattgaatttgctcaatgcggttacgaagagaacaacgacgacatggtaatgatcagcatttgcatgggcagcatggacatgcgttgcatatcggacttgacctcaaaagtttaatatccttgaacaaaacccgtccgagatgatttcatctcagatagttctatccggctatccctgatgaacctgaccgaaaatctgatgctgtgcttcggacaataagcataacgatctccaccgtcacgaatataagaaacaggcggtatctaaaagccatgatcaaataggggcagaaatgaatatctctccgctttcaccgatagctaaacacagagccttaatccctcgtgcc

SEQ ID NO: 89138 - DNA, 600 bp, Oryza sativa
  Clone ID: PAT_MRT4530_87922C.1
atgacggagccacatggcggcggtgacagatttggctgcgagctcgtcggctctcgccctcccttctctacgagtggcggcggcctcttcccacgagggcagcggatctggcctccggcttcttccctctccccccctctcttctcgcggcggccgagggaccaccagcggcagggaggaggagttctcaacgcaatagcacgttggaaacctgagcttatacgtatttcgtcttcctacttggtacctaaaagtgttgtctctatcatctactacctccgtttcacaataagtacaggaaattatgaaggcagccttctcagcctctactctcctgctagggaccaacagggatcctgcgactcccgggtgcgtggctcaagggcaaggcgggagactggggctcctcgaccctttgctctggcaccgccgcttgtgtcaggggtagttgggcaccttgaatgcgccatcaatgccgttggtgtcacgcgccctggatgccatcatgttgttggaggcctagggaatgggactgactttctccccctgaggcttactcctggagcccctcgagggctccgcaaaggggaccttcgctag

SEQ ID NO: 89139 - DNA, 263 bp, Oryza sativa
  Clone ID: PAT_MRT4530_87923C.1
ccacatgtcggcagagcttgtgtggtggtagagcattggtgcgtcagccgtggatttgcaggtggtgagcggcgggtaaaaactcagtcgggccttggccggaccgacaacgatggttcattccccctcctgagggcgttgtcgtgctgtctcacccctcaagggtatgtatatagccaatttttggtagagtttgatttccgaagattgaacaaatggcaacacccattaggctattactcttgaatatagaaaaatttagc

SEQ ID NO: 89140 - DNA, 933 bp, Oryza sativa
  Clone ID: PAT_MRT4530_87924C.1
atggcgcattcaaggtgcccaactacccctgacacaagcggcggtgccagagcaaagggtcgaggagccccagtctcccgccttgcccttgagccacgcacccgggagtcgcaggatccctggggacacggcttgtggtctcacggctccacgtcggacgcgcgcaccggtggcagtggggaccgtggctccgcgggccgtttccgcgcttgcagaagaaccgctcgaagcgctgcgcctgggttcgggaacggcgaagccatgacccgaggacacgcgttggtggagccgaagccccgtgcatcgcctcgtccggtcgccagatcctcctccaccgctgctccccgccaccgacgctcgcgaagaagggaggaggagaggaaccgccaccgttgtggcccccgtcgccagatatggcgagcctgcgcccagatccggcgagcccgccaccgccaagctcgccacgccgtcggcgagctcgtccgcaccattgtggggggaggagtacggcagcgtcgagcccgcgtccggatccgctatcgtgaactcctccccgccgccgccgagtactcaccgttgagaactcctcctccctgccgctggtggtccctcggccgccgcgagaagagagggggggagagggaagaagccggaggccagatccgctgccctcgtgggaagaggccgccgccactcgtagagaagggagggcgagagccgacgagctcgcagccaaatctgtcaccgccgccatgtggctccgtcatcgccgcttgcagagaagacgcgggggagaggccggaggtggatgctgcgttgagatgtggaggagtcaatgatgcggtggcacacgagagggggagcgacggctttgagaggaagcggaggcgacgagactccaaaggaacgctggagaggaagaggataagatag

SEQ ID NO: 89141 - DNA, 293 bp, Oryza sativa
  Clone ID: PAT_MRT4530_87925C.1
attaaaattgatgttatataaattatttttggattataacaaacaaccacatatttgaaaacgtataagcacaagctacacacagtacgggggggggggaagaaaaaaaaaaaaatgcaaaacaacgcaaagaagccggccaaggctagaggcagggccaccaccaaaccaaacactaggcgaaatgaaaaggaacaagggcaacgaaaaaaacccggaaaggaaagccaaaacaagaagaccgcaacgacggaacagaagaacgaagcaatcgttggacacaggcgaacaac

SEQ ID NO: 89142 - DNA, 2539 bp, Oryza sativa
  unsure (1)..(2539): unsure at all n locations
  Clone ID: PAT_MRT4530_87926C.1
ggaaaaaaaaggggggaaaactcaggaagacgactcctcgccgccgacctacccgagcnaggagcaccccggcgggcggcggcgcgtggcggatcgcncggnttccggctccgagcctccccctcccctctntctctcctgggctcgtcgtagtcgcggcatgacaattccaactttgcctcggcgcaccacgactccccaacgaacacattcgcagcaggggtctgacaggtgcgaattaattttttttttcttctccccgatgctacggctggtggggatcggcgagaggctgttggcagtcggaacaaatagacgggcagcctatttttcccagccgagccacaggagtggctactacacagcagcgagggacaatggattgtcggcaaagcgaaagattccaactgtcttctctagaatgttctcacattacaaggtaattgtcaggaagaacaaagctggggatcacaagtgcagaaataggatttcaaggggattccgtaccttctctgggacagtcgcgaattcatcggcaacacagcacgcccaattggcatggaagcggctcagtcatacatacatgtacagcggaccccggtttccattgatcagccgagcagcctgtgctctaagcttttccttcacgaggttccatgttgtccctggggtcatggctctagcatttggcaagtttgcattgtcacggcctgtcctggcagattcaccacacctgcccacaatggaaggtattgtcacaaatgcgcgggatactcgccagtttctgtcatccatagtttggtcaatctgggagggtgtcactttgcttattagagctgtgcatttggcaatcttgttcttccctgcaactgcattgtctccatttgctgatactttcagtgttggatttagaaggagatggcttcgtcttgtgcgccgtacccttgaaatagctgggccagcatttatcaagtggggtcagtgggctgcaacacgacctgatctttttccaagtgatctctgtgttgagcttgccaagcttcatagtgcagctccagcacatggatttgcttacagcaaagctaccattgagaaggcgtttggtcgtaaactttctgaaatatttgagacttttgaggaggaacctgtagcttctggaagtattgcacaagtacatcgagctacattaagagatcaacatactgaaaagcatgttgctgttaaggtgaggcatcctggtgtgggtgaatcaatcaagaaagactttttactcatcaatcttctggcgaaagcttcgaatgttgtccctgggttgagctggctgaggctggatgagagtgtccgtcaatttgctgttttcatgatgtctcaagttgacctttcaagggaagctgctcatttgagtcgttttatctacaatttccgcagatggagacatgtgtctttcccaaagccattatatccactagttcatccatctgtccttgttgagacgtttgagaatggagaaagtgtttctcgttttatggatgagattgaaggaaatgctcggatgaagagagatcttgcccacattggcacatatgcattcttgaagatgcttctggaggacaattttattcatgcggatatgcatcctgggaacattcttgtccgtctaaatgagagaaaacctaagaggaaactgtttttcagacctaagccccatattgtgtttcttgatgtgggcatgactgctgaactcacccgagatgaccgtgataacttacaacagttcttcaaggcagtggccaccagggatggtcgtactgctgctaactgtactctgcaattatcaaaacagcaaagctgtccaaacccagttgcctttattgagatagcttcatttcttaatcaggaattggataagacattttcgttctggggaacgcctgaaggggacattttccatcctgttgaatgcatgcatcaactgcttgacacagttcggcgccacaaagtcaacattgatgggaatatctgtactgtaatggtcacgattctggttcttgaggggtggcaacgcaagctagacccaggctttgatatcatgcacacgttgaagactctactactagacaaggatataaagcaaccagttgattttttctcataaacaagttcatgctttcaagtgccaaatctacgagcctcagaatatgcatatatacagcagagaaaggtgatgacaccatgggacagaagttcgcaaaccaagcaatctatactaatgccttatgtcatgttatgttctctctctttttttttaaacaacctctctacctgcaacttacggcattgggtttcacatttgacaaccttcagtgctaaaattttgtccagcgccttggtggagtaagccaccaaaattccttgtgctaaaatctcttatcgagaaacaaaccctgttagatgtagcaaccgaatattgataacgagcagaattacgttgcagattatacagaattttacttcctgctatgctgctgcaaaaaaaaaa

SEQ ID NO: 89143 - DNA, 311 bp, Oryza sativa
  Clone ID: PAT_MRT4530_87927C.1
gaccggaacggcaggcacgacccacgccaccgtttaggtagtccaccaaccgcaacgcaaccccgggagggtgaagaagaagcccgaggcggagacggccccccaacccacggggcggacgacacccgggcacaggccggcaaggccgccgccaaggcggaaggcgaggggcgcaaaaccaggcgcaaggaagcagcgaaacgcaagcagggcccacagggagaggagggggacggcgacacacgccggctacacgggggaccggagaaagggacccaacgaggcaaccagaccggaaaggaacccggaac

SEQ ID NO: 89144 - DNA, 2913 bp, Oryza sativa
  Clone ID: PAT_MRT4530_87928C.1
cccttctggctcccccgcgcggccggccccccccctcttccctctttttgtttccttgttctgtgcaggctccgtcgcagttccgggttcctcccttgccccagcggagacacggtctacctccaaaattagttcctttgcaaccctctaagaaaaatgtgatttgcaaatatgcaaatatatatatcacaaacacaattctacaacgccaaacatgcaatgttacaagttcccaaaaaaattacactttcaccttttttcctaactaagctgagtatgaacttctcaacccaggagcattgctgctgggcaaagatgggcgccacaatgagcctcgccacagtaataatcggtcggcgtgcaacaccttgcaaaaccggtcttcccatcttttaaaacttcctgcccgtttgcgtggtgcaaaactccatgtgatgcaccccgatttgcaagatgggagaaatgataagaggctttgtgctatctgaggcgccaattactactgtacatggatttacagctgggtctactgccttgatgcaacaaaaaggtcctcctttaagttagcgcaaaatcctcttcttggaaagaaagctgcggctcttcttggtagggatgaaccactttgtttatctcatctgcggtgagtgtttcacgctccagcagggcgtttgctaaagcgtgtaattgcttctcatgcttcttcaataaacgcttgacccgcccataagcttctcttaagagtttgacgacctcagcatctatccttgattgcatctcaacacttggccgttctttcacatgcacaggaccaatagcatcactcatcccacaatttgataccatgtactgagcaagctctgttgcagtatgaagatcatttcttgccccagttgtaacattgtcttccccaaaaatgagctcctctgcaaccctgccacccatgcaaacatcaagacgtgccagcagctgtttcttgctaatagaagtctcatcctgtgaaggaagctgtgtgaccattccaagggcagagccacgaggcaggatagtagccttgtgaatggggtgggcaccctgggtgttgagtgcaacaatagcatgcccactttcatggtaggccgtaagtattaactctcttaaaataaaataaagtaacttgaagaggcatgcctttttggattcgtcagatatgaacattgatttcctctcagttcccatgataatacgatctttcgcaaattccaactgtgcagcagccaacttgtcagcaccttcaactgcagccttaattgctgcaatgtttactaggtttgcaaggtcagctccattgaagccaggagtactgcgggcaatcgcattaacatccacatcactggatactggcttatcttgcaaatagagctcgagaatttcttggcgtccccgcacatcaggattggggacaacaatatgcctatcgaatctaccaggtcttgtaagtgctggatcaagaatatctggcaagtttgtcgcagccatcacaattattccctcattttgttcaaaaccatccatctcgacaagaagttgatgcaatgttttctttgtgtgtccttcccactgttttctagttgaacccacagcatctatttcatcaatgaaaacaatgcatggcgccttcttctttgcagcttgaaacaatgacctcactctccgagcaccaacaccaacaaacatttcctcaaattcagaacctgcccgataaaaaaatggcacaccagcttcaccagcgatagccttagcaagcagagtcttcccagttcctggagaaccagtcaaaagtattcccttcggtagttttccaccaagccgagtaaactttgaagggttttttagatactcaactacctcctcgagttctttctttgcgtcatcacaccctttgacatctttaaatgtcttgacattcttctccggcatgatatccttattcaattctttaggagaatatgatgaactggaaccaacaccagatgcccctattccacctaagctaccaatatacttttgaagagcagcagcacccattacccacattagtccaacagcaattgtaaacagcacagtcgagaagatttcttgagcaaaccgggttgatctacctgtagctttagggtcaaccataactacatgtaatggttgcttttctgatatgccgggattcatgaaaggcttgtcctcgttcccagatacacgttgcttcaattcttgcagcagggctggcagacttgcagacctcccagactgttcgtctggaaggtaatcagctatgccattggtgagaataagagcccgaaggtattctgcaacacctctgctgtccacagcatggcttctttgctcgaaccttttgatgacatcttctgggctgaacttgttgagctcgtggagcagcgcgctctgcttggcgggatccgcggggttggcgtccgcgtcgtcgatcagccgctgcagtcgccggtcgggccgccagaagggccaccagctcatccagtccccggacaccacccagtcgaagaacctcctcgccgcggccaccacggccgccgcgagcgccagcacccaagccctacccttctccaccaggtcctccagctcctcctcctccaccttcccgcccccctccgcggccgccgtccccacgacctcctccgcctccggagcggccggcagctcgggcggcggcgggtcgggggccggggagggcgccggctgcgggccctccgaggccaatgcgcggaggggcagcgggaggcgccggtggtgccccgccctcgggaacgaggccgaggaggaggggaggggcagccggcggcgcgggggcagcggcgaggggagggggcggaggaggagcgaggcctggagggcgctcat

SEQ ID NO: 89145 - DNA, 406 bp, Oryza sativa
  Clone ID: PAT_MRT4530_87929C.1
ggtgttatagaccacaagagaaacaggaaaaccggacaaacggccccaggcaaaaaaaccatggagacaaggcggacaacacaaaccacaaaaaacaaaacaacaaaaaccacccaaagacggaaaaaaaagagccaaaacccccaccccaacacgaatgtccagaaaaccccccccaccccgagaaccccggaaacggccaaagagaccaacaccccccaccaggaccccacaaccaaagaggaacagaacgcacgcaaaacctgaccaagagatcccccaaaaaaatcaacaagcgcgtgcccatcctggcaacggtgagaacgtcacccactacccagaccaggcggaaaaagcctgaaagccccaccaataagaacaggccccacatcaagcggaaaaaccc

SEQ ID NO: 89146 - DNA, 723 bp, Oryza sativa
  Clone ID: PAT_MRT4530_8792C.1
atgatgctaggccgaaccaattatatatataatgagatagcaagcttgccgatacaggcaaagagtgcaacttttggccatcttgatcccctcgtcaccctttctttcttggctactcctccgcttgatctctcacactcaaccttgagaagccaacggtggggagcacttgaggcacatgagggcagtgattccagctgggagctctggagattcagtggtgttcctttgtacatcttaccgggtgcacctgacatcaggcatataattttacatatttcacaaaagtttttgaataagacgaacggtcaaacatgtgctaaaaagtcaacggtgtcaaacattttgaaacggagggagtatttgatagtggaggagctcgaaacagcggaaattaacttgaagccaaatcatgccaatggcggtggtatttgggggtggtggggtggagctactacacaataccgtcatgaagacctcaacctggagccaaatcacaacccagcagcaggtggaagatccggcatgaaggagcttgccacctcacccttatgttcaaaaggggaaggaggaatgagaggtcaagtttttgttggatggggagcgagcaagagctggactcgaacgggatcagtgggaaggatgagaatgcagattctgactcaatatgcccatcccaagagcttggaagatgggtacttatgttctaacggacaagagtaa

SEQ ID NO: 89147 - DNA, 252 bp, Oryza sativa
  Clone ID: PAT_MRT4530_87930C.1
atgtctttcgtgattagtttcacacctctcatcataataacagatgctataattgataataatttgattagctcctggtttggaatggtatattcctggtttggagatagaactgtgcagccgggatggttgttcagaatggttgggcctgtacaacagggtatgttgtatagcgttggtttaatattgtttaattattacttaaccgttttattaaattctcaaatgttcgctaaatgctgcttttgcaaa

SEQ ID NO: 89148 - DNA, 1314 bp, Oryza sativa
  Clone ID: PAT_MRT4530_87931C.1
atgttggtcttcgccgccttctttgccgctgggcttcgccttccgtgtgacgacttcttgccgtcagtgttggaaatgtacgaagtcaagcttccccagcttagtccatcggcgttcccgaagctagccgtttttgcttggatgtgccgaacgtgcgggttcgctcctaccgcagagcttttcgccgttctattcacggcgtgcgcgacgaccaaggatgtcagtacgccggcagggccgaagaaaacagttttcggctgtgtaagctttatgctttggccagagtgctcggatgcctggccagttcctgcgtcgatggcaaagtggaatcgtaattggatgcagaagtggttctacgtcgacaacccgtaccccgccgaagatgacaaggcgaattggcttcgctttcggcgccttccagtcgccgtcgtcagcaaaccgagcgtggaggtcgacggcacgctcgaatcacggcttatcctccttctcaaagttgcgtgtcggctgagcacccgcgacctctgcgagcagttttttcgctcgttggaagatgccgaggctgaagcggcgaatatgatcaggggccttataacagccgaatacgctcgcttgctgcagcggcaatctaacggccgggcgaaccgcgtctataatggcaaactggctagccgggcgaaccccgcaaaggtggacgacgatgtcgagccgtcgaagaagcgcaagcgtgccattgccaagggtggcccggttcagacccggcgggccgccaaagacgctgcggagaccgatgctgacgacgacgacgactgcgaaagggaagaggtgttagacgatgacgccgggtcgcgcgggtataccccgagccccatcagggcgaaaactagggccggctctagcacttcgccaccatgtccccaagacgtcgctggcgctaatgtgctgttggctatcgccggcgctgggtcgatggcaggggctgctgcccgcaagaagaagaaagaggtggtgcaggtatccggcggcttctccgacagcgtggcgtctttgggcggagcgccaacttcgccggcgctacgccgtcccctacgtcggaagaggttatcgttgccgccgcctgctagcgatgccgatgcgcccaccgggggtagcgtttcggctactgctgctgcgtcgaatctggcgctgcaaccagcgggggccaacgtcttcggcaccgacggggtcgtcacattgccctttgtcagtcggcaacgggaaggcaagagtctggcagtcgagatgacggtgttcgacatttcgctcaccgcctgttga

SEQ ID NO: 89149 - DNA, 499 bp, Oryza sativa
  Clone ID: PAT_MRT4530_87932C.1
ggcagaggctttggcagaggtttcactggaaacgggtacagttgttggaatgggcctgtgagaagccatgcactctttgtcgacgagaacaaatgcataggatgtagggagtgcgtccaccatgccggagagacattcgcgatggacgatgttcttggaagcgctcacgtcgaagtccagtttggagaccaggagcagaagatacaggtagctgtggagtcgtgcccagtgaactgcatccactgggtgatgagcgaggagctagcggtgctggagttcctggcacggccacagcagaaggaagcgcacggcgtgttcggcggcgggtgggagaggccccgggacgtgttcgctgcggccaacaacttcaccaagaggctccagagagaggagcaacaggacatggcacggcagcaacgctacaataatggtaaaaagaaataactgaaaccaaacgaacagcttctagcagctgtgaaccagaaaaataacgaagaag

SEQ ID NO: 89150 - DNA, 1098 bp, Oryza sativa
  Clone ID: PAT_MRT4530_87933C.1
ccatccctctcccgttccgggccacaccaccctctcctcccatggcctccgcctccgcctccctctcgctggcgttctcccctctcctcctccctaccccgcgaccccgaccctactcgcgacccatcaacccggggtttcctacccccctacggctcagccttgcgtgctcgccgccctcccgtcgcgccggcccggttgccgcggtcccggacggcgtcgccgtcgcggacgtagtggagaaggactggtccttcctcgatgctgcggcggcggcggcggccgcgggcggcagcctcccccgcgcgctcgcggcgggggccctctcccccgcgtcgcgggtgctggccgtgacccccgcgccgtccttcgtggacgccctcctctcggggcacccctgcgagctcctggtggccgcgcacgagtccctgtacgtgctggcggggatcaaggaggggcacgacgaggtgaggtgcttccacttggagggaggcggaggcggcaggggaggcggagtggtggagggcgtgccggagaggttcgacgcgttcgacgccgtgttcgtctgctacttccccgggatgggtgtctcggccgccgcgctgctcaagtcgctggccaagagatgctccaaaggtggaagagttgtcatctttttggatcaaggacggcaaagtttggagcaacatcgcagggaacatcctgaagttgtaactgccgatttgcctaccaggccttctctagagaaggctactgccggtagcaagtttgaaatattagagtttgttgacgagcctactttgtatcttgctgttttgcagtttcaatgatgaacttgttgaaaacaacaaattatatagacagcttgccatccatgccggcgagaatcaactcggctttgtagtttgtagatatgcaagaaattattgcaaagttaatgatccttatggcagccaagttactttgtagtatccctgttgacatatgggaattaccagaagcactggcagttaagggcatttacgattagatgaagccctgcgctttactgtgggataaaaaaaaaaaaaaaaaaaaaaaaaaaaagggcctcgtgcc

SEQ ID NO: 89151 - DNA, 3059 bp, Oryza sativa
  Clone ID: PAT_MRT4530_87934C.1
ttgtatacatcatgccctgtttgtacttgagatgaataatatttttttaaacggttacactacttacagtgcatgcaaacctgttttagtccttcagctgcagccaggagcgcctgataatctacgggccgtccacaccaggtttcgtccagtccctcagcccattccacacatcgcgcaaacgcttccaccggagctcctgccctgcgcgacgcctcgcctcggcctgccgttcggtttcaccttcctcgcatgcatcaccattattgtagcgttgctgccgtgccatgtcctgttgctcctctctctggagcctcttggtgaagttgttggccgcagcgaacacgtcccggggcctctcccacccgccgccgaacaggcaccagtcgctctgttttttttttttttttttcagtccaaaagttcttgtcccatgcatcttcttcagttaggagtttttgtttaggttttctttcctctatcttctgtgctaattttatattagaaattaaggtcttgcggagctcactcagctgaacccactaaaaaagtaacgagatcatatactatggggtttaaccatgcaccccaaataccttctgcgtctggcacggtgatatatacacgggtaaaaatctgtgttggctacagcagaaaggagctaagctcttgtaagacatccagcgtcagaaccttgataccgtgggaagctggagtggttgtaacgctggaatgcgtatcggccctcgtagaatttctcctcgtcggttagcttcttgtacatctcatgccactcaaggagctcgtttcgtaagcggtctgccttacataagagtaccgccgtgcgcttccttctgctgtggccgtgccaggaactccagcaccgctagctcctcgctcatcacccagtggatgcagttcactgggcacgactccacagctacctgtatcttctgctcctggtctccaaactggacttcgacgtgagcgcttccaagaacatcgtccatcgcgaatgtctctccggcatggtggacgcactccctacatcctatgcatttgttctcgtcgacaaagagtgcatggcttctcacaggcccattccaacaactgtacccgtttccagtgaaacctctgccaaagcctctgccactagcaccagcgttcctgggactatttctcatcaacaccttgtatgcctcattcagcagtagggtgtagtcatgacccgtcactcccagcacttggtagtagtcctccctggcttttccccttgtagtgctacagcacctgatgatgctccttggtctgtacttgattggtctaatcagttcatactgaactgatccatttcggagcagcccgtgcaatgctcgagaggattgatttttggatccctgatctgtaatgagggggtctgtggtgtagtcgagtacgacttcatcttcctcatccatagggacactgaaacaagcagtcagcttagttgtaatgccaaataaattcttgagcaaactacaaaaattatggcggactttctctaacctatcatatactgctgctccagcataccctaatctttttaattgccatccatgcttgctcccaacgttttggtcaccttcatctccaggccagggcattccagagcctagcatcttctccttcagctccttgatatcccacacatatcccattcgatctcttcctagagctcgggtgcgttcgtatgctggaagtgcctcatccaaaataatcagcttgtctttggaagtgcacaaggaaaagcgtgggaagctggagtggttgcaacgctgcaatgcgtataggccatcgtagaatttcacctcgtcggttagcttcttgtacatctcatgccactcaaggagctcgtttcgtaagcggtctgccttacataagagttgctgctctgatgcctcaagtttagagcactcatcctttagcaccttcttctgacagattaaatgtctgatcctttcatcttgcatctgaacagcattgacgtctggaggttgattagcgtaatcattgatgtgctgccttttttgagccctccaatgaatcactgagcatgaatttcttcttttggatgactctccattggaagacatgtcaaacaatacagattctctggctcttgaattgtcatcataagccactgtggaagcttgagctgctaaactatcatcacgagcaacagtggatgcataatgagctggaggaagtgcttttgtgactcgagcatatccaactaaatgagcatggtgcttccaatactccagtgtcatttctttcaaccgtgtctcaagtctatggaaaagtcccgtcttctcaaaatcttgtttatcatgagtaggtcttatgaagtttgcctccaaaaccccagcaatgcctttgctgtgacttttatcagggtgagcacaccaaaagggcagtataaggcggttcttgtggtagacattaaatccatgtatatccagttttggagcacctcttaagtagccaattgtagtaataacgtcaacctctatgtttattccaacttgtggtcgatatttgatgcattcacagtatatgagatcattgacaatgtgatgtggctcaacaacttgtccacacaggataactttgaagtgttttggtagacgaagtgaatatcgaaagcgatttgcgacatgcatatgatttagccttcctactgtcttctttccatctggcatggcaggtgctcctgagatcataatatcctcttcatcagatgcaaagtcaagttccatttcccatgcatcgttgaaccacaagttgaacacaattagtttggtaccatggcatcccatgtctccaaattgattcaataaatcatcttctgtagtaaatggagaccacttcaaaagagtggacaaattggaagaaaaatgtttctcaccacggtccattatcttcttgagagtatgagatgattcatcaaattcataatcaacctttggtcccaagctcattgggctgggtttggacccctttcctttaaaagggggaac

SEQ ID NO: 89152 - DNA, 180 bp, Oryza sativa
  Clone ID: PAT_MRT4530_87935C.1
atgaaaactgagtacgtaagacacgacgcaggagcgagcgacaagtttgacggaaagaggggatcaaggagaacgactaagtataccaaagaagggacaagtgcgagcggggcacagctaatcagcgcgtacgcgttcctagcgcagacgccgccaaggcccacgcacgggctagcatag

SEQ ID NO: 89153 - DNA, 548 bp, Oryza sativa
  Clone ID: PAT_MRT4530_87936C.1
tggatcccccgggctgcaggctgaacaatgtctcactagccataaggtttagtctattcttgaatgctcttttgtattagctaatagcttctcaggtattacctgtactatcaatagttctgatagagctgtcaattttttttagggtttctactactctctaggacagccatatatctttgagaatattgattttatccccccccccctatttgtattagattatccatatagagactgctgttggccttgaatttatcccatagcatttgtgctcatcgaaatgtgctgaattttattcacagtgattcacaaatataatctggtgagttgatcatataattcaaaagcttcttttgatttctacctatgtcctttctattgatcgctatacataaccaccaccatcgtgcctcgccaatcatgacgacagaggctgcatcctacatcctttcatccatatagccttaggccattgcccagccatgacaatttgttactgttaactgcatttgagaactaattaatttgcttcttaacgcatgcat

SEQ ID NO: 89154 - DNA, 270 bp, Oryza sativa
  Clone ID: PAT_MRT4530_87937C.1
atggcgacagcagctagcaacggggacggcgacgctggcggggtttgcgatgacgatgatcgaggtaagcggttccgggcggggatgtggccgatggtggtggggatggtgatggtggagtcaacggatccagtagtggcgtgcccggttccgacggcggcgtggcggctggcgacctgcaggcggcctgcctcacgtggtgtgcatagtgcagatatcttcggtgtgcaggtgatatttggtggcttccgctgtggatgctatgattga

SEQ ID NO: 89155 - DNA, 914 bp, Oryza sativa
  Clone ID: PAT_MRT4530_87938C.1
ctatttggagaagaagacgatcaccggtataaatacaagggcccccatggaggggagaggcatcaaatcacaattcatagatgtcagctctccatctatcttccctctttctccctcctttctctcttccacgacgcagtacgccggggcagcgccgggcgactggaactcggtgacggagcggtagttgcggaggcgatgatggccgccgccgatgcagaagataatgatgtggcggtagtcgtcaagcatctcgaggcgctcggtgctggtggatgccgggaggcctgacacgatggtgacctcgcggacactgccgacgctggcgccgtcgcccgcggcgatcgagcaggtgcggacgctgccgagccgcccttccttcgccccggccatgcccagccacgcgctgccttgcctctcgcactggcgagaggtagaagacaatccccagcctgacatcgcccccccagcgcttcttcgccggcgcgcgcctcctcgccctcctcctcgcccggtcgtcttccttttgggccgcatgctgcccatccgctgattgccccggtcttggagcgttttcccccaatcgtcgggtcgggaagtgtcctagagcttaaaaacacgaaacgaagtgtccggtagcaaaatttgccttattttaaagtaatttttctatattttttttaaaaataaaatacatcatttaacggaaagcatgtgaaaaagagacaaatcttctcgccttccatcctaaatgaactctgcctaagttgagatgattaaagtcctggccacatggcccacaccttagcaagcgtaagaaaatcttagcacattttttagtcattcacgcatatgtaaaacctaatttgttagaagagaatttggtcaaaaaaaaaaaaaaaaaaaaaaaaaaa

SEQ ID NO: 89156 - DNA, 211 bp, Oryza sativa
  Clone ID: PAT_MRT4530_87939C.1
atggagtggagagaaagagggggagagggagcggatgaaggagaggaccgccacgacggcgcgatcgcttcaccgccatggctaccgatcgcgactgcgtttcgttttgggagaattggccccaggcctaccacgccacagcccatcgaaccggacgacccagcggtcagaccggtgaaccagaagtttgaccggttcgatggccggtccg

SEQ ID NO: 89157 - DNA, 4467 bp, Oryza sativa
  Clone ID: PAT_MRT4530_8793C.1
atgacgagggcgacggtgctccggcggtcggcgagcgaaacggaggcgcggacgaggtcgacggcgatgcggcgatgccgagggaggtggcgccgagccgggaggaagaccggagcgacggcggcggcgaaccgaaggtcgacggcgacggcggagagagaggagcacggcgctagcacgattccgacggcgagagcgagcggctttcacattgaattttacttattcttttgcacaattttgaggatgaattttagagtcgatttgggacgcgacattgaagctagtgattggctacatgccatagagaagaagttggatttacttccgtgtactgatcaggagaaggtctcatttgcatcacatcagttgcatggccctgcctctgaatggtgggatcacttccgtcttaacaggactactgctgaacctatcacttggcttgaattcaccgctgctttccggaagacgcatataccatcgggggtagtgtctctcaagaagaaggagttcaggtcgcttacccagggatctcgctctgttacggagtatctgcacgagttcaatcgtcttgctcgttatgctccggaagatgtgcgcaatgatgaagagcgccaggagaagtttttgggaggacttaatgatgagctttcttacccacttatggttggagattaccctgatttccagaaattagtggataaggctattcgtcaggaagacaagtacaatcgcatggagcagaagaaacgtcggattgctcaattcaagacacaacagggaaataatcagaagtcgcgtcttactttaggaccccagtccatgccacagggaggttcttcgtctgttgttcgtccgcaacgtcagttcttcaacaacaatgctggcaacaacatccgtaatcaagctccacgtcctgttgcagctccagcacagcaacaacctgccaagagggagcaaggcagcaagcccgtggtgtgtttcaactgtggagatccaggacattatgctgacaagtgtccgaagccccgacgcgtgaaggttgtccctgcccagagtaactctgctgtaccagcatcaaaggcccgtgtcaatcatgttgctgctgcagaagctcaagatgctccagatgtgattttgggtacgttccttgttaactcagttcctgcaacagtacttttcgattctggtgctacacattcattcttatctatgagttttgcgggaaatcatgggatggaagtagaagatcttagacgtcctttgatggttagtaccccaagtaatcaagcactctctttgcaacgtagcccctcggtcagaatagaaattcaaggagtaccatttctggccaatcttatcttgttagaatccaaagaccttgatgtcatcctagggatggactggttagccagacataaaggtgtgatagactgtgccaacagaaaagtaactctcaacagctatgatggtcgagttgtaaccgttcatgcattgtcttctgagtctttaaggtcaagactgaatcagataactttggaagagattcctatagtccgggagtatcctgatgtgttcccagatgatttaccgggtatgccgcctaaaagggatatagagttcagaatagatttggtacctggaacaactccgatccataagagaccttatcgaatggcagccaatgagttggcagaagttaagaggcaagtagatgatttgctacagaaaggatacatcagaccgagttcatcaccatggggagctccggttatttttgtggaaaagaaagaccatactcagagaatgtgtgtggactatcgtgcactaaacgatgtgactatcaagaataagtatccactacccaggattgatgatttgtttgatcagcttaaaggtgccactgttttctccaagatagatcttcgatcagggtatcatcagttgagaatcaaagaggaagatatacctaagacagcttttaccactaggtatgggttgttcgaatgtactgttatgtcttttggacttaccaatgcccctgctttcttcatgaatttgatgaataaggtgtttatggaatacctagacaagttcgtggtggtctttattgatgatattcttatctactctcaaaccaaagaagagcatgaagaacatcttcgccttgcattggagaagctacgagaacatcaactgtatgctaagtttagcaagtgtgaattttggttgtccgaagtgaaattccttggtcacgtcatctcagccggaggagttgccgtcgatcctagtaacgtggaatccgtaaccaattggaagcaaccaaagacagtttcagagattcgcagtttcctaggccttgcaggatattatcggaggtttatagagaatttttccaagattgctaagcccatgacacgactgcttcagaaagatgtgaagtacaaatggtcggaagaatgtgagcggagttttcaagagttgaaaagtcgcttaatatcagctcctattttgattttgcctgatccaaagaagggtttccaagtgtattgcgatgcatccaaacttgggttaggttgtgttctgatgcaagatgggaaggtggttgcctatgcatctcgtcagttacgtccgcatgagaagaactaccctactcatgatattgagttagctgcagtcgttcatgcattaaagatttggcgtcattatcttttcggtactcgtacagaagtgtacaccgatcacaagagtttaaagtatatctttactcagccggatctgaatatgagacaacggagatggttggaattaattaaggattatgacatgggaattcattatcatccgggaaaggctaatgttgtagcagacgctcttagcagaaaaggttattgcaatgctacagaaggacgacagttgccattggaattatgcaaggaatttgaaagattaaatttgggaattgtcggtagaggtttcgttgcagctttagaagcaaagcccactctaattgatcaagttagagaagcccaaattaatgatcctgatattcaagagatcaagaagaatatgagaagaggaaaagctattggtttcttggaagatgagcacggaactgtatggttgggtgaaagaatctgtgtccccgacaacaaagatctaaaggatgcaattctgaaagaagctcatgatactttatactccattcaccctggtagtaccaagatgtaccaggatctcaaggaaagattttggtgggcaagtatgaagcgtgaaatcgcagaatacgtagcagtatgtgatgtttgtcagagagtcaaggcagaacatcagaaacccgccggtttgttgcaacctttgaagattcctgaatggaaatgggaagaaataggtatggattttatcactggtttacccagaacgtcatcaggccatgactctatttgggtgatagtcgatagacttaccaaagtggctcatttcattccggtaaagacaacctattctggaagtcgcttggcggaattgtatatggcaaggattgtgtgtttgcatggcgtccctaagaagatagtgtctgatcgaggcagtcagtttacttcaaatttttgggagaaacttcaggaagagatgggttctaagttgaactttagtactgcttatcatccgcagacagacggacaaaccgaaagggtgaatcaaattttggaagacatgttgagagcttgtgctctagatttcggtggaagttgggataagaatctaccctatgcagaattttcgtacaacaacagttatcaagctagtctacagatggctccttacgaagcactgtatggtcggaagtgccgcactccgcttttgtgggatcaaacgggagaacgtcaggttttcgggacggatatcctaagggaagcagaagaaaaggtaaagatcattcaagaaagattgcgagtggctcaatctcgtcataagagttatgccgacaatcgccgcagagatttgagttttgaagaaggagattatgtgtatcttcgtgtcacgcctcttcgaggagttcatcgttttcagaccaaaggaaaattggcaccgcgttttgtgggaccttataagattgtcagcagaagaggagaggttgcttatcagttggagttacctcaatccttggcaggagtccataatgtgttccatgtgtcgcaattgaaaaagtgtttaagggtacctaccgaagaagctaatattgaccagatagaagtccaagaggatttgacttatgttgagaaaccaatccgtatactggaaacaaatgagagaagaaccaggaatcgagttatccgtttctgcaaagttcaatggagtaatcactcggaagaagaatcaacttgggaacgagaagatgaattaaagtcagctcatccgcttctgttcgccagttcttccgaatctcgaggacgagattctgtttaa

SEQ ID NO: 89158 - DNA, 884 bp, Oryza sativa
  Clone ID: PAT_MRT4530_87940C.1
tcacacagtacatagagagacgattatgataggataggagaaacaagtcgtgcgccacgccgcagccgcacaagacttgatcctcttcttcttcttcttcttcctccaggctccagtggcgatggcgaccatgctctgctccttcacgcccgccaccagggctccgctccttcgcacttcctcctcctcttcctctctcggcttcgccacctcgcaactcgccggcctcagcctcggcctctccgccgcagccaccaccgcgccctccgccgccggtcccaagctccaccccatcctcgcgcgccggatatgccccttcacggacaagaagaccaacagggcgaacaaggtgtccttctcaaaccacaagacgaagaagcagcagtttgtgaacctgcagtacaagaagctgtggtgggaggaaggcaagcgcttcgtcaagctgcgtctctccaccaaagccctcaagaccatcgagaagcatggcctcgacgccgtcgccaaaaaggccggcatcgacctcaacaagaaataaatcaaatcatcatcatcatgatgcatacatacatgtattctctcatcaattgccgctgtgctgaatagaccagagctgtatgtagtccattattaaatccattcatctcgatgatgcaatttattgtagagtactacagtatgcattcatcggtggtggtggccggcttcgtttccttaaatttccttttatcccgtgttgctgctgcaagtccggctcgaattgtttgctactagtgtttcatttcggtcgagttcctaattaatactgtatgttggttacgaattataagatggatggatgtaacttgagcagcatcaggtcgtgcagttggcatcttgcgcttttc

SEQ ID NO: 89159 - DNA, 514 bp, Oryza sativa
  Clone ID: PAT_MRT4530_87941C.1
caccaaaaaaggttaactttcaacccaagggaaaaaaggggggcgccgggttttaccaaacaacaggggggaaaaggggccccccccaaaatttaaaagcccaagccaaaaggaaaatttttaacaaaaaaaaaggggcacccccctttttttttttttaagggggggggcgaaaaaaatttttttaggcccccccccccccccgaaaaaaaaaaaaaaaaaacccggggggccaaccacggggggcccccccccttttttgggaaaaaaaacccctttaaaaaaaaacccccccgggccggggtaagaaaaattgccctctttaaaagggaaaaaaccccttaaaaccccttaaatcccgggggggggggggcccccccctacaaaccccgaaatcggccccgggtttaaccaaaaaactgaacccggggccggggccaaaaaccccccaaagggacccccctttccccggcccgggggggaggggtattgggcacttttccccgggggccca

SEQ ID NO: 89160 - DNA, 959 bp, Oryza sativa
  unsure (1)..(959): unsure at all n locations
  Clone ID: PAT_MRT4530_87942C.1
atggcgacccaagatgctgagctgtgattnaatggccggctgccatctacatcaacacctcgtcgggcatgctaatttggtggangtcggcaccaggccgccccgccggagcgcgcagaatgtcatcggagcaagcatggttactactgagccgtgcccgacagaagtctcattcgaactgccggaatgtcgccgaactgcccgcatccgcggacgtcgtcaagtcgctgagccgcccatgccatcctgatggatcagagccatcgtcaaccaggaggccatctcgtccaccgtatcggcgacgcccagacgctcgctgttcccatcaagccgccggtagcactgtccaccgagtgccaccccgtcaaagcctgccattgtgccggcatcatcgcaccgacgccgagccctaaagatgccgcagttgtgatcgctattgtgtgaggacgtctcacagagactccaccggccggcgacgccttcacactcgtcgcggtctcttcggtcaccgtcgacgtcttctcaatcatcttcgatggtcctgccactttcctcacactcatcaccaagctgtttgaggagaacgccggagcgccattgcttggtgcccgcacaccatcatcaagtccgttcgggaagacttcacctcgtctaggcggaatcgtcatcaagttcttccatgatgcctgcacttcgccaagctggagttgtctccatgacatctttctctctacaccacatgatgagatgctatctgtctacaatgttttcacttcatcacactaagatgagatgccatccgtctgtggtgctctcctctcttaatcaagatcgatgtagtccgtccgtgattctctccctcttcgttgggattgagatgtagtcgctggtccgtgtattgcagagtcgcttgtctacatcaatataaagcaagaatggtgccgtctgtgatgcagggg

SEQ ID NO: 89161 - DNA, 739 bp, Oryza sativa
  Clone ID: PAT_MRT4530_87943C.1
atgtgcgaacttgatattttacacgactctctttaccaattctgccccgaattacacttaaaacgactcaacagtttaacgttggcttgccacgcattacttgactgtaaaactctcactcttaccgaacttggccgtaacctgccaaccaaagcgagaacaaaacataacattaaacgaatcgaccgattgttaggtaatcgtcaccttcacaaagagcgactcgctgtataccgttggcatgctagctttatctgttcgggcaatacgatgcccattgtacttgttgactggtctgatattcgtgagcaaaaacgacttatggtattgcgagcttcagtcgcactacacgggcggtctgttactctttatgagaaagcgttcccgctttcagagcaatgttcaaagaaagctcatgaccaatttttatgtcgaccttgggagcattctaccggggaacaccaaaccgctcattgtcagtgatgctggctttaaagtgcatggtataaatccgttgagaagctggttggtactggtaaggtcgagtaagaggaaagtacatatgcagacctaggagcggaaactggaaactatcacaacttactgatatgtcatctagtcactcaaagacttaggctttaagagctgactaaaaccatccatcctcatgcaaattctttgttataactcgctctaaaggccgaaaataaaggctggaacggactcttggcccaaccct

SEQ ID NO: 89162 - DNA, 2230 bp, Oryza sativa
  Clone ID: PAT_MRT4530_87944C.1
ctaggcttccgtcgagacgccgtcgtgatgtggaggccatagatcgctcccgccgccgccgtcctcttcatcgagcaaagcgtgagacacagaaatcaccgtgtcccatgccatcactggccgcccttgccttcctgcagtcgcgctcgcttgcgtctcccctgtgggctgcgaccagaaagctcctatgactctcctctcaaatactagatatcttaaagctcctagctttgccgcaaccagggcgatttggactccgtcaactaatcgtatcgtgacacgtatccagacgtggaatccacgatctctcgtctctccacgtcgcatcccaatccccatctcgcttctcgcttctttgaccggcggcgccgatgctcctccgccgcggcgccgcctcctcctcctcttccatggcctttccagcgccgtcgttttacccgtcctccaacagtgcttccctaaagtgtacggtggtggctgcgctcgatggaggggctcaacggcggtttcaacatagccttgaggtcggggacctggcggcggcgtcggagcctctagcacaggggtttggcagcggcggctgctgctggaggtcccagcgatttgaggtcgctgcggctcccccaacagttttttggaggtcttcgacgtggtgacgacgcatcgagttcgacgggtccctgtcgccgccggcggttaggtgcgtgattagcagctccctgtgttttcccctttcatcaatgggcgtgtgattcgagcgattacattgatttaaatgtggatttcgagtttctactgtctactgggtaggccaatggcatagaggaggattaggacgagaagaagctgtcctctctgttgcctctcctgtacagcccaacatactactatcatagtgattgaagctagcacatgacttgatgcgggcggccgtgaagcggcgagagaaggatgcggtggtcgaaagggaggcgtccagttagcgttgacacgatccaggcaacaagtgtgcaacacagtgctgtttgtgtatgcacataacaagaatgaaattaaggggagcagctctggtgcgacggggaagttggcagcacatacgcatttcattgagcacatcttgagcgttttagatttcttgaatgttttatattgtgatcagaccaataagctccaacttcatcttcctaacatacagtatgtcacgtatgatgaggatggtaatcgtcacctccacaaagagcgactcgctgtataccgttggcatgctagctttatctgttcgggcaatacgatgcccattgtacttgttgactggtctgatatccgtgagcaaaaacggcttatggtattgcgagcttcagtcgcactacacggtcgttctgttactctttatgagaaagcgttcccgctttcagagcaatgttcaaagaaagctcatgaccaatttctagccgaccttgcgagcattctaccgagtaacaccacaccgctcattgtcagtgatgctggctttaaagtgccatggtataaatccgttgagaagctgggttggtactggttaagtcgagtaagaggaaaagtacaatatgcagacctaggagcggaaaactggaaacctatcagcaacttacatgatatgtcatctagtcactcaaagactttaggctataagaggctgactaaaagcaatccaatctcatgccaaattctattgtataaatctcgctctaaaggccgaaaaaatcagcgctcgacacggactcattgtcaccacccgtcacctaaaatctactcagcgtcggcaaaggagccatggattctagcaactaacttacctgttgaaattcgaacacccaaacaacttgttaatatctattcgaagcgaatgcagattgaagaaaccttccgagacttgaaaagtcctgcctacggactaggcctacgccatagccgaacgagcagctcagagcgttttgatatcatgctgctaatcgccctgatgcttcaactaacatgttggcttgcgggcgttcatgctcagaaacaaggttgggacaagcacttccaggctaacacagtcagaaatcgaaacgtactctcaacagttcgcttaggcatggaagttttgcggcattctggctacacaataacaagggaagacttactcgtggctgcaaccctactagctcaaaatttattcacacatggttacgctttggggaaattatga

SEQ ID NO: 89163 - DNA, 253 bp, Oryza sativa
  unsure (1)..(253): unsure at all n locations
  Clone ID: PAT_MRT4530_87945C.1
gngaagccgccgagaacaaattgatgtgtttattgttcaaatcgtccgaatgtgtcgaccttgaagaaactgatacaagcgttctacgacacgaagaataactaaacggactggtataataggctggattttacatggacatagactattctaaaactacattgtaacaccatgtcaatggcacagctggcccttgccgccagcataaggattgtaggctgggctgcctaatggctcggctaactaccattca

SEQ ID NO: 89164 - DNA, 4283 bp, Oryza sativa
  Clone ID: PAT_MRT4530_87946C.1
ctaattatagagagattcatctggaaagatatccctgccatctgcaccaactgtaacaacatggacggcaagttgttggtcttccaggaggctcatcctgaattgcttcgcgttgtggcaatcgaccatgtagagtctctttagtgagattagattctctgcctgatacagcgctggacagtcctgcgcaagcaagtcctttagattacagagattggaaattctcctcaaacacctgttgttcttgaccttgagccataacactgaaggaaggttgtcaacttcttgcagcgtgtgagcaccttcgatatggattcttcttaagttagcaatcctatgcaagtcttcagggagagcccttagttttgggcagtcgttaagaaacaaacgcttaaggcaaggcatcagaacaagctgttcagatttgccacacaaattccatgtgttgagagaccaactttccaaattgctcatgttagtgatgagaagcaattcgagttttggaaaaatagttatatgctttgcgctattgacgcctttccctagcagccccgcaccgctgaatcccttgactgtaaaactctcactcttaccgaacttggccgtaaccttcacaaagagcgactcgctgtataccgttggcatgctagctttatctgttcgggcaatacgatgcccattgtacttgttgactggtctgatattcgtgagcaaaaacgacttatggtattgcgagcttcagtcgcactacacggtcgttctgttactctttatgagaaagcgttcccgctttcagagcaatgttcaaagaaagctcatgaccaatttctagccgaccttgcgagcattctaccgagtaacaccacaccgctcattgtcagtgatgctggctttaaagtgccatggtataaatccgttgagaagctgggttggtactggttaagtcgattctatacgatggatttccaacgcaaatgcatccccaatgttaagtggatacactctttctttggcaaggcagctcatctagtggactccactgaggttgttgggcattttcagaaggttcttacctccagaggcaagttctgtatctgctcaatcgccattggtgtgattgttgaggttataatcatgttcccaatccagcaccggtcatacggagatggaatcaacaatgttcttgttcttctgagaggagggataccgatcgcaatgcctactgttctgtcagtcacacttgcaataggttctcatcacctgtctcaacagacagtatatcacatatcattactaaaattaattaatttttggcaaggtgctatcactaaaaggatgacagccatagaagaaatggcaggaatggatgttctctgctgtgacaaaattggaactctcactctcaaccatctcactgttgacaaaaacctaattgaggtagagaactttaataaaaatatgtggtttccggtggacgccggcatgttcccggagcacaagtacgagatcgtgaggatcattcaacgggagggccacctgtgcgggatgaccggcaacggcatgaacgcgctggcgctgaagaaggccgacatcggcacagccaacatcgcacgcgctagcactgaagaaggccgacatcgcgctcacggagcccggctgagaggcacacatgctgagagcgcatgtgcaatctgtgatgagaccaaagcatacggatcgtgcgcgacggctcgggacttcgagatttacgcggcgcatgccacattcgaggacccgcttatgcgagctcatggggttaagcagatcaaatcggccttctacacactccccaagttattcggtgaatccaaaatcgtggagtacacaattacagaaaacgaaaccgcgcccggaaaagtcgagatactgatcgacaacaagcagcactacaagttcctgggcagggccatcgacctggcgtcgctcatcacgctcgacgtcgaggacggcaaggttgtgaagcaccaagactggtgggacaagaagcctctcaagaacagggacacggtgagcttcccggtggtcggccggctggcggaggcgacccgccgcggcgccatgctgctcactcacgctctcatgggctgcggcaaggacccataggccatcgccttcgacagccctacaagtggacaatctcgctgcccgtataaaaatatgtttgtcgaactcgatattttaccaggactctctttaccaattctgccccgaattacacttaaaacgactcaacagcttaacgttggcttgccacgcattacttgactgtaaaactctcactcttaccgaacttggccgtaacctgccaaccaaagcgagaacaaaacataacatcaaacgaatcgaccgattgttaggtaatcgtcacctccacaaagagcgactcgctgtataccgttggcatgctagctttatctgttcgggcaatacgatgcccattgtacttgttgactggtctgatattcgtgagcaaaaacgacttatggtattgcgagcttcagtcgcactacacggtcgttctgttactctttatgagaaagcgttcccgctttcagagcaatgttcaaagaaagctcatgaccaatttctagccgaccttgcgagcattctaccgagtaacaccacaccgctcattgtcagtgatgctggctttaaagtgccatggtataaatccgttgagaagctgggttggtactggttaagtcgagtaagaggaaaagtacaatatgcagacctaggagcggaaaactggaaacctatcagcaacttacatgatatgtcatctagtcactcaaagactttaggctataagaggctgactaaaagcaatccaatctcatgccaaattctattgtataaatctcgctctaaaggccgaaaaaatcagcgctcgacacggactcattgtcaccacccgtcacctaaaatctactcagcgtcggcaaaggagccatgggttctagcaactaacttacctgttgaaattcgaacacccaaacaacttgttaatatctattcgaagcgaatgcagattgaagaaaccttccgagacttgaaaagtcctgcctacggactaggcctacgccatagccgaacgagcagctcagagcgttttgatatcatgctgctaatcgccctgatgcttcaactaacatgttggcttgcgggcgttcatgctcagaaacaaggttgggacaagcacttccaggctaacacagtcagaaatcgaaacgtactctcaacagttcgcttaggcatggaagttttgcggcattctggctacacaataacaagggaagacttactcgtggctgcaaccctactagctcaaaatttattcacacatggttacgctttggggaaattaacgtggaatccacgatctctcgtctctccaccgccgtcgttttacccgtcctccaacagtgcttccctaaagtgtacggtggtggctgcgctcgatggaggggctcaacggcggtttcaacatagccttgaggtcggggacctggcggcggcgtcggagcctctagcacaggggtttggcagcggcggctgctgctggagccattcagaacacgatagccatgacagccaggcaaaggcaacagaaaaaggcccaagatccccgctcaatcttcaaggaataggtttacttcatgataattcatgtctcatgttaatattgggagaggcaacccactatgctcagctcatggatcttcaggaatggagctgccagcatcttattgacaaacaaatacaaggtagatcgatatttgtcaacgccttagctatactagaatacgaggggcatctaagagaaaaatacaaatatagcttcccggtggtcggccggctggcggagatgacccgccgtggagccatgctgctcactcacgctctcatgggctgcggcaaggacccataggccatcgcctccgacagccctacaagtggacaatctcgctacccgtataaaaatatgtttaatatagtttattctctattcactagtactacctcctttcctaaatatataaagttggtttgtttaattttaaacgaatcaacgtcatacaaataacacggagggagtacattttaggtggactgtaaattaaagattgtactccagatgagtatgacgtttttttgcctcatatcactattatgtaatatcatttgtatctactacagtacaatgtttcctttctgatgatgaattaattaaaccctttgtg

SEQ ID NO: 89165 - DNA, 177 bp, Oryza sativa
  Clone ID: PAT_MRT4530_87947C.1
atggcctcagacggcaatggcaaccgtatcagcggcggatccacagccgaagagcttaggaagggcggatccgcctccagtggccttgggagcggtggatccacccttgcacgccatagagagaggaggtggaaaggtggtgcggcaatcacggcaatggtggcggctggctcatag

SEQ ID NO: 89166 - DNA, 174 bp, Oryza sativa
  Clone ID: PAT_MRT4530_87948C.1
atggtggaggtggcggcatcgggaccgggcaccggcacatgcgagaacagcaacaccaacgtagacaacaacaccaacaatgcctcatctagtaccggagcattctccaagttttcgaattcctccctgacacatgacgaggttgaaccatatgatatggagaacattgcgtga

SEQ ID NO: 89167 - DNA, 1914 bp, Oryza sativa
  Clone ID: PAT_MRT4530_87949C.1
atggcggcggttgcaaggtcgcgacatcccggccactgtgcgcggcgacctctacctgtcacgtcgttgttcaggctggccgatgcgacgcccgcgtcgcgccgccgccggctagctgtgccgggacctcctcttactggttgtgagcagagagattctactctcacagtgtgcactctggacgagaaatcgaggaacccaagctggaaggcgatcgggtacgccgcgcctgccgccgccgccgccgcggtggagcaacgcagaccggcgtcgccgtcgcggcggccgctcgaggatggcgtggtggagacgaggcggatggacgacaacgccctgctcaggtcgctcgtggagaagggcctcgccgtgaagacgggaacggccgcgcaccacacggtgcagtgcgacgccgtggtcgtcgggtccggctgcggcggcggcgtggccgccgccgtgctcgcgtcgaaggggtacaaggtggtcgtcgtcgagaagggggactacttcgccacggaggattacacctccctcgagggcccgtccatggagcggctctacgagaagggcggcgtgttcggcacgtccaacgtcacgaccatactgttcaccggcgccacggtcggcggcggctcggcggtgaactggtcggcgtgcatccgcacgccggcggagatcagggaggagtggtcgcgcgagcacgggctgccggtgttcgcgagcacggcgtacgcgcaggccatggacgcggtgtgcgatcggatcagggtgaccggcgggtgcgaggaggaggggttccagaacagggtgctccgccgcggctgcgacgcgctcgggatgcgcgccgacgccgtgccgcgcaactcgtcggaggggcacttctgcggcagctgcaacctcgggtgccccacgggggacaagaagggcaccgacacgacgtggctcgtcgacgccgtcgagcgcggcgcggtcatcctgaccgggtgcaaggccgagcacttcatcctcgagaggaacgccggcgggaggggcggccggagcaagaggtgcgtcggcctgatggcgacgtgcacgagcagcggcatcaccaagaagctccgcatcgaggcgaaggtgtccatctctgcgtgcggcgcgctcatgacgccgccgctgctgcgaaacagcgggctcaagaaccgccacatcggccggaaccttcacctccacccggtgtccatggcgtggggctacttcccggacagcacggcggagctcccgggcaagtgctacgagggcggcatcatcaccagcatgcaccgcgtcaccgaccgcaccatcatcgagacgccggcgctcggcccgggcgcgttctccgccgtggtgccgtgggagtccggccgcgacatgaaggagcggatgcgccggtacgcgcgcacggcgcacgcgttcgcgctggtgcgcgaccgcggcgccggcgccgtcgacggcgagggccgcgtccgcttctccccgagccgcgacgacgccgaggagctccgcgccggcctccgccgcgcgctgcgcatcctggtggccgccggcgccgccgaggtgggcacccaccgcagcgacgggctccgcctccggtgcaagggcgtgcgcgacgcggacgtggaggcgttcctcgacgaggtgaccatcgagaagggccccatgtacccgggttccgacaagtgggccatcttctgctcggcccaccagatgggcagctgccggatgggcgcgagcccacgcgacggcgccgtcgacggcgccggcgagagctgggaggccgaggggctctacgtctgcgacggcagcctgctcccgacggcggtgggcgtgaacccgatgatcaccattcagtccatcgcctactgcctctcgaacggcatcgccgacaccctgtcgcactag

SEQ ID NO: 89168 - DNA, 321 bp, Oryza sativa
  Clone ID: PAT_MRT4530_8794C.1
atgtggcaagggaaaatcgtgcacgagggcgtcacgggtccaatcaagcatgaggaaaatcacgcatgcgaggatgttacgggcccaatcgaggcagcgcgcaaagggcgcctcacagacggaaggagcactcgcgcgacgtcaacacgcgtgactgcctcgatcccgcgcgaccaattcgcgggactctgtatcggtgcgcgcctccgccctggtgcagcatcacctcaacggcgtgccaactgcagcgggtcccgcgtcacggtcgcacgccatcgcccggagttgcagcatggactgacgacgcgtcgacgccagtac

SEQ ID NO: 89169 - DNA, 402 bp, Oryza sativa
  Clone ID: PAT_MRT4530_87950C.1
gtggtcgcctaacaacggctgcataataggccatccgggcacgcataatcactagtcagtactggacgaggctggcagtcagtgaagacataaacacccaacagctgcggcataatatgacagccgtgtatgtggaggcaccactcagagagcgacggaggcaggcctgtgctgaagtcgttaacgcccaacagctgctgcatatagttgccaggcgtgtatgcggtggctccactctgtgtgaacatactgctgccggctgataatcggcagactccccacaccgagggcatcattggccaaccgtgtaggtggaagcaccagtctgtggagacagaagcaggcctgcggcgaaatcaaatactcgcatagctggagatctaatatgccatgcgtgtatgc

SEQ ID NO: 89170 - DNA, 2495 bp, Oryza sativa
  Clone ID: PAT_MRT4530_87951C.1
gatccccgggctgcaggaatcggcacgagggcgtctcgttcgatcgctcaccggccgcgcgtccccttgggctgcgcgccgatcgatgatgccggccgtcgactagccgcgcggggccggccagaaaccaccaggcgccagccaattaaccctgcctaaacgccgcccgccaaaagcccctgtgctgctgctgtgccgccatctcaccggatctcgacgccgttgctggagctccacgtacgagcctggcttctccgccgaaccacgtgacgggcaaggcaaacaggtagctactattcaagatggctgcccagcatgatatggtgtcaaagtttggtgctgctgccattgtggttatgctcatgcttgtcgtccctaacagcggcagcggcgaagatgcagggcatgacaaggatcaattggctcctatgtcaagcgaagcagaatttggattttctctcccaattgttcacgggcgtccaccggcacccggtatggatgacgagaagtttgtgactccatttagaatttatgaggatgttgtctatcttgctgaaatggagattggtgagcggcaacagaagcaatacctcctgatcgacacaggcagctctttggtctggacacagtgcgacgaatgcccgcattgtcacattggcgatgtgccaccatatggaagatcccaatctcgaacattccaggaagtgagctgtggtgatgatgatgacaatgataaagaagaagcaattgctagttactgtccagcaaaaccgccgggatatatcactttgtgcgtcaatgggaggtgtatgttcaaggcgctatataatttgaccgggcaaggcgagactgttcaaggatacatgtcaatggatacatttcacttcattgatgacaggagatttgactaccaagctaagttccggatggtttttgggtgtgcacaccaagagaatatcgttcttacagctgtcaaggaatgcactggcatattgggattaggtatgggcgatgcatcgtttttgaggcagaccggaataactaagttctcgtactgtgttccacctcggatgccagaaccagcagctccaactgttggtgtagaacagcaaccttttcagtatgttgattgggataacttggagatagatgaaacgttagatgatgagggaaggattcaggtcatgaatgatgaccaattatacgtactcctaggcttgagggatgaggaaagggcaaaaaaatcggcgcatgctgctggagcgaatggttcaagtaatgctgctggagctgatgattcaagtaatgctgctgaagctgctggagtcactgacggcatcgagggtgcagcaattcctgttgatgattcagtaccgggtgagcttgttataagctatgacaagaataacccttgtatggatcgatacactaagtacccctcaatgaaggaattcagattggctgtaagacagtttgctatcaagaaggaatttgagctaggcaaagtgaaaactgacccggagaggtatagggatgatcacaaggaagaggtccttaagagatcacctggaagtgttatagaaattgacatcaagatagttgatgggagggcatactttcataggttttttgctgcatttagtccttgcatcaaggggtttgtggctgttgcatttgggtttatagactccgagaccgaggacaactgggtttggttcatgactcagcttcatagggcaataggagacctagaacctcttgctatttgttcagatgcatgtaaggggttagagaatgcagtcaataaggtgttccctgctgctgaacgaagggaatgtttttggcatcttacgcaaaaattttctaagaagttccatggtgagacttttggtaatatgtaccctgcagcaagagcctatagggaagaggtgttccagaagcacatgttccctattattaatggaactcctgaagtttggaaatatttgacaatatatcataacctaaagtggatgaggtgtggcttcaaccccgcaattaagtgtgattatattacaaataatattgcagaggttttcaatgcatggatttctgatatcaaggatttgccaattgttgacctagttgacaagcttagagagaaggtgatggttctatgggataagagaaggagaattggagaaaggcttaatgaggtgcatgactatgtcaaagaatttggaagacacgttgtttcaatagtggcaaacacatgcacatgtgaggagtggcaacacaccgggcagccctgtgggcatccattggcctttttaacaactcagagaaatgttgacttggaagggtatgttgatatggtttactcagtggagaaattcagggctgcatatgagagagataccggcaatgccagacaagtcacattggccaaaggtgaaaatgcctttcgatttgggcgcaccactagagaagaggagtgttgggagacaggaaattga

SEQ ID NO: 89171 - DNA, 348 bp, Oryza sativa
  Clone ID: PAT_MRT4530_87952C.1
aatgattcctgataccccaagcatctggcggggggtatttttaggggcttattagcttgtgtgaccctctccctgtgcgctacggagactagtgcacccttgacctcttagctggggacttggagtacgataaagaagaacaaggatgcaactactaccaccacgatgggctctgtctgtggacgactccggcatcttcagcgaaaccagctatggctgagggagacacccggggtccctccattgagccgaggcactagaaggatcccgacttccctgaggggaagactgcatcggatgacctccaccacgtcaagtttacgttcacaagtcatgctttctgggctg

SEQ ID NO: 89172 - DNA, 219 bp, Oryza sativa
  Clone ID: PAT_MRT4530_87953C.1
atgccgagcagccacgcctcctccctgcgccaagccgccaccaccacctacttgcgtcaagccgccaccattgtcctcctacctgccaaggcttcctcgcgatgcctaagctgccgccaccacctacccacggtcattactgctgccgttgtttcacaatggggattcgggttcgagaggggaagagtcgacgccgagagcctgatcctggaggggtag

SEQ ID NO: 89173 - DNA, 287 bp, Oryza sativa
  Clone ID: PAT_MRT4530_87954C.1
tgaatgcacgaagtatgtgctgagccatgactttgattgacatttcttctctttatttgctgataaattagtgcggttcctaaaagatacttcattgcagtgctacaagcgttgatgttgaagagcatttgtacaagctagcaactagcatgggcatcactgtgattacttcctcgcaaaggccagctttgatccccttccattccttggagctgaaactcatcgacggagaaggaaactgggagctatgcgagatccaccaatgatttgtctgtccggttcgcatt

SEQ ID NO: 89174 - DNA, 248 bp, Oryza sativa
  unsure (1)..(248): unsure at all n locations
  Clone ID: PAT_MRT4530_87955C.1
atatgtggtttttttaaatgaggggagaccacactctttntcttcanaaaccaccaacccatctttcctaatttaactcaaaaaaaacaaatatatttcctttcctatatacatactctcccatctcactcttcattacaaaactaaacatctctctctaactcacaccaactcatttatccattttgtattcctctctaaatagcttaaattaattaccttcgcgtaaggtttcaaaaatttttttt

SEQ ID NO: 89175 - DNA, 582 bp, Oryza sativa
  Clone ID: PAT_MRT4530_87956C.1
atggcgccagggttcctgatgcttcttcccatcggatggatggcgctagggtttccgagtccagacgcttctccccatcaccgcatcgctggttgccgagtccagacgcttctcccccatcgccgcatcgctacacggctccccatcgctacctcccgcggtccctaccaccacctgcgcgccatcgccgcctcctgcaaccgagcgccctgtccccaccaccacctgcgcgtgatcgcgacgtgggtggatggggcagctggcaagcgcggatgtgcggcggcggccggggggcaagcgaggagtggcagctgggcgggcggcgagcgggggacgcggatgggaggaggcagcggcggtgggcacggatgggcggggaggaggcggcaggcgcagataggacaggggcagacgggcgaggggcggaggcggcaggcgacggtccgcgggtgggcgcaaggcgacggcagcgggcgcaaacggctgtcgctggcggtgctctccttccagatctggatggtgaggttcctcgcaatattatctgccctaatttgggtgaatcaagatgtccagaaacgatga

SEQ ID NO: 89176 - DNA, 2298 bp, Oryza sativa
  Clone ID: PAT_MRT4530_87957C.1
gcgtgtcttatggagcacctcaaccatgtcctcgtcctccaggccaaggtcctctggtgtgctttctgcgtcaactttgtcaccatctaaagcaagtgtcagatctgcgacactcagattaaccttctaagcatacgccctaaaaagcttgccaaacttctcaacatcacctcaccgaaactggtgatgcccacctttgtcttgaagttcaacgactaacttttctcttgcttcgtgtcgttcaggtgacttgtctagatctatatgttcagttggtattctggcctcaaccttttgcctagcagtttgagccaacttctccagaaaatcatcagctgattcagcaaatttcgccattgcttgcttctgtaatagaatggaaccatgcacaggtttatacctcagctccttcaatacgctgctctgctctgattcgtccgtgacagtggacttgggcttggggggtggcggcggcggcagccaatcctcctctcccaagtcgactaccgcggcagccttcgcggccttctgctcacccttatcccccttctcgtcggcattggcgtcgccgtcgccgtcggccaccttgcgccgcttgttgcagtggacgaagatgtcggacttctcaatgtcggtatcgtcgaagctgaaggccatggtgggctgcacgcgggagtagtcgaagagcggctccagctcctcctcatccgcctccgcctccgcacccgccgcctgttcttcagttatacttctcctcccacctgaaacgcctccgatcatcgacgacgattcttccatctcccagaggaggaagaggccgccgacggcgacgggggtgtagttgagggtgtccttggtgaccgggtacgacaccggcagcgagaagagcacggtgatggtggccacccacagcaccgccgcccagccgacggcgacgccgcaccgccccaggttgaagggccccggcacgaagtgcttccgcgccagcgtcaccctgaacaggatcggcagcgcgtacgccacgtacagcccgatcgtcgcgatcgacaccatcgcctggaacgccaccaagctccccagcgacggcaatgccatgcagagggagatgagggccgagagccagacggcgttgatcggcacctcgtgcttgttgaccttgtgccagacggacgacaatggcatcgcgccgtctctcgagaacgcgtacgccatccttgagttgcttgttaccgagctcatgccacagaagtatatcgcgacggcgacgatccctaggcagatgatcccgccgatgccgctcccgtaccggctcttgaaggcgaggtagaacacctcagcaatggcataccctccagcatcgttctcggggttcagcaggtaaggtatgtccttcactgcaaaggtgatgccaagaatgtatccccatcctactattatcgatatcccaatcgcgctgatgatgccgatcgggccattcctgtcagcattcttcgtctcctcggtcatatgcgcagacgcgtcatatcctgtcagcgtgtactggctcatcaggagccccagcacgaagatgtaaaagttactgtgaatcccagcgttgttttcagtgttgaaatgggtgaacacaaacttggcactggccctctcggtagcaaccgtcggcacagcaatcatgaggacaaagacacctagcatgttccaggcagccgcgaactgcccaaagaaggaaagccaggtgatggggaggctgttgatggcggcgtggctcagcaggatggcggcgtggaaggcgatcacgacgtacttggacgccatgtaccctcctccgttgttgcccccagtgctgagcaggatgatcacctgaatcagctgggccagtgagaagtccacgctggtcgtcaccgcccactgtccgacaatgttaaaccatccggtgatccaggaggcgaagggcgcccaacgcttgccggagaggcgggcgctccagtagtagaggccaccggaggtggggaaggaggagcagatctcggccatggagaggccgacggtcatggtgaaggcgccggcgacgaaccagccgaacgtcatggtggccggcccgccgaagctgagccccgtgttgtacagcgtcgtgatccccgtcagcaccgagatgatggagaacgagaaggcgaagttggacagcactgagaggtcgcgcttgagctcctgcttgtagccgagctcccggaggcgcgcgtggccggtgtcgccgccgccgccggcttcggcgtccgcagccggggccttgttccaggtcat

SEQ ID NO: 89177 - DNA, 790 bp, Oryza sativa
  unsure (1)..(790): unsure at all n locations
  Clone ID: PAT_MRT4530_87958C.1
aactttcagttcttatctgaatatctgaactttcttctgctttgcagtgggcggtgacgaccagcgtggacttctcactggcccagctgattcaggtgatcatcctgctcagcactgggggcaacaacggaggagggtacatggcgtccaagtacgtcgtgatcgccttccacgccgccatcctgctgagccacgccgccatcaacagcctccccatcacctggctttccttctttgggcagttcgcggctgcctggaacatgctaggtgtctttgtcctcatgattgctgtgccgacggttgctaccgagagggccagtgccaagtttgtgttcacccatttcaacactgaaaacaacgctgggattcacagtaacttttacatcttcgtgctggggctcctgatgagccagtacacgctgacaggatatgacgcgtctgcgcatatgaccgaggagacgaagaatgctgacaggaatggcccgatcggcatcatcagcgcgattgggatatcgataatagtaggatggggatacattcttggcatcacctttgcagtgaaggacataccttacctgctgaaccccgagaacgatgctggagggtatgccattgctgaggtgttctacctcgccttcaagagccggtacgggagcggcatcggcgggatcatctgcctagggatcgtcgccgtcgcgatatacttctgtggcatgagctncgtaacaaagcactcagggatgggcgtacgcgtctcgagagacgcgcgatgccattgtcgtccgtctgg

SEQ ID NO: 89178 - DNA, 626 bp, Oryza sativa
  unsure (1)..(626): unsure at all n locations
  Clone ID: PAT_MRT4530_87959C.1
cacaactgtttcagctgcttttagccttcaattgaatcgtcaatttcttagtacatattgtcaatctacaaccagtgtataaaatgtataatccccttccacgtaatataatttcgctgaacaaatcaacaactaatcacaacaccaccaccatgacatgatatgctcccgtttcccttccagatcatcttcttacctgttcttcagttatacttctcctcccacctgaaacgcctccgatcatcgacgacgattcttccatctcccactgcatttccatatccaccggcgaaaaccaaaaccaaaacctcaatcttggcttagctagccatcgaggttggtgatggggcctttgaaccagtgcctggcgctgaggagccaggaggagaggacgaggaggaagaggccgccgacggcgacgggggtgtagttgaagggtgtccttggtgaccgggtacgacaccggcagcgagaagagcacggtgatggtggccacccacagcaccgccgcccagccgacggngacgccgcaccgccccaggttgaagggccccggcacgaagtgcttccgcgccagcgtcacccttgacaaggatcgcagcgcgtacgccacgtacagcccgatc

SEQ ID NO: 89179 - DNA, 9654 bp, Oryza sativa
  Clone ID: PAT_MRT4530_8795C.1
atggccgagcaaggaaaagcgcacgacctctctccgagtgtgagcggcgacgacggggagccgaatccacgccgtcgagctcgtactcccccacctcctccacaccaaagtcctaagcagggggaggcgctcgagagggatgataaatccgcagcatcaccggtcgcgggtggtgcaggagaacggcgagatggggagtgtcgcctcctcgtctacggcgacggcagcacgcctcagggtgcgcttcaggctgctggcgcgctcctacgacacccgcctgtcgtccatgacccggagtctccagcccaacgatggctggaagacgtggccaacttggtcatgacggcacagcagtgcctgggtgctggtggacggtccgccaccaccaagacctccggcgccgctaccaccggctccgtgtcatcaaggcggagggcgcggcgagcggcggcggctgcacgtcattcggctgccactccctcgtcgacaccgtcgactcgggaggatcagcatggggagccggatgcccgcctcaacatcgagcgccggcgtaatagccggcgtactccccgtgcaacggagggcgcctcctcgtccagagtgtcacctcgacacggacgtgaagatcagccctccgtgcccccggccggtggtgttggctgtagagcctttgtggcgagtcttcggaatgtccgttggcccccaaggttccggcccaccatcaccgagaagtacgatgggagcgtcaaccccactgagtttctccaggtctatacgaccgggatcgaggccgctgggggtgacgacagggtcatggcgaacttctttcccatggccctaaaaggacaggcgcggggttggctaatgaacctgccacccgcgtcggtccactcctgggaagatttgtgccaacagttcaccatgaacttccaaggcacatatccgcgcccaggcgaagaagcggacttgcatgcggtacagcgaggcgatgatgagtcgcttcgctcgtacattcagcggttttgccaagtccgcaatactataccatgcatccctgcacacgcggtgatctatgcgttcagggggggtgtgcggcacaaccgcatgctcgaaaagattgcctccaaagagccccagactaccgcagagctttttcagctcgcggaccgagtggctcgtaaggaggaggcctggacctggaactcctccggttccggagtggcagcttcggccgcccccggatccgccgctcagacagggcggcgtgacaggaggaggaagaagaggccggaccgttccggcgacgagggtcatgtcctcgccgtcgagggcgctccgcgggccactcgaaaggggaggcctgcgagcgacaaaaagaacgaggctggtacacccagcagggagcgcctcgccggcagatggtgctctgtccacaacacctccctccacaatctcgcgaactgtcgtgcggtcaaaaacctggccgagcgaacgaggaaatgggaggaggacaggaggcaggaacgccgtgagggcaagtccccggcggttccttccggcaaacggcgaagtgaggccaagcagaaggcccccgctgttgacatcgatgatggtgatgatgacctaggtttccaagaacctggggccaccattgccaccgtcgatggaggagcatgtgctcacgtctctcgacggagcttcaaggctatgaagcgagagcttctggccatggcccctacccatgaggcgatgcgtcgggcgcggtggtcggaggttgctctcactttcgaccagaccgaccacccaccgtgcattgcccggggagggcaggttgcgatggtggtttcccccaccatctgcaacgtgaagttgggacgtgtcctcatagatggaggagcggctctcaacatcctttcccccgcggcctttgatgctatcaaggccccggggatggtgctccagccgtctcaaccgatcatcggtgtgacgccggggcacacgtggccattaggtcacatcgacctaccggtcaccttcggtggacccgccaacttccgcacggagcgggtgagcttcgatgtggcggacctcagtctgccctacaacgcggtcctagggagacccgcgttggtgaagttcatggcggcggtccactacgcctacctccagatgaagatgccgggccccggtggccccatctctgtctgtggcgaccttaaagtcgcgcttgcttgcatggagcagcgcgcggaccgcctcgctgctgcgtccaagcccgagggtggtgacgagaggcttggcccctctgcccccaccgccccgaggcagcggatggccacatgcgacgaggtcccggaagacgcgctcgtctccttcctgcgggcaaacgctgacgtcttcgcatggagaccagcggacatgcccggggtccccagggaggtgattgagcaccgtctcgccgtgcggccgggcgcaaggccggtccggcagaaagtgcggcggcaagccccggaacgtcaagccttcatccgcgaggaggtggctagacttttggaggccgggttcatccgtgaggtcatccatccggagtggctggcgaacccggtggtcgttcccaaggcgaacggcaagcttcggatgtgcatcgactacaccgaccttaacaaggcatgtcctaaggatccttaccccctgcctcgcatagatcagattgtcgactccactgcggggtgcgaccttttgtgttttctagatgcatattctggttaccatcagattcgcatggctaggaaggatgaggaaaaaactgcgttcattacccccgtaggaacctattgttatacatcaatgcccttcgggttaaagaatgcaggtcctacttttcagcgtactactcgaatttctttgggtagccaaataggacgtaatgttgaggcgtatgtcgatgacttggttgtaaaaacgcgcaaccaagagaccttactctcagatctagcggaaacttttgagaacctccgctccgcccgcataaaactgaaccccgataagtgcgtgtttggtgtacctgcgggcaagcttctcgggtttttggtctctgcccgaggcattgaggtcaaccccgagaagatacgagctatagagcggatccgcccccccagcaaacttagggatgtgcagtgcgtcactggttgcatggccgccctaagtcgtttcatatcaaggctgggagagaaggcgcttcccttgtttaagctcctcaagcgctcggggccgttcacttggacggaggaagctgaacatgcccttactaagttaaaggcatatctcagctctaaaccctaaaccctaaaccctaaacgctaatcccagtcctcgaaaagcgcgggtcggggctagtgcctggggagatccgcatgtcgagactggccaggccgggaacgtggtgaccgaggggtatgggtgacccgattgtgggtttttgccgattcccccccggagttcaccacgccccggggcacggctcggttctgggccccgtttggcgattttagccgacccccccccccttcaggggtagaagcgacgaaggtgttcgatgttccacgggtttggcagctccgtgccgtcgcccgtggccagccgtaccgagcccggccgggggacaccgatcactcgatacggaccctcccacattggtgagagtttgctcaatccagcacgcgtttggacgcggcgtaggacgaggtcgtcgacgcagagtgatcgggcccggacgtggcgctgatggtagcgccgcaggctctgctggtagcgcgcagctcggagggccgcgcgccgccttcgctcttccaagtagtcgaggtcatctctacgaagctgatcttgatcagcctcgcagtacatggtggcccgaggagacctcagggtgagctcagatgggagaaccgcttctgcgccgtagacgaggaagaaaggcgtttccccggtcgctcggcttggtgtggttcggttcgcccagagcaccgctggcaactcctcgatccatgaatcgccgtgcttcttgagaatattgaaggtcttggttttaaggcctttgaggatttctgcattggcgcgctccacttggccattgcttctggggtgggcaggtgaggcgaagcagagcttgatgcccatgtcttcacagtagtcgccgaagagttcactagtgaattgggtgccattatccgtaataatacggttaggtactccaaaacgggccgtgatacccttaatgaatttaagagcagagtgcttatcgatcttgacaaccggataagcctcgggccacttagtgaacttgtcgatcgcaacatacagatactcaaacccgcctggggcccgtttgaacggtcccaggatatcaagcccccagacagcaaatggccacgacagcggtatgatctgcagggcctgggccggctgatggatttgcttggcgtggaactgacacgctctgcatcgccggaccagatcgactgcgtcattgagagctgtcggccaataaaatccttgacgaaaggccttgccaaccagggtgcgcgaggcggaatgggctccgcactcgccctcatggatgtcaacaagaagctcaacgccttgttcctgaggaatgcacttcaggaggattccgttagccgcgcgccgatagagggtcccttctaccagcacatagcgtttggaaatgcgttgtacgcgttcactcccttcgcggtcctcaggtagagtcttatctgtgaggtatgtttggatctcagagatccaagcaatcaatctaagggagcttggaacgctctcttcgggtcccgaggcctggactccgacgggcctcgggtgccggtcaggcgcatccgtctcccctgaggggtcgggtcgcgccgacggctgggtaagcctttcttcaaaggcgcccggtggggtctgggctcgcgaggacgcgagccttgagagttcgtcggctatcatgttgtcccttctgggtacatgccgaagctctatcccgtcgaaatggcgctccatacgccgcacttggcgtacgtaggcgtccatctgtgggtcagagcaccggtactccttacagacctggttaacgactagctgggagtcgcctaataccaagaggcggcggatccccagtccagccgccactctgagtccggcaaggagtccctcgtactctgccatattgttagtcgctcggaagttgagacggaccaaatatctgaggacgtctccgttcggagaggtcaacgtgacccctgcaccggcgccctgaagagacagagaaccgtcaaactgcatcacccagtgggcggtttgaggcagctgtgaggggttcgtgctggcctcgggtattgagacggtctctggagccggggtccactctgccacaaaatcggcgagggcctggctcttgatagcgtggcgtggttcaaagtgcagatcgaactcggaaagctcgattgcccattttaccactcgtcctgtaccctctcgattatgcaagatttgaccgagggggtaagacgtaaccacagcgacccgatgcgcctggaaataatggcgcagtttcctcgaggccatcagaatagcgtaaagcatcttctgggcctgtgggtatcgggtcttggcgtcccggagggcctcactaacaaagtagacaggccgctgcacctttcggcgaggccgatcttcttcgctaggggccgcacccccggggcgttcttcgtccgagtggcccctcggggcgcacccgtcttctgtgccgatgacctcggggtcggaagacgacaggagcggccttcccacagtggcctcgggaccgtcctgggggttgggggctcctggtgtcatcggacaagcgggcaaagggccaactccggtcgtcaggggccttaggccaccgttcggctcgggggcctcttctccctgctctctcccgggtcgaatcggtacagggttagcctcggggtcagagggtgataggtgcggcctccccgcagtggcctcggggccttcctgagggtcgggggcacccgacaccgtctgacaagcgggcggagggccgactccggtcgtcgggggccttaggccaccgttcgactcgggggcctctcctccctgcctgctcccgggccaagtcggcacagagtgggggtgcgcagaatgaggattgtcctcatcgcgctccacaaccaacgctgcactaactacttggggggtcgctgctaaataaagtagcaggggctcatttggctccggggcgactagaaccggaggagagctgagatatgcctttaactgagtaagggcatgttcagcttcctccgtccaagtgaacggccccgagcgcttgaggagcttaaacaagggtagcgccttctctcccagccttgatatgaaacgacttagggcggccatgcaaccggtgacgcattgcacgtccctaagtttgctgggggggcgcatccgctcgatagctcgaatcttctcggggttggcctcaatgcctcgggcagagaccaagaacccgagaagcttgcccgcaggtacaccaaacacacacttatcggggttcagttttatgcgggcggagcggagattctcaaaagtttccgctagatctgaaagtaaagtttcttggttgcacgtttttacaaccaagtcatcgacatacgcctcaacattacgtcctatttggctacccaaagaaattcgagtagtacgctgaaaagtaggacctgcattctttaacccgaagggcattgatgtataacaataggttcctacgggggtaatgaacgcagttttttcctcatcctccctagccatgcgaatctgatggtaaccagagtatgcatctagaaaacacaaaaggtcgcaccccgcagtggagtcgacgatctgatctatgcgaggcagggggtaaggatccttaggacatgccttgttaaggtcggtgtagtcgatgcacatccgaagcttgccgttcgccttgggaacgaccaccgggttcgccagccactccggatggatgacctcacggatgaacccggcctccaaaagtctagccacctcctcgcggatgaaggcttgacgttccggggcttgccgccgcactttctgccggaccggccttgcgcccggccgcacggcgagacggtgctcaatcacctccctggggaccccgggcatgtccgctggtctccatgcgaagacgtcagcgtttgcccgcaggaaggagacgagcgcgtcttccggaacctcatcgcatgtggccatccgctgcctcggggcggtgggggcagaggggccaagcctctcgtcaccaccctcgggcttggacgcagcagcgaggcggtccgcgcgctgctccatgcaagcaagcgcgactttaaggtcgccacggacagagatggggccaccggggcccggcatcttcatccggaggtaggcgtagtggaccgccgccatgaacttcaccaacgcgggtctccccaggaccgcgttgtagggcagactgaggtccgccacatcaaagctcacccgctccgtgcggaagttggcgggtccaccgaaggtgaccggtaggtcgatgtgacctaatggccacgtgtgccccggcgtcacaccgatgatcggttgagacggctggagcaccatccccggggccttgatagcatcaaaggccgcgggggaaaggatgttgagagccgctcctccatctatgaggacacgtcccaacttcacgttgcagatggtgggggagaccaccatcgcaacctgccctccccgggcaatgcacggtgggtggtcggtctggtcaaaagtgagagcaacctccgaccaccgcgcccgacgcatcacctcatgggtaggggccatggccagaagctctcgcttcatagccttgaagctccggcgagagacgtgagcacacgcccctccatcgacggtggcaatggtggccccaggttcttggaaacctaggtcatcatcaccatcatcaatgtcaacagcgggggccttctgcttggcctcacttcgccgtttgccggatgggaccgccggggacttgccctcgcggcgttcctgcctcctgtcctcctcccacttcctcgttcgctcagccaaatttttgactgcgcgacagtccgcgagatcgtggagggaggtgttgtggacggagcaccacctgccggcggggcgctccctgctgggtgtaccagccccgttctttttgtcgctcgcaggcctcccctttcgagtggcccgcggagcgccctcgacggcgaggacatgaccctcgtcgccggaacggtccggcctcttcttcctcctcctgtcacgccgccctgtctgagcggcggatccgggggcggccgaagctgccactccggaaccggaggagttccaggtccacgcttcctccttacgagccactcggtccgcgagctgaaaaagctccgcggtagtctggggctctttggaagcgatcttttcgagcatgcggttgtgccgcacgccccccctgaacgcgtagatcaccgcgtgtgcagggatgcatggtatagtgttgcggacttggcaaaaccgctgaatgtacgagcgaagcgactcatcatcgcctcgctgtactgcatgcaagtccgcttcttcgcctgggcgcggatatgtgccttggaagttcatggtgaactgttggcacaaatcttcccaggagtggaccgacgcgggtggcagattcattagccaaccccgcgcctgtccttttagggccatgggaaagaagttcgccatgactctgtcgtcacccccagcggcctcaatcccggtcgtatagacctggagaaactcggtggggttgacactcccatcatacttctcggtgatggtgggccggaaccttgggggccaacggacattccgaagactcgccacaaaggctctacagccaacaccaccggccgggggcacggagggctgatcttcacgtccatgtcgaggtgacactctggacgaggaggctccctccgttgcacggggagtacgccggctattacgccggcgcccgatgttgaggcgggcatccggctccccatgctgatcctcccgagtcgacggtgtagacgagggagtggcagccgaatgacgtgcagccgccgccgctcgccgcgccctccgccttgatgacacggagccggtggtagcggcgccggaggtcttggtggtggtggcggaccgtccaccagcacccaggcgctgctgtgccgtcatgaccaagttggccacgtcttccagccatcgttgggctggagactccgggtcatggacgacaggcgggtgtcgtaggagcgcgccagcagcctgaagcgcaccctgaggtgtgctgccgtcgccgtagacgaggaggcgacgctccccatctcgccgttctcctgcatcacctgcggctggtgacgccgcggatttgtcgaccctctcaagcgcctccccctgcttagggctttggcgcggaggaggtggaggagtacgagctcgacggcgcggattcggctccccgtcgtcgccgctcacactcggcgagaggtcgtgtgtttttccttgctcggccat

SEQ ID NO: 89180 - DNA, 957 bp, Oryza sativa
  Clone ID: PAT_MRT4530_87960C.1
atggagagctacgggaggaagcgggcgtggaagaaggggccgacgagggggaagggcgggccgcagaacgcggcgtgcgagtaccgcggcgtgcggcagcggacgtgggggaagtgggtagccgagatccgcgagcccaacaagcggacgcgcctctggctcggctccttcgccaccgccgaggaggcggcgctcgcctacgacgaggccgcgcggaggctctacggccccgacgccttcctcaacctgccccacctccgcgccgcctccgccgccgccgcgcaccagcgcctcaggtggctcccggcctccgccgccgccgccgccgcaagggggggcgccgccgccgtccccgcctacggcctcctcaacctcaacgcgcagcacaacgtccacgtcatacaccagaggctgcaggagctcaagaactcgtcgtcgtcgccgaccaagccgccgccgcgtacgccgacgcgcgccaacccgcctccgccgcctctccccacctcgtcgccctgctccaccgtcaccaacagcgtcggctccgcggctctgcctccgcccatgtcgtgcttccaggcgctggagcaagcgatggcggccacggcggcgatggagagcgcgccgtgcgacgacgacgccgccgtcgtgggcttcggcgccgacaagccccagctcgacctcaaggagttcttgcagcagataggcgtgctcaaggccgacgacgacggcgcgacaggcaagaacggcgccgtccacggggacgacggcgagctggcggacgcgtttggcttcggcggcagcggcgagttcgactgggacgcgctggctgccgacatgagcgacatcgcaggaggccacggcggcgcgctgggcgccaatggcgggttccagatggacgatctgcatgaggtcgaacagtttggcgggtgcatgcccatccctatttgggacatttga

SEQ ID NO: 89181 - DNA, 902 bp, Oryza sativa
  Clone ID: PAT_MRT4530_87961C.1
gcacgaggggaatcagtcgccaaaggcagcttcaggcagcgaacgaggagttttgcggcagcgggggctcgtggacgcggcggcggagtaatggccggggaggagacggcgtcgggctccaagccgccggcggcagcgacgaccatccgcctcgtcaacttcatctccgaggaccagcttgacgaggcgaagcggacgagaggggagcgggcggacgacggcaccgcccagcgcgacaagccgctcttccagatcctgcaggagaacaaggagaagaaggatgccgagttcaacgagcggttcaagcacagacctccaaaagccttggatgaagatgagatggagtttcttgacaaacttgcatcatcaaggaaggaatatgagcagcaggtggctaatgaagaagctgaacaactccgcagtttccaagaggcggtcgcggcccggtctaatattatacatgaagaggctcctacagtctcgagaccagaggagagcaagcctaaggcaaaaaggagccaacctgcactcctgaaaaatgtaataatttcggtgaaaccacaagcgaagaaagcaaagttagatggggaagataagcctcctgcgaaggagcttccttcaaatgggcacagtgcagatcacaagcccccagatgccaccaagggcgtgcttggttctctggtgcagtatgatgatgatgaaagcagtgatggggacgtatgacaactgtaacagagcaacagtctgaggttttgctggctggtgtctggcaaaaatatgttttttcctgttttccctgtgcattaatatccatgattttcttgtagcgtgtgaatttattgtcagcggtgatgataatttgataacgaaaacaatactaatgcacgaatccacttaaaaaa

SEQ ID NO: 89182 - DNA, 901 bp, Oryza sativa
  Clone ID: PAT_MRT4530_87962C.1
tttttttttttttttttttttttttttttttaaatgaaccagggagtcataatattcctttgcataaaattcttccagggattttttgaagttaaactcacaacaattatttgtcaaactgaaaaatgacctttcagatacactcgcagctgaagcctgaaagtagcaatggaagggacatttaatgtcaaattactcagcaaaataaactttttaaaccagggggataagtaacattccgacaacagtaagtttacaaaagttaaaagaaacttgagaatcagattttccgcgatgcgggatgaaaatccttcaggttggacttgggtaccctgatccttgtcatcatgcttgatggtttcatctcttgatggtttcatattcgctttgtgctatcctaatttcagttcgttgatcttctcaagtgctaacatattgatgatgtatccagcagttttattaacacaaaatctaactcgcattggattagtgacgacgacattatgcctgtgcgttactgtttctccttggtccaaaacgaatgctcagattgtccaagacacggctaacattcatgagccgtggatcatcagaaggaatttcacgttccttcaaacccttgtaatatgcttcaacagcaggaagtgatggagtgattctgcggttttgcatgagatcccagacataatttgctattgtatatccaccagtcttttcacctgaagctgcaagtagaagatcagttcccatccttgcgtttaagaagaaatttctcgaagtcatcttctctatggtttcttgagcaagttgcattcctcttggtgtatgcccaatcatagctccctcagcaagtgtcacatacaactctgcaggcagggattttgagcctgtggactcttcc

SEQ ID NO: 89183 - DNA, 392 bp, Oryza sativa
  Clone ID: PAT_MRT4530_87963C.1
aaaaggggaaagacaactttttttctatttatttcacccaaagtttcacatgtaagcatttgttgatctttgagcttatttttaacttccggaccactttactgttaaaactcattgcatgacaccgccaagggtggttatggcactgggtgcaccatattacctctgggagagtccatttttggatggcacgttataaggcaaccaagcttgaccttgtgctcgatgttgatcaaggtgtagatcaccaaactgctggagttgtagctgatgcgctatgggctgaacaatgttaatgtcctgatagtgagattgttgcgccaccagcgcgagctgttgccagacttggttgtttctcagttgaaacacagctgattgcaagaaggggcttg

SEQ ID NO: 89184 - DNA, 165 bp, Oryza sativa
  Clone ID: PAT_MRT4530_87964C.1
atgaagcagcgatttgagtgggaatttgttttttggttcaatcagaggatggaggataatatgatatacccaatcaaggaccaagaaaccatgctggcagtaccaatggacatgaacaggcagcaggatactgtttgctccaagatttggagagccactgaataa

SEQ ID NO: 89185 - DNA, 390 bp, Oryza sativa
  Clone ID: PAT_MRT4530_87965C.1
atgccgttctttcctcgatcctccacatacgcggcgtataccataccgccgccgccggcgacgcccgggcgccccgacgacgacaacgatcactatcacgaagacgaagataagcccctgctcccgccgatccgccactgccgacgacagcggacgtgggtgcggcggcggagacggagcggcggcggttcgtggtgccgacggcgtacctggttggtcatgccggtgttccggcggctgctggagaagggcagaaagcggagtaggagttcgggtgaattcgagtacagcgacggcgagctcaccatgtccattccctgcgacacggatgacttcaagtacatcgtcgtcatggacactcaccagaacgggcctcgtcgacgacggtga

SEQ ID NO: 89186 - DNA, 333 bp, Oryza sativa
  Clone ID: PAT_MRT4530_87966C.1
gacccagctctttggagcacctcaacggagaaggacaaatccccaatactaacgcctcctaatcatgaggactgggcgggcgtggactggccggccgcctctcccgccgacgcccccacctctcgtgtcggcgcgcctcctctcctcctctcctgccacctccgtcgcgtcgaccgcctccgcttgccgttgcaaccgcactcgccgatgcccgccctcgcagccacgctcgctcgccgcttgccctcgcagccgctcccgccgacaccgccgctccgcctgcctccgcccgtgcccggagagaaaaagagaacaatagaaaaatgagggtca

SEQ ID NO: 89187 - DNA, 2148 bp, Oryza sativa
  Clone ID: PAT_MRT4530_87967C.1
atgcggtgctggcgtcgcctggcggcggccggcgcactgctcgccgccctctgcgccgcgcttgctctggcggtggcggagcaccggcgccctgacaccacggccagcagcagcagccgccggccgctgcggttcgcgtcgggaggagggttcaaggtggcgctcttcgccgacctgcattacggcgagaacgcctggacggactggggcccacggcaggacgccggctccgaccgcgtcatggccgccgtcctcgacgccgagaagcccgacttcgtggtgtacctcggcgacctcgtgaccgcgaacaatctagggatccccaacgcgagcctgtactgggacagagcgatttctccgaccagaggcagggggatcccgtgggcgacggtgttcgggaaccacgacgacatgccgttcgagtggcctcctgagtggttctctcctgcaggcgttccgccgctgcattgcccaccaccgagcatgtcagattcagactgcagcttccgaggaacaccgcgacttgaactgatgacaagtgaggttatccgtaatggattgtcatattcatcaaatggccccaaggacctctggcctgctgtttccaactacgtcttgcaggtgctatcacagaagcgagatgatccagctctgctcatgtatttccttgactccggtggtggatcctatccagaagtgatatccagtgctcaggttcagtggtttcatagtcaatctcagttccttaatccaaatggaaggattccagagataatcttttggcatattccaagtacggcatatgccaaggttgcgccgaaagctaagtccgaaataagaaaaccctgtgttggctctatcaacagggaagaagtagcaccacaagaagctgaatggggtatgatggatgcccttgtcaagagggcttcagtgaagcggagtgggcggcggccggagtgggcgacggcagggcggagcggcggcagagcagaggggcagaggcagagaggggcggagacgaggggtgaagcggcgcgttgtgggcggagcggccggccgacgggggagaagtcgcagcgcggcggtggccggagggccgcggggccccccccgttgggagcagaggagccgcccgtggcctgtggccgtctgcgggtgcgtgccggcgtccaccttgatgttggtgttgccgttggcgacgaggccatcgaccagggtcttgaggtcggcctgcgcgtcgccggcgacgtaagcggagcggacagaggcgtcgcgctcgacttcgacctccatgagcttagagaagacgccaaccatggccgccgtgttgtacgtgcaggcctccgtctgtaggtacgcgccccggtggtcggtgaacacgtcgttgccgttgggcccgccgacgacggtgccgtcgaggtcgtgcgacttctccccccgccgcgcgccgcgccggcctgcagtctgcagaggctcgccacctagcctggacgctgcacccacactgttcatggcttcactcaattcgacgcgattggggttttggaatggggaattttcgaccaacggccggcgttgtgggccgcgccaccgggggcggggagcagcggcggtggtgggcacgagtgcagcttcaagatcctgctcatcagggactccggcgtcggcaagagccgccctccctgcttcgccggggggcggcgtgcagtggccgtcgggagaaggagcgatggtcctcaaaggctccccgctccttctcccaatcgccgattctattacgacgcctcctaccgcgccgtctaccgccatcagtgtcacaccccaatctggtaccgccgtagaacggcacctgactggagcgtgtcgtaggaaaaacggcgcgaaccgcttccttaacttaggttgcagctcagaacagcccgagaatgcaaccgacgacgcgacctcccgggtcagatcattacttctcggctcccagagccatttcacttgattaagcggctcccagagcctttttcctttttctcggactcccagagtccagctccccgccgcccctccaaccgaccccgccccggcgttcccaactattggcatgcgaggtttcccgacaccacatgtcgggttttcaaggcttctcaaacccat

SEQ ID NO: 89188 - DNA, 1144 bp, Oryza sativa
  Clone ID: PAT_MRT4530_87968C.1
tgtggccattactcagctcacctactccagatctcgccatggcggcggcgtcgtctcggtggcagcggatggccgcggcgtgcttcgtcctcgccgcgcttgcgatgtgggcggcgcccgcggcgtgcggcgcgcgcgcggttcctcgtggggcgggggcgggggtggcggcgcagcaggcgaacgcgtcgtcgtcgtcgtcggcggcggcggacgagttcctggcgccgcacaaccaggcgcgggcggcggtcggggtggcgccgctgcggtggagcggcgacctggcggcggcggcggcgaggacgacgtcgcagcagcagggcgggcaggggcggcggtgcgggttcgcggacatgagcgggagcccctacggcgcgaaccaggggtgggcgagctacccggcgcgccccgcggaggtggtggcgtcgtgggtggcgcaggggaggtactacgcccacgccaacaacagctgcgcgccggggcagcagtgcggcacctacacccaggtggtgtggcgccgcacggcggaggtcggctgcgcccaggccacctgcaccaccggcgccacgctcaccatctgcctctacaacccgcacggcaacgtgcagggccagagcccctactgaccggtctcttcgccgccgccgtcgccgtcgccgtcgacgtcgccggagcgttgttgtcggtttgcttttgtgcttattaagcttactaatgtgactgtggtgtgtgatcttgtctgtgtactcttgtgttattacgcctacgtggtgtttagagctgcgtgcgtgcttaagatttggactgaaaatgatggatgttgtgacgcgcgtgtcagcacgtgctgcttggagtgtagcttgtgatatggctcttgaattcgaatgctaggtttgtgtagatccacccatgagccatgagccacaatcacgggtgtataaagctgtgctgtgctaagctactccctccgtcccataatgtcccaacctagaataggatgagacccatgagacccatcctaggactatgaatctgctcatcccatcgtagatggttacaatattatggaggaacggagggagtatgcaagaagcattaatgttacgagagcaaaggctaaggctacctttttatgaatcct

SEQ ID NO: 89189 - DNA, 1603 bp, Oryza sativa
  unsure (1)..(1603): unsure at all n locations
  Clone ID: PAT_MRT4530_87969C.1
atggagggcaaagagaccaagaacaccgtcgctgccgctgcctcctcctcccctctcttctccttctccaactccaacgcttccttcggcttcggcttcggcttcagcgcgtcatccggacctcctccgccgccgccgccgccagccgtcgaggtgctcctctccgaggaatcgcccgtcgcggccggcgaattggagcctgtggtgattgatgactccctgtcgatttacaaggggagagcaagtacttctgatgtttttggagtcaaaaactctgatttagtcccagggaaatatgaaggtgggttgaagctctgggaaggttcactagacttggtgaagactttaaactcagacatcaaagaagaccgattgcttttagaaggcaaacgtgtattggagctaggatgtggacatggcctccctggtatctatgctattcttaagggtgctgttctagtccacttccaagatttcaatgctgaggtccttagatgccttaccataccaaatgtaaaggctaatctattgaaggaatcatctgaagaaaagtttacatctggtagtgttggtttctttgctggtgactggagcgaaattgacagtctgcttcttcgtggagatgctgacctggataaatcaaccaacagtcatgaaaacgatacagcgtataatggctatgatatcatccttatggctgagactgtctatgcagtatcttccctccctaatctctacaggctcatcaagaagtgcctgcgctaccctggaggtatagtttacatggcgggtaaaaagcattacttcggagtaggtggtggcacaaggcactttgttcgcttggttacagaagatggggccatgcagtccgacctacttgctgaagttgctgatggatcatcgatgggcttgcaggaatccagcatcggtggtcggacggccagcttcttccactaccagaggctggaatgccgggatgacggtggcccgccgcggccatccaggtggcggtggctgccggccctcgacggtaagccggcacacnccccctgtctcttccatgtcaagaagctgaaatggagcaggatcacctcggtcctcctgccaagaaggtggtggcggagctctcctccaagatccgccgtgccggggcgacgacgatggagggcgccaccgacatctgcccgaccatcatcttcgcgtcgcagtgggggctcccggtgctctccaggccattgctggctggtaacaaggccaggtatcttcaccatgggaagggcttctgaggaagtgagaagctttgtttctgtgcctctccaagtttgatctctgctcctagtgagatgttcttgtgtgtcaatatgtgatgatttgtgtccggtgaattacttagttgaccctgtagattcagttgtgtgttctattgttgtatacttttgtgttggtctcccatcgatcaggatctgatcttaggcactttgctatagttggccatgatcagatcttccttttttgtgataattcagtatagtccaagttaatgccgagtnaaaaaaaaaaaaaaaaaaaaaaaaaaaaaaaaaaaaaaaaaaaaaaaaaaaaa

SEQ ID NO: 89190 - DNA, 4902 bp, Oryza sativa
  Clone ID: PAT_MRT4530_8796C.1
atgcacgcccgagctgccgccggtggtgacgtcaccgccaacgtcatcgtcgtcgttccccgtggcccggttccgacgtttttggagagtctgagtttgcaggagaagattttgaagagttccaaggccagcaaggcaagtcacacagatcccaaacaacccttgagcatgttgatcccgtttaaagctattgtttctattcaactattgcatttattttcgaatatgccgcgctacaagcctgagtacttgtttggtgttgagggatttgtccaggagttgcgtacgatgtcctttgccataggatttgggactgcccctttgtatgcccagattcctcatgatcgtcacgaagagaagtgccgagacaaagtcaccttgaacagtaatagtgaagatatcccatcagtgatgttcgaagctggaggaggaaactacatccatgcatgtcaggaggtggcaaggatcgccataggagagctccgcgatcgctacagtgatcagttggccgatactgagtatcgctaccatcctcgccaaccacagggaagtgactgtggcagctaccttgagactgaggggattgagaatgatgctaccacaaggcatttggttgagatgctgtgggctatggatgaaacccgagcggaggttgtgctagcagctcaagatcgtgaagaccgaaatcgtggtaagatttgcaggctagaggacaaggtggatcgtttggagaaggaactagccgtgttgaagggagaagcaccaccgcagaaggccagggttcgtcttaccgcaaggaagagagctctattcatccctcgctaccaattggtgccaaaggtccgtgtggtggagaaagaagttaccccagccctagcggatcctccggtcgtcaatatggtgctcactcacagcaacgggaatggccccaacatcaacaataacaacaacaacaatggagagaatcccacacttgcccaagtcctggctcaacaggcacagcttatgaacatgatgatgcagcaactccagaaccagcagaaccagggaaataaccatgcacctccccagaacaagttagcagaatttcttcgtgtgaggccgcccactttctctagcaccactaatcctgttgaagctcgtgattggctgcatgccatagagaagaagttggatttgcttcagtgcactgatcaggagaaggtctcatttgcatcacaccagctgcatggccctgcctctgagtggtgggatcacttccgccttaacaggactactgctgaacctatcacttggcttgaattcaccgctgctttccgaaagacgcatataccatcgggagtggtgtctctcaagaagaaggaattcaggtcgctcacccagggatctcgcacggtcaccgagtatctgcacgagttcaaccgtttggctcgttatgctccggaagatgtgcgcactgatgaagagagccaggagaggttcttggaaggacttaatgatgagctttcttaccaactcatgactggggattatcatgatttccagaagttagtggataaggctattcgccacgaggacaagtacaaccgcatggagcagaagaaacgccggattgctcagttcaaggcacaacaggggaatagtcagaggccgcgtcttactttaggaccccagtccatgccacagggaggttcttcgtctattgttcgtttgcagcgtcagttcttcaacaacaatgctggcaacaacatccgcaatcaagctccacgacctgttgcagctccaacacagcaacagcctgccaagagggagcaaggcagcaagcccggggtgtgcttcaactgtggagacccaggacattactctgacaagtgtccgaagccccgacgcgtgaaggttgtctctgcccagagcaactctaccgcaccagcatcaaaggcccatgtcaatcatgttgctgctgcagaagatcaaggtgctccagatgtgattttgggtacattccttgtcaactcagttcctgcaacagtgcttttcgattctggtgctacacattcatttttatctatgagttttgcgggaaatcatgggatggaagtagaagatcttagacgtcctttgatggttagtaccccaagtaatcaagcactttctttgcaacgtagcccctctgtcagaatagaaattcaagaagtaccatttctggccaatcttatcctattagaatccaaagaccttgatgtcatcctagggatggactggttagccagatataaaagtgtgatagtctgtgccaacagaaaagtcaagtctgaaccaatagcttcggaagagattcccatagtacaggaatacccggacgtgttcccggacgatttacctggtatgccgcctaaaagagatattgaattcagaatagatctgaaagatcatacccagaggatgtgtgtagactatcgtgcactaaatgatgtgactatcaagaataagtacccgctgcccagaattggtgatttgtttgatcagcttaaaggtgccaccgttttctccaagatagatcttcgatcagggtatcaccagttgagaatcaaagaggaagatatacctaagacaacttttaccactaggtatgggttgtttgaatgtactgttatgtcttttggacttactaatgcccccgctttcttcatgaacttgatgaataagtttagcaagtgtgaattttggttgtctgaagtgaagttccttggtcacgtcatctcagccggaggagttgccattgatcctagtaatgtggaatccgtaaccaactggaaacaaccaaagacagtttcagagattcgcagtttcctaggcctcgcaggatattatcggaggtttatagagaatttttccaagattgctaagcccatgacacgattacttcaaaaggatgtaaagtacaagtggtcagaagaatgtgagcagagttttcaagagttgaagaatcgcttaatatcagctcctattttgattttgcctgatccaaagaagggttttcaagtgtattgtgatgcatccaagcttgggttaggttgtgttctgatgcaagatgggaaggtggttgcctatgcatctcgtcagttacgtccgcatgagaagaactaccctactcatgatcttgagttagctgcagtggttcatgcgttgaagatttggcgtcattatcttttcggtactcgtacagaggtgtacaccgatcacaagagtttaaagtacatctttactcagccagatctgaacatgagacaacagagatggttggaattaattaaggattatgacatgggaattcattatcacccgggaaaggctaatgttgtagcagatgctcttagcaggaaaggctattgcaatgctacggaaggacgacagttgccattggagttatgcaaggaatttgaaagattaaatttgggaattatcagtagaggtttcgttgcagccttagaagcaaagcccactctaattgatcaagttagagaagcccaaattaatgatcctgatattcaagaaatcaagaagaatatgagaagaggaaaagccatcggtttcgtggaagatgggcaaggaactgtatggttgggcgagagaatctgcgtccccgacaacaaagatttaaaagatgcaattctgaaagaagctcatgatactttatactccattcaccctggtagtaccaagatgtaccaggatctcaaggaaagattttggtgggcaagtatgaagcgtgaaatcgcagaatacgtagcagtatgtgatgtttgtcagcgggtcaaggcagaacatcagaaacccgcaggtttgctgcagcctttgaagattcctgaatggaagtgggaggaaatcggtatggatttcatcactggtctacccagaacgtcatcaggccatgactctatttgggtgatagtcgacagacttaccaaagtggctcatttcatcctagtaaagacaacctattccggaagtcggttggcggaattgtatatggcaaggattgtgtgtttgcatggcgtccctaagaaaatagtgtctgatcgaggcagtcagtttacttcaaagttttggaagaagcttcaggaagagatgggttctaagctgaactttagtactgcttatcatccgcagaccgacggacaagccgaaagggtaaatcagattttggaagacatgttgagagcttgtgctttagacttcggtggaagttgggataagaatctaccttatgcggaattctcgtacaacagcagttatcaagctagtcttcagatggctccttacgaagcactttataatcggaagtgccgcactccgcttttgtgggatcaaacgggagaacgtcaggttttcaggatggacatcctgagggaagcagaagaaaaggtgaaaatcattcaagaaagattgcgtgtggcccagtctcgtcataagagttatgccgacaatcgtcgtagagatctaagttttgacgaaggagattatgtgtaccttcgtgtcacgcctcttcgaggagttcatcgttttcacaccagaggaaagttggcaccgcgttttgtgggaccttataagattgtcagtagaagaggagaggttgcttatcagttggagttacctcaatctttggcaggagtccataatgtgttccatgtgtcgcaattgaaaaagtgtttaagggtacctaccgaagaagctaatcttgaacagatagaagtccaagaggacctgacctatgttgagaaaccaatccgtatcttggaaatagatgagagaagaaccagaaatcgagttatccgtttttgcaaagtccatggagtaatcactcggaagaagaatcaacttgggaacgagaagatgaattga

SEQ ID NO: 89191 - DNA, 286 bp, Oryza sativa
  Clone ID: PAT_MRT4530_87970C.1
ggtgaacgtggtggacgatcttgtggtcaccttcaacgcctacgactacatcgagctgtgccgtttctggtacctggagggcgctatgcaccgtgcgggcaacgtgcacaatatgttttacacgctttttgaagagatgatcaggcacaaggaggaggctaggatgctgaacaagacagacacagaccttggcagtaaggacctgtgtgacatccttctgtacaaggctgatgaccgcacggtcgacgtgatgctcacctgtaacaacattaatgactttattatt

SEQ ID NO: 89192 - DNA, 1868 bp, Oryza sativa
  Clone ID: PAT_MRT4530_87971C.1
gcaaaagatgggcaggtaaagtagaaaaccgtccatgtctcgccttgacaacatattccttcatcatcaggtgtcactcacatacagtgtcacgactcacgaccgagcggggtcatctttatcttacaactgacgagaggtcagcgggcttcactcgtatgggttcctgaagttcttgaggagttctggaatgtcgtatccaagcatatcatccaccgcctgcaccatcttgggcttgattttctcaaacttgtcaatgctatacccacccaggacatctctgaaatgctccacataagggaaatctccagctggaagatgttgttccctttggacctttgcgaactcattctccaaattgtctataagtcgctgctgagctttggctttgcccatcatcgcaggcatctccttcttcaaatgaccaattatatgggcatgaatcttggctgctcttgcacgtttaacaaattcattgattcgacggtcacaagctttcttcggtatatctttcagatcagaaagtagatcatcttgctctctctcaaatagttcctttccaattggaccaacagctgattcatttactggtttgtcattaaatgatccaatataaacacgtgcaacctcaggggtattcaatactttcccaagagaccacatcaatgcaccatagactctcataagctgctgagtgtcaacttggtctgccttgtttagcactacacgtattttgtcatcatgtccgcgtaaagatccaatgacacgtttgaactcatcactgatatcaagcttatgtggatcaaacagaagaagaataagatcacacttggccgcaaaccatgatgtgacaccagtgaaatcatagctacgttgcgtccgttgcttctcgcctgagagaacaccaggtgtgtcgacaaaggtgatatgctctagtagtggatgtggcatctgagagcattcgaacttggataaaaaagcagttccaaatgttgtaagaccactgaaaggcatgtctgcttgcacagctatggtattcccaggaatagtcctttcatctggtcctgacatgacaacaacaaatctgtcagttgttggctctattcaaatatgggcacctggatagcttgttctgagcagatgttttataaaagttgttttccctgtagaatattgacctaaaagcataaccattggctttgcatcaaaatcactatttgtcagtaatggagatacaaaatcattgaatttgtatgtaacttccaaaggctttaatttttcgatgtatagtttttttaacccatcaatgacagaagtaacagcattcaggggtatcttctttgaggactttgagctgaaccattggctcgttgcaggagattgagcctgaggaaatccatcgatatctggatcaactctcttagcatgatgctttgatttcacaagtagagcatccaaaccatccatcgttggaggattcaggctgcccaagtcatcgcgcttaaggctgtcttgagtgatctcatcccccgcttgcgccagagagacaagctgcattgccgtgacgaattcgctgaaacctaagtacccctgccgcttggagtccgcgattgcccaaacctgcttgaggtcggcgcgggggagcttggacatggcgaagaacttgatggcgtcgggccccgtgatgcgcccgtcgccatctgagtcggcgaaggcgaaccactcctggtaggtcttctggtgctccttggagtagccgctcgccggatgctgcccgatctccatggctcccctccctcctcgtccccgggccgcgccgcggctccgctttgcagccgggagaagcaagcaaaaaccctacgacgtga

SEQ ID NO: 89193 - DNA, 457 bp, Oryza sativa
  unsure (1)..(457): unsure at all n locations
  Clone ID: PAT_MRT4530_87972C.1
agcgacggtgatgccttcccactcgcagcagtccatgccattccgccatgacatgncgatgccattgtcgtgtgatagcccagcaaggaaccggaggagagagctcttctcctgctcgaggcacgcaatggtggagacggccatggggagcaggaacagcagcagacataacgaggaagcagcgaggccagagaaaggcatcactaccctgcttctccacgcagaatggggtgccatcttcatggtctctcttatcacaggtctttggagttgaatttggcagctaatgttcgcgaaaattacattgttcgttgagcatatatgtacacaactgaatgcatatattatgtacttaactgaattattgtttcgtttgaagtccggagatattgattttgtgttcgcagccataggacttgtgagcnatactgctaaaaaaaaaaaaaaaaaaaaaaaa

SEQ ID NO: 89194 - DNA, 322 bp, Oryza sativa
  unsure (1)..(322): unsure at all n locations
  Clone ID: PAT_MRT4530_87973C.1
tgcgccgctcgcgatctagaactctagatcgcgagcgggcgccntatattttttattgtttagatttatggcaagcgggactactgtacagtcaatcgatatgtgcctatgacacataggatagtatgaggacctaattcatagtgactggtgcatcttcttcagcccccggaggaatgaattatggcatcgaggactctatacacttcaaaacatttagggcccccattgaccatttcttttttggctttccgaaagctcagcaagaatggacctgttgatgaactgactttttaaatggtgatccctgtgtcttaggagc

SEQ ID NO: 89195 - DNA, 130 bp, Oryza sativa
  Clone ID: PAT_MRT4530_87974C.1
gagacaacccacggccaggggagctggcagggtcggcggaccttgggtttggccgacctgagcctatcccggtccaaccacaactgccttctgacggttgctaccgacatccttatggctgttgtggccg

SEQ ID NO: 89196 - DNA, 1413 bp, Oryza sativa
  Clone ID: PAT_MRT4530_87975C.1
atggccgtggcggcggcgacgcgcattgcggtggtggtggtggtcttggcgctggcggttctcgcgccggccgcgcgcgggctccgccgagacgacttcccgccggggttcctcttcggcgccgcgacgtccgcttaccagattgagggcgcatacttggacgacaacaaggggctcaacaattgggatgtcttcacccacacgcaggctggacgaatctcagatggacgcaatggggacgtagcggacgaccactaccatcggtacacggaagatgtggatatcctgcataacttgggtgtcaattcctacagattctcgatttcgtgggcgagaattctaccaagaggccggcttggaggagttaattcagcaggaattgccttctacaaccgtctgatcaacgcactccttcagaaaggcatacaaccattcgtgactctgaatcatttcgacattccgcacgaactggagacccgggaggagtttgagtactactcggacgtctgcttcaatgcgttcggcgatcgggtcaggttctggacgacgttcaacgagccgaacctgtccaccaggcaccagtacattctgggagagttccctccgaaccactgctccccgccgttcggcaactgcagcagtggcgactcgcgccgggagccgtacgccgcggcgcacaacatcctgctctcccacgccgccgccgtccacaactacaagacgaattatcagccttgcaggtttttggatccaatattctttggtgattaccctagagaaatgagagagatcttatcatcaaatttgccaaagtttaccccagaagagaaaaaactactgcagaataacaaggttgatttcattgggataaatcattacacagcaatttacgcaaaggattgcatctattctccgtgcacgcttgacacttacgaggggaatgctctcgtatacgccattggtagaagaaacggcaaaataattggcaaacccactgcacttcatgggtactttgtcgtcccagaagccatggaaaaggttgtcatgtacgtcaatgatagatatagaaacacaactatctacattactgagaacggctactcacaacacagcgataccagcatggaagacttgatcaacgacgtcgaaagagtcaactacatgcatgattacctcaagtatctctcttcagcaatcaggaagggagcaaacgtagggggctacttcgcgtggtcaatcgtggacaattttgagtgggtttatggttacaccgtcaagtttgggttgtaccaagtggatttcgacacgcaggaaaggattccaaggatgtctgccaagtggtatagagatttcctcacgagctccagtcttacagacggtctccaagtgcggtcacgtagagcagattcgtga

SEQ ID NO: 89197 - DNA, 573 bp, Oryza sativa
  Clone ID: PAT_MRT4530_87976C.1
atctctcttcagcaatcaggaagggagcaaacgtagggggctacttcgcgtggtcaatcgtggacaattttgagtgggtttatggttacaccgtcaagtttgggttgtaccacagtggatttcgacacgcaggaaaggattccaaggatgtctgccaagtggtatagagatttcctcacgagctccagtcttacagacggtctccaagtgcggtcacgtagagcagattcgtgaataattccgatgctagaatacgtctagcactggatagttattttgtacttggagttgtatatatactcagatgtattgttgtgtacatgactacatactttatagttacttcagttatggacttgtgatcctatcaaaatgctctcaagctcaattcgtggacacacaagggggtgctagtacagcttagcataagtgtacttatttaccaatagagagcaccggagcaagctgtgtacgttatgtataggacgatgtgtttatgaagccatgtgtaaaatgttatcatgttttgtgaaagtgcatccgaagtttatttgtgtgaaaaaaaaaaaaaaa

SEQ ID NO: 89198 - DNA, 306 bp, Oryza sativa
  Clone ID: PAT_MRT4530_87977C.1
aattgaagttctagactcagtgaggagttgaggtccagacggtcaaggataccgggtgacgaagttggatacgagatggcatacggtggatggataccgtgtgggtgaaatctttgcaacgggcttcacgagcatgcagcggctcggcttggtgatgcaagcagggcgtcggctggcctgggcatgtggcaaggcaagccgagtctgactcggtgaattttctgtggccggctgtggctgcaggtttcggagagtttgtgagaattacaattttttaagcaacttttgtacaaaaatttttttaca

SEQ ID NO: 89199 - DNA, 621 bp, Oryza sativa
  Clone ID: PAT_MRT4530_87978C.1
ggaatcggcacgagggctaacgagtgagagaacgagtagtacgtgctgtagtgggtggatcggtcgagatggccgtggcggcggcgacgcgcattgcggtggtggtggtggtcttggcgctggcggttctcgcgccggccgcgcgcgggctccgccgagacgacttcccgccggggttcctcttcggcgccgcgacgtccgcttaccagattgagggcgcatacttggacgacaacaaggggctcaacaattgggatgtcttcacccacacgcaggctggacgaatctcagatggacgcaatggggacgtagcggacgaccactaccatcggtacacggaagatgtggatatcctgcataacttgggtgtcaattcctacagattctcgatttcgtgggcgagaattctaccaagaggccggcttggaggagttaattcagcaggaattgccttctacaaccgtctgatcaacgcactccttcagaaaggcatacaaccattcgtgactctgaatcatttcgacattccgcacgaactggagacccggtacggcggatggttaggcgctgcaatccgggaggagtttgagtactactcggacgtctgcttcaatgcgttcg

SEQ ID NO: 89200 - DNA, 336 bp, Oryza sativa
  Clone ID: PAT_MRT4530_87979C.1
tcactttttctcacttccggcccatccctttctctcttcttcccttgacccagccggcccaattggaagccgcctctcttctttctcctggtgggcgcgcgtggcgcacgcacacgcgctgccaccgtcgctgccgtagctttgagcgcagccgcccacagctttacgccgccgcagtcgtcttaccgtcgccgccaaggaatcaccgtcgacgtcagccgcgaacgaaaccggcaccgctttcttccgctccactccaccggcgccgtgtttcccttctccctctcctctacgaaccgacctcctccgcctataaatagccagcatgctcgccat

SEQ ID NO: 89201 - DNA, 3120 bp, Oryza sativa
  Clone ID: PAT_MRT4530_8797C.1
atgtcgaacgaaaaggttccatcgaatgcaccaatagcgcctcaagaaggtaacgctcctcaaaattccggtagcaataagcagccagacgcttctagtgaagaaacgtggcgcacaccaagtgacccgtttccaatggaaataacacaagtcgccccccgcgatgatgatccggactacatacctatcgaacaggccatggtagtccgacgccgctcgaaacgtaaagccgagaggaacaggacagagcaagaagttgagatggacaccgctacgtctgcacctgaacgtacggagacatctacaagtgcaggcgggagtgggaaaaaaagatgtggtgagagaagcaagaataaattacccaaggaaacttacaacgtgattgctctcgatcaggatgggaagcccgtcgagccaccgatagtgcggtccaagttcagcaacgcatgtggcactctagtcaggacacgttgtcccattaatgtcaagttgtgggaaacagtggacgacaacatcaagacacttctctggaatgagttgcagaagtattttgtgttccctcctggatcagaggtcagggggagagattacgcacttaaaaagatgggagatcgatggcgacagtggaagtccgatctaaatcgggattatgttcagaagaatctcccaccgtttacggattatggacatatatcgcaggctgactgggacacgtttgttgcggatcatacaacagctgaagcattggctttgaggaaaaaaatgtcatacgctggtcacgtcgatcaatggcgggagatcgagcaaagatttgccgcggccgctgaaaacccgacagcctttccaaggttattccctgatagccaacaacccacacaatccgcacagcaaacaactaatgtacccagcagtgtaggctcagtgcagacaactaccttccctgtggatagtataactggaccacctccgtgcagtctcatcgtaccaatcggtcgcgctggaaagactaaggaggttgcaatgggttttgcaatacccggacgtcaattccacaacacggcaatccctgaggattacgcaaggatacaggtcgccaagactgagccacaaactaagccttacccactagacatgtggaagtacggtagtgctttgcaacagaggcccgaagaccggtccttatatggccgagctcctggtttggaatggtacattcctggtttggagatagaactgtgcagccggggtggttgttcagaatggttgggcctatacaacaggatgccgcgttacaagcctgagtacctgtttggtgttgagggttttgtccaggagttgcgtacgatgtcctttgtcattggatttgggactgcccctttttatacccagattcctcatgatcgtcatgaagagaagtgccgagtcaaagtcaccttgaacagcaatagtgaagatattccctcagtgatgttcgaagctggaggaagaaactacatccatgcatgtcaggaggtggcaaggatcgccataggagagctccgtgatcgctacagtgatcaattggccgacactgagtatcgttaccatcctcgccaaccccagggaagtgaccgtggcagttatcttgagactgaaggaattgagaattatgttaccacaagacatttggttgagatgttgtgggctatggatgaaagtcgtgcggagactgtgttagcagctcaagatcgtgaagaccggaatcatggtaagatttgcaagttagaagacaaggtggatcgtttggagaaggaattagccgcattgaagggagaagcaccgccgcagaaggccaggattcgtcttaccgcaaggaagagagctctatttgtccctcgctatcaactggcgccaaagatggtgaacactcgtagcaatgggaatggtcccaacaaccccaataataacaacaatggagagaatcccactctggcccaagttcttgctcaacagacacagcttatgaacatgatgatgcagcaatttcagaatcagcaaaaccaagggaataatcatgcacctccacagaacaagttagcagaatttcttcgtgtgaggccgcctgttttctctagtaccactaatcctgttgaagctagtgattggatacatgccatagagaagaagttggatttacttcagtgtactgatcaggagaaggtctcatttgcatcacatcagttgcatggccctgcctctgaatggtgggatcacttccgccttaacaggactactgctgaacctatcacttggcttgaattcaccgctgctttccgaaagacgcatataccatcgggagtagtgtctctcaagaagaaggagttcaggtcgcttacccagggatctcgctctgttacggagtatctgcacgagttcaatcgtcttgctcgttatgctccggaagatgtgcgcaatgatgaagagcgccaggagaagtttttgggaggacttaatgatgagctttcttacccacttatggttggagattaccctgatttccagaaattagtggataaggctattcgtcaggaggacaagtacaatcgcatggagcagaagaaacgtcggattgctcaattcaagacacaacagggaaataatcagaagccgcgtcttactttaggaccccagtctatgccacagggaggttcttcgtctgttgttcgtccgcaacgtcagttcttcaacaacaatgctggcaacaacatccgtaataaagctccacgtcctgttgcagctccagtacagcaacaacctgccaagagggagcaaggcagcaagcccgtggtgtgtttcaactgtggagacccaggacattatgctgacaagtgtccgaagccccgtcgcgtgaaggttgtccctgcccagagtaactctgctgtaccagtatccaaggctcgtgtaaatcatgtcgctgctgcagaagctcaagatgctccagatgtaattttgggtacgttccttgttaactcagttcctgcaacagtacttttcgattctggtgctacacattcattcttatctatgagttttgcgggaaatcatgggatggaagtagaagatcttagacgtcctttgatg

SEQ ID NO: 89202 - DNA, 601 bp, Oryza sativa
  Clone ID: PAT_MRT4530_87980C.1
ggacgacgttcaacgagccgaacctgtccaccaggcaccagtacattctgggagagttccctccgaaccactgctccccgccgttcggcaactgcagcagtggcgactcgcgccgggagccgtacgccgcggcgcacaacatcctgctctcccacgccgccgccgtccacaactacaagacgaattatcaggcaaagcaaggcggctcgatcgggatcgtgatcgcggtgaaatggtacgagccgctgacgaattccacggaggatgttcgggcgggacggcgtgcgctggccttcgaggtggattggtttttggatccaatattctttggtgattaccctagagaaatgagagagatcttatcatcaaatttgccaaagtttaccccagaagagaaaaaactactgcagaataacaagggtgatttcattgggataaatcattacacagcaatttacgcaaaggattgcatctattctccgtgcacgcttgacacttacgaggggaatgctctcgtatacgccattggtagaagaaacggcaaaataattggcaaacccactgcacttcatgggtactttgtcgtcccagaagccatgga

SEQ ID NO: 89203 - DNA, 201 bp, Oryza sativa
  Clone ID: PAT_MRT4530_87981C.1
atggcaattgctttggcatctcgccaattggtagagatttcatggggatttcatggagaaaggagaaagcaagacaaggaagctagaggcagagcaaccacaaatgaacaaccagatgtatctgactacacactaggagctccaatttgtatgccacagctctcacccaatctaacactctgtaggggccatagtatttga

SEQ ID NO: 89204 - DNA, 335 bp, Oryza sativa
  Clone ID: PAT_MRT4530_87982C.1
tctgtcacacgctcgagtcgctcaaccgggggggcgtttttcaataggaccggcgttaccaacaaacatatgaacgacccaccatcatgaggcccatagacaacagtcgaagatgacttctaaacaagctcaaagaatacaatggacacgactgcgaagtaatacatgaggctgactattttgctggagaaaaaactgaacatgaagatggtgacacaatacctactcactcaaatcacgtgaccaacactctcgctcttgatgatctgtttcctccaagttaacttgccaacttaaagagtatgcgcaaaggatctggttctggtaggactaac

SEQ ID NO: 89205 - DNA, 744 bp, Oryza sativa
  Clone ID: PAT_MRT4530_87983C.1
atggattccggcggtggcggtggcggtggcggtggcaacggcgacacgggcggcgagggctcgacgtggacgccgtggtccggagtggacgcggcgccgccccggcgcggtggcaacggcgacaggggcagcgagggctcgacgtggacgccgtggtccggggcggacgcgacgccgccccggcgcggtggcaacggcgacacggccggcgagggctcgacgtggacgccgttgtccggggtggacgcgacgccgccccggcgcggtggcaacgaagacgcgggcggcgagggctcgtcgtgggcgccgtggaccggggtggacgcgacgccgctccggcacggcatcgacgccaccgtggatgagatccgcgaggcgctggggctggcgcccgtgtcggccgccatggcgcgccgccgacgcgcggcggagcacctgcgccgcgccgcggagtacgtggagctgcgcgcgcgcgggggttgccaccacgacgacgcgcggtgccgccgggtgcagtcggcgctggccgcgcaggtgcgcggcgcgtgcgcgcggtgcgggtccaacttctgcgtcgtgcccgtggtggaatccaccaacgtctcgggcgaacagtgcgttcgctgcggctgctgcggcgagcgcgtggatttggcggcggcggcggcgctggtgatggctccccccgcggcgacgaggcggcagcaagggtggcaaccgtgtcaccaaggctacaacatgtag

SEQ ID NO: 89206 - DNA, 301 bp, Oryza sativa
  Clone ID: PAT_MRT4530_87984C.1
ttggggtttttttttttttttttttttttttttttgtttttttttttttttttttttttttttggggaggaaagccctctttttggatttttatggggggaactttcggggcaaacctcaaaaaaacacccgccagcatttgacggggggggggggatacccttacaggcttacaggttatttctacatacataaccaaaggggatcccatttccaggtctaccaaaccttgcaaaatggaaaccctcttcctgaaacccgatcaaattaactggatttcgccggacacgtactaacctgg

SEQ ID NO: 89207 - DNA, 498 bp, Oryza sativa
  Clone ID: PAT_MRT4530_87985C.1
atggagccggttgtctcggtctcgcgcgtgcggcgccggtcgccgtcgtggttcacggtggacggcggcgtggcggaggagccgctgctcctgctcggggcaccggcggacggcgacgacggcggcgaccaggcgcgggcggcgctcctgcgcgtggaggagctcgagcacctcctcggcgacgtggcgcggaggctgtcgcggctggacgccaagcgcggcaggctcgagggccagatcgccgcggcgtcccgcggccgcaggggtggcggcgctcatcatcgccgtcacgggagcgctggaggaatatcggagtcggagggcgagggctacacgcggaagggcgcgggcgccgtccgcaagattctcagggcggcggccggcgacgtgaagaaggcgcgggagtggctggaggcggtggcggggaggctggaggcggcgctcgtcgacgcccgcgagcgcctcgcgctgcagcagatgctggcagccggagcgtag

SEQ ID NO: 89208 - DNA, 771 bp, Oryza sativa
  Clone ID: PAT_MRT4530_87986C.1
atcgctggcgcctttgactcccgccgcgggcggcgcagcgcaaacgatggggatccccgccgcctcaatcgcggcccggacagccgcaggagcagagctggccggcgtcatagccgcgcgcgcagtccgccgccgatcgctggacggctccggcggcgcagccggatgccgccgcatggcgatccacctagcctgacactacaggaacggcgcgctcgagcaggccttattattcacctcgcccaaggcgaccaaaatcggcgcgcacaggaagcgccgcatcgaagaccacttcaaggagggcggccagcgcaggctggatccaagccctatcaacatagattaacagctactatattaggcatcatattggcaacattgaccggaggacatgatcaatgcctggactaccatgagtcaaaggctataactgagattatacggaggcatgattgatcactattgctgctggaatggatatacttgatcatgcgaacttggtgtgcttagcgatgaacagacacgtattattactactgtgaatcctgtcagaaggtacaaaggtggatgaccttaaaggccttcttgctgccacagcaagtgggctaatcatacatctgactttcggtcttgttgcactgttgactgactagagctcattagacgaggctcttccacagcttataatacacccatctctggtactgctgctttgcttgacagtctgatagattcaccgtaagagtgccacactgcacgtcagtggatact

SEQ ID NO: 89209 - DNA, 1655 bp, Oryza sativa
  Clone ID: PAT_MRT4530_87987C.1
caaacatgcaaacataaggcattactctggatcaggattgtcaaatttttattcttgaatatgcaaacataaggcattgtgcacaacatggtccctaggagataaaggcgttgttttgaaggcaaaccactatgaaataaactaaacactcttgtggacgacttaggtgctgtttactctagcttgacttccgctctcttgggaggatccagctgcaggtaagtatacggctccgttggctcctccccaggtttcgaacgcatgcattgccaaaagagcttgaatggacctggaactgtcttgaaaggattcccctcaaagcaagcctggacgacgtcctcggcgcggtcgttgcagcggtgcgccttgggctcccgcttgtccccctccggcaagccccatgggctctccctcctcggcaccggcctcccctcgctcatcctcctccaaccacctccctcctcactagcaaccaccctaatgacagatggggcccaccgatcccaagcagaggccatgagcaagttatctacctcaatagtctcagcatcagagatgagccacttatcctggtcgcgagcaaagcagaagtaccgcccattggcataggagatcattgaggccagagaatattttgccgaggagtgaacacccttgcagagaagtttgatatcaatgggatgtgcaatgccaactagaacttcagatagctgaacctggttttcacaatcaccaaaccagtataaacctattgtaaagatatgtggtgtgtttgaaggagaaacatcaacgttcttcggacttccacaatgcttgcaattgtccccaaagcacaactgttcatcatagagaaccggaagctctgcaaaggattcgatttcacgttcctcaatctcactgttgaaatcaaaatgcagaggagtttctgacatatgcagtgcttgaagaatcgttgccacaacctcagaagcaattcttttccagcctgcaactgaaattgattcaccaggtttaaccttctgtatgatcacatgcaagataaacatgtctttgtccttgttttctttgttgggaacatcaatacttggcatttcctcagcagattggccaggagttacaaaaagagtcagcaatctcttgatagtgttggcttcagtggttgttggcttgaagaacagcaccgcgtcatcggcatacaccgagagcaaatctcttcttgcatttagaggcgaaagcaaaccagccagctttgcccgagaaaccaaagcttgcagagcatccatgactaagataaaaagcaacggcgatagagggtcgccttgtctcagtcctcgagccggtttaattggatctgacagcaccccgttaatcaaaatgcttgtttcttcagttaggagggcagccgagatccatcttcgccaattcgggccaaatcccctaaactccatcattgacagcagaaaaccccaagagacagtgtcaaacgctttggaaatgtcaagcttcaacatcatcgttgccttcttctgccggtggaattgttgcaccaggcccttgacaaaaacaaaattctcgtgaatgcagcggcccttaatgaaggcagtttgcgagcaagggattagtgcttctagcttcggcgccagtcgttgtgccat

SEQ ID NO: 89210 - DNA, 586 bp, Oryza sativa
  Clone ID: PAT_MRT4530_87988C.1
gcacgagctcgtgccgaattcggcacgaggttttttttttttttttttttttgccgcaaccatctggattgatgagcagttcatcaaaccacaaattctattgcagttcataggtctctccagtcaagaattaaccgtctggatcgatgaccagttcatcaagctacaaattatattccagttcatagatctctccagtcaaaaataaaccttacaagcaactataaaaattagaagtatgcaccctttgatcacaaggagacccaaaaccaagtacaatccaatatactactccagctacaactctacaaggctcttgatgcagtaggtgcccacaaggaaccagccagtcatcaccgcagcgaaagcaagcaagccgatcaggaatgtcgcgccgccaaggagagtgccgatggtgatcaccagtgcaaatgggaaaaaagtcttcaccaccgacgctgtactcacccagcgaccccgtaagaacatcacagcagcgaggctgaccacattccatttggcatgggcggagtagaacagacggttcagattgtccccgccccagccggcacggttgccctcgtgc

SEQ ID NO: 89211 - DNA, 550 bp, Oryza sativa
  Clone ID: PAT_MRT4530_87989C.1
gctcgtgcgcgcagcgcgcgggcggagcggagcggagggagaggagggagagagagaacaagtgcgaccacacgggtgcaatgggacgcccctggctgagtaaatagcaaaccagggaagccttgatgccaagagacatgtggattcaacggggtggtgtcgggtagaaccctcgggcttcctggcatagtatggtctgggacctaacctgttgtcggtctgggacccctctcgttggcagagaggtgtaacatcccggcctagcgcttaataggattaatagaatactcatattaacaagttgcaacttcttttccagaagccgatctccaaagaactccagggttaagcgtgcttggcctggagcaatttgggatgggtgactgaccgggaaattcttttcccgggttcgcacgagtgaggacaaagtgtgtagaaaagacatgtgttggtctgtgagggcagtctatgacctatgaaagctgccagatgtaagtgggcccggcctgggagaggcgggtcgttacactcctaggggggcttgtattta

SEQ ID NO: 89212 - DNA, 301 bp, Oryza sativa
  Clone ID: PAT_MRT4530_8798C.1
gatctcagattaatcactgtgccccccctgtatatatgtatcggcagctatttcacagtccagagtaccatgtgtctacaacagtgctgtttgctcaattggttagctcaaactaatttacaattcaattgaacgattttacatgccatcagtaaacagcccactccatcctttttctctctatagcttgattttcttcaccaaactaccaaaaaaattgaatagtaatggtacatttcctatatagtatacgatggggcaaaaaaaaatcatgctccctgcttctcattgtggaaggaga

SEQ ID NO: 89213 - DNA, 320 bp, Oryza sativa
  Clone ID: PAT_MRT4530_87990C.1
aggaaaaagagaggctttatcatcattaggcgaaagactgggcagtacatttttttaaaacaatggcttgcaatttatttaggggggggggctttatccggaagcccccctaaaaggattatggcgggtggggaaaggtttgggagctcttggattggattggagtgaatgccccgaaataattttcttttttatggttgagcccttgaggcttttttcttgggatgggataggcatttgttggaaaaggatggggaggaggagggatggaggaatttttgtgtggggggggggtttataaggtatttgggttggttttt

SEQ ID NO: 89214 - DNA, 420 bp, Oryza sativa
  unsure (1)..(420): unsure at all n locations
  Clone ID: PAT_MRT4530_87991C.1
acgaaaaaancaacgggccccccaaagaacaagggccggggggnnnnannancaagggncccaccccaaannaagggggcccggggccaanaaaccgggacaaaanaacgggggggggggggnngagnnacaacccaacacagggggccagcccaganaagggagccaacaanagccccanaggccncagagcacagggcancaccancccgggnnccccacccggggggggnnancagcccaaccncaanccccancggcancancggcancccncngggggcgagggggnccacccccnnngcnaaggggcagcnncagggncccgaacgggggancgacancganccggcccccgaggggggagccagggcccccccccccgancagggcccagacagcaagagccgaaaaccccgg

SEQ ID NO: 89215 - DNA, 134 bp, Oryza sativa
  Clone ID: PAT_MRT4530_87992C.1
tggacatcggactattcgatgaacacaatcgcgctcggccttgatctcatctactacatccgcatatcaattatatgcaatgatctagatcataaactatacaacgcggctctgataccactgttcggatacgc

SEQ ID NO: 89216 - DNA, 243 bp, Oryza sativa
  Clone ID: PAT_MRT4530_87993C.1
tggcgttggtagggtagccatggcggaggaggccaccctgagccacccgccgcggtacgtgaagctgagcaggccacacgacgccctcacccccgccgaggacatcctcgcgtggaaggacaaccagccagtccacgtcccgcaactcgtggacaggaggtgcagccagtgcggtcagctcctgacttagtggtacaagcccccttgccacaagccctggaccaccggtattctgacctgggc

SEQ ID NO: 89217 - DNA, 673 bp, Oryza sativa
  Clone ID: PAT_MRT4530_87994C.1
gcacgaggctgcaacctggcaacgcgcacccacgtcggcgaagtgctcgatcactgcccccattggcggcggcgacgatcacccgcgaagccgccgccgccatagacaagcctacaagctgatggcgaggccgcagcaacgataccgcggcgtgcggcagcgccactggggctcctgggtctccgagatccgccaccctctcctgaagacgcggatatggctgggcacgttcgagacggcggaggatgcggcgcgggcgtacgacgaggcggcgaggatcatgtgcgggccccgcgcgcgcaccaacttcccgctcgccgacgccaccgcggcggcggcggcggccgccgcgtcctcgtcgttcctctccgccgcgctcgtcgccaagctccaccggttcaacctggcgtccgtgcaggccacgcagcggcagagggaggccgccgccaccgccgccgcggcctcttcggcctccgccacgacgccgccgctcggcaatgccgccgccgccgacgacgacgcgcggaccaccacgacgtacggcgcggaatggagcggcaggttcctcgaggagcagcacgtcgagcagatgatcgacgagctgctcgactccaacttctccatggagatctgctactagcactgtgtgacacacacacacacactctgttct

SEQ ID NO: 89218 - DNA, 425 bp, Oryza sativa
  unsure (1)..(425): unsure at all n locations
  Clone ID: PAT_MRT4530_87995C.1
gaaaaaaggaaaatgaggtcttgtaccataatactggtatggtacatgttccagaagagctggctcttaaagcaaggaaacttattaagagattccatgaaatccaatattattctgataattttactttatcggagaatgatggagagagacggtttgctcctaatattggtactctacccaagactagctctgttatatatgcaccgaaaattattggaagagagcaagacaaggacaacattgtagaaaagttgttgtccatgacgagtgacagtgtagctactccagtttctatcttgggctattgtcggtatggggtggattaaggcaagaccacattggcacagcttgtatataacgactccanggatacagggggttttttgacatgcatgcatggggttgtgtgtcaagccatttga

SEQ ID NO: 89219 - DNA, 1012 bp, Oryza sativa
  unsure (1)..(1012): unsure at all n locations
  Clone ID: PAT_MRT4530_87996C.1
tcatggccaccggcgacgggagagagaggccagcggcagcgacgaggtacagaggtgcgagtcggcggtgagagggggcgagagggagacctgcgcgacctcctccgtcggcgtcatgacctcctcctcgatgcggtgctgctggcaccgctccaccccgatctnnnnnnnnnnnnnnnnnnnnggggcgggacaagcgaagaaaccaaaggcaaggacacgcaaaaaaccacgangcaggccaaccggaaaaccgaaancgaaacgaaaaacggcgggaaaaagaagaaaaaaaaagccaacacaccgacagagggannaaaacgggggaacggacgcaaaaggagcaggcacagccaaaccaaaaacgggcgcgaaaagagcggaaanccggccacgaaaaccgcacgacccccccaccccccccccacccccngccccgnnggggaccaaacacaggcacgagggcacggaaaaccccaccaacggccacgggggcccaaaaccaaggccggncccggcgaaggggaaaaaaggggcnagccccgcacaagccgcaaaaaagggggggnnnccccccangggcgggaaacgggggcggcnggggggggagcccgaccccgggcacccccgcgcgatgnagacgaccccgccggcgccgctngccatcggccaccacgagggagagagaggcgacaacgagagagggagaaagaggcggcgaagagagagaggatccggcgccggcgaggtggaaggggaggacggaggaaaaggatcggcaggggagagcggaggaaacggagcggctggggagagggcggaggaaaaatcggcgaaggggagaagggcagagaaagagacgcaaagcggagaaggggcagaggaagagacgcgtgagataggagtggctgtagggaggggtattttcgaattttttcagtgccgagacacccattgtaggcttgagtatcttcatatagtccccttatattttgaggagcctatttag

SEQ ID NO: 89220 - DNA, 648 bp, Oryza sativa
  Clone ID: PAT_MRT4530_87997C.1
atggtggctgcacggagcggcgacgacgcggagctcaggttggacgtcgagtgcttggcggccgcgccgcggtggaccagggcgagaaggagccacagcgaggcggagcggaagcggcgggagcgcatcaatgctcacctcgacacactgcgcggcctcgtcccctcggcgtcccggatggacaaggcggcgttgctcggggaggtggtgcggtacgtgcggaagctgcgcagcgaggcggcgggcagcgcggccgtcgtcccgggggaaggcgacgaggtcgtcgtagaggaggaggaggtggaggtggaggggtgcagctgcgacgccggggagaggcaggcggcgaggcgcgtgaaggcgtcggtgtgctgcgccgaccgcccggggctcatgtcggagctgggcgacgcggagaggtccgtcagcgcgagggcggtgcgcgcggagatcgccaccgtcggcgggaggacccggagcgacctggagctcgacgtcgcgcggacggcggcggcgggaggaggcagcaacggggcgtcccagctgccggcgctgcaggccgcgcttcgcgccgtgatcatgagccaggaggagctgctcgccgtggagagctacaagcagcgccgcttctccgcggatttcgcctag

SEQ ID NO: 89221 - DNA, 1656 bp, Oryza sativa
  Clone ID: PAT_MRT4530_87998C.1
tagtggatccccgggctgcagggagagagagagagaactagtctcgagtttttttttttttttttttttttttttttttttttttagttgatagccgtccgttaacactgattagaagactagaaagacaacgtttgcattttcattgcccctgaattggagggtcatcatatatgaattttacataaaggatatccttttttggcatatgaaagaccatgatattgacatttagatgttttcagtcaacaagctctctttctgtacagttatacttatagatacaactggcatatcgattttaactgtttaagttgtcggatttctacagactatcgaatttcagtctcacacatttcaaacttcataatgaaggaaagaggttatcttacgagacgaaaaggttggagtacggactgaaggcataccttctacgcatactggataatccagaacttccattgtctacaaaatcgcttcacaggttgccttattgtgtcctgcttgcttgcacctgctacagagccgtacaacagtaggtatcttgtaggggttaaaacgcttccttctgggtttatctgatgtccgtggcttaggaggtggaatcaaatttgccccagcactaaaatcaacggtatccatgtcaggaattgggaatattgctcctgagtaagccaaatggtagctctctattctgaaaaattttgtgaagtagtcatagaaagatcgcccaaccctgttgaacacagcaacagcatgcatacaaggaaggccagaaagttgccaccttcgacaggtgcattcccaatttgcaaggttgacaacataaattgcactgccccggacttcaaacacggtttcagaagagcacagcacagtcagcttcccagctttggacatctcatcctgcactttgaattccatggaaggagttaaaggccctgaccaggacttgcaagactcgcgccttgcttctatcacctccattattttcattctcagagagtctatcatcagcactattgatccttccttcttggtaggtatccagttattaaaagcatcaacaatgttcgaggagaaatgatcataacgacagcctctgaagatggcatctgaccaatgctccggcttacttgcaataatccaatcagcagcttcagtggatatattccttatgctctcaattgatgcgttaaaatcctcgatgctgcaggcttgggctgctcgagtgaaatcctcaaccatcccatctcttatctgttgtgaccacggtcccttcctcagctctcctttgaattcttccatgatatgatgcaaacagaaggcgtggtgactttcttcgaacacttgtggaacagcagcatccaatcccttttgtccactggacaaaaatgtcatagcattgtaaggatagttgtgattctggagagcatacctcagctgcatcaagaaccaaacccaactctcataattttcatcttcaaccacattaaatgccactggaaagacaccatcatctgcatcaactccagcagcaaccagcaacttgtactcattagtcgctttaagcggaaccttgtcaagaaatatgagaggcctacacccatttgtgaagccatgcaaagaagcgtggaatgcaacaaagaagcggcg

SEQ ID NO: 89222 - DNA, 104 bp, Oryza sativa
  Clone ID: PAT_MRT4530_87999C.1
gggcaggcgccggtgacccgcctccatggcagccgcaagagccgcctccgtccaatgcgcacgacgaccgaggcgctcgatgagggacaccacacgtcacggcg

SEQ ID NO: 89223 - DNA, 4812 bp, Oryza sativa
  Clone ID: PAT_MRT4530_8799C.1
atgatgatggaccgcggaggggtttggatggaggggaaacgatgccgaggacggccttgccgctgcgatgccggaggtgatggggggggtgtggccgaccggtgcacggcgaggagggacgggcggccgaacaactccggcgaggcggacggagaggttcgcggcgacgttccggcgaaaccgagggcaggccggggtggagggcgatgcggcgtcgccgagggaggagacggcgacgtcggccgacgctctggcgcggcgaccggggcagccggaggagatgtcgacgaggaggaaggtgaggccggcgcgggcgacggtgttccggcgatgttcgggcgaggaggaggtgataccggggatgagggcggcgtcgtggagccgaggaaggtggtgaacactcgcagcaacgggaatggccccaacaaccccaataacaataacaatgaagagaatcccactcttgctcaagttcttgctcaacagacacagctaatgaacatgatgatgcagcaacttcagaaccagcagaaccaaggaaataaccatgcacctcctcagaacaagttagcagaatttcttcgtgtgaggccgcctattttctctagtaccactaatcctgttgaagctggtgattggctgcatgccatagagaagaagttggatttgcttcaatgcactgatcaggaaaaggtctcatttgcatcacaccagttgcatggccctgcctttgaatggtgggatcacttccgcctgaataggactaccactgaacctatcacttggcttgagttcaccgctgctttccggaagacgcatataccatcgggagtggtgtctctcaagaagaaggaattcaggtcgctcacccagggatctcgctctgttacggagtatctacacgagttcaatcgtctggctcgttatgctccggaagatgtgcgcaatgatgaagagcgccaggagaagttcttggaaggacttaatgatgagctttcttacccactcatgaccggagattattctgatttccagaagttagtggataaggctattcgtcaggaagacaagtacaaccgcatggagcagaagaaacgtcggattgctcaattgaagacacaacaggggaatattcagaagccgcgtcttactttaggaccccagtccatgccacagggaggttcttcgtctattgttcgtccgcagcgtcagttcttcaacaacaatgctggcaacaacatccgcaatcaagctccacgtcctgttgcagctccagcacaacaacaacctgtcaagagggagcaaggcagcaagcccgtggtgtgtttcaactgtggagacccaggacattatgctgacaagtgtccgaagccccgacgcgtgaaggttgtccctgctcagagcaactctgctgtaccagcatcaaaggcccgtgttaatcatgttgctgctgcagaagctcaagatgctccagatgtgattttgggtacgttccttgttaactcagttcctgcaacagtgcttttcgattctggtgctacacattcattcttatctatgagttttgcgggaaatcatgggatggaagtagaagatcttagacgtcctttgatggttagtaccccaagtaatcaagcactctctttgcaacgtagcccctctgtcagaatagaaattcaaggtgtaccatttcgggccaatcttatcctgttagaatccaaagaccttgatgtcatcctagggatggactggttagccagatataaaggtgtgatagactgtgctaacagaaaagtaactctcaccagtaatgatggtcgagttgtgactgttcatgcattatcttctgagtctttaaggtcaagactgaaccagataactttggaagagattcctatagtccgggagtatcccgatgtgttccctgatgatttacctggtatgcctcctaaaagggatatagagttcagaatagatttggtactaggaacaactccgatccataagagaccttatagaatggcagctaatgagttggcagaagtcaaaaggcaagtagacgatttgcttcagaaaggatacatcagaccaagttcatctctatggggagctccagttatttttgtggaaaagaaagatcatacccagaggatgtgtgtggactatcgtgcactaaatgatgtgactatcaagaataagtatccactacccagaattgatgatttgtttgatcagcttaaaggtgccaccgttttctccaagatagatcttcgatcaggatatcaccagttgagaatcaaagaggaagatatacctaagacagcttttaccactaggtatggattgttcgaatgtactgttatgtcttttggacttaccaatgcccctgttttcttcatgaacttgatgaataaggtgtttatggaatacctagacaagttcgtggtggtctttattgatgacattcttatctactcccgaaccaaagaagagcatgaagaacattttcgccttgcattagagaagctacgagaacatcaactgtatgctaagtttagcaagtgtgaattttggttgtctgaagtgaagttccttggtcacgtcatctcagcaggaggagttgccgtcgatcctagtaatgtggaatccgtaaccaactggaaacaaccaaagacagtttcagagattcgcagtttcttaggcctcgcaggatattaccggaggtttatagagaatttttccaagattactaagcccatgacacgactgcttcagaaagatgtgaagtacaagtggtcggaagaatgtgagcagagttttcaagagttgaagaatcgcttaatatcagctcctattttaattttacctgatccaaagaagggtttccaagtgtattgcgatgcatccaaacttgggttaggttgtgttctgatgcaagatgggaaggtggttgcctatgcatctcgtcagttacgtccgcatgagaagaactaccctactcatgatcttgaattagctgcagtagttcatgcgttgaagatttggcgtcattatctcttcggtactcgtacagaggtatataccgatcataagagtttaaagtatatctttactcagccggatctgaacatgagacaaaggagatggctggaattaattaaggattatgacatgggaattcattatcacccgggaaaggctaatgttgtagcagacgctcttagcaggaaaggctattgcaatgctacggaaggacgacagttgccgttggaattatgcaaggaatttgaaagattaaatttgggaattgtcagtagaggtttcgttgcagccttagaagcgaagcccactctaattgatcaagttagagaaacccaaattaatgatcctgatattcaagaaatcaagaagaatatgagaagaggaaaatctattggtttcttggaggatgagcaaggaactgtatggttgggtgagagaatttgtttccccgacaacaaagatttaaagaatgcaattctgaaagaagctcatgataccttatactccattcaccctggtagtaccaagatgtaccaggatctcaaggaaagattttggtgggcaagtatgaagcgtgaaatcgcagaatacgtagcagtatgtgatatttgtcagcgagtcaaggcagaacatcagaaacctgccggtttgctgcagcctttgaagattcctgaatggaagtgggaagaaatcggtatggattttatcactggtctacccagaacgtcatcaggccatgactctatttgggtgatagtcgacagacttaccaaagtggctcatttcattccggtaaagacaacttatttcggaagtcgcttagcggaattgtatatggcaaggattgtgtgtttgcatggcgtccctaagaaaatagtgtctgatcgaggcagtcagtttacttcaaatttttggaagaagcttcaggaagagatgggttctaagctgaactttagtactgcttatcatccgcagacagacggacagaccgaaagggtgaatcaaattttggaagacatgttgagagcttgtgctttagacttcggtggaagttgggataagaatctaccttatgcagaattttcgtacaacaacagttatcaagctagtcttcagatggctccttacgaagcactgtatggtcgaaagtgccgcactccgcttttgtgggatcaaacgggagaacgtcaggttttcgggactgatatcctgagggaagcagaagaaaaggtgaaaatcattcaagaaagattgcgtgtggcccagtctcgtcataagagttatgccgacaatcgccgcagagatttgagttttgaagaaggagattatgtgtatcttcgtgtcacgcctcttcgaggggttcatcgttttcacaccaaaggaaaattggcaccgcgttttgtgggaccttataagattgtcagtagaagaggagaggttgcttatcagttggagttacctcaatctttggcaggagtccataatgtgttccatgtgtcgcaattgaaaaagtgtttaagggtacctaccgaagaagctaatcttgaacagatagaagtccaagaggatctgacctatgttgagaaaccaatccgtatcttggaaatagatgagagaagaaccagaaatcgagttatccgtttttgcaaagtccagtggagtaatcactcggaagaagaatcaacttgggaacgagaagatgaattgaagttagctcatccgcatctgttcgccagttcttccgaatctcgaggacgagattctgtttaa

SEQ ID NO: 89224 - DNA, 615 bp, Oryza sativa
  Clone ID: PAT_MRT4530_879C.1
atggatccaccggccaagccaccgagggaaagtagaggagaggaggggcatttgtcgcacctgcaacccgctgtcgccgtcagcccgtcaccatggaggtcggatgcggctaaatctgacggccccagacctccacgccgatggatccgtcggctaggtcgcccgaacggtgagcgcagggagatggaggagaggagcagtagaggagccggcgatgtggccatgcctgcggctggatccagacgaggaggggcgaggctgctccaacccgctcgtcaccgaactgcctctgagcaggaggaggagagccctggcagcggtgcgacgaagcacgggccgagcggcataggcaggaggatgccggagcccggagggacgggcgccggggtagagggagggggctccgccacggttggggaggacgccatcgtcgccgtcgacgcttgccttagggacggccgtcgccgagggagcgcggatgccgccgttgggagggcaccgtcaccgagaggtagggagggagggatggccgtcgaggccgacagggagaggaagaggaagagggggagggacggccatctccgccgtctccgccgtcgccgcgccacgccgtga

SEQ ID NO: 89225 - DNA, 533 bp, Oryza sativa
  unsure (1)..(533): unsure at all n locations
  Clone ID: PAT_MRT4530_87C.1
atgactcttcttcgcaaagcaaaagggccgacagctggtgttcgtacaccaaaacagtacgacgcatcgatccatgtaaaaacccccattggaggcgcggccaaaaccgggcaggaattggagttggacggcagcggcagcggcgggcagaggagagggatcgcgagggcactcaaggagcacaaggcgaggctctacatcatccgccgatgcgtcgtcatgctcctccgctgctgatgatcgagctgaggatggcgtgcacacgccttaatttcttctcggtggaatatctttcgcagtttttctctcaccaattcaccatggatcggtgggggcgaatgtttgtcccttgtttgggtagatctgtttggatctgtctctcttaaatttgtacatactgatgagctagtgtagaccatatcaatataggatgcagatggaagtagtattagttagtatgagaggtaaattagttagttggggctgaagaattgggggttgtcctntacccaggaccaatttgccttgtaaaa

SEQ ID NO: 89226 - DNA, 472 bp, Oryza sativa
  Clone ID: PAT_MRT4530_88000C.1
gtatccaaaggagccagaagctgggaaaagatcgagtaaaacagtttcagaagaatggcagttctatacttctatacaagctttctgaaccaatatacttctacatttcatagctcttcagaagctagcatacaaataaggaaaataatatataaaattgtacattaggggaaaagggtatgttagtgtgcatgcaagcctatgttcagatataagattcatggatgtgtctgaactcagaagaggactgagttggcatgcgtcgcaacatgcaatattgcaaatgaagtatcaccacattcagttactggagttgcgacgactgaggtagaagaacaatgcagtacatgcggctgctgcataagggaacacggtccacatgcccacagctgccgcaacacttgcgagtgcaacaacaggccgttctctcaggaaaaacccaacagctagctggataggaagagtaaataga

SEQ ID NO: 89227 - DNA, 1440 bp, Oryza sativa
  Clone ID: PAT_MRT4530_88001C.1
atggaaaagcaggacgacgcaacgcagctcctaccagacgacctgctcgccgaaatcctcggccgcctcgcgccgcgttggctcgccgcgtcccgctgtgtctgcaaggcatggcaagccatcatcgacagccgtcgccttctccgcgcggatctcctcccgctctcgctcagcggcatctacttcaacttccatgatgaacggcattcggtgttcttctcccacccctcgacgcgccccatcatctccggcatgttcaccgactacacgcccaatgcggaccgcgtggaggatcactgcaacggccttgttctactctggggtggcgtagctaaccccaccacccgacaatgggcgcctttccctgagcccccacctccatgcaccgagattaagggcgtctgccagcttagtaactatctcatgtatgaccctaccatatcatcgcactacgaaattttccaaatcccacgtgcgcttgatagatatcacgacgagcttgatcctatggatgacacctcgcaatggccaccgtcaccaagcgtgttgaatgtgttttcgtcaaggaccggagaatgggaaaagagatcgtacgtacgggagggtgaggctgccggtacagttgccgacatggcattgtcttttccatacgatcatttcaatggagtctattggcagggagcactttatgtacattgtgaagcagattttgtcatgagaatatccttatctgacaagacatatcaggtcattatgctgcctataactacggaagtatctgaatataaatcgcattttttcgggagatcgaagaatggggtgcactatgcattaatggatagggaccaacgactacgaatttggtttctcaacgagtcatgtggtcagaaaatgtgggaattgaagcatgacaagaacattagctttctactgaaaaggcatgacaaatatggacaaaatgatggaccctggacactgcactattttgactattgtgaaaattatgaccagaatgacattgatgcccattatgaaggttacataaatgaagattataacgaagagtacatcgccgcccaagattgcaagcattttgaagctgcctcctatgaagatcgtaatggaaatagcatcagaaacgtgatagtaccaataaataaatttgagtgggactctgacaatgatagcattcttgacattgaaaatatgaatgacgaacatcgcgatacatttttttcaatccttggatttcatccctacaaagaggttatatttctgaaccgacaaatggagagaggattggcttatcatttcaatagctcaaagattcaatacttgggaaaaacgttcccagaatgttatcattcggaagttcatgagatgtatgcgtcttttgtgtacactccctgctggataggggagctttctgaaagcacataa

SEQ ID NO: 89228 - DNA, 316 bp, Oryza sativa
  Clone ID: PAT_MRT4530_88002C.1
ccgccgcacggccccaccgcccgcccgctccgggtgcagaacggctgctcttgatcgtgatcgatcgcctccgatctccatcgatcgatcgatcgagtgctttcgtcaagtttttgcctcccctggccggccgcctgctagcttcttccaagtgaaaagttactcgtcttctatgcgaaacctattcggggtatggattatttgatcgatgtcaagtactctacttaatctgtatactacttttgactactggtggatgtaattaattagttaattgatcaccatttgcggcaaaaaaaaaaaaaaaaaaaaaaaa

SEQ ID NO: 89229 - DNA, 444 bp, Oryza sativa
  unsure (1)..(444): unsure at all n locations
  Clone ID: PAT_MRT4530_88003C.1
atatgaacggtattgtaaagtttaaagggagctctccttttacattgcacatgacgccagaagtccacaatcacctactttccacagctgaaatctggccacgatctgacgtcgcaatgcccatcacccaaacacacaaagatcacagtattattatcagagtaaaaatttcaccgtatcatcactcagcctgtgtgatcactcatcgcctcacgatcatcatcaagaaacgggtagtccgtgtaccctaccacagggtcatgggtatagaacgttgcccggtcatacttgttcaggggcgcgtccagctgaaacctcctcggcaggtcaggatttgccaggaacaggcgaccgaacaccaccatgtcggcgtacccagacgccacggccatgttcccagcatccctgtcgtaccctcctncgaccatgaacatccccctcctg

SEQ ID NO: 89230 - DNA, 831 bp, Oryza sativa
  Clone ID: PAT_MRT4530_88004C.1
atggagagcatcaatgtagcacgaggtgcatccgtgacgcctcgcatggcgctgccgtgcatcagcaacctccagacccttcactacaacctgctcttgcaccgcaaccgcaagacgaacgggaggaaactgcggagcgtgtcatgcagggcgagcgccggccgaggcggcggccgcggcctcgaccgccgcgacgtgctccttggcataggcgcagcggccgccatggtggccacgcagggcggcggcggcgcgctcgcggcgccaatccaggccccggacctcggccactgccacgagcccgtggacctccccgaccccgacacagcgccggagatcagctgctgcccgacgtacagcgccggcaccgtcgccgtcgacttcacgccgccgccggcgtcctcgccgctccgcgtgcggccggcggcgcacctggtggacattgcgtacttgaccaagtacgagagggccgtgtcgctcatgaagaagctccccgccgatgatccccgcagcttcaagcagcagtggcgcgtgcactgcgcctactgcgacggcgcgtacgaccaggtacggatgtacctgtacttccacgagagaatactgggcaagctcatcggcgacgagacgtttgcgctgccgttctggaactgggacgcgccggccggcatgtcgttcccggcgatctacgccaactgcaggctgtcgtcgctgtacgacccaaggcgaaatcaggcgcaccagccaccgttcccgctcgacctcaactacaacggaaccgacctgtcgaaactagatttcggcaataataaaagggggtggctatcaagctag

SEQ ID NO: 89231 - DNA, 1029 bp, Oryza sativa
  unsure (1)..(1029): unsure at all n locations
  Clone ID: PAT_MRT4530_88005C.1
cggnacgctggacgagacgcgtgctcgactctgccttggactcgccggagagatgggcgacgcggcgtcgtcggcgtcggcggcggagatggtggggcgcgcggtgggtgaggtgcgggaggcgctgaacgagcacgccgacgtggtggcggagctctttgggcgcgtctcctccgacctccgctccggattccgccccgccctcgactccttcctcggcttcttccacgccgtcgactggaaggaaccttggttgatcagcatgttaatttttcatgccattctgctgctggtaacaatcatctcaaggagaaatgtcaacttccaacttatcttgtcagctttaacattttctggtgtatttctcgctgagagaataaatacattcttagggcaacactggaagagcttctcaagccagaattattttgatccccaaggtctgttcatttcagttgtctggtctgggcccctccttttgataacgatccttattttggtgaacactcttgtcacactctgcctgctgatggtaagatggaaaagggcggagcttaggcaccgtgctcgtgaggttcgtaacaagcaggattgatcttaagctacctgaaaagctgaaactacgctgtttggtggccagcagacaagttgcttcccttggactgttgatctaaccgaaggaatttttttgtgtgaacttaccatgtgtagacatgtagcagtcgttcacaaaaacagtgtttatttagggatcatttcacatttgaagaaatcatggccagaggcccagagcttgactcttttgcctgtagcttgtgtattcccacgcattcttgtttttcatgcgaaggcaggagtcgagttactgtatttgctgaaatatgtgtaatagggcaaatcctttttccattgagaatctggctccatgaatgacagggtattttgcaattgtaatacttattcaataactcattttgatttaacacctgtgtcttctctgagtgtgattaaaaaaaaaaaaaaaaaaaa

SEQ ID NO: 89232 - DNA, 399 bp, Oryza sativa
  Clone ID: PAT_MRT4530_88006C.1
tttgttttttttttttttttttttttttttttttttttttttttttttttttttttttttttttttttttttttataagttataaaaaatattatattttatggaaataattataatatatgggcagaaaaaaaaaaaacaacgaaaaaagccaaaaaaaaaaaaaagagggtcccccaaagggggaaaaagatattttgaaaaaaaaaggggggtaaaatgggaaaaaaagggagggtttaaaaaaaaaaaacgccttaatagaacaaacaaagctgaagaaggggcccccccttggaggtaaaaaacagcacatttaaacgcaaaaagggggcacaacggggcccaacctcaaaagggaacccaggggggggtaaaaacacccaagggtggtaagcc

SEQ ID NO: 89233 - DNA, 502 bp, Oryza sativa
  Clone ID: PAT_MRT4530_88007C.1
catccacaaagcgggcatcgcacttcatagtacatctcatcagatttccagctgaaaccaagatcaacaatcaaccatgatcagtgccaggagacttgctcaactggccaagaagtggcagaggatggcggcacttgaaaggaagaggctcacaatgaaagccaaagaaaatgaagagtgctgcacatctgtagcaggcaagggccactgtgtcatgtacacagcggacgggagccgattcgaggtcccgttggcgtacctcggcactgcagtcttcagtgagctcctcaggatgtcacaggaggagtttggtttcacgagcgatggcaggatcatgttgccttgtgatgctgtggtaatggagtatgccatgtgcttgctcaagagaaatgcttcagctgaggtggagaaagcattgctgagctccatggtggcaccttgccactacaccggttgtatggtgccaaccgttggagtcaaccagcatatttcttgcttgtag

SEQ ID NO: 89234 - DNA, 2064 bp, Oryza sativa
  Clone ID: PAT_MRT4530_88008C.1
gtagattgaatttggctttttcatactgtttttggtcgtctcgtttgattgatttgggatcgcttggggattatttttctatgttcaattcggactggaaggacagaccaaccgaaaacatcacaaaaatcgcaaaaaaacacgggaatcggacttgagcagtgggacgacgtacgaaaatatttggtagaaacatcttaaacttttataatagatagagatagagataagtaggttagatagatatatccagttggtttattcgtttggtggtcgcaaataaatcgtaggcgagacttttccgtctcctagacggactcggtggccgtacgtgtcacctgttctgtccctgcaaagaaatactatggtataactagctagacgagacctttttggtctctactagacagataccgtaacagtgtctgtcttacctggattactggaacattgcagtatttatacctacatatatatgtgcacacaattcattatgaataatcataagtccctctccctttggctgcatgcatgccacgaagatgcagaagatgggtgtgaagaggaggaagagcagaagcaagcacacaaacacgacgtcgtactcctcccgagctgatggaagacatggttacggagatcctggtgcggctgcctgtcaagtccctcctgcggttcaagcccgcgtgcagagcctggcaagccatcatcgacgaccccgtgttcatccgagctcacctgcgccgctccgcctccaggtgggagcagagccacagcttcatcatcaaccctcacagcatggtcagagtcccttgggatcggtggccagtcccctccaatcgctaccgcttccatcagtggcagctgcaacgcggcaccaccaccacctctcccagaaacaataatgtggcgacgttcttgcatgccaaggacttatctgacgatcagcagttctacacaaccgagttcacgcaccgcgacggcctggtgttttctaccaccaccaccagcctccacgtcttcaacccagccaccagggatgccatcacgctgcctaccagttccaggtccaatctaatgggaggtggaagattcaactaccactgctcgggtctaggcctggatccacgcaccggcatgtacaaggtagtccaggctttcttccggttccagtcaatggaaccagctgaaacaaaaatggggatggaggtgttcaccattggaggaggaggtggtggtgccggttggagggagatcacgagtgatcctccatacccagccaagagattccagatcggcgtgtctgtctgcggctacatgttctggcgcttttccgagaggcatacgaagctcgagcgcggcatcctccatcttagcctggaggaagaggagttcggcatcaccggcctgccagatgagctggacactgataacagcttcttgctggacgagctactcggccgggatctgtgtgtgtcggcgtctaacaccagctgcacgatgctgaacatatggacgctgcctgtagcggacgagagcctgtgcacgctgtggcaatggcgttactgcatcgattacccctggagtctttgctctgtgatggctcttcctcctttcagcgatgaaatcatcttgttgcgaggtaataatatatgtcgctatgatctggcgacttctaagctcaagatactatgtagattggatcgcacgaggtaccagggggagggggcacggaagtcggaattgttcagtgccatgccgttcatcgaaagtctcgttcggatcacttattaatagccgatcatcgccctgttcagttggggctttagccttcagcagcaaagccagcacaaacaggattttgtgccttctcagctgtctgcagcgctgccgcagaataagcagctatttgcatgtttatctattttatatgtattttgaaccatgtgatatgtactaattaagttaaaagttttatgcttagctagtgaatatctgtgtggtactttcatcttaaccatataaatatggaaattcctagcttttaatttttttaaaaaaaaa

SEQ ID NO: 89235 - DNA, 757 bp, Oryza sativa
  Clone ID: PAT_MRT4530_88009C.1
gcggccgggcggtgatggcggtggcctcgcgtggcagcggccgggcggcggcggaggcagcctcgcgcggtggatccaggaggggaggcggccagaccacccccggcagctgcaggcggcggccggcacggaggcgcgcggcggcaagcggtggaggccggcgcggctacacggatttttttcttttttccttcttaaaatgggggagctgaagaaactggttgaagagggaaagataaagtacattggactgtctgaagcgtcggcatcaacaatcagaagagcacacgcagtgcatcccatcacagctgtccagcttgagtggtctctgtggtcaagagatgctgaagaagacataatcccaacttgcagggaactcggcattggaattgtcggctttttgtccagtggcccaaaaatagtaggcacaatggcgcaggtcgggtcgggcggcggccggccgagagcggtgcggagcggggcaggcggccggccgaatcggaaaattggtccggacagacggaaagatctaccaagattccagccggagaacatggagaagaacacggtgatcttcgagcgggtgagcgtgatggcgacgaggaagggctgcacggcgtcgcagctggcgctggcgtggaacgtggcggcgctgggcgtgcgcctcgcggcggaggagatggccgagctcgagtcgttggcggcggcggacgtgctgcgcggggacaggtaccacgccagcttcctcaccacctag

SEQ ID NO: 89236 - DNA, 2772 bp, Oryza sativa
  Clone ID: PAT_MRT4530_8800C.1
ccccgacggatggtggttttagccgtgggtctcagtctcactcccagattctactcccgctcctccatcgtcgtcgccgcgagtttgctcctctcggcggcgccctcctcgtcgtccccgcgcgctcgtgccgctgctccggccagcgggtactccccgtggcgaggcagcattagtagaatatcatcgcacccaacagctatggctaccacacaagcctcagaagcagccactgagaaaggattgcctttggggatggatgtctccatggtggatgaatatgcttcccagtccaagctgctgcaggaattcgttaaaattcccactattggcaacgcttggatcttcaattccaagactgaaaacacatctagggcgatagtttctgttggccaaacagatctgttggcaaacaaaaagaggagcttcctattaaattcccacatctcaaaaaattcctcaaattctgtggatttccagtggtctcccttcccaatcgaaatgagtggagtttcagcagtaattccatcgccatctgggagaaaacttttactaatacggaattctgaggatgattcccctacaaaactagaagtttggggcccctgtcagttggagaacgagattcacattgcacaatctgttcatggatcactctatgtcgacgaatggtttgaagggatatcgtggaatcaagaagagactttagtagcttacgttgctgaggagcctcctcaaccgaagccagaattcaatgattcaggatacaagaaggctggctcgtctgaaaaagactccaagagctggaagggaaaaggggattgggaagaaacttggggagaaacgtattccaagaaaaggatacctgcattgttcgtggtcaacatttcaagcggtgaagtgcgagctgtgaagggcataccgagaacattaagtgttggccaagtgatttgggctccatcatcatcacatagcctggtttttgtggcgtggtcatctgataatggttaccaaaagacaccaaggaaacttggaattaaatactgctttaacagaccttgtgctctgtatgctgttcctgatcctttcatggaagaagctgataagccatcacttaatgtcagtaagggtgaaactgcacctacaaccaagttaacatcagagttgagcagtgcttttttcccacgattcagtccagatggaaagtatcttgtgtttatctcagcaaagagtgctatagatagtggaacacacaatgcgacaaattcaatgcataagattgactggcctgcagatgggaaattggagggcctcagtgttgctgatgtggtcatggttgttttcctggtctgtactgctctggcatacttaggaatccatggcttactgatggacaaactatgattttatcttctatttggggaagtaaggaagtaatactttctgtaaatgttgtgagccgtgaagtttcaagagttagtcctcaggattcggattattcatggaatgttcttgcactagacaaggataatattcttgcagtttcaagcagccttattacagttcctcaaatatactatgggtctgaggtttgtcagactggaaaaccaaaccaatgggagtggcaagaaattgcaactccttttccgagtccttctgataagatcagtgcaatattagcagaccataagttcagtatactcaaaatcccgattagcaactcttctaacaaactcgctgatggtgctaagctgccctttgaggctatttttgtgtcctggaaggattctgcaacaagaccaacaattgttgttcttcatggtggaccacacactgtttacccatcaagctattcaaaatcgttagcatttctttattcacagggatataaccttcttgttgtgaactatagaggttcactaggctttggtgaagaagcactacaatctcttcctggaaatattggttctcaggatgtgaatgatgtattgacggctttggactttgttataaagaaaggattaatagatgcatctaaagtagctgttgttggaggttcacacggtggtttcctgacaactcatttgattggccaggtcttcttggattctgttgaccttatgtttcatggactgcaggctccaggcacttttgttgcagcagctgctcgaaacccagtatgtaatttatcattgatggtaggaacaactgacatacctgagtggtgttttgtggagatttatgggaaagaagggaaaaactgcttctcagagtatccttcatttgatgatctttgtcaatttcaccagaaatcaccaatatcacatatatcaaaggtgagcacgccaacactttttctccttggagcacaagatctcagagttcctgtttctaatggcttacagtatgcaaggaccttgaaggagatgggagttgaaaccaaaattattgtctttccagaagatatgcatggccttgacaagccacagtctgattttgaaagcttcctcaatataggtgtttggttcaagaagcacatgagcaaataaacaacatgcctctgttaccacactctcaccttgcttaataaatgcttgtaatttgggtcaaagcagcccaaggaaacgtggttctgttggcattctaataaattaagcctgctgtaacatttctgtactgggataattcttgaaaatgtaaatgcatttggttataaaattttaccctcgtggtacggaactatggattacaaaaaaaaatataaaaataaaa

SEQ ID NO: 89237 - DNA, 2766 bp, Oryza sativa
  Clone ID: PAT_MRT4530_88010C.1
atggaagaggctatttttgctatggtgcaggaggagatgagattgaaactgatgagaggcacaaatcctataagatcaacatacactgttgctgataatagggaatgctacaactgtggacaagtgggtcatgagaccgtggtagctttgggtgacaccgcagtggtagaagaggtgaccgagggggtcgtggtggaggtcgtggtgggggcagaggtgctccttaggccaatgcaaccattgaggaggtgggaagaatggcagaataacaagaccaataagagctccaacaccaccactcactttggtaactttgccaactacgcccaagtgggcgaagttaaccttctctcagttagttcggctattgatcaactcaagtgcattgttgtatttgatgataactcttgtctgttccaagagaagggaactgagaggaggattgggactgcagtcaggcatgatgagttgtggtacatcaatcatgaggaactgggactagctgcggtggttggagatgttgagaaggagatcagtttgcttcattgtcagttaggacatccatcttttggggttttgagtaagttgtatccagacctctttagtagagtggatatgcatagactggtgtgtgatgattgtgagcttgatgaagggatcattcaccagactacttgtcctggtacccctcctcaaagtggtgtagctgagaggaaaaatcgacatttgctagaagtggcaagatttctaatgttccagatgaacgtgccaaaatatttatggagtgaggctgtgatgacaactgcatatcttatcaatcagatgctgtctaggatacttggtatgaagtcacctgttgaactttttttgggtaagcgagagtacaaggttcctctaaaagtgtttggttatgtatgttttgtgcgagatcatcgaccctttgttggcaagctggatcctcatgcagtaaaatgtgtgtttgttggctatgcttcgagtcagaaagggtataaatgttgggattccattgggaggagactgtttgaattctcgactgtcatggaggatgacagccgagagggggagacagagggaggtgatacacatgaaaaaaatgttggttacaagaatggagaggcagtggtagttggatcaataccatgctcgattgatggtgtgagtaaagaggtggaaaaatttgttgaagctacacaagacaaagatggagaattggttcttcatgagagggatggagaagtggtgcttcatgagggagatggagaagtggttgtagggacaattccatgtcctatggagcaaaccgaaaaggtgaaacaaaaggatatgctagtttaccaaaggaggaggtttgataatcatggggagaaaagaaagaaatcagtgcaagatcaagttgaaagttgccacacccagaatacccagtcccagagtcctctcagagcctctctcctccagcctccttggctcctcttgagacaattgacagtgtccataccaaacgattggaagtgtgcaaaacaagatccaagatggaaagatgcaatgaaagatgagctgaatgctcttgtgaagaacaaaacttgggaacttgtgagacttccaccagtgaaacaaattcctgaaggaaaggtggataggtataaatcaagattagttgcaaaaggctataatcaaacatatggaatcgactatgatgagacatttgcaccagtggcaaaaatgggcatagtgaagactttggtatcttgtgcagtaaactttgggtggcctcttcatcaacttgatgtgaaaaatgcatttcttcatgtgataactagtgatgatgtaaaagaaatcaggtgcctggaggaaaagctaggaaaggtgtttgaggtgaaggaccttggtccccttcgctacttccttgggattgagattgctcgctcatcaaaggggattgttctctctcagaggaagtatgtgttggacctactgatagatacaggaatgctggggtgtcgtccaagtactacacctattaataggaatcaccaattgtgtgctcagtcaggtgatcttgttgataaggaagcttaccaaaggttgatgggacgtttgatctatctttgtcacacaagacctgatatctcctatgcagtaagtgttatgagtagatatatgtatgatcccagaactggtcacttagatgttgttcataggattcttagatatctgaaagggaccccaggaaaggggttatggttcaggaagaatggacacctaaacgtggaaggatattgtgatgctgattgggcaagtagtatggatgatagaaggtctgcatcggggtattgtgtgtttgttggtggtaatcttatttcttggcggagcaagaagcaagcagtggtggctcggtctactgcaaaagtagaatacagagctatggctctgggcttgagtgagatggtatggatgaggggtttgttgtctgagcttcgagtgttaagaagtgatactgtgatgcttcattgtgacaataaatcagccatcaacattgcaaacaacctagttcaacatgatcgcactaaacatgtggagattgataggttcttcatcaaggagaagattgatagtggggtgcttgggctagaatatattaagtcatgtgaacaactagttgattgtctaactaaggggctaggtcctagtgaagttcaatcaatatgtaacaagatgggtatgattgatatcttttgcccatcttga

SEQ ID NO: 89238 - DNA, 536 bp, Oryza sativa
  Clone ID: PAT_MRT4530_88011C.1
ggggcgggggggtgacccaaaaaaaaaggggggaccaaaagggaacttggtcctcgtttaaaaaaatgggaactggaacaaaaccctggaacaaagggggaaaactgaaaaaaaaaaaaattttcataccctggtacgtacaaaaaatgtacatccgggtggttactaaaggcctatttttttttggccagggggggagttttgttcatttgaagcctggccaaactagtaaaagctaaaaagctaattcccagctatttggacaaccatacataaaaggggaccgaaaaaaagggaaggatgggtttcaccactttagggggaaaaaaaaaaggccaaaaatcctcccagcgggggtgccacggggggggcccaaaaaaacggccccacggggggggggataaagccccggaactttcaaccaaaaatgggggggaaaaaccttaaaaggccccaccccccgcccttggggggggcccttgggggggacccggggggggccccccttaagggggggagggaggaaaaaagggggg

SEQ ID NO: 89239 - DNA, 1484 bp, Oryza sativa
  Clone ID: PAT_MRT4530_88012C.1
cggacgctgcagcagctagacaataataattaagccactactactatacagagacatcgatgaggaagcagttagtggtggtgttggctttgctggtggcagcagcagcagccatggcgatggctgatgaggaggacgtgacattgacggacaaggacctggagacggaggagagcatgtggagcctgtacgagagatggcgcgccgtgtacgcgccgtcgcgggacctctccgacatggagagcaggttcgaggtgttcaaggcgaacgccaggtatatccacgagttcaaccagaagtcgaagggcatgtcctacgtgctcggcctcaacaagttctccgacctcacctacgaggagttcgccgccaaatacaccggcgtcaaggtggacgcctccgccttcgctactgctacgacttcctctcccgacgaggagctccccgtcggcgtgcccccggcgacgtgggattggagactgaatggcgccgtgactgacgtcaaggaccaaggacagtgtgggagctgctgggtgttctcggcggtgggggcggtggaggggatcaacgcgatcatgacggggaacctgttgacgctgtcggagcagcaggtgctcgactgctccaacaccggcgactgcctcaagggcggggatcctagggcggcactgcagtacatcgtcaagaacggggtcaccttggaccaatgcggcaagcttccctactacccaggttacgaagccaagaagctggcctgcaggacggtggcagggaagccgccgatcgtgaaggtggacgccgtgaagccggttgccaacaccgaggccgccctgctgctcaaagtcttccaacagcccatctccgtgggaatcgacgccagtgccgacttgcaacactacaaaaagggtgtattcactggtcgttgcaagacggcgcccttgaaccatggcgtggtggtggtgggttatggtgtgaatactaccccggacaagacaaaatactggatcgttaagaactcgtggggcaaaggctggggcgagggtggctacatccgtatgaagcgtgacgtgggaaccccggggggtctatgtggcatcaccacgtatgccacatacgttacaaagaagtgtccttgccccgcaaaccctcccactatcatcgcctcctactaaccgaccgaaccaatacagatcatatagctccactcacatacacatgcataataagtacacgtgttgtcacctttcttgagtactcaaatgtgtgtcgtaactatggttacctatggtacacccatgtgcttaagtaaataaataatggtatatattaagcacacgcgcatgtgtacaaagacatgcataaactataataaaaaggagtttgtgaatcggtcaagtttgaataaatcaatacatcagtgtatgcatgcctgtgtgcgttggtgtgcttgatatgaagaaataaaagttctcgttattatgagttcc

SEQ ID NO: 89240 - DNA, 359 bp, Oryza sativa
  Clone ID: PAT_MRT4530_88013C.1
gctagatagaaagaaagagaggccgtcggcggccatggaagagagagagagagagagatgaaatgatgatgatgatacagctgccgctgcgtgctcacttctctttctgtcagctctccctgcagcatgcacgctgccacagccacactctctccattatctaactgctcctttaatttcctcttctctctctctctctctggactcgcatcgatctccgatgagataagagcatgctgctgctgctgcaacgcggtggtgataaagctaggcagcgcgggacctcgtccttatcttgtactgcaggtttgggggtgagccctatacgtgccatgagctctctgaccgaggacaaggag

SEQ ID NO: 89241 - DNA, 769 bp, Oryza sativa
  Clone ID: PAT_MRT4530_88014C.1
ccggccgggaaccactccgcccagataataacaatccgacaaaatggcgcgccgtcccgctcgttgctaccgatactgcaagaacaagccgtatcctaagtctcggttcaaccgtggtgtccccgaccccaagatccgaatcttcgatcttggccgaaagcgcgccaacgtcgatgacttccctctctgcatccacctcgtttccaacgagtatgagcagctgagctctgaggctcttgaggccgcacgtatttgcgccaacaagtacctcgtcaagaacaccggtaaggagggtttccacctccgagtccgtgctcaccctttccacgtcgtccgtatcaacaagatgttgtcttgtgccggtgccgatagacttcagaccggtatgcgtggtgcctggggtaagcccaacggtactgtcgcccgtgtcaacattggccagattctcatgagcgtccgcactcgtgatgctaaccgtgccattgctctcgaggccctccgccgatcccagtacaagttccctggccgacaaaagatcattgtctccaagaactggggcttcactcctctccgccgtgaggagtacctcgataagaaggctgccggccgcgtcaaggtcgacggtgcttacgtccagttcctctccaaccacggttctctggagcgcaacatccgtcgcttccccgacgctttcaagtctgaggcttaaaggaatgattgataggatggaatatggggttttctggcgtcaaaatggcttgtcaaataa

SEQ ID NO: 89242 - DNA, 221 bp, Oryza sativa
  Clone ID: PAT_MRT4530_88015C.1
gaaaaggattggctctgaggctgggctcgggggtcccggccccgaacccgtcggctgccagcggactgcatcgagctgctcgcagcggcgagacaggccccgcgtcccgcacggggacggaccgggaacgccccctcggggcccttccccgggcgtcgaacaccgactcagaactgctacggacaaggggaatccgacttttaattaaaaaaaaaaaaaaa

SEQ ID NO: 89243 - DNA, 129 bp, Oryza sativa
  Clone ID: PAT_MRT4530_88016C.1
atggctcctgttgttgttctccgagcactaagctcttctccacgctccctcaacattgacggcaacgtcatgccccttgatgtcactgcagttgctttcccggcctcaccatctgatgcccggcgctag

SEQ ID NO: 89244 - DNA, 531 bp, Oryza sativa
  Clone ID: PAT_MRT4530_88017C.1
tcgctttattagcttattgatcaaggccgtgacaccatttcatgcggttgaatcatgtgctttattgttaaaagaggctgggtttcaagaacttcgtgaaaatgatccgtgggatattgctccattaggaaaatattacgttacaaaaaaccgttctgcgatatttgcctttgctattggtggtcaagttcaagagaaaagtggattttcgatagttgttgcccatacggatagcccatgtcttagagtcaagcctatttcaaaattgacatctgagaaattcttgcaggtcggtgtctcaacttatggaggtggcatttggcgtacttggtttgaccgtgatttgagtgttgctggacaagttgttattcggaaaaattcttctctggtgcataaattgatcgatgtgagaaaaccgattttaacgattccttattttggctattcatctggaaacggatcgaacacagtttgaattggattaatgaacacaattgccgtccgattttggctatgcaagcttatgagaag

SEQ ID NO: 89245 - DNA, 216 bp, Oryza sativa
  Clone ID: PAT_MRT4530_88018C.1
atggcctccaacgaagaggccggattcccttctctcctgtgggatgaactcaacgacgacgcggggcaggatgaactcgacgacgacgcggggcaggatgaactcgacgacgacgcgagcgcgggagaacgacgaaacgaggtcacgacctccacaatgcgcgcaagtgcccgttcctcacgccgctcgccctggatttggccgaggaacacgtga

SEQ ID NO: 89246 - DNA, 355 bp, Oryza sativa
  Clone ID: PAT_MRT4530_88019C.1
attgatgcccaagcgcacaacgcgggggggttttaacaaccatacgtgcgacatgaggcctccagggcaaaggcctttttaatgatctcagaaaataaattcatggctgtaatcattaatgcgtcgcctgaagacacgaccattacagtatacagatgtggccctctagaatcccatcctccggggggcaaacatccccaatactacctttgataaagctccagctggtctcaaggcttcatcggcgtatagtagacggaaagcatatccagagagcccggtaccctttatggaataggggtctgctgattctaaacatctcaaggtatcaaaacattccgttatcagaggcttc

SEQ ID NO: 89247 - DNA, 2808 bp, Oryza sativa
  Clone ID: PAT_MRT4530_8801C.1
atggccgagcaagcgaaggcgcacgacctctctccgagtgtgagcggcgacgacggggagccaaacccacgccgtcgagctcgtactcccccacctccacaccaaagtcctaagcagggggaggcgctcgagagggttgataaatccgcagcatcaccggtcgcgggtgatgcaggagaacggcgagatggggagcgacgcctcctcgtctacggcgacggcagcacgcctcagggcgcgcttcaggctgctggcgcgctcctacgtcacccgcccgtcgtccatgaccctgagtctccagctcagcgatggctggacaacgtggccaacttggtcatgacggcccagcagcgcctgggtgctggtggacggtccgccaccaccaagacctccggcgccgccaccaccggttccgtgtcatcaaggcggagggcgcggcgagcggcggcggctgcacgtcattcggctgccactccctcgtcgacaccttcgactcgggaggatcagcatggggagccggatgcccgcctcaacatcgagcgccggcgtaatagccgacgtactccccgtgcaacggagggcgcctcctcgtccagagtgtcacctcgacatggacgtgaggaccagccctccgtgcccccggctggtggtatcggctgtagagcctttgtggcgagtcttcggaatgtccgttggcccccaaggttccggcccaccatcaccgagaagtatgatgggagcgtcaaccccaccgagtttctccaggtctatacgaccgggatcgaggccgctgggggagacgacagggtcatggcgaatttctttcccatggccctgaagggacaggcgcggggttggctaatgaacttgccacccgcgtcggtccactcctgggaggatttgtgccaacagttcaccatgaactttcaaggcacatatccgcgcccaggtgaagaagcggacttacacgcggtacagcgaagggatgatgagtcacttcgctcgtatattcagcggttctgtcaagtccgcaacaccataccatgcatccctgcacacgcggtgatctacgcgttcagggggggtgtgcggcacaaccgcatgctcgaaaagattgcctccaaagagccccagactaccgcggagctttttcagcttgcggatcgagtggctcgtaaggaggaggcatggacctggaacccctccggtcccggagtggcagcttcggccgcccccggatccgctgctcagacagggcggcgggacaggaggaggaagaagaggtcggcccattccgacgacgagggtcatgtcctcgccgtcgagggcgtttcgctggccacccgaaaggggagtctatacaagaagggggcccgaaggcctcggaagaagaaagaaaaagctattcaagattggcgggggcctgggggctcactccgacgcgcccgggtcaccagccttgtcgtcgttatcgtccgcaccaccgtcgccgccctcctcgtcggagtcgagggcgaacgcgagccgaggggccgtaccctcgaagctgtgaacgatgtggtcggcggcgtcccggacctgcgcgcgtgcgccgtcctcggttccgaaagggaactcttccagcgctgcccacggggagaagtcagggtccgagaggcccccaagccgaacggcggcccaaggcccccgacggccagagttggccctccgcctgcttgtccgacggtgtcaggcgcccccgaccctcaggatagcctcggggccactgcgggaaggccgcgcctgtcgccctcttaccccgaggatatcggcgcagaagccgagggcgccccgcgctgcctctcggatgaagagcgccctggagatgcggcccctagcgaagaggatcggccccgccgaaaggtgcagcggcccgtctactttgttagtgaggccctccgggacgccaaaacccgataccctcgggcccagaagatgctatacgctattctgatggctccgagaaaagcaccatcaccatatctccaggcgaagcaaatcggctcgcccagattcgtgcgctgctcaggtaatgtggcagtcttgaagagaccgcccattatggacagccaagtcaccattaccaatgtgcatggattgagaccgttgggtattttgcccaactacggagaccggtcccacctgtcaccaggctttaggggtggcgtcacacctgaccgcttcccttgggaagggaaattgctctggcataacgccgggggctactgtcggtgatatgggaccgggagtatcatgaccagaggcttgaggcagacgcaatcgcccacgtggcctggcaccttcggggacgtcgggcccgagggtgaggtgtccgccctcctcctgatttcccccgaggggggggggtcgggttgcgcttgccccggccccgagggccgaggcaccccgaccccttaaggaagtcggtcagatcacgggttaggtggcgactggcggtctgacgcacgccttgccccatcccgtcaagacgaaagcctctaggcacttgtctcaagccggagctagcgggttatctcttagagatggcacgttagccctggttagatttataccaggcttcatcccaaccattacatgcaagatgttacatgaagaagggcaaacatgcacgttgctaagctgacgcgtggtagacaaggatgactgatctgtgaccggtctgacactggtcgcgtcatccacagacagccataatcccacgtcgcacctgtttccggcggaagtgggggtaggtatgggccgtctcgt

SEQ ID NO: 89248 - DNA, 243 bp, Oryza sativa
  Clone ID: PAT_MRT4530_88020C.1
atggagaaggagaggcgagaaaaaaaaataccacaaggcaatggaggcggcggcgggtctgatcgtgcaatgcggcggcgagattatcgacgggaggaggaggagttcttgatggctttgtttcttgatggtaaaaagcaggagcagagcagctgggaggagcagaagatggcagaggcctccactttctctctcctccaatttccacttcaacaaaaggtgacaagtgtagcaaagctctga

SEQ ID NO: 89249 - DNA, 849 bp, Oryza sativa
  Clone ID: PAT_MRT4530_88021C.1
atggacatatcagcgaggatagcgtggggacgggcggtcggcgacggcggaggcagcgagcgcggcggaggaggcggcggcggcggcggccggcgaagtggagcaaagtgcccgcgagtggagcagatcgatggcgggagatggggggaggaggccgagcacgacattgtcatcgcgctggacggcgaggtgtcggtgtgggtgaccggcgtgggtgaccagcccgttggtaggaaggcgagagcattgggagatacctcgtcagggaggtccaagtcatcatccggaggcggcggcggttgcgccccctccacggcggacccaccggcggcaacgccgatcgccgcgcctctcccctcccccatctttcgtcggcctcctcccctctccctctcttcctcctcctgtcacgaggccctcgaggtggcggagctcgaccgggctcgccggccacctcttccctctctatcgctgccggcctatcctctctttgcggcggaggagccgagcacgacgacggagtcagcgcccgcaacgaagcggagaaaggcgcggccgcgtgctggggctggttgtcgcgcctggcgttggccgcctcgcctcgccgccgccgctgcctccaccgccccaccccgccgccgctcacctcctcctccgccgccactgcttgctttctccattgccctgccccgccgccctggcccaccgctcgcctccctgcgctcgctgccgcctcgccttgccgccgtcgctgccttctccgccgtcgccgaccgcccacaccgaccgcccgtccccgtgccgtcctcgccatgcgcgcagcgcgagccgcgagagagaaaagagtga

SEQ ID NO: 89250 - DNA, 171 bp, Oryza sativa
  Clone ID: PAT_MRT4530_88022C.1
atgaaggattgcggccggaaaaacttctcggcggcgaaaaacagagcagagcaggggcggcgcggctccgctcggggcggcgtgggccagggggaaaggatgagctcagacgccatcatcgccatggatgagctcgggaattggatggggcaaaggtggcagaggctgtga

SEQ ID NO: 89251 - DNA, 987 bp, Oryza sativa
  Clone ID: PAT_MRT4530_88023C.1
atgggggaggggagaggcgcggcgatcggcgttgccgccggtgggtccgccgtggagggggcgcaaccgccgccgcctccggatgatgacttggacctccctgacgaggtatctcccaatgctctcgccttcctaccaacgggctggtcacccacgccggtcacccacaccgacacctcgccgtccagcgcgatgacaatgtcgtgctcggcctcctccccccatctcccgccatcgatctgctccactctgctggcggccgcacgctcgcccacttgctctagtcgctcgccgccgcccgctccactccgcctgccgcgcgcttgcccgttgcccctcaccgcgggcactttgctccacttcgccggccgccgccgccgccgcctcctccgccgcgctcgctgcctccgccgtcgccgaccgcccgtccccacgctatcctcgctgtgcgcgcagcgtgagccgcgagagaaaaaagagcgagagagagaggaagaagagaagagtatagcagttctcacgcgcatgcgggcagatagcggccgacggcagggcgggcggggcggcgcgtggggaagaagcgggagatggggagaggaggtggacggcgcgaccgcccgcgacggcgggagcagtggccggcgcccgcctctccccatccggagccgcgggggcgtttttggcccatttcaactgtccagcatgaagcccaatcttcggaccaccacaggggtcttctgtggcgacggtggacgcacctggcccatcgaggcgagcgagggagaggcagcgccaggagtcgagctcgtaggcgcccacggcagcgtacacgaaccacggcgccagatagagaaggaagaggatgaggacgagcatctcgccgctgcctccttggccctcaccccgccgagcaaagaggagagggaagaagacaggagaaagaaggaagaaaacagaaaaaaagaaaaaggatatggatggaaaact

SEQ ID NO: 89252 - DNA, 570 bp, Oryza sativa
  Clone ID: PAT_MRT4530_88024C.1
atggagaagaacttctacaattctgagacggcaaagaacctaggtcctgataatgttgtctcaaatgttgactgggagtgcagttttatgtatcgtcaccagccagaatcgaacattcatgatattcctgagctggtccgtaccactcttcctgaatatgctgaagaagtaatcaagttggcagagcggctagcagaagttatgagtgagaaccttgggcttgacaaggattacttgaagaaagcgttttctaatccttccgtaggcataaaggcggccaagtaccctaggtgcagtcatcccgaatttgtgatggggctccgcggacacactgacgctgggggaatcatacttctactccaagatgacttggtccctggtttggagttcttgaaagatgagaagctagggaagagcaattatttgctatggaaggcacaagtccttcctaccatgaggggagcccaaatgttcggctacctcgacggcaccatcgtcaccccattgaaggagatcggggtaaaagagggtgaaatgatcacccaggcgccaaatccggcgtacacctag

SEQ ID NO: 89253 - DNA, 2238 bp, Oryza sativa
  Clone ID: PAT_MRT4530_88025C.1
ccgggctgcaggaatcggcacgaggcttctctctctctctctctctctctcctcgaaaaccccaacacacacaacgcgaaccccactccgcgatggcgtccgccggcgatcgccgcggcggcggggggcctcccggctccggcgacgactccgggggtggttgggagactgttgagaagagggtaaagaaaccagcgcaacaagttgggaaggggcaatggggacaatggaattctccaaatgctgcacctgcacctactgcaccacggagtggctctggagcttttcatcattctggaaacactttggttcgacattctgatcgtaggccagcaagaggcactcctaggccaccaccacaaaacaggtctatagaggcagaactgcaagcaccgcacggagttgtgactgcacctctggcaaatggttggcagtggggagccaggtcttgcccacctggtactgaaagcaaggagggtggtcttcctttgtctggttgtgatcctgaaacagacaatgctgaaggttatgacacatcggacgatgataatgatgatgatatgagtgacgatttgagtgatgactatgattctgatgcaagtgagaaaagttttgagactcggaaaaatcacaagttgttcaaaggtttcttcgaagtcctggaggcgttaagtgtagaacagttaaatgaaccaactaggcaatggcattgcccagcatgcaaaaatggacctggtgcaattgactggtacaaagggctacaacctttgatgactcatgccaaaacaaagggttctataaaggtcaagcgtcacagagaattggctagtttattggaagaagagctatctcgcaggggaacttcagtggtaccatctggcgaacaatttaggaaatggaaaggattgcgggaaagcactgatcgtgagattgtttggccaccaatggtggttgttatgaacactgtattggaacaagatgaggatgataagtggaaaggtatggggaaccaagagctaattgattatttcagtgaatatgctgcaagcaaagcacgccatgcctatggtccaaatgggcaccgtggcatgagtgtgctaatctttgacagctcggctgtgggctatatggaagcagaacgtttgcatgatcactttgttcgtcaaagaacagacaggaatacatggaacagtgctcacaaggttacattcttacctggtgggaaaaggcagctgtatggtttcttagctacaaaagatgacatggagacattcaatagacattgccacggaaaatcccgtttgaaatatgagatgagatcttataatgagatggtggttacccaaatgaagcagatgagcgaagacaaccagcaactgaattacctgaagaacaaaatggttaagaaagagcagcactctaaattagtagaggatacattgagtgttgttacccagaaacttagggagacaatggaagagaatactattgtacgaaataaagccaaagaaaagcacttggagtatgagaaagagatgaagtaccaggaggaatttttccatgatcaaatcgaaaaaattcacaaggccacagaggagaaagaaatcaagtttgagaagttgctgcaagaggagcgagcaaaggctagacaaagtgatgttgactctggaagtactgaagatcgcaggcaaaggaaggaaaagattcagaacttcatagactgccaggtgaaggatgttgaggaatttgaagccgaacgagacaaactgatcaaattgcatgaagagaagaaggtgaagctcaagaaggagtacctggcgaaggaatttgagcttgagaaggagctggacacagccctcacttccctgatggataaacacaagccggacatcttcaaatcctccacctcgccttcgacatgaagaactgcggcttaccatacatttcctgctcatctacaatagctaagactcccatttcctaagtacccgtaaaacttctagcgatgcgaaagcatcattctgtttgggtggatgcatgcctttggaaggaaacctgaaccagttccgtattatatggagtactatcagtttatggttgctgatgaactgatgactgtgcgctgcgcttttacagcaagcgtggaaatcgaatatatatctagtttatctcatcaaaaaaaaaaaaaaaaaaaaaaaaaaaaaataaaaaaaaaaaagaggcctcgtgccgaattcc

SEQ ID NO: 89254 - DNA, 447 bp, Oryza sativa
  Clone ID: PAT_MRT4530_88026C.1
gggaaaaaaacagggaacccgtttttggcccctttatttgggaacaaacccaatggggggccggccaattccctggggcacccaaggggccaatttttaaggggggggggggggaacaaaaaaaaccctgggccccccccccaaatgggcccccgggcccttttttttcccccccctttccccggggtaaaaaaagggggcccacaaatttttccaacaaaggcgggggcgcttaattaacttggcccaaaaaaacccctctcatttgggaaaaaaaacccccaattatattcgccccaccccgaattaattttgtttgccaagaggaccggggttccttcaatttaaaaccacccaccgccttccaggggggggtaattaatggcccctttggggggggggccggcccccccccaggggggggcccccgcccgggggggggggccc

SEQ ID NO: 89255 - DNA, 357 bp, Oryza sativa
  Clone ID: PAT_MRT4530_88027C.1
atggggatgcgccccatcgtcttcgtcgcctaccgccaggggatcgccgccgccacgctcctcctcgcctcgctcgccgccagggggtgggacctccgccgccacatggccgtcggcgccccggcgttcgccctcctcttcgccgcctccctcgccaggccgctcatctcccggttgattttggtcggcagcgcgacgggtctgtacttctacttcctggggctgcagctcgcgtcgccgtccatggccagggccaccaccaacctcgcccccggcattaccttcgccatcgccgccgtaatcgggtaccacttcttcatcgtccccatctccggcggcgacggcgccgccccctag

SEQ ID NO: 89256 - DNA, 321 bp, Oryza sativa
  Clone ID: PAT_MRT4530_88028C.1
ttataaaaaaaaaaaaaaaaaaaaaaaaaaaaaaggaaaattttaaaaaaaaaaaagggaaaaaaaaaaaaaaaaaaaaaaaaaaaaaaaaaaaaaaaaaaaaaaacaaaaaataaaaataaaaaataataaaaaaaatacgggtgggagttttaaaggatcccaataagtcacatattttaaagacacttaaaaaattttttttattttccttctataaaaaacccttggtaaaggttttaaattcactttgatggtaaacccgcggagataacaaataaattgcttttactaataaccccttttcacttgttaaaaatt

SEQ ID NO: 89257 - DNA, 348 bp, Oryza sativa
  Clone ID: PAT_MRT4530_88029C.1
atgccgaggacgacatcaccgctgcaatgccggagtaggggacggcgtggaacacgccattgcgatgttggagaaggtggtggtgcagcggggcgacgagccggcaaggaggaacgggcggttggcgcggcggcggcgtttcagcgaacttcgggcgacgccgcagccgggccggagaagaggatggcgctgcagcaccgacagaggtggcagcgacgtcggcctgcactcaggcgaggtggcagggatggttggagatggtatagtagcggcaatgccactgcaagccggcggggacgcgtctccggcgatttccccacgaatcggaggcggcgccagggaagatga

SEQ ID NO: 89258 - DNA, 1499 bp, Oryza sativa
  unsure (1)..(1499): unsure at all n locations
  Clone ID: PAT_MRT4530_8802C.1
attacttaatgtcagtaagggtgaaactgcacctacaaccaagttaacatcagaggtgagcagtgcttttttcccacgattcagtccagatggaaagtatcttgtgtttatctcagcaaagagtgctatagatagtggaacacacaatgcgacaaattcaatgcataagattgactggcctgcagatgggaaattggagggcctcagtgttgctgatgtggtacctattgtgatgtgccctcaggatggttgttttcctggtctgtactgctctggcatacttaggaatccatggcttactgatggacaaactatgattttatcttctatttggggaagtaaggaagtaatactttctgtaaatgttgtgagccgtgaagtttcaagagttagtcctcaggattcggattattcatggaatgttcttgcactagacaaggataatattcttgcagtttcaagcagccttattacagttcctcaaatatactatgggtctgaggttgtcagactggaaaaccaaaccaatgggagtggcaagaaattgcaactcctttttcgagtccttctgataagatcagtgcaatattagcagaccataagttcagtatactcaaaatcccgattagcaactcttctaacaaactcgctgatggtgctaagctgccctttgaggctatttttgtgtcctggaaggattctgcaacaagaccaacaattgttgttcttcatggtggaccacacactgtttacccatcaagctattcaaaatcgttagcatttctttattcacagggatataaccttcttgttgtgaactatagaggttcactaggctttggtgaagaagcactacaatctcttcctggaaatattggttctcaggatgtgaatgatgtattgacggctttggactttgttataaagaaaggattaatagatgcatctaaagtagctgttgttggaggttcacacggtggtttcctgacaactcatttgattggccaggctccaggcacttttgttgcagcagctgctcgaaacccagtatgtaatttatcattgatggtaggaacaactgacatacctgagtggtgttttgtggagatttatgggaaagaagggaaaaactgcttctcagagtatccttcatttgatgatctttgtcaatttcaccagaaatcaccaatatcacatatatcaaagtttaagaaaatctgcaggtgagcacgccaacactttttctccttggagcacaagatctcagagttcctgtttctaatggcttacagtatgcaaggaccttgaaggagatgggagttgaaaccaaaattattgtctttccagaagatatgcatggccttgacaagccacagtctgattttgaaagcttcctcaatataggtgttggttcaagaagcacatgagcaaataaacaacatgcctctgttaccacactctcaccttgctntaataaatgcttgtaattgggtcaaagc

SEQ ID NO: 89259 - DNA, 790 bp, Oryza sativa
  Clone ID: PAT_MRT4530_88030C.1
aatcggcttaaggaattttgtacagaagctgaaattaatcctgaagcaagcaaattcacatagaactgaagcaagcgtacaccctggaatcagaagatccgcaattgagcaggtcatatggatggcgcaactgaagcctgaacctcactgcatcgaccatttcatcgactgctaaatgcgggacgatctggtgatggcgcagcagacagtcagaagggcatggcaagagaatttcaagctttcatctggaggcgtctctgtcctggagtacgaagagtcccttcgctctgttgcctcgagggcactgaagctgatcctcggtgtagggatgaaaacggtcggaaacggtcggaaaaaccctctaccatttccattttcattttattttctcgaaaatggaatcggaatggcatactcggaaacggtaacgatatcggtaatgtcggtatatcggaaacggaaccgttggaacgggaatctaccgatgtcggccagaagtcgaaaattcatgtcggaaacagcgaaccgtggtatcatcccacatttaactatgcatgaagatggccttataatttcacccttgcatcatcacgctgccacataacactgttatatgatgattaatgagttgacaataaggtcaacaaacaatataaacaaagttcaacgatacttcaacattaatgtggctacagcatacaataggatgatgatgcagtcacacccacatgatgacttccacttgcacttccagatgcagcagattgagattcttaaaaaaaagaggaag

SEQ ID NO: 89260 - DNA, 715 bp, Oryza sativa
  Clone ID: PAT_MRT4530_88031C.1
ctttggttgggcccacaggctatccatttactagcaccatctccagaacaacggggtcctatgggccagcccagtcaagtgttgtaaacccaacaaaatatcagcactttataggccagcacacaggcaccatcgggtactagcctccaaaaggcagtttccttcaaggcaccaatcaggtgtggtcagggggtgtcatcatcatgtccatcatccatcatgttacacaccgggccacctcaggtgcacatgtgtccagcatcatcccagctggcgccaacaacgctccaagccttgtctggcccaggtcgttggcaacagccccagtcaagcaccctccatcacacaccccttcaccccagcatgtcagccaccacagggctctgtggcatgtcacccaggtgcctcgggcgccagggcacatgccaaaccaagctggtccagggcatttcccagctggccttccagggccattcaggcaaagcatctgtgttttggtgttggcaatatacaaagcagctacagccatcacgcagactccatccctccgttttcagccactccgtgttgaaagctcgtcatctggccatcaacaaacaaggctcccctaatcattatggtggtcacacacacaaagactgcagtccctgacggttggttcgtggaaactatgttgccttccaaccgggggcttggatcttgctcttggcccacc

SEQ ID NO: 89261 - DNA, 643 bp, Oryza sativa
  Clone ID: PAT_MRT4530_88032C.1
aagaaaggagcagcgcttgactccccctcttcctccgcaaccgcgagccggcgctccactaccgccgccgggaaagagaggagcacgccgacaagcagaccggagagagagaggaaggggagagttgtgcggttgataagtgggtcccacgtcgatttttacacggtgttggcatctagggatgaaaacggtcggaaacggtcggaaaaaccctctaccatttccattttcattttattttctcgaaaatggaatcggaacggtatactcggaaacggtaacgatatcggttatatcggtatctcggaaacggaaccgtcggaacgggaatataccgatatcggacggaagtcgaaaattcatgtcggaaacagcgaactgtggtatcatcccgcatttaactatgtatgaagatgaccttataatttcacccttgcatcattacgctgccacacaacaccgttatatgatgattaataagttgacaataagattgataaataatataaataaagttcaatgatacttcaacatcaatgtggctaaagcatacaatgtggcttacatgataggattacagcataactaatattgtccgactttttttaggatatagatttgaagtcttcgagaacaccaagct

SEQ ID NO: 89262 - DNA, 367 bp, Oryza sativa
  Clone ID: PAT_MRT4530_88033C.1
tttcctctcgccccaagactcccgcatctgatgggactcttttaacacaccgtgggcttcaaacaacctccgtcgtcgctgtgtgtaccactaccaccgtaaaaagccaggcggcgaggaccgatccgccggaagaggaagaggaggtactggtgtgccctaccaaaacagactcgcaacacatgcccatcaacatcatcctataccagtacctctacaacaaggagctacatgttcccaaaagcttgtcaaaggtggaatcaaccccccaatgatgaccatcctcttcaatcactgctaatgctacagctgataaaggtgacaaaaactccatgaacgacccactcaagcgggtaatgccatccca

SEQ ID NO: 89263 - DNA, 261 bp, Oryza sativa
  Clone ID: PAT_MRT4530_88034C.1
atggtgagcgagcggcagttgggctggcgcgcggcgccggtcgacgtgtggccggcaaacgctgggaatgtgctactgctgggtacacgcatgccggggttcggggaggctgccccccaatgccacgtggccctcccccaaggggagtcaggcccgaggtggggcccgaggtggggtggcggccactccttcccaaagactagtcggaggaggctgccccccaatgccatgtggccctcccccaaggggagtcaggcctaa

SEQ ID NO: 89264 - DNA, 362 bp, Oryza sativa
  Clone ID: PAT_MRT4530_88035C.1
aagaagttgaagcagcagaggcagcagcagggccggatcagcgaggaggtgcccgccggggatgcggcggcggcttcgcgggcgggggagtggggttcttgggcggcggcggcggtgaggacgagggtggcggcgctgaaggagcccgccgccgcgcaggggctcgccgccgtcgatggcttcttctccgcttgatctttctttgtttcttcttcttcttcttttttcctttgttgggaagtgatttggtgaagcaggccatatccaatttggaggatttgattttgttttttcttttcctctttaccagtatgtgatgtgtacatatatcgactttgtgaagaaatcgcaactttttctcc

SEQ ID NO: 89265 - DNA, 504 bp, Oryza sativa
  Clone ID: PAT_MRT4530_88036C.1
atgtcttcctctccctctctgtcgcctctttcctgtcgccgcactagcttctcccttctctggtccccatcgccgcctttcccgtcgagctcggacgacgggacaaggaagcatgtggacattgagcttagtggcggcagcacttcccacctcgagctcccggcggagtggatcaaggagggtcttagcggcgagcatggatcgaggcttagcgaggtccccacggcggctcaggcctacgccaccgccgagcttcgcccccctccttgtctccaatccggtggatccagcggtggcttgctcgtgctgacaagggatgaagcgccggcggtcaaggcaagctctgtcgacgagctccctggtggcggcacagagcggggggctgccgccgccattgagctcctcagtggtggtcgatgtggcccccacccatcggatgcttcttcccgttctcctcctcgccgcctctcctctggtcctctctctcccttccctgtggcgtag

SEQ ID NO: 89266 - DNA, 1436 bp, Oryza sativa
  Clone ID: PAT_MRT4530_88037C.1
atggccggaacgatccacccgttccaccagcagtggccgccggcggcgggcgcgcccgcgccggccgccgccgtcccgccgccaccccccgtgccgggcgtcccaggcgcgcccgacgccgccgccgcagccgccgccgccgccgccgcggccggcggctgccgcccgccccgacgaggtccgcaccatcttcatcacggggctccccaccgacgtcaaggagcgggagctccacaacctgctccgctggctccccgggttcgaggcctcccagatcaacttcaagggcgaccagcccatggggttcgcgctcttctcctccgcgcaccacgccatcgccgccaaggccgcgctgcaggatctcatcttcgatgcggagaccaagacggcgctgcacaccgagatggccaagaagaacctcttcgtcaagagaggtgtgggaaacgatgcaaatgctatggaccaaagtaaacgcttgcggactggtggagattatactcattctccttatgctgctcccccatatcatccacccccaccagctgtttccatgtggggaactccaggttatatcgcggcacctccaccttacaatcattatgctgcctattcagtgcctcctgtggcaatgacttcaccttctcccgtaccaggtccaactgcctatgctcctgtttaggaatacagaggataaccctccctgtaataccctttgccatggtcatcttggagaaactgttattgaagcggaattgcggagcctcttcagcgtgcaacctggttataaacaaatgaaggtgttgcgccaagacaggaacactgtttgtttcattgagtttgaggatgtgaatgctgcatcagctgtacaccataatctacagggtgctgttattcctagctctggtcgtggtggaatgcgaattcaattttcgaaaaatccctatggccgaaggaaggattctgttggtggaattgggggctctctaaatggagctccttcaaactgagaggggatgtaacttgaactttagcatcctactaaattatcatctgcatattttcttctaaatgcttgtttctgtcatgtggcatcaccatctccattaggttgaatttctggccatgatcatcttctttacatggagtttcttggacatgatcatcatctttattaggtggagtttctgggacatgatcatcatctgatagactttgcattgttaccattatcatcgctggtggtgtggaatcctttattttctatatgtagtttgagaagcacatttcgagcatcttgtagatgtgcatttgccgcttgtcatggatattctgcagtattctgtagttttcttgtgtttagttgctacatctcatgtgtccatgtcattgtcactttgcaaacaggacattctgtaatagtataactgagttttctt

SEQ ID NO: 89267 - DNA, 271 bp, Oryza sativa
  Clone ID: PAT_MRT4530_88038C.1
aaccaaatatgacttcatttgctgcataacaaagaggctttttcatacatgagccacacccttcataaacctaccagaacacatactctaacaatccatattataacttatacatcaaaataaaagatccgagcaaacataatacccaattcacacccattacctaaatacctacatcaactaccattaaaactaaaactccaataaaccaaataaccaacacattttcaattctagcatagataatataactgctatatatatcataaat

SEQ ID NO: 89268 - DNA, 308 bp, Oryza sativa
  Clone ID: PAT_MRT4530_88039C.1
atttatatttatatttttaactcaacacccgagtcgagttaattcaaacaagaattctctaaccttaataaccttatcaaattacaaaataataaatccctacataaatttccaatacttaaaaaaaaagatattttttcaattattatccaattttacatcataacttaaattacaaattaccataattactcactttttcaaaaaatttcctttatttacaaacatttcttccccttttatatttacaacattaattcttaattttacaatttcctttattaattccatacatttccctatccaat

SEQ ID NO: 89269 - DNA, 714 bp, Oryza sativa
  Clone ID: PAT_MRT4530_8803C.1
atggagccgagatctccgcgcccgtttcctctctctccggccgctctctctccctcccgttgctatataattgctccccgagctccgctcttccgtttccgccgctcgccgctcgctctcgccgtcgaaatcgtgctcgcgccgtgctcctccctctccgccatcgccgccgagctccgttccgccgccgccgccgctccggactttctccttactcggcgacccctccgtccgcttcgccgtgttgccgccgaccccgtccgccgctccgcttcgcccgccgaccgccggagcaccgtcgccctcgtcatcccgagccgcgccgccgtcttcctccgctccgtccgccgtttccgccgccttcgctgtctcggggtgagccgtggaccgtccccttcgtttcccccttccctcctctctctcgggtgccactccgccgcgccgttggtcgccggcggcgaccatcggggcgcgggtgcgcgccgctcccgtcggccgcgccggcgaggccgccctcgggcgcgccctcgcggctgccaagtgggcccggccgtcagccgcccgcgcccgtgggtgcggctgacgcgcgggacccacggcgccgaccgccgccagccgcgtgcgcccggtccaccgtggaccgagcggctgacgcgtgggccccacttcccgtggacccggtccgcgcgcccgccccctcggctgacgcaataa

SEQ ID NO: 89270 - DNA, 470 bp, Oryza sativa
  unsure (1)..(470): unsure at all n locations
  Clone ID: PAT_MRT4530_88040C.1
ggggggggaccggggaaggggggaaggggggggaaaaggggaaaaggggggaaaaaagggaaaaggagaaaaaagggggaaaaaaaggggaaaaggggaggcgggggaaaaagggggaacggggggaaaagggaaaaaaaaagagaaaaaaaaaaaaaaaagaaaaaagggggaaaggaaaaaaaagggaaaaaaaaaaaaaaaaaagaaaaaaaaaaaaaaacaggggaaaaaagggaaaaacggggggggaaaaaaaaaaaaaaaaagggaaaaaagaaagaaaaagggaaggggggaaaggggggaaaagaggggtctgccttcaacgagggggcgggccaaaacgaaaaggcgcgaaaacggaggaaggggaaaaagcggggngaagcgggtcagcgggagtggccccaaaaggggaaaaacccgggnagcggggtgaaactggggttaataattggagggttttt

SEQ ID NO: 89271 - DNA, 360 bp, Oryza sativa
  Clone ID: PAT_MRT4530_88041C.1
gccaaacagggcaggagaaatggaagccgaccgcggcgacgtactcgagcatgcactggagcgtgatcctcgacatcatgatgaaccccgcgatgatgtacgaccagatggacgaccacatgcaccaccggtgccacagcgtgatgaacaccgacatgatcctctacgagcacctctacgagctcgaccggtacctccaccgcttcgtccagtccggcatcaaggcccggatcgggaccgagatgctgcgcaacacgctccgcaagatgatcgtgcagatgaactggccgaggaactgcatgaggtagtgcatcagctactggctgagcgactgccgcggggacttcctcctgtgctccg

SEQ ID NO: 89272 - DNA, 182 bp, Oryza sativa
  Clone ID: PAT_MRT4530_88042C.1
gttaactatcctgtttaagtgtccatttattacgctcacaacacatcctgatactccgaacgccattgctgggctcgggacgcgatgcggacacagatccccactacaccacttgaacacaaggcatcctgatacacgaggtttcaccctaagtaagtcggggaatctaagcgcgattctga

SEQ ID NO: 89273 - DNA, 1937 bp, Oryza sativa
  Clone ID: PAT_MRT4530_88043C.1
tttgttttatgagaactcatgcactttattaaaagaaagcgttttagaaacacaaagcatgagttacattaactgctccattaggagtgaaggaaagagctcttttagtaggacaaacatctctggaacaaatgtgagaaatattagagcaatcaaaagctaagcagctgttagtctgagcttgtcttgctgactttgcaaggccatctgcaactttgttgagctctctagagatccaaatgattcgaacttgttgatcctgcagaaaatttttaattcttgaaagaattggtctcagagaccaatgtccggggttttgtatgtagtcctcgttctgcacaacattcactatctcactgttatctgagagaaaaatagggtcttgcagctgaagatgacgagcaatttgcatagctaaaaataatccttcagcttctgctagcaaaggagttcctgcattgagactttgagctttgatgacaatagcattgtgattgctagggttgtggatgaagatccctactcctattttctcttccttccaagaggcatccacataaactcttgttcctgtaggaattttaacaatagaatttcttatattattctcttcagcccgattgaagtcttggcaactgtcttcttccatttgatgaacactttcatatgtctttgccattgcctgcgcagcattgcacacttgttgtggctcccaaatctttgttttgaagttgatatcattccttgctttccaaatctgattttgattggggtacatttcattgtaaattgtcttgtaagcactcttggctgaacaaactcctgagggtgtgtacttccagcaaagcctatcttcctcctctccctgcataatctgaacctgcataattgaatgttgagctgcactatcaaaaatttgagttattttctgagcatcccaattcttattctcatcccaaagatcagaaacctgaagaatagaagaccagaaagcagattttggcatatctgttctagccttccaaaaggaagtgtttggaaaatattttgattttaggacagaggatagaagatcatttggattagtaagaattctccaggcagattggacaaggatacttttatttacagccatcaaatctcttatgcccaagcctccctcagaaacaggtttgcaaatgtctttccaagacctaagagccattccttttttgccaccatctgcttgaattcctgcatgagaaagagaattagctttgtaagtagtaagcttgcttttaaacttgtcgacaatgaaactgtaggcagcatttctgtcttttgcactcaccagaagaggatgccctagatgctttgtgctggagttcataagagaaacaggaaagattgtaagaatattttgtcttacctcttcaggagtacttttgctgaacaggatggaagatttgccccaatttggagtctggcctgatctgagacaaaaggaattgattatttcagaggttttcctgacttcctcttgttgggcctgccccacaatgattagatcatctgcaaacatcagagaatgaatggaaggaccattttgtcctaactttattactgaaatgtggttcctttgaattgcatctgcaagctggtcagaaagttcattaatcgcaaggacaaaaagataaggcgataaaggacaaccttgacgaatacctcgatgagctgtttcatagaaggagcctaccatggcagtaacatcgtcttttatccaattccaggcagctctataaaatgcaacattgagaccatctggccctggggaggcatctcttcgcatttgctttagaatttctaggatgtcattttcagaagggatttcagggggaggaaaaattacatcattgtcattttgatccatagaaggagtggcatcatctgtattggat

SEQ ID NO: 89274 - DNA, 909 bp, Oryza sativa
  Clone ID: PAT_MRT4530_88044C.1
gggctgcaggctcgctgtttggtccatctctctttgacccaactgacgagtgtagccgtaggtccagctcctcgcgggggccatcgcgccttggcccaactgacgagtggagccgtaggtccatctcgcatacgcgactgccgtacgatgccatcatcaacccaaggaggacatatgtccgtatgatgccaaaaccgatccttcccatcaaatccggtcgaatcctcatcaaatctggttgaacgaatcattctcatcaaatccggtcgaatctttcttgatgtttcaaaattggttgaggattttttatacacccgatctcctttttccatttttatcaaaatcagagcgaatttgcaaaactcaggataaaaacgatgacttttaaatggagattaaattcgatgaattaaagtggaattaaaagggaaaattatgggggaaaatgacaagggagctgtggggaattgatttttgcaattaattggagggaacgcatggcgagacgctagggtttggccgggcaagaaaaaacatggtatataaaaaaaacaaatccttaccccacgcatacccttctgcgggtgaaaaaaatagcaacgaaaaaaagaggataaaaaaactggaaaaagagagtaaaaaaccagctgatgggaaaaacccaaaaaagccaaagataaaaaagcggacaaaaaaaaagccgaagataaagaagaggacggggaaaaacagtgaaaaagaatggactaacggaaaaaaaggaaacaacggaaaaaacaaggaaaaaaacagaaagaaaaaagacgcaagaatcggaccttttttttgccgttttcaggggtatttttgttttttgatcgcctttttacgggacttctttttctccgcattaaattgaatcggatctac

SEQ ID NO: 89275 - DNA, 363 bp, Oryza sativa
  unsure (1)..(363): unsure at all n locations
  Clone ID: PAT_MRT4530_88045C.1
tttatttgttgaaagttagggatatataggatagtatattgtttgctctatgagaatttggagaaaaacaaatagcactaacatgtcatcttaaatangaaatttgaaaactagatggttaatgctaaggattagatatgtgtcgttttaaaaaacaaattttatcctcccaacaaaaataaagtacataggttattgtcatggaatttagtggtaagatatttatcatatcaactaacaaggattagccgggtcataaaccatccaagttgtataaaacagagacaagaaaggttacaatctttcagtcaaaattaaccattgaaaataataaatattgagtaaaaataacaatcatcaagt

SEQ ID NO: 89276 - DNA, 403 bp, Oryza sativa
  Clone ID: PAT_MRT4530_88046C.1
ccacgcgtccgaaaagaggaaaaaaaacatatacactagtagggaacgacggatcgatatcaaaggctaccagggccaccttcttaacagcggcagctcatgggcgcgcacacaagccatatgcggcgcacaagtgagcgagtcacatataaagtacagcgacagacagggccatcgcgaggtgcaggacagcccggtggacgcgggccgtcaggtgctcgaccggcagctcaccggccgggagaggctccagccgatgttccgcacgaccggacgcgctcggcctgcgcatgcaatgctgccagcaactgcaggacgtgaaccgcaagtaccgctgcgccgacaaccgccgaatggagaggagctacaaggagagcatgccgatgcccctggagcaaggcta

SEQ ID NO: 89277 - DNA, 484 bp, Oryza sativa
  Clone ID: PAT_MRT4530_88047C.1
aggaattcctagtaagcactatttcatcagaatgtgctgattatgtccctgtcctttgtacacaccgcccgtcgctactaccgattgaatgttttagtgagatcttcggcttggttttccgagcggctctcgggtcgttcggtttttatcgagaaagatgctcaactggatcatttagaggaagtaaaagtcgtaacaaggtattcgtaggtgaacctgcgtatggatcattaccgttcgtttgattgtttcttcaatcaaatagacactacttgctaacttcgcacaagcatattctatacgtttttatacgtatatgtttatgtttgtgtcgcaccattatgtatttaacaagtcatcatcatatgtatatatgtatgtatgtatgtatgatttgttttaaacctttccattcaacaatcattgttgtttgtcattgaatatgaatcgaatctataaaccagaaaaaaaaaaaaaaaaaaaa

SEQ ID NO: 89278 - DNA, 2105 bp, Oryza sativa
  Clone ID: PAT_MRT4530_88048C.1
atggagacgacgacgacggagaggcggcggctgttcgcgacggataaggtgggcggcagggcggtgtacaggctgcaggcggcgacggtggccgccgggatactgctggtgctttactacagggcgacgcgcgtgccggccgccggcgaagggcgggcggcgtggctggggatgcgggcggcggagctctggttcgccgtctactgggtcatcacgcagtccgtccggtggtgccccgtccgccgccgcaccttcaagaacaggctcgccgagagatacaaagaaaatctacctggtgtggatgtttttgtatgcactgcagacccacacgcagagccaccaagccttgtcatctctaccatcctatcagtcatggcatacaattacccatcagaaaaaataagtgtgtatctttctgatgatggtggttcaattcttactttctacgctctatgggaggcatccatgtttgcaaagaaatggctaccattctgcagaagatataacattgagccaaggtccccagctgcttacttctcggaatcagaagggcatcacaatctgtgctccccaaaagaatggtcatttatcaagaacctgtatgaagaaatgagagagagaattgattcggctgtcatgtcaggaaaaattcctgaagaaattaaactaaagcataaaggatttgatgaatggaactcggaaatgacctcaaaaaatcaccagccaattgttcaggttctgatagatgggaaaagccaaaatgcagttgatgacgacggaaatgtgctaccaacactggtatacatggcgcgcgagaagagccctcagtatcaccataacttcaaagccggggcattgaacgctttgataagggtatcagcactgataagtgacagccctgttatcttgaatgtggactgtgacatgtattccaacaatagtgattcaatcagagatgcgttgtgcttcttccttgatgaagaaatgagccacaaaattggatttgtccagtatcctcagaactacaacaatatgaccaaaaataatatatatgggaactctctcaatgttatcaatcatgtggagatgcgtggtttggacagtgctggtggatgtctctatattggcacaggatgcttccatagaagagagatcctttgtggtaagaaattcagcaaagattacaaggaagactggggcagaggaataaaggaaagaggacatgagaacatagatgagattgaagagaaggcaaaatctttagcaacctgcacttatgaacttaggacacaatggggcaatgagattggagtgaaatatggttgcccagtagaggatgtcatcactggattggcaatacattgccgaggatgggagtcagtctacatggaacctcaaagggcagcatttgtgggtgtagctccagcaacacttgcccagacaatactgcaacacaagagatggacactaggttttgtcaaagccattcccttatttcaaaagattatgagtccatgggctacacccttcatatatgtattttgtgtgaagaccctctacagtctttatgaggcattattatctggggatacattgaaaggatggtggaatggacaaaggatgtggatggtgaaaagaattacctcatatctatatggcttcattgacaccatccgaaaattgttaggattgtcaaagatgtcatttgaaattacagcaaaggtaagtgatggcgatgaagcaaagaggtatgagcaagaaatccttgagtttgggtcatcatctcctgaatttgtgatcatcgcaactgtcgcattactgaacttcgtctgcctagttgcagggctaagcaaaataatggcaggtgtgtggaatgtgtttttaccccaggtcattctatgtggactgatagtgatcactaatatcccaatttatgaggcaatgtttgtgagaaaggataaggggagaataccattaccagtcacactagcttcaattggctttgtaatgttggcattcctgttaccaatagtttgaggtcctaaaatgggaagcgatgccttgtaaaatgattatggaaataaattgcactgccttttctttcc

SEQ ID NO: 89279 - DNA, 1128 bp, Oryza sativa
  Clone ID: PAT_MRT4530_88049C.1
ttgttttttggtgtctctttagacgagctctgtcgtctcgtctttgtgttttttttttttttttcttttttaatcaatatgttatttgttgtatttagattagacaagaacattttggtagactttgttgaattgaccagatacatccattaccaaggaaatgaaaccgagaatatcaagagatacattgaagtcaccatgtagtaaattaattgcctgaagctttcgttgtcgatgctgtcaacttgacagttaaatatgattaggactacgtgcttcgttaacattagtcgtggacaatggtagctcaaaagttttctgcttctcaaaattgtcatcttgatcaacttgattgccatggtccttgttcttgccccaaatgagagcatacaggcccacaacaataattattgcaccaatcacccttcccaaggtaacaacctcacaaagaatgaaagatcccaaaatagtcactataatcatgcaaagagggctaaaggcagtgacaaatacgggacccctctcctttataaccataccttgcacataataagccactccagaacacattatgccagagtagacagctgtaaaaagcctcatatcaaagccaattaaccaggccttgatatcacgctccatgactagggcgaccgccccactctgtgctacacccatggcgcatatcagtgtggttagagaaagctctgctgggtaacccctcagtgtgtatgattgtagaatgaagaaggcagaccagcaaaagcagcttagcaaaatcataaagatacccataagccagtggccattattgtggtcactactatcagagatgttgtgattggcattcttggtccacggaaaattgatgacagggcccttgaagagtatcataagcatagctccccccactgttatcagtgtgcccgctatttttgcctgacttcgtcgttccttgatgcttattctctccatcctctcgaaccagagcgcgaatggtgccatgacgacggcggcgacggcattccggtatacgacgagcacgtagtggctcatgccttgccgtagcgacgcgacggagatgaggaacagcccggcgaagccgaactgtaggaagaccatcgccat

SEQ ID NO: 89280 - DNA, 261 bp, Oryza sativa
  Clone ID: PAT_MRT4530_8804C.1
atggggctccagcacaaactcaccaatcttggaaaagcagaagcaaggagcagtaatcacggcatggacgacggcagccgacgcatccacttcaccatgccctacatcaaaaaaccaccaaaaacacaagcactcaaaaacacaacccatcgaagagagcaaccagcggcaaagcgtgtaggcgcgcaccatctcattgtcgaaatctcaaggcaaagtgaagcacaaagcctgcagaaaggggatttatctcctgcatag

SEQ ID NO: 89281 - DNA, 2106 bp, Oryza sativa
  Clone ID: PAT_MRT4530_88050C.1
atggagacgacggcggcggcgacggcggcggagcggcggcggccgctgttcacgacggaggagttgggcggcagggcggtgtacagggtgcaggcggcgacggtggccgccgggatactgctggtgctctactacagggcgacgcgcgtgccggccgccggcgaagggagggcggcgtggctggggatggcggcggcggagctctggttcgccgtctactgggtcatcgcgcagtccgtccggtggcgccccttccgccgccgcaccttcagggacaggctcgccgagagttgtattggacatggccctattataaacgacccttaccaagcaggttcaattcttactttctatgctttatgggaggcctccatatttgcaaagaaatggctaccattctgcaaaagatataacattgagccaaggtcaccagctgcttacttctcagagtcaaaagtgcatcacaatctgtgcatcccaaaagaatgggcactgatcaagaacctgtatgaagaaatgagagagagaattgatacagctaccatgtcaggaaaaattcctgaagaaatgaagctaaagcataaaggatttgatgaatggaactcagattttactttgaaaaatcaccagccaattgttcagattctgatagatgggaaaaaccgaaatgcaattgatgatgatagaaatgtgctaccaacaatggtatacgtggcgcgcgagaagaggcctcagtaccaccataacttcaaagctggggcattgaacgctttgataagggtatcatcagtgataagtgacagccctgttatcttgaacgtggactgtgatatgtattccaacaatagtgattcaatcagagatgcgttatgcttcttcctcgatgaagaaatgggccagaaaattggatttgtgcagtaccctcagatcttcaacaatatgacccaaaatgatatatatggaaactctttcaatgttagctatcatgtggagatgtgtggtttagacagtgttggtggttgtctctacattggcacaggatgcttccacagaagagagatcctttgtggtaggatattcagcaaagactacaaggaaaactggaacagaggaataaaggaaagaggaaaagagaacataaatgagattgaggagaaggcaacatctttagtaacttgcacttatgagcataggacacagtggggtaatgacattggagtgaaatacggtttcccggcagaggatatcattactggattggcaatacattgcagaggatgggagtcagccttcataaatcctaaaagagcagcatttttgggtttagccccatcaacacttgcccagaatatactgcaacataagagatggagtgagggtaatctcacaatttttctttcgaagtactgctccttcttgtttggacatggaaaaatcaagttacaactacagatgggctactgcatatgtggattatgggcagccaactcactgcctacactctattatgttgtgattccatcactaggtcttgttaagggcacccccctattcccacagattatgagtccatgggctacacccttcatatatgtattttgtgtgaagaccctctacggtctttatgaggcattattatctggggatacattgaaaggatggtggaatggacaaaggatgtggatggtgaaaagcattacctcatatctatatggcttcattgacaccatccgaaaatgtgtaggaatgtcaaagatgtcatttgaagttacagcaaaggtaagcggtcacgatgaagcaaagaggtatgagcaagaaatcctagaatttgggtcatcgtctcctgaatatgtgatcatcgcaaccgtcgcattactgaacttcgtctgcctagttggagggttaagtcaaataatggcaggtgtctggaatatgccatggaatgtgtttttaccccaggccatcctctgtggaatgatagtaatcattaatatgccaatttatgaggcaatgttcctaagaaaggacaatgggagaataccaacagcagtcacactagcttcaattggctttgtaatgttggcattcctagtaccaatagtttga

SEQ ID NO: 89282 - DNA, 2345 bp, Oryza sativa
  Clone ID: PAT_MRT4530_88051C.1
gagctcactacacagagagagtagctagttagccgccggcgatggagacgacgacgacggagaggcggcggctgttcgcgacggagaaggtgggcggcagggcggtgtacaggctgcaggcggcgacggtggccgccgggatactgctggtgctctactacagggcgacgcgcgtgccggccgccggcgaagggcgggcggcgtggctggggatggcggcggcggagctctggttcgccgtctactgggtcatcacgcagtccgtccggtggtgccccgtccgccgccgcaccttcaagaacaggctcgccgagagatacaaagaaaatctacctggtgtggatgtttttgtatgcactgcagacccacacgcagagccaccaagccttgtcatctctaccatcctatcagtcatggcatacaattacccatcagaaaaaataagtgtgtatctttctgatgatggtggttcaattcttactttctacgctctatggcaggcacgcatatttgcaaagaaatggctaccattctgcagaagatataacattgagccaaggtccccagctgcttacttctcggaatcagaagggcatcacaatctgtgctccccaaaagaatggtcatttatcaagaacctgtatgaagaaatgagagagagaattgattcggctgacatgtcaggaaaaattcctgaagaaattaaactaaagcataaaggatttgatgaatggaactcggaaatgacctcaaaaaatcaccagccaattgttcaggttctgatagatgggaaaagccaaaatgcagttgatgacgacggaaatgtgctaccaacactggtatacatggcgcgcgagaagagccctcagtatcaccataacttcaaagccggggcattgaacgctttgataagggtatcagcactgataagtgacagccctgttatcttgaatgtggactgtgacatgtattccaacaatagtgattcaatcagagatgcgttgtgcttcttccttgatgaagaaatgagccacaaaattggatttgtccagtatcctcagaactacaacaatatgaccaaaaataatatatatgggaactctctcaatgttatcaatcatgtggagatgcgtggtttggacagtgctggtggatgtctctatattggcacaggatgcttccatagaagagagatcctttgtggtaagaaattcagcaaagattacaaggaagactggggcagaggaataaaggaaagaggacatgagaacatagatgagattgaggagaaggcaacatctttagtaacttgcacttatgagcataggacacagtggggtaatgacattggagtgaaatacggtttcccggcagaggatatcattactggattggcaatacattgcagaggatgggagtcagccttcataaatcctaaaagagcagcatttttgggtttagccccatcaacacttgcccagaatatactgcaacataagagatggagtgagggtaatctcacaatttttctttcgaagtactgctccttcttgtttggacatggaaaaatcaagttacaactacagatgggctactgcatatgtggattatgggcagccaactcactgcctacactctattatgttgtgattccatcactaggtcttgttaagggcacccccctattcccacagattatgagtccatgggctacacccttcatatatgtattttgtgtgaagaccctctacggtctttatgaggcattattatctggggatacattgaaaggatggtggaatggacaaaggatgtggatggtgaaaagcattacctcatatctatatggcttcattgacaccatccgaaaatgtgtaggaatgtcaaagatgtcatttgaagttacagcaaaggtaagcggtcacgatgaagcaaagaggtatgagcaagaaatcctagaatttgggtcatcgtctcctgaatatgtgatcatcgcaaccgtcgcattactgaacttcgtctgcctagttggagggttaagtcaaataatggcaggtgtctggaatatgccatggaatgtgtttttaccccaggccatcctctgtggaatgatagtaatcattaatatgccaatttatgaggcaatgttcctaagaaaggacaatgggagaataccaacagcagtcacactagcttcaattggctttgtaatgttggcattcctagtaccaatagtttgaggtccctaaaatgggatttgatgccttataaaacattgggtgtttctgatgatgatcatgaaaataaattgcattgccatttcatggaaaaaaaaaaaaaaaaaa

SEQ ID NO: 89283 - DNA, 237 bp, Oryza sativa
  unsure (1)..(237): unsure at all n locations
  Clone ID: PAT_MRT4530_88052C.1
agacatcactgaaaagcaggacttgttgaagaaataagcattttgccatgatcgcagcaagggctgcaaacctgcnggtggccatgaangccctangcgctggccgtgctggccctcncctacccggngcgactgcgcgcgcccanncaatgcggcatgcatgccggcgtgnncccngtgccccaacangctctgctgcaccatgtgggggtggtgccgcctcaccacaccactact

SEQ ID NO: 89284 - DNA, 491 bp, Oryza sativa
  unsure (1)..(491): unsure at all n locations
  Clone ID: PAT_MRT4530_88053C.1
aaaatatattatctattttttatttttataatacttaattaatcatacgctaataaggtattttgcttttcacgtggaaggaatgagttcccaacataaggaattaggtattgttgttggtggtgaactctggtagttgataatggtatttagactggactgctttcgttagttgaaaaaaaatgcagaaaagcattcccttggtttagcagccccatcttctcgattatacttatactctctccgtccaaaaaaaaaaactcaatttagaaggggntaactaatcaaccaaaatttgaattttcaatctaggatttggagttgattttgacggttttgtttgtaggttatttccccagcatttgcttttatatcgctaaggacacggattttatttataaattattttcggtttgtaaatatgccgttgggttattcgggggttcttcctgnacttggtaaatcccttaggacctcggtgggccgggggt

SEQ ID NO: 89285 - DNA, 419 bp, Oryza sativa
  Clone ID: PAT_MRT4530_88054C.1
gaaaaactagtcaacccccctgctcaacggcttcacgttctacttcaaccagtacaccaccctgcggcacacggcggcgcaacgagcatagcgccgcggaagcgtacccggcggtggtcaactgcctaggtgacgcgcgctcgatgtccgtctcactctacagtagaccgggcgcgctttagctggtgctttcttgcagcaaccgcattgcgcgcggcctgcttgtccggatcagataggcgagggggctgagcgcatggaaggccagggggaacgacgtcaccggacccatgccgatgtccctggggtgcctggggctcatcgaggagctcaacctggtcaggaaccagctggacgggcggatcctccacgtgctttgcgcgctggtcaagagcgggaagctgaagaaccttttcctg

SEQ ID NO: 89286 - DNA, 828 bp, Oryza sativa
  Clone ID: PAT_MRT4530_88055C.1
atggtgaagtgtagggcacgcacgactaggaaaaagattgagatcaagcgcggggacaagaaggtacgagatgcatgcttttccaagcgccacactaccatcttcaacaaggccaatgagctcgctatcctctgtggcgtgatggttgctgttgtttttgtctctcccaatgccaatggcgggattttctcatttggctacccatctgtcagctctgtggcaaatcgcttcctcgccaatgctccaaacaacaccagtgtgagtagctcaacccaaagcgggagggatgtggaaatccgtgaactagaacgtgaagaaagagagttgaaagagcatctacaagcttccacagatcagaataagcttctgcgggaggcaatagcagcaagggatggagggcaattgatgcttctcctgcagagtgattgtagtgagttgggaccaaaaggtctggtcagcgccctcatcatcacggcattacacatcgaggggagtagccatccatccggcactgcactgcagccactgccagtgttgggggaggagaagccgtggctcgagatctctctcccagcgccgcgccggcgctggccgtcgcacggctacacgctgccccctgcccccggtctcgcgtggcgcgtggcggcgtccgctctcccccgcgggccgtccgccgtcgcacccgcgcttcgtcacgcgaaacacaaggattctcccgtacgcgcgcggctcgtcgccggtggagtcgcggacggcaagaggcgcgacccgttcagtgcttcgcgtttccatatgccggaccggaccggcctgtggcccatatcttag

SEQ ID NO: 89287 - DNA, 439 bp, Oryza sativa
  Clone ID: PAT_MRT4530_88056C.1
tagtggatccccgggctgcaggaatggcacgaggccattctctcctcgatttccctccaccgtcgccgccatgccattctcccctccgtgcctggacgccgccgccgccgccgccgcctccctctccttcctccccgccgccgccgcgaggccaccggcgccatgcgcggtggcgccgcgctcgcgccgggcgctgagggtggcggcatccgtggccacggccccggagtcggcggccgcgcaggggcggctggagtcgctgagccaggtggccggggtgctgggcacgcagtggggcgacgaggggaagggaaagctcgtcgacatcctcgcgcagcgcttcgacatcgtcgcacgctgccaggtcggtccgtctcgcgccgtcgcgcgcgcttcttttgctggggtggagctaatgctgggcatactatatataatt

SEQ ID NO: 89288 - DNA, 327 bp, Oryza sativa
  Clone ID: PAT_MRT4530_88057C.1
atggaggctgccgtctttgctcccccaccagatcgccatcctggcactaccagcggtggaggcggaggcggccgccgctgctgcaccggggaggatggccgcgaatggcgtgagctcgatatccaagggcggggctgtaatgaggtacacccatggaccatgacggaccggtgtgtgcagcggatgcgggcaaggagggaattgtgcagctggagaactcggaacctatggggctccttgaggagagggagtacatccctgaaaccacatgattccttgcatcagttcatcccttctgttgaggctttgagtggctggggattttga

SEQ ID NO: 89289 - DNA, 222 bp, Oryza sativa
  Clone ID: PAT_MRT4530_88058C.1
atggcgaaggccgcgggtggaggagggaggggcttccggcgagggcacccgcgccgccgatggcgcctgcgcctgtacagtccaccctgcctcgcgcatgccgcgtacggccgtcctcggcgaaagcctgggtggtcgccggtcatcctccggctagccgcggaaggggtcgaggtgggaacacggccgcagagggagacggcgacggcgacggcgagctag

SEQ ID NO: 89290 - DNA, 561 bp, Oryza sativa
  Clone ID: PAT_MRT4530_88059C.1
cattattcctacagaaacgtgtatcatatacacgctatcataaagacagaggacttagtcagtctcacgagaaaggcctaggggtcttccggctagcaccacaaggtgtgggctattcgacctgggttcgagcctcacccctatcttaataaatttcgatctgagagcccttcctctcatatccagtgtttttttttttcagtcagtctcacacatagcgatgcaagtggatctggatggacttggcccaatggcccatgctagttcatttgcttgaattataattcaaatgcatatatacatatttgaccagaaagtgactcatcaattgagtaaaatgggccaatggccaggtgtccagtccaattacatttgtgctcacacgtccactactgctggtgtttaaaacattttataccttgtttcgttgaatatattacctatatgacttagcattgcaaaagaattcaatcacgatctgtctccaatacattaaggtggggagatgactggattttgaaaatccagtcataatttagactgtcttagatatcgtatgct

SEQ ID NO: 89291 - DNA, 522 bp, Oryza sativa
  Clone ID: PAT_MRT4530_8805C.1
atggcgtcagccactagagaaaaaggcaccggtggcggagttggcccgacgatggagcggaagctcgaggccagagtctcctttacattgagacatggacatcatgaagttcatatgcatgtgggtgcatttggtggtcttgtctggccaagtgtgatgagttctgtcaagtcccaaacaaagagagaagtggctgttataaccatcggcggtttgaccggccaccctatgtcggtcagacctgcaggcaacataaattggggatttcgattccaacagccaaaagttttaaaaccgcctattcacccccctctactcggccacggaggacggaggaggcaggcgccagtggctgcggaggacctcttccttgactttcccaaagaagaaacaggcggcaacgagagagacagtggtggcggccgagaagcagcagcagctgctggcagcggttgtggcggcaagggagaggaggcagaggcgacagcgtcaaagtgggagcaagcggtggctggaaggtga

SEQ ID NO: 89292 - DNA, 1194 bp, Oryza sativa
  Clone ID: PAT_MRT4530_88060C.1
atggcggtggaagttgtccagtttcttgtaagaaagtacgtggatagccttgcggaggaggaggcagcagcggagctccctttccgcgcgcacttctacgacgtcaaggccgaactggagaaggccgccatttcttccaccaacgccgatgagctccggcagtgcctgtacgagctcaacgacctgctcgccgagtgccgcatgctcgccagccggacgaacactcggccgggctgcttctccccgtccgaagcgtggcgttccaacagggtgaagacgagggtgatcgccgtcaagcgccgcgttctgcggtgtgtcgagagcgattccagcggcaacgccgcagccttggaggaggaggacagcgccgccgcgggcttcagccggtggaccacctcctggctcgaagagggcaccgtccacgggttcgaccagcagctcgccgagctggaatccatggcgttcggggcggagtgcggcgccggaggtcttaccggcgtcggcatcgtcggcatgggcggcgtcgggaagaccgcgctcgcgcagctcgtgttcaacagcccgcgggcgaggcgccgcttcttccccaggatctgggtgtgcctgtcgcgcaccgcctgcgccggagtggacgtgagaaaggaagtcttgcagagcatgctcatggctctcggcctcgaggaggaggtcatcttgtccatggatggtggcaacggcctgggagagatggtgtttgcagtccatgagcagctcaaggggaagaggtacctcgtagtattcgacgacgtctggaacgtcgacggctggtacgccgacgtggtaggccgccggaatgcctcgcccaccggcgaggagtggggagagcgcctcgccttcgggttgcccaaagagagaggcggggtggtggtcgtcaccagccggctggagcaagcggcagagacgatggtcgggaagagcagcttgcaccgtgtgcagccattggccgacggcgagagctgctgggcaattttcatggatgcattttccaaggaaagacggccggctgacgtcaccactgtcaacaacatgaaagatgagatcattgatacctgcggtgggctcccgtcagcggccaagacactgggagacatctttgcaaggagtttatcatcgcccgcctcaacttctagccaggaacttagcaagaataggtag

SEQ ID NO: 89293 - DNA, 1011 bp, Oryza sativa
  Clone ID: PAT_MRT4530_88061C.1
atggtggatagcaagcaaacttctaaacccccgtcctctaaaccaccgccgacggcagaagtcatccctgagaacatcatcccaataacactagataagctgacgccagaacaagtggcagagtatgagcagatgattaacaatttgaagactcagtacttgcactcattcaagcagatgcattcaggcacagttatccagaggtacaaggtaaaggtggtttctgccgatgatccagaatcaagtacatccaaggatggcaaggtgataaaggtgacaaagatgatgaacctaaggatgatgaaactgggggagaagagcccttggagttcaataacttctaggaccaagtcgagagtgcttgtcaatactttgaaaaatatgatcaagtttgtggttgatggcacaattgctgagcatcaggctaagggaccagtctttctgccagaaggcgtgtttccgcagtacaggaatttagtgaccggcaaccaacagcctgctaccaatgtacctccagggcagccgatggcgtcggcttcggcttctagaccaggtgtatcttcatcggcacaaaggccaccggttaatccttatttgctgaccagagaacaacctcaacacgctaggcagaacatcaatcggttgactcaggaacagattgcagcaatgttcaagccacctcaacctgttggagctcaatttatccctgaacaacaaatgcataatgtgcaacaaccgcctcagaactatcttggtgataaacagtttcatagttatttctatagtgggaatcatgagatgaagctttctgatttggcagcagttagacagaggcatgatgaaactatacagaattacattcagaggatcagagatatgaggaatagatgctatagtttggctttaaccgattctcagtttgccgatctcgctttccagggtttgatagctccgattaaggagaagttttcggctcaacactttgaaagcttgtctcaccttgcacagaag

SEQ ID NO: 89294 - DNA, 813 bp, Oryza sativa
  Clone ID: PAT_MRT4530_88062C.1
atggcgatggagtccgcgagcagtgagttggagaggccagagtcattgatggcggtggaagttgtccagtttcttgtaagaaagtttgtggatagccttgcggaggaggaggaggcagcagcggagctccctttccgcgcgcacttctacgacgtcaaggccgaactggagaaggccgccatttcttccaccaacgacgatgagctccggcagtgtctgtacgagctcaatgacctgctcgccgagtgccgcttgctcgccaaccggacgaacatgcggccgggctgcttctccccgtccgaagcgtggcgttccaacagcttgaagaagagggtgatcgccgtcaagcgccgagttctgcggagcgtcgagagcgattccagcggcgttggcggcaacgccgcagccttggaggaggaggacagtgccgccacgggcttcagccggtggacctcctcctggatcgaagagggcaccgtccaggggttcgaccagcaactcgccgagctggaatccgtggcggagtgcggcgccggaggacttaccggcgtcggcatcgtcggcatgggtggcgtcgggaagaccgggctcgcgcagctcgtgttcaacagcctgcgggcaatgaggagaggggcggcggccgccggcgttaggccaagggggcaggagtggaggaggccgcgcctctccacggtccttatctccgccggcgagaggagggagcagaggagagagatgaagagaggaggaagaggaggggattgcaatgacaggcgctgggagtgggcggtagctgacggcgagaggagctag

SEQ ID NO: 89295 - DNA, 342 bp, Oryza sativa
  Clone ID: PAT_MRT4530_88063C.1
gccacgcggacacaatgtacaaacttcagacacacgcagaggaaccgaccttcacctaacgccgaggtgaggccgaactcctacggccatcgcattagacaccgtgcgaaaacaagcgccatctcgatttatgctaccagatagccctgcactagcacgtagcaggactgctcatataccgaggcggacagcctgcggcgcatacgactccgtgacattgtacgcttgatcaacattcgggcggttctgtctctggcgctcgtgcactactaggcggtctgcggcgtactcacacaggtggaacgacagaagctgctgatcgagtgcagcttatacggggtg

SEQ ID NO: 89296 - DNA, 3332 bp, Oryza sativa
  Clone ID: PAT_MRT4530_88064C.1
tagcgcgtccccccggcccccggcctcttgccttcttccatctcggaaatttcgtccctgcgcctgcgcgagaaagcttggtactttttccagggaggaggaggagctgcaggagaggatcccacgagaaacattggaagagaaaaaagaagcgcttcttttgcggttctggcagaagaagcagggaaggggatggtgaagaggcggctgttcttgctgctgttcttgtgcttgttggctgggtcaagaatcgcttccgctgacaccaatccgcaagatgcggctgcgctaagatctttgatgaagaaatggacaaaaaatgtgcctgctagctggaggaagtccaatgatccttgtgcgagatgggatggaattacatgtgataggaactcaagggttacatcactaaatttattcggtatgaacttggaagggactctaagtgatgatatcggaaacctgactgaactgacggtcttggatttatcctcaaacagaggtgttggtggtactctcacaccggctattgggaagttggctaaccttagaattttagcattgataggttgcagtttcagtggtaatgttccaagtgaactagggaacctgtcacaactcgatttcctcggcctgaactccaaccaattcacgggcaagattccgccatcattgggcaagctgtccaaggttacttggctagaccttgctgataaccagttgaccggaccaatcccaaactccagggaccatggatctgggtttgatcagctacttaaggcccaacacttccatctcaacaaaaataagctgcaaggttcggtcccggattttttgttcaactccagcatggatctcaagcatatactttttgacaggaacaactttaatggatctattccagcgtctattggggtacttccaaaacttgaagtactccgtttaaatgacaatgctttcacgggtccggttcctgcaatgaataacctgacgaagctccatgttctaatgctgtcaaacaacaagttaagtggactgatgcctaacttgactggaatggatatgctcgaaaatgtggatctaagcaacaacagctttataccttctgaagttccaagttggttcacaagtttaatcaaattaatgaccctcaaaatgcagtcagtaggtctttctgggcaactgccgcagaagcttttcagcaaccccaacctgcaatatgtagtattgagtgacaatcaattgaatggtgtacttgacatgggcaatatcagcgatgaacttcatgtcgatatttgctacttctctgttgccaggcttgcaggaaacccagtctgtggtgattcacttctgtcaagcatgaagccatgcacagacctgacaactgaacctctacacaagcctccttccattgatgtccagtgtgcaaatccatttgtcgaaaccatcgtttttagagctccttcttttggagatgttgttaagttccttccttcgctgcaagccaacctctcaagcaaactaaacagctgcaccccgaacaacctaggcctggtgtactcgaatgatgatgcatacctgaacgtggatattagagcatgcccagtaaaccagaagagatttaactactcccaggtgctaaactgcttcaatctaacccttcagacttacaagccaccagagatctttggaccttactacgtgaaggcacacccttatccattccatgataaaacttctcgagctgtgttgattggtgttgtgactggatcccttctcctcgttattgggctcacacttgttggagtttacgctgtgcggcaaaagaagcgggctcagaaacttgtttctatcaatgatccttttgcatcatggggatcaatgggacaagatattggtgaagcaccgaaaatcaagagtgctagatgcttcacactggaagatctcaagttgagcacaaatgatttccgagagattaacgcaattggggcaggaggatatggaacggtgtaccgaggaaagcttcctgatggacaactgatagccatcaagaggtctaagcaagggtccatgcagggtgggcttgagttcaagacagaaatcgagctcctttctagagtccatcacaagaacttggttggtcttgttggtttctgctttgagaagggagaaaggatgcttgtttacgagttcataccgaatggaacgctaagtgaggccttgtatggtataaaaggagtacaattggactggagtaggagacttaagatagctctggattcagctagagggctagcgtacctccatgaccatgccgatcctccaatcattcacagagatgtgaagtccaccaacatcctcttggatgagaggatgaccgcgaaggtcgcagatttcggtctctccttgttggtatcagacagtgaggaaggccagttctgcaccaacgtcaagggaacactgggatacctggacccggagtactacatgacacagcagctcacagcgaagagcgatgtgtacagcttcggggtggttcttctagagctcatagtggcgcagccacccatacacaagcagaagtacatcgtccgggaggtgaagacggcactggacatgggagaccaaacgtactgtggcctgaaggatgtgatggacccggttcttcagaaaacaggggatctccgtggtttcgcaaggttcctgaagctggcattgcagtgtgtcgaagatctaggaaccgaccggccatcgatgaacaccatagtgagggagatcgaggtgataatgcaggacaacgggatcagaaccggcatgtcatcgacgagctcttcgttcagcatcgactcgagaacgatgatggccgcgccaaagtacccatactccaacgcatcgacatcgtcgacggcgtttgatatggatagcagggcctttgagtacagtgggaagttcccttctgaaggcagcctgaagaacaggggcacgtaggagggtatggtcagtcaggtcagaggtgtacagcggatgaaaggcctgttcagaatagcagattttacgaagtgtgaaaagaggatggggctgcatatttataggatattaaggatcaaactacactgtacagaggtcatgaactttacaattcttttgtcttgtgagaaaagaaagagcaattctttttcttcgaaatagcgtataaaagttaaccatggaattatgtaacttacctttgctcactgataaaatcatcagagttgtttgtatattaacatttgtaagcatgaaccccacaacaaatacactgcaaaactcatgtgagcaggggggcgcaacagggg

SEQ ID NO: 89297 - DNA, 420 bp, Oryza sativa
  unsure (1)..(420): unsure at all n locations
  Clone ID: PAT_MRT4530_88065C.1
aaaggaaagggaacacaagtggattcctttttttttgccaaaaaaggggttcaaaaatcaaaaatatttccccgtttggttccctgggggactggggttccccccatttagggccatgaaaaaaaaggggggggtgggcaaaaccatagagggggcaaaccggggggtntttatttaccacttacaaaagaaattttgatcgaaaaaatttttttttgttgctgcccccgaaaaaaaaatgggaaaaacccccgagggtgttgccntcctgtggtgacctaattatcaataaagggggcaaggggggcctttgggaaaggcccaataaaccttttcttttttttaccctttttgaacataaagacgggggggaatcccccgatgccgcaattgggggggatttttgggaagacccccccc

SEQ ID NO: 89298 - DNA, 291 bp, Oryza sativa
  Clone ID: PAT_MRT4530_88066C.1
tcggattgcttggtttcaatggaccaacttcaggaagaaatacaggggtgccaccctgaaattctcaagattggtacaagggtacccaactcaaatactaagcgtgaattttaatgggtactgcccgacgaaccagggctgtatatcactcttactgccctacctggacggactcgagatctcaagaaggtccggatcaatcggaagcggatcatcgagacacaagctgcacactggttgctagagaatcgggcaccggtatacgagcgcggttatgttctagtggtcatc

SEQ ID NO: 89299 - DNA, 406 bp, Oryza sativa
  Clone ID: PAT_MRT4530_88067C.1
gcgcacctggaataatgacggcaactagcgtcagcgaagatgctgtcggtgtgtcagtagaagaccttttatatcctgggaccatagagccgcagctggtgaaacagaatcagcatccggctgttcatcgcttgtttctttttttccgggaggatattctaccttgctgaattgagggtgaggaatagattaaactgaattgaccttagtgacttgcgacaccataacggcgtatcacctgaggacgctcatttcttgttggccctcctacatcgatccatctttctacacttccttctatgtttgttgattgatccatcggcccaagtcagtctaggctacttatgagttcgattttgtaaaatattgttttctatagcctgtcagatgattgttatcctcgtgc

SEQ ID NO: 89300 - DNA, 531 bp, Oryza sativa
  Clone ID: PAT_MRT4530_88068C.1
atgatgcacatgagcttctactggggcacgtccgtcaccatcctcttcgacggctggcgcacgtcggggtggccggggtacctcgcctccctcctcgcgctcttcctcgccgccgcgctctaccagcacctcgaggcccgccgcgtccgcctcagggcgggtcgtcgtcaccgcgccggcggcggcggcggcgccgcctcctccgccgccggtcccgtcgtgcccgccgcgtccgacgcgcgcgccctgctgtccgccgcggggggccgcctcggcctcggcctcggcctcggcaggcggtggatgaaggagccccgggctgctgcttccgcggcggcggcggcgctgttcggcctgagcgccgcggtcgggtacctcctgatgctggccgtcatgtcgttcaacggcggggtgttcctggccgtcgtggcggggctcgccgccgggcacctggcgttccgcggcggcgcggacgaggccgacggcggcgtgggggacgacgagctcgagagcccctgcgcctgcgcgtag

SEQ ID NO: 89301 - DNA, 470 bp, Oryza sativa
  Clone ID: PAT_MRT4530_88069C.1
gtgcaccaactattatcagtactttgcttttatggcaaatccttttgtcatttacatgatagctacatatataaagtacatagatatatactagctccttatcattaaagaaaaggactagatacgtacttgatcacttgatccctacccaaatactactactcttgcatccttgcagagtcaaactcagaactactaccttttgacttgacctaatcagggatcattactaagtaatcacctaatcccctttgattaattaatttatacatcacacacactctccttaattaggtggggactcatatacatccacccttactaatatttttccatccaaggaaaaaccataaaaaagaggttaagactaggttaaatgattaataatccacctaatatactagacgtgtggttcgaacccacatgtcagtgacgcatattgacctcgtcaacacccttctcctgctgct

SEQ ID NO: 89302 - DNA, 1308 bp, Oryza sativa
  Clone ID: PAT_MRT4530_8806C.1
atggatcaggaggcctcgttgctgccggcggcgtcgtcgcacacggtggtgaggaggaagagagctctgcagcttaacgagacggtgtacgaggagccggagtacgtggcgaccaagggtggcacatacaacgtcgcggagatgcccgagaggttgctgatggccgccgactaccgcaccagcccatccaccgcggggagcaacgccgccatcctgacggtccgcggccactcctccgccgcggcgagcgccgccgccgcccacacgatttgcgcgctgtcctccgccgcagggaacacgatcgccacctcgaccgccaccgcccactcgatctgcagctggtcctccgccgcagggaaaacgatcgcaacctcgaccgccaccgccatgacggactcctccgcggcgaggtccacccggagcatccctccatacctcatcgggaggatgcaaatggacggggaggaaatagcggtggtgtcctccccgctggtcgagcccgataccatcgccgaggtgcccgtcatctccatggacgacgacgatcacccgacctccccaacctctacgaagatcgcggtcgaggggcgcccccaaccaaaactgcgcatctgcagcgtggatgtagacctctccgggtcccccaacgggcacgttcccgaggccccgcagcgcactgcttgggaggcaaccggcgaacgatcccatggcttcaaggaagggaatccagaacgtaggaccgttggtgttggcgatgccgatgctgagtaccggagcccagacctgcaggcgcggagtccgagcatcgcgtcggagctcgcggccgtacgcctggtgttgctggtcaccggcgcttcgggcttggacgccgcgcgcgcccgccctgacgatcgcagaagattcccgatcccctcggccgcaagctggctcggtgttccagtcgcgcgcgcgcgcatgaccgcgctccggtgggtgaggagcagcacggcgctgcggggaaacagtagcgacgccgccgccgccgccgccgccgccgcggcgccctctccctcctccgcgtcgtccacgcccacgagctccaccttcctcgaggaaatggcgctccccttggccgcgcccatcatggccgcgtctgtcgtcacggcggcgagcaaggcgcgcgtgagcagctggtgcctgccggggatggccgcggcccctcattgctgtggccgcggcggcgacggcggggttagagggggcggttgcggtggtggtggtggtggtggtggtgacgtggatttgatcggaggacgacgcgatttataa

SEQ ID NO: 89303 - DNA, 939 bp, Oryza sativa
  Clone ID: PAT_MRT4530_88070C.1
ccggccgggctctctcctggactccccatcgtgcgccgttaggtcgccgtcgccgcatgccgctcctctccccactcacgggaggaactctctccaaaccctaaccctaacctcctctctctccacgaatacgcgctgcacgctgttgcgcgctcccctccccactcgccggttcctccgcgtctcacctgatctccacctcgaaatccgccgccggagcagcgttaggtcgtcgccctcggtggctcatgtcgcactgtcgcccaccttcgcgccgccaccggtctcctccgcacgattggaacaggataatcttctgctcaagaaaacaccaatgttggagatgatcacaattgtcctccactgctcttgatcattcaagcaggcacatatacatacatatacaaaaagatatgccatggtgtggatggaaatcgtggaggaattctgcatctgcactctattgacagagttctacttatataaacattgcaagggatgcatctttcggtaattcaccattgataggcattgtactaaactactaatactataatctgcaggtaatatatatccatctattttttcccttcaaatctactagacttcaacatacaattttctcaaccccagatatgtgggtatatgcagctgatttgcaatcaccaaccccagatattttaacccttatagcttaactttgaagtccatatgttaggcgcagagtggtaaagtggtttatgtctattttgatcgagcagtttggcgagcggagacgtggaattatacaatggtagttcaggagaattaacataggcataggtactattttttactgatagatgtattttgaaatcttcatggattatggagcggaacagctaaactttgctctgctgtaacttagacccaattgtgcagtgttcatggtatgtccga

SEQ ID NO: 89304 - DNA, 792 bp, Oryza sativa
  Clone ID: PAT_MRT4530_88071C.1
cccgcgtccgcttagacttacacctcgcgcgccgccgcagctccgatcggaagaagctcgattcgtctccgactccgacgaccagaagctaccggcgacgcgagcggagaagcgcggaggggagggggcgcgcgccgccatggcgttcgagaatatcgtcgtggccaaccccgtcgttgacatggacggtgatcagacgactcgagttatttggaaatggatcagagatcagcttatattccatttcttggacttggacataaaacactatgacttaggtctacctaatcaggccgctgacggggacaaagttacaatagagagtgcagaagcgaccctaaagtataatgtagccatcaaatgtgcaactataactccagatgaaggacgcgtgaaagagtttaatttaagtgcaatgtggaagagtccaaatgggacaataaggaacattttgaatggaactgttttccgagaaccaatcatctgcaagaatattcctcggcttgtacctgggtggataaagcccatatgcattggacgacatgcatttggtgatcaataccgagcaacagatacagttattaaaggtcctgggaagttgaagttagtatttggtatgtctcaataaagctaatgtcatgatagtggctgcagatctgaacttgtagcagccaggattaaattaatatttagctttgtctccctagtgtttatcctactaggaatgacaaggacttctaccttttcttttcatatgggcatcattggctttggctatagaaaagctgttct

SEQ ID NO: 89305 - DNA, 2108 bp, Oryza sativa
  Clone ID: PAT_MRT4530_88072C.1
atggcgttcgagaagatcgtcgtggccaaccccgtcgtcgagatggacgagttcaacacatttgatgtgctgaaagctgctctacttggcctttctgaaattctaggtgttacaaggaatagtggtgatgagatgactcgagttatttggaaatggatcaaagataagcttatattccctttcttggacttggacataaaatactatgacttaggtctacctaatcgtgacgctactggggacaaagttacaatagagagtgcagaagcgaccctaaagtataatgtagccatcaaatgtgcaactataactccagttttggacactcaatttaaatttgattttggccgcactattcatgagcctacagatgaaggacgcgtgaaagagtttaatttaagtgcaatgtggaagagtccaaatgggacaataaggaacattttgaatggaactgttttccgagaaccaatcatctgcaagaatattcctcggcttgtacctgggtggataaagcccatatgcattggacgacatgcatttggtgatcaataccgagcaacagatacagttattaaaggtcctgggaagttgaagttagtatttgatggcagagaggaacaaatagagttggatgtgttcaactttactggtgctggtggagtagccttgtctatgtataatactgacgagtctatttgggcattcgctgaagcttccatgaacatggcttaccagaaaagatggccactttatcttagcaccaaaaacacgatcctcaaaaaatacgatggaaggtttaaagatatatttcaggagaactatgaaacaaaatggagagccaagtttgatgatgcaggaatatggaacatggagccttattttcctcctttatgtcctaatcatttctgctgtggcaggtacgaacatcggctgattgatgatatggtggcctatgcccttaagagtgaaggtggctatgtttgggcttgcaagaactatgatggagatgtgcagagcgatctaattgctcaaggttttggatcgctaggtctaatgacatcagttctggtgtgccctgatggtagaaccattgaagctgaagctgctcatggtacagtcacacgccattacagagttcaccaaaaaggaggcgaaactagtacaaatagcattgcttcaatatttgcttggacaaccggactaggacatagggcaaagctcgatgacaataaaagactgttagattttgtacaaaaacttgaagctgcttgtgtgggaacagtggaatctggaaagatgacaaaggatctagctcttcttgtacatgggccaaatgttagccgagataagtatcttaacactgttgagttcatcgatgctgttgctgaggatttaagaacaagattgtcagtaacatccaagttatgaaggaatgaatagggcaacggcaggggacatgttaggatcccatgatacaaagtttatacatttttactttgaataagagcgattgaagcattggtatgcgcagctatcaaccacggtgctctgataaaatctggtaaagattgtatgcatactccatacaacaatggaggtggaggaggatattttgctcgaaataagaagtttgaacttttattcgtcagacttctacttataactactttgatgattaaatcatggccgtgtagcttagttcttctatgccaaaagagcaagtagaactatcctaaaggtacccaccacaagtggtgtttgtgctttgtaccatacaaacaagactgtttatttactacagtatatagcttggaataaaaaagcaggtgcagatctgttggtaatctggagtaggacatttgaatgggtgacatgctgtgttggttacccattgcttcagtttcctcccatgacagggcatcctgagcctgacgcagcctcagcagcagcagcagcagcaggcgtgctcaagaagctcgcgaggaaattgccgcgctcgtagaagtactccgtcttctccaccttcatctcctcgtcgacctaatgccgcatcccacacacagaactgtcagtgctacgaatataagcggacgcgagatcgacccggg

SEQ ID NO: 89306 - DNA, 852 bp, Oryza sativa
  Clone ID: PAT_MRT4530_88074C.1
atgaacgcgagggtgttgggcggcggcggcggcggcggaggcgacggcgagacgacggtggtgctggcgcacggctacggcggcagcagccacatctgggacgacgtcgccccggcgctggcgaagacgttccgggtcgtcgtcttcgactggagcttctccggcgacgtcgtcgtcgacgacgacgacgacgccgccgccgtctcggaggacattagctgctcgtacttcggcttcgccgacgagctggtggcgatgatggacgagctggcgctgacggcggtggtgttcgtgggtcactccatggccggcatgatcggctgcattgcgtccgtggcgcggccggagctgttccgccacctcgtgctcgtcggcgcgtcgcctaggtacatcaacgacgacggcgacggctacgtgggcggcttcgagcgcggcgaggtggacgccatgctcgccgccatcgaggccgatttcgcggcgtgggcgccgctgttcgccgaggccgtcgtcgggccggcgccgtcgccgggcgccggcgcggtggccaagttcgccaagcagctggggcggatgcgcccggccgcggcgctccgcgtcatgcgcgccgtgctcacctgcgacgtccgcgccgtgctccgcgacgtcgcggcgccgtgcaccatcgtgcactgcgcgcgcgacgccgtggcgccgctcgctgtggcgcggtacatgcagcgcgcgatggcacgcggcgtcgacggcgcgccggcgccggcggtggtggtgatggattcctccggccacttcccgcagctcacggcgcccatggagttcgtccgggtcatggaggccatactgcttgaccactaa

SEQ ID NO: 89307 - DNA, 386 bp, Oryza sativa
  Clone ID: PAT_MRT4530_88075C.1
agcgcagaaatagccatggtatatttatagttacagaaataatcctcaaacgcacggatacaccattgtaacatttcactcaaaagtattccaaggtatcgtatttattcaatccaagggatgatttataaaagagagaactctgctaatatcttaatacatacatatccttgcggtgatttttcgtccgacacccccttccccccctaaaatcccagtcggaattccatatcacacaaatagaatcccacattgagcacaccttcttttcaaatgccacattatcacaatcgtcacaggaccggcttcgtccgtcgggggtgcgcaccagcagcccccggcctggaatcccaattgcgagccaaaaaaaagaaagttcgattcaa

SEQ ID NO: 89308 - DNA, 499 bp, Oryza sativa
  Clone ID: PAT_MRT4530_88076C.1
gcggaacttatggttttactcattcatcatgtcacacatgcacgtcgccggcctgcattcgcgccgccccccggactctctcttggtgattgattgattatcgttttgacggttttgctgttggtgatggttgtcgcgaggatggcggcgcgcgagcgcagcgtggccggacccggtgccatcagaggagcccgcgtaggcgtcggcgtacaccgtcgtcgtcacggaggacaagcccgatccgccgtcggcggaggagaagagcgaggaggtcgtggtggtctctaatggcggctctatggacacagcggaagagcgcccgtgtagacggaggcagccgaggaggacagtggcttgtacgacatcctgagcaagctggacatccatgtgacaccaactcttgtcctctatggataccgtgctgtgggtgtcctatgggacatatcttcggttgcatatgcagacgattacattgccttgcatatgtgatctgacattt

SEQ ID NO: 89309 - DNA, 695 bp, Oryza sativa
  Clone ID: PAT_MRT4530_88077C.1
cggacgcgtgggttttttgaagccaacctatatcactttattatttaagatgttaccttacagccgcaatgataactagtataaattagtgttttgccggtatttagtcatcagattcaccccctctataaattgcacaaaagaaaaaaagaaaaaaacttaagagggcaaaaaattacataattacatttacatggaccagaacatcttccaagatgtatccgtgctaaacgtgagcctgatattaaaaaaaaagaatagcaagaaagtcactaatatataaactacagtaagcctaaacgcaacaaaacctactcccagagcttttcttgatcggttcccacttatttgactgttgcttgaagacatcccctcaactatctccttggccagctctgtttaaaatgcttttttctaggtataccttcagctttcacgcaagacatccacgaatttttcagtcagctagcaaaagaattagtttcgtcatctgagactgctgggccgctcatatacttcaatagaactccaggccacaggtgggcagcaaagcaaggtagaataacatgctttccaccacagcttgacttagttgaagaaatatggggatcccaggacatccgtgagatcaaaatctcccctctctggcaatggaggaaattttaattcagggaaagatttctcaaagctcgtgc

SEQ ID NO: 89310 - DNA, 270 bp, Oryza sativa
  Clone ID: PAT_MRT4530_88078C.1
gggaattaaaactccatcatggtcttccgggaacaggaaaacaatcctgaagacaacatcacggagaatcagcccaccgggccgcctgactgaggttcaagacaccaaaccaaatgaaacacgggatcagcgccaaaacaagggagccactggatcagtgggcaaccacagggtggcccctcgtccagggccttcgaccgggggttacagcacgccccccggagggctggatcaggagcccacccccggcggagaaggacccgttgggaa

SEQ ID NO: 89311 - DNA, 627 bp, Oryza sativa
  Clone ID: PAT_MRT4530_88079C.1
atggtggggctcacgtgggccccatatgcgagcgaggaggcgccctcggcgacctcgcgcgccaccgtcgcactccaccttcaagccgccgcgttcctccggtggtcaatccccatcggcgaggtccccgtcatgcaagctgggcagcctgggctaggagatacagcggcgttgggcgtcgtagtggcggcgaccggcgtgagcgtcggggtggcggcagccttgggcgcgggcaccggcgtgacaatcttgggggccaacgcaactagtggcggcgtcaaggagggcgtcggcggcgcgcggggccacagggcgcaagcggcaccgtggaggagggcgtcggcgtcgggtgcccttgatctggttgggcgccaacttccagaagcggacggtgagcacgccgttgtcgagggaggtggcaatggagtcgagccccgccgctccgtccttcgccgcccacatgccgaaaaggggaagggagcgatgagtcgggagcggtcgctggtcgccgccgctcaacccgtcgcccgctccggccaccccgctccgctttgtagcttgctctggcggtcggagctgccgtccgctcagctccggtcgccgcctgcctttgctgtgagcctctga

SEQ ID NO: 89312 - DNA, 666 bp, Oryza sativa
  Clone ID: PAT_MRT4530_8807C.1
atggatcctctctcaacagcatgtgttcctgaagcagaagtaatcgatctagagtcggctgaatgcaggagcggggcaacaatggcaaaatcgatgggccatagcagtggatttcatccaaagcagcagggtcacaggaaaattagtttgtcaccacagtccaagggaaactttttggaatctgctagacgaggcttttccatagtggtttacatactggaccttgttacgaagaagtatatattgcacttttacatagagaggtgtcagcccaaatgcgtagtgaatatcattaaagaattcgatgataggaagaaggagttgattggtgaagttgggtttgatggacttttggatatcaagcttactaaggtaaacaggcagtttggtgcatggctactgagcaaagttgatccgaaatcatgcgctattgttaaagatgtcaaccaggagttgccattcggtcctaatgatgtgaatgcagtttttggcttgccatgctcaggtcaacctattatcccttgctctcaatatgaattggatgggaagaaacaaatattgtgcgaaatatttgagataccaaacttttcacacctgaaaatatcactcttagagagaatcctaaagaagcagtatggttatcccatgacaatagatgaaaagagg

SEQ ID NO: 89313 - DNA, 741 bp, Oryza sativa
  Clone ID: PAT_MRT4530_88080C.1
atggtggggctcacgtgggccccatatgcgagcgaggaggcgccctcggcgacctcgcgcgccaccgtcgcactccaccttcaagccgccgcgttcctccggtggtcaatccccatcggcgagcctgggctaggagatacagcggcgttgggcgtcgtagtggcggcgaccggcgtgagcgtcggggtggcggcagccttgggcgcgggcaccggcgtgacaatcttgggggccaacgcaactggtggcggcgtcaaggagggcgtcggcggcgcgcggggccacagggcgcaagcggcaccgtggaggagggcgtcggcgtcgggcgccaacttccagaagcggacggtgagcacgccgttgtcgagggaggcggcaatggagtcgaggtcggccgccgcccacatgacaaaaagggaagggagagaggacaaaggagtagagagcggttgccgccgctccacccgtcccgctccgcaccgccggcctactctgcccgccgtcgctgcttcggcctcacgccccgctccgctgccagccgtccagccccgccgctccgtccttcgccgcccacatgccgaaaaggggaagggagcgatgagtcgggagcggtcgccggtcgccgccgctcaacccgtcgcccgctccggccaccccgctccgctttgtagcttgctctggcggtcggagctgccgtccgctcagctccggtcgccgcctgcctttgctgtgagcctctga

SEQ ID NO: 89314 - DNA, 358 bp, Oryza sativa
  Clone ID: PAT_MRT4530_88081C.1
aggtataccctctacccttggatatatgttgtatgttgatacggtatacctgcgcgtatacggatgtttcctgtatacattaaggaaatccatcacgtaatagaaacggagtccacggatggaaggagtcctactcggacagaactaggtcgttactatattgtgtggggtccgatatctgcgagttctacttggagatcgactaacccgcggtataaaagggacccccggggaggacctaagacatcgaatctcatcaccaacacaaccaccacagcctacgaagtcgaagccggcaggagccaagtcgccgggtgatctagtcgaaccaactcgactacggtctcgtcggtatcat

SEQ ID NO: 89315 - DNA, 120 bp, Oryza sativa
  Clone ID: PAT_MRT4530_88082C.1
atggcccacccagatcaggatatgtgtggacagatcctgcagatcgaccctgatgtaaaatatgctgcatctgcatgccccttctctgcacacctgaagtggaagaagcaagctcaatga

SEQ ID NO: 89316 - DNA, 219 bp, Oryza sativa
  Clone ID: PAT_MRT4530_88083C.1
cagcagaagcgacagagacgacgtgacgaggtgcgaccggggactcgcgagcagcgtcgtcgaaggcggaggcggttgaggccgacggggctcgtagtggcaacgtgatggtgcaggggacttcaaggacgacgactgccggcacagcttctctgatttgtgatgtctgtatatatgtgatgtatattagcttgtatgtatgtagttcggtgtcaattt

SEQ ID NO: 89317 - DNA, 247 bp, Oryza sativa
  Clone ID: PAT_MRT4530_88084C.1
aaagctggcccgcgggtttaacccgctgccttaatatccggccctaggcaccggtcccccaattggttcccataaaaaaaggtcattttgcctccaattggccaacccggggaacatgttacctttccaaggctggaaaccctttttccaccttaccccttcctagaagaagataggccgggacctaggcttcattttccctccttcccccgaggcctgcttggttgataacctaggaaccccactt

SEQ ID NO: 89318 - DNA, 196 bp, Oryza sativa
  unsure (1)..(196): unsure at all n locations
  Clone ID: PAT_MRT4530_88085C.1
ggtgctcaaggactatcgggctgacccggtgaagtctcggctccggcgtgccggtcgcggcggcgtacctgtcgaattcgagcgccgctcatcccgtcccggtatctgatagcccctacggcgataggagaggtaacccatttctctgccgcgatggttctgcctcccgtttgnccgacggtaccgcggccatttt

SEQ ID NO: 89319 - DNA, 317 bp, Oryza sativa
  Clone ID: PAT_MRT4530_88086C.1
ggtaggagggggactgactccgccgccgtcgctggtggcaatgctgctgcataatgggagctgattaccaaagaagcatactgagactgaggtggtaaatggtggataatttgctgtcgattatgatggaaatgcctattaaatgtttaaaattcctcttatttaattgatggttgctgctgtttaaatgctgtaaattgaagtgtttatatgctgtaaattgaagcgtttaaatgttgtaaattgaagtatttaaatgttgtaaattgaagcgtttaaatgttctttgtttagcattttaaggaacttaaagctca

SEQ ID NO: 89320 - DNA, 225 bp, Oryza sativa
  Clone ID: PAT_MRT4530_88087C.1
atggggaagatgaaggggaagcagcgacaggacaagttctaccacctcgccaagaagttctaccgcgttcgatgtcgtgctccactccacgacgggtcacccaacgtcggtggcgcgtgggcgcaggaggccaccgcgcaatcgtcgctcgtccacaaccgcctgccgccgcgtcgcctcgtgctcccgccgccgtgtcggtgcagcccgcctccgcaacgctag

SEQ ID NO: 89321 - DNA, 294 bp, Oryza sativa
  Clone ID: PAT_MRT4530_88088C.1
atgaagaatatgaacaaggtaacctgccttctccaccagagcgcaatatccatgaagaatatgaacaaggtaacctgccctctccaccagagcgcaatatccatgaagaatatgaacaaggccagtgaagtcgggagtcgaacacgagccgcggaagccggaagtggagaaacgcgtcaatggcggaagccgcggagccacaaaacatttcggtgccagtgcgcctccgccgacgcgtcgcccacctcaccgctgctccaccgccggctgattccgagcgctcctctccggtga

SEQ ID NO: 89322 - DNA, 1057 bp, Oryza sativa
  Clone ID: PAT_MRT4530_88089C.1
actttccatctcccaccacggccacactgacgagtagtagacggtgaacagcctacagggaggaggcatgggggtagccgtgacaatggcgagctacgccgccgtcctgcgcccgcacgcctcgtcgacgaggactccgcgcgggcctcgtcgtcccgcgggcgcggtgccacctacgccgcgccgggcagcgctgcgagctactacgcggtctcctccggctgtcgctgccactccacctccgcgggagcgggtgcagcagcagcagcagccgggtgacggccagacgacgacgcggctctactcgctggcgccgtgcccgctcctgctggcggcgctgctgccgggggccgagccggtgcgcgccgtgttcgagccgttcgtcgagctggtcaagacgtggggcctccccggctggctcgtgcactggggccaccccggcaacatggccgtggtgctctttgcaatgggtggctacggaacatacctgggcttcaggatcaagctatcggatgaccctgaagagaaggccaaggccaaggacctccacccgaagctcctcgccggcatgttcttcttcttcgcagctggcgccactggtggagtcaccgctcttctcacgtcagacaaaccaatctttgagagtccgcatgctgtgaccggcatcatcggccttgcactccttaccattcagtctatcctgccgacattgttcgagggtaatccttcgctgagaaatgcacatggactcctcggcagcggcatcatgaccctgtttctaatccacgcagccttcgggctacagctcgggctcagcttctaatcctcagccacaacatctggggtttgcttctctgtgattagctctcagaggcatccctgttacacacatcgaagagaaatgaaacacagagagagttttctctctcttgttttccctttgtttcttttcaccctgcgaatgttgacaataatgtagacctggtgttggattgtgtattgacgacaacgaattccatcgtgttgcgctgataaaaaaaaaaaaaaaaaaccccag

SEQ ID NO: 89323 - DNA, 1542 bp, Oryza sativa
  Clone ID: PAT_MRT4530_8808C.1
atggctcctctctcaacagcatgtgttcctgaagcagaagtaatcgatttggagtcggctgaatgcaggagcggggcaaccatggcaaaatcgacgggccatagcagtggatttcatccaaagcagcagggtcacaggaaaatcagtttgtcaccacagtccaaggctttgaaggtttctggcacaagaggcagcctaaataagactgttgcacgggtggtatccaggtgtcagcccaaatgcgtagtgaatatcattaaagaattcgatgataggaagaaggagttgattggtgaaattggatttgatggacttttggatatcaagcttactaaggtaaacaggcagtttggggcatggctactaagcaaagttgatccgaaatcatgcgctactgttaaagatgtcaaccaggagttgccattcggttccaatgatgtgaatgcagtttttggcttgccatgctcaggtcaacctattatcccttgctctcaagatgaattggatgggaagaaacaaatattgtgtgaaatatttaagataccaaacttttcacacctgaaaatatcactcttaaagagaatcctaaagaagcagtatggttatcccatgacaatagatgaaaagagggttttcatggcggcttttgtgctttatgtcacaacgaagcttttggcaccgcaatcctgtgcaaacttcatatctcctaggtctattatggctgtttctgatgttgacaatataaaacagtacaactggtcccaattcgttgtagatgaggtgaagaaagcagcagaatcaatgcccacctgctttccgaataaggctcaactatccattaacgggtgtatcatctttctaatggtaaaatacttgagaaatctcctgttccggaaggttgggatcacatgtgttaaaacatgtcacatttctcagtttgaggatgatcaaattgctaggatgattcaacaagatgtagttagtaaacataacccaggattccccttccctcgttatgggaaactccagttgatgaaggatccaagagaaaacaacccccatgtgccagagctatctcccctaaacttatgctcctgttcgaagatcccatctagagccattgatggcggtaaaaatttaataaaattcctggtttcacacttctcttcgttagacgtacatagaagtgtcgggtcacaggcatacgaggagttgaaatcttccgttcaggatggattcgatcggatcgataagattttgcctaccatatcagatttcgtcgacataagcaccatgcaaactgctattcacgcatctaacctattcaagagagctttcaagactaatattacagtggcagttaagatagtgataagggcagcaataacgaaagttattgataccattgaggatatacaagggcctctccatccatggggagacacaactgccatgggataccacacacccacaaactactccacacatgctacaaaagatgctagtcaattggaccaaccaaccaacacggtcaaacgttaa

SEQ ID NO: 89324 - DNA, 577 bp, Oryza sativa
  unsure (1)..(577): unsure at all n locations
  Clone ID: PAT_MRT4530_88090C.1
gcgttcgggnactgatgcggcggatgccgccggggagggcggagacggcgctgaacgcgctgctctccctcatccccgaccactccctcgacctcctctcccaggtcgacctcccgctccaggtttgcatggacaaggagagcgtgaaggaatacatcctatgcgagtacaaccgtgacgctgactcctacaggtctccttggtcaaacaaatacgatcctcctttggaagatggaacagttccctccgaagagatgaggaatcttgaagttgaggcaaatgatgttttctctgtctaccgtgaccagtattacgaaggtggcatctcttctgtgtatatttgggaggatgaagatgagagttttattgcatgcttcttaataaagaaagatggagaaggaaaaagagggcacatgcagattggttcatgggatgctattcatgtcattcaggttggtcctgaagaagaaggagcagcgcattactgcttgaacagcactggtgatgctatcattggacaacagataacaagccaatctgggaacttttcaacttgtgcggggatcacatcagggcg

SEQ ID NO: 89325 - DNA, 1284 bp, Oryza sativa
  Clone ID: PAT_MRT4530_88091C.1
atggaggcggcgatggatctgatgcggcggatgccgccggggagggcggagacggcgctgaacgcgctgctctccctcatccccgaccactccctcgacctcctctcccaggtcgacctcccgctccaggtgcctatatcttcctcttatcgcatcgcgtcacaactacctacctccagtttcttggttatgggatgttcttcttgttactcgaaaagattcacagatagagagatggaagtaggtgtcttaatcattgctcgcgagaatggcccggtttgcatggacaaggagagcgtgaaggaatacatcctatgcgagtacaaccgtgacgctgactcctacaggtctccttggtcaaacaaatacgatcctcctttggaagatggaacagttccctccgaagagatgaggaatcttgaagttgaggcaaatgatgttttctctgtctaccgtgaccagtattacgaaggtggcatctcttctgtgtatatttgggaggatgaagatgagagttttattgcatgcttcttaataaagaaagatggagaaggaaaaagagggcacatgcagattggttcatgggatgctattcatgtcattcaggttggtcctgaagaagaaggagcagcgcattactgcttgaacagcactgtgatgctatcattgacaacagataacaagcaatctggaactttccacttgtcgggatcaatcaggcggcagatgagtatgactcttgctgtggcagatgggcacctggttaatatgggaaaaatgatagaagaaatggagggcaagctcagaaattcgttggaccaggtttattttgggaagaccagagagatggtttgcacgcttcggccaccacccgaagtattaaacaggaggctacctgacagctgagaaaacgcagagatgtgaatttttaacacaagaactatatattagtcttgcaatcatctccttagcgacctagagtctcttttcgtaattgatctgtatttaatagtagcagtctctaaaatggacaccactttgagccatcataggagtgtcttctccattgaattgtgaggaaactgggcaaagcttcttcatggcagctgtaacagagagtttaagcaaaagggagcaggagtttgcatttgccgaactcgttgtcactgcccctgagagcaatattctgtcatctttgtgaagatctacatcttcttgtgaccttacaatttgttaaatcaatgcaagaatatggttatctgcttacaaaaaaaaaaaaaaaaa

SEQ ID NO: 89326 - DNA, 309 bp, Oryza sativa
  Clone ID: PAT_MRT4530_88092C.1
atggggacgatgcggaggatgagagtttgggactgcattctgatggagatgattatcatcgctgtcctcaacaacctctctgccaaggtccagcttctatggataaggtcttctttctcaggttctcgtgattctaaggattgtctgcaatgggagatgtgttgtgataagatctttaatagtcacaactttcggaggatgagcagcaactcaaacaaggtgattttagagtggatgcttattataaggagatggaagttaatgagccgtgttttggtaacagagaatgatgaagctattatttattga

SEQ ID NO: 89327 - DNA, 1327 bp, Oryza sativa
  Clone ID: PAT_MRT4530_88093C.1
gggggctactctggatctgagatggccccccggccccctggctttcggcgcgagggtgtgtcttttcctgtccttgcgcagaatcaggcaggctggtggttgccatttggatctgatggcttcgacgatggtccggcagtttgtgcacatggtgacctacagctgcaatcgtggcatatacggactgcaccggatcaatccgtcacgattcttccaccctaaggatgctgcggtgggacggccggcaacggcggtggaggacgttcggctgcctcgaccggcaatgagcttcagccgtccctacgagacgcacattatcccgacagagttcatgcccctcggacgcaacaatgacaagatcgtcagcgtggacgagaccggccgctccatcctctacgacgtggcctcacacgccatcagcacactgcccggcctgaaagctgagcccaaatttggatgctgcgtgtccctcaacatcggcgacaatctgtacgtcatgcaggagaacccttgtcgtgctcaatgttttgaagcgcttgtctactgcaaaagccccaagtcagacgaggagcaggagaaccgctggtcgtggcgcccccaaccaccgcctccttacctgcactcagtcggctaccactgctctggcggtgacatcaccgcctatgcggtggtcggtgactcgcacatcttggtgtccacggagagctacggtacctactccttcgacacggtgagctccgagtggagcaaggctggcgactgggcgttgcccttcaatggccgcgccgagtacgtccctgagcacgggctctggtttggcttctctgccagtgatgatggcctcctcggtgcatgggacctgtccacagtggtcacgcagcagcagccgccggtggcacacgtcttgcaggacggcttctctgtgcctgaggggttctcctcgttcgttgtgcaccttggcgccggcaacctgtgcgtcgccaagttgttcgagaaggctcgccgtgagacgtccgaccaggactgctacctctttgaaaccactcgcagatttgccatgttgaccggcgtggaggtccagcgccggggcgaagagctcaacatcatcaagcacaggtcaagccgttacagctttggcctagacaaaatcccttcttctgtattctagctccccgatactaactaccggagtagtggtactgctgcttaatactaagctaagcctttatttggtcgtcaaaatcttgctggttagcttgaactgatcttgtcaaaatcttgctggttagcttgaactgatcttgtatatcatctctagcatttggtc

SEQ ID NO: 89328 - DNA, 1548 bp, Oryza sativa
  Clone ID: PAT_MRT4530_88094C.1
atgggagaagatggcggcgtgaactcttcttccaactctccggccgccgccggcgccctcgcgctggtggtggcgatctgctcgtacctggccgtcgtcgccacccgcaagcagaagcggcggcggcggcggcggccgccggtggtcggcacggcgttccaccagctgtaccacgtccggcgcgtgcacgactaccacacggcgctgtcccgcgagcacacgaccttccggctgctcgtgccggccggccgcgaccagatatacacctgcgaccccgccgtcgtcgagcacatcctccggaccaacttcgccaactacggcaaggggccgtttaaccacgggaacgccagcgacctgttcggggacggcatcttcgccgtcgacggcgacaagtggaagcagcagaggaagatcgccagctacgacttctccaccagggccctccgcgacttcagcggcgccgtcttcaagaggaacgccgccaagctcgccggcgtcgtctccagccacgccgcgtcaaaccaatccatggacttccagggtttcttgctgagagcaacgatggactccatcttcaccatcgcgttcggcccagacctcaacacgctggacggctccggcgaggggcgccgcttcgccgcggcgttcgacgacgccagcgagttcaccatgctccgctacctcagcccgctctggaagctggcgaggctcctcaacgtcggcgccgaggccatgctcaaggagaggatcaaggtcgtcgacgggttcgtgtacaggctcatccgtgccaggtccgacgagctctccaacaccaaggcacacgactccggttcgaggcaggatatcctgtcaagattcctccaggcaacgaccagcgattctgggacggtcgattacaagtacctgcgagacatcatactgaacattgtcatagccggcaaggacaccacagccggggcgcttgcttggttcctgtacatggtgtgcaagcacccggaagtccaggagaagatctgccacgaagccatggtggccaccagcgccggcgacgccgcttccgtcgacgagttctcgcagagcctgaccgaccaggcgctgaacaacatgcactacctgcacgccgcactgacggagacgctccggctttaccctgcagttccactggataacaagcagtgcttctcagacgatgtattgcccaacggtttcaacgtcagcaagggggacatcgtgttcttcatcccctacgcgatgggccggatggagagcttgtggggcaaagacgctgaatccttccggcctgaacgttggctcgacgagaacggcgtctttcagcaggagagcccgttcaagtttacagctttccaggccggcccaagaatctgcctcgggaaggagttcgcgtacaggcagatgaagatcttcgcggccgtgctgctccgtttcttcgtgctcaagctgcgcgacgagaaggagatcgtcagctaccggaccacgcttacactcgccgtcgaccagggtctccatctgacggctacggcgagatga

SEQ ID NO: 89329 - DNA, 818 bp, Oryza sativa
  Clone ID: PAT_MRT4530_88095C.1
ggatccccgggctgcaggctgcttgacctctatggtcttatatcgtgctttacgaaattctcaaactacaattattcatatcatactttacatgactgaaactattgtggatatggctcttcgatctgggatacccttaacaaataatcacatatgcattgaccataaccccattggctatgagtttggaagaattgctgcctccaaatcagcagaaagtatgcgaacataatcatgcttagatcctccctggtggtctcaaccctcctcattgctctatctgtccccttctttgggctagttatggcgttggttggttctttactcaccatgcttgtgacctacatccttccatgcgcctgtttcttggccatccttaagagaaaagtgacttggcatcagattgcagcttgctcattcatcatcgtggtaggggtttgctgcgcttgcgtggggacatactcatccctctccaagattatccataactacacctgacctgagtggccagctgaggaacggagcactagctgcttatgtagtaataagaaaataattaatcatccttctatagccctgcacataccggaacaaagttttgcccgggaactggagtcgacttgatcaattatatatgtataatataattagtttggatcgtttgtttaatttgtggcaactccaggcatgttaatgtataattaacgataaaaacaccacagtaccacatagtggagttttgttaatgataaaaataaataatgctttacatggtgtatgatcgatattacagaccaatataaaaaaaaaaaaaaaaa

SEQ ID NO: 89330 - DNA, 1050 bp, Oryza sativa
  Clone ID: PAT_MRT4530_88096C.1
atgaaggacttggtgtcgtgcttcagcgagcacgccgtccggatctctgacgtcgcgtgctccggcagcgcgaatgcggcgacggtgtcggcagcgggtgttgctgcggcgggggtcggtgatggtggcggcgcggggagggcggcggtgagcgcggtgacgagcgtgtaccggtcgcggctctcggcgtccgggaaggatttggtcatcgacgtgacatggtcgcgggcgcccgacgggccggcgctgtcggtcgccgtgcacgacgccgcggccgcgtcgaggctccgcggcggcggcggcggggccgcgggcgcggcgccgaggcacctgcacaggaggaaagggagcgggacgttcaccgccggcagctgcgtggtgggcgtgttctgggacttcgcggcggcgcggtacgcggcggggcccgagccggtgtccgggtactacgtcgccgtcgtggccgacgccgagttcgtgctcctgctcggggacatgagccgcgggtacgtggagcggctgcacggcgggataccgatcgccgggtcacggatggcgcggcggcgggagcggttcgtcgggtgcgggtgctggtccacgagggcgcggttcctggagtccggcgccgagcacgacatcgtcgtcgcgctggacggcgacgcggaggcgtgggtgaccgtcgacggccggaaggtggtgcagctccggcggctgcggtggaacttccgcggcagccacacccttttcctcgacggcggcgcgccggtggacatgacgtgggacctccacggctggctcttccacgcggccgacccctcgccggcctcctcctgcgccgccgtcttcacgttccagacgcgcggcgcgtcggagacgaagttctggatagaggacgacggcgacggcgacgacgatctggaacaatctcagccaccggctgcgccgcgcggcccgaaacagaagctgggcggcggcggcggcggcggcgctccgtcggggcagggattctgcttactgatccaaggtttcaggggcgcatccaagatcgcttga

SEQ ID NO: 89331 - DNA, 276 bp, Oryza sativa
  Clone ID: PAT_MRT4530_88097C.1
atggtggtgtggtggcggaggacaagggaagaatggccggcgttaatggaggaggcggcggcggcggcggcggtggcggtggcggcgatgttcctcaaagcagaacttcgccatttcttcctgatggcacttctcgcctccaattcatcgtctgctgactcctcttcgctggaagctccaaattttgcaaacctcaaatccttccttaaacagggagggccgccggcgcggtcgcaggagagggtgccgaccggaggcagagacgaggacccctag

SEQ ID NO: 89332 - DNA, 141 bp, Oryza sativa
  Clone ID: PAT_MRT4530_88098C.1
atggcgggctcaccggcgtgtggagggaaacgggcttcggcggcggaatcagatggggaaggggtggacagtgtggccctcggggcggcgaatgcgacggcatcgatggcgcagctcggcgcggcgactagcggcggctag

SEQ ID NO: 89333 - DNA, 207 bp, Oryza sativa
  Clone ID: PAT_MRT4530_88099C.1
gtgtgaagatgcttaatcgcattgctgaagctggtggtaccttcattccggggccttacctgctggtcgatatgctggaaatgaaagaacttggagggaggccagatgcccaaggcaaagcagcgaatcaggcgagccctcaacaagctgagctgacgccacgacagcaactgctcaaggatcaagtgcatgcatgtgtggccaatc

SEQ ID NO: 89334 - DNA, 2211 bp, Oryza sativa
  Clone ID: PAT_MRT4530_8809C.1
atggatcctctctcaacagcatgtgttcctgaagcagaagtaatcgatctagagtcggctgaatgcaggagcggggcaacaatggcaaaatcgatgggccatagcagtggatttcatccaaagcagcagggtcacaggaaaattagtttgtcaccacagtccaagaggcttttccatagtggtttacatactggaccttgttacgaagaagtatatactgcacttttacatagagaggctttgaaggtttctggcacaaggggcagcctaaataagactgctgcacgggtggtatccaggtgtcagcccaaatgcgtagtgaatatcattaaagaattcgatgataggaagaaggagttgattggtgaagttgggtttgatggacttttggatatcaagcttactaagtacaactggtcccaattcgttgtagatgaggtgaagaaagcagcagaatcaatgcccacctgctttccgaataaggctcaactatccattaacgggtgtatcatctttctaatggtaaaatatttgagaaatctccagttccggaaggttgggatcacatgtgttaaaacatgtcacatttctcagtttgaggatgatcaaattgctaggatgattcaacaagatgtagttagtaaacataacccaggattccccttccctcgttatgggaaactccagttgatgaaggaaccaagagaaaacaacccccatgtgccagagctatctcccctaaacttatgctccggttcgaagatcccatctagagccattgatggcggtaaaaatttaataaaattcctggaatcacacttctcttcattagacgtacgtggaactgtcgggtcacaggcatacgaggagttgaaatcttacattcaggatggattcgaccgcatcgatgagattttgcctaccatatcagatttcgtcgacataagcaccatgcaaactgctattcacacatctaacctattcaagagagctttcaagactaatattacagcggcagttaagatagcgataagggcagcagtaacgaaagttattgataccattgaggatatacaagggcctctccatccatggggagacacaactgccatgggataccacacacccacaaactactccacacatgctacaaaagatgctagtcaattggatcaaccaacagatacccaacaatatgatcacaaaattggaggcttgcagtgtactcctccaaaatctaatggagctccagaattcggtagcgacgggcagaagaagcgcaaatacaccgttgaaaacccaccatctcacttgctgaagcacaagtcaaagcgtgtagtcaaaccaaacaggaagctcatgtcacctttcatgtcaaagcaatgctcaacggagaggctggaatccaggattgctgacgacctgtattcctatataatgtctatttctgacgatgcatcattagaaaaaacatggctgcagagctcccatcctttcagaatatcattgacgctacgaaacatccaagaaactataaagattgggagccaaatggattcagattctctcaaccttgcaattcgaataatgttccaacaagaagttgagagatttcacaacacaaactaccttggttggaggcatttcattaaccaagattttgggatgtacgcgctagctggtgaggaattttgggaagctagccatcaacttgcacacttctcgggcccagaggtagtatatgatgtttcagaaagccacctgatactgattcctgttcacctattcaatcattacgtgctgtacgtatttaacatggagagcaagaagttatcggtgcttgattcactaaacacagaagatccactaggggaatcacgtttcaccaggcatgacaagataaagatcatggtgtcacagtgtgtaatggaatgcatgcgtcttgcatctccagggtggaacatggacatacttaattgggactttgagacagttgaaaatataccagagcagcagaacagggatgactgtggcttttacgtattcaactttatggtgaactacgatggtcgtcgtcttctgaaccctattacagaggacccgtactacctccggaggcaatttttgatccaccttttgactctgcgtgataacgaggcaatactaccagaatatgtggtggaccgtcttcgacaaattaaagacaattag

SEQ ID NO: 89335 - DNA, 287 bp, Oryza sativa
  Clone ID: PAT_MRT4530_880C.1
atccggctcaagtatatgatactttcgcatttaaataactgtgctgtatacatctcattgtgtacataaataactcctatgtgttgtttagctaccaggacttgtgtagaatatactatgttgacttcttaggtatttctcgtgctttggcccagagaaaaaggtagagcccgacaatcaccaatgctgtgcctagaagactgcacattgagaataggagaacaattacatctattgctgccaatggtcaaaaaataaactgtactgcaaatacacttcatatagtt

SEQ ID NO: 89336 - DNA, 1604 bp, Oryza sativa
  Clone ID: PAT_MRT4530_88100C.1
atggcagggtctcttgccgcctcagcattcttcccaggtccaggctcatctcctgcagcatcagctagaagctccaagaatgctgctgttaccggcgaattgccggagaatttgagtgtctgtggcattgtcgcaaagcctaacccacctcctgcagccatgcaagtaaaggcacaggctcaaacccttcccaaggttaatggtacgaaggttaacctcaagacggtgaagcctgacatggaggaaacggtgcctcacagtgctccaaagacgttctataaccaactgccggattggagcatgcttcttgcggctattacaaccatcttcctcgccgcagagaagcagtggacactgcttgattggaagccgaagaaacctgacatgcttgttgacacatttggctttggtaggatcatccaggacggtatggtgtttaggcagaacttcatgattcggtcctacgagattggcgctgatcgtacagcttctatagagacattgatgaatcatttacaggaaacggctcttaaccatgtaaggactgctggtcttcttggagatggttttggggctacaccggagatgagcaaacggaacttgatatgggttgtcagcaaaatccagcttcttgttgagcaataccccgcatggggagatatggttcaagttgacacatgggtcgctgctgctggcaaaaatggcatgcgtcgagactggcatgttcgtgactacaactctggccgaacaatcttgagagctacaagtgtttgggtgatgatgcacaagaaaactagaagactttcaaaaatgccagatgaagttagagctgaaataggcccatatttcaatgaccgttcagctataacagaggagcagaagcaattcataagaaaggggctcactcctagatggggtgacctcgatgtcaatcagcatgtgaacaatgttaaatatattgggtggatccttgaggtggttattcttgtcccttatattcattgtttagagaaaaataatttggctttatccttttatatggtacttcctttgtttcacaatagtgctccaatttcagtactggagaagcatgagcttgcaagcatgaccctggattacaggaaggagtgtggccgagacagcgtgctgcaatcacttaccaccgtgtcaggggaatgcaccagcattggcgccgacaagcaggcttctgccatccagtgcgaccatcttgtgaaggctgacattgtgaaggcacacacagagtggcgaccaaagcgatcgcatgcagcagctgagaacgcgtaaacaaacaaaccgacgaaaatctgtggtagggagaatatcaaacttcccttgcctctgttgccctgaagctgatcttgaagtgtgagttgtattctgtaaaaaattagtagtttccatagtgtgaggttggaggggaggtgttggtgcttgcctactgtacctgctacatctattatttcttgattctttgttcgctttttttttcttttttgtttttaacccctgtggagataagacaggttttgaagtgtggaagaggttgtttcaatcgtctaattgattcacctcttcagcatgtg

SEQ ID NO: 89337 - DNA, 432 bp, Oryza sativa
  Clone ID: PAT_MRT4530_88101C.1
aagcctctaacattccaattaaaaagataaatattatcttgtgacatgggcacacaagttgctgcaactactacaatggttggaactaagcatcatacatcctttgccgaaacacacccaacattgctgggagaaacacagacaaaagagagtaatgcatctctggtagtagctagcttgaagacattggggaggcaagctaagacaacttgggaagcaaaagaggatcaggacaggctgctgcttcattgggagcagaagaggttgcttcttcatcgaggtacagcacagcacagggacttgcttcatgggggcacaaccgccgccttcttctttggagccttcaggcggatgcttttgcaccctcccttctccaccagctcggcaattgtcttcaggctgccgggggacaggggcttcttgtagcgcttg

SEQ ID NO: 89338 - DNA, 2358 bp, Oryza sativa
  Clone ID: PAT_MRT4530_88102C.1
atggcgacgacgaagacgcagcttctcttgaggttctggctactgctggtggtgtgagcttgcgagcccgaggagcggaggcggtccacaagtctaatccgcgtcgtctgcgcgttcgtgggcgaggaggagaaagaagaggaggaagagagggaagggggcttgatttgatttgggcgcgtctcgtggagtatccggttgccccttctagtgtgtaacttggagcaaatttggaccctgagacgcaaatcagtcatggctggttctcttgcggcgtctgcattcttccctgtcccagggtcttcccctgcagcttcggctagaagctctaagaacacaaccggtgaattgccagagaatttgagtgtccgcggaatcgtcgcgaagcctaatccgtctccaggggccatgcaagtcaaggcgcaggcgcaagcccttcctaaggttaatggaaccaaggttaacctgaagactacaagcccagacaaggtaggatataatgccgtccactgctccgaagacaccggagaaaatctcccgtcgtctccttccttgcgccaagaaagacgagccgcggctcaacagcggagtggaggggcgccgatctccatcgccgaggagagcagagcaggggaggggaggggatcctggttagcgcttttggcgtgtgattgatttctaaacgaattttgggccgtgaagggaagttcaatcatggcagggtctcttgccgcctcagcattcttcccaggtccaggctcatctcctgcagcatcagctagaagctccaagaatgctgctgttaccggcgaattgccggagaatttgagtgtccgtggcattgtcgcaaagcctaacccacctcctgcagccatgcaagtaaaggcacaggctcaaacccttcccaaggttaatggtacgaaggttaacctcaagacggtgaagcctgacatggaggaaacggtgccttacagtgctccaaagacgttctataaccaactgccggattggagcatgcttcttgcggctattacaaccatcttccttgccgcagagaagcagtggacactgcttgattggaagccaaagaaacctgacatgcttgttgacacatttggctttggtaggattatccaggacggtatggtgtttaggcagaacttcatgattcggtcctacgagattggtgcgtgatcgtacagcttctatagagacattgatgaatcatttacaggaaacagctcttaaccatgtgaggactgctggtcttcttggagatggttttggggctacaccggagatgagcaaacggaacttgatatgggttgtcagcaaaatccagcttcttgttgagcaataccccgcatggggagatacggttcaagttgacacatgggttgctgctgctggcaaaaatggcatgcgtcgagactggcatgttcgtgactacaactctggccgaacaatcttgagagctacaagtgtttgggtgatgatgcacaagaaaactagaagactttcaaaaatgccagatgaagttagagctgaaataggcccatatttcaatgaccgttcagctataacagaggagcagagtgaaaagttagccaagacaggaaataaagttggtgatgatgctacagagcaattcataagaaaggggctcactcctagatggggtgacctcgatgtcaatcagcatgtgaacaatgttaaatatattgggtggatccttgagagtgctccaatttcagtactggagaagcatgagcttgcaagcatgaccctggattacaggaaggagtgtggtcgagacagcgtgctgcaatcacttaccaccgtgtcaggggaatgcaccagcattggcgccgacaagcaggcttctgccatccagtgcgaccatcttcttcagcttgagtcaggagctgatattgtgaaggcacacacagagtggcgaccaaagcgatcgcacgcagcagctgagaacgcgtaaacaaacaaaccgacgaaaatctgtgggagggagaatatcaaacttcccttgcctctgttgccctgaagcttatcttgaagtgtgagttgtattctgtaaaaaattagtagtttccatagtgtgaggttggaggggaggtgttggtgcttgcctactgtacctgctacatctattatttcttgattctttgttcgcttttttttttcttttttgtttttaacccctgtggagataagacaggttttgaagtgtggaagaggttgtttcaatcgtctaattgattcaactattcagcaagtaaactgctccatggaatttcatcgtttggttggagctgagaaaaaaaaaaaaaacccgcccccccg

SEQ ID NO: 89339 - DNA, 334 bp, Oryza sativa
  Clone ID: PAT_MRT4530_88103C.1
tttttttttttttttttttttgtttttttttttttttttttataacgttttttatttacagttgcaatcaatcgtattcacgcgtgtagcaacatgacaacatctgctcaaaagaaaatcttgaaactggattttacccaaaacagttcgctgcattggagcgggactggaattttttttttggaagacgaaagctatcacaaaactaccaaaaactaaaacacactgcgatgcccccctgaaaaaacccgttgctaactattgtgggagggggaacctgctcgcggaaacctttggggccaaaagaccccggctgaggagtcttgagcccccg

SEQ ID NO: 89340 - DNA, 464 bp, Oryza sativa
  unsure (1)..(464): unsure at all n locations
  Clone ID: PAT_MRT4530_88104C.1
tggctgcangattcggcacgagaacacatcctcgcgccggnagcgcancaacctgctgcttcnganngngggttcctctgccgccgcctcatcaactcgcccgtgcggangaancaaaaaaacgtngtgggtgggcatggncgaactgctggggcganttttggggcgcgcgaaaccttccccgaagaanatnnaaaacaacttccgccaaaagggtgctggggcaacntcnanaccctcccacaaaatcctcatccccacgctctccgtngctctccatcgcgcgcctccccctcnancctaaccccncgcccgtcnanacttgccnaancccgccgcctcctccncaaggtggttgggtggggccncnncaanaancccaaagggntnnttttncctttgctttctggaaggtcggggaaaaaacctggggccaaaanctctccccnattattaacccccgt

SEQ ID NO: 89341 - DNA, 417 bp, Oryza sativa
  Clone ID: PAT_MRT4530_88105C.1
tcagacttctgtgaagccatttcccctttcaaagtatcttttcatcttgggtcggttcttttgaagcctgagttcttttttaagcaaatctttatcaatttcaaactcatcttcttctatggcaataacaaagccaacatcaagctcgataacattgatatcgaagtctgagattgaaggttcgtcggagttgtctggatatatcccggcttcgcttgagacggagagacgccgccactggccgctgcggctgctgctcgcacggggcaagaccacggcggcgcgcacagcacgtggcagcgtggcaccttcaatggcggcggtgaacttcgcagacgaccggcagcggcgatgacgaacctcacagacgaccgcagcggcgacgatgaacctcacagacgaccgcacgatcctcat

SEQ ID NO: 89342 - DNA, 450 bp, Oryza sativa
  Clone ID: PAT_MRT4530_88106C.1
atggcctcgcccccccccggctgctgcggcccgagccaggggtgcacagtgtggagggtggccgcgggacgacgacacaaggccttccgcatcaagcggtgccccgacaaggagcaggacgttttcgacagtggagacggctggcgcggtggaaggcaccgagggagatggggagcacgctacaagctgccactcctcgttcctgctccgcattgttgatggaaggcaacggtggaaggcctcgccacttgagatcctccccctcacggccgatactaccttcctccctgtgccgcccccgtcggcctgcacgcttgactcaaggcaccagatcccgctgtcaaggcgttccacacgtgggcccgtcgcctcggccttgctagctccctggctcgaccgtcgtatcctcctcatcagcggctttccaccggatttcacgaaaaccgtcat

SEQ ID NO: 89343 - DNA, 358 bp, Oryza sativa
  Clone ID: PAT_MRT4530_88107C.1
cgcgccccgagcgctattttgacaaccaccaccggggaggaggcggtggccggggtgggggtagttccagccccccgccgtatcggagtggccgccgccactccccgtcgaggagatccccttcgccgccgttcaagaggtcgcggcgggacgacgggtacgaccgccgtggcggccgtgggagcccgccgccgcggtacgggtacggcgacaggaggtatggatatgaccacgagcgtggtggaggcagaggtgggtatgatgatgaccgataccatggcaggtatcaaaatcgcgcagcagattgggccgattcagggtttggggcatccaatgatggtcctggaattacccaaag

SEQ ID NO: 89344 - DNA, 1738 bp, Oryza sativa
  unsure (1)..(1738): unsure at all n locations
  Clone ID: PAT_MRT4530_88108C.1
atggcaatggcttgtgcagcactagtgccgttgctactgttgcttcttgttgtgctctctcgctctacatctctcgctgaccacagtgcagtgagccgacaccccaccctacacaactcggtccccacaagccgaccgtacgggccgtgcagtacatcgccggcgaagggtagggcggcgccgtccaccgtcgacggcatgctctggtcggaccagcaccgcgccgactacatacagtggaggctctccggctcggtcgccggcgtgctgcagccggccgacgacgtgccggtgtcaactaactacgaacagcagtccatagaaggagatcttaactatggcacgtactaccctgcacctgcaccaatgtcatcaaaggcgatgaatccggccgccaccggcggcggcggcggcgggccgggagtgacccagacgatggtgctggacacggcgagcgacgtgacatgggtgcagtgctcgccgtgccccacgccgccgtgctacccgcaaaaggacgtcctctacgaccccaccaagtcgtcgtcgtccggcgtcttctcctgcaactcgccgacgtgcacccagctcggcccctacgccaatggctgcaccaacaataaccagtgccagtaccgcgtccggtaccccgacggcacgtcgacggcgggcacctacatctccgacctgctgaccatcacccccgccaccgcagtcaggagcttccagttcggctgcagccacggcgtgcagggcagcttcagcttcggcagcagcgccgccgggatcatggcactcggcggcgggccggagtcactggtgtcgcagacggcggcgacctacggccgcgtcttctcccactgcttcccgccgccgacgcgccggggattcttcaccctcggcgtgccgagggtggccgcctggaggtacgtgctgacgccgatgctcaagaacccggccatcccgcccacgttctacatggtgcgcctcgaggccatcgccgtcgccgggcagcggatcgccgtgccgcccaccgtgttcgccgccggcgccgcgctcgactcccgcaccgccatcaccaggctgccgccgacggcgtaccaggcgctgaggcaggcgttcagggaccggatggcgatgtaccagccggcgccgcccaagggcccgctcgacacctgctacgacatggccggcgtccgcagcttcgcgctgccgaggatcacgcttgtgttcgacaagaacgccgccgtcgagctcgatccgtcgggcgtcctcttccagggctgcctcgccttcaccgccggccccaacgaccaggtccccgggatcatcggcaacatccagcttcagacgctcgaggtgctctacaacatccccgccgccctcgtcggattccgccatgccgcctgctgagtccggccgccgcccccgacgtctcgatcgggactctactactacaggccggagctgctcttgctccggtgataccttttaattttcataaagctcgagcgctcgcgtctttaattggattcctcctatttatttttgcgtatgcgtacacgtgctacaagatcagctggnctggcgtncatgtatgagccagattagcggttgctttngatatgtactcttccatccatgtgggtatatatatatatatatatatatatatatatatatatatatatatatgcacgaagaaataaaacttaatttgtttgcctaaaaaaaaaaaaaa

SEQ ID NO: 89345 - DNA, 737 bp, Oryza sativa
  Clone ID: PAT_MRT4530_88109C.1
cgctccgcctcttgctcaccttcgccggccggagccccctcgtcgacatcggcatcgtcgtcttcgtcatcgccgcgctcgccgcgccggcgctcggcaccatcatcctcctcggctcttgcgtcgcggtcggcggcctcgacgcgcaccacctcttcacctccttcgccttgaagaacccaatcatccacgcgcccaccggcgtcgccaccgccgccgtcgtcggcaccacgcttctcgccctcttcttccgcaaggcgcaaaatgcggcggccgcggccgcggccgctgccccactaccggccacggagcgcgccgccaagattatctcggacggtgccaatcccggcggcggctgcacgtgaaggttcccgcgccgcgagcccgtcgccatcatcgtcggcgccatctgcgccgtcacctccgccgtgctcggcgccatgctcctggtgcgcttcatccgcgtcgcgggcgacgctcctgaccgggccacggagcgcttcgcgcgggtgaccctgacggtggccttcgctgccatcttcctcgtcgccggctgcctcctcgccgcccccgccgccgacaagttcgccagctccgcctgtcccgtcgccgacatcgccatttgcgtcttcctcatctgcgccgccaccgcgccagtcctcggcaccgtgcttctcgcgcgctacttccgcgccgcgggcaaagcggacggcgttggaggcgcccccgcgcccgcc

SEQ ID NO: 89346 - DNA, 408 bp, Oryza sativa
  Clone ID: PAT_MRT4530_8810C.1
atggcgagcgcgatccggtgggcggcggccgctccccccaccccgccggaggggagcccggaggccagtgggagcgcaggattcggatccgcggaggccggcgacgacgacgacaacgacgaggaggaggaggcggcggctgccgggagcggcagagccaccggcggattgaccttggttgttgtgtgcgggccgcccacccgcaggcgaaagtcagattcaaccgcatggaaaaatcattctcctactagtgacccgaagtttggggagggcgtcaccgggccgctgcctggaagcccgtgcctcccctcctgccagatcttcgcgaaggggaacgcgccgccattaggcatgtgctatgcccgcctacgaatacggtgcctggcaatatgcgaaaatcatttttga

SEQ ID NO: 89347 - DNA, 222 bp, Oryza sativa
  Clone ID: PAT_MRT4530_88110C.1
atggtgcctgaaggagttggaagcaggaggtcatggaaggagcggaggagggagaggaacaatagcagcagcagcagtacttttgccccatcattcgcatcggcggtgaagatccgggggctcgacgttgccacctgccggagctcgcacggcgacgccagcgggcggcgagcgaaggagggggcagcaatgagggaggtggctagaggagtgggacagtag

SEQ ID NO: 89348 - DNA, 468 bp, Oryza sativa
  Clone ID: PAT_MRT4530_88111C.1
atggcgtccataatcatcctggccgtcgtgttcgtcctcgacgtcctcgccttcgtcctcgccatcggcgccgagaaacgccggaacacggcggcgtacgtgaacgtcgaccagaacgcgcggccgtactgcgtctacggctccgacgcggcgacggggtacggcatcggggcgctggtgctgctggcggcagggcaggcgatgatcatggtggcgactcggtgcttctgctgcggccgcgcgctctcgccggggcggtggcgcgccttcgccggcttctgcttcatcacctgctgctccacctctggtttattttgtgatagatcttcacccagctccgctccaattttaaatgaagttaaaattgtttggttgagcgacgaagctgaagctgcaccaaacatacctcgagatcgatgccactggaaagaggacgggtcggctctttggatgcagcccatcttctag

SEQ ID NO: 89349 - DNA, 623 bp, Oryza sativa
  Clone ID: PAT_MRT4530_88112C.1
accaatgatcgagaggataaactggatggctgaccaatcagagaagggcacttcaacacgagtggaggtatcatggtaaattatatgtacagattagagaatatagaagagtatgcgctgtcatatttgggtacagggctcgctcatacttcatctaacttgctccattatatcgagccaaaggatacatgagctgaagaacacttttggaaatgaagtttttcatccagcgaaggattataaggatatcattggatacggataataacttaataaggatatcacacttctccctggtccttgtggacttgaattcgtcatataaattgttcgtgataatgtatagccgcgtgtacagtgtacttctgtttctgattggcctcgctgcactggcagcattgtagcactaggagtaactagtaattagtttatcttggccattcattctctcctgttctggtaaatgtatcagggaatacggaatacctaaatacctaatagtcatagtcacaatatcatgcataccaatgcaagaagaagcacttacatttgcaaaaaaaaaaaaaaaaaaaaaaaaaaaaaaaaaaggggggggggcctcgtgccgaattcctgcagcccgg

SEQ ID NO: 89350 - DNA, 672 bp, Oryza sativa
  Clone ID: PAT_MRT4530_88113C.1
atggcgtccataatcatcctggccgtcgtgttcgtcctcgacgtcctcgccttcgtcctcgccatcggcgccgagaaacgccggaacacggcggcgtacgtgaacgtcgaccagaacgcgcggccgtactgcgtctacggctccgacgcggcgacggggtacggcatcggggcgctggtgctgctggcggcagggcaggcggtgatcatggtggcgactcggtgcttctgctgcggccgcgcgctctcgccggggcggtggcgcgccttcgccggcttctgcttcatcacctgctgcctgtttggcacaaaatatactagaattgtggagctgagtttagacagctccagaactccactccagattcaactcttggagctaaatttaggagttggagctgtaccaaataggcatttggtaaaactcctactcctaaatttagctttagaagttgggtctgaagtggagctttggaactgtataaatccagctccacctctggtttattttgtgatagatcttcacccagctccgctccaatttattttaaataaagttaaaattgtttggttgagcgacgaagctgaagctgcaccatacatacctgtaagacgagatcgatgccactggaaagaggacgggtcggctctttggatgcagcccatcttctag

SEQ ID NO: 89351 - DNA, 1370 bp, Oryza sativa
  Clone ID: PAT_MRT4530_88114C.1
atgccggaatacgatccggcccatgggccaatgggagtccgtttcgtcttcgtcttcgtcgtcgtcgtcttcctgtcttgcaagaaagaaaaggcggagcaggagcagcaacgagaaaaggcggaggcggcggcgcaaccgacaaggaaaagcaaagcgagagcaggaaaacctcgccggcggcgacaccaccaccaccagcaggcagggatggcccggtacgaccgcgcgatcaccgtcttctcccccgacggccacctcttccaggtggagtacgccctcgaggccgtccgcaagggcaacgccgccgtcggcgtccgcggcaccgacaccgtcgtcctcggcgtcgagaagaaatccacccccaagctccaggactccaggtccatgcgcaagatcgccagcctcgacacccacatcgcgcttgcctgcgcggggctcaaggcggacgcccgcgtgctcatcaaccgggcgcgcgtcgagtgccagagccaccgcctcaccgtcgaggaccccgtcaccgtcgagtacatcacgcgctacatcgccggactgcagcagaagtacacccagagcggcggggtgcgccccttcggcctctccaccctcatcgtcggcttcgacccctacaccgagaagcccgccctctaccagaccgacccatccggcaccttctccgcctggaaggccaacgccaccggccgcaactccaactccatgcgcgagttcctcgagaagaattacaaggacacctccggcaaggagaccatcaagcttgccatccgagccctccttgaggttgtcgagagcggtggcaagaacatcgagattgcggtgatgacacacaaggatggcctccgcgagctggaggaggctgagatcgacgagtacgtggctgagattgaagcagagaaggctgccgccgaggccgcgaagaagggcgccccgaaagaaacctgacctgatcatcatgattcagcaaagcataatctctcttagcatgtgttgtttcttttctgttcttgtttgagaggaacgcagaactgtttggttcaactgaagtggatatggctatttgctgatcagcctacctggagtaaatcctcatgctatatgctttgtgatgttgcacaacactgctgcgatgctcatcgtgtcagttgccactcagtgggtctccttttatgtatgaatatatctgttgcctgttggttgtagacagtaaaaaaaaatagtactatgagctagtgcgggccgctgctctccgtcgcggggatctgggccaacttctcgtcttgtgtctggagcccatgcttttttgttctactgctcccttgttctaaaaaaaaaaaaaaaagagcgcgcgctct

SEQ ID NO: 89352 - DNA, 734 bp, Oryza sativa
  Clone ID: PAT_MRT4530_88115C.1
cagatataataaaaaggggtttgtaagttataacaattttaaacacgaaaggtttggagtatgtaagctgacacaaatgcatacacatcttgttgtcacagattctgaagagacagatactctagagtttttcctgaagcaacgcactgctgggtgctggcattgctgctccattctacaattccaatgacatggtaatactgaagacagcatgtgatggcgcttctagccaaattaaggtgctagctggtcgttgttccgtcctttagactgtggtagctagctgttccttgcatatgcggcccaactaaagatcaatatgaagggccaacactcgtatagagtatttttcagtagtactgaagcgaagtttcgcattgcccatagtagccccattctgttatatagtggtgctgcaagaagggcccacttcacccaaaactccatgttcttgcttagcaggacaacggggctgaggacacatattgctatggcagtcttgtgagcaaccggagctagcaccatatacaaacccactgcgaaggtagcaatcaagcaggcgaccgaggtctccatgcagtacaaggctgtaaccaagtaggtcttgcggctccttgagttgaacagtggggatccagagtacatgagcccaatggtagctatggcggcgaagataagtgcaaatgtgttggccatgatgaaggcatgaaaggtatacctccctgcaagtgttg

SEQ ID NO: 89353 - DNA, 145 bp, Oryza sativa
  Clone ID: PAT_MRT4530_88116C.1
gcgcggtttgtgttgccccgtccgcctcttcctcttgccggaccggactccatgaggggcaggcgaccttgcacgaggtagcgagactatccacttgcatcggcggcaccttctataggggaggggagatgacttcaagtatgct

SEQ ID NO: 89354 - DNA, 486 bp, Oryza sativa
  Clone ID: PAT_MRT4530_88117C.1
atgtcgaacaaccgcggaccaaaattttatgcccaaaacgccgtctacattgccatggatgggggatacgaccttgtaaggctccgcctacccgacaaggaccagggaggggtggacgacggtagcgcggggccgtgcggcggcggtggcggcgcgccccctgcggtggccgatgagggggcggccgtgccatggcggagctgtgttgtgcggcggtggcgtggccctgcgctggcgcagcgagggacgaccgtgaggcggcggagcgtggccgtgcggcggcctttccccacccccaccctcccagatccgaccggaggaagggtggcggtggaagaagcgggcggcggaggcgggaggtcgtcgtcggcgacggcggcgctgtgggcttgtggcggtgctcccacctcccagatccggagctatggctggcgatcaagccgtcatggggccatagcaagggtggccgctcaccattcaccttaa

SEQ ID NO: 89355 - DNA, 439 bp, Oryza sativa
  Clone ID: PAT_MRT4530_88118C.1
aaactgaatgaacacacgtatatattagtgggcaggacatatatcatgtgttgaacccaatgcatcacgcctggttttggtcggaccctgcaaacactactcatacatagccaatttcttccaacctactacacatataatatatctcatatgaaggccgtgatctcatattgcaacttcatgatacactcgttttgcacacactgtgtgataatacgagaccctttcttaggcattgttggagcaccatacactgaaactgtcatgtacacatgcattggtgaaacagtgtgatgcgattaggtgctccacagctataagagacctttacacaagactcaacctcggcaatcagacacaaaaagcacattgcgttcaaatgccaatgcgcaggcaacatctttcacatgcgatgaagcccactttgcagactccatgg

SEQ ID NO: 89356 - DNA, 417 bp, Oryza sativa
  Clone ID: PAT_MRT4530_88119C.1
atggctgtcggcaccggtttcccgtgcgggaaccaccacggcgccggcgggggcaggccgtgggccgggagggagcaattagcgcgtggccccacggggacgggctcgcagatcgggcgctcggcggcagtggctgcgctgcacgcgtgcaccgccactccgccagcggccagccactgggcacgccgccgctccagacggccaagttgtggatgcaccgccccagccatcgtcatcgcgccgccgggagccgccgttgtcacgccgcccggcacctgcagccgtcgacgcgggcgcggcacctgccgccgtcgtcctgccgtccatccaccatccgccgccagcgcccttcgtcgccactcgctagaacaccatctgcagccaacggcctccgttgttgaagaaatcaactactga

SEQ ID NO: 89357 - DNA, 2550 bp, Oryza sativa
  Clone ID: PAT_MRT4530_8811C.1
atggcgtggccgaaggggggagggcggtggtggtggtgcggctcccctccctctccctcccagatcaggcggaggggagggtcagcggccgtggcacagccagagagggcggtggcgttacatggtcacaggaaaattagtttgtcaccacagtccaagaggcttttccatagtggtttacatactggaccttgttacgaagaagtatatactgcacttttacatagagaggctttgaaggtttctggcacaaggggcagcctaaataagactgctgcacgggtggtatccaggtgtcagcccaaatgcgtagtgaatatcattaaagaattcgatgataggaagaaggagttgattggtgaagttgggtttgatggacttttggatatcaagcttactaaggtaaacaggcagtttggtgcatggctactgagcaaagttgatccgaaatcatgcgctattgttaaagatgtcaaccaggagttgccattcggtcctaatgatgtgaatgcagtttttggcttgccatgctcaggtcaacctattatcccttgctctcaagatgaattggatgggaagaaacaaatattgtgcgaaatatttgagataccaaacttttcacacatgaaaatatcactcttagagagaatcctaaagaagcagtatggttatcccatgacaatagatgaaaagagggttttcatggcggcttttgtgctttatgtcacaacgaagcttttggcaccgcaatcctgcgcaaacttcatatctcctaggtatattatggttgtttctgatgttgacaatataaaacagtacaactggtcccaattcgttgtagatgaggtgaagaaagcagcagaatcaatgcccacctactttccgaataaggctcaactatccattaacgggtgtatcatctttctaatggtaaaatatttgagaaatctccagttccggaaggttgggatcacatgtgttaaaacatgtcacatttctcagtttgaggatgatcaaattgctaggatgattcaacaagatgtagttagtaaacataacccaggattccccttccctcgttatgggaaactccagttgatgaaggaaccaagagaaaacaacccccatgtgccagagctatctcccctaaacttatgctctggttcgaagatcccatctagagccattgatggcggtaaaaatttaataaaattcctggaatcacacttctcttcgttagacgtacgtggaactgtcgggtcacaggcatacgaggagttgaaatcttacgttcaggatggattcgaccgcatcgatgagattttgcctaccatatcagatttcgtcgacataagcaccatgcaaactgctattcacgcatctgacctattcaagagagctttcaagactaatattacagcggcagttaagatagcgataagggcagcagtaatgaaagttattgataccattgaggatatacaagggcctctccatccatggggagacacaactgccatgggataccacacacccacaaactactccacacatgctacaaaagatgctagtcaattggatcaaccaacagaattcggtagcgacgggcagaagaagcgcaaatacactgttgaaaacccaccatctcacttgctgaagcacatgtcaaagcgtgtagtcaaaccaaacaggaagctcatgtcacctttcatgtcaaagcaatgctcaacggagaggctggaatctaggattgctgacgacctgtattcctatataatgtctatttctgacgatgcatcattagaaaaaacatggctgcagagctcccatcctttcagaatatcattgacgctacgaaacatccaagaaactataaagattgggagccaaatggattcagattctctcaaccttgcaattcgaataatgttccaacaagaagttgagagatttcacaacacaaactaccttggttggaggcatttcattaaccaagattttgggatgtacgcgctagctggtgaggaattttgggaagctagccatcaacttgcacacttttcgggcccagaggtagtatatgatgtttcagaaagccacctgatactgattcctgttcacctattcaatcattacgtgctgtacgtatttaacatggagagcaagaagttatcggtgcttgattcactaaacacagaagatccactcggggaatcacgtttcaccaggcatgacaagataaagatcatggtgtcacagtgtgtaatggaatgcatgcgtcttgcatctccagggtggaacatggacatacttaattgggactttgagacagttgaaaatataccagagcagcagaacggggatgactgtggcttttacgtattcaactttatggtgaactacgatggtcgtcgtcttctgaaccctattacagaggacccgtactacctccggaggcaatttttgatccaccttttgactctgcgtgataacgaggcaatactaccagaatatgtggtggaccgtcttcgacaaattaaagacaattag

SEQ ID NO: 89358 - DNA, 685 bp, Oryza sativa
  Clone ID: PAT_MRT4530_88120C.1
agcagcaatagcatggctttgaagccgggagacaagtgttctgcaaccaccagctgacagggcgttttctcacgtcgcatttgcgattttgcaggcgagagatttacccctctgcatccatccaccaacccgatcgacgactggtttgcttgcatctgaaaaatgtcctcttctaggtgaggtacagtacaattgtacagaataaagccatacaactcacgcttgatctggcccaattctacctgtctcctgctgatcgatggcggagccaccacctctaacggcaccggcgccggcgccggcgactcctccgagattggcggggttcgagcagttggacgcgcgcatcaaggagctgacctcgtcgcagggggagttgctggacaggatccagaagctcaaactgaattggattattggagaatttctctgtcttgatggcaaaatgatggagaatgagcagcagaagtgcttttgcaggaggtgcagaactggcgctccaacctcgagacacaggtcaagacaagccagaatgtcgtactgctcatggttctggcatatgattctaggaaatgaaggaaatcagagcaacgaagacacaaaccaagccccgcagcctcgagaaccagcacaggagtttgataccgatgctcatatggaaaaacaaactgcaatggaagcatga

SEQ ID NO: 89359 - DNA, 459 bp, Oryza sativa
  unsure (1)..(459): unsure at all n locations
  Clone ID: PAT_MRT4530_88121C.1
angctagctagtgctacacttgctgccatggagggtgcactcgcgcgctcgctggccaccgccgccgccgccgtcatgctcccgccaccgccggcggcgagctcgctgaggcggaggagtagtagtagggtggcggcgagcggcctccgggcaagcgtcagtgccagtacagctacgagtagtacgagcatggctcagctggtggccgccggcggcggcatcgacgagctcaggctcgtcgacgaacgcgccgccgtggcggcgctgcagcagcagcagcttcccgtcggcggctgcgaggtggagaagctccgggccgtcgcggaggcggcggcggaccgggcggagatgcacgacatcatcgggaggcagcgggacaactggaaccacctgctgctccactccaacaactccctcctcctcgccgcctccctcatggccgcgctcgcgcccgccgcc

SEQ ID NO: 89360 - DNA, 555 bp, Oryza sativa
  Clone ID: PAT_MRT4530_88122C.1
cggacgcgtgggatttttttttgccttttataggaatcggatctacggtttttttgccacttaggagaaactaaattgcgatgctggagattatctttctctatctttactatctttagctgggcggctcttctttttctttttatgcaggtttctggctttggtccttcccttttattatttttcattaaaaaaagacctcaagtatgcttattgcaagattatagggactcagatgctaaagtacagacccaaacattaaaatcatatacagatggaatgctctcgaccagtaggttccatttttggaaacatatctataatccggcacatcagttttatttttggcttttaagagcgaatcggatctagagtcggactttttttctcccttcctgagagggaaacggtaggagtcagactttcttttttgttttgacggttctgagacgttatcgttaagagtctgactttctttatttttttcgctatcttctttaaggatggaggtaacatgtcttattttttaagtagtagagatgtggcacacatttg

SEQ ID NO: 89361 - DNA, 713 bp, Oryza sativa
  unsure (1)..(713): unsure at all n locations
  Clone ID: PAT_MRT4530_88124C.1
cccacgcgtccgcccacgcgtccgcccacgcgtccgcggacgcgtgggcgagcgcagagtagagggaatggcgtccgacggcgtgctcctggggatgggcaaccccctcctcgacatctccgccgtcgtcgacgacgccttcctcaccaagtatgacgtcaagctgaacaatgcaattctcgctgaggaaaagcacttgcctatgtatgatgagttggccagcaagggcaatgttgaatatattgccggaggagccacccagaactctatcagggttggctttgtttccttccttaatcttctcgtcccctgcagatcgactcgagtgagttgggtgttcattatatatctctttttcacacacatgtacgtagtatgatatacatgtatatatactccatctgttactgctcccacggacacatgtgctgtctgtgttgttggtggtgaaagatcactggttgcaaacttatcagcagcaaactgctacaaatctgagcatctgaagaaaccggagaactgtgcactagtggagaaagcaaaatacatctacattgctggctttatccttacggtctgcccagattctattcagcttgttgctgagcatgctgccgctaacaacaaggtgttcctgatgaacctctctgcaccctttatctgtgagtcattccgtgatgcccaggagaagggtcttncgtttgtggactaca

SEQ ID NO: 89362 - DNA, 246 bp, Oryza sativa
  Clone ID: PAT_MRT4530_88125C.1
tttattttctctctctacttcacttcttcttctggtggtcttctcccaagcaaagcagcagctcgagatcgatctagtactgtggctgctagctgcatatataagtaatggcgcatatttgatctcgctttcagcaaccaggcgactggtctgaggatcaattgatttggagatttttttgagtgtgttcaattcatcactcatcagagagtgtgaagcgcctactgcatgagctagctgtgagcc

SEQ ID NO: 89363 - DNA, 977 bp, Oryza sativa
  Clone ID: PAT_MRT4530_88126C.1
gaaaatggacgcatttgctttttctgtcaagctgcagtgagaatctgcctcctctggtatcttcatggcattgagatttgcccctttttcactgtgttcctctaactatgtgaataagtcatggcaagttttttaatgattatataaagtatcagcaattacatgtttatgctgtgaaaaaggaggtcatggaacatgagtgatccattctggaaacgtggacaatccactgctaaaaataaatactatgcatgtctcttgtttattccattgcagtgttcatttccccttttggttgatgtgctatctatgatgtggtttacattttttttaatcttgcagcaataaagttttttctttttgcatccatatgcccaaagggcaatgtctacttgtttgatatcttggtcctgttctcaggtggtggctattgtctatgccattatgacaacaagaaatgagcatataacatgggaaatgagggcaatccgagtgctgccgatgtttgtcttgcctgctgtatcttctgtgatatattcaacagttgtaaaattcacaaggatgcttgagcggaaagaccagaagacacttgaaaagctgagagctgagaggaaggccaagattgatgagctaaaagagagaactaattattacctcacccaacagcttattcagaaatatgacctagatccagctgcaaaggctgcggcagcatcggtattggcatctaagctcggagaggaaactggcttaaaagtacatgttggtgaagaaccaaaactggattcagcagttgctaggagcaatgatgtggagatatcaccatcagaagggctgagaaacaggaagcaatccaatgcaagaggtagccgaactggaggcaccactgctgctcaaaatccagctcagggagctgaatccagtctgacaagtagctctggcctggaacagcctccaatggtggtagaacattttca

SEQ ID NO: 89364 - DNA, 414 bp, Oryza sativa
  Clone ID: PAT_MRT4530_88127C.1
aaagcttgactgggtcatcgctgtccctccctgatttgatctgggcggcacctacagctatgcgcgtgtgccggcaggtttctgggtccaggatttattcgaactcagccgcaacccgtacgacaagctaggccatttcatacagggcgttacacctgcgctgctcgctcgcgaaatactgctgcgcttgcgttatgtagcgcccggcgaaaatcgctcggtgtctcctttgcactgctgtgatggcactcggcgttgcagcgcgttctacgaactcattgaatggtgggttgcgctgctcgcagggctaggcgcggatgatttcctcggcacgcagggggacccctgggacacccaatcggacatgttcatgggcgttgctaggcgcattgctgtcggtcagctggctatcac

SEQ ID NO: 89365 - DNA, 640 bp, Oryza sativa
  Clone ID: PAT_MRT4530_88128C.1
cggcacgaggggctatctaagcaccggcattgcatacagccgcctaagcaaagagcacagcaagtatacgcgaatctgagtgtgtgagagagactagtagcacagacgaaggtatggcgttctacctcggcagcatgggtggctcgccatcgtcatggggggtggcggaggtgccggtgccgagcagcaggccgtggagcaaggcggaggacaaggtgttcgagagcgcgctcgtggcgttcccggagcacacgcacaatcggtgggcgctcgtcgcgtcgcggctcccggggcgctcggcgcacgaggtttgggaacactaccaggtgctcgtggacgatgtcgacctcatcgagcgtggcatggttgcgtccccgggctgctgggacgacgacaacaacagcgccggccacggccgtggcagtggtggggatgagcgtcgtcgcggcgtgccctggactgaggaggagcacaggctatttctggaagggctagagaaatatgggcgtggcgactggcgcaacatctcgcgctggtcggtgaagacgcggactccgacgcaagtggcgagccatgcgcagaagttcttcatccgacaggccaacgccagcagccgtggcgactccaagcgtaagagcat

SEQ ID NO: 89366 - DNA, 308 bp, Oryza sativa
  Clone ID: PAT_MRT4530_88129C.1
acacaattaaatgaagacaaacacacccaaacaagaatgaaaaaaaagaaatcttccaacaagaaagtagcttaccaaccttcttcactggtggcaaccaacataaacattctttttcaaggacaagccaccaccaataaagaacgcacctgacgaccacccgccaagtgttattcacaacaatccacaccgatcggtggaacaaatcaatcattgaacgcaaccgactgttatttataaagaacacgcgcagatcaagatccaggaaccactcccccgccccggcctgcataccaactttccttaaa

SEQ ID NO: 89367 - DNA, 2625 bp, Oryza sativa
  Clone ID: PAT_MRT4530_8812C.1
atggatcctctctcaacaacatgtgttcctgaagcagaagtaatcgatctagagtcggctgaatgcaggagcggggcaacaatggcaaaatcgatgggccatagcagtggatttcatccaaagcagcagggtcacaggaaaattagtttgtcaccacagtccaagaggcttttccatagtggtttacatactggaccttgttacgaagaagtatatactgcacttttacatagagaggctttgaaggtttctggcacaaggggcagcctaaataagactgctgcacgggtggtatccaggtgtcagcccaaatgcgtagtgaatatcattaaagaattcgatgataggaagaaggagttgattggtgaagttgggtttgatggacttttggatatcaagcttactaaggtaaacaggcagtttggtgcatggctactgagcaaagttgatccgaaatcatgcgctattgttaaagatgtcaaccaggagttgccattcggtcctaatgatgtgaatgcagtttttggcttgccatgctcaggtcaacctattatcccttgctctcaagatgaattggatgggaagaaacaaatattgtgcgaaatatttgagataccaaacttttcacacctgaaaatatcactcttagagagaatcctaaagaagcagtatggttatcccatgacaatagatgaaaagagggttttcatggcggcttttgtgctttatgtcacaacgaagcttttggcaccgcaatcctgcgcaaacttcatatctcctaggtatattatggctgtttctgatgttgacaatataaaacagtacaactggtcccaattcgttgtagatgaggtgaagaaagcagcagaatcaatgcccacctgctttccgaataaggctcaactatccattaacgggtgtatcatctttctaatggtaaaatatttgagaaatctccagttccggaaggttgggatcacatgtgttaaaacatgtcacatttctcagtttgaggatgatcaaattgctaggatgattcaacaagatgtagttagtaaacataacccaggattccccttccctcgttatgggaaactccagttgatgaaggaaccaagagaaaacaacccccatgtgccagagctatctcccctaaacttatgctccggttcgaagatcccatctagagccattgatggcggtaaaaatttaataaaattcttggaatcacacttctcttcgttagacgtacgtggaactgtcgggtcacaggcatacgaggagttgaaatcttacgttcaggatggattcgaccgcatcgatgagattttgcctaccatatcagatttcgtcgacataagcaccatgcaaactgctattcacgcatctaacctattcaagagagctttcaagactaatattacaacggcagttaagatagcgataagggcagcagtaacgaaagttattgataccattgaggatatacaaggtcctctccatccatggggagacacaactgccatgggataccacacacccacaaactactccacacatgctacaaaagatgctagtcaattggatcaaccaacagatacccaacaatatgatcacaaaattggaggcttgcagtgtactcctccaaaatctaatggagctccagaattcggtagcgacgggcagaagaagcgcaaatacaccgttgaaaacccgccatctcacttgctgaagcacaagtcaaagcgtgtagtcaaaccaaacaggaagctcatgtcacctttcatgtcaaagcaatgctcaacggagaggctggaatccaggattgctgacgacctgtattcctatataatgtctatttctgacgatgcatcattagaaaaaacatggctgcagagctcccatcctttcagaatatcattgacgctacgaaacatccaagaaactataaagattgggagccaaatggattcagattctctcaaccttgcaattcgaataatgttccaacaagaagttgagagatttcacaacacaaactaccttggttggaggcatttcattaaccaagattttgggatgtacgcgctagctggtgaggaattttgggaagctagccatcaacttgcacacttctcgggcccagaggtagtatatgatgtttcagaaagccacctgatactgattcctgttcacctattcaatcattacgtgctgtacgtatttaacatggagagcaagaagttatcggtgcttgattcactaaacacagaagatccactcggggaatcacgtttcaccaggcatgacaagataaagatcatggtgtcacagtgtgtaatggaatgcatgcgtcttgcatctccagggtggaacatggacatacttaattgggactttgagacagttgaaaatataccagagcagcagaacggggatgactgtggcttttacgtattcaactttatggtgaactacgatggtcgtcgtcttctgaaccctattacagaggacccgtactacctccggaggcaatttttgatccaccttttgactctgcgtgataacgaggcaatactaccagaatatgtggtggaccgtcttcgacaaattaaagacaattag

SEQ ID NO: 89368 - DNA, 425 bp, Oryza sativa
  Clone ID: PAT_MRT4530_88130C.1
ggaccaggcccataaccagttttttaattagcaacatcggaaagtcacaaaaatgtgcaggggttcattaggatttggtcaaggtcctaattataattagaaaacctttgggcacttgggcttaaaaaaaaacacttaaatttttttaattaaaaaaagggaaccgctcaaaagggttaaaggcctccaaaaaacattggaggaaaagcccttaaagaacaagccgaaccattttcaaaaccaaacaagaaaaggtgccctccgttagcatcatcttcactgggcctcttccttttggtgggctgagctgatcctgaagaccctttgattccattcgccactttgctttcatcttcttcaaaggcaccagtttaattcttttcattttaagccttcttttaaccttctttcttatcctttttttt

SEQ ID NO: 89369 - DNA, 271 bp, Oryza sativa
  unsure (1)..(271): unsure at all n locations
  Clone ID: PAT_MRT4530_88131C.1
gagtgtgggcccccgcacccagctctgttcgcgagagcgccaaaaactgccctatactatnatacgctcgtgcggatgatgtgctgtctggaagagatattagcctagacgccagatgccatgttgatgtgattgctgtgtggttgactggggtgtgtgcggtgtggtgcatgccgtgtgttgatgagtttgagaaatggttggtgaaagaaaatagctgaaaccagatttggagctcagngttacngttnaaaaaaaaaaaaaaaaaaaa

SEQ ID NO: 89370 - DNA, 1894 bp, Oryza sativa
  Clone ID: PAT_MRT4530_88132C.1
ggatcccccggctgcagccccgcggctccgcctcctccccccacgccggcgacgacgaccaaccctagacccgccgcctcctccgccgccgccgccgccgccggccaccgcgagaggtaacgacctctcctcccgcatctccccctccctctccttcccaccatggggagcaaggggagggcgccgccgccttaccaccaccggggggcgcacaagatgatgcaccgggacccgtacgggggggcaccggggatgccggggccgttcccgtacgacatgctggcggcggcggcgccgccgccggagatcctggagcagaagctgatggcgcagcggggggagctgcagaagctggcggtggagaacgaccggctggcgatgagccacgactcgctgcggaaggagctcgccgcggcgcagcaggaggcgcagaggctgcaggcgcaggggcaggcggcgatggcggccgaggagcaggaggcgagggggatcctcgacaaggtcgccaagatggaggccgacctcaaggcccgcgaccccgtcaaggccgagctgcagcaggcgcacgccgaggcgcagggcctcgtcgtcgcgaggcagcagctggccgccgacacgcagaagctgagcaaggacctgcagaggaacctcggcgaggcgcagcagctccccgcgctcgtggccgagcgcgacgccgctaggcaggagtatcagcacctcagggctacgtatgagtacgaaaggaaactcaggatggatcactccgagtcgctgcaggatgatggcgcgcctagtcttcctgttggacaaattgcttatgatagcggttatggagctgcgcagggaaggacaccacctgctggactgggagactctttaagcggaaacccagctggcacagctcctcggactggatttgatccatcaagaggcaatatgtatgacgcttctcgtattgctagcttcagttcttcaaaagctggaggacatgatgcatcaaggggtgccgcaggctacaattctttgaaaggtgctggatatgatccttctaaagcacctgcacttggaggacaggcaacagctgcagctgctcatgggagtagtgctgattactatggatcaaatcaggcaacaccaccttcatatgcttggggacaagctgcatccgcttatggatctgcacaagtgccacagtcacatgcatctggacctcctgttcaatcaacatcctacagtgcaacaacagcacgtaactttggctctgcccaggctttaccatcatatgcacatgcacaggagcaaccttcatatggacacgcacagctaccatcctcatatggattagcgcaagcatcatttccatttgccccagcgcaaggggtgtcaccctatgggtcaggtgcacagcctccgcagtatggagctgggcaagcagcaactaatcctggcagtgcttaccaagcacctcatggacgtaaataaatcggcaaaagttgtctactgatggattgttattggcaaaagagacaatgcgctgctttgtacaccagagttcagtttcctttccacagctaccaaatcttgtcgtttaactgatatgaggtgattcctgaatatagtctggagaagtaatgctctgcaagatgggaatgcttctgtaaagtgtaaacttgtcgtcggtgttttaactgcctttttttataccttcaagcctccaggttaggcaacccatggaagcatgaattctgacaagagctgtaactgttgattcttatttgatttgtcaaagttagtcgattgtttgttagttcaaactcaaatgctgcatgtatgatatgagatatacactgctagttctgggaggttaaaaatatgcccgtgctggagattctcc

SEQ ID NO: 89371 - DNA, 241 bp, Oryza sativa
  Clone ID: PAT_MRT4530_88133C.1
accaataaaaacctactaacatttatttttaaaataccataccctaacacttattatacttttaaccaaacaatataataggccataacatgcaatgctaaacccctaactccggctctggctacacattgaaagaaaaagtattgacctttacctttggctattgtcttgcctcggctggctagatccgacacccaaatggtgaaacagtggagctctaagtgtctaagtcgatcgaaat

SEQ ID NO: 89372 - DNA, 461 bp, Oryza sativa
  unsure (1)..(461): unsure at all n locations
  Clone ID: PAT_MRT4530_88134C.1
tacctaagattggacagcgggaagntgtttaccataatatgggccccagtgggctgacccaacgaatgcaagtgcggtcaatattcccgcacaatgaagtttgacacaagaatatcagatagagnaaatgaagcagaagaatacatatgacttgggtagttcaaactccagggtggatttaattctagtggctcaattttgatggccttctcaattccaataatcacaantggagaaggatgatctcccattcatggacacatgaattgggctgtgacccttttcacacttgggtgcctgcattatgaatccatcagtgtcgggacaccaaaagattttgccatatatctaaagagtccactggtgctgccctgatctgggctacttcatcccaggcctttgtgtaatacttaaggattcttagggaccantaatggccttgtaattccttgcctttatct

SEQ ID NO: 89373 - DNA, 464 bp, Oryza sativa
  Clone ID: PAT_MRT4530_88135C.1
gccctatctgctgcaaattctcacattagatgcaatggtctgcgtcatcaagcctatatagcgtccagtctttgcgctgagggtgtgcatccattgcgaaggatgcaagaagaatgtgaagaacgggcttcaacatgtggactgcagggtgcatatgcgaggtggacgcccggggcaacaaggggatagggacagcctgccgaaatatggacgcctattccggcatagaacttccaatagtatggctactgtttgggacgatggccgcgaggatattgctagagagggctgacatggtcaagtaccatcgggagcctgatctgctggaaggagcaggagcaggacggaccagatcttacggggatgcatggcgtgctccattgccagtgcgctgtcaaccaatgacacgtggtgtgtcgtgcttaccgcgattgttcttaaggatgataggcaggataacctgt

SEQ ID NO: 89374 - DNA, 453 bp, Oryza sativa
  Clone ID: PAT_MRT4530_88137C.1
atggggatggcgaggacgcgctttctcgctccgcgggcgggggcttcggcggcctccgccgtctccgcgaagccggcggcggtggcgccgctgtacgcggaccgcacggtcgtccgtatcgggctccccagcaagggccgcatgtccgagcaaaccctaagcctccttaaggtctcgcacatcgtctccggtcctgcttgcatctatcgaattctgtatttacgtggtgattttgttgactttgggttgttattatgctgttcatgcctcggggtgcagagttgccaattgtcagtcaggcacctcaacccgcggcagtacaccgcagatatcccgcaggtcccaaacttggaggtttggtttcagaagcccaaagatattgtccgcaaactacaatctggggatcttgaccttggcattgttggttttgacatagtcagtgaatatgggcag

SEQ ID NO: 89375 - DNA, 792 bp, Oryza sativa
  Clone ID: PAT_MRT4530_88138C.1
atggcgggtgcgtcggcgtggtacacagtcgtgagcggatccaacggcggcggcgactgtcacatgcggatttgcttcaagcacgtcgtcgacgacgacgacccggcggcgcgcggcaccggcggcgggtcgcccaggcagccgaggcggaagcacggcggaggcggcggcggtaagatcaacccctacgccgagcgcgggctggacaagttctccaccgtgctctccgagctcgaggcccgccgggacaagatcctccgccgcgtcggctccggcggcggcctcgtcatggtccgcttcgtccagtccaacggcgcgttggagcccatcatcgtcaagctccccgacgagcagcggcgccccaaggacgacgccgccgccaagaaacccaggccgtcgtctccgtcgaccgccgccgcccagcagcagggcgcctccgccgcgcgcgcgaccagggctccaccacctgcgccggcggcgagcagggtgtcgtcgttctcgtgggggcggatgcggcggccggcgtgctactggccggcggtgatggtgctgatgctggtgtgcctcgccgtgttcgggagggtgttcgccatctgctgcacctccatctggtggtacctcgcgcccaccctgctgagcaacggaggcgccggcggcgaggacgcggcgcgccgccctctgggctccccgaggaagtcgccgccgccggcgagcggcaagaagttggccggccgccgcggcacgcgcgaggttgggagctcgccgagaggccacacaaagaagggcacctga

SEQ ID NO: 89376 - DNA, 1089 bp, Oryza sativa
  Clone ID: PAT_MRT4530_88139C.1
ccaccgccgaagcgccaccactccgtgcccgacaatctcttcctcctccacaaccagccccagccaccgccgccggcgcccgcgcaatgcctcccgtttccaacgctacatagcgcggtacccttccagctccagccttcgatgcagcatccgcgcaacgcgatgaagtcaaccgcggcggcggcggcggcgcagcagcaacacctcctggacgagcttgcagcggcggcgaaggcaaccgaagtcggcaactccataggcgcgcgagagatattggcgcggctcaatcagcagcttcccccaattgggaagcctttcctccgctccgcctcctacctaaaggacgccctcctcctcgcgctcgccgacggccaccacgccgccacccgtctcacgtctccgctcgacgtcgccctgaagctcaccgcttacaaatccttctccgacctctcccccgtgctccagtttgccaacttcacggtaactcaggcgcttctggatgagatcgccagcacaaccgcgtcttgtatccgcgtcattgatttcgacctcggtgtcggcggccagtgggcttcgttcttgcaggagcttgctcaccgctgtggctctggcggtgtgtccttgccgatgttgaagctcacagccttcgtctcagccgcctcccaccacccgcttgagctgcatcttactcaggataacctctcacagtttgctgctgatcttggtattccatttgagttcaatgctattaatctcgacgcatttgatcctatggaactcattgctcctacagctgatgaggttgttgcagtaagcctcccagttggttgctcagcacgcactccactcccagctatgcttcagttggtgaaacagcttgctcctaagattgtggttgctattgactatggcagtgatcggagcgacctcccattttcccaacacttcttgaattgcttacagtcttgtctatgtcttcttgaatcacttgatgctgctggcactgatgcggatgctgtcaggtttgcacctcaaccactcagcaaccttgcggaggcacaggctgactgcctcttgaagcgggtgcag

SEQ ID NO: 89377 - DNA, 420 bp, Oryza sativa
  Clone ID: PAT_MRT4530_8813C.1
atgggctcccaactagtatgcagaagagggcttccaaaaggtgattatggcctcggattgtctatcctatcatccagagaatttggtcgggaacacgggattgatccatggcgggagcggggagcccttgttgctgacatgaagaagcgtgcaacctaccttcctggagtgctccttttcacatacaccatcaagatacaggaacctacgaacgagaacgacaactacagctattattccatcaaaaagcgcctcaggcggatgacctccttcccatactcggcggcggaatgtgaactctggttcatcaacgtcctcctacggttcttggacgcggttgtttccatctccacctccattgccgccgcgttgcctcatctcgcggtgcataaggtccttttgcttcggtgggccctgtga

SEQ ID NO: 89378 - DNA, 341 bp, Oryza sativa
  Clone ID: PAT_MRT4530_88140C.1
aactgggccgcccggcacggcacgacccaggcccggccatgcctgggccgaggttagtcgggcccgcacggctcgaccgacacgtcgagccgtgctgtgccagcccagggggtgcatacacggcctaggcacggcccaatatgactcgggctatgctaggccggcccaaaggcaccagaccggcccaccataccgagggtgtagcctaggcacggcccggctgtcgggccgggccagcacgggcacgaccccagtcgggccgtgccgtgcttgggccgggccaaaatagcgtgccttggaccggaccacgggcatcggaccatatggccatctataggtcc

SEQ ID NO: 89379 - DNA, 2454 bp, Oryza sativa
  Clone ID: PAT_MRT4530_88141C.1
ttttttttttttttttttttgccaaattatcttatctattcacaacgaaatgtttccaagaacatgaagtggccaattgagcggagagcaacaacatagtggtaagaccctagaggccatagccactggtcacacactacagagacactcataccaagattgccaaatccattaggcctacctaataaacaacagagtgtgcaacaaccatgataataatttctttgcaatgtttaaattgcaagacaaaattcatattactggagttaaacatgcctgcaaatggtgtaggaatcatgatggtcgaggcaggtgtgatcagcatcgccatgctgagacggatacaagctcgccacgctgccaatagagtgcaaggcctgctccacgcttctccacatggaagcctcggacctgcacccgcttcaagaggcagtcagcctgtgcctccgcaaggttgctgagtggttgaggtgcaaaccctgctgatgttagcactgtccgccaagcgatcgctttgtcagctctacgccgcccaagaactgcatcctccactctgggctgaatcagaaacctctcgatcttactgacagcatccgcatcagtgccagcagcatcaagtgattcaagaagacatagacaagactgtaagcaattcaagaagtgttgggaaaatgggaggtcgctccgatcactgccatagtcaatagcaaccacaatcttaggagcaagctgtttcaccaactgaagcatagctgggagtggagtgcgtgctgagcaaccaactgggaggcttactgcaacaacctcatcagctgtaggagcaatgagttccataggatcaaatgcgtcgagattaatagcattgaactcaaatggaataccaagatcagcagcaaactgtgagaggttatcctgagtaagatgcagctcaagcgggtggtgggaggcggctgagacgaaggctgtgagcttcaacatcggcaaggacacaccgccagagccacagcggtgagcaagctcctgcaagaacgaagcccactggccgccgacaccgaggtcgaaatcaatgacgcggatacaagacgcggttgtgctggcgatctcatccagaagcgcctgagttaccgtgaagttggcaaactggagcacgggggagaggtcggagaaggatttgtaagcggtgagcttcagggcgacgtcgagcggagacgtgagacgggtggcggcgtggtggccgtcggcgagcgcgaggaggagggcgtcctttaggtaggaggcggagcggaggaaaggcttcccaattgggggaagctgctgattgagccgcgccaatatctctcgcgcgcctatggagttgccgacttcggttgccttcgccgccgctgcaagctcgtccaggaggtgttgctgctgcgccgccgccgccgccgcggttgacttcatcgcgttgcgcggatgctgcatcgaaggctggagctggaagggtaccgcgctatgtagcgttggaaacgggaggcattgcgcgggcgccggcggcggtggctggggctggttgtggaggaggaagagattgtcgggcacggagtggtggcgcttcggcggtggctggagcagtggctgttgttgatggtcggagaaggaggggaacggcatgaacaaggtggaggccggcgtcggctgatgctggttgaggagtagtgtgggtgatggcaagccaaggagagggggcttcatgtcagcgccgttgtggaaaggcgcagtagtcgccggcggcggctggagcgccgcttcgggcgacaggaggccgaaagcggaggtggccttgctattgctgccgctgctgcttgtgagcgacctcccgccggaggacgacaggtcggaggcgagggcggctggcgaggagacgccaccggggtgatgctgcagcgggaacccgaacccggcggcattggcgaggagctgctgctgcgagagccccggcgcctggggttccatgtcgccgggggcagccatgatccagttcaaaaatgtctgctcctggcctgccgccgccgcggcgtcgccgagcatggcgtcccagctctcctccgcgacgaagcccacatccagggcccccggtatgggcggcagctcaccgccaccgccgccgccgtgttcgccgggggccgcccatctggtggcttcggcggcggctgcgctgctctccgaaaccgccgccacgccggtagatatagaatccgccgcgccgctaccatgggacgaagacagcgtcgatgtggagttgggcgggctcgggctccccctgcagtccagcaccgacctcggctccaccagcaacgaccccccgccgcccccgccgccgccgcccttgtcctccggccaaagcagcgccgctatgctccccgcgagctccgccgccccgttcccgtcggcactgaagggtgccgccctcat

SEQ ID NO: 89380 - DNA, 206 bp, Oryza sativa
  Clone ID: PAT_MRT4530_88142C.1
tgatttatgaaaataccccaaaacacaagaaggcatcaacatacatttttgaggattgggagccgacaattgcaaaggtggacccatattcttattgcggtaaagatccgattaatttcaaatgtaatgtaccattaaacccaaataagtcaaatttccaacacggttaaaaacacaaaggcttgtacgtacccatgttttggaaa

SEQ ID NO: 89381 - DNA, 406 bp, Oryza sativa
  unsure (1)..(406): unsure at all n locations
  Clone ID: PAT_MRT4530_88143C.1
cccacgcgtccgcggacgcgtgggcggcgctggcccggccgccagatccggcagggtcgagatgaggcgcggtggcggacgacggatctggagcctagcgcggtggcggccgacggtgggagtggaggcggncgaggcccgacggcggtagcggtctccacctccgccgcctctgccggcgatgcctccagccgcgcctccgcctccgcccgcgctagccggccgccacctatgccttcaccttcgtcgacgcctccccccgcctcccggtcgccaacgccaccgatgcctcccttacctgcaccaccgaccgcgctagccgccggatcctaccttcacgaggccgtttatgcgcagataccgcctgcttcattcccactcaccggacacctcgtaatggagtgcc

SEQ ID NO: 89382 - DNA, 409 bp, Oryza sativa
  Clone ID: PAT_MRT4530_88144C.1
cccacgcgtccgcggacgcgtgggttcgaacttaccttcctcttgcacgaggctcagatcttcttaatcttccttcttctctcatctttcgtattcaaagctgtaaatgactgcaggccgaaggtaggatccagcaatattttgctccgatcctcgcaacatatattcttgtttcaaagtggcaggtagggcgggggtggcgatgatgaatatggtgtcgagcagcagcatccaaccggggcagatacatagcatatggcagcgacgacaaggaggtgagagtagagggagatatgtggtgatgagcagcggcagcgtcaggaagagcagcagcagcaggaggagggtggtggcggttatccgggccgtgggcgacggcgcaggtgaatcgacgagcggcaaggacgaa

SEQ ID NO: 89383 - DNA, 313 bp, Oryza sativa
  Clone ID: PAT_MRT4530_88145C.1
agcagaccgagagaaccacactgaccttgaatcctacgatcgcgggagctatgccatgcggcagcatgccattttcgtgcgcactgctgccacccaagggctcaaggagcgtgttgaggccgagacgcattaccatgcaccagtcggccgtataatcgaattccacagcgtcaggcagccgcaggtcatgagctgcatgggctacatacctccggcctgtgaggagtgtgccggcaacttacccgaccatcacgtatataggctagtactaattggtcatctgtgatgctatgatgcctcccaccttcggttc

SEQ ID NO: 89384 - DNA, 120 bp, Oryza sativa
  Clone ID: PAT_MRT4530_88146C.1
tgccaccctgcactttcctgttattctcatttcaacctcgcattttttacactccgctccccatgccctgtgaaaactaattacaatccagtccttcaccggtcagcgatgcccactccg

SEQ ID NO: 89385 - DNA, 298 bp, Oryza sativa
  Clone ID: PAT_MRT4530_88147C.1
tcgagccataggtctaaaagaaaaggaggccaaagatgtggagaacaaaacatgtaataatttagagcctcgaacatcacctaggcaagtgtggagactcaaagaggtaaaagttaagagatcggtgatttcccaaagtagtgataaatccaatttgatgagagaagaatcaccggtcattagagataagtctccttcacatgatgctatgggtgttagtgcggtattcatcttgccttcgaaatcgcgcaatcaagaaagccgattttgcttggggggcaagacgtcaatatgctta

SEQ ID NO: 89386 - DNA, 979 bp, Oryza sativa
  Clone ID: PAT_MRT4530_88148C.1
ccttgcaaacttaagtgataataaatcttgtagctcagatttaataattacatagttcgttcatcttcctcctaagttagcatttggattggaaaataaactagaatctgatgaaactgagatggagcagaggtgaaatcaagaacttgatcgataaaacttggaagttttttgctaaccatcctctcgttcgtccgggagaggcttgtcatggcaggttaaggaacagtgatggatcggtgtcggcgaacacgccggttggccagtacggcccgaggtcgcagcccgacggccactcgaacgggctcgtgtccaggtgctccttcccgccgccgccgccgtcggcgacgccgagcccgagcgccaccgccggctgtgtcgctgccgccgcggtgaggtcttccggggctttcttggttgtggcttctggtgccgtcggtgcggctacgtcggcagcgtcggcggtggtgggcggcggcggcgcaggcacgggctgaggagggggcggagagacgcggcggcgcttggagttcttggagcgcttggggctcttggctggcgaagaaggcgacgacgacgatgaggcggcggcggcggcggcggaggaggaggaagtcgagctcttgcgggagccgccgccgacggggacgttgcggagggagccgcccttggtccagtagcggcggcacgacttgcagaagtgccgcggctgcgacgtgttgtagttgttgtagtagcagaacttggtgtcccgcgactcgcaccgcgggcacgggtcgcccacgccggctgccgcctcctccgccgccggcgtcagctgcgccgccgccgggtaccccttcggccggcggaggtccacgcccgcgaactgcggcgccggccgtcgccccgcctcctgcatgcgcgcccgcagaaaagctcggacgaacacgcgcgcgcgctctctcgtcggtgcagtgcaggcgagcggacgcgtggg

SEQ ID NO: 89387 - DNA, 4105 bp, Oryza sativa
  Clone ID: PAT_MRT4530_88149C.1
atgaacttccaaggcacatatccgcgcccaggtgaagaagcggacttgcatgcggtacagcgaagggacgatgagtctcttcgctcgtacattcagcggttctgtcaagtccggaacaccataccatgcatccccgcacacgcggtaatctacgcgttcagggggggcgtgcggcacaaccgcatgctcgaaaagatcgcctccaaggagccccagaccaccgcggagctttttcagctcgcggaccgtgtggctcgcaagaaagaggcctggacctggaactccaccggttccggtgtggcagcttcggccgcccccggatccgccgctcggtcagggcggcgggacaggaggaggaagaagagggagcgcccgaccggcaagtggtgcaccgtgcacaacacctccctccacgacctcgcggactgccgcgcggtcaaaagtttggctgagtggacgaggaagtgggaggaggagaggaggcaggagcgccgtgagggcaaggccccggcggctccctccggcaaccggcaaagtgaggccaagcagaaggcccccgccgaggacatcgacgatggcgacgatgacctagggttccaggagcctggggccaccatcgccaccgtcgatgggggagcatgcgctcacgcttctcgtcggagcctcaaggccatgaagcgagagcttctggccgcggcccctacccatgaggcgacgcggcgggcgcggtggtcggaggttgccctcaccttcgaccagaccaaccacccgccgtgcgttgcccggggaggacagatcgcgatggtggtttcccccaccgttagcaacgtgaagttggggcgtgtcctcatagatgggggtgcagccctcaacatcctttcccccgcagcctttgacgccatcaaggccccggggatggtgcttcggccgtcccagccgattgtaggtgtgacgcaggggcacacttggccgctaggtcatatcgacctcccggtcaccttcggtggatccgccaacttccgcacggagcgggtgaacttcgatgtggcggacctcagtctgccctacaacgcggtcctagggaggcccgcgttggtgaagttcatggtggcggtccactacgcctacctccagatgaagatgccgggccccggtggccccatctctgtccatggcgacctcaaagtcacgcttgcttgtatggagcagcgcgcggaccacctcgccgccgcgtccaagcccgagggtggcaacgagaggctcagcacctccgtcccagccgccccgaggcagcggatgatcacgtgcgacgaggtcccggaagacgcgctcgtctccttcctgcgggcaaacgccgacgtcttcgcctggagaccggcggacatgcccggggtccccagggaggtgattgagcaccgtcttgccgtgcggccgggcgcaaggccggtccggcagaaagtgcggcggcaggccccgaaacgtcaagccttcatccgcgaggaggtggcgcgacttctggaggccggattcatccgtgaggtcatccatccggagtggctggcgaacccggtcgtcgttcccaaggcgaacggcaagcttcggatgtgcatcgactacaccgaccttaacaaggcatgtcctaaggacccttaccccctgccacgcatagatcagattgtcgactccaccgcggggtgcgaccttttgtgttttctagatgcatactctggttatcatcagattcgcatggctagggaggatgaggaaaaaactgcattcattacccccattggaacttattgttatacgacaatgcctttcgggttaaagaatacaggtcctacttttcaacgtactactcgaatttctttgggtagccaaataggacgtaatgttgaggcctatgttgatgacttggttgtgaagacgcgcaaccaagagaccttactctcggatctagcggaaactttcgaaagcctccgctccgcccgcataaagctgaaccccgataagtgcgtgttcggcgtgcctgcgggcaagcttcttgggttcttggtctctgcccgaggcatcgaagccaaccccaagaagatacgagctatagagcggatgcgcccccccagcaagcttagggatgtgcagtgcttcaccggctgcatggccgccctaagtcggttcatatcgaggctgggagagaaggcactacccctatttaagctcctcaaacactccgggccgtttatctggacggaggaggctgagcgggccttcactcagttgaaggcgtacctcagttctcccccagtcctggtcgccccggagccagatgagccgctgctactttacctagcagcaaccccgcaggtggtcagcgcggcgttggttgtggagcgcgacgaggacaaccctcaccccgcgcatccccaccctgtgtcgactcgacccgggagagagcagggaggagaggcccccgagccgaacggcggcccgaggcccccgacggccggagctggccctccgcctgcttgtccgacggtgccaggcgcccccgacccccaggatggccccggggccactgcgggaaggccgcgcctgtcgccctccgaccccgaggtcgtcggcacagaagccgagtgcgccccgcgcggcctctcggacgaagagcgccctggagatgcggcccctagtgaagaagatcggccccgccgaaaggcgcatcgggtcacggtggttacgtcttaccccctcggccaaatcttgcataaccgagagggtactggacgggtggtgaaatgggcaatcgaactctctgagttcgatttgcactttgaaccacgccacgcaatcaagagccaggccctcgccgactttgtggcagagtggaccccggcccctgaagcccatctccgtccccgaggccagctcgggcccctcgcagctgcctcacaccgcctactgggtgatgcagttcgacggctccctatctcttcagggcgccggtgcgggggtcacgttgacctcgccaaacggagacgtcctcagatacctggttcgcctcgactttcgggcgaccaataatatggcggagtacgagggactccttgcgggactcagggtggcagctggactggggatccgtcgcctcctggtgttaggcgactcccagctggtcgttaaccaggcgtacctcacagataagactctacccgaggactgcgaagggagtgaacgcatccagcgcatctccaagcgctacgtgctggtggaagggaccctctatcggcgcgcggctaacggagtcctcctgaagtgcattcctcgggaacaaggcgtcgagcttcttgccgatatccatgaaggcgagtgcggagcccactccgcctcacgcaccttggttggcaaggcctttcgccagggtttctattggccgacggctctcaacgatgcggttgacctggtccggcggtgcagggcgtgccagttccacgccaagcaaacccatcagccggcccaggccctgcagaccatacctctttcatggccgtttgctgtctgggggctcgatatcctgggtccgtttaggcgggccccgggcgggttcgagtatctgtatgtcgctgtcgacaagttcactaagtggcccgaggcttacccggtcatcaagatcgataagcactccgcgcttaaattcatcaggggcattactgctcggtttgggatgcctaatcgtatcattacggataacggcacccagttcactagtgaactcttcggtgactactgcgaagatatgggcatcaagctctgcttcgcctctcccgcccaccccagaagcaatggccaagtggagcgcgccaacgcagaaatcctcaagggcctcaaaaccaaaaccttcaatatcctcaagaagcacggcgactcgtggatcgaggagttgccagcggtgctctgggcgaaccgaaccacgccaagccgagcaaccggggaaacgcctttcttcgtcgtctacggcgcggaggcggttctcccatccgagctcaccctgaggtcccctcgggccaccacatgcataagcttatattttttctcttccgtatttcaataa

SEQ ID NO: 89388 - DNA, 117 bp, Oryza sativa
  Clone ID: PAT_MRT4530_8814C.1
atgaattttcttaagctctacagaaaagcttcccgcctcgaaaacacaatcttgcaagcggaatttggaggttctaatttcaccgaatccagcaaagcaggggagaatcagatgtaa

SEQ ID NO: 89389 - DNA, 5313 bp, Oryza sativa
  Clone ID: PAT_MRT4530_88150C.1
atggccgaacgggcagtggcgcacagcctctctccgaacgctagtggtgacgacggggagcagaacccgcgccgtcgggctcgcaccccaccgtccccctctcgccgaaatcttgggcgaggggaggtgctcggagaggtcggaggatccgcgacttcgctgcccacggacgacgggggaggacggcgagacggggcgcgtcgtcgcctcgtctacggcaatggcggcacgccccagggcgcgctccaggctgcgggcgcactcctgcgtcacccgcccgtcgtccccgatccagagactccagcccgacgttggctggatgacgtggccgacttggtcatgatggcgcagcagcgcctaggtgccggcgggcggtcctccgccaccgggacctctggcgctgccgccgctggctccacgtcgtcgaggcggagggcgcggcgagcggcggccgtcgcccaccgttcgtccgccattccctcgtcaacgcctccgacccaagatgtgcgtggggggtcagatgcctggctcgatatcgagcgccggcgcgacgatcgtcgcgccgcccacgcaacggagggcgcttcctcgtccggagcgccacttcggtccgggcacgggggccggccccccgtgtccccggttggcggtgccggctgtcgagcctttgtggcgagccttcggaacgtccgttggcccccaaggttccggcccaccatcaccgaaaaatacgacggaagcttcaaccccgccgagtttctccagatctacacgactgggatcgaggccgccgggggcgacgacagggtcatggcgaatttcttccccatggccctgaagggtcaggcgcggggttggctaatgaacttgccacccgcgtcggtccactcttgggaggatttgtgccagcagttcaccacgaactttcagggcacatatccgcgcccaggcgaagatgcggacttgcacgcggtacagcgaagggacgatgagtctcttcgctcgtacgttcagcggttctgtcaagtccgcaacaccataccatgcatccccgcacacgcggtgatctacgcgttcagggggggcgtgcggcacaaccgcatgctcgagaagatcgcctccaaggagccccagaccaccgcgcagctttttgagctcgcggactgtgtggctcgcaaggaggaggcctggacctggaactcctccggctctggcgtggcagctccggccgtccccgagtccgccgctcgatcagggcggcgggacaggaggaggaagaacaggtcggcctgttccgacgacgagggtcatgtcctcgccgtcgagggcgcttcgcgggccccccgaaaggggaggcctgcgagcgacaaaaagaaggaggccggcgctcccagcagggagcgcccgactggcaagtggtgcaccgtgcacaacacctccctccacgacctcgcggactgccgcgcggtcaaaagtttggccgagcggacgaggaagtgggaggaggagaagaggcaggagcgccgtgagggcaaggccccggcgactcccgccggcaatcggcgaggtgaggccaaacagaaggcccccgccgaggacatcgacgatggcgacgatgacctggggttccaggagcccgaggccaccgtcgccaccgtcgatgggggagcgtgcgctcacgcttctcgccggagcctcaaggccatgaaacgagagcttctggccgcggcccctacccatgaggcgacgcggcgggcgtggtggtcggaggttgccctcaccttcgaccagaccgaccacccgccgtgcgttgctcggggaggacagatcgcgatggtggtatcccccaccgtctgcaatgtgaagttggggcgtgtcctcgtagacgggggtgcagctctcaacattctttcccccgcagccttcgatgccatcaaggccccggggatggtgctccggccgtcccagccgatcatcggtgtgatgccggggcacacctggccgctgggtcacatcgacctcccggtcaccttcggtggtcccgccaacttccgcacggagcgggtggacttcgatgtggcggacctcagtctgccctacaacgcggttctgggaaggcccgcgttggtgaagttcatggcggcggtccactacgcctatctccagatgaagatgccgggccccggtggccccatcaccgtccatggcgacctcaaagtcacgcttgcttgtatggagcagcgcgcggaccacctcgccgcggtgtccaagcccgcgggcggcgacgagaggctcagcacctccgtcccagccgccccgaggcagcggatgatcacgtgcgacgaggtcccggaagacgcgctcgtctccttcctgcgggcaaacgccgacgtcttcgcctggagaccggcggacatgcccggggtccccagggaggtgattgagcaccgtctcgccgtgcggccaggcgcaaggccggtccggcagaaagtgcggcggcaggccccggaacgtcaagccttcatccgcgaggaggtcatccatccggagtggctggcgaacccggtcgtcgttcccaaggcgaacggcaagcttcggatgtgcatcgactacaccgaccttaacaaggcatgtcctaaggacccttaccccctgccacgcatagatcagattgtcgactccaccgcggggtgcgaccttttgtgttttctagatgcatactctggttatcatcagattcgcatggctagggaggatgaggaaaaaactgcattcattacccccatagggacttattgttatacgacaatgcctttcgggttaaagaatgcgggtcctacttttcaacgtactactcgaatttctttgggtagccagctaggacgcaatgttgaggcctatgttgatgacttggttgtaaagacgcgcaaccaagagaccttactctcggatctagcggaaactttcgaaagtctccgctccgcccgcataaagctgaaccccgataagtgcgtgttcggcgtgcctgcgggcaagcttctcgggttcttggtctctgcccgaggcatcgaggccaaccccgagaagatacgagctatagagcggatgcgcccccccagcaagcttagagatgtgcaatgcgtcaccggctgcatggccgccctaagtcggttcatatcgaggctgggagagaaggcgctacccctatttaagctcctcaaacgatggcctcggggccactgcgggaaggccgcgcctgtcacctccgaccccgaggtcgtcggcacagaagccgagtgcgccccgcgtggcctctcggacgaggagcgccccggagatgcggcccctggcgaagaggatcggccccgccgaaaggtgcagcggcccgtctactttgttagcgaggccctccgggacgccaagacccgataccctcaggcccagaagatgctttacgctattctgatggcttcgaggaagttgcgccattatttccaggcgcatcgggtcacagtggttacgtcttaccccctcggccaaatcttgcataatcgagagggtactggacgggtggtgaaatgggcaatcgaactctctgagttcgatttgcactttgaaccacgccacgcgatcaagagccaggccctcgccgactttgtggcagagtggaccccagctcccgagcccggtgccggtgcgggggtcacgttgacctcgccgagcggagacgtcctcagatacctggtccgcctcgactttcgggcgaccaacaatatggcggagtacgagggactccttgcgggactcagagtggcagctggactggggatccgccgcctcctggtattaggcgactcccagttggtcgttaaccaggtctccaaggagtaccagtgctctgacccgcagatggacgcttacgtgcgccaggtgcagcgtatggagcaccatttcgacgggatagagcttcggcacgtgcccagacgggataacgcggtcgccgacgaactctcaaggctcgcttcctcgcgagcccagaccccaccgggcgcctttgaagaaaggcttgcccagccgtcggtgcgacccgaccccctaggggagacggacgcgcctgaatggcccccgaggcccgtcggagtccaggcctcgggacccgaggggagcgcttccagctcccctagattgattgcttggatcactgagatccaggcatacctcgcagataagactctacccgaggaccgcgaagggagtgaacgcgtccggcgcatctccaagcgctacgtgctggtgaaggggaccctctatcggcgcacggctaacggagtcctcctgaagtgcattcctcgggaacaaggcgttgagcttctcgccgatgtccatgaaggcgagtgcggagcccactccgcctcacgcaccttggttggcaaggcctttcgccagggtttctattggccgacggctctcaacgatgcggtcgacctggtccggcggcgggccccgggcgggttcgagtatctgtatgtcgctgtcgacaagttcactaagtggcccgaggcttatccggtcatcaagatcgataggcactccgcgctcaaattcatcaggggcatcactgttcggttcggggtgcctaaccgtatcattacggataacggcacccagttcactagtgagctctttggtgactactgcgaagacatgggcatcaagctctacttcgcctcccccgcccaccccagaagcaatggccaagtggagcgcgccaatgcggaaatcctcaagggcctcaaaaccaagaccttcaacatcctcaagaagcacggcgactcgtggatcgaggagctgccagcggtgctctgggcgaaccgaaccacgccaagccgagcaaccggggaaacgcctttcttcctcgtctacggcgcgaaggcggtcctcccatctgagctcaccctgaggtcccctcgggtcaccatgtattgcgaggctgatcaaggtcagcttcgccgagatgacctcgactacctggaagagcgaaggcggcgcgtggcccttcgagccgcgcgctaccagcagagcctgcggcgctaccatcagcgccacgtccgggcccgatcactctgcgtcgacgacctcgtcctacgccgcgtccaaacgcgtgctggactgagcaagctctcaccaatgtgggagggtccgtatcgagtgatcggcgtcccccggccgggctccgttcggctggccacgggcgacggcacagagctgcctaacccgtggaacatcgagcaccttcatcgcttctacccctag

SEQ ID NO: 89390 - DNA, 129 bp, Oryza sativa
  Clone ID: PAT_MRT4530_88151C.1
atgatgaaagcaccgccgccgctgtctgtcaaggtctcaaagagaaccgagactggcttttcacccggcagcctcactaaagggcatgggatggcacgacagtgcccaaaagaaggagtgatgctctaa

SEQ ID NO: 89391 - DNA, 4992 bp, Oryza sativa
  Clone ID: PAT_MRT4530_88152C.1
atggccgaacgggcagtggcgcacaacctctctccgagcgctagcggtgacgacagtgagcagaacccgcgtcgtcgagctcgtactccaccgcccccctctcgccgaagtcttaggcgggaggaggcgctcgagggggtcgaaagatccgcaacttcgccgcccacgagcgatggagaaggacggcgagacggggagcgtcgcctcctcgtctacggcgatggcagcacgccccagggcgcgctccaagctgcgggcgcgctcttgcgtcacccgcccgttgtccccgatccagagactccagcccgatgttggctggatgacgtggccgacttggtcatgacggcgcagcagcgcctaggcgccggtgggcggtcctccgccaccaaggcctctggcgctgctaccgccggctccgtgtcgtcgaggcggagggcgcggcgagcggcagccgttacccgccagtcgccgccgcgcgcacttagttcgccgccgccgccggccgtcttcagccacgccgcgccgtcgcttgcgtcgtcgccgccgcttgccgccgccgccgttaggtgcgccgtggtgaggagaacctcggccgcccgtcccccttcgccgccgaccaccggagctccgccgtcgccgtcaagccgagccgccgccgccgtcctcttcgtcgccggccatcatcgttcgtcgtttgtcgttgtggtctacatgaccgggatcgaggccgccgggggtgacgacagggtcatggcgaatttcttccccatggccctgaaaggacaggcgcggggtgaagaagcggacttgcatgcggtacagcgaagggacgatgagtctcttcgctcgtacattcagcggttctgtcaagtccgcaacaccataccatgcatccccgcacacgcggtaatctacgcgttcagggggggcgtgcggcacaaccgcatgctcgaaaagatcgcctccaaggagccccagaccaccgcggagctttttcagctcgcggaccgtgtggctcgcaaggaagaggcctggacctggaactccaccggttccggtgtggcagcttcggccgcccccggatccgccgctcggtcagggcggcgggacaggaggaggaagaagagggagcgcccgaccggcaagtggtgcaccgtgcacaacacctccctccacgacctcgcggactgccgcgcggtcaaaagtttggctgagtggacgaggaagtgggaggaggagaggaggcaggagcgccgtgagggcaaggccccggcggctccctccggcaaccggcaaagtgaggccaagcagaaggcccccgccgaggacatcgacgatggcgacgatgacctagggttccaggagcctggggccaccatcgccaccgtcgatgggggagcatgcgctcacgcttctcgtcggagcctcaaggccatgaagcgagagcttctggccgcggcccctacccatgaggcgacgcggcgggcgcggtggtcggaggttgccctcaccttcgaccagaccaaccacccgccgtgcgttgcccggggaggacagatcgcgatggtggtttcccccaccgttagcaacgtgaagttggggcgtgtcctcatagatgggggtgcagccctcaacatcctttcccccgcagcctttgacgccatcaaggccccggggatggtgcttcggccgtcccagccgattgtaggtgtgacgcaggggcacacttggccgctaggtcatatcgacctcccggtcaccttcggtggatccgccaacttccgcacggagcgggtgaacttcgatgtggcggacctcagtctgccctacaacgcggtcctagggaggcccgcgttggtgaagttcatggtggcggtccactacgcctacctccagatgaagatgccgggccccggtggccccatctctgtccatggcgacctcaaagtcacgcttgcttgtatggagcagcgcgcggaccacctcgccgccgcgtccaagcccgagggtggcaacgagaggctcagcacctccgtcccagccgccccgaggcagcggatgatcacgtgcgacgaggtcccggaagacgcgctcgtctccttcctgcgggcaaacgccgacgtcttcgcctggagaccggcggacatgcccggggtccccagggaggtgattgagcaccgtcttgccgtgcggccgggcgcaaggccggtccggcagaaagtgcggcggcaggccccgaaacgtcaagccttcatccgcgaggaggtggcgcgacttctggaggccggattcatccgtgaggtcatccatccggagtggctggcgaacccggtcgtcgttcccaaggcgaacggcaagcttcggatgtgcatcgactacaccgaccttaacaaggcatgtcctaaggacccttaccccctgccacgcatagatcagattgtcgactccaccgcgggccaaataggacgtaatgttgaggcctatgttgatgacttggttgtgaagacgcgcaaccaagagaccttactctcggatctagcggaaactttcgaaagcctccgctccgcccgcataaagctgaaccccgataagtgcgtgttcggcgtgcctgcgggcaagcttcttgggttcttggtctctgcccgaggcatcgaagccaaccccaagaagatacgagctatagagcggatgcgcccccccagcaagcttagggatgtgcagtgcttcaccggctgcatggccgccctaagtcggttcatatcgaggctgggagagaaggcactacccctatttaagctcctcaaacactccgggccgtttatctggacggaggaggctgagcgggccttcactcagttgaaggcgtacctcagttctcccccagtcctggtcgccccggagccagatgagccgctgctactttacctagcagcaaccccgcaggtggtcagcgcggcgttggttgtggagcgcgacgaggacaaccctcaccccgcgcatccccaccctgtgtcgactcgacccgggagagagcagggaggagaggcccccgagccgaacggcggcccgaggcccccgacggccggagctggccctccgcctgcttgtccgacggtgccaggcgcccccgacccccaggatggccccggggccactgcgggaaggccgcgcctgtcgccctccgaccccgaggtcgtcggcacagaagccgagtgcgccccgcgcggcctctcggacgaagagcgccctggagatgcggcccctagtgaagaagatcggccccgccgaaaggcgcatcgggtcacggtggttacgtcttaccccctcggccaaatcttgcataaccgagagggtactggacgggtggtgaaatgggcaatcgaactctctgagttcgatttgcactttgaaccacgccacgcaatcaagagccaggccctcgccgactttgtggcagagtggaccccggcccctgagcccatctccgtccccgaggccagctcgggcccctcgcagctgcctcacaccgcctactgggtgatgcagttcgacggctccctatctcttcagggcgccggtgcgggggtcacgttgacctcgccaaacggagacgtcctcagatacctggttcgcctcgactttcgggcgaccaataatatggcggagtacgagggactccttgcgggactcagggtggcagctggactggggatccgtcgcctcctggtgttaggcgactcccagctggtcgttaaccaggtctgtaaggagtaccagtgctctgacccgcagatggacgcttacgtgcgccaagtgcggcgtatggagcgccattttgacgggatagagcttcggcacgtgcccagacgggataacgcgctgtcggcgcggcccgaccccctaggggagacggacgcgcctgaacggcccccgaggcctgtcggagtccaggcctcgggacccgaggggagtgctcccagctcccttagattgattgcttggatcactgagatccaggcgtacctcacagataagactctacccgaggactgcgaagggagtgaacgcatccagcgcatctccaagcgctacgtgctggtggaagggaccctctatcggcgcgcggctaacggagtcctcctgaagtgcattcctcgggaacaaggcgtcgagcttcttgccgatatccatgaaggcgagtgcggagcccactccgcctcacgcaccttggttggcaaggcctttcgccagggtttctattggccgacggctctcaacgatgcggttgacctggtccggcggtgcagggcgtgccagttccacgccaagcaaacccatcagccggcccaggccctgcagaccatacctctttcatggccgtttgctgtctgggggctcgatatcctgggtccgtttaggcgggccccgggcgggttcgagtatctgtatgtcgctgtcgacaagttcactaagtggcccgaggcttacccggtcatcaagatcgataagcactccgcgcttaaattcatcaggggcattactgctcggtttgggatgcctaatcgtatcattacggataacggcacccagttcactagtgaactcttcggtgactactgcgaagatatgggcatcaagctctgcttcgcctctcccgcccaccccagaagcaatggccaagtggagcgcgccaacgcagaaatcctcaagggcctcaaaaccaaaaccttcaatatcctcaagaagcacggcgactcgtggatcgaggagttgccagcggtgctctgggcgaaccgaaccacgccaagccgagcaaccggggaaacgcctttcttcgtcgtctacggcgcggaggcggttctcccatccgagctcaccctgagtctcgacacgcggatctccccaggcactagccccgacccgcgccatttgaggctaggacctgggcacgagccctcgttcaagccaagacacagaaggactgcggcatag

SEQ ID NO: 89392 - DNA, 282 bp, Oryza sativa
  Clone ID: PAT_MRT4530_88153C.1
atgaacatgatgatagcttatttgatttcagagccggctctgggctccggcaagaatctccgccaatccgcctccagcgccctctacggcgcctccgcaagtccgccgcacgccgggccgccgccgatccctgcagcattcagcccttcacagctttgtctgttcgccatcgaccggccgacacaacatgaatatctgcctcaacttccagagtgtctgcgggtttcaatttatatgtactatcgtgctgccgtgctgcaaccatattgtccattgaattga

SEQ ID NO: 89393 - DNA, 5422 bp, Oryza sativa
  Clone ID: PAT_MRT4530_88154C.1
tcatcctctttcgtgtgcgccaagcttctcccgctcagcccaatggccgaacgggcagtggcgcacaacctctctccgagcgctagcggtgacgacggggagtagaacctgcgccgtcgagctcgtactccaccgcccccctcgcaccgaagtcttgggcgggaggaggcgctcgagggggtcgaaagatccgcgactttgccgcccacgggcgatggagaaggacggcgagacggggagcgtcgcctcctcgtctatggcgatggcagcacgccccagggcgcgctccaggttggtcatgacggcgcagcagcgcctaggcgccggcgggcggtcctccgccaccaaggcctctggcactgctaccgccggctctgtgtcatcgaggcggagggcgcggcgagcggcggccgttgcccgccgttcgtccgccattccctcgtcaatgcctccgacccaagaagatgtgcgtggggggccagatgcccgcctcgatatcgagcgccggcgcaatggtcgtcgtgctgcccacgcaacggagggcgcttcctcgtccggagcgccactccgatccgggcatgggggccagcctcccgtgtccccggttggtggtgccggctgtcgagcctttgtggcgagccttcggaacgtccgttggcccccaaggttccggcccaccatcaccgaaaaatacgacggaagtgtcaaccccgccgagtttctccagatctacacgaccgggatcgaggccgccgggggtgacgacagggtcatggcgaatttctttcccatggccctgaagggacaggcgcggggttggctaatgaacttgccacccgcgtcggtccactcttgggaggatttgtggcagcagttcaccacgaacttccagggcacatatccgcgcccaggcgaagaagcggacttgcatgcggtacagcgaagggacgatgagtctcttcgctcgtacattcagcggttctgtcaagtccgcaacaccataccgtgcatccccgctcacgcggtgatctacgcgttcagagggggtgtgcggcacaaccgcatgctcgagaagatcgcctccaaggagccccagaccaccgcggagctttttcagctcgcggactgtgtggctcgcaaggaggaggcctggacctggaactcctccggttccggtgtggcagctccggccgcccccgggtccgccgctcggtcagggcggcgggacaggaggaggaagaagaggtcggcccattccgacgacgagggtcacgtcctcgccgtcgagggtgcttcgcaggccacccgaaatgggaggcctgcgagcgacaaaaagaaggaggccggcgctcccagcagggaacgcccgaccggcaagtggtgttccgtgcacaacacctccctccacaacctcgcggactgccgcgcagtcaaaagtttggctgagcgaacgaggaagtgggaggaggagaggaggcaggagcgccgtgagggcaaggccccggcggctcccgccggcaaccggcgaagtgaggccaagcagaaggccccagccgaggacatcgacgatggcgacgatgacctggggttccaggagcctggggccaccatcgccaccgtcgatgggggagcgtgcgctcacgcttctcgtcggagcctcaaggccatgaagcgagagcttctggccgcggcccctacccatgaggcgacgcggcgggcgcggtggtcggaggttgccctcaccttcgaccagaccgaccacccgccgtacgttgcccggggaggacagatcgcgatggtggtttcccccaccgtttgcaatgtgaagttggggcgtgtcctcatagacgggggtgcagccctcaacatcctttcccccacagcctttgacgccatcaaggccccggggatggtgctccggccgtcccagccgatcatcggtgtgacgccggggcacacttggccgctaggtcatatcgacctcccggtcaccttcggtggttccgccaacttccgcacggagcgggtgaacttcgatgtggcggacctcagtctgccctacaacgcggtcctggggaggcccgcgttggtgaagttcatggcggcggtccactacgcctatctccagatgaagatgccgggccctgatggccccatctctgtccatggcgacctcaaagtcgcgcttgcttgtatggagcagcgcgcggaccacctcgccgtggcgtccaagcccgagggtggcgacgagaggctcagcacctccgtcccagccgccccgaggcagcggatgatcacgtgcgacgaggtcccggaagacgcgctcgtctccttcctgcgggcaaacgccgacgtcttcgcctggagaccggcggacatgcccggggtccccagggaggtgattaagcaccgtctcgccgtgcggccgggcgcaaggccggtccggcagaaagtgcggcggcaggccccggaacgtcaagccttcatccgcgaggaggtggcgcgacttctggaggccggattcatccgagaggttatccatccggagtggctggcgaacccggtcgtcgttcccaaggcgaacggcaagcttcggatgtgcatcgactacaccgaccttaacaaggcatgtcctaaggacccttaccccctgcctcgcatagatcagattgtcgactccaccgcggggtgcgaccttttgtgttttctagatgcatactctggttatcatcagattcgcatggctagggaggatgaggaaaaaactgcattcataacccccataggaacttattgttatacgacaatgcctttcgggctaaacaatgcaggtcctacttttcaacgtactactcaaatttctttgggtagccaaataggacgtaatgttgaggcctatgttgatgacttggttgtgaaaacgcgcaaccaagagaccttactctcggatctagcggaaactttcgaaagtctccgctccgcccgcataaagctgaaccccgaaaagtgtgtgttcggtgtgcctgcgggcaagcttctcgggttcttggtctgtgcccgaggcatcgaggccaaccccgagaagatacgagctatagagcggatgcgccccccaagtaagcttagggatgtgcaatgcgtcaccggctgcatggccgccttaagtcgattcatatcgaggctgggagagaaggcactacccctatttaggctcctcaaacgccccgggccgttcatctggacggaggaggctgagcgggccttcactcagctgaaggcatacctcagttctcccccagtcctggtcgccccagagccagatgagccgttgctactctacctggcggcaaccccgcaagtggccagcgcggcgttggtcgtggagcgcgacgaggacaaccctcactccgcgcatccccaccctatgtcgactcgacccgggagagagcagggacgtgaggcccccgagccgaacggtggcccaaggcccccgacggccggagctggccctctgcccgcttgtccgacggtgccaggcgcccccgacccccaggacggcctcggggccactgcgggaaggccgcgcctatcgccctctgaccccgaggtcgtcggcacagaagccgagtgcgccccgcgcggcctctcggacgaagagcgccctggagatgcggcccctagcgaagaggatcggccccgccgaaaggtgcagcggcccgtctacttcgttagcgaggccctccgggacgctaagacccgataccctcaggcccagaagatgctttacgctattctgatggcttcgaggaagttgcgccattattttcaggcgcatcgggtcacggtggttacgtcttaccccctcggccaaatcttgcataaccgagagggtactggatgggtggtgaaatgggcaatcgaactctctgaattcgatttgcactttgaaccatgccacgcgatcaagagccaggccctcgccgactttgtggcagagtggacaccagctcctgagcccggcgccggtgcgggggtcacgttgacctcgccgagcggagacgtcctcagatacctggttcgcctcgactttcgggcgaccaataatatggcggagtacgagggactccttgcgggactcagggtggcagctggactggggatccgccgcctcctggtgttaggcgactcccagctggttgttaaccaggtctgtaaggagtaccggtgctctgacccgcagatggacgcttacgtgcgccaagtgcggcgtatggagcgccattttgacgggatagagcttcggcacgtgcccagacgggataacgcggtcgccgacgaactctcgaggctcgcttcctcgcgagcccagaccccaccgggcgcctttgaagaaaggcttgcccagccgtcggcgcggcccgatcccctaggggagacggacgcgcctgaacggcccccgaggtctgtcggagtccaggcctcgggacccgaggggagcgctcccagctcccttagattgattgcttggatcgctgagatccaggcgtacctcgcagataagactctacccgaggaccgcgaagggagtgaacgcgtccagcgcatctccaagcgctacgtgctggtggaagggaccctctatcggcgcgcggctaacggagtcctcctgaagtgcattcttcgggaacaaggcgtcgagcttcttgccgatatccatgaaggcgagcgggccccgggcgggttcgagtatctgtatgtcgctgtcgacaagttcactaagtggcccgaggcttacccggtcatcaagatcgataagcactccgcgcttaaattcatcaggggcatcactgctcggtttggggtgcctaatcgtatcattacggataacggcacccagttcactagtgaactcttcggtgactactgcgaagatatgggcatcaagctctgcttcgcctcccccgcccaccctagaagcaatggccaagtggagcgcgccaacgcagaaatcctcaagggcctcaaaaccaagaccttcaacatcctcaagaagcacggcgactcgtggatcgaggagttgccagcggtgctctgggcgaaccgaaccacgccaagccgagcaaccggggaaacgcctttcttcctcgtctacggcgcggaggcgattctcccatccgagctcaccctgaggtcccctcgggcaaccatgtactgcgaggctgatcaagatcagcttcgcagagatgacctcgactacttggaagagcgaaggcggcgcgcggccctccgagccgcgcgctaccagcagagcctgcggcgctaccatcagcgccacgtccgggcccgatcgctctgcgtcgacgacctcgtcctacgccgcgtccaaacgcgtgctggactgagcaagctctcaccaatgtga

SEQ ID NO: 89394 - DNA, 412 bp, Oryza sativa
  Clone ID: PAT_MRT4530_88155C.1
aaggataaagagaggctttttaattctttatcaaagaccggcccgcaaaagcatacaaacaattggttgcaatttattaattgacattttttttatccctaggccgacctaaaaggattctgccgccttactaaacccattggggatctcctggtttggattggccggaaggccccgccctcatctcctctattttccctgaccctttgaccctatcatcttgaaaatggatgtgccttcgttagaacctcctttgggaaatgcacgggacatgaacctttttcctgaacggggggctcccgtacaatttggattggaccggaatgagctgtcagcacaacctttgcttggggccttctttcaagcgcctaggggtgcggctaataccacacctgccgctggaaaaccgccc

SEQ ID NO: 89395 - DNA, 5664 bp, Oryza sativa
  Clone ID: PAT_MRT4530_88156C.1
atggcagttaaggaccgagggggttatgcgaagggtcctgtcacggcctctttccgacggcgagacggggcgcgtcgccgcctcgtctacggcgatggcggcacgccccagggcgcgctccaggctgcgggcgcgctcctgcgtcacccgcccgtcgtccccgatccagagactccagcccgacgttggctggatgacgtggccgacttggtcatgacggcgcagcagcgcctaagcgccggcgggcggtcctccgccaccgagacctctggcgctgccgccgccggctccaggtcgtcgaggcggagggcgcggcgagcggcggccgttacccgccgttcgtccgccattccctcatcaatgcctccgacccaagaagatgtgcgtggggggccggatgcccgcctcgatatcgagcgccggcgcgactctcgtcacgccgcccacgcaacggagggcgcttcctcgtccgaagcgccacttcggtccgggcacgggggccggccccccgtgtccccggttggcggtgctggctgtcgagcctttgtggcgagccttcggaacgtccgttggcccccaaggttccggcccaccatcaccgaaaaatacgacggaagcgtcaaccccgccgagtttctccagatctacacgactgggatcgaggccgccgggggtgatgacagggtcatggcgaatttcttccccatggccctgaagggacaggcgcggggttggctaatgaacttgccacccgcgtcggtccactcttgggaggatctgtgccagcagttcaccacgaacttccagggcacatatccgcgcccaggcgaagaagcggacttgcatgcggtacagcgaggggacgatgagtctcttcgctcgtacattcaacggttctgtcaagtccgcaacactataccgtgcatccccgcacacgcggtgatctacgcgttcagggggggcgtgcggcacaaccgcatgctcgagaagatcgcctccaaggagccccagaccaccgcgcagctttttgagctcgcggaccgtgtggctcgcaaggaggaggcctggacctggaactcctccggttctggtgtggcagctccggtcgcccccgggtccgccgcttggtcagagcggcgggacaggaggaggaagaagaggtcggcccgtcccgacgacgagggtcatgtcctcgccgtcgagggcgcctcgcgggccccccgaaaggggaggcctgcgagcgacaaaaagaaggaggccggcgctcccagcagggagcgcccgacgggcaagtggtgcaccgtgcacaacacctccctccacgacctcgcggactgccgcgcagtcaaaagtttggctgagcggacgaggaagtgggagaaggagaagaggcaggagcgccgtgagggcaaggccccggcggctcccgccggcaaccggcgaggtgaggccaagcagaaggcccccgccgaggacatcgacgatggcgacgatgacctggggttccaggagcctgaggccaccgtcgccaccgtcgatgggggagcgtgcgctcacgcttctcgccggagcctcaaggccatgaagcgagagcttctggccgcggcccctacccatgaggcgactcggcgggcgcggtggtcggaggttgccctcaccttcgaccagaccgaccacccgccgtgcgttgcccggggaggacagatcgcgatggtggtttcccccaccgtttgcaatgtgaagttggggcgtgtcctcatagacgggggtgcagccctcaacatcctttcccccgcagcctttgacgccatcaaggccccggggatggtgctccggccgtcccagccgatcatcggtgtgacgccggggcacacctggccgctgggtcatatcgacctcccggtcaccttcggtggttccgccaacttccgcacggagcgggtggacttcgatgtggcggacctcagtctgccctacaacgcggtcctagggaggcccgcgttggtgaagttcatggcggcggtccactacgcctatctccagatgaagatgccgggccccggtggccccatcaccgtccatggcgacctcaaagtcgcgcttgcttgtatggagcagcgcgcggaccacctcgccgcggcgtccaagcccgcgggtggagacgagaggctcagcacctccgtcccggccgccccaaggcggcggatggtcacgtgcgacaaggtcccggaagacgcgctcgtctccttcctgcgggcaaacgccgacgtctttgcctggagaccggcggacatgcccggggtccccagggaggtgattgagcaccgtctcgccgtgcggccgggtgcaaggccggtccagcagaaagtgcggcggcaggccccggaacgtcaagccttcatccgcgaggaggtggcgcgacttctggaggccggattcatacgtgaggtcatccatccggagtggctggcgaacccggtcgtcgttcccaaggcgaacggcaagcttcggatgtgcatcgactacaccgaccttaacaaggcatgtcctaaggacccttaccccctgccacgcatagatcagattgtcgactccaccgtggggtgcgaccttttgtgttttctagatgcatactctggttatcatcagattcgcatggctagggaggatgaggaaaaaactgcgttcattacccccataggaacttattgttatacgacaatgcctttcgggttaaagaatgcaggtcctacttttcaacgtactactcgaatttctttgggtagcaaattaggacgtaatgttgaggcctatgttgatgacttggttgtgaaaacgcgcaaccaagagaccttactctcgaatctagcggaaactttcgaaagtctccgctccgcccgcataaagctgaaccccgataagtgcgtgttcggcgtgcctgcgggcaagcttctcgggttcttggtctctgcccgaggcatcgaggccaaccccgagaagatacgagctatagagcggatgcgcccccccagcaagcttaaggatgtgcagtgcgtcaccggctgcatggccgccttaggtcggttcatatcaaggctgggagagaaggcgctacccctatttaagctcctcaaacgctccgggccgtttacctggatggaggaggctgagagggccttcactcagttgaaggcgtacctcagttctcccccagtcctggtcgccccggagccagatgagccgttgctactctacctggcggcaaccccgcaggtggtcagcgcggcgttggtcgtggagcgcgacgaggagaaccctcactccgcgcatccccaccctgtgtcgactcgacccgggagagagcagggaggagaggcccccgagccgaacggcggcccgaggcccccaacggccggagttggccctccgcctgcttgtccgacggtgccaggcgcccccgacccccaggatggccccggggccactgcgggaaggccgcgcctgtcgcctctgaccccgaggtcgtcggcacagaagccgagtgcgccccgcgcggcctctcggacgaagagcgccctggagatgcggccccaggcgaagaggatcggccccgccgaaaggaagttgcgccattatttccaggcgtatcgggtcacggtggttatgtcttaccccctcggccgaatcttgcataaccgagagggtactggacgggtggtgagatgggcaatcgaactctctgaattcgatttgcgctttgaaccacgccacgcgatcaagagccaggccctcgccgactttgtggcggagtggaccccagctcccgagcccgtccccgctcccgaggccagctcgggcccctcgcagctgccccacaccgcctactgggtgatgcagttcgacggctccctgtctcttcagggcgccggtgcgggggtcacgttgacctcgccgagcggagacgtcctcagatacctggtccgcctcgactttcgggcgaccaacaatatggcggagtacgagggactccttgcgggactcagagtggcagctggactggggatccgccgcctcctggtgttaggcgactcccagttggtcgttaaccaggtctccaaggagtaccgatgctctgacccgcagatggacgcttacgtgcgccaggtgcggcgtatggagcgccatttcgacttgatagagcttcggcacgtgcccagacgggataacgcggtcgccgacgaactctcaaggctcgcttcctcgcgagcccagaccccaccgggcgcctttgaagaaaggcttgcccagccgtcggcgcgacccgaccccctaggggagacggacgcgcctgaacggcccccgaggcccgtcggagtccaggcctcgggacccgaggggagcgctcccagctcccctaggttgattgcttggatcactgagatccaggcgtacctcgcagatatgactctacccgaggaccgcgaagggagtgaacgcgtccggcgcatctccaagcgctacgtgctggtggaggggaccctctatcggtgcgcggctaacggagtcctcctgaagtgcattcctcgggaacaaggcgtcgagcttctcgccgatatccatgaaggcgagtgcggagcccactccgcctcacgcaccttggttggcaaggcctttcgccagggtttctattggccaacggctctcaacgatgcggtcgacctggtccggcggtgcagggcgtgccagttccacgccaggcaaacccatcagccggcccaggccctgcagaccatacctctttcgtggccgtttgctgtctgggggctcgatatcctgggtccgttcaggcgggccccgggcgggttcgagtatctgtatgtcgctgtcgacaagttcactaagtggcccgaggcttatccggtcattaagatcgataagcactccgcgcttaaattcatcaggggcatcactgctcggtttggggtgcctaaccgtatcattacggataacggcacccagttcactagtgagctcttcggtgactactgcgaagacatgagcatcaagctctgcttcgcctcccccgcccaccccagaagcaatggccaagtggagcgcgccaacgcggaaatcctcaagggcctcaaaaccaagaccttgaacatcctcaagaagcacggcgactcgtggatcgaggagctgccagcggtgctctgggcgaaccgaaccacgccaagcagagcaaccggggaaacgcctttcttcctcgtctacggcgcggaggcggtcctcccatctgagctcaccctgaggtcccctcgggtcaccatgtattgcgaggctgatcaagatcatcttcaccgagacgacctcgactatttggaagaacgaagacggcgcgcggcccttcgagccgcgcgctaccagcagagcctgcggcgctaccatcagcgccacgtccgggccctatcactctgcgtcgacgacctcgtcctacgccgcgtccaaacgcgtgctggactgagcaagctctcaccaatgtgggagggtccgtatcgagtgatcggcgtcccccggccgggctccgttcggctggccacgggcgacggcacagagctgcttaacccgtggaacatcgaacaccttcgtcgcttctacccctag

SEQ ID NO: 89396 - DNA, 5487 bp, Oryza sativa
  Clone ID: PAT_MRT4530_88157C.1
atggccgaacgggcagtggcgcacaacctctctccgagcgctagcggtgacgacggggagcagaacccgcgccgtcgagctcgtactccaccgtccccctctcgccgaagtcttgggcgggaggaggcgctcgagagggtcgaaagatccgcgacttcgccgcctgcgggcgatggagaaggacggcgagacggggagcgtcgcctcctcgtctacggcgatggcagcacgccccagagcgcgctccaggctgcgggcgcactcctgcgtcacccgcccgtcgtccccgatccagagactccagcccgacgttggctggatgacatggccgacttggtcatgacggcgccgcagcgcctaggcgccggcgggcggtcctccgccaccaaggcctctggcgctgctaccgtcggctccgtgtcgtcaaggcggagggcgcggcgagcggcggccgttacccgccgttcgtccgccattccctcgtcaacgcctccgacccaagaagatgtgcgtggggggccagatgcccgcctcaatatcgagcgccggcgcaatggtcgtcatgctgcccacgcaacggagggcgcttcctcgtccggagcgccacttcggtccgggcacgggggccagccccccgtgtccccggttggtggtgccggctgtcgagcctttgtggcgagccttcggaacgtccgttggcccccaaggttccggcccaccatcaccgaaaaatacgacggaagcgtcaaccccgccgagtttctccagatctacacgaccgggatcgaggccgccgggggtgacgacagggtcatggcgaatttcttccctatggccctgaaaggtcaggcgcggggttggctaatgaacttgccacccgcgtcggttcactcttgggaggatttgtgccagcagttcaccatgaacttccagggcacatatccgcgcccaggtgaagaagcggacttgcatgcggtacagcgaagggacgatgagtctcttcgctcgtacattcagcggttttgtcaagtccgcaacaccataccatgcatccccgcacacgcggtgatctacgcattcagggggggcgtgcggcacaaccgcatgctcgagaagatcgcctccaaggagccccagaccaccgcggagcttttccagctcgcggactgtgtggctcgcaaggaggaggcctggacctggaactcctccggttccgatgtggcagctccggccgcccccgggtccgccgctcggtcagggcggcgggacaggaggaggaagaagaggtcggcccattccgacgacgagggtcacgtcctcgccgtcgagggcgcttcgcgggccacccgaaaggggaggcctgcgagcgacaaaaagaaggaggtcggcgctcccagcagtgagcgcccgaccggcaagtggtgttccgtgcacaacacctccctccacgacctcgcggactgccgcgcggtcaaaagtttggctgagcggacgaggaagtgggaggaggagaggaggcaggagcgctgtgagggcaaggccccggcggctcccacaggcaaccgtcgaggtgaggccaagcagaaggccaccgccgaggacgtcgacgatggcgacgatgacctggggttccaggagcctgaggccaccgtcgccaccgtcgatgggggagcgtgcgctcacgcttctcgccggagcctcaaggccatgaagcgagagcttctggccacggcccctacccatgaggcgacgcggcgggcgcggtggtcggaggttgccctcaccttcgaccagaccgaccacccgccgtgcgttgcccggggaggacagatcgcgatggtggtttcccccaccgtttgcaatgtgaagttggggcgtgtccttatagacgggggtgcagccctcaacatcctttcccccgcagcctttgacgctatcaaggccccggggatggtgctccggccgtcccagccgatcatcggtgtgacgccggggcacacttggccgctaggtcatatcgaccttccggtcaccttcggtggttctgccaacttccgcatggagcgggtgaactttgatgtggcggacctcagtctgccctacaacgcggtcctggggaggcccgcgttggtgaagttcatggcggcggtccactacgcctatctccagatgaagatgccgggccccggtggccccatcaccgtccatggcgacctcaaagtcacgcttgcttgtatggagcagcgcgcggaccacctcgccgcggcgtccaagcccgcgggtggcgacgagaggctcagcacctccgtcccagccgccccgaagcagcggatgatcacgtgcgacgaggtcccggaagacgcgctcgtctccttcctgcgggcaaacgccgacgtcttcgactggagaccggcggacatgcccggggtcctcagggaggtgattgagcaccgtctcgccgtgcggccgggcgcaaggccggtccggcagaaagtgcggcggcaggccccgaaacgtcaagccttcatctgcgaggaggtggcgcgacttctggaggccggattcattcgtgaggtcatccatccggagtggctggcgaacccggtcgtcgttcccaaggcgaacggcaagcttcggatgtgcatcgactacaccgaccttaacaaggcatgtcctaaggacccttaccccctgccacgcatagatcagattgtcgactccaccgcagggtgcgaccttttgtgttttctagatgcatactctggttatcatcagattcgcatggctagggaggatgaggaaaaaactgcattcattacccccataggaacttattgttatacgacaatgcctttcgggttaaagaatgcaggtcctacttttcaacgtactactcgaatttctttgggtagccaaataggacgtaatgttgaggcctatgttgatgacttggttgtgaaaacgcgcaaccaagagaccttactctcggatctagcggaaactttcgaaagtctccgctccgcccgcataaagctgaaccccgacaagtgcgtgttcggcgtgcctgcgggcaagcttctcgggttcttggtctctgcccgaggcatcgaggccaaccccgagaagatacgagctatagagcggatgcgcccccccaacaagcttagggatgtgcaatgcgtcaccggctgcatggccgccctaagtcggttcatatcgaggctgggagagaaggcgctacccctatttaagctcctcaaacgctccgggccgtttacctggacggaggaggctgagcgggtcctcactcagttgaaggcgtacctcagttctccccctgtcctggtcgccccggagccagatgagccgttgctactctacctggcggcaaccccgcaggtggtcagcgcggcgttggtcgtggagcgcgacgaggacaaccctcactccacgcatccccaccctgtgtcgactcgacccgagaaagagcagggaggagaggcccccgagccgaacggtggcctaaggcccccgacggccggagctggccctccgcctgcttgtccgacggtgccaggcgcccccgacccccaggacggcctcggggccactgcgcgagggccgcgcctgtcgccctttgaccccgaggtcgtcggcacagaagccgagtgctacccgcgtgccctctcggacgaagagcgccctggagatacggcccctagcgaagaggatcggccccgccgaaaggcgcatcgggtcacggtggttacgtcttaccccctcggccaaatcttgcataaccgagagggtactggacgggtggtgaaatgggcaatcgaactctctgaattcgatctgcgctttgaaccacgccacgcgatcaagagccaggccctcgccgactttgtggcggagtggaccccagctcccgagcccgtctccgcccccgaggccacctcgggcccctcgcagctgcctcacaccgcctactgggtgatgcagttcgacggctccttgtctcttcagggcgccggtgcgggggtcacgttgacctcaccgagcggagacgtcctcagatacctggtccgcctcgactttcgggcgaccaacaatatggcggagtacgagggactccttgcgggactcagggtggcagctggactggggatccgccgcctcctggtgttaggcgactcccagctggtcgttaaccagatctgtaaggagtaccggtgctctgacccgcagatggacgcttacgtgcgccaggcgtacctcgcagataagactctacccgaggaccgcgaagagagtgaacgcgtccagcgcatctccaagcgctacgtgctagtggaagggaccctctatcggcgcgcggctaacggagtcctcctgaagtgcattcctcgggaacaaggcgtcgagcttctcgccgatatccatgaaggcgagtgcggagcccactccgcctcacgcaccttggttggcaaggcctttcgccagggtttctattggccgacggctctcaacgatgcggtcgacctggtccggtggtgcagggcgtgccagttccacgccaggcaaacccatcagccggcccaggccctgcagaccatacctctttcgtggccatttgctgtctgggggctcgatatcctgggtccgtttaggcgggccccgggcgggttcgagtatctgtatgtcgctgtcgacaagttcactaagtggcccgaggcttatccggtcatcaagatcgataagcactccgcgcttaaattcatcaggggcatcactgctcggtttggggtgcctaaccgtatcattacggataacggcacccagttcactagtgagctcttcggtgactactgcgaagacatgggcatcaagctctgcttcgcctcccccgcccacctcagaagcaatgaccaagtggagcgcgccaacgcggaaatcctcaagggcctcaaaaccaagaccttcaatatcctcaagaagcacggtgactcgtggattgaggagctgccagcggtgctctgggcgaaccgaaccacgccaagccgagcaaccggggagacgcctttcttcctcgtctacggcgcggaggcggtcctcccatctgagctcaccctgaggtcccatcgggccaccatgtgttgcgaggctgatcaagatcagcttcgcagagacgacctcgactacttggaagagcgaaggcggcgcgcggccctccgagccgcgcgctaccagcagagcctgcggcgctaccatcagcgccacatccgggcccgatcactctgcgtcgacgacctcgtcctacgccgcgtccaaacgcgtgctgaactgagcaagctctcaccaatgtgggagggtccgtatcgagtgatcggcgtcccccggccgggctccgttcggctggccacgggcgacggcacagagctgcctaacccgtggaacatcgaacaccttcgtcgcttctacccctag

SEQ ID NO: 89397 - DNA, 4605 bp, Oryza sativa
  Clone ID: PAT_MRT4530_88158C.1
atgacggcgcagcagcgcctagacgccggcgggcggtcctccgccaccaaggcctctggcgctgctaccgccggctccgtgtcgtcgaggcggagggcgcggcgagcggcggccgtcaactgccgtttgtccgccattccctcgtcaacgcctccgacccaagaagatgtgcgtggggggctggatgcccgcctcaatatcgagcgccggcgcaatggtcgtcgtgctgcccatgcaacggagggcgcttcctcgtccggagcgccacttcggcccgggcacgggggccacccccccgtgtccccggttggcggtgtcggctgtcgagcctttgtggcgagtcttcggaacatccgttggcccccaaggttccggcctaccatcaccgaaaaatacgacgggagcgtcaaccccgccatgtttctccaggtctacacgaccgggatcgaggccgccgggggtgacgacagggtcatggcgaatttcttccccatggccctgaaaggtcaggcgcggggttggctaatgaacttgccacccgcgtcggtccactcttgggaggatttgtgccagcagttcactatgaacttccagggcacatatccacgcccgggtgaagaagccgacttgcatgcggtacagcgaagggacgatgagtctcttcgctcgtacattcagcggttctgtcaagtccgcaacaccataccatgcatcctcgcacacacggtgatctacgcgttcagggggggtgtgcggcataaccgcatgctcgagaagattgcctccaaggagccccagaccaccgcggagctttttcagctcgcggaccgtgtggctcgcaaggaggaggcctggacctggaactcctccggttccggtgtggcagctccggccgcccccggatccgccgctcggtcagggcgacgggacaggaggaggaagaagaggtcggcccattccgacgacgagggtcacgtcctcgccgttgagggcgcttcgcgggccacccgaaaggggaggcctgcgagcgacaaaaagaaggaggccggcgctcccagcagggagcgcccgaccggcaagtggtgttccgtgcacaacacctccctccatgacctcgcggattgccgcgcggtcaaaagtttggctgagcggacgaggaagtgggaggaggagaggaggcaggagcgccgtgagggcaaggccccggcggctcccgccggcaaccggcgaggtgaggccaagcagaaggccaccgccgaggacgtcgacgatggtgacgatgacctggggttccaggagcctagggccaccgtcgccaccgtcgatgggggagcgtgcgctcacgcttctcgccggagcctcaaggccttgaagcgagagcttctggccgcggcccccacccatgaggcgacgtggcgggcgcgatggtcggaggtggccctcaccttcgaccagaccgaccacccgccgtgcgttgcccggggaggacagatcgcgatggtggtttcccccaccgtttccaatgtgaagttggggcgtgtcctcatagatgggggtgcagccctcaacatcctttcccctgcagcctttgacgccatcaaggccccggggatggtgctccggccatcccagccgatcatcggtgtgacgccggggcacacttggccgctgggtcatatcgaccttccggtcactttcggtggttccgccaacttctgcacggagcgggtgaacttcgatgtggcggacctcagtctgccctacaacgtggtcctggggaggcccgcgttggtgaagttcatggcggcggtccactacgcctatcttcagatgaagatgccgggccccggtggccccatcaccgtccatggcgacctcaaagtcgcgcttgcttgtatggagcagcgcgcggaccacctcgccgcagcgtccaagcccgcgggtggcgacgagaggctcagcccctccgtcccagccaccccgaggcagcggatgatcacatgcgacgaggtcccggtcaaggaggttgccttaggcgacggcccgtccaagaccacacgaatcagtgacgtcttcgcctggagaccggcggacatgcccggggtccccagggaggtgattgagcaccgtctcgccgtgcggccgggcgcaaggccggtccggcagaaagtgcggcggcaggccccggaacgacaagccttcatccgcgaggaggtggcgcgacttctggaggccggattcatccgcgaggtcatccatccggagtggctggcgaacccggtcgtcgtccccaaggcgaacggcaagcttcggatgtgcatcgactacaccgacctcaacaagtcatgtcctaaggacccttaccccctgccacgcatagatcagattgtcgactccaccgcggggtgcgaccttttgtgttttctagatgcatactctggttatcatcagattcgcatggctagggaggatgaggaaaaaactgcattcattacccccataggaacttattgttatacgacaatgcctttcgggttaaagaatgcaggtcctacttttcaacgtactactcgaatttctttgggtagccagttaggacgcaatgttgaggcctatgttgatgacttggttgtgaagacgcacaaccaagagaccttactctcagacctagcggaaactttcgaaagtctccgctccgcccgcataaagttgaaccccgataagtgcgtgttcggtgtgcccgcgggcaagcttctcgggttcttggtctctgcccgaggcatcgaggccaaccccgagaagatacgagctatagagcggatgcgcccccccagtaagcttagggatgtgcagtgcatcaccggctgcatggccgccctaagtcggttcatatcgaggctgggagagaaggcgctacccctatttaagctcctcaaatgctccgggccgtttacctggacggaggaggctgagcgggccctcactcagttgaaggcgtacctcagttctcccccggtcctagtcgccccgaagccagatgagccgttgctactttacctggcggcaaccccgcaggtggtcagcgcggcgttggtcgtggagcgcgacgaggacaaccctcactccgcgcatccccaccctgtgtcgactcgacccgggagagagcagggaggagaggcccccgagccgaacggcggcccgaggcccccgacggccggagctggccctccgcccgcttgtccaacggtaccaggcgcccccgacccccaggaaggccccggggccactgcgggaaggccgcgcctgtcgccctctgaccccgaggtcatcggcacagaagccgagtgcgccccgcgtggcctctcgggcgaagagcgccctcgagatgcggcccctagcgacgaggatcggccccgccgaaaggtgcagcggcccgtctacttcgttagcgaggccctccaggacgccaagacccgataccctcaggcccagaagatgctttacgctattttgatggcttcgaggaagttgcgccattatttccaggcgcatcgggtcacggtggttacgtcttacccctcggccaaatcttgcataaccgagaagagccaggccctcgccgactttgtggcagagtggaccccagctcccgagcccgtctccgtccccgaggctagctctggccccgcacagctgcctcacaccacctactgggtgatgcagttcgacggctccctgtctcttcagggcgccggtgcgggggtcacgttgacctcgccgagcggagacgtcctcagatacctggttcgcctcgactttcgggcaaccaataatatggcggagtacgagggactccttgcaggactcagggtggcagctggactggggatccgccgcctcctggtgttaggcgactcccagctggtcgttaaccaggtctgtaaggagtaccggtgctctgacccgcagatggatgcttacgtgcgccaggtgcggcgtatggagcgccatttcgacgggatagagcttcggcacgtgcccagacgggataacgcggtcgccgacgaactctcaaggctcgcttcctcgcgagcccagaccccaccgggcgcctttgaagaaaggcttgcccagccatcggcgcgacccgaccccctaggggagacggacgcgcctgaacggcccccgaggcccgtcggagtccaggcctcgggacccgaggggagcgctcccagctcccttagattgattgcttggatcgctgagatccaggcgtacctcgcagataagactctacccgaggaccgcgaagggagtgaacgcgtccagcgcatctccaagcgctacgtgctggtggaagggaccctctatcggcgcgcggctaacggagtcctcctgaagtgctttcctcggaaacaaggcgtcgagcttctcgccgatatccatgaaggcgagtgcggagcccattccgcctcacgcaccttggttggcaaggcctttcgccagggtttctattggtcgacggctctcaatgatgcggtcgacctggtccggcgatgcagggcgtgccagttccacgccaggcaaacccatcagccggcctag

SEQ ID NO: 89398 - DNA, 864 bp, Oryza sativa
  Clone ID: PAT_MRT4530_88159C.1
atgccgtgtagggctgcagatgccaaccacgtaaagaagatgttctcgaagatcatcttccctcggtttggcaccccgagaatggtcgtaagtgatggaggatcgcacttcatcgacaagacctttcgagaccttctgcataaaatgggcgccaaacaagacgttcccacaccctaccatcctcaaaccagtgaacaagcagaaacatcaaacaaacaaatcaagaatattctgctaaagactgtcaacaagatggggataggatggaaggacaaattatctgacgctctatgggcttaccgcacagcctataagacacccattgctatgtccccatatcagatagtctacaggaagacctaccggcttctactagaactagaacaccgagcatactgggcgatcaggaattggaacatggactttgagggagatgggggaatggagacaaatgcaattagcagaactagaggaatggagagacaaggcataccacagctccaagatatacaagaaaagaacgaagcgctgcaaatgggaaggatcgttcgacgtcatcaacacctcatctcacagggcaatcacactccgcgacaattcagcaagtctatgattccatacgaagcctccacctccaacaccaacgatctagagggagaaccctcgccggccaaccaattgattctagtggaggactacactatggaaggtgtcaacgcagtatgggcagagcccctggtatccatgcctgcctcaccatcgagtttgtgggtgatcggtgaacaccctggatcggctgaacccctctcggccctgatcagcccctcgctcgaccgcgtgctctctttcgccaaggaggattga

SEQ ID NO: 89399 - DNA, 777 bp, Oryza sativa
  Clone ID: PAT_MRT4530_8815C.1
atgtggaggctagaaaatttctccggttctataaaagaattgcttcgactctgcaccatgacacgatttcgaagacgctcatctctgctggagagctggcaatcagtaaagatagagggccaggagaaggcgacgcagcgccggcgagcggcgaggatgaggcagcgccaacaagcggcgagaggacgagaggacggggagaaggcaagcggcgaggatgaggaggcactagcaagcagcgagaggatgaggccgctgccggcaaggatagtcgaaacatggggagcgggagcggccgcggccgcctccggcgaggatgtttgcggggaggttacggaggtcgcggaggggagtggccgtcgccgagaacggtcgcggaggcgggtgcgagcacagccgtcggcggcgaggacgctcgcggggaggtcgtggaggtcaccgagaggcgcggggagcgggcgcggctgctaccggcgaggaggctcgcgggaaggtcgcagaggggcacggggagcgagtgcggccgctgccgtggacggttgctgtggcgggcacgggcgcagccgccgccggcgaggacagtcacggagggcgcggggagggcggaagagctcctcctctcgccgctccttcccatccgccgctgtgctgccctcctccggcaccgtgctaccgtcctccagctgcccatgcatccgccatcgagacgaggacaacaagatgaagacggagacggcaaaaaatgcgacagagaggacggaaatcgtgatgaagtga

SEQ ID NO: 89400 - DNA, 5884 bp, Oryza sativa
  Clone ID: PAT_MRT4530_88160C.1
atggccgaacgggaagtggcgcacaacctctctccaagcgctagcggtgacgacggggagcagaacccgcgccgtcgagctcgtactccaccgcccccctctcgccgaagtcttaggtgggaggaggcgctcgagggggtcaaaagatccacgacttcgccgcccacgagcgatgaagaaggacggcgagacggggagcgtcgcctcctcgtctacggcgatggtagcacgccccagggcgcgctccaagctgcgggcgcgctcttgcgtcacccgcctgtcgtccccgatccagagactccagcccgacgttggctggatgacgtggccgacttggtcatgacggcacagcagcgcctaggcgccggtgggcggtcctccgccaccaaggcctctggcgctgctaccgtcggctccgtgtcgtcgaggcggagggcgcggcgagcggcggccgttacccgccgttcgtcagccattccctcgtcaacgcctccgacccaagaagatgtgcgtagggggccggatgcccgcctcagtatcgagcgccggcgcaatggtcgtcgtgctgcccacgcaacggaaggcgcttcctcgtccggagcgccatttcggttcgggtgcggggaccagccccccgtgcccccggttggtggtgtcggctgtcgagccttcggaacgtccattggcccccaaggttccggcccaccatcaccgaaaaatatgacggaagcgtcaaccccgccgagtttcttcaggtctacacgaccgggatcgaggccgccgggggtgacgacagggtcatggcgaatttcttccccatggccctgaagggacaggcgcggggttggctaatgaacttgccacccgcgtcggtccactcttgggaggatttgtgccagcagttcaccatgaacttccaaggcacatatccgcgcccagttgaagaagccgacttgcatgcggtacagcgaagggacgatgagtctcttcgctcgtacattcagcggttttgtcaagtccgcaacacacaaccatgcatccccgcacacgcggtaatctacgcgttcagggggggcgtgcggcacaaccgcatgctcgaaaatatcgcctccaaggagccccagaccaccgcggagctttttcagctcgcggaccgtgtggctcgcaaggaggaggcctggacctggaattccaccggttccggtgtggcagcttcggccgcccccggatccgccgctcggtcagggcggcgggacaggaggaggaagaagaggtcggcccattccaacgacgagggacacgtcctcgccgtcgagggagcttcgcgggccacccaaaaggggaggcctgcgagcgacaaaaagaaggaggccggcgctcccagcagggagcgcccgaccggcaagtggtgcaccgtgcacaacacctccctccacgacctcgcggactgccgcgcggtcaaaagtttggctgagcggacgaggaagtgggaggaggagaggaggcaggagcgccgtgagggcaaggccccggcggctccctccggcaaccggcgaagtgaggccaagcagaaggcccccgccgaggacatcgacgatggcgacgatgacctagggttccaggagcctggggccaccatcgccaccgtcgatgggggagcgtgcgctcacgcttctcgtcggagcctcaaggccatgaagcgagagcttctggccgcggcccctacccatgaggcgacgcggcgggcgcggtggtcggaggttgccctcaccttcgaccagaccgaccacccgccgtgcgttgcccggggaggacagatcgcgatggtggtttcccccaccgtttgcaacgtgaagttggggcgtgtcctcatagacgggggtgcagccctcaacatcctttcccccgcagcctttgacgccatcaaggccccggggatggtgcttcggccgtcccagctgattatcggtgtgacgccggggcacacttggccgctaggtcatatcgacctcccggtcaccttcggtggatccgccaacttccgcacggagcgggtgaacttcgatgtggcggacctcagtctgccctacaacgcggtcctggggaggcccgcgttggtgaagttcatggcggcggtccactatgcctatctccagatgaagatgccgggccccggtggccccatctctgtccatggcgacctcaaagtcgcgcttgcttgtatagagcagcgcgcggaccacctcgccgccgcgtccaagcccgagggtggcaacgagaggctcagcacctccgtcccagccaccccaaggcagcggatgatcacgtgtgacgaggtcccggaagacgcgctcgtctccttcctgcgggcaaacgccgacgtcttcgcctggagaccggctgacatgcccggggtccccagagaggtgattgagcaccgtctcgccgtgcggccgggcgcaaggccggtccggcagaaagtgcggcggcaggccccggaacgtcaagccttcatccgcgaggaggtggcgcgacttctggaggccggattcatccgtgaggtcctccatccggagtggctggcgaacccggtcgtcgttcctaaggcgaacggcaagcttcggatgtgcatcgactacaccgaccttaacaaggcatgtcctaaggacccttaccccctgccacgcatagatcagattgtcgactccatcgcggggtgcgaccatttgtgttttctagatgcatactctggttatcatcagattcgcatggctagggaggataaggaaaaaactgcattcattacccccataggaacttattgttatacgacaatgcctttcgggttaaagaatgcaggtcctacttttcagcgtactactcgaatttctttgggtagccaaataggacgtaatgttgaggcctatgttgatgacttggttgtgaaaacgcgcaaccaagagaccttactctcggatctagcggaaactttcgaaagtctccgctccgcccgcataaagctgaacctcgataagtgcgtgttcggcgtgcctgcgggcaagcttctcgggttcttggtctctgcccgaggcatcgaggccaaccccgagaagatacgagctatagagcggatgcgccccccccagcaagcttagggatgtgcaatgcgtcaccggctgcatggccgccctaagtcggttcatatcgaggctgggagagaaggcgctacccctatttaagctcctcaaacgctccgggccgtttatctggacggaggaggctgagcgggccttcactcagttgaaggcgtacctcagttctcccccagtcctggtcgccccggagccagatgagccgctgctactttacctggcggcaaccccgcaggtggtcagcgcggcgttggttgtggagcgcgacgaggacaaccctcaccccgcgcatccccaccttgtgtcgactcgacccgggagagagcaggcaggagaggcccccgagccgaacggcggcccgaggcccccgacggccggagctggccctccgcctgcttgtccgacggtgccaggctcccccgacccccaggatggccccggggccactgcgggaaggccgcgcctgtcgcccgacgacctccgaccccgaggtcgtcggcacagaagccgagtgcgccccgcgcggcctctcggacgaagagcgccctggagatgcggcccctagcgaaggggatcggccccgccgaaaggtgcagcggcccgtctacttcgttagcgaggccctccgggacgctaagacccgataccctcaggcccagaagatgctttatgctattctgatggcttcaaggaagttgcgccattattttcaggcgcatcgggtcacggtggttacgtcttacccccttggccaaatcttgcataaccgagatggtactggacgggtggtgaaatgggcaatcgaactctctgagttcgatttgcactttgaaccacgccacgcgatcaagagccaggccctcgccgactttgtggcagagtggaccccggcccctgagcccatctccgtccccgagaccagctcgggcccctcgcagctgcctcacaccgcctactgggtgatgcagttcgacggctccttgtctcttcaaggcgccggtgcgggggtcacgttgacctcgccgagcagagacgtcctcagatacatggtccgcctcgattttcgggcgaccaacaatatggcggagtacgagggactccttgcgggactcagagtggcagctggactggggatccgccgcctcctggtgttaggcgactcccagttggtcgtcaaccaggtctccaaggagtaccagtgctctgacccgcagatggacgcttacgtgcgccaggttcggcgtatggagcgccattttgacgggatagagcttcggcacgtgcccaggcgggataacgcggtcgccgacgaactctcaaggctcgcttcctcgcgagcccagaccccaccgggcgcctttgaagaaaggcttgcccagccgtcggcgcgacccgaccccctaggggagacggacgcgcctgaacggcccccgaggcccgtcggagtccaggcctcgggacccgaggggagcgttcccggctcccctagattgattgcttggatcactgagatccaggcgtacctcgcagataagactctacccgaggaccgcgaagggagtgaacgcgtccgacgcatctccaagcgctacgtgctggtgaaagggaccgtctattggcgcgcggctaacggagtcctcctgaagtgcattcctcgggaacaaggcgtcgagcttctcgccgatgtccatgaaggcgagtgcggagcacactccacctcacgcaccttggttggcaaggcctttcgccagggtttctattggccgacggctctcaacgatgcagtcgacctggtccggcggtgcagggcgtgccagttccacgccaggcaaacccatcagctggcccaggccctgcagaccatacctctttcgtggccgtttgctgtctgggggctcgatatcctgggtccgttcaggcgggccccgggcaggttcgagtatctgtatgtcgctgtcgacaagttcactaagtggcccgaggcttatccggtcatcaagatcgataagcactctacgcttaaattcatcaggggcatcactgctcggtttagggtgcctaaccgtatcattacggataacggcacccagttcactagtgagctcttcggcgactactgcgaagatatgggcatcaagctctgcttcgcctcccccgcccaccccagaagcaatggccaactggagcgcgccaacgcggaaatcctcaagggcctcaaaaccaagaccttcaacatcctcaagaagcacggcgactcgtggatcgaggagttgccagcggtgctctgggcgaaccgaaccacgccaagtcgagcaaccggggaaacgcctttcttcctcgtctacggcgcggaggcggttctcccatccgagctcaccctgaggtcccctcgggccaccatgtactgcgaggctgatcaagatcagcttcgcagagatgacctcgactacttagaagagcgaaggcggcgcgcggccctccgagccgcgcgctaccagcagagcctgcggcgctaccatcagcgccacgtccgggcccgatcactctgcgtcgacgacctcgtcctacgccgcgtccaaacgcgtgctggactgagcaaactctcaccaatgtgggagggtccgtatcgagtgatcggcgtcccccggccgggctccgttcggctggccacgggcgacggcacagagctgcctaacccgtggaacatcgagcaccttcgtcgcttctacccc

SEQ ID NO: 89401 - DNA, 805 bp, Oryza sativa
  Clone ID: PAT_MRT4530_88161C.1
tgttatgtatctgttgatggctgggtgtgctgtttgaatgcctagtgtaactgttcctagaaactatggcatcggaagaattcatcagtcttggggaaccttgtgaggctgatgcaaaagatgaagaagagaccaaccttcagactataccccccaatttgaatgaagtcaacccattggcatctgaaggggagtctggtcctgtggataacaccaaggcttcggatgggatcatagatcttgaaggacaagatcaagtggatggggaacctactaccatggatagtaccaaggttcctgatgtaattatagatcttgaagaaggtcaagtggaagacatggatctttcagatgatgatgtagttgtaaaacatcagtatttggatgcttctatccagtccagcaccagtgtagcagatgtacagactctacatggtgtttcagttggtgggcggacgcgtggggggcttgagaatggcagtcatgcatcgaaaagtatccttatcgatgaaagcacaatcagaggagttaaaagagcccgagtagaatcaactgagccttcagttcgtgtgatttacagcaacttgacaagggaaagcaaaagaaagctcgtggaattgatgcaacaatggtctgagtggcaaaccagaaagcaaaatacattgacgaaagctggggaagaagttttagaatgtggcgaagagacttattatccagcattacatgttggttcagagaaatcttgtgctgtgtcattttgggtagattgccaagcataagaaggtgttgttctggatgatgattc

SEQ ID NO: 89402 - DNA, 5304 bp, Oryza sativa
  Clone ID: PAT_MRT4530_88162C.1
atggccgaacgggcagtggcgcacaacctctctccgagcgctagcggtgacgacggggagcagaacccgcgccgtcgagctcgtactccaccgtccccctctcgccgaagtcttgggcgggaggaggcgctcgagagggtcgaaagatccgcgacttcgccgcctgcgggcgatggagaaggacggcgagacggggagcgtcgcctcctcgtctacggcgatggcagcacgccccagagcgcgctccaggctgcgggcgcactcctgcgtcacccgcccgtcgtccccgatccagagactccagcccgacgttggctggatgacatggccgacttggtcatgacggcgccgcagcgcctaggcgccggcgggcggtcctccgccaccaaggcctctggcgctgctaccgtcggctccgtgtcgtcgaggcggagggcgcggcgagcggcggccgttacccgccgttcgtccgccattccctcgtcaacgcctccgacccaagaagatgtgcgtggggggccagatgcccgcctcaatatcgagcgccggcgcaatggtcgtcatgctgcccacgcaacggagggcgcttcctcgtccggagcgccacttcggtccgggcacgggggccagccccccgtgtccccggttggtggtgccggctgtcgagcctttgtggcgagccttcggaacgtccgttggcccccaaggttccggcccaccatcaccgaaaaatacgacggaagcgtcaaccccgccgagtttctccagatctacacgaccgggatcgaggccgccgggggtgacgacagggtcatggcgaatttcttccctatggccctgaaaggtcaggcgcggggttggctaatgaacttgccacccgcgtcggttcactcttgggaggatttgtgccagcagttcaccatgaacttccagggcacatatccgcgcccaggtgaagaagcggacttgcatgcggtacagcgaagggacgatgagtctcttcgctcgtacattcagcggttttgtcaagtccgcaacaccataccatgcatccccgcacacgcggtgatctacgcattcagggggggcgtgcggcacaaccgcatgctcgagaagatcgcctccaaggagccccagaccaccgcggagcttttccagctcgcggactgtgtggctcgcaaggaggaggcctggacctggaactcctccggttccgatgtggcagctccggccgcccccgggtccgccgctcggtcagggcggcgggacaggaggaggaagaagaggtcggcccattccgacgacgagggtcacgtcctcgccgtcgagggcgcttcgcgggccacccgaaaggggaggcctgcgagcgacaaaaagaaggaggtcggcgctcccagcagtgagcgcccgaccggcaagtggtgttccgtgcacaacacctccctccacgacctcgcggactgccgcgcggtcaaaagtttggctgagcggacgaggaagtgggaggaggagaggaggcaggagcgctgtgagggcaaggccccggcggctcccacaggcaaccgtcgaggtgaggccaagcagaaggccaccgccgaggacgtcgacgatggcgacgatgacctggggttccaggagcctgaggccaccgtcgccaccgtcgatgggggagcgtgcgctcacgcttctcgccggagcctcaaggccatgaagcgagagcttctggccacggcccctacccatgaggcgacgcggcgggcgcggtggtcggaggttgccctcaccttcgaccagaccgaccacccgccgtgcgttgcccggggaggacagatcgcgatggtggtttcccccaccgtttgcaatgtgaagttggggcgtgtccttatagacgggggtgcagccctcaacatcctttcccccgcagcctttgacgctatcaaggccccggggatggtgctccggccgtcccagccgatcatcggtgtgacgccggggcacacttggccgctaggtcatatcgaccttccggtcaccttcggtggttctgccaacttccgcatggagcgggtgaactttgatgtggcggacctcagtctgccctacaacgcggtcctggggaggcccgcgttggtgaagttcatggcggcggtccactacgcctatctccagatgaagatgccgggccccggtggccccatcaccgtccatggcgacctcaaagtcacgcttgcttgtatggagcagcgcgcggaccacctcgccgcggcgtccaagcccgcgggtggcgacgagaggctcagcacctccgtcccagccgccccgaagcagcggatgatcacgtgcgacgaggtcccggaagacgcgctcgtctccttcctgcgggcaaacgccgacgtcttcgactggagaccggcggacatgcccggggtcctcagggaggtgattgagcaccgtctcgccgtgcggccgggcgcaaggccggtccggcagaaagtgcggcggcaggccccgaaacgtcaagccttcatctgcgaggaggtggcgcgacttctggaggccggattcattcgtgaggtcatccatccggagtggctggcgaacccggtcgtcgttcccaaggcgaacggcaagcttcggatgtgcatcgactacaccgaccttaacaaggcatgtcctaaggacccttaccccctgccacgcatagatcagattgtcgactccaccgcaggccaaataggacgtaatgttgaggcctatgttgatgacttggttgtgaaaacgcgcaaccaagagaccttactctcggatctagcggaaactttcgaaagtctccgctccgcccgcataaagctgaaccccgacaagtgcgtgttcggcgtgcctgcgggcaagcttctcgggttcttggtctctgcccgaggcatcgaggccaaccccgagaagatacgagctatagagcggatgcgcccccccaacaagcttagggatgtgcaatgcgtcaccggctgcatggccgccctaagtcggttcatatcgaggctgggagagaaggcgctacccctatttaagctcctcaaacgctccgggccgtttacctggacggaggaggctgagcgggtcctcactcagttgaaggcgtacctcagttctccccctgtcctggtcgccccggagccagatgagccgttgctactctacctggcggcaaccccgcaggtggtcagcgcggcgttggtcgtggagcgcgacgaggacaaccctcactccacgcatccccaccctgtgtcgactcgacccgagaaagagcagggaggagaggcccccgagccgaacggtggcctaaggcccccgacggccggagctggccctccgcctgcttgtccgacggtgccaggcgcccccgacccccaggacggcctcggggccactgcgcgagggccgcgcctgtcgccctttgaccccgaggtcgtcggcacagaagccgagtgctacccgcgtgccctctcggacgaagagcgccctggagatacggcccctagcgaagaggatcggccccgccgaaaggcgcatcgggtcacggtggttacgtcttaccccctcggccaaatcttgcataaccgagagggtactggacgggtggtgaaatgggcaatcgaactctctgaattcgatctgcgctttgaaccacgccacgcgatcaagagccaggccctcgccgactttgtggcggagtggaccccagctcccgagcccgtctccgcccccgaggccacctcgggcccctcgcagctgcctcacaccgcctactgggtgatgcagttcgacggctccttgtctcttcagggcgccggtgcgggggtcacgttgacctcaccgagcggagacgtcctcagatacctggtccgcctcgactttcgggcgaccaacaatatggcggagtacgagggactccttgcgggactcagggtggcagctggactggggatccgccgcctcctggtgttaggcgactcccagctggtcgttaaccagatctgtaaggagtaccggtgctctgacccgcagatggacgcttacgtgcgccaggcgtacctcgcagataagactctacccgaggaccgcgaagagagtgaacgcgtccagcgcatctccaagcgctacgtgctagtggaagggaccctctatcggcgcgcggctaacggagtcctcctgaagtgcattcctcgggaacaaggcgtcgagcttctcgccgatatccatgaaggcgagtgcggagcccactccgcctcacgcaccttggttggcaaggcctttcgccagggtttctattggccgacggctctcaacgatgcggtcgacctggtccggtggtgcagggcgtgccagttccacgccaggcaaacccatcagccggcccaggccctgcagaccatacctctttcgtggccatttgctgtctgggggctcgatatcctgggtccgtttaggcgggccccgggcgggttcgagtatctgtatgtcgctgtcgacaagttcactaagtggcccgaggcttatccggtcatcaagatcgataagcactccgcgcttaaattcatcaggggcatcactgctcggtttggggtgcctaaccgtatcattacggataacggcacccagttcactagtgagctcttcggtgactactgcgaagacatgggcatcaagctctgcttcgcctcccccgcccacctcagaagcaatgaccaagtggagcgcgccaacgcggaaatcctcaagggcctcaaaaccaagaccttcaatatcctcaagaagcacggtgactcgtggattgaggagctgccagcggtgctctgggcgaaccgaaccacgccaagccgagcaaccggggagacgcctttcttcctcgtctacggcgcggaggcggtcctcccatctgagctcaccctgaggtcccatcgggccaccatgtgttgcgaggctgatcaagatcagcttcgcagagacgacctcgactacttggaagagcgaaggcggcgcgcggccctccgagccgcgcgctaccagcagagcctgcggcgctaccatcagcgccacatccgggcccgatcactctgcgtcgacgacctcgtcctacgccgcgtccaaacgcgtgctgaactgagcaagctctcaccaatgtgggagggtccgtatcgagtgatcggcgtcccccggccgggctccgttcggctggccacgggcgacggcacagagctgcctaacccgtggaacatcgaacaccttcgtcgcttctacccctag

SEQ ID NO: 89403 - DNA, 801 bp, Oryza sativa
  Clone ID: PAT_MRT4530_88163C.1
aaattgacagcagaaaaagtatagattcctatccacttaagaaggttgtagcgatgaaacagaagaagcaaatgaaactaaagagcagtcagactgattctgatgacatgttggaactcttgacgagtaaaaaggatgagacaaagttgaagaacaagaagaagagcaaaaagaatctcaaagaaggcagtaatcctgttgaggagcatcataattgatctattgactgtagagaaaacaaagaaatcagggaaaagcagcaaaaaggataagcatgaatccagcagagagaacaagttggacaggcatggtgaagttgatactgcaaatgtcgatgagattcaatctgttgatgaagattgttccagaggaatgaaaaaatgggtcctagagtacaaacagaagaggcccggcttgaaagtgttgcagcaaagaatagatgagtttataactgctcatgaggaacaagaagagcaggagaggaaagagagggaagcacgcgctgctgaggatggatggacagttgtggttcatcataagggtaggaaaaagaccacagatactgaaactggaacagctgttggctctgtatctctagctgcaatgcaggagaaaatggctaataagaaacccaaggaagttgatatgaatttctacagatttcaaaagcgagaagctcacatcagtgaactcgcgatgctgcagagcaagtttgagcaggacaagaaaaggatacagcagcttcgtgctcaacggaaattcaagccatactaatgctgcccactttggatatctatcctc

SEQ ID NO: 89404 - DNA, 657 bp, Oryza sativa
  Clone ID: PAT_MRT4530_88164C.1
atggcggagctctcgccgatgagggaggtggtatcgatgcacccgctgcttcacctcgacggcggcgagagggaggcggtgttcgcggcaggagaccagacgtacggcgagttccgcctgacgctcctgtggttggtactttccccaatctctgtttccctctcccagttcaccctgcttgcgatcgagttgcgattgcgacactgcccgccgccgccgccgccgtggctcgcgactgccgtacggtggcgcgccgctgccgccgacgtgcgtgagggaggatgcttcgattggaacgccatgtcgcaagtttcttcctcctcctcctccgagatggatttccgcgccgccgtcctctcggggttttccgggggccgcgacctgcgggagtcgtcagtctccagcgaggactccgtcgactctgactctagcccggtcagcggggcgccggcttcagcgtctccgtccccccctcgcgcccggccacgggactggtcggcggctgttggcccggcggccgcggcggctgccatggcggagccctcgcagcagcgcccggccacggtggcgtccgtcggcgtgaggcacactctcagatcggtcgtggtgcgccctccagagcaggcgtcgtcgcgccctccccccgggtcgccctag

SEQ ID NO: 89405 - DNA, 1861 bp, Oryza sativa
  Clone ID: PAT_MRT4530_88165C.1
atggcagtttccgttttcaacacaaggaggcgtacttcccttgtttccgccttcatagatcgaacacgtatgttcatatccacacctctcccccaagtacgagacaaggtctcgagaacaaaaccccccaaaccccacggcggcggcggcgagcggcggcggaagaagcagccgcaagaggcagcagctcgcgccggcggcggcatgggtgggagcagcgcaagcccgtgtgacctggacagggagttcgcgccccaaatcgcccagctcctcgccacccctcctctccaacccgcgcaggaatactacaatgggctcatacagtccaggaaacatgatggtataagagtgaacttcagcagcaagcatgggaaaggtgtttgtgcgaacaaggagtttgcagaaggggaccttattctgaaggatcaaatattggttggtgctcagcacagtcttaacaagattgattgcgctgtgtgcagttattgctttcgcttcattggttctatagagttccagattggacgaagattgtattggcaaagcgttggttcaagcagtgactgcactaataggaggcattgccatgagagtgatttgggatcgagtgccagttcttctggtgcaacaaaggaaaacagtagtactttgccagaagaggtcttaggatcacttattactggtgacatgtcactgcctttcacagaccattttagtttgcctcaagttgttccttgtcgtggatgtgaggaagaacgctactgcagccaatcatgtgctgattccgactgggaaacttatcactctttgctgtgtactggatctaagactgaaccatcccagagatctgctcttcagaaattcatagaacatgcaaatgggtccaatgatatttttcttgttgctgccaaggctatcactttcactctgctgaggtacaagaaactcaaaacgcagcctgaatttcaaaataacacagatgaatcaaacttttctttgcttatggaagcatggaaaccactttcgatgggctacaaaaagaggtggtgggactctgttgctttgcctgaggatgttgattcctgtgatgaagatacatttaggcagcaaattagggatctagcacttacgatcattatcttctgtgtttcgcagtcattgcagcttctcaaggatgctatttttgattctgatggtttggttgttccgtctccagtggaagactatttcatacatattgatgatcttccagatgatgagaagtgcaacatatcccaggaggaagctgaaaaggttacaaggccatttctagatgctttaggtgaagactatgcagctccttgtgaggggacggcattctttcctttgcaaagctgtatgaatcattcatgttgtccaaatgctaaagcatataaaagggatgaggatactgatggtaatgcagtgataattgctctggagcctatcaagaaggacgatgagattaccatatcctacatcgatgaggatgtctcctacgaggagaggcaggcggagcttgcagattatggattcatctgtacgtgccctaggtgccaagaagaaaagcccaactgaacaagatccacagtttggaggttcctgaaatttatttttttggtgtggaatatgcaattgaagttttgacgactccatttattttattttttttgtctaggatatgcaattgagattttgacaactccaaaaatgttaggataggatatgcggaaagaatgatatgatacgtacttatttgagtggatgctggattttgctgtgctaatgttggatgctgcagaaagtttttattccttctgttcaaaaaaaaaaaaaaaaaaaa

SEQ ID NO: 89406 - DNA, 335 bp, Oryza sativa
  Clone ID: PAT_MRT4530_88166C.1
ataccgtgaattgccttagtctccaaggagaacttggagacaataaacctgcatgatatagaataaacccaatcatctctgagtaggactcggttaatcaccagtccatgaggagttttccataatatcttctagttttccttatcatatatgggaatatatcgtatatacgaaggtataccatatccgtatatttcgtaattcataggaaaggaggtatgccttattcataaccatgacaatttccattggcatattttatttatgttgtagcaggcacccggaacaaagggttggcctcctatttaaccaagacatggcctcgaacgcctaac

SEQ ID NO: 89407 - DNA, 521 bp, Oryza sativa
  unsure (1)..(521): unsure at all n locations
  Clone ID: PAT_MRT4530_88167C.1
cggccaccagcatctatggctgcggggctcgccaccgtcgtgtctttcctgctcgtcgtcctcgtctccgtcgccccggctggaacaaagactgcccgcctcccggtagcggcagcagcggcggcggccaccacggcaagccgcccggtagcggcagcggcggcggcggtcaccatggggatgctcggcgagcaccaccaccaccacaaacctcccccgccaactccggcgtacgttccatctccaccaccatacgtgccaccctacatcccgccgccgacgccgccatacgttccaccctacatcccgccgccgacgccgccgtacgtcccgccgccgacgccgccgtctcctccggcatacgtgccgccgncgacgccgtcgtcgccgncgccgtacgtgccgncgncgagcccgccggcgacgaatacgtgcccgatcgttgcttctttgcggaacgcgggcgnggaacgccttggtgggctganccacctggngancgggcagaaggcgagggcgaa

SEQ ID NO: 89408 - DNA, 1241 bp, Oryza sativa
  Clone ID: PAT_MRT4530_88168C.1
tttttttttttttttttttttggatcataagtcggatcttttctcgtggattaattaattaaactacacttggattaaaaccggaggtagtacattaatacaacacaaatcgcagacacgagtacgatcgagagagtaaaggtagcacagtatagctagctagcgagggtgtagtatagtagcctccgccattgacgacgacgacgaagctttgctagctgctgcttcgtttgttcagttcaggcgccgtagagcggggggcacttgaagccgggaggcgggtgcttgccgcaggtgatgagcagctcgagcgcgacggggaggtagatgttgatgttgaggaggcgcgcgcggatggtggtgcagaggcagagcgcggcgtccaggtccgccacgccctgcaccagcgggcagcacttcgccctcgccttctgcccgatcaccaggtggatcagcccccccagcacgtccacgcacgcgttcagcttcagcgcgtcgatcgggcacgtcttcgtcgccggcgggctcggcggcggcacgtacggcggcggcgacggcggcgtcggcggcggcacgtatggcggaggagacggcggcgtcggcggcgggacgtacggcggcgtcggcggcgggatgtagggtggaacgtatggcggcgtcggcggcgggatgtagggtggcacgtatggtggtggagatggaacgtacggcggagttggcggcggccgtggcgtcggcggcgtgtagggcgggtggcacgacgggcaccggggagacgggggaggtttgtggtggtggtggtgctcgggcggcttgccgtggtgaccgccgccgccgctgccgctaccgggcggcttgccgtggtggccgccgccgctgctgccgctaccgggaggcgggcagtctttgttccagccgtgggcgacggagacgaggacgacgagcaggaaagacacgacggtggcgagcgccgcagccatagatgctggtggcgcggctcgacgttgcacggtggcgtgagatgggttggcgcgccttttatagagcggccatggacgcccacgcctccgctgatcactgaacagggcgagcaccgcgcgcgcgcgcggacgtacgcgcgccgacgcttctagcgcgctagcactcggcagcacggcgcgcacaggcacagacgatgaggtcgagacgccgctgcggggagggggggagactgaggtggttgtcgccatgggacgcgccat

SEQ ID NO: 89409 - DNA, 381 bp, Oryza sativa
  Clone ID: PAT_MRT4530_88169C.1
atggaggctgatactgataattcaaattgcccgcctggtaattttgaaagtttggctgaatattgcgcaccaaatgtttgggaacaacttgaggtacgaccgtctgatctggttgcacatgatgaaccaaatgttctgggacaacttgattcgcagcgtgctgaccttgctgctgaatcggctgaacaacctgttgcctcaatggcatttgctgaatcgactgcacgacctgctgcctttgtggcgtctgttgaatcggctgcaccacctgctgccttggtggcgtatgctgaatcggtgcaggagccgatactggtgccgttggttgagccgattgtgcattgggaggaattggctgaactgctggctgattatcagtga

SEQ ID NO: 89410 - DNA, 198 bp, Oryza sativa
  Clone ID: PAT_MRT4530_8816C.1
ttagtagcacccgaggtcctgggttcgactccccatgggaatgaattttccaggatttaacggcgttgtgctttcagtggtaggcgacgtacccgtcgacagcgaggcgctgctgacgacccgtacaagacgatgagcagccacaggagatgaatatggagctttggactcctcaacggcggagctctcagtgagcat

SEQ ID NO: 89411 - DNA, 354 bp, Oryza sativa
  Clone ID: PAT_MRT4530_88170C.1
atggcttccatgtcggcttcggtttgtgtttcggggtcagggctgacttgggcctgcacagcggggagcgcggttggggccgctgccgactgcgatggagtagcttggggcaccaacagttggcttgtcgaaaggatctccgcgctggtctggagtgcccttgccaccgcagccgccttcgccacgtcggccgcgttcggcacttgcacagaggtggcaggggccgaaggcggtagtgatggtgcagatgtggaagcagatgatactcttcgccttgcacctttcgccggggacgcctctggctttacaaggtactcgcacgacccctcgcctctcgccgttcttgctccatag

SEQ ID NO: 89412 - DNA, 1482 bp, Oryza sativa
  Clone ID: PAT_MRT4530_88171C.1
atgatgcagcaagaacggaaccaattcttgaattcattcatgcagacccgcaaggggacagttgttcagaactataaagttcttccaaggatcgagaagtgcaacaagctccagatggtgcagctcaaccaagtgataaaagtgttgcagatggttctcaaggggttcaaggtgatggctctcaaggggtccaaggtgttggttctcatggaattcaaggtgatggttctcagggatttcaaggatcaggttgactatgccgtgcaacatgctttgatcaatcaatctgggatattagtcaacactttgtcaaacatagtgaagtcgatggttgatggctcgatagctgaatatcaagctacaggaccggtttatttgccacgaggtgttttcctgaactatcggccgttaatcactgataatcagccagcagttcagccaattcctcccaatgcacaatcggctcaaccaacggcaccagtatcggctcctgcacctgctgcaccatcattggcaccaggtcaattagttaatcctcggttgttgcaacagccgattcaacaaacaccaccaaggcagcaagttttgcaaccgattcagcatacgccaccaaggcagcaggtggtgcagccgattcaacagacgccacaaaggcagcaggtcgtgcagtcgattcagcaaatgccattgaggcaacaggttgttcagccgattcagcagcaaggtcagcacgctgcgaatcaagttgtcccagaacatttggttcatcatgtgcaaccagatcagacggtcgtacctcaagttgttcccaaacatttgggtatgatagctctgatcagggagaagttctcgtctcaagactttgatagtttgtcatatcttgcacagaaggtaaccttgcatgaacagaggtttgcagaagccaggaagaactttaaaaaggttaattatgtatgtccttacatatatggatcggatgatgatgatgactctgaaatagcagcagccgaatgggttagaagcaaaaaggttataccatgccaatgggtgaagagttctggaaaagaagagagatatgactttgatattaccaaggctgataagatttttgatttgctacttcgagagaaacatattcaacttcttgctgttcatacaatcccatcggctgaagaattgggcaagagaaggtattgcaagtggcataattttgtgtctcattctaccaatgattgcaagatcttcaggcagcagatccaggcaactattgaaggaggcaaaatcaaatttgatgattctaagaggccgatgaaggttgatggcaatccttttcctgtcaatatgaagaagtatgacaaacagcaggaggggtgttatgaagaagatgatggcggtttgatcctcattggggatgtgaattctttagattttgttggaatgaaggaagttcaagccgatcgtataatagaagcaatcggctaa

SEQ ID NO: 89413 - DNA, 587 bp, Oryza sativa
  Clone ID: PAT_MRT4530_88172C.1
ccgcaccaggacaagatcacacacaactcatcagactcagatagaagagttcattgagtcatcgagagcgagcaacccagctagacaaacaagcaaacctagctacctactactcgatccaaggcaaaatggacgtgatggagaagtctcggcgagctaacttcttgttcgacgacgacgaccaaacgccgcccaggcagaacggccgccggaacgtcgaccagcacaacagcgacgacggcgacgtcgacagcgtccgcgtgtcgtgctacggcggcgtcgcaaagccagaggccaagtcgtcgtcgactgcgaaggacgtcgtcgtcaccggccgtcctgctgcaggctccaaccgtacctgactctataattctagctacagatcgatcgatctcacacgcaccttgatcatgatcgagcatgtgcatcgattgatcgaacatgctaactctggttgttagttattgtttctagttgttgaaaagaactcaggttgagtttaatgctagctatacttactctgtcgtcccaaaacatcaaaatttgttgcattccaattttggttaaaaaaaaaaaaaaaaaaa

SEQ ID NO: 89414 - DNA, 606 bp, Oryza sativa
  Clone ID: PAT_MRT4530_88173C.1
atgtcggcctctagcgaaaatgaacctattttcgctggtggcgggcagagctgcgatgctgcacggtggcggcgacgacggcgatgcttgggcgggccggagagctgcgatgcgaggcgggcgcaaccacggtggacgtgcgatgggaggcgggcgtgcggcaacggcgacacgaggtgggcgcaaccacggcggaccagctatggcaacgacgatgaccttgggccgcgggtcctcagccaggaggggctcgggcgcgggcgcggcatatacggccgccgtagggccgtgtgcggcgaatccaaccgtgggaggggcgcgtgcggcggattgggccgtggcgacgtcagctccctccagcctcgaggcggcgacgatgatggtgacagggggcggatccggtgggagacggtggtggcagcaacctccatggtcgccggcaatgatccaaaatgcatcttcgctagcggccgagaaaggaacgcccaccagcagagagatgtcttcactggcggtagccttaggacggccgccagcgaagacatgtctttgctggcggcggacataacgcagccgccagcaaagaagtatctccacttgcgttag

SEQ ID NO: 89415 - DNA, 339 bp, Oryza sativa
  Clone ID: PAT_MRT4530_88174C.1
atgtccagattcgtgtgctactcgagtaatgtggcagtcttgaagagaccgctcattattgacagccgagttaccattgccgatatgcgtgatttgtggccgttgggtttctgcccaagtgtggagaccgggggcgtcaggcccgagggtgatgtgttcgccctcctctttaccgggagggtcgggccgctcccgtctcggccccgagggccgaagcgccccgaccccttgtgggctttgcgccacgtatatggggtagaccggtcagatcgcgggttaggtggcgacaggcgatttgaagcacgcctcgccccgtcccgtcaggacgagggcttctag

SEQ ID NO: 89416 - DNA, 412 bp, Oryza sativa
  Clone ID: PAT_MRT4530_88175C.1
atgggtgtgtgtgctgatgtgctcaattttgagaaggttagagatgttagagcaggcagggcgtccggcgtgtgcgaagtcagtaaaaaccagtcatacatctctactattataaaaattgaagatgtttttgccgatattgggcttagtccaagtgatgctgctgttgtcatgctttctggtcaattggcagatggcttcgcaacaatcttcgttggagaactggcacttcttgctttctacgtcataaatgatttggaaatgccacaatcatccaaagcattgcgattcggccaaggccaccgcccacagttgttcccggcgtcgacggggctcccgcacccggactcctccttccccgccgccagaccccttccccgcctccacataccggcggcgccgccgacgcacc

SEQ ID NO: 89417 - DNA, 394 bp, Oryza sativa
  Clone ID: PAT_MRT4530_88176C.1
gcaacgttataatattttagtaaaccaatttcaacccaaactgggaattggcagtttggggcattagatgatcacaaagcaaaagaaaggggtcccaggatacgattcgagaacctaaagagaccgcagcatggacctaccaaaacttttcaaaaacaggcttcatttggataagattcattttaagttctgaactacgactaccccatactgggagattttacaaaacatggaaggggacttggatcacataaacaaggttggccttgaagctttgaagggtggcttcagcttcctgggagggggcctgaccttcctgtacaccagggggaacttgatatctgacttggggaactgcttaaggttggcacgcttgcagagtttaaaggggaca

SEQ ID NO: 89418 - DNA, 249 bp, Oryza sativa
  unsure (1)..(249): unsure at all n locations
  Clone ID: PAT_MRT4530_88177C.1
tgcgccccgcgccgntgtcgtntgncgnaccacgcgccgcgcgccgtnngccgtcgggttgcccgtcccgtcgccgctctagagcccgagggagttgcggatccaagcgaaggccaagacccgcaagactttgagcaaggcaagtcatcactattctttgaacatgttgatcccaattgcgaaattgttttgtttacaaataaaattgcatgcaattatgaacatcctacttgtgattataccatgcct

SEQ ID NO: 89419 - DNA, 362 bp, Oryza sativa
  Clone ID: PAT_MRT4530_88178C.1
cccggagagccaatgcacgattatttagagcggataatttcgccaggctagcgtggaagcgcccaatctatttttctgctgtgtttttactttaattttcacctcttctttttaaatttttatgtccatctttgggctctcagcctctcaggcaaatgtatattctcgtccgcgggtggcatagtcatggtacatactatgaatgatgaataagaaagagtttgcttcaaaaaaaaaaaaaaaaaaaaagggcggccgccctttttttttaagaatgtaaacattggttccttttgttttgtactatatattttcgctctgtactttacacgttggttccttttgtaaaaaaaaaaaaaaaa

SEQ ID NO: 89420 - DNA, 164 bp, Oryza sativa
  unsure (1)..(164): unsure at all n locations
  Clone ID: PAT_MRT4530_88179C.1
acttcgattcgactcgctcctgatcgacttactaccnccagccgcgcctgcgcgcacagcataaaaccccccacccacctgaaccgtcccaccatccacttccaccatccaaattccacaacatcgagtaagcgagctgagaggtccgtcgtcagtcagtcagt

SEQ ID NO: 89421 - DNA, 625 bp, Oryza sativa
  Clone ID: PAT_MRT4530_8817C.1
gctcacatcagcatatcacttctattcagatttcgcatcaggagaccgtgaacgagatgggctcctgcttgggctccgtttcttggggcttgatgcttcaccatttgcaggagaagcatttggagatttggatcttgctggtgatctgcaaaaaagaagtcgagaagcaaccatattcaatatccaaaatgcgggtctaacagcttattccaaaaaccttgatgctttgtccagcattgcaccgaccaaatgaaagtgaaaatagcccaatgaaaacaagagattaagagcacataattaagtccaaaaatatgtagtattgaatgcaaataatgcatgcaagacgcaaccaccatatatagcatgccaaaggtagggagagaactcattcctcaagcattgaacgccaagcacattcctagtcattgtaccatcattatccaaatatcgtcaatccttaatgctcctatgtccagaattccaaacaatgcgctatgcccaatctctgatggcaatcagttacagtgcattaggtcaaataattggatcattttagctttccatagaagctctcaataaatgggcatacctcatacaaccaagagcaaattgagcggacgcgtgg

SEQ ID NO: 89422 - DNA, 529 bp, Oryza sativa
  unsure (1)..(529): unsure at all n locations
  Clone ID: PAT_MRT4530_88180C.1
cccacgcgtccgggcctggctaaaaaaaaaaaaaaaaaaaaaaaaaaaaaaaaaaaaaaaaaaaaaaaaaaaaaaagaaaaaaaaaaaaaaaaaaaaaaaaaaaaaaaaaaaaaaaaaaagggnnnggggggcgggccgttttaaaggatcaaattttacttccgcttgcttgcaacttaatattttttttatggtgaaccaaaaataaattccatgggcggaattttaaaaccgtggaaatggaaaaaaccttggaataaccaaattaattcgcttggaagaaaatccctttttcgccggttgggtaaaaaggaaaaagcccgtacccgttcctttttccaaaaatttgcacactttgaatggaaattggaaccccccttgtaggggacaataaagggggggggttgtgttgtttacccaaagggtaacttttaaatttgcaagcgcctaagcgccggttctttgggttttttccctttctttccccgcaacttttgccgttttcccccttaaagttttaaatggggg

SEQ ID NO: 89423 - DNA, 547 bp, Oryza sativa
  Clone ID: PAT_MRT4530_88181C.1
aaggccgtactggagagatcggagtacctccgggacaaccgcttcacgatcaggtgtgacatcacggtcatgaagaatcccgaggcaaaggacactggcggcaggcgggtaaccctgccaccgtcggacctggcccggcacctcggcggcctcctcgccaccggagtgggcgccgacgtgacgttcgaggtcgacggcaagacgttcttggcgcatcggaatgtgctcgcggcccgatccccagtgttccaccaagagcttttctccctaacggagaaggggaatgccgcgactggcggtgccggtgtcatcatacgcgtcgacgacatggaggcgcaggacttcgaggctctgctccacttcatatacaccgactcgttgccggagatgaaaggtggagacgcagtggcgatgctcccaacctggtcgcggcggctaacagccatgttggcgtttgctggggaacaccaatgccccgagcttgagaagaagtgcttgcagctactcgaagatccagcaaatttgaggaacatcgtggagactgaag

SEQ ID NO: 89424 - DNA, 1116 bp, Oryza sativa
  Clone ID: PAT_MRT4530_88182C.1
atggccaccgcgcccaccgtcgccggcggcaaactgctgcgttccgcctctgcgattgtaggcggcacggagagcggccagcacctgctcgagatcaacggctactccagcatcaaggacgccgtctccatcggcaactgcgtccagtctcggcatttccgcgttggcggccacgattggtacatccgctactaccccaacggcttcaactcgaacgtttccgattgcatatccatctacctcgtcttggacggccacgaggcccacgactactattacggtcgctcaatcgtgagagcagagctcacgttgagcttactcgaccaagaacgggagccagtgacatcctacatctacagccatgggttgcaaattttcgatggctacggccgctatcggggatctctgcgtttcatccagaaggccgtactggagagatcggagtacctccgggacaaccgcttcacgatcaggtgtgacatcacggtcatgaagaatcccgaggcaaaggacactggcggcaggcgggtaaccctgccaccgtcggacctggcccggcacctcggcggcctcctcgccaccggagtgggcgccgacgtgacgttcgaggtcgacggcaagacgttcttggcgcatcggaatgtgctcgcggcccgatccccagtgttccaccaagagcttttctccctaacggagaaggggaatgccgcgactggcggtgccggtgtcatcatacgcgtcgacgacatggaggcgcaggacttcgaggctctgctccacttcatatacaccgactcgttgccggagatgaaaggtggagacgcagtggcgatgctcccagacctggtcgcggcggctaacaggtataagatggagagactaaggttggtctgtgaagataagctatgtgagtatgtaactgtgagaaccgtggcagccatgttggcgtttgctggggaacaccaatgccccgagcttgagaagaagtgcttgcagctactcgaagatccagcaaatttgaggaacatcgtggagactgaaggtcttgagcatctgacgaaaagctacccctttgttttgaaggatctaattgccatgtttgctacaaaaccgtag

SEQ ID NO: 89425 - DNA, 375 bp, Oryza sativa
  Clone ID: PAT_MRT4530_88183C.1
gttgattgcattagacacggccaactacacctggcgggggatctttggaagtttcgtacggctagccatactgacattaatacgaccacgataaacggtcgatctaccaggtgggaccacctctaaaggcatatagggtgggattaggggagcgatcttcttctaggactaccacctgctcgagaaggtggatgacttagcccaggagcacatccacgagtacgtggtccacgcccagggggtctccgccacggtgtacttttagtgcacccacgatcgtactcaacatctcctgccgcgacttcgttcggaccgcggactacaagaccctcgtcatcggccacttctccatcatgatgcacaagcgcgggaacc

SEQ ID NO: 89426 - DNA, 203 bp, Oryza sativa
  Clone ID: PAT_MRT4530_88184C.1
gttggagcgagggagtgggactatcacgggggggcgcttttcttgctccgtgagtgacactaacgtgatcgtatcctctgttgcctgaatcactcgcacctagattggctgaatgtcttctcggccagaaaccatccgagtctgacaattaacctcgtcgcagctgtggtcgctgtggtgattgcggcgatgtgcctgagaag

SEQ ID NO: 89427 - DNA, 487 bp, Oryza sativa
  Clone ID: PAT_MRT4530_88185C.1
ctaggaaaatataaaaaaacgctggccaaaaccccttattgttttggcgccaaaggaacccaaaggccaaaaaacgataaaaaaaaaagggaaagggaaaggggtaaaaaactttcaaaaagtttatccatgttacacgtatataaatctgcccaacccgaatgaaatgggcgggaaaaaaaaaataggggaacaaaactcggacttatcagggggggttcccaccagccagccccacatgccaggggaactttgcctttgttttgcccccaacgctgtttgctaaaaggcagccttttgttttaaaagaagctaaacctccctttccaaggcatccatactttggagctttggccgaagctccgaaacatccacctaaagttggaaacattttgactgttcaaaaaaaagttggccacggacagttggaagttccttcgaaagctttgaatttttagcctttgtttaagaaatcttttttttaagc

SEQ ID NO: 89428 - DNA, 275 bp, Oryza sativa
  unsure (1)..(275): unsure at all n locations
  Clone ID: PAT_MRT4530_88186C.1
ggtctccgccgccgaaacccaaaatcttctcttngggggcctatgtaatgccatgtgggtttctcacacacaggcccagtggtgtgcgttaaggcctccgtctgacacccggacacgctctgagactgcccattctcgcagagggtgctgctgactctccaggagaataacgtgccctacgagatgattatgattgacctccataacaagccctactggcttctgaagataaccccaaggaccaacgaacctgggtttaacggtggtgatggcaa

SEQ ID NO: 89429 - DNA, 186 bp, Oryza sativa
  Clone ID: PAT_MRT4530_88187C.1
atggacggacggacgcctcacgaagaccagaagctcttgggtctctcagctgctgcaactttccccgattccaatggctatagatcatggcatggccagggagcagcagccagaaacacacgccatgttcttcatgtcaagaacctgtcaggcacaagagagcgagagggtaatcccgatggttaa

SEQ ID NO: 89430 - DNA, 937 bp, Oryza sativa
  Clone ID: PAT_MRT4530_88188C.1
cagaactgagattcactatagtctttttattcatagtgattcacagttaacactgaacaaaacaccatgcatgtacatgcatcgatcttttatcgacttaggggttggttgaacacgcatgagatcactcacacatacaaaactacgattacagagatacatcgaacgcgacatggaaacaaacgttgacatgaacagttgaacttgaacacccctaccctatcacagtcatagcatagcaaagcaagcaagcaggtgaacaaacctctctctgcatgcgcccaacacgtgcctactatagtacttacaagcagacagcaaattgattaactaaggacgggcacgacgagatcgccggcgatggccggcgtcgcgagagatgccgagacatcgatcacgagcggccggcgacgaggagcctcgccggggtgctcatcatctggtacccctggtgttggtggtggtggccgtggcccccgtagcccctgccgctgccggcggcggcgggaccgccgaagcgcgcgccgcagcgcggggacgcggcggggtcggcctgctccatctcccacatgacgtccatgaaggcgtcgacgtcgcaggggagctcgagggggccctcgcacccggcgaacccgtactccgtctccgcctggtccagcagagcccggaacagcgggtggttggcgcaccgcgcccgcaccgcgaaccgctccttctccggccccaccagcaccgcgaagaaccccgccggcacggccgcgccgccgtagccgccgccgccggcggcggaggcggggcgcctcgttgtccggtgccccagcgacgaccggcacctgtcgatcgtcttggccaggatgttcctcctctcccctcctcctcctcctccttccttcatcgtcgtcgtcgccgcgcgcagcgaactatgcacaaattaaac

SEQ ID NO: 89431 - DNA, 527 bp, Oryza sativa
  unsure (1)..(527): unsure at all n locations
  Clone ID: PAT_MRT4530_88189C.1
ttgccatagggctgcgagtgatgttgctagacctgacctgaaatgtgctgtgtgaanccatggaggttgggctggcgaccccccatagaagccagagttgcctgccacaggatgatgctggcggaagagtgtggccatgtgtgggatgccctgctgcaaactgtgccacagtgatagatgggcactggaaagggtgtgccactgctctggacccccttgcacctgggtgtgccncccacctgaggtgtgtgcacacacagtgagctggccctggacccccctntggaaatgtctgggcgccaattggagaactgggtttgctgcttggngggctgctgatgctaatgataatgatgggtgacttgagagaaaatgnccttnatgaaatgattggcacgcgccctgattgcctctttgccaatgatgctggcttgatgactgatggtggtgaataacacctgctgaatgatgaatgaatgattgatgaatgaattgagaggcctgctgaaaaaaaaaaaaaaaaaaaa

SEQ ID NO: 89432 - DNA, 3300 bp, Oryza sativa
  Clone ID: PAT_MRT4530_8818C.1
atggcgcgctgcggcggcgaaaggatggtggacgagctgcgcgacgtgctggacgacttcgcgttccgggccaagcggctggccgcgccgctgctgcagccgttcggccgcgcctccgaggcggtggcgcttgacggcgcggagatcgacgggctcaggcgcatccgcgcggcgctccgggccgccgaggagcgcgtggtcaccgatgacttcgtcaggctgtggctgcgggagctggaggacctggagcgcatggccgaggacgtgctcgaggagctcgagttcgaggcgctccgcgcgtcccgcctcgagcggttcaagctccagctcctccggtccagcgccggcaagcggaagcgcgagctcagctcgctcttctcctcctccccggatcgcctcaaccgcaagattgggaagatcatggagcgctacaacgatctcgccagggaccgggacgcgctgcggctgcgaagcagtgatgaggagaggcgacgtgagccgagcccactgacgccgaccagctgtttgacgaaatgctcccttcatggaagagagcgggacaagaagcaggtcattaagctgctcctatctgatgaatataactgccagggtgtctactctgttgtgcctatagttggcgctgctggtgttgggaagactagtctggttcaacacatctacaatgatgaggccttgagatccaagtttgacatgaaaatgtgggtctgggtgtgccaagagtttgatgtattgaagctcacaaggaagctcgctgaagaagcaacggagtccccttgcggcttcgctgagatgaatcaactacatcgaatcattgctaaacggctggagggaaagcgattcttgcttgttcttgatgatgtatgggatgagagtctactccgctggacaagcttgctggttcctctaaaatctgctgcacctggtagtagaattgtagtgacgactagaagtgctaaagttgctcgaatgatggcattcaagatacaccaactggggtacctcactgatactacctgctggtctgtgtgccgaaatgctgccttgcaagaccgtgatcctagtattattgatgacggcttgatttctataggtaaatctgttgcagccaagtgcaaaggcttgccattggctgcaaatgcagcaggaagtgttctatccattgcaattgataggaagcactgggagactgttgagcaaagtgacttgtgggctaacaatgaagtgattgatcatacccttcctgctcttctagtgagctacaatagcttacagaagcctttgaaacattgtttctcgtattgctcgctgtttccgaaggagtatgtgtttagaaaagacaagctggtcaggctatggttggcacaaggctttgctgcagcagatggagaaagcgatgctgaagatattgcttgcaggtactttcataacctcgtggagaggttctttcttcagcaatctccatcttatgaccataacgagcaaagatccttcagaaacttccataacactgattatactaacaggtatgtcatgcatgatctctaccatgagcttgctgagtacgtagcagccgatgagtactctagaatagagagatttacattgagcaacgtaaatggagaagctcgccatctatccttgactccaagcgagactcattctcatgaaataggagaatttcatgcatccaataacaaatatatgaatgaatcccaataccctggcctgcgaactttgctggttgtccagagaaccaaacatgacgatggaagaaaaacttcgagcatacaaaaaccaagtgttctgttcaaagcttttgtatgtttaagggctctggatttgagtaatactgacatggagggcctgccaaactctattggggaactgatacaccttaggtacctcagtcttgagaacaccaaaatcaagtgcctgccagagtcaataagttctctattcaagttgcacacgatgaacctcaagtgttgcaactatcttagtgagctgccacaagggataaaattccttgctaacttaaggcatcttgaactaccacgcatagataactggaatgtgtacatgccatgtggaatttctgaattaactaatctccaaacaatgcacacgatcaagttcacaagtgattcaggaagttgtgggattgctgacttggttaacttggacaatcttagaggtgagctgtgcatatcaggcatagagaacgtaagcaaagaacaaattgctacagaagctatcatgaagaacaaaggtgaattgcgtaagttggtactccagtggtcacacaatgactccatgtttgctaatgacgcatcatctgtgttggacagccttcaaccccaccctgctctggaggaactcattatcatgggcttttttggtgtcaaatttcctgtatggatggggagccagtgctcgtttaaattgtccttcctagagctgaaagattgtcggaattgtaaagaattgccatctcttggtctattaccctgtctgaaacatcttttcatcaactcactcaccagcatcaagcacgtgagacggatgttatctagcggtgatcatactagctctggtgattttcagtccaggattgcttttcctacattggagacactgaaattcacagacatggaatcttgggagcattgggatgaaactgaggctacagacttcccttgtctccgacaccttaccattttgaattgtagcaaactaacggggttgcccaagcttctggcattggtagatctgcgaataaaaaattgtgagtgtctactcgacttgccaagtttcccatccctccagtgcattaaaatggagggtttctgccgtgtcaaccatttgttgcaactccctctattctctcagcttgagatgctagaacttcggtgtcacaaaaaactcgtatcgctgagaaaactccagcatatttccccatttcacagtttgagattgagaaaagaactagtacaaaaggtatcaggttgtgaagtgttgccattccagaatccctctgttcaagatagtcagaaaacttggacatttttaaggtgtgccgggcaaatccttgaatgtaatgttgttgcttgtactgatcttaccttcggccagacgaatgtccactcttctgaagaggaaatcggcaatggtgtaatattccacataggacaggatgaagctgttgagcttgtatcctgcaaaccggtttgggtccaaataggccagccagaggaggttgagattatttgcatagactag

SEQ ID NO: 89433 - DNA, 538 bp, Oryza sativa
  Clone ID: PAT_MRT4530_88190C.1
cgggctgcaggcagctttctcgataattctctcctccgatttcgccgccttccctcccgctcgggccatcgacgcagcctcccctaaagaacaacacctaccctctgccgcgtcggcgaagagatggggaagcacgagttcctgacgccgaaggcgatcgcgaacaggatcaaggcgaaggggctgcagaagctgcggtggtactgccagatgtgccagaagcagtgccgcgacgagaatggcttcaagtgccactgcatgtcggagtcgcaccagcgccagatgcaggtgttcggccaggcccccgaccgagtcgtcgagggcttctccgaggagttcctcgacgccttcctcaccttgctccgccgcgcccaccgacactcccgcatcgccgccaccgtcgtctacaacgagttcatcgccgaccgccaccacgtccacatgaactccacgcgctgggccacgctcaccgagtttgtcaagttcctcgggcgcgagggccactgcaaggttgaggacactcccaaagggtggttca

SEQ ID NO: 89434 - DNA, 412 bp, Oryza sativa
  Clone ID: PAT_MRT4530_88191C.1
cagcagcagaggcgacggtattaaaaacggagaggagcaggagcacgcaacggcggcgatgcgaagcgcagggagcaggagcttgtcagcggtggaggcggggtgggagcgcggcggtcaggagggggtcggcgactcggcgagatatgctctgcggaggacgccgtccgaaggaacgggcgaaggaaagggggaggcaatttttccacgaaaaaggcttcgcgcggatcgtccccggggccgccgcggcctcccccgcccggcgagggcacttgttgccacctacgcgggaagagcggtggaggcggcggggcagtacccgagtctggcggcgatggatctggccggtggtggcggcgccaagcacagctggaggtggaggagggtgagcggcggcaccgtgcacgcgtga

SEQ ID NO: 89435 - DNA, 2381 bp, Oryza sativa
  Clone ID: PAT_MRT4530_88192C.1
gccttcgaccgcggcttctgcctccttgtcaaggctatccaggagctgagtgagcgcaagtacaggatcgtggtcactgtcggcttcggcgggccgagcggttcaagaattcagagacacctggaaagagcagcctggattcttggattcagcgagattgtctacttcgatgtctcctgtactttagcatgagccgagaccggaagtgacgtttgctcaatcgtcttcagattcaaagttcgtaagaccctggggtctctctttgaagatcacgttgctgaatgtaatgtaaatgtcaaggatcttataaaagataaatataaattaatgcaattggttgattttcaagagaagaaacgtacaggatggaggcaactgaagatttcgccatctggagtggtgattgttgatggtgcttatgctcttcattcaacactgaggtcactgcttgatattcgtgttgctgtggttggtggtgttcattttagccttctgtctaaagtccagcatgatattggagattcttgctcgttggactatctgattgatagcatatttcccttgtttagaaagcatattgagccagacttgcatcatgctcaaattagaatcgacaacagctttgtctgctcattccgagaaccatactacaagcttaaatgcaaaaacgagttaccagatggacataatttgtatttttttaatcaaaatgaaggagaaactgagaactttattgagatgtaccttaggccaccttttgcttccgaggaaataaaaattgatgattggattaaagttaggcaatgtggaataagatattacttgtctcttggggatcagaggattgtggacaaatactttattatccgtccaaaagctgagtttgaggttggacgtacaactctgggaggattgttggccttaggatatagtgttgttgttagcttcaaacgtacatgcacatctgtcagcagagatcagttattaattgcagcagagactattgacaccctaaatgaaacatttctggtgctaaaaggtccaagtaggaagattgttgcagcagaagctagaaagctcggtataaaggggccatggattacgaagtcataccttgaaatgatcctagagagcaaaggggtcccacgacttaatacgccaccaccaatctcaaggaaattactgactgaaagtcaagaaaaaaaaattgttgcaccaaagccaattcgtgtttcgaccgaaaatgttgcaaattttgatgactttgcacaaccatggacgaggtctccacccaaaaagtttgaccaggagcctgttatgggaaaatggcagttcaatcaagattcttcttcaggaagtaacatccagttagctccactgccagactcctatgacttagataggggtcttctcctatcagttcaagcaattcaggcattgttggagaacaaaggatttcctgtcattgttgggattggtggccctagtggatcaggcaagacaagtttagctcagaagatggccaatataattggttgtgaagttataagcttggagagttattataagcctgaacaagttagggattataaatatgatgagtatagctcattggatataggtttgcttactaagaacattatggagatcagaaagaatcacaaagcagaagttccttgctttgactttgagaagtgcaaaagaaagaaattcgaggagcttcaagtctctgaggaatgtggagtgccttcctcaatcacttttgacctcactagggatcaccatgactccatgagaatgtacacaatcaaggtaatcttcgaaggtgtctatgctttgcatcctgctataaggaaatcactggatttatggattgcagttcttaagattcaaaatgactttgaccctgtgctctctcctgaaagctcacttttcgtactaaaaagtaaaaaacaggtatcttatcaagacatattgaaagtactcgatgctagtaaagcctgcagctgtgtccagaattttactgttgtgtatctaagacttcctggcataccgttgagtggacagctgacagaaggcgagtgtattagggtccgaatatgtgaaggaagatttgcactgttaatacgagagcctataagggaaggaaattttattatccagccaaaggttgattttgacattagtgccagcactgtcgcaggacttcttaagcttgggtgcattatcagaagaaccagttgctatacgggttgtaacctttgtgctatatgggttgttgttattgtggttgattgttgggcctatgtgggcttagcccacttgttatttgatactaatataaatgaatataatatgatgggctgaaaatggtgtggtgt

SEQ ID NO: 89436 - DNA, 339 bp, Oryza sativa
  Clone ID: PAT_MRT4530_88193C.1
atgggctctcgcgccgcggaggtcgtcgacaacaaagaacgtgctaccggcagggagggagggtgccgcgcccctgccactgcctccccgtggggagcccgccgcccgtggcctaccgcctcccctcctgccggatctggcggatgggaggacaccgccgcgcccaccacccacggcagggcctgccgcctcccctcccggccatggtgctcgcatatggaaagaagaggaggacggatgaagggggaggaagagagcggtgggggagaggagataaggtgcaagcaggccagggacggatggagacgtgcagaacactcccagccaaaacttgcatga

SEQ ID NO: 89437 - DNA, 1428 bp, Oryza sativa
  Clone ID: PAT_MRT4530_88194C.1
tcagcaggcgccacggcggaagccgacggagccgccgccgacgtcgtagagcacctcgtgcgtctgctgctgcacgttcccgatgaagccgagcgcgaagtctcccggcgtcggcacgaacgcgaggcacccctccaccatgactcccatcgcgtccagcctcaccaccgcgccgccgtcgaacaccagcgacaccgccggcaccgtcacgctcgtgaaccggacgaagtcgtagcaggtgtccagcccggccctccctcccgccacccgcgggtacgccgccatggcgctccggaacgccagccgcagcgccctgtacgccgtcggcggcagctgcgtgatgatcacgctcgagtccatcaccgcgccgccggcgaacaccaccggcggcacgttcagccgccgcccgccgacctcgatgcccctgaggcgaaccaggtacagcgtcgggatgatgctcgggttacgcaccagcggcgtcctcgcgaacctccccgcgccgccgccgtcggccgggccgccgagcgagaggaagccggaggagctcgggtccgggacgcagtaggagaacgcgttcccgaacgtcgccgccgtctgcgacaggagcgactggcggccgccgccgagcgacatggtgccggaggtggaggcgctgaagttgccgcgcacggcgtggctgcagccgaagcggaagttcatgacgacggtgctcgggttgagcgtgagggcgtccaccatgtacgtccccgaggtggccctgccgtcgccgtagtcgacgaagtactggcactggttgttggagcaaccagcgccgtagcggccgagctcgccgcaggcggcggagccgcacggcacggcggcggaggtcctcgacctcctcgggtcaaacaaggcgttctgctgcgggtagcactccggcatggggcacggcgcgcactggatccatggcaggtcgatgctggtgtcgatggacatcggctgcgccaggatggggtcgtcgatcgccgacgggcggctgattcttgacgacgacgacgacgacgagcccgatctgccaccggtgccgatgccgaagctcgcctgcatcttgtagtccgactgctgcacgtcgacgatcggcttgtccggctcaagcacgacgtcgccgccggcgggggccttcctccggatggcgtcggggtggagcttgtccaacgtaacatgtcgaccaacaacggcggcaaggttgtcttcggcaacgggaaacacgggccgtaggggcggggcaaccccccccacgtgccattgctggatggcattggttaacacattacccttgagaccggagcagatggctttgggcttcaacaaggagctggtttccacgacaatgtagtgctcgcgattctcagctcctccatcaccatggccatggccatgagagcccat

SEQ ID NO: 89438 - DNA, 287 bp, Oryza sativa
  Clone ID: PAT_MRT4530_88195C.1
cgctcccaacaattccccaaagtaagtgacggccgctaacgaccacagccggccctccaaaaggatgacctctaggactactgcgaccgaagagagcacagagtcaaggaccctggagttacgttccctccacagttgccatgagactaggaggaccagggagtcgaagctggcacggagatgatcaggtaaacaagccctagaagatggccaccaatcatgcagccatgtgccatagaggggagagagggcagcccagccaggagacgataacacccgtgttggta

SEQ ID NO: 89439 - DNA, 1323 bp, Oryza sativa
  Clone ID: PAT_MRT4530_88196C.1
atgggctctcatggccatggccatggtgatggaggagctgagaatcgcgagcactacattgtcgtggaaaccagctccttgttgaagcccaaagccatctgctccggtctcaagggcttgcttaatgtacgcctaatacgtgtacatgagtacatgcgtgcagcaatgccatccagcaatggcacgtgggtggcgctgcaccgcccctacggcccgtgctcgccgtcgccgacgacaacctcgccgccgttgttggtcgacatgctacgctgggacaagctccacaccgacgccatccggaggaaggccaccgccggcggcgacgtcgtgcttgagccggacaagccgatcgtcgacgtgcagcagtcggactacaagatgcaggcgagcttcggcatcggcaccggtggcagatcgggctcgtcgtcgtcgtcgtcgtcaagaatcagccgcccgtcggcgatcgacgaccccatcctggcgcagccgatgtccatcgacaccagcatcgacctgccatggatccagtgcgcgccgtgccccatgccggagtgctacccgcagcagaacgccttgtttgacccgaggaggtcgaggacctccgccgccgtgccgtgcggctccgccgcctgcggcgagctcggccgctacggcgctggttgctccaacaaccagtgccagtacttcgtcgactacggcgacggcagggccacctcggggacgtacatggtggacgccctcacgctcaacccgagcaccgtcgtcatgaacttccgcttcggctgcagccacgccgtgcgcggcaacttcagcgcctccacctccggcaccatgttcgcgaggacgccgctggtgcgtaacccgagcatcatcccgacgctgtacctggttcgcctcaggggcatcgaggtcggcgggcggcggctgaacgtgccgccggtggtgttcgccggcggcgcggtgatggactcgagcgtgatcatcacgcagctgccgccgacggcgtacagggcgctgcggctggcgttccggagcgccatggcggcgtacccgcgggtggcgggagggagggccgggctggacacctgctacgacttcgtccggttcacgagcgtgacggtgccggcggtgtcgctggtgttcgacggcggcgcggtggtgaggctggacgcgatgggagtcatggtggaggggtgcctcgcgttcgtgccgacgccgggagacttcgcgctcggcttcatcgggaacgtgcagcagcagacgcacgaggtgctctacgacgtcgtcggcggctccgtcggcttccgccgtggcgcctgctga

SEQ ID NO: 89440 - DNA, 708 bp, Oryza sativa
  Clone ID: PAT_MRT4530_88197C.1
atgtggcgtggtgtggggggagaaatcggcaaaatccctcacctgtacgtagcagatggtgttgatggggttgagcttgcggctcttgagctccatgctcctgcccttcctcccgtccttcccctccgcgcgcgtcttgttgaacgccacctccgcctcccctccccctccccctccccctcctccgccgcccatcttctccttgctcctcttcccgagcgtgctgttcccgcgtcggaggaggttgttgtggtggccgcggcgacctcctcctcctgcctggccgccgcggggtttaagggcggaggcctcatgccgaagcgagggacggagctcccggatggattacgggggggagcagcagggcaacgggggcacattcgaaaagctgaaccggcatatcatgatattgatgaaattaccatgggcgccttgctgttgacggatacttcgcctatcactaaaagactaattagatctgcctgtgttgtcgccaccatatcaaacatatcttcctccgcgcatgccggccctatccacaaggcccttaaggagaagagcaaagccaacatcgatgcatgcagaaccgtcaccgagaagaacaatcccaagtacaagctcaaacaggtgtggcgacgcgtagcaggtcggcgacggcgtcgtagaactagacgtctaagatccacgctcaaggaggttgtagagaaa

SEQ ID NO: 89441 - DNA, 950 bp, Oryza sativa
  Clone ID: PAT_MRT4530_88199C.1
gcctcgcctctctccatcatggtaagacagtacacaccacacaaatgatctagaatgacttacattgtgaaacggagggagcaataactaacaaaattaaccataatctgattcgctgatcaattgactccggtgtgcagaggctggtgatcaagacgaagagcgtggagttcatgccgttcctgctctccctgtccgtgttcctgtgcggcacctcctggttcatctacggcctgctcggccgcgaccctttcatcgcggtaatttactcatcgtctttcttttcgctgtcaattgctgcaagcctacaagcaacctgtcgacgttgattacagaaagctacgtaacctgacgacgagacatatgatccaatccgatcgtggctttttgtgtttttgtttggatctcgattgatcgtactgtctgatgggcacatgcaaaccgctgcaaaagcacagcactgcaccgcacaagcaacgctgtttgcaactcaatgccgcgaaatggccggcggcgtcggttatcctttcgatgtctcgtccaacttggcgcgcacatgttgggcgtacgtacgtactcccttcgttccatgaaaaaccaatatagaaccagatatgacgcatcgtaaattcgtggtactatgaatctggatatatatatatatatatccagatttgtagtattagaatatgccacatatttatttttcatgagacggagggagtataggagtagcagctatagccgtgcacacgaatggcacgcaaagagtttaactgacgaaattgcatcattgtgttgtacgacgtgcagatccccaatggatgcgggagctttctgggcttgatgcagctgatcctctacgcgatctaccggaaccacaagggggccacgccagcggcggcggccgggaagggggacgccgccgacgaggtggaggacgcgaagaa

SEQ ID NO: 89442 - DNA, 405 bp, Oryza sativa
  Clone ID: PAT_MRT4530_8819C.1
atggcgagagttccggcggggaagacgaagcgtcgcttggatctcggatttcttgttaagggtatcggagtcttcgtcttcgctactcgtttcgacaccaacggtgctcacctttgtgtcaaacgacgaccgacgacggccggcgacgagaggcgcggcggcggcggctcggacctcgtcggcggcggggctacggcgcacggcgacgacggggaggtggcggctgggcttccccaccaccgtgcgcacctaatggcgtcgacggcaagcggcggcgacggcggatgcggcggcgcggcgcggctggcggttggccggcggcggcagcggcttgagaggcgtggcggcggcgctacgaagcatgggagagcacgggagagggggcaaacgaaagaggacaactag

SEQ ID NO: 89443 - DNA, 1401 bp, Oryza sativa
  Clone ID: PAT_MRT4530_881C.1
gctcctatcatagatgtggtctctgcccctgtccctccctctttccttctcacggtctctacttctacttcggcttcggcgccgctctctcccatgactgcctctatctctgttcctgctatcccgttcattgtagtcatggtctctgcctcgatctctgctcctttccctgctttctcttctagttgaaccacgttgctcaacctcccatccagcccgtccagacccaggaagggttggtgcattttcagtttgctgtgttttagcacggaatttctttttgaggttgccaaattcatcatacatctccccgtcatcctcttcagcctctttgcggcgccttttaacttcctctagttcttcttcatcaagttctttatacccaccaccccggcctcctctcacaccaccttcattgtgacctggcttagtggtgttacagatattacatttcatccgctttgcccaatttatgttgccacacattgggcatgaccaatcatttggaccaaacagtccaggaggaccaccaacagcagcagcacggctgcctccttttgcatcgtcacttccacggcctctacccctaccaccaccaccggcacctgatccactaacaccggcagggcgagcagctccacagcgattacagacaccacgaaaggcaaagtttacattgccacaacttgtatttgggcacagccaatccccatcttgctgccaggcttttcctggaccatcaccgtgccctctccctctgcctgccccgttgtccaattcatcttgtccaccaaggccagcagagttgttcaaactcgccgagttgtcatatgtgtctttgttttttgactcagctatatggacctgaatggtgcttccatggaaatccttgttattgaaccattctactgcagctgaagcagcatgtgggtcttcataggtgactgtcgcgtcaccctttggttcattggtaaccttgtccctgtaaatccagatttttggacgaccggtccttttatccttcttcagcaaccctatggtgccaaaataatcggccagcatggtctcatcggttccaggaggcagattgcacacataaacagagccatttggggggcctcttgacatatacccagccatctcccaacatccatgtctggccttcaatctgagaagttcgagcactgagcgtaggaccgaatagtccttgtcgcatcctttggcttcgtcgtacagaagctccttcgctgtttttttcaacgcttcccaactgtccaaccctcgtcttgtaccagttaggacctctggttcaacgtgccgtaacatatcttccagatcaaaatcaataccttcattctctatacctgagccaccgtattccgggatgtttccctgtgacat

SEQ ID NO: 89444 - DNA, 492 bp, Oryza sativa
  Clone ID: PAT_MRT4530_88200C.1
gacacgcagcccacagtgccccggtgcacagagccccgtgttgctgcacttcctccacggcgccccgccggcgccggcgccgccgccagcagcaagccgccctccaagacctagctcctccatatccggttctcaatctctcccagatggtcggccgccgtccgtcgtcttaattctaacgcatccatgtattatgtttaatttttctctctcgatcgctagctagctgtagttccctttttctagtagtagctgttatgtttttttctgtcattcgatctgtgtgtctttagttaatctgcacctcctctgtagcttggtcgatcgatcaggttaattttgtcaaattagcactattagctagctagtagctagaccagaggatcaagcatgcatcatcccttcccaaatgatctcctactccgtggtgcagttgcatgctttaaccatcctattaatgaatctgccatcattctcaaaaaaaaaaaaaaa

SEQ ID NO: 89445 - DNA, 513 bp, Oryza sativa
  Clone ID: PAT_MRT4530_88201C.1
atgaagggaggagcatcaaggaaggtgaggtctgccatgccagaagaggaaccgaaacatgaagacagggcagcagagacaacggagtcttccatgtttctgacgagaactgaggcggaggcatctccaccaagaatcgtcgggcttcgcgggaaaccacccttcacaactacaacaacgacttccaacttcaccaccaacaaagacaagagttggggcaagcagagcagcagaaaacacctaggaggaaggaagggaggaagggaggtggcaaccgcgatgggggtggggggagggggtggacgtcgccgacgcgcaccctgccgaaagccgccccaccggaccgacgaagagaccaacccgcgccgcttcgcaagcaccagccttctgcccacgcgcgctagccaccgccgcgcgcgccggccacgcccaccgatgtgcgcagccgaggagacctccgccgccggccactctccacaccggcgcgccgctatcctctacgactggatctag

SEQ ID NO: 89446 - DNA, 1531 bp, Oryza sativa
  Clone ID: PAT_MRT4530_88202C.1
ttgatattttgttgttttttttttttttttttttttttttttttttttttttttttttttttttagccacaacacatatatttgtcctttaaagttttaaggagttgaggagaattacaacagcgtacatccgcaagaggatcaaatcagagccctatacaaaaggaaggatatgcagcgcacacatccgtccgtacagtcaagctaaccaaaagccactgtggattcattcacttgtcgaagtagccctcggtcctgcccttgaacccgatctggccgaaggtgagcgccaggaacagcccaaggtgccacgtcaccaaccacagccagaacggcgagtcgagcgccggcggcgaggggaagtgggagagctcctggccgatgctggagaagaagagccccgtgaggctgttgccgttgatcgccgggacgctcgacggcgcgatccacccgatcagcccgaacccgatcacgttcaggtccctcctaagccagtcctgcggaaacgtcatgcaggtgatcctgccgttcctctccaggttcctcgtcagcagcgggttcctcgccgacacccgggcgcccgtcgtgaagccggtggagaaggccggccggcgggcgagggtggcgccggcgaggccggagacggtggaggcggccatggcagctaagctagcagatggtctctctctgtctctggtcggcgagctgcgtgtgttcgcgtgggcctctaactgctctgtgttgccatcttggacaccttctgccttgtaagttactgaaggtagagaagcaagtgtagcagcagagaggcctctgtgtcctgtaccaaccgcttctcccaatgcaactaattcctgtggatcattcgcatgctcctctacaggctccacaggtctccaatcgctgatccccgcgagagccataagtcgcgcggctacttcgcgctcctcggcatcctgcagagctcgtgcataagcctcatcgtcctcgtactccgcggggtctagctctggctcgacttcctcctcatcatactcctcgtcgaacccctcctcctcgaactcgcttccctcagccccctccccatctcgctctccctcgccacgaccctccccaacggcgtgctcgtggtggtggacgcggaggtggtgctccagctcctcctcgtagtcctcctcggcctcgtcgtcgtactcgtagctcccggcatccgagctcccgtaatcgctgccctcgccgacgcctccgcccatgcgaagcatcatgtacgcccgctcctgctcctggagcacgcgggccagggcgaggtcggcgtcgacctggctgagcgccgtgaacggccgccgcgcctccgcggccgcggccacgtcgtcgtcccctccggcgtccgcggccgcagcggcgacggccacggcggcagctggcggggccggattcgtggcggggctcgcgtcggcgccgggcttgtcgccggcggcgccgccgctccccttcgaatccgccatcgccttggcggagattagcctcgtgc

SEQ ID NO: 89447 - DNA, 198 bp, Oryza sativa
  Clone ID: PAT_MRT4530_88203C.1
atgtcgaccggcggcaaccttcgcgtcttcgtggtcctcctcgtcgtgcaggtctgcctgctcgtggtgatggcgtcgtcgtcgtcgtggacggtgcagggacggcctttggcgctggagtccgtgccggcttgctgcttctaccacccggactgctgccaggccgccggcgccgatccggcgatcgctgatccgtga

SEQ ID NO: 89448 - DNA, 1113 bp, Oryza sativa
  Clone ID: PAT_MRT4530_88204C.1
agtaaaagaatggctagcaatatataatataataatataaccattgtacatttatggatcatacaacagccatgaggcccccacagggaatgcagagcatagcggcacgggcaaacagagtacagtggagctaagccaggagaggactgaagaacgcaaaagatcatagtgctggtccctcgcatgtgtccgaaagttttatctgccttctccccaacattacaagatgcgaccatatgatgcccgctatttgctcccatcaagccccataatggcagcaaagattggtcatgcctggttgctgtccgatgtggaaacttccgcgctgcacatcgggcaaaccttatttatttgaagccattggtttatgcactcaggatggtatgaatgcttgcaggggagtgcaatcaaagattcaccatcctcaaattccacacgacaaataacacattgctctgtgttgccatcttggacaccttctgccttgtaagttactgaaggtagagaagcaagtgtagcagcagagaggcctctgtgtcctgtaccaaccgcttctcccaatgcaactaattcctcataagaatactcatctgggtcaacctcttgccacgcatcctgtggatcattcgcatgctcctctacaggctccacaggtctccaatcgctgatccccgcgagagccataagtcgcgcggctacttcgcgctcctcggcatcctgcagagctcgtgcataagcctcatcgtcctcgtactccgcggggtctagctctggctcgacttcctcctcatcatactcctcgtcgaacccctcctcctcgaactcgcttccctcagccccctccccatctcgctctccctcgccacgaccctccccaacggcgtgctcgtggtggtggacgcggaggtggtgctccagctcctcctcgtagtcctcctcggcctcgtcctcctctcgtagctcccggcatccgagctcccgtaatcgctgccctcgccgacgcctccgcccatgcgaagcatcatgtacgcccgctcctgctcctggagcacgcgggccagggcgaggtcggcgtcgacctggctgagcgccgtgaacggccgccgcgcctcc

SEQ ID NO: 89449 - DNA, 384 bp, Oryza sativa
  unsure (1)..(384): unsure at all n locations
  Clone ID: PAT_MRT4530_88205C.1
ttttcactcactcactcacactgaactcctatggcctccgccgtcgtagccaagccaccggccgccgctccggcgagccgccgccgatgcttcgtcttcgtagagcgcgccgccgccgccgccgtcggcgtcaacgcggcgatcgctgccgtcgatgaccaccgcccagttccggccgcggccgccgccgccatggacgacgtcgtcggccgcgtcgcgcggcctgcgcgccccagcgcgcgcgccatcatggaggggacgcacaagcagatcagctccggcggcgcctcgggcggctactgcaccgngccgtggngcagcatctgcaccgggaataacccgntcgccattgccgagntcttgctgtgcttgcacctttgcggg

SEQ ID NO: 89450 - DNA, 1065 bp, Oryza sativa
  Clone ID: PAT_MRT4530_88206C.1
aaacctgaccttgtgatattcgtgatggatggtagcattggtcaggcagcgtttgatcaggcgcaagcatttaaacagagtgcttctgttggtgctgtgattgttacgaaattggatggtcatgccaaaggaggcggtgcacttagcgcggttgcagctacaaagagccctgttgtatttattggaactggagaacacatgcaggattttgaggttttcgatgtgaaaccatttgttagtcgtctgttaggaatgggagacttgtctggcttagtgaacaagatcaaagatgctatgcctgctgatcaacaacctgagcttatgcagagactgatagaaggaacctttactctcagagtattctacgagctgttccagaatcttcttaacatgggtcctattggacaggttttatctatgatacctggatttaggtctgaactgatgccaaaaggacatgacaaggaaagccaagcaaagattaagcggtacatgactattatggattctatgacaaatgcagagcttgatagcacaaacccaaagctgatgagtgaatcacgaattaaacgggtcgctcgaggatctggcaggaccatgaaagatgtgaccgacatgctggaagagtacaagagaatcgccaaggtgtgtagcaagttgaagaagaagttgcccaagaatatggacaggaatgttatgaacaacaaggacacgctgaacaccattaacaatctcatccctaagcaattgttgaatcagatcggtggtgttaatccgttgcagagcgtcatgaagcaaatgggcttaaagacatgaacgaaatgttttgggagcatgtgctgatgttaattgatatttgcaaatatatatgatgggcttgatgcaaacactcggctaacattgagggcctggttttcagtgggatatcggcatttaaagtattttttttcttcatgctgaatggaggaagtagtaatattaattttgctgaaatttatgtcaattcagtcaatcaatagttagcgtaccctcgtaaggggcatttaaagtaaaattgaaaaaaaa

SEQ ID NO: 89451 - DNA, 932 bp, Oryza sativa
  Clone ID: PAT_MRT4530_88207C.1
aagggggtgaggagaattacaacagcgtacatccgcaagaggatcaaatcagagccctatacaaaaaggaaggatatgcagcgcacacatccgtccgtacagtcaagctaaccaaaagccactgtggattcattcacttgtcgaagtagccctcggtcctgcccttgaacccgatctggccgaaggtgagcgccaggaacagcccaaggtgccacgtcaccaaccacagcctgcaaattaatcacaaaacccacatgaacaattagacacgtagccactgaacgcttttgctactaattatataggagtactatactgcgtgcctgaagaagatagaggtactgaccagaacggcgagtcgagcgcccgcggccagggaaagtgggagagctcctggccgatgctgaagaagaagagccccgtgaggctgttgccgttgatcgccgggacgctcgacggcgcgatccacccgatcagcccgaacccgatcacgttcaggtccctcataagccagtcccgcggaaacctgcaggcccaacacacaacaccacgtacgcaccgtcagaatctcacgccacgtacgcttgctgctctcagaattcttcttgcaggtgatcctactactgctacttacgtcatgcaggtgatcctgccgttcctctccaggttcctcgtcagcagcgggttcctcgccgacacccgggcgcccgtcgtgaagccggtggagaaggccggccggcgggcgagggtggcgccggcgaggccggagacggtggaggcggccatggcagctaagctagcagatggtctctctctgtctctggtcggcgagctgcgtgtgttgtctcggtggtttgtggcagcgtaggttaggacgcgtggtgggacgcgtggggcggttgcgtacgtggcggcaggggatgagcgggcgc

SEQ ID NO: 89452 - DNA, 1365 bp, Oryza sativa
  Clone ID: PAT_MRT4530_88208C.1
atgggggtgatctctggtggtggtggtggtgacgacgacggctacggcggcggcgacggcatgctccggtcactccactcctcgtcgtcttctgacacggataacaacagcggtggctgcaagaacaatggcggcggcggtggcgaggccgccgccgccgttgagggtggcggtgatcagcgtgccgttgcggcggcggcgccgtcgacgcgggacttgctgctggcgtgcgcggacctgctgcagaggggggacctgccggcggcgaggcgagcggcggagatcgtcttggcggcggcggcgtcgccgcggggcgacgcggcggaccgcctggcgtaccacttcgcccgcgcgctggcgctcccggtcgcgccgttcctgcgtttcgcgcacctcacggcgaaccaggccatcctcgaggccgtcgacggcgcgcgccgcgtccacatcctcgacctcgacgccgtccacggcgtgcagtggccgccgctgctgcaggccatcgccgagcgcgcggacccggcgctcggcccgcccgaggtccgcgtcaccggcgccggcgccgaccgtgacaccctcctccgcaccggcaaccgcctccgcgccttcgcccgctccatccacctccccttccacttcaccccgctcctcctctcctgcgccaccacggcgccccaccacgtcgccggcacgagcaccggcgccgccgccgccgcctcgaccgccgccgccgccactggcctcgagtttcacccggacgagacgctcgccgtgaactgcgtcatgttcttgcacaacctggccggccacgacgagctcgccgcgttcttgaagtgggtgaaggccatgtcgcccgccgtggtgaccatcgccgagagggaagcaggcggcggcggcggcggcggcgaccacatcgacgacctgccgcggcgggtcggggtggccatggatcactactcggcggtgttcgaggcgctggaggcgacggtgccgccggggagccgggagcgcctcgccgtggagcaggaggtgctgggccgggagatcgaggccgcggtgggggccctccggcggccggtggtggcgcggcatcgagcggtggggcggcgccgcccgcgccgcggggttcgcggcgcggccgctcagcgcgttcgccgtgtcgcaggcgcggctgctgctccggctgcactacccgtcggagggctacctcgtgcaggaggcgcgcggcgcctgcttcctcgggtggcagacgcgcccgctgctctccgtctcagcgtggcagccgtcgtcgtcgtagccggcgacgaagacgacgatggcgacggcggcggcgaccacgggctagggtttgccaagctcgattga

SEQ ID NO: 89453 - DNA, 186 bp, Oryza sativa
  Clone ID: PAT_MRT4530_88209C.1
atgactgttggacttcacatggtgttgtcgattgtgtcctgtctctacggttcgcacaccgagaacgacaacagcttcgacatcagaagtcgcgattgatgtaaagagacctactcagacaagactaggttgtcaacgtaccgtgtgcggttcgacgtctccgagtcctgcttggagactgcttga

SEQ ID NO: 89454 - DNA, 1823 bp, Oryza sativa
  Clone ID: PAT_MRT4530_8820C.1
actagtactagatggtcagctttgcgaagaagaagatgtcgctagtggtctgccgaagttctagaaggctgcaggatccactagcgaagcaaaggaagcagtgaagccagatgtgaagcaggaggaaaagattagatctgttaaggtcctatccttagtttctgatctctttctttcctccaattttctctttccccctctctaaaccttgtaacagatggctgacaatgagaaaggaagtaggtcagaaatcaaaacaagggtgccccaagctccgagtgaatgaagcaccagacaccagttgtgtgacagtggtctaacacctgattaactagaacgaattgcttatagagctaccacagcagcatcagatgccaattctagacccgagtcagatgcaacctcaagtgcaggtggaggcagtccaatcactcacaccacaagttagcgcaccgccagcatcccaacaagcccatcgtgccatgccacatgtggactcaaaagaagcaagaatcatttgttttatctatgttgaacaagggcactatgcaaggaactgtccttagcagaaaaaaaaagcaccaatgcgaaccgaagatgaggtccgtaagatgaccattaccggcacagaatggcctccaccaggaatgacaaaacgtcaaagaagaaatttcttccgaggtgcaccatagttgacggaacatcttttagctaatggaggtagagtgtctgatagcgaagattcagatcaagtctcctcacgggttgaagatgagaagtctctccaaggtttcaaccagaataaaaaggaacatatggcatgctctcgttgtggagaaatcggtcactttgccagctcatgtgtcaccacttgcgttcattgtgaggaagaccatccacccgacgagtgtccaacaagcaggattacttatttcttgtgcgaatgagctgatcatgtacgaaaagattgtcaattcagttttctgctgatgaagaagatggccaaccaacccgccagttacaacagacagaagcatcaaggcaacccaaatcctcgacaagactacagtttcagcctaactccaatgccaggacagaggaatcaaaatgggaaaagaaaatgccgagacaacagccaagaaatcaagtacaagatgaagaacctgagagtaagaaagcccaaggactgcattgccccagaagcacccacaacacccggagtgaagagtacctggttgagaaaggtcaaaagtcgctctctcccccttccaaccctatttaaaccctccccgcacctcctccgtccatttccgccgtcgccgcccttcctcctcgccggattcgagctcgcgacgtcgctctctctctccgccatcgccgccgagctccggtccgccgccgtcgtcgccccggaccgcctcccacctcggcgccgcctccttcggcttcgccgcatcctcgccgacctcgtccacccctccgtttcggtcgccgaccgccggagcgccgccgtccccgtcgacccgagccacgccaccgcctccctccgctccggccgcctcctccgtcaccgccgtcgcctcggggtgagccgtggaccgtcgcctcctttcccccttccctctcctctctcggccgccgctccgccgcgccggtggttgccggcggcgaccatcggggcgcgggggtgccgcctcccgccgaccgcgccggcttggccgccctcgggcgcgccgagtggctgccgcgtggggcccggccgtcagccgcccgcgccctcgggtgcggctgacgtgtggggcccacggcgccggccggtgtga

SEQ ID NO: 89455 - DNA, 1375 bp, Oryza sativa
  Clone ID: PAT_MRT4530_88210C.1
atggcttccgctgtgcagttgcttttgcttcgtctacctctcgccgccgttttccccccaaaacccgcgacgacgaaaaccctagccgtcgccggaatgtcgaaggccgaggccgccgccgccggcgacgccgccaagcccgacccggagatgggagtcgcgggggagaaggaggtggttgcggagaaggcaccggcgaggaggaaggtagcggcggaggaggaggacccgcggctgcggtgggcgttcgtgcggaaggtgtactgtatcctggcgctgcagttcgccgtcacggcggcgatcgccgtcgtggcgtgggccgtccgccccatcccgcgcttcttcgcggcgggctccctcgcctcgtggctcgtctacctcgccatcctcctctgccccttcatcggtctctgcggcctcctcctcctcctcctcccttcccttgcttggttcctcgatctctctttctttcttccatggtggtatctgattggggttttggggtttgcgcagtgctgtggccgatgctcaagaccatcaggatctggaccacttgctgttcctattacctgggagattatgatatttgttgctatcagggtttcccaaaccgccggggccgaggttaccgcgccctgggcggaggttaccgcggtttttctattaccgtacccccgtggtaaggccggtaaccacgcggttaccgacggtaaagtggttctgcaagcagcaatcctaacggcggttgctgtcatcggcctcaccattttcacattctgggcagcccacaggggccatgatttcaccttcatgtatcccttcctggccgccagccttctggtgcttctggcatacctcatcattcagatctgtttccctctggggagggctggcatgacgatctacggctgcctcgccaccgtgctgttctccgccttcatcgtcttcgacaccaatcagctgatcaagcgccacacctacaacgagtacgtcatcgccgccatctcgctgtacctcgacgtcatcaacctcttcatggctcagctctcgttctccatctaagtggcacgcctgttcttacgcccttcaacggttgtccagtacatggtggttcttacagctgaagaaacttagttacatttaccttacctaccatatcctacactactatatatgcagcgagaagtcttgcagagctggagactctggacctgtaattacttaatcatctctagctatgttgcactgtcgttgcgctgatagcacgatagatatattctggtacctttgagacatttttgcagtgatatgcactacatcggtttagatctaatcagtggagcgaaaaacttcaatggagatgttaatttctcac

SEQ ID NO: 89456 - DNA, 671 bp, Oryza sativa
  Clone ID: PAT_MRT4530_88211C.1
ataattaaagtactcatgcggttcccgcccgcgtcatacgatctggagcagcctcgcgcgacgaacagcatccgcccacccagcgattccagctccttccatgcgtacagggcctcgatggtcccgtcgactggctatggtgcctggcccggctctgctgtggacggggattgctggctctagagtttttcggctctcacactcgtgcgaaagtagtcatatgtgtagaaggaagaaagattgaaggaggccaccgaaaggaaagagtgaacaaaatgtgtagcatgggggagtaggctcgaaataagttcacagcctaaggtacgggctggcgagtcaccctcaggctggggcaaaaaaggcgcatgagctctagtgccagtaaagaaaggagaagaaaccgggcccaaatgtcattagactaggagagtggtgtcaaccctggccacctgggaaaggttttggtcagggctaacaccgggggctactgtccatgatatgggcctgggggtatcatcgcgcttgaccggtctgtgactggtcgaatgaccgatgggactagggtagtgcgcctgcacgctgcccatgtgtcagtcggtgcatcccctgtcacatcccgtcccaaaataagtgcagacataagtttccatgttcaattttaatcgtctgtc

SEQ ID NO: 89457 - DNA, 759 bp, Oryza sativa
  Clone ID: PAT_MRT4530_88212C.1
ccggccgggaaaaaaaaaaaaaaccctgtcccttgttaattcttcttcttcttcctaactactccaagctagctcagaatcagatccatccatggcctcctccggctccaagtccaagaccaacaatggcttcttcgtcccttctcctgcaactgcaatggcgccatgcttcctcctcttgctcatcttcttcttcctccatgtcgatgcttctgctgctgctgcttcttcttcttcccatccacagctggtgcagcagatgcaggtgaagagggcgagatccctcctgcaggctccaaagatagactgccaggggacgtgctcggggcgatgcgccaacaactggaagaaggagatgtgcaacaagatgtgcaacgtctgctgcaaccgatgcaactgcgttcccccgggaagtgggcaggacacccgccacctctgcccttgctacgacaccatggttaatccacacaacggcaagctcaagtgcccatgattccttccttcctattagctgctgctattgctctcagagagatcagagtacaatgtacttggtagtatgtgtacgtatgtgttccatgcatcttgatgttcaatccctacatctctctggctgtcactactagcttagctactacataggactgctctatataatagatgcctttctactttcttcaatctccagcaccaggaataaaacaaacatatcatgattctcttctctcttctaaaaaaaaaaactcgagggggggcccg

SEQ ID NO: 89458 - DNA, 168 bp, Oryza sativa
  Clone ID: PAT_MRT4530_88213C.1
atgaccgacgatgaccacgaaggtcccttgaagggctcattggaagcggcagtgctggtggagcctctttctgatgctcctcgatgtgggctgtggcggcgccgctggacgtggtgggcttgccgcattagcccaattactcctaagtggtttggcctaagtgggtaa

SEQ ID NO: 89459 - DNA, 825 bp, Oryza sativa
  Clone ID: PAT_MRT4530_88214C.1
atggggagggggaagatagtgataaggaggatagacaactcgacgagcaggcaggtgacgttctcgaagcgtcggaacgggcttctgaagaaggcgaaggagctatccatcctctgcgatgcggaggtcggccttgtcgtcttctccagcaccggcaggctctatgagttctccagcaccaactgggcatggtgcactgctcacgctgaagaatatataccaactcctataactggagaactccagcaaactcccctcaaaggagctgaatatgcgcacaatatatgcgcacaatccgatagtacagaatcttctgaacttgaggttggcaagagctgcaagccacgcatgggccaaagggggcagattgctgcagatgccaatagcatttggcagagggaggcagcaagcttgaggcagcaactgcacaacttgcaagaaagccacaagcaactgatgggtgaggagctttctggcctaggtgttagagacctacaaggtttagagaataggcttgaaataagtctacgtaatatcagaatgagaaagggaagcctaattcaccaggaaaacatcgaactttctagaagcctaaatgtcatgtcgcaacaaaaattggaactgtataacaaggttcgatgcaaaattctcttagaaacttgtgactacatgttaacacattatcccaagcaactaaaggaacaacttgatttcagcttcaggcctgtgaacagagaggtgccacagatgcaaatgaaagttccagcactccatacagctttcgtatcatacaaaatgctaatatgcctcctagtcttgaattga

SEQ ID NO: 89460 - DNA, 3721 bp, Oryza sativa
  Clone ID: PAT_MRT4530_88215C.1
gagcaaacgaaaagcataaacctgcattatttaaatgccgatcaaacacttattccattatgtcactgaaatggtgccaccgcaccgatttattcaaagcaagaatataagacaagttattaggtttatagcatcaaaagccaacaagcacttccaaaattgcactagaaagctcagcaccttctcttgcatttagcatgccccattagtgctcggggtgaacaatgtaacatagcttgagagctatgttcacataacagtgttcacaacagactgcctggaacacatcctgtgttaacagcaagctaccaccactgttaatagtagctacagaaattgtcaaaacattctagattagacaatctccacaataatcatgcaataataagtttaaaagtaagcattagctgccatgcacgatagctaagatttaaaatatgagccgcgcatatggaagaaccaatccaagaatagcactgtggtctgcaaacccatgaaagctgcacttgtcaagaaaatccctacatctgttccgcccctcaaataacagagtactttccagtttgggcagaaccaggaaggttcagagcatggttggcacaatcttcaaggacacgcttcaattctgctttcgccttcttgacagatagctcagtggggccctctatgaacaggtacagcttgcgttcattagcaccaacaatttttccttgaggaaaaaaggttccccttgtagtgattgcagcacccgtccattcctggataggacccaatgtttctttgtgagtgatcttccagcgggcattttgtgggaaatcattaatctcaagctcagcctcataatgttctgggactgcatgtgcttgtatccttgccagattttgctgtatgttaaatgcagcctgcagtgcacgtgctgtggcctcgttattctgtgtgtttgaagcaatggctagaggaagcaagggccctacagaagtgccttgtgtttgctggttggcattgctagcagcctttgctgcaaccatagcagcagcagcttgagcagcagcaatagcttgtgccgcaaggtcacctcccgccttacgaacccctccttcctcatcagaatctgaatctgacttgtcctcctcataaccatattcccttgcctgagccttctttgcagatttccgtgcttcatcctcctcttcattgaacttgaaaccgcttccaccatatcctgttccatgggcctgctctgttccctgcttcacctttgccataaaacgatcagctagacctttcaggtcctctggaacagcctgctctgagagctccaaagctttaacaaggtctggagcataacgctcctcttcctcagaaataaaagtcacggcaaatcccttcctcccagcacgtccagttcgtccaacacgatgaacataatcctcatagtggttcgggacatcataattcacaacaagctcaagctccttgacatctaaacccctagcagcaacactggtagcaatcagcaagctgcacacattgctcttgaaatcagctagtgttgattcacggtcagtctggtctttcccaccatgcagggataggcatggatatccatgctggaacaggtctttgagtagagaatcacatttatctttatcaaaccactctccaagcagctccaacagcctaaagaacctctcattttctggccgcacctcaaccagttgtgtgatatctttgttgacgacactcctcccacccacctggatctcaacaggctttgtcagcaccttacgggccagtatctccacctgacgtggaaaagtggctgagaaaagaactgtctgcctatctggacgagtattctgaactatccgagtaatctgaggctcaaaacccatatcaaacatcctatcagcttcatccatcaccaagaatgtaactctccgaagattagtaatcttcccactgcttgtgcaaagaatatcaatcatcctgcctggtgtacaaacaacaatttcagcacccctcttcagttcactgatctgctgggcaactccagaacctccatagatagcaacacagttgatgccaagcgccttcgaaaacttcttaatgtctgaatgtatctgcaccacaagctctctagtaggagccattataagcccaattgggccatctccaggaacaacagccggctgatctttgacatgcctcagcataggcaggacaaatgctagagtcttgcctgatccagtctttgcaattcctatacaatcacgcccactcattatgatcggcagtgcttgtgcctgtatagacatcggtttctcgaaaccaagtttcttgattgtatcaaggagcttgctggtaagcccactctgcacccatgtctttattggcttgggtacatctttcccatgcaccttgagctccaactgcttccgataagctgccacttcctcagctgccatctttgtaatatccttcacctcaatgtagaaattcttccggaacggctggtagtcgatcttagaatggtcaacaatagccaacttttctgcctttgtcttcttgacacgtttcatgaactcctcatcatcctcatcttcggaaccaccctcatcatcctcgtcatctgcataatccgagtctgagtcttctccttgtataattctccccatcaccttctttggcccctttttatccccattagtcacagcatccttagcactcttatcattcttgtcatccacattggcagcaggcatgctctcaagctttgcgacctcaggcaataccatcgagttcatgaacgcatcaagcggatcaatctcatcttcatccatagcattggcgccgtttgcattatcacccccatttggaacatcaacgtccatggcaccggcaccagaaccaccattatcatcggatttcttaccatcctcttggttcccctcctcatcagactcctcgccatccaaggtccacttcttcccggcattgccgccatcttctgcttctgcgggggccgcggcggcggcggctgaggtgccaactccggcctcctcctgctcgcggcgcttcgtctcctcctcgcggcgcttcatctcctgccactccttgatgcggcggcgccgcgtctccatctcttcgtccagctgcttctgctcctcctccttcttcttctggcgccgcctctcggcctcctccacatccaccacctcctcctccctggcccccgaagccggcccctccggctccgcgtcgcggtggtggtggtggtggtgcgacgaccggcggcggcgcttgcggtcgcggtccacatcctcctcctcctcctccgccgccgcctcccgcctcctcgacctctcctcgcggtccctctcctcgcgccgccgcgcacgctccctctccttctccttctcccgctcctcccgctcccgcgccttccgctcctcgcgatcccgctccttctccctgtggcggcgctcccggtcccggtcccgatcccggtcgtcatcccggtcctcgcggtggtggtggcgagaggaggatctctcgcggtcgcggtcgcggtggtggcgggaggaggaccgctcgcggtccttctccttgtcgcggcggtggtgcttggaggagccggcctcgtcgctagaccccatgtcggcggcggcggcgggcggcggcgaagctggagaggaggaaaccctaggcggagatgcgg

SEQ ID NO: 89461 - DNA, 497 bp, Oryza sativa
  Clone ID: PAT_MRT4530_88216C.1
cccctcttttttttttttttttttttttttttttttttgaaaactaaaactggctcattcacagctggcagcaccactggaaattgtagcaaggacaaacaacaatacagacacatgaagatagaagatagaaaataagcgttcagagcaggaagttcccaccgacatcgctcctctatcctgtacaaaacaaaacaaggatagccatgaagatggaagatagaaaatatgcgttcagagcaggaagttcccaccgatatcgctcctctatcctgtacaaaacaaaacaaggatagccgaccaaataaaactagctggctacacttcacaaaatcacaaccaaaaaaggcactataaacatagctaccatcatccatccaggactacagaatgcgtctgctttggcatagctaacttcaagtcgctatatatataccataacaattcctcctaaagtaggcacgcctcaagcgcatagatgcctttccaaatttctg

SEQ ID NO: 89462 - DNA, 442 bp, Oryza sativa
  unsure (1)..(442): unsure at all n locations
  Clone ID: PAT_MRT4530_88217C.1
agatatgcaaagcacgcgtcaacatacctcgttgtggaatatccttataacaagggtgngataccacagagcaataaagactgtttgtacacggggtatgatataagaaaagagcccactcttcccgaagggaaaaagcgggcaagagttttccgtggaagcttaatacccgcctaccccncaacccggaacggcccgaagccaaagcgaagtcaattaagcgagggaaacggaaagaagcgcccaatacggcaaacccgcctctcgcgagcgggttggcccgattatttaagccagcgggcacacaaggtttcccgactgaaaaccgggcatgagtcgtattacaattcactggccgtcgttttacaacgtcgtgactgggaaaaccctggcgttacccaacttaatcgccttgcagcacatccccctttcgccagctggc

SEQ ID NO: 89463 - DNA, 547 bp, Oryza sativa
  Clone ID: PAT_MRT4530_88218C.1
ccggccggggattcttctacagagttcggcatccccaccactgcaatcaagcgccgcacacctactgataacgccgaggtcgagcggacaatggccgccgccgccgccgccgccgcagtcgccgccgccgcttcgtcgcaaccggcgtcccagcccctcgccggccgcgtggccatcgtgacgggcgcgtcgcgcggcatcgggcgcggcatcgcggcgcacctgtccgcgctcggcgcgagcctcgtcctcgggtacgcgtccagctccgccgaggccgacgcgctcgccgcggagctcccccgcgccgtggccgtcaaggccgacgtgtccgacgagacgggcgtccgcgccctcttcgacgccgccgagtcggccttcggcgccggggcgcacatcctcgtggcgaacgccggcttgctcgacgacaggtacccgcacctgtcgaacacccccaccgccgacttcgaccgcaccatcgccgtcaacctgcgcggcgcgttcctctgcctccgcgaggcggcgaaccgcctcccccgcggcggcc

SEQ ID NO: 89464 - DNA, 390 bp, Oryza sativa
  Clone ID: PAT_MRT4530_88219C.1
atgagcggcaaccggcaccctccgctggcaccacgcgactccgcagcctctgcttggagcgaggcaacctgcagccatgcctgcgtgctcgcgcgaggccgccttctcgttagcttcgctccgccgccgcggtttcccccggttagccgtggtgctcggagccggttccagcgtcatgagcaaggtctaccgcggctccgcctccgagaggtactgccgtggcctcgcaccattccgccgaactccgccatgacgccagacgcgcggcctcgtgcgagccaccttccgccgcatcacctccgcatctgcgtcaaggccccggacgactccacctccgggaccgccactgtggtctcgctcggtcgctgcgatctgctggtgttgacgtga

SEQ ID NO: 89465 - DNA, 2133 bp, Oryza sativa
  Clone ID: PAT_MRT4530_8821C.1
atggcaaagagggatggggagaagaaagggatcaaggaggaagaagggggattggggaagtgcacctttgcattactacggaggttctggattccctaccgccctcacgtcaccgccgccggtcgccggagcaccgtcgccgcgctggaccgcctcgtcttcgtcatccgccacctggaagccaatgctagcaatctgaagagtgaattaagtgtttcagcctcggatcatgcaatagaaaaacctaaaaaactgctagtgactgaagaaataagtgaacctcccaacgttggtaagattgactgtgctgattctccaactccacatcaatcctccaactgttcaagtggtcttgcaaaatcttcaggtttttatgatcatgttaaaggccctccaatgacagatagtataggtgttttatcgaacacttctgtcaggtttggtgattttgatgaagtgccagaaacgcccactgaagatgagagcaaggtattggatatatgtgaaataacagataatcgtttggatgttagtggttcaccttccttggacgacacagtctccttgtcctgtgcaaacaatgatcttgaagttccagttaagtcgtcttctgttgcttcaacagaaagccagacagttcttcatgcaccaacttcagcagattttggaggtgaaactgctggaagcaaagaaaggttcaggcagagactctggtgttttctttttgagaatctgaatagggctgtggatgaactttacctcctctgtgagttagaatgtgacatggagcaaattaatgaatccatccttgttcttgaagaagctatatctgattttcaagaactgaaatccagggcggagcattttgataacaccaaaaaatctactgctctaccaaaggaggggatgccaatggctgtgaaagctgaccatcgaagaccacatgccttgtcttgggagaggcatttcagagaattcaattggaactggctcgcaaacaagctgaaacttcatggttctgaaatgcggagagctgaaaagctactggtgatcaaaacaaagcaaaaggaggacattgcaagggaagaagctgtattggaacggagaaaaattcttgaagctgagaagatgcaacgtcttgctgaaatacagcgtaagaaagaagaagctattattagaagagaagaggagcgcaaagcatctagtgctgcacgagaagcgagggctgcagagcagcaacgtagaaaagagataagagcaaaagctcaacaagaagaggctgaactgttagcccaaaaattagcagagaagcttcgtgaaagtgagcagcgccgtaagccccaggtggaaggatccccattaccatcatccatactatttggtctcaaccttctggccgtcttaacatctaaacctggaaatttctctaccattgattgggagtcctgcaaatgcagaactctagcgggtaatctagttcaagaatatgaatatctttgttcacaagacataggtatgggcaaccagttgatgatatctgatcaatctggagatgtcaaattgccatctaccaagtctgatctattgaaatgtgatgaatgcgatcctagcgaattgatcaaagaaaataagtccttggatcatcataaattcaacattccaggggacaacatgtcagtttatgaagctagcaaagactcagggtccatgccagaaatgcagtcatctgatacactagaggcttcagcaattcttccatcgaattttgaagaggtagccactggcgttttgaaagttctgaacaacatggcatgtttggatatcacccttcttcaatgcatgctggttggtttactgcttctagaatctctgctacttcttggttacttctctttgttccatgctgggaaccaagcagttcttcgtgacccggagttgatgcctatcttggctactgctcttatcgcgctttatgcctatgagtattctgcgtccatcctcgtcggcctcaatatatttttacatttctttactgattataattccatagaggagcagcgttgggcggtggcggcggccagcgcagcaccgggcaagggcggcctgcgcgcgtcgggcggcggcggcggctaa

SEQ ID NO: 89466 - DNA, 1833 bp, Oryza sativa
  Clone ID: PAT_MRT4530_88220C.1
gcataaacatttgtatttttagatcatggaaatgacacaacaactaataagtttgttggaaaaacgaaaaggagacatacaaggtgatttacagcaaaaacaacagtaatgagtttttatttcacaaaaatggtgccaaagaggaggatacttttaataagagcaatgataataagaagcaatcccattggcgttgaaatggatgattttacatacaagccactgccttacatcaattaaaatacaacaattaatctactttgtcaccgcctactcttcaagtcattgacgctgtccataacacaaccgataaaggggagggcgaggcatggaggccacttgacatgtgaagtgcttttacaccctaatcttctgaagcaaaactttgggttcaccaatcacatcattacaacattagctcggagatctggttctccagcctcagcaatcgtgcttgcctgagcaagtgcagtttgcttggtcatgttttagcttctcaacttggccctgaagctccttgatgtaggttacagcaatatccaacatgtctgatgtattcgtttgcttgtccatgttcggcacgagatcctgcagcttcttcagcctcttgctaatcctcgttctcctctccctctcagcgatgctccgcgggtgcgtcgcgcagccgcgctttgcccgggccctgcaggcgacggagtctggctggagctgcaagaagtcatccatgccggccatctccagcgacgactgcttcgacaagccaaactgggagtcgatgttgctgaagctggagaccatgtcgtcgccgtggtcgccggcggcggcggcggcgacgcgggccttcttgctgctgctcgggggcgagaacatgatggagttggtgtcgtcccaggagctcatggagaagttcctggaggagaggaaggaggaggactgcgcgccgtggccggcgccatcgctggagctgttgccgccgccgccggtgacgatgctctccccgatgtcggggatgaggccgcccatctccgatatctgcggcaggtcctgccgcgagaagctccactgcgagctcagcctcctgtgcgccatcgcgccggcgtcgccgccgccgccggagtagccgcccatccctctcgtcgcggccatgccattgccgtgcgggtcagccatgaggcgggagaggaggccggcgggggagctgctgtggcggaagagcgggacggcggcggaggaggcgtcgacgtggatctcgccggagccgccgtacgcgcgctcgagcgggtgccgcccgacatcggccgccgccgctgtggacgtcgtcgtcgtcgtccggcagctggactcgcaggaggtgagccccgacgactccgcggagaagtacctccccaccatctgctgctgctgcggcggcggcggcggcggaagctgatgctgatgctgatgatgatgcagctgatcgacaaccccaaccccgcggccccggatcaccgagtcggcgatcgacgccagcagcgaccccggcgccgagccgtacctcgccagcccccccgccgccggcatcggcggcggcggcatccccccgtgcggcgccgtcatcctgttcatctccggcggcgcggcggcggcggtggtggtgcgggttcgggtcggcctgggaagggaagggtgacgtggacggggcgactcccacgatgcgtgtgcacatgtgtgggtgtggccatgtgccttcacaacccacgtcggatcttgacagctcggatggttagcacacgtcgggatacggatacccccgggggtgacttgtgtagagtaactgaaacgacttactactac

SEQ ID NO: 89467 - DNA, 631 bp, Oryza sativa
  Clone ID: PAT_MRT4530_88221C.1
ctttgtttttttttttttttttttttttttttttttttttttttttttttttttttttttttttttttttttataaggcccactaaaatctttaaaaaaggtttttttacctcggctggggggctcccaagggggggaaagattattaacccaagttacaaatgggggcggggaagaggaaaacacctgtctcaaactaaaaaattatctgcatctaacatataaaaaagctgactacccccccagactaagttattactagtcattaaaacaaaaaccttttgtttgctgaaatattaaaggggtgttaacaagctccgagcaagtcccccgcaaccaatcaacataaaaaaaaacagggtcaaactgtactggtgtatttaaaactataccagttttcaccacttcaccattaaaaggggtggtggaaaccaacagttccatttaaactggtttcgccggctccatcccaacagggaggaatgaatcaaaccttattagccattaccaatggcctggctccaatcccttgagcgattatcaaccccgcgggggccctgactcgcaccaagggaccatttttttttttgtaatcccaacaaagagggggtatttctttttttgggcttcg

SEQ ID NO: 89468 - DNA, 287 bp, Oryza sativa
  Clone ID: PAT_MRT4530_88222C.1
tttttgtttttttttttagagaaagagatgcagtgcctcgggggatcgctgacccgacattgaataactggagcgcagcgagccagatagtatacactacataggcatacagggaaagaacaagaagttcaataggggttgactaagagaagatgaagaacactaggacgtggacatggtacagaggacactgtcggagaacttgacgttgacggggcggaccgactcgaacaagctggggaagacctggacggcgccgtgggtggcggtatgaaccatgtacgggg

SEQ ID NO: 89469 - DNA, 204 bp, Oryza sativa
  Clone ID: PAT_MRT4530_88223C.1
agtgcgacactcccttttttttttttttaggtgggtgatagacagtgggtgggtgaccccatatatccaaaattattacaaaattttggaatttgtgaagccaaggagtttggatgttaaaagctaaacagaacttaaacgtgaatcgcatttgggaaggtttgcaggcaggacttctgcaaggttatggtaccggtggaatga

SEQ ID NO: 89470 - DNA, 294 bp, Oryza sativa
  unsure (1)..(294): unsure at all n locations
  Clone ID: PAT_MRT4530_88224C.1
caaatgatgctgaacgttggtgagtagtggtgactgccttgatgcaatgatctcttacgagtgacataactgcatgacataggccatgatgttgccctgtgtgctaacgaggctgagcggtgtcgattgcctgtcctcgtgatgactgagtgagctgtgtgaattgacccaatgacactgtgattgttgttagccatcgggaggtaaagatctggctatgtatattgttcattgtttgaagaaagagaaatgaatgatactttnaattgacgataaaaaaaaaaaaaaaaaaaa

SEQ ID NO: 89471 - DNA, 170 bp, Oryza sativa
  Clone ID: PAT_MRT4530_88225C.1
gagctagtctcggtacgtatgcaatccctgacgtacagctggtagcctcttttttggccgccctcctttttttttttttttttttgttattccattcgacatttaattattccgacatgaacaccaaaggcgtttttcaacactgaggcattgtcggaagcccacttaat

SEQ ID NO: 89472 - DNA, 501 bp, Oryza sativa
  Clone ID: PAT_MRT4530_88226C.1
tggtgcttctcgtgcaattcaggttctttggatggtttaatattttttttattggttgtaatggacagttagcagtagcaccacgtttttaggcctcagggccaagttataaaacttgagggtgaatatttggaactaataaatacttgacgaacatatcttctcttctaagtctacatttatggcttccactgtccacatctatgtatttgtgaattatattatatgtatatcacaacagacagctgtactgattggtcactataatctgttgcatttattttactcaccaagcacaatcagtgtatgcctagttccttatagcagttcttactttttagtgccaaaattttgcactagaaatgtttaaatgtgtcatgttagtatagatgatctcagatcatatttaaaactagttttgtgattcacttgtgttctgaggaagcgaatataaaacaaaagaaaaagaatcttttgcttcttcatccactctttccattg

SEQ ID NO: 89473 - DNA, 533 bp, Oryza sativa
  unsure (1)..(533): unsure at all n locations
  Clone ID: PAT_MRT4530_88227C.1
tcccgttcgtcgcggtaccggtctgacccaagtcccccggtgacccgtcgtaccccggtccgccgggctcccgttcgacaagctccccgacgactggcggtgcccgacgttgcggcgcggcgcaagtccttcttcgagancatagtagcgtcgagatctgccagggttctgcgcagaaccaaccagttgcggcctgcggcggcaactgccctgcaccggcggaccagaaagcgctggctgcatctagcggcagcctgcctgcgtgcggcttgccctgcttgcttgcctgctgccggctgaccttgcctgccaaatggaacccagtgcacccccctgcttncctgaattgctgctgacctgctgacctgctgacctgctgactggggcctggtttgctactaattaagtatatatcagtacgttntatttttattggctaattaattaattaatctgtgtgaatacatagtgctattccatctcgaattttgaatttncgatatttaacccagtaaaaaaaaaaaaaaaaaaaa

SEQ ID NO: 89474 - DNA, 160 bp, Oryza sativa
  Clone ID: PAT_MRT4530_88228C.1
gaacaaaatgatcctgacagatactccatgcatgaggctgatatgatgcttttcaactgggataaccagctctgcctgcaaaatcgtgcaaggaatgattcaggtttccacctacaagtgtggccatgaacatgaactgggaatctttttgagcgggggg

SEQ ID NO: 89475 - DNA, 1140 bp, Oryza sativa
  Clone ID: PAT_MRT4530_88229C.1
atgggggtgctgcggagcacgcagagcatggaggcggaggtggaggagatgcgcgccgcgctagcgctcgcgccgctcggccgccacggcgcgtggaggtcgggggccgcggcgaagcgggaggccggggcggaggagggcgcggcgcccgaggcccgcaccgtgtgcgtcaccggcgggatatcgttcgtggggctcgccgtcgtcgaccgcctcctccggcacggctacgccgtcaggctcgccctcgagacgcaagaggatctggacaagctgcgagagatggagatgtttggtgagaacggcagggacggtgtctggaccgtgatggcaaatgtaatggacccagagagcttgaaccaagcattcaatggttgtgttggtgtcttccacacatcatccctcattgatccagggggcatctctggctacacgaaacacatggcgattctggaagccagagcggccgagcaggttgttgaagcctgtgtcaggacagagtcagtgaggaagtgtgtgttcacctcatcgctactggcatgcgtgtggaggcaaagctaccctcatcaccgtcgtcgcttccccgccatcatcgacgagagctgttggagcgacgagagcttctgccgcgataacaagctgtggtttgcgctcgggaagacgatggcggagaaggcggcgtggagggcagcacggggcagagacctgaagctcgtgacgatttgcccggcgctggtcaccggcccaggattccgccggcgaaactccactccgtccatcgcctacctcaaaggagcgcacgcgatgctggcggagggcctgcttgcgacggcggacgtggagagggtggccgaggcgcacgtccgcgtctacgaggcgatgagcggcggcggcgcggccggcggccggtacatctgctacgaccacgtcgtccggcgcggcgaggagttcgccgagctgcagcggcagctcggcctcccgatcaccggcgtggcagctgcctcgcggcccggctactccgacgacggcgacgtcggcggcgacgggcggttcgcgctctgcaacgggaagctggcgaggctggtgtcctcgcggaggaggtgcacctatgacgtctactaccccgcctcgtacgactaa

SEQ ID NO: 89476 - DNA, 1477 bp, Oryza sativa
  Clone ID: PAT_MRT4530_8822C.1
ggggagggggcgcgcggaccgggtccacgggagtagggcccacgcggcagcctcacggtccacggtggaccgggtgcacccgggctcacaccggctgtcacgcccagaatttcccgaatagaattccaagcagaatgtgcattgaaatccccgtccaggaccggccggggtacacaaacgacaatgtcgacattcagatccacgtcggaaagaggccgtgacaggaccattcgcataaccccctctaaccaagcacaccacacctcaggtttcacccccactcctcgcaaggcagcgagcagtcccctctcgtgcctaggtgaatccggaagccgcataggccgtcgcaggacccatccaaactccatcacgcccacccttgcctggatgcgtcagctagaggaaagctacactacaagcccagccgttgcccacgctggcttatggtgggccccacacgtcagcgggtcaaagggggtggctcatggtggactcggtccaccgcagcacaggcgcgcgggcacaccacgtggaagaccacgtggcggccacgacggcacggcggggcgaggtggcaaaggcatggcgccgaggtggcgccacatgggacaccggcgcggggcggcgccagagccacgtagacggcccggatcaccccaaaggggatcgggcggccacagctagcgggagcggcaaaactcgccggccgaccggccggggagcgacggcgagcagcccagaggtcgccggcgacgaccaccggcgcgacggcacgcgcgggaggcagcggagggaggcagaggagggagatggggagctcaccgagcgcacaaggcacggaggcggcgcgggagagcgaccgacgacgaggagaggcgacgacgcttcctcggggaggcacggagcggcgagaggcggcggctggaggcggtacaggcggcggtggctcggcctcgcggtgggacggcgtttcgggggtggaagagggaagggaaatggatgccggggtgaagcgtggggcggcgatgccgatggtggtgacggcgcagtgcggcgatggcgagagcggcggctagaggaggccggagctcgccggagagtggcgacggctcggttttgcgtggggagagcgggggagagtgcggggagtacggaaaaattggggaaatggacgagggtcgcatggggtgtttatataggctcagaagagggaaatcgtggccgagaggggcggaatcaggaggccaaccggccagcgacgtggggtggcgacgtggagctcgagggaggtcaaactggcgtgatttttggggaaaagtggaggaaaatgaggaggaatgggtggcgaccatgtccgcacggttggacgtgcgcgcgggaggcgagaggcggcggttttagcggcggggtggggtggcaatggcggcagttgccggtccatggcgatggggtggctggaggtaggggaaggggatga

SEQ ID NO: 89477 - DNA, 499 bp, Oryza sativa
  Clone ID: PAT_MRT4530_88230C.1
gtttgattttttttattgaaagaggcgggatatcacagcttctctcaaagtcttcaggcacttatcgttccagaagacacttgcgtgtgccgttgtttggtgcgaacataagatcatataaagtatagtcaaggctgataagctgacacagctaccagcagtgcactacactcgtagcttattaccagccccagcagtccccgagattagcaaaggttgcagatggcaagcacagcttgcgaaaggacttgctcggccaatagttttgatgcaaagcctgctgagcctgcggctggtgtgcgcaagctgaggcctattgtccagcgtaaagcaaggtatgactcggcagagtacaacctgctccaagaaggcaagcagcccaaggatgggattgtgctggttagcctccagatgacagcaattcctcttaaggcccgcttgacagaacctacatcaaacttggcaactggcaacaggcctagccggctttccaggagtt

SEQ ID NO: 89478 - DNA, 285 bp, Oryza sativa
  Clone ID: PAT_MRT4530_88231C.1
cacgctgtggatccttttgagcggcctttctttttttttttgtttacattggtttttacggacatttgtgctatataagttacaaggaacaagattaattacaggcttaaattaccggaaccaggacccttcagcacaagacgatgtcatcgtctggatttttgaatggccaggcaacaacaaccttaaggttccacccttggaaccttacaatagccgatacccgcggggcccatatgttgggattcttaaatttggccttatggcacaactttttaaattttt

SEQ ID NO: 89479 - DNA, 334 bp, Oryza sativa
  unsure (1)..(334): unsure at all n locations
  Clone ID: PAT_MRT4530_88232C.1
ccctacagtaaacaccaccacacaggtcacaggcgcggccaagcagcgcccacataccatcgggcaggcccggcccgataggcanttcgnnncggnnngtgccggcccatgggctgcgcctcccgcccaggcacggcccaccagctgtcgggccgggcctatcgtgccgtgccggcccaacgtgccagcggagaggcccaagcacggcccggtggtcgggccgggccagcacgggcccgactcttaacgggccgtgctatgcttgggccgggccaaaacgccgtgccgtgggccgggccgtcgggcctcgggccttttggccatctatacatag

SEQ ID NO: 89480 - DNA, 913 bp, Oryza sativa
  Clone ID: PAT_MRT4530_88233C.1
cccacgcgtccgcccacgcgtccgcccacgcgtccgcccacgcgtccggccgccaaccctagatccgcctgcagctcctccgctcctccacccaccaccgccgtatcttccctcatctggccatccactccggtgatgtcgagcgcgtggtgtcgcaagaacgttgcctcgtttggtgagaggggatagtgcagcgagccgcctccaatcccttctgtcccactgctactcgctgtcgcagagaggagatttgtccgaccgggtttcatgttaagctgtggctttatttcccaccatcctcagtcccatcctatttctctttcttgttcgagcaatcgaatctgatttaaggatctgattttctcttgctaattttcaggagtcaaccgtctatttgctgtcccgtgcaccaacacgaacattgacccgatttcattctgacacagtgcagtgtttagtaggaggaaatgaattaaaggacaattcaggggttgggttggttgggtcagtgaagaaatcagcaaaactgcagtccacaagatacaatgaattatgcttacaaggtgtttgtgttaatgactgcaagttgacacttcacagcatgtcctttgcattttaactacaaaaggtcgtgttctatgcatgctaactcgtgctcatcactagttgatagatttgtgcagttatttttccctgattattatgttatctcactatatgatgcaaaaatttaaagctcatgttatctcatgatgtgatatgctctttatacaatctcttagtagttctccaaagtgcctcaccaatttgtgactgacattttttcccaataaaatgctatgctgactatcgcattatatatctcatttttgaaacacaatagtatgagtacttgcttttgattttgtatcgt

SEQ ID NO: 89481 - DNA, 438 bp, Oryza sativa
  Clone ID: PAT_MRT4530_88234C.1
gcttagcccaccaagtacccttgccggaagctttacaggaaaataaagcttatatgtcctaacaggtgggaaggtctaaaggaacttttgctcctaggcggtgaaacatatattgaaaccttcaccatgttactctaattacaagggctaagcatgcattctccctttcgttctgcaggctaccctctggctataagggataggcctacctatgaagtttttctgcccctatgagttaaggaatgcatttgtgcccttagcataaacaaaagcttatacccttccgacgaaagaaagatcttgagcatgacgtctccttaaaagtataccgtagcagggacggactaatatgggataactgcctccttctctattgggctataaggaataacaaaaatgcgcttgaggattgtttgccacttgttgggatcaaagcaa

SEQ ID NO: 89482 - DNA, 1068 bp, Oryza sativa
  Clone ID: PAT_MRT4530_88235C.1
atgccgccgcatcacggcggcctcatggcgcctcggcctgacatggtagcagcggccgtcgcggcgagcggcggcggcggtggcggcggcggcccgaccggcggcacggcggtgcggccgggctcgatgacggaacgggctcggctggcgaagatcccgcagccggagccggggctcaagtgcccgcgctgcgagtccaccaacaccaagttctgctacttcaacaactactcgctctcgcagccgcgccacttctgcaagacgtgccgccgctactggacgcgcggcggagcgctccgcaacgtccccgtcggcggcgggtgccgccgcaacaagcgcaccaagtcgtccaagtcgtcctcgtcgacgtcggccgccggctcggcctccgccaccggcggcacgtcgtcgtccacatcgtcgaccgccacgggtggcagcagcagcgccgcggcggccgcggcgatgatgccgccgcaggcgcagctgccgttcctggcctcgttgcaccacccgctcggcggcggcgatcactacagctccggtgcgtccaggctagggtttcccggattgagctcgctggatcccgtcgactaccagctcggcggcggcgccgccgccgccgccgccatcgggctagagcagtggcgcctcccgcagatacagcaattccccttcttgagccgcaacgacgccatgccgccgccaatgtccggcatttacccgttcgacgcggaggccgccgccgacgccgccggcttcgccggccagttgctggccggcaccaaggtgcccggctcgtcgggcctgatcacgcagctcgcatccgtcaagatggaggacagcaacgctcagtccgcggcgatgaacagctcgccgagggagttcttgggcctccccggcaacctccaattctggggcggtggcaacggcgcgggacccggcggcaatggagacggcgccaccggcggcagcggcgccggtgtcgctccgggaggcggcggcagcggcggcggatgggctgatctctccggattcaactcgtcgtcgtcggggaacatactgtga

SEQ ID NO: 89483 - DNA, 1272 bp, Oryza sativa
  Clone ID: PAT_MRT4530_88236C.1
gataaattaagggactataataacaataaaatattaaaatatgccgtcataaatttagcaaatccgtaaatgaaataaattgatcttcaatccgttttacagtacaagaataactcagtccttcgagctaacgggtcctcctcccttaacttccattgacaaatctgcagctcttccggacctccccctggctgcccgtcagcggctggatgttccccatgttgaccatggacctggcgaagctcttgaagaaggccttctggctgatggcgaagctgttgacgatcgccgccgtgggcgcgcccggcgtggacaggagctcctggtcggactggaggaagccgcggttcacctcgatgttggcgaagtagttcttgtcgaaggcgtccggcgtggtcgggtccaggtcgttcagcgccgacgagttcccgccccgccgcgggcagctcttcgccagcgcccgccggtagccggcgtccagcgtcgggtccggcttccccgtcccgctgaagttgtacagcctgtccgtcacgaactggcactgcaccctcccgaacgtgtgcgcccctgagagggcgacgaggtcggtgacgtcgaggccgacggcggcgaacttctgctgaagggtggtgaggttgtcgcgggggctggggaggttattgtcggcgccggtgaggttggccgtggtgccgtcgcgccggccgaggggcacgcgccaccgggggcctccggacagttcgacggagatcttggcggcgatggcgaggatgtcggcgcaggagacgacgccggggcaggcctcctcaagtgccgccttgatgtcgtccaccaccgggtacccccgcgccgagttgttgttcggcgtcgcgaacttctccgacacgatgctcgtgctgttgtccagcaggatcgacgcgtcgcaaccctggacgaagcagtcgtggaagtggaggcgggtgaggctggcgaagatgcgggggtcgtcctgccgcgccctcttcagcacgcgccgcacgatccggtgcacgtccgggcacgtcccgtcgtagtacttgtcgcacagctgcgccgacgcgccggccgccgccgcggcgagggccacggccacgaccaggaccgcggcacgaaccgcagccacagcgcccatctctctctctctctctctctctctctccgctgcagccttgagctagtaacgtatgtacactgctcactccgtgacgcacaaatgagaaatgaccaagtgcctcgtgccgaattcctgcagcccgg

SEQ ID NO: 89484 - DNA, 195 bp, Oryza sativa
  Clone ID: PAT_MRT4530_88237C.1
atggaggagctcaagaggaggaacaagaagagtcgccgggagggcggtaccaaatatgggccgtcgatacaggccgatcggatggctaacaagaatcgagtacctggcagtaccagcgctcccccctacaccaccgcacctcgcatgaggacgagcgtcatcaccgacagcagggggaggcaatgcgggagctag

SEQ ID NO: 89485 - DNA, 573 bp, Oryza sativa
  Clone ID: PAT_MRT4530_88238C.1
gaaacagagaagaacagaagagagcagaacagagcaaagggaatggaatggatcattaagagagagatgatgatgagtgagcagtgagcagctgccgacggaaagaagccatcattaggcaccaaatgcagcatgcacatgcttagcagcatcagctgctgccggccaggggagacaagaaaacagaggagaagaagaagaagaagaggaaagccatcgtcatcatcgtgtcgtgattagaatccggccatgtcgacagcagaagcagccgtgtggaggggccatggcagcagcaacatcacgcggcaaatcctcaagtgcacgaggtggcagctggaggagaccacggacttcatcacatgcccctaccactactactgcgacagcgcctaccccggcgactactcccccgccgtcggcgcgctcgtcgccgccttcgccgcgtactgcctcgtttccgccgccgcattcgccgtactggacatcggcagggccggcggcggcggcgggaggaataggcggaagtacatggtgccgtcgggcccattcttgctgccggtggtgctcctggcg

SEQ ID NO: 89486 - DNA, 735 bp, Oryza sativa
  Clone ID: PAT_MRT4530_88239C.1
atggcggcacgcacgcggtcgcaggctcaaggcctcgacctccctccgccgcgcgcgctcttgtcctcgacgcgccgccccatccacgccgagttccgcgtcgtcgtcggtgtctccagcggggatgagccggaaggagatggtggtggcggcggcggcggctggagtggttacaatgaaatcgatacacctccccagcgacggagcaaagtcgcccaagatgccgacgaagaagaggccgtgggagtgctgcaacgacgtcgaggaggcgtcgtcgccgtcgggcctgctcatctgcagcgacgtctactggggagccgacccgggccccttctgcaccccgaggccgtgggaagattgctgcgacaacgccatctgcaacaggtctctcccaccgatctgccagtgcggcgacgaggtggatcgtgcgccgccgcgtgcaaggattgccagccggtggagtcgtcgtcgtcgtcgtcgtcggagcctcctcgatacatcggcgctgtcgctagatttgcttggccaggtgctcgaccgggtggctccgtgtcgtcgcggcgggtggagctgtatggttggatgacaagggacctcgacgagcacggtgcgacgtttttggagggcagcgagacgtcgcagtcacgctgtaggagctcttcgatagcaggggcgcaccgtcgtgccaaggctcaaggtgttcctctttcttgtttctgcaaaaagctactatag

SEQ ID NO: 89487 - DNA, 167 bp, Oryza sativa
  Clone ID: PAT_MRT4530_8823C.1
gccacgcgttcgttcacgcgtactgccactgtgtcagtatatcgtgagcaggccactttcgcttttttttttttaaaaaataaaatgctttataattagcgtgcaggacataaaactggacaacgattactcaaggcgaattatgagagaggggggccccttttgga

SEQ ID NO: 89488 - DNA, 586 bp, Oryza sativa
  Clone ID: PAT_MRT4530_88240C.1
tcgattagggtttactcgagactcgagagaggagagctcgcccgctagggtttggcgggagatggctcaggcggtggaggagtgctacctgctgatgtccattatttcttgctctctctttatcgtcttctatgttacctctgttggctgcaccttcgatatcacttttctctaccatctgtatcttttctctaatcttgtggttctctattcattatatctggttctctctctccaacttcctcttcttctttatgacgtattttcattcttttcctctcatcctttcttctgctcttattttcatgtttttctgttatttcttatctattggtataattgcttgatcttactacttgctcttgttctcctcttctttctttttcttgtctcttcttctattttctgctcttatctccttattttcttctttacatttcccttctatttcttctttcctttctttctttttcctttcttatcctttcctcctttttctcttttccccctgctctttctttcacccttttctctttccctccttctcatcttttcttccttcttctccctccttcacttctcttcc

SEQ ID NO: 89489 - DNA, 459 bp, Oryza sativa
  Clone ID: PAT_MRT4530_88241C.1
atgaacaaagaacaacaagggaagagcatattcacaatgggaggatgggatctgacatcctacaacacattatctgatccggccagcaagaaaccgtcggtcgcccaagtcaactgcaaatgcaaattcagccaatgtgttgtgcaatttatggaaacaccacgggttgatgtggaatattcccttctacagcaacttcccttgatcgacacggcgtttctctgtcgaaaagggatcgatctaaagaagacaagcagagatgaacacgacctgcgaaaggtgacaccggtttacacgacgattcgctgtacaggtcacgaggctgtactgctgctgctggttcttcgctttggatcatcactgtcagagtctttggctagatttgcaagaaccaaagtgtgctctgacagcagtgagtgtgatgatgatgatgatgatagtggggatgagtacgtactg

SEQ ID NO: 89490 - DNA, 3228 bp, Oryza sativa
  Clone ID: PAT_MRT4530_88242C.1
atgcccgacgggcacgggggccacgacccgctgcggccgcgcccatcccgccagttcagtcaccaacccaccaaaccccaccgcgaccgcgactccgacgtctccgccacgggccaaagtcgaaaaatcgaggggactttcccatctccatcccgcggcgggcgcacggtggcccaggagggcgcccgcggctactgctgcttccgctcaaagcttcaagttcccgtgcgcttctgcttccccactacctcccgctggtctcggtgcccactgcgcagcgcgggctcttcaataactattatcggtactcctggtggtcttcttggtagttttaagatagaattaactggggctactgtacctggtgaaccagaccctccaattgtgcttcattacaatgtccgtcttcttggtgataaacttacagaagatcctgtaatagtccaaaatacatggactatagctgacgactggggttctgaagatcgttgcccatctcctggttcagatgctaaggacattgcaaaagtggatgagttagaaaaatgcggtagcatggtgggcaatgatcaaaaacaagcatgggccactaagttaaagtccaatgtttcaagcatacaacctgcctggaaaaagaacacagaacctaagaaatattttcccttcagacaaggatatcttgctatagcaattcttcgtgttggagcacatgggatccatatgactgtagatgggaaacatgtcacttcatttgcctttcgggaggatttggagcctggatttgttggtgaagctccaccagttcccatggacaaacccctggatctttttattgggatcttttctacagctaacaatttcaagcgcagaatggcagttcgcagaacttggatgcagtatgatgctgtccgctcaggaaaggctgcagttcgattctttgttggcctggaatggcctgaggagagttatcctccatgggcacatggtccgggatacattgtatcacaagacatagcaaaagaagtttacaggaaacacaagagaggagaacttaagatgttcaaactagaagatgtcgcaatgggaatatggatcaatgagatgaagaaggatgggttggataagtacggggacaacgctgggattgacggggtgtcgtcgccgatgacgttgaggcggtactacaaggagcagggcaatgtcatgcctggcgaggacttcctcgagctcgacctgagggcggcgcgcggaggcggaggcggcgggcgcacggctgcggaggctgctgaggacgagcgcgacaacggaggctgcgcgcggcggaggctgacggcggcacatgctcatttatctagactgtatcttggttataaccccttcctcaaagcatttatccaggacttccctaagcttatcaagactgatctatctgttcctacagaggagaaagtttttcctgaggcagcatcctttttgaatggttctaagcaaattgatgcgtccgatcttccatcagatgattcagcagacaatgattatgaccctactttggctcaagggcacaaggtggatgaagaaaaatcttctggagaagatggtggtgaaggattagattctgatgactcatcttctgaggattctgaatcttctgagaaggaaaagtctaaaacttcacagaatggaaggacagttgatgatcttggtttgccttctgaggattcagaggatggtgactttgatccagcaggtccagattccgacaaagaacaaaatgatgaatcaaactcagatcagtcagatgaatcagattttacatctgactctgatgatttttgtgctgagattgctaaatcctgtggtcaggatgaaatctcaggcccttcatcatcacaaatcagaacagtcgatcgcaccgatggaagtggttttgatgcgtcgtcgtcgtcgttgccgaccggtggcggcgcgcgcagaagaagattgaggccgatgcgcgcggggagggagggagcggctccctgtgatcttcgccgtggcgtcgtcgttgtcgttgttgctgacccggcggcggtgcgcgcgcggaggaagacagaagccggcacgcagacggagggaggaaggcgctggagctcgccggcgtgcggagggcgggcggcggcatcacgcgcgcggagaaaggaggaggctggcgcgcgtggagtgccgccggatccaccgcttgcacaccaccacggcctgagctccaccaccgttgctcctcttcctcgtcatcgagctcaccgtcgccgccacgacagctcggcgccaccgcccccacagctcggcgtcgccgcccccacagatcggcgccgccccgcgccccatcagaccgccgccgccctccacctccacagcgggcgccggcggggctgtacatcacgccgctgccgccgcctcctcagctcgccgccgccgcccccacagatcgttgccgccgccccctcagatcggcgccgactcggaccccctcaaagcgccgccgctgccgccctccaccacaacgagtgggcgccggcggggcagaggcttatggtaaagcatcatctgattcaagtgacgatgaagagtggtatggaaatagtacacccgaaaaagaaactgaaggcacatttcaaggaagatccataccctagtcgtgcaacaaaagaaaatctggcacaagagttaggcctcacatttaatcaggtcactaaatggttttccagtactcgtcattacgcaagagtggcagccacaaaaaaggagaacaacattgaaaatcatacggctgagaataataacaataccaacactgttgatagcatacaactgagaggatccaatgatattgttagtgtagatagaaatgatatggtctccgaggaaaggacaggacaaagtaatctcaatgaaggtactccattaagatcagataccagctgtgggcagagtgtggctgtgactcctatggtacacccagaaaaccagggcaatgattcctcaagtaatgttagaacaccaaatgctaagtctgcggagaaattgatccctggactggaaaattcagatgaggctaggcgaaaggcggtacaacgggaactgagaaagatgaagactggcagaatttctgataagatgacacttggaagcacatcctgcagcactccagttacaggaatgggttcagttgactgtaacagtttagcatag

SEQ ID NO: 89491 - DNA, 838 bp, Oryza sativa
  Clone ID: PAT_MRT4530_88243C.1
atgttcctcttgaaggaatggaaaaatagttcgatgcggcacgctgctaaggccccgccggcgcccgctgtggaggtggagggcggcggcggcagcggcggtctgatggggcgcggggcggcgccgatctgtgggggcggcgacgccgagctgtgggggcggtggcgccgagctgtcgtggcggcgacggtgagctcgatgacgaggaagaggagcaacggtggtggagctcaggccgtggcggtgtgcaagcggtggatccggcggctgctgagtgtacgagccgcagatccggcggcggcggcgcctctctcccacgagctggtgagcttcggcgccgcgccgtcaccactccacgcgcgccagcctcctcctttctccgcgcgcgtgatgccgccgcccgccctccgcacgccggcgagctccagcgccttcctccctccatctgcgtgctggcttctgtcttcctccgcgcgcgcaccgccgccgggtcagcaacaacgacgacgacgacgccacggcgaagatcacagggagccgctccctccctccccgcgcgcgtcggcctcaatcttctactgcgcgcgccgccaccagtcggcaacgacgacgacgccgctgtggcgaagagcacagggcgccgctctctccccccagcgcgcgccggcctccgtcttcctctgcgggcatgtcggcgacggctaccggcggcgcattcacgtacgcgagcggagtgttaattttgacggggacttttctcccattcggcggcggtgtcgaagggacgtcgacacccccgtcttcctggcagccacggcctagcccagcagcctgtggc

SEQ ID NO: 89492 - DNA, 955 bp, Oryza sativa
  Clone ID: PAT_MRT4530_88244C.1
aaataaaaggaaatgcctgcataagatttggagaatcagaatactggcttggttctcaaaagagaaataatagcgctcagtatgttcattgtcgatcatctggggaaaggatcatcatattctccatattaagcagcaccaaataaaatttcaccacaacatgctaaaagaatcaggaaaaataggcagcacaatgaaattaaccacaaatcagtacattttcagataaaacaaatctttcagcaaaagagactgcattaaatttggagaatcatagttctggcttgattatctcttaagagaacaatagcgcacattatgctcatcgtcgatcatctggggaaaggatcgtcatatcctccactaccaattcaaccaaaactaaataaagaaagtgcactacaacatacaggctactcagctaggacaaacagctgataaacacataaactagaaatagcttgacaacgtattcacatttgagtacaacacagccaaacaaaaagcatacaggaatatgtcaagtcttggctaagtctatgttaatactaaaccataaagcgtatatacaccactgccaaatactgaaccacaacatcgagcacattcagaagaacaatgacagtggggcatggctatggcatcgactcatacacagcagcaatgagatccaccggtaatcagtttatacgatgcgcatactcacactaacatccatccaaaggatgatggtaaataagcacaatgaaactaatcaagaaccaactcatttgaagataaaggaaatctttcagaaaaaaaaactctacattaaaattcgaggatcagatttctggcttgattatctcctaagagaaaacaatcgcacggtatgttcattgtcgatcatctggggaaaggatcatcatatcctccgtatggacatatccaaagctaaaatgtagacaacagcaca

SEQ ID NO: 89493 - DNA, 421 bp, Oryza sativa
  Clone ID: PAT_MRT4530_88245C.1
atgggcaaagaagaggttgacaatatcatagatgtgctcaagaaaaacattgatatcttcgcttggggccctgatgaggtgggagctggctgcgaactcatgagcttcttggatgcaaactccggctatcaccagatccacatggacccggccgacatctccaagacaaccttcatcacgccatttggcaccttttgccacctcaggatgcctttcggcctgaggaacgccggggcaaccttcgccagccgaaagtggtttgcccttcttcaagaccctccgaggcgcgggaaaattcacctggacacccgaatgccaagcagcgttcgacgagctaaagcaatatctgcgaagcccgcccgctctgatcagcccaacaccaggaagcgaactgctactatatctggcagcttcgccagtg

SEQ ID NO: 89494 - DNA, 401 bp, Oryza sativa
  Clone ID: PAT_MRT4530_88246C.1
actagtgcgtttgttctcaaattctagtatcttcgctgcaacgctaccgccgagaggatggggaggacgagagctgaccggcagggtggcacagtcggaggagcagccgggcggaggggcggcgcagtcggaggagtggcatgggcggcggtgcgggcggcgcaaagggcggaggagcggcgcaagaggcgtccggatggaggtggctggcgggtgcggaagtggaagcggtggcggcgggcgggcgcggaggaggtaggcagtggccggcggacatggatgcaagcggtgacactgtccttccgtctctgagaggagtcgattcggatggggcaaggccgggacggggcattgatctggatgagggcggtaatttggtttgggtgctggcagttgcggga

SEQ ID NO: 89495 - DNA, 711 bp, Oryza sativa
  Clone ID: PAT_MRT4530_88247C.1
atgctcttcgccacagcgtcatcgtcgccgtcgttaccgaccggcggcggcgcgcgcggaagaagattgaggccgacgcgcgcggggagggagggagcggctccctgtgatcttcgtcgtggcgtcgtcatcgtcgttaccgacccggtggcggcgcgcgcgcggaggaagacagaagccggcacgcagacggaggaaggaaggcgctggagctcgccggcgtgcggagggcgggcggcggcatcactcgcgcggagaaaggaggaggctggcgcgcgtggagtggtgacggcgcagcgccgaagctcaccagctcgcgggagaggcgccgctgccgccggatctgcggctcctccaccaccgttgctcctcctcctcatcatcgagctcaccgtcaccgccacgacagctcagcgccaccgcccccacagctcggcgtcgctgcccccacagatcggcgccgcctcgcgccccatcagaccgccgccgccgccctccacctccacagcgggcgccggcggggctatatatcacgccgccgccgccgcctcctcagctcgccgccgccgccccctcaaatcggcgccgactcggaccccctcaaagcaccgccgccgccgtcctccaccacaacgagtggacgccggcggggcagtgcttgacgccgccgccgccgccccctcagctcgccgccaccgccgccccattagc

SEQ ID NO: 89496 - DNA, 768 bp, Oryza sativa
  Clone ID: PAT_MRT4530_88248C.1
atggagcagagtaagagcatcctcaacagatatgccatccaaacatccatcgagaaaatagcgagaaaagtgccaaatttggcgttcctctctcctcatgccatcccgcaactgccagcacccaaaccaaattaccgccctcatccagatcaatgccccgtcccggccttgccccatccgaatcgactcctctcagagactgggtggtggtggcggtgggccatcggcgggaggaggagggagatggacttgccaggaggagggtggagaaagagaggcatatcggaaggacagtgtcaccgcttgcatccatgtccgccggccactgcctacctcctccgcgcccgcccgccgccaccgcttccacttccgcacccgccagccacctccatccggatcgagccatggagggtgaaggtagagagaggagagaggatgcgccggtggccaccttcgccggccactcccgccgtcggccacttgcgcccgcctcttgcgccgctcctccgccctttgcgccgcccgcaccgccgcccatgccactcctccgactgcgccgcccctccgcccggctgctcctccgactgtgccaccctgccgcaacaagctcaccgggaaggagaaaaacggaaaagggaccactggtggctgcggatgacaatggctgcggggtccaaccacggctgtggcagcggcggcgtagaagcggcgccggcaacagggagcagcagcggcgacacgcacgcacgcagggacggtggcggctag

SEQ ID NO: 89497 - DNA, 3058 bp, Oryza sativa
  Clone ID: PAT_MRT4530_88249C.1
tgtagccccttggtcaaagcatttatcaactactgacctgcgattatcaacaccaatttatcatgttattgagttaggatttattaggaccccaccatttcccagagacaaaaacttcttttgatctattggggtatttccaacagataacgatttatgctgcatctgcgcagtaggctctttctaccaatgttaagagtagtgcggtcaggaatagctacaaacaaattgttaaaaggggtaggaaaggctccgaaatatcaccaagtaaaacatatcccctgagatcgactcatagtaatgtaatgatgcttcgcggtgcctcaaaaaggaatacttagtaacctaatgtgcccacaaatgagaatactggtatccaacgagttgcgaactaaaggtgtacaagctaacacttgacgccttcaccttgcagagcgcttagatgaacctggaaaagtaagaattagacacataataagcttcgaaatgatggtgctggtgttcaaccagccgaaaagaaaagaaaggtaggcagacccccaaaaggaggaactcccaaggacgattacctcatgatccgaaagcgagttagatatgttttgaatcgaatgaactatgaacaaagtttaattcaagcctatgccagtgaaggttggaaaggtcaaagcttggaaaaaataagacctgagaaggagcttgaacgagccaaggtggaaattctgcgatgcaagtcaagaatacgggaagcttttcggaatttggattccctcctatctgagggaaagctggatgaatctatgtttgattctgctggagaaatatctagtgaagatattttctgtgctgcatgtggttcaaaggatgttacattaaaaaatgacataattctttgtgatggaatctgcgacagagggttccaccagtattgtttaaaccctcctttgcttgctgaagatattccacagggggatgaaggatggctttgccctgcatgtgattgcaaaattgactgcatagatgtattaaatgaactccaaggggtcaaactctctatccatgactcttgggagaaagtttttcctgaggcagcatcctttttgaatggttctaagcaaattgatgcgtccgatcttccatcagatgattcagcagacaatgattatgaccctactttggctcaagggcacaaggtggatgaagaaaaatcttctggagaagatggtggtgaaggattagattctgatgactcatcttctgaggattctgaatcttctgagaaggaaaagtctaaaacttcacagaatggaaggacagttgatgatcttggtttgccttctgaggattcagaggatggtgactttgatccagcaggtccagattccgacaaagaacaaaatgatgaatcaaactcagatcagtcagatgaatcagattttacatctgactctgatgatttttgtgctgagattgctaaatcctgtggtcaggatgaaatctcaggcccttcatcatcacaaatcagaacagtcgatcgcaccgatggaagtggttttgatggtgagcctaatgcagaaaattcgaatcttgcatttatggagacagagctagagcaagacatggtgctaccaatttctagtaaacgacaagttgaacgtttggattacaaaaaactgtataatgaggcttatggtaaagcatcatctgattcaagtgacgatgaagagtggtatggaaatagtacacccgaaaaaggtaatttagaagacagtgaaacagattcgcttgctgaatcacctcagggtggaaaaggattctctagaagagcaccagttaggtaccataataatgaacatactccacagaatgtaaggcccggtggttcagtaagcgaccagcaaactgaagtactttgctccaatagcaatggtagcacagccaaaaacagacattttggtcctgcaattaatcagaaactgaaggcacatttcaaggaagatccataccctagtcgtgcaacaaaagaaaatctggcacaagagttaggcctcacatttaatcaggtcactaaatggttttccagtactcgtcattacgcaagagtggcagccacaaaaaaggagaacaacattgaaaatcatacggctgagaataataacaataccaacactgttgatagcatacaactgagaggatccaatgatattgttagtgtagatagaaatgatatggtctccgaggaaaggacaggacaaagtaatctcaatgaaggtactccattaagatcagataccagctgtgggcagagtgtggctgtgactcctatggtacacccagaaaaccagggcaatgattcctcaagtaatgttagaacaccaaatgctaagtctgcggagaaattgatccctggactggaaaattcagatgaggctaggcgaaaggcggtacaacgggaactgagaaagatgaagactggcaggtgaaactccctagtgttcgagttatttgaccagatgtgcagagaagcaagtttttgtatgctgcctagattgcttttaatcagatgtgcagagaagcaaagattttttttccttcttgtttgtggtcgcaaaaaagcctgattgttgtagctgctatgtttgttccctttggctgtccatccagaatttctgataagatgacacttggaagcacatcctgcagcactccagttacaggaatgggttcagttgactgtaacagtttagcatagtccgtagtggacagtagctgtgttgtttgtcgtgccctgtagtcctgtactaccttgaattaggactgctaagtgaaccgatacaagtacttgtgactgaaatctatacctctttttttctttccaccttgggaatttgtagaacaaaaccgatgtctgatgatatgctatctaggaatagcaactgttgtatttttgttcctgtttagggagatttagattctgatgagcaaaaaaaaagtaaaaaacttttaagaatttgaaaaggctgggtttcccagtttttagcttctactaaaaaaaaaaaaa

SEQ ID NO: 89498 - DNA, 300 bp, Oryza sativa
  Clone ID: PAT_MRT4530_8824C.1
tttttgagaaaaaaaaacttcaacagtataatttcaaaaaaaattccactttgtgcttattttgtgctttcactaacggctgatcacgtcacctcaccatacaaaacactggccaatttcgaactcagaccgccatacaggacttgactgaacatgatgaaaacataaacaacgagattaactcaacacatgtcccttcctttcttcaactctcgcatatgtgccttgtacaaaacaagaaggccggggtgaattaaacggatcctcactaacttgcactttgcaatccactttccaaat

SEQ ID NO: 89499 - DNA, 321 bp, Oryza sativa
  Clone ID: PAT_MRT4530_88250C.1
acgctcacgcgtacgccaccgaacgcggttggtgccccgcgttctcgacaagtacctcggcaactgcgttggcccgggcttagtcggggcgcccgaggaggagctagccggtgacgtcgtggcggactgagtgttcacggtctgctcaaacgttgccaacatcattgacgaggcagatcccggagagccgccttactgggaggggtggaaggagcgcatcgcgcattgctatcttggacaacgcgcctttttaagaggacgattccactaggttcctgttggacaacggctattgatgcttttggaggattttaatgtgga

SEQ ID NO: 89500 - DNA, 921 bp, Oryza sativa
  Clone ID: PAT_MRT4530_88251C.1
aaaatttggggcaattgcttatttgacctcgttttgaattctaattgccgatttgaccctactttctgaactttgcttatttgacccttattttcgagtacgaagctctggtctgactctattccgtttgtgtccgcggaggaagacggaggccggcgcgcgctggggggagagagcggtgccctgtgctcttcgccacagcgtcgtcgtcgtcgtcgttgccgaccggcggtggcgcgcggggaagaagattgaggccgacgtgcacggggagggagggagtggagggagtggcccctgtgatcttcgccgtggcgtcgtcgtcgtcgttgccgacccggcggcggcgcgcgcggaggaagacagaagccggcccgcagacagagggaggaaggcgctggagctcaccggcgtgcggagggcgggcggcggcatcacgcacgcggagaaaggaggaggctggcgcgcgtggagtggtgacggcgcggcgccgaagctcaccagctcgcgggagagagacgccgccgccgccggatctgcggctcgtacacccagcagccgccggatccaccgcttgcacaccgccacggcctgagctccaccaccgttgctcctcctccttgtcatcgagctcaccgtcgccgccatgacagctcggcgccaccgcccccacagctcggcgtcgctgcccccacagatcggcgccgccccgcgccccatcagaccgccgccaccgccgctgccctccacctccacagcgggcgccggcggggctgtacatcacgccgccgccccctcaaatcggcgccgactcggaccccctcaaagtgccgtcgccaccgccctccaccacaacgagtgggcgccggcggggcagtgcttgacgccgcctccgctgccccctcagctcgccgccaccgc

SEQ ID NO: 89501 - DNA, 963 bp, Oryza sativa
  Clone ID: PAT_MRT4530_88252C.1
tcagcgtcgctcgctcactcgctcctctccgtcgcaaagcagagttgccgcttcctcatccatcgaaaccgaacggcagtggagagcgcgactcaggctcgggctggaggtggtcggctcggaggtcaccacgctgggcggccaggtcaggctcgccttccttgtatcgtgcgggtctcgcgacgccgccgccgccatagcctcggtccgccacgcgctccagtccgtgctcggcaaggtcagctcaggcttcgacttcgcacccagtgcgtcgctgctgggcagcaaacgccgaaaggtctccacgttcgagtcgtcgagctgctcgtcttgacaagtttcagagatgattacgaagtaatatgcccgttgctccatgctagctctcccctgctccctccgccggctccggctcccctcttccctcagccggcgccggctctcctctcctccgggccgagcaacggcgtcctccatgccgtgcggcggcagcagcagcgtcctccgggccgagcagtggcggtagcgtccttgaagaagcgccggcgggaggacggcggcggtggcgcgattctggagatggtggcagagcggatctgggctcctcctctctcggccgacgacgaggagacggagctgctcatggtcgtcgtcctcctcgctttgtctccacttccggccggcgatgaggtttcggaggcggcagcgcgaagcggagcccaggacgacgatgaggtcggcgacgcggagcgggagggcgcgaggtgacggcgagtcggaggcacgctctccacagtgtaggctccagccgttactctgctccagcgcgagcgaggaagcgcgcttccctccgcgggagcgagcgcctctggtgggacgcgcaaccttacgccacgcaagcgcgaatcctagctttctgttggacttggactggactgacacacaattacaccacttagccat

SEQ ID NO: 89502 - DNA, 983 bp, Oryza sativa
  unsure (1)..(983): unsure at all n locations
  Clone ID: PAT_MRT4530_88253C.1
tcactcgtgcgtgcagcggcggcggctagctaagggggcggcggtggcggcgagctgagggggcggcggcggcggcgtcaagcactgccccgccggcgcccactcgttgtggtggagggcggcagcggcggcgctttgagggggtccgagtcggcgccgatctgagggggcggcggcaacgatctgtgggggcggcggcggcgagctgaggaggcggcggcagcggcgtgatgtacagccccgccggcgcccgctgtggaggtggagggcggcggcggcggtctgatggggcgcggggcggcgccgatctgtgggggcggcgacgccgagctgtgggggcggtggcgccgagctgtcgtggcggcgacggtgagctcgatgacgaggaagaggagcaacggtggtggagctcaggccgtggtggtgtgcaagcgggggatcccgccgctgctgagtgtacgagccgcagatccggcggcggcgggcgcctctctcccgcaagtggtgagtttggggcngngccgtcaccactccacgcgcgccagcctcctcctttctccgcgcgcgtgatgccgccgcccgccctccgcacgccggcgagctccagcgccttcctccctccgtctgcgtgccggcttctgtcttcctccgcgcgcgcaccgccgccgggtcagcaacaacgacgacgacgacgccacggcgaagatcacagggagccgctccctccctccccgcgcgcgtcggcctcaatcttcttctgcgcgcgccgccaccggtcggcaacgacgacgacgacgctgtggcgaagagcacagggcgccgctctctcccccccagcgcgcgccggcctccgtcttcctccgcgggtgcgccgccgccgccgccgccggggaaagagatttttttttatattatccaaactttaggtcaaacaagcaaacaaacaagatataacagggccaaataagcaagggcaaaatgga

SEQ ID NO: 89503 - DNA, 1411 bp, Oryza sativa
  Clone ID: PAT_MRT4530_88254C.1
atgtcgtccccgtcctccgccgcgtcgccgccgccgccgccgccggcggagcagcgccgcccggacccggtgcgcttcggcatcatggggtgcgcctccatcgcgcggaagctggcccgcgccatgctcctcgccccgggcgccgccgtggccgccgtcgggagccgctccgaggcgaaggcccgcgcgttcgccgaggagaccggcctgctcctccgccacgccccgcgcctgcacggctcctacgaggccctcctcgccgacccgggcgtcgacgccgtctacctcccgctccccaccagcctccacgtccgctgggccaccgccgccgccgccgcggggaagcacgtcctcctcgagaagcccaccgcgctctgcgccgccgacctcgacgccatcctcgccgcctgcgacgccgcgggcgtccagttcatggacgccaccatgtggatgcaccacccgcgcaccgccaagatgcgggagctcgtcgccgacgaggccaccaccggcgacgtcagggtggctagaaagataaatagcctgttcagctttcgggcaaacgaagaattcctccaaaatgatatcagggtaaagccagaccttgatgccctgggtacgctaggcgatgctgggtggtacagcatccgtgcaattttgtgggctgttgactatgagcttcccaagactgtgatcgccctgcgcaaccctgttaggaaccaagctggcgtgctccttgcctgcggagcaacattgtactgggctgatggaaagattgccaccttcaactgttctttcctcaccaacctcaccatggacatgaccatcgttggaacaaacggtacgcttcacgtcaccgactttgtcatcccatatgaagagaagtacgcggcattcaacatggcgtccaagtcaaagtttgctgaactccacatcggatgggatccactgccgagcaagcatgtcgtctctacagacctgccacaggaagccctcatggtccaggaattctcaaggttagtgcagaacatccgagacgcaggtggcaaacctgagggaaagtggccagccatcacccggaagactcaggttgtgatggatgcggttaaaacctccattgacaaccgatttgggccagtggatatttctagctgaaggggtaagcaagtgtgctttctgacgatctctgaagtccatgatatttctgtatcctaccagaaagaaccacctattcaaataattggaagaattgcagtcaaattcactacaatattgtagatgtatcaagcaagatgatgttataaataaatagaatttgaaacatggaacctctgtttgacccatggaaagctaaccattgggacatatatattcccatatcccattcatctgttcctaatgaggttcatagttc

SEQ ID NO: 89504 - DNA, 4212 bp, Oryza sativa
  Clone ID: PAT_MRT4530_88255C.1
atggcgcccccaatcgccgggaacggacgcgccaaccgtctctccctcctcgccggagcgtcgtccggtcgcgccgtcgcctcctccagcatcgcagctgcctccccttccccggcttgccctccgtttcccgcggagacccccggagctgcgttcccgccgtcgcccttccctttcatccgcgtcggccgcctccagccgcctctatctccctgcctgagcgccggtcgacgtcgccaccacctccctcgactccgcgacgccgccctcatccccggcatctcctcctcctcgcccgaatttcgccggaacaccgtcgcccgcgccggcttctccttcctcctcggcggcatctcctccggctgcccctttcgccatgcccatgcgtcagccggcgctgccgtcccctccctcggcacgccgcggcaccaccacctccggcatcgcagcggcaaggtcgcccttggcctcgcttcccctccatccaaacccctccgcggtccatcatcgtcgtctccgatcgttctcgtcgtcgacgtcccatcggtcacccggctcgtcgtctcgcggcgccgcctccgtcgtcggcatcgcagcggcgtggtccacgccgtcgtcggctgccctcatcgtctcctcgccggccccgcccccgtcatcgtcttcgtcctcgcctccgcgtcgtcaagcctcgtgccggccgcgtctcgccgtcgtccaaggatcgccgccgaagtcgttccctcgccgtctgtctccgccgcgcctctttcgtcgttccggaggttcccgaagcgtggttcgtggtcgtcgccgaagaccgtcgagcccgtcgaggctgacgattggttgaaagatgttgatagaaaactcaacttagtgcagtgtactcctgttgagaagacgctctacgcctctcaccagctaagaggacctgctgcagattggtgggagaattactgcaatgcacatcctgaacccactaacattgcttgggatgagtttgctacggctttccgtgcagctcatgtgcctgaaagcactattgacatgaagaaagaagaattcaacagacttaagcaaggcaacagcagtgtcaatgagtacctaagtcagttcaacaagttggctcggtacgcccctgaggaagtagacacagataagaagaagatcaggaaattcttgaaacgaatcgcagttggaatgagactccagttgcttgctcatgacttccccacttttcaacatatgatcaacaaggcacttctgcttgaggatgccagaaaagaggctaccgaagaatacaagaaacgcaagtctaaccatcagggaaattcttcccgaggcacacctcgccctcgctacggtcaacccatgcaataccaccagtcggtcactcaggctaaccgccagccaggctacgcccctcgccctcagatgaaccgtccgacacctccgccacagcagtgtgcccctagtggcaacactgcgccaaacagtgttacctctttcaactcaccacagggaccgtcagtagttcagtgtttccggtgcaaccagatgggtcactatgctagacagtgccctcagaatcctaccaacaccaacttagggcatgctaatggcagcatcgccaaaactcctactccagcggcagctcagtctcgtcctagctctcaggcaagtggacaaggttctcgtgcttccaaccactttggtcgaggacgtgtgaatcacattcaagctgaaaccgctcaggatgctccagacgttgtgatggaagaattaacgagtatgccaccagaccgagagattgagttcgccatagaactggcaccagggactgcaccaattgcaaaaaggccataccgaatggcagctaatgagttagcagaagttaaaagacaaatcgaagaactggaaagtaaaggttatgtgcgacctagctcatccccttggggagccccagtgcttctggttaagaaaaaggatggctcggagagaatggtaatcgactatagagccctgaatgaagtaactataaagaacaagtacccgttgccacggattgacgatttattcgatcaacttaaaggagcaagagttttctcaaaaattgacttgaggtcaggttaccaccaactgaaaatcagatctgaagatatcccgaagaccgctttctcaacgcgttatggtctatatgagttcacagttatgtccttcggactcaccaatgctccagcattcttcatgaacttaatgaacaaaattttcatggaatacctagaccagtttgtcgtggtgttcatcgatgacatcctgatatactccaagaacgaggaagaacatgctgaacacctgaggctgataatggaaaagctcagagatcatcaactattcgctaaattctcgaaatgggaattctggttggaccgagtagcatttcttggacacgtgatctcctctaacggtgtcgaagtagatcccagcaaggttgaagctgtacttgcttggaacccgcccaagaatgtgtcagagatccgcagcttccttggcttagcgggatattatcgaagattcattgaaggattctctaagctagccagacctatgaccgagctgttaaagaaggaaaagaaatttcactggtctacagcctgtgaagacagctttcaagaaatgaagaaaaggttgaccactgcaccagttctcaccttgccagatatccgaaaagattttgagatcttctgtgacgcatcaagacaaggcttaggatgtgtcctaatgcaagaacgaaaggttgtggcatatgcatccaggcagcttaggcctcatgaagtcaattatcccacccatgatctcgagttggcaaccgtggagaagaaagacaccaacttctccatagacgatcaaggcacagtttggtgcggtccacgcatctgtgtaccggccaagaaggagttaagagatctcatcctaaaggaagctcatgagtccgcttactccattcatccaggaagtacgaagatgtaccaagatatcaaggcatacttttggtgggttggaatgaagcgagatgtcacagaatacgtagccttgtgtgacatttgccaaagagtcaaggcagagcatcagaggccagccggggacgttgggcccgagggtgatgtgttcgccctcctcttagtccccccgagggggtcgagccgcacccgcctcggccccgagggccgaggcgccccgacccctcgtgggttttcgctccgcgtgtatgggttagacagccatgattccgcgtcgcgcctgctcccggcgaaagtggagattgggagcttggagtctcacctagggtccccggccgaaccggcaaaggggggcctgcgcggtctcccggtgaggagccccacgctccgtcacctaccgattcccgagtggaaatgggaagagatcggaatggatttcatcaccggtttgccaagaacccccaacgggttctggaagcagttgcatgaagccctcggaactgatctaaattttagtacggcctaccatccacagaccgatggtcagacggaaagggccagcattcagatgtcgccgaatgaggcaatgttcggaagaaagtgccgcacccccttgtgctggaatgaggtgggcgaagcactggtattcggtcctgacatactcaagtcagcagaagaacaagttaagctgatacgagaacgtttgaagacagcacagaaccgtcataagaattacactgacaatcggaggcgtgaccttgagttcgaaaagggagatcatgtgtacctgcgggtatcacccctccgtggtatgagaaggtttgggatgtccggcaagttagcaccccgctacatcggcccctacctcataaccgccagacgtggcgaagtggcttatcagcttgagctacctgaaggtctcgcagatgtgcacaacgtgttccacgtatcccagctaaagaaatgtcttcgagttccagaagagcaagttcccctgggtaatatcgagctggaaaagaatctgacctacaaggaaagaccgatcaaggttcttgaagaggcagaacgtcagactcgaaggaagaccatcaagttctacaaagtccaatggagcaatcattctgaagatgaggcaacctgggaacgagaagatcttctccgcgccgagttcccggacctgctcccttag

SEQ ID NO: 89505 - DNA, 507 bp, Oryza sativa
  Clone ID: PAT_MRT4530_88256C.1
atggaggaggctgccccccgatgccacgtggccctcccccgaggttcacaaataaatagaggcactgtgggggagtccatccgccacatccggcgttgcgggtctgacttgcggccatcccagcgcttcaagccgtccccacccacccaccagccatccatcgcagaggtccggcgagccatcggcctcgacaacgatgacccttcggtgtcctcccgccgtggggagaggcagttcgtgttccggcagccgaaggacgatgggttctacctcttccgctgtcgcctcattctcctccattacgtcaacaaccaaagggttggtgaggggggggggagggggctgtcgtactacggttgccaggcgatggggcctgttgaatggccgaagttcgacatgttccctatcgaacgcccgcagctcgacatgttccagtcgaacacacctcgtttgattgcctggcctatcgatcctttgtcgttcgatagaccctattttggcggataa

SEQ ID NO: 89506 - DNA, 3246 bp, Oryza sativa
  Clone ID: PAT_MRT4530_88257C.1
atgcagagatggaacagtctcaccgctctcaccgcactgccagtcacaattctggagaagaacgcctcccttccccacctcataccgtcgagcccgtcgaggctgaaagatgttgatagaaaactcaacttagtacagtgtactcctgttgagaagacgctctacgcctctcaccagctaagaggacctgctacagattggtgggagaattactgcaatgcacaccctgaacccactaacattgcttgggatgagtttgcgacggctttccgtgcagctcatgtacctgaaagcaccattgatatgaagaaagaggaatttaacaggcttaagcaaggcaacaacagtgtcaatgagtacctaagtcagttcaacaaattggctcggtatgcccctgaggaagtggacacagacaagaagaagatcaagaagttcttgaagggaatcgcagttggaatgagactccagttgcttgctcatgacttccccacttttcaacatatgatcaataaggcacttctacttgaggatgccagaaaagaggctaccgaagaatacaagaaacgcaagtctaaccatcagggaaattcttcccgaggcgcacctcgccctcgctatggtcaacccatgcaatatcaccaatcggtcactcaggctaaccgccagccaggctacgcccctcgtcctcagatgaaccgtccggcaccccagccacagcagtgtgcccctagtggcaatactgcgccaaacagtgttacctctttcaagtcaccgcagggaccgtcagcagttcagtgtttccggtgcaaccagatgggtcactatgctagacagtgccctcagaatcctaccaacaccaactcagggcatgctaatggcagcactgccaggactcctactccagcggcagctcagtctcgtcctagctctcaggcaagtggacaaggttcacgtgcttccaacaactttggtcgaggccgggtgaaccacattcaagctgagaccgctcaggatgctccagacgttgtgatggaagaattaacgagtatgccaccagaccgagagattgagttcgccatagaactggcgccaagcactgcaccaattgcaaaaagaccataccgaatggcagctaatgagttagcagaagttaaaagacaaatcgaagagttggagagtaaaggttatgtgcgacctagctcatccccttggggagccccagtgcttctggttaagaaaaaggatggctctgagagaatggtaatcgactatagagccctgaatgaagtaactataaagaacaagtacccgttgccacggattgacgatttgttcgatcaacttaaaggagcaagagttttctctaaaattgacttgagatcaggttaccaccaactgaaaatcagaactgaagatatcccgaagaccgctttctcaacgcgttatggtctatacgagttcacagtgatgtccttcggactcaccaatgccccagcattcttcatgaacttaatgaacaaaatctttatggaatacctggaccagtttgtcgtggtgttcatcgatgacatcctgatatactccaagaatgaggaagaacatgttgaacacctgaggctgataatggaaaagctcagagatcatcaactattcgctaaattctcgaaatgcgaattctggttagaccgagtagcatttcttggactcgtgatctccttcaacggtgtcgaagtagatcccagcaaggttgaagctgtacttgcttggaacccgcccaagaatgtgtcagagattcgcagcttccttggcttaactggatattatcgaagattcattgaaggattctctaagctagccagacctatgaccgagctgttaaagaaggaaaagaaatttcactggtctgcagcctgtgaagacagttttcaagaaatgaagaaaaggttgaccactgccccagttctcaccttgccagatatccgaaaagatttcgagatcttctgtgatgcatcaagacaaggcttaggatgtgtcctaatgcaagaacgaaaggttgtggcctatgcatccaggcagcttaggcctcatgaagtcaattatcccacccatgatctcgagttggcagccgtggttcatgctcttaagatctggaggcactatttaatcgggaacagatgtgaagtatacaccgatcacaaaagttttaagtacatcttcactcagaccgagttaaatatgaggcagagaagatggttggaactaatcaaggattacgatcttggaattcataccaccccgtcaggtgtccctgccagcttgacagtacagcctaccctagagtcgcaaatccgagaagctcagaaagacgacgaagggataaaggagttaacaaaaagaatacaagagaagaaagacaccgatttgtccatagacgaccaaggcacagtttggtgcggtccacgcatctgtgtaccggccaaaaaggagttaagagatctcatcctaaaagaagctcatgagtccgcctactccattcatccaggaagtacgaagatgtaccaagatatcaaggcatacttctggtgggctggaatgaagcgagatgtcgcagaatacgtagccttgtgtgacatttgccaaagagttaaggcagaacatcagaggccagctggtctgctgcaacccctaccgattcccgagtggaaatgggaagagatcggaatggatttcatcaccggtttgccaagaacccctagcgggtacgactccatctggaaccgtcagaaaaattacgctgacaatcggaggcgtgaccttgagttcgaaaaaggagatcatgtatacctgcgggtatcacccctccgtggtatgaggaggtttgggatgtccggcaagttagcaccccgctacattggcccctacctcataactgccagacgtggcgaagtggcttatcagctcgagttacctgaaggtctcgcagatgtgcacaacgtgttccacgtatcccagttaaagaaatgtcttcgagttccagaagagcaagtcctcctgggtaatatcgagctggaaaagaatctgacctacaaggaaagaccgatcaaggttcttgaagaggcagaacgtcagactcgaaggaagaccaccaagttctacaaagtccaatggagcaaccattctgaagatgaggcaacctgggagcgagaagatcttctccgtgcagagttcccggagctgctcccctag

SEQ ID NO: 89507 - DNA, 1262 bp, Oryza sativa
  Clone ID: PAT_MRT4530_88258C.1
gggggggaagcaaaaaaggggccaaaaaaggccggtcaacgggggaattcccccagtttaaaaggaccccacagccggagctcagggggcagccaacaaaggacaatatctggctgaatggtttaacaggatggcccaaggcaaagaacacccagaaggtccgttgcgcatgacaggaacaggatcagggcgacacaatttccgcccattccggtacaagcatcttgggcaatttgcacccttgggtggagagcaagctgctgcagagctcccaggcgactgggtttccatgggccatagcactcagtggctctggtactctgtatatgcaagcaaacaagtgagttggcgcacacggatgctggtggtatccgactggactcggaggttcatatttgggagggattcaagccgaatttagcactgccaaatgctgcatcatttcttgtagagataacattgctgaataattttgttgtctttggctgtgtttagttcgtgtgccaaaaaaaaatttttgaagtatacggacacatttgaagtattaaatgtagactaataacaaaacagattacagatttcgcttataaactgcgagacgaatctattaagcctaattaattcgtcattagcaaatgtttacttgagcaccacattgtcaaatcaagacgtaattagactcaaaagattcgtctcgcaatttacatgcaaactgtgcaattggtttttttcatccatatttaatgctccatatatgtattcaaacatttgatgtgacggaaaagttgaaagtttaaagaaaaaagtttgaatataaacacggtcctagttagaagtactgcccaattctctcgacagcaatcttacaacatttcactcgaagcatttactgctcaaaataagctcgcaaacatcctcttctgcgatgtcaacacgcgcatttcactgaggacaaacccccattgtcaaaaccattagtttatgaactgaaagcagttccggaaggatcccatcaattggcttttaaataagctacagaaacctcctgcacaaatcagtttcttcaggaaagaaggcaactgctttgaaacttacataaacaactgctactctctcaaagtctcaattgatctaacgaaagattgcttgcatctgtgcaagtaactattgcctattgcttagtgctgtagtactgtcagtagcttgcagaaatgcagagctgcataatggtgcactgcatggctatggacacatcatttgac

SEQ ID NO: 89508 - DNA, 4530 bp, Oryza sativa
  Clone ID: PAT_MRT4530_88259C.1
atggcagtgaacgccagcttcagttcccacggttttggcgagggtcaccacgtcgctcagcttcgtgacctcgcccgcttccttggcttctcgtgtcccgagtacacggggtactccgtggaccgtgttccccctcgctgtgagctctgtgtacctttaccctcgtggaggcccactctccagatcgcgtaccaggacctctcctggactgcgcttcgacgcttggcccatgactacagccaccgtctcgggggctctgccttctggcagctcccacgccttccttctggccacgcagacgccaggtggtgtgcgtacagtcaagctcggcgtagctctgtgacttgtccacacccgttgtatcagatggctagccgcccccgccgtgctgctcatgcatcagcctgcttcggttttgaggaaggtagagttgagccagaagcaaatcatgagtcagctaatgagcaatctcaccacagcaaccgttcgcaccgtactgcttcccgcaatgcagaagttgagcaaccccgccgcagcaaccgctcgcatcacacagcttcccgtatagcagagatggaacagtctcaccaatctcaccgcgctgctagtcacaattctggagaagaacgcatcccttccccacctcatgtggaaaacaacatgcaacacctgatggcagttcagacacagatcttgcaaggattagccgcggctatagccggctttcagcataatgcgcatggaaatggccaccctcacatgagcaacaatagatccaaactgaccgacttcctgaggtctcggccgccagagttctctcagaccgtcgagcccgttgaggctgacgattggctgaaggatgttgatagaaaactcaacttagtgcagtgtactcctgttgagaagacgctctacgcctctcaccagctaagaggacctgctgcagattggtgggagaattactgcaatgcacaccctgaactcactaacattgcttgggatgagtttgctatggctttccgtgcagctcatgtgcccgaaagcaccattgatatgaagaaagaggaatttaacaggcttaagcaaggcaacaacagtatcaatgagtacctaagtcagttcaacaagttggctcggtatgcccctaaggaagtggacacagacaataagaagatcaggaagttcttgaagggaatcgcagttggaatgagactccagttgcttgctcatgacttccccacttttcaacatatgatcaacaaggcacttctacttgaggatgccagaaaagagtctgccgaagaatataagaaacgcaagtctaaccatcaggggaattcttcccgaggcgcacctcgccctcgctatgggcatgctaatggcagcactgccagaactcctactccagcagcagctctgtctcgtcctaactctcaggcaagaggacaaggttctcgtgcctccaacaactttggtcgaggccggatgaaccacattcaagctgagaccgctcaggatgttccagacgttgtgatgggtatgttctctgtcaactccgtacccgcaatagttctgtttgattcaggagcttcccattctttcatatcacaagcttttgtgaaaagaaatggttggaaaacccaaaatttacatgtaccaatgatagtacattcccctggaaggaatataagggcaactcaaatatgcccggaagttaaccttagaattgaggaagttgacttcctagccaaaccgatagtcctggactcgcaaagcttggacatcatcctagggatggattggttggctaagcacaaaggacagatagattgtgccgaaaggtccatcaccttgcaaggacctggaggaaagcaagtccgctttacctctaacacccctaccacaagtcggtctatcctaacctgtttacaagtcacctccttggagtcggtgcccatagtctgtgaatatcctgacgtatttccagaagaattaacgagtatgccaccagaccaagagattgagttcgccatagaactggcaccaagcaccgcaccaattgcaaaaagaccctaccgaatggcagctaatgagttagcagaagtcaaaagacaaatcgaagaattggagagtaaaggttatgtgcgacccagctcatccccttggggagccccattgctcctggttaagaaaaaggatggctctgagagaatggtaatcgactatagagccctgaatgaagtaactataaagaacaagtacccgttgccacggattgatgatttgttcgatcaacttaaaggagcaagagttttctctaaagttgacttgagatcaggttaccaccaattgaaaatcagatctgaagatatcccgaagactgctttctcaacgcgttatggtctatatgagttcacagtgatgtccttcggactcaccaatgctctagcattcttcatgaacttaatgaataagatcttcatggaatacctggaccagtttgtcgtggtattcatcgatgacatcctgatatactccaagaatgaggaagaacatgctgaacacctgaggctgataatgggaaagctcagggatcatcaactattcgctaagttctcgaaatgcgaattctggttggaccgagtagcatttcttggacacgtgatctcctccaacggtgtcaaagtagatcccagcaaggttgaagctgtacttgcttggaacccgcccaagaatgtgtcagagatccgcagcttccttggcttagctggatattatcaaagattcattgaaggattctctaagctagccagacctatgaccgagctgttaaagaaggaaaagaaatttgaatggtcagcagcctgtgaagacggctttcaagaaatgaagaaaaggttgaccactgccccagttctcaccttgccagatatccgaaaagatttcgagatcttctgtgatgcatcaagacaaggcttaggatgtgtcctaatgcaagaacgaaaggttgtggcctatgcatccaggcagctcaggcctcatgaagtcaactatcccacccatgatctcgagttggcagccgtggttcatgctcttaagatcaggaggcactatttaatcgggaacagatgtgaagtatacacgatcacaaaagtcttaactcaaatatggccagaccaagatcgcctgtgcagagaattggagaagttaaggctgaccgtggtacagtcaggtgtccctaccagcttgacagtgcagcctaccctagaatcgcaaatccgggaagctcagaaagatgatgaagggataaaagaattaataaaaagaatacaggagaagaaggacaccgatttctccatagacgatcaaggcacaatttggtgcggtccacgcatctgtgtaccggccaagaaggagttaagagatctcattctaaaggaagctcatgagtccgcctactccattcatccaggaagtatgaagatgtaccaggatatcaaggcatacttctggtgggctggaatgaagcgagatatcgcagaatacgtagccctgtgtgacatttgccaaagagtcaaggcagagcatcagaggccagctggtctgctgcaacccctatcgattcccgagtgcaaatgggaagagatagaatggatttcatcaccggtttgccaagaacccctagtggctcatttcgtgccagtgaaaaccacctttgatggaaagaaactagcagaactctacatgacccatgtcgtatgtagatttggctgtcccaagaagattgtgttagatcgaggcactcagttcacctcaaggttctggaaacagttgcatgaagctcttggaaccgatctaaattttagtacagcttaccatccgcagaccgatggtcagacagaaagagtaaaccaaatcctagaagacatgctacgtgcgtgtgccatggattttgaaggcacttgggatcattgtttgccgtatgctgagttctcatacaacaacagttatcaggccagcattcagatgtcgccaaatgaggcaatgttcggaagaaagtgccgcactcccttgtgttggaatgaggtgggcgaagcactggtattcggtcctgacatactcaaggcagcagaagagcaagttaagctgatccgagaacgtttaaagacagctcagaaccgtcagaagaattacgctgacaatcggagacgtgaccttgagttcgaaaaaggagaccatgtgtacctgcgggtatcacctctccgtgatgtgcacaacgtgttccatgtatcccagttaaagaaatgtcttcgagttccagaagaacaagttcccctgggtaatatcgagctggaaaggaatctgacctacaaggaaagaccgatcaaggttcttgaagaggcaggacgtcagactcgaaggaagaccatcaagttctataaggtccaatggagcaatcattccgaagatgaggcaacctgggaacgagaagatcttctccgcgccgagttcccggagctgctcccttag

SEQ ID NO: 89509 - DNA, 2846 bp, Oryza sativa
  Clone ID: PAT_MRT4530_8825C.1
tcagagcaaattgaagttcgcgaagacttgacctacgtggagagaccggtgaaaatcctggacgccatggagcgcaggaccaggaaccgggtaatccgtttttgcaaagtccaatggagcaaccacgctgaggaagaagctacttgggagcgtgaagacgagcgtcgcctcctttcccccttccctcccctctctcggccgccgctccgccgcgccggtggtcgccggcggcgaccatcggggcacgggcgcgccgcctcccgccgaccgcgccggcgtggccgcccgcgtgcgcgccgagtggctgccgcgtggggcccggccgtcagccgcccgcgccctcgggtgcggctgacgtgtggggcccacggcgccgaccggtgcgagccgggtgcgcccagtccaccgtggaccgtgaggctgccgcgtgggccccactcccgtggacccggtgcgcgcgcccctccccctcggctgacgcaataaacccttgttcaccctgcctaagatctttaggtacctgaatgctatcagatgaggttcactccacctcccggagcatccggcggagcgctgggccctcaaggtcgggcacaagttagcagcagcatggtaaacaagcccttgtgagctggcgcgaaacatgcgggatatggagcctttcataacgccaagcacaagcacgccctccacatgtgcctgcccgtacatctcattctccaagagtacaggcttgaatcggttgcaatcaagcttgacgttttgcttatccatgaaggtctgcctgatgaattcaaatccatgtttgtggaacgaaagaggatttgtgaagatctcatgatctaggggatattgatcagtaaggctgctttcatgtacaccaatgctatactgcttgtaacgcaggcccatttgttccgctgggttgccgaaatcaattcttggatatccagtctagtccaccccatggcacaatctgaatcaatgtagcgttttgtggcaagaacacacagttggtgagtccagcaccatggacacccatcatcacatcaacagagttgacaaccttgccaaaatgggagagatcagagctcacattggcctcttcaaccaccacctcgtaacctatctcctcagccatcgccactatctcgttaagattgagaaacattcttgtcctctgcctggatataatgagcagtcttggcttggctttgggaatctcaccaagcgcagttacaaaatccctaggcagtgagtaggtcctgcgcatgaacctattaaaatccaccattgagtagttatgtggagcttttgatgagtcaattgtgaactccatgtaagcatgaaggccaacaattgcatgcttgaagcaatgcacttgatcgtcattgttgaagtcaatcaaggggtacttggatagcttatcaaacaccaccttatacttccttgtccaccaaatagccatgtctgtgattaggaattgaacttcgccattgaattcgcttgcggttgtgaaaagagggacaagcacgtcggtgaagtcatggaatagatttccagtgtatccagtcagagcaaagaccactgcaggcacattgtgatacttgctacactcaggtgccactttgcttgatttcacggttatctctgtaatatggccgaggcagagctcgtcacctttacgagggtaaggcttaactttccatatctcctctctctttgaactggcaggttccatgtacatgacagaacttgcattgggatgaatcctaatgttgccccgcatctcacagacatttgctctgaagtttgagaaatcacatagtggtttcttgttccactcctcattatcagtttctggttccacattgtctcccttgtccgcgtccatctcaaattcatatttttcattcggtttgccatcttcttgcttgccattgtcagtgtcttcagcatcacggatggtataattggaaacagtcgggagggtcaccttgctatgctgtgtgtgcccctcttcctcgccgttcttattatcctcttcgcctccaccacctaacacctcagatgcagtggccgcctcctcgttcttgccttgctcgggctcactactgagtagcctcttctcctcctcactagtccctttggcggtggcgtcctcggcgccttcgtcttcgtccaccaccttgggatcctcggcggcggggaaggtatcggcggatctcctggagtcggcgtggatccgctggcggatcaggagcgagcgcggcgcatgatccaccgacagccggccgttcactgcgaactcaaagaaacgagtgaggcgcttggtgttaccatcgatccaaggatccaagaagaaaaagaagaagaagatgatgaagaagcggcgacggcatggcgtacggttgaagaggagggcgtcgggcttggagatgacgacgaaggtgagtgtgacgaggaagaagccgatgacgaggacgagcaggcgcagccgccgcgactcctgccggaggctccgcaccagcttggcgcgctcgacgggcttcatctccccctcctaaatctcctcgctcttcttgccggccgctccactcgaccgacctcgcgcccgccgctgcctttctcctatcccgcgaggagagaccggccgagagaggcggaatggggtttgggatcagcgtggttgcgagaataagggggatagcaatctgcaatcctgggctggctggatatgtgcgtgctagcttccttcctttccttgcctctttcgtcagctttccagtattcctcttcctctgcgctctcctcccacctcgtgccgaattcctgcagcccgggga

SEQ ID NO: 89510 - DNA, 5292 bp, Oryza sativa
  Clone ID: PAT_MRT4530_88260C.1
atggcagtgaacgccagcttcagttcccacggttttggtgagggtcaccacgtcgctcagcttcgtgacctcgcccgcttccttggcttttcgtgtcccgagtacacggggtactccgtggaccgtgttccccctcgctgtgagctctctgtgtacctttaccctcgtggaggtatacacggagctggccttcgcccacaccacttcactgtggccaggcccactctccagatcgcgtaccaggacctctcctgtcgcgaccgagaaaaatacattttcccgaaagctagtgtattaatccccgtcccaggaaaagccgggactgagccacaaactaagccttacccactagacatgtggaagtacggtagtgctttgcaacagaggcccgagcttaatccttatattggccggggtgctacttcccacaactggcatgcacccaaaccccaccggaaaacaggttttaggggttttgaaagaggaagagagggtggaaccatgaatagagtacccactagttgggattttgtttatcctagggtgaacaaggtcgacggcgacgacgaaaaggcggccggagcggaggaaggcggcggcgcggctcgggtcgacggggacggcggcgctccgacgatcgacgagcgaaacggaggggtggacgaggtcggcgaggatgcggcgaagccgaaggaggcggcgccgaggtgggaggtggtccagggcgacgacgtcggcggaccggagctcggcggcgacggcggagagagagagcgacggcgcgagctcgattccgccgaggaggaagggcggcgagaggcggaaacggacggaggaggacgtgacatctcctggactacgcttcgtcgcttggcccacgactacagccaccgtctcgggggctctgccttccggcagctcccacgccttccttctggccaagcagacgccaggtacccttgtccgtacagcgagtctcagccagtgctgactcgcatggttgagctttcggaggctcaggccactcagcacgacctactccttgaggcttaccactcccttgcccgccgctacgccgctctggaggcccgtctggccgaggagggtgtcacctcagttgacactgtctcttgggactcaggccgcctctgccacgccagccacctgtcctcccacagctcccgcggctctgctcgcactcccagtggcccgcgctcccccagctcgcgtgcgccgtactcaccagtgtactctccctacccacacccagttagcccttcctacacccccggacacaccccagttgcttcctcccgccgtggcccacgctttatccgcactgcgcggaagcgcgttgttggttcttccaccgtgttccgcttcgactacccagctcccccaccgccagcggcccgtgctgctgccggccctcgacagatggctagccgcccccgccgtgctgcccatgcgccagcccgcttcggttttgaagaaggtagagttgtgacagaagcaaatcatgagtcagctaatgagcagtctcaccacagcaacagttcgcaccgtactgcttcccgcaacgcagaagttgagcaaccccgccgcagcaatcgctcgcatcacacagcttcccataatgcagaagtggaacagtctcaccgctctcaccgcactgccagtcacaattctggagaagaacgcctcccttccccacctcatgtggaaaacaacatgcagtacttaatggcagttcagacacaaatcttgcaaggattagccgcagccatagccggttttcagcatagtgcgcatggaaatggccaccctcacatgggcaacaatagatccaagctgacagactttctgaggtctcgtccgccagagttctctcagaccgtcgagcccgtcgaggctgacgattggctgaaagatattgatagaaaactcaacttagtacagtgtactcctgttgagaagacgctctacgcctctcaccagctaagaggacctgctgcagattggtgggagaattactgcaatgcacaccctgaacccactaacattgcttgggatgagtttgctacggctttccgtgcagctcatgtgcctgaaagcaccattgacatgaagaaagaggaatttaacaagcttaagcaaggcaacaacagtgtcaatgagtacctaagtctgttcaacaagttggctcggtacgcccctgaggaagtggacacagacaagaagaagatcaggaagttcttgaagggaatcgcagttggaatgagactccagttgcttgctcatgacttcctcacttttcaacatatgatcaacaaggcacttctacttgaggatgccagaaaagaggctaccgaagaatacaagaaacgcaagtcaccgctaggaccgtcagcagttcagtgtttccgatgcaaccagatgggtcactatgccagacagtgccctcagaatcctaccaacaccaactcagggcatgctaatggcagcactgccagaactcctactccagcggcagctcagtctcgtcctagctctcaggcaagtggacaaggttctcgtccttccaacaactttggtcgaggccgggtgaaccacattcaagctgagaccgctcaggatgctccagacgttgtgatggaggaattaacgagtatgccaccagaccgagagattgagtttgccatagaactggcaccaggcaccgcaccaattgcaaaaagaccctaccgaatggcagctaatgagttagcagaagttaaaaggcaaatcgaagaattggagagtaagggttatgtgcgacctagctcatccccttggggagccccagtgctcctggttaagaaaaaggatggctctgagagaatggtaatcgactatagagccctgaatgaagtaactataaagaacaagtacccgttgccacggattgacgatttgttcgatcaacttaaaggagcaagagttttctctaaaattgacttgagatcaggttaccaccaattgaaaatcagatctgaagatatcccgaagaccgctttctcaacgcgtatgtttgtcgtagtgttcatcgatgacatcctgatatactccaagaatgaggaagaacatgctgaacacctgaggctgataatggaaaagctcagggatcatcaactattcgctaaattctcaaaatgcgaattctggttaaaccgagtagcatttcttggacacgtgatctcctccaacggtgtcgaagtatatcccagcaaggttgaagctgtacttgcttggaacccgcccaagaatgtgtcagagattcgcagcttccttggcttagctggatattatcgaagattcattgaaggattctctaagctagccagacctatgaccgagctgttaaagaaggaaaagaaatttcaatggtctgcagcttgtgaagacagctttcaagaaatgaagaaaaggttgaccactgccccagttctcaccttgccagatatccgaaaagatttcaagatcttctgtgatgcctcaagacaaagcttaggatgtgtcctaatgcaaaaacgaagggttgtggcctatgcatccaggcagctcaggcctcatgaagtcaactatcccacccatgatctcgagttggcagccgtggttcatgctcttaagatctggaggcactatttaatcgggaacagatgtgaagtatacaccgatcacaaaagtcttaagtacatcttcactcagaccgagttaaatatgaggcagagaagatggttggaactaatcaaggattacgatcttggaattcattatcaccccggtaaagccaacgtggtcgctgatgcgctaagtcgcaagacctattgcaatgtagctcaaatacggcctaaccaagatcgcctgtgcaaagaattggagaagttgaggctgaccgtggtacagtcgggtgtccctgccagcctgacggtgcagccaaccctagaatcgcaaatccgggaggctcagaaagatgacgaagggataaaagaattaataaaaaaaatacgggagaagaaagacaccgatttctccatagacgatcaaggcacagtttggtgcggtccacgcatctgtgtaccggccaagaaggatttaagagatctcatcctaaaggaagctcatgagtccgcctactccattcatccaggaagtacgaagatgtaccaggatatcaaggcatatttctggtgggctggaatgaagcgagatgtcgcagaatacgtagccctgtgtgacatttgccaaagagtcaaggcagagcatcagaggccagctgggctgctgcaacccctaccgatccccgagtggaaatgggaagagatcggaatggatttcatcaccgggttgccaagaacccctagcgggtacgactccatctgggtaatcgtggaccgactcacgaaatcagctcatttcgtgccagtgaaaaccacctttgatggaaagaaactagcagaactctacatgacccatgtcgtgtgtagatttggctgtcccaagaagattgtgtcagaccgaggcactcagttcacctcaaggttctggaagcagttgcatgaagccctcggaaccgatctaaattttagtacagcctaccatccgcagaccgatggtcagacagaaagggtaaaccaaatcctagaagacatgctacgtgcgtgtgccctggatttcgaaggcacttgggatcgttgtttgccgtatgctgagttctcatacaacaacagttatcaggccagcattcagatgtcgccgaatgaggcaatgttcggaagaaagtgccgcactcccttgtgctggaatgaggtgggcgaagcgctggtattcggtcccgacatacttaaggcagcagaagaacaagttaaactgatccgagaacgtttaaagacagcgcagaacagtcagaagaattacgctgacaatcggagacgtgaccttgagttcgaaaaaggagatcatgtgtacctgcgggtatcgcctctccgtgatgtgcacaacgtgttccacgtatcccagttaaagaaatgtctccgtgttccagaagaacaagttcccctgggtaatatcgagctggaaaagaatctgacctacaaggaaagaccgatcaaggttcttgaagaggcagaacgtcagactcgaaggaagaccgtcaagttctacaaggtcaaatggagcaatcattctgaagatgaggcaacctgggagcgagaagatcttctccgcgccgagttcccggagctgcttccttag

SEQ ID NO: 89511 - DNA, 5046 bp, Oryza sativa
  Clone ID: PAT_MRT4530_88261C.1
atgggtggaatgggagacatgtggattcaccggggtggtgtctgggaggacccctgggcttcctggcacagtatggtctgggacctaacctgttgttggtctgggacccctctcgtcggcatatggcccactctccagatcgcgtaccaggacctctcctggactgcgcttcgtcgcctggcccacgactacagccaccgtctcgggggctccgccttccggcagcttccacgccttccttctggccactcagacgccaggtacccttgtccgtacagcgagtctcagccagtgctgactcgcatggttgagctttcggaggctcaggccactcagcacgacctactccttgaggcttaccgctcccttgcccgccgctacgccgccttggaggcccgtctggccgaggagggtgtcacctcagttgacactatctcttgggactcaggccgcccctgtcacgccagccacctgtcctcccacagctcccgcggctctgcccgcactcccagtggcccgcgctcccccagctcgcgtgcgccgtactcaccagtgtactccccctacccacacccagttagcccttcctacacccccggacacaccccagttgcttcctcccgccgtggcccacgctttatccgcaccgcgcggaagcgtgttgttggttcttccaccgtgttccatttccactacccagctcccctaccgccagcggcccgtgctgctgccggccctcgacagatggctagccgcccccgccgtgcagctcgtgcgccagcccgctttggttttgaagatggtagagccgagccagaagtaaatcatgagcagtctccccacagcaaccgttcgcaccgtactgcttcccgcaacgcagaagttgagcaaccccgccgcagcaaccgctcgcatcgcacggcttcctgtgatgcagagatggaacagtctcaccgctctcaccacactgccagtcacaattctggagaagaacgcctcccttccccacctcatgtggaaaacaacatgcagcacttaatggcagttcagacacaaatcttgcaaggattagccgcagccgtagccggttttcagcataatgcgcatggaaatggccaccctcacatgagcaacaatagatccaagctgacagattttctgaggtctcgtccgccagagttctctcagaccgtcgagcccgtcgaggctgacgattggctgaaagatgttgatagaaaattcaacttagtgcagtgtacccctgttgagaagacgctctacgcctctcaccagctaagaggacctgctgcagattggtgggagaattactgcaatgcacaccctgaacccactaacattgcttgggatgagtttgctacagctttccgtgcagctcatgtacctgaaagcaccattgacatgaagaaagaggaattcaacagacttaagcaaggcaacagcaatgtcaatgagtacctaagtcagttcaacaagttggctcggtatgcccctgaggaagtggacacagacaagaagaagatcaggaagttcttgaagggaatcgcagttggaatgagactccagttgcttgctcatgacttccctacttttcaacatatgatcaacaaggcacttctacttgaggatgccagaaaagaggctaccgaagaatacaagaaacgcaagtctaaccatcagggaaattcttcccgaggcgcacctcgccctcgctacggtcaacccatgcaataccatcagtcggtcactcaagctaaccgccagccaggctacgcccctcgtcctcagatgaaccgtccggcaccccagccacagcagcgtgcccctagtggcaatactgcgccaaacagtgttacctctttcaagtcaccgcagggaccgtcagcagttcagtgtttccggtgcaaccagatgggtcactatgctagacagtgccctcagaatcctaccaacaccagctcagggcatgctaatggcagcactgctagaactcctactccagcggcagctcagtctcgtcctagctcccaggcaagtggacaaggttctcatgcgtccaacaactttggtcgaggccgagtgaaccacattcaagccgagactgctcaggatgctccagacgttgtgatgggtatgttctctgtcaactccatacccgcaatagttctgtttgattcaggagcttcccactccttcatatcacaagcttttgtgaaaagaaatggttggaaaacccaaaatttacgtgtaccgatgatagtacattcccctgggagggatataagggcaactcaaatatgcccggaagttaaccttagaattgaggaagttgacttcctagccaaaccgatagtcctagactcgcaaagcttggacatcatcctagggatggattggttggcaaagcacaaaggacagatagattgtgccgaaaagtccatcactttgcaaggacctggaggaaagcaagtccgctttacctctaacagtcctaccgcaagtcggtctatcttaacctgtttacaagtcacctccttggagtcggtgcccatagtctgtgaatatcccgacgtatttccagaagaattaacgagtatgccaccagaccgagagattgagttcgccatagaactggcaccaggcaccgcaccaattgcaaaaagaccctaccgaatggcagctaatgagttagcagaagtcaaaagacaaatcgaagaattggagagtaaaggttatgtgcgacctagctcatccccttggggagccccagtgcttctggttaagaaaaaggatggctctgaaagaatgtttgtcgtggtgttcatcgatgacatcctaatatactccaagaatgaggaagaacatgctgaacacctgaggctaataatggaaaagctcagggatcatcaactattcgctaaatttttgaaatgcgaattctggttagaccgagtagcattccttggacacgtgatctcctccaacggtgtcgaagtagatcccagcaaggttgaagctgtacttgcttggaacccgcccaagaatgtgtcagagattcgcagcttccttggcttagccggatattatcgaagattcatcgaaggattctctaagttagccagacccatgaccgagctgttaaagaaggaaaagaaatttcaatggtctgcagcctgtgaagacagctttcaagaaatgaagaaaaggttgaccactgccccagttctcaccttgccagatatccgaaaagatttcgagatcttctgtgatgcatcaagacaaggcttagaatgtgtcctaatgcaagaacgaaaggttgtggcctatgcatccaggcagctcagacctcatgaagtcaattatcccacccatgatctcgaattggcagccgtggttcatgctcttaagatctggaggcactatttaatcgggaacagatgtgaagtatacaccgatcacaaaagccttaagtacatcttcacacagacggagttaaatatgaggcagagaagatggttggaactaatcaaggattacgatcttggaattcattaccacccctgtaaagccaacgtggtcgctgatgcgctaagtcgcaaggcctattgcaatgtagctcgaatacggcctgaccaagatcgcctgtgcagagaattggagaagttgaggctgaccgtggtgcagtcaggtgtccctgccagcttgacagtacagcctaccctagagtcgcaaatccgggaagctcagaaaaacgacgaagggataaaagagttaataaaaagaatacaggagaagaaagacaccaatttctccatagacgaccaaggcacagtttggtgcggtccacgcatctgtgtaccggccaagaaggaattaagagatctcatcctaaaagaagctcatgagtccgcctactccattcatccaggaagtacgaagatgtaccaagatatcaaggcatatttctggtgggctggaatgaagcgagacgtcgcagaatacgtagccttgtgtgacatttgccaaagagtcaaggcagagcatcagaggcccgctggtctgctacagcccctaccaattcccgagtggaaatgggaagaaatcggaatggatttcatcaccggtttgccaagaacccctagcgggtacgactccatttgggtaatcgtggaccagctcacgaaaccggctcatttcgtgccagtgaaaaccacctatgatggaaagaaactagcagaactctacatgacccatgtcgtatgtagatttggctgtcccaagaaaattgtgtcagaccgaggcactcagttcacctcaaggttctggaagcagttgcatgaagccctcggaaccgatctaaactttagtacagcttaccatccgcagaccgatggtcagacagaaagaatgtcgccgaatgaggcaatgttcggaagaaagtgccgcacccccttgtgctggaatgaggtgggcgaagcgctggtattcggtcctgacatactcaaggcagcagaagaacaagttaagctaatccgagaacatttaaagacagcgcagaaccgtcagaagaattacgctgacaatcggaggcgtgaccttaagttcgaaaaaggagatcatgtgtacctgcgggtatcacccctccgtggtatgaggaggtttgggatgtccggcaagttagcaccccgctacatcggcccctacctcataactgccagacgaggcgaagtggcttatcagcttgagttacctgaaggtctcgcagatgtgcacaacgtgttccacgtatctcagttaaagaaatgtcttcgagttccagaagagcaagtccccctgggtaatatcgagctggaaaagaatctgacctacaaggaaagaccaatcaaggttcttgaagaggcagaacgtcaaactcgaaggaagaccatcaagttctacaaagtccaatggagcaaccattctgaagatgaggcgacctgggagcgagaagatcttctccacgccgagttcccggagctgctcccttag

SEQ ID NO: 89512 - DNA, 360 bp, Oryza sativa
  Clone ID: PAT_MRT4530_88262C.1
cacgaggcgagttttttttttttttttttttttttttttttttttttttgattgatgggagatgtctcccatgtatttttaaaaccttctggtatggctagctggttctttttgtaggaaagaaacaaatctgaaacaagaacatctagatgacaaattgtacatactggaatacaaacaatgggtattgactggaggaccggggcaattcgttctttcccaactttcaattccatatatgtattgaagcatgtcctggtaatacttccttcacaattcgttagtttctcattggtcagattacgagctccaacaaattgggtgcaaagtagggcgtgtcaccattagggctattcctgg

SEQ ID NO: 89513 - DNA, 4044 bp, Oryza sativa
  Clone ID: PAT_MRT4530_88263C.1
ctaagggagcagctccggaaactcggcgcggagaagatcttctcgctcccaggttgcctcatcttcagaatggttgctccattggactttgtagaacttgatggtcttccttcgagtctgacgttctgcctcttcaagaaccttgatcggtctttccttgtaggtcagattcttttccagcacgatattacccaggggaacttgctcttctggaactcgaagacatttctttagctgggatacgtggaacacgttgtgcacatctgcgagaccttcaggtagctcaagctgataagccacttcgccacgtctggcggttatgaggtaggggccgatgtagcggggtgctaacttgccggacatcccaaacctcctaacgggtttccactcgggaatcggtaggggttgcagcagaccagctggcctctgatgttccgccttgactctttggcaaatgtcacacagggctacgtattctgcgacatctcgcttcattccagcccaccagaagtatgccttgatatcttggtacatcttcgtacttcctggatgaatggaataggcggactcatgagcttcctttaggatgagatctcttaactccttcttggccggtacacagatgcgtggaccgcaccaaactgtgccttggttgtctatggagaaattggtgtctttcttctcctgtattctttttattaattcttttatcccttcgtcgtctttctgagcctcccggatttgcgactctagggtaggctgtactgtcaagctggcagggacacctgactgtaccacggtcagcattaacttctgcaattctctgcacaggtgatcttggtcaggccgtatttgagctacattgcaataggccttgcgacttagcgcatcagcgaccacgttggctttaccagggtgatagtggattccaagatcgtaatccttgattagttccaaccatcttctctgtctcatatttaactcggtctgtgtgaagatatacttaagacttttgtgatcagtgtatacttcacatctgttcccgattaaatagtgcctccagatcttaagagcatgaaccacggctgccaactcgagatcatgggtgggataattgacttcatgaggcctgagctgcctggatgcataggccacaacctttcgttcttgcattaggacacatcctaagccttgtcttgatgcatcacagaagatctcgaaatcttttcggatatctggcaaggtgagaactggggcagtggtcaaccttttcttcatttcttggaagctgtcttcacaggctgcagaccattgaaatttcttttccttctttaacagctcggtcataggtctggctagcttagagaatccttcaatgaatcttcgataatatccagctaagccaaggaagctgcggatctctgacacattcttgggcgggttccaagcaagtacagcttcaaccttgctgggatctacttcgacaccattggaggaaatcacgtgtccaagaaatgctactcggtctaaccagaattcgcatttcgagaattttgcgaatagttgatgatccctaagattttccattatcaacctcaggtgttcagcatgttcttcctcgttcttggagtatatcaggatgtcatcgatgaataccacaacaaactggtccaggtattccatgaagattttgttcattaagttcatgaagaatgctggagcattggtgagtccgaaggacattactgtgaactcatatagaccataacgcgttgagaaagcggtctttgggatatcttcagatctgattttcagttggtggtaacctgacctcaagtcaatttttgagaaaactcttgctcctttaagttgatcgaataaatcgtcgatccgtggcaacgggtacttgttctttatagttacttcattcagggctctatagtcgattaccattctctcagagccttcctttttcttaaccagaagcactggggctccccaaggggatgagctaggtcgtacataacctttactttccagctcttcgatttgtcttttaacttctgctaactcattagctgccattcggtagggtctttttgcaattggtgcggtgcctggtgccagttctatggcgaactcaatctctcggtctagtggcattcttgttaattcttccggaaatacgtcgggatattcacaaactatgggcaccgactccaaggaggtgacttgtaaacaggttaagatagaccgacttgcggtaggagtgttaggggtaaagcggacttgctttcctccaggtccttgcaaggtgatggacttttcggcacaatctatctgtcctttgtgcttagccaaccaatccatccctaggatgatgtccaagctttgcgagtctaggactatcggtttggctaggaagtcaacttcctcaattctaaggttaacttccgggcatatttgagttgcctttatattccttccaggggaatgtactatcattggtacacgtaaattttgggttttccaaccatttcttttcacaaaagcttgtgatatgaaagaatgggaagctcctgaatcaaacagaactattgcgggtacggagttgacagagaacatacccatcacaacgtctggagcatcctgagcggtttcagcttgaatgtgattcacacggcctcgaccaaagtggttggaagcacgtgaaccttgtccacttgcctgagtgctaggacgagacttagctgccgctggagtaggagttctggcagtgctgccattagcatgccctgagttggtgttggtaggattctgagggcactgtctagcatagtgacccatctggttgcaccggaaacactgaactgctgacggtccttgaggtgacttgaaggaggtaacgctgtttggcgcagtattgccactaggggcacgctgctgtggctgaggtgccggacggtttatctgaggacgaggggcgtagcctggctggcggttagcctgagtgaccgactggtggtattgcacgggttgaccgtagcgagggcgaggcgcgcctcgggaagaatttccctgatggttagacttgtgtttcttgtactcttcggtagcctcttttctggcatcctcaagtagaagtgccttgttgatcatgtgttgaaaagtggggaagtcatgagcaagcaactggagtctcatcccaactgcgattcccttcaagaacttcctgatcttcttcttgtctgtgtccacctcctcaggggcgtaccgagccaacttgttgaactgacttaggtactcattgacactggtgttgccttgcttaagcctgttgaattcctctttcttcatgtcaatggtgctttcaggcacatgagctgcacggaaagccgtggcaaactcatcccaagcaatgttagtgggttcagggtgtccattgcagtaattctcccaccaatctgcagcaggtcctcttagttggtgagaggcgtagagcgtcttctcaacaggagtacactgcactaagttgaattttctttcaacatccttcagccaatcgtcagcctcgacgggctcgacggtctgagagaactctggcggacgtgaccttagaaaatctgtcagcttggatctattgttgcccatgtgagggtggccatttccatgcacattatgctgataaccggctacggctgcggctattccttgcaagatttgtgtctgaactgccattaagtgttgcatgttgttttccacatgaggtggggaagggaggcgttcttctccagaattgtgactagcagtgcggtgagagcggtgagactgttccatctctgaatcacgggaagctgtgcgatgcgagcggttgctacggcggggttgctcaacttctgcgttacgggaaacagtacggtgcgaattgttgctgcggtgagactgctcattagctgattcatgatttgcttctggttcgactctaccttcttcaaaaccgaagtgggctggcgcacgagctgcacggcaggggcggctagccat

SEQ ID NO: 89514 - DNA, 344 bp, Oryza sativa
  Clone ID: PAT_MRT4530_88264C.1
gggaggaaagaatttacatttgttggggggggtgactggaaaaaaaccccaggaccggggttaaaatggggggaatttaaaacgcttaacttttacacttggtggaatattgcctaaaaagaattttagcccctgggcatgaatcccatttttaagacatttaatacggtccccaagacatccacagattttccaaaccctggctgccggtggtggttgcttgcttgggaaccttgaagaaaacgaaaccactggtcctccttattgggaaaacacttatcacaatggggaatatttttaatttgcaaaattagcttgggaaggtcctttttccttttttaaat

SEQ ID NO: 89515 - DNA, 414 bp, Oryza sativa
  Clone ID: PAT_MRT4530_88265C.1
ccaatcgtcagcctcgacgggctcgacggtctgagagaactctggcggacgagacctcagaaatatgctgaaaaccggctacggctgcggctaatccttgcaagatttgtgtctaaactgccattaagtgctgcatgttgttttccacatgaggtggggaagggaggcgttcttctccagaattgtgactggcagtgcggtgagagcggtgagactgttccatctctacatcacaggaagccgtgcgatgcgagcggttgctgcggcggggttgctcaacttctgcattgcgggaagcagtacggtgcgaacggttgctgtggtgagactgctcatgatttgcttctggctcggctctaccatcttcaaaaccaaagcgggctggtgcacgagctgcacggcgggggcggctag

SEQ ID NO: 89516 - DNA, 4760 bp, Oryza sativa
  Clone ID: PAT_MRT4530_88266C.1
taaccaggaaaaagaaaaaaaaaccccacgagacggtgcgaagttctattgatagagcaggaaaaaattataagattacaaccctggaaggtcataaccaggaaaaagaaaaaaaaaccccacccacacaccgacagtgctaacacacacacccgggagaaggctagcaccggaccggccgccgctaagcgtgaccgaccgccgctagaccaacaaaggaacatagacgagatcggcccgcaccgatgctccaccactactcaagctctgccgacatgtgggacccctgcatcggcgtccccgccggtcagccttcgtgcgctgaagaccgcaccacacccaccggcagctcctcctcacaccgaggtcgcctcctccaccgccggccgcgcctctcgcgccaagccggcctcctccaccggatgcacctctcgcgccaatccggcctccctccatcggccgcgcctctcgcgccaagctggccaccgtcgccgccggcagtgcctctcgcgccgtaccggcctcctccaccatcggctgcgcctctctgcaccaagccgacttccgacccttctccgatcgctgttgcgccgtccaggtgcgcctgtcttccacgcccccggctagccgttgaagaccgccatgcctcccaccgtcacgcctccacttgctgccgctgtcgatcgtctgtacgacgccgccagccgttgtcgcatccgccaacgtccccggccgccacacgtcgcctccacagccgcggcagctgcaagccagccgccgtctaccgccgccgccgtctccagccgtcgtagccagccgctgtcgccacaagccgccgcctcgtcgccaaccgccaccagcagttcaacggaggggatccggtctcccgccgcagtaggccgacaccgcgttgtcacgccccgaactagtcccgaccggaactagcccgtgacgctccaaattaacctgttaatcgataccagtcccaggaaacagtgctggtatcacaggaagacagaatatcacagcaacaaaggtctctttattatagagtagaggtacagtcatgttgggctgcggacagatcccaagctcacaactgcattgcaaaaagggaaacggaagccaagacttggaccaaacaacacaggcgcgacttgggaattaggccgaaaccctaaaactcatcgtagccggtttgctcctggaagaactcctcatcagcaggatccgcttcatcttcttcagcaactgggggggattatttatatagagcaagggtgagtacgggagtactcagcaagccatgggaaataagtgtttaatgcaggcttcaaggaaaggctgttgtttttgcaattgattttatttgaactcttttctaaaagcaactgtattctttttattaattcttttaccccttcgtcgtctttctgggcctcccggatttgcgactctagggtaggctgtactgtcaagctggctgggactcctgactgtaccacggtcagccttaacttctccaattctctgcacagatgatcttggtcaggccgtatttgagctacattgcaataggccttgcgacttagcgcatcagcgaccacgttggctttaccaggatgatagtggattccaagatcgtaatccttgattagttccaaccatcttctctgcctcatatttaactcggtctgtgtgaagatatatttaagacttttgtgatcggtgtatacttcacatctgttcccgattaaatagtgcctccagatcttaagagcatgaaccacggctgccaactcgagatcatgggtgggataattgacttcatgaggcctgagctgcctggatgcgtaggccacaaccttacgttcttgcattaggacacatcctaagccttgtcttgatgcgtcacagaagatctcgaaatcttttcggatatctggcaaggtaagaactggggcagtggtcagccttttcttcatttcttgaaagctgtcttcacaggctacagaccattgaaatttcttttccttctttaacagctcggtcataggtctggctagcttagagaatccttcaatgaatcttcgataatatcccgctaagccaaggaagctgcgaatctctgacacattcttgggcgggttccaagcaagtacagcttcaaccttgctgggatctacttcgacaccgttggaggagatcacgtgtccaagaaatgctactcggtccaaccagaattcacacttcgagaatttagcgaatagttgatgatctctgagcttttccattatcagcctcaggtgttcagcatgttcttcctcgttcttagagtatatcaggatgtcatcgatgaataccacgacaaactggtccaggtattccataaagattttgttcattaagttcatgaagaatgctggagcattggtgagtccgaaggacattactgtgaactcatatagaccataacgcgtcgagaaagcggtcttcggaatatcttcagatctgattttcagttggtggtaacctgacctcaagtcaatttttgagaagactcttgctcctttaagttgatcgaataagtcgtcaatccgtggcaacgggtacttgttctttatagttacttcattcagggctctatagtcgattaccattctctcagagccatcctttttcttaaccaggagcactggggctccccaaagggatgagctaggtcgcacataacctttactccctaactcttcgatttgtcttttgacttctgctaactcattagctgccattcggtagggtctttttgcaattggagctgtgcttggagccagttctatggtgaactcgatctctcggtctggtggcattcttgttaattcttccggaaatacgtcgggatattcacagactatgggcaccgactccaaggaggtgacttgcaaacaggttaggatagaccgacttgcggtaggggtgttaggggtaaagcggacttgctttcctccaggtccttgcaaggtgatggacttttcggcacaatctatctgtcctttatgcttagccaaccaatccatccctaggatgatgtccaagctttgcgagtctaggactatcggtttggctaggaagtcaacttcctcaggggcgtaccgagccaacttgttgaactgacttaggtactcattgacactgttgttgccttgtttaagtctgttgaattcttctttcttcatgtcaatagtgctttcgggcacatgagctgcacggaaagccgtagcgaactcatcccaagcaatgttagtgggttcagggtgtgcattgcggtaattctcccaccaatctgcggcaggtcctcttagctggtgagaggcgtagagcgtcttctcaaccggagtacactgcactaagttgagttttctatcaacatctttcaaccaatcgtcagcctcgacgggctcgacggtctgagagaactctggcggacgtgacctcagaaagtctgtcagcttggatctattgttgcccacgtgagggtggccatttccatgcgcattatgctgaaagctggctatggctgtggttagtccttgcaagatttgtgtctgaactgccattatgtgttgcatgttgttttccacatgaggtggggaagggaggcgttcttctccagaattgtgactggcagtgcggtgagagcggtgagactgctccagctctgcatcacgggaaactgtgcgatgcgagcggctactgcggcgaggttgctcaacctctgcgttgcggggaacagtacggtgcgaacggttgctgtggtgagaatgctcattagctggttcgtgatttgcttctgcttcaactctaccatcttcaaaaccaaagcgggctggtgcacgagctgtacgacgggggcggctagccatctgtcgagggccggcagcagcacgggccgctggcggtgggggagctgggtggcggaaacggaacacggtggaagaaccaacaacacgcttccgcgcagtgcggataaagcgtgggccacggcgggaggaagcaactggggtgtgtccgggggtgtaggaagggctaactgggtgtgggtagggggagtacactggtgagtacggcgcacgcgagctgggggagcgcgggccactgggagtgcgagcagagccgcgggagctgtgggaggacaggtggctagcgtggcagagacggcctgagtcccaagagatagtgtcaactgaggtgacaccctcctcggccagacgggcctccaaagcggcgtagcggcgggcaagggagcggtaagcctcaaggagtaggtcgtgctgagtggcctgagcctccgaaagctcgaccatgcgagtcagcactggctgagactcgctgtacggacaagggtacctggcgtctgagtggccagagggaagacgtggaagctgccggaaggcggagcctccgagacggtggctgtagtcgtgggccaggcgacgaagcgcagtccaggagaggtcctggtacgcgatctggagagtgggcctggccacagtgaagtggtgggggcgaaggccagctccgtgtatacctccacgagggtaaaggtacacagagagcttacagtgagggggaacacggtccacggagtaccccgtgtactcgggacacgagaagccaaggaaacgggagaggtcacgaagctgagcgacgtggtgaccctcaccaaaaccgtgggaactgaagctggcgttcactgccat

SEQ ID NO: 89517 - DNA, 695 bp, Oryza sativa
  Clone ID: PAT_MRT4530_88267C.1
atgtggattcgccggggtggtgtcggggaggacccctgggcttcctggcacacttggaggtctcccgacgtggctgatccccacgggctgggtgatccggttgctgaagaagatgaagtggatcctgctgacgaggagttcttccaggagcaaatggcagtgaacgccagcttcagttcccacggttttggtgagggtcaccacgtcgctcagcttcgtgacctctcccgtttccttggcttctcgtgtcccgagtacacggggtactccgtggaccgtgttcccctcactatcgcgtaccaagaccttttctggactgcgcttcgtcgcctggcccacgactacagccaccgtctcggaggttccgccttccggcagcttccacgccttccctctggccactcagacgccaggtacccttgtccgtacagcgagtctcagccagtgctgactcgcatggtcgagctttcggaggctcaggccactcagcacgacctactccttgaggcttaccgctcccttgcccgcagttacgccgctttggaggcccgtctggccgaggagggtgtcacctcagttgacactatctcttgggactcaggccgcttttgccacgccagccacctgtcctcccacagctcccgcggctctgcccgcactcccagtggcccgcgctcccccagctcgcgtgcgcc

SEQ ID NO: 89518 - DNA, 2847 bp, Oryza sativa
  Clone ID: PAT_MRT4530_88268C.1
atgggcaacaatagatccaagctgacagattttctgaggtcacgtccgccagagttctctcagaccgtcgagctcgtcgaggctgacgattggttgaaagatgttgatagaaaactcaacttagtgcagtgtacaccggtcgagaagacgctctacgcctctcaccagctaagaggacctgcggcagattggtgggagaattactgcaatgcacaccctgaacccactaacattgcttgggatgagtttgctacggctttccgtgtagctcatgtgcctgaaagcaccattgacatgaagaaagaggaattcaacagacttaagcaaggcaacagcagtgtcaatgagtacctaagtatgttcaacaagttggctcggtacgcccctgaggaagtggactcagataagaagaagatcaggaaattcttgaaaggaatcgcagttggaatgagactccagttgctagcgcatgacttccccacttttcaacatatgatcaacaaggcacttctacttgaggatgccaaaaaagaggctaccgaagaatacaagaaacgcaaatctaaccaccaggggaattcctcccgaggcgcacctcgccctcgctatggtcaacccatgcaataccaccagtcggtcactcaggctaaccgccagccaggctacgcccctcgtcctcagatgaaccgcccggcaccccagccacagcagcgtgcccctagtggcaatactgcgccaaacagtgttacctctttcaagtcaccacagggaccgtcagcagttcagtgtttccggtgcaaccagatgggtcactatgctagacagtgccctcagaatcctacaaacaccaactcagggcatgctaatggcagcactgccagaactcctactccagcggcagctcagtctcgtcctagcactcaggcaagtggacaaggttcacgtgcttccaaccactttggtcgaggccgtgtgaatcacattcaagctgaaactgctcaggatgctccagacgttgtgatgggagcaagagttttctcaaaaattgacttgaggtcaggttaccaccaactgaaaatcagatctgaagatatcccaaagaccgctttctcaacgcgttatggtctatatgagttcacagtaatgtccttcggactcaccaatgctccagcattcttcatgaacttaatgaacaaaatcttcatggaatacctggaccagtttgttgtggtattcatcgatgacatcctgatatactccaagaacgaggaagaacatgctgaacacctgaggttgataatggaaaagctcagggatcatcaactattcgcaaaattctcgaaatgcgaattctggttagaccgagtagcatttcttggacacgtgatttcctccaatggtgtcgaagtaaatcccagcaaggttgaagctgtacttgcttggaacccacccaagaatgtgtcagagattcgcagcttcctcggcttagctggatattatcgaagattcattgaaggattctctaagctagccagacctatgaccgagctgttaaagaaggaaaagaaatttcaatggtctgcagcctgtgaagacagcttccaagaaatgaagaaaaggttgaccactgccccagttctcaccttgccagatatccgaaaagatttcgagatcttctgtgatgcatcaagacaaggcttaggatgtgtcctaatgcaagaacgaaaggttgtggcctatgcatccaggcagctcaggcctcatgaagccaattatcccacccatgatctcgagttggcagccgtggttcatgctcttaagatctggaggcactatttaatcgggaacagatgtgaagtatacaccgatcacaaaagtcttaagtatatcttcacacagaccgagttaaatatgagacagagaagatggttggaactaatcaaggattacgatcttggaatccactatcaccctggtaaagccaacgtggtcgctgatgcgctaagtcgcaaggcctatcgcaatgtagctcaaatacggcctgaccaagatcacctgtgcagagaattggagaagttaaggctgaccgtggagaagaaagacaccaatttctccatagacaaccaaggcacagtttggtgcggtccacgcatctgcgtaccggccaagaaggagttaagagatctcatcctaaaggaagctcatgagtccgcctattccattcatccaggaagtacgaagatgtaccaagatatcaaggcatacttctggtgggctggaatgaagcgagatgtcgcagaatacgtagccctgtgtgacgtttgccaaagagtcaaggcagaacatcagaggccagctggtctgctgcaacccctaccgattcccgagtggaaatgggaagagattggaatggatttcatcaccggtttgccaagaacccctaacgggtacgactccatctgggaccgtcagaaaagttacgctgacaatcgaaggcgtgaccttgagttcgaaaaaggagatcatgtgtacctgcgggtatcacccctccatggtatgaggaggtttgggatgtccggcaagttagcaccccgctacatcggcccctacctcataaccgccagacgtggcgaagtggcttatcagcttgagctacctgaaggtctcgcatatgtgcacaacgtgttccacgtatcccagctaaagaaatgtcttcgagttccagaagagcaagttcccctgggtaatatcgtgctggaaaagaatctgacctacaaggaaagaccaatcaaggttcttgaagaggcagaacgtcagactcgaaggaagaccatcaagttctacaaa

SEQ ID NO: 89519 - DNA, 448 bp, Oryza sativa
  Clone ID: PAT_MRT4530_88269C.1
gcacgagggagagagagaactagtctcgagtttggtttttttttttttttttttcagcttaacgaaaaatcctgcatcgatgatcaatcgatcgaattgacaagagcaatcatgatgcacaacacgcaaatcaagcgccgcatcttcccccaaacgcgttccccccgcacatcaaagggctccgaatccctgacgatcgagagccgcacggatggccaggatcgatggagcgaagcggcggcggacgctcatgagcaaaataaccaaatgcagccggaatcggagcgcgcgtacgtaccaggagcggcgaggacgaggagggaaggcacaaacaatcaagcgaagtccgcagtcgggcgggcggtggatcgacgcggcggagcgcagcgacaataccccgcctccaccgcgagcgacgcgccggcgggcggggaaaccctaggcgtcg

SEQ ID NO: 89520 - DNA, 317 bp, Oryza sativa
  Clone ID: PAT_MRT4530_8826C.1
acgtggcgaggggagcgagtgggacggagactcaggctgagctgccatcaatgcgcggcgccccaaccgtccctcactgcatctaatgcgacaagggcgtcaatcaggcgggaccaaactgtgaccggcctgtcgccggtcacgtctgattggacgggcggtgatacccccacgttccaccctgtacccggcggagtaggggtagagggaatgacaagggtgtcccccgtgtcggcggggggcggcgctgggccccactcgaggacggacggctgcttagcttccaggcgaaggcacgaatcgtgatccggtctaag

SEQ ID NO: 89521 - DNA, 365 bp, Oryza sativa
  Clone ID: PAT_MRT4530_88270C.1
ggcaaccggaaaagctttttatttattcctcaacgggcaaaaactaaaaaggggattccccaagtcctcccaaaggaatacatgaaaccggccgactaagccactgggactcccaaggggtacgacccaccagcggcaaaccatacttgcccgaccaaacaaaccccccctgaaaacctgaattacggaccccaaacatgactttttccctcaccgaccacattttcaggagcttaaccggagatctcaagggccttaacctaaggttttttgacctcggccttgggcccggggacagggagcaccccgttttccagtccggccttaacctgggccaccttgggggtctccggaagcctgaaccg

SEQ ID NO: 89522 - DNA, 741 bp, Oryza sativa
  unsure (1)..(741): unsure at all n locations
  Clone ID: PAT_MRT4530_88271C.1
ccgccnaggtagactcatctagcatccaccccncgggagctgtcctgatccaagcctattgatttctaacccttggtacctggaactgcaccgatccacaagaggtcttactgaatgggagccaactagttggcggaagtcaataagccagttgatgaacagttacagaaaggatacatccgcccgagcacgtagccttggggtgcttcggatatctttgcgggcaaaaaagacaaaaccaacaggatgtgcgttgactaccgagctctcaatgggggcaccataatgaacaagtttcctttgccaaggattgattacccggttgatcaggttaaaagagctactgtgttctctaagatagacctgcgatcaggctatcacccattgaagttccgcgacgaggatatttcaaagacagcatttatcactcggtacgggttgttcgaatgcacagttatgtttttcggactcactaacgcacctgcctccttcatgaatttgatgaacaacgtgtttatggaatttctagacaagtttgtcggggatttcatcgatgacatacttatctactccaagttctaggaagaacattaacagcatctttcgctggtactttaaaagttaaaagagcaccagctatatgccaagctcagcaacgtgcgacttttggcttaaagaaaatcagtttttcggacacattgtgaatgcttattgaatagctgtggattcagcaaatgtgga

SEQ ID NO: 89523 - DNA, 2334 bp, Oryza sativa
  Clone ID: PAT_MRT4530_88272C.1
atggcgatggtgacggcgcggcagttcttggcgtcggcggcggagctggggagcgggcggcggcgctgcggcggcggcggcgcgtgcgacatgcgggaggacggcggggtggaggcgctgatgcagtgccagcgcgtgagcgacctgctcatcgcggcgtccttcctctccatcccgctcgagctcttctacttcgccacctgcgccgacctgtccgaggtcaagtgcgccgtgctccacttctgcgccttcatcgtcctctgcggcgccacccacctcctcgccgcgttcacgcacgcccacccgcactccgccccgctgctcagggcgctcaccgccgccaaggtgctcgccgccgtcgcgtcgtcggcggcagcggtctcgctcctcaccttcatccccaagctgctccgcatcaaggtcagggagtcgctgctccgcgacaaggccagccgcctccaccgcgacctcggcctcgtccgccgccgcgaggaggccacctcccgcgccgtgcgggagctcacgggccggatccgcgcctccccgcccgacgcgcacgccatcctccgcaccactgcgctccagctcgccgacgccctcggcctccacgcctgcgccgtctggatgcccgccgccggccggccccacgacctcgtcctggtgcatcacctcacctcccggcccgacgacgcggccgacttgctgctggaggttggtgacgcgtgcaccgtcgccgccgatgaccccgacgtggtcgacgtaatggcgagcaaggtcgccaaggtgctcgggccggactcggcgctcgccatggcgagcagcgtcggcgcggcgccggcgggggcggtggccgccattcggatccccatcctcagggtgtccatctacgacggaggagggacgccggaggtgaccgaggcgagctacgccatcctggtgctgcttcttcccccccacgacgccgccggcgggtggagcagccacgacctggagatcgtccaggtcgtcgccgaccaggccgccgtcgcgctctcccacgccgcggtgctggaggagtcgcggtcgatgcgggacaggttcgccgagcagcacagagcgctgatgcaggccaagcaccgggccgccatggcgaccagggcgttcagctccatccagagcgccatgtgccacgccatgcgaaggcccgtgcactccgtagtcgggctggtctcaatgctgcaacatccggaggcagacacaatgcggccggagcagaggctcgccgtcgacgccattgcccgaacaagcaacctcttgtcggcgctcatggacgaggtgaccgtgaaccggcagcatttgtccgtgcagaggaaacccttcagcctgcacgcgctgatcaaggaggccatcagcgtcgccggctgcctgtctcattgcgggggagctgggttcctgcaccagccggaatgcgcgctgcccgaatgggtcgtcggcgacgagaggagggtcttccacctgctgcttgacatggtgggcaccctgctgaaccgatgcaacaccgggtccggggcgtgccgcctctcgttctcggtcaggatctgcaatgtgggtgaagagaggtatagccttgactggatcccgatgcgaccgaccttctccggttgcaacgtttgcgtcaagttcaaggtcgggatcgggagatctaggagttgtgctattgagaggagtttgccgtgcgaattgcctcgtcgttctgcggccactaccagctctcagatggggcatatcttcagcggctacttcaacaagattgtgcagatgatgaatggtaacatgtggtcggcgtcggactccgagggcgtcggagagagcgtcaccctgatcctgcagttcaagctgcagcagggacatgtcgaagcatccccgccgtacatccctcacttgaacggcctgagggtgctcctcgccgacgacgacgccatgaaccggggggtgaccaagaagatcctggagaggcttgggtgccaggtcatgtcggcgccgtcgggcgcccactgcctgagcctcctggcgagcgccgaggcctccttccagctcgtcgtcctcgacctcgacgatcgcgccgtgccctcggcggccatggaccggtttgaggtggccctcaggatcagggagctcaggaacagctgctggctgctgatcgtcattgccgtcgcggctggcgtcgtcgccaccgatgatggcggcgccgtgcaggagctgtgccagcgtgccgggatcaacgggctggtccagaaaccggtcacgctgccggcactgggagctcagctctgccgagtgctccaggacaactga

SEQ ID NO: 89524 - DNA, 363 bp, Oryza sativa
  Clone ID: PAT_MRT4530_88273C.1
cccacgcgtacgcggacgcgtgggcggcaaccgactaactctgtctgaaggaagctaagattattaatcattgagtatctagccatggctgaggagaagaagcaccacgacctgttccaccacaagaaggacggtgaggaggagagcttccgcgagattatctacgaccaggagaagaagcaccacatgcacctggagctgctctgcagccttgaccccatttccttcagcaccgacgctctgcacgagaagcagcaggcgaaaaaggacacggaaaactctcacggccacacggtgaaggaggaggtagctgctgccgcccattagacacacctgggtgtgacttccacggccacgatgctt

SEQ ID NO: 89525 - DNA, 363 bp, Oryza sativa
  unsure (1)..(363): unsure at all n locations
  Clone ID: PAT_MRT4530_88274C.1
ctcgggggggtcttcttgcgggccttaggtctggcgcccgggcggcttccgggtcgcggcggtcctgtgctcgggatgttggcccgggtgcctttgggctgtagcgctgcgggggggagggccggggggcggggcgtcctataacctcgctggcgcctccgctgttgcggggccccccggccgacgcccctgccggattctacgccttggctggcgcctgggccgggggcggcccgcttcctttggtcgggggggggtggtggggctggggggcccttgggccttggtggggggtccgccggggggttgggggggcgttggccgtggggttgggcnggtttggggcggtcgggggcggggggg

SEQ ID NO: 89526 - DNA, 441 bp, Oryza sativa
  Clone ID: PAT_MRT4530_88275C.1
gcatcacattaacttttttttcctactccccaccaaaaaaacaacaataagccgaggccagacccaaaaaaaaaaaacagaactgctggagaaaaacccggggcatcgacggaagcagaaccaagaactgcctcgccctgggaaaacaaacgcgggaggggaccggctgctgctgctgctcaccacacaaaaactaactcccacggcccctaggcgcaggacccctggtgcgacgactaccccaaggcgcctaaagagtggggcgacgaccaccaccacccccgctacagaggcacccggaggggtgtactgggggcccctaccatctcttcggatgcggccgcaaaaccactcccgggggagggaggggacctgaagtcattactgggtccccacacctagcgcgaaaggaaaaaaggacaccggctggaacctctcccc

SEQ ID NO: 89527 - DNA, 649 bp, Oryza sativa
  Clone ID: PAT_MRT4530_88276C.1
ccaaggctagaataactcaaggatcaagttggcaactgatcgaatttgctagctagctggtttcacaatgcaccgggcaacaagaaggggatatacgggcgatccgccaacaaaggtactagagagagagaacgccgatgcgcacaaggatcaagtcaagggcttaaacggcagaatcagtaaattaaacgacacaataaaagagttaaacgacacgatcgaggcgctggagaggcaggttcagaacctgaccaggtacaaggaagagaagcagaagcagcacgcgaatcttcagaaagaattcgcagagctggagaggaaatacagagacctggatgcagcccacaggaattgcggccccactgtcagattccctgttttcaccgtcggacaaccctactatcaccgccacaattgatcgatcgatatgatcgatctgcacaaccatcgaatgccctacgtacgtacctgaatatatgtataagtatctatacagtatatgcagggctgtgtgtgatgtatatgcatgcctatgagagttgcgagtgtactgtatgtatatgtgtgtgaagaataaagctgcatgtatactggcagctatatatctagagcatgcaacattgatatgtgatcgatcgatgtcatgcaa

SEQ ID NO: 89528 - DNA, 305 bp, Oryza sativa
  Clone ID: PAT_MRT4530_88277C.1
gttgcttcatacaagtaagcagcagctagttgccgacaaggcctgagaaggaagaagaagctctcatcatcatcaccatgtcgtgctgcggtggcaactgcggatgcggctccagctgccagtgccggaaccggctgcggcggatgcaagtactctgaggtggagcccacgaccacgaccaccttccttgccgatgcaaccaacatggggtctggcgctgcttccggaggatcagagatggcggcggagatacgcagctgaggatgcttcaccctgaagtgcggcaccagctgcttgctgcttct

SEQ ID NO: 89529 - DNA, 230 bp, Oryza sativa
  Clone ID: PAT_MRT4530_88278C.1
acgggcttggctgctttggagagttgggaggagcagcgagagagtgggggttgatggcggctatggcggcggccgtggcctcgtcacgctgggggtcccccgactacacaccgttgctccgcggccaccacccgcccccttcgtgctcggcgccgtcgctgctcctgctgaccaggtcgtcgcgttgctactgtgccgccgaaccacggttagagcccctgtctgtttgg

SEQ ID NO: 89530 - DNA, 1761 bp, Oryza sativa
  Clone ID: PAT_MRT4530_88279C.1
atggcggcagcgactccggcgaactccggggagggcggtggcctggatgtccttcgcactgtgcaacgctcctgcatcccttcaaagaatttaaacaaagtcttacaacgataccaagagaaggatcttgtacttaattgggaaaagtgccatttcatggtctatgaagggatagttcttggtcatcgagtgttcatcaaggacttctctacaatcacccgacctctgaccaacctcttagctaaggatgctccctttgagtttgatgacgcgtgcctaaaatcctttgaaattctcaaaaaggcactcgtctctgctccaatcattcaacctcccgattggactctgcccttcgagattatgtgtgatgcaagcgatttcgatgttggtgtggtcctgggccaaatcaaggacaaaaagctgcaaatcactgacacgcaggaacaactgataaatgatttcttgagaaatgatatgttgatgacgatttgcgactctaacccgtgccacccctcgccggcggtcaggacctcctcggagcccggtgtcgccaccatccgatccgcagtaacgtcatcttccccggcttcatctccgtttcgcccagaggatgccgggagtgcatcctcgtcggcaactagtggcgccaccgccatcgttcaccgtcaaatcgagcgacatcgcaacgtgccactgcctccactagcgtcgcagccgcctcctcttcctcggcccaacctctatttctcctggagacagccggaaattcgtcctcactggtgtgcaatggtgacctcgacttcatccttgtcctccggcagccctccctcgtcgccggagcgccggcggcttcatctcatcgtcttcatcgtcggccgcgcctcctcactgcccgaagaccccaggaacgtcgccccatcgcctcgccttcctccggtcgtcgttctcgtcaagatgaagtcccgcccgtcgtcgtcgtcgtcaagtccacagcgccaaacccgtcgtgtccgcctcttcatcaagcctgaagatcgtcagagtcgtcctctcttcgtcgatccgttcgtctctgtcgccctccttcgttcgtcgtcgccgcgccaagtcgactatgtatccaagtgggttgaggctatgccgtccagcgccgcggatgcaaagcatgccaagaagatgttcacagagatcatcttcccaaggtttggtacccctaggatggtcataagtgacagaggttcgcacttcatcgacaaaaccttccgagacctcctacaagacatgggagccaagcacaatgtcgccacaccttatcatccacagaccagcggtcaagcagaaacttcaaacaaacaaatcaagaatattctgcagaagacggtcaacaaaatgggaacaggatggaaggataaattgctggatgcactgtgggcataccggacagcatacaagacacctattggattgtcctcctatcagatagtctgtgggaagtcatgccgactccctgtagaactcgagcatagagcatattgggccatcaggaactggaatatggactttgaaggagcaagagaatggaggaaaatgcaaatcgctgaacttgaagaatggagtgaaaaggcatatcacaacactaagatatacaaagaaaggacgaagtgctgttatgataaaaggataaaaattaagaaattcaagccaggagacaaagtgttgatgttcaactccaggtttgttgtgatgcgctttcggaggtag

SEQ ID NO: 89531 - DNA, 2020 bp, Oryza sativa
  Clone ID: PAT_MRT4530_8827C.1
ccgcacgtcgccggcccgcgcgcgatggggtggaaggcgacgatgggtggtgtcaaggtggccggcggtggcggcggcgtggagaaggtcaggtgcccgtcggtggccgcggtggcgcggtcgcggatgaggccgtgggttctgcgcgccaccacgacggtgctgctttggacctgcgtcatgcagctcacggccgtcggggagaggtgggggccgcgcgtcctcaaggggtggccgtcgtgccggacggcgcaggaggcggcctccgccgcgctcgccgccacgcggctcccaatgccggtacccgtcgtggagaaggccccattgccgccgaaaagaatttataggaacaacggttatctgatggtttcatgcaatggtggactcatccaaatgcgagcagctgtatgtgatatggttgtcattgcaagatacttcgaatgtgactctaatagtgcccgagttggataagacatcattttggaatgatccaagtgagttccaagatatatttgatgttgaacactttataacatctctgagagatgaggttcgtattcttagagagttgccaccaagggtaaagcgaagagtggaacttggaatgttccactcaatgccacctattagctggtctgatatctcttattaccgtaacaagatacttcctttaattcggaagcacaaggttcttcatctgaacagaactgatgctaggctagcaaataacggactaccgctcgatgtccaaaagttgcgttgccgagttaacttcggttcactgaagttcacttccgatattgaagagttaggcaggagagtgattagattgcttcgccaaaatggcccctttttggtccttcatttacgatatgaaatggatatgctggctttctctggctgtactgaaggctgcactcgtgaagaggcagatgagctcacaagaatgagatatgcttatccatggtggaaagagaaagtaataaactcctatgcaaaaagaaaagatggcctttgccctttgacaccagaggagattgctcttgtcctcagagccttggacattgacagaagtatgcagatatacattgcagctggagaaatatatggtggaaagcgtagaatggctgctcttacttcagcgtatcccaacgtggtgagaaaggagacacttttgcaaccttccgatctcatgttcttccagaaccattcgtcacaaatggcagctctggattacttggtatcactggaaagtgatatatttgttccaacatatgatggtaatatggctaaagttgttgagggacaccgcaggttcatgggttttaagaaaacaatcttattggatcgaaaactcattgttgagctggtcgaccagtataatagtggttctatgctgtgggatgaattctcttcactaatcaagtctgtccacgcaaaccgaatgggagcagcttcaaaaaggacagtgattcatgacaaaccgaaggaagaggactacttctatgctaaccctcaagagtgcttgcgagatcccaatcttttacggacatcatgatatttttactagcgcaattgcgcgagtatacttattaccattacacgtttacagcatagctgaacttgtttcttccgagctgactcaaatggctcggcattttcagttcagaacttcaggttgggccattgacaagggagtttggatggaagctgaaagaaaggatgatacaattgtgagcttgtgactacttaactcaaatgtagttggtacatagacgttacatgttggggaattggggatgttaggtttcctaattacgccgattaagagaagatattcatgtatagatgggggcgggttagtggataagttagttcaacagaacgttaccgatcatggttcatgaaggaaattgttatatactcaggtttttcatactttgtgcagacattactgctcttgcatcttgaaaaaaaaaaaaaaaaaaaaactcgagggggggcccggagggcctcgtgc

SEQ ID NO: 89532 - DNA, 169 bp, Oryza sativa
  Clone ID: PAT_MRT4530_88280C.1
atgggcgtgggatgcctcgtaggaaatgatggtatggttctgatccgtggcgcatgtgcacccatgggtgctgtagaacatcctgctctaattgtctcagatggaggcaagaaagttgagttggttgttgtcttcctcgccacagcgcgcacccagttcgggagcgcat

SEQ ID NO: 89533 - DNA, 1963 bp, Oryza sativa
  Clone ID: PAT_MRT4530_88281C.1
aatcatcacagaacagcaacacacatgacacgtcagtccatcagtatttcagtacttagttcaatcacaaaacacatcacactataaatacatagttcatcacaaaacatagttcaatcacaaaacacatcagtacatggttcatcacaaaacatatctcatccacttgtgcagcaggagtacactaatttgaaatggaaacttgaaattagatgtaacttgaaaattaaattgaccaacattttcttcaaacatccattggcgcaatgccatcctcatttcaaacatccattggcgcaatgccatcctcattagaacattccactgtctctgtctcttgctctgttccattagccaaggacaacatggcacagaagttctgctccaggttctccatgtccttctcagtaagatagacccaaccacatttccaccattccaatagtggctgttccaagtaaacttctaactcactcttagtgcctattccaggggcagtactagcacgcaagtattgttgaacatctgcatcaagctcatcatcgctctccccatcatagtctttactcactaaaagattattctgcacatttgtagctgctggactctttgaacttgcttgactagatgcataagtatcaaatagcttattaataacaaccatgaaatccgccatgtgttttggggctaccacaccataaaccttatctgcataatactcaagaagtgttctcttgaacctaggatcaagcaagcaagcttcagaaagagccatattggacttctcccaatatttatcatacttaggtttcattgacttgcccatagttgctatgattgtattagaactacggcaccattcttctactgccatcttaatttgacagaattttcttgttggaacatccaaagacagcccacaagtagtgtctaaaccatcacactcagaagcacacttcatgaattctgaccaatcattggcagatgcattgtccaaagtaagtgcaagcaatttcctatcaaggttccaatccagtacactatcatagaactctttgcacaagtttttccctgagtgatgaccctctacatgcataaactttataattctcttttgcatgcaccacgtatcatctatccaatgcacagtgatgcacatataacctttattttgatttgaggtccacatgtccatggttgtactaaagcggcatgcaagagttttaaagtactcatacattttcttcttctcatccaaaaacatatccaatatatgtttcctaacagttatgcgacttttgattggaaaggtagggtgcaatgacttaataaaatccacaaagtactcatgctcaacaatactaaagggatattcatgcataatgattgccaagtaaaatttcttcaagctaacagcctcatcatacttgtaagtctcaacagcagtgccgctttcactcttttttagatttagaagctgctggccactttttatttggtgcttcttgtctaagtgactccaaaatattgttgtgcccctgttgctctcacgacgagttgtatagctgcacttcttacactttgcccaaagctctacaatctctgttccatcatctcctactacctttttctcatacttgtcaaagtggctccaaacctctgaactacacttctttgctttctttgctggagggacatttgcatcctcggtagtttcctgtgtcaaatcaacttctactcttgctgctgcaaccacatttgtggtaggatctcctacatttgcaagagttggttgtgatgctcgcaaagctacaatgcccgcattgcatacacttgcactgctgctacttgcatgtgatgattccatcacaaatcgtcgtcctccctctgctcgccgttgttttccgatgaggttctccgtccttttagggttaagtctttctgttcctagcgtttgtgtcat

SEQ ID NO: 89534 - DNA, 2214 bp, Oryza sativa
  Clone ID: PAT_MRT4530_88282C.1
ctatgttgtcccactgcaacatagcatttccactgcctcatgatctgtttcattggtcagggacaacaaggcacaaaaatttcgctccaggttctccatgtccatctcagttaggatagacccaactacatttccaccttttcttgatgctgcagtccaatctttggtgcaaatcagagcttgcacaatttcaggatctagacagctacgaaacggatcaataacacgaccgccggcactgaatgcagattctgaagccacagttgatacttgaatagctagtacatcacgagcaagtcgactaagaataggaagctcatgttgcttgagagaccaccaatgcaaaatattaaatgggcttttgtcttttatgtcccattccaacagtggttgatccatgtaaacttccaactcacttttagtacctattccaggggcagtactagcacgcaagtattgtagaacatctgcatcaagttcatcatcactctccccatcatactctttagtcactaaaggattattctgcacatctgtagctgctggaatcttcgaagttggttgactagatgcataagtatcaaatagcttattgataatagccatgaagtctgccatgtgttttggggcactctcaccataaaccttatctgcataatactcaagaagtgttctcttgaacctaggatcaagaaagcaagctacagaaagagccatattggacttctcccaatatttatcatacttaggtttcattgacttgcccatagttgcaataactgtattagaactatggcaccaatcttctactgccatctttatttgacaaaattttgtaaaaaataaatttgcagttggataactactgccagagaagatcaaagtagcatcataaaatctcttcaagcatgtacacaatgactttgccatagtccaatcatcatctgttggggcacatttcaaatatttgtgtctatgacgaagaaagagcctattaaatgcaagtctatagtgaatagcttgctttaacatgagaaatgtggaattccaccttgttggaacatccaaagagagaccacaagtaatgtctaacccatcacattcagaggcacacttcatgaattcttcccactgcagcggggagttctttacaatccaaactgtgtttctgatatttgaaatactagatgaaatttgcttcaaaccatcttgagcaacaagattgaaaatatgattgaaacatctaacatgaaaaaaggccccatcacagatcaagggttgtatcttgttgagcttttgtactaaccccctagcacatacatcattggctgatgcattgtccaaagtaagtgcaagcaattttctatcaaggttccagtccagtacactatcatagaacactttgcacaagttgttccctgagtgatggccctctacatgcataaacttgataattctcttttgcatgcaccaattatcatctatccaatgcacagtgatgcacatataacatttattttgatttgaggtccacatatccatggttgtacaaaagcggcatgaaagagttttgaagtactcatacattttcttcttctcctccaaaaacatattcagtatgtctttcctaacagttatgcgacttttgattggaaaagtagggcgcaaggacttaataaaatccacgaagtactcatgctcaacaatattaaagggatattcatgcataatgattgccaagtaaaatttcttcaagctaacagcctcatcatacctgtaagtctcaacagaagtgccgctttcactctttttgagatttagaagctgctggccactttttatttggtgctttttgtctaagtgactccaaaatattgttgtgcccctgttgctctcacgacgagatgtatagctgcacttcttacactttgcccaaagctctacgatctctgttccatcatctcctactacctttttctcatacttgtcaaaatggctccaaacctcggaactgcacttctttgctttctttgtaggagggacatttgcgtcctcagtagcttcttgtgtcaaatcaacttgaactcttgctactgcagcaacatttgcagcaggatctccttcatttgcaagagttggttgcgatgctcgcaaagctacaatacccgcattgcatatacttgcactgctgctacttgcatttgatgaatccat

SEQ ID NO: 89535 - DNA, 488 bp, Oryza sativa
  Clone ID: PAT_MRT4530_88283C.1
gtttttgtttttttttttttttttttttttttttttgggttttttttttttttttttttttttttttttttttttttttttttttttttttttaacccgcaaaaaaagccccctttgggtttgggccattgggggccccccttttaaagggggggggggcccccccggaaaaaaaaaattttttaaaaaggggttttcctattaagcagtttcttccctgggcccccctctttaacccccccccttttttgcccgggcaatattttcaacctggggggccgccctcccctcaagattggccccatagggcctggggccctcaacccccgcaattttttcaacgggggcctcaagaaatttaaaggttttcttaacaacagacatgctttttttaacccccaacccctggtggggggaggtttccccaaggggcccccaactatttttttttttaaccaaggccttgttgggggcccttttaagggggc

SEQ ID NO: 89536 - DNA, 367 bp, Oryza sativa
  Clone ID: PAT_MRT4530_88284C.1
cggtgcgcaatatccttttcgacccacacgcccgatatagatccgccgctttcgctctcctctgctttcgtctaattataatgcgggcgggcggctatctcacacagcaaaagcctacttgggatgctccactgatcgtcttctacttactcctctttcttccagcttggccggtgtgtggctgattattccagaattcccattaactaaatcaccggatcaagaataatgatataaaggggggagaggctcttttctgagggatgacagattccgtttcgtatgaacagcgcaccattttagatttcttcctccttctcttattctttccgttgtgcatgctgcttttctctactaccttttccac

SEQ ID NO: 89537 - DNA, 386 bp, Oryza sativa
  unsure (1)..(386): unsure at all n locations
  Clone ID: PAT_MRT4530_88285C.1
ccaaacctcaacaggctcccccgaccgactcacaatacagcggcgtcggccgccggccgcggcgcgcccgatcgttgcgaaacccctcgcccccccgtcgcccaccgctccgcgtcgcgcagcgcgcgctggtggcgcaggagcgtccggccgcgcggtcttcaaccctcagttgggttgggggaaggacttgggcgacggcacggccccccgcctccccgcaaccaccgccgagcgctgggtccaaactaccacacccgacgagccgagctccaaactacaaccctccaaccacaactaaaaagcggaagaccccgaacgtgtcaacattctccacactccggagcagatacgccggcgtcggcgcgggaatttgccngagctag

SEQ ID NO: 89538 - DNA, 225 bp, Oryza sativa
  Clone ID: PAT_MRT4530_88286C.1
aacctttccagccgaagccgttaaccttcttccgcctccttcctcctttcccggtggttcgccatggaagccttcgccaccgagaccccctggccggggatctccgggtccccctggagcatgtggtggttccgggccgggctcccctaccccacccgtgcctcccggggggggaagctccggtcgtcgttctcgcccgagggggcggccacggcggcgtcggtc

SEQ ID NO: 89539 - DNA, 5273 bp, Oryza sativa
  Clone ID: PAT_MRT4530_88287C.1
atggcggcgaccaggcggtcggccaccacagcacgcgcgcgcggcttgcaatgggaggcgcggcggattgagtggcgcggctcgggcacgcgcgctggctgcggggccgagcggctgcgcggctgcaggcgcggcagggcagcggggccgggcggcgcagacgcgacgcgggcgacgaccacgcgggcgcgcgccacgacggaacgggcgctacagaccaacccccctaacaagaatctcgaccccgagattcatcacctaagggagcagctccgggaactcggcgcggagaagatcttctcgctcccaggttgttttcactggcacgaaatgagccaatttcgtgagtcgatccacgattacccaaatggagtcgtacccgctaggggttcttggcaaaccggtgatgaaatccattccgatttcttcccatttccactcgggaattggtaggggctgtagcagaccagctggcctctggtgctctgccttgactctttggcaaatgtcacacaaggctacgtattctgcgacatctcgcttcattccagcccaccagaagtatgccttgatatcttggtacatcttcgtacttcctggatgaatggagtaggcggactcatgagcttcctttaggatgagatctcttaattccttcttggccggtacacagatacgtggaccgcaccaaactgtgccttgatcgtctatggagaaattggtgtctttcttctcctgtattctttttattaactcttttatcccttcgtcgtctttctgagcttcccggatttgcgactctagggtaggctgtactgtcaagctggcagggacacctgactgtaccacggtcagcctcaacttctccaattctctgcacaggcgatcttggtcaggccgtatttgagctacattgcaataggccttgcgacttagcgcatcagcgaccacgttggctttaccggggtggtaatgaattccaagatcgtaatccttgattagttccaaccatcttctctgcctcatatttaactccgtctgtgtgaagatgtacttaagacttttgtgatcggtgtatacttcacatctgttcccgattaaatagtgcctccagatcttaagagcatgaaccacggctgccaattcgagatcatgggtgggataattgacttcatgaggcctgagctgcctggatgcataggccacaacctttcgttcttgcattaggacacatcctaagccttgtcttgatgcatcacagaagatctcgaaatcttttcggatatctggcaaggtgagaactggggcagtggtcaaccttttcttcatttcttgaaagctgtcttcacaggctgcagaccattgaaatttcttttccttctttaacagctcggtcataggtctggctagcttagagaattcttcaatgaatcttcgataatatccaactaagccaaggaagctgcgaatctctgacacattcttgggcgggttccaagcaagtacagcttcaaccttgctgggatctacctcgacaccgttggaggagatcacgtgtccaaggaatgctactcggtctaaccagaattcgcatttcgagaatttagcgaatagttgatgatccctgagcttttccattattagcctcaggtgttcagcatgttcttcctcattcttggagtatatcaggatgtcatcgatgaacaccacgacaaactggtccaggtattccataaagattttgttcattaagttcatgaagaacgctggagcattggtgagtccgaaggacatttctgtgaactcatatagaccataacgcgttgagaaagcggtcttcgggatatcttcagatctgattttcaacattctctcagagccatcctttttcttaaccagaagcactggggctccccaaggggatgagctaggtcgcacataacctttactctccaattcttcgatttgtcttttaacttctactaactcattagctgccattcggtagggtctttttgcaattggtgcggtgcctggtgccagttctatggcgaactcaatctcccggtctggtggcatactcgttaattcttctggaaatacgtcgggatattcacagactatgggcaccgactccaaggaggtgacttgtaaacaggttaagatagaccgacttgcggtaggagtgttaggggtaaagcggacttgctttcctccaggtccttgcaaggtgatggacttttcggcacaatctatctgtcctttgtgctttgccaaccaatccatccctaggatgatgtccaagctttgcgagtctaggactatcggtttggctaggaagtcaacttcctcaattctaaggttaacttccaggcatatttgagttgcccttatatccctcccaggggaatgtactatcattggtacacgtaaattttgggttttccaaccatttcttttcacaaaagcttgtgatatgaaagagtgggaagctcctgaatcaaacagaactattgcgggtatggagttgacagagaacatacccatcacaacgtctggagcatcctgagcggtctcggcttgaatgtgattcacccggcctcgaccaaggttgttggacacacgagaaccttgtccacttgcctgagagctaggacgagactgagctgccgctggagtaggagttctggcagtgctgccattagcatgccctgagctggtgttggtaggattctgagggcactgtctggcatagtggcccatctggttgcaccggaaacactgaactgctgacggtccctgtggtgacttgaaagaggtaacactgttgggcgcagtattgccactaggggcacgctgctgtggctgaggtgccggacagttcatctgaggacgaggggcgtagcctggctggcggttagcctgagtgaccgactggtggtattgcatgggttgaccgtagtgagggcgaggtgcgcctcgggaagaatttccctgatggttagagttgcgtttcttgtattcttcggtagcctcttttctggcatcttcaagtagaagcgctgcgattcctttcacgaatttcctgatcttcttcttatctgtgtccacttcctcaggggcgtatcgagccaagttgttgaacatacttaggtactcattgacactgctgttgccttgcttaagtctgttgaattccactttcttcatgtcaatggtgctttcaggcacatgagctgcacggaaagacgtagcaaactcatcccaagcaatgttagtgggttcagggtgtgcattgcagtaattttcccaccaatctgcagcaggtcctcttagctggtgagaggcatagagcgtcttctcaaccggagtacactgcaccaagttgagttttctatccacatctttcagccaatcgtcagcctcgacgggctcgacggtctgagagaactctggcggacgagacctcagaaagtctgtcagcttggatctattgttgctcatgtgacggtggccatttccatgcgcagtatgctgaaaaccggctacggctgcggctaatccttgcaagatttgtgtctaaactgccattaagtgctgcatgttgttttccacatgaggtggggaagggaggcgttcttctccagaattgtgactggcagtgcggtgagagcggtgagactgttccatctctacatcacaggaagccgtgcgatgcgagcggttgctgcggcggggttgctcaacttctgcattgcgggaagcagtacggtgcgaacggttgctgtggtgagactgctcatgatttgcttctggctcggctctaccatcttcaaaaccaaagcgggctcctgtagtcggctcctcagtcgaagaaatgtcgatcggctgacgcgaagggaccggcggaacctgtcgagggccgacagcagcacgggccgctggcggtgggggagctgggtagtggaaacggaacacggtggaagaaccaacaacacgcttccgcgcggtgcggataaagcgtgggccacggcgggaggaagcaactggggtgtgtccgggggtgtaggaggggctaactgggtgtgggtagggggagtacactggtgagtacggcgcacgcgagctgggggagcgcgggccactgggagtgcgggcagagccgcgggagctgtgggaggacaggtggctgccgtgacagaggcggcggcgtagcggcgggcaagggagcggtaagcctcaaggagtaggtcgtgctgagtggcctgagcctccgaaagctcaaccatgcgagtcagcactggctgagactcgctgtacggacaagggtacctggcgtctgagtggccagaaggaaggcgtggtagctgccggaaggcgaagcccccgagatggtgggcgatctggagagtgggcctggccacggtgaagtggtgtgggcgaaggccagctccgtgtatacctccacgagggtaaaggtacacagagagctcacagtgagggggaacacggtccacggagtaccccgtgtactcgggacacgagaagccaaggaaacgagcgaggtcacgaagctgagcgacgtggtgaccctcaccaaaaccgtgggagctgaagctggcgttcactgccatctgttaatcgataccagtcccaggaaacagtgctggtatcacaggaagacagaatatcacagcaacagaggcgcgcggttcgcggaggacgcggtgcggcaggcccacgcgcagcctcacggctcgcggtggaccgcgcgcgcgagggggaggagggaagcgacggaccggggtctgcttgacccggtcgcggccgaggtggcgccgacgtggtgcctacgtggctgccacgtgggcgggcgggaggtagacgacgacgccggtcggaacggacggcagacaacagcggcgagcggcggagcgaaccacggcgatacaggcgaaagcgagcacaccgggaagttgcacaggactaagggagacgagccaatggctcggattcgccgggggatgctcgacggcggcggattgcggcggcggcaaccggcggcaggagaagggggaaacggcgatggcgcgacgggagaccgattcgggcgagttagagcatctacgcgactccgggaatccgttgctagcgtcggattgggcggagctacgctgagcgaggccggcgacgagtgggtgctacggagcacgggcggcgacggcggcgagcacacagcgagcggcggcaacggtcggggcggcgtcagctag

SEQ ID NO: 89540 - DNA, 5058 bp, Oryza sativa
  Clone ID: PAT_MRT4530_88288C.1
atggcagtgagcgccagcttcagttcccacggttttggtgagggtcaccacgtcgctcagcttcgtgacctcgcctgtttccttggcttctcgtgtcccgagtacacggggtactccgtggaccgtgttccccctcactgtgagctctctgtgtacctttacccccgtggaggtatacacggagccggccttcgtccacaccacttcaccgtggccaggcccactctccagatcgcgtaccaggacctctcctggactgcgcttcatcgcctggcccacgactacaaccaccgtctcggaggctccgccttccggcagcttccacgccttccttctggccactcagacgccaggtacccttgtccgtacagcgagtctcagctagtgctgactcgcatggttgagctttcggaggctcaggccactcagcacgacctactccttgaggcttaccgctcccttgcccgccgctacgccgccttggaggcccgtctggccgaggagggtgtcacctcagttgacactatctcctgggactcaggccgcctctgccacgccagccacctgtcctcccacagctcccgcggctctgcccgcactcccagtggcccgcgctcccccagctcgcgtgcgccgtactcaccagtgtactccccctacccacacccagttagcccttcctacacccccggacacaccccagttgcttcctcccgccgtggcccacgctttatccgcactgcgcggaagcgtgttgttggttcttccaccatgttccgtttccgccacccagctcccccaccgccagcggcccgtgctgctgccggccctcgacagctgacagattttctgaggtcacgtccgccagagttctctcagaccgtcgagcccgtcgaggctgacgattggttgaaagatgttgatagaaaactcaacttagtgcagtgtactccggttgagaagacgctctacgcctctcacaagctaagaggacctgctgcagattggtgggagaattactgcaatgcacaccctgaacccactaacattgcttgggatgagtttgctacggctttccgtgcagctcatgtgcctgaaagcactattgacatgaagaaagaagaattcaacagacttaagcaaggcaacagtagtgtcaatgagtacctaagtcagttcaacaagttagctcagcacgcccctgaagaagtggacacagataagaagaagatcaggaaattcttgaaagggatcgcagttggaatgagactccagttacttgctcatgtcttccccacttttcaacatatgatcaacaaggcacttctgcttgaggatgccagaaaagaggctaccgaagaatacaagaaacgcaagtctaaccatcagggaaattcttcccgaggcacacctcgccctcgctacggtcaatccatgcaataccaccagtcggtcactcaggctaaccgccagccaggctacgcccctcgtcctcagatgaaccgaccggcacctcagccacagcagcgtgcccctagtggcaatactgcgccaaacagtgttacctctttcaagtcaccgcaaggaccgtcagcagttcagtgtttccggtgcaaccagatgggtcactatgcaagacagtgtcctcagaatcctaccaacaccaactcagggcatgctaatggcagcactgctagaactcctactccagcggcagctctgtctcgtcctagctctcaggcaagtggacaaagttcacgtgcttccaaccactttggtcgaggacgtgtgaatcacattcaagctgaaaccgctcaggatgctccagacgttgtgatgggtatgttctctgtcaactccgtacccgcaatagttctgtttgattcaggagcttctcattctttcatatcgcaagcttttgtgaaacgaaatggttggaaaacccaaaatttgcgtgtaccgatgatagtacattcccctgggaggaatataagggcaactcaaatatgcccggaagttaaccttagaattgaggaagttgacttcctagccaaaccgatagtcctagactcgcaaagcatggacatcatcctagggatggattggttggctaagcataaaggacagatagattgtgccgaaaagtccatcaccttgcaaggacctggaggaaagcaagtccgctttacccctaacactcctaccgcaaatcggtctattctaaccagtttacaagtcacctccttggagtcggtgcccgtagtctgtgaatatcccgacgtatttccggaagaattaacgagaatgccaccagaccgagagattgaattcgccatagaactggcgccaggcaccgcaccaattgcaaaaagaccctaccgaatggcagctaatgagttagcagaagttaagagacaaatcgaagagctggaaagtaaaggttatgtgcgacctagctcatccacttggggagccccagtgcttctggttaagaaaaaggatggctctgagagaatggtaatcgactatagagccctaaatgaagtaactataaagaacaagtacccgttgccacggattgacgatttattcgatcaacttaaaggagcaagagttttctcaaaaattgacttgaggtcaggttaccaccaactgaaaattagatctgcagatatcccgaagaccgctttctcaacgtgttatggtctatatgagttcacagttatgtccttcggactcaccaatgctccagcattcttcatgaacttaatgaacaaaatctttatggaatacctggaccagtttgtcgtggtattcatcgatgacatcctgatatactctaagaacggggaagaacatgctgaacacctgaggttgataatggaaaagctcagggaccatcaactattcgcaaaattctcaaaatgcgaattctggttagaccgagtagcatttcttggacacgtgatctcctccaacggtgtcaaagtagatcccagcaaggttgaagctgtacttgcttggaacccgcccaagaatgtgtcagagattcgcagtttccttggcttagctggatattatcgaagattcatcgaaggattctctaagctagccagacctatgaccgagctgttaaagaaggaaaagaaatttcaatggtctgcagcttgtgaagacagctttcaagaaatgaagaaaaggttgaccactgccccagttctcaccttgccagatatccgaaaagatttcgagatcttctgtgatgcatcaagacaaggcttaggatgtgtcctaatgcaggaacgaaaggttgtggcctatgcatccaggcagctcaggcctcatgaagttaattatcccacccatgatctcgagttggcagccgtggttcatgctcttaagatctggaggcattatttaatcgggaacagatgtgaagtatacaccgatcacaaaagtcttaagtatattttcacacagaccgagttaaatatgagacagagaagatggttggaactaatcaaggattacgatcttggaatccactatcatcctggtaaagccaacgtggtcgctgatgcgctaagtcgcaaggcctattgcaatgtagctcaaatacggcctgaccaagatcacctgtgcagagaattagagaagttaaggctgaccgtggtacagtcaggtgtccctgccagcttgacagtacatcctaccctagagtcgcaaatccgggaagctcagaaagacgacgaagggataaaagagttgataaaaagaatacaggagaagaaagacaccaatttctccatagacgatcaaggcacagtttggtgcggtccacgcatctgtgtaccggccaagaaggagttaagagatctcatcctaaaggaagctcatgagtccgcctactccattcacccaggaagtacgaagatgtaccaagatatcaaggcatacttctggtgggctggaatgaagcgagatgtcgcagaatactggaaatgggaagagatcggaatggatttcatcaccggtttgccaagaacccccagcgggtatgactccatctgggtaatcgtggaccgactcacgaaatcagctcatttcgtgccagtgaaaaccacctatgatggaaagaaactagcagaactctacatgacccatgtcgtatgtagatttggctgtcccaagaaaattgtgtcagatcgaggcactcagttcacctcaaggttctggaagcagttgcatgaagctctcggaactgatctaaattttagtacggcctaccatccgcagaccgatggtcagacagaaagggtaaaccaaatcctagaagacatgctacgtgcgtgtgccctggatttcgaaggcacttgggatcgttgtttgccgtatgctgagttctcatacaacaacagctatcaggccagcattcagatgtcgccgaacgaggcaatgttcggaagaaagtgccgcactcccttgtgctggaatgaggtgggcgaagcgctggtattcggtcctgacatactcaagtcagcagaagaacaagttaagctgatacgagaacgtttgaagacagcacagaaccgtcagaagaattacgctgacaatcgaacgcgtgaccttgagttcgaaaaaggagatcatgtatacctgcgggtatcacccctccgtggtatgaggaggtttgggatgtccggcaagttagcaccccgctacatcggcccctacctcataaccgccagacgtggcgaagtggcttatcagcttgagttacctgaaggtctcgcagatgtgcacaacgtgttccacgtatcccagctaaagaaatgtcttcgagttccagaagagcaagtccccctaggtaatatcgagctggaaaagaatctgacctataaggaaagaccgatcaaggttcttgaagaggcagaacgtcatactcgaaggaagaccatcaagttctacaaggtccaatggagcaatcattctgaagatgaggcaacctgggagcgagaagatcttctccgcgccgagttcccggagctgctcccttag

SEQ ID NO: 89541 - DNA, 1284 bp, Oryza sativa
  Clone ID: PAT_MRT4530_88289C.1
atggggaacatctgtggtggttcagggaaggctcatgtatcgggggattgcaggccgcctagctcagggacaatgacccccaaaacaagcagcagcgtcacaaccagcaatagcacaactgggaagctctcctctgttggcagcagcttcatggcgtcttccggaagcggcggcacgagcagcggattcgacgacggggtgtacccagagggccagatcctggaggcaccaaacctcaggacattcacattcattgagctcaggacagccaccaagaacttcaggccggatagtgttcttggggagggaggctttgggagggtgtacaaaggatgggtggatgagaagacgatgaacccggtgaagggcggcaccggcatggttgttgctgtcaagaagctcaactcagagagcatgcaaggttatgaggaatggcagtcagagataaactttctgggtaggctctcgcatccaaacctagtcaagctcttgggctactgctttgaggacaaggaacttttgctcgtgtatgaattcatggccaaagggagcttggagaaccatcttttcaagaaaggatgtcctccactatcatgggaactgaggctgaagatagccattggtgcagctcgaggacttgcgttcctgcatgcctcagaaaaacaagtcatctaccgtgactttaaggcttccaacattcttctagatgctaactataatgcaaagctctctgattttgggcttgctaagcttggaccaactggtagcaactcacatatcacaacaagggtcatgggcacatatggttatgcagcaccggagtatgtagccactggtcatttatatgtcaagagtgatgtttacggtttcggagttgtgatgctggagatgatgtccggtcagcgagcactagaccccaaccgtcctaatgggcagctcagccttgtggactgggcgaagccctacttggcggaccggagaaagcttgcccgcctcatggacccccggtttgagggccagtataactccaaacaagctgttcaggcggcgcagttgacgttaaattgcctggcaggtgagcccaggagcaggccctcaatgaaggaagttcttgagacactcgaaaggatcgaatcaatgaagagccgagcaagggatgcaagaggaagcggttcatcaagggaccatagccatggtcgcaccacagcgcaccaacggtcatcgccgcgccctgatggtcgccgtggatcaaggaccaatggtcacgccacgaaggcacggtga

SEQ ID NO: 89542 - DNA, 404 bp, Oryza sativa
  Clone ID: PAT_MRT4530_8828C.1
atctggtcgaccgcccataaccgcgggcacggctattcgaatagttttactctgatcagaggtgtacaactgtatccacaacacacagccccacgacacgtttccgtgcgccgatatgccaccacgacataccggaaagaggccgtgataggacccttcacataaccccctctaaccgatcgcaccacaccttaggattcgccctcgtccccaacaggcaacgggcagcccccctttcgtgccgcgatgaatccggaagccgatcaaccggacaccccggccgacccaactccatcatgcccaccctcgcctgggtacgtcggctagaggaaagctacactacaagcctagccgttgcccacgctggcttgtggtaagtacaataagttcttctagggcatccc

SEQ ID NO: 89543 - DNA, 487 bp, Oryza sativa
  Clone ID: PAT_MRT4530_88290C.1
gagcaaaagcacacagtaatttgcataaatatcatttacatcatccgatgtacaacaaattaatcaagccacacgcaaaatctatattgtaagtatgtaaagctcaaatcctcaatgctgctctcctcctaatattgggaggggcttattgcttgtgagcaaatcaaatcaatacctatagttccttttctgttttccctcaaattttacaactcaagcattgtacaaaacaagaaaacaagcaaaatggcaaaccaaagtatcaacagtagtatccacccatctgggttaaaaactgtgtactgttgctaactaactgtaaccagctcaggcagtttctgtggtgtctgcttctagtgagggtttgtcagtggctgtttctgtgtcaccttgcaatggcgcctcctcaacggcagcatcctccggtgatgacttggtcgcgccatcttcttcctctgatggtttgtgagcctctggcttttcaagg

SEQ ID NO: 89544 - DNA, 157 bp, Oryza sativa
  Clone ID: PAT_MRT4530_88291C.1
caagtacagcttcaaccttgctgggatctacttggacaccgttggaggagatcacgtgtccaagaaatgctactcgcctcaggtgttcagcatgttcttccttattcttggagtatatcaggatatcgtcgatgaacaccacgacaaactggtccag

SEQ ID NO: 89545 - DNA, 4300 bp, Oryza sativa
  Clone ID: PAT_MRT4530_88292C.1
ctaagggagcagctccggaaactcggcgcggagatgatcttctcgttcccaggttgccttatctttagaatggttgctccattggaccttgtagaacttgatggtctttcttcgagtctgacgctttgcctcttgaagaaccttgatcggtctttccttgtaggtcaggttgttttctagctcgatgttgcccaggggaacttgttcttctggaactcgaagacatttcttcaactgggatacatggaacacgttgtgcacatctgcgagaccttcaggtagctcaagctgataagccacttcgccacgtctggctgttatgtggtagggaccaatgtagcggggtgctaacttgccggacatcccaaacctcttcataccgtggaggggtgatacccgtaggtacacatgatctcctttttcgaactcaagatcacgcctccgattgtcagcataattcttctgacggttctgagctgtctttaaacgttctcggatcagcttaacttgttcttctgctgccttgagtatgcaggaccgaacaccagcgccgctaggggttcttggtaaaccggtgatgaagtccatcccaatttcttcccacttgcattcggaaattggtaggggttgcagcagaccagctggtctctggtgctctgctttaactctttggcaaatgtcatagagagccacatattccgcgacatctcgcttcattccagcccaccagaaatatcccttaatgtcctggtacatctttgtacttcctagatgaatggagtaggcagactcatgggcttcttttaaaatgatatcttttaattctttcttggctggtacgcagatgcgagatccgcaccacactgtgccttggtcatctatggagaaaccggtgtatttcttctcgtgtattctttctattaactcttttatacctttatcatctttctgagcttcccggatttgcgattccaatgtaggttgcactgtcaggctagcagggatggccgactgtaccactatcagccttaacttttctaattctctgcacagacgatcttggtctggccatactttaactgcattgcagtaggtcttgcgactcagtgcatcagcgaccacattggctttaccgggatggtaatggatcccaagatcataatccttgattagttccaaccaccttctttgcctcatatttagctctgtctgagtgaagatgtatttaagactcttgtgatcggtatacacttcacacttgtacccgatcaagtagtgccgccagatcttaagggcatggatcacggctgctaattcaagatcatgggtgggatagttgacttcatgaggtctaagctgcctagacgcataggccacgaccttacgatcttgcattaagatatcccaagccttgccttgacgcatcacagaagatttcaaagtcttttcgtatatcattctctcagagccatcctttttcttaaccagaagcactggggctccccaaggggatgagctaggtcgcacataacctttactctccaattcttcgatctgctttttgacttctgctaactcattaactgccattcggtagggtctttttgcaattggtgcggtgcctagtgccagttctatggcgaactcaatctctcggtctggtggcatacccgttaactcttccatcacaacatctggagcatcctgagcggtttcagcttgaatgtggttcacccggcctcgaccgaagttgttggaaacatgagatccctgtccactagcctgagaactaggacgagacggagctggtgcgggagtaggagtcctggcggtgctgccattagaacgtcctgagttggagttggcaggatcctgtgggcattgcctggcatagtgtctcattattcggtgcagtattactgctaggggcacgctgctgcggctgaggcgccaggcggttagtctgaggacgaggtgcatagcttggctggcggttagcatgagtgactgactggtgatattgcatgggttgtccaaagcgagggcgaggtgcacctcgggaggaattcccctgatgattagacttgcgtttcttgtattcctcggtagcttcttttctagcatgtgagttgcacgaaaagccgtagcaaactcatcccaagcaatgttagtggggtcaggatgagcattgcagtagttttcccaccaatcagcggcaggtcctcttagctggtgagaggcgtagagtgtcttctcgaaaggagtacattgtaccaagttgagcttcctttcaacatccttcagccaatcatcagcctcaacaggcacgacggtctgagagaactcgagcggacgagacctcagaaagtccgtcagcttggatctgttgttacccatgtggggatggccatttccatgtgcattatgctgaaagccggctatggctgtggctaatccctgcaagatctgtggctgtcgagggccggcaacagcacgggccgctggcggagggggagttgggtagtcgaagcggaacactgtggaagagccaacaacacgcttccgcgcagtgcggatgaagcgtgggccacggcaggaggaagcaactagagtgtgtccgggggtgtagaaggggctaactgggtgtgggtagggagagtacactggtgagtacggcgcacgcgagccgggggagtgcgggccactgggagtgcgagcagagccgcgggagctgtgggaagacaggtggctggcgtggcagaggcggccaaagtcccaagaggtagtgtcaactgaggtgacaccgtcctcggccaggcgggtctcgagtgcagcgtagcggcgtgcaagggagtggtaagcctcaaggagaaggtcgtgctgggtggcctgagccttagaaagctcaaccatgcgagtcagcacaggctgagactcgttgtacgggcaagggtacctggtgtcagtgcggccagaaggaaggcgtgggagctgccggaaggcagagcccccgaggcggtggctgtagtcgtgggccaagcgacgaagtgcagtccaggagaggtcctggtacgcgatctggagagtgggcctggccatagtgaagtggtgtgggcgaaggccagccccgtgtatacctccacaagggtaaaggtataccgaaagctcacaacgagggggaacacggtccacggagtaccccgtgtactcgggacacgagaagccaaggaagcgggcgaggtcacgaagctgagcgacgtggtgaccctcaccaaaaccatgggaactgaagctggcgttcactgccatcacagcaacagaggtctctttattatagagtaggattacagtcatgatgggctgcagacagaccccgagctcacaacatatgccgacgagaggggtcccagaccaacaacaggttaggtcccagaccatactctaagcgtgccattgggtagatctcgagatttgaggatttttggaagttgaacggagtcaaacagatgtacggttgagaaaatattgaatttctaagattattggatttttggtctcgcgtggtcccgagtgggacccacttgtcggcggctcggctcaccatgagcgaggtgcatgcggcgcggtgtctctgtgggccgcgcgcacgcgagcggggacggagggagcggctgaccagggtcggcttgacccggtccggccgagctagcgccgacgtggcgccttcgtggctggccgtgtgacgacgagggcgacggggtgtacaccggaatgacaaggggaaatgagatggagcgagccaacggctcggattcgccggagggggctgcggattgcggcggcggcaactggcggcgagaaagggggaaatcggcaacggcatgatgggagatcgattcgggcgagctagagcatctacgcgactccgggaatccgtttctagcgtcggattggacggaacatcgccgaggaaggccggctgctcgagtctaaggggaggaggaagagcgaggagtgagaacggggaggtgttctaccgagacgagacggggcgttgtgacgagaggccgacggcatgggagtgatctctccagcctcgggtcggggaagaggaagaagacgagcgcccgaagtccccttccgatcctagcgcgcaccggctcctccagcgcacgcgacggcgaagggcgacggtgaacagggcacggggcgaggcgacaatggcggaaggcgaaagcgagggagatgggtttgggggaggggctcgggtttatagggcggctatgtcagttcggaaacc

SEQ ID NO: 89546 - DNA, 738 bp, Oryza sativa
  Clone ID: PAT_MRT4530_88293C.1
tcatctgagctcttcctcctctccatcatcgctgtccatgtcctggatggcacaggagaggctgcacgagcgcacggcgacgtcggtgacccgaaggccggtgtcgtacacctcgccgggcctccagtcggcgggaagcacctcaccgtcgctacgcagccatttcccgccggagccggccgtcaccacgacgcggagccgcagcgggccgaccggcgcgcgcgacgtcgtccagactcccggcgcgccgtcgcgccgcgtcatgtacctccacgacgaatagtacgacgacgacggcggtgtagcgttcgcctgcgcgatctcaacggcggcgatgtcggtctggccgccctggtacaggaagcggatggcgaggtgggtcgggttcctgctcgcctcctccaccctcaccgccaacctcctgctctccctgtactcgcaaggtatcctcctgaagtccacctctagcgtgcgctgcctcgtgagctcgtgagcggagacgccctgcttggccatggccgcgaaggcgtcctcggtgatgcgaaactgcagcgagccgccggctgtccggttcatctccccctcctgctccggctgcttcgccatgtcggcgacgacgaccttgacgccgtcctccccgcacagtctccggtctctgcaccttaactggtagcaggcgccgcaggcatggccatggcggaagaggtcggcggtgacggcggcaacgttgagctccat

SEQ ID NO: 89547 - DNA, 570 bp, Oryza sativa
  Clone ID: PAT_MRT4530_88294C.1
atggaggtatacacggagctggccttcgcccacaccacttcactgtggctaggcccaccctccagatcgcataccaggacctctcctggactgcgctttgtcgcctggcccacgactacagccaccgtctcggaggctccgccttccggcagcttccacgccttccttctggccactcagacgccaggtcgcctctgccacgccagccacctgtcctcccacagctcccgcggctctgcccgcactcccagtggcccgcgctcccccagctcgcgtgcgccgtactcaccagtgtactccccctacccgcacccagttagcccttcctacacccccggacacaccccagttgcttcctcccgccgtggcccacgctttatccgcactgcgcggaagcgtgttgttggttcttccaccgtgttccgtttccactacccagctcccctaccgccagcggcccgtgctgctgtcggccctcgacaggttccgccggtcccttcgcgtcagccgatcgacgtttcttcgactgaggagccgactactggaggcagcctggccgacgaggagtag

SEQ ID NO: 89548 - DNA, 162 bp, Oryza sativa
  Clone ID: PAT_MRT4530_88295C.1
atggcgatcaatcgccgctccgccaagtacatcctccagctcgagcacgactacccctgggacgacgaccccaagtccatcagccgcctcatcttccagcagatgatcctcttcacggccgccatggaattcgaggaattcaggggagacgtggacttctga

SEQ ID NO: 89549 - DNA, 2781 bp, Oryza sativa
  Clone ID: PAT_MRT4530_88296C.1
atgggcaacaatagatccaagctgacagactttctgaggtctcagccgccagagttctctcagaccgtcgagcccgttgaggctgacgattggctgaaggatgttgatagaaaactcaacatagtgcagtgtactcctgttgagaagacgctctacgcctctcaccagctaagaggacctgctgcagattggtgggagaattactgcaatgcacaccctgaacccactaacattgcttgggatgagtttgctacggctttccttgcagctcatgtgcctgaaagcaccattgatatgaagaaagaggaatttaacaggcttaagcaaggcaacaacagtgtcaatgagtacctaagtcagttcaacaagttggctcggtacgcccctgaggaagtggacacagacaagaagaagatcaggaagttcttgaaagggatcgcagttggaatgagactccagttgcttgctcatgacttccccacttttcaacatatgatcaacaaggcacttctacttgaggatgccagaaaagaggctaccgaagaatacaagaaacgcaagtctaaccatcagggaaattcttcccgaggcgcacctcgccctcgctatgaacatgttgaatacctgaggctgataatggaaaagctcaggaatcatcaactattcgctaagttctcgaaatgcgaattctggttagaccgagtagcatttcttagacacgtgatctcctccaacggtgtcgaagtagatcccagcaaggttgaggctgtacttgcttggaacccacccaagaatgtgtcagagatccgcagcttccttggcttagctggatattatcgaagattcattgaaggattctctaagctagccagacctatgaccgagctgttaaagaaggaaaagaaatttcaatggtgtacagcctatgaagacagctttcaagaaatgaagaaaaggttgaccactaccccagttctcaccttgccagatatccgaaaagatttcgagatcttctgtgatgcatcaagacaaggcttaggatgtgtcctaatgcaagaacgaaaggttgtggcctatgcatccaggcagctcaggcctcatgaagtcaactatcccacccatgatctcgagttggcagccgtgagtagatgtgaagtatacaccgatcacaaaagtcttaagtacatcttcactcagaccgagttaaatatgaggcagagaagatggttggaactaatcaaggattacgatcttggaattcattaccaccccggtaaagctaatgtggtcgctgatgcgctaagtcgcaagacctattgcaatgtagctcaaatatggcctgaccaagatcgcctgtgcagagaattggagaagttaaggctgaccatgcctaccctagaatcgcaaatccgggaagctcagaaagatgacgaagggataaaagaattaataaaaagaatacaggagaagaagggcaccgatttctccatagatgatcaaggcacagtttggtgcggtccacgcatctgtgtaccggccaagaaggagttaagagatctcattctaaaggaagctcatgagtccgcctactccattcatccaggaagtacgaagatgtaccaggatatcaaggcatacttctggtgggctggaatgaagcgagatgtcgcagaatacgtagccctgtgtgacatttgccaaagagtcaaggcagagcatcagaggccagctgagattggaatggatttcatcaccggtttgccaagaacccctagcgggtacgactccatctgggtaatcgtggatcgactcacgaaatcaactcatttcgtgccagtgaaaaccacctttgatggaaagaaactagcagaactctacatgacccatgtcgtatgtagatttggctgtcctaagaagattgtgtcagaccgaggcactcagttcacctcaaggttctggaagcagttgcatgaagctctcagaaccgatctaaattttagtacagcttaccatcagcagaccgatggtcagacagaaagggtgaaccaaatcctagaagacatgctacgtgcgtgtgccctggatttcgaaggcacttgggatcgttgtttgccgtatgctgagttctcatacaacaacagttatcaggccagcattcagatgtcgccgaatgaggcaatgttcggaagaaagtgttgcactcccttgtgctggaatgaggtgggcgaagcgctggtattcggtcctgacatgctcaaggcagcagaagaacaagttaagctgatccgagaacgtttaaagacagcgcagaaccgtcagaagatttacgctgacaatcggaggcgtgaccttgagttcgaaaaaggagatcatgtgtacctgcgggtatcatctctccatggtatgaggaggtttgggatgtccggcaagttagcaccccgctacatcggcccctacctcataaccgccagacgtggcgaagtggcttatcagcttgagttacctgaaggtctcgcagatgtgcacaacgtgttccacgtgtctcaattgaagaagtgtctccgtattccagaagaacaagtccccctgggtaatatcaagctggaaaagaacctgacctaccaggaaaggccgatcaaggttcttgaagaggcagaacgtcagacccgaaggaagaccatcaagttctacaaggtccaatggagcaatcattctgaagatgaggcaacctgggaacgagaagatcttctccgcgccgagttcccggagctgctcccttag

SEQ ID NO: 89550 - DNA, 2193 bp, Oryza sativa
  Clone ID: PAT_MRT4530_88297C.1
atggcagtgaacgccagcttcagttcccacggttttggtgagggccaccacgtcgctcagcttcgtgacctcgcccgcttcctgggcttctcgtgtcccgagtacacggggtactccgtggaccgtgtcccccctcgctgtgagctctctgtgtacctttaccctcatggaggtatacacggagctggccttcgcccacaccacttcactgtagccaggcccaccctccagatcacgtaccaagacctctcctggactgcgcttcgtcgcttggcccacgactacagccaccgtctcgggggctctgccttccggcagcttccacgccttccttctggccacccagacgccaggtacccttgtccgtacagcgagtctcagccagtgctgactcgcatggttgagctttcggaggctcaggccactcagcacgacctactccttgaggcttaccgctctcttgcccgccgctacgccactctggaggcccgtctgcccgaggagggtgtcacctcagttgacactgtctcttgggactcaggccgcctctgccacgccagccacctatcctcccacagctcccgcggctctgctcgcactcccagtggcccgcgctcccccagctcgcgtgcgccatactcaccagtgtactccccctacccacacccagttagcccctcctacacccccggacacaccccagttgcttcctcccgccgtggcccacgctttatccgcactgcgcggaagcgtgttgttggttcttccaccgtgttccgcttcgactacccagctcccccaccgctagcggccccccgcttcggttttgaggaaggaagagttgagccagaagcaaatcatgagtcagctaatgagcagcgtcaccacagcaaccgttcgcaccgtactgcttcccgcaacacagaagttgagcaaccccgccgcagcaaccgcttgcatcacacagcttcccgtaatacagagatggaacagtctcaccgctctcaccgcactgctagtcacaattctggagaagaacgcctcccttccccacctcatgtggaaaacaacatacagcacttaatggcagttcagacacaaatcttgcaaggattaaccgccgccatagccggttttcagcataatgcgcatggaaatggccaccctcacatgggcaacaatagatccaaactgacagactttctgagttctcgtccgccagagttctctcagaccgtcgagcccgtcgaggctgacgattggctgaaagatgttgatagaaaactcaacttagtgcagtgtactcctgttgagaagacgctctacgcctctcaccagctaagaggacctgctgcagattggtgggagaattactgcaatgcacaccctgaacccactaacattgcttgggatgagtttgctacggctttccgtgcagctcatgtgcctgaaagcaccattgatatgaagaaagaagaattcaacagacttaagcaaggcaacaacagtgtcaatgagtacctaagtctgttcaacaagttggctcggcacttctacttgaggatgccagaaaagaggctaccaaagaatacaagaaacgcaagtctaaccatcagggaaattcttcccgaggcgcacctcgccctcgctatggtcgacccatgcaatatcaccaatcggtcactcaggctaaccgccagccaggctacgcccatcgagaagaaaggcaccgatttctccatagacgatcaaggcacagtttggtgcggtccacgcatctgtgtaccggccaagaaggagttaagagatctcatcctaaaggaagctcatgagtccgcctactccattcatccaggaagtacgaagatgtaccaggatatcaaggcatacttctggtgggctagaatgaagcgagatgtcgcagaatatgtagccctgtgtgacatttgccaaagagtcaaggcagagcatcagaggccagctggtctgctgcaacctctaccgattcccgagtggaaatgggaagagatcggaatagatttcatcactggtttgccaagaacccctagcgggtacgacttgtcgcgtcccaaatcgactctaaaattcatcctcgaaattgtgcaaagaataattaaaattcaatgtgaaagcctccaacaattaaaatgtgcaaagataaaagtcaaatga

SEQ ID NO: 89551 - DNA, 1608 bp, Oryza sativa
  unsure (1)..(1608): unsure at all n locations
  Clone ID: PAT_MRT4530_88298C.1
tccccgggctgcaggaatcggcacgaggagggaagaagaacgagaagacgctcgatcgatcgagaggtttaatctgtccttcctctcgccggccccgtctcctcttcccccgccgccaccgccgccgccgccgcctctagattaaagcagagctacagccaggaggggcgcgcgccgccatggggcttggcaacgtcgccatcctcgtcggctccggaattcttggatcagttcttgtaggtggtgatgccaaactccctagtgctggcgaggtactttctggtgctgccaagtttgtcaagaagcatggaaacgaagggaaagatacatcgtctaacaccgatgcacacaccgctcagctattatctcaggtcaaccatctcagacaggagatacaatctctaggctcaaggcctgttacagttgtcaccaatgctgctagatcaggacctggtacatttactataacagtggtggctgttgctggggctgttggctacgcctacattaagtggaagggctggaaactttctgatttgatgtttgtcacgaagcgtggcttatccgatgcttgcaatgtagttggcagccaattggacaaggtttcagatgatgtcacttctgcaaggaaacatctcgctggaaggattgatcgtgtggatatcagtttagatgaaacacaagaaattattgaagggacaagggatgaggtcacagtcatccatggggatcttagtgctttccaagaggatttacaatcagttaaccttgtagttcggagtctggaatcaaagctcgtgagtctggaatacacccaggtcccagcagcatccgttcctccagctattggatcttcagagctagttgttaggagggtttcttcgttgcctcaatctactgctcttccagttctgccgacaaccacacctgcagctgaaccatcacctagggcagaggcaccacaggaggaacagtggggttttgtgagcagaacatcatcttgtagggaaggatcaggtcgttttcaggagcagcggagtgttgtgaccagaacgtcgtctattagggaaggatctcctgaatcttcaaatggagcctcatcctcaactggagcaagcacaggaacgaacacaagcacaggaacaaacacaagcacgggcagatttggtgggctgaggctgcctggacttgggtttcttgcaagttcgacgagatagttgatgaggtgtttttatttaagttaaaagatggtgctgccaggagctctccattgctttacttgtagttttaggttgtactagtaggagagaagagataacactagcagtgatgtgatggaacaacacatatgcgtgcggggctgggctcctttgttcttgaggaggccaaatttttgtagaaaaaaaagagaggaaaacatgtgctcctatctatctatctatctatctatctatagctatgaatgcatcatccagggcaacaccttggtctttgatgtcgtgatttttaacttgaagtgccaagattactagtacttggttaattaaatttatgncgaggagtcaactggttggttgccaaaaaaaaaaaaaaaaaaaaaaaaaaaaa

SEQ ID NO: 89552 - DNA, 1121 bp, Oryza sativa
  Clone ID: PAT_MRT4530_88299C.1
atggcagtgaacgccagcttcagttcccacggttttggtgagggtcaccacgttgctcagcttcgtgacctcgcccgctttgttggcttctcgtgtccggagtacacggggtactccgtggaccgtgttccccctcgttgtgagctctctgtgtacctttaccctcgtggaggtatacacggagctggccttcgcccacaccacttcaccgtggccaggcccactctccagatcgcgtaccaggacctctcctggactgcgcttcgtcgcttggcccacgactacagccaccgtctcgggggctctgccttccggcagcttccacgccttccttctggccacgcagacgccaggtacccttgtccttacagcgagtctcagccagtgctgactcgcatggttgagctttcggaggctcaggccactcagcacgacctactccttgaggcttaccgctcccttgcccgccgctacgctgctttggaggcccgccgcctctgccacgccagccacctgtcctcccacagctcccgcggctctgcccgcactcccagtggcccgcgctcccccagctcgcgtgcgccatactcaccagtgtactctccctacccacacccagttagcccttcctacacccccggacacaccccagttgcttcctcccgccgaggcccacgctttatccgcactgcgcggaagcgtgttgttggttcttccaccgtgttccgtttcgactacccagctcccccaccgccagcggcccgtgctgctgccggccctcgacagatggttagccgcccccgccgtgctgctcgtgcaccagcccgctttggttttgaggatggtagagttgagccagaagcaaatcatgagtcagctaatgagcagtctcaccacagcaaccgttcgcaccgtactgcttcccgcaacgcagaagttgagcaaccccgtcgcagtaaccgctcgcatcacacagcttcccagttctctcagaccgtcgagcccgtcgaggctgacgattggctgaaagatgttgatagaaaactcaacttagtgcagtgtactcctgttgagaagacgctctacgcctctcaccagctaagaggacctgctgcagattg

SEQ ID NO: 89553 - DNA, 5162 bp, Oryza sativa
  Clone ID: PAT_MRT4530_8829C.1
aacagaatctcgtcctcgagattcggaagaactggcgaacagatacggatgggctgacttcaattcatcttctcgttcccaagttgactcttcttccgagtgattactccattggactttgcaaaaacggataactcgattcctggtccttctctcatttgtttccaagatacggattggtttctcaacataggtcagatcctctggacttctatctgttcaagatagcttcttcggtaggtacccttaaacacttcttcaattgcgacacatggaaaacatcatggactcctgccaaagattgaggtaactctaactgataagcaacctctcctcttctactgacaatcttataaggtcccacaaaacgcggtgccaattttcctttggtatgaaaacgatgaactcctcgaagaggtgtgacacgaatatacacataatctccctcttcaaaactcaaatctctgcggcgattgtcggcataactcttatgacgagactaagccacacgcaatctttcttgaatgattttcaccttttcttctgcttcccttaggatatccgtcccgaaaacctgacgctctcccgtttgatcccacaaaagcggagtgcgacacttccgaccatacagtgcttcgtaaggagccatctgaagactagcttgataactgttattatacgaaaattctgcataaggtagattcttatcccaacttccaccgaaatctaaagcacaagctctcaacatgtcttccaaaatctgattcaccctttcagtttgtctatcagtttgcggatggtaagcagtactaaagttcagcttagaacccatctcttcctgaagtttcttccaaaaatttgaagtaaactgactgcctcgatcagacactattttcttagggacgccatgcaaacacacaatccttgccatatacaattccgctaaccgacttccagaataggttgtctttaccgggatgaaatgagccactttggtaagtctgtcgactatcacccaaatagagtcatggcctgatgacgttctgggtagaccagtgataaaatccataccgatttcttcccatttccattcaggaattttcaaaggctgcagcaaaccggcgggtttctgatgttctgccttgactcgctgacaaacatcacatactgctacgtattctgcgatttcacgcttcatacttgcccaccaaaacctttccttgagatcctggtacatcttagtactaccagggtgtatggagtataaagtatcatgagcttcttttagaattgcatcttttaaatctttgttgtcggggacacagattctctcacccaaccatacagttccatgctcatcctccaagaaaccgatagcttttcctcttctcatattcttcttgatctcttgaatatcaggatcattaatttgggcttctctaacttgatcaattagagtgggcttcgcttctaaggctgcaacgaaacctctactgacaattcccaaatttaatctttcaaattccttgcataattccaatggcaactatcgtccttctgtagcattgcaatagcctttcctgctaagagcatctgctacaacattagcctttcccgggtgataatgaattcccatgtcataatccttaattaattccaaccatctcctttgtctcatgttcagatccggctgagtaaagatatactttaaactcttgtgatcggtatatacctctggacgagtaccgaaaagataatgacgccaaatcttcaacgcatgaactactgcagctaactcaagatcatgagtaggatagttcttctcatgcagacgtaactgacgagatgcataggtaaccaccttcccatcttgcatcagaacacaacctaacccaagtttggatgcatcacaatacacttggaaacccttctttggatcaggcaaaatcaaaataggagctgatatcaagcgattcttcaactcttgaaaactctgctcacattcttccgaccacttgtacttcacatctttctgaagcagtcgtgtcatgggcttagcaatcttggaaaaattctctataaacctccggtaatatcctgcgaggcctaggaaactgcgaatctctgaaactgtctttggttgtttccagttggttacggattccacattactagaatcgacggcaactcctccggctgagatgacgtgaccaaggaacttcacttcaaacaaccaaaattcacacttgctaaacttagcatacagttgatgttctcgtagcttctctaatgcaaggcgaagatgttcttcatgctcttctttggttcgggagtagataagaatgtcatcaataaagaccaccacgaacttgtctaggtactccataaacaccttattcatcaagttcatgaagaaagcaggggcattggtaagtccaaaagacataacagtacattcgaacaatccatacttagtggtaaaagctgtcttaggtatatcttcctctttgattctcaactgatgataccctgatcgaagatctatcttggagaaaatggtggcacctttaagctgatcaaacaaatcatcaattctgggtagtggatacttattcttgatagtcacatcatttagtgcacgatagtccacacacatcctctgggtatgatctttcttttccacaaaaataaccggagctccccatggagatgaactcggtctgatgtatcctttctgaagcaaatcatctacttgcctcttaacttctgccaactcattggctgccattctataaggtctcttatggatcggagttgttccaggtaccaaatctattctgaactctatatcccttttaggcggcataccaggtaaatcgtctgggaacacatcaggatactcccgaactataggaatctcttccaaagttatctggttcagtcttgaccttaaagactcagaagacaatgcatgaacagttacaactcgaccatcattactggtgagagttacttttctgttagcacagtctatcacacctttatgtctggctaaccagtccatccctaggatgacatctaggtctttggattctaacaggataagattggccagaaatggtactcctttaatttctattctgaccgaggggctacgttgcaaagaaagtgcttgattacttggggtactaaccatcaaaggacgtctaagatcctctacttccatcccatgatttcccgcaaaactcatagataagaatgaatgtgtagcaccagaatcgaaaagtactgttgcaggaactgagttaacagggaacgtacccaaaatcacatctagagcatcttgagcttctgcagcagcaacatgattgacacgggcctttgatactggtgcggtagagttgctctgggcagggacaaccttcacgcgtcggggcttcggacacttgtcagcataatgtcctgggtctccacagttgaaacacaccacaagcttgctgccttgctccctcttggcaggttgttgctgtgtcgaggctgcaataaggcgtggagcttgattgcggttgttgttgccagcattgttgttgaagaactgacgctgcggacgaacaacagacgaagaacctccatgtggcatagactggtgtcctaaaataagacgcggcttctgattattcccctgttgtatcttgaattgagcaatccggcgtttcttctgctccatgcgattatacttgtcctcctgacgaatagccttatccactaatttctggaaatcagaataatctccagtcatgagtgggtaagaaagctcatcattaagtccttccaagaacttctcctgacgctcttcatcattgcgcacatcttctggagcataacgagccagacgattgaactcgtgcagatactccgtaacagagcgagatccctgggtgagcgacctgaactccttcttcttgagagacaccactcccgatggtatatgcgtcttccgaaaagcagcggtgaattcaagccaagtgataggttcagcagtagtcctattcagacggaagtgatcccaccattcagaggcagggccatgcaactgatgtgatgcaaatgagaccttctcctgatcagtgcactgaagcaaatccaacttcttctctaaggcatgcaaccaatcactagcttcaacaggattagtggtactagagaaaataggcggcctcacacgaagaaattctgctaacttattctgaggaggtgcatggttatttccctggttctgctggttctgaagttgttgcatcatcatgtgcattagctgagtctgttgagcaagaacttgagcaagggttggattctccccattgttattgttattggggttgttggggttgggaccattcccgttgctgcgagtgttcaccatctggcatggacagggcacaagaagagaaaccgggggaaactttggcgccaattgatagcgagggacaaatagagctctcttccttgcggtaagacgaatcctgaccttctgaggtggtgcttctcccttcaacgcggctagttccttctccaaacgatccaccttgtcttctagcttgcaaatcttaccacgattccaatcttcacgatcttgggccgctaacacagtttccgcacgactttcatccatagcccatagcatctcaaccaaatgtgttgtggtagcatcattctcaattccttcagtctcaaggtaactgccacggtcacttccctgtggttgacgaggatggtaacgatactcagtgtcagccaactgatcactgtaacgatcacggagctctcctatggcgatccttgccacttcctgacatgaatggatgtagtttcttcctccagcttcgaacatcaccgatgggatatcttcactattactgttcaaggtgactttgactcggcacttctcttcatgacgatcatgaggaatctgggcataaaaaggggcagtcccaaatccaacgacaaaggacattgtacgcaactcctggacaaaaccctcaacaccaaacaagtactcaggcttgtagcgcggcatcctgttgcataggcccaaccattctgaacaaccatcccggctgcacagttcttctattatggtgagaagggtgagactaatcacg

SEQ ID NO: 89554 - DNA, 936 bp, Oryza sativa
  Clone ID: PAT_MRT4530_882C.1
ccggccgggatcgctttactctctctgtccctggctttcttcgtctctcttcatgtcgccggcacatatccaccaccggctccaaccctccccaaccgtggcggagccccctccctctaccccggcgcccgtccctccgggctccggcatcctcctgcctatgccgctcggcccgtgcttcgtcgcaccgctgccagggctctcctcctcctgctcagaggcagttcggtgacgagcgggttggagcagcctcgcccctcctcgtctggatccagccgcaggcatggccacatcgccggctcctctactgctcctctcctccatctccctgcgctcaccgttcctgatgagggcacggcgactcgaggcgacggctgcggcgactcggtcttccagactcgtcccgccaccggctacggcctcaacgggcgatgacgggcgacctagccgacggatccatcggcgtggaggtctggggccgtcagatttagccgcatccgacctccatggtgacgggctgacggcgacagcgggttgcaggtgcgacaaatgcccctcctctcctctactttccctcggtggcttggccggtggatccatcggtgtggaggtcggagacaggcggatctgggagatgcgatggtgacgccaccccgtcccgttcttcctcccacaccagaagaaggagcagtgatgataatgaattactcttgtgctttgttgatgtttattcatgcttttttttctaatcttgaggatctgggttgttcatatgttaaaataaggatatggggattattgtttgttgttaatattttcaccttcaatttgaggatctggggcattgtattgggggattggggcattgaggagtcaatgaagagaatcgggctcaataaaatggctcaattcgagccagtcaaagtttaaaaaaaa

SEQ ID NO: 89555 - DNA, 735 bp, Oryza sativa
  Clone ID: PAT_MRT4530_88300C.1
atgccgccgccgccgccgccttcgttggccaggctccaccaacgcctctccctctcgctcctccggggacgctccccccccgcggcggccgacgccttcctccgccgcgggctcgcctcgtccgcctcctcctcctcttccgccgccgccgccgcggcggtggcggcggcggcggcaggccgggagaagagctcgaggaggacgctagcgtacctgctaggcgtggccgcggcgatggtcggcgcctcctacgccgccgtcccgctctaccgccgcttctgccaggccaccggctatggcggcaccgtccagcgccgcgagagtgtggaggagaagatctcacgacatgctcgagacggaacaacaacttcaagagagataattgtccaatttaatgctgacgttgctgatggaatgccgtggaaattcattccaacacagagagaagtgaaggttaaacctggtgaaagtgctcttgcattttatactgctgaaaatcgtagttcagctccaataactggtgtatccacatataacgtagctcctatgaaggctgcaatatatttcaataagatacaatgtttttgctttgaggagcaaacacttcttccaggggagcagattgacatgccggtgttcttctacatcgatcctgagtttgagacagaccccaaaatggaaggggtgaacaatattgtcctttcttacacattctttaaggtgaacgacagttaa

SEQ ID NO: 89556 - DNA, 371 bp, Oryza sativa
  Clone ID: PAT_MRT4530_88301C.1
ctactatggataaaactattgttcacatcatggattaacaaaaagacataaagatcaattcgtccaagtgctgaaatccgattcggccacctgctatattgctgacttcaaactgtcaccaaatgtgcatatacgagctccgtttttggcccgtgagtacttgtcaagtcatcttttcaacagatctagcctcatctccaaattcatttctgtcggctgcaatcacagaaacaatgtgttgcatcacctataatgggtctatgggcttgtaacttcatctggacctagcccaggtggggctctcatgtggggtgcgccgcaacatggtggagcatgaccctatggaccccttggtcgtcctcccacctcct

SEQ ID NO: 89557 - DNA, 1821 bp, Oryza sativa
  Clone ID: PAT_MRT4530_88302C.1
atggatgtgaatgagatatcatgggtacccggtcgagaaggacttgaagatgatcaaggggatctcatcctgtttcggggtggcctcggggttgttcacactcttcgacaaatgctttgtcatgctgatccagtgctcggaggacaatctagccgtggtctcacgcgtaataccctgcatgatcatggagttccatgtaaataccttggaattccactccctgtcaagaaattacctaagaggagccttcagccgctcgtcaatgtggtccacaattgtggctcctctccggataaagcgaaagccttcagttcagccccgaccgatccgcacagccggagcccgggagaagtcgagaagatcatacacccacacctactcgcgccgcgcgcgccgccgtcgacggccgcctcctcctcctcttcttcccccgtgccggcgttcgcgttgcctcctcgatcgcgccgcgccgcgccgcgcgcactcccggcgggcgagctggtttggagagggggcgagacgacctgactccgccctcgattggaatcgaatccaagattgatggcgatggagggaccaatcctgtgtcgtgcagtgatgcaagcgaagctacctgtcacgatgatcagcaattcactgaccaagtctgggcagcttggaactgcattcctgggttctgtgtgtaaatacaggaatatcactagactcatttccccaatctatcagccggcacaaaagaactttgctcctgtttgcggtagcttcagctcgtcgtccgatggtaatggatatatggctggaaactttagtgagagtgatgaagattatgttaattctactgtgctagaagcagttgaggtgagaagtggggcagagggatatgtaatcaagatgcgagatgggaaaaacttgagatgtgtgcacaataattctcaagggagaaatattccagaaagcgcaccacaacctgctattgttttgaggattgaagatggaagtgaaactttacttccaatcattgttttggaaatgccaagcgtacttctgatggctgctattcggaatgtccacattgcaagaccaaccatatatcaagttgtgaaggagatgattgataagatgggttatgaggtaaaactggttcggataaataaaagaattcaagaagcatactgtgctgaactgtttctgacgaaggtaggtgaccatacagaaagtatcacctttgatctaagaccttcagatgccataaacattgctgttcgctgcaaggttcctatacaagtccatagaagccttgcatacagtgatggcataagatcagtcgagccagcaagaatggcgatagcagccggcatgtctgacgggttgttgtttacagaacttgacagacctgatgggcagccatgtgtcgaggctcaagagtttggattgatccggaacatgctcattgcagctgttgaagagagatacaaagatgctgcaacgtggagggacaaactgatgctgctgaggtctaagcggaaaaactgggcctgaaagcgtggctcgtctcaatggtgtaaataaagacgaagcactgttgaatcccagaatgcattccagatgactgatactgtctatgtaattagatgtatatattatatggaactaagaactggattatgtaaattccgactgtttcagtctttcggagtaaagaataatctgtggaaaaaatatgcatgttcttagttggcaagctcacctccattttcacaagtctactattccatgaaaataatatttgccagctcaatgtcctctttcggacttttgttt

SEQ ID NO: 89558 - DNA, 4092 bp, Oryza sativa
  Clone ID: PAT_MRT4530_88303C.1
ctaggttgcctcatcttcagaatggttgctccattggactttgtagaacttgatggtcttccttcgagtctgacgttctgcctcttcaagaaccttgatcggtctttccttgtaggtcagattcttttccagcacgatattacccaggggaacttgttcttctggaacacggagacatttctttaactgggatacgtggaacacgttgtgcacatctacgagaccttcaggtaactcaagctgataagccacttcgccacgtctggcggttatgaggtaggggccgatgtagcggggtgctaacttgccggacattccaaacctcctcataccacggaggggcgatacccgcaggtacacatgatctcctttttcgaactcaaggtcacgcctccgattgtcagcgtaattcttctgacggttctgcgctgtcttcaaacgttctcggatcagcttaacttgttcttctgctgccttgagtatgtcaggaccgaataccagtgcttcgcccacctcattccagcacaagggagtgcggcactttcttccgaacattgcctcattcggcgacatctgaatgctggcctgatagctgttgttgtatgagaactccgcatacggcaaacaacaatcccaagtgccttcgaaatccagggcgcacgcacgcaacatgtcttctaggatttggtttaccctttcggtctgaccatcggtctgcggatggtaggccgtactaaaatttagatcggttccgagggcttcatgcaactgcttccagaaccttgaggtgaactgagtgcctcggtctgacacaattttcttgggacagccaaatctacatacgacatgggtcatgtagagttctgctagtttctttccatcaaaggtggttttcactggcacgaaatgagctgatttcgtgagtcggtccacgattacccagatggagtcgtacccgctaggtgttcttggcaaaccggtgatgaaatccattccgatctcttcccatttccactcgggaatcggtaggggttgcagcagaccagctggcctctgatgctctgccttgactatcttcgtacttcctggatgaatggagtaggcggactcatgagcttcctttaggatgagatctcttaactccttcttggccggtacacagatgcgtggaccgcaccaaactgtgccttgatcgtctatggagaaatcggtgtctttcttctcttgtattctttttattaattcttttatcccttcgtcatctttctgagcctcccggatttgcgattctagggttggctgcaccgtcaagctggcagggacacctgactgtaccacggtcagcctcaacttctccaattctctgcacaggcggtcttggtcaggccgtatttgagctacattactgtaggccttgcgacttagcgcatcaccgaccacattagctttaccggggtggtcatgaattccaagatcgtaatccttgattagttccaaccatcttctttgcctcatatttaactcggtctgagtgaagatgtacttaagacttttgtgatcggtgtatacttcacatctgttcccgattaaatagtgcctctttcgttcttgcattaggacacatcctaagccttgtcttgatgcatcacagaagatctcgaaatcttttcggatatctagcaaggtgagaactggggcagtagtcaaccttttcttcattttttgaaagctgtcttcacaggctgcagaccattgaaatttattttccttctttaacagctcggtcataggtctggctagcttagagaatccttcaatgaatcttcgataatatccagctaagtcaaggaagctgcgaatctctgacacattcttgggtgggttccaagcaagtacagcttcaaccttgctgggatctacttcgacaccgttggaggagatcacgtgtccaagaaatgctactcggtctaaccagaattcgcatttcgagaatttagcgaatagttgatgatccctgagcttttccattatcagcctcaggtgttcagcatgttcttccttattcttggagtatatcaggatatcgtcgatgaacaccacgacaaactggtccaggtattccatgaagattttgttcattaagttcatgaagaatgctggagcattggtgagtccgaaggacatcactgtgaactcatatagaccataacgcgttgagaaagcggtcttcgggatatcttcagatctgattttcagttggtggtaacctgatctcaagtcaatttttgagaaaactcttgctcctttaagttgatcgaacaaatcgtcaatctgtggcaacgggtacttgttctttatagttacttcattcagggctctatagtcgattaccattctctcagagccatcctttttcttaaccagaagcactagggctccccaaggggatgagctaggtcgcacataactcttactctccaattcttcgatttgtcttttaacttctgctaactcattagctgccattcggtagggtctttttgcaattggtgcggtgcctggtgccagttctatggtgaactcaatctctcggtctggtggcatactcgttaattcttctggaaatacgtcgggatattcatagactatgggcaccgactccaaggaggtgacttgtaaacaggttaggatagaccgacttgcggtaggggtgttagaggtaaagcggacttgctttcctccaggtccttgcaaggtgatggacttttcggcacaatctatctgtcctttgtgcttagccaaccaatccatccctaggatgatgtccaagctttgcgagtctaggactatcggtttggctagaaagtcaacttcctcaattctaaggttaacttccgggcatatttgagtggcccttatattcctcccaggggaatgtactatcattggtacacgcaaattttgggttttccaaccatttcttttcacaaaagcttgtgatatgaaagaatggaaagctcctgaatcaaatagaactattgcgggtacggagttgacagagaacatacccatcacgacgtctggagcatcctgagcggtctcagcttgaatgtggttcacccggcctcgaccaaagttgttggaagcacgtgaaccttgtccacttgcctgagagctaggacgaggctgagctgccgctggagtaggagttctggcagtgctgccattagcatgccctgagttggtgttggtaggattctgagggcactgtctggcatagtgacccatctggttgcaccggaaacactgaactgctgacggtccctgcggtgacttgaaagaggtaacactgtttggcgcagtattgccactaggggcacgctgctgtggctgaggtgccggacggttcatctgaggacgaggggcgtagcctggctggcggttagcctgagtgaccgactggtgatattgcatgggttgaccgtagcgagggcgaggtgcgcctcgggaagaatttccctgatggttagacttgcgtttcttgtattcttcggtagcctcttttctggcatcttcaagtagaagtgccatgttgatcatatgttgaaaagtggggaagtcatgagcaagcaactggagtctcattccaacagcgatccctttcaagaatttcctgatcttcttcttgtctgtgtccacttcctcaggggcgtaccgagccaacttgttgaacatacttaggtactcattgacactgctgttgccttgcttaagtctgttgaattcctctttcttcatgtcaatagtgctttcaggcacatgagctacacggaaagccgtagcaaactcatcccaagcaatgttagtgggttcagggtgtgcattgcagtaattctcccaccaatctgcagcaggtcctcttagctggtgagaggcgtagagcgtcttctcaacaggagtacactgcactaagttgagttttctatcaacatctttcagccaatcgtcagcctcgacgggctcgacggtctgagagaactctggcggacgagacctcagaaaatctgtcagcttggatctattgttgctcat

SEQ ID NO: 89559 - DNA, 221 bp, Oryza sativa
  Clone ID: PAT_MRT4530_88304C.1
gggaacggaaaaattcttaaacccaggacaaaaataaaacaggggcattgcccatgtccccaagaaaacccccaaaaaaaccaaaaaatccaaaggaacgataaacccagaatcaaaagcggggtcaacctccaagtcccccaccaatttcccgaaaaaaaaacccaccaaccggccctcaagaaaccccagtaccagagccccagccataaacacacctt

SEQ ID NO: 89560 - DNA, 2292 bp, Oryza sativa
  Clone ID: PAT_MRT4530_88305C.1
gtggccggcgccgacggcggcgcgagcacggacttcgccgtggtggacctgccggcggccgccgtcgccgccgccgccgaatccgtgcgaaaggcttgcgtggagtacccatgcttcaacgtggccacccctggcgcggaggcgctgccggataaggtggtcggggtgagcagcaagttggacgagcatccgttgggggagatgatggcgagggtgtggaagagaagctacccggggtacgccccacgtgtggcggataagctggaggggttgagcaaaatcaactgagagctctacacaaactactgtatcgaaaatattgaaaccttatgctatttcccatgttggaagcagataattcattgacagcacgttactgtacctgcgcttgttgcaaggctcttctctattcatgttgtgcgttaggtgctactagttagattcttttaatgcagacaggtcagtatttggttaaatatgtacccgccttagactatcgagacagatttttgctcttaagggttttcagctcgaccggacaaaacattaccagtacttgcagttgccaatgcatttgtatagagtcttttatataaagagttggatagtcctttcacgcttaaggaagacactcataaaattgaagggcccctaatagtaaaaatcggcgatttgctacaaaggtggactaattgtgttttcaggtcaacactgcatcacctttttgcgtttggtatagaccgctagtttgtggctttcatacttcacacaaactttgatttagtggttcagtgctaggaaagctgaggcagtgaggcatgcccaccgaggtgggtccgtgaggagagggagacacgtgggtgggccgcagggcgagcgtccgatcctggcgcacccgcgccggtcgaccgagaactagcattctcggaagcggacagcagcagaagcaacaagcagcaaccacttcccggcgggagaggcagctggaagccggagatggtcgccgccgccggagatcgcctggatctccccgtggtggacctcgcgtcctccgacctccgatcctccgccgaatccatccgaaaggcttgcgtggagtgcggattcttctacgtggtcaaccatgggatcgaggaggggttgctggagaaggtgttcgcggagaacaggaggtttttcgagcagccgctggaggagaagatggcgctgctgaggaacagcagccacctggggtacaccccgccctacaccgagaagctcgacgcctcgtccaaattcagaggagaccttagtgagacattcaaaattgggcctattggagacgaaggttttcagaatgatgctaaccaatggccttctgaagagcgcctgccatgttggaaggagacaatgaaactgtaccgtggaaccgcactgggtactggcaaacggatactctctctagttgctctgagtttgaatctagacgctgaattctttgactgcccattggcatttcttcgattgttgcactacccaggtgaaatcaacgagtccgatgatggcaactatggagcatcagctcactcagattatggaatactaacccttctagcaacagatggcattcctgggctgcagatatgcagggagaaggataggcatccccagctctgggaagatgttcatcacatcgatgggtctacactgcatcgtgttgtggcagttggtaaagagcgatactctgtggctttctttcttgacccagaccctgatttagtggttcagtgcttggaaagctgttgtagtgaggcatgcccaccaaggttcccacctataaaaagtggagactatttggaagaccgattgagggctacatacaaataatcctacgttggctgcgtacatccatgttggatgtaaaggccaggttttaatccattttctgaaaaacacaaataatcctacgtttttaaatgtgtaaagcttaagattagtgaacttcagtgagcagctattccgttgagatggacggaaacatcttgatcttatatgtagcccatctgctgttgctgatttctcgcgtgtgttaatactagctttacttatgagcaatcatgtcagcatctggtgaaatttgtaaccgccttcgagtgtcaacatatatttttgctcttcactgttttcaggaagactggacataacctccactgtattttctgttgccaaaacattggtatagagttttttgtataaagattcttatgatgctttcacgattaaggaagacacaaataaagtaactttgctctc

SEQ ID NO: 89561 - DNA, 4974 bp, Oryza sativa
  Clone ID: PAT_MRT4530_88306C.1
ctaagggagcagctccgggaactcggcgcggagaagatcttctcgctcccaggttgcctcatcttcagaatgattgctccactggactttgtagaacttgatggtcttccttcgagtctgacgttctgcctcttccagaaccttgatcggtctttccttgtaggtcagattcttttccagttcgatattacccagggggacttgctcttctggaactcgaagacatttctttaactgggatacgtgaaacacgttatgcacgtctgcgagaccttcaggtagctcaagctgatatgccacttcgccacgtctggcggttatgaggtaggggccgatgtagcggggtgctaacttgccggacatcccaaacctcttcataccacggaggggtgatacccgcaggtatacatgatctcctttttcgaactcaaggtcacgcttgagtatgtcaggaccgaataccagcgcttcgcccacctcattccagcacaagggagtgcggcactttcttccaaacattgcctcattcggcgacatctgaatgctggcctgataactgttgttgtatgagaactcagcatacggcaaacaacgatcccaagtgccttcgaaatccaaggcacacgctcgcagcatgtcttctaggatttggtttaccctttctgtctgaccatcggtctgcggatggtaggctgtactaaaatttagatcagttccgagagcttcatgcaactgcttccagaaccttgaggtgaactgagtgcctcgatccgacactattttcttgggacaaccaaacctacatacgacatgggttatgtagagctctgctagtttccttccatcataggtggttttcactggcacgaaatgagctgatttcgtgagtcgatccacgattacccagatggagtcgtacccgctaggggttcttggcaaaccggtgatgaaatccattccgatctcttcccatttccacccggggatcggtaggggttgcagcagaccagctggcctctgatgctctgccttgactctttggcaaatgtcacacaaggctatgtattctgcgacatctcgcttcattccagcccaccagaagtatgccttgatatcttggtacatcttcgtacttcctggatgaatggagtaggcggactcatgagcttcttttaggatgagatctcttaactccttcttggccggtacacagatgcgtggaccgcaccaaactgtgccttgatcgtctatggagaaattagcgtctttcttctcctgtattctttttattaactcttttatcccttcgtcatctttctgagcctcccggatttgcgattctagggtaggctgtactgtcaagctggcagggactcctgactgtaccacggtcagccttaacttatccaattctctgtacagatgatcttggtcaggccgtatttgagctacattgcaataggccttgcgacttagcgcatcagcgaccacgttggctttaccaggatgatagtggattccaagatcgtaatccttgattagttccaaccatcttctctgcctcatatttaactcggtctgtgtgaagatatatttaagacttttgtgatcggtgtatacttcacatctgttcccgattaaatagtgcctccagatcttaagtgcatgaaccacggctgccaactcgagatcatgggtgggataattgacttcatgaggcctgagctgcctggatgcataggccacaacctttcgttcttgcattaggacacatcctaagccttgtcttgatgcgttacagaagatctcgaaatcttttcggatatctggcaaggtgagaactggtgcagtggtcaaccttttcttcatttcttgaaagctgtcttcacaggctgcagaccattgaaatttcttctccttctttaacagctcggtcataggtctggctagcttagagaatccttcaatgaatcttcgataatatcccgctaagccaaggaaactgcggatctctgacacgttcttgggcgggttccaagcaagtacagcttcaaccttgctgggatctacttcgacaccgttggaggaaatcacgtgtccaagaaatgctactcggtccaaccagaattcgcatttcgagaatttagcgaatagttgatgatctctgagcttttccattatcagcctcaggtgttcagcatgttcttccttgttcttggagtatatcaggatgtcatcgatgaacaccacgacaaactggtccaggtattccatgaagattttgttcattaagttcatgaagaatgctggagcattggtgagtccgaaggacataactgtgaactcatatagaccataacgcgttgagaaagcggtcttcgggatatcttcagatctgattttcagttggtggtaacctgaccattctctcagagccatcctttttcttaaccagaagcactggggctccccaaggggatgagctaggtcgcacataacctttactttccagttcttcaatttgcttttaacttctgctaactcattagctgccattcggtagggtctttttgcaattggagctgtgcctggtgccagttctatggcgaactcgatctctcggtctggtggcattctcgttaattcttccggaaatacgtcgggatattcacagactatgggcaccgactccaaggaggtgacttgtaaacaggttaggatagaccgacttgcggtaggggtgttaggggtaaagcggacttgctttcctccaggtcccattacaacgtctagagcatcctgagcggtttcagcttgaatgtgattcacacgtcctcgaccaaagttgttggacgcacgagaaccttgtccacttgcctgagagctaggacgagactgagctgccgctggagtaggagttctggcagtgctgccattagcatgccctgagttgttgttggtaggattctgaggacactgtctggcatagtgtcccatctggttgcaccggaaacactgaactgctgacggtccctgtggtgacttgaaagaggtaacactgtttggcgcagtattgccactaggggcacgctgctgtggctgaggtgccggatggttcatctgaggacgaggggcgtagcctggctggcggttagcctgagttaccgactggtgatattgcatgggttgaccgtagcgagggcgaggtgcgcctcggaaagaatttccctgatggttagacttgcgtttcttgtattcttcggtagcctcttttctggcatcctcaagtagaagtgctttgttgatcatatgttgaaaagtggggaagtcatgagcaagcaactggagtctcattccaactgcgattcccttcaagaacttcctgatcttcttcttgtctgtgtccacttcctcaggggcgtaccgagccaacttgttgaacatacttaggtactcattgacactgctgttgccttgcttaagtctgttgaattcttctttcttcatgtcaatagtgctttccggcacatgagctgcacggaaggccgtagcaaactcatcccaagcaatgttagtgggttcagggtgtgcattgcagtaattctcccaccaatctgcggcaggtcctcttagctggtgagaggcgtagagcgtcttctcaaccggagtacactgcactaagttgagttttctatccacatctttcagccaatcgtcagcctcgacgggctcgacggtctgagagaactctggcggacgagacctcagaaagtttgtcagcttggatctattgttgctcatgtgagggtggccatttccatgcgcattatgctgaaaaccggctacggctgcggctaaaccttgcaagatttgtgtctgaactgccattaagtgttgcatgttgttttccacatgaggtggggaagggaggcgttcttctccagaattgtgactgacagtgtggtgagagcggtgggactgttccatttctgcattacgggaagctgtacgatgcgaacggttgctgcggtgagactgctcattagccgactcatgattttcttctggctcaactctaccatcttcaaaaccaaagtgggctggtgcacgagctgcacggcgggggcggctagccatctgtcgagggccggcagcagcacgggccgctggcggtaggggagctgggtagtggaaacggaacacggtggcagaaccaacaacacgcttccgcgcagtgcggataaagcgtgggccacggcgggaggaagcaactggggtgtgtcctggggtgtaggaagggctaactgggtgtgggtagggcgagtacactggtgagtacggcgcacgcgagctgggggagcgcgggccactgggagtgcgggtagagccgcgggagctgtgggaggacaggtggctggcgtggcagaggcggcctgagtcccaggagatagtgtcaactgaggtgacaccctcctcggccagacgggcctccaaggcggcgtagcggcgggcaagggagcggtaagcctcaaggagtaggtcgtgctgagtggcctgagcctccgaaagctcaaccatgcgagtcagcactggctgaggctcgctgtacggacaagggtacctagcgtctgagtggccagaaggaaggcgtggaagctgccggaaggcggagcctccgagacggtggctgtagtcatgggccaggcgacgaagcgcagtccaggagagatcctggtacgcgatctggagagtgggcctggccacggtgaagtggtgtgggcgaaggccagctccgtgtatacctccacgggggtaaaggtacacagagagctcacagtgagggggaacacggtccacggagtaccccgtgtactcgggacacgagaagccaaggaaatgggcgaggtcacgaagctgagcgacgtggtgaccctcaccaaaaccgtgggaactgaagctggcattcactgccat

SEQ ID NO: 89562 - DNA, 289 bp, Oryza sativa
  Clone ID: PAT_MRT4530_88307C.1
cgcgcgcggaggggaggggctcgagacgagcggtgacacaacgacgttgcgcggcgacgcgatgcaacggcgacaagacgcgacgcgcggggctcgagagcgacgcgacggcgtggcgacacgacggcgcggcggcgcggggctacgcgcggcgggcgagcggcgcatggtgacggcgcgcggcgcgatagcggcgatgggacgggcgcgcggcggcttggggcgcgaggccgacggtgacaggcgagcggcgcagcagcgacggggcggcgggcgcgacgacaagtga

SEQ ID NO: 89563 - DNA, 1966 bp, Oryza sativa
  Clone ID: PAT_MRT4530_88308C.1
atggcgccgaagagggagaagaagaagaagaatctagcggcggttcatcctcccccacgcccccggaacacagtgacattacgtcttgaaggtactgaggaagagttcttggaaaatttcaacagatgccaggctcattttcaatattggcttctcatgaattcacccttccgcatacgttttggggaccaagttatatacactacccctttggatgggacattttactatgtcctgcaacatgaaggtcgctatgtcatactcgtagtattagccaggatggcatggctaattggtttttgtactacaaatggatttttccaaatggaatttgaagatttgatgggcctttatatggatagtgtccacagccaccttctcagattcaaaggaaatcaccataccatatcgcccaatgggacaggaaacactactgttaatttgcaattcattagaaaatgcttccacggattgtgtacatttgttccaagcaagtgtcaggacccaaaggacttgccagtgtggattggtctttttgttgtgctgattatggaatccaaatctcgtgaaatccataggcgtcattgccatgcaatccttgaggtgatcacaccggagttgggtagagactatgtcaatagttttatcaagaactggagttcaattagtgctcaagtgatggggtccttgacgaatttaacacaccatccacatgactgtggcattgatgtattggttacattggatgatctgattcaggtattttattaccttcatgttgatgcttggaatggaggattgtttgagcatgacagtctcgcaccccctccgagagagatgaaatggtctccagttgaccccggcgtgggtgatgcaaacataagattacctcaggagccagcattacatggacgtggacacaagcgtacttctgcgccatcggcagagatgtgttcaaagcgagcacggggtctcttaggaggtgggcttggaggacccccttcagcaccagatttttttgttcgatatgtgcaagggggagatcaaatgcagaaacaagaatgtgatcacttggtttctcatctagtctcatttggcatcacgtgtaaagaacgccatacgaacacctgcaccaacttccctagtaaagtttggccagcttgaagacattcgacgctaccttgaagttgcgaatctgctatgcgacattagcttctccttctcagtggtgttcttggttatcattggttcagttctggctctgtacggtactgatcctgtatgccatttccttccttctgagctggttactggaggtgctggtgatgacgaggcatccactttgttgcaagatcatcaattattttctgacatgcttcagcagcagctgtctaaggccaaaaatagaatgaaacattatgctggtgtttcaagtgggagatcaagtgtatttgaagttctaacctatgatcagaaatcagttgcttcagctttacccaaattagcttttaagtattttggtccttttccatcttgtttcgcattggggaagtggcatacaaattgcaggcttcctggagattcatttatccaccctgtctttcatgtctctcagctcaagcagtttgtgccagctcatgttccgatcttttctcaattgccctctccatttcaacagcacattagagaactggaaccatctgcaattctgaattgctgtcttgttaaaaagggtaacactgttcacactcaagtgttggtgcaatggggagaaatgccatcggcttgtgctacttggaagattaccatgatatgtaagcttgttttttgtcatcgcctcaagggggtggcaatgtcacaccacagggtgtgttacaggtggaagaatcaaggcctggagctagaggtaggagacgatgggaaggtgggaaatggaaatgcatatcctgaagaaggcatcgtctag

SEQ ID NO: 89564 - DNA, 1962 bp, Oryza sativa
  Clone ID: PAT_MRT4530_88309C.1
atggcgtccactgaaactatcaaagaattcttcaacgtcaatggccagataatcggcgccgccgtgcttgccgtgctcgctatggtagtggtggcgctcggcacgtacggccgtcattgcagccacccggcgctccgcctcttcgtgtggggcgcctccaccgtcttcctcctgctctccacctccatcatctccaatttgctcaagggggtccaggactgggtgggcactaccaggaggaacatcttcgtcgcgttctgcatgctcggcctcgccaagttgctgctcaacctgttcgcgtcatggcgggcgagcagctcgttcgccgttggcaagaacgcccggcttgtctccggctacatggagcagctcgaggaagagggcgacgaggtcggcggccatgaccaggtgccccgttacatagtgacgggggggaaggaggagcacgtcgccacgggcgcccgcggataccgcatcaggcgggacgccctggacgatgagtccagcagcctcgtgacgctggaccgcgtgtggcggatggcggagcacggcgatgtcaacggcctcctcgccaagcggcccgagctcagggacctctgcctctccttctccctgttcaagagccttcgccggcagctgtcaggctatcccctggacgacgcgggctctaccaaggcccttgagttcgtgctgcgaggcatgaacgccgccggctctgcctgtgccgtcaacgccgaccgagtgttccatgttctcgtcgacgagctctcgtttgccagcgacttctacttcgctgggcttccgctgtgcacttacagcgggtggtgcgccgccctgaactacatcttctccgtcctaatcgttgtcggagccaccgccgtgggaacaatatataaagtggaaaagattttgccattcaaagaagggaagcctaactttgtcgtcacgttcgccctcctggtggcggtggcgctcgtcgaggtatgggacatcgtcgccggcgtgtgctccaattggagtaagatggccttgctcggccactacatcaggcacgagccacagtggcgtcggtgtcgccgcgcccacgcggcgctcgacgccatgctgcggttcaggcccgcgaggcggtggcgcaacaagatcgggcagaactcggtgctggagccccgccgcttctgccggcggtccggccttctctccgagaagctctacggccgcgccgggctcatgaggtcggtggaagtctcgccggcggtgaaggacacggttctcaggtccttgatgagcagctacggcaggtcgagcagaggacgcgcggcggagcggcgagtcggcagcaaggtcgactggctgtggtacggctcccgaaagagctgggcgtccgacgacggcgacggctgcgtcagcaccaccgacatcatcctcgcgtggcacgtcgccacgaggctctacgagatgagatgctcgctgcacgcttcgtctccgacgccgtcggcatcatcgtcggacatggccgccgcgtgccacctctccaactactgcgcgtacctggcgtcggccgcgccggagctgctgccggacatcgccacgtggaccgagaaacggtacagggaggacagcgccgccggtgagacgacgacggcgcagcagaggtacgagcggctcgtggcgacgctgagcgccggcgcgcgcgacaaggcgctgcgtcgcggcgcggagatcgcgcgccgccttgcggaggagtacacgaccgccgccgaggacgacgacgaggcgtcggcgtggctgttcctggcggatttctggtcggagatgatgctctacgtggcgccgtcggagaacgtcaaggggcacgtggaggccatggcgcgcggcggcgagttcgtcacgctgctctgggcgctgctcctgcacgccggcatcaccgctaggcctgaggcgccaagccgtattatcccgtag

SEQ ID NO: 89565 - DNA, 646 bp, Oryza sativa
  Clone ID: PAT_MRT4530_8830C.1
atgccgacgacggaggcggcgccgccagacggcgagccggcgaggatggacggtcacagccgacgtcggacaccggcgcaagccgacgagccggggaggaggaaggggcggccgaaaggacgctggcgacgaagaggatggagaggccggcgcggcgacggcgttccggcgaaaccgaggagcagccggggtggagggcgatgcggcgacgccgagggaggggacggcagcgccggctgatgcacgggcgcggcggaaggggctgccggaggagacgtcgacgaggaggaaggagaggccggcgcgggcgacggtgttccggcgaaattcgggcgaggaggaggtgatgccggggatgagggcggcgtcgcggagccgagggaggtggtggcgacgtcaaccggcgctcaggcagggagacagaggcgcctggaggcggccggcgcggaggaaagggaacggcgacggcgggaacgcagctccgggggtctccgcgggaaacggagggcaagccggggaaggggaggccgccgcgatgctggaggaggcgacggcgcggccggccggcgcgctggcgcggcggcaggggcggctggaggcggccggcggcacgggagagaggggacgacggcggggagggggctag

SEQ ID NO: 89566 - DNA, 1256 bp, Oryza sativa
  Clone ID: PAT_MRT4530_88310C.1
cggacgagaacaaaccaaaccttagctcctctcgctttggcttctcaccccgcacagccaactcttcccgtccatctcaatctccactgataatcgagacacaggccatgccgtgggtgcgcttcctcgtccggttggtcgtcttcttccgcgtcatcgtgtgagagcaagctaaagctactcgatccgtcgatcggccggcggtgactgactgagaatgtgcattggtttccaagggagcaggaggagtagcagcgagacgagcgccgccgacgcggtgatgagaagtggcgccatcgcgtactaccacacgctgaccaaggtttgccaggccgagtacttccgtcaccttctcaagcccgtgacgtaggttgaccagtacataatcctcctcccttcttcacccgacgagagagctagctgcgcagcttctctcacaagaaaaaaaacagaggagacaaacagagtttggaagttaagagcagaagaagatgcagggagaccacgggtactacggcgggagggactcgccgccgcaggggtacggctacggcggcggctacggctacggaggcgggtatggctacgacgccggtgggtactactccggcggcggcggcggctacccgtcggctggggcggcggcggcggcgtacgaggacccgatggtcgggaggaggacgcacgacttcccggcgccgatgaacgagctggagttccagccgtcggccacgtgccccaagaactacgtcatcttcgaccagacgtgcaccaagagccgggtcatgttccacccctcgctggcgcacaagttcggcggcgggtcgtcggcgtacgacaacaacgtgtacggcggcggcggagcgcacgacgccgccaagggcgcgtacagggacagcgtcggctacgacgacgacgacagctgctcggtgcggcagaaggaggacacggacgagatcgacgcgctgctgagctcggaggacggcgacgaggacgacgtggtgagcacggggcgcaccccggggtaccgggacggcagctccccggactcgacgtgctcgtccagctacggcggcgggcaggcgaggcccgggcgcaagaaggagcgcatgaagaagatggtgcggacgctcaagggcattatccccggcggcaaccagatggacacgccggccgtgctcgacgaggccgtccggtacctcaagtctctcaaggtcgaggtcaagaagcttggcgtgcgcggctccgacaactga

SEQ ID NO: 89567 - DNA, 1422 bp, Oryza sativa
  Clone ID: PAT_MRT4530_88311C.1
atggcgacggaaaattcttcccctgcttttacggacttcttgccccgtgcgctcagcccgattccgtttgttgataaaggggacataatgatgaatattgatcaagctgaggattcatgcagtaacattagtggtgcttcgagatcttctcagtctcatactgatcaaactgaggattcaaaaggaaatgaactatgtactcgtgtcaaggctgttacggatgtatcatgtggtagtgaattacaagatacttgtgaagaagaaggcatcatattatggccaggtctcaagatgagctttcctcaagcccctctagtcaggatccaggacaatgaacttgattacgcgtacgtcgatgtttctgaaacttctattggcaattcatttttcattacacagttcaaccttcctttgtcacttcctgtttatgttgtcctctgtctatcatttcctgtgccctctcgaaatgcatgcaaacaactggcagctaatcctgaggcccctctgtttcgcctgcctcctttaggatcctatgaaaaagaaatgtgcggacctgtattgcttatatgcaacgtccattctcctggaatgagttgtttctctccatataccaagagcaccttctacagggagaatatggagattgatattgacgatgtgttgtactccaatggtagctggttcttactaagggaggcaaatataatcagcctttggaatgttaacacagagaagcgatggtttgttggcgaagctgaggagattattcatcagggatattttatcgggaacccaccattcgatgtgacaatagctcttgcgcgacaacatcccccaaagctcggagaagaagctataactgcaatctggctcagatcggttaagattggtggctggagcaaagggtcggtgaggtgtgattatgagcacagcgggttgaatagcctcaccattcatcagggcatgcttttttggttaactgacagcggttcgttgtgttgtgcgaggcaaacatctgagggcttagaacttatgatttggaacggctcagtgagaatatatgggatgaacttttcactggtaaagcattttgatgacctatacattgtgaacggtggcggttttttcccaaatgaagtagctaaatcataccaaatcgtcgttggagatgagcttcttgttgatgaaaagaggttgaaggggaaagacgtatttacagtctcaagacaaggaggttttgtactcccatcatccgaagcggataatggcaagttattcactggaaacatgataccggatgtcgactgctctatgtacagctggaaaaacaatcaaaatgaaattataaagccctgccactttcttcgccacgctacctgtagcagtgtttgggctatgctgcgtaccaagaggcgaacctag

SEQ ID NO: 89568 - DNA, 297 bp, Oryza sativa
  Clone ID: PAT_MRT4530_88312C.1
gcgtccacgcgtccggccgccgccgcgttcatcggcgcgctgcccacggtcgatgtgtcctagcccgccacggcctgcgccatctgcaaggacgacctccccctcgctgcccccgcccggaggctcccctgcggccacctctaccactccgaatgcatcgtgcagtggctggagatgcgcaactcctgccccgtctgccgctcccgcctcccgtccgacgagccccaggacgcggcggcgccgtctgacccgggccccgcgcccatgcggatcacgatcaggctcagcaccaaccga

SEQ ID NO: 89569 - DNA, 1052 bp, Oryza sativa
  Clone ID: PAT_MRT4530_88313C.1
gaattccgaacaacaaagccgtcctcttctgaccaaaaagaccaaagccatggcgccttccctcgccacctcttccaccctcgctctcttcctcctcgtcgccgtctccatcgccgacgccgcgacattcgccatcaccaacaggtgccagtacacggtgtggccggcggcggtgccatcgggcggcggcacgaagctcgacccggggcagacgtggaccatcaacgtgccggccgggacgacgggcgggcgcgtgtgggcgcgcacgggctgcggtttcgacggcagcggcaacgggcagtgccagacgggcgactgcggcgggaagctgcggtgcacggcgtacggcgcggcgcccaacaccctggccgagttcgcgctgaaccagtggaacaacctcgacttcttcgacatctccctcatcgacggcttcaacgtgcccatggccttcctccccgccggcagcggcgccgggtgccccaaaggcgggccgcggtgcgccacggccatcacgccgcagtgccccagcgagctgagggcgcccggcgggtgcaacaacgcgtgcacggtgttcaggcaggacaggtactgctgcaccggatcggcggccaacagctgcggcccgaccaactactcggagttcttcaagcggctgtgcccggacgcctacagctaccccaaggacgacgcctccagcacctacacttgcccggccggcaccaactaccaggtcgtcttctgcccatgatcgaacggccgcgcgcgcggctgatcgatcgatctctgatgatcttgggatttgtatgatcgatgcatgtgtggatgtaaccgtgatatacgtacctaagaataagctcgcacgcgcaaacgaggataagtttatgttatcgatctttgaataagtaaaaacaactgggtttatgaattgatatatatgaacgatgactttcagtaagataaacacggttaattacgtgttcgatcagccatatgttattatgcgtgtaactatggaaactattctaactataaaaattaagaagacggaattc

SEQ ID NO: 89570 - DNA, 1557 bp, Oryza sativa
  Clone ID: PAT_MRT4530_88314C.1
atggccgccgccgccgccgccgcgtcaacgtcgcgccttctcctcctccgccaccaccaccacgccgccgccgacgggtcgaagcagcagcagcagctcaggtattcctccaagccgtcttctctcgctctgccccggctgcgccttttgccggcggccggggcgctgctgcccgaccgggtcaccccgttctcctacgaggaggacgacgagtccgacgaccacccgcgcgaggagtgcgggctggtcggggtcgtgggggaccccgacgcgtcgtcgctctgctacctcgggctgcagaagctgcagcaccgcggggaggagggtgccgggattgtcgccgtcgggggtgacgggaagctcaagtcggtcaccgggctcggcctcgtcgccgacgtgttcggtgaccccgcacggctggcatcgctccccgggccagccgccatcgggcacgttcgggcaggtcgccgtcgcgcacaacgcaacctcgtcaactaccaggcgctgcggaacaagctggaggcgaggggctccatcttcaacacctcgtcggacacggaggtcatcctccacctcatcgcgacgtcgctgtcgcggccactgctgtcccgcatctgcgacgcgtgcgagcgcctcgcgggggcctactcgctgctgttcctgacggccgataagatgttcgccgtgcgcgacccgcacgggttccgcccgctggtgctcggccgccgccgcaacggcaccgtcgcgttcgcgtcggagacttgcgcgctggacctcatcgaggcgacctacgagcgcgaggtggagcccggggaggtggtcgtcgtcgaccgccgcgacatgtccgtctcctcagcgtgcctcgtcccgcaccgcccccgccgctcctgcgtcttcgagcacatctacttcgccctcccaaactccgtcgtcttctcgcacgccgtccacgagcgccgcaccgccttcggccgcgcgctcgcggaggagtcccccgccgcgggcgccgacgtggtcatcccggttcccgactcggggttctacgccgcgctcgggttcgcgcgcgcgtcggggctggagttccagcagggcctcatccggtggcactacagcggccgcagcttcatccagccgacgcaggcgatccgcgacctcgccgtgaagctcaagctggcaccggtccacggcgtgatccgcgggaagagcgtggtggtggtggacgactccctggtgcgcggcaccacctcgagcaagatcgtgcggctgctccgcgacgccggcgcgcgcgaggtgcacatgcggatcgcgagcccgccggtggtgggctcgtgcctgtacggcatcgacacgcccagcgagggggagctcatctccaaccggatggatctcgagggcgtccgccgcgagatcggcagcgactcgctcgccttcctctcgctcggcaagctccacagcatctacggcgccgaggcggagggctactgcgacgcctgcttctcgcgcaactaccccgtgctgcccacgctgcccgagccggtcgtagagctcgaggagtga

SEQ ID NO: 89571 - DNA, 1841 bp, Oryza sativa
  Clone ID: PAT_MRT4530_88315C.1
caacaccggataaaaattgccctgatcaaatatactgaagtagtagtagcaccaaaattccatgtccatacaaattctgatccattgcctaacattacgacggatgcagagaagccgtagagcatagcagagcagagctgacctactcgatcactcactcactcaccagtgtgaccagttcactcctcgagctctacgaccggctcgggcagcgtgggcagcacggggtagttgcgcgagaagcaggcgtcgcagtagccctccgcctcggcgccgtagatgctgtggagcttgccgagcgagaggaaggcgagcgagtcgctgccgatctcgcggcggacgccctcgagatccatccggttggagatgagctccccctcgctgggcgtgtcgatgccgtacaggcacgagcccaccaccggcgggctcgcgatccgcatgtgcacctcgcgcgcgccggcgtcgcggagcagccgcacgatcttgctcgaggtggtgccgcgcaccagggagtcgtccaccaccaccacgctcttcccgcggatcacgccgtggaccggtgccagcttgagcttcacggcgaggtcgcggatcgcctgcgtcggctggatgaagctgcggccgctgtagtgccaccggatgaggccctgctggaactccagccccgacgcgcgcgcgaacccgagcgcggcgtagaaccccgagtcgggaaccgggatgaccacgtcggcgcccgcggcgggggactcctccgcgagcgcgcggccgaaggcggtgcggcgctcgtggacggcgtgcgagaagacgacggagtttgggagggcgaagtagatgtgctcgaagacgcaggagcggcgggggcggtgcgggacgaggcacgctgaggagacggacatgtcgcggcggtcgacgacgaccacctccccgggctccacctcgcgctcgtaggtcgcctcgatgaggtccagcgcgcaagtctccgacgcgaacgcgacggtgccgttgcggcggcggccgagcaccagcgggcggaacccgtgcgggtcgcgcacggcgaacatcttatcggccgtcaggaacagcagcgagtaggcccccgcgaggcgctcgcacgcgtcgcagatgcgggacagcagtggccgcgacagcgacgtcgcgatgaggtggaggatgacctccgtgtccgacgaggtgttgaagatggagcccctcgcctccagcttgttccgcagcgcctggtagttgacgaggttgccgttgtgcgcgacggcgacctgcccgaacctgtacccggccaggaacggctgcacgttccgcagcgacgcggcggcgccggcggtggagtacctcacgtgcccgatggcggctggcccggggagcgatgccagccgtgcggggtcaccgaacacgtcggcgacgaggccgagcccggtgaccgacttgagcttcccgtcacccccgacggcgacaatcccggcaccctcctccccgcggtgctgcagcttctgcagcccgaggtagcagagcgacgacgcgtcggggtcccccacgaccccgaccagcccgcactcctcgcgcgggtggtcgtcggactcgtcgtcctcctcgtaggagaacggggtgacccggtcgggcagcagcgccccggccgccggcaaaaggcgcagccggggcagagcgagagaagacggcttggaggaatacctgagctgctgctgctgcttcgacccgtcggcggcggcgtggtggtggtggcggaggaggaggaggcgcgacgttgacgcggcggcggcggcggcggccattcgtgagtgggggaaggggagcggcgcgagggattg

SEQ ID NO: 89572 - DNA, 1223 bp, Oryza sativa
  Clone ID: PAT_MRT4530_88316C.1
ttttttttttttttttttttgaactcaaatcaaatcgaacatttttcacagattaaaatgtgatgaacatcttctacatcatgtacaacacgagcgatttttttttctgattccacgttttttgcatttgagatcaaagaccgaagaaagcactggattcactgttgcagccttgcaggtgaagagcacaacagatccaggaagtacaatgtgtgaaaacagtcatggtatggtgcctacattctttagccatcccctcccgagcggcctcaaatcgctggatcttcaagtgcggcagtggagaaattgttgattcgtggatatgctgccttttcgtccagttggttttgagtccaaattaacatctttagaaggctagggagctttggatctttctcatgactttggcttgtaagaatggcagcattaacttcacttgcggtcttcaatcgttgggaaacatccaatagttccccatatggacagttctttatatcttcaaaaaccaaaagtgctacagttttctctatttcttcaagaaagacttgattttcttcgcctcttggagcgagttcttcttgtgcaaactccaaagcttcatttatttttcccgcacgaatcaattctattagcttctgttgttgcagatgaaagtacagttggggatttgtgtccagaatcgtgggattaagatcgttaatcttctcgatggcctcctgaacattccctgattgcaccgctctcttcacctccatccgatccgtgatggtggccaggtcaatatccggttgggtgccggactcgacgcggaacttgtccgcagcgtcgacgaagccctcggtgacgaggaagttcatgacgaggcggttcatgtcctccttgcggatcttgacgtcgcggagcttccgctcccactcgtcacgcgtcaccagcttcttggaggacgccatggaggcggcgggggagtcgatggagtccaggtcgcggaggacgatgcgggagaggaacatcagatgcgcggggggagcggggagaggcagaggcgaggcgaggcggggcgggtgtccagggccgatcaagccgtcgccatccgccggcggcgaggggctcgggaggctagggtttcgcggggtaggggaggatggatccgacggagacttggaggagcaaggaaccgagagctggactgcaggagaagagagtaggttcccggccgggagacg

SEQ ID NO: 89573 - DNA, 468 bp, Oryza sativa
  Clone ID: PAT_MRT4530_88317C.1
atatttacaaataaaaaataatttacgaatacaatataacgaacttgtatcgtattctttgccctaatcacgtcgttagcgttcctcgttcctcggagccgtaatccagctattcgcccttccgttccggccatcgccgcgcgtgtagttcgccgcccttccgccgtcgccgtggctgtcgtcgtcgccgtcgccgtcaatgcagatgaatccccacggcggcgcattcgccggtgctgccacttgcccatccgccggtggtgacgatcttcttcaaaatctaatctacgggaactggacaacagcccagcagctcgttcggctccaagcaaaagaccactggacggcgacggcgacagcgacggcgacagccacgacgacggcggaagggcggcgaactacacgcgcggcgatagccggaacggaagggcgaatagctggattacagctccgaggaacgaggaacgc

SEQ ID NO: 89574 - DNA, 5085 bp, Oryza sativa
  Clone ID: PAT_MRT4530_88318C.1
ctaagagagcagctccggaaactcggcgcggagcagatcttctcgttcccaggttgcctcatcatcagaatgattgctccattggactttgtagaacttgatggtcttccttcgagtctgacgttctgcctcttcaagaaccttgatcggtctttccttgtaggtcagattcttttccagctcgatattacccaggggaacttgctcttctggaactcgaagacatttctttaactgggatacgtggaacacgttgtgcacatctgcgagaccttcaggtagctcaagctgataagccacttcgccacgtctggcagttatgaggcggggtgctaacttgccggacatcccaaaccttctcataccacggaggggtgatacccgcaggtacacatgatctcctttttcgaactcaaggtcacgcctccgattgtcagcgtaattcttctgacggttctgtgttgtcttcaaacgttctcgtatcagcttaacttgttcttcttctgacttgagtatgtcaggaccgaataccagtgcttcgcccacctcattccagcacaagggggtgcggcactttcttccgaacattgcctcattcggcgacatctgaatgctggcctgataactgttgttgtatgagaactcggcatacggcaaacaacgatcccaagtgccttcgaaatccaaggcacacgcacgtagcatgtcttctaggatttggtttaccctttcggtctgaccatcggtctgcggatggtaggctgtactaaaattcagatcagttccgagggcttcatgcaactgcttccagaaccttgaggtgaactgagtgcctcggtctgacacaattttcttgggacagccaaatctacatacgacatgggtcatgtagagttctgctagtttctttccatcataggtggttttcactggcacgaaatgagctgatttcgtgagtcggtccacgattacccaaatggagtcgtacccgctgggggttcttggcaaaccggtgatgaaatccattccgatctcttcccatttccactcgggaatcggtaggggttgcagcagaccagctggcctctgatgctctgccttgactctttggcaaatgtcacacaaggctacgtattctgcgacatctcgcttcattccagcccaccaaaagtatgccttgatatcttggtacatcttcgtacttcctggatgaatggagtaagcggactcatgagcttcctttaggatgagatctcttaactccttcttggccggtacacagatgtgtggaccgcaccaaactgtgccttgatcgtctatggagaaattggtgtctttcttctcctgtattctttttattaactcttttatcccttcgtcatctttctgagcctcctggatttgcgattctagggtaggctgtactgtcaagctggcagggactcctgactgtaccacggtcagccttaacttctccaattctctgcacatatgatcttggtcaggccgtatttgagctacattgcaataggccttacgacttagcgcatcagcgaccacgttggctttaccaggatgatagtggattccaagatcgtaatccttgattagttccaaccatcttctctgcctcatatttaactcggtctgtgtgaagatatatttaagacttttgtgatcggtgtatacttcacatctgttcccgattaaataatgcctccagatcttaagagtatgaaccacggctgccaactcgagatcatgggtgggataattgacttcatgaggcctgagctgcctggatgcataggccacaacctttcgttcttgcattaggacacatcctaagccttgtcttgatgcatcacagaagatctcgaaatcttttcggatatctggcaaggtgagaactggtgcagtggtcaaccttttcttcatttcttgaaagctgtcttcacaggctgcagaccattgaaatttcttttccttctttaacagctcggtcataggtctggctagcttagagaatccttcaatggatcttcgataatatcccgctaagccaaggaagctgcggatctctgacacgttcttgggcgggttccaagaaagtacagcttcaaccttgctgggatctacttcgacaccgttggaggaaatcacgtgtccaagaaatgctactcgatctaaccagaattcgcatttcgagaatttagcgaatagttgatgatctctgagcttttccattatcagcctcaggtgttcagcatgttcttcctcgttcttggagtatatcaggatgtcatcgatgaacaccacgacaaactggtccaggtattccatgaagattttgttcattaagttcatgaagaatgctagagcattggtgagtccgaaggacataactgtgaactcatatagaccataacgcgttgagaaagcggtcttcgggatatcttcagatctgattttcagttggtggtaacctgacctcaagtcaatttttgagaaaactcttgctcctttaagttgatcgaataaatcgtcaatccgtagcaacgggtacttgttctttatagttacttcattcagggctctatagtcgattaccattctctcagagccatcctttttcttaaccagaagcattggggctccccaaggggatgagctaggtcgcacataacctttactttccagttcttcgatttgtcttttaacttctgctaactcattagctgccattcggtagggtctttttgcaattggagctgtgcctggtgccagttctatggcgaactcaatctctcggtctggtggcattctcgttaattcttctaggaatacgtcgggatattcacagaccatcacaacgtctggagcatcctgagcggtttcagcttgaatgtgattcacacgtcctcgaccaaagtggttggaagcacgaggaccttgtccacttgcctgagagctaggacgagactgagctgccactggagtaggagttctggcggtgctgccattagcatgccctgagttggtgttggtaggattctgagggcactgtctagcatagtgacccatctggttgcaccggaaacactgaactgctgacggtccctgtggtgacttgaaagaggtaacactgtttggcgcagtgttgccactaggggcacgctgctgtggcggaggtgccggacggttcatctgagggcgaggggcgtagcctggctggcggttagcctgagtgaccgactggtggtattgcatgggttgaccgtagcgagggcgaggtgcgcctcgggaagaatttccctgatggttagacttgcgtttcttgtattcttcggtagcctcttttctggcatcctcaagcagaagtgccttgttgatcatatgttgaaaagtggggaagtcatgagcaagcaactggagtctcattccaactgcgatccccttcaagaatttcctgatcttcttcttgtctgtgtccacttcctcaggggcgtaccgagccaacttgttgaacatacttaggtactcattgacactgctgttgccttgcttaagtctgttgaattcttctttcttcatgtcaatagtgctttccggcacatgagctgcacggaaggccgtagcaaactcatcccaagcaatgttagtgggttcagggtgtgcattgcagtaattctcccaccaatctgcagcaggtcctcttagctggtgagaggcgtagagcgtcttctcaacaggagtacattgcactaagttgagttttctatcaacatctttcaaccaatcgtcagcctcgacgggctcgacggtctgagagaactctggcggatgtgacctcagaaaatctgtcagcttggatctattgttgcccacgtgagggtggccatttccatgcgcattatgctgaaaactggctatggctgtggttagtccttgcaagatttgtgtctgtactgccattatgtgttgcatgttgttttccacatgaggtggggaagggaggcgttcttctccagaattgtgactggcagtgcggtgagagcggtgagactgttccatctctgcattacggaaaactgtgcgatgcgagcggttgctgcggtggggttgctcaacctctgcgttgcggaaaacagtacggtgcgaacggttgctgtggtgagactgctcattagctgattcatgatttgcttctgcttcaactctaccatcttcaaaaccaaagcgggctggtgcacgagctgcacggcgggggcggctagccatcggtgggggagctgggtggcggaaacggaacacggtggaagaaccaacaacacgcttccgcgcagtgcggataaagcgtgggccatggcgggaggaagcaactggggtgtgtccgggggtgtaggaagggctaactgggtgtgggtagggggagtacactggtgagtacggcgcacgtgagctaggggagcgcgggccactgggagtgcgggcagagccgcgggagctgtgggaggacaggtggctggcgtggcagaggcggcctgagtcccaggagatagtgtcaaccgaggtgacaccctcctcggccagacgggcctccaaagcggcgtagcggcgggcaagggagcggtaagcctcaaggagtaggtcgtgctgagtggcctgagcctccgaaagctcgaccatgcgagtcagcactggctgagactcgctgtacggacaagggtacctggcgtctgagtggccagaaggaaggcgtggaagctgccggaaggcggaacctccgagacggtggctgtagtcgtgggccaggcgacgaagcacagtccaggagaggtcctggtacgcgatctggagagtgggcctggccacagtgaagtggtgggggcgaaggccagctccgtgtatacctccacgggggtaaaggtacacagagagctcacagtgagggggaacacggtccacggagtaccccgtgtactcggaacacgagaagccaaggaaacgggcgaggtcacgaagctggacgacgtggtgaccctcaccgaaaccgtgggaactgaagctggcgttcaccgccat

SEQ ID NO: 89575 - DNA, 4953 bp, Oryza sativa
  Clone ID: PAT_MRT4530_88319C.1
atgacggaacgggcgctacagaccaacccccctaacaagaatctcgaccccgagattcagcacctaagggagcaggtccgggaactcggcgcggagaagatcttctcgctcccaggttgcctcgtcttcggaatgattgctccattggactttgtagaacttgatggtcttccttcgagtctgacgttctgcctcttcaagaaccttgatcggtctttccttgtaggtcagattcttttccagctcgatattacccaggggaacttgctcttctggaactcgaagacatttctttaactgggatacgtggaacacgttgtgcacgtctgcgagaccttcaggtagctcaagctgataagccacttcgccacgtctggcggttatgaggtaggggccgatgtagcggggtgctaacttgccggacatcccaaaccttctcataccacggaggggtgatacccgcaggtacacatgatctccacacatgatctcctttttcgaactcaaggtcacgcctccgattgtcagcgtaattcttctgacggttctgtgcagtgctttgcccacctcattccagcacaagggggtgcggcactttcttccgaacattgcctcattcggcgacatctgaatgctggcctgataactgttgttgtatgagaactcggcatacggcaaacaacgatcccaagtgccttcgaaatccaaggcacacgcacgtagcatgtcttctaggatttggtttaccctttcggtctgaccatcggtctgcggatggtaggctgtactaaaattcagatcagttccgagggcttcatgcaactgcttccagaaccttgaggtgaactgagtgcctcggtctgacacaattttcttgggacagccaaatctacatacgacatgggtcatgtagagttctgctagtttctttccatcataggaggttttcactggcacgaaatgagctgatttcgtgagtcggtccacgattacccaaatggagtcgtacccgttgggggttcttggcaaaccggtgatgaaatccattccgatctcttcccatttccactcgggaatcggtaggggttgcagcagaccagctggcctctgatgttccgccttgactctttggcaaatgtcacacagggctacgtattctgcgacatctcgcttcattccagcccaccagaagtatgccttgatatcttggtacatcttcgtacttcctgggtgaatggagtaggcggactcatgagcttcctttaggatgagatctcttaactccttcttggccggtacacagatgcgtggtccgcaccaaactgtgccttgatcgtctatggagaaatttgtgtctttcttctcctgtattctttttattaattcttttatcccttcgtcgtctttctgagcctcccggatttgcgactccagggtaggctgtattgtcaagctggcagggacacctgactgtaccacggtcagtcttaacttctccaattctctgcacaggtgatcttggtcaggccgtatttgagctacattgcaataggccttgcgacttagcgcatcagcgaccacgttggctttaccaggatgatagtggattccaagatcgtaatccttgattagttccaaccatcttctctgtctcatatttaactcggtctgagtgaagatatacttaagacttttgtgatcggtgtatacttcacatctgttcccgattaaatagtgcctccagatcttaagagcatgaaccacagctgccaactcgagatcatgggtgggataattggcttcatgaggcctgagctgcctggatgcataggccacaaccttttgttcttgcattaggacacatcctaagccttgtcttgatgcgtcacagaagatctcgaaatcttttcggatatctggcaaggtgagaactggggcagtggtcaaccttttcttcaattcttggaagctgtcttcacaggctgcagaccattgaaatttcttttccttctttaacagctcggtcataggtctggctagcttagagaatccttcaatgaatcttcgataatatccagctaagccaaggaagctgcggatctctgacacgttcttgggcgggttccaagcaagtacagcttcaaccttgttgggatctacttcgacaccgttggaggaaatcacgtgtccaagaaatgctactcggtccaaccagaattcgcatttcgagaatttagcgaatagttgatgatctctgagcttttccattatcagcctcaggtgttcagcatgttcttccttgttcttggagtatatcaggatgtcatcgatgaacaccatgacaaactggtctaggtattccatgaagattttgttcattaagttcatgaagaatgctggagcattggtgagtccgaaggacataactgtgaactcatatagaccataacgcgttgagaaagcggtcttcgggatatcttcagatctgattttcagttggtggtaacctgacctcaagtcaatttttgagaaaactcttgctcctttaagttgatcgaataaatcgtcaatccgtggcaacgggtacttgttctttatagttacttcattcagggctctatagtcgattaccattctctctgagccatcctttttgtcgggatattcatagactatgggcaccgactccaaggaggtgacttgtaaacaggttaggatagaccgacttgcggtaggggtgttaggggtaaagcggacttgctttcctccaggtccttgcaaggtgatggacttttcggcacaatctatctgtcctttgtgcttagccaaccaatccatccctagaatgatgtccaagctttgcgagtctaggactatcggtttggctaggaagtcaacttcctcaattctaaggttaacttccgggcatatttgagttgcccttatattccttccaggggaatgtactatcattggtacacgcaaattttgggttttccaaccatttcttttcacaaaagcttgcgatatgaaagaatgggaagctcccgaatcgaacagaactattgcgggtacggagttgacagagaacatacccatcacaacgtctggagcatcctgagtggtttctgcttgaatgtgattcacacggcctcgaccaaagttgttggaagcacgtgaaccttgtccacttgcctgagagctaggacgagactgagctgccgctagagtaggagttctggcagtgctaccattagcatgccctgagttggtgttggtaggattctgaggacactgtctagcatagtgacccatctggttgcaccggaaacactgaactgctgacggtccctgcggtgacttgaaagaggtaacactgttaggcgcagtatcgctactaggggcacgctgctgtggctgaggtgccggacggtttatctgaggacgaggggcgtagcctggctggcggttagcctgggtgaccgactggtggtattgcatgggttgaccgtagcgagggcgaggtgcgcctcgggaagaatttccctgatggttagacttgcgtttcttgtattcttcggtagcctcttttctggcatcctcaagtagaagtgccttgttgatcatatgttgaaaagtggggaagtcatgagcaagcaactggagtctcattccaactgcgattcctttcaagaatttcctgatcttcttcttatctgtgtctacttcctcaggggcgtaccgagccaacttgttgaactgacttaggtactcattgacactgctgttgccttgcttaagtctgttgaattcttctttcttcatgtcaatagtgctttcaggcacatgagctgcacggaaagccgtagcgaactcatcccaagcaatgttagtgggttcagggtgtgcattgcagtaattctcccaccaatctgcggcaggtcctcttagttggtgagaggcgtagagcgtcttctcaacaggagtacactgcactaagttgagttttctatcaacatctttcaaccaatcgtcagcctcgacgggctcgacggtctgagagaactctggcggacgagacctcagaaagtctgtcagcttggatctgttgttgcccatgtgagggtggccatttccatgcgcattatgctgaaaactggctatggctgtggttagtccttgcaagatttgtgtctgaactgccattaagtgttgcatgttggtttccacatgaggtggggaagggaggcgttcttctccagaattgtgactggcagtgcggtgagagcggtgagactgttccatctctgcatcacgggaaactgtgcgatgcgagcggctgctgtggcggggttgctcaacctctgcgttgcgggaaacagtacgatgcgaacggttgctgtggtgagactgctcattagctgattcatgattttcttctggctcaactctaccatcctcaaaaccaaagcgggctggtgcacgagctgcacggcggggacggctagccatctgtcgagggccagcagcagcacgggccgctggcggtgggggagctgggtagtggaaacggaacacgttggaagaaccaacaacacgcttccgcgcggtgcggataaagcgtgggccacggcgggaggaagcaactggggtgtgtccgggggtgtaggaagggctaactgggtgtgggtagggggagtacactggtgagtacggcgcacgcgagctgggggagcgcgggccactgggagtgagggcagagccgcgggagctgtgggaggacaggtggctggcgtggcagaggcggcctgagtcccaagagatagtgtcaactgaggtgacaccctcctcggctagacaggcctccaaagcggcgtagcggcgggcaagggagcggtaagcctcaaggagtaggtcgtgctgagtggcctgagcctccgaaagctcgaccat

SEQ ID NO: 89576 - DNA, 514 bp, Oryza sativa
  Clone ID: PAT_MRT4530_8831C.1
aggcaattgagatgttttgggaatacaatctgccttcacccaggtgcgtggctgtagatgcctgtgcagaacctgaccttgtgaaggccctgaatgtttctggtttcccagaggtcctcttcactaatgcagggaagatagttcaccgtgacaaagtcgtccgatcggctgaggaatggacaagaatgatggcattcttctactataaagcagcaaggccgccttgcttgagcgaggcagatggtcagggtcaagaaaaggtccccctgatgtcataagaacagtgtgtaggcgtagcttgtacgttgtattttacatcagtgtgcattgttagaaaccttagagtttaaatcagttcacatttcttagctttttaaatgtcgtaacacaggcatctattagcatctactagtgaattgccatctttatctgttaatggcatagaatagatatatccaactgcaacaagattatgttcatgtgctgtaggattatggttaaaaaaaaaaaaaaa

SEQ ID NO: 89577 - DNA, 5491 bp, Oryza sativa
  Clone ID: PAT_MRT4530_88320C.1
ctaagggagcagctccgggaactcggcgcggagaagatcttctcgctcccaggttgcctcatcttcagaatggttgctccattggactttgtagaacttgatggtcttccttcgagtctgacgttctgcctcttcaagaaccttgatcagtctttccttgtaggtcagattcttttccagctcgatattacccagggaaacttgctcttcttcaggtaactcaagctgataagccacttcgccacgtctggcggttatgaggtaggggccgatgtagcggggtgctaacttgccggacatcccaaacctcctcataccacggagaggtgatacccgcaggtacacatgatctccttttccgaactcaaggtcacgcctccgattgtcagcgtaattcttttggcggttctgtgctgtctttaaacgttctcggatcagcttaacttgttcttttgctgccttgagtatgtcaggaccgaataccagcgcttcgcctacctcattccagcacaagggggtgtggcactttcttccgaacattgcctcattcggcgacatctgaatactggcctggtaactgttgttgtatgagaactcagcatacggcaaacaacgatcccaagtgccttcgaaatccagggcacacgcacgtagcatgtcttctaggatttggtttactctttctgtctgaccatcggtctgcggatggtaagctgtactaaaatttagatcggttccgagagcttcatgcaactgtttccagaaccttgaggtgaactgagtgcctcggtctgacacgatcttcttgggacagccgaatctacatacgacatgggtcatgtagagttctgctagtttctttccatcaaaggtagttttcactgccacgaaatgagctgatttcgtgagtcgatccacgattacccagatggagtcgtacccgctaggggttcttggcaaaccggtgatgagatccattccgatttcttcccatttccactcgggaattggtaggggctgtagcagaccagctggcctctgatgctctgccttgactctttggcaaatgtcacacaaggctacgtattctgtgacatctcgcttcattccagcccaccagaagtatgccttgatatcttggtacatcttcgtacttcctggatgaatggagtaggcggactcatgagcttcctttaggatgagatctcttaattccttcttggccggtacacagatgcgtggaccgcaccaaactgtgccttgatcgtctatggagaaattggtgtctttcttctcctgtattctttttattaactcttttatcccttcgtcgtctttctgagcttcccggatttgcgactctagggtaggctgtactgtcaagctggcagggacacctgactgtaccacggtcagcctcaacttctccaattctctgcacaggcgatcttggtcaggccgtatttgagctacattgcaataggccttgcgacttagcgcatcagcgaccacgttggctttaccggggtgataatgaattccaagatcgtaatccttgattagttccaaccatcttctctgcctcatatttaactcagtctgagtgaagatgtacttaagacttttgtgatcggtgtatacttcacatctgttcccgattaaatagtgcctccagatcttaagagcatgaaccacggctgccaactcgagatcatgggtgggatagttgacttcatgaggcctgagctgcctggatgcataggccacaacctttcgttcttgcattaggacacatcctaagccttgtcttgatgcatcacagaagatctcaaaatcttttcggatatctggcaaggtgagaactggggcagtggtcaaccttttcttcatttcttgaaagctgccttcacatgctgcagaccattgaaatttcttttccttctttaatagctcggtcataggtctggctagcttagagaatccttcaatgaatcttcgataatatccagctaagccaaggaagctgcggatctctgacacattcttgggcgggttccaagcaagtacagccttaaccttgctgggatctacttcgacaccgttggaggagatcatgtgtccaagaaatgctactcggtctaaccagaattcgcattttgagaatttagcgagtagttgatgatccctgagcttttccattatcagcctcaggtgttcagcatgttcttcctcattcttggagtatatcaggatgtcatcgatgaacaccacgacaaattggtccaggtattccatgaagattttgttcattaagttcatgaagaatgctggagcattggtgagtccgaaggacatcactgtgaactcatatagaccataacgcgttgagaaagtggtcttcgggatatcttcagatctgatttccagttggtggtaacctaatctcaagtcaattttggagaaaactcttgctccttttagttgatcgaacaaatcgtcaatccgtggcaatgggtacttgttatttatagttacttcattcagggctctacagtcgattaccattctctcagagccatccttctttttaaccagaagcactggggctccccaaggggatgagctaggtcgcacataacctttactctccaattcttcgatttgtcttttgacctctgctaactcattagctgccatttggtagggtctttttgcaattggtgcggtgcctggtgccagttctatcgcgaactcaatctctcggtctggtggcatactcgttaattcttctgggaatacgtcgggatattcacagactacgggcaccgactccaaggaggtgacttgtaaacaggttaggatagaccgacttgcggtaggggtgttagaggtaaagcggacttgctttcctccaggtccttgcaaggtgatggacttttcggcacaatctatctgtcctttgtgcttagctaaccaatccatccgtaggatgatgtccaagttttgcgagtctaggactatcggtttggctaggaagtcaacttcctcagttctaaggttaacttccgggcatatttgagttgcccttatattcctcccaggggaatgtactatcataggtacacgtaaattttgggttttccaaccatttcttttcacaaaagcttgtgatatgaaagaatgagaagctcctgaatcaaatagaactattgcgggtatggagttgacagagaacatacccatcacaatgtctggagcatcctgagcggtctcagcttgaatgtggttcactcggcctcgaccaaagctgttggaagcacgagaaccttgtccacttgcctgagagctaggacgagactgagctgccgctggagtaggagttctggcagtgctgccattagcatgcccggagttggtgttggtaggattctgagggcactctctggcatagtgacccatctggttgcaccggaaacactgaactgctgacggtccctgcggtgacttgaaagaggtaacactgtttggcgcagtagtgccactaggggcacgctgctgtggccgaggtgccggacggttcatctgaggacgaggggcgtagcctggctggcagttagcctgagtgaccgactggtggtattgcatgggttgaccaaagcgagggcgaggtgcgcctcgggaagaattcccctgatggttagacctgcgtttcttgtattcttcggtggtctcctttctggcatcctcaagtagaagtgctgcgattcccttcaagaacttcctgatctttttcttgtctgtgtccacttcctcaggggcataccgagccaacttgttgaactgacttaggtactcattgacactgttgttgccttgcttgagcctgttaaattcctctttcttcatatcaatggtgctttcaggcacatgagctgcacggaaagccgtagcaaactcatcccaagcaatgttagtgggtttagggtgtgcattgcagtaattctcccaccaatctgcagcaggtcctcttagctggtgagaggcgtagagcgtcttctcaacaggagtacactgcactaagttgagttttctatcaacatccttcagccaatcgtcagcctcgacgggctcgacggtctaagagaactctggcggacgagacctcagaaagtctgtcagcttggatctattgttgcccatgtgagggtggtcatttccatgcgcattatgctggaagccggctatggctgcggctaatccttgcaagatctgtgtctgaactgccatcaagtgttgcatgttgttttccacatgaggtagggaggggatgcgttcttctccagaattatgactggcagcacggtgagagcagtgagactgttccacctctgcattacgggaagctgtgtgatgcgagcggttgctgcggtggggttgctcaacttctgcattgcgggaagcagtacggtgcgaacggttgctgtggtgagactgctgattagctgactcatgatttgcttctggctcaactctaccttcctcaaaaccgaagcgggctcctgtagtcggctcctcagtcgaagaaacatcgatcggctgacgcgaagggaccagcggaacctatcgagggccggcagcagcacgggccgctggcagtgggggagctgggtagtcgaagcggaacacagtggaagaaccaacaacacgcttccgcgcagtgcggataaagcgtgggccacggcgggaggaagcaactggggtatgtccggggtgtagaaggggctaactgggtgtgggtaggggaagtacactggtgagtatggcgcacgcgagctgggggagtgcgggctgagccgcgagagctgtgggaggacaggtggctggcgtggcagaggcggcctgagtcccaagagacagtgtcaactaaggtgacaccctcctcggccagacgggcctccagagcggcgtagcggcgggcaagggagcggtaagcctcaaggagtaggtcgtgctgagtggcctgagcctccgaaagctcaaccatgcgagtcagcactggctgagactcgctgtacggacaagggtacctggcgtctgtgtggccggaaggaaggcgtgggagctgccggaaggcagagcccccgagacggtgggcgatctggagagtgggcctggccacagtgaagtggtgtgggcgaaggccagctccgtgtatacctccacgagggtaaaggtacaccgaaagctcacagcgagggggaacacggtccacggagtaccccgtgtactcgggacacgagaagccaaggaagcgggcgaggtcacgaagctgagcgacgtggtgaccctcaccaaaaccgtgggaactgaagctggcgttcactgccatttgttaatcgataccagtcccaggaaacagtgctggtatcacaggaagacagaatatcacagcaacagtggtctctttattacagagtaggagtacagtcat

SEQ ID NO: 89578 - DNA, 402 bp, Oryza sativa
  Clone ID: PAT_MRT4530_88321C.1
accagcatatatataatgcagtgcagatatatagtaaataagttgattgcatatacttagttatcagtctacacacataagctaagcacacccactcgctgggcacaaatatagtgtgtgtgtgtgtctatatctatatatatatatatatatatatacatatacatatacatatatatatatatacctatatctatatatatatatatatatatatatatatatatatatatatatatatatatacatatatacatatatatatacatatatacatatatatatatatacatatatacatatatacatatatatatatacatatacatatatatatatacatatacatatatatatatatatatatatatatacatatacatatacatatatatatatata

SEQ ID NO: 89579 - DNA, 4863 bp, Oryza sativa
  Clone ID: PAT_MRT4530_88322C.1
ttatttcttttcgatggttaggttgttgccgacatttctataactaatataaatattcgtatttttccattcgttgcctgataggtgcggtgattttttcgtcacccttgcctccccccaaatcccagtaagaattccatcacccccacatgtgttatcgttaccaagctttccacaagcgacataatagttccgacttcgctgcgaagatgccctcctctccgcctgcatggaggccaccctcaggctcctacgcgcgtgccgctggtcaccggtgccctctctaaaactacgccaccggctttccaccctatgtcgcggcggctgccccatcgtggatcgggccacgggctctagtctcaagactttcagggaggagaagaaaggcacggttttctggtggcttgcttgggcggcaatgaggtagaggtgggaggagatgatgggtcggctggggagggaggcgacgcccgtgtcgcccaacccttgagcgacgcgggcggggaccaagagtatgagcgccttcatcaaaattgctaacgactttgtagtccccaccgcagcttctgacctcaaataggccagatctggcggcactgagaggtggcagcgatggatctgaaggggaagggggtaaagcgatggatcggcgaaggaggtggtgacctctgacctcaaagagccattctggagcttgcttggaccgacggagttggacacggaggcgggggcgtgggcggatgcggcgactagaccaaggccggtgacaagatccgactgccgcgaggtcagtgatgtgaccaagggtagcatgtcttctaggatttggtttaccctttctgtttgaccatcggtctgcggatggtaagctgtactaaaatttagatcggttccgagagcttcatgcaactgcttccagaaccttgaggtgaactgagtgcctcggtctgacacaatcttcttgggacagccaaatctacacacgacatgggtcatgtagagttctgctagtttctttccatcaaaggtggttttcactggcacgaaatgagctgatttcgtgagtcggtccacgattacccagatggagtcgtacccgctaggggttcttggcaaaccggtgatgaaatccattccgatctcttcccatttccactcgggaatcggtaggggttgcagcagacccgctggcctctgattctctgccttgactctttggcaaatgttacacaacgccacgtattctgcgacatctcgcttcattccagcccaccagaaatatgccttgatatcctggtacatcttcgtacttcctggatgaatggagtaggcggactcatgagcttcctttaggatgggatctcttaactccttcaaactgtgccttgatcgtctatttgagaaatcggtgtccttcttctcctgtattctttttattaattcttttatcccttcatcatctttctgagcttcccggatttgcgactctagggtaggctgcacggtcaagctggcagggacacctgactgtaccacggtcagccttaacttctccaattctccgcacaggcgatcttggtctggccatatttgagctacattgtagtaggtcttgcgacttagcgcatcagcgaccacattagctttaccgggatggtaatgaattccaagatcgtaatccttgattagttccaaccatcttctctgcctcatatttaactcggtctgggtgaagatgtacttaagacttttgtgatcggtgtatacttcacatctgttcccgattaaatagtgcctccagatcttaagagcatgaaccacggctgccaactcgagatcatgggtgggatagttgacttcatgaggcctgagctgcctggatgcataggccacaacctttcgttcttgcattaggacacatcctacgccttgtcttgatgcatcacagaagatctcgaaatcctttcggatatctggcaaggtgagaactggggcggtggtcaaccttttcttcatttcttgaaagctgtcttcacaggctgtagaccattgaaatttcttttcattctttaacagctcggtcataggtctggctagcttagagaatccttcaataaatcttcgataatatccagctaagccaaggaagctgtggatctctgacacattcttgggcgggttccaagcaagtacagctccaaccttgctgggatctacttcgacaccgttgaaggagatcacgtgtccaagaaatgctactcggtccaaccagaattcgcatttcgagaatttagcgaatagttgatgatccctgagcttccccattatcagcctcaggtgttcagcatgttcttcctcattcttggagtatatcaggatgtcatcgatgaataccacgacaaactggtccaggtattccatgaagatcttgttcattaagttcatgaagaatgctggagcattggtgattccgaaggacatcactgtgaactcatatagaccataacgcgttgagaaagcggtcttcgggatatcttcagatctaattttcaattggtggtaacctgatctcaagtcaattttagagaaaactcttgctcctttaagttgatcgaacaaatcgtcaatccgtggcaatgcgtacttgttctttatagttacttcattcagggctctatagtcgattaccattctctcagagccatcctttttcttaaccaggagcactggggctccccaaggggatgagctaggtcgcacataacctttactctccaattcttcgatttgtcttttgacttctgctaactcattagctgccatttggtagggtctttttgcaattggtgcggtgcctggtgccagttctatggcgaactcaatctctcggtctggtggcatacttgttaattcttcgggaaatacgtcgggatattcacagactatgggcaccgactccaaggaggtgacttgtaaataggttaggatagaccgacttgcggtaggggtgttagtggtgaagcagacttgctttcctctaggtccttgcaaggtgatggacctttcggcataatctatctgtcctttgtgcttagccaaccaatccatccctaggatgatgtccaagctttgcgagtctaggactatcggtttggctaggaagtcaacttcctcaattctaaggttaacttccgggcatatttgggttgcccttatattcctcccaggggaatgtaccatcacaacgtctggagcatcctgagcggtctcagcttgaatgtggttcacccggcctcgaccaaagttgttggaagcacgagaaccttgtccacttgcctgagagctaggacgagactgagctgccgctggagtaggagttctggcagtgctgccattagcatgccctgagttggtgttggtaggattctgagggcactgtctggcatagtgacccatctggttgcaccggaaacactgaactgctgatagtcctagtggtgacttgaaagaggtaacactatttggcgcagtattgccacttggggcatgctgctgtggctgaggtgccggacggttcatctgaggacgaggggcgtagcctggctggcggttagcctgagtgaccgattggtgatattgcatgggttgaccatagcgagggcgaggtgcgcctcgggaagaattcccctgatggttaaacttgcgtttcttgtattcttcggtagcctcttttctggcatcctcaagtagaagtgccttgttgatcatatgttgaaaagtggggaagtcatgagcaagcaactggagtctcattccaactgcgattcccttcaagaacttcctgattttcttcttgtctgtgtccacttccttaggggcgtaccgagccaacttgttgaactgacttaggtactcattgacactgttgttgccttgcttaagcctgttaaattcctctttcttcgtatcaatggtgctttcaggcacatgagctccacggaaagccgtagcaaactcatcccaagcaatgttagtgggttcagggtgtgcattgcagtaattctcccaccaatctgcagcatgtcctcttagctggtgagaggcgtagagcatcttctcaacaggagtacactgcactaagttgagttttctatcaacatctttcagccaatcgtcagcctcgacgggctcgacggtctgagagaactctggcggacgagacctcagaaagtctgtcagcttggatctattgttgcccatgtgagggtggccatttccatgggcattatgctgaaagccggctatggctgcggctaatccttgcaagatttgtgtctgaactgtcattaagtgctgcatgttgttttccacatgaggtggggaagggatgcgttcttctccagaattgtgactggcagtgcggtgagagcggtgagattgttccacttctgcattacgggaagctgtgtgatgcgagcgattgctgcggtggggttgctcaacttctgcattgcgggaagcagtatggtgcgaacggatgctgtggtgagactgctcattagctgactcatgatttgcttctggctcaactctaccttcctcaaaactgaagcgggctggcatctgcgtagccagaaggaagacgtgggagctgccggaaggcagagcccccgagacggtggctgtagtcgtgggccaagcgacgaagcgcagtccaggagaggtcctggtacgcgatctggagggtgggcctagccacagtgaagtggtgtgggcgaaggccagctccgtgtatacctccgcgagggtaaaggtacacagagagctcacagcgagggggaacacgtccacggagtaccccat

SEQ ID NO: 89580 - DNA, 648 bp, Oryza sativa
  Clone ID: PAT_MRT4530_88323C.1
atgccggtgacggcgatccaattgccccacttgcgattgcggtccttgcggttgcggatcctcgactacggccaaccttggtttgagcaatccgtgcggagcgtgtacgtgccgctgcacctgcacctcgtcgagttccttcagtggacggcggcgttgagttgcttctcaaacgcgtggcgccggcggctggcgggtggctggtggcggcgcttggcggtggtggcggttgccggtcgctcttgccgggtcaccatagatgaattggaagtggaacaatataccttcacacgagaaacatcagacatcgccgtgctcaagtacagttcagtctgtaccccagcaatttccagccaagcgtgcgcgctccaagaaacgcctcccggggcacaagcaacccacggctgtagagtgcagaccccggagacagggccgccggctcaggcaatgcgtcgaacacctcgcgtcctcgcgcggccttactgccggcagctcagctcgggccagcatttcgtcgaagaccacgactgcaggtctcccgccggagttgtcctcaccggcgtcgtcggctcgtcgccgttacctaggcgtggcttcgcgactccccagttccccactagccaactttttattttaagacgccactag

SEQ ID NO: 89581 - DNA, 4652 bp, Oryza sativa
  Clone ID: PAT_MRT4530_88324C.1
ctaagggagcagctccgggaactcggcacggagaagatcttctcgctcccaggttgcctcatcttcagaatggttgctccattggaccttgtagaacttgatggtcttccttcgtgtctgacgttctgcctcttcaagaaccttgatcggtctttccttgtaggttagattcttttccagctcgatattacccaggggaacttgttcttctggaactcgaagacatttctttaactgggatacgtggaacacgttgtgcacatctgcgagaccttcaggtaactcaagctgataagccacttcgccacgtctggcggttatgaggtaggggccgatgtagcggggtgctaacttgccggacattccaaacctcctcataccacggaggggcgatacccgcaggtacacatgatctcctttttcgaactcaaggtcatgcctccgattgtcagcgtaattcttctgacggttctgcgctgtctttaaacgttctcggattagcttaacttgttcttctgctgccttgagtatgtcaggaccgaataccagtgcttcgcccacctcattccagcacaagggagtgcggcactttcttccgaacattgcctcattcggcaacatctggatgctggcctgataactgttattgtatgagaactcagcatacggcaaacaacgatcccaagtgccatcggtctgcggatggtaggccgtactaaaatttagatcggttccgagggcttcatgcaactgcttccagaaccttgaggtgaactgagtgcctcggtctgacacaatcttcttgggacagccaaatctacatacgacatgggtcatgtagagttctgctagtttctttctatcaaaggtggtttttactggcacgaaatgagctgatttcgtgagtcggtccacgattacccagatggagtcgtacccgctaggggttcttggcgaaccggtgatgaaatccattccgatctcttcccatttccactcgggaatcggtaggggttgcaacagaccagctggcctctgatgttctgccttgactctttggcaaatgtcacacagggctacgtattctgcgacatctcgcttcattccagcccaccagaagtatgccttgatatcttggtacatcttcgtacttcctggatgaatggagtaggctgactcatgagcttcctttagcatgagatctcttaattccttcttggccggtacacagatgcgtggaccgcaccaaactgtgccttgatcgtctatggagaaattggtgtctttcttctcttgtattctttttattaactcttttatcccttcgtcgtctttctgagcctcccggatttgcgattctagggtgggctgcactgtcaagctggcagggacacctgactgtaccacggtcagccttaacttctccaattctctgcacaggcgatcttggccaggccgtatttgagctacattgcaataggccttgcgacttagcgcatcagcgaccacattagctttaccggggtgataatgaattccaagatcgtaatccttaattagttccaaccatcttctctgcctcatatttaactcgatctgagtgaagatgtacttaagacttttgtgatcggtgtatacttcacatctgttcccgattaaatagtgcctccagatcttaagagcatgaaccacggctgccaactcgagatcatgggtgggataattgacttcatgaggcctgagctgcctggatgcataggccacaacctttcgttcttgcattaggacacatcctaagccttgtcttgatgcatcacagaagatctcgaaatcttttctgatatctggcaaggtgagaactggggcagtggtcaaccttttcttcatttcttgaaagctgtcttcacaggctacagaccattgaaatttcttttccttctttaacagctcggtcataggtctggctagcttagagaatccttcaatgaatcttcgataatatccagctaggccaaggaagctgcgaatctctgacacattcttgggcgggttccaagcaagtacagcttcaaccttgctgggatctacttcgacaccgttggaggagatcacgtgtccaagaaatgctactcggtctaaccaaaattcgcatttcgagaattttgcgaatagttgatgatctctgagcttttccattatcagcctcaggtgttcaacatgttcttccttattcttggagtatatcaggatgtcatcgatgaacaccacgacaaactggtccaggaattccatgaagattttgttcattaagttcatgaagaacgctggagcattggtgagtccgaaggacatcactgtgaactcatatagaccataacgcgttgagaaagcggtcttcgggatatcttcagatctgattttcagttggtggtaacctgatctcaagtcaattttagagaaaactcttgctcctttaagttgatcgaacaaatcgtcaatccgtggcaacgggtacttgttctttatagttacttcattcagggctctatagtcgattaccattctctcatagccatcctttttcttaaccagaagcactggggctccccaaggggatgagctaggtcgcacataacctttactctccaattcttcgatttgtcttttaacttctgctaactcattagctgccattcggtagggtctttttgtaattggtgcggtgcctggtgccagttctatggcgaactcaatctctcgatctgggggcatactcgataactcttctggaaacacgtcgggatattcacagactatgggcaccgattccaagggagtggcttgcaaattggttaggattgaccgacttgcggtaagagtgttgggggtaaagtgaacttgctttccaccaggtccttgcaaggtgatggacctttcggcacaatctatctgtcctttgtgcttagccaaccaatccatccctaggatgatgtccaagctttgcgagtccaggactatcagtttggctaggaagtcaacttcctcaattctaaggttaacttccgggcatattttagttgcccttatatcccttccagtggaatgtactatcattggtactcgtaaattttaggttttccaaccatttcttttcacaaaggcttgcgatatgaaagaataggaagctcctgaatcaaacagaattattgcgggtatggagttgacagagaacatacccatcacaacgtctggagcatcctgagcggtctcagcttgaatgtggttcacccgacctcgaccgaagttgttggaagcatgggaaccttgtccacttgcctaagagctaggacgagactgagctgctgctagagtaggagttctggcggtgctgccattagcatgccctgagttggtgttggtaggattctgagggcactgtctagcagagtgacccatcttgtcccaccggaaacactgtacggttgacagtcctggtggtgacttgaaagaggtaacactgtttggcgcaatattgccacttggggcacgctgctgcggcggaggtgctggacggttcatctgagggcgaggggcatagcctggctggcggttagcctgagtgaccgactggtgatactgcttaggctgaccaaagcgagggtggggtgcacctcgggaagaattcccttgatgggtagacttgcgtttcttatattcttcagtagcctcttttctggcatcctcaagtggaagtgccttgttgatcatgtgctgaaaggtggggaagtcatgagcaagcaactggagtctcattccaactgtgactcctttcaagaacttcctgatcttcttcttgtctgtgtccacttcttcaggagcgtatcgagccaacttgttgaactgactcagatactcattgacactgctattgccttgcttgagcctgataaattcttccttcttcatgtcaatagtgcttttaggcacatgagctacacgaaaagctgcagcgaactcattccatggaatgttagtgggttcggggtgtgcattgcagtaattctcccaccaatctgcagcaggtcctcttagctggtgagaggcgtagaccgtcttctcaataggaatacactgcactaagttgagttttctctcaacatcctttagccaatcgccagcctcaacgggcttgacggtctgagagaactctggcggacgagacctcagaaagtctgtcagcttggatctattgttgcccatgtgagggtggccatttccatgcgcgttgtgctgaataccggctatagctgtggctaaaccttgcaagatttgagtctgaactgccatcaagtgctgcatgttattctcaacatggggtggtgaaggaatgcgttcttcaccagaattgtgaccgacagagcggtgagagcggtgagactattccacttctgcattacgggaaactatgcgatgcgagcggttgctgcggtgggattgctcaacttctgcattgcgggaagcagtacggtgcgaacggttgctgtggtgagactgctcattagctgactcatgatctgcttctggctcaactctaccttcctcaaaaccgaagcgggctggtgcacgagcagcgcggtggggcggctagccat

SEQ ID NO: 89582 - DNA, 828 bp, Oryza sativa
  Clone ID: PAT_MRT4530_88325C.1
gtggctttagccagtcagacttatgacctggttgatgctcatatccaacagctagatcagtttatgagaaaacttgaagaacttcgacaagaaaaggaggcagctacaactgctgctgctgctgctgctgcggcggctgctagtgttgctacaggtacgcctgttgctgctactgtaacagctagcgctggtacttcaactgctgacaatactccaaaaggtggaaggtctagcgaaagaggccgagggggtcgaaagaagactgctaaggtgcccactgagcaaccagcaccagccatagatttagaactgcctgtggatcctaacgaaccaacatattgcctctgcaaccaagtcagctacggagagatggtcgcatgcgacaataatgattgcaagatcgaatggtatcactttgggtgcgtcggcgtgaaagagcatccgaaggggaagtggtattgcccaagttgcattggattccaaaagaagcgaaaaggaaagtgaaatgtgatcaacccttgataggaggtagcttcttgatgataagtggtgatggacgtgggtaacaaaaacatagtagctggtactgtgaaatactgttgtagcttcagtgatgatgtacatgttacccctgtgttaccgaggaaatgctgtaggcgtcttagagttagggaccagtcaatcatgaagagcagttgtgcctgtattggtgtatcttcattgcctttttttggtggatgtgtaggttgtaattgtaatctatccctcccatgtgggcttgatgcaatctacacataaatctgtttatacctaaaaaaaaaaaacaaa

SEQ ID NO: 89583 - DNA, 5339 bp, Oryza sativa
  Clone ID: PAT_MRT4530_88326C.1
ctaagggagcagctccgggaactcggcgcggagaagatcttcttgctcccaggttgcctcatcttcagaatggttgctccattggactttgtagaacttgatggtcttccttcgagtctgacgttctgcctcttcaagaaccttgatcggtctttccttgtaggtcagattcttttccagctcgatattacccagggggacttgctcttctggaactcgaagacatttctttaactgggatacgtggaacacgttgtgcacatctgcgagaccttcaggtaactcaagatgataagccacttcgccacgtctggcggttatgaggtaggggccgatgtagcggggtgctaacttgccggacatcccaaacctccttataccacggagaggcgatacccgcaggtacacatgatctcctttttcgaactcaaggtcacgcctccgattgtcaacgtaattcttctgacggttctgcgctgcctttaaacgttctcggatcagcttaacttgttcttctgctgccttgagtatgtcaggaccgaataccagcgcttcgcccacctcattccagcacaagggagtgcggcactttcttccgaacatttcctcattcgatgacatctgaatgctggcctgataactgttgttgtatgagaactccgcatacggcaaacaacgatcccaagtgccttcgaaatccagggcacacgcacgtagcatgtcttctaggatttggtttaccctttctgtctgaccatcggtctgcggatggtaggccgtactaaaatttagatcggttccgagggcttcatgcaactgcttccagaaccttgaggtgaactgagtgcctcggtctgacacaatcttcttgggacagccaaatctacacacgacatgggtcatgtagagttctgctagtttctttccatcaaaggtggttttcattggcacgaaatgagctgatttcgtgagtcggtccacgattacccagatggagtcgtacccgctaggggttcttggcaaaccggtgatgaaatccattccgatctcttcccatttccactcggggatcggtaggggttgcagcagaccagctggcctctgatgttctgccttgactctttggcaaatgtcacacaaggctacgtattctgcgacatctcgcttcattccagcccaccaaaagtatgccttgatgtcttggtacatcttcgtacttcctggatgaatggagtaggcggactcatgagcttcctttaggatgagatctcttaactccttcttggccggtacacagatgcgtggaccataccaaactgtgccttgatcgtctatggagaaatcggtgtctttcttctcctgtattctttttattaactcttttatcccttcgtcgtctttctgagctttccggatttgcgattctagggtaggctgtactgtcaagctggcagcgacacctgactgtactacggtcagccttaacttttccagatctctgcacaggcgatcttggtcgggccgtatttgatctacattacaataggtcttgcgacttagcgcatcagcgaccacattagccttaccggggtggtaatggattccaagatcgtaatccttgattagttccaaccatcttctctgcctcatatttaactcggtctgtgtgaagatatacttaagacttttgtgatcggtgtatacttcacatctgttcccgattaaatagtgcctccagatcttaagagcatgaaccacggctgccaactcgagatcatgggtgggatagttgacttcatgaggcctgagctgcctggatgcataggccacaacctttcgttcttgcattaggacacatcctaagccttgtcttgatgcatcacagaagatctcgaaatcttttcggatatctggcaaggtgagaactggggcagtggtcaaccttttcttcatttcttgaaagctgtcttcacaggctgtagaccattgaaatttcttttctttctttaacagctcggtcataggtctggctagcttagagaatccttcaatgaatcttcgataatatccagctaagccaaggaagctgcgaatctctgacacattcttgggcgggttccaagcaagtacagcctcaaccttgctgggatctacttcgacaccgttgggggagatcacgtgtccaagaaatgctactcggtctaaccagaattcgtatttcgagaatttagcgaatagttgatgatccctgagcttttccattatcagcctcaggtgttcagcatgttcttcctcattcttggagtatatcaggatgtcattgatgaacaccacgacaaactggtccaggtattccatgaagattttgttcattaagttcatgaagaatgctggagcattggtgagtccgaaggacatcactgtgaactcatatagaccataacgcgttgagaaagcggtcttcgggatatcttctgatctgattttcaattggtggtaacctgatctcaagtcaatttttgagaaaactcttgctcctttaagttgatcgaacaaatcgtcaatccgtggcaacgggtacttgttctttatagttacttcattcagggctctatagtcgattaccattctctcagagccatcctttttcttaaccaggagcactggggctccccaaggggatgagctaggtcgcacataacctttactctccaattcttcgatttgtcttttaacttctgctaactcattagctgccattcggtagggtctttttgcaattggtgcggtgcctggtgccagttctatggcgaactcaatctctcggtctggtggcatactcgttaattcttctggaaatacgttgggatattcacagactatgggcaccgactccaaggaggtgacttgtaaacaggttaggatagaccgactcgcggtaggggtgttagaggtaaagcggacttgctttcctccaggtccttgcaaggtgatggacttttcggcacaatctatctgccctttgtgcttagccaaccaatccatccctaggatgatgtccaagctttgcgagtctaggactatcggtttggctaggaagtcaacttcctcaattctaaggttaacttccgggcatatttgagttgcccttatattcctcccagggaaatgtactatcattggtacacgtaaattttgggttttccaaccatttcttttcacaaaagcttgtgatatgaaagaatgggaagctcctgaatcaaacagaactattgcgggtacggagttgacagagaacatacccatcacaacgtctggagcatcctgagcggtctcagcttgaatgtggttcacccggcctcgaccaaagttgttggaaacacgagaaccttgtccacttgcctgagagctaggacgagactgagctgccgctggagtaggagttctggcagtgctgccattagcatgccctgagttggtgttggtaggattctgagggcactgtcgggcatagtggcccatctggttgcaccggaaacactgaactgctgacggtcctagcgatgacttgaaagaggtaacattgtttggcgcagtattgccactaggggcacgctgctgtggctgaggtgcctgacggttcatctgaggacgaggggcgtagcctggctggcggttagcctgagtgaccgactggtggtattgcatgggttgaccgtagcgagggcgaggtgcgcctcgggaagaatttccctgatggttagacttgcgtttcttgtattcttcggtagcctcttttcgagccaacttgttgaacagacttaggtactcattgacactattattgccttgcttaagtttgttgaattcctctttcttcatatcaatggcgctttcaggcacatgagctgcacggaaagccgtagcaaactcagcccaagcaatgttagtgggttcagggtgtgcattgcagtaattctcccaccaatctgcagcaggtcctcttagctggtgagaggcgtagagcgtcttctcaacaggagtacactgcactaagttgagttttctatcaacatctttcagccaatcgtcagcctcgacgggctcgacggtctgagagaactctggcggacgagacctcagaaagtctgtcagcttggatctattgttgcccatgtgagggtggccatttccatgcgcactatgctgaaaaccggctatggctgcggctaatccttgcaagatttgtgtctgaactgccattaagtgctgcatgttgttttccacatgaggtggggaagggaggcgttcttctccagaattgtgactagcagtgcggtgagagcggtgagactgttccatctctgcattacgggaagctgtgtgatgcgagcggttgctgcggcggggttgctcaacttctgcgttgcgggaagcagtacggtgcgaacggttgctgtggtgagaccgctcattagctgactcatgattttcttctggctcaactctaccttcttcaaaaccgaagcgggctggcgcacgagcagcacggcgggggcggctagccatctgtcgagggccgatagcagcacgggccgctggcggtgggggagctgggtagtcgaatcggaacacggtggaagaaccaacaacacgcttccgcgcagtgcggataaagcgtgggccacggcgggaggaagcaactggggtgtgtccgggggtgtaggaggggctaactgggtgtgggtagggggagtacactggtgagtacggcgcacgtgagctgggggagcgcgggccactaggagtgcgagcagagccgcgggagctgtgggaggacaggtggctggcgtggcagaggcggcctgagtcccaagagacagtgtcaactgaggtgacaccctcctcggccagacgggcctccagagcggcgtagcggcgggcaagggagcggtaagtctcaaggagtaggtagtgctgagtggcctggcgtctgcatggccagaaggaaggcgtggaagctgccggaaggcagagcccccgagacggtggctgtagtcgtgggccaagcgacgaagcgcagtccaggagaggtcctggtacgcgatctggagggtgggcctggccacagtgaagtggtgtgggcgaaggccagctccgtgtatacctccacgagggtaaaggtacacagagagctcacagcgagggggaacacggtccacggagtaccccgtgtacttgggacacgagaagccaaggaagtgggcgaggtcacgaagctgagcgacgtggtgaccctcaccaaaaccgtgggaactgaagctggcgttcactgccat

SEQ ID NO: 89584 - DNA, 5556 bp, Oryza sativa
  Clone ID: PAT_MRT4530_88327C.1
ctaagggagcaggtccgggaactcggcgcggagaagatcttctcgctcccaggttgcctcgtcttcggaatgattgctccattggactttatagaacttgatggtcttccttcgagtctgacgttctacctcttcaagaaccttgatcggtctttccttgtaggtcagattcttttccagctcgatattacccaggggaacttgctcttctggaactcgaagacatttctttaactgggatacgtggaacacgttgtgcacatctgcgagaccttcaggtagctcaagctgataagccacttcgccatgtctggcggttatgaggtagggaccgatgtagcggggtgctaacttgccggacatcccaaaccttctcataccacggaggggtgatactcgcaggtacacatgatctcccttttcgaactcaaggtcacgtctccgattgtctgcgtaatttttctgacggttctgcgctgtctttaaacgctctcggatcagcttaacttgttcttctgctgacttgagtatgtcaggaccgaataccagggcttcgcccacctcattccagcacaagggggtgcggcactttcttccgaacattgcctcattcggcgacatctgaatgctggcctgataactgttgttgtatgagaactcagcatacggcaaacaacgatcccaagtgccttcgaaatccaaggcacacgcacgtagcatgtcttctaggatttggtttaccctttccgtctgaccatcggtctgtggatggtaggccgtactaaaatttagatcagttccgagggcttcatgcaactgcttccagaaccttgaggtgaactgagtgcctcgatccgacactattttcttgggacagccaaatctacatacgacatgagtcatgtagagttctgctagtttctttccatcataggtggttttcactggcacgaaatgagctgacttcgtgagtcggtccacgattacccagatggagtcgtacccgctgggggttcttggcaaaccggtgatgaaatccattccgatctcttcccatttccactcgggaatcggtaggggttgcagcagaccagctggcctctgatgttccgccttgactctttggcaaatgtcacacagggctacgtattctgcgacgtctcgcttcattccagcccaccagaagtatgccttgatatcttggtacatcttcgtacttcctgggtgaatggagtaggcggactcatgagcttcctttaggatgagatctcttaactccttcttggccggtacacagatgcgtggtccgcaccaaactgtgcctttatcgtctatggagaaattggtgtctttcttctcctgtattctttttattaattcttttatcccttcgtcgtctttctgagcctcccggatttgcgactctagggtaggctgtactgtcaagctggcagggacacctgactgtaccacggtcagtcttaacttctccaattctctgcacaggtgatcttggtcaggccgtatttgagctacattgcaataggccttgtgacttagcgcatcagcgaccacgttggctttaccaggatgatagtggattccaagatcgtaatccttgattagttccaaccattttctctgtctcatatttaactcggtctgagtgaagatatacttaagacttttgtgatcggtgtatacttcacatctgttcccgattaaatagtgcctccagatcttaagagcatgaaccacggctgccaactcgagatcatgggtgggataattggcttcatgaggcctgagctgcctggatgcataggccacaaccttttgttcttgcattaggacacatcctaagccttgtcttgatgcgtcacagaagatctcgaaatcttttcggatatctggcaaggtgagaactggggcagtggtcaaccttttcttcaattcttggaagctgtcttcacaggctgcagaccattgaaatttcttttccttctttaacagctcggtcataggtctggctagcttagagaatccttcaatgaatcttcgataatatcccgctaagccaaggaagctgcgaatctctgacacattcttgggcgggttccaagcaagtacagcttcaaccttgctgggatctacttcgacaccgttggacgagatcacgtgtccaagaaatgctactcggtctaaccagaattcgcacttcgagaattttgcgaatagttgatgatctctgagcttttccattatccgcctcaggtgttcagcatgttcctcctcgttcttggagtatatcaggatgttatcgatgaataccacgacaaactggtccaggtattccataaagattttgttcattaagttcatgaagaatgctggagcattggtgagtccgaaggacattactgtgaactcatatagaccataacgcgttgagaaagcggtcttcggaatatcttcagatctgattttcagttgatggtaacctgacctcaagtcaatttttgagaagactcttgctcctttaagttgatcgaataaatcgtcaatccgtggcaacgggtacttgttctttatagttacttcattcagggctctatagtcgattaccattctctcagagccatcctttttcttaaccagaagcactggggctccccaaggggatgagctaggtcgcacataacctttactctccaactcttcgatttgtcttttaacttctgctaactcattagctgccattcggtagggtctttttgcaattggagctgtgcctggtgccagttctatggcgaactcgatctctcggtctggtggcattctttttaattcttccggaaatacgtcgggatattcacagactatgggcaccgactccaaggaggtgacttgtaaacaggttaggatagaccgacttgcggtaggggtgttaggggtaaagcggacttgctttcctccaggtccttgcaaggtgatggacttttcggcacaatctatctgtcctttgtgcttagccaaccaatccatccctagaatgatgtccaagctttgcgagtctaggactatcggtttggctaggaagtcaacttcctcaattctaaggttaacttccgggcatatttgagttgcccttatattccttccaggggaatgtactatcattggtacacgcaaattttgggttttccaaccatttcttttcacaaaagcttgcgatatgaaagaatgggaagctcccgaatcgaacagaactattgcgggtacggagttaacagagaacatacccatcacaacgtctggagcatcctgagcggtttcagcttgaatgtgattcacacggcctcgaccaaagttgttggaagcacgtgaaccttgtccacttgcctgagagctaggacgagactgagctgccgctggagtaggagttctggcagtgctgccattagcatgccctgagttggtgttggtaggattctgaggacactgtctagcatagtgacccatctggttgcaccggaaacactgaactgctgacggtccctgcggtgacttgaaagagataacactgttaggcgcagtattgccactaggggcacgctgctgtggctgaggtgccggacggtttatctgaggacgaggggcgtagcctggctggcggttagcctgagtgaccgactggtggtattgcatgggttgaccgtagcgagggcgaggtgcgcctcggaaagaatttccctgatggttagacttgcgtttcttgtattcttcggtagcctcttttctggcatcctcaagtagaagtgccttgttgatcatatgttgaaaagtggggaagtcatgagcaagcaactggagtctcattccaactgcgattcctttcaagaatttcctgatcttcttcttgtctgtgtccacttcctcaggggcataccgagccaacttgttgaactgacttaggtactcattgatactgctgttgccttgcttaagtctgttgaattcttctttcttcatgtcaatagtgctttcaggcacatgagctgcacggaaagccgtagcgaactcatcccaagcaatgttagtgggttcagggtgtgcattgcagtaattctcccaccaatctgcggcaggtcctcttagttggtgagaggcgtagagcatcttctcaacaggagtacactgcactaagttgagttttctatcaacatctttcaaccaatcgtcagcctcgacgggctcgacggtctgagagaactctggcggacgagacctcagaaagtctgtcagcttggatctgttgttgcccatgtgagggtggccatttccatgcgcattatgctgaaaactggctatggctgtggttagtccttgcaagatttgtgtctgaactgccattaagtgttgcatgttggtttccacatgaggtgggaaagggaggcgttcttctccagaattgtgactggcagtgcggtgagagcggtgagactgtcccatctctgcatcacgggaaactgtgcgatgcgagcggctgctgcggcggggttgctcaacctctgcgttgcgggaaacagtacgatgcgaacggttgctgtggtgagactgctcattagctgattcatgattttcttctggctcaactctaccatcctcaaaaccaaagcgggctggtgcacgagctgcacggcgggggcggctagccatctgtcgagggccggcagcagcacgggccgctggcggtaggggagctgggtagtggaaacggaacacggtggcagaaccaacaacacgcttccgcgcagtgcggataaagcgtgggccacggcaggaggaagcaactggggtgtgtcctggggtgtaggaagggctaactgggtgtgggtagggcgagtacactggtgagtacggcgcacgcgagctgggggagcgcgggccactgggagtgcgggcagagccgcgggagctgtgggaggacaggtggctggcgtggcagaggcggcctgagtcccaggagatagtgtcaactgaggtgacaccctcctcggccagacgggcctccaaggcggcgtagcggcgggcaagggagcggtaagcctcaaggagtaggtcgtgctgagtggcctgagcctccgaaagctcaaccatgcgagtcagcactggctgagactcgctgtacggacaagggtacctggcgtctgagtggccagaaggaaggcgtggaagctgccggaaggcggagcctccgagacggtggctgtagtcgtgggccaggcgacgaagcgcagtccaggagaggtcctggtacgcgatctggagagtgggcctggctacagtgaagtggtgtgggcgaaggccagctccgtgtatacctccacgggggtaaaggtacacagagagctcacagtgagggggaacacggtccacggagtaccccgtgtactcgggacacgagaagccaaggaaacgggcgaggtcacgaagctgagcgacgtggtgaccctcaccaaaaccgtgggaactgaaactggcgttcactgccat

SEQ ID NO: 89585 - DNA, 592 bp, Oryza sativa
  Clone ID: PAT_MRT4530_88328C.1
catgtaaattgtttatagttagtattaattttcaggaatggccctaggagcaatctgtctcagatgcatatactgtacagctcaagtcaccaatgcttaattacactaataatctattcatggagagtggattactatcttcatttatgactgaattagaaaaatatttgctcatggaaaggatttcagcagtttacataagggctgcaataatgtatacacttctatcttgctaaattgtgtgcactactattaaaaaggataattattcgggtaccagctttagttggtatagccttcctgattcctattatttaattttttttctagaagttatttatatcgctgttactgaagacatctcgactgaaattattttttcctgcgcctgcaacagtagaaagttcagtagcacatgttgatttagggaactgtttaaacaaaaaaggttaactcacacaggatgtagttttggccaacattggcccatattaggatgcttaattctgatcctattttattttgcattaacaggcactgcacggctgcagcggtgtaattaaatcatcgcatcagggggggggccttatgc

SEQ ID NO: 89586 - DNA, 526 bp, Oryza sativa
  Clone ID: PAT_MRT4530_88329C.1
atgctggagcggcaccgtgtcctgcacaggctgctgctgctgctcgggacgtgcatggtctgggcggtcgctgggcagggcgaggcgggagaggaggacggcgccgcgacggcggtcggcggcggcgacagcggcagcccggcggagctccacggcgtgggcgtgcagcggccgtgcgcgggcgtcgacggggaggcgcgggcgtcgcgggtggcgggaaggcgcgggcgtcaacgaggcgaagcgggagaggaggaggacggcgccgcgacgggcggccggcggtcaaccgagcttgagccaattcatggtggcagtggcggtggcaggcgagcgcggtggcggcaggcgagtgcggtgacgactgctgctggcgccccgtctcagcccaactccggcggcagggcgagcggctaagtacggcggcagtccgagcggcagcagggccggggcgagcggcggctgggatagggacgacgggagggaccccgagtcgtcgtcgtggcgtcgtgctccgtgtcgctga

SEQ ID NO: 89587 - DNA, 3829 bp, Oryza sativa
  Clone ID: PAT_MRT4530_8832C.1
atgctcgccggcgaacggcgacgcgaggacgcacacggagggcaccaacgggtagcggacggcacggcgaacacaccggcgaccaaaacgacggcggagaggcaacggacgacgacggcgacgaggaaggggcggcggctaccttcgggttgtcgacggcgacgatgctccggcggtctccgacggcagcgaaggggcggacgaggacggcggcgacttggcgatgacgacggcggccttcccgagtgacggcgacggctggaacgacggcggcgcacggctggagcggcggcggcgaaggcaaagctagggcacatggcgctagggctactccggcgacgagaggcgaaggcgagggtggcggcggaaagagaagagcacggggatccttttaaaggggctcggaggcgacggcggaggcccacggcgacggcaacggcgaaggaaactccgtccgcccctccttcgtcgccgtaggcagccggaagccgcttcttcctcgacgccgtcgccgtcccatattagaagatgctataactggtaataatttgattagctcctggtttggaatggtatattcctggtttggagatagatctgtccagccgatgccgcgcttcaagcctgagtacttgtttggtgttgagggatttgtccaggagttgcgtacgatgtcctttgtcataagatttgggactgcccctttgtatgcccagattcctcatgatcgtcacgaagagaagtgccgagtcaaagtcaccttgaacagtaatagtgaagatatcccatcagtgatgttcgaagatggaggaggaaactacatccatgcatgtcaggaggtggcaaggatcgccataggagagctccgcgatcgctacagtgatcagttggccgacactgagtatcgctaccatcctcgccaacctcagggaagtgaccgtggcagctaccttgagactgaggggattgagaatgatgctactacaaggcatttggttgagatgctgtgggctatggatgaaacccgcgcggagattgtgctagcagctcaagatcgtgaagaccggaatcgtggtaagatttgcaagctagaggacaaggtggatcgtttggagaaggaactagccgcgttgaagggagaagcaccaccgcagaaggccaggattcgtcttaccgcaaggaagagagctctatttgtccctcgctaccaattagcgccaaaggtccgtgtggtggagaaagaagttaccccagccctagcggatcctccggtcgtcaatgtaagtgatgatgaaggagaagaatcgaagcgcacccattcaaaggtcgagtggggagctactcaagatgatggagacgagccgaacgagccttcaattaactccaatgcccggaagacctagacaacgggaatggtcccaacatcaacaataacaacaccaatggagagaatcccacacttgcccaagtcctggctcaacaggcacagcttctgaacatgatgatgcagcaactccagaaccagcagaactagggaaataaccatgcacctccccagaacaagttagcagaatttcttcgtgtgaggccgcccactttctctagcaccactaatcctgttgaagctggtgattggctgcacaccatagagaagaagttggatttgcttcagtgcactgatcaggagaaggtctcatttgcatcacaccagctgcatgcccctgcctttgagtggtgggatctcttccgccttaacagaactactgctgaacctatcacttggcttgaattcaccgctgctttccggaagacgcatataccatcgggagtgatgtctctcaagaagaaggaattcaggtcgctcactcagggttctcgctctgtcactgagtatctgcacaagttcaatcgtttggctcgttatgctccggaaaatgtgcgcaatgatgaagagcgccaggagaagtttttggaaggacttaatgatgagctttcttacccactcatgacgggggaatatcatgatttccagaagttggtggataaggctattcgccaggaagacaagtacaaccgcatggagcaaaagaaacgccggattgctcaattcaaggcacaacaggggaatagtcaaaggccgcgtcttactttgggaccccagtccatgccacagggaggttcttcgtctgttgttcgtccgcagcgtcagatcttcaacaacaatactggcaacaacatccgcaatcaagctccacgccctgttgcggttttgacacagcaacaacctgctaagagggagcaaggcagcaagcccgtggtgtgtttcaactgtggagacctaggacattacgctgataagtgtccgaagccccgacgcgtgaaggttgtccctacccagagcaactctaccgtaccagcatcaaaggctcgtgtcaatcatgttgctgctgcagaagctcaagatgctccagatgtgattttgggtacgttccttgttaacttagttcctgcaacagtgcttttcgattctggtgctacacattcattcttatctatgagttttgcgggaaatcatgggatggaagtagaagatcttagacgtcctttgatggttagtaccccaagtaatcaagcactctctttgcaacgtagcccctctgtcagaatagaaattcaaggagtaccatttctggccaatcttatcctgttagaatccaaagaccttgatgtcatcctagggatggactggttagccagacataaaggtgtgatagactgtgccaacagaaaagtaactctcaccagcaatgatggtcgcgttgtaacagttcatgcattgttttttgagtctttaaggtcaagattgaaccaaatatactttggaaaagattcctatagtccgggagtatcccaatgtgttcccagacgatttacctgggtatccgccttaaaaggatatagagttcagaatagatttggtaccagaaccactccgatccataagagaccttatagaatggcagccaatgagttggcagaagtcaagaggcaagtagacgatttgcttcagaaaggatacatcagaccgagttcatctccatggggagctccagttatttttgtggaaaagaaagaccatacccagaggatgtgtgtggactatcgtgcactaaatgatgtgactatcaagaataagtatccgctacctagaattgatgatttgtttgatcagcttaaaggtgccaccgttttctccaagatagatcttcggtcagggtatcaccagttgaggattaaagaggaagatatacctaagccagcttttaccactagtaaggtgtttatggaatacctagacaagtttgtggtggtctttattgatgacattcttatctactcccgaaccaaagaagagcatgaagaacatcttcgccttgcactagagaagctacaagaacatcaattgtatgctaagtttagtaagtgtgaattttggttgtctgaagtgaagttcctgggtcacgtcttctcagcagagagtgccgtcgatcctagtaatgtggaatccgtaaccaactggaaacaaccgaagatagtttcagagattcgcagtttcctaggcctcgcaggatattatcggagatttatagagaatttctccaagattgataagcccatgacacggctgcttcagaaagaggtggagtacaagtggtcagaagaatgtgtcacgaccggaaataacccaacgggctttcctgacgtgcgtgcattaatccttgtcccaggaggcaaggtacaccaaaagttgatacaattcagagtttaa

SEQ ID NO: 89588 - DNA, 4924 bp, Oryza sativa
  Clone ID: PAT_MRT4530_88330C.1
tcaggtgtatacttcacatctgttcccgattaaatagtgcctccagatcttaagagcatgaaccacggctgccaactcgagatcatgggtgagatagttgacttcatgaggcctgagctgcctggatgcgtaggccacaacctttcgttcttgcattaggacacatcctaagccttgtcttgatgcatcacagaagatctcaaaatcttttcggatatctggcaaggtgagaactggggcagtggtcaacctattcttcatttcttgaaagccgtcttcacaggctgctgaccattcaaatttcttttccttcattaacagctcagtcatatgtctggctagcttagagaatccctcaatgaatcttcgataatatccagctaagccaaggaagctgcggatctctgacacattcttgggcgggttccaagcaagtacagcttcaaccttgctgggatctacttcgacaccgttggaggagatcacgtgtcccagaaatgctactcggtccaaccagaattcgcatttcgagaacttagcgaatagttgatgatccttgagctttcccattatcagcctcaggtgttcagcatgttcttcctcattcttggagtatatcaggatgtcatcgatgaataccacgacaaactggtctaggtattccatgaagattttgttcattaagttcatgaagaacgctggagcattggtgagtccgaaggacatcactgtgaactcatatagaccataacgtgttgagaaagcggtcttcgggatatcttcatatctgatttttaatttgtggtaacctgatctcaagtcaattttagagaaaactcttgctcctttaagttgatcgaacaaatcgtcaattcgtggcaacgggtacttgttctttatagttacttcattcagggctctatagtcgattaccattctctcagagccatcttttttcttaaccaggagcactggggctccccaaggggatgagctaggtcgcacataacctttactctccaattcttcgatttgtcttttgacttctgctaactcattagctgccattcggtagggtctttttgcaattggtgcggtgcctggtgccagttctatggcgaactcaatctctcggtctggtggcatactcgctaattcttctggaaatacgtcgggataatcgcagactatgggcaccgactccaaggaggtgacttgtaaacaggttaggatagaccgacttgcggtaggggtgttagaggtaaagcggacttgctttcctccaggtccttgcaaggtgatggacctttcggcacaatctatctgtcctttgtgcttagccaaccaatccatccctaggatgatgtccaagctttgcgagtctaggactatcggtttggctaggaagtcaacttcctcaattctaaggttaacttccgggcatatttgagttgcccttatattccttccaggggaatgtactatcattggtacacgtaaattttgggttttccaaccatttcttttcacaaaagcttgtgatatgaaagaatggaaagctcctgaatcgaacagaactattgcgggtacggagttgacagagaacatacccatcacaacgtctggagcatcctgagcggtctcggcttgaatgtggttcacccggcctcgaccaaagttgttggaagcacgagaaccttgtccacttgcctgagagctaggacgagactgagctgccgctagagtaggagttctggcagtgctaccattagcatgccctgagttggtgttggtaggattctgagggcactgtctggcatagtgacccatcaattggtgatattgcatgggttgaccatagcgagggcgtggtgcgcctcgggaagaattcccctgatggttagacttgcgtttcttgtattcttcggtagcctcttttctggcatcctcaagtagaagtgccttgttgatcatatgttgaaaagtggggaagtcatgagcaagcaactggagtctcattccaactgcgattcccttcaagaacttcctgatcttcttcttgtctgtgtccacttcctcaggggcataccgagccaacttgttgaactgacttaggtactcattgacactgttgttgccttgcttaagcctgttaaattcctctttcttcatatcaatggtgctttcaggcacatgagctgcacggaaagccgtagcaaactcatcacaagcaatgttagtgggttcagggtgtgcattgtagtaattctcccaccaatctgcagcaggtcctcttagctggtgagaggcgtagagcgtcttctcaacaggagtacactgcactaagttgagttttctatcaacatccttcagccaatcgtcagcctcaacgggctcgacggtctgagagaactctggcggtcgagacctcaggaagtctgtcagtttggatctattgttgcccatgtgagggtggccatttccatacgcattatgctgaaagccggctatggccgcggctaatccttgcaagatctgtgtctgaactgccatcaagtgttgcatgttgttttccacatgaggcggggaagggatgcgttcctctccagaattgtgaccggcagcgtggtgagagcggtgagactgttccatctctgcattacgggaagctgtgtgatgcgagcggttgctgcggcggggttgctcaacttctgcattgcgggaagcagtacggtgcgaacggttgctgtggtgagattgctcattagctgactcatgatttgctcctggctcaactctaccttcctcaaaaccaaagcgggctggtgcacgagcagcacggcgggggcggctagccatctgtcgagagccgtcagcagcacgggccgctggcggtgggggagctgggtagtcgaagcggaacacggtggaagaaccaacaacacgcttccgcgcagtgcggataaagcgtgggccacggcgggaggaagcaacgggagtgtgtccgggggtgtaggaggggctaactgggtgtgggtagggggagtacactggtgagtacggcgcacgcaagctgggggagcgcgggccactgggagtgcgggcagagccgcgagagctgtgggaggataggtggctggcgtggcagaggcggcctgagtcccaagagacagtgtcaactgaggtgactccctcctcggccagacgggcctccagagcggcgtagcggcgggcaagggagcggtaagcctcgaggagtaggtcgtgctgagtggcctgagcctccgaaagctcaaccatgcgagtcagcactagccgagactcgttgtacggacaagggtacctggcgtctgcgtggctagaaggaaggcgtggaagctgccggaaggcagagcccccgagacggtggctgtagtcgtgggcgaagcgacgaagcgcagtccaggagaggtcctggtacgcgatctggagagtgggcctagccacagtgaagtggtgtgggcgaagaccagctccgtgtatacctccacgagggtaaaggtacacagagagctcacagcgagggggaacatggtccacggagtaccccgtgtactcgggacacgaaaagccaaggaagcgggcgaggtcacgaagctgagcgacgtggtgaccctcaccaaaaccgtgggaactgaagctggcgttcactaccatcattaaacttgctctgagcagactgatgtctctgctatcgctggcaatggcaatgtctctgcatacaccttgaatgattgtagggatagcacagcaatcccctgtttgaaatagctccaagtccaagatttcttcgaatgagctattcttagctccataaatcatgcaagcaagaaggaagttgagaaaccggtggccttgccaaaacctccgaggttcactggcaggcatttgcgaagccgcggtgttacttgattcattccactgctcgatgaactcggcatcaccgatacctaccacattgcatgcagttgagccacagatttcgcagatcctgtttcccctgatcttgaaccaggtctcggcgcactgcttatgggcgcaggagaggtcgtccttgcaggagcagccgaggaacatgccggagccggactcggcggcggcgctctcgaggccgaggtggcagatgcggcaattcctctcggccgtgtccgggctggccttgctgatctcggccagcccggcctcgaggtccacgtcgcccagcgagcactccgacacgcacgacttcctcctgccgccgccgtccgcgtccgcgtccccggcgccggagcggacggacgcgcacgtcgagatgaagtcctcgagggcaacggagccctggcgcgagtgcgaccgccatgagtggtcctccgcgtcggagaagcgctggctccccttatcctcatccgagctctcctccgcaagcccgcctcctcctcctccgccgccgccgacgtggcgggccggctccgcgctagaatccgcggcggcggcgggagcgatcgtcaacgcctgctcgccgtcgttcaccattgctcacgccaaacaaactcttgcagttacaggttactccaaagctgacggtgtgccaccacgcaagcaatgcggccgatcactgggagcacccacccaagaaaaatccaagctgccagtagattctaagctctaaaaaaataacgaattgaaaatatactgctaccgacgaggcatcaggtgcctaaaaaagattggattttaaagctgtttcttgatccacagtggcgcagagagagaagcgagaaagcgaggaagagtcgcgtagctgggaagaatcgattgcacccggagtaggcgaaagagagaaggggaaaaaagaaaagagaaaacttgcggagttgtgcctcgtgccgaattcctgcagcccggg

SEQ ID NO: 89589 - DNA, 4149 bp, Oryza sativa
  Clone ID: PAT_MRT4530_88331C.1
ctattggactttgtagaacttgatggtcttctttcgagtctgacgttctgcctcttcaagaaccttggtcggtctttccttgtaagtcagattcttttccagctcgatattacccagagggacttgctcttctggaactcgaagacatttcttcaactgagacacgtgaaacacgttgtgcacatctgcgagaccttcaggtaactcaagctgataagccacttcgccacgtctggcggttatgaggtaggggccgatgtagcggggtgctaacttgccggacatcccaaacctcctcataccacggaggggtgatacccgcaggtatacatgatctcctttttcgaactcaaggtcacgcctccgattgtcagcgtaattcttctgacggttttgcgctgtctttaaacgttctcggattagcttaacttgttcttctgctgccttgagtatgtcaagaccgaataccagcgcttcgcccacctcattccagcacaagggagtacggcactttcttccgaacattgcctcgttcggcgacatctgtatgctagcctgataactgttgttgtatgagaactccgcatacggcaaacaacgatcccaggtgccttcgaaatccaaggcacacgcacgtagcatgtcttctaggatttggtttaccctttctgtctgaccatcagtctgcggatggtagcccgtacttaaatttagatcggttccgagggcttcatgcaactgcttccagaaccttgaggtgaactgagtgcctcgatctgacacgatcttcttgggacagccaaatctacatacgacatgggtcatgtagagttctgctagtttctttccatcaaaggtggttttcactggcacgaaatgagctgatttcgtgagtcggtccacgattacccaaatggagtcgtacccgctaggggttcttggcaaaccggtgatgaaatccatcccgatctcttcccatttccactcgggaatcggtaggggctgtagcagaccagctggcctctggtgctctgccttgactctttggcaaatgtcacacagggctacgtattctgcgacatctcgcttcattctagcccaccagaaatatgccttgatatcttggtacatcttcgtacttcttggatgaatggagtaggcggactcatgagcttcctttaggatgagatctcttaactccttcttggctggtacacagatgtgtggaccgcaccaaactgtgccttggtcgtctatggagaaattggtgtctttcttttcctgtattctttttattaactcttttatcccttcgtcatctttctgagcctcccggatttgcgattctagggtaggctgtactgtcaagctggcagggacacctgactgtaccacggtcagccttaacttctccaattctctgcacaggcgatcttggtcaggccgtatttgagctacattgcaataggccttgcgacttagcgcatcagcgaccacgttagctttaccgggatgataatgaattcccagatcgtaatccttgattagttccaaccatcttctctgcctcatgtttaactcggtctgagtgaagatgtatttaagacttttgtgatcggtgtatacttcacatctctttccgattaaatagtgcctccagattttaagagcatgaatcacggctgccaactcgagatcatgggtggggtaattgacttcatgaggcctgagctgtctggacgcataggccaccacctttcgttcttgcattaggacacatcctaagccttgtcttgatgcatcacagaagatctcaaaatctttttggatatctggcaaggtgagaactggggcagtggtcaaccttttcttcatttcttgaaaactgtcttcacaggctgcagaccattgaaatttcctttccttctttaatagctcggtcataggtctggctagcttagagaatccttcaatgaatcttcgataatatccagctaagccaaggaagctgcgaatctctgacacattcttgggcgggttccaagcaagtacagcttcaaccttgctgggatctacttcgacaccgttggaggagatcacgtgtccaagaaatgctactcggtctaaccagaattcgcatttcgagaatttagcgaatagttgatgatctctgagcttttccattatcagcctcaggtgttcagcatgttcttcctcattcttggagtatatcaggatgtcatcgatgaacaccacgacaaactggtccagcattctctcagagccatcctttttcttaaccagaagcactggggctccccaaggggatgagctaggtcgcacataacctttaccctccaattcttcgatttgtcttttaacttctgctaactcattagctgccattcggtagggtctttttgcaattggtgcagtgcctggcgccagttctatggcgaacacaatctctcggtctggtggcatacttgttaattcttctgggaatacgtcgggatattcacagactatgggcaccgactccaaggaggtgacttgtaaacaggttaggatagaccgacttgcggtaggggtgttagaggtaaagcggacttgctttcctccaggtccttgcaaggtgatggacttttcagcacaatctatctgtcctttgtgcttagccaaccaatccatccctagaatgatgtccaagctttgcgagtctaggactatcggtttggctaggaagtcaacttcctcaattctaaggttaactcccgggcatacttgagttgcccttatattcctcccaggggaatgtacttgtccacttgcctgagagctaggacgagactgagctgccgctggagtaggagttctggcagtgctgccattagcatgccctaagctggtgttggtaggattctgagggcactgtctggcatagtgacccatctggttgcaccggaaacactgaactgctgacggtccctgtggtgacttgaaagaggtaacactgtttggcgcagtattgccactaggggcacgctgctgtggctgaggtgccggacggttcatttgaggacgaggggcgtagcctggctggtggttagcctgagtgaccgactggtggtattgcatgggttgaccgtagcgagggcgaggtacgcctcgggaagaatttccctgatggttagacttgcgtttcttgtattcttcggtagcctcttttctggcatcctcaagtagaagcgccttgttgatcatatgttgaaaagtggggaaatcatgagcaagcaactggagtctcattccaactgcgattcctttcaagaatttcctgatcttcttcttgtctgtgtccacttcctcaggggcgtaccgagccaacttgttgaacatacttaggtactcattgacactgctgttgccttgcttaagtctgttgaattcttctttcttcatgtcaatagtgctttcaggcacatgagctgcacggaaagccgtagcaaactcatcccaagcaatgttagtgggttcagggtgtgcattgcagtaattctcccaccaatctgcagcaggtcctcttagctggtgagaggcgtagagcgtcttctcgaccggagtacactgcactaagttgagttttctatcaacatctttcagccaatcgtcagcctcaacgggctcgatggtctgagagaactctggcggacgtgacctcagaaaatctgtcagcttggatctattgttgctcatgtgagggtggccatttccatgcgcattatgctgaaaaccggctacggctgcggctaatccttgcaagatttgtgtctgaactgccattaagtgttgcatgttgttttccacatgaggtgggaaagggaggcgttcttctccagaattgtgactggcagtgcggtgagagcggtgagactgttccatctctgcattacgggaaactgtgcgatgcgagcggctgctgcggcggggttgctcaacttctgcgttgcgggaagcagtacggtgcgaacggttgctgtggtgagactgctcattagctgactcatgattttcttctggctcaactctaccatcttcaaaaccaaagcgggctggtgcacgagctgcacggcgggggcggctagccat

SEQ ID NO: 89590 - DNA, 351 bp, Oryza sativa
  Clone ID: PAT_MRT4530_88332C.1
atggccaccgcgtgcgcgtgcacccgcctacccctccaaaacggccctcttggcggcaacgaggtcaaggacctagccgaagtgggagcttccaatgagggattggatggaaggggaacaccttgttggctctcaaaggcgagcacccagtcgtggtggaacaacaacatccatcatcggagtgcatccgaccaccaccgacgactgaatctgagcagctggagtcggcccttgttgctcgaggagtcgcgacaaaagagcagcagagagggcatcatcattccgagcatgtgtcacaataaggtcatcatagggaccctcaatgctaggatccccctgcccctccactag

SEQ ID NO: 89591 - DNA, 1063 bp, Oryza sativa
  Clone ID: PAT_MRT4530_88333C.1
ttttcctccctctcgaaggaagcattcctcgccactctctctccatatgctgcccgccaccgccaccgcctccgccgcgccgccgccgccgccgccgttgccggcgtcccccggcggcgagccgcacgccgccctgctcctgtccctggcctacctgccgctgcgcgagctgctgtcctgcgcgggcgcgtgccgccgcctccgcgacgccgtcgcgggggacccgctcctgtggcggcgcgtcgcggtggcggcgccgccgctcgcccgccggctcaccgacgaggcgctcctcgcgctgacggggagggcgggggggacgctccggtccctccgcctcctcgggtgcacccgcgtctccgacgccggcctgctccgcgtcgtcgagcgaaaccctggcatcaccgagattctcagtatggagtctagtacgctactgaaggacaccatgatctcaactagggctaaaatttacaagctctatatgcccagatgtacaggcttgactgctgaaggtgtggtgaagattgtccaggttctttatgaatgcaaggggaatctaaaccgcattcgactccatggtatttgcaggatgactaagcatcatcttgatgctatcagttctgccatgtgcaagggtaaccaacaagaagatgatcaatcacttttctatagccacagagtccatgaagtgctcaacaccaacgatgaacgccgtattgatgttgatgtgtgccctatgtgcacaaatgtgaggctggtgtttgattgtacaagggatggctgtaggagaaaggatagttgggctcaatgtcgaggctgcttcttctgtgttgcccgatgcgaaacatgcggtgggtgcatcgacttggaggagctcagcgagactgaacttgcatgctcggacttcctgtgcatggagtgctggcttccgctcccgaaatgtagcacttgcaatcggccctactgcaagaggcatgaaaatctgaaggattctgaattatttattgatcacgtcaaatttagcgggtgcagacttcatggacttgtgcaacttgtctga

SEQ ID NO: 89592 - DNA, 150 bp, Oryza sativa
  Clone ID: PAT_MRT4530_88334C.1
atggctgcgcggaggggcgaggctgagttcaccgacgcgcggggtcctcccagcggcgtggcggagaggaggatgagcagaagatatatcggctatgatagaagatcagacttaaccgagacagttccagctaaaccgatgcatctctaa

SEQ ID NO: 89593 - DNA, 5559 bp, Oryza sativa
  Clone ID: PAT_MRT4530_88335C.1
ctaagggagcagctccggaaactcggcgcggagaagatcttctcgttcccaggttgcctcatcttcagaatgattgctccattggaccttgtagaacttgatggtctttcttcgagtctgacgttctgcttcctcaagaaccttgatcggtctttccttgtaggtcagattcttttccagctcgatgttacccaggggaacttgctcttctggaactcgaagacatttctttaactgggatacgtggaacacgttgtgcacatctgcgagaccttcaggtagctcaagctgataagccacttcgccacgtctggcggttatgaggtaggggccgatatagcggggtgctaacttgccggacatcccaaaccttctcattcctcggagtggtgatacccgtaggtacacatgatctcctttttcgaactcaaggtcacgcctccgattgtcagcgtaattcttctgacggttctgtgctgtcttcaaacgttctcgtatcagcttaacttgttcttctgctgacttgagtatgtcaggaccgaataccaaggcttcgcccacctcattccagcacaagggagtgcggcaccttcttccgaacattgcctcattcggcgacatctgaatgctggcctgataactgttgttgtatgagaactcggcatacggcaaacaacgatcccaagtgccttcgaaatccaaggcacatgctcgcagcatgtcttctaggatctggtttactctttctgtctgaccatcggtctgcgggtggtaggccgtactaaaattcagatcagttccgagtgcttcatgcaattgcttccagaaccttgaggtgaactgagtgcctcgatccgacactattttcttgggacagccaaatctacatacgacatgagtcatgtagagttctgctagtttctttccatcataggtggtcttcactggcacgaaatgtgctgacttcgtgagtcggtccacgattacccaaatggagtcgtatccgctgggggttcttggcaaaccggtgatgaaatccattccgatctcttcccatttccactcgggaatcggtaagggttgtagcagtccagctggcctttggtgttctgccttgactctttggcaaatgtcacacagggctacgtattctgcgacatctcgtttcattccagcccaccagaagtatgccttgatatcttggtacatcttcgtacttcctgggtgaatggagtaggcggactcatgagcttcctttaggatgaggtctcttaactccttcttggccggtacacagatgcgtggaccgtaccaaactgtgccttgatcgtctatggagaagttggtgtctttcttctcctgtattctttctattaactcttttatcccttcgtcttctttctgtgcctcccgaatttgcgattctagggtaggctgtactgtcaagctggcagggactcctgactgtaccacggtcagccttaacttctccaattctctgcacagttgaccttggtcaggccgtatttgagctatattgcaataggccttgcgacttagcgcatcagcgaccacgttggctttaccaggatgatagtggattccaagatcgtaatccttgattagttccaaccatcttctctgtctcatatttaactcggtctgagtgaagatatacttaagacttttgtgatcggtgtatacttcacatctgttcccgattaaatagtgcctccagatcttaagagcatgaatcacggctgccaactcgagatcatgggtggggtaattgacttcatgaggcctgagctgcctggatgcataggccacaacctttcgttcttgcattaggacacatcctaagccctgtcttgatgcatcacagaagatctcgaagtcttttcggatatctggcaaggtgagaactggggcagtggtcaatcttttcttcatttcttgaaagctgtcttcacaggctgtggaccattgaaatttcttctccttctttaacagctcggtcataggtctggctagcttagagaatccttcaatgaatcttcgataatatccagctaagccgaggaagctgcgaatctctgacacattcttgggcgggttccacgcaagtacagcttcaactttgctgggatctacttcgacaccgttggaggagatcacgtgaccaagaaaagctactcggtccaaccagaattcgcatttcgagaatttagcgaatagttgatgatctctgagcttttccattatcagcctcaggtgttcagcatgttcttcctcgttcttagagtatatcaggatgtcatcgatgaataccacgacaaactggtccaggtattccataaagattttgttcattaagttcatgaagaatgctggagcattggtgagtccgaaggacattactgtaaactcatatagaccataacgcgtcgagaaagcggtcttcggaatatcttcagatctgattttcagttggtggtaacctgacctcaagtcaatttttgagaagactcttgctcctttaagttgatcgaataagtcgtcaatccgaggcaacgggtacttgttctttatagttacttcattcagggctctatagtcaattaccattctctcagagccatcctttttcttaaccagaagcactggggctccccaaggggatgagctaggtcgcacataacctttactttccagttcttcgatttgtcttttaacttctgctaattcattagcggccattcggtagggtctttttgcaattggagctgtgcctggtgccagttctatggcgaactcaatctctctatctggtggcattcttgttaattcttccggaaatacgtcgggatattcacagactatgggcaccgactccaaggaggtgacttgcaaacaggttaggatagaccgacttgcggtaggggtgttaggggtaaagcggacttgctttcctccaggtccttgcaaggtgatggacttttcggcacaatctatctgtcctttgtgcttagccaaccaatccatccctagaatgatgtccaagctttgcgagtctaggactatcggtttggctaggaagtcaacttcctcaattctaaggttaacttccgggcatatttgagttgcccttatatttcttccaggggaatgtactatcattggtacacgcaaattttgggttttccaaccatttcttttcacaaaagcttgcgatatgaaagaatgggaagctcctgaatcaaacagaactattgcgggtacggagttgacagagaacatacccatcacaacgtctggagcatcctgagcggtttcagcttgaatgtgattcacacgtcctcgaccaaagtggttggaagcacgggaaccttgtccacttgcctgagagctaggacgagactgagctgccgctggagtaggagttctggcggtgctgccattagcatgccctgagttggtgttggtaggattctgaggacactgtctagcatagtgacccatctggttgcaccggaaacactgaactgctgacggtccctgtggtgacttgaaggaggtaacactgtttggcgcagtgttgccactagggcatgcttctgtggctgaggtgccggacggtttatcgtagcgagggcgaggtgcgcctcgggaagaatttccctgatggttagacttgcgtttcttgtattcttcggtggcctcttttctggcatcctcaagtagaagtgctttgttgatcatatgttgaaaagtggggaagtcatgagcaagcaactggagtctcattccaactgcgattcctttcaagaatttcctgatctttttcttatcggtgtctacttcctcaggggcgtaccgagccaacttgttgaactgacttaggtactcattgacactgctgtggccttgcttaagtctgttaaattcttctttcttcatgtcaatagtgctttcaggcacatgagctgcacggaaggcagctgcaaactcatcccaagcaatgttagtgggttcaggatgtgcattgcagtaattctcccaccaatctgcggcaggtcctcttagctggtgagaggcgtagagcgtcttctcaacaggagtacactgcactaagttgagttttctatcaacatctttcaaccaatcgtcagcctcgacgggctcgacggtctgagagaactctggcggtcgagacctcagaaagtccgtcagcttggatctgttgttgcccacgtgagggtggccatttccatgcgcattatgctgaaagctggctatggctgtggttagaccttgcaggatttgtgtctgaactgccattatgtgttgcatgttgttttccacatgaggtggggaagggaggcgttctcctccagaattgtgactggcagtgtggtgagagcggtgagactgctccaactctgcttcacgggaaactgtgcgatgcgagcggttgctgcggcgaggttgctcaacctctgcgtcgcgggaaacagtacggtgcgaacggttgctgtggtgagaatgctcattagctggttcgtgatttgcttctgcttcaactctaccatcatcaaaaccaaagcggactggtgcacgagctgtacgacgggggcggctagccatctgatacaacgggtgtggactagtcacagagctacgccgagcttgactgtgcgcacacctcctaggagaaccagactgtcgagggccggcagcagcacgggccgctggcggtgggggagctgggtggcggaaacggaacacggtggaagaaccaacaacacgcttccgcgcagtgcggataaagcgtgggccacggcgggaggaagcgactggagtgtgtccgggggtgtaggaagggctaactgggtgtgggtagggggagtacactggtgagtacggtgcacgcgagctgggggagcgcgggccactgggtgtgcgagcagagccgcgggagctgtgggaggacaggtggctggcgtggcagagacggcctgagtcccaagagatagtgtcaactgaggtgacaccctcctcggccagacgggcctccaaggcggcgtagcggcgggcaagggaacggtaagcctcaaggagtaggtcgtgctgagtggcctgagcctccgaaagctcgaccatgcgagtcagcactggctgagactcgctgtacggacaagggtacctggcgtctgagtggccagaaggaagacgtggaagctgccggaaggcggagcctccgagacggtggccgtagtcgtgggccaggcggcgaagcgcagtccaggagaggtcctggtacgcgatctggagagtgggcctggccacagtgaagtggtgagggcgaaggccaactccgtgtatacctccacgagggtaaaggtacacagagagctcacagtgagggggaacacggtccacggagtaccccgtgtactcgggacacgagaagccaaggaaacgggcgaggtcacgaagctgggcgacgtggtgaccctcaccaaaaccgtgggaactgaagctggcgttcactgccat

SEQ ID NO: 89594 - DNA, 2366 bp, Oryza sativa
  Clone ID: PAT_MRT4530_88336C.1
ccccaattcccaaattttttaacctaaccctagctttgcaaggagacgggcggcggggggcgctgcgtgcggcgtgcggtgcggcggcgggcgcggtgtacggcggcggcgagccggcgaccgcggggcagccagccaggcaggggcggctgccggctggacgcactggcgcagcatctcctagggtggcggcggagcgggcgcacggccgtggaggcgtcgacgcaggaagaggaccactcggcttggcgccagggcgcggggcagcggctgactcgtgaggcagcggcgcggcgcggcctgcggcgacagcggcattgcggcgcgacgcgcggcctgctgcgacagcggcagtgcggccatggacgacaagctctacccgcctcgaggcccagcgcgaagaaatcaagtcccgagccccgatgtcgaaaagaacattgttcaactattattcaagtggcagcagcagtactcctactgcatcagaggatgatgagaacacaagacaacaaaaattggcaagggtagagtttacttgcttagatattgttagtgatccaggaacgtgcaaaccaattgatgagtatccatttgagattagagatcaagtgaagagggcatttgttttaaggggtccaactcaaccagttggttatacatttccttgcaaatggcaaagtgcgagcaagattgatcccaaggtgcgggtgcagattatcttccaaacatgtttggggctctactgggactccatggcacatgttaagtgctctggatcgcttgctattttctgctcctcaatcgtgctcattggctcacacatggacggcttcagttatgcacaaccgtcttcacaaagcacatcaaaggaccagcatggcagcaacatcaacagtgcgctaaaagttttgaatcttgtaccaagaaaggctgactatgacaaagtgggaggtccatgccatcaccaactaatccatgactgcatgaatgacatcttgggggttcaatcaaatcatactatacacaagggaaatggtgtcacttttaactcatgcagcaatcctgcacaggctaaatttgatagctttgtttcaaataatggctcggctttgcgttccaggactagattcataaaggaggacatgtttatgctgataatggagctgcacaggaaaggagaaaccagtacagatcaatctattttggcagctgccatgagttcctgtgctgataggcaaatgttcacccaaggcacacagcttcatggtctattggttaaagttggctgtgattcaactgtctttattggcagctcacttatcaccttatattcgaggtgtagccagttggaaagttcgtacttggttttccagaccatgccaaccaaaaacacagtgtcatggacagcaatgatttctggttttgcgctacataatcgggttgaaccatgtctccatttgtttgcgtcaatgaggctttcaagttgcaagccaaatgacatcacatttgccactctttttagtgtgtgcactaaccacgcacttctagcacttggtaaaagtgttcatgctttacaaatgagaatgggtttccattcatatgtgcatgtttccaatgccctgctgtccatgtatgcaaagtgtgggtgcatagatgaagcccagtccatatttggcttcattgcctgtaaagaccttgtttcgtggaatgccatgatctttggatgttcgcagtatggccttgctaagcattgccttgacttgctgaaagaaatggagaggcaacacatagtaccagatgctctcgccttccttcgtgtcggtttttcaggccgacatggccgccttgtggaggaaggccgacgctgctcaaagacaatcttttaacatagaagaaaaccggggctcgatccgtactcgggtttgctggaccttcctgggcgcgcagcattgcttgaagaagcgtgggattcgatccaaacaatgcctatcccggcaaagcccgtcatatgggggtctctaccggggacccgtagagtgtacaggaaaaatgcgatcgcaatcgacactgcagagaatgtttgcaaccatgagccaggctatttctcaaatcagatacaagtgtccaatctgtatacatgagtaggtgtttgcagtcatatgggcaggtttagaatgccattgtgtccgagaatcctaagggtgggcgttgtgtagaactcgagttaagatgtggatgaattgcctttcatgaccttgttgcgtggaatgcaattacctcaggaagttaatagtcaagatataatagattgattaaaagcacacatggaatgcaagtatgatatgcttacagaaggcctggagtag

SEQ ID NO: 89595 - DNA, 916 bp, Oryza sativa
  Clone ID: PAT_MRT4530_88337C.1
acggcgaccgaacgagggggagggcggcggcttaccgacggtggcggcggcgacgacggtgtaaggcggaacgtcgcacggcgcggcgcggcggcaccgagggcggcggcgcgacggcgcgaaggcggctgcgcggcggcacgaaggcagcggcgcggtggaggagaaggggaaaatggggaaagaggaggtggggtggtgtggggtggaatggcgactggggggggatttatagggcgcggggaggggtggccggccctaatggcgatgggatggcgcggtgcgcggggcgcgtggcgacagtgacgcgcggcgacgcggggctcggagtggcgactcgacgggcgggcggcgcagcgcggggctcggcacggggctcggcgcgacaggacgggcgggacggcgacaggcgagcggcgcgcggcggcagcgacgggtgatggcaacgggcgcggcgtggcgcggcgagggtgacggcgacgggtgacagcgacgcgcgcggcgcggcacggggcgcagggcgcgaggcgtcgcggcacggggcgcgacgcgggggcgcagcatggggctcggggctcgaaggtgcggcagcgcgacggcgacggctcgcggcgcgcggcgatggcgacgcgacggcgacggcgcgcggcgcggcagcggggacgggatgtgacggcgacggcgcgcagcgcggcagcggcgacgagacgtgacggcgatggcggcgcggggcgcgaggcggcgtgacggcgcgtggcgcggcagcgacacggggcgcgacgcgatgcggcgtgcgcagagctaggcacggcccggcagggggagggcggcgatgggacgcgggtcgctgggtgttcggcttgggctctggtcgagcacctggcggcccatgaacagtagccgactgggagaatca

SEQ ID NO: 89596 - DNA, 315 bp, Oryza sativa
  Clone ID: PAT_MRT4530_88338C.1
gcgtacgtccagtcgctacggactgtatcgaactacgattggttcaccaatggattgaaggatgatccaccaacgataatactgatatgtaactatttcgattttatatatggaatttattcatttgaagtaaccaaacaatttacaaataaaaaaaaaaaaaaaaaaaaaaaaaaaaaaaaaaaaaaaaaaaaaaaaaaaaaaaaaaaaaaaaaaaaaaaaaaaaaaaaaaatatcataaaaaaaaagagaacaaaaggacacctaacggtaaatatgattgaaaaaaaaaaataaaaaagaaaaaacagaatt

SEQ ID NO: 89597 - DNA, 1545 bp, Oryza sativa
  Clone ID: PAT_MRT4530_88339C.1
atggataaaaactgtggttgcaaaagagtgcatatagacatggaatccattaaaaacgtgcccttgtgggatcgcacaacctttcaagatcttgccaatgtgatgggcgtgaagaaaaccacactttataaacgttacaaggaagatcttgaatttgtgtttgctcgggacattggcggtcagaccaacgacatcggtccggtcaaacaagcaacttcatggtggtcacgcgaagcttattctaaatctagtactttagtttctcctttgacttctttggatattggtgcttcttcgtcgacttatactgctctttctactattaatgtcatgtttgatgatcaacttgagcaattcgaggaggaggacttggctttggctattaacaagttgtctcgagctagaattgtgtcaggttcaggaaaagaggagcttaggagagccaagacccaagacccaagacccaagaaagaagacaacggagacaagttcaaggacgacaagccaaaaagtaggttcaagggaaggagagacaagttcaaggacaacaagccaaaaatcttgagagtgatgaagacgaagacaagggagagaacatctcaggcgtatgcttcatggctcatggtgaatcagattcagagtatgaagacaatgaaagatgctaatgttccacatgattcgagactaaaatcttttcttgctcttggagttgtcatgctgttaacgccaaaatttgatcaatcaactactctcggcgcatcaccaccctctttaccgaggcttttacttatcatccggcggaacttggcacctaacgtggggctacatcggttttcgatctccggccaaggggctttggtggtgaggaaggagaacatgtggatcgtggattcctggtgttcgcggcacatgaccggtgataaaagttggttctcctccctcaaagaggcatccaggatggactcaattatctttggaggtactacaagtgtcgttcttgctacgacacctgtcaagattttacatatggacactattggtccagctagagtgcaatatgttggaggaaggtggtatgtgttggttattgttgacgatttttctagaaattattgtgttttcttcatgatttatatggatgatatcatctttggttgttcatcttacgctttggttgtggagttttctgagataatgcgtagggaatttaagttgagcatgatgggtgatttatcgtactttttggattgcaaattaagcgaatacctcaaggtagtgcatcaaatgaagtacatcaagaatcttttaaggcgtttcaagatgcagaattgcaagccaatttctacaccaattgggtctactaccgtgttggatcctgaagaaaatgatgaagttgtttatcaaaaggagtacaaaagtatcattgttgtatcatactgcttcaatgccagacatacagtttgttgtgtgtttctatactcgattttaagcttctccacgtgtttcgcatcgtcaagcggtcaagcagattatgagagtatttga

SEQ ID NO: 89598 - DNA, 1149 bp, Oryza sativa
  Clone ID: PAT_MRT4530_8833C.1
atgccgttcccgccgcctctcgtgccagtcgccgccatcctttccgccgccagccgcctccctgtggtcgtctcgccgtcgccgtcctcggtgagaatccccaccgtcccttctccttttttttcctcctccgccgctccccgtgcccgctgccgcgacacgccgctgtcgccggcggtcgtctggctgcacgccgccgcgcgctatcgctcgaccaggccggctgtgccgtgcccgtgccctagccgcgccgcctcgtggccgtccgatcggctttgggccgatccgggccgtcggttcccgtggaccggcggtggaccgcctcggtggtcccggtccatggtggaccggcgcccttgtgccgctgaccggtgggcccacttgccggcgccgcccctcccccttgatgacgtcagcgagaatccgtcgtttcggaagtccgcggtcgcgaggaaaagagttcggaagatcaaagtgaagaagcaaggcaagtcacacattccccttgtactttgatgacctagctagaactatatgcttagccatgcttaattaccactagctcagtcgatgggataattgcagtattagacattttagtatcttggtgagctgcgtgctcgagacatctggccatgcttcatggtcgtaattattcaactaaaatgcgactgaatggtgggctgtgggtgcatggttttgctggtcgcatccatggcagttaaggaccggttcgcgggatgccttggaagaatttatcgtacttaccacaagccagcgtgggcaacggctgggcttgtagcgtagctttcctctagccgacgcatccaggcaagggtgggcgtgatggagtttggatgggccctgcgacggcctatgcggcttccggattcacctaggcacgagaggggactgcccgctgccttgcgaggagtgggggtgaaacctgaggtgtggtgtgcttggttagagggggttatgcgaagggtcctgtcacggcctctttccgacgtggatctgaatgtcaacattgtcgtttgtgtaccccggctggtcctggacggggattttaatacacattctgcttggaattctattcgggaatttctgggcgtgacacaaccacattgtgccgttaacttggcgttt

SEQ ID NO: 89599 - DNA, 369 bp, Oryza sativa
  Clone ID: PAT_MRT4530_88340C.1
gagacccctcgcccgcgcttgcgcgccgccgtgtgcgtcgaccggccgcgcagccgcccacctcccggtctcgcgcgcctgccgccggccgcccggccacctccactccacccactccatcccgccttctccacctccgcctccgcctcacttctctacaagacttctgcgccgccgcccacttcccggcctcgcgcgccacgcgcctcacgtgccgaccgccccccgcccaccgccgtttacgccgaccggctgtgcggccgctcctgtcgacgcgccaccgcccaccgctcgcctgacgacacgagagagagagaggggggaggaggggaagaggaaaaggaagaggtgagagacaatgacaggtag

SEQ ID NO: 89600 - DNA, 395 bp, Oryza sativa
  Clone ID: PAT_MRT4530_88341C.1
aactgttggatcaccaaaaactcagtgagacatcttgttgatattgtgtaccaagagctatgaacatacacttatgagctttaactagaacattggataagctatgcaaacgcactacaactcagtatgcacaccaggtgctaaggttgcagggtgctcacagattggatccctcatcatcagttcatgctttctgaaggtggaaggaacttgatgatagccatcaagagaatagctaagagaacggcggatgagaccttctttatggcacctgactgcgataaataagctttggcctcacattgtttctgagctcagattgatattcgtccccccttctgacatgcgcctgaacccatcctgtgctgctggaaatccaatctggcgctggtcca

SEQ ID NO: 89601 - DNA, 436 bp, Oryza sativa
  unsure (1)..(436): unsure at all n locations
  Clone ID: PAT_MRT4530_88342C.1
acgtgggcgcgtcggcgcgcgccggtatgttattttttcttttcctccnttcattttctggggggggggggggtttttttttcgcggcctacaattactcctcngaggtgaggcggtttgagctcctgcaggccgcccagtttgttttttttctccatggccgccaacgcagccgncaaggagcgcgccacgggcggggccggcgcgtaccacccgttgtatggctccccctgggtgggcccgcgtgcggcgcanccttctttattgcacgtccatgaccgtgttctcgagagccggtcggtctggacggcctccggcacttggaggcccagcgccttttccaacccgnactttgtgtgtgatttttttgaggcccacggcaccggcggccagtcccagtgatcttctttttttttcttgtgccatttatgatcta

SEQ ID NO: 89602 - DNA, 598 bp, Oryza sativa
  Clone ID: PAT_MRT4530_88343C.1
ctagcccaccttcctcctcttctctcttattctcgttctcctcttcatctcgtttttccctttctctttctcgctctcttctctccatggcgctgtggcgcacaagggctgcggcgctgcgccccaattgtagggggcgtcgccgccgcctctgcctggctgcccggcggggtgccgccgccgcctcctctctccttccttccttcttcttttccccttatcctccctctttttctctctcatcccaactctaaccctacccgttgccctgcctctccaattgccatggctgccgtggagatggccggtgccaagcaccgcgcaactccggcggccccgacctatctccatgagtgtgctctccggtctgtactcccccccccccccccctctcctgatttctagtgttttatattggtaagatgttattcccttttgtgctactgatatatgattgtggtgtaccattaggttaatcctaatggtcaacttaatgactctatgctatggattgtaattactagttctagggttctagatcaattgatttgctagattggatgatgccagtatgcccatgatgaatgaatgctcacat

SEQ ID NO: 89603 - DNA, 175 bp, Oryza sativa
  Clone ID: PAT_MRT4530_88344C.1
ttcctcggcattccgcgccggagctgaggaggtccacatagccatctagggaggtggggcattcaaccgagcgccaaatcgtgcggccagcccggttccttactttttccggcgaccctccgcccggcctgatcccgtggtggatcaactacaactaatctttaggaaagcctct

SEQ ID NO: 89604 - DNA, 370 bp, Oryza sativa
  Clone ID: PAT_MRT4530_88345C.1
ctacacttgccgtcgttgagttcgcctcgccgccgtcatgaggatgcgcgggttgacgcggagctccgtcgtgtgccaccgagccgccgccgcaccatattgccacacgggagtgatgtcgtcgccgccgtcctgccaatcaggtagtggacgggtcatcgatgacctcctcgccgtgtgccgccctaactcccttcaaagtcgacagacgacggcctccgacgctgccgccgtgctcgaggggccggtgcaccgggcggtggacaccgttgcagacaatgaatgggaaaggggaaacccaaattccccccttctcttgctcggtcatttaggcttaccagttgggccggtctacctccgcctgaccgaa

SEQ ID NO: 89605 - DNA, 406 bp, Oryza sativa
  Clone ID: PAT_MRT4530_88346C.1
cttctatgcccaccaccatcccagtacccccctggcctccctaatgccgcgcttgaacccaccattgaccaccaccatgggctccgacgcctccgaccccttgtaccgtgctgcaccttgtctgcgcacctgattgtgtttggcttgcgagctccgccgctgcgggggctacgcgtgctggcgacactccttactttatttgggctgcggacttcaagtgctcaggctcccattcgctataattgataagagttcaaagtgaaaatggatcaaggcgaatggttagctgatttgattaggaggaaaacttaattctggactccagtttgaactagcctgcccacatctggcttttcttgtaccacttccggtttcagaccaatgatgcccccatagttgggcagct

SEQ ID NO: 89606 - DNA, 255 bp, Oryza sativa
  Clone ID: PAT_MRT4530_88347C.1
atgggtcgccgccaccaccccgacgagctcggcgctgtgggccttaggctccgagttcctggcaggagtatgacagtggcaaacgtggcggctcaaatccgtgttggcgtgtcgaggctgaacgccatggcgatgcattgtgaatggcctaagcggtcttcgggagactcaggcctcagcatgagagattggtggctcgatgcgagtatcccgttccggatcagctaccagaaatccttcgacgcactttgctga

SEQ ID NO: 89607 - DNA, 219 bp, Oryza sativa
  Clone ID: PAT_MRT4530_88348C.1
atggaggctatgcttgagctcgtcagccgccttgcctatccatccatccccgacccacgtcccacaacagcgaagcggagggaccgatggcatgccgggtggacgccgcgccgggataggcctcgcgcggaggggcttggcatgcgagcaaacccgcatgaaggcggcgccggggggcaggggctgcacgacgatatgatgaccttgacgagcttgtag

SEQ ID NO: 89608 - DNA, 3108 bp, Oryza sativa
  Clone ID: PAT_MRT4530_88349C.1
atggcgacattctgcaaggtacggaaaagagatgatggtatctacgtcctgacgctggccagcagcgacggccaccactatctgaccaccgaagccatcacccagctcaagcaagccctcgagagaatccgcagcaccaaggcgagaggcctggtgacgaccaccacgtcgggctccttctgcgacggcatcaacgccgtgtcggatgacgacgacgacgagccgctttcttcgttggagcgtggcatggccgaggtggtgcgcctgctgctggacctgccgatgccgaccgccgccgccgtccgcggcgacgccaggtggctgggcttcgtcctggcgctggcgcacgaccacctgttcgtgcatacggaggccgtgctgggattggccgccgctgccgacacgacggccaagccccgacggcgcccgctgccggactacgtcgtggcgctcctccgggagaagataccgtacgcgcagctgcggaagctgctcttgctcaaggcgcacgtgttcaccggcgaggagctcaaggggaactggcactcggtgcacgaggcgatccccaatcgggatcatgtggttgctgttgctgtgcagaacctccaaagcgtggttgtgggagacgggatggactacgccaaggtgaggcggaccatgtacaccaacagctgcgtggctgttgcggtgacgacgacgacgacgaccatgctgcctttcgatggatcatccagcgtagccaacggtgtgacgataagcagtgaaatgacgccttcgggggaatccttcaactcaagctataattcaagtactacaccagtggatataagtctagctgccatagaagcctgtaccgatggattttcggaatcaaaaaaagttgggagtggtgcgtatggaaaggtttacaagggagtttacaacgaggaggaacttgcattcaagaagattgatggcttggccgtgcttaacgaggatcaattcaagaatgaacttaaacacctaatgagtgtccagcatagaaatatcgttcggtttgttggttactgttctcaaataaaagaaaaattcatctggcgaggaaaggaatacgttagtgttcaatatataacaagaattctgtgctttgagtatttgccaggtggaagccttgacaagcatctggataaagaatctgaatctgatggatttgactggcgcacacgatacaatataatcaaggtgatttcccaaggattaaattacctccatgaattggaaaaacctattttccacttagacctgaaacctgccaatgtattgcttgatgagaacatggagccaaaaattgcagactttgggatatcaaagcatttcactggaactaaaactcacataacaatatcaaaacctacaggcacacctcgttacatgccgcctgagtatttgaataaactcgtgatctcaaataagtatgatgtattcagttttggagttatggtcatggaaatcattgctgggcctactggttatgacaacttcagtgaagcgaatgatcaagacagttttaaatatattgatcgtagtcatgggagaatcagtttgtcaccgcagtccaaggctttcaaggtctcaggcacaaggggtagccttcaaaagacggctgcacgggtggtatctaggtgccagcccaaatgcatagtgaatatcactaaagacttcgatgataggaagaaggagttgattgctgaaattggatttgatggaattttggatatcaaacttactaaggtaaacaggcagtttggggcatggcttctgagcaaggttgatccaaaatcaggcactattgttacagatttcaaccaggagttgccatttggtcccaacgatgtcaatgcagtttttggcttgccatgctcagcaattgtgcaggcaaaatatttgagcaaactcgtgatacagaaggttgggatcacgagtgttaaatcatgccacatttctcagtttgaggacaatcaaattgctatgatgatccaacaagatatagtaagtaaacataatccaggatacactttccctcgttatgggaagctccagttgatgaaggctccaagagaaaactaccctcaagcgccagaggtgtctcccctcaacttatcctccgtttcgaagatacaatgcagaggcaatgatggaggcgccaatttaatcaaattcctggaatcacacttcaattcgttagacgtgagtgcaatggttgggccacaggcctataaggagttgaaatcttacgttcaggatggattcaatcggattgatgagattttgcctagcatagcagatttcgtagacataagcaacctcaaaactgctactgaagcagcaaacatgttcaagaaagctttcaagtataatatggcagcggcagttaagatagcgacgagggcagcagttaggaatgttattgataccattgaggatatgcaagggcctctccatccatggggagacccctctgccatgggataccacacacccacgaactactccacacatgctacagaatatgaaaatatagtggagcaaccaacagatacccgacactgtgatcacaaatttggagcctcgcagtgcactcctacaaaatttaatggagctccaggcatcgttagaatgtatgctgtagctggagatgaattttgggaagctagtcatcaacttgcacacttcacgggccccgaagttgtatatgatgtttcagatagtcacatgagcaagaaggtattagtccttgattcactgaacacccaagatccactggggaatcacgtttcaccaggcatgacaagattaagatcatggtgtcccgggtggaacaaggacatactgaactgggactatgaggcagtggaaaatataccagagcagcaaaacggggatgactgcagctttcacgtattcaataatatggtgaactgggatggtcttcgtcttgtgaactctacttcacaggacccgtactacctccggcgacaatttttgatccacctattggctctgcgtgataacgaggcaatacttccagaatatgtggtgcaccgtcttcgacatattaaatacaattag

SEQ ID NO: 89609 - DNA, 143 bp, Oryza sativa
  Clone ID: PAT_MRT4530_8834C.1
cataccaacagacactgtaggattatacaaaaaaacaacatcattgaggaatagccaatggatcccttaaataacacggcaacgaaacaagagtttagctgccatgcactcccattcagatacaacatgctcctcagcctata

SEQ ID NO: 89610 - DNA, 1479 bp, Oryza sativa
  Clone ID: PAT_MRT4530_88350C.1
atggctcctccttcaccaatcggagatactgaagcagaggtaatcattctggaggatctgccacccgttggtgtcccaggagcagaagtcatcgatctggagtcgcctgaatgcaagagcggggcagccggggcaaaatcgaggagtcacagtagtacaggtcatccaaagcagcagagtcacgggagaatcagtttgtcaccgcagtccaaggctttcaaggtctcaggcacaaggggtaaccttcaaaagacggctgcacgggtggtatctaggtatcggcaaagcagggtactaaatagacagaagaaagacaacactacctttggtatcaattgtaggtgccagcccaaatgcatagtgaatatcactaaagacttcgatgataggaagaaggagttgattgctgaaattggatttgatggaattttggatatcaaacttactaaggtaaacaggcagttttgggcatggcttctgagcaaggttgatccaaaatcaggcactattgttacagatttcaaccaggagttgccatttggtcccaatgatgtcaatgcagtttttggcttgccatgctcaggtcaacttattatcccttgctcacaagatgaattagacgggaagaaacaaaaattgtgtgaaatatttgagattccaaacttttcacacctgaaaatatcactcttagagagagtcctaaagaagcagtatgttcatcccatgacaatagatgaaaagagggaattcaaggcggcttttgtgttatatgtcacaacaaagctcttggcaccgcaatcctgcgcaaacttcatatctcctaggtatattagagctgtggctgatgttgacaatacaaaacagtacaactggtcccagttcgtcgtagatgaggtgaagaaagcagcagaatcattgcccaaacgctttccgaatacgacgcaacaatccattaacgggtgtatcatcttcctaatgttcgaggacaatcaaattgctatgatgatccaacaagatatagtcagtaaacataatccaggataccctttccctcgttatgggaagctccagttgatgaaggctccaagagaaaactacccccaagcgccagaggtgtctcccctcaacttatcctccgtttcgaagatacaatgcagaggcaatgatggaggcgccaatttaatcaaattcctggaatcacacttcaattcgttagacgtgagtgcaatggttgggccacaggcctataaggagttgaaatcttacgttcaggatggattcaatcagattgatgagattttgcctagcatagcagatttcgtagacataagcaacctcaaaactgctactgaagcagcaaacatgttcaagaaagctttcaagtataatatggcagcggcagttaagatagcgacgagggcagcagttaggaatgttattgataccattgaggatatgcaagggcctctccatccatag

SEQ ID NO: 89611 - DNA, 292 bp, Oryza sativa
  unsure (1)..(292): unsure at all n locations
  Clone ID: PAT_MRT4530_88351C.1
gactagttctagaacgccggcttccatctcctcctttcgcgttcgagcgcggacgcgatgccgttggctgccgtctcctccgctcctccgcatcctatggcaccctccccctccccatccctagcgcctccactcctgccanctcgtcgncagatccggccgaccccgtggtcaagggcggcaaatnncgacgagctccgcaggaggaccggggggagggtaaggggttgtgntggcctcggntcggtgatggtggtcctcaacaaacatatcctcagcggtaacggggact

SEQ ID NO: 89612 - DNA, 239 bp, Oryza sativa
  Clone ID: PAT_MRT4530_88352C.1
atgatcgatcgcctgcagtgcaggaacgttcctggcgggccctgccggccggctgcggatcgatgtgtggccgcgtgcgtgatgcggtggccgagggcccccggcgagagagagagagagagaggagaagctaggccggccagctcaatgtcggttgctctgccaggtgggggcctagctaggcgcctgatcgacaccgggcatgtgtgcctgaccccgatgggcgccgcgcgcgccaa

SEQ ID NO: 89613 - DNA, 6479 bp, Oryza sativa
  Clone ID: PAT_MRT4530_88353C.1
ctaagggagcagctccgggaactcggcgcggagaagatcttctcgctcccaggttgcctcatcttcagagtggttgctccattggactttgtagaacttaatggtcttccttcgagtctgacgtactgcctcttcaagaaccttgatcggtctttccttgtaggtcagattcttttccagctcgatgttacccagggggacttgttcttctggaactcgaagacatttctttaactgggatacgtggaacacgttgtgcacatctgcgagaccttcaggtaactcaagctggtaagccacttcgccacgtctggcggttataaggtaggggccgatgtagcggggtgctaacttgccggacatcccaaacctcctcataccacggagaggtgatacccgcaggtacacatgatctcctttttcgaactcaaggtcacgcctccgattgtcagcgtaattcttttggcggttctgcgctgtctttaaacgttctcggatcagcttaacttgttcttctgctgccttgagtatgtcaggaccgaataccagcgcttcgcccacctcattccagcacaagggggtgcggcactttcttccgaacattgcctcattcggcgacatctgaatactggcctggtaactgttgttgtatgagaactcagcatacggcaaacaacgatcccaagtgccttcgaaatccagggcacacgcacgtagcatgtcttctaggatttggtttaccctttcggtctgaccatcggtctgcggatggtaggctgtactaaaatttagatcggttccgagagcttcatgcaactgtttccagaaccttgaggtgaactgagtgcctcggtctgacacgatcttcttgggacagccaaatctacatacgacatgggtcatgtagagttctgctagtttctttccatcaaagatggttttcactggcacgaaatgagccgatttcgtgagtcgatccacgattacccagatggagtcgtacccgctaggggttcttggcaaaccggtgatgaaatacattccgatttcttcccatttccactcgggaattggtaggggctgtagcagaccagctggcctctggtgctctgccttgactctttggcaaatgtcacacaaggctacgtattctgcgacatctcgcttcattccagtccaccagaagtatgccttgatatcttggtacatcttcgtacttcctggatgaatggagtaggcggactcatgagcttcctttaggatgagatctcttaattccttcttggccggtacacagatgcgtggaccgcaccaaactgtgccttgatcgtctatggagaaattggtgtctttcttctcctgtattctttttattaactcttttatcccttcgtcgtctttctgagcttcccggatttgcgactctagggtaggctgtactgtcaagctggcagggacacctgactgtaccacggtcagcctcaacttctccaattctctgcacaggcgatcttggtcaggccgtatttgagctacattgcaataggccttgcgacttagcgcatcagcgaccacattagctttaccggggtggtaatgaattccaagatcgtaatccttgattagttccaaccatcttctctgcctcatatttaatttggtctgagtgaagatatacttaagacttttgtgatcagtgtatacttcacatctgttcccgattaaatagtgcctccagatcttaagagcatgaaacacggctgccaactcgagatcatgggtgggatagttgacttcatgaggcctgagctgcctgaatgcataggccacaacctttcgttcttgcattaggacacatcctaagccttgtcttgatgcatcacagaagatctcgaaatcttttcggatatctggcaaggtgagaactggggcagtggtcaaccttttcttcatttcttgaaagctgtcttcacaggctgcagaccagtgaaacttcttttccttctttaacagctcggtcataggtctgactagcttagagaatccttcaatgaatcttcgataatatccagctaagccaaggaggctgcgaatctctaacacgttcttgggcgggttccaagcaagtacagcttcaaccttgctgggatctacatcgacaccgttggaggagatcacgtgtccaaggaatgcttctcggtctaaccagaattcgcatttcgagaatttagcgaatagttgatgatccctgagcttttccattattagcctcaggtgttcagcatgttcttcctcattcttggagtatatcaggatgtcatcgatgaacaccacgacaaactggtccagtgtgaactcatatagaccataacgcgttgagaaagcagtcttcgggatatcttcagatctgattttcaattggtggtaacctgatcttaagtcaatctttgagaaaactcttgctcctttaagttgatcgaacaaatcgtcaatccgtggcaacgggtacttgttctttatagtcacttcattcagggctctatagtcgattatcattctctcagagccatccttcttcttaaccagaagcactggggctccccaaggggatgagctaggtcgcacataacctttactcttcaattcttcgatttgtcttttaacttctgctagctcattggctaccattcggtagggtctttttgcaattggtgcggtgcctggtgccagttctatggcgaactcaatctctcggtctggtggcatactcgttaattcttctggaaatacgtcgggatattcacagactacgggcaccgactccaaggaggtgacttgtaaacaggttaagatagaccgacttgcggtaggggtgttagaggtaaaacggacttgctttcctccaggtccttgcaaggtgatggacttttcggcacaatctatctgtcctttgtgcttagccaaccaatccatccctaggatgatgtccaagctttgcgagtctaggactatcggtttggctaggaagtcaacttcctcaattctaaggttaacttccgggcatatttgagttgcccttatattcctcccaggggaatgtactatcattggtacacgtaaattttgggttttccaaccatttcttttcacaaaagcttgtgatatgaaagaatgggaagctcctgaatcaaacagaactattgcgggtacggagttgacagagaacatacccatcacaacgtctggagcatcctgagcggtctcagcttgaatgtggttcacccggcctcgaccaaagttgttggaagcacaagtaccttgtccacttgcctgagagctaggacgagactgagctgccgctggagtaggagttctggcagtgctgccattagcatgccgtgagctggtgttggtaggattctgagggcactgtctggcatagtggcccatctggttgcaccggaaacactgaacagctgacggtccttgcggtgacttgaaagaggtaacactgtttggcgcagtattgccactaggggcacgctgctgtggctgaggtgccggacggttcatttgaggacaaggggcgtagcctggctggcggttagcctgagtgaccgactggtggtattgcatgggttgaccgtagcgagggcgaggtgcgcctcgggaggaatttccctgatggttagacttgcgtttcttgtattcttcggtagcctcttttctggcatcctcaagtagaagtgccttgttgatcatatgttgaaaagtggggaagtcgtgagcaagcaactggagtctcattccaaccgcgattcctttcaagaatttcctgatcttcttcttatctgtgtccacttcctcaggggcgtaccgagccaacttgttgaacatacttaggtactcattgacactgctgttgccttgcttaagtttgttgaattcctctttcttcatgtcaatggtgctttcaggcacatgagctgcacggaaagccgtagcaaactcatcccaagcaatgttagtgggttcagggtatgcattacagtaattctcccaccaatctgcagtaggtcctcttagctggtgagaggcgtagagcgtcttctcaaccggagtacactgcaccaagttgagttttctatcaacatctttcagccaatcgtcagcctcgacgggctcgacggtctgagagaactctggcggacgagacctcagaaaatctgtcagcttggatctattattgcccatgtgagggtggccatttccatgcgcattgtgctgataaccggctacggctgcggctaatccttgcaagatttgtatctgaactgccattaagtgctgtcgagggccggcagcagcacaggccgctggcggtgggggagctgggtagtggaaacggaacacggtggaagaaccaacaacacgcttccgcgcggtgcggataaagcgtgggccacggcgggaggaagcaactggggtgtgtccgggggtgtaggaggggctaactgggtgtgggtagggggagtacactggtgagtacggcgcacgcgagctaggggagcgcgggccactgggagtgcgggcagagccgcgggagctgtgggaggacaggtggctggcgtgacagaggcggcctgagtcccaagagacagtgtcaactgaggtgacaccctcctcggccatatgggcctccagagcggcgtagcggcgggcaagggagcggtaagcctcaaggagtaggtcgtgctgagtggcctgagcctccgaaagctcaaccatgcgagtcagcactggctgagactcgctgtacggacaagggtacctggcgtctgcgtggccagaaggaaggcgtggaagctgccggaaggcggagcccccgagacggtggctgtagtcgtgggccaggcgacgaagcgcagtccaggagaggtcctggtacgcgatctggagagtgggcctggccacagtgaagtggtgtgggcgaaggccagctccgtgtatacctccacgggggtaaaggtacacagagagctcacagcgagggggaacacggtccacggagtaccccgtgtactcgggacacgagaagccaaggaaacgggcgaggtcacgaagctgagcgacgtggtgaccctcaccaaaaccgtgggagctgacgcttgcgttcactgccatctgtaaattgataccagacccaggaaacagtgctggtatcataggaagacagattatcacagcaacagaggtctctttattatagagtagaggtacagtcatgttgggctgcggacagatcccgagctcacaactgcattacaaaagggaaagcggaagccaagacttggaccaatcatcacaggcgcgacttgggaactagaccgaaaccctaaaactcatcgtagccgacttgctcctggaagaactcctcgtcagcgggatccacttcatcttcttcagcaaccggatcacccagcccgtgcagaacggccacgtttggagaccttgaggctttcatgacaaggcatttcgaaagccgacacaggttcactatatgccaacgagaggggtcccagaccgacatcaggttaggtcccagaccatgctctaagtatgccattagatagatctcgagatttgaggatttttggaagttgaacggagtcaatcggatgtacggttgagaagatattgaatttctaagattattggatttttgatcttgcatggtcccgagtgggacccgcttgttggcggctcggctcaccgtgagcggggagcaggcagcgcggcggctcgcggtggaccgcgcgcgcgagcggggcagaggggagcggcggaccggggttagcttgactcggtcgcggccaaggtggcaccgacgtggcgtctacgtggctgggcggacggcggcggcgagcggcggggagatcgggaggttgcacgggacgaggggagacgagctaatggctcggattcgccggagaaagctcgacggcagcagattgcggcggcggcaaccggcggcgagaaaagagggaaacggcgacgacgcgactagggttcgattcctccggactagagcatctacgcggtcaccggagtccattcctcgcatcggattgagcggagctacaacgagggaggccggcgatgagaggcgctcgagtggcactaggcgagggagcttcgaggggaagggatgggctcacgggcgcggggtcaaacggcatgggcgatggctggcgcggctgctcctctgcgtccatggcgctcgagccatgtcgatttggggagggagagagatgggagcgagaggcgctgcctcccgattttggacggacgcgggcggcgcggctcgggcacgcgcgctggcttgcggggccgagcggcagcgcggccacgggcacggcagggcagcggggcttaggcgcggcacgggcggcgaccgcgcgggcgcgcgtgcgcgaggc

SEQ ID NO: 89614 - DNA, 319 bp, Oryza sativa
  unsure (1)..(319): unsure at all n locations
  Clone ID: PAT_MRT4530_88354C.1
attcagaagaacattgaaggtcatcatttattcaccacatatttataaatagatgcttcctggcaaaagaaagcactatttatttagcaaccccactttgtcccccgcgcacaggtaactatatgttcctattgcccggttcttggggncctaggattcccaagccagtggcagacaccaccaggcccattggggatgtccacgttgcagaacgccgggaggctcgccgccgggcgctccaagtnccctcttcggcgggcggggaacacctcggtcatggggggcccggcctnnggggggccgagctccctgttgatgc

SEQ ID NO: 89615 - DNA, 4629 bp, Oryza sativa
  Clone ID: PAT_MRT4530_88355C.1
atggcagtgaacgccagcttcagttcccatggttttggtgagggtcaccacgtcgctcagcttcgtgacctcgcccgtttccttggcttctcgtgtcccgagtacacggggtactccgtgggccgtgttccccctcactgtgagctctctgtgtacctctacccccgtggaggtatacacggagctggccttgcccacaccacttcactttggccaggcccactctccagatcgcgtaccaggacctctcctggactgcgcttcgtcgcctggcacacgactacagccaccgtctcgggggctccgccttccggcagcttccacgccttccttctggccactcagacgccagctcgtgcgccagcccgctttggttttgaagatggtagagccgagccagaagtaaatcatgagcagtctccccacagcaaccgttcgcaccgtactgcttcccgcaacgcagaagttgagcaaccccgccgcagcaaccgctcgcatcgcacggcttcctgtgatgcagagatggaacagtctcaccgctctcaccacactgccagtcacaattctggagaagaactcctcccttccccacctcatgtggaaaacaacatgcagcacttaatggcagttcagacacaaatcttgcaaggattagccgcagccgtagccggttttcagcataatgcgcatggaaatggccaccctcacatgagcaacaatagatccaagctgacagattttctgaggtctcgtccgccagagttctctcagaccgtcgagcccgtcgaggctgacgattggctgaaagatgttgatagaaaattcaacttagtgcagtgtacccctgttgagaagacgctctacgcctctcaccagctaagaggacctgctgcagattggtgggagaattactgcaatgcacaccctgaacccactaacattgcttgggatgagtttgctacagctttccgtgcagctcatgtacctgaaagcaccattgacatgaagaaagaggaattcaacagacttaagcaaggcaacagcaatgtcaatgagtacctaagtcagttcaacaagttggctcggtatgcccctgaggaagtggacacagacaagaagaagatcaggaagttcttgaagggaatcgcagttggaatgggactccagttgcttgctcatgacttccctacttttcaacatatgatcaacaaggcacttctacttgaggatgccagaaaagaggctaccgaagaatacaagaaacgcaagtctaaccatcagggaaattcttcccgaggcgcacctcgccctcgctacggtcaacccatgcaataccatcagtcggtcactcaagctaaccgccagccaggctacgcccctcgtcctcagatgaaccgtccggcaccccagccacagcagcgtgcccctagtggcaatactgtgccaaacagttttacctctttcaagtcaccgcagggaccgtcagcagttcagtgtttccggtgcaaccagatgggtcactatgctagacagtgccctcagaatcctaccaacaccagctcagggcatgctaatggcagcactgctagaactcctactccagcggcagctcagtctcgtcctagctcccaggcaagtggacaaggttctcatgcgtccaacaactttggtcgaggcggagcgaaccacattcaagccgagactgctcaggatgctccagacgttgtgatgggtatgttctctgtcaactccatacccgcaatagttctgtttgattcaggagcttcccactccttcatatcacaagcttttgtgaaaagaaatggttggaaaacccaaaatttacgtgtaccgatgatagtacattcccctgggagggatataagggcaactcaaatatgcccggaagttaaccttagaattgaggaagttgacttcctagccaaaccgatagtcctagactcgcaaagcttggacatcatcctagggatggattggttggcaaagcacaaaggacagatagattgtgccgaaaagtccatcactttgcaaggacctggaggaaagcaagtccgctttacctctaacagtcctaccgcaagtcggtctatcttaacctgtttacaagtcacctccttggagtcggtgcccatagtctgtgaatatcccgacgtatttccagaagaattaacgagtatgccaccagaccgagagattgagttcgccatagaactggcaccaggcaccgcaccaattgcaaaaagaccctaccgaatggcagctaatgagttagcagaagtcaaaagacaaatcgaagaattggagagtaaaggttatgtgcgacctagctcatccccttggggagccccagtgcttctggttaagaaaaaggatggctctgaaagaatgtttgtcgtggtgttcatcgatgacatcctaatatactccaagaatgaggaagaacatgctgaacacctgaggctaataatggaaaagctcagggatcatcaactattcgctaaatttttgaaatgcgaattctggttagaccgagtagcattccttggacacgtgatctcctccaacggtgtcgaagtagatcccagcaaggttgaagctgtacttgcttggaacccgcccaagaatgtgtcagagattcgcagcttccttggcttagccggatattatcgaagattcatcgaaggattctctaagttagccagacccatgaccgagctgttaaagaaggaaaagaaatttcaatggtctgcagcctgtgaagacagctttcaagaaatgaagaaaaggttgaccactgccccagttctcaccttgccagatatccgaaaagatttcgagatcttctgtgatgcatcaagacaaggcttagaatgtgtcctaatgcaagaacgaaaggttgtggcctatgcatccaggcagctcagacctcatgaagtcaattatcccacccatgatctcgaattggcagccgtggttcatgctcttaagatctggaggcactatttaatcgggaacagatgtgaagtatacaccgatcacaaaagccttaagtacatcttcacacagacggagttaaatatgaggcagagaagatggttggaactaatcaaggattacgatcttggaattcattaccacccctgtaaagccaacgtggtcgctgatgcgctaagtcgcaaggcctattgcaatgtagctcgaatacggcctgaccaagatcgcctgtgcagagaattggagaagttgaggctgaccgtggtgcagtcaggtgtccctgccagcttgacagtacagcctaccctagagtcgcaaatccgggaagctcagaaaaacgacgaagggataaaagagttaataaaaagaatacaggagaagaaagacaccaatttctccatagacgaccaaggcacagtttggtgcggtccacgcatctgtgtaccggccaagaaggaattaagagatctcatcctaaaagaagctcatgagtccgcctactccattcatccaggaagtacgaagatgtaccaagatatcaaggcatatttctggtgggctggaatgaagcgagacgtcgcagaatacgtagccttgtgtgacatttgccaaagagtcaaggcagagcatcagaggcccgctggtctgctacagcccctaccaattcccgagtggaaatgggaagaaatcggaatggatttcatcaccggtttgccaagaacccctagcgggtacgactccatttgggtaatcgtggaccagctcacgaaaccggctcatttcgtgccagtgaaaaccacctatgatggaaagaaactagcagaactctacatgacccatgtcgtatgtagatttggctgtcccaagaaaattgtgtcagaccgaggcactcagttcacctcaaggttctggaagcagttgcatgaagccctcggaaccgatctaaactttagtacagcttaccatccgcagaccgatggtcagacagaaagaatgtcgccgaatgaggcaatgttcggaagaaagtgccgcacccccttgtgctggaatgaggtgggcgaagcgctggtattcggtcctgacatactcaaggcagcagaagaacaagttaagctaatccgagaacatttaaagacagcgcagaaccgtcagaagaattacgctgacaatcggaggcgtgaccttaagttcgaaaaaggagatcatgtgtacctgcgggtatcacccctccgtggtatgaggaggtttgggatgtccggcaagttagcaccccgctacatcggcccctacctcataactgccagacgaggcgaagtggcttatcagcttgagttacctgaaggtctcgcagatgtgcacaacgtgttccacgtatctcagttaaagaaatgtcttcgagttccagaagagcaagtccccctgggtaatatcgagctggaaaagaatctgacctacaagggaagaccaatcaaggttcttgaagaggcagaacgtcaaactcgaaggaagaccatcaagttctacaaagtccaatggagcaaccattctgaagatgaggcgacctgggagcgagaagatcttctccacgccgagttcccggagctgctcccttag

SEQ ID NO: 89616 - DNA, 5571 bp, Oryza sativa
  Clone ID: PAT_MRT4530_88356C.1
ctaagggagcagctccgggaactcggcgcggagaagatcttctcgctcccaggttgcctcatcttcagaatgattgctccattggactttgtagaacttgacggtcttccttcgagtctgacgttctgcctcttcaagaaccttgatcggtctttccttgtaggtcagattcttttccagctcgatattacccaggggaacttgctcttctggaactcgaagacatttctttaactgggatacgtggaacacgttgtgcacatctgcgagaccttcaggtaactcaagctgataagccacttcgccacgtctggcggttatgaggtaggggccgatgtagcggggtgctaacttgccggacatcccaaacctcctcataccatggagaggcgatacccgcaggtatacatgatctcctttttcgaactcaaggtcacgcctccgattgtcggcataactcttctgacggttctgcgctgtctttaaacgttctcggatcagcttaacttgttcttctactgccttaagtatgtcaggaccgaataccagcgcttcgcccacctcattccagcacaagggagtgcggcactttcttccgaacattgcctcattcggcgacatctgaatgctggcctgataactgttgttgtatgagaactcctcatacggcaaacaacgatcccaagtgccttcgaaatccagggcacacgcacgtagcatgtcttctaggatttggtttaccctttcggtctgaccatcggtctgcgggtggtaggccgtactaaaatttagatcggttccaagggcttcatgcaattgcttccagaaccttgaggtgaactgagtgcctcggtctgacacaatcttgttgggacagccaaatctacacacgacatgggtcatgtagagttctgctagtttctttccatcaaaggtggttttcactggcacgaaatgagctgatttcgtgagtcggtccacgattacccagatggagtcgtacccgctaggggttcttggcaaaccggtgatgaaatccattccgatctcttcccatttccactcgggaatcggtaggggttgcagcagaccagctggcctctgatgttctgccttgactctttggcaaatgtcacacaaggctacgtattctgcgacatctcgcttcattccagcccaccagaagtatgccttgatatcctggtacatcttcgtacttcctggatgaatggagtaggcggactcatgagcttcctttaggatgagatctcttaactccttcttggccggtacacagatgcgtggaccgcaccaaactgtgccttgatcgtctatggagaaattgatgtctttcttctcctgtattctttttattaactcttttatcccttcgtcgtctttctgagcttcccggatttgcgactctagggtaggctgtactgtcaagctggcagggacacctgactgtaccacggtcagcctcaacttctccaattctctgcacaggcgatcttggtcaggccgtatttgagctacattgcaataggccttgcgacttagtgcatcagcgaccacattagctttaccggggtggtaatgaattccaagatcgtaatccttgattagttccaaccatcttctctgcctcatatttaactcggtctgagtgaagatgtacttaagacttttgtgatcggtgtatacttcacatctgttcccgattaaatagtgcctccagatcttaagagcatgaaccatggctgccaactcgagatcatgggtgggataattgacttcatgaggcctgagctgcctggatgcataggccacgacttttcgttcttgcattaggacacatcctaagccttgtcttgatgcatcacagaagatctcaaaatcttttcggatatctggcaaggtgagaactggggcagtggtcaaccttttcttcatttcttgaaagctttcttcacaggctgcagaccattgaaatttcttttccttctttaacagctcggtcataggtctggctagcttagagaatccttcaatgaatcttcgataatatctagctaagccaaggaagctgcgaatctctgacacattcttgggcgggttccaagcaagtacagctctaaccttgctgggatctacttcgacaccgttggaggagatcacgtgtccaagaaatgctactcggtctaaccagaattcgcatttcaagaattttgcaaatagttgatgatctctgagtttttccattatcagcctcaggtgttcagcatgttcttcctcattcttggagtatatcaggatatcatcgatgaacaccatgacaaactggtccaggtattccataaagattttgttcattaagttcatgaagaacgctggagcattggtgagtccgaaggacattactgtgaactcatatagaccataacgcgttgagaaagcggtcttcgggatatcttcagatctgattttcagttggtggtaacctgatctcaagtcaatttttgagaaaactcttgctcctttaagttgatcgagcaaatcgtcaatccgtggcaacgggtacttgttctttatagttacttcatttagggctctatagtcgattaccattctctcagagccatcctttttcttaaccagaagcactggggctccccaaggggatgagctaggtcgcacataacttttactctccaattctttgatttgtcttttaacttctgctaactcattagctgccattcggtagggtctttttgcaattggtgcagtgcctggcgccagttctatggcgaactcaatctctcggtctggtggtatactcgttaattcttctggaaatacgtcggggtattcacagactatgggcaccgactccaaggaggtgacttgtaaacaggttaggatagaccgacttgcggtaggggtgttagaggtaaagcggacttgctttcctccaggtccttgcaaggtgatggacttttcggcacaatctatctgtcctttgtgcttagccaaccaatccatccctaggatgatgtccaagctttgcgagtctaggactatcggtttggctaggaagtcaacttcctcaattctaaggttaacttccgggcatatttgagttgcccttatattcctcccaggggaatgtactatcattggtacacgtaaattttgggttttccaaccatttcttttcacaaaagcttgtgatatgaaagaatgagaagctcctgaatcaaacagaactattgcgggtacggaattgacagagaacatacccatcacaacgtctggagcatcctgagcggtctcagcttgaatgtggttcactcggcctcgaccaaagttgttggaagcacgtgaaccttgtccacttgcctgagagctaggacgagactgagctgccgctggagtaggagttctggcagtgctgccattagcatgccctgagttggtgttggtgggattctgagggcactgtctggcatagtgacccatctggttgcaccggaaacactgaactgctgacggtccctgtggtgacttgaaagaggtaacactgtttggcgcagtattgccactaggggcacgctgctgtggctgaggtgccggacggttcatctgaggacgaggggcgtagcctggctggcggttagcctgagtgaccgactggtggtattgcatgggttgaccgtagcgagggcaaggtgcgcctcgggaagaatttccctgatggttagacttgcgtttcttgtattcttcggtagcctcttttctggcatcctcaagtagaagcgctgcgattcctttcaagaatttcctgatcttcttcttgtctgtgcccacttcctcaggggcgtaccgagccaacttgttgaacatacttaggtactcattgacactgctgttgccttgcttaagtctgttgaattcttctttcttcatgtcaatagtgctttcaggcacatgagctgcacggaaagccgtagcaaactcatcccaagcaatgttagtgggttcagggtgtgcattgcagtaattctcccaccaatctgcagcaggtcctcttagctggtgagaggcgtagagcgtcttctcgaccggagtacactgcactaagttgagttttctatcaacatctttcagccaatcgtcagcctcaacgggctcgacggtctgagagaactctggcggacgtgacctcagaaaatctgtcagcttggatctattgttgctcatgtgagggtggccatttccatgcgcattatgctgaaaaccggctacggctgcggctaatccttgcaagatttgtgtctgaactgccattaagtgttgcatgttgttttccacatgaggtggggaagggaggcgttcttctccagaattgtgactggcagtgcggtgagagcggtgagactgttccatctctgcattacgggaaactgtgcgatgcgagcggctgctgcggcggggttgctcaacttctgcgttgcgggaagcagtacggtgcgaacggttgctgtggtgagactgctcattagctgactcatgattttcttctggctcaactctaccattttcaaaaccaaagcgggcccctgtggtcggctcctcagtcgaagaaacgtcgatcggctgacgcgaagggaccggcggaacctgtcgagggccggcagcagcacgggccgctggcggtgggggagctgggtagtgaaaacggaacacggtggaagaaccaacaacacgcttccgcgcggtgcggataaagcgtgggccacggcgggaggaagcaactggggtgtgtccgggggtgtaggaagggctaactgggtgtgggtagggggagtacactggtgagtacggcgcacgcgagctgggggagcgcgggccactgggagtgcgggcagagccgcgggagctgtgggaggacaggtggctggcgtggcagaggcggcctgagtcccaagagacagtgtcaactgaagtgacaccctcctcggccagacgggcctccagggcggcgtagcggcgggcaagggagcggtaagcctccaggagtaggtcgtgctgagtggcctgagcctccgaaagctcaaccatgcgagtcagcactggctgagactcgctgtacggacaagggtacctggcgtctgagtggccagaaggaaggcgtggaagctgccggaaggcggagcccccgagacggtgggcgatctggagagtgggcctggccacggtgaagtggtgtggacgaaggccagctccgtgtatacctccacgggggtaaaggtacacagagagctcacagtgagggggaacacggtccacggagtaccccgtgtactcgggacacgagaagccaaggaaacgggcgaggtcacgaagctgagcgacgtggtgaccctcaccaaaaccgtgggagctgaagctggcgttcactgccatctgttaatcgataccagtcccaggaaatagtgctggtatcacagggagacagaatatcacagcaacagaagtctctttattatagagtagaagtacagtcat

SEQ ID NO: 89617 - DNA, 155 bp, Oryza sativa
  Clone ID: PAT_MRT4530_88357C.1
agtttcgagttcttgccaccaccgcacatcgccaccttcatcaattttgccgtcatcaccaccgtcaccaccatcgcacccaccaacagctccaccacaaacccgactcagcttacaggtcttgttgctacagcaccgatacacctcgttccacg

SEQ ID NO: 89618 - DNA, 5295 bp, Oryza sativa
  Clone ID: PAT_MRT4530_88358C.1
atggcagtgaacgccagcttcagttcccacggttttagtgagggtcaccacgtcgctcagcttcgtgacctcgcctgtttccttggcttctcgtgtcccgagtacacggggtactccgtggaccgtgttccccctcactgtgagctctccgtgtacctctaccctcgtgaaggtatacacggagctggccttcgcccccaccacttcaccgtggccaggcccactctccagatcgcgtaccaggacctttcctggactgcgcttcgtcgcctggcccacgactacagccaccgtctcggaggctccgccttccggcagcttccacgccttccttctggccactcagacgccaggtacccttgtccgtacagcgagtctcagccagtgctgactcgcatggttgagctttcggaggctcaggccactcagcacgacctactccttgaggcttaccgctccctggcccgctgctacaccgctttggaggcccgtctggccgaggagggtgtcacctcagttgacactatctcctgggactcaggccgcctctgccacgccagccacctgtcctcccacagctcccgcggctctgcctgcactcccagtggcccgcgctcccccagctcgcgtgcgccgtactcaccagtgtactccccctacccacacccagttagcccttcctacacccccggacacaccccagttgcttcctcccgccgtggtccacgctttatccgcactgcgcggaagcgtgttgttggttcttccaccgtgttccgtttccaccacccagctcccccaccgccagcggcccgcgctgctgccggccctcgacagatggctagccgcccccgccgtgcagctcgtgcgccagcccgcttcggttttgaagaaggtagagccgaaccagaagcaaatcatgaatcagctaatgagcagtctcaccgcagcaaccgttcgcaccgtactgtttcccgcaacgcagaagttgagcaaccccgccgtagcaaccgctcgcatcgcacagcttcccgtgatgcagagatggaacagtctcaccgctctcaccgcactgccagtcacaattctggagaagaacgcctcccttccccacctcatgtggaaaacaacatgcaacacttaatggcagttcagacacaaatcttgcaaggaatagccgcagccgtagccggttatcagcataatgctcatggaaatggccaccctcacatgggcaacaatagatccaagctgacggattttctgaggtcacgtccgccagagttctctcagaccgtcgagcccgtcgaggctgacgattggttgaaagatgttgatagaaaactcaacttagtgcagtgtactccagtcgagaagacgctctacgcctctcaccagctaagaggacctgctgcagattggtgggagaattactgcaatgcacaccctgaacccactagcattgcttgggatgagtttgccacggctttccgtgcagctcatgtgcctgaaagcaccattgacatgaagaaagaggaattcaatagacttaagcaaggcaacagcagtgtcaatgagtacctaagtatgttcaacaagttggctcggtacgcccctgaggaagtggactcagataagaagaagatcaggaaattcttgaaaggaatcgcagttggaatgagactccagttgctagcacatgacttccccacttttcaacatatgatcaacaaggcacttctacttgaggatgccagaaaagaggctaccgaagaatacaagaaacgcaaatctaaccaccaagggaattcctcccgaggcgcacctcgccctcgctacggtcaacccatgcaataccaccagtcggtcactcaggctaaccgccagccaggctacgcccctcgtcctcagatgaaccgcccggcaccccagccacagcagcgtgcccctagtggcaatactgcgccaaacagtgttacctctttcaagtcaccacagggaccgtcagcaattcagtgtttccggtgcaaccagatgggtcactatgctagacagtgccctcagaatcctaccaacaccaactcagggcatgctaatggcagcactgccagaactcctactccagcggcagctcagtctcgtcctagcactcaggcaagtggacaaggttcacgtgcttccaaccactttggtcgaggccgtgtgaatcacattcaagctgaaaccgctcaggatgctccagacgttgtgatggtacattcccctggaaggaatataagggcaactcaaatatgcccggaagttaaccttagaattgaggaagttgacttcctagccaaaccgatagtcctagactcgcaaagcttggacatcatcctagggatggattggttggctaagcacaaaggacagatagattgtgccgaaaagtccatcaccttgcaaggacctggggaaaagcaagtccgctttacccctaacactcctaccgcaagtcggtctatcttaacctgtttacaagtcacctccttggagtcggtgcccatagtttgtgaatatcccgacgtatttccggaagaattaacaagaatgccaccagaccgagagattgagttcgccatagaactggcgccaggcaccgcaccaattgcaaaaagaccctaccgaatggcagctaatgagttagcagaagttaaaagacaaatcgaagaattagagagtaaaggttatgtgcgacctagctcatccccttggggagccccagtgctcctggttaagaaaaaggatggctctgagagaatggtaatcgactatagagccctgaatgaagtaactataaagaacaagtacccgttgccacggattgacgatttgttcgaccaacttaaaggagcaagagttttctcaaaaattgacttgaggtcaggttaccaccaactgaaaatcagatctgaagatatcccaaagaccgctttctcaacgcgttatggtctatatgagttcacagtaatgtccttcggactcaccaatgctccagcattcttcatgaacttaatgaacaaaatcttcatggaatacctggaccagtttgtcgtggtattcatcgatgacatcctaatatactccaagaacgaggaagaacatgctgaacacctgaggttgataatggaaaagctcagggatcatcaactattcgcaaaattctcgaaatgcgaattctggttagaccgagtagcatttcttggacacgtgatttcctccaatggtgtcgaagtagatcccagcaaggttgaagctgtacttgcttggaacccgcccaagaatgtgtcagagattcgcagcttcctcggcttagctagatattatcgaagattcattgaaggattctctaagctaaccagacctatgaccgagctgttaaagaaggaaaagaaatttcaatggtctgcagcctgtgaagacagcttccaagaaatgaagaaaaggttgaccactgccccagttctcaccttgccagatatccgaaaagatttcaagatcttctgtgatgcatcaaggcaaggcttaggatgtgtcctaatgcaagaacgaaaggttgtggcctatgcatccaggcagctcaggcctcatgaagtcaattatcccacccatgatctcgagttggcagccgtggttcatgctcttaagatctggaggcactatttaatcgggaacagatgtgaagtatacaccgatcacaaaagtcttaagtatatcttcacacagaccgagttaaatatgagacagagaagatggttggaactaatcaaggattacgatcttagaatccactatcaccctggtaaagccaacgtggtcgctgatgcgctaagtcgcaaggcctattgcaatgtagctcaaatacggcctgaccaagatcacctgtgcagagaattggagaagttaaggctgaccatggtacagccaggtgtccctgccagtttgacagtacagcctaccctagagtcgcaaatccgggaggctcagaaagacgacgaagggataaaagaattaataaaaagaatacaggagaagaaagacaccaatttctccatagacaaccaaggcacagtttggtgcggtccacgcatctgtgtaccggccaagaaggagttaagagatctcatcctaaaggaagctcatgagtccgcctattccattcatccaggaagtacgaagatgtaccaagatatcaaggcatacttctggtggactggaatgaagcgagatgtcgcagaatacgtagccctgtgtgacgtttgccaaagagtcaaggcagaacatcaaaggccagctgctcatttcgtgccagtgaaaaccacctatgatggaaagaaactagcagaactctacatgacccatgtcgtatgtagatttggctgtcccaagaaaattgtgtcagaccgaggcactcagttcacctcaaggttctggaagcagttgcatgaagccctcggaaccgatctaaattttagtacagcctaccatccgcagaccgatggtcagactgaaagggtaaaccaaatcctagaagacatgctacgttcgtgtgccctggatttcgaaggcacttgggatcgttgtttgctgtatgctgagttctcatacaacaacggttatcaggccagcattcagatgttgccaaatgaggcaatgttcggaagaaagtgccgcactcccttgtgctggaatgaggtgggcaaagcactggtattcggtcctgacatactcaagtcagcagaagaacaagttaagctaacccgagaacgtttaaagacagcgcagaaccgtcagaaaaattatgctgacaatcggaggcgtgaccttgaattcgaaaaaggagatcatgtgtacctgcgggtatcacctctccgtggtatgaggaggtttgggatgtccggcaagttagcaccccgctacatcggcccctacctcataaccgccagacgtggcgaagtggcttatcagcttgagttacctgaaggtctcgcagatgtgcataacgtgtttcacgtatcccagttaaagaaatgtcttcgagttccagaagagcaagttcccctgggtaatatcgtgctggaaaagaatctgacctacaaggaaagaccgatcaaggttcttgaagaggcagaacgtcagactcgaaggaagaccatcaagttctacaaagtccaatggagcaatcattctgaagatgaggcaacctgggagcgagaagatcttctccgcgccgagtttctggagctgctcctttag

SEQ ID NO: 89619 - DNA, 515 bp, Oryza sativa
  Clone ID: PAT_MRT4530_88359C.1
tcaagcttcgcccagaatcaaaatgccaccacacatggcttccttcctctgttcccctgctgctccagtgagtccaatggcgatggtctccgtcaaccgccgccttcccggcttcccgctggttgcgctcgcgccgccgccgccgccctcagcgccaccgtgtggtgctctctctcgctcgccgcccgcgcgccactgccatgcccctgcggccatgcgcaaccttagattcctcgtcagctgggctgggctgggccgggagctatcggctgacgcccaagaacaaataacccacgccttcccgcccttgatgccgcctcgcccgccattggtgctccctccccggctgcgcgccgcggcgccggtggcggccgccggcgaccaaacgacgacgggcagcggcgggtcgatcccaatgcacgcaaagatgatcggggaattcccgcaacggcgcgacatttgcttataccgcttccgatccatctcaacaacaacaaatcgatcatgaaagaaac

SEQ ID NO: 89620 - DNA, 10549 bp, Oryza sativa
  Clone ID: PAT_MRT4530_8835C.1
atgccgcgctacaagcctgagtatctttttggtgttgagggttttgtccaggagttgcgtacgatgtcctttgtcattggatttgggactgtccctttttatgcccagattcgtcatgatcgtcatgaagagaagtgccgagtcaaagtcaccttgaacagtaatagtgaagatattccctcagtgatgttcgaagctggaggaagaaactacatccatgcatgtcaggaggtggcaaggatcgccataggagagctccgtgatcgctacagtgatcagttggccgacactgagtatcgctaccatcctcgccaaccccagggaagtgaccgtggagactgaaggaattgagaatgatgctaccacaaggcatttggttgagatgctgtgggccatggatgaaagtcgtgcagagactgtgttagcagctcaagatcgtgaagatcggaatcgtggtaagatttgcaagttagaagacaaggtggatcgtttggagaaggaattagccgcattgaagggagaagcaccacctcagaaggccaggattcgtcttaccgcaaggaagagagctttatttgtccctcgctatcaattggcgccaaaggttcgtgtggtggagaaagaagttgccccagcagatcctccggtcatcatcataagtagtgatgaagaagaagaatccaagcgcaactgttccaagattgagtgggtagcaacccaagatgatgaagacgagccgaacgagccttcaatcgacctccgatgctcggaagaactagacaacgggaatggtcccaacctcaacaaccccaataacaataacaatggagagaatccaacccttgctcaagttcttgctcaacagactcagctaatgaacatgatgatgcagcaacttcagaaccagcagaaccaaggaaataaccatgcaccccctcagaataagttagcagaatttcttcgtgtaaggccgcctgttttctctagtaccactaatcctgttgaagctggtgattggttgcatgccatagagaagaagttggatttgcttcagtgcactgatcaggagaaggtctcatttgcatcacaccagttgcatggccctgcctctgaatggtgggatcacttccgcctgaataggactactgctgaacctatcacttggcttgaattcaccgctgctttccggaagacgcatataccatcgggagtggtgtctctcaagaagaaggaattcaggtcactcactcaaggatctcgctctgttacggagtatttgcacgaattcaatcgtcttgcccgttatgctccggaagatgtacgcaatgatgaagagcgtcaggagaagttcttggaaggacttaatgatgagctttcttacccactcatgactgaagattattctgatttccagaaattagtggataaggctattcatcaggaggacaagtacaatcgcatggagcagaagaaacgccggattgctcacttcaaggcacaacaggggaataatcagaagccgcgtcttactttaggaccccagtctatgccacatggaggttcttcgtctgttgttcgtccgcagcatcagttcttcaacaacaatgctggcaacaacatccgtaatcaagctccacgtcctgttgcagcttcgacacagcaacaacctgccaagagggagcaaggcagcaagcctgtggtatgtttcaactgtggagacccaggacattatgctgacaagtgtccaaagccccgacacgtgaaggttgtccctgcccagagcaactctgctgtaccagcatcaaaggcccgtgtcaatcatgttgcagctgcagaagctcaagatgctccagatgtgattttgggtacgttccttgttaactcagttcctgcaacagtgcttttcgattctggtgctacacattcattcttatctatgagttttgcgggaaatcatgggatggaagtagaagatcttagatgtcctttgatggttagtaccccaagtaatcaagcactctctttgcaacgtagcccctctgtcagaatagaaattcaaggggtaccatttctggccaatcttatattgttagaatccaaagaccttgacgtcattctagggatggactggttagccagacataaaggtgtgatagactgtgctaacagaaaagtaactctcaccagcaatgatggtcgagttgtgactgttcatgcattgtcttctgagtttttaaggtcaagactgaaccagataactttggaagagattcctatagtccgggggtatcctgatgtgttcccagatgatttacctggtatgccacctaaaagggatatagagttcagaaaagatttggtacctggaacaactccgatccataagagaccttatagaatggcagccaatgagttggcagaagttaagaggcaagtagatgatttgcttcagaaaggatacatcagaccgagttcatcaccatggggagctccggttatttttgtggaaaagaaagaccatacccagaggatgtgtgtggactatcgtgcattaaatgatgtgactatcaagaataagtacccgctacccagaattgatgatttgtttgatcagcttaaaggtgccaccgttttctccaagatagatcttcgatcagggtatcaccagttgagaatcaaagagtacgggttgttcgaatgtactgttatgtcttttggacttaccaatgcccccgctttcttcatgaacttgatgaataaggtgtttatggaatatctagacaagttcgtggtggtctttattgatgacattcttatctactctaagaccaaagaagagcatgaagaacatcttcgccttgcattggagaagctacgagaacatcaattgtatgccaagttcagcaagtgtgaattctggttgtctgaagtaaagttccttggtcacgtcatctcagcaggaggagttgccgtcgatcctagtaatgtggaatccgtaaccaactggaaacaaccaaagacagtttcagagatccgcagtttcctaggcctcgcaggatattatcggaagtttatagagaatttttccaagattgctaagcccatgacacgactgtttcagaaagatgtgaagtacaagtggtcagaagaatgtgagcagagttttcaagagttgaagaatcgcttgatatcagctcctattttgattttgcctgatccaaagaagggtttccaggtgtattgcgatgcatccaaacttgggttaggttgtgttttgatgcaagatgggaaggtggttgcctatgcatctcgtcagttacgtccgcatgaaaagaactaccctactcatgatcttgagttagctgcagtagttcatgcgttgaaaatttggcgtcattatcttttcggtactcgtacagaggaatttgaaagattgaatttgggaattgtcagtataggtttcgttgcagccttagaagcgaagcccactctaattgatcaagttagagaagctcaaactaatgatccggatatccaagaaattaagaagaatatgagaagaggaaaagctattggtttcttggaggatgagcacggaactgtatggttgggtgagagaatctgtgtccccgacaacaaagatttaaaagatgcaattctgaaagaagctcatgatactttatactccattcaccctggtagtactaagatgtaccaggatctcaaggaaaggttttggtgggcaagtatgaagcgtgaaattgcagaatacgtagcagtatgtgatgtttgtcagcgagtcaaggcagaacatcagaaacccgccggtttgttgcagcctttgaagattcctgaatggaaatgggaagaaatcggtatggattttatcactggtttgcccaaaacgtcattaggccatgactctatttgggtgatagtcgacagacttaccaaagtggcacatttcattccggtaaaaacaacctattccggaagtcgcttagcagaattgtatatggcaaggattgtgtgtttgcatggcgtccctaagaagatagtgtctgatcgaggcagtcagtttacttcaaatttttggaagaaacttcaggaagagatgggttctaagttgaactttagtactgcttatcatccgcagacagacggacaaactgaaagggtgaatcagattttggaagacatgttgagagcttgtgctttagatttcggtggaagttgggataagaatctaccttatgcagaattttcatacaacaacagttatcaagctagtcttcagatggctccttacgaagcactgtatggtcggaagtgccgcactccgcttttgtgggatcaaacgggagaacgtcaggttttcgggacggatatcctaagggaagcagaagaaaaggtgaaaatcattcaagaaagattgcgagtggctcagtctcgacataagagttatgccgacaatcgccgcagagatttgagttttgaagaaggagattacgtgtatcttcgtgtcacgcctcttagaggagttcatcgtttccataccaaaggaaaattggtaccgcgttttgtgggaccttataagattgtcagtagaagaggagaggttgcttatcagttagagttacctcaatctttggcagaagtccataatgtgttccatgtgtcgcaattgaagaagtgtttaagagtacctaccgaagaagctaatcttgaacaaatagaagtccaagaggatctgacctatgtggagaaaccaatccgtatcttggaaacaaatgagagaagaaccaggaatcgagttatccgtttttgcaaagtccagtggagtaatcactcggaagaagaatcaacttgggaacgagaagatgaattgaacgagggattcgagttcgtctcggattcgtctttcccgaaccttccttcctcgtcgccggtcgccgtgggccttcgccttcgcctccgagcccctttaaaaggttccccgtggtctcctctacccgccgccaccctcgccttcgcctctcgtcgccggagtcgccctagcgccccgtgcgccgccgttgttccagccgtcgccatcgctcgggaaggccgccgtcgtgttcgccgtcgcgtcgccgtcctcgtccgccccttcgccgtcgccgaagaccgccggagcgtcatcgccgccgtcgacccgaagagcttcgccgcttcctcctcgtcgccgtcgccatccgttgatcttccgcctccgtttgcgtcctcgcgccgtcgttcgccggcgagcatgcgccgcccgagccgtcccagctgcccgagccgccgccgccggggtgacgtcatcgctgacgccatcaagttcgtcctccattccgtcgtttccggagagtccgttttcaccggagaagagtttgaagagttccaaggccagcaaggcaactcctggtttggaatggtatattcctggtttggagatagaactgtgcagccaggatggttgttcagaatggttgggcctatacaacaggatgccgcgctacaagcctgagtacctgtttggtgttgagggttttgtccaggagttgcgtacaatgtcctttgccataggatttgggactgcccctttttatgcccagattactcatgatcgtcacgaagagaagtgccgagtcaaagtcactttgaacagtaatagtgaagatatcccctcagtgatgttcgaagctggaggaagaaactacatccatgcatgtcaggaggtggcaaggatcgccataggagagctccgcgatcgctacagtgatcagttggccgacacggagtatcgctatcatcctccagtcgtcaatgtaagtgatgatgaaggagaagaatcgaagcgcactcattccaagattgagtggggagcaactcaagctgatgaagacgagccgaacgagccttcaatcaactccgatgctcggaagacctagaaagccttgtcgaaccgttgtcttagatcgttgtgttagtttgcttgagtcttcagtttgtaataatgaaactcacttaagatcaataaaagttaaagtaattctctgtcctaagtagtttcccccggtttctcttcttgtgccctgcccataccagatggtgaatactcgcagcaatgggaatggccccaacaaccccaataacaacaacaatggagagaatcccacacttgcccaagttcttgctcaacagacacagctaatgaacatgatgatgcagcaactccagaaccagcaaaaccaaggaaataaccatgcacctccccagaacaagttagcagaatttcttcgtgtaaggccgcctactttctctagcaccgctaatcctgttgaagctggtgattggttgcatgccatagagaagaagttggatttgcttcaatgcactgatcaggagaaggtctcatttgcatcccatcagttgcatggccctgcctctgaatggtgggatcatttccgcctgaataggactactgcggaacctatcacttggcttgaattcaccgctgctttccggaagacgcatataccatcgggagtggtgtctctcaagaagaaggaattcaggtcgctcacccagggatctcgctctgttacggagtatttgcacgagttcaatcgtttggctcgttatgctccggaagatgtgcgcaatgatgaagagcgccaggagaagttcttggaaggacttaatgatgagctttcttacccactcatgactggagattatcatgatttccagaagttagtggataaggctattcgtcaggaggacaagtacaatcgcatggagcagaagaaacgccggattgctcaattcaagacacaacaggggaataatcagaagccgcgtcttactttaggaccccagtccatgccacagggaggttcttcgtctgttgttcgtccgaagcgttagttcttcaacaacaatgctggcaacaacatccgcaatcaagctccacgtcctgttgcagctccagcacagcaacaacctgccaagagggagcaaagcagcaagcccgtggtgtgtttcaactatggagacccaggacattatgctgacaagtgtccgaagcccagacgcgtgaaggttgtccctacccagagcaactctaccgcaccagcatcaaaggctcgtgtcaatcatgtcgctgctgcagaagcacaagatgctccagatgtgattttgggtacgttccttgttaactcagttcctgcaacagtgctttacgattctggtgctacacattcattcttatctatgagttttgcaggaaatcatgggatggaagtagaagatcttagacgtcctttgatggttagtaccccaagtagtcaagcactctctttgcaacgtagcccctctgtcagaatagaaattaaaggagtaccatttctggccaatcttatcttgttagaatccaaagaccttgatgtcatcctagggatggactggttagccagacataaaggtgtgatagactgtgctaacagaaaagtaactctcaccagcaatgatggtcgagttgtgactgttcatgcattgtcttctgagtttttaaggtcaagactgaaccaaataattctggaaaagattcctatagtccgggagtatcccgatgtgttccccgatgatttgcctggtatgccgcctaaaagggatatagagttcagaatagatttggtaccaggaacaactccgatccataagagaccttatagaatggcagccaatgagttggcagaagtcaagcggcaagtagatgatttgcttcagaaaggatacatcagaccaagttcatctccatggggagctccggttatttttgtggaaaagaaagatcatacccagaggatgtgtgtggactatcgtgccctaaacgatgtgactatcaagaataagtatccgctacccagaattgatgatttgtttgatcagcttaaaggtgccactgttttctccaagatagatcttcgatcagggtatcaccagttgagaatcaaagaggaagatatacctaagacagcttttaccactaggtatggattgttcgaatgtactgttatgtcttttggacttaccaatgcccccgctttcttcatgaacttgatgaataaggtgtttatggaatacctagacaagttcgtggtggtctttattgatgatattcttatctactctcgaaccaaagaagagcatgaagaacatcttcgccttgcactagagaagctacgagaacatcaactgtatgctaagtttagcaagtgtgaattttggttgtctgaagtgaagttccttggtcacgtcatctcagctagaggagttgccgttgatcctagtaatgtggaatccgtaaccaactggaaacaaccaaagacagtttcagagattcgcagtttcctaggtcttgcaggatattatcggaggtttatagagaatttttccaagattgctaagcccatgacacgattgtttcagaaagatgtgaagtacaagtggtcagaagaatgtgagcagagttttcaagagttgaaaagtcgcttaatatcagcacccattttgattttgcctgatccaaagaagggttttcaagtgtattgcgatgcatctaagtttgggttaggttgtgttctgatgcaagatgggaaggtggttgcctatgcatctcgtcagttacgtccgcatgaaaagaactaccctactcatgatcttgagttagctgcagtagttcatgcgttgaaaatttggcgtcattatcttttcggtactcgtacagaggtatataccgatcacaagagtttaaagtatatctttactcagccggatctgaacatgagacaaaggagatggttggaattaattaaaggattatgacatgggaattcattatcacctgggaaaggctaatgttgtagtagacgctcttagcaggaaaggctattgcaatgctacggaaggacgacagttgtcattggaattatgcaaggaatttgaaagattaaatttgggaattgtcagtagaggttttgttgcagccttagaagcgaagcccactctaattgatcaagttagagaagcccaaattaatgatcccgatattcaagagatcaagaagaatatgagaagaggaaaagctatcggtttcttggaggatgagcacggaactgtatggttgggtgagagaatctgcgtccccgacaacaaagatttaaaagatgcaattctgaaagaagctcacgacactttatactctattcaccctggtagtactaagatgtaccaggatctcaaggaaagattttggtgggcaagtatgaagcgtgaaatcgcagaatacgtagcagtatgtgatgtttgtcagcgagtcaaggcagaacatcagaaacctgccggtttgctgcagcctttgaagattcctgaatggaagtgggaagaaatcggtatggattttatcactggtttacccagaacgtcatcaggccatgactctatttgggtaatagtcgacagacttaccaaagtggcacatttcattccggtaaagacaacttattccgaaagtcgcttagcggaattgtatatggcaaggattgtgtgtttgcatggcgtccctaagaagatagtgtctgatcgaggcagtcagtttacttcaaatttttggaagaagcttcaggaagagatgggttctaaactgaactttagtactgcttatcatccgcagacagacggacaaacagaaagggtgaatcagattttggaagatatgttgagagcttgtgctttagacttcggtggaagttgggataagaatctaccttatgcagaattttcgtacaacaacagttatcaagctagtcttcagatggctccttacgaagcactgtatggtcggaagtgccgcactccgcttttgtgggatcaaacgggagaacgtcaggttttcgggacggatatcctaagggaagcagaagaaaaggtaaagatcattcaagaaagattgcgagtggctcagtctcgacataagagttatgccgataatcgccgtagagatttgagttttgaagaaggagattatgtgtatcttcgtgtcacgcctcttcgaggagttcatcgttttcacaccaaaggaaaattggcaccgcgttttgtgggaccttataagatcgtcagtagaagaggagaggttgcttatcagttggagttacctcaatctttggcaggagtccataatgtgttccatgtttcgcaattgaaaaagtgtttaagggtacctaccgaagaagctaatcttgaacagataaaagaccaagaggatctgacctatgttgagagaccaatccgtatcttggaaatagatgagagaagaaccaggaatcgggttatccgtttttgcaaagtccaatggagtaatcactcggaagaagagtcaacttgggaacgagaagatgaattgaagtcagctcatccgcatctgttcgccagttcttccgaatctcgaggacgagattccgtt

SEQ ID NO: 89621 - DNA, 4515 bp, Oryza sativa
  Clone ID: PAT_MRT4530_88360C.1
ctaagggagcagctccggaaactcggcgcggagaagatcttctcgttcccaggttgcttcatcttcagaatgattgctccattggactttgtagaacttgattgtcttccttcgagtctgacgttctgcttcttcaagaaccttgatcggtctttccttgtaggtcagattcttttccagctcgatattacccaggggaacttgctcttctggaactcgaagacatttctttaactgggatacgtgaaacacgttgtgcacatctgcgagaccttcaggtagctcaagctgataagccacttcgccacgtctggcggttatgaggtaggggccgatgtagcggggtgctaacttgccggacatcccaaaccttctcataccacggaggggtgatacccgcaggtatacatgatctcctttttcgaactcaaggtcatgcctccgattgtcagcgtaattcttctgacggtccagggcttcgcccacctcgttccagcacaagggggtgcgacactttcttccgaacattgcctcattcggcgacatctgaatgctggcctgataactgttgttgtatgagaactcagcatatggcaaacaacgatcccaagtgccttcgaaatccaaggcacacgcacgcaacatgtcttctaggatttggtttacccttttcgtctgaccatcggtctgcggatggtaggctgtactaaagtttagatcagtcccgagggcttcatgcaactgcttccagaaccttgaggtgaactgagtgcctcggtctgacacaattttcttggggcagccaaatctacatacgacatgggtcatgtagagttctgccagtttccttccatcataggtggttttcactggcacgaaatgagctgatttcgtgagtcggtccacgattacccaaatagagtcgtacccgctgggggttcttggcaaaccggtgatgaaatccattccgatctcttcccatttccactcgggaatcggtaggggttgcagcagaccagctggcctctgatgctctgccttgactctttggcaaatgtcacacaaggctacgtattcagcgacatctcgcttcattccagcccaccaaaagtatgccttgatatcctggtacatcttcgtacttcccggatgaatggagtaagcggactcatgagcttcctttaggatgagatctcttaactccttcttggccggtacacagatgcgtgaatcgcaccaaactgtgccttgatcgtctatggagaaattggtgtctttcttctcctgtattctttttattaactcttttatcccttcgtcatctttctgagcctcccggatttgcgactctagggtaggctgtactgtcaagctggctgggactcctgtctgtaccacggtcagccttaacttctccaattctctgcacagatgatcttggtcaggccgtatttgagctacattgcaataggccttgcgacttagcgcatcagcgaccacgttggctttaccaggatgatagtggattccaagatcgtaatccttgattagttccaaccatcttctctgcctcatatttaactcggtctgtgtgaagatatatttaagacttttgtgatcggtgtatacttcacatctgttccctattaagtagtgcctccagatcttaagagcatgaatcacggctgccaactcgagatcatgggtgggataattgacttcatgaggcctgagctgcctggatgcataggccacaacctttcgttcttgcattaggacacatcctaagccttgtcttgatgcatcacagaagatctcgaaatcttttcggatatctggcaaggtgagaactggggcagtggtcaaccttttcttcatttcttgaaagctgtcttcacaggctgcagaccattgaaatttcttttccttctttaacagctcggtcataggtctggctagcttagagaatccttcaatgaatcttcgataatatccagctaagccaaggaagctgcgaatctctgacacattcttgggcgggttccaagcaagtacagcttcaaccttgctgggatctacttcgacaccactggaggagatcacgtgtccaagaaatgctattcggtctaaccagaattcacatttcgagaatttagcgaatagttggtgatctctgagcttttccattatcagcctcaggtgttcggcatgttcttcctcgttcttggagtatatcaggatgtcatcgatgaacaccacgacaaactggtccaggtaatccataaagattttgttcattaagttcatgaagaacgctggagcattggtgagtccgaaggacatcactgtgaactcatatagaccataacgcgttgagaaagcggtcttcgggatatcttcagatctgattttcagttggtggtaacctgatctcaagtcaatttttgagaaaactcttgctcctttaagttgatcgaacaagtcgtcaatccatggcaacgggtacttgttctttatagttacttcattcagggctctatagtcgattaccattctctcagagccatcctttttcttaaccagaagcactggggctccccaaggggatgagctaggtcgcacataacctttactctccaactcttcgatttgtcttttaacttctgctaactcattagctgccattcggtagggtctttttgcaattggtgcagtgcctggcgccagttctatggcgaactcaatctctcggtctggtggcatactcgttaattcttccggaaatacgtcgggatattcacagactataggcaccgactccaaggaggtgacttgtaaacaggttaggatagaccgacttgcggtaggggtgttagaggtaaagcggacttgctttcctccaggtccttgcaaggtgatggactttttggcacaatctatctgtcctttgtgcttagcgaaccaatccatccctaggatgatgtccaagctttgcgagtctaggactatcggtttggctaggaagtcaacttcctcaattctaaggttaacttccgggcatatttgagttgcccttatattcctcccaggggaatgtaccatcacaacgtctggagcatcctgagcggtttcagcttgaatgtggttcacccggcctcgaccaaagttgttggaagcacgtgaaccttgtccacttgcctgagagctaggacgaaactgagctgccgctggagtaggagttctggcagtgctgccattagcatgccctgagttggtgttggtaggattctgagggcactgtctggcatagtggcccatctggtcgcaccggaaacactgaactgttgttggtccctgcggtgacttgaaagaggtaacactgtttggcgcagtattgccactaggggcacgctgctgtggctgaggtgccggacggttcatctgaggacgaggggcgtagcctggctggcggttagcctgagtgaccgactggtggtattgcatgggttgaccgtagcgagggtgaggtgcgcctcgggaagaatttccctgatggttagacttgcgtttcttgtattcttcggtagcctcttttctggcatcctcaagtagaagtgccttgttgatcatatattgaaaagtggggaagtcatgagcaagcaactggagtctcattccaactgcgattcctttcaagaatttcctgatcttcttcttgtctgtgtccacttcctcaggggcgtaccgagccaacttgttgaacatacttaggtactcattgacactgctgttgccttgcttaagtctgttgaattcctctttcttcatgtcaatagtgctttcaggcacatgagctgcacggaaagccgtagcaaactcatcccaagcaatgttagtgggttcagggtgtgcgttgcagtaattctcccaccaatctgcagcaggtcctcttagctggtgagaggcgtagagcgtcttctcaaccggagtacactgcactaagttgagttttctatcaacatccttcagccaatcgtcagcctcgacgggctcgacggtctgagagaactctggcggacgagacctcagaaaatctgtcagcttggatctattgttattcgtgtgagggtggccatttccatgcgcattatgctgaaaaccagctacggctgcggctaatccttgcaagatttgtgtctgaactgccatcaggtgctgcatgttgttttccacatgaggtggggaagggaggcgttcttctccagaattgtgactggcagtgcggtgagagcggtgagactgttcaatctctgcatcacgggaagctgtgcgatgcgagcggttgctgcggcgaggttgctcaacttctgcgttgcgggaagcagtacggtgcgaacggttgctgtggtgagaccgctcattagctgactcatgatttgcttctggctcgactctaccatcttcaaaaccaaagcgggctggtgcacgagctgcacggcgggggcggctagccat

SEQ ID NO: 89622 - DNA, 270 bp, Oryza sativa
  Clone ID: PAT_MRT4530_88361C.1
gcccacacagtaacactcctgttcttggtaattacgggaaagaatttccgcacaggctgtaatactcgttggcgcctgtatagtagagagtagtagagtagagtagagatacgggataccggtataaaaccacctcccacatgtaatctccgtgactccggaaatccactcgatgaattgaattttggtggccggcttggccggccggccggcggcccgctccgaattccggttgggtcgagtcgacgataaaaaaaaaaaaaaaaaaaa

SEQ ID NO: 89623 - DNA, 5556 bp, Oryza sativa
  Clone ID: PAT_MRT4530_88362C.1
atggcagtgaacgccagcttcagttcccacggttttggtgagggtcaccacgtcgctcagcttcgtgacctcgcccgtttccttggcttctcgtgtcccgagtacacggggtactctgtggaccgtgttccccctcactgtgagctctctgtgtacctttacccccgtggaggtatacacggagctggccttcgcccacaccacttcactgtggccaggcccaccctccagatcgcgtaccaggacctctcctggactgcgcttcgtcgcctggcccacgactacagccaccgtctcggaggctccgccttccggcagcttccacgccttccttctggccactcagacgccaggtacccttgtccgtacagcgagtctcagccagtactgactcgcatggttgagctttcggaggctcaggccactcagcacgacctactccttgaggcttaccgctcccttgcccgccgctacgccgctctggaggcccgtctggccgaggagggtgtcacctcagttgacactatctcttgggactcaggccgcctctgccacgccagccacctgtcctcccacagctcccgcggctctgcccgcactcccagtggcccgcgttcccccagctcgcgtgcgctgtactcaccagtgtactccccctacccgcacccagttagcccttcctacacccccagacacaccccagctgcttcctcccgccgtggcccacgctttatccgcactgcgcggaagcgtgttgttgggtcttccaccgggttccgtttccactacccagctcccctaccgccagcggcccgtgctgctgccggccctcgacagatggctagccgcccccgccgtgcagctcgtgcaccagcccgctttggttttgaagatggtagaaccgagccggaagcaaatcatgagtcagctaatgagcagtctcaccacagcaaccgttcacaccgtactgcttcccgcaatgcagaagttgagcaaccccgccgcagcaaccgctcgcatcgcacagcttcccgtgatgcagagatggaacagtctcaccgctctcaccgcactgccagtcacaattctggagaagaacgcctttcttccccacctcatgtggaaaacaacatgcagcacttaatggcagttcagacacaaatcttgcaaggattagccgcagccatagccggttttcagcataatacgcatggaaatggccaccctcacattagtaacaatagatccaagttgacagactttctgaggtctcgtccgccagagttctctcagaccgtcgagcccgtcgaggctgacgattggctgaaagatgttgatagaaaactcaacttagtgcagtgtactcctgttgagaagacgctctacgcctctcaccagctaagaggacccgctgcagattggtgggaaaattactgcaatgcacaccctgaacccactaacattgcttgggatgagtttgctacggctttccgtacagctcatgtgcctgaaagcgctattgatatgaagaaagaagaattcaacagacttaagcaaggcaacagcagtgtcaatgagtacctaagtatgttcaacaagttggctcggtacgcccctgaggaagtggacacagacaagaagaagatcaggaaattctttaaaggaatcgtagttggaatgagactccagttgattgctcatgatttccccacttttcaacatatgatcaacaaggcacttctactcgaggatgctagaaaagaggctaccgaagaatacaagaaacgcaagtctaaccataagggaaattcttcccgaggcgcacctcgcccttgctacggacaacccatgcaataccaccagtcggtcactcaggctaaccgccaaccaggctacgcccctcgtcctcagatgaaccgtccggcccctcagccacagcagcgtgcccctagtggcaatactgcgccaaacagcgttacctctttcaagtcaccgcagggaccgtcagcagttcagtgtttccggtgcaaccagatgggtcactatgctagacagtgccctcagaaccctaccaacaccaactcagggcatgcgaatggcagcactgccagaactcctaccccagcggcagctcagtctcgtcctagctctcaggcaagtggacaaggttcacatgtttccaacaactttggtcgaggccgggtgaaccacattcaagctgaaaccgctcaggatgctacagacgttgtgatgggtatgttctctgtcaactccgtacccgcgatagttctgtttgattcaggagcttcccattccatcatatcacaagcttttgtgaaaagaaatggttggaaaacccaaaatttacgtgtaccaatgataatacattcccctggaaggaatataagggcaactcaaatatgcccggaagttaaccttagaattgaggaagttaacttcctagccaaaccgatagtcctagactcgcaaagcttggacattatcctagggatggattggttggctaagcacaaaggacagatagattgtgccaaaaagtccatcaccttgcaaggacctagaggaaagcaagtccgctttacctctaacacccctaccacaagtcggtctatcctaacctgtttacaagtcaccaccttggagtcggtgcccatagtctgtgaatatcccgacgtattcccagaagaattaacgagtatgccaccagaccgagagattgagttcgccataaaactggcgccaggcaccgcaccaattgcaaaaagaccctaccgaatggcagctaatgagttagcagaagttaagagacaaatcgaagaattggagagtaaaggttatgtgcgacctagctcatccccttggggagccccagtgcttctggttaagaaaaaggatggctctgagagaatggtaatcgactatagagccctgaatgaagtaactataaagaacaagtacccgttgccacggattgacgatttgttcgatcaacttaaaggagcaagagttttctcaaaaattgacttgaggtcaggttaccaccaactgaaaatcagatctgaagatatcccgaagaccgctttctcaacgcgttatggtctatacgagttcacagtaatgtccttcggactcaccaatgctccagcgttcttcatgaacttaatgaacaaaatctttatggaatacctggaccagtttgtcgtggtgttcatcgatgacatcctgatatactccaagaatgaggaagaacatgctgaacacctgaggctgataatggaaaagctcagagatcatcaactattcgcaaaattctcgaaatgcgaattctggttagaccgagtagcatttcttggacacgtgatctcctccaacggtgtcgaagtagatcccagcaaggttgaagctgtacttgcttggaacccgcccacgaatgtgtcagagatccgcagcttccttggcttagctggatattatcgaagattcattgaaggattctctaagctagccagacctatgaccgagctgttaaagaaggaaaagaaatttcaatggtctgtagcctgtgaagacagctttcaagaaatgaagaaaaggttgaccactgccccagttctcaccttgccagatatccgaaaagatttcgagatcttttgtgatgcatcaagacaaggcttaggatgtgtcctaatgcaagaacgaaaggttgtggcctatgcatccaggcagctcaggcctcatgaagtcaattatcccacccatgatcttgagttggcagccgtggttcatgctcttaagatctggaggcactatttaattgggaacagatgtgaagtatacaccgatcacaaaagtctaaagtatatcttcacacagaccgagttaaatatgaggcaaagaagatggctggaactaatcaaggattacgatcttggaatccattaccatcctggtaaagctaacgtggtcgctgatgcgctaagtcgcaaggtctattgcaacgtagctcaaatatggcctgaccaagatcgcctgtgcagagaattggagaagttgaggctgaccgtggtacagtcaggtgtccctgccagcttgacagtacagcctaccctagagtcgcaaatccgggaagcccagaaagacgacgaagggataaaagagttaataaaaagaatacaggagaagaaagacaccaatttctccatagacgatcaaggcacggtttggtgcggtccacgcatctgtgtaccggccaagaaggagttaagagatctcatcctaaaggaagctcatgagtccgcctactccattcacccagggagtacgaagatgtaccaagatatcaaggcatacttctggtgggctggaatgaagcgagatgtcgcagaatacgtagccctgtgtgatgtttgccaaagagtcaaggcagaacatcagaagccagctggtctgctacaacccctaccgattcccgagtggaaatgggaagagatcggaatggatttcatcaccggtttgccaagaacccccagcgggtacgactccatttgggtaatcgtggaccgactcacgaaatcagctcatttcgtgccagtgaaaaccacctttgatggaaagaaactagcagaactctacatgacccgtgtcgtatgtagatttggctgtcccaagaaaatcgtgtcagaccgaggcactcagttcacctcaaggttctggaaccagttgcatgaagccctcggaaccgatttaaatttcagtacggcctaccatccgcagaccgatggtcagacagaaagggtaaaccaagtcctagaagacatgctacgagcgtgtgccttggatttcgaaggcacttgggatcgttgtttgccgtatgccgagttctcatacaacaacagctatcaggccagcattcagatgtcgccgaatgaggcaatgttcggaagaaagtgccgcactcccttgtgctggaatgaggcgggcgaagcactagtattcggtcctgacatactcaagacagcagaagaacaagttaagctaatccgagaacgtttaaagacagcgcagaacggtcagaaaaattacgctgacaatcggagacgtgaccttgagttcgaaaaaggagatcatgtgtacctgcgggtatcacccctccgtggtatgaagaggtttgggatgtccggcaagttagcaccccgctacatcggcccctacctcataaccgccagacgtggcgaggtggcttatcagcttgagctacctgaaggtctcgcagatgtgcacaacgtgttccacgtatcccagttaaagaaatgtcttcgagttccagaagagcaagtccccctgggtaacatcgagctggaaaagaatctaacctacaagaaaagaccgatcaaggttcttgaagaggcagaacgtcagactcgaaggaagaccatcaagttttacaaagtccaatggagcaatcattctgaagatgaggcaacctgggagcaagaagatcttctccgcgccgagttcccggagctgctcccttag

SEQ ID NO: 89624 - DNA, 5400 bp, Oryza sativa
  Clone ID: PAT_MRT4530_88363C.1
atggcagtgaacgccagcttcagttcccacggttttggtgagggtcaccacgtcgcccagcttcgtgacctcgcccgtttccttggcttctcgtgtcccgagtacacggggtactccgtggaccgcgttccccctcactgtgagctctctgtgtacctttacccccgtggaggtatacacggagctggccttcgcccacaccacttcactgtggccaggcctactctccagatcgcgtaccaggacctctcctggactgcgcttcgtcgcctggcccacgactacagccaccgtctcggaggctccgccttccggcagtttccacgccttccttctggccactcagacgccaggtacccttgcccgtacagcgagtctcagccagtgctgactcacatggttgagctttcggaggctcaggccacccagcacgacctactccttgaggcttaccgctctcttgctcgccgctacgccgctttggaggcccgtctggccgaggagggtgtcacctcagttgacactatctcttgggactcaggtcgcctctgccacgccagccacctgtcctcccacagctcccgcggctctgctcgcactcccagtggcccgcgctcccccagctcgcgtgcgccgtactcaccagtgtactccccctacccacacccagttagcccttcctacacccccggtcacaccccagttgcttcctcccgccgtggcccacgctttatccgcactgcgcggaagcgtgttgttggttcttccaccgtgttccgtttccactacccagctcctccaccgccagcggcccgtgctgctgccggccctcgacagatggctagccgcccccgccgtgcagcccgtgcaccagctcgctttggttttgaagatggtagagtcgaagcagaagcaaatcatgaatcagctaatgagcagtctcaccacagcaaccgttcgcaccgtactgtttcccgcaacgcagaagttgagcaaccccgccgcagcaactgctcgcatcgcacagtttcccgtgatgcagagatggaacagtctcaccgctcttaccgcactgccagtcacaattctggagaagaacgcctcccttccccacctcatgtggaaaacaacatgcaacacttaatggcagttcagacgcaaatcttgcaaggactaaccacagccatagccagttttcagcataatgcgcatggaaatggccacccccacatgggcaacaacagatccaagctgatagactttctgaggtctcgtccgctagagttctctcagaccgtcgagcccgtcgaggctgacgattggttgaaagatgttgatagaaaactcaacttagtgcagtgtactcctgttgagaagacgctctacgcctctcaccagctaagaggacctgccgcagattggtgggaaaattactgcaatgcacatcctgaacccactaacattgcttgggatgagtttgctacggctttccgtgcagctcatgtgcctgaaagcaccattgacatgaagaaagaagaattcaacaggcttaagcaaggcaacagcagtgtcaatgagtacctaagtcagttcaacaagttggctcggtacgcccctgaagaagtggacacagataagaagaagatcaggaaattcttgaaaggcgcacctcgccctcgctacggtcaacccatgcaataccaccagtcggtcactcagactaaccgccagccaggctacgcccctcgtcctcagatgaaccgtccggcacctccgccacagcagcgtgcccctagtggcaatactgcgccaaacagtgttacctctttcaagtcaccacagggaccgtcagcagttcagtgtttccggtgcaaccagatgggtcactatgctagacagtgccctcagaatcctaccaacaccaactcagggcatgctaatggcagcaatgccagaactcctactccagcggcagctcagtctcgtcctagctctcaggcaagtggacaaggttcacgtgcttccaacaacttcggtcgaggccgtgtgaatcacattcaagctgaaaccgctcaggatgctccagaagttgtgatgggtatgttctctgtcaactccgtacccgcaatagttctgtttgattcgggagcttcccattctttcatatcgcaagcttttgtgaaaagaaatggttggaaaacccaaaatttgcgtgtgccaatgatagtacattcccctggaaggaatataagggcaactcaaatatgcccggaagttaaccttagaattgaggaagttgacttcctagccaaaccgatagtcctagactcgcaaagcttggacatcatcctagggatggattggttggcaaagcacaaaggacagatagattgtgccgaaaagtccatcactttgcaaggacctggaggaaagcaagtccgctttacccctaacactcctaccgcaaatcggtctattctaacctgtttacaagtcacctccttggagtcggtgcccatagtctgtgaatatcccgacgtatttccggaagaattaacaagaatgccaccagaccgagaaatcgagttcgccatagaactggcaccaggcactgcaccaattgcaaaaagaccctaccgaatggcagctaatgagttagcagaagttaaaagacaaatcgaagagttggagagtaaaggttatgtgcgacctagctcatctccttggggagccccagtgcttctggttaagaaaaaggatggctctgagagaatggtaatcgactatagagccctgaatgaagtaactataaagaacaagtacccgttgccacggattgacgatttattcgatcaacttaaaggagcaagagttttctcaaaaattgacttgaggtcaggttaccaccaactgaaaatcagatctgaagatatcccgaagaccgctttctcaacgcgttatggtctatacgagttcacagtaatgtccttcggactcaccaatgctccagcatttttcatgaacctaatgaacaaaatctttatggaatacctggaccagtttgtcgtggtattcatcgatgacatcctgatatactccaagaacgagaaagaacatgctgaacacctgaggctgataatggaaaagctcagaaatcatcgactattcacaaaattcttgaaatgcgaattctggttggaccgagtagcatttcttggacacgtgatctcctccaacggtgtcgaagtagatcccagcaaagttgaagctgtacttgcttggaacccgcccaagaacgtgtcagagatccgcagcttccttggcttagctggatattatcgaagattcattgaaggattctctaagctagccagacctatgaccgagctgttaaagaaggaaaagaaatttcaatggtctgcagcctgtgaagacagctttcaggaaatgaagaaaaggttgaccactgccccagttctcaccttgccagatatccgaaaagatttcgagatcttctgtgatgcatcaagacaaggcttaggatgtgtcctaatgcaagaacgaaaggttgtggcctatgcatccaggcagcttaggcctcatgaagtcaattatcccacccatgatctcgagttggcagccgtggttcatgctcttaagatctggaggcattatttaatcgggaacagatgtgaagtatacaccgatcacaaaagtcttaagtatatcttcacacagaccgagttaaatatgaggcagagacgatggttggaactaatcaaagattacgatcttggaatccactatcatcctggcaaagccaacgtggtcgctgatgcgctaagtcgcaaggcctattgcaatatagcccaaatacggcctgaccaagatcacctgtgcaaagaattggagaagttgagggtgaccgtggtacagtcaggtgtccctgccagcttgacggtacaacctaccctagagtcgcaaatccgggaggctcagaaagacgacgaagggataaaagagttaataaaaagaatacaagaaaagaaagacaccaatttctccatagacgatcaaggcacagtttggtgcggtccacgcatctgtgtaccggccaagaaggagttaagagatctcatcctaaaggaagctcatgagtccgcctactccattcatccaggaagtacgaagatgtaccaagatatcaaggcatacttctggtgggctggaatgaagcgagatgtcgcagaatacgtagccttgtgtgacatttgccaaagagtcaaggcagagcatcagaggccagctggtctgctgcaacccctaccgattcccgagtggaaatgggaagaggtcggaatggatttcatcaccggtttgccaagaacccccagcgggtacgactccatctgggtaatcgtggatcgactcacgaaatcagctcatttcgtgccagtgaaaaccacctatgatggaaagaaactagcagaactctacatgacccatgttgtatgtagatttggctgtcctaagaaaattgtgtcggaccgaggcactcagttcacctcaaggttctggaagcagttgcatgaagccctcggaactgatctgaattttagtacagcctaccatccgcagaccgatggtcagaccgaaagggtaaaccaaatcctagaagacatgctacgtgcgtgtgccttggatttcgaaggcacttgggatcgttgtttgccgtatgccgagttctcgtacaacaacagttatcaggccagcattcaaatgtcgccgaatgaggcaatgttcggaagaaagtgccgcacccccttgtgctggaatgaggtgggcgaagccctggtattcggtcctgacatactcaagtcagcagaagaacaagttaagctgatccgagaacgtttaaagacagcgcaaaaccgtcagaaaaattacgctgacaatcggagacgtgaccttgagttcgaaaaaggagatcatgtgtacctacgggtatcacccctccggggtatgagaaggtttgggatgtccggcaagttagcaccccgctacatcggcccctacctcataaccgccagacgtgacgaagtggcttatcagcttgagctacctgaaggtctcgccgatgtgcacaacgtgtttcatgtatcccagttaaagaaatgtcttcgagttccagaagagcaagttcccctgggtaatatcgacctggaaaagaatctgaccaacaaggaaagaccgatcaaggttcttgaagaggcagaacgtcagactcgaaggaagaccatcaagttctacaaagtccaatggagcaatcattctgaagatgaggcaacctgggaacgagaagatcttctccgcgccgagtttccggagctgctcccttag

SEQ ID NO: 89625 - DNA, 3600 bp, Oryza sativa
  Clone ID: PAT_MRT4530_88364C.1
ttagactttgtagagcttgatggtcttccttcgagtctgacgttctgcctcttcaagaaccttgatcggtctttccttgtaggtcagattcttttccagctcgatattacccaggggaacttgctcttctggaactcgaagacatttctttaactgggatacgtggaacacgttgtgcacgtttgcgagaccttcaggtagctcaagctgataagccacttcgcaccgtctggcggttatgaggtaggggccgatgtagcggggtgctaacttgccggacatcccaaaccttctcataccacggaggggtgatacccgcaggtacacatgatctcctttttcgaactcaaggtcacgcctccgattgtcagcgtaattcttctgacggttctgtgctgtcttcaaacgttcccgtatcagcttaacttgttcttctgctgacttgagtatgtcaggaccgaataccaatgctttgcccacctcattccagcacaatggggtgcggcactttcttccgaacattgcctcattcggcgacatctgaatgctggcctgataactgttgttgtatgagaactcggcatacggcaaacaacgatcccaagtgccttcgaaatccaaggcacacgcacgtagcatgtcttctaggatttggtttaccctttcggtctgaccatcggtctgcggatggtaggctgtactaaaattcagaaccttgaggtgaactgagtgcctcggtctgacacaattttcttgggacagccaaatccaaatggagtcgtacccgttgggggttcttggcaaaccggtgatgaaatccattccgatctcttcccatttccactcgggaatcggtaggggttgcagcagaccagctggcctctgatgttccgccttgactctttggcaaatgtcacacagggctacgtattctgcgacgtctcgcttcattccagcccaccagaagtatgccttgatatcttggtacatcttcgtacttcctgggtgaatggagtaggcggactcatgagcttcctttaggatgagatctcttaactccttcttggccggtacacagatgcgtggtccgcaccaaactgtgccttgatcgtctatggagaaatttgtgtctttcttttcctgtattctttttattaattcttttatcccttcgtcgtctttctgagcctcccggatttgcgactctagggtaggctgtactgtcaagctggcagggacacctgactgtatcacggtcagtcttaacttctccaattctctgcacaggtgatcttggtcaggccgtatttgagctacattgcaataggccttgcgacttagcgcatcagcgaccacgttggctttaccaggatgatagtggattccaagatcgtaatccttgattagttccaaccatcttctctgtctcatatttaactcggtctgagtgaagatatacttaagacttttgtgatcggtgtatacttcacatctgttcccgattaaatagtgcctccagatcttaagagcatgaaccacggctgccaactcgagatcatgggtgggataattggcttcatgaggcctgagctgcctggatgcataggccacaaccttttgttcttgcattaggacacatcctaagccttgtcttgatgcgtcacagaagatctcgaaatattttcggatatctggcaaggtgagaactggggcagtggtcaactttttcttcaattcttggaagctgtcttcacaggcgttggaggaaatcacgtgtccaagaaatgctactcggtccaaccagaattcgcatttcgagaatttagcgaatagttgatgatctctgagcttttccattatcagcctcaggtgttcagcatgttcttcctcgttcttggagtatatcaggatgtcatcgatgaacaccacgacaaactggtctaggtattccatgaagattttgttcattaagttcatgaagaatgctggagcattagtgagtccgaaggacataactgtgaactcatatagaccataacgcgttgagaaagtggtcttcgggatatcttcagatctgattttcagttggtggtaacctgacctcaagtcaatttttgagaaaactcttgctcctttaagttgatcgaataaatcgtcaatccgtggcaacgggtacttgttctttatagttacttcattcagggctctatagtcgattaccattctctccgagccatcctttttcttaaccagaagtactggggctccccaaggggatgagctaggtcgcacataacctttactttccagttcttcgatttgtcttttaacttctgctaactcattagctgccatttggtagggtctttttgcaattggagctgtgcctggtgccagttctatggcgaactcgatctctcggtctggtggcattcttgttaattcttccggaaatacgtcgggatattcacagactatgggcaccgactccaaggaggtgacttgtaaacaggttaggatagaccgacttgcggtaggggtgttaggggtaaagcggacttgctttcctccaggtcccatcacaacgtctggagcatcctgagcggtttctgcttgaatgtgattcacacggcctcgaccaaagttgttggaagcacgtgaaccttgtccacttgcctgagagctaggacgagactgagctgccgctggagtaggagttctggcagtgctaccattagcatgccctgagttggtgttggtaggattctgaggacactgtctagcatagtgacccatctggttgcaccggaaacactgaactgctgacggtccctgcggtgacttgaaagaggtaacactgttaggcgcagtatcgctactaggggcacgctgctgtggctgaggtgccggacggtttatctgaggacgaggggcgtagcctggctggcggttagcctgggtgaccgactggtggtattgcatgggttgaccgtagcgagggcgaggtgcgcctcgggaagaatttccctgatggttagacttgcgtttcttgtattcttcggtagcctcttttctggcatcctcaagtagaagtgccttgttgatcatatgttgaaaagtggggaagtcatgagcaagcaactggagtctcattccaactgcgattcctttcaagaatttcctgatcttcttcttatctgtgtctacttcctcaggggcgtaccgagccaacttgttgaactgacttaggtactcattgacactgctgttgccttgcttaagtctgttgaattcttctttcttcatgtcaatagtgatttcaggcacatgagctgcacggaaagccgtagcgaactcatcccaagcaatgttagtgggttcagggtgtgcattgcagtaattctcccaccaatctgcggcaggtccacttagttggtgagaggcgtagagcgtcttctcaacaggagtacactgcactaagttgagttttctatcaacatctttcaaccaatcgtcagcctcgacgggctcgacggtctgagagaactctggcggacgagacctcagaaagtctgtcagcttggatctgttgttgcccat

SEQ ID NO: 89626 - DNA, 5430 bp, Oryza sativa
  Clone ID: PAT_MRT4530_88365C.1
atggcagtgaacgccagcttcagttcccacggtcttggtgagggtcaccacgtcgctcagcttcgtgacctcacccgtttccttggcttctcgtgtcccgagtacacggggtactccgtggaccgcgtcccccctcactgtgagctctctgtgtacctttacccccgtggaggtatacacggagctggccttcgcccccaccacttcactgtggccaggcccaccctccagatcgcgtaccaggacctctcctggactgcgcttcgtcgcctggcccacgactacagccaccgtctcggaggctccgccttccggcagcttccacgccttccttctggccactcagacgccaggtacccttgtccgtacagcgagtctcagccagtgctgactcgcatggttgagctttcggaggctcaggccactcagcacgacctactccttgaggcttaccgctcccttgcccgtcgctacgccgccttggaggcccgtctggccgaggagggtgtcacctcagttgacactatctcctgggactcaggacgcctctgccacgccagccacctgtcctcccacagctcccgcggctctgcccgcactcccagtggcccgcgctcccccagctcgcgtgcgccgtactctccagtgtactccccctacccacacccagttagcccttcctacactccaggacacaccccagttgcttcctcccgccgtggcccacgctttatccgcactgcgtggaagcgtgttgttggttcttccaccgtgttccgtttccaccacccagctcccccaccgccagcagcccgtgctgctgccggccctcgacagatggctagccgcccccgccgtgcagctcgtgcaccagcccgctttggttttgaagatggtagagtcgaagcagaagcaaatcatgaacccgctaatgagcagtctcaccacagcaaccgttcgcaccgtacctctccccgcaacgcagaagttgagcaaccccgccgcagcaaccgctcgcatcgcacagtttcccgtgatgcagaaatggagcagtctctccgctctcaccgcactgccagtcacaattctggagaagaacgcatcccttccccacctcatgtggaaaacaacatacaacacataatggcagtacagacacaaatcttgcaaggactaaccacagccatagccagttttcagcataatgcgtatggaaatggccaccctcacgtgggcaataatagatccaagctgacagactttctgaggtcacgtccgccagagttctctcagaccgtcgagcccgtcgaggctgacgattggttgaaagatgttgatagaaaactcaacttagtgcagtgtactcctgttgagaagacgctctacgcctctcaccagctaagaggacctgccgcagattggtgggagaattactgcaatgcacaccctgaacccactaacattgcttgggatgagttcgctacggctttccgtgcagctcatgtgcccgaaagcactattgacatgaagaaagaagaatttaacagacttaggcaaggcaacagcaatgtcaatgagtacctaagtcagttcaacaagttggctcggtacgcccctgaggaagtaaacaccgataagaaaaagatcaggagattcttgaaaggagtcgcagttggaatgagactccagttgcttgctcatgacttccccacttttcaacatatgatcaacaaagcacttctacttgaagatgccagaaaagaggccaccgaagaatacaagaaacgcaagtctaaccaccaaggaaattcttcccgaggcgcacctcgccctcgctacggtcaacccatgcaataccaccagtcggtcactcaggctaaccgccagccaggttacgcccctcgccctcagatgaaccgtccggcaccccagccacagcagcgtgcccctagtggcaatacggcgccaaacagtgttacctccttcaagtcaccgcagggaccgtcagcagttcagtgtttccggtgcaaccagatgagtcactatgccagacagtgccctcagaatcctaccaacaccaactccgggcatgctaatggcagcaccgccagaactcctactccagcggcagctcagtctcgtcctagctctcaggcaagtggacaaggatctcgtgcgtccaacaacttcggtcgaggacgtgtgaatcacattcaagctgaaaccgctcaggatgctccagacgttgtgatgggtatgttctctgtcaactccgtacccgcaatagttctatttgattcaggagcttcccattccttcatatcacaagcttttgtgaaaagaaatggttggaaaacccaaaatttgcgtgtaccaatgatagtacattcccctgggaggaatataagggcaactcaaatatgcccagaagttaaccttagaattgaggaagttgacttcctagccaaaccgatagtcctagactcgcaaagcttggacatcatcctaggaatggattggttggctaagcacaaaggacagatagattgtgccgaaaagtccatcactttgcaaggacctggaggaaagcaagtccgctttacccctaacacccctaccgcaagtcggtctgtcctaacctgtttacaagtcacctccttggagtcggtgcccatagtctgtgaatatcccgacgtatttccggaagaattaacaagaatgccaccagaccgagagatcgagttcgccatagaactggcaccaggcacagctccaattgcaaaaagaccctaccgaatggcagctaatgagttagcagaagtcaaaagacaaatcgaagagttggagagtaaaggttatgtgcgacctagctcatccccttggggagccccagtgcttctggttaagaaaaaggatggctctgagagaatggtaatcgactatagagccctgaatgaagtaactataaagaacaagtacccgttgccacggattgacgatttattcaatcaacttaaaggagcaagagttttctcaaaaattgacttgaggtcaggttaccaccaattgaaaatcaggtctgaagatatcccgaagaccgctttctcaacgcgttatggtctatatgagttcacagtaatgtccttcggactcaccaatgctccagcattcttcataaacttaatgaacaaaatctttatggaatacctggaccggtttgtcgtggtattcatcgatgacatactgatatactctaagaacgaggaggaacatgctgaacacctgaggctgataatggaaaagctcagagatcatcaactattcgctaaattctcgaaatgcgaattctggttagaccgagtagcatttcttggacacgtaatctcctccaacggtgtcgaagtagatcccagcaaggttgaagctgtacttgcttggaacccgcccaagaatgtgtcagagattcgcagcttccttggcttagctggatattatcgaagattcattgaagggttctctaagctagccagacctatgaccgagctgttaaagaaggaaaagaaatttcaatggtctgcagcctgtgaagacagctttcaagaaatgaagaaaaggttgaccactgccccagtacttaccttgccagatatccgaaaagatttcgagatcttctgtgacgcatcaagacaaggcttaggatgtgtcctaatgcaagaacgaaaggttgtggcctatgcatccaggcagctcaggcctcatgaagtcaattatcccacccatgatctcgagttggcagccgtgattcatgctcttaagatctggaggcattacttgatagggaacagatgtgaagtgtacaccgatcacaaaagtcttaaatatatcttcacacagaccgagttaaatatgaggcagagaaggtggttggaactaatcaaggattacgatcttggaatccactaccatcctggagtcccagccagcttgacagtacagcctaccctagagtcgcaaatccgggaggctcagaaagatgacgaagggataaaagagttaataaaaagaatacaggagaaggaagacaccaatttctccatagacgatcaaggcacagtttggtgcggtccacgcatctgtgtaccggccaagaaggagttaagagatctcatcctaaaagaagctcatgagtccgcttactccattcatccaggaagtacgaagatgtaccaagatatcaaggcatacttctggtgggctggaatgaagcgagatgtcgcagaatacgtagccttgtgtgacatttgccaaagagtcaaggcagagcatcagaggccagcaggtctgctgcaacccctaccgattcccgagtggaaatgggaagagatcggaatggatttcatcaccggtttaccaagaacccccagcgggtacgactccatttgggtaatcgtggaccgactcacgaaatcagctcatttcgtgccagtaaaaaccacctatgatggaaagaaactagcagaactctacatgacccatgtcgtatgtagatttggttgccccaagaaaattgtgtcagaccgaggcacccagttcacctcaaggttctggaagcagttgcatgaagccctcgggactgatctaaattttagtacagcctaccatccgcagaccgatggtcagacagaaagggtaaaccaaatcctagaggacatgctgcgtgcgtgtgccttggatttcgaaggcacttgggatcgttgtttgccgtatgccgagttctcttacaacaacagttatcaggccagcattcagatgtcgccgaatgaggcactattcggaagaaagtgccgcacccccttatgctggaatgaggtgggcgaagcactggtattcggtcctgacatactccagtcagtagaagaacaagttaagctgatacgagaacgtttgaagacagcacagaaccgtcagaagaattacgctgacaatcggaggcgtgaccttgagttcgaaaaaggagatcatgtatacctgcgggtatcacccctccgtggtatgaagaggtttgggatgtccggcaagttagcaccccgctacatcggcccctacctcataaccgccagacgtggcgaagtggcttatcagcttgagctacctgaaggtctcgcagatgtgcacaacgtgttccacgtgtcccagttaaagaaatgtcttcgagtcccagaagagcaagttcccctgggtaatatcgagctggaaaagaatctgacctacaaggaaagaccgatcaaggttcttgaagaagcagaacgtcagactcgaaggaagaccatcaagttctacaaagtccaatggagcaatcattctgaagatgaggcaacatgggaacgagaagatcttctccgcgccgagtttccggagctgctcccttag

SEQ ID NO: 89627 - DNA, 5208 bp, Oryza sativa
  Clone ID: PAT_MRT4530_88366C.1
ctaagggagcagctccgggaactcggcgcggagaagatcttctcgctcccaggttgcctcatcttcagaatggttgctccattggactttgtagaacttgatggtcttccttcgagtctgacgttctgtctcttcaagaaccttgatcggtctttccttgtaggtcagattcctttccagctcgatattacccagggggacttgctcttctggaactcgaagacatttctttagctgggatacgtggaacacgttgtgcacatctgcgagaccttcaggtagctcaagctgataagccacttcgccacgtctggcggttatgaggtaggggccgatgtagcggggtgctaacttgctggacatcccaaaccttctcataccacggaggggtgatacccgcaggtatacatgatctcctttttcgaactcaaggtcacgcctccgattgtcagcgtaattcttctgacggctctgtgctgtcttcaaacgttctcggatcagcttaacttgttcttctgctgacttgagtatgtcaggaccgaataccagtgcttcgcccacctcattccagcacaagggagtgcggcactttcttccgaacattgcctcattcggcgacatcttaatgctggcctgataactgttgttgtatgagaactcagcatacggcaaacaacgatcccaagtgccttcgaaatccagggcacatgcacgtaacatgtcttctaggatttggtttaccctttcagtctgaccatcggtgtgcggatggtaggccgtactaaagtttagatcggttccgagggcttcatgcaattgtttccagaaccttgaggtgaactgagtgcctcggtctgacacaatcttcttgggacagccaaatctacatacgacatgggtcatgtagagttctgctagtttctttccatcaaaggtggttttcactggcacgaaatgagctgatttcgtgagtcggtccacgattacccagatggagtcgtacccgctaggggttcttggcaaatcggtgatgaaatccattccgatctcttcccatttccactcgggaatcggtaggggttgcagcagaccagctggcctctggtgctctgccttgactctttggcaaatgtcgcacagggctacgtattctgcgacatctcgcttcattccagcccaccagaagtacgccttgatatcttggtacatcttcgtacttcctggatgaatggagtaggcggactcatgagcttcctttaggatgagatctcttaactccttcaaactgtgccttgatcgtctatggagaaattggtgtctttcttctcctgtattcctttttattaattcttttatcccttcgttgtctttctgagcctcccggatttgcgactctagggtaggctgtactgtcaagctggcagggacacctgactgtaccacggtcagccttaacttctccaattctctgcacaggtgatcatggtcaggccgtatttgagctacattgcaataggccttgcgacttagcgcatcagcgaccacgttggctttaccaggatgataatggattccaagatcgtaatccttgattagttccaaccatcttctctgtctcatgtttaactcggtctgtgtgaagatatacttaagacttttgtgatcggtgtatacttcacatctgttcccgattaaatagtgcctccagatcttaagggcatgcaccacggctgccaactcgagatcatgggtgggataattgacttcatgaggcctgagctgcctggatgcataggccacaacctttcgttcttgcattaggacacatcctaagccttgtcttgatgcatcacagaagatctcgaaatcttttcggatatctggcaaggtgagaactggggcagtggtcaaccttttcttcatttcttgaaagctgtcttcacaggatgcagaccagtgaaatttattttccttctttaacagctcggtcataggtctggctagcttagagaatacttcaatgaatcttcgataatatccagctaagcctaggaagctgcgaatctctgacacattcttgggcgggttccaagcaagtacagcttcaaccttgctgggatctacttcgacaccgtgggaggagatcacgtgtccaagaaatgctactcgatctaaccagaatttgcatttcgagaatttagcgaatagttgatgatctctgagcttttccattatcagccttaggtgttcagcgtgttcttcctcattcttggagtatatcaggatgtcatcgatgaacaccacgacaaactggtccaggtattccataaagattttgttcattaagttcatgaagaatgctggagcattggtgagtccgaaggacattactgtgaactcatatagaccataacgcgttgagaaagcggtcttcgggatatcttcagatctgattttcagttggtggtaacctgacctcaagtcaatttttgagaaaactcttgctcctttaagttgatcgaataaatcgtcaatccgtggcaacgggtacttgttctttatagttacttcattcagggctctatagtcaattaccattctctcagagccatcctttttcttaaccagaagcactggggctccccaaggggatgagctaggtcgcacataacctttactctccaactcttcgatttgtcttttaacttctgctaactcattagctgccattcggtagggcctttttgcaattggagccgtgcctggtgccagttctatagcgaactcaatctctcggtctggtggcatactcgttaattcttctgggaatacgtcgggatattcacagactatgggcaccgactccaaggaggtgacttgtaaacaggttaggatagaccgacttgcggtaggggtgttaggggtaaagcggacttgctttcctccaggtccttgcaaggtgatggacttttcggcacaatctatctgtcctttgtgcttagccaaccaatccatacctaggatgatgtccaagctttgcgagtctaggactatcggtttggctaggaagtcaacttcctcaattttaaggttaacttccgggcatatttgagttgcccttatattccttccaggggaatgtactatcattggtacacgtaaattttgggttttccaaccatttcttttcacaaaagcttgtgatatgaaagaatgggaagctcctgaatcaaacagaactattgcgggtacggagttgacagagaacatacccatcacaacgtctggagcatcctgagcggtttcagcttgaatatggttcacacgtcctcgaccaaagtggttggaagcacgtgaaccttgtccacttgcctgagagctgggacgagactgagctgtcgctggagtaggagttctggcagtgctgccattagcatgtactgagttggtgttggtaggattctgaggacactgtctggcatagtgacccatctggttgcaccggaagcactgaactgctgacggtccctgtggtgacttaaaagaggtaacactgtttggcgcagtattgccactaggggcacgctgctgtggctgaggtgccggatggttcatctgaggacgaggggcgtagcctggctggcggttagcctgagttaccgactggtgatattgcatgggctgaccgtagcgagggcgaggtgcgcctcgggaagaatttccctgatggttagacttgcgtttcttgtattcttcgatagcctcttttctggcatcctcaagtagaagtgccttgttgatcatatgttgaaaggtgggaaagtcatgagcaagcaactggagtctcattccaactgcgatccccttcaaaaatttcctgatcttcttcttgtctgtgtccacttcctcaggggcgtaccgagccaacttgttgaacatacttaggtactcattgacactgctgttgccttgcttaagtctgttgaattcttctttcttcatgtcaatagtgctttcaggcatatgagctgcacggaaagccgtagcaaactcatcccaagcaatgttagtgggttcagggtgtgcattgcagtaattctcccaccaatctgcagcgggtcctcttagctggtgagaggcgtagagcgtcttctcaacaggagtacactgcactaagttgagttttctatccacatctttcagccaatcgtcagcctcgacgggctcgacggtctgagagaactctggcggacgagacctcagaaagtctgtcagcttggatctattgttgctcatgtgagggtggccatttccatgcgtattatgctgaaaaccggctatggctgcggctaatccttgcaagatttgtgtctgtcgagggccggcagcagcacgggccgctggcggtgggggagctgggtagtggaaacggaacacggtggaagaaccaacaacacgcttccgcgcggtgcggataaagcgtgggccacggcgggaggaagcaactggggtgtgtccgggggtgtaggaagggctaactgggtgtgggtagggggagtacactggtgagtacggcgcacgcgagctgggggagcgcggaccactgggagtgcgggcagagccacgggagctgtgggaggacaggtggctggcgtgacagaggcggcctgagtcccaggagatagtgtcaactgaggtgacaccctcctcggccagacgggcctccaaagcggcgtagcggcgggcaagggagcggtaagcctcaaggagtaggtcgtgctgagtggcctgagcctccgaaagctcaaccatgcgagtcagcactggctgagactcgctgtacggacaagggtacctggcgtctgagtggccagaaggaaggcgtggaagctgccggaaggcggagcctccgagacggtggctgtagtcgtgggccaggcgacgaagcgcagtccaggagaggtcctggtacgcgatctggagagtgggcctggccacggtgaagtggtgtgggcgaaggccggctccgtgtatacctccacgggggtaaaggtacacagagagctcacagtgagggggaacacggtccacggagtaccccgtgtactcgggacacgagaaaccgaggaaacgggcgaggtcacgaagctgagcgacgtggtgaccctcaccaaaaccgtgggaactgaagctggagttcactgccat

SEQ ID NO: 89628 - DNA, 435 bp, Oryza sativa
  Clone ID: PAT_MRT4530_88367C.1
atgacgtcgcaggcggtatcgtacggcagcggcgcaagaccgcgcggtctcacggattggaatagcgagactgagtggattgaaagggacgtctcgcggagcgataccgccacgtggccctacagcctagcccttcccccacaccttggaagacgcaaaggcagccagggggcctcggggtgccacgtcacgccccttgggccctcgcgctgcctcgccccgaggccctcgcccagctaccatactgtgaccggcctgtcgctggtcacgtccggtcggacgggcagccgtgcccccacgttcgcccctgtacccggcggagtggaggcagggctgtcccccgtgtcaggcgggaggtggcgctgggtcccactcgaggacggacggccgcttagcttccgggcgaaggcacagaccgtggtccggtctgagtag

SEQ ID NO: 89629 - DNA, 296 bp, Oryza sativa
  Clone ID: PAT_MRT4530_88368C.1
aggagaaggtggtgtccgttggtggagggctagaggatccctccatcgagtcttgggtgacctccacggtggtgctgccagggggtgcggtaactgcaccaaaaacgcttcccaccaatatgctctcggtagaggccaccaaggtggagatcctatacgtgtgctgggcgaggagaactaggtctcgcatgagtgccgatggtagggatgctctggtgcggagggctctgtgtggagaggttgtggcatcaatgatgggagactggatgggggctgccatgcgtggtcttgcatga

SEQ ID NO: 89630 - DNA, 243 bp, Oryza sativa
  Clone ID: PAT_MRT4530_88369C.1
ggcacgagatccagtgtgcctgctccatttttggtgatattttgagcaactgtcagactgggaacaagaataagaatgcagccctcccaactgctctccccatcccggatggttctactggttactgaatgtatggtgctatgcagtcttatagcactgaattttcattgttctgctttggtcaaattgcattatagtattctttgtctctgaattgaaattttaaccttccttctggctatc

SEQ ID NO: 89631 - DNA, 1477 bp, Oryza sativa
  Clone ID: PAT_MRT4530_8836C.1
gaatgaaatcaactacctatgacatatatcatgaaacataacagtaaaaatattatacagccacaaaaaaaaaatgcaagttacattttagcattacaatggctgcacgtccgcaacaatagtacactccttaaccaatacaaccaggtctaaactagtcattcaacaacccaaccggaacaatagttcacttatgaactaggcacttattttgtttttttttatagaaaccaacatataaatagttttttaactgccaactacagcctcagatcaatggaattgaagcctccaacatgccgacatagcaatgttacttcgggtcggaacggagtttgtgcggagtaatttctgggacaactctgtagatgtgcacttttatgttatccttctggacaagctcgaagacacacacatcaaacttctccagattgttgccaacagcaaatttgccccagccaccactgaaagaaccaacagaacgatcactgtagtagacatagttaacttcccaagccttcccttgtggatcccagagtgtgatccttttgttggtatggggaagacactcacggacaaattcacatgggatattcatgaaaaatccaacatagacatatgactccatcattatttgcacggcaaaaggattcttagatttaaactctcttgccctttgaagagcatggtccttctctgcttcagttaccggacgcctctgtgatattactgttagttgtctttgaccctttgaaacacatctaccacgccgagacacctcaccagacagaaagcgcatcaggaatggtggatttggtgacttgctagaagaattatcttcatctgagctgcatgatgaacctctggtactgttatggcttgtcgatgttaccttggacttgccagcagaagctcctgcacgttttctcctagaactttcgcaaacattagcctcagatgacttcttaaatacaaccaccctatcttccataaggtaatctacatctctagttctctttcctgtgattccattattttccttcagggcgggagccattttctctgttgtgatagctgcggtgaccatgcccccttcatcactttctgttttaatgatcacatttttggaagggtgagcagagaaagttgatatcttgtcaatgcctgaaggttcaaagactgtcactgagaattgtgaccgtttatcataagtgaatactaaaaattgaccacactgaattgagttatctctgacaaattctttccatccatgcacaaagaagaatccctcagagtctgaagtcagctctgcactccatttatttccacttcgatcaaccagagaaaccatcccagtaggttgattctgaaggcattggttgaatgatgatgggattttcatccgctccagagattgcagggtgagaagcacacggaagaagctcctccccctcgtccgattcctgcagcccgggga

SEQ ID NO: 89632 - DNA, 312 bp, Oryza sativa
  Clone ID: PAT_MRT4530_88370C.1
atgaagatgatatcacccatcaaagctgacgaagattttggtggtggtaaagacaatgacaccaatcaaagacggcgatggaagaagttgaatgatgatgaaaaggaagacgtccttgagcggcagcataataggccagtcgtgaaagcaaagacaccatggacggtgcggcaaaggcaagccaaagacgaagacgatgatgcctatcaacgacgccgtgtcagtgaaataatcaatcagcaacagatgaaacagtcagccatgaagatgatgacgttcatcagtagtggtaacggcataaaccagccatag

SEQ ID NO: 89633 - DNA, 892 bp, Oryza sativa
  Clone ID: PAT_MRT4530_88371C.1
ccgccggccgggaaaataattcgcgtaaactattattcgccgccggcccccgtgtccattcctagggtttcttccatccccacgccggcggcggcgttgtctcgcggcggcgccggcggactcctctctgcttccttccccgttcccgttcctcccccgcgccgcaagctatggcagtgcaagctggaaccccagctactcctataagcccccaagtgattagtggtgcatttgttcagcaatattaccacattctacatgagacaccagatcaggtctataagttctatcaagatgcaagtattgttggtcggcctgattctaatggagtcatgaaatatgtatcaacaactgctgatatcaacaaaataatcttgtctatggacttcagcaactacttaacagagatagagactgcagatgcacagttatctcaccaggatggtgtgctcattgttgttactggatctttgacatctgaaggcatatgccgtagatttacacagtcattcttccttgcaccacaagaatctggtggctatgttgttctcaatgatatttttagatttatagtggaaaggccaccagttgcaataagtcaagttagtcaagaaaatgagaacaatcagaacactgccactcttcctgaaactgatcctaatccagcgggagatggtatgatctcagagcctgtggcagtggaaaataatgttgcggaggggggaagtgacaaattccacggttgatggcactagtattgaaaataatgctactgctgctgtcgaaccacctgtacatatgacgaaagaggagcccaggaagatctctgttgctgctacttcccctccagctcagaaggtagttacgaaaaaatgcctatgcggccctgtga

SEQ ID NO: 89634 - DNA, 2859 bp, Oryza sativa
  Clone ID: PAT_MRT4530_88372C.1
tcagcggtcgtatggaaattcattgtcatcttctatcaccttgaacggttttcggtggagaacaatgccacacattttctacatcttcaaggccgcaacacctcagagacagtaaataatagtacaaggcaaaccaccccagggccaacaatgacttgactaactagtataaataattataacaacacagactacccctagaatcttttggtagtgtacacggataattcgcctctgaaaagagagggatgtgcacagcacgacaggctgcatcaaagaagcgcctggagcggccacattttgctacatatgcgatatgtctcgcctatctgcagcatgtgctcttactctagtttcacctgctgctgggaaccttaaaagccataatgcactgttcggaacacgtttgagaatattgcaccatgtatcaaatatttctggatccaacgcacgttcaaggttgcgtacccatctagctgtatcaaataatgggcaagtcatacggacttccttcaacttattagtcagagcttgaagttttgccggatttagtgcaaggtctactgccctatcttcatactctttcatactgctgacaatcatctcttcccctagcccggtggctaggcagagggaaccagctactctggttgccattttctccagtggaagggttatcattggtaaaccagcccacaatatgtctgtgcgggctggttgcagtgcgcaaagttcattcctggcaccctttgtgtaaccattaaggtttattaatatttgtattttgtcttgattaatgattctggcaatcatatcagaggtcatggcagacacatccacaaaatgctcagcctcagactgaatacgctgcctccattcagtaccatcattttgactcagcgcatagcagaagacctcaacattgtcacggtcatgcattccaaatactgaacccatgagatgggagaggggatgattcccaaaatcgctgctaacatatccaacccttagtcgacagtgtttaccctctgctttgacaggaacaggagggggatgcacaaaggacggcaatccaaaacgagaggcaatcaaggaacaatgagcagcatatttacagcttatctctagtgcaagcatgggatcaataggatatgcgatggcatggaaaggttgcacgcttggaagtactgacatctttatttgctttctgataatttcttcaacatcgcgaaacatggcattcctgttttcccaatcacacacacactgtaaagtatgcaaaaggttgcaggttgcttcaggaaaatcaggacgcaaacgaagagccatggtagacacatccacaaaatgctcagcctcagactgaatacgctgcctccattcagtaccatcattttgactcagcgcatagcagaagacctcaacattgtcacggtcatgcattccaaatactgaacccatgagatgggagaggggatgattcccaaaatcgctgctaacatatccaacccttagtcgacagtgtttaccctctgctttgacaggaacaggagggggatgcacaaaggacggcaatccaaaacgagaggcaatcaaggaacaatgagcagcatatttacagcttatctctagtgcaagcatgggatcaataggatatgcgatggcatggaaaggttgcacgcttggaagtactgacatctttatttgctttcggatagtttcctcagcatcgcgaaacatggcattcctaattgcttcttccactcttccagcatctttaagggcattgcccatgttattgtatgcttcaacaaactgtggatcgcagattatagcttgattgtaacaacgaattgctatatcaagctggccttgctcatagtaaatggtagcaagattaccgtaagccattgcatagtcaggacgtgcctgcaccgcacgctgatatgatataatggcttcttgagacattcccatggtcttataaacattcccttggttaagatatgcatcagcaaaagatggcttaagtttaacagcttccttataatatagtaaagctttatccagatcccctgcctccatgaacaggccagcaagattcgaccatgcgatcgcaaattgtggatctatgcgtagtgcttcaatgtaacaattgtatgcctcctgaataaaaccttgggccttcatcagattaccaagattgctgtgcgcatcaaccaatcgagggttgattgcaagtgcttgtctacagcattgagctgcctcatttaatcttcccttccatgtatatgcactagcaagatttgaccaagcatcgcaaaagtttggtcgcagctgaatggcggttagatagtaacggattgcaagatcaacatcacccttctccttccatgcattggccatgttaccatagcactctgcaaagtttggatcaatagcaagagcctcctcattctttgcaatacacatatcataattacgtatctgatagtaaatagctccaagaagaagcaggttatctgtccgccgtggattcttctcataaacgatgttaccatgctctaatgcctctttatactttccagaccggtaattttgatgtgcaagtgccaaatgccgttctacatcaacagccccgagctgcttgggcttgggctcgggctgggcctgggccctggcgtcgaccggcggcgcgggcggcagcaggaacgaggctggcgacgaggccacggactcgtcgagctcggcggcggcgcggccgaaccctagccagtccgcgcccccgagcagcgccggcgccgccgccggctgctgcggccgcgggtcgccgccgccctgctgctgcaacgagagcat

SEQ ID NO: 89635 - DNA, 728 bp, Oryza sativa
  Clone ID: PAT_MRT4530_88373C.1
caagtaaaaatgtaatttgtattacaatattataataataacaatgcactatttatctttgacatcgcggcaacacctcaaagacagtaaataatagtacaaggcaaaccaccccagggccaacaatgacttgactaactagtataaataattataacaacacagactacccctagaatcttttggtagtgtacacggataattcgcctctgaaaagagagggatgtgcacagcacgacaggctgcatcaaagaagcgcctggagcggccacattttgctacatatgctacaactctcgcctatttacacagccggtgatgtaagcatgtcagcggtcgtatggaaattcattgtcatcttctatcaccttgaacggctctcggtggcgaccggagcagtacaggttccacatcttgtagtacgcacgttcaaggttgcgtacccatctagctgtatcaaataatgggcaagtcatacggacttccttcaacttattagtcagagcttgaagttttgccggatttagtgcaaggtctactgccctatcttcatactctttcatactgctgacaatcatctcttcccctagcccggtggctaggcagagggaaccagctactctggttgccattttctccagtggaagggttatcattggtaaaccagcccacaatatgtctgtcccagttgtgtgcgcattgcagagagggctgactcaaaataaatc

SEQ ID NO: 89636 - DNA, 221 bp, Oryza sativa
  unsure (1)..(221): unsure at all n locations
  Clone ID: PAT_MRT4530_88375C.1
cggacgcgtgggtctcaatcctctcctagcatatggcctaggcctccctcgcagcagcgatcgctcctccccagcgncgaggagaggtcatcgcgagtcgctcagccgctgncaggggatggcctcctagtcgcatcatctgcagccgcgggggcatcggcagcagcgagggtgggcgtggtgcagatgacctccgagggggacctcgacgccaactacgc

SEQ ID NO: 89637 - DNA, 1275 bp, Oryza sativa
  Clone ID: PAT_MRT4530_88376C.1
atggtgcgggagctcatcgccgtggtggcgcgcgcggcgctgcagtgggcgctgtcgtcgctgctgctcgccaacggcgccgccttctgcctcatcgccgccgcggcgtcgtggctccgcctcggcccgccgctgtgcctactctgcgccggcgtccaccggcttctctgctccgcccccgccgcggccgacgccgacgacgcgcgcggccaagaacgcgcggcgttccgacgactcctctgcgacgcccacgtcgccgccatggccgcctcggagccggagaagaagaagcagcagcagcagccggatcagcagaagatgatctctgcttctgatggagaagagaagagagatgcagcagaggttgaaattgcagacaaacctggaggtatggagggtcaccgcgtcgtctccatcggcagcgagatctgcgagcaggaccacgccggcggcgaccagcgctccaccgccggcgaagaaggctacggcgacggcccttacgtctccctcttcgagctcgcgcccattgcggcgcgcgccccgcaggacgaggacggacacggcaatgcccacgaggtgttcgacgacctgccggccgagctgcggcgcgacggcgacggcgcgctgaccgtgggcaggctcgcggcggcgctccgggcgcagcggagggagctggacgccgttcgcgcggagctcgacggcgagcggcgcgcgtgcgcggaggcggcggagtaccagcggcagctggaggagcagggggagttcgaccgggaggcggtgcgcctcgccatgcagctcgtccacgaggccgagacggagaagcacgcgctgcagcgccagctcgacgcgttccgggtcaaggcccatctctacgactacgaggccgccgccaccgccgccgccgccacggaccacgacgcggccggcgacggcggcggcggcaacaactaccagtcgctggtggacttcttgccggggtcggtgttctcctcctcgccggacctggccaacctgctcaagctctacaccgagggcaatggcggcggccgtcgactgaccgacgcgccggtgccggtggtcaccgaggtggttgaggaagaagaggaggaggaggaggaggaggaggaggaggaggaggaggaagtcgccgtcgcggccatcggtggcgtggattcgaacgggaacggtgatgctgccgccaccatcgccatcgccggcgattctttgcaggaaggaagcagtgatcacctcgaacccacaaacggtgaattgtga

SEQ ID NO: 89638 - DNA, 685 bp, Oryza sativa
  Clone ID: PAT_MRT4530_88377C.1
cccacgcgtccgctttcatgccaagcacacacaccatctgcatcttctcttctaccattcttgctttctccttgtagtctcttctgttctttcagagaagagaaaaacatatctgtgctagctttgccttcttccatggcagtggctatagaggctccgttccatgtcctggctgtggatgatagccttcctgacaaagctggtttaaggctaaacttgatatggagatctctccgaatccttaattgatttggagtcacatgtagtataattaaggaacaagccccacagctcacgtcgtcttaatattctatctcgacagttttggtgtaaaatcaataatgaagatatggagtgatacgcaaatcaatcttgtcgatcttccatgatgtggtgtctaataaaatggtctttagttgcagacaactaactagcaccacatgtctttgtcacaatatattctattatacatgcacaacaaatggagcaacaagagggcactctaaaagtaaagtaaaaaaaaatcctccagatatcataagatatgaataaaaaaagaaatttgtaatggatagtacatggagaataattctgtgttcaatttctggattgcatatcatggtttttgatcttagaataaactctgatacagttatgattttggtatctgaatcagatgcctgga

SEQ ID NO: 89639 - DNA, 891 bp, Oryza sativa
  Clone ID: PAT_MRT4530_88378C.1
atgtacggtggcatgcttgctgcgatagtgatgatgcttttcatggttgatccagtccttcaacacgtgacgatcttgctcgatttatgtggttttgccatactgtcatttggcaacttgcagattcctgcagctatcgtgcgcgaagagctcgcgaggatgcgccttacgcaacatgactccttcggcgttgggagtactttacatcgttgccagcacgctggaggtcttctcgttcatccatcggagatccctcgttcgccatggtggattcacaggggagttgaatctgtcaatctgtactatgcctatgccttcgacaaatacatggaaggaggtgtgtttgctccaaagaggatcaacctcagcaactttgcgatagattctataaactctgacatgtccaagaatcagctgtacgggatccggatgatgcacacttttctgcaaagagatccgacaagagcacaactcctggagaaactcaccacttcaacgcagacgaaggccaggttgatcaacatgttggactggactgatggaaaccatcatacaaccgtgggaaaaaaacaaaaagaaaagagaaaccgaggttgtaacgggggctctaatggtttattaagggtagaggggtctaaagaccctccagcccccacgctgcctccgccactgacggttgggacgacggcggtggggagcggcggcggcggcggcggtggcggtggggatgagggtggggagcggtggcggcggtcccacgaactggatgagatcggaagccttgctccatgcaaaactgcaaatgaaagaagcagagaaacaaacttgcaacgacagaaggaaacaaaaagcatcccaaatctgtgcatccacacacccatacagaggtaa

SEQ ID NO: 89640 - DNA, 2006 bp, Oryza sativa
  Clone ID: PAT_MRT4530_88379C.1
ttttttttttttttttttttatcatcccccggccgcaggcgtagaaaatgtagcggttatgacttcaaacctgcaaaaccacgttttgtaacaattaacgagtacaaatagatcttgctttgaacaaaacttctaaaatgttcaactatcgcaaaaatgagtaaattggtcgttcatatgctgtagtggcaaataactaaatacatggtgagcatctattacaaccaagctgacacgaaatatatcagtgcacatttgtagacctgaaattgaggagctaacaggacagcgagaagaactttagaatccagctttctctggttattttagagatcagccctccctgggtatctagggaaggggatgacatctctgatgttctccaaaccagtggcaaaaagaatcattctttcaaaacccaaaccaaaaccactgtgcttgacagatccaaagcggcggaggtccaagtaccattcatatggctccaaaggcaacccggcgtcttgtatccttgttttgagaaggtccagacgttcctccctttggcttccaccaaccaactcaccaaccttgggcacaagaacatccatagcagctacagtcttctgatcatcattgagtctcatataaaatgcctttatttctttgggatagttataaacaatcaccggcttcttaaatatcacctcggttaaatacctttcatgctctgaagctaaatcaattccccattcaaccttgttttcgaatttcttatcagtgacatttttcaatagctcaacagcttttgtatatgaaatgcgctgaaaaggtgtcgaggaaacaagctccagacgctcaattgcagtcttatcgtaatttttcaccatgaattccatgtcttcccggcaatgctcaagaagccacttgcaaaggtactgtacatatctttctgcacagttcatatcatcctgcaagttagcaaatgcgatttctggttcaaccatccaaaactctgccaaatgtcgtgatgtatgggagttttctgcacggaatgttggtccaaaggtataaacactgctaagagcacatgcataggtctcaacttgaagctgtccagacacagtcagaaaagcctggcgtttgaagaagtcattctcataagctactgtcccatcatctctgtacggaattccgggcttcaacttagatctttcctccagccttgagacattttcttttgccttgttaagctcagcaacagcagctgtgatttcttgtttgctagcttttgcagctttaagctgtgcaaccgcatcacctttttccttgacaacaactctagctgcctcaatatcagactctgatggtgcagggttctctttcaattccttctccaccttttcagcatggctgaacaaagtcgtcacttgaaacatctcaccagcaccctcacaatcacttgtagttattattggtgtgtgcacataaagaaaaccattctcatcaaaaaacctgtgtgttgcacaggctagctggtgtctaatacgcgcaacagcaccaatcgtgttggtgcgggagcggagatggacgacgtccctgagattctcgagcgtgagcttggtcttgggcagcgggtaggcggcggggtcgacctcgccgacctcgatgacgcggtcgacgcggagctcgacgcgctgcttggcgccctccggcggcttcttgagctcgccctcgacgagcacggacgtgcccgtggcggtgagcggcgcgagcgggtggacggcggcgtcgacgaggacctgcaggttggaggcgcaggagccatcgttgagctcgaggaaggcgaaggtgcctttcccctgctcccgcccggtcttgacccacccgcccacgacgacgcgctcgccggcgcgcgcggcgccgtcggccaggatggatcggatgcgggtgcggtcggtggcgggctccaggtcgtcggagagggaggccgcggccatggcggccgccgcggcgtcttcggccat

SEQ ID NO: 89641 - DNA, 728 bp, Oryza sativa
  unsure (1)..(728): unsure at all n locations
  Clone ID: PAT_MRT4530_8837C.1
cggaattcccgggtcgaccacgcgtccgaacgcatctcgacatgatagccgagatacagatggacccgatcgccgtcaatgccgcaacttgaggcatgacgctccactacaattgcacgcacgcagaggaggtgcgtgtcgatcggggcgccctgcaccatttcgggctgctggggctcgccgacaggcgccaccgcggngatggggagcagaccgcctgtgtacttatacggaccaaagggagcgaaggagtgaacgacgcacttgtgccatgacgagcacaggtaacggcactgccgactacatcgtacagaaggatcgaaggcaacagtctgacgggagctagacggctgagacattgtacctccgtgtgctaggcgagcatatccatagatgatagcttcagagcaagtggggaggcacactgtgatgcgggggctgtaccccacaagggggcatctacggcaacgccggttgaataactttttaacaacgccaccagagcgcgcgtgacggcacaacaaacttgtggcacacaacagggactcctgctacaaccaatgctacatggcctacactactacgttgttctatgtaacactattctccatgattacattatcgctgcttacttgtacatcattgttgacaacgacgtctgctgctagctactggactgtactatactactctatcgcttcgcatcacaaagtcatttggctctgctt

SEQ ID NO: 89642 - DNA, 414 bp, Oryza sativa
  Clone ID: PAT_MRT4530_88380C.1
aggaaaccaagactcaaaaaaccaccgggggggtggacggggctaatttgagttcctcggcaaaatttgactgaaaaaagaaactacgggggctttaatttagggcatccggtgggccgccttcttggggagcagtttttccctggccttggttttcgcctgggacttggatcccatgacgccccctccccacttttttctaacctcatagaaattgggggtgaaattcgccttgatagcccccaggattttggtaaactcaagcttggccttgtttttgacagggggcaaacagaggacaaatgcagtttttttggaaacaaatagaccaaaaggggcttttctttctaaaagggagaaggggacccccttttttctgcaagggggtggaagccccacaacccctttaatcgg

SEQ ID NO: 89643 - DNA, 465 bp, Oryza sativa
  Clone ID: PAT_MRT4530_88381C.1
cttggttttttttttttttttttttttttttttttttttttttttaattccaactaattttgagatatacacaaacaacgaggaaaataacctttacaaaaatggcggcatcctctgaggatgcatggaatgatatccactatctggggggctctgggggggggggtccccggggggtcttcgagtaaagcctccatgtgtatggttctgcatgggattgaaggggccccaccagggagattcaccgtcagctgggatcccgggaaatggggtaaagccctcctggccccccccatttggccgttcaacaggtctagaaacagcctccccctccgaggaattgctcctgttccccgggggagcaaagccatgggggcctccaatctcacctggggatgatgccgcgctgaaagatgtttttgttgaaccccttggccttccccttcttgacgctggggggaatgg

SEQ ID NO: 89644 - DNA, 291 bp, Oryza sativa
  Clone ID: PAT_MRT4530_88382C.1
atgcggcgactcgtcacaggtgtttggtttgaggatgtaggctctaatggttgtttcttgcagcagaggagtgcctcttcgagatcctccgtcggccagtgtgccccttctatgaatgagatgatattgttgtatgataagttcttgccatccccttttgtgaatgattgctatatgagatctatcagtttgaagttttttgatggtgatgaatgtgactgtgatgagatatatcagtttgaagtttttgtgatggtgacgactgtgactgcgatgagcaaaccaccatag

SEQ ID NO: 89645 - DNA, 440 bp, Oryza sativa
  Clone ID: PAT_MRT4530_88383C.1
cggacgcgtgggcgccgccgccaccgccgccgccgtcgccggtggccaagtgctcgcccgcccatctgtctccatctctccccatcctgtacgtgggcagttgctgctagctctctgtccaagaaaagaaaaaccaaaaccacccaccacagcggcagcgagcgacgcatcggggcggaaggaagcggagcgaatcgaccgaaggaggcagcgcgcttcctctgtaacgactgcgctgcgcatcggcggcgtgtctcggacgcggcgcgcgcattggctgcgcaattacactttctcatccaaagcttgattccccaaatcaaatccagcactcgcacctgaacttcaggggatgaattgtcatggatacgtctagccatgcaatttgagccctaaggatgaagagatcctggctccctcactgaaggacgacgaggggc

SEQ ID NO: 89646 - DNA, 5547 bp, Oryza sativa
  Clone ID: PAT_MRT4530_88384C.1
ctaagggagcagctccggaaactcggcgcggagaagatcttctcgttcccaggttgcctcatcttcagaatgattgctccattggactttgtagaacttgatgatcttccttcgagtctgacgttctgcctcttcaagaaccttgaacggtctttccttgtaggtcagattcttttccagctcgatattacccaggggaacttgctcttctggaactcgaagacatttctttaactgggatacgtggaacacgttgtgcacatctgcgagaccttcaggtagctcaagctgataagccacttcgccacgtctggcggttatgaggtaggggccgatgtagcgggctgctaacttgccggacatcccaaacctcctcataccacggaggggtgatactcgcaggtatacatgatctcctttttcgaactcaaggtcacgcctccgattgtcagcgtaattcttctgacggctctgtgctgtcttcaaacgttctcggatcagcttaacttgttcttctgctgacttgagtatgtcaggaccgaataccagtgcttcgcccacctcattccagcacaagggagtgcggcactttcttccgaacattgcctcattcggcgacatcttaatgctggcctgataactgttgttgtatgagaactcagcatacggcaaacaacgatcccaagtgccttcgaaatccaaggcacacgcacgtagcatgtcttctaggatttggtttaccctttcggtctgaccatcggtctgcggatggtaggctgtactaaaatttagatcagttccgagggcttcatgcaactgcttccagaaccttgaggtgaactgagtgcctcggtctgacacaattttcttgggacagccaaatctacatacgacatgggtcatgtagagttctgctagtctctttccatcataggtggttttcactggcacgaaatgagctgatttcgtgagtcggtccacgattacccaaacggagttgtacccgctgggggttcttggcaaaccggtgatgaaatccattccgatctcttcccatttccactcgggaatcggtaggggttgcagcagaccagctggcctctgatgctctgccttgactctttggcaaatgtcacacaaggctacgtattctgcgacatctcgcttcattccagcccaccaaaagtatgccttgatatcttggtacatcttcgtacttcctggatgaatggagtaagcggactcatgagcttcctttaggatgagatctcttaactccttcttggccggtacacagatgcgtggaccgcaccaaactgtgccttgatcgtctatggagaaattggtgtctttcttctcctgtattctttttattaactcttttatcccttcgtcatctttctgagcctcccggatttgcgattctagggtaggctgtactgtcaagctggcagggactcctgactgtaccacggtcagccttaacttctccaattctctgcacagatgatcttggtcaggccgtatttgagctacattgcaataggccttgcgacttagcgcatcagcgaccacgttggctttaccaggatgatagtggattccaagatcgtaatccttgattagttccaaccatcttctctgcctcatatttaactcggtctgggtgaagatatatttaagacttttgtgatcggtgtatacttcacatctgttcccgattaaataatgcctccagatcttaagagcatgaaccacggctgccaactcgagatcatgggtgggataattgacttcatgaggcctgagctgcctggatgcataggccacaacctttcgttcttgcattaggacacatcctaagccttgtcttgatgcgtcacagaagatctcaaaatcttttcggatatctggcaaggtgagaactggtgcagtggtcaaccttttcttcatttcttgaaagctgtcttcacaggctgcagaccattgaaatttcttttccttctttaacagctcggtcataggtctggctagcttagagaatccttcaatgaatcttcgataatatcccgctaagccaaggaaactacggatctctgacacgttcttgggcgggttccaagcaagtacagcttcaaccttgctgggatctacttcgacaccgttggaggaaatcacgtgtccaagaaatgctactcgatctaaccagaattcgcatttcgagaatttagcgaatagttgatgatctctgagcttttccattatcagcctcaggtgttcagcatgttcttcctcgttcttggagtatatcaggatgtcatcgatgaacaccacgacaaactggtccatgtattccatgaagattttattcattaagttcatgaagaatgctggagcattggtgagtccgaaggacataactgtgaactcatatagaccataacgcgttgagaaagcggtcttcgggatatcttcagatctgattttcagttggtggtaacctgacctcaagtcaatttttgagaaaactcttgctcctttaagttgatcgaataaatcgtcaatccgtggcaacgggtacttgttctttatagttacttcattcagggctctatagtcgattaccattctctcagagccatcctttttcttaaccagaagcactggggctccccaaggggatgagctaggtcgcacataacctttactttccagttcttcgatttgtcttttaacttctgctaactcattagctgccattcggtagggtctttttgcaattggagctgtgcctggtgccagttctatggcgaactcaacctctcggtctggtggcattctcgttaattcttctgggaatacgtcgggatattcacagactatgggcaccgactccaaggaggtgacttgtaaacaggttagaatagaccggcttgcggtaggggtgttaggggtaaagcggacttgctttcctccaggtccttgcaaggtgatggacttttcggcacaatctatctgtcctttgtgcttagccaaccaatccatccctaggatgatgtccaagctttgcgagtctaggactatcggtttggctaggaagtcaacttcctcaattctaaggttaacttccgggcatatttgagttgcccttatattcctcccaggggaatgtactatcattggtacacgcaaattttgggttttccaaccatttcttttcacaaaagcttgtgatatgaaagaatgggaagctcctgaatcaaatagaactattgcgggtacggagttgacagagaacatacccatcacaacgtctggagcatcctgagcggtttcagcttgaatgtgattcacacgtcctcgaccaaagtggttggaagcacgagaaccttgtccacttgcctgagagctaggacgagactgagctgccgctggagtaggagttctggcggtgctgccattagcatgccctgagttggtgttggtaggattctgagggcactgtctagcatagtgacccatctggttgcaccggaaacactgaactgctgacggtccctgtggtgacttgaaagaggtaacgctgttaggcgcagtattgccactaggggcacgctgctgtggctgaggtgccggacggtttatctgaggacgaggggcgtagcttggctggcggttagcctgagtgaccgactggtggtattgcatgggttgaccgtagcgagggcgaggtgcgcctcgggaagaatttccctgatggttagacttgcgtttcttgtattcttcggtagcctcttttctggcatcctcaagcagaagtgccttgttgatcatatgttgaaaagtggggaagtcatgagcaagcaactggagtctcattccaactgcaattcccttcaagaatttcctgatcttcttcttatctgtgtctatttcctcaggggcgtaccgagccaacttgttgaactgacttaggtactcattgacactgctattgccttgcttaagtctgttgaattcttctttcttcatgtcaatagtgctttcaggcacatgagctgcacggaaagccgtagcaaactcatcccaagcaatgttagtgggttcaggatgtgcattgcagtaattctcccaccaatctgcagcaggtcctcttagctggtgagaggcatagagcgtcttctcaacaggagtacactgcactaagttgagttttctatcaacatctttcaaccaatcgtcagcctcgacgggctcgacggtctgagagaactctggcggacgtgacctcagaaagtctgtcagcttggatctattgttgcccacgtgagggtggccatttccatgcgcattatgctgaaaactggctatggctgtggttagtccttgcaagatttgtgtctgtactgccattatgtgttgcatgttggtttccacatgagatggggaagggaggcgttcttctccagaattgtgactggcagtgcggtgagactgttccatctttgcatcacgggaaactgtgcgatgcgagcggctgctgcggcggggttgctcaacctctgcgttgcgggaaacagtacggtgcgaacggttgctgtggtgagactgctcattagctgattcatgatttgcttctgcttcaactctaccatcttcaaaaccaaagcgggctggtgcacgagcggcatggcgggggcggctagccatctgtcgagggccggcagcagcacgggccgctgacggtgggggagctgggtagtggaaacggaacacggtggaagaaccaacaacacgcttccgcgcggtgcggataaagcgtgggccacggcgggaggaagcaactggggtgtgtccgggggtgtaggaagggctaactgggtgtgggtagggggagtacactggtgagtacggcgcacgcgagctgggggagcgcgggccactgggagtgcgggcagagccgcgggagctgtgggaggacaggtggctggcgtggcagaggcggcctgagtcccaagagatagtgtcaactgaggtgacaccctcctcggccagacgggcctccaaagcggcgtagcggcgggcaagggagcggtaagcctcaaggagtaggtcgtgctgagtggcctgagcctccgaaagctcgaccatgcgagtcagcactggctgagactcgctgtacggacaagggtacctggcgtctgagtggccagagggaaggcgtggaagctgccggaaggcggaacctccgagacggtggctgtagtcgtgggccaggcgacgaagcgcagtccaggagaggtcctggtacgcgatctggagagtgggcctggccacagtgaagtggtgggggcgaaggccagctccgtgtatacctccacgggggtaaaggtacaccgagagctcacagtgagggggaacacggtccacggagtaccccgtgtactcgggacacgagaagccaaggaaacgggagaggtcacgaagctgagcgacgtggtgaccctcaccaaaaccgtgggaactgaagctggcgttcactgccat

SEQ ID NO: 89647 - DNA, 205 bp, Oryza sativa
  Clone ID: PAT_MRT4530_88385C.1
tggcggcatcggcaacgacaaggcggtgtggctacgatgctctcgcatctcctccgtcggtagaacccgtattctcctccggccatcgacgaggcagtcgcttgaaaatgagcaacgcgtgcccctcggtggtcaacgacgtccgaggcatctcccgtgctgtggagattacaggaggccctccaggggcaggagacacaactag

SEQ ID NO: 89648 - DNA, 3423 bp, Oryza sativa
  Clone ID: PAT_MRT4530_88386C.1
agggagcagctccggaaactcggcgcggagatgatcttctcgttcccaggttgcttcatcttctgaatggttgctccactgaaccttgtagaacttgatggtctttcgttgagtctgacgttctgcctcttcaagaactttgatcggcctttctttgtaggttagattcttttccagctcggtattgcccaggggaacttgttcttctggaacacgaagacatttcttcaactgagacacgcgaaacacgttgtgcacatctgcaagaccttcaggtaactcaagctgataagccacttcgccacgtctggcggttatgatgtaggggccgatgtagcggggtgctaacttgtcggacatcccaaacctcctcataccacggaggggtgatacccgcaggtacacatgaactcctttttcaaactcgagatcacgtctccgattgtcggcataacttttctgacggttctgagctgtcttcaaacgttctcggatcagcttaacttgctcttctactgccttgagtatgtcggggccaaacactagtgcttcgtcgacctcattccagcacaagggggtgcggcactttcttctgaacattgcctcattcggcgacatctgaatgctggcctgataactgttgttgtaggagaatgcagcatatggcaggcaacggtcccaagtgccttcgaaatccagggcacacgcacgaagcatgtcttctaggatcttatttactctttatgtctgaccatcggtctgcggatggtaagctgtactgaaatttagatcggttccgagagcttcatgcaattgcttccagaaccttgaggtgaactgagtgcctcgatctgacacaatcttcttggaacaaccaaatcgacatacgacatgggtcatgtagagttctgccagtttctttccatcaaaggtagttttcactggcacgaaatgagctgatttcgtaagtcggtccacgattacccaaatggagtcgtacccgctaggggttcttggcaaaccggtgatgaaatccattccgatctcttcccatttccactcgggaatcggtaggggttgcagcagaccagctggcctctgatgttctgccttgactctttggcaaatgtcacacaaggctacgtattctgcgacatctcgcttcattccagcccaccagaagtatgccttgatatcttggtacatcttcgtacaaactgtgccttgttcgtctatggagaaattggtgtctttcttctcctgtattctttttattaactcttttatcccttcgtcatctttctgagcttcccggatttgcgactctagggtaggctgtactgtcaagctggcagggacacctgactgtaccacggtcagccttaacttctccaattctctgcacaggcgatcttggttaggccgtatttgagctacattgcaataggccttgtgacttagcgcatcagcgaccacgttagctttaccggggtggtactggattccaagatcgtaattcttgattagttccagccatcttctctgcctcatatttaactcggtctgagtgaagatgtacttaagacttttgtgatcggtgtatacttcacatctgttcccgattaaatagtgcctccagatcttaagagcatgaaccacggctgccaactcgagatcatgggtgggataattgacttcatgaggcctgagctgccgggatgcataggccacaacctttcgttcttgcattaggacacatcctaagccttgtcttgatgcatcacagaagatctcgaaatcttttcggatatctggcaaggtgagaactggggcagtggtcaaccttttcttcatttcttgaaagctgtcttcacaggctgtagaccattgaaatttcttttccttctttaacagctcggtcataggtctggctagcttggagaatccttcaatgaatcttcgataatatccagctaagccaaggaagctgcgaatctctgacacattcttgggcgggttccaagcaagtacagcttcaaccttgctgggatctacttcgacaccgttggaggagatcacgtgtccaagaaatgctactcggtctaaccagaattcgcatttcgagaatttagcgaatagttgatgatctctgagcttttccattatcagcctcaggtgttcggcatgttcttcctcgttcttggagtatatcaggatgtcatcgatgaacaccatgacaaactggtccaagtaatccataaagattttgttcattaagttcatgaagaacgctggggcattggtgagtccaaaggacatcactgtgaactcatatagaccataacgcgttgagaaagcggtcttcgggatatcttcagatctgatttttagttggtggtaacctgatctcaagtcaattttagagaaaactcttgctcctttaagttgatcgaacaaatcgtcaatccgtggcaacgggtacttgttctttatagttacttcattcagggctctatagtcgattaccattctctcagagccatcctttttcttaaccagaagcactggggctccccaaggggatgagctaggtcgcacataacctttactctccaattcttcgatttgtcttttaacttctgctaactcattagctgccattcggtagggtctttttgcaattggtgcggtgcctggcgccagttctatggtgaactcaatctctcggtctggtggcatactcgttaattcttctgggaatacgtcgggatattcacagactatgggcaccgactccaaggaggtgacttgtaaacaggttaggatagaccgacttgcggtaggagtgttagaggtaaagcggacttgctttcctccaggtccttgcaaggtgatggacttttcggcacaatctatctgtcctttgtgcttagccaaccaatccatccctaggatgatgtccaagctttgcgagtctaggactatcggtttggctaggaagtcaacttcctcaattctaaggttaacttccgggcatatttgagttgcccttatattcctcccaggggaatgtactatcattggtacacgtaaattttgggttttccaaccatttcttttcacaaaagcttgtgatatgaaagaatgggaagctcctgaatcaaacagaactatcgcgggttcggagttgacagagaacatacccatcacaacgtctggagcatcctgagcggtttcagcttgaatgtgattcacccggcctcgaccaaagttgttggaagcacgtgaaccttgtccacttgcctgagagctaggacgagacggagctgccgctggagtaggagttctggcagtgctgccattagcatgccctaagttggtgttggtaggattctgagggcactgtctggcatagtgacccat

SEQ ID NO: 89649 - DNA, 1470 bp, Oryza sativa
  Clone ID: PAT_MRT4530_88387C.1
atgacgatgccaaagaacgtcggaggtggtgctggcggcgagggtggtggcggtcggtggggaagaacaaaggatatcacgaagagtaaaagagtggttagaatgacgaaagttagcttgcccaacggaagtaaccggaatggtagaaccgtcaccaaccacaatatgagagggagaggtagaggtgggtgggtgggtgaaggcgctgtggcgccgttgccgccgccttgcttcccgccgccatttccgccgcgacgacagcgattgtgggagttcccgccaccgttgccgccgccgccaccaccgccttggttcccggcgccgaaaccggagggcggtgagcacgagggtccggtccttgaccggttcgccgaggtcgccgagttgatctgccatggccttcagtttgcggcagaaatcggcgacgttgagatcgccttgctggaagtggtggaagtccgccgtgagcgtgatggcgcggtgctcgcaattgccgaggaactgatgttccaaggtaatccaaacgagccgggcggtggtgtcgacggagagaacttcttggaggaggtcggtggagatggtgcagtaaagccaggcgaggacgacgcagtccatctgcttccaatcggcacgatgggggagatgttcgtcggagaggacatgttccgtcaaggcatacttgctgagggcgacgaggaagaggccacgccacttcgtgtagtttgcggcggcgacatccagtgtgacaggaacaagagccttcacgttgaggacgctgatggcctaggcgtgaagggcggcgctggtgtcggggtcgagcacaggcgcaggcgcggcggagtgagatgggccgctgccatgaacgccatgcgggaaccctggcaggacagaaggcttgggccaggagtagtgggctggcgccgagccgggtggaggcaggccggctgccacgaagagcgcggcgaggtcgacgggtgtcgcgggctcgccggacggtggagccgaggtgccgaccggaagcatggccgtcgtggtcgtcgttggagcgtggacgtcgacgggcggggtcggtgctgggagagacgcgagaaaggtggagagcgcctggcgcgccgtggcggacgccttggccgcagcgccgtcggcgacgatggtggcagtgtcggcggcgatagagaggccatcgggggactggaacgccgcgcggacggcgttggcagcggcgtcggcggcggagtcgagaacagcggcggtgggggagttggtgtaggaagccgtgtcgtcggcggttgccatggcgagcgacgggcgcagcaggcgtgctacggaaggaagagagcggaagaggtggatcgggagtctgataccataaaagggaatgggactcaacgcgatggtgtattgatcacggagatttacatatgtaggcctcatcctttccttacacaagcaaccgatttatggaaatag

SEQ ID NO: 89650 - DNA, 569 bp, Oryza sativa
  Clone ID: PAT_MRT4530_88388C.1
ttttttttttttttttttttggtccaataattcattgcaatagttcactgcaggccatgacaacagtagctgcccatacactgtgtcagaattcggagcgagttacagtcaaaatgttcattttgcagtaaaaaagaaacaactatgacatgttttgactatccaggcttctatctgagctatcgagcatcaaaactgaaatatgagcaattttgatgtgggaatgatttccggaaggcatgtattgtcaatacatggcagcagagagtaaaagtatatccagctacataactaaggtgtagacaagacaaataatgagaatttggtgacaatcttggcaacttcagcgctgtagcttcctccttgcaagtgctggacttttctttggtatgtagactttgtaactgacctgcacagtttctccctcatgcattctagagaatgtctttttctcaaactgagaaccatctttgacctcagtcccaggctgatccttgacctcaccagttgacaaagtcagaaacattaggagctgaagcttcacctgaatttctttcatcccctttagt

SEQ ID NO: 89651 - DNA, 4515 bp, Oryza sativa
  Clone ID: PAT_MRT4530_88389C.1
ctaagggagcagctccggaaactcggcgcggagaagatcttctcgttccctggttgcctcatcttcagaatgattgctccattggactttgtagaacttgatggtcttccttcgagtctgacgttctgcctcttcaagaaccttgatcggtctttccttgtaggtcagattcttttccagctcgatactacccaggggaacttgctcttctggaactcgaagacatttctttaactgggatacgtggaacacgttgtgcacatctgcgagaccttcaggtagctcaagctgataagccacttcgccacgtctggcggctatgaggtaggggccgatgtagcggggtgctaacttgccggacatcccaaaccttctcatacctcggaggggtgacacccgcaggtacacatgatctccttttttgaactcaaggtcacgtctccgattgtcagcgtaatttttctgacggttctgcgctgtcttcaagcgttctcggatcagcttaacttgttcttctgctgacttgagtatgtcaggaccgaataccagggcttcgcccacctcattccagcacaagggggtgcggcactttcttccgaacattgcctcatttggcgacatctgaatactagcctggtaactgttgttgtatgagaactcagcatacggcaaacaacgatcccaagtgccttcgaaatccaaggcacacgcacgcagcatgtcttctaggatttggtttaccctttctgtctgaccatcggtctgtggatggtaggccgtactaaaatttagatcagttccgagagtttcatgcaactgcttccagaaccttgaggtgaactgagtgcctcggtccgacacaattttcttgggacagccaaatctacatacgacatgagtcatgtagagttctgccagtttctttccatcataggtggttttcactggcacgaaatgagctgatttcgtgagtcggtccacgattacccaaatggagtcatacccgcagggggttcttggcaaaccggtgatgaaatccattccgatctcttcccatttccactcgggaattggtaggggttgtagcagaccagctggcctctggtgctctgccttgactctttggcaaatgtcacacaaggctacgtattctgcgacgtctcgcttcattccagcccaccagaagtatgccttgatatcttggtacatcttcgtacttcctggatgaatggagtaggcggactcatgagcttcctttaggatgagatctcttaactccttcttggccggtacacagatgcgtggaccgcaccaaactgtgccttgttcgtctatggagaaattggtgtctttcttctcccgtattctttttattaactcttttatcccttcgtcatctttctgggcctcccggatttgtgattctagggtaggctgtactgtcaagctggcagggacacctgactgtaccacggtcagccttaacttctccaattctctgcacaggtgatcttggttaggccgtgtttgggctacattgcaataggccttgcgacttagcgcatcagcgaccacgttagctttaccgggatgataatgaattcccagatcgtaatccttgattagttccaaccatcttctctgtctcatatttaactcggtctgtgtgaagatatacttaagacttttgtgatcggtgtatacttcacatctgttcccgattaaataatgcctccagatcttaagagcatgaaccatggctgccaactcgagatcatgggtgggataattgacttcatgaggcctgagctgcctggatgcgtaggccacaacctttcgttcttgcattaggacacatcctaagccttgtcttgatgcgtcacagaagatctcgaaatcttttcggatatctggcaaggtgagaactggtgcagtggtcaaccttttcttcatttcttgaaagctgtcttcacaggctgcagaccattgaaatttcttttctttctttaacagctcggtcataggtctggctagcttagagaatccttcaatgaatcttcgataatatcccgctaagccaaggaagctgcggatctctgacacgttcttgggcgggttccaagcaagtacagcttcaaccttgctgggatctacttcgacaccgttggaggaaatcacgtgtccaagaaatgctactcggtccaaccagaattcgcatttcacgacaaactggtccaggtattccatgaagattttgttcattaagttcatgaagaacgctggagcattggtgagtccgaaggacattactgtgaactcgtatagaccataacgcgttgagaaagcggtcttcggaatatcttcagatctgattttcaattggtggtaacctgacctcaagtcaatttttgagaagactcttgctcctttaagttgatcgaataaatcgtcaatccgtggcaacgggtacttgttctttatagttacttcattcagggctctatagtcgattaccattctctcagagccatcctttttcttaaccagaagcactggggctccccaaggggatgagctaggtcgcacataacctttactctccaactcttcgatttgtcttttgacttctgctaactcattagtcgttaattcttctggaaatacgtcaggatattcactgactatgggcaccgactccaaggaggtgacttgcaaacaggttaggatagaccgacttgcggtaggggtgttaggggtaaagcggacttgctttcctccaggtccttgcaaggtgatggacttttcggcacaatctatctgtcctttgtgcttagccaaccaatccatccctaggatgatgtccaagctttgcgagtctaggactatcggtttggctaggaagtcaacttcctcaattctaaggttaacttccgggcatatttgaattgcccttatattcctcccaggggaatgtactatcattggtacacgcaaattttgggttttccaaccgtttcttttcacaaaagcttgtgatatgaaagaatgggaagctcctgaatcaaatagaactattgcgggtacggagttgacagagaacatacccatcacaacgtctggagcatcctgagcggtttcagcttgaatgtgattcacacgtcctcgaccaaagtggttggaagcacgagaaccttgtccacttgcctgagagctaggacgagactgagctgccgctggagtaggagttctggcggtgctgccattagcatgccctgagttggtgttggcaggattctgaggacactgtctagcatagtgacccatctggttgcaccggaaacactgaactgctgacggtccctgtggtgacttgaaagaggtaacactgtttggcgcagtattgccactaggggcacgctgctgtggcggaggtgccggacggtttatctgaggacgaggggcgtagcctggctggcggttagtttgagtgatcgactggtggtattgcatgggttgaccgtagcgagggcgaggtgcgcctcgggaagaatttccctgatggttagacttgcgtttcttgtattcttcggtagcctcttttctggcatcctcaagcagaagtgccttgttgatcatatgttgaaaagtggggaagtcatgagcaagcaactggagtctcattccaactgcgattcccttcaagaatttcctgatcttcttcttatcggtgtctacttcctcaggggcgtaccgagccaacttgttgaactgacttaggtactcattgacactgttgttgccttgcttaagtctgttgaattcttctttcttcatgtcaatagtgctttcaggcacatgagctgcacggaaagccgtagcaaactcatcccaagcaatgttattgggttcaggatgtgcattgcagtaattttcccaccaatctgcggcaggtcctcttagctggtgagaggcgtagagcgtcttctcaacaggagtacactgcactaagttgagttttctatcaacatctttcaaccaatcgtcagcctcgacgggctcgacggtctgagagaactctggcggacgtgacctcagaaagtctgtcagcttggatctattgttgcccacgtgagggtggccatgcacattatgctgaaaactggctatggctgtggttagtccttgcaagatttgtgtctgaactgccattatgtgttgcatgttgttttccacatgaggtggggaagggaggcgttcttctccagaattgtgactgacagtgcagtgagagaggtgagactgctccatctctgcatcacgggaaactgtgcgatgcgagcggctgctgcggcggggttgctcaacctctgcgttgcgggaaacagtacggtgcgaacggttgctgcggtgagactgctcattagctgattcatgatttgcttctgcttcaactctaccatcttcaaaaccaaagcgggctggtgcacgagctgcacggcgggggcggctagccat

SEQ ID NO: 89652 - DNA, 210 bp, Oryza sativa
  Clone ID: PAT_MRT4530_8838C.1
atggcgcttctcgaggaggagctgcgctacctcatggtccaccaaaccgtgcagctcgaccccacgggcatcttctccctgcgccgcctctcactcggctccatggacgacggctgtggcgccgggaggacgacaactgcgaagagaggagatggaggagaggatcagaagctgggaggatggaacgttccaagctgggtaaggacctag

SEQ ID NO: 89653 - DNA, 369 bp, Oryza sativa
  Clone ID: PAT_MRT4530_88390C.1
atctaggcctcgcaatagcggcccaagaggggacgattaaaagtagctggggcgttccaaataatctccagcacatatcgtatgagggtcctagacaacactatgacggacaagatggagcgccaggaagacctaccatactagagagcaaacatgagcctggcctcattagtatagcgtcagaacaggcactagtcatgctaacatccggccaaatacttacacacactcgcctcaacaggatagcagacctcaaggcataatctgaaacatcactcgtactcattgggggaaaaaacggtggctgcatcatcggcagctgctagaaaaaacgagcaaacacgacgtttaccagatgcagacaactcc

SEQ ID NO: 89654 - DNA, 5313 bp, Oryza sativa
  Clone ID: PAT_MRT4530_88391C.1
atgacggcggggcggtttggaccggagcggcgacactggcgacaggcgcgtgcagaggctgacggcggcggcgaccgggcggtcggccaccacggcacgcgcgcgcgggaagcaacgggcggcgtccgcgcgggcgcgcacacgctggctcgcgaggacgagcggatgcgcgggttctgcctcttcaagaaccttgatcggtctttccttgtaggtcagattcttttctagctcgatattacccaggggaacttgctcttctggaactcgaagacatttctttaactgggatacgtggaacacgttgtgcacgtctgcgagaccttcaggtagctcaagctgataagccacttcgccacgtctggcggttatgaggtaggggccgatgtagcggggtgctaacttgccggacatcccaaaccttctcataccacggaggggtgatacccgcaggtacacatgatctcctttttcgaactcaaggtcacgcctccgattgtcagcgtaattcttctgacggttctgtgctgtcttcaaacgttctcgtatcagcttaacttgttcttctgctgacttgagtatgtcaggaccgaataccagtgctttgcccacctcattccagcacaagggggtgcggcactttcttccgaacattgcctcattcggcgacatctgaatgctggcctgataacttgaggtgaactgagtgcctcgatccgacacaatcttcttgggacaaccaaatcgacacacgacatgggtcatgtagagttctgccagtttctttccatcaaaggtggttttcgctggcacgaaatgtgccgatttcgtgagtcgatccacgattacccagatggagtcgtacccgctaggggttcttggcaaaccggttatgaaatccattccgatctcttcccatttccactcgggaatcggtaggggttgcagcagaccagctggcctctgatgctctgccttgactctctggcaaatgtcacaaagggctacgtattctgcgacatctcgcttcattccaacccaccagaaatatgccttgatatcctggtacatcttcgtacttcctggatagatggagtaggcggactcatgagcttcttttaaaatgaggtctcttaactccttcttggccggtacacagatgcgtggaccgcaccaaactgtgccttgatcgtctatggagaaatcggtgtccttcatcttctgtattctttttattagctcttttatcccttcatcatctttctgagcttcccggatttgcgattctagggtaggctgcactgtcaagctggcagggacacctgactgcaccacggtcagccttaacttctccaattctctgcacaggcgatcttggtctggccatatttgagctgcattgcaataggtcttgcgacttagcgtatcagcgaccacattagctttaccgggatggtaatgaattccaagatcgtaatccttgattagttccaaccatcttctctgcctcatatttaactcggtctgagtgaagatgtacttaagacttttgtgatcggtgtatacttcacatctgttcccgattaaatagtgcctccagatcttaagagcatgaaccacggctgccaactcgagatcatgggtgggatagttgacttcgtgaggcctaagctgcctggatgcgtaggccacaacctttcgctcttgcattaggacacatcctaagccttgtcttgatgcatcacagaagatttcgaaatcttttcggatatctggcaaggtgagaactggggcagtggtcaatcttttcttcatttcttgaaagctgtcttcacaggctgctgaccattcaaacttcttttccttctttaacagctcggtcataggtctggctagcttagagaacccttcgatgaatcttcgatagtaaccagctaggccaaggaaactgcggatctctgactcattcttgggaggataccaagcaaggacagcttcaaccttgctgggatctacttcgacaccgttagaggagatcacgtgaccaaggaatgctactcggtccagccagaattcgcattttgagaacttagcgaacaattgatgatctcttagcttctccattatcagcctcaggtgttcaacatgttcttcctcattcttggagtatatcaggatgtcatcgatgaataccacaacaaactggtccaggtactccatgaagattttgttcatcaggttcatgaagaatgctggagcattggtgagtccgaaggacatcactgtgaactcatacagcccatagcgcgttgagaaagcggtcttcgggatatcttcatatctgattttcaacattctctcagagccatcctttttcttaaccagaagcactggggctccccaaggggatgagctaggtcgcacataacctttactctccaattcttcgatctgctttttgacttctgctaattcattagctgccattcggtagggactttttgcaattggtgcggtgcctagtgccagttctatggcgaactcaatctctcggtttggtggcatttccgttaattcttttggaaatacgtcgggatattcacagactatgggtaccgattccaaagaagtggcttgcaaactggttaggatagaccgacttgcagtaagagtgttgggggtaaagcgaacttgctttcctccaggtccttgcaaggtgatggacctttcggcacaatctatctgtcctttgtgcttagccaaccaatccatcccaagaatgatgtccaagctttgcgagtctaggactatcggtttggctaggaagtcaacttcctcaattctaaggttaacttccgagcatattttagttgcccttatatcccttccaggggaatgtactatcattggtactcgcaaattttgggttttccaaccatttcttttcacaaaagcttgcgatatgaaagaatgggatgctcctgaatcaaacagaactattgcgggtgcggagttgacagagaacatacccataacaacgtctggagcgtcctgagcggtctcggcttgaatgtggttcactcggtctcgaccaaagttgttggaagcacgggaaccttgtccacttgcctgcgtgctaggacgggactgagctgctgcaggagtaggagttctggcggtgctgccattggtatgccctgagttggagttggtaagattctgagggcactgtctggcatagtgacccatctggttgcaccggaaacactgaactgctgatagtcctggcggtgacttgaaagaggtaacactgtttggcgcggtattgccacttggggcacgctgctgcggctgaggtgccagacgattcatctgaggacgaggggcatagcttggctggcggttagcctgagtgactgactggtgatattgcatgggttgtccaaagcgagggcgaggttcccctcgggaagaatttccctgatgggtagacttgcgtttcttatactcctcggtagcctcttttctggcatcctcaagtagaagtctcttgttgatcatgtgtgtgactcctttcaagaacttcctgatcttcttcttgtctgtgtccacttcctcaggagcgtatcgagccaacttgttgaactgactcatatactcattgacactggtattgccttgcttgagcctgttaaattcttccttcttcatgtcaatagtgctttcaggcacatgagctgcacggaaagctgcagcgaattcatcccatggaatgttagtgggttcggggtgtgcgttgcaataattctcccaccaatctgcagcaggtcctcttagctggtgagaggcgtagagcgtcttctcaacaggagtacactgcactaagttgagttttctctcaacatctttcagccaatcgtcagcctcaacgggctcgacggtctgggagaactctggcggacgagaccttagaaagtctgtcagcttagatctgttgttgcccgtgtggggatggccatttccatgcgcgttgtgctgaataccggctatggctgtggctaaaccttgcaagatttgagtctgaactgccatcaagtgctgcatgttgttctcaacatggggtggggaaggaatgcgttcttccctagaattgtgaatggcagcgcggggagagcggtgagactgttccacttctgcattacgggaaactgtgcggtgcgagcggttgctgcggtggggttgctcaacttctgcattgcgggaagcagtatggtgcgaacggttgctgtggtgagactgctcattagctgactcatgatttgcttctggctcaactctaccttcctcaaaaccgaaatgggctcctgtagtcggctcctcagtcgaagagacgtcgatcggctgacgcgaagagatcggcggaacttgtcgagggccggcagcagcacgggctgctggcggtgggcgagctgggtggtcaaagcggaacacagtggaagaaccaacaacacgcttccgcacagtgcggataaagcgtgggccacggcaggaggaagcaactggggtgtgaccaggagtgtaggaagggctaactgggtgagggtagggagagtgcactggggagtacggcacacgcgaactgggggtgcgcgggccactgggagtgcgaacagagccgcgggagctgtgggaagacaggtggctggcgtggcagaggcgacctaagtcccaagaggcagtgtcaactgaggtgacaccctcctcggccaggcgggcctccaaagcagcgtagcggcgagcaagggagcggtaagcctcaaggagaaggtcgtgctgggtggcctgagcctcagagagctcaaccatgcgagtcagcacaggctgagactcgctgtacgggcaagggtacctagtgtcagtgcggccagaaggaaggcgcaggagctgccgaaaggcagagcccccgaggcggtgggcgatctggagagtgggcctggccacagtgaagtggtgtgggcgaaggccagccccgtgtatacctccacgagggtaaaggtacaccgaaagctcataacgagagggaacacggtccacagagtaccccgtgtactcaggacacgagaagccaaggaagcgggcgaggtcacgaagctgagcgacgtggtgaccctcaccaaaaccgtgggaactgaagctggcgttcactgccatctgttcatcgataccagtcccaggaaacaatgctggtatcacaggaagacagaatatcatagcaacagaggtctctttattacagagtaggagtacagtcat

SEQ ID NO: 89655 - DNA, 387 bp, Oryza sativa
  Clone ID: PAT_MRT4530_88392C.1
atgtttttcgcaggccctgaattccctggcatcgggacgccgttcggagaagaaggaaaatacgtcgaggtggtaaaactccccgccgcaggcaacgttgccggaaggggtcgcgggtcgcggctggagaaaggaccagcggcgcgcgaggaaaaggacggcatcagccggcgatgggggaggcgacgcggcgtccgactggctatgtttaggcctttagggtacgaggtggttgggcctttttttgggccgcacggggctaccgggcttagaaaggctaacacgaaagaccgtaacaatcacctcgacaacgcgactgctagctgctggagtgagagtgtgacacacagcaccgaagacctgtcggatgaagggagtacagcatag

SEQ ID NO: 89656 - DNA, 5157 bp, Oryza sativa
  Clone ID: PAT_MRT4530_88393C.1
atggcagtgaacgccagcttcagttcccacggttttggtgagggtcaccacgtcgctcagcttcgtgacctcgcccgcttccttggcttctcatgtcccgagtacacggggtactccgtggaccgtgttccccctcgctgtgagctctctgtgtacctttaccctcgtggaggtatacacggagctggccttcgcccacaccacttcactatggccaggcccactctccagatcgcgtaccaggacctctcctggactgcgctttgtcgtttggcccacgactacagccaccgtcttgggggctctgccttccggcagctcccacaccttccttctagccacgcagacgccaggtacccttgtccgtacaacgagtctcagccagtgctgactcgcatggttgagctttcggaggctcaggccactcagcacaacctactcctcgaggcttactgctcccttgcccgccgctacgccgctctggaggcccatctggccgaggagggtgtcacctcagttgacactgtctcttgggactcaggccgcctctgccacgccagccacctgtcctcccacagctctcgcggctctgcccgcactcccagtggcccgcgctcccccagctcgcgtgcgccgtactcacaagtgtactccccctacccacacccagttagcccctcctacacccccggacacaccccagttgcttcctcccgccgtggcccacgctttatccgcactgcgcggaagcgtgttgttggttcttccaccgtgttctgcttcgactacccagctcccccaccgctagcggcccgtgctgttgggggccctcgacagatggctagccacccccaccgtgctgctcgtacaccagcctgcttcggttttgaggaaggtagagttgagccagaagcaaatcatgagtcagctaatgagcagtctcaccagagcaaccgttcgcaccgtactgcttcccgcaatgcagaagttgagcaaccccaccgcagcaatcgctcgcatcacacagcttcccgtaatacagaagtggaacagtctcaccgctctcaccgcactgccagtcacaattctggagaagaacgcatcccttccccacctcatgtggaaaacaacatgcagcacttgatggcagtacagacacaaatcttgcaaggattagccgcagccatagccggctttcagcataatgcacatggaaatggccaccctcacatgggcaacaatagatccaagctgacagactttctgaggtctcgtccgccagagttctctcagaccatcgagcccatcgaggctgacgattggctgaaagatgttgatagaaaactcaacttagtgcaatgtactcctgttgagaagacgctctacgcctctcaccagctaagaggacctgctgcagattggtgggagaattactgcaatgcacaccctgaacccactaacattgcttggggtgagtttgctatggctttccgcgcagctcatgtgcctgaaagcgccattgatatgaagaaagaggaatttaacaggcttaagcaaggcaacaacggtgtcaatgagtacctaagtcagttcaacaagttggctcggtatgcccctgaggaagtggacacagacaagaagaagatcaggaagttcttgaagggaattgcagttggaatgagactccagttgcttgctcatgacttccccacttttcaacatatgatcaacaagacacttctacttgaggatgctagaaaagaggctaccgaagaatataagaaacgcaagtctaaccatcaggggaattcttccctaggcgcacctcaccctcgctatggtcaacccatgcaatatcaccagtcagtcactcaggctaaccgccagccgggctacgcccctcgtcctcagatgaaccgtccggcacctcagccacagcaacataccccaagtggcaatactgcaccaaacagtgttacctctttcaagtcaccgctaggactgtcagcagttcagtgtttccggtgcaaccagatgggtcactatgccagacagtgccctcagaatcctaccaacaccaactcagggcatgctaatggcagcactgccagaactcgtactccagcggcagctcagtctcgacctagctctcaggcaagtggacaaggttctcgtgcttccaacaactttggtcgaggccgggtgaaccacattcaagctgagacagctcaggatgctccagacgttgtgatggtacattcccctggaaggaatataagggcaactcaaatatgcccgggagttaaccttagaattgaggaagttgacttcctagccaaaccgatagtcctagactcgcaaagcttggacatcatcctagggatggattggttggctaagcacaaaggacagatagattgtgccgaaaggtccatcaccttgcaaggacctggaggaaagcaagtccgctttacctctaacgcccctaccgcaagtcggtctatcctaacctgtttacaagtcacctccttggagtcggtgcccatagtctgtgaatatcccgacgtatttccagaagaattaacgagtatgccaccagaccgagagattcagttcgccatagaactagcaccaggcactgcaccaattgcaaaaagaccctaccgaatggcagctaatgagttagcagaagtcaaaagacaaatcgaagagttggaaagtaaaggttatgtgcgacctagctcatccccttggggagccccagtgcttctggttaagaaaaaggatggctctgagagaatggtaatcgactatagagccctgaatgaagtaactataaagaacaagtacccgttgccacggattgacgatttgttcgatcaacttaaaggagcaagagttttctctaaaattgacctgagatcaggttaccgccaattgaaaatcagatctgaagatatcccgaagaccgctttctcgacgcgttatggtctatatgagttcacagtgatgtccttcggactcaccaatgctccagcattcttcatgaacttaatgaacaaaatcttcgtggaatacctggaccagtttgtcgtggtattcatcgatgacatcctgatatactccaagaatgaggaagaacatgctgaacacctgaggctgataatgggaaagctcagggatcatcaactattcgctaagttctcaaaatgcgaattctgcaaggttgaagctgtacttgcttggaacccgcccaagaatgtgtcagagatccgcaacttccttggcttagctggatattatcgaatattcattgaaggattctctaagctagccagacctatgaccgagctgttaaagaaggaaaagaaatttgaatggacagcagcctgtgaagacggctttcaagaaatgaagaaaaggttgaccactgtcccagttctcaccttgccagatatccgaaaagatttcgagatcttctgtgatgcatcaagacaaggcttaggatgtgtcctaatgcaagaacgaaaggttgtggcctatgcatccaggcagctcaggcctcatgaagtcaactatcctacccatgatctcgagttggcagccgtggttcatgctcttaagatctggaggcactatttaatcgggaatagatgtgaagtatacaccgatcacaaaagtcttaagtatatcttcacacagaccgagttaaatatgaggcagagaagatggttggaactaatcaaggattacgaccttggaattcattaccatcccggtaaagctaatgtggtcgcggatgcgctaagtcgcaagacctattgcaatgaagctcaaatatggccagcccaagatcgcctgtgcagagaattggagaagttaaagctgaccgtggtacagtcaggtgtccctgccagcttgacagtgcagcctaccctagaatcgcaaatccgggaagctcagaaagatgatgaagggataaaagaattaataaaaagaatacaggagaagaaggacaccgatttctccatagacgatcaaggcacagtttggtgcggtccacgcatctgtgtaccggccaagaaggagttaagaaatctcattctaaaggaagctcatgagtccgcctactccattcatccaggaagtacgaagatgtaccaggatatcaaggcatacttctggtgggcgggaatgaagcgagatgtcgcagaatacgtagccctgtgtgacatttgccagagagtcaaggcagagcatcagaggccagctggtctgctgcaacccctaccgattcccgagtggaaatgggaagagatcggaatggatttcatcaccggcttgccaacaacccctagcggatttggctgccccaaaaagattgtgtcagaccgaggcactcagttcacctcaaggttctggaagcagttgcatgaagctctcggaaccaatctaaattttagtacagcttaccatccacagaccgatggtcagacagaaagggtaaaccaaatcctagaagacatgctacgtgcgtgtgccctagatttcgaaggcacttgggatcgttgtttgccgtatgctgagttttcatacaacaacagttatcaggccagcattcagatgtcgccgaatgagacaatgtttggaagaaagtgccgcactcccttgtgctggaatgaggtgggcgaagcactgaattacgctgacaatcggaggcgtgaccttgagttcgaaaaaggagaccacgtgtacctgcgggtatcacctctccgtggtatgaggaggtttgggatgtccggcaagttagcaccccgctacatcggcccctacctcataaccgctagacgtggcgaagtggcttatcagcttgagttacctgaaagtctcgcagatgtactcaacgtgttccacgtgtctcagttgaagaagtgtctccgtgttccagaagaacaagttcccctggataatatcgaactggaaaagaatctgacctacaaggaaataccgatcaaggttcttgaagaggcagaacgtcagactcgaaggaagaccatcaagttctacaaggtccaatggagcaatcattctgaagacgaggcaacctgggaacgagaagatctcctccgcgccgagttcccggagctgctcccttag

SEQ ID NO: 89657 - DNA, 480 bp, Oryza sativa
  Clone ID: PAT_MRT4530_88394C.1
atggggtcgggcatgggcggtggcagcggctggccagcgaagcggggcggcgagcggcttctagggctcggcggtgagggcaagatggtgtcggagagggtgaaggggacgtcctccctcaagttcgacgactatcggagcctcaatgacagcgatgtcatcgagttatccgtcggatccggcaacgacggccgcaataaggccgtggacgtcaccgcgctaggcggcgacacgcacaccggcggattccgtcccagctgcgccgttggagctcgacgccctctgccctccaccgctgctcccctctcctcggccctcaacagcgtgcgctgtgccgtcatccgttcgccaccaccgtcgttgtataccattggccgtgccgttgttgttgtccaccatcagccgctcgttgtcgtcctcaccactagtgctgaaagaagatttggggaagaagtgttggatcggatgcgagggggctaa

SEQ ID NO: 89658 - DNA, 291 bp, Oryza sativa
  Clone ID: PAT_MRT4530_88395C.1
catctagccatggtgacatggtgaacagaagaaagctccgcggtgatgagcaagtgcattccatgtggtcgcgagttgggaaacggcggcagaaggactgccggaatatattagacgaaataaaagttatttacagacaagaaaacacaaaaaacacaataacaaaaggcagcatcaagggggttggaaagccaaaagtctttgatcaatgtcttgaagaattagggtagccaccctatcaaccgttgtgggagtttttttggaaaatacgcctattccgctccaactaaa

SEQ ID NO: 89659 - DNA, 633 bp, Oryza sativa
  Clone ID: PAT_MRT4530_88396C.1
atgcgcggcgcagcgctgaatgctgggtgtactgcctgtctgctgccgtcggtggatggagcaggtcgctcgtcgctgctgttgctgcagggcggtggcagcggctggccagcgaagcggggcggcgagcggcttctagggctcggcggtgagggcaagatggtgtcggagagggtgaaggggacggtgaagggttttgacgccaccaatgggttcggcttcatcactcccgacgacgacggcgaggacctcttcatccaccagtcctccctcaagttcgacgactatcggagcctcaatgacagcgatgtcatcgagttatccgtcggatccggcaacgacggccgcaataaggccgtggacgtcaccgcgctaggcggcgacacgcacaccggcggattccgtcccagctgcgccgttggagctcgacgccctctgccctccaccgctgctcccctctcctcggccctcaacagcgtgcgctgtgccgtcatccgttcgccaccaccgtcgttgtataccattggccgtgccgttgttgttgtccaccatcagccgctcgttgtcgtcctcaccactagtgctgaaagaagatttggggaagaagtgttggatcggatgcgagggggctaa

SEQ ID NO: 89660 - DNA, 4251 bp, Oryza sativa
  Clone ID: PAT_MRT4530_88397C.1
atggaacagtctcaccgctctcaccacactgccagtcacaattctggagaagaacgcctcccttccccacctcatgtggaaaacaacatgcaacacctaatggcagttcagacacaaatcttgcaaggactaaccacagccatagccagttttcagcataatgcgcatggaaatggccaccctcacatgggcaacaacagatccaagctgacagactttctgaggtctcgtccgccagagttctctcagaccgtcgagcccgtcgaggctgacgattggttgaaagatgttgatagaaaactcaacttagtgcagtgtactcctgtggagaagacgctctacgcctctcaccagctaagaggacctgccgcagattggttggagaattactgcaatgcacaccctgaacccactaacatttcttgggatgagttcgctacggctttccgtgcagctcatgtgcctgaaagcactattgacatgaagaaagaagaatttaacagacttaagcaaggcaacagcagtgtcaatgagtacctaagtcagttcaacaagttggctcggtacgcccctgaggaagtagacacagataagaaaaagatcaggaaattcttgaaaggaatcgcagttggaatgagactccagttgcttgctcatgacttccccacttttcaacatatgatcaacaaagcacttctacttgaggatgccagaaaagaggctaccgaagaatacaagaaacgcaagtctaaccatcagggaaattcttcccgaggcgcacttcgccctcgctacggtcaacccatgcaataccaccagtcggtcactcaggctaaccgccagccaggctacgcccctcgtcctcagatgaaccgtccggcacctcagccacagcagcgtgcccctagtggcaatactgcgcctaacagtgttacctctttcaagtcaccgcagggaccgtcagcagttcagtgtttccggtgcaaccagatgggtcactatgctagacagtgtcctcagaatcctaccaacaccaactcagggcatgctaatggcagcactgccagaactcctactccagcggcagctcagtttcgtcctagctctcaggcaagtggacaaggttcacgtgcttccaaccactttggtcgaggccgtgtgaatcacattcaagctgaaaccgctcaggatgctccagacgttgtgatgggtatgttctctgtcaactccgtacccgcaatagttctatttgattcaggagcttcccattctttcatatcacaagcttttgtgaaaagaaatggttggaaaacccaaaatttgcgtgtaccaatgatagtacattcccctgggaggaatataagggcaactcaaatatgcccggaagttaaccttagaattgaggaagttgacttcctagccaaaccgatagtcctagactcgcaaagcttggacatcattctagggatggattggttggctaagcacaaaggacagatagattgtgccgaaaagtccatcaccttgcaaggacctggaggaaagcaagtccgctttacccctaacacccctaccgtaagtcggtctatcctaacctgtctacaagtcacctccttggagtcggtgcccatagtctgtgaatatcccgacgtattcccagaagaattaacgagtatgccaccggaccgagagattgagttcgccatagaactagcaccaggcacagctccaattgcaaaaagaccctaccgaatggcagctaatgagttagcagaagttaaaagacaaatcgaagagttggaaagtaagggttatgtgcgacccatctcatccccttggggagccccagtgcttctggttaagaaaaatgatggctctgagaggatggtaatcgactatagagccctgaatgaagtaactataaagaacaagtacccgttgccacggattgacgacttattcgatcaacttaaaggagcaagagtcttctcaaaaattgacttgaggtcaggttaccaccaactgaaaatcagatctgaagatatcccgaagaccgctttctcaacgcgttatggtctatatgagttcacagtaatgtccttcggactcaccaatgctccagcattcttcatgaacttaatgaacaaaatctttatggaatacctggaccagtttgtcgtagtattcatcgatgacatcctgatatactccaagaacgaggaggaacatgctgaacacctgaggctgataatggaaaagctcagagatcatcaactattcgcaaaattctcgaaatgcgaattctggttagaccgagtagcatttcttggacacgtgatctcctccaacggtgtcgaagtagatcccagcaaggttgaagctgtacttgcttggaacccgcccaagattgtgtcagagattcgcagcttccttggcttagcgggatattatcggagattcattgaaggattctctaagctagccagacctatgaccgagctgttaaagaaggaaaagaaatttcaatggtctgtagcctgtgaagacagctttcaagaaatgaagaaaaggttgaccactgccccagttctcaccttgccagatatccgaaaagatttcgagatcttctgtgatgcatcgagacaaggcataggatgtgtcctaatgcaagaacgaaaggttgtggcctatgcatccaggcagctcaggcctcatgaagccaattatcccacccatgatctcgagttggcagccgtggttcatgctcttaagatctggaggcattatttaatcgggaacagatgtgaagtatacaccgatcacaaaagtcttaagtatattttcacacagaccgagttaaatatgaggcagagaagatggttggaactaatcaaggattacgatcttggaatccactatcatcctggtaaagccaacgtagtcgctgatgcgctaagccgcaaggcctattgcaatgtagctcaaatacggcctgaccaagatcatctgtgcagagaattggagaagttaaggctgaccgtggtacagtcaggagtccctgccagcttgacagtacagcctaccctagaatcgcaaatccgggaggctcagaaagatgacgaagggataaaagagttaataaaaagaatacaggagaagaaagacaccaatttctccatagacgatcaaggcacagtttggtgcggtcaacgcatctgtgtaccgaccaagaaggagttaagagatctcatcctaaaggaagctcatgagtccgcttactccattcatccaggaagtacgaagatgtaccaggatatcaaggcatacttctggtgggctggaatgaagcgagacgtcgcagaatacgtagccctgtgtgacatttgccaaagagtcaaggcagaacatcagaggccagctggtctgctgcaacccctaccgattcccgagtggaaatgggaagagatcggaatggatttcatcaccggtttggcaagaacccccagcggatacgactccatttgggtaatcgtggaccgactcacgaaatcagctcatttcgtgccagtgaaaaccacctatgatggaaagaaactggcagaactctacatgactcatgtcgtatgtagatttggctgtcccaagaaaattgtgtcggaccgaggcactcagttcacctcaaggttctggaagcagttgcatgaagctctcggaactgatctgaattttagtacagcctaccatccgcagaccgatggtcagaccgaaaggacagcacaaagccgtcagaagaattacgctgacaatcgaaggcgtgaccttgagttcgaaaaaggagatcatgtgtacctgcgggtatcacccctccgtggtatgagaaggtttgggatgtccggcaagttagcaccccgctacatcggcccctacctcataaccgccagacgtggcgaagtgacttatcagcttgagctacctgaaggtctcgcagatgtgcacaacgtgttccacgtatcccagctaaagaaatgtcttcgagttccagaagagcaagtccccttgggtaacatcgagctggaaaagaatctgacctacaaggaaagaccgatcaaggttcttgaagaggcagaacgtcagactcgaaggaagaccatcaagttctacaaagtccaatggagcaatcattctgaagatgaggcaacctgggaacgagaagatcttctccgcgccgagtttccagagctgctcccttag

SEQ ID NO: 89661 - DNA, 5490 bp, Oryza sativa
  Clone ID: PAT_MRT4530_88398C.1
atgcccacggtcatgggcggatgtgagatggcagtgaacgccagcttcagttcccacggttttggtgagggtcaccacgtcgctcagcttcgtgacctcgcccgtttccttggcttctcgtgtcccgagtacacggggtactccgtggaccgtgttccccctcactgtgagctctccgtgtacctctaccctcgtggaggtatacacggagctggccttcgcccccaccacttcatcgtggccaggcccactctccagatcgcgtaccaggacctttcctggactgcgcttcgtcgcctggcccacgactacagccaccgtctcggaggctccgccttccggcagcttccacgccttccttctggccactcagacgccaggtacccttgtccgtacagcgagtctcagccagtgttgactcgcatggttgagctttcggaggctcaagccactcagcacgacctactccttaaggcttaccgctccctggcccgccgctacgccgctttggaggcccgtctggccgaggagggtgtcacctcagttgacactatctcctgggactcaggccgcctctgccacgccagccacctgtcctcccacagctcccgcggctctgcccgcactcccagtggcccgcgctcccccagctcgcgtgcgccgtactcaccagtgtactccccctacccacacccagttagcccttcctacacccccggacacaccccagttgcttcctcccgccgtggtccatgctttatccgcactgcgcggaagcgtgttgttggttcttccaccgtgttccgtttccaccacctagctcccccaccgccagcgatggctagccgcccccgccgtgcagcttgtgcgccagcccgcttcggttttgaagaaggtagagtcaaaccagaagcaaatcatgaatcagctaatgagcagtctcaccgcagcaaccgttcgcaccgtactgtttcccgcaacgcaaaagttgagcaaccctgccgtagcaaccgctcacatcgcacagcttcccgtgatgtagagatggaacagtctcaccgctctcaccgcactgccagtcacaattctggagaagaatgcctcccttccccacatcatgtggaaaacaacatgcaacacttaatggcagttcagacacaaatcttgcaaggaatagccgcagccgtagccggttataagcataattcgcatggaaatggccaccctcacatgggcaacaatagatccaagctgacagattttctgaggtcacgtccgccagagttctctcagaccgtcgagcccgtcgaggctgacgattggttgaaagatgttgatagaaaactcaacttagtgcagtgtactccggtcgagaagacgctctacgcctctcaccagctaagaggacctgctgcaaattggtgggagaattactgcaatgcacaccctgaacccactaacattgcttgggatgagtttgctacggctttccgtgcagctcatgtgcctgaaagcaccattgacatgaagaaagaaaaattcaacagacttaagcaaggcaacagcagtgtcaatgagtacctaagtatgttcaacaagttggctcggtacgcccttgaggaagtggactcagataagaagaagatcaggaaattcttgaaaggaatcgcagttggaatgagactccagttgctagcgcatgacttccccacttttcaacatatgatcaacaaggcacttctacttgaggatgccagaaaagaggctaccgaagaatacaagaaacgcaaatctaaccaccaggggaattcctcccgaggcgcacctcgccctcgctacggtcaacccatgcaataccaccagtcggtcactcaggctaaccgccagccaggctacgcccctcgtcctcagatgaaccgctcggcaccccagccacagcagcatgcccctagtggcaatactgcgccaaacagtgttacctctttcaagtcaccacagggaccgtcggcagttcagtgtttccggtgcaaccagatgggtcactatgctagacagtgccctcagaatcctaccaacaccaactcagggcatgctaatggcagcactgccagaactcctactccagcggcagctcagtctcgtcttagcactcaggcaagtggacaaggttcacgtgcttccaaccactttggtcgaggctgtgtgaatcacattcgagctgaaaccgctcaggatgctccagacgttgtgatgggtatgttctctgtcaactccgtacccgcaatagttctgtttgattcgggagcttcccattctttcatatcacaagcttttgtgaaaagaaatggttggaaaacccaaaatttacgtgtaccaatgatagtacattcccctggaaggaatataagggcaactcaaatatgcccggaagttaaccttagaattgaggaagttgacttcctagccaaaccgatagtcctagactcgcaaagcttggacatcatcctagggatggattggttggctaagcacaaaggacagatagattgtgccgaaaagtccatcaccttgcaaggacctggaggaaagcaagtccgctttacccctaacactcctaccgcaagtcggtctatcttaacctgtttacaagtcacctccttggagtcggtgcccatagtttgtgaatatcccgacgtatttccggaagaattaacaagaatgccaccagatcgagagattgagttcgccatagaactggcaccaggcaccgcaccaattgcaaaaagaccctaccaaatggcagctaatgagttaacagaagttaaaagacaaatcggagagctggaaagtaaaggttatgtacgacctagctcatccccttggggagccccagtgcttctggttaagaaaaaggatggctctgagagaatggtaatcgactatagagccctgaatgaagtaactataaagaacaagtacccgttgccacggatcgacgatttattcgatcaacttaaaggagcaagagttttctcaaaaattgacttgaggtcaggttaccaccaactgaaaatcagatctgaagatatcccaaagaccgctttctcaacgcgttatggtctatatgagttcacagtaatgtcctttggactcaccaatgctccaacattcttcatgaacttaatgaacaaaatcttcatggaatacctggaccagtttgtcgtggtattcatcgatgacatcctgatatactccaagaacgaggaagaacatgctgaacacctgaggttgataatggaaaagctcagggatcatcaactattcgcaaaattctcgaaatgcgaattctggttagaccgagtagcatttcttggacacgtgatttcctccaatggtgtcgaagtagatcccagcaaggttgaagctgtacttgcttggaacccgcccaagaatgtgtcagagattcgcagcttcctcggcttagctggatattatcgaagattcattgaaggattctctaagctagccagacctatgaccgagctgttaaagaaggaaaagaaatttcgatggtctgcagcctgtgaagacagcttccaagaaatgaagaaaaggttgaccactgccccagttctcaccttgccagatatccgaaaagatttcgagatcttctgtgatgcatcaagacaaggcttaggatgtgtcctaatacaagaacgaaaggttgtggcctatgcatctaggcagctcaggcctcatgaagtcaattatcccacccatgatctcgaattggcagccgtggttcatgctcttaagatctggaggcactatttaatcgggaacagatgtgaagtatacaccgatcacaaaagtcttaagtatatcttcacacagaccgagttaaatatgagacagagaagatggttggaactaatcaaggattacgatcttggaatccactatcaccctggtaaagccaacgtggtcgctgatgcgctaagtcgcaagacctattgcaatgtagctcaaatacggcctgaccaagatcacctgtgcagagaattggagaagttaaggctgaccgtggtacagtcaggtgtccctgccagcttgacagtacagcctaccctagagtcgcaaatccgggaggctcagaaagacgacgaagggataaaagaattaataaaaagaatacaggagaagaaagacaccaatttctccatagacaaccaaggcacagtttggtgcggtccacgcatctgtgtaccggccaagaaggagttaagagatctcatcctaaaggaagctcatgagtccgcctattccattcatccaggaagtacgaagatgtaccaagatatcaaggcatacttctggtgggctggaatgaagcgagatgtcgcagaatacgtagccctgtgtgacatttgccaaagagtcaaggcggaacatcagaggccagctggtctgctgcaacccctaccgattcccgagtggaaatgggaagagatcggaatggatttcatcaccggtttgccaagaacccctaacgggtacgactccatctgggtaatcgtggaccgactcacgaaatcagctcatttcgtgccagtgaaaaccacctttgatggaaagaaactagcagaactctacatgacccatgtcgtatgtagatttggctgtcccaagaagatcgtgtcagatcgaggcactcagttcacctcaaggttctggaaacaattgcatgaagccctcggaaccgatctaaattttagtatggcctaccatccgcagaccgatggcacttgggatcgttgtttgccgtatgctgagttctcatacaacaacagttatcaggccagcattcatatgtcgccgaatgaggcaatgttcggaagaaagtgccacacccccttgtgctggaatgaggtgggtgaagcgctggtattcggtcctgacatactcaagtcagcagaagaacaagttaagctaatccgagaacgtttaaagacagcgcagaaccgtcagaaaagttacgctgacaatcgaaggcgtgaccttgagttcgaaaaaggagatcatgtgtacctgcgggtatcacccctccgtggtatgaggaggtttgggatgtccggcaagttagcaccccgctacatcggcccctacctcataaccgccagacgtggcgaagtggcttatcagcttgagctacctgaagatctcgcagatgtgcacaacgtgttccacgtatcccagctaaagaagtgtcttcgagttccggaagagcaagttcccctgggtaatatcgtgctggaaaagaatctgacctacaaggaaagaccgatcaaggttcttgaagaggcagaacgtcagactcgaaggaagaccatcaagttctacaaagtccaatggagcaaccattctgaagatgaggcaacctgggagcgagaagatcttctccgcgccgagttcccggagctgctcccttag

SEQ ID NO: 89662 - DNA, 163 bp, Oryza sativa
  Clone ID: PAT_MRT4530_88399C.1
aacgacagggagacggggagttcacgtgggtttgctttcgtgtcaccttctccgtccgagcaagtcgatgcgcgacagccatcgagggcatgaacaggacaaggagctcgacaggccagcaaacaatcaccgtcaacgaggcacacagtccacagccagctca

SEQ ID NO: 89663 - DNA, 1154 bp, Oryza sativa
  unsure (1)..(1154): unsure at all n locations
  Clone ID: PAT_MRT4530_8839C.1
tgcgaatttcttcatttaaattttaatttaaaatcggatttattgcgtcagccgaggggaaagggcgcgcggaccgggtccacgggagtggggcccacgcggcagccccacggtccacggtggaccgggtgcacgcggcttacaccggccggcgccgtgggccccacgcgtcagccgcacccgagggcgcgggcggctgacggccgggccccacatggcagccgcgggacgcgcccgaaggcggccacgccggcacagccgacgggaggcggcgcgcccgcgccccgatggtcgccgccggcgaccaccggcgcggcggagcggcgcccgagagaggggagggaagggggaagcgaaacggcggtccacggctcaccccgggtcgacggcgacaacggaaacggcgaccgaagcggagagaggcggcggcgcggctcgggtcgacggggacggcggcgttccggcggtcggcggtcgaaacgggggggggggggtggacgaggtcggcgaggtcgcggcggagccgaaggaggcgacgccgaaacgggagagggtccggggcgacgacggcggtggaccggagctcggcggcgacggcggagagagagaacgacggcgcgagctcgattccgacggggagagagagcggcgagtggcggaaacggtggagggaggcacggggagcgtttaaatagtgttggagggggagagaacgnccgnatgagggtgaatcggccgcggaagatccgnccgccattgatgcaccggcgaagtttgctggagtgtttccaaacgaatccgagggagagagagagagagggaaaagtggggggaaagggagagggaatcacggggagtgatttccccctctttattgcgcgcgggggcggcggaatgcggcggaatccgcggcggcggcggcgctagggcacgggcaaggcggcggttgcggcgcgaggtaggggatgacgggtgggccccacccgtcagcgagggtggcgggcgggcccgcccgtcagcggcgcgcgcgcgggggaaggccggatgggccgcgggggagaggagagagagggagggagctaggccgagccggcccaagagggggaagggggaaaaagactttttagggtttttttcttttaataaaacctttt

SEQ ID NO: 89664 - DNA, 426 bp, Oryza sativa
  Clone ID: PAT_MRT4530_883C.1
atggccgccgcgtccggcatccgcatcctgtccaagaaattcacgccgctgctgtgcagatcatcggtagcaagaactggcatggccttggctaaaaccaaccacacgagtacaccatttgtgaattctcttaatggggctaagatacctttttcatccagttccatcatcaaggacagccattcgtttcgtcaatcttggcatccaaggactccagagccaaatactgatgaagaatttacgatacaatggaggatgcgtttccttgctaattttctgttcttagtatatgccagtggatttatcgcacataagcgtaggaattaaactcataagatgaaattaggagctactagctttcaagcattgggagcccctgcctgcccacctgtcctccccagagacagagaagagcttgtaatttaa

SEQ ID NO: 89665 - DNA, 1896 bp, Oryza sativa
  Clone ID: PAT_MRT4530_88400C.1
atgacgaagccgccgtcgccaccaccgcagcagacggcggcgaccacggcgcgggggttcgaggttacctgcgtgaaggatctcctcccgctcctgcagggcgtccccgtcacgtatcgcttcgagaagcacaacgcgaagctcgaggggacggtcgccgccggcggctacgcctgcgcttgccccgcctacgcgggctgcgactaccgcggcaaggtgctgtcggcgctgcagttcgagaagcacgcgggggtgacgtcgaagaaccagaacggccacatcttcctccgcaacggccgctcgctctacgagctcttccacaagctcagggaggtgcccgccgagaaattccccgaggcattccggatggccgcgggggtgcccatgacggtgctcgccgccgcggccgccgccgccgctgaggaggcgccgcgggagcgggggcttgggccggggcctgtggcggcggagcagcccccggcctcggcgacgccccgaccgcgcccgaccatggagatgctgaccgaggaggagaaggccggtttgtctctccttggcttgagggcaagtggctcaaggaccgaaataaattccatggacggcattgaagggcttgctacagaagcgattgggaatgcaccaagcagtgaccatgcgatgcttgatgcagaagagatggggaatgcagctgctcagcgacctaggaatagtggtctttccacaaccacaactgttaaagtgccggtgacagcacgcaataaccatgcaatgcctgatgcaaatgaggtgaggaatgctgatggtggtcggtcagcaacccttgctgttaaactggaggttacatctggcagtgaccatgcaatgtctgatgcgaaagagttgaagaatgcagattatgagcaacctagggatagtgtgctggcaacaacctctgctgttaaagtgcgaattggagcagccaatgaccatgcaatgcctgatgcggaacagacaaggaatccagttcttgagcaaccttgggatagtagcatgttaataaccgctcctgttaaggtgcgggtgacagaaaccaagtatcggccagagagtatactgaaagatgtaaggggattgctgtccactggtcttcttgaaggcttcagggtaacctacaagaagaatgagataatgaatgcatgtgagtttgaacagcattccgcttcgtttcaactggaaaaggattatttcgatgatgcaccttcagatccttgttcaactcaaagctcacaagagtcgaatattgccttgacggattccttgaaagactcaaccagcaacgccagttcaatcctcaactggagttcattcaggaggcgttcagataggcagttcaaacgaggaggcactgagacttcgactccaatcttgagtagaagccctgagaaagagatatctgatctatctacaagcacttccatgaagagtgaagaaactcctagtgagaatactgcagggcttctcactactgatggtataaaacataattctgctggacctgttgcattgagatccacgtcttcagagtgtgatcccattaatatgacatttcctttgtcaatttcagttacagtaattcaagatcctccaccagaccacaatgttgactcaaattcaaaagatttggggcaaccaaaagtgaggtaccgtagcatttatacttcagacggattaacacttcatgagctggcactgaaactgcaggatggtttaagttcaaatgtaaatattgatgaactccctactcttacttcaggtgaagccctatgtcttaagtttctgggtgaattggatggtgcatacaataaaaatatggtgacagagccaggatatcctaagattgagattaggttgctgtag

SEQ ID NO: 89666 - DNA, 567 bp, Oryza sativa
  Clone ID: PAT_MRT4530_88401C.1
atggggtggggaaggaatgcgttcttctccagaattgtgactagcagtgcgggagagtacactggagagtacggcgcacgcgagctgggggagcgcggcccactaggagtgcgagcggagccgcgggagctgtgggaagacaggtggctggcgtggcaaaggcgaccggagtcccaagaggtagtgtcaactgaggcaagggtacctagcgtcagtgcagctagaaggaaggcatgggagctgctggaaggtagagcccccgaggcggtggctgtaatcgtgggccaagcgacgaagtgcagtccaggagtcctggtacgcgatctggagagtgggcctggccacagtgaagtggtgtgggcgaaggccagccccgtgtatacctccacgagggtaaaggtacaccgaaagctcacaacgagggggaacacgatccacagagtaccctgtgtactcgggacacgagaagccaaggaagcgggcgagttcacgaagctgagcgacgtggtgaccctcaccaaaaccgtgggaactgaagctggcattcactgccatctacaattttga

SEQ ID NO: 89667 - DNA, 2895 bp, Oryza sativa
  Clone ID: PAT_MRT4530_88402C.1
ttatcctaaaaaccgcgtaatcggtcttctcaagcaagtgatttctgcaccaagcttaggttcgcaaacatcaccaagggatgtgccatcagcatagaatgcttctgtcaacaagcacagcatcaatagtgcaatgtcagtactgttgttggagagattactgttgttggctagtacaagctgttcatctgacaaaatagtgtacccaagtttctcagaccagattggtgccatttcaggatcaacaggtgccgtaagaagacggacattccaggcctttaaatgcgcctcaattagacttagaagaagcgaaaaataacccttctttctgcactcattatgcgtagcaataaggacaagttctgcaacttcttctgtacgcactttcagaattgcagctgacacaacaaatgtacttgtggttaacactgcacaatagattccacgaaaatccttctctccagttgtatcctttgaattaaccatatttcttatgtcatcaatgtcctggggagctgtttctgcaaatgcatctttgaagatctcaatgacctgatgttgcacatcgctcctcatattcgttccatttaaaagttgccaacaaatgttgtatcttatccgtctgagaaaggcaatatcttccctctttttcagtccttcgtgtaaagaagcacgtagcaactggcatttctcacaacacatgaagttgaattgcgtgtattctcccaaaactttcagaggtgcctttggtttttgaagtccattgttgtagcacttaacatgcaatgctctctcacactggttacagaagacaatcatgtcaacactaataactccaagcaccgtatggggtttccgacacatataacagctctctactgtaagtactctttcttgtagtgtccgcttcaagggaacaataataggtctgctagtggtcgaatactctttgccagaacctgaagtaagagtagggagttcatcaatatttacatttgaacttaaaccatcctgcagtttcagtgccagctcatgaagtgttaatccgtctgaagtataaatgctacggtacggttgccgtcttctccccattccaacatgcttttcaaattgtgaaggagtatactgcacctctccgttcttcaacttgtaagttaacaaagtatagtctggaaggcccccctccttgaagagcatcgggtgcaaagtgttatctctcacttttggttgccccaaatcttttgaatttgagtcaacattgtggtctggtggaggatcttgaattactgtaactgaaattgacaaaggaaatgtcatattaatgggatcacactctgaagacgtggatctcaatgcaacaggtccagcagaattatgttttataccatcagtagtgagaagccctgcagtattctcactaggagtttcttcactcttcatggaagtgcttgtagatagatcagatatctctttctcagggcttctactcaagattggagtcgaagtctcagtgcctcctcgtttgaactgcctatctgaacgcctcctgaatgaactccagttgaggattgaactggcgttgctggttgagtctttcaaggaatccgtcaaggcaatattcgactcttgtgagctttgagttgaacaaggatctgaaggtgcatcatcgaaataatccttttccagttgaaacgaagcggaatgctgttcaaactcacatgcattcattatctcattcttcttgtaggttaccctgaagccttcaagaagaccagtggacagcaatccccttacatctttcagtatactctctggccgatacttggtttctgtcacccgcaccttaacaggagcggttattaacatgctactatcccaaggttgctcaagaactggattccttgtctgttccgcatcaggcattgcatggtcattggctgctccaattcgcactttaacagcagaggttgttgccagcacactatccctaggttgctcataatctgcattcttcaactctttcgcatcagacattgcatggtcactgccagatgtaacctccagtttaacagcaagggttgctgaccgaccaccatcagcattcctcacctcatttgcatcaggcattgcatggttattgcgtgctgtcaccggcactttaacagttgtggttgtggaaagaccactattcctaggtcgctgagcagctgcattccccatctcttctgcatcaagcatcgcatggtcactgcttggtgcattcccaatcgcttctgtagcaagcccttcaatgccgtccatggaatttatttcggtccttgagccacttgccctcaagccaaggagagacaaaccggccttctcctcctcggtcagcatctccatggtcgggcgcggtcggggcgtcgccgaggccgggggctgctccgccgccacaggccccggcccaagcccccgctcccgcggcgcctcctcagcggcggcggcggccgcggcggcgagcaccgtcatgggcacccccgcggccatccggaatgcctcggggaatttctcggcgggcacctccctgagcttgtggaagagctcgtagagcgagcggccgttgcggaggaagatgtggccgttctggttcttcgacgtcacccccgcgtgcttctcgaactgcagcgccgacagcaccttgcctcggtagtcgcagcccgcgtagtcggggctagcgcaggcgtagccgccggcggcgaccgtcccctcgagcttcgcgttgtgcttctcggagcgttacgtgacggggacgccctgcaggggcgggaggagatccttcacgcaggtgacttcgaacccccgctccgtgttcgccgccgtctgctgcggtggccgcgtcggcggcttcgtcat

SEQ ID NO: 89668 - DNA, 1822 bp, Oryza sativa
  Clone ID: PAT_MRT4530_88403C.1
ccgtgcggagggagcacgcggcgcgcgctagggtttggggagagagacgcggtgcacgcgcgcggttcgtggaggacgcggatgcggcgggcccacgcgcagcctcatggctcgcggtggactgcgcccgcgagcggggccggagggagcggctggccgggtcagctcgacccggtcttagccgagctggcgccgacgtggcgcctacgtggctgccacgtgggccggcgggaggtcgaagaagacgccggccggaacggacgacggacggtggctgcgaacggcggggcgaaccacggcgatacaggcgaaagagagcacaccagaaggttgcacgggttgaggggagacgagccaatggctcggattcgccggaggatgctcgacggcggcggattgcggcggcggcaaccggcggtgagagaagggggaaacggcgacgacgcgacgggagaccgattcgggcgagctagagcatctacgcggcttcgggagtctgttgctagcgtcggattgggcggagctacgccgagtgaggctggcgacgagcgggtgctacggagcacgggcggcgacggcggcgagcacacagcgagcggcggcaacggtcggggcggcaccagctagctacggggaggctagtcatgctactacccgaatctaaggggaggagatggaacgaggaggaagaacggagggaggcactaccgtgcggggcgcgcacaggctcctccggcacacgcgacggcggtggtcggcgagagggacggcaatggcgtgggtgaaaaatgggggagattgggaggagaaaaaggaagggagggcgcctgggtttataaggcggcaatgtcggtttggaaaccgaccttgggcggtcaagggagcgagccagcgctcggcggtcgcggcccaaacggcgacagggggaggggaggatgacgccggcgggagaaaaaagggaaaaagagggagagaaagggaggagggagagagggcgatgcggcagagggggagggagctctgcctccgtcccttggaagcacgcgcgaggaggggcggggccaagtcaatgacgacggcgatgacggccgggcggtttggagcggagcgacgacacgggtggcaggcgcggcaggcgctgacggtggcggcgactggccggtcggccaccatcaaacacacgcacggaggggctaactgggtgtgggtacggggagtacactggtgagtacggcgctcgcgagctgggggagcgcgggccactaggagtgcgggcagagccgcgagagctgtgggaggacaggcggctggcgtggcagaggcggcctaagtcccaagagacagtgtcaactgaggtgacaccctcctcggccagacgggcctccaaagcagcgtagcggcgagcaagggagcgggaagcctcgaggagtaggtcgtgctgagtggcctgagcctcagagagctcaaccatgcgagtcagcacaggctgagactcgctgtacgggcaagggtacctagtgtcagtgcggccagaaggaaggcgcaggagctgccgaaaggcagagcccccgaggcggtggctgtagtcgtgggccaagcgacgaagtgcagtagtgaagtggtgtgggcgaaggccagccccgtgtatacctccacgagggtaaaggtacaccgaaagctcataacgagagggaacacggtccacagagtaccccgtgtactcaggacacgagaagccaaggaagcgggcgaggtcacgaagctgagcgacgtggtgaccctcaccaaaaccgtgggaactgaagctggcgttcactgccat

SEQ ID NO: 89669 - DNA, 4716 bp, Oryza sativa
  Clone ID: PAT_MRT4530_88404C.1
atggctagccgcccccgccgtgcagcccgtgcaccagcccgctttggttttgaagatggtagagttgagccagaagaaaatcatgagtcggctaatgagcagtctcgccgcagcaaccgttcgcatcgtactgcttcccgtaacgcagaagttgagcaaccccgccgcggcagccgctcgcatcgcgcagtttcccgtgatgcagagatggaacagtctcaccgctctcaccgcactgccagtcacaattctggagaagaacgcctcccttccccacctcatgtggaaaacaacatgcaacacataatggcagttcagacacaaatcttgcaaggactaaccacagccatagccagttttcagcataatgcgcatggaaatggccaccctcacgtgggcaacaatagatccaagctgacagattttctgaggtcacgtccgccagagttctctcagaccgtcgagcccgtcgaggctgacgattggttgaaagatgttgatagaaaactcaacttagtgcagtgtactcctgttgagaagacgctctacgcctctcaccagctaagaggacctgctgcagattggtgggagaattactgcaatgcacatcctgaacccactaacattgcttgggatgagtttgctacggctttccgtgcagctcatgtgcctgaaagcactattgacatgaagaaagaagaattcaacagacttaagcaaggcaacagcagtgtcaatgagtacctaagtcagttcaacaagttggctcggtacgcccctgaggaagtagacacagataagaagaagatcaggaaattcttgaaacgaatcgcagttggaatgagactccagttgcttgctcatgacttccccacttttcaacatatgatcaacaaggcacttctgcttgaggatgccagaaaagaggctaccgaagaatacaagaaacgcaagtctaaccatcagggaaattcttcccgaggcacacctcgccctcgctacggtcaacccatgcaataccaccagtcggtcactcaggctaaccgccagccaggctacgcccctcgccctcagatgaaccgtccgacacctccgccacagcagtgtgcccctagtggcaacactgcgccaaacagtgttacctctttcaactcaccacagggaccgtcagtagttcagtgtttccggtgcaaccagatgggtcactatgctagacagtgccctcagaatcctaccaacaccaacttagggcatgctaatggcagcatcgccaaaactcctactccagcggcagctcagtctcgtcctagctctcaggcaagtggacaaggttctcgtgcttccaaccactttggtcgaggacgtgtgaatcacattcaagctgaaaccgctcaggatgctccagacgttgtgatgggtatgttctctgtcaactccgtacccgcaatagttctatttgattcaggagcttcccattctttcatatcacaagcttttgtgaaaagaaacggttggaaaacccaaaatttacgtgtaccaatgatagtacattcccctggaaggaatataagggcaactcaaatatgcccggaagttaaccttaaaattgaggaagttgacttcctagccaaaccgatagtcctagactcgcaaagcttggacatcatcctagggatggattggttggctaagcacaaaggacagatagattgtgccgaaaagtccatcaccttgcaaggacctggaggaaagcaagtccgctttacccctaacacccctaccgcaagtcggtctatcctaaccagtctacaagtcacctccttggagtcggtacccatagtctgtgaatatcccgacgtatttccagaagaattaacgagtatgccaccagaccgagagattgagttcgccatagaactggcaccagggactgcaccaattgcaaaaaggccataccgaatggcagctaatgagttagcagaagttaaaagacaaatcgaagaactggaaagtaaaggttatgtgcgacctagctcatccccttggggagccccagtgcttctggttaagaaaaaggatggctcggagagaatggtaatcgactatagagccctgaatgaagtaactataaagaacaagtacccgttgccacggattgacgatttattcgatcaacttaaaggagcaagagttttctcaaaaattgacttgaggtcaggttaccaccaactgaaaatcagatctgaagatatcccgaagaccgctttctcaacgcgttatggtctatatgagttcacagttatgtccttcggactcaccaatgctccagcattcttcatgaacttaatgaacaaaattttcatggaatacctagaccagtttgtcgtggtgttcatcgatgacatcctgatatactccaagaacgaggaagaacatgctgaacacctgaggctgataatggaaaagctcagagatcatcaactattcgctaaattctcgaaatgggaattctggttggaccgagtagcatttcttggacacgtgatctcctctaacggtgtcgaagtagatcccagcaaggttgaagctgtacttgcttggaacccgcccaagaatgtgtcagagatccgcagcttccttggcttagcgggatattatcgaagattcattgaaggattctctaagctagccagacctatgaccgagctgttaaagaaggaaaagaaatttcactggtctacagcctgtgaagacagctttcaagaaatgaagaaaaggttgaccactgcaccagttctcaccttgccagatatccgaaaagattttgagatcttctgtgacgcatcaagacaaggcttaggatgtgtcctaatgcaagaacgaaaggttgtggcatatgcatccaggcagcttaggcctcatgaagtcaattatcccacccatgatctcgagttggcaaccgtggttcatgctcttaagatctggaggcattatttaatcgggaacagatccaacgtggtcgctgacgcgctaagtcgcaaggcctattgcaatatagctcaaatacggcctgaccaagatcacctgtgcagagaattggagaagttaagactgaccgtggtacagtcaggtgtccctgctagcttgacagtacagcctaccctagagtcgcaaatccgggaggctcagaaagacgacgaagggataaaagaattaataaaaagaatacaggagaagaaagacaccaacttctccatagacgatcaaggcacagtttggtgcggtccacgcatctgtgtaccggccaagaaggagttaagagatctcatcctaaaggaagctcatgagtccgcttactccattcatccaggaagtacgaagatgtaccaagatatcaaggcatacttttggtgggttggaatgaagcgagatgtcacagaatacgtagccttgtgtgacatttgccaaagagtcaaggcagagcatcagaggccagccgcagacagccatgattccgcgtcgcgcctgctcccggcgaaagtggagattgggagcttggagtctcacctagggtccccggccgaaccggcaaaggggggcctgcgcggtctcccggtgaggagccccacgctccgtcacctaccgattcccgagtggaaatgggaagagatcggaatggatttcatcaccggtttgccaagaacccccaacgggtacgactccatttgggtaatcgtggaccgactcacgaaatcagctcatttcgtgccagtgaaaaccacctatgatggaaagaaactagcagaactctacatgacccatgtcgtatgtagatttggctgtcccaagaaaattgtgtcagaccgaggcactcagttcacctcaaggttctggaagcagttgcatgaagccctcggaactgatctaaattttagtacggcctaccatccacagaccgatggtcagacggaaagggtaaaccaaatcctagaagacatgctgcgtgcgtgtgccttggatttcgaaggcacttgggatcgttgtttgccgtatgctgagttctcatacaacaacagttatcaggccagcattcagatgtcgccgaatgaggcaatgttcggaagaaagtgccgcacccccttgtgctggaatgaggtgggcgaagcactggtattcggtcctgacatactcaagtcagcagaagaacaagttaagctgatacgagaacgtttgaagacagcacagaaccgtcataagaattacactgacaatcggaggcgtgaccttgagttcgaaaagggagatcatgtgtacctgcgggtatcacccctccgtggtatgagaaggtttgggatgtccggcaagttagcaccccgctacatcggcccctacctcataaccgccagacgtggcgaagtggcttatcagcttgagctacctgaaggtctcgcagatgtgcacaacgtgttccacgtatcccagctaaagaaatgtcttcgagttccagaagagcaagttcccctgggtaatatcgagctggaaaagaatctgacctacaaggaaagaccgatcaaggttcttgaagaggcagaacgtcagactcgaaggaagaccatcaagttctacaaagtccaatggagcaatcattctgaagatgaggcaacctgggaacgagaagatcttctccgcgccgagttcccggacctgctcccttag

SEQ ID NO: 89670 - DNA, 353 bp, Oryza sativa
  Clone ID: PAT_MRT4530_88405C.1
tcgcccacgcgttcgcccacgcgaccgaataaaccttaccataaggtgtctcttttaaatcatgagaaagcatgtgctcaatgaatagcaaaggggagaggagagatgagagagtgaagaacaactacgtaactaaagcatctttctatctctaaatctctctctatctagaacacaataacaatttagcgagaactagctagtgattattaaatatgaactcggacaagaaaaagacctatagtgagtactccacgatgagcttattcgatcaagcaaccgagcggtaggcaccaccgccatagaggctcgggttcatcaccaagctgacagcggcctggccgtgcttcatc

SEQ ID NO: 89671 - DNA, 831 bp, Oryza sativa
  Clone ID: PAT_MRT4530_88406C.1
atggcttcctccccctccgcggccgccacagagcggagcgcgaggagcacgttcccggagctggaggggttccgggtggcggcgctgcgcgggttccgccgcgtcttcgcccactccgccccgatcttcttcgagcgcggcatcgccatcgaggccaccaaggagttctcaagcttaagtgtggagccatgtgagggtgaactgatcgttgtcactgtgtttgaaataaaggaggatgaggttgttccagaaggactggatggggtgccttatgcaaatccagcagttgtctgtgcacgctatagcgatgaagaatatttccaagaagcaaggaaatatattatcagcgctatggccgatacaacattgatagaatatggagagacgatattttaccctgtcgtgcttatcttagacattgtgggtacagcccatcgatggcatgtcaaagcaagatgcatttctaaccaaaatgctattgctttgggtcatctcaaagtgagatgcatttctgaagcaaagggaaatcattgttttgaactatccattagcagcacattttctattgaaatgtcattatcagccattactttgttaggcatgttgaatcttggccattctgctattagagtcgcctttcacgatactgattgcttaatttgcagtgtcctcgctgcgaaaaatcttggagaaccagcatacagcaacttcctagaccacacctatctgggtgaccggacaaccacaataagggaatacctggccactaccggagccggcatcatggaagaggagcctccagaatcgctaaaaagccgctatggcgggtag

SEQ ID NO: 89672 - DNA, 1210 bp, Oryza sativa
  Clone ID: PAT_MRT4530_88407C.1
aactacaaatccacacaagcaaccatgagtataacccaatctgaaatttggcaatgaaaatttgcacaaccggtgaagctagcgggtgaaggagacggtggacgacgtcggcggttggggtagaggccgccggatccaactgttgccagtgcggtggaggaggctgctgccggatctggcaggtggcggtggggtggcggaggaggcgactggcggtcgggggagaggcgccagatctgcgtcccccagacgtttcgaggccgatggtcgtgacgcgggggaggcggcggcagccagcggtcgggacgcagagaaggaagtggctggcggtggggggagaggccgcggtggctggatccgtgccctgtaggccagatctggcggccgacagtcgggaggcagaggaggaagcggtcgggctgtgggggcagaggccgcggtggccagatccgcaccctataggctagatccagtggccggtggtcggaaggcgggggaggcagggccggccagtggtcgggaggcggaggaggaagcagcccacggtggccggatccgcgccccgtaggccatatccggcggccggcggtcgggggaggcggcgctggccggcgattggaaggcggaggaggaagcaaccggcggtggccgctacttgcgcgtggagtcggaggccgccgttggacccggtgctcggcgcgtgcaagctcggtgcgtgtggaggaggagagggggtcgggggaggggggagcccgacccctatcacaggagggggcgggcaccgccctacctcgggcccgatcccccctcgggggagggccacgtggcgccaggggcggcctcctccctctagtctcggtcgggacgggcccgacccccaagcgaggagggggtagccgccactccaccccgggcgccacccgctcggggaagtgccacgtgggtctgggggcagcctcttccctccaaacttgggaccctaagctgggagggggtggccgccgctccacccaggcgccacccttctcaggggatgccactcgagtttgggggcggtgtcaaaggcggagctccaccgggggatggcccgctgccatcccggctcaccgctcgactttcctacggcatgctccggtggcgacgaggtggaggggaggggagaggagtgcggcggtggtagacatattaataggacatacaaagaccacaa

SEQ ID NO: 89673 - DNA, 594 bp, Oryza sativa
  unsure (1)..(594): unsure at all n locations
  Clone ID: PAT_MRT4530_88408C.1
ggggnagtgtgcaagcgagtgggtccttgcttncgggaggaggaggaggaggaggagaatggcgacggcggcggcgtcgacccggcagcggagtcgtcgtcggcgaagctgtacgaggacgtgccggagatgccgctgatggcgctgaaccacatctcccgcctctgcaagtccatcggcgcgtgggtccgcttctacgtcaaggccctcggcttcgtcctcatccaccgccctcccgctctcgacttcaacggcgcctggcttttcaactacggagttgggatccatctcgtccagagagacgacgcgaggagagcgcccgacgtcaaccccggggacctcgaccccatggacaaccacatctccttccaatgcgaggacatggggatgatggagaagaggctgaacgagatggggatcgagtacatgaagcggaccatcaacgaggaggagggctcgcccatcgaccagctcttcttcaaggaccccgacggcttcatgatcgagatctgcaactgcgagaacctcgagctcgtccccgctggcgccttttttcttctcaggctgccccgagaccgncacaacccgccgctc

SEQ ID NO: 89674 - DNA, 400 bp, Oryza sativa
  Clone ID: PAT_MRT4530_88409C.1
cagcggggccgctccatatccccctcttcctcccgaccgtcctttccctcaccctctctctcgcctccctcgcgcgatgggtccggcgacggcgaccgcgggtggatccggcggcggtggtggcggctaaggacgcatccggcggcggcaactccctctgacccctctcgcctccctcccgcagcggatctgatggcggtggcggcgtcggccccatccccggcgcggagacgctgccgagagcggcggaaggctggctcgggagccggtcgtggcggaaggcggcgatgacaacgacggcaacggcaacgacgacggcgacgacaacgacggcggcagacgacgacgacgacggcgacagtgaccacgaggagggtgactgcaggaggcggctagggtt

SEQ ID NO: 89675 - DNA, 183 bp, Oryza sativa
  Clone ID: PAT_MRT4530_8840C.1
atgccgcatctacgtccgacagcctgcgaccaggacaatgaggaagccctaactctggggttgggccgtcccttggtagggccccaccctaacggcccaatgagagatacccaagcccgcagcagctgcagcaccgttcgctccgagagtggctgcgcgggagacggcgcgctacgagcgtga

SEQ ID NO: 89676 - DNA, 514 bp, Oryza sativa
  Clone ID: PAT_MRT4530_88410C.1
aaactagtggatcccccgggctgcaggtccatagaggatatagcacgggagcttggttttcacgggaatccatttctccaaggtcttgtggtcagcatattcattgttggagcatttttcggaagcttaggctcatctgcactagtcgacaattttggatgtaaaagaactcttcaaattgatagcattccgctgattcttggtgcacttctcagtgcacaggcagattcgttggatgagatgctcttgggaagattccttgttggcattggaattggcataaatacagtgctcgttccactatatgtctccgaggttgctccaacaaaatacaggggttctttggggactctatgtcagatcggaacatgtttgggaataatcgctgcattctcattgggaataccatctgaaagtgacccacattggtggcggacaatgctttatgctgcatgtgtacctggtgttcttattgttgctggaatgcaatttgctgttgagagtccccgctggc

SEQ ID NO: 89677 - DNA, 756 bp, Oryza sativa
  Clone ID: PAT_MRT4530_88411C.1
atggcgacggcggcgaggctgctcctcctcctcttcctcacggcggcagccagcgcgtgggagatgaacatccggttgccgacggagatgctgaacggcggcgaggccgtggtggcgccgatcatccacgcgctgcggccgctgctgggctccggcgggcagctggcggcgcgcgccggcgtggcgtgcgacagctggaggctaggcgtggaggcacacaacgtgatcgggtggaagacggccatcgcctacgccgagagcctccagctctccggcaacggcaaggagatctgggtgttcgacatcgacgagacctccctctccaacctcccctactacgccaagcacggattcggagctacactgtacaatgatacgagcttccgcgaatacgtggcggaagggagcgcgccggcgctgccggagacgaggcggttgtaccggcggctgctccagctcggcgtcaagccggtgttcctgacgggccgcaccgaggaccaaaggaacatcaccgtcacaaacctccgccggcagggatactccgggtggatggagttgttgctcaagccagcagtgcacgccgccggcgagctccaggggtccgccgttgcatacaagtccggcgagcggcaaaagctggaggatgccggtttcaccatcctcggtaacattggtgaccaatggagtgacatcctcggtacaccggagggcgcccgcaccttcaagctgccggaccccatgtactacatcggctag

SEQ ID NO: 89678 - DNA, 371 bp, Oryza sativa
  Clone ID: PAT_MRT4530_88412C.1
gggcattcggcaaggttccatgattcatcattgaaaaacccgaggaaacccgcttggccaggcaaccacaacttttgaacaccccagggggaaaaaccagatttactaacccccccactaaattaggtaaacagggcctttgggtgggatttgacaaggtgagccctccaaagcaaagggaaactgggaaggggaaagggacccgacccccagagttcaattcaaaagtttaaaaacaactgatagcaagggccatctgctaaaaaaggcctccctggggagcaagcccgaacaggtccataggaatggcaggagggctatcccttgggggaaacatgaaaaccgccctgtacaggggatccccctccttg

SEQ ID NO: 89679 - DNA, 603 bp, Oryza sativa
  Clone ID: PAT_MRT4530_88413C.1
cccaatgtcagtgagcagtactgcagacagacaatctggattgctctctctatccgctactgctgcgtatgggactctggcgggtgcctcacgcacgcgcaaaacgccgacgagatcctcctccgccgcggtgtgcttctctcctcaccgacgctactgccaccgtcgtcgtcggccgtgacagctggtggctccaccgccaccattgccggggagggctccacctccgattccgggctctctgggatacctccggcggcgtctcctcctccgccgccgctgccgttgtcgtggcgacggaatgagcgtggtgaggacaatgagcgtggtgaggacaatggcaacgacgacgacgcggcgcctcgcggcgtcgacggcgccagcggcgagactacgatggcggcgaacgccgccgttggcgaggggccctgcttgaggtcgagcgccttgagcgggtcgtccaaggtgcgccccgacgagccctgccgccggaacgacaccgacgacctctgcatcttcgatatcgaccgacgaccggtttccattatcactcggcaaaatgtacgtgaattctgcgtgaatttggtgcaaatttggagctaa

SEQ ID NO: 89680 - DNA, 174 bp, Oryza sativa
  Clone ID: PAT_MRT4530_88414C.1
gtgggcccacctcctgcgtggtggtgggtcccaccaacacacgcattcaatgccaccctcatccagagggcgacgtgggtggggccaatgaggcccatcctttttgtagacgagaggagagagagagagagagagtacgagagtcgtcgctggcgcggacgctgaggctacgcg

SEQ ID NO: 89681 - DNA, 507 bp, Oryza sativa
  Clone ID: PAT_MRT4530_88415C.1
atgcagaattccacatccccgctgtatacaccgagatcaaccggtcagaacatgctcatactccgccaaccctctcttcagaacatgctcatactccgccaaccctctcttctctgcaagaggcatcctccccaattccccattgttatatctgttgctggtaagaccgttgccagcgtggttgtgtcagaccgaacagactctgcactcgccatcctcacgaacgactccagggcctccgaaccaggaagcccggccggccatcagcgtgttccacataacggtatccggcgactgcacagtgtcgaacaccttgcgtgcgtggtcacctctggacagcatgaagcgtacaggctacagcttggccaatgcggacgccacgaacgtgtcggcggcgtaacccgcgcgtgcagcgcgccgcgcgcgggctgcggagtcggttggagacgacacgccgccgccatgagagcaatgagcgaggtggcggcgaaggcgaaggagaagtag

SEQ ID NO: 89682 - DNA, 5463 bp, Oryza sativa
  Clone ID: PAT_MRT4530_88416C.1
atggcagtgaacgccagcttcagttcccacggttttggtgagggtcaccacgtcgctcagcttcgtgacctcacccgtttccttggcttctcgtgtcccgagtacacggggtactccgtggaccgcgttccccctcactgtgagctctctgtgtacctttacccccgtggaggtatacacggagctggccttcgccctcaccacttcactgtggccaggcccactctccagatcgcgtaccaggacctctcctggactgcgcttcgtcgcctggcccacgactacagccaccgtctcggaggctccgccttccggcagcttccacgccttccatctggccactcagacgccagatacccttgtccgtacagcgagtctcagccagtgctgactcgcatggttgagctttcggaggctcaggccactcagcacgaccttctccttgaggcttaccgctcccttgcacgtcgctacgccgccttggaggcccgtctggccgaggagggtgtcacctcagttgacactatctcctgggactcaggacgcctctgccacgccagccacctgtcctcccacagctcccgcggctctgcccgcactcccagtggcccgcgctcccccagctcgcgtgcgccgtactctccagtgtactccccctacccacacccagttagcccttcctacactccaggacacaccccagttgcttcctcccgccgtggcccacgctttatccgcactgcgcggaagcgtgttgttggttcttccaccgtgttccgtttccaccacccagctcccccaccgccagcagcccgtgctgctgccggccctcgacagatggctagccgcccccgccgtgcaactcgtgcaccagcccgcttgggtttcgaagatggtagagtcgaagcagaagcaaatcatgaacccgctaatgagcagtctcaccacagcaaccgttcgcaccgtaccgctccccgcaacgcagaagttgagcaaccccgccgcagcaaccgctcgcatcgcacagtttcccgtgatgcagaaatggagcagtctctccgctctcaccgcactgccagtcacagttctggagaagaacgtatcccttccccacctcatgtggaaaacaacatacaacacataatggcagtacagacacaaatcttgcaaggactaaccacagccatagccagttttcagcataatgcgcatggaaatggccaccctcacgtgggcaataatagatccaagctgacagactttctgaggtcacgtccgccagagttctctcagaccgtcgagcctgtcgaggctgacgattggttgaaagatgttgatagaaaactcaacttagtgcagtgtactcctgttgagaagacgctctacgcctctcaccagctaagaggacctgccgcagattggtgggagaattactgcaatgcacaccctgaacccactaacattgcttgggatgagttcgctacggctttccgtgcagctcatgtgcccgaaagcactattgatatgaagaaagaagaatttaacagacttaagcaaggcaacagcaatgacaatgagtacctaagtcagttcaacaagttggctcggtacgcccctgaggaagtaaacaccgataagaaaaagatcaggagattcttgaaaggaatcgcagttggaatgagactccagttgcttgttcatgacttccccacttttcaacatatgatcaacaaagcacttctacttgaagatgccagaaaagaggccaccgaagaatacaagaaacgcaagtctaaccaccagggaaattcttcccgaggcgcacctcgccctcgctacggtcaacccatgcaatatcaccagtcggtcactcaggctaaccgccagccaggttacgcccctcgccctcagatgaaccgtccggcaccccagccacagcagcgtgcccctagtggcaatacggcgccaaacagtgttacctctttcaagtcaccgcagggaccgtcagtagttcagtgtttccggtgcaaccagatgggtcactatgccagacagtgccctcagaatcctaccaacaccaactccgggcatgctaatggcagcaccgccagaactcctactccagcggcagctcagtctcgtcctagctctcaggcaagtggacaaggatctcgtgcgtccaacaacttcggtcgaggacgtgtgaatcacattcaagctgaaaccgctcaggatgctccagacgttgtgatgggtatgttctctgtcaactccgtacccgcaatagttctatttgattcaggagcttcccattctttcatatcacaagcttttgtgaaaagaaatggttggaaaacccaaaatttgcgtgtaccaatgatagtacattcccctgggaggaatataagggccactcaaatatgcccggaagttaaccttagaattgaggaagttgacttcctagccaaaccgatagtcctagactcgcaaagcttggacatcatcctaggaatggattggttggctaagcacaaaggacagatagattgtgccgaaaagtccatcaccttgcaaggacctggagggaagcaagtccgctttacccctaacacccctaccgcaagtcgaatgccaccagaccgagagatcgagttcgccatagaactggcaccaggcacagctccaattgcaaaaagaccctaccgaatggcagctaatgagttagcagaagtcaaaagacaaattgaagagttggagagtaaaggttatgtgcgacctagttcatccccttggggagccccagtgcttctggttaagaaaaaggatggctctgagagaatggtaatcgactatagagccctgaatgaagtaactataaagaacaagtacccgttgccacggattgacgatttattcgatcaacttaaaggagcaagagttttctcaaaaattgacttgaggtcaggttaccaccaattgaaaatcaggtctgaagatatcccgaagaccgctttctcaacgcgttatggtctatatgagttcacagtaatgtccttcggactcaccaatgctccagcattcttcatgaacttaatgaacaaaatctttatggaatacctggaccagtttgtcgtggtattcatcgatgacatcctgatatactctaagaacgaggaagaacatgctgagcacctgaggctgataatggaaaagcttagagatcatcaactattcgctaaattctcgaaatgcgaattctggttagaccgagtagcatttcttggacacgtaatctcctccaacggtgtcgaagtagatcccagcaaggttgaagctgtacttgcttggaacccgcccaagaatgtgtcagagattcgcagcttccttggcttagctggatattatcgaagattcattgaaggattctctaagctagccagacctatgaccgagctgttaaagaaggaaaagaaatttcaatggtctgcagcctgtgaaggcagctttcaagaaatgaagaaaaggttgaccactgccccagtacttaccttgccagatatccgaaaagatttcgagatcttctgtgatgcatcaagacaaggcttaggatgtgtcctaatgcaagaacgaaaggttgtggcctatgcatccaggcagctccggcctcatgaagtcaattatcccacccatgatctcgagttggcagccgtggttcatgctcttaagatctggaggcactatttaatcgggaacagatgtgaagtatacaccgatcacaaaagccttaaatatatcttcacacagaccgagttaaatatgagacagagaagatggttggaactaatcaaggattacgaccttggaatccactatcatcctggtaaagccaacgtggtcgccgatgcgctaagtcgcaaggcctattgcaatgtagctcaaatacggcctgaccaagatcatctgtgcagagaattggagaagttaaggctgaccgtagtacagtcaggagtcccagccagcttgacagtacagcctaccctagagtcgcaaatccgggaggctcagaaagatgacgaagggataaaagagttaataaaaagaatacaggagaagaaagacaccaatttctccatagacgatcaaggcacagtttggtgcggcccacgcatctttgtaccggccaaggagttaagagatctcatcctaaaggaagctcatgagtccgcttactccattcatccaggaagtacgaagatgtaccaagatatcaaggcatacttctggtgggctggaatgaagcgagatgtcgcagaatacgtagccttgtgtgacatttgccaaagaatcaaggcagagcatcagaggccagctggtctgctgcaacccctaccgattcccgagtggaagtgggaagagatcggaatggatttcatcaccggtttaccaagaacccccagcgggtacgactccatttgggtaatcgtggaccgactcacgaaatccgcacatttcgtgcccgtaaaaaccacctatgatgggaagaagctagcagaactctacatgacccatgtcgtatgtagatttggctgtcccaagaaaattgtgtcagaccgaggcactcagttcacctcaaggttctggaagcagttgcatgaagccctcggaactgatctgaattttagtacggcctaccatccgcagaccgatggtcagacagaaagagtaaaccaaatcctagaagacatgctacgagcgtgtgccttggatttcgaaggcacttgggatcgttgtttaccgtacgcggagttctcatacaacaacagttatcaggccaacattcagatgtcgccgaatgaggcaatgttcggaagaaagtgccgcactcccttgtgctggaatgaggtgggcgaagccctggtattcggtcctgacatactcaagtcagcagaagaacaagttaagctaatccgaggacgattaaagacagcgcagaaccgtcagaagaactacgctgacaatcggaggcgtgaccttgagttcgaaacaggagatcatgtatacctgcgggtatcacccctccgtggtatgaagaggtttgggatgtccggcaagttagcaccccgctacatcggcccctacctcataaccgccagacgtggcgaagtggcttatcagcttgagctacctgaaggactcgcagatgtgcacaacgtgttccacgtatcccagctaaagaaatgtcttcgagttccagaagagcaagttctcctgggtaatatcgagctggaaaggaatctgacctacaaggaaagaccgatcaaggttcttgaagaggcagaacgtcagactcgaaggaagaccatcaagttctacaaagtccaatggagcaatcattctgaagatgaggcaacatgggaacgagaagatcttctccgcgccgagtttccggagctgctcccttag

SEQ ID NO: 89683 - DNA, 369 bp, Oryza sativa
  unsure (1)..(369): unsure at all n locations
  Clone ID: PAT_MRT4530_88417C.1
gctgggggtgtgtttttttttttatttttttttttttttttattacttttttttttattatttttttcaccatttgtttttatactttctctgtcaaatgaaatcctatttttttatcaacccctcatattcatacacacatctatctttattggggttagtacgggggctaaaantcctannataacctatccaccacaaaacaccaactgtccccccccaaatgaccaccttttttatttcttttcacctaacctccacaccctccaattcccttttcccccanccccccaacacctcacccatnnnttccccaacctcnntnncacaccaccccctccccctncctccaaccatctttttaaaccc

SEQ ID NO: 89684 - DNA, 5199 bp, Oryza sativa
  Clone ID: PAT_MRT4530_88418C.1
atggctagccgcccccgccgtgcagctcgtgcaccagcccgctttggttttgaagatggtagagttgaagcagaagcaaatcatgaatcagctaatgagcagtctcaccacagcaaccgttcacaccatactgtttcccgcaacgcagaggttgagcaaccccgccgcagcaaccgctcgcatcgcacagttttccgtaatgcagagatggaacaatctcaccgctctcaccgcactgccagtcacaattctggagaagaacgccttccttccccacctcatgtggaaaacaacatgcagcacttaatggcagttcagacacaaatcttgcagggattaaccacagccatagccagttttcagcataatgcgcatggaaatggccaccctcacgtgggcaacaatagatccaagctgacagactttctgaggtctcgtccgccagagttctctcataccgtcgagcccgtcgaggctgacgattggctaaaagatgttgatagaaaactcaacttagtgcagtgtactccggttgagaagacgctctacgcctctcaccagctaagaggacctgctgcagattggtgggagaattactgcaatgcacaccctgaacccactaacattgcttgggatgagtttgctatggctttccgtacagctcatgtgcctgaaagcgctattgatatgaagaaagaagaattcaacagacttaagcaaggcaacagcagtgtcaatgagtacctaagtatgttcaacaagttggctcggtacgcccctgaggaagtggacaccgacgagaagaagatcaggaaattcttgaaaggaatcgcagttggaatgagactccagttgattgctcatgatttccccacttttcaacatatgatcaacaaggcacttctactcgaggatgctagaaaagaggctaccgaagaatacaagaaacgcaagtctaaccatcagggaaattcttcccgaggcgcacctcgccctcgctacggacaacccatgcaataccaccagtcggtcactcaggctaaccgccagccaggttacgcccctcgtcctcagatgaaccgtccggcacctcagccacagcagcgtgcccctagtggcaatactgcgccaaacagtgttacctcgttcaagtcaccacagggaccgacagtagttcagtgtttccggtgcaaccagatgggtcactatgctagacagtgccctcagaaccctaccaacaccagctcagggcatgcgaatggcagcactgccagaactcctacccagcggcagctcagtctcgtcctagctctcaggcaagtggacaaggatgcttcagacattgtgatgggtatgttctctgtcaactccatacccgcaatagttctggttgattcgggagcttcccattctttcatatcacaagcttttgtgaaaagaaatggttggaaaacccaaaatttgcgtgtaccaatgatagtacattcccctggaaggaatataagggcaactcaaatatgcccggaagttaaccttagaattgaggaagttgacttcctagccaaaccgatagtcctagactcgcaaagcttggacatcatcctagggatggattggttggctaagtacaaaggacagatagattgtgccgaaaagtccatcaccttgcaaggacctggaggaaagcaagtccgctttacccctaacactcctaccgcaagtcggtctatcttaacctgtttacaagtcacctcattggagtcggtgcccatagtttgtgaatatcccgacgtatttccggaagaattaacaagaatgccaccagaccgagagattgagttcgccatagaactggcaccaggcaccgcaccaattgcaaaaagaccctaccgaatggcagctaatgagttagcagaagttaaaagacaaatcgaagagctggaaagtaaaggttttgtgcgacctagctcatccccttggggagccccagtgcttctggttaagaaaaaggatggctctgagagaatggtaatcgactatagagccctgaatgaagtaactataaagaacaagtacccgttgccacggatcgacgatttattcgatcaacttaaaggagcaagagttttctcaaaaattgacttgaggtcaggttaccaccaactgaaaatcagatctgaagatatcccaaagaccgctttctcaacgcgttatggtctatatgagttcacagtaatgtccttcggactcaccaatgctccagcattcttcatgaacttaatgaacaaaatcttcatggaatacctggaccagtttgttgtggtattcatcgatgacatcctgatatactccaagaacgaggaagaacatgctgaacacctgaggttgataatggaaaagctcagggatcgtcaactattcgcaaaattctcgaaatgcgaattctggttagaccgagtagcatttcttggacacgtgatttcctccaatggtgtcgaagtagatcccagcaaggttgaagctgtacttgcttggaacccgcccaagaatgtgttagagattcgcagcctcctcggcttagctggatattatcgaagattcattaaaggattctctaagctagccagacctatgaccgagctgttaaagaaggaaaagaaatttcaatggtctgcagcctgtgaagacagcttccaagaaatgaagaaaaggttgaccactgccccagttctcaccttgccagatatccgaaaagatttcgagatcttctgtgatgcatcaagacaaggcttaggatgtgtcctaatgcaagaacgaaaggttgtggcctatgcctccaggcagctcaggcctcatgaagtcaattatcccacccatgatctcgagttggcagccgtggttcatgctcttaagatctggaggcactatttaatcgggaacagatgtgaagtatacaccgatcacaaaagtcttaagtatatcttcacacagaccgagttaaatatgagacagagaagatggttggaactaatcaaggattacgatcttggaatccactatcaccctggtaaagccaacgtggtcgctgatgcgctaagtcgcaaggcctatcacaatgtagctcaaatacggcctgaccaagatcacctgtgcagagaattggagaagttaaggctgaccgtggtacagtcaggtgtccctgccagcttgacagtacagcctaccctagagtcgcaaatccgggaggctcagaaagacgacgaagggataaaagaattaataaaaagaatacaggagaagaaagacaccaatttctccatagacaaccaaggcacagtttggtgcggtccacgcatctgtgtaccggccaagaaggagttaagagatctcatcctaaaggaagcttatgagtccgcctattccattcatccaggaagtacgaagatgtaccaagatatcaaggcatacttctggtgggctggaatgaagcgagatgtcgcagaatacgtagccctgtgtgacatttgccaaagagtcaaggcggaacatcagaggccagctggtctgctgcaacccctaccgattcccgagtggaaatgggaagagatcggaatggatttcatcaccggtttgccaagaacccctaacgggtacgactccatctgggtaatcgtggaccgactcacgaaatcagctcatttcgtgccagtgaaaaccacctttgatggaaagaaactagcagaactctacatgacccatgtcgtatgtagatttggctgtcccaagaagatcatgtcagatcgaggcactcagttcacctcaaggttctggaaacaattgcacgaagccctcggaaccgatctaaattttagtacggcctaccatccgcagaccgatggtcagactgaaagggtaaaccaaatcctagaagacatgctacgtgcgtgtgccctggatttcgaaggcacttgggatcgttgtttgccgtatgctgagttctcatacaacaacagttatcaggccagcattcagatgtcgccgaatgaggcaatgttcggaagaaagtgccgcacccccttgtgctggaatgaggtgggcgaagcgctggcattcggtcctgacatactcaagtcagcagaagaacaagttaagctaatccgagaacgtttaaagacagcgcaggaccgtcagaaaagttacgctaacaatcgaaggcgtgaccttgagttcgaaaaaggagatcatgtgtacctgcgggtatcacccctccgtggtatgaggaggtttgggatgtccggcaagttagcaccccgctacatcggcccctacctcataaccgccagacgtggcgaagtggcttatcagcttgagctacctgaaggtctcgcagatgtgcacaacgtgttccacgtatcccagctaaagaaatgtcttcgagttccagaagagcaagttcccctgggtaatatcgtgctggaaaagaatctgacctacaaggaaagaccgaccaaggttcttgaagaggcagaacatgatataattgttgctagttcaacacagagtgcagtatcagctttgttgcaggatcttaaggaggattttgcactaaaggatttgggtgatttgcactatttccttggaatagaagtgaacaaggtaaatgatgggttgctactatctcaaggaaagtacactgctgacttgcttaagaaaaccaatatgagtgattgcaaaccttttaacacacctttatcaacatcagagaaactctctctacatgagggagatttacttgggtctagtgatgccacacagtatagaagcatagtaggggctctgcaatacttaactttgactagacctgatatctccttctcagtgaataaggtgtgtcagtttttacatgctcctactacagttcattgggcaacagtgaagaggattttaagatatttgaagtatacagccagtctaggacttaagtttgaaaaatcaaagtctggtcttgttagtgcttttacagatgcagattgggctggatcccttgatgacaggagatctactggaggctttgctatttatcttggctccaaccttgtgtcatggagtgcaagaaaacaggcaacagtgtctagatcaagcactgaagcggaatacaaagcacttgctaatgtaactgcagaattgatgtggatatag

SEQ ID NO: 89685 - DNA, 5448 bp, Oryza sativa
  Clone ID: PAT_MRT4530_88419C.1
atgggcggatgtgagatggcagtgaacgccagcttcagttcccacggttttggtgagggtcaccacgtcgctcagcttcgtgacctcacccgtttccttggcttctcgtgtcccgagtacacggggtactccgtggaccgtgttccccctcactgtgagctctccgtgtacctctaccctcgtggaggtatacacggagctggccttcacccccaccacttcaccgtggccaggcccactctccagatcgcgtaccaggacctttcctggactgcgcttcgtcgcctagcccacgactacagccaccgtctcggaggctccgccttccggcagcttccacgccttccttctggccactcagacgccaggtacccttgtccgtacagcgagtctcagccagtgctgactcgcatggttgagctttcggaggctcaggccactcagcacgacctactccttgaggcttaccgctccctggcccgccgctacgccgctttggaggcccgtctggccgaggagggtgtcacctcagttgacactatctcctgggactcaggccgcctctgccacgccagccacctgtcctcccacagctcccgcggctctgcccgcactcccagtggcccgcgctcccccagctcgcgtgcgccgtactcaccagtgtactccccctacccacacccagttagcccttcctacacccccggacacaccccagttgtttcctcccgccgtggtccacgctttatccgcactgcgtggaagcgtgttgttggttcttccaccgtgttccgtttccaccacccagctcccccaccgccagcggcccgcgctgctgccggccctcgacagatggctagccgcccccgccgtgcagctcgtgcgccagcccgcttcggttttgaagaaggtagagtcgaaccagaagcaaatcatgaatcagctaatgagcagtctcaccgcagcaaccgttcgcaccgtactgtttccggcaatgcagaagttgagcaaccccgccgtagcaaccgctcgcatcgcacagcttcccgtgatgcagaaatggaacagtctcaccgctctcaccgcactgccagtcataattctggagaagaacgcctcccttccccatctcatgtggaaaacaacatgcaacacttaatggcagttcagacacaaatcttgcaaggaatagccgcagccgtagccggttatcagcataatgcgcatggaaatggccaccctcacatgggcaacaatagatccaagctgacagattttctgaggtcacgtccgccagagttctctcagaccgtcgagcccgtcgaggctgacgattggttgaaagatgttgatagaaaactcaacttagtgcagtgtactccggtcgagaagacgctctacgcctctcaccagctaagaggacctgctgcagattggtgggagaattactgcaatgcacaccctgaacccactaacattgcttgggatgagtttgctacggctttccgtgcagctcatgtgcctgaaagcaccattgacatgaagaaagaggaattcaacagacttaagcaaggcaacagcagtgtcaatgagtacctaagtatgttcaacaagttggctcggtacgcccctgaggaagtggactcagataagaagaagatcaggaaattcttgaaaggaatcgcagttggaatgagactccagttgctagcgcatgacttccccacttttcaacatatgatcaacaaggcacttctacttgaggatgccagaaaagaggctaccgaagaatacaagaaacgcaaatctaaccaccaggggaattcctcccgaggcgcacctcgccctcgctacggtcaacccatgcaataccaccagtcggtcactcaggctaaccgccagccaggctacgcccctcgtcctcagatgaaccgcccggcaccccagccacagcagcgtgcccctagtggcaatactgcgccaaacagtgttacctctttcaagtcaccacagggaccatcagcagttcagtgtttccggtgcaaccagatgggtcactatgctagtgccctcagaattctaccaacaccaactcagggcatgctaatggcagcactgccagaactcctactccagcggcagctcagtctcgtcctagcactcaggcaagtggacaaggatgctccagacgttgtgatgggtatgttctctgtcaactccatacccgcaatagttctgtttgattcgagagcttcccattctttcatatcacaagcttttgtgaaaagaaatggttggaaaacccaaaatttacgtgtaccaatgatagtacattcccctggaaggaatataagggcaactcaaatatgcccggaagttaaccttagaattgaggaagttgacttcctagccaaaccgatagtcctagactcgcaaagcttggacatcatcctagggatggattggttggctaagcacaaaggacagatagattgtgccgaaaagtccatcaccttgcaaggacctggaggaaagcaagtccgctttacccctaacactcctaccgcaagtcggtctatcttaacctgtttacaagtcacctccttggagtcggtgcccatagtttgtgaatatcccgacgtatttccggaagaattaacaagaatgccactagaccgagagattgagttcgccatagaactggcaccaggcaccgcaccaattgcaaaaagaccctaccgaatggcagctaatgagttagccgaagttaaaagacaaatcgaagagctggaaagtaaaggttatgtgcgacctagctcatccccttggggagccccagtgcttctggttaagaaaaaggatggctctgagagaatggtaatcgactatagagccctgaatgaagtaactataaagaacaagtacccgttgccacggatcgacgatttattcgatcaacttaaaggagcaagagttttctcaaaaattgacttgaggtcaggttaccaccaactgaaaatcagatctgaagatatcccaaagaccgctttctcaacgcgttatggtttatacgagttcacagtaatgtccttcggactcaccaatgctccagcattcttcatgaacttaatgaacaaaatcttcatggaatacctggaccagtttgtcatggtattcatcgatgacatcctgatatactccaagaacgaggaagaacatgctgaacacctgaggttgataatggaaaagctcagggatcatcaactattcgcaaaattctcgaaatgcgaattctggttagaccgagtagcatttcttggacacgtgatttcctccaatggtgtcgaagtagatcccagcaaggttgaagctgtacttgcttggaacccgcccaagaatgtgtcagagattcgcagcttcctcgacttagctggatattatcgaagattcattgaaggattctctaagctagccagacctatgaccgagctgttaaagaaggaaaagaaatttcaatggtctgcagcctgtgaagacagcttccaagaaatgaagaaaaggttaaccactgccctagttctcaccttgccagatatccgaaaggatttcgagatcttctgtgatgcatcaagacaaggcttaggatgtgtcctaatgcaagaacgaaaggttgtggcctatgcatccaggcagctcaggcctcatgaagtcaattatcccacccatgatctcgagttggcagccgtggttcatgctcttaagatctggaggcactatttaatcgggaacagatgtgaagtatacaccgatcacaaaagtcttaagtatatcttcacacagaccgagttaaatatgagacagagaagatggttggaactaatcaaggattacgatcttggaatccactatcaccctggtaaagccaacgtggtcgctgatgcgctaagtcgcaaggcctattgcaatgtagctcaaatacggcctgaccaagatcgcctgtgcagagaattggagaagttaaggctgaccgtggtacagtcaggtgtccctgccagcttgacagtacagcctaccctagagtcgcaaatccgggaggctcagaaagacgacgaagggataaaagaattaataaaaagaatacaggagaagaaagacaccaatttctccatagacaaccaaggcaaagtttggtgcggtccacgcatctgtgtaccggccaagaaggagttaagagatctcatcctaaaggaagctcatgagtccgcctattccattcatccaggaagtacgaagatgtaccaagatatcaaggcatacttctggtgggctggaatgaagcgagatgtcgcagaatacgtagccctgtgtgacatttgccaaagagtcaaggcggaacatcagaggccagctggtctgctgcaacccctaccgattcccgagtggaaatgggaagagatcggaatggatttcatcaccagtttgccaagaacccctaacgggtacgactccatctgggtaatcgtggaccgactcacgaaatcagctcatttcgtgccagtgaaaaccacctttgatggaaagaaactagcagaactctacatgacccatgtcgtatgtagatttggctgtcccaagaagatcgtgtcagatcgaggcactcagttcacctcaaggttctggaaacaattgcatgaagccctcggaaccgatctaaattttagtacggcctaccatccgcagaccgatggtcagactgaaagggtaaaccaaatcctagaagacatgctacgtgcgtgtgccctggatttcgaaggcacttgggatcgttgtttgccgtatgctgagttctcatacaacaacagttatcaggccagcattcagatgtcgccgaatgaggcaatgttcggaagaaagtgccgcacccccttgtgctggaatgaggtgggcgaagcgctggtattcggtcctgacatactcaagtcagcagaagaacaagttaagctaatccgagaacgtttaaagacagcgcagaaccgtcagaaaagttacgctgacaatcgaaggcgtgaccttgagttcgaaaaaggagatcatgtgtacctgcgggtatcacccctccgtggtatgaggaggtttgggatgtccggcaagttagcaccccgctacatcggcccctacgtggcgaagtggcttatcagcttgagctacctgaagctaaagaaatgtcttcgagttccagaagagcaaattcccctgggtaatatcgtgctgaaaaagaatctgacctacaaggaaagaccgatcaaggttcttgaagaggcagaacgtcagactcgaaggaagaccatcaagttctacaaagtccaatggagcaaccattctgaagatgaggcaacctgggagcgagaagatcttctccgcgccgagtttctggagctgctcccttag

SEQ ID NO: 89686 - DNA, 497 bp, Oryza sativa
  Clone ID: PAT_MRT4530_8841C.1
gcaccacctcctcctgatgaggccgcgcgccgccttctcctctcgccctccccctctctcatcctccccgtgccgccgcgcccttcccaccaccgccatcgcctcgcgcctcctctgctcccaccacgcctcgtcgccgcccgaagatgcctccgcctccgcctcgccctccatcgtcgccgacctgctcgactacctcaacgagtcatggacgcagttccacgccaccgcggaggcgaagaggcagctgcttgatgcgggcttcacgctgctcagtgagaacgacgactgggacctgcagcctggtggccgctacttcttcacgcgcaacatgtcctgcttgattgcctttgcagtaggggaaaagtacaaattgggaaatgggttcaatataattgcggctcacaccgatagcccatgtctcaagctgaaaccaaggtctgcctcctttaaatctgggcatcaaatggtaaatgtacagacatacggaggtgggc

SEQ ID NO: 89687 - DNA, 451 bp, Oryza sativa
  Clone ID: PAT_MRT4530_88420C.1
ataagtttggcttgccaaatcaattggagagctagctatatagatgtttggagagtccaatttagagagactgttggagatgctctaagtaagttggtgtgaaatggaatggagaaggcccaaggttctgaagttggttctgatttctgagaatcaggcttatgccattctggttgggattacccacaaaacaagtatacagtcccttctgttgtccgggcatacgtccctctcaatagagtggaccaacaacatacacaccggttttagggcatgtttggagcagcttctagcagccgcagcttctcacataatctccagcttctctaaacagtttagattgtcacctagattcttagaatctgtagttgtataatacagaaaatgtactagaatccaaaagctggaaaacccagcttcttctaattctaaaaaaaaaaaaaaaaaaaaa

SEQ ID NO: 89688 - DNA, 6034 bp, Oryza sativa
  Clone ID: PAT_MRT4530_88421C.1
atggggagggaaggagaaggggaggccgggggtttaaggaggcggcaatgtcggtttggggaaccgacttgcgcggtcaagagcgcgagctggcgctcggctagcggccaaattggcgacagggaggatgacgccggcggagaggcgtgcgcagaggctgacggcggcggcgaccgggcggtcggccacgcgcgcgcggctcgcaacgggaaggcgcggcggatggtgcggcgcggctcggcacgcgcgctggctgcggggccgagcggctgcaggctgcagggcggcagggcagcgggaccgggcggcatccacgcgggcgcgcgcgagcaacggcccgcggggagcggcagcgagggatggggagacggagagcgaggggggggcgctcggggcggcgcgcgagcagcgcgccacgacggaacgggcgctacagaccaacccccctaacaagaatctcgtccccgagattcagcacctaagggagcagctccggaaactcggcgcggagaagatcttctcgttcccaggttgcttcatcttcagaatgattgctccattggactttgtagaacttgattgtcttccttcgagtctgacgttctgcttcttcaagaaccttgatcggtctttccttgtaggtcagattcttttccagctcgatattacctaggggaacttgctcttctggaactcgaagacatttctttaactgggatacgtggaacacgttgtgcacatctgcgagaccttcaggtagctcaagctgataagccacttcgccacgtctggcggttatgaggtaggggccgatgtagcggggtgctaacttgccggacatcccaaaccttctcattcctcggagtggtgatacccgtaggtacacatgatctcctttttcgaactcaaggtcacgcctccgattgtcagcgtaattcttctgacggttctgtgctgtcctcaaacgttctcgtatcagcttaacttgttcttctgctgacttgagtatgtcaggaccgaataccaaggcttcgcccacctcattccagcacaagggagtgcggcaccttcttccgaacattgcctcattcggcgacatctgaatgctggcctgataactgttgttgtatgagaactcggcatacggcaaacaacgatcccaagtgccttcgaaatccaaggcacatgctcgcagcatgtcttctaggatctggtttactctttctgtctgaccatcggtctgcgggtggtaggccgtactaaaattcagatcagttccgagtgcttcatgcaattgcttccagaaccttgaggtgaactgagtgcctcgatccgacactattttcttgggacagccaaatctacatacgacatgagtcatgtagagttctgctagtttctttccatcataggtggtcttcactggcacgaaatgtgctgacttcgtgagtcggtccacgattacccaaatggagtcgtatccgctgggggttcttggcaaaccggtgatgaaatccattccgatctcttcccatttccactcgggaatcggtaggggttgtagcagtccagctggcctttggtgttctgccttgactctttggcaaatgtcacacaaggctacgtattctgcgacatctcgcttcattccagcccaccaaaagtatgccttgatatcttggtacatcttcgtacttcctggatgaatggagtaagcggactcatgagcttcctttaggatgagatttcttaactccttcttggccggtacacagatgcgtggaccgcaccaaattgtgccttgatcgtctatggagaaattggtgtctttcttctcctgtattctttttattaattcttttatcccttcgtcgtctttctgagcctcccggatttgcgactctagggtaggctgtactgtcaagctggcagggacacctgactgcaccacggtcagccttaacttctccaattctctgcacaggtgatcttggtcaggccgtatttgagctatattgcaataggccttgcgacttagcgcatcagcgaccacgttggctttaccaggatgatagtggattccaagatcgtaatccttgattagttccaaccatcttctctgtctcatatttaactcggtctgagtgaagatatacttaagacttttgtgatcggtgtatacttcgcatctgttccctattaagtagtgcctccagatcttaagagcatgaatcacggctgccaactcgagatcatgggtggggtaattgacttcatgaggcctgagctgcctggatgcataggccacaacctttcgttcttgcattaggacacatcctaagccctgtcttgatgcatcacagaagatctcgaagtcttttcggatatctggcaaggtgagaactggggcagtggtcaatcttttcttcatttcttgaaagctgtcttcacaggctgtggaccattgaaatttcttttccttctttaacagctcggtcataggtctggctagcttagagaatccttcaatgaatcttcgataatatccagctaagccgaggaagctgcgaatctccgacacattcttgggcgggttccacgcaagtacagcttcaactttgctgggatctacttcgacaccgttggaggagatcacgtgaccaagaaaagctactcggtccaaccagaattcgcatttcgagaatttagcgaatagttgatgatctctgagcttttccattatcagcctcaggtgttcagcatgttcttcctcattcttagagtatatcaggatgtcatcgatgaataccactacaaactggtccaggtattccataaagattttgttcattaagttcatgaagaatgctggagcattggtgagtccgaaggacattactgtgaactcatatagaccataacgcgtcgagaaagcggtcttcggaatatcttcagatctgattttcagttggtggtaacctgacctcaagtcaatttttgagaagactcttgctcctttaagttgatcgaataagtcgtcaatccgaggcaacgggtacttgttctttatagttacttcattcagggctctatagtcaattaccattctctcagagccatcctttttcttaaccagaagcactggggctccccaaggggatgagctaggtcgcacataacctttactttccagttcttcgatttgtcttttaacttctgctaactcattagcggccattcggtagggtctttttgcaattggagctgtgcctggtgccagttctatggcgaactcaatctctcggtctggtggcattcttgttaattcttccggaaatacgtcgggatattcacagactatgggcaccgactccaaggaggtgacttgcaaacaggttaggatagaccgacttgcggtaggggtgttaggggtaaagcggacttgctttcctccaggtccttgcaaggtgatggacttttcggcacaatctatctgtcctttgtgcttagccaaccaatccatccctaggatgatgtccaagctttgcgagtctaggactatcggtttggctaggaagttaacttcctcaattctaaggttaacttccgggcatatttgagttgcccttatattccttccaggggaatgtactatcattggtacacgcaaattttgggttttccaaccatttcttttcacaaaagcttgcgatatgaaagaatgggaagctcccgaatcaaacaggactattgcgggtacggagttgacagagaacatacccatcacaacgtctggagcatcctgagcggtttcagcttgaatgtgattcacacgtcctcgaccaaagtggttggaagcacgagaaccttgtccacttgcttgagagctaggacgagactgagctgccgctggagtaggagttctggcagtgctgccattagcatgtcctgggctggtgttggtaggattctgaggacactgtctagcatagtgacccatctggttgcaccggaaacactgaactgctgacggtccctgtggtgacttgaaggaggtaacactgtttggcgcagtgttgccactaggggcacgctgctgtggcggaggtgccggacggttcatctgaggacgaggggcgtagcttgactggcggttagcctgagtgaccgactgatggtattgcatgggctgaccgtagcgagggcgaggtgcgcctcgggaagaatttccctgatggttagacttgcgtttcttgtattcttcggtggcctcttttctggcatcctcaagtagaagtgctttgttgatcatatgttgaaaagtggggaagtcatgagcaagcaactggagtctcattccaactgcgattcctttcaagaatttcctgatctttttcttatcggtgtctacttcctcaggggcgtaccgagccaacttgttgaactgacttaggtactcattgacactgctgtggccttgcttgagtctgttaaattcttctttcttcatgtcaatagtgctttcaggcacatgagctacacggaaagccgtagcgaactcatcccaagcaatgttagtgggttcaggatgtgcattgcagtaattctcccaccaatctgcggcaggtcctcttagctggtgagaggcgtagagcgtcttctcaacaggagtacactgcactaagttgagttttctatccacatctttcaaccaatcgtcagcctcgacgggctcgatggtctgagagaactctggtggacgtgacctcagaaagtctgtcagcttggatctattgttgcccacgtgagggtggccatttccatgcgcattatgctgaaagctggctatggctgtggttagaccttgcaagatctgtgtctgaactgccattatgtgttgcatgttgttttccacatgaggtggggaagggaggcgttcttctccagaattgtgactggcagtgcggtgagagcggtgagactgctccaactctgcttcacgggaaactgtgcgatgcgagcggctgctgcggcgaggttgctcaacctctgcgttgcgggaaacagtacggtgcgaacggttgctgtggtgagaatgctcattagctggttcgtgatttgcttctgcttcaactctaccatcttcaaaaccaaagcggactggtgcacgagctgtacgacgggggcggctagccatctgtcgagggccggcagcagcacgggccgctggcggtgggggagctgggtggcggaaacggaacacggtggaagaaccaacaacacgcttccgcgcagtgcggataaagcgtgggccacggcgggaggaagcgactggagtgtgtccgggggtgtaggaagggctaactgggtgtgggtagggggagtacactggtgagtacggcgcacgcgagctgggggagcgcgggccactgggagtgcgagcagagccgcgggagctgtgggaggacaggtggctggcgtggcagagacggcctgagtcccaagagatagtgtcaactgaggtgacaccctcctcggccagacgggcctccaaggcggcgtagcggcgggcaagggagcggtaagcctcaaggagtaggtcgtgctgagtggcctgagcctccgaaagctcgaccatgcgagtcagcactggctgagactcgctgtacggacaagggtatctggcgtctgcgtggccagaaggaagacgtggaagctgccggaaggcggagcctccgagacggtggccgtagtcgtgggccaggcggcgaagcgcagtccaggagaggtcctggtacgcgatctggagagtgggcctggccacagtgaagtggtgggggcgaaggccaactccgtgtatacctccacgagggtaaaggtacacagagagctcacagtgagggggaacacggtccacggagtaccccgtgtactcgggacacgagaagccaaggaaacgggcgaggtcacgaagctgggcgacgtggtgaccctcaccaaaaccgtgggaactgaaactggcgttcactgccat

SEQ ID NO: 89689 - DNA, 492 bp, Oryza sativa
  Clone ID: PAT_MRT4530_88422C.1
tgttcttcgacgtcgctcccggcacctgtcgcccccgacgacgcccaacctggaccaggagatggcgctcaaccgctcggcgtccaccaggaaccggtgaacagtggcgcgccactgctgtcccgcacccgtacatgacaaatgtgagcggcgcatcagccattccatggcacatctgatcatctcccttggggaattgcaaacagctccagtggaaggaagaggaaatgtacagatcatagacggttattagggattgataatgctgaaacgctcttgcatctatctggctgatcttgttctagtcatggcaacgaaacagagtggtgttgttcactgctagtgagtgagtttccatacagcatacatgtaactgtaagtagcaggatttgacggaacttgatattgggcattgtaatttgtacaaataatcgggttttgcttcttcagaaacagatgcaggatcacgcctaaaaaaaaaaaaaaaaaaaa

SEQ ID NO: 89690 - DNA, 442 bp, Oryza sativa
  Clone ID: PAT_MRT4530_88423C.1
atgtgttctaattttttttattttttttttcaacctttcattatttcatttctgttacaacatgcacttttgtattgctgatgatttatttcaaaaaccatcctgagcaatccaagcctaagattgacattgctgggggatgcactcacagatatgacacgggggctctcgtgggcatgactagagaacgaacacacctaactcatctgcccaattgggctggagccaactagctccttgaagggagaaacgataggcataagctacaacatcggcaggaagtgcgcggaagatggaaccctttcatgccatggggccaaccatggagtcagggttggaagaaaatgcaatatatgagcatccttgcgtttgggccattataatgaatacatgggggaggggaataatcagaagctggccaagacggagctctccatcaaac

SEQ ID NO: 89691 - DNA, 5447 bp, Oryza sativa
  Clone ID: PAT_MRT4530_88424C.1
gcgccacgacggaacgggcgctacagaccaacccccctaacaagaatctcgaccccgagattcagcacctaagggagcagctccgggaactcggcgcggagaagatcttctcgctcccaggttgcctcatcttcagaatgattgctccattggaccttgtagaacttgatggtcttccttcgagtctgacgttttgcctcttcaagaaccttgatcggtctttccttgtacgtcagattcttttccagctcgatattacccagggggacttgctcttctggaactcgaagacatttctttagctgggatacgtggaacacgttgtgcacatctgcgagaccttcaggtaactcaagctgataagccacttcgccacgtctggcggttatgaggtaggggccgatgtagcggggtgctaacttgccggacatcccaaacctcctcataccacggaggggtgatacccgcaggtatacatgatctcctttttcgaactcaaggtcatgccttcgattgtcagcgtaattcttctgacggttctgtgctgtcttcaaacgttctcgtatcagcttaacttgttcttctgctgacttgagtatgtcaggaccgaatatcagcgcttcgcccaccctttctgtctgaccatcggtctgcggatggtaggccgtactaaaatttagatcagttccgagagcttcatgcaactgcttccagaaccttgaggtgaactgagtgcctcgatctgacacaattttcttgggacagccaaatctacatacgacatgggtcatgtagagttctgctagtttctttccatcataggtggttttcactggcacgaaatgagctgatttcgtgagtcggtccacgattacccaaatggagtcgtacccgttgggggttcttggcaaaccggtgatgaaatccattccgatctcttcccatttccactcgggaatcggtaggggttgcagcagaccagctggcctctgatgctctgccttgactctttggcaaatgtcacacaaggctacgtattccgcgacatctcgcttcattccggcccaccagaagtatgccttgatatcttggtacatcttcgtacttcctgggtgaatggagtaggcggactcatgagcttcctttaggatgagatctcttaactccttcttggccggtacacagatgcgtggaccgcaccaaactgtgccttgatcgtctatggagaaattggtgtctttcttctcctgtattctttttatcaactcttttatcccttcgtcgtctttctgagcttcccggatttgcgactctagggtaggctgtactgtcaagctggcagggacacctgactgtaccacggtcagccttaacttctctaattctctgcacaagtgatcttggtcaggccgtatttgagctacattgcaataggccttgcgacttagcgcatcagcgaccacgttggctttaccaggatgatagtggattccaagatcgtaatccttaattagttccaaccatcttctctgtctcatatttaactcggtctgtgtgaaaatatacttaagacttttgtgatcggtgtatacttcacatctgttcccgattaaataatgcctccagatcttaagagcatgaaccacggctgccaactcaagatcatgggtgggataattgacttcatgaggcctgagctgcctggatgcataggccacaacctttcgttcctgcattacgacacatcctaagccttgtcttgatgcatcacagaagatctcgaaatcttttcggatatctggcaaggtgagaactggggcagtggtcaaccttttcttcatttcttgaaagctgtcttcacaggctgcagaccattgaaatttcttttccttctttaacagctcggtcataggtctggctagcttagagaatccttcaatgaatcttcgataatatccagctaagccaaggaaactgcgaatctctgacacattcttgggcgggttccaagcaagtacagcttcaaccttgctgggatctacttcaacaccgttgggggagatcacgtgtccaagaaatgctactcggtctaaccagaattcgcatttcgagaattttgcgaatagttgatggtccctgagcttttccattatcaacctcaggtgttcagcatgttcttcctcgttcttagagtatatcagaatgtcatcgatgaataccacgacaaactggtccaggtattccatgaagattttgctcattaagttcatgaagaatgctggagcattggtgagtccgaaggacataactgtgaactcatatagaccataacgcgttgagaaagcggtcttcggaatatcttcagatctgattttcagttgatggtaacctgacctcaagtcaatttttgagaagactcttgctcctttaagttgatcgaataaatcgtcaatccgtggcaacgggtacttgttctttatagttacttcattcagggctctatagtcgattaccattctctcagagccatcctttttcttaaccagaagtactggggctccccaaggggatgagctaggtcgcacataacctttactctccaactcttcgatttgtcttttaacttctgctaactcattagctgccattcggtagggtctttttgcaattggagctgtgcctggtgccagttctatggcgaactcgatctctcggtctggtggcattcttgttaattcttccagaaatacgtcgggatattcatagactatgggcaccgactccaaggaggtgacttgtaaacaggttaggatagaccgacttgcggtaggggtgttaggggtaaagcggacttgctttcctgcaggtccttgcaaggtgatggacttttcggcacaatctatctgtcctttgtgcttagccaaccaatccatccctagaatgatgtccaagctttgcgagtctaggactatcggtttggctaggaagtcaacttcctcaattctaaggttaacttccgggcatatttgagttgcccttatattcctcccaggggaatgtactatcattggtacacgcaatttttgggttttccaaccatttcttttcacaaaagcttgcgatatgaaagaatgggaagctcccgaatcgaacagaactattgcgggtacggagtcgacagagaacatacccatcacagcgtctggagcatcctgagcggtttcagcttgaatgtgattcacacggcctcgaccaaagtggttggaagcacgagaaccttgtctacttgcctgagagctaggacgagactgagctgccgctggagtaggagttctggcggtgctgccattagcatgccctgagttggtgttggtaggattctgagggcactgtctagcatagtgacccatctggttgcaccggaaacactgaactgctgacggtccctgtggtgacttgaaagaggtaacactgtttggcgcagtgttgccactaggggcacactgctgtggcggaggtgccggacggttcatctgagggcgaggggtgtagcctggctggcggttagcctgggtgaccgactggtggtattgcatgggttgaccatagcgagggcgaggtgtgcctcgggaagaatttccctgatggttagacttgcgtttcttgtattcttcggtagcctcttttctggcatcctcaagcagaagtgccttgttgatcatatgttgaaaagtggggaagtcatgagcaagcaactggagtctcattccaactgcgattcccttcaagaatttcctgatcttcttcttatctgtgtctacttcctcaggggcgtaccgagccaacttgttgaactgacttaggtactcattgacactgctgttgccttgcttaagtctgttgaattcttctttcttcatgtcaatagtgctttcaggcacatgagctgcacggaaagccgtagcgaactcatcccaagcaatgttagtgggttcagggtgtgcattgcagtaattctcccaccaatctgcggcaggtcctcttagttggtgaaaggcgtagagcatcttctcaacaggagtacactgcactaagttgagttttctatcaacatctttcaaccaatcgtcagcctcgacgggctcgacggtctgagagaactctggcggacgagacctcagaaagtctgtcagcttggatctgttgttgcccatgtgaggatggccatttccatgcgcattatgctgaaaactggctatggctgtggttagtccttgcaagatttgtgtctgaactgccattaagtgttgcatgttggtttccacatgaggtggggaagggaggcgttcttctccagaattgtgactggcagtgcggtgagagcggtgagactgttccatctctgcatcacgggaaactgtgcgatgcgagcggctgctgcggcggggttgctcaacctctgtgttgcgggaaacagtacgatgcgaacggttgctgtggtgagactgctcattagctgattcatgattttcttctggctcaactctaccatcctcaaaaccaaagcgggctggtgcacgagctgcacggcggggacggctagccatctgtcgagggccggcagcagcacgggccgctggcggtgggggagctgggtagtggaaacggaacacggtggaagaaccaacaacacgcttccgcgcggtgcggataaagcgtgggccacggcgggaggaagcaactggggtgtgtccgggggtgtaggaagggctaactgggtgtgggtagggggagtacactggtgagtacggcgcacgcgagctgggggagcgcgggccactgggagtgcgggcagagccgcgggagctgtgggaggacaggtggctggcgtggcagaggcggcctgagtcccaagagatagtgtcaactgaggtgacaccctcctcggccagacgggcctccaaagcggcgtagcggcgggcaagggagcggtaagcctcaaggagtaggtcgtgctgagtggcctgagcctccgaaagctcgaccatgcgagtcagcactggctgagactcgctgtacggacaagggtacctggcgtctgagtggccagagggaaggtgtggaagctgccggaaggcggaacctccgagacggtggctgtagtcgtgggccaggcgacgaagcgcagtccaggagaggtcctggtacgcgatctggagagtgggcctggccacagtgaagtggtgggggcaaaggccagctccgtgtatacctccacgggggtaaaggtacaccgagagctcacagtgagggggaacacggtccacggagtaccccgtgtactcgggacatgagaagccaaggaaacgggcgaggtcacgaagctgggcgacgtggtgaccctcaccaaaaccgtgggaactgaagctggcgttcactgccatcat

SEQ ID NO: 89692 - DNA, 5600 bp, Oryza sativa
  Clone ID: PAT_MRT4530_88425C.1
atgggccggccggcccaaaaggcggcccagagcgcgcacgggaggggaggagagaggggaccggtggaccaggctcaccgcgcgcggtcccggcctcacggctcgcggtggatcgcgcgcacgcggagggaccgaccggggtcggcccgacccggtctggcccttggaggctagcgcgcggagtggtgatacccgcaggtacacatgatctcctttttcgaactcaaggtcacaccttcgattgtctgcgtaattcttctgacggtgtgctgtcttcaaacgttctcgtatcagcttaacttgttcttcagctgacttgagtatgtctggaccgaataccagtgcttcgcccacctcattccagcacaagggggtgcggcactttcttccgaacattgcctcattcggcgacatctgaatgctggcctgataacttgaggtgaactgagtgcctcggtctgacacaattttcttgggacagccaaatctacatacgacataggtcatgtagagttctgctagtttctttccatcataggtgattttcactggcacgaaatgagctgatttcgtgagtcggtccacgattacccaaatggagtcgtatccgttgggggttcttggcaaaccggtgatgaaatccattccgatctcttcccatttccactcgggagtcggtaggggttgcagcagaccaactggcctctgatgttccgccttgactctttggcaaatgtcacacagggctacgtattctgtgacatctcgcttcattccagcccaccagaagtatgccttgatatcttggtacatcttcgtacttcctggatgaatggaataggcggactcatgagcttccttgaggatgagatctcttaactccttcttggccggtacacagatgcgtggaccgcaccaaactgtgccttggttgtctatggagaaattggtgtctttcttctcctgtattccttttattaattcttttatcccttcgtcgtctttctgagcctcccggatttgcgactctagggtaggctatactgtcaagctggcagggacacctgactgtaccacggtcagccttaacttctccaattctctgcacaggtgatcttggtcaggccgtatttgagctacattgtgataggccttgcgacttagcgcatcagcgaccaccttggctttaccagggtgatagtggattccaagatcgtaatccttgattagttccaaccatcttctctgtctcatatttaactcagtctgtgtgaagatatacttaagactttggtgatcagtgtatacttcacatctgttcccgattaaatagtgcctccagatcttaagagcatgaaccacggctgccaactcgagatcatgggtgggataattgacttcatgaggcctgagctgcctggatgcataggccacaacctttcgttcttgcattaggacacatcctaagccttgtcttgatgcatcacagaagatctcgaaatcttttcggatatctggcaaggtgagaactggggcagtggtcaaccttttcttcatttcttggaagctgtcttcacaggctgcagaccattgaaatttcttttccttctttaacagctcggtcataggtctggctagcttagagaatccttcaatgaatcttcgataatatccagctaagccgaggaagctgcgaatctctgacacattcttgggcgggttccaagcaagtacagcttcaaccttgctgggatctacttcgacaccattggaggaaatcacgtgtccaagaaatgctactcggactaaccagaattcgcatttcgagaattttgcgaatagttgatgatccctgagcttttccattatcaacctcaggtgttcagcatgttcttcctcgttcttggagtatatcaggatgtcatcgatgaataccacaacaaactggtccaggtattccatgaagattttgttcattaagttcatgaagaatgctggagcattggtgagtctgaaggacattactgtgaactcatatagaccataacgcgttgagaaagcggtctttgggatatcttcagatctgattttcagcattctctcagagccatcctttttcttaaccagaagcactggggctccccaaggggatgagctaggtcgcacataacctttactttccagctcttcgatttgtcttttaatttctgctaactcattagctgccattcggtagggtttttttgcaattggtgcggtgcctggtgccagttctatggcgaactcaatctctcggtctggtggcattcttgttaattcttccggaaatacgtcgggatattcacaaactatgggcaccgactccaaggaggtgacttgtaaacaggttaagatagaccgacttgcggtaggagtgttaggggtaaagcggacttgctttcctccaggtccttgcaaggtgatggacttttcggcacaatctatctgtcctttgtgcttagccaaccaatccattcctaggatgttgtccaagctttgcgagtctaggactatcggtttggctaggaagtcaatttcctcaattctaaggttaacttccgggcatatttgagttgcccttatattccttccaggggaatgtactatcattggtacacgtaaattttgggttttccaaccatttcttttcacaaaagcttgtgatatgaaagaatgggaagctcccgaatcaaacagaactattgcgggtacggagttgacagagaacatacccatcacaacgtctggagcatcctgagcggtttcagcttgaatgtgattcacacggcctcgaccaaagtggttggaagcacgtgaaccttgtccacttgcttgagtgctaggacgagactgagctgccgctggagtaggagttctggcagtgctgccattagcatgccctgagttggtgttggtaggattctgagggcattgtctggcatagtgacccatctggttgcaccggaaacactgaactgctgacggtccctgcggtgacttgaaagaggtaacactgtttggcgcaatattgccactaggggcacgctgctgtggctggggtgccgggcggttcatctgaggacgaggggcgtagcctggctggcggttagcctgagtgaccgactggtggtattgcatgggttgaccgtagcgagggcgaggtgcgccttgggaggaattcccctggtggttagatttgcgtttcttgtattcttcggtagcctcttttctggcatcctcaagtagaagtgctgcgattcctttcaagaatttcctgatcttcttcttatctgagtccacttcctcaggggcgtaccgagccaacttgttgaacatacttaggtactcattgacactgctgttgccttgcttaagtctgttgaattcctctttcttcatgtcaatggtgctttcaggcacatgagctgcacagaaagccgtagcaaactcatcccaagcaatgttagtgggttcagggtgtgcattgcagtaattctcccaccaatctgcagcaggtcctcttagctggtgagaggcgtagagcgtcttctcgaccggagtacactgcactaagttgagttttctattaacatctttcaaccaatcgtcagcctcgacgggctcgacggtctgagagaactctggcggacgtgacctcagaaaatctgtcagcttggatctattgttgcccatgtgagggtggccatttccatgcgcattatgctgataaccggctacggctgcggctattccttgcaagatttgtgtctgaactgccattaagtgttgcatgttgttttccacatgaggtggggaagggaggcgttcttctccagaattgtgactggcagtgcggtgagagcggtgagactgttccatctctgcatcacgggaagctgtgcgatgcgagcggttgctgcggcggggttgctcaacctctgcgttgcgggaaatagtacggtgcgaacggttgctgtggtgagactgctcattagctgattcatgatttgcttctgcttcaactctaccatcttcaaaaccaaagcgggctcctgtagtcggctcctcagtcgaagaaacgtcgatcggctgacgcgaagggaccggcggaacctgtcgagggccggcagcagcacgggccgctggcggtgggggagctgggtagtggaaacggaacacggtggaagaaccaacaacacgcttccgcgcggtgcggataaagcgtgggccacggcgggaggaagcaactggggtgtgtccgggggtgtaggaagggctaactgggtgtgggtagggggagtacactggtgagtacggcgcacgcgagctgggggagcgcgggccactgggagtgcgggcagagccgcgggagctgtgggaggacaggtggctggcgtggcagaggcggcctgagtcccaagagatagtgtcaactgaggtgacaccctcctcggccaaacgggcctccaaagcggcgtagcggcgggcaagggagcggtaagcctcaaggagtaggtcgtgctgagtggcctgagcctccgagagctcaaccatgcgagtcagcactggctgagactcgctgtacggacaagggtacctggcgtctgagtggccagaaggaaggcgtggaagctgccggaaggcggaacctccgagacggtgggcgatctggagagtgggcctggccacagtgaagtggtgggggcgaaggccagctccgtgtatacctccacgggggtaaaggtacacagagagctcacagtgagggggaacacggtccacggagtaccccgtgtactcgggacacgagaagccaaggaaacgggcgaggtcacgaagctgagcgacgtggtgaccctcaccaaaaccgtgggaactgaagctggcgttcactgccatctgttaatcgataccagtcccaggaaacagtgctggtatcacaggaagatagaatatcacagcaacagaggtctctttattatagagtaggagtacagtcatgttgggctgtggacagatcccgagctcacaactgcattacaaaaggaaagcggaagccaggactagaccaaacaacacaggcgcgacttgggaactaggccgagaccctaaaactcatcgtagccggcttgctcctggaagaactcctcatcagcaggatccgcttcatcttcttcagcaacgtgcgcggtcccgggtgggacccgcttgtcagcggctcggctcaccgtgcggagggagcacgcggcgcacgcgcgcgggcgggggagggacgcggtgcacgcgcgcggtctgcggaggaacggatgcggcgggcccacgcgcagcctcacggctcgcggtggaacacgcgcacggaaggggctgaccggggtcggcccgtcccgacctcggctgagctggcgcacggcgatacctgtcaggtcgtccccttcctccagccacccgcctccgacggcaaccgccgccgaatccgccacgccgccgcctcctccgctcttcccgcgcccacgccgcgccgctcccgcgtcctccccacgtcgccgcctcttcccccgcat

SEQ ID NO: 89693 - DNA, 1023 bp, Oryza sativa
  Clone ID: PAT_MRT4530_88426C.1
ccacgcgtccgctcgatcgtatcgtatagtcgtctgtacaaaccaaccgacgcgatcgtactacgctagctaagacaggatgagcagcgagaatggagagaacggacacggcgccgccgacgaggtggtggagccgtatcagcagacgccgcggcccgggccgaagctgaacgagaggatcctctcgtcgctgtcgcggaggtccgtcgccgcgcacccgtggcacgacctcgagatcggccctgatgctcccgccgtgttcaacgtcgtcgtggagatcaccaaggggagcaaggtgaagtacgagctggacaagaagacggggctcatcaaggttgatcggattctatactcgtccgtggtctaccctcacaactacggtttcattccgagaacgctttgcgaggacaacgaccccatggatgtccttgtcctcatgcaggaaccagttcttcctggttcattcctccgagccagggccattggtctcatgcctatgattgaccagggagagaaggatgacaagatcatagctgtctgcgccgatgatcctgagtaccgccatttcaataatctcagcgagctttctcctcatcgccttcaggaaatccggcgcttctttgaagactacaagaagaatgagaacaaggaggttgctgtcaatgacttcttgcctgctccgacagctcgtgaagcaatccagtactctatggatctgtacgcacagtacattctgcagagcttgaagcggtagagcgtattccaattttttgatttacgaattcttcccgtgagctcaagcaaagagtggctctgcagaacagttaagatctgatgcatagccaagttatatgggttatgtatgtcaacaaatcattgctcccccccccccccccagagatgtattagtctgtatttcggcattactcatttggaaatttgtttcaaggcttgtgctttgatctatgtacttctatttgttattggaaaaggaattaatatggcgattggtgttacttcgct

SEQ ID NO: 89694 - DNA, 5556 bp, Oryza sativa
  Clone ID: PAT_MRT4530_88427C.1
ctaagggagcaagtccgggaactcggcgcggagaagatcttctcgctcccaggttgcctcgtcttcggaatgattgctccattggactttgtagaacttgatggtcttccttcgagtctgacgttctgcctcttcaagaaccttgatcggtctttccttgtaggtcagattcttttccagctcgatattacctaggggaacttgctcttctggaactcgaagacatttctttaactgggatacgtggaacacgttgtgcacgtctgcgagaccttcaggtagctcaagctgataagccacttcgccacgtctggcggttatgaggtaggggccgatgtagcggggtgctaacttgccggacatcccaaaccttctcataccacggaggggtgatactcgcaggtacacatgatctcccttttcgaactcaaggtcacgtctccgattgtcagcgtaatttttctgacggttctgcgctgtctttaaacgttctcggatcagcttaacttgttcttctgctgacttaagtatgtcaggaccgaataccagggcttcgcccacctcatcccagcacaagggggtgcggcactttcttccgaacattgcctcattcggcgacatctgaatgctggcctgataactgttgttgtatgagaactcagcatacggcaaacaacgatcccaagtgccttcgaaatccaaggcacacgcacgtagcatgtcttctaggatttggtttaccctttcggtctgaccatcggtctgcggatggtaggctgtactaaaattcagatcagttccgagggcttcatgcaactgcttccagaaccttgaggtgaactgagtgcctcggtccgacactattttcttgggacagccaaatctacatacgacatgagtcatgtagagttctgctagtttctttccatcataggtggttttcactggcacgaaatgagctgacttcgtgagtcggtccacgattacccagatggagtcgtacccgctgggggttcttggcaaaccggtgatgaaatccattccgatctcttcccatttccactcgggaatcggtaggggttgcagcagaccagctggcctctgatgttccgccttgactctttggcaaatgtcacacagggctacgtattctgcgacgtctcgcttcattccagcccaccagaagtatgccttgatatcttggtacatcttcgtacttcctgggtggatggagtaggcggactcatgagcttcctttaagatgagatctcttaactccttcttggccggtacacagatgcgtggtccgcaccaaactgtgccttgatcgtctatggagaaatttgtgtctttcttctcctgtattctttttattaattcttttatcccttcgtcgtctttctgagcctcccggatttgcgactctagggtaggctgtactgtcaagctggcagggacacctgactgtaccacggtcagtcttaacttctccaattctctgcacaggtgatcttggtcaggccgtatttgagctacattgcaataggccttgcgacttagcgcatcagcgaccacgttggctttaccaggatgatagtggattccaagatcgtaatccttgattagttccaaccatcttctctgtctcatatttaactcggtctgagtgaagatatacttaagacttttgtgatcggtgtatacttcacatctgttcccgattaaataatgcctccagatcttaagagcatgaaccacggctgccaactcgagatcatgggtgggataattaacttcatgaggcctgagctgcctggatgcataggccacaacctttcgttcttgcattaggacacatcctaagccttgtcttgatgcatcacagaagatctcgaaatcttttcggatatctggcaaggtgagaactggggcagtggtcaaccttttcttcatttcttgaaagctgtcttcacaggctacagaccattggaatttcttttccttctttaacagctcggtcataggtctggctagcttagagaatccttcaatgaatcttcgataatatccagctaagccaaggaaactgcgaatctctgacacattcttgggcgggttccaagcaagtacagcttcaaccttgctgggatctacttcgacaccgttgggggagatcacgtgtccaagaaatgctactcggtctaaccagaattcgcattttgagaattttgcgaatagttgatggtccctgagcttttccattatcaacctcaggtgttcagcatgttcttcctcgttcttagagtatatcaggatgtcatcgatgaataccacgacaaactggtccagatattccataaagattttgttcattaagttcatgaagaatgctggagcattggtgagtccgaaggacattactgtgaactcatatagaccataacgcgttgagaaagcggtcttcgggatatcttcagatctgattttcagttggtggtaacctgacctcaagtcaatttttgagaaaactcttgctcctttaagttgatcgaataaatcgtcaatccgtggcaacgggtacttgttctttatagttacttcatttagggctctatagtcgattaccattctctcagagccatcctttttcttaaccagaagcactggggctccccaaggggatgagctaggtcgcacataacctttactttccagttcttcgatttgtcttttaacttctgctaactcattagctgccattcggtagggtctttttgcaattggagctgtgcctggtgccagttctatggcgaactcgatctctcggtctggtggcattcttgttaattcttccggaaatacgtcgggatattcacagactatgggcaccgactccaaggaggtgacttgtaaacaggttaggatagaccgacttgcggtaggggtgttaggggtaaagcggacttgctttcctccaggtccttgcaaggtgatggacttttcggcacaatctatctgtcctttgtgcttagccaaccaatccatccctagaatgatgtccaagctttgcgagtctaggactatcggtttggctaggaagtcaacttcctcaattctaaggttaacttccgggcatatttgagttgcccttatattccttccaggggaatgtactatcatcggtacacgcaaattttgggttttccaaccatttcttttcacaaaagcttgcgatatgaaagaatgagaagctcctgaatcaaacagaactattgcgggtacggagttgacagagaacatacccatcacaacgtctggagcatcctgagcgatttcagcttgaatgtgattcacacgtcctcgaccaaagtggttggacgcacgagaaccttgtccacttgcctgagagctaggacgagactgagctgccgctggagcaggagttctggcagtgctgccattagcatgccctgagttggtgttggtaggattctgaggacactgtctggcatagtgtcccatctggttgcaccggaaacactgaactgctgacggtccctgtggtgacttgaaagaggtaacactgtttggcgcagtattgccactaggggcacgctgctgtggctgaggtgccggacggttcatctgaggacgaggggcgtagcctggctggtggttagcctgagttaccgactggtgatattgcatgggttgaccgtagcgagggcgaggtgcgcctcgggaagaatttccctgatggttagacttgcgtttcttgtattcttcggtagcctcttttctggcatcctcaagtagaagtgccttgttgatcatatggtgaaaagtggggaagtcatgagcaagcaactggagtctcattccaactgcgatccctttcaagaatttcctgatcttcttcttatctgtgtccacttcttcaggggcgtaccgagctaacttgttgaactgacttaggtactcattgacactgctgttgccttgcttaagtctgttgaattcttctttcttcatgtcaatagtgctttcaggcacatgagctgcacggaaagccgtagcaaactcatcccaagcaatgttagtgggttcagggtgtgcattgcagtaattctcccaccaatctgcagcaggtcctcttagctggtgagaggcgtagagcgtcttctcaacaggagtacactgcactaagttgagttttctatcaacatctttcaaccaatcgtcagcctcgacgggctcgacggtctgagagaactctggcggacgtgacctcagaaaatctgtcagcttggatctattgttgcccacgtgagggtggccatttccatgcgcattatgctgaaaactggctatggctgtggttagtccttgcaagatttgtgtctgaactgtcattatgtgttgcatgttgttttccacatgaggtagggaagggaggcgttcttctccagaattgtgactggcagtgcggtgagagcggtgagactgtcccatctctgcatcacgggaaactgtgcgatgcgagcggttgctgcggcggggttgcccaatctctgcgttgcgggaaacagtatggtgcgaacggttgctgtggtgtgactgctcattagccgactcatgattttcttctggctcaactctaccatcttcaaaaccaaagcgggctggtgcacgggctgcatggcgggggtggctagccatctgtcgagggccggcagcagcacgggccgctggcggtgggggagctgggtggcggaaacggaacacggtggaagaaccaacaacacgcttccgcgcagtgcggataaagcgtgggccacggcgggaggaagcaactggggtgtgtccgggggtgtaggaagggctaactgggtgtgggtagggggagtacattggtgagtacggcgcacgcgagctgggggagcgcgggccactgggagtgcgggcagagccgcgggagctgtgggaggacaggtggctggcgtggcagaggcggcctgagtcccaggagatagtgtcaactgaggtgacaccctcctcggccaggcgggcctccaaggcggcgtagcggcgggcaagggagcggtaagcctcaaggagtaggtcgtgctgagtggcctgagcctccgaaagctcaaccatgcgagtcagcactggctgagactcgctgtacggacaagggtacctggcgtctgagtggccagaaggaaggcgtggaagctgccggaaggcggagcctccgagacggtggctgtagtcgtgggccaggcgacgaagcgcagtccaggagaggtcctggtacgcgatctggagagtgggcctggccacagtgaagtggtgggggcgaaggccagctccgtgtatacctccacgggggtaaaggtataccgagagctcatagtgagggggaacacggtccacggagtaccccgtgtactcgggacacgagaagccaaggaaacgggagaggtcacgaagctgagcgacgtggtgaccctcaccaaaaccgtgggaactgaagctggcgttcactgccat

SEQ ID NO: 89695 - DNA, 794 bp, Oryza sativa
  Clone ID: PAT_MRT4530_88428C.1
atgcccggcgactcggcgtcgtcgacgctgcagtacacgggcatcggcgcattcgtcgccatcgtcggcatcgtcgtcctggccgtcatcttctacacccgttcgtccgcccgtcacgccgcccccggcgcggcgcccgacgcggtcaccgcgctccaggggcagcagcagcagcgcggcctcggcctcggccccgacgacgtctccgtgctcccgacgttcacgtaccacgccgccgccaccgcctcgcccggccgatgcgggcctgatcggacgcggggacgcgaaggcggcggcggactgctgcgccgtctgcctcgacgagctcggcgagggcgccgtcgtgcgcatgctgccgtcgtgcaagcactacttccacgccacctgcgtcgacgtttggctgctgtcgcgggccacgtgcccggtgtgccgggggagcccagggcaggagaaggtccgccattttcggcctcgcgtccctctcaccgccgctgccgcagctgcgccggtgcgcgccgtcgccgcccaaggaggccgccgccgccgccgctgccgatacgtcgagagccaacgacgatgactcctccgcagccgcgtcgaggtcgccatccccgataagatcgagcacgcgtttcgacctcgcggccgccgccattgacgccgccgcccgtagtccggcaatgtcgccgtcgccgactcgcccgtggactccggagcgtgtggcgcgggtgtcaaggtcaccgtctcccgtgacgacgacggcgacgaccgatttgcacgtggtcgaagtgtag

SEQ ID NO: 89696 - DNA, 927 bp, Oryza sativa
  Clone ID: PAT_MRT4530_88429C.1
ctactcctcgtctgcctggctgcctcctgtagtcggctcctcagtcgaagaaacgtcgatcggctgacgcgaagggaccagcggaacttgtcgagagccggcagcagcacgggccgctggcggtgggggagttgggtagtcgaagcggaacacggtggaagaaccaacaacacgcttccgcgcagtgcggataaagcgtgggccacggcgggaggaagcaacgggagtgtgtccgggggtgtaggaggggctaactgggtgtgggtacggggagtacactggtgagtacggcgctcgcgagctgggggagcgcgggccactaggagtgcgggcagagccgcgagagctgtgggaggacaggcggctggcgtggcagaggcggcctaagtcccaagagacagtgtcaactgaggtgacaccctcctcggccagacgggcctccagagcggcgtagcggcgggcaagggagcgggaagcctcgaggagtaggtcgtgctgactggcctgagcctccgaaagctcaaccatgcgagtcagcactggctgagactcgctgtaaggacaagggtacctggcgtctgcgtggccagaaggaaggcgtggaagctgccggaaggcagagcccccgagacggtggctgtagtcgtgggccaagcgacgaagcgcagtccaggagaggtcctggtacgcgatctggagagtgggcctggccacggtgaagtggtgtgggcgaaggccagctccgtgtatacctccacgagggtaaaggtacacagagagctcacaacgagggggaacacggtccacggagtaccccgtgtactccggacacgagaagccaacaaagcgggcgaggtcacgaagctgagcaacgtggtgaccctcaccaaaaccgtgggaactgaagctggcgttcactgccatcat

SEQ ID NO: 89697 - DNA, 445 bp, Oryza sativa
  Clone ID: PAT_MRT4530_8842C.1
tatgtggacccacatgtcattgaaataggtatagcaaatagttaattgccacatctaaaagtggcaaatagttaaatgccccgctccctagagccggcggtgcccttcctccgagccggcggctcagccatgctctccctctacctacgaccccgccgtggcgcctcctctctccctctccctctacatgcgacgccatgccaaggctgcctggcgagcagcggtctacgacgggctggggagcagcggccggcaagctactcctcggcgtcggcggcgctccttctgcgagcggcgacgggcggcggcgtctctccgcctctcgccttctctccctcgccatgaggccgtgggagggctcgaccgtagcgggcggcagcgccctcccttccggcggaggggaggccggcggacaggtcctgtgcccttcccttcgccggatcca

SEQ ID NO: 89698 - DNA, 6857 bp, Oryza sativa
  Clone ID: PAT_MRT4530_88430C.1
ctaagggagcagctccgggaactcggcgcggagaagatcttctcgctcccaggttgcctcatcttcagaatgattgctccattgcaccttgtagaacttgacggtcttccttctagtctgacgttctgcctcttcaagaaccttgatcggtctttccttgtaggtcagattcttttccagcacgatattacccaggggaacttgttcttctggaacacggagacatttctttaactgggatacgtggaacacgttgtgcacatctgcgagaccttcaggtaactcaagctgataagccacttcgccacgtctggcagttatgaggtaggggccgatgcagcggggtgctaacttgccggacatcccaaacctcctcataccacggagaggcgatacccgcaggtacacatgatctcctttttcgaactcaaggtcacgtctccgattgtcagcgtaatccttctgacggttctgcgctgtctttaaacgttctcggatcagcttaacttgttcttttgctgccttaagtatgtcgggaccgaataccagcgcttcgcccacctcattccagcacaagggagtgcggcactttcttccgaacattgcctcattcggcaacatctgaatgctggcctgataacttgaggtgaactgagtgcttcggtctgacacaatcttcttgggacagccaaatctacacacgacatgggtcatgtagagttctgctagtttctttccatcaaaggtggttttcactggcacgaaatgagctgatttcgtgagtcggtccacgattacccaggtggagtcgtacccgctaggggttcttggcaaaccggtgatgaaatccattccgatctcttcccatttccagtattctgtgacatctcgcttcattccagcccaccagaagtatgccttgatatcttggtacatcttcgtacttcctggatgaatggagtaggcggactcatgagcttcttttaggatgagatctcttaactcctttttggccggtacacagatgcgtggaccgcaccaaactgtgccttggtcgtctatggagaaatcggtgtctttcttctcttgtattctttttattaattcttttatcccttcgtcatctttctgagcctcccggatttgcgattctagggttggctgcactgtcaagctggcagggacacctgactgtaccacggtcagccttaacttctccaattctctgcacaggcgatcttggtcaggccgtatttgagctatattgcaataggccttgcgacttagcgcatcagcgaccacgttagctttaccggggtggtaatgaattccaagatcgtaatccttgattagttccagccatcttctctgcctcatatttaactcggtctgagtgaagatgtacttaagacttttgtgatcggtgtatacttcacatctgttcccgattaaatagtgcctccagatcttaagagcatgaaccacggctgccaactcgagatcatgggtgggataattgacttcatgaggcctgaactgcctggatgcataggccacaacctttcgttcttgcattaggacacatcctaagccttgtcttgatgcatcacagaagatctcgaaatcctttcggatatctggcaaggtgagaactggggcagtggtcaaccttttcttcatttcttgaaagctgtcttcacaggctgcagaccattgaaatttcttttccttctttaacagctcggtcataggtctggctagcttagagaatccttcaatgaatcttcgataatatccagctaagccaaggaagctgcgaatctctgacacattcttgggcgggttccaagcaagtacagcctcaaccttgctgggatctacttcgacactgttggaggagatcacgtgtccaagaaatgctactcgatccaaccagaattcgcatttcgagaatttagcgaatagttgatgatccctgagcttttccattatcagcctcaggtgttcagcatgttcttcctcattcttggagtatatcaggatgtcatcgatgaacaccacgacaaactggtccaggtattccatgaagattttgttcattaagttcatgaagaatgctggagcattggtgagtccgaaggacatcactgtgaactcatatagaccataacgcgttgagaaagcggtcttcgggatatcttcagatctgattttcaattggtggtaacctgacctcaagtcaatttttgagaaaactcttgctcctttaagttgatcgaataaatcgtcaatccgtggcaacgggtacttgttctttatagttacttcattcagggctctatagtcgattaccattctctcagagccatcctttttcttaaccagaagcactggggctccccaaggggatgagctaggtcgcacataacctttactctccaattcttcaatttgtcttttaacttctgctaactcattagctgccaatcggtagggtctttttgcaattggtgcggtgcctggcgccagttctatggcgaactcaatctctcggtctggtggcatactcgttaattcttccggaaacacgtcgggatattcacagactatgggcatcgactccaaggaggtgacttgtaaacaggttaggatagaccgacttgcggtaggggtgttagaggtaaagcggacttgctttcctccaggtccttgcaaggtgatggacttttcggcacaatctatctgtcctttgtgcttagccaaccaatccatccctaggatgatgtccaagctttgcgagtctaggactatcggtttggctacgaagtcaacttcctcaattctaaggttaacttccgggcatatttgagttgcccttatattcttcccaggggaatgtagagactgagctgccgctggagtaggagttctagcagtgctgccattagcatgccctgagttggtgttggtaggattctgagggcactgtctggcatagtgacccatctggttgcaccagaaacactgaactgatgacggtcctggcggtgacttgaaagaggtaacactgtttggcgcagtattgccactaggggcacgctgctgtggctgaggtgccggacggttcatctgaggacgaggggcgtagcctggctggcggttagcctgagtgaccgactggtggtattgcatgggttgaccgtagcgagggcgaggtgcgcctggggaagaatttccctgatggttagacttgcgtttcttgtattcttcagtagcctcttttctggcatcctcaagtagaagtgccttgttgatcatatgttgaaaagtggggaagtcatgagcaagcaactgaagtctcattccaactgcgatccctttcaagaatttcctgatcttcttcttgtctgtgtccacttcctcaggagtgtaccgagccaacttgttaaacatacttaggtactcattgacactgctgttgccttgcttaagtttgttgaattcctctttcttcatgtcaatagtgctttcaggcacatgagactgcactaagttgagttttctatcaacatctttcagccaatcgtcagcctcgacgggctcgacggtctgagagaactctggcggacgagacctcagaaaatctgtcagcttgaatctattgttgctcatgtgagggtggccatttccatgcgcattatgctgaaaaccggctacggctgcggctaatccttgcaagatttgtgtctgaactgccattaagtgctgcatgttgttttccacatgaggtggggaagggaggcgttcttctccagaattgtgactggcagtgcggtgagagtggtgggactgttccacttctgcattacgggaagctgtgtgatgcaagcggttgctgcggtggggttgctcaacttctgcgttgcgggaagcggtacagtgcgaacggttgctgtggtgagactgctcattagctgactcatgatttgcttcgggctcaactctacctccctcaaaaccgaagcgggctggtgcacgagctgcacggcgggggcggctagccatctgtcgagggccgacagcagcacgggccgctggcggtgggggagctgggtaatcgaatcggaacacggtggaagaaccaacaacacgcttccgcgcggtgtggataaagcgtgggccacggtgggaggaagcaactggggtgtgtccgggggtgtaggaggggctaactgggtgtgggtagggggagtacactggtaagtacggcgcacgcgagctgggggagcgcgggccactgggagtgcgggcagagccgcgggagctgtgggaggacaggtggctggcgtggcagaggcggcctgagtcccaggagacagtgtcaactgaggtgacaccctcctcggccagacgggcctccagagcggcgtagcggcgggcaagggagcggtaagcctcaaggagtaggtcgtgctgagtggcctgagcctccgaaagctcaaccatgcgagtcagcactggctgagactcgctgtacggacaagggtacctggcgtctgcgtggccagaaggaaggcgtggaagctgccggaaggctgagcccccgagacggtggctgtagtcgtgggccaagcgacgaagcgcagtccaggagaggtcctggtacgcgatctggagagtgggcctggccacagtgaagtggtgtgggcgaaggccaactccgtgtatacctccacgagggtaaaggtacacagagagctcacagtgagggggaacacggtccacggagtaccccgtgtactcggggcacgagaagccaaggaagcgggcgaggtcacgaagctgagcgacgtggtgaccctcaccaaaaccgtgggaaccggccaacaacttttcaacggccacccgggccaacaacttttcaaacggccacccgggcctagctgatcccatcagatccgcccatgaccgtgggcacgactgttcgaacagtttgttaacctctgcagagggggtacactttaccctcacgacattactaacccggatcaccagcccgtggggatcagccacgtcgggagacctccaagctttcatgacaaggcatttcgaaagccgacacaggtttaccatatgccgacgagaggggtcccagaccaacaacaggtttggtcccagaccatactgtgccaggaagcccaggggtcctccccgacaccaccccggcgaatccacatgtctctcggcatcaaggctcccgtgcaatcctatcaatgcatgatattttgcaagcaatataattaagttcaaatataggctcaagatgttcaaaggtggcttgccttgctcgagatctggagcttgatcctcgaaatcctcgcactgcgggtcttcgggctccgaaactacacgcgaaatgggacaactcaacaaacggcgaaaataaagcccaaaaagaaaagaaaagaaaagaaggagggagggaaattagactttcctcgggcggctagggcgcggcccgagagaaaggggcggctcggccgagcttaatgggccggccggcccaagaaggcggcccaaggcgcgcgtgcgggtggggaggagagagagagagccggtgggccgggtccatcccgtgtggtcccgagtgggacccgcttgtcggcgactcggctcaccggtttggggagggaggcgcggtgcatgcgcgcggttcgcggaggacgcggtgcggcgggcccacgcgcagcctcacggctcaccgtggaccatgcgcacgggggggggaacggagggagcggctggccgggtcagccgatccggtcgcggccgaggtggcgccgacgtggtgcctacgtggctgccacgcgggccggctggaggaagacgaaggcgccggccgcgaatggacggcgggcggcggcggtttctccgggacgccgtgcgacgacgaggggtgacggggcgtacactgggatgacgagggagaacgagagggagcgagccaacggcttggattcgccggagggagtccgtcggcggcggattgcggcggcggcaaccggcggagaggaaagggggaaacggcgacgaggtctcgaggggccgattcccggcggtgagagcatctacgcggctacgggaacccatcgcttgcgccggattaggaggaaacgcatcgagggaggccggcgacgagagacgcttccgagctcgggcggcgacggcggcgagcacacggcgagcgacgacagcagtcggaacggcgccagggaagagatgttgcgaggagggagaacggagggatgcactaccgtgcgggacggggtgcagtgacgaggggccgacggcgcgggagtgttctctccggcctcgggccggggaagaggaagaagacgagctcctggagtccccttccgcgtccacgaacgtgccggctcctccggcacgcgaggcacgaaaggcggcggcgaggaaaaagggaggagggaaagggggcttgcccccttgccactttggggaaaaggaggagggagagagggcgacgcggcggaggggggaagctctgcctccgtcccttggaggcacgcgcggggagaggcggggccgagtcgatgacgacggcgatgacggcggggcggtttggaacggagcagcgactcgggcggcagacgcggggcaggcgcagcaggcgctgacggcggcggcgactggccgatcggccaccacggcgtgcgcgcgcgcgggcggcgctgcgatttgggtggcatcggcgggaagcggcggcgaaggcggagggcgctcggctcggcgcggctcacgcgcacgcgtgtgcagcgcacgggcagagtggggga

SEQ ID NO: 89699 - DNA, 292 bp, Oryza sativa
  unsure (1)..(292): unsure at all n locations
  Clone ID: PAT_MRT4530_88431C.1
atcgatcgggagtgtcgcgcttgcttcccacgccggccgacgaacagaaggaaaccggcagtgatatatatatgggcgccgtagcgtcgcgcgggcaggaggacgccgcgcgggtggccgcggggcgggagcacatgaagcggtgcagggagaggcggcggctgatgcgggaggcggtgcggctgcggcgncacctcgcggcctcgcacgncgcgtacctccggtcgctcacccacgncgcgtccgcgntctcccgcttcgggttcggcgagccgntcccggtgtccgacca

SEQ ID NO: 89700 - DNA, 913 bp, Oryza sativa
  Clone ID: PAT_MRT4530_88432C.1
catcgtctctatagctacctaccttcatctctctctagagctagagctagcacacaagagagagggagagagagagagagagagcgcttggttgttggcgtggtggatggcgcaagatgatgaggacgtgggtctagctctgggcctctccctgggctccggcggccacaggcggcagagagaaagtagagacgaagcgccgtcgtcggcggcggcgtccctgctgacgctgaggctcccggcagagagcggggggcagccgcaggtggtggtgaagagggaggtggtgcgggcggaagaggaggagtacgaatacgagtacgagagggcgctctactcgtcgtcggctgcggcggcggacgacgacgagggctgcaacagccggaagaagctgaggctgagcaaggagcagtcggctctgctggaggatcgcttcaaggagcatagcactctcaaccctaagcaaaaggttgctttggcgaagcagctaaacctgaggccaaggcaagttgaggtgtggttccaaaacagaagagccaggacgaagctgaagcagacggaggtggattgcgagcttctgaagcgctgctgcgagacgctgacggaggagaaccgacgcctccatcgtgagctccagcagctcagggctctgacccactccaccgccgccggcttcttcatggccaccaccctccccgtccccgccgccacgctctccatctgcccctcctgcgagcgcctcgccaccgccgccgccgccggagcttcccccaccgccgccgccgaccgcaccaacaagcccaccgccccgcacttgttcagccctttcgccaacgcgcacggcaaggacgggcagtgggcgtgggcggtcggcaaggacggcgacgtggacggcggcgctcaccggcgctga

SEQ ID NO: 89701 - DNA, 1705 bp, Oryza sativa
  Clone ID: PAT_MRT4530_88433C.1
ttttttttttttttttttttttttttttttttgaacgactcgcacgagacggtgcgaagttctattgatagagcaggaaaaaattacaagattacaaccctggaggatcataaccagcaaaaagaaaaaaaataccaccgcccacacaccgacagcgccaacacacacacacacccgggagaaggctagcaccgaaccggccgccgctaagcgtgaccgaccgccgctagaccaacaaaggaacatagacgagatcgccccctagaggatgccaaaatgatgtcttcaggaagagaagcgacggaagaaccgccgccgccatccgtcagggctcaaagaagtcaagactgggcttttgccagacaaccgcccttgaggggtgagacagcacgacaacgccctcaggagggggaatgaaccatcattgtcggttcagctacagccgagctgggttttcacctgccgctcaccacctgcgaatccacggctgacgcaccgatgctccaccatcactcaagctctgccgacatgtgggacccctgcaccggcgtccctcgccggtcagccttggtgcgtcgaagaccgcaccacacccaccggcagctcctcctcacaccgaggtcacctcccccaccgtcggctacgcctctcgcgccaagccggcctcctccaccggatgcacctctcgcgccaatccggcctccctccatcggccgcgcctctcgcgccaagccgtcctccgtcgccgtcggcagcgcctctcgcgccgtgccggcctcctccaccggacgcgcctctcgcgccaatccggtctcctgtcatcggctgcgactctctgtgccaagctgacccccgaccctcctccgatcgctgctgcgccgtccaggtgcgctcgtcttccacgcccctggctagccgtcgaagaccgccatgcctcccaccgtcacgcctccacttgctgccgccgtcgatcatctatacgacgccgccagacgttgtcgcatccgccaatgtccccggccgccagacgctgcctccacagccgcggcagctacgagccagccgccgtctccaactgtccgtagccagccgttgtcgccgcaagccgccgcctcgtcgccaaccgccacagcagttcaacggaggggatccggtctcccgccgcagcaggccgacaccgcgtgcagccgccacgacagacgccgccggcaccgcagccgccgccgccaccgcagccacctccagcgccagccgaccgatcagatctggccacggccaccgcctgccactgcagacatggccatgccgctgcctcctccgccacgccgccactccagccaccgacactgccacctccgcgccgcccactcgccgtccccggcagtccgccgcccggagcaacaaatccagccatggggggggggggtcggatccatgcatcccagcgccggatctggacgccgccgtcggtttctcctcggcgccggcgccttgccctgagctccgtcttgccggcgccctaaccagcttgactgcgagcgagggaagagagccccgccgccgccgtccttgcagccgcctggctttgccggcggtggctcgggcagcggcgagaagtggggatggaagacaaaggctaagcttgtgtggccgcatccagcgattccccagcgattccgacaaccaccagcaacagcatggctga

SEQ ID NO: 89702 - DNA, 182 bp, Oryza sativa
  Clone ID: PAT_MRT4530_88434C.1
gagtactttttgattgctgagcactggtatgacagtactccagatgtttttgtaagcaccaacagcttatttgcgtagtaactttacatcgggttacaccgggacaccttccaaattttctggtttgaagacacacacatgaataacttaactgtggttcctctgttttccaaaaaaaaaaa

SEQ ID NO: 89703 - DNA, 701 bp, Oryza sativa
  Clone ID: PAT_MRT4530_88435C.1
gtggatccccgtcgcggccaggaacctgtctccggattagcgatttttaggccacctgccaagatggtcggggcaatcaatacagtatccagacctttggccccaatacctttatcaacggcaattcctactactcccgctcgccctattaccatagctaccctgggtctagcgcccatcgacgaccaggcgatcgcccctggaaaccagcccactaccgacggccgactagccaccatacttattcttttagcaatactttcaaaagcaagaaaagtcgcccttggcaatatgaaccctattggcaacagccttggaaaaaagagcctagttcatcaccccaattcagcacctattggcagcgcaacccctggcaacggcccacctaccgcaacgaccaaaatctctacctcgacacccgctggtaaatacatttttaacgaccccaaaagttcgccaacaattaagagttaagaatcaggacaagaaaaaggcgatcgccaccggtgatttattttctgtgtctcctaaacatcgaagcaccaaaaatccagtacgataaagcggtacttttgcgtccgttgctatggcacagtttcctttatctactgtttccctgcgccgttggttgccctggggtttaggtggcctaacaattatcacttcccttggcatcctcggatttaggcattatcaacgcc

SEQ ID NO: 89704 - DNA, 741 bp, Oryza sativa
  Clone ID: PAT_MRT4530_88436C.1
caagcagcagcaagctcgagctactagctagctacactagctcgattagttgcagcaatggcggcgaaggcggcgcttgtgctggcggtgagcctcctggtggtggccatggccgtggcctgcccggactgcccttcgccgaagccaccggcgccgaggccgaagccgccgacgcctcactacggcggcgggtcgtcgtgcccgcgcgacgcgctgaagctgcacgtgtgcgccaacgtgctgggcctcgtcaaggccaaggtcggcgccgtgtcgccgtacgagccctgctgctcgctgctcgacggcctcgtcgacctcgacgccgccgtctgcctctgcaccgccatcaaggccaacgtgctgggcatcaagctcaacctccccatcgacctcagcctcatcctcaacaactgcggcaagatctgcccatccgactaccagtgcgtgcactagatcgagatctagagagctagtgttgcacttgatcactccatggctgggagtaccgtatcttcatgttgtttttacccccaatatcttgatgtgttgttaatttcttgctttttttttcttttgattctatggttcgtgatccgttggtagcgctatgatcattgtatttttttttgtttctcatgatttgttatagtttcgtcaataaaatggaaatgtatttttttgtcgcatatatgcaatggtcagagattggaactctaaaaaaaaaaaaaaaaaaaaaaa

SEQ ID NO: 89705 - DNA, 309 bp, Oryza sativa
  Clone ID: PAT_MRT4530_88437C.1
atggaggccaaaattggagccacagccatggtcctgctcctcctggcctttggtgttgttggtgaggccaagacacatgaataccgcagccataccttcaaaggcgtctgcatccacgacgatctctggaagtactgcgtcaggttcatcttatctgccatgaaggccaaggttgcagcaacagccctgttcctgctccttctgacctttggtggtgaggccaagatatgccatgatcccagccaaaccttcaaggggatgtgcctcagtaacagcaactgcatctccagctgcatctccgaggactag

SEQ ID NO: 89706 - DNA, 381 bp, Oryza sativa
  Clone ID: PAT_MRT4530_88438C.1
atgtgcttccgtaggaaatcaagggtacaggctacagcccgccgccgtcgaattgcggaacggcgtgtgccccgtgcggccgggtttcggcacagctctgcaagcccgcacgtacgcggcacgcgcgatcgatggtttgtctacccctacctaccacgagtagagctactatgcggccttggaagtttgccttgtgccgttgtgctggtgtcccggactcccggttggccggttgataggcatgttggggagttcacggttcagtgtctcggagactcggataatgttctatgcgtgggcatgatcattaaacgggctctgtccgtgactgggggacatccggcccagtacggtccagtagcggagctctcggtgaaacgc

SEQ ID NO: 89707 - DNA, 297 bp, Oryza sativa
  Clone ID: PAT_MRT4530_88439C.1
acagtattaaccgttgattgattgtgggcttatagggcatcacctgtcgatgtgcatatataccaagaaattctttattattgagagcattacatgctttattgtttacggtcgtccatcccagagatacaaaactctattaaatgttctgacagagccacataccatgcaggtcaccactactgtgttcgaatgggtgggcgcatacttcgcctggggtgtactggtgaggaacggtccctcgccgttaagagtggccggggggtcctaggtcgcggggatgaacccgccaatgtt

SEQ ID NO: 89708 - DNA, 177 bp, Oryza sativa
  unsure (1)..(177): unsure at all n locations
  Clone ID: PAT_MRT4530_8843C.1
ggaccnganagncngaananaacaccgacccggaacaagggacaaacacganaggggcacccaagaacaaacggggcggagggagccnaggcacagaagcaacggcagggagcanagggagaaacacagccaagcaacgctccggaccccccggcacgacgcataacagcgacatag

SEQ ID NO: 89709 - DNA, 483 bp, Oryza sativa
  unsure (1)..(483): unsure at all n locations
  Clone ID: PAT_MRT4530_88440C.1
caaaaggggggctcatttcataaatgaaggattaaatccctttttcgaaaaaaaagaggaaaacaaaagggagggccgaaatgaccaaaacccatgggggaagctaccttgcaaggaaaaaattggaagtaaccgtaatacaagcaggaggcgatcatcccccttcgattttacggaaacttaaattcaccacctgcccagtttgttcaacgcccccatcgttgggtgggggcgagaagcatttttataccaccaccaccacttttgtcgatgggggcggcctcttaaggccgggggaagcgtccctccgggggngtttgtcgaacccgggggccgtcggtcccggaatggacggggngcggttgcgcgccgccccccccccccccccgtggcagatggaagagggccccgcttttccttccactccttgggcgaaaggggctgttgcctgccctccaggctgaaaaaccccgggtccccctt

SEQ ID NO: 89710 - DNA, 483 bp, Oryza sativa
  Clone ID: PAT_MRT4530_88441C.1
atgggagattggatctttgctccagaatccaaatcctccacgacagtggtgctggtgcgtgagagattgggtcgtgcgtcttaccaggcgcccaacgacgagagctacggccgcgccgccgcgcgacaagcataccacaccgacgaggtccccccctccgccgcgaacgccgatctcagcacgccgccatcgacgaggtcacgctccaggtctagggctccgcatcggcttaccagtttgccgtcgcctgcaacacggctgacggcgctacgaggacgaggcaatgggggaacacgggcggcggaaccgagagatggagcttgggcctcatgttgcctgttgggccttgggttcagggccgctcggcccaaaatctccgggagatcagcgaggggccgtgcaggcctccaccagctcggagtatcgtatcgtgtaggaataagtctatttaccatctctcatcttcgtgtcgagtttaattga

SEQ ID NO: 89711 - DNA, 327 bp, Oryza sativa
  Clone ID: PAT_MRT4530_88442C.1
atgtcttccctccccttttttctccctctcctctccctcctacctcaccttgtggcagcaccgccgagggcaggacgggcgaggcgcccgtcggagccggcacaggctgacaagaagtgtgctcttttttatggtgtaacaataagtgaagaacaagctcggtcaggcattgtagtcagagtcaactcagccgcacaaagtgaatttaagctacttttcttcgaacaagaatttgatggaggttatggactagctctgcaggtacctagattcaatgcaagggtcagggtgttatcccaggcttcatggacaactccgtcgccttga

SEQ ID NO: 89712 - DNA, 325 bp, Oryza sativa
  Clone ID: PAT_MRT4530_88444C.1
cttttttttccgggccagaaaagggtttttactacgccgaaacaccgagggtttaaaaaccctttattgaggacaacatacaaaactcggggtaatgttttccttacaagggacccgtaaaaaaggaatgcccctttacaatccccggaacctttttttaaaaagaaaaaattttcaacccagttttggattaaaagctaaaaaacttcccagggtgggattaccccctgggtctttttttaaaaaaaaaacttaaacaattccccgggctggaccttttttgctttgcaacattgacacgggtgggttgttagagaaccaatta

SEQ ID NO: 89713 - DNA, 3657 bp, Oryza sativa
  Clone ID: PAT_MRT4530_88445C.1
atggagattgacgacattgtggcgccgcccgccaccttccccggttgccacccagcttgcccaagcagcagcctcggcgtcaccgatctcgacgggcgtcctcgatgctctgttcgcctcgccgccgcaaccgatcatcgcctcgccgccgaggtcgccaccaagatcgccgtgtgcgcgaccgctccacatgggacgacgcctcaagatccgcacaaggcagcacagccagcccacccgacgcagctgggcctcaacggcgaagaaggcgcttcaattgagcaggtcatcgccgagtacgtcgccatgttcgatggcccattgccggcgcacgtcatcgccgccctcaccaccatcttcggcatcgacgacgaagaacaggagacaatggatgcggcgctgatatctctagttggcgaagatatcatctcctggaatgtgagaggcctaaactcacctgcgcgctgcaacgcagtccatgagctcatgcttgacacaaagtgcaccttggcctgcttccaagagaccaaactccaaagcatagatgacggccttgctcgtttcttaggaggctacaagcttgataaatttgccttcaagccggcgagaggcacgagaggaggaatccttctcctttggagtagtggagattttgatgtccaagagtttcgaatcggccgcttctcgatctccgcgcaaataacagatattcgctcaggagttacgttcctcctcactggtgtctacgggccaacaaggcaccacctcaaagattcgttcctccggcacattaggagattaaggcccagccctggggaaggatggctcatccttggagacttcaacatgatctactgtgctagggacaaaaacaatagcaacctcaacctcgcacgcatgagacgttttcgcgtagtcattgatcgatggccatccgaccattgccctcttgtactgtccaacccgcaaggcccacatcgtccgaggaccttcaagtttgaaaacttttggacacgggtcccggggttcaaggacaaagtcaaggacatctggagccaaccttcttcgcacactgagcctatgcaccgcctgaatcaaaagctgcaacgtacggcggtcggccttagagattggacaaaaggcatctgctcagaggctaaattgcaattccatatggcactcaatgtcatccaaagactcgacgtggcacaagagcacagagaactctcccccccggaaacgcgactgagggcggctctcaagcggaaagtcctaggactcgcttctatagaaagggcaaggaaaaagcaagcctccagggtaactcacatccgtgaaggagatgcgaacacgaagttcttccacctcagggttaatgcgcgaaggagaaggaatacaatccaaagattgaaaaaggacagtggttgggcggtgacgcacggtgaaaaggaattgacgatccatgatcacttcgcaagcttcatagggaggccggggccgaggccaaaagagctaaactgggagacgttggacatcacaccgattgatctagccacgctgggggaacccttcactgaggaggaggtgcatagggcaattaaggaaatgccagccgacaaagcaccgggaccagacggcttcactggggccttcttcaaagtttgctgggaaatcatcaaggatgacattctgctagtcttcagctccatctataacctgagatgtgcgcacctgaatttgctcaactcagcaaacatcgtcctaatcccaaaaaaggatggggctgaaagcgtttcggactataggccaattagtctaattcatagcatcgccaagatcttcgctaagatgctagagctgcggttaaggccccacatgcatgagttgatctcggtcaatcaaagcgctttcataaaggggagaagtattcatgacaactacctcttcaacgatgttgcgacttccgcgaacatcctacatcgttttggcacagccacaggactcgtcaccaaccttcagaaatcccaggttgcggccataagatgcggcaatatagacctggaagaggtcctccaaggcgttccggcgaggcgagcaaatttcccactaaaatacttgggcctcccgcttgttctgggaagactgcgaaaaacggacttgcaaccggtcttcgacaaaatatcagggagaattgcaagttggagggggaaaaacatggcagcagccgggagaaccacgcttgtaaagtctgtgctttcagcacagccaatttatctcctcactgccttgaaggtgatgaaggaatccctggagcagcttgacaagcagagacgtcgcttcctttgggctggtacgggggatatcaccggggggaaatgcaagggggaccttggtgtcctaagcttggagaaatttacaagagctctgagattgcgatggttgtggaacgaatggagagatccaagcaagccttgggtgggtttggaaacgccttgtgatggtgtggatagggacctcttcgccgcctcaacaaagataactgtgggcgatgggaatacgacgcgcttctgggactccgcatggattaatggccgaagaccaaaagacctaatgccgttggtctatgagatctccaaaaataggaagaaatccctacggcaagggaaagaagacgactcctgggtgcatgacctgaccctcgatgcgggttcatctatcacaatcaacctcctcgatcagctagtccgcctgtgggaggcggtacggaatgtgcacttagacagcgaggagccggatcagattgtttggaaattcacaagcagcggccactatacagctttctcggcttatcatgcccaatgtttgggggcgccaaacacaaacttcaactccctaatctggaaagtttgggcgccagggaaatgtaaatttcatgcctggctcatcattcaaaatagagtctggacgtcggaccgactcgcgacaaggggctggcggaataacggacattgccccctatgtcgttgtgacaccgagacagccttgcacctcgtcgccatgtgtagatacacgaagagaatctggcgcctcgttgctacatgggcgggatatcagcagttggaaccggcccaatgggaggaagcccgttatggcaagccatactttcttgtttcatgggcctacatgtcatatactcattttctagccaaacattgccacacttgtggccaacaggccacaatttgtttgccatgccacacctataacaaattgagttatgccaatgttaggcaacaaccaaacagaccaaccactcagatggaaaacaagctatctacaacaacagaaggtgaagaacttaagtcagcggctcaagttgttgctgacgtgcttgctgagaacaccaagaagaatcggttcttgcagaatgtgggcttcaataatgcccagcctagattcagtgagcagagcactgagacagaactagaagcggagaaaagggccaatgctgagcttcgtgcacaggtggctgatttgtcaaacaaagtgcaagaatctgagcaggcaaggattaaagaccgagaggagatgaagaggagtcaatctgagatggaagcaaaacttaatcttttgctcagtcaaattcgaccaagttaa

SEQ ID NO: 89714 - DNA, 2160 bp, Oryza sativa
  Clone ID: PAT_MRT4530_88446C.1
atgtcacagctcggcgaaccggcgacgcgccctgaggaggacacttgcttcatccccacctcgtacgccattgacgaggagctgcgtgaatggagtgagaccgcagtggtctcctgggcggcccgcgctccgccgaccaccgagccgcgcgacgtcgagcaggccttcctcgacgagttcaagctccgccgtggcgaggtggccgtgtctctccatcacccacaagctttcctcatcaagttccagcaccgtcgacattgtgaggaagcgctggcgaagggatacgtcaagcggcacggcattgagatccacttcatcaagtggcgcagcctcaagagcgcgcttggtgtcgccctgatgttccgagttcggttgtgtcttgacggcgtccccatgcatgcctgggccgcggacattgctgagcgcatcattggtcgcacttgcgccctggaacagatcgagacggacgtcgtccacccagtggagtctggtaacacgcgctccatcgacctatgggcgtggacggcgaatcctagcaccatcccgaagaggatgtggcttggcttcacaaagcgggcgaaggacccgaacctggcgcccctatttgcggtggagaacccactggagcactggcagaggggggtgcgccatccggtgctcttccacttggaggagattcatgactacacggcggcgaccattgatttggaggggcaaggcagcttccagccggccaagcgccgcctaccgccttggagcctgggagtgctcgacggtgaacaggtcccagggcgagtctttgaagacttcccgcaccacccgccgccgccacgatcggtccacgagcgcctcggagggcgtgatcgggatgacgagcgccgggaggctcgccggccagaacgccggtctgaccgcgacgccatcgatggccgcgcggacagaccccgccgtggacgcgcagtacggggaggacaccttcatgatgaaggcgaccacgatgacgaggatgattgggatggcgagcgcgacgaccgcgacggctgtgctgatcgcgatggccgccatgcccgcgatcagggcgggcgcggcgggcgtggtcgtcgtcgggggtctggcaatgaccacccgagaccctggcgccgcaatgaccgcgatgatgatcgtgatgaccgaggccgggatctcggccgtggccgggatgataggcggggaagcgacaacaactaccgccgtgagcgcacgcgctccccgcgtcgctgggacaggggaggcgccaaccgtagcggcggcggcacgcggcgcacggctgatccggtctacgactcgagcaaactgatgaacattccccttctacacaaatccgcgaaccaggcagaggtaggtgaatttcgtttgctccacgcgctgcacaactccagcttcttgtgtcaggaaccccagacgaacacgttgtcgccggtgagccaactgcagtggctctccatcatcgcagacaaggctgccacgccagccctctcgggtcgcccagccaaaccgaggattgaagcctggttccagaacgcggcctgggagccgatcccggtcgaacacgccttcgcgcgcatcaagtcggcgctgccgccgcctacctcgacgactacttgccaacaagtagaggaggcgctcctgcggattgagctggcggctgcggcgaccgacccccctgtgggagagccattcccgcagattgactcgccgcccccgcgggtcacctcgccggcattagcccaaggcccggtcgccaccaagatcgccgtgtgcgcgacgctccacatgggacgacgcctcaagatccgcacaaggcagcacagccagcccacccgacgcagtgagcgcattgccaagcaaccagcacggccgacgatggagcgctgccaacgcgttctcttcaaaaggctgggcgtcctcaacggcgaagaaggcgcttcaattgagcaggtcatcgccgagtacgtcgccatgttcgatggcccactgccggcgcacgtcatcgccgccctcaccaccatcttcggcatcgacgacgaagagcaggagacaatggatgcggcgctgatatctctagttggcgaaggtatagccgacgcggcggaggatgctgaggacaccgtcgccgcctaa

SEQ ID NO: 89715 - DNA, 1038 bp, Oryza sativa
  Clone ID: PAT_MRT4530_88447C.1
atggccgccgccgacggcgacgaggactgggagatctgcaactgcgacggcttcgtctacaagcgccgccgggtcctccacccgcccgacctcgaggacgccgccgccaccgccgcgacctcctccgccccggggccgccacccgaggccgtactccgccgccgccgccgccaggcgctcctccggctccgcgccaggtacctcgacgagctctcccgctgggagtcgctctcctcggacgtcctcgcgccgctccccgccgcgccggccgcggaccttcctccccgaccgccttccgaccccgtcgccgcctcgccgcctcccggctcctcctcctcctcctccgacctcccgtcatcgacggcctcctcgcccagatcatcaagtaagaatgttagtatggcggaggtgacggagcagttgctcaagcggttgacggaggtgtgcgacgagatcgatgagttctgccacgcgcacgaggcagccttggtggatgccgtcaccgacctgccggtatggggcgatccacgggagctcatgaactccttgtgcagccccgccgagctgccacataagttacaaatagagcttactgagaacaactattacactttgttaaatgcatgttctaaaaatgaaatattccaagatgcaatatggctaacagcggcacaagcaccaataggtcaatctgggatgccagtggcatcatgccacaagctcaagctgcaccagcatctgcatcctatcagcaaggagctcatgctgggccatattgtgctccaccttatgcatatgccaaccctatgtcttaccagcaggctcatgggaatgctggctaaccatctgcagaatgtctactccaactatcatggctaccaggcagcttatggtcgcggcggcgccgcgactgatgcggtgagcgtgattcagacaagcggtggagcggctaccgtcgtcgtcgcgcaagcagctgatcccccttcagtccttctgatggtgcacttcaccccaaatccactggaggagctcagatga

SEQ ID NO: 89716 - DNA, 750 bp, Oryza sativa
  Clone ID: PAT_MRT4530_88448C.1
atggccctgaagaagctgtaccaaaagaaaagtctaatttttcaatggaatccaaatttcggccaactagatatgaataactgtacgaactcaacaaacaaattcgggagaaccacgcttgtaaagtctgtgctttcagcgcagccaatttatctcctcactactgccttgaaggtgacgaaggaatccctggagcaacttgacaagcagagacgtcgcttcctttgggctggtacgggtgatatcaccgggggaaagtgtaagagagatctaagtaagccttgggtaggattggaaacgccttgcgatggtgtggatagggacctcttcgctgcctcaacaaagataacggtgggcgatgggaatacgacgcgcttctgggactccgcatggattgacggtcaaagaccaaaagacctaatgccgttggtctatgagatctccaaaaataggaagaaatccctgcgccaagggaaagaagacgactcctgggtgcatgacctgacccttgatgcgggttcatctatcacaatcaaccttctcgatcagctagtccgcctgtgggaggcggtacggaatgtgcacttagatagcgaagagccggatcagattgcttggaaattcacaagcagcggccactatacagcttcctcggcttatcatgcccaatgtttaggggcgcctaacacaaacttcaactccctaatctggaaagtttgggcaccggggaaatataaatttcatgcctga

SEQ ID NO: 89717 - DNA, 1230 bp, Oryza sativa
  Clone ID: PAT_MRT4530_8844C.1
atggcgctgctccaacgcctcctcgtcgcgctcctccgcgtcctcgtcgccggagagcacgccgccggcgacgccatgccgtcgccggcgtccggcggcggtggcgccgccgttaacgttgaagcgcggtacgcgcgcgtgttctgcttcggcaactcgctcaccgacaccggcaacaaccccctcctcccggccaccgccggcgggccgtccaccagcccgccgtacgggatgaccttcttccaccgccccaccggccgctcctccgacggccgcctcctcatcgacttcatcgtgaaggcgctgagggcgccgcagccgacgccgtacctcgccggcaagacggcggcggatttgctggccgggacgaacttcgcggtgggcggcgcgacggcgctcgagccggcggtgctcgcgagaatgggcatcgtgtcggcggtgccggtgtctctcagcaacgagacgcgctggttccaggatgccttgcagcttcttgcttcctccatcaacgcgaggcgcaggatcgccgagacgtcgctcttcttcttcggagagatcggagtcaacgactacttcctcgccttggctagcaaccacaccgtcgaacaggcggcggcgaccttggtcccagacatcgtcggcgtcattcgatcagccgtgatcgacgccatcgtcgccggagcaagaacggtggtgatcaccgggatgataccgctgggctgcgagccgcagctgctcgccctgttccccgcgggctccgccgccgactacgacccggacaccggctgcaatgcgcggttcaacaagctcgccgaggtgcacaaccgcgagctgacccggatgctccggcagctccggcgcgcgttccccgccgccgccgtccactacgccgacttctaccgccccgtcaccgccatcatcgcctctccggccaaatacggtttcggcgacacgccgttggcggcgtgctgtggcggcggcggcaacccctacaacttcgacttcgcggcgttctgcaccttgcgggcgtcgacgctgtgcgccgatccatccaagtacgtctcctgggacgggatccattacacggaagcggtgaacaagttcgtggctcgttccatgctaaggagagccctaataccgatgcccaaacccaatccgtccttgtctatgccgttatcaagttcacgcgaacatacaggacaagaaaccagccgggagctcgctacataa

SEQ ID NO: 89718 - DNA, 116 bp, Oryza sativa
  Clone ID: PAT_MRT4530_88451C.1
atacaaaacgaataactgattaatgcatatacgtctacttcttcattggacttttacatccattaacaaacaatttgctattttacagcttaaaataaaaccttgcttatttttac

SEQ ID NO: 89719 - DNA, 650 bp, Oryza sativa
  Clone ID: PAT_MRT4530_88452C.1
ctagctccggttgaagttgaaaactcgttaaaagtgtttggctatactttcagttctagatctgaaaaaaaaaatgaaaaaatgaaaaaaaacgaaaccaatcggccccagccgcgccgccggccgccggccacgcgcgccgcccgtcctcgtcccgcagcccccggccgccgcagcccttcgccgccgccggcctccgcccgcgcgtcgtcgtcacgccccgtcgccgtggccccctaccgccgacgctaccgtagcccgccgccgccggcctccacccgctcgtcatcgtcacgctgcgccgcctgtcgccgcctgtcgtcatcccgccgctgccgcagcccgccaccgccgccggcgcccgctcgggattgggaggggaggagagagaacgggaggaaaggaggattgtaggggtagttgagtggcattttcgtgtagatactctaaaaaattagagggtagtgggtcttttgggatagagtggagctgtggagcagcaaaaacccagctccaccccgtagttcattttttaggagtagctctgccaactccactccaaaaaaaggtggatctggatcgtttggcacaactccggctcctgataagttggagtgggagctagagctatgccaaacggggcctaaacc

SEQ ID NO: 89720 - DNA, 204 bp, Oryza sativa
  Clone ID: PAT_MRT4530_88453C.1
atggcgcactcttacatgatgccacacaggccatggagtagaactggtgctgaggtgatgcgcggggagaagctcaggttgagctctgactgggagtgcggacctggtgttgccgacacgtgtgaagctccgcctagtgagaggaatgccctagtactggccagtggtggtggtggcgacttgagccagaatgttggctggtag

SEQ ID NO: 89721 - DNA, 261 bp, Oryza sativa
  Clone ID: PAT_MRT4530_88454C.1
atgagtgtggcagccaatgcgagaagggagcgcgacggtggtgggaagaggcgacgggaagaggcgacggcagcggcgaggccggaggcggcgacagcgggacagggcgccctaacgaccggtggttacatcgtcatcgttgtcgaccggcgagcaagcgaggagatggggcggcggtcggcgaacgaggaggtgaggcggtggcccggagacttggcgatggccggcgaacgaggaggcaaggcggcggcccgaagatga

SEQ ID NO: 89722 - DNA, 5588 bp, Oryza sativa
  Clone ID: PAT_MRT4530_88455C.1
ccctgctctatataaataatcccccccagttgctgaagaagatgaagcggatcccgctgacgaggagttcttccaggagcaagccggctacgatgagttttagggttaatttggagcgtcacgggctagttccgatggcagtgaacgccagcttcagttcccacggttttggtgagggtcaccacgtcgctcagcttcgtgacctcgcccgcttccttggcttttcgtgtcccgagtacacggggtactccgtggaccgtgttccccctcgctgtgagctctctgtgtacctttaccctcgtggaggtatacacggagctggccttcgcccacaccacttcactgtggccaggcccactctccagatcgcgtaccaggacctctcctggactgcgcttcgtcgcttggcctacgactacagccaccgtctcgggggctctgccttccggcagcttccacgccttccttctggccacgcaaacgccaggtacccttgtccttacagtgagtttcagccagtgctgactcgcatggttgagctttcggaggctcaggccactcagcacgacctactccttgaggcttaccgctcccttgcccgccgctacgccgctctggaggcccgtctggccgaggagggtgtcacctcagttgacactgtctcttgggactcaggtcgcctctaccacgccagccacctgtcctcccacagctcccgcggctctgctcgcactcccagtggcctgcgctcccccagctcgcgtgcgccgtactcaccagtgtactccccctaccctcacccagttagcccctcctacacccctggacacaccccagttgcttcctcccaccgtggcccacgctttatccgcactgcgcggaagcgtgttgttggttcttccaccgtgttccgtttcgactacccagctcccacaccgccagcggcccgtgctgctgtcggccctcgacagatggctagccgcccccgccgtgctgctcgtgcaccagcccgctttggttttgaggaaggtagagttgagccagaagcaaatcatgagtcagctaatgagcagtctcaccacagcaaccgttcgcaccgtactacttcccgcaacgcagaagttgagcaaccccgccgcagcaaccgctcgcatcacacagcttcccgtaatgcagagatggaacagtctcaccgctctcaccgcactgccagtcacaattctggagaagaacgcctcccttccccacctcatgtggaaaacaacatgcaacacttaatggcagttcagacacaaatcttgcaaggattagccgcagccgtagccggttatcagcacaatgcgcatggaaatggccaccctcacatgggcaacaatagatccaatctaacagactttctgaggtctcgtccgccagagttctctcagaccgtcgagcccgtcgaggctgacgattggctgaaagatgttgatagaaaactcaacttagtgcagtgtactcctgttgagaagacgctctacgcctctcaccagctaaaaggacctgctgcagattggtgggagaattactgcaatgcacaccctgaacccactaacattgcttgggatgagtttgctacggctttccgtgcagctcatgtgcctgaaagcaccattgatatgaagaaagaggaattcaacagacttaagcaaggcaacaacagtgtcaatgagtacctaagtatgttcaacaagttggctcggtacgcccctgaggaagtggacacagacaagaagaagatcaggaagttcttgaagggaatcgcagtaggaatgagactccagttgcttgctcatgacttccccacttttcaacatatgatcaacaaggcacttctacttgaggatgccagaaaagaggctaccgaagaatacaagaaacgcaagtctaaccatcagggaaattcttcccgaggcgcacctcgccctcgctatggtcaacccatgcaataccaccagtcggtcactcaggctaaccgccagccaggctacgcccctcgtcctcagatgaaccgtccggcacctcagccacagcagcgtgcccctagtggcaatactgcaccaaacagtgttacctctttcaagtcaccgctaggaccgtcagcagttcagtgtttccggtgcaaccagatgggtcactatgcccgacagtgccctcagaatcctaccaacaccaactcagggcatgctaatggcagcactgccagaactcctactccagcggcagctcagtctcgtcctagctctcaggcaagtggacaaggctctcgtgcttccaacaactttggtcgaggccgggtgaaccacattcaagctgagaccgctcaggatgctccagacgttgtgatgggtatgttctctgtcaactccgtacccgcaatagttctgtttgattcagaagcttcccattctttcatatcacaagcttttgtgaaaagaaatggttggaaaacccaaaatttacgtgtaccaatgatagtacattcccctgggaggaatataagggcaactcaaatatgcccggaagttaaccttagaattgaggaagttgacttcctagccaaaccgatagtcctagactcgcaaagcttggacatcatcctagggatggattggttggctaagcacaaagggcagatagattgtgccgaaaagtccatcaccttgcaaggacctggaggaaagcaagtccgctttacctctaacacccctaccgcgagtcggtctatcctaacctgtttacaagtcacctccttggagtcggtgcccatagtctgtgaatatcccgacgtatttccagaagaattaacaagtatgccaccagaccgagagattgagttcgccatagaactggcaccaggcaccgcaccaattgcaaaaagaccctaccgaatggcagctaatgagttagcagaagttaaaagacaaatcgaagaattggagagtaaaggttatgtgcgacctagctcatccccttggggagccccagtgctcctggtcaagaaaaaggatggctgtgagagaatggtaatcgactatagagccctaaatgaagtaactataaagaacaagtacccgttgccacggattgacgatttgttcgatcaacttaaaggagcaagagttttctctaaaattgacttgagatcaggttaccaccaattgaaaatcagatctgaagatatcccgaagaccgctttctcaacgcgttatggtctatatgagttcacagtgatgtccttcggactcaccaatgctccagcattcttcatgaacataatgaacaaaatcttcatggaatacctggaccagtttgtcgtggtgttcatcgatgacatcctgatatactccaagaatgaggaagaacatgctgaacacctgaggctgataatggaaaagctcagggatcatcaactattcgctaaattctcgaaatgcgaattttggttagaccgagtagcatttcttggacacgtgatctcccccaatggtgtcgaagtagatcccagcaaggttgaagctgtacttgcttggaacccgcccacgaatgtgtcagagattcgcagcttccttggcttagctggatattatcgaagattcattgaaggattctctaagctagccagacctatgaccgagctgttaaagaaggaaaagaaatttcaatggtctacagcctgtgaagacagctttcaagaaatgaagaaaaggtttaccactgccccagttctcaccttgccagatatccgaagagatttcgagatcttctatgatgcaacaagacaaggcttaggatgtgtcctaatgcaagaacgaaaggttgtggcctatgcatccaggcagctcaggcctcatgaagtcaactatcccacccatgacctcgagttggcagccgtggttcatgctcttaagatctggaggcactatttaatcgggaacagatgtgaagtatacaccaatcacaaaagtctcaagtacatcttcactcagaccgagttaaatatgaggcagagaaaatggttggaactaatcaaggattacgatcttggaattcattaccaccccagtaaagctaacgtggtcactgatgcgctaagtcgcaaggcctattgcaatgtagctcaaatacggtcttaccaagatcgcctgtgcagagaattggagaagttaaggctgaccgtggtacagtcaggtgtccctgccagcttgacagtgcagcctaccctagaatcgcaaatccgggaggctcagaaagatgacgaagggataaaagaattaataaaaagaatacaggagaagaatgacaccaatttctccatagacgatcaaggcacagtttggtgcggtccacgcatctgtgtaccggccaagaaggagttaagagatctcatcctaaaggaagctcatgagtccgcctactccattcatccaggaagtacgaagatgtaccaagatatcaaggcatacttctggtgggctggaatgaagcgagatgtcgcagaatgcgtagccttgtgtgacatttgccaaagagtcaaggcagaacatcagaggccagctggtctgctgcaacccctaccgattcccgagtggaaatgggaagagatcggaatggatttcatcaccggtttgccaagaacccctagcgggtacaactccatctgggtaatcgtggaccgactcacgaaatcagctcatttcgtgctagtgaaaaccacctttgatggaaagaaactagcagaactctacatgacccatgtcgtgtgtagatttggctgtcccaagaaaattgtgtcagaccgaggcactcagttcacctcaaagttctggaagcagttgcatgaagccctcggaaccgatctaaatttattacagcctaccatccgcagaccgatggtcagacagaaaggttatcaggccagcattcagatgtcgccgaatgaggcaatgttcggaagaaagtgccgcactcccttgtgctggaatgaggtgggcgaagcactggtattcggtcctgacgtactcaaggcagcagaagaacaagttaaactgatccgagaacgtttaaagacagcgcagaaccgtcagaagaattacgcggacaatcgaaggcgtgaccttgagttcgaaaaaggagatcatgtgtacctgcgggtatcgcctctccgtggtataaggaggtttgggatgtccggcaagttagcaccccgctacatcggcccctacctcataaccgccagacgtggcgaagtggcttatcagcttgagttacctgaaggtctcgcatatgtgcacaacgtgttccacgtatcccagttaaagaaatgtcttcgagttccagaagagcaagtccccctgggtaatatcgagctggaaaagaatctgacctacaaggaaagactgatcaagatttttgaagaggcagaacgtcagactcgaaggaagaccatcaagttctacaaagtccaatggagcaaccattctgaagatgaggcaacctgggagcaagaagatcttctccgcgccgagttcccggagctgctcccttag

SEQ ID NO: 89723 - DNA, 716 bp, Oryza sativa
  Clone ID: PAT_MRT4530_88456C.1
gaggccggccggatgaatctattatagtaagttacccctttccacccctctctctccccaccatcggctcatcgctggtgaaggttaggatagggactaggttccctgctcctctagtacttgtagtagcaatagtcgggttcggccgttggggcggactcttcgcgtggttttaattttcccttttgattctcatggtgattgttggcgtcggttggcctcgtccttgtgtctaggagcgctgtcgggcttctccacggagacgaatcactccctgttgggcttcttctcccagccgctacctaggatgcctccagatctgtgcaaagagaggtaacgtctgtctacatcgacatctccggcgaggtctttccaaggaaggcggcctcatgcttgatccttggcgacaaatcttcactaggtggctggagttttcaagttgcatcaaagatgtctcaacctcccactcgtggaggaccgaatctgtatgcctcttggcttcttatgtagctcaccgcgtttcttttgctttcttcaccaacaaaatacatctagttgttgtctttggagtagctatggtctttgtactaatttctctcaagaacaatagtagaaatctcaagtggtgttgctaaaatttcactttgctcatcaacaccttagcctccatacataggaggaatcattagggattgagtgcattcagctcacttggt

SEQ ID NO: 89724 - DNA, 185 bp, Oryza sativa
  Clone ID: PAT_MRT4530_88457C.1
tttttattgtgtcattaaagccttttttttgtatttttattgctgcaactttcgttgcaaacttcagaaatacactcgccagcattagacggctgattacatatacgcttacaggccttacagccttattttctacataccataaccacaatggacatcccaattttccagcctctaaccaaatc

SEQ ID NO: 89725 - DNA, 5556 bp, Oryza sativa
  Clone ID: PAT_MRT4530_88458C.1
ctaagggagcaggtccgggaactcggcgcggagaagatcttctcgctcccaggttgcctcgtcttcggaatgattgctccattggactttgtagaacttgatggtcttccttcgagtctgacgttctgcctcttcaagaaccttgatcggtctttccttgtaggtcagattcttttctagctcgatattacccaggggaacttgctcttctggaactcgaagacatttctttaactgggatacgtggaacacgttgtgcacgtctgcgagaccttcaggtagctcaagctgataagccacttcgccacgtctggcggttatgaggtaggggccgatgtagcggggtgctaacttgccggacatcccaaacctcctcataccacggaggggtgatacccgcaggtatacatgatctcctttttcgaactcaaggtcacgcctccgattgtcagcgtaattcttctgacggttctgtgctgtcttcaaacgttctcgtatcagcttaacttgttcttctgctgacttgagtatgtcaggaccgaataccagtgcttcgcccacctcattccagcacaagggggtgcggcactttcttccgaacattgcctcattcggcgacatctgaatgctggcctgataactgttgttgtatgagaactcggcatacggcaaacaacgatcccaagtgccttcgaaatccaaggcacacgcacgtagcatgtcttctaggatttggtttaccctttcggtctgaccatcggtctgcggatggtaggctgtactaaaattcagatcagttccgagggcttcatgcaactgcttccagaaccttgaggtgaactgagtgcctcggtctgacacaattttcttgggacagccaaatctacatacgacatgggtcatgtagagttctgctagtttctttccatcataggtggttttcactggcacgaaatgagctgatttcgtgagtcggtccacgattacccaaatggagtcgtacccgttgggggttcttggcaaaccggtgatgaaatccattccgatctcttcccatttccactcgggaatcggtaggggttgcagcagaccagctggcctctgatgttccgccttgactctttggcaaatgtcacacagggctacgtattctgcgacgtctcgcttcattccagcccaccagaagtatgccttgatatcttggtacatcttcgtacttcctgggtgaatggagtaggcggactcatgagcttcctttaggatgagatctcttaactccttcttggccggtacacagatgcgtggtccgcaccaaactgtgccttgatcgtctatggagaaatttgtgtctttcttctcctgtattctttttattaattcttttatcccttcgtcgtctttctgagcctcccggatttgcgactctagggtaggctgtactgtcaagctggcagggacacctgactgtaccacggtcagtcttaacttctccaattctctgcacaggtgatcttggtcaggccgtatttgagctacattgcaataggccttgcgacttagcgcatcagcgaccacgttggctttaccaggatgatagtggattccaagatcgtaatccttgattagttccaaccatcttctctgtctcatatttaactcggtctgagtgaagatatacttaagacttttgtgatcggtgtatacttcacatctgttcccgattaaatagtgcctccagatcttaagagcatgaaccacggctgccaactcgagatcatgggtgggataattggcttcatgaggcctgagctgcctggatgcataggccacaaccttttgttcttgcattaggacacatcctaagccttgtcttgatgcgtcacagaagatctcgaaatcttttcggatatctggcaaggtgagaactggggcagtggtcaaccttttcttcaattcttggaagctgtcttcacaggctgcagaccattgaaatttcttttccttctttaacagctcggtcataggtctggctagcttagagaatccttcaatgaatcttcgataatatccagctaagccaaggaagctgcggatctctgacacgttcttgggcgggttccaagcaagtacagcttcaaccttgctgggatctacttcgacaccgttggaggaaatcacgtgtccaagaaatgctactcggtccaaccagaattcgcatttcgagaatttagcgaatagttgatgatctctgagcttttccattatcagcctcaggtgttcagcatgttcttcctcgttcttggagtatatcaggatgtcatcgatgaacaccacgacaaactggtctaggtattccatgaagattttgttcattaagttcatgaagaatgctggagcattggtgagtccgaaggacataactgtgaactcatatagaccataacgcgttgagaaagcggtcttcgggatatcttcagatctgattttcagttggtggtaacctgacctcaagtcaatttttgagaaaactcttgctcctttaagttgatcgaataaatcgtcaatccgtggcaacgggtacttgttctttatagttacttcattcagggctctatagtcgattaccattctctccgagccatcctttttcttaaccagaagcactggggctccccaaggggatgagctaggtcgcacataacctttactttccagttcttcgatttgtcttttaacttctgctaactcattagctgccattcggtagggtctttttgcaattggagctgtgcctggtgccagttctatggcgaactcgatctctcggtctggtggcattcttgttaattcttccggaaatacgtcgggatattcacagactatgggcaccgactccaaggaggtgacttgtaaacaggttaggatagaccgacttgcggtaggggtgttaggggtaaagcggacttgctttcctccaggtccttgcaaggtgatggacttttcggcacaatctatctgtcctttgtgcttagccaaccaatccatccctagaatgatgtccaagctttgcgagtctaggactatcggtttggctaggaagtcaacttcctcaattctaaggttaacttccgggcatatttgagttgcccttatattccttccaggggaatgtactatcattggtacacgcaaattttgggttttccaaccatttcttttcacaaaagcttgcgatatgaaagaatgggaagctcccgaatcgaacagaactattgcgggtacggagttgacagagaacatacccatcacaacgtctggagcatcctgagcggtttcagcttgaatgtgattcacacggcctcgaccaaagttgttggaagcacgtgaaccttgtccacttgcctgagagctaggacgagactgagctgccgctggagtaggagttctggcagtgctgccattagcatgccctgagttggtgttggtaggattctgaggacactgtctagcatagtgacccatctggttgcaccggaaacactgaactgctgacggtccctgcggtgacttgaaagaggtaacactgttaggcgcagtattgccactaggggcacgctgctgtggctgaggtgccggacggtttatctgaggacgaggggcgtagcctggctggcggttagcctgagtgaccgactggtggtattgcatgggttgaccgtagcgagggcgaggtgcgcctcgggaagaatttccctgatggttagacttgcgtttcttgtattcttcggtagcctcttttctggcatcctcaagtagaagtgccttgttgatcatatgttgaaaagtggggaagtcatgagcaagcaactggagtctcattccaactgcgattcctttcaagaatttcctgatcttcttcttgtctgtgtccacttcctcaggggcgtaccgagccaacttgttgaactgacttaggtactcattgacactgctgttgccttgcttaagtctgttgaattcttctttcttcatgtcaatagtgctttcaggcacatgagctgcacggaaagccgtagcgaactcatcccaagcaatgttagtgggttcagggtgtgcattgcagtaattctcccaccaatctgcggcaggtcctcttagttggtgagaggcgtagagcgtcttctcaacaggagtacactgcactaagttgagttttctatcaacatctttcaaccaatcgtcagcctcgacgggctcgacggtctgagagaactctggcggacgagacctcaaaaagtctgtcagcttggatctgttgttgcccatgtgagggtggccatttccatgcgcattatgctgaaaactggctatggctgtggttagtccttgcaagatttgtgtctgaactgccattaagtgttgcatgttggtttccacatgaggtggggaagggaggcgttcttctccagaattgtgactggcagtgcggtgagagcggtgagactgttccatctctgcatcacgggaaactgtgcgatgcgagcggctgctgcggcggggttgctcaacctctgcgttgcgggaaacagtacgatgcgaacggttgctgtggtgagactgctcattagctgattcatgattttcttctggctcaactctaccatcctcaaaaccaaagcgggctggtgcacgagctgcacggcggggacggctagccatctgtcgagggccggcagcagcacgggccgctggcggtgggggagctgggtagtggaaacggaacacggtggcagaaccaacaacacgcttccgcgcagtgcggataaagcgtgggccacggcgggaggaagcaactggggtgtgtcctggggtgtaggaagggctaactgggtgtgggtagggcgagtacactggtgagtacggcgcacgcgagctgggggagcgcgggccactgggagtgcgggcagagccgcgggagctgtgggaggacaggtggctggcgtggcagaggcggcctgagtcccaagagatagtgtcaactgaggtgacaccctcctcggccagacgggcctccaaagcggcgtagcggcgggcaagggagcggtaagcctcaaggagtaggtcgtgctgagtggcctgagcctccgaaagctcgaccatgcgagtcagcactggctgagactcgctgtacggacaagggtacctggcgtctgagtggccagagggaaggcgtggaagctgccggaaggcggaacctccgagacggtggctgtagtcgtgggccaggcgacgaagcgcagtccaggagaggtcctggtacgcgatctggagagtgggcctggccacagtgaagtggtgggggcgaaggccagctccgtgtatacctccacgggggtaaaggtacaccgagagctcacagtgagggggaacacggtccacggagtaccccgtgtactcgggacacgagaagccaaggaaacgggagaggtcacgaagctgagcgacgtggtgaccctcaccaaaaccgtgggaactgaagctggcgttcactgccat

SEQ ID NO: 89726 - DNA, 11372 bp, Oryza sativa
  Clone ID: PAT_MRT4530_88459C.1
ctaagggaacagcttcgggaactcggcgcggagaagatcttctcgctcccaggttgcctcatcttcagaatgattggtccattggaccttgtagaacttgatagtcttccttcgagtctgacgttctgcctcttcaagaaccttgatcggtctttccttgtaggtcagattcttttccagctcgatattacccaggggaacttgttcttctggaactcgaagacatttctttaactgggatacgtggaacacgttgtgcacatctgcgagaccttcaggtaactcaagctgataagccactacgccacgtctggcggttatgaggtaggggccgatgtagcggggtgctaacttgccggacatcccaaacctcctcataccacggagaggcgatacccgcaggtacacatgatctccttcttcgaactcaaggtcacgcctccgattgtcagcgtaattcttctgatggttctgcgctgtctttaaacgttctcggatcagcttaacttgttcttctgctgccttgagtatgtcaggaccgaataccagtgcttcgcccacctcattccagcacaagggagtgcggcactttcttccgaacattgcctcattcggcgacatctgaatgctagcctgatagctgttgttgtatgagaactcagcatacggcaaacaacgatcccaagtgccttcgaaatccagggcacacgcacgtagcatgtcttctaggatttggtttaccctttctgtctgtccattggtttgcggatggtaggctgtactaaaatttagatcggttccgagggcttcatgcaactgcttccagaaccttgaggtgaactgagtgcctcggtctgacacaatcttcttgggacagccaaatctacatacgacatgggtcatgtagagttctgctagtttctttccatcaaaggtggttttcactggcacgaaatgagctgattttgtgagtcggtccacgattacccagatggagtcgtacctgctaggggttcttggcaaaccggtgatgaaatccattccgatctcttcccatttccactcgggaatcggtaggggttgcagcagaccagctggcctctgatgctctgccttgactctttggcaaatgtcacacaaggctacgtattctgcgacgtctcgcttcattccagcccaccagaagtatgccttgatatcttggtacatcttcgtacttcctggatgaatggagtaggcggactgatgagcttcctttaggatgagatctcttaactccttcttggccggtacacagatgcgtggaccgcaccaaactgtgccttgattgtctatggagaaattggtgtctttcttctcctgtattctttttattaactcttttatcccttcgtcgtctttctgagcttcccggatttgcgattctagggtaggctgtactgtcaagctggcagggacacctgactgtaccacggtcagccttaacttctccaattctctgcacaggcgatcttggtcaggccgtatttgagctatattgcaataggccttgcgacttagcgcatcagcgaccacgttagctttaccggggtggtaatgaattccaagatcgtaatccttgattagttccagccatcttctctgcctcatatttaactcggtctgagtgaagatgtacttaagacttttgtgatcggtgtatacttcacatctgttcccgattagatagtgcctccagatcttaagagcatgaaccacggctgccaactcgagatcgtgggtgggataattgacttcatgaggcctgagctgcctggatgcataggccacaacctttcgttcttgcattaggacacatcctaagccttgtcttgatgcatcacagaagatctcgaaatcttttcgaatatctggcaaggtgagaactggggcagtggtcaaccttttcttcatttcttgaaagctgtcttcacaggctgcagaccattgaaatttcttttccttctttaacagctcggtcataggtctggctagcttagagaatccttcaatgaatcttcgataatatccagctaagccaaggaagctgcgaatctctaacacattcttgggcgggttccaagcaagtacagcctcaactttgctgggatctacttcgacaccgttggaggagatcacgtgtccaagaaatgctactcggtctaaccagaattcgcatttcgagaatttagcgaatagttgatgatctctgagcttttccattatcagcctcaggtgttcggcatgtcttcctcgttcttggagtatatcaggatgtcatcgatgaacaccacgacaaactggtccaggtattccataaagattttgttcattaagttcatgaagaatgctggagcattggtgagtccgaaggacattactgtgaactcatatagaccataacgcgttgagaaagcggtcttcgggatatcttcagatctgattttcagttggtggtaacctgacctcaagtcaatttttgagaaaactcttgctccattaagttgatcgaataaatcatcaatccgtggcaacgggtacttgttctttatagttacttcattcagggctctatagtcgattaccattctctcagagccatcctttttcttaaccagaagcactggggctccccaaggggatgagctaggtcgcacataacctttaccctccaattcttcgatttgtcttttaacttctgctaactcattagctgccattcggtagggtctttttgcaattggtgcagtgcctggcgccagttctatggcgaactcaatctctcggtctagtggcatactcgttaattcttccggaaatacgtcgggatattcacagactatgggcaccgactccaaggtggtgacttgtaaacaggttaggatagaccgacttgcggtaggggtgttagaggtaaagcggacttgctttcctccaggtccttgcaaagtgatggacttttcggcacaatctatctgtcctttgtgcttagccaaccaatccatccctaggatgatgtccaagctttgcgagtctaggactatcggtttggctaggaagtcaacttcctcaattctaaggttaacttccgggcatatttgagttgcccttatatttcttccaggggaatgtactatcattggtacacgtaaattttgggttttccaaccatttcttttcacaaaagcttgtgatatgaaagaatgggaagctcctgaatcaaacagaactattgcgggtacggagttgacagagaacatacccatcacaacgtctggagcatcctgagcggtttcagcttgaatgtgattcacccggcctcgaccaaagttgttggatgcacgtgaaccttgtccacttgcctgagagctaggacgagactgagctgccgctggagtaggagctctggcagtgctgccattagcatgccctgagttggtgttggtagggttctgagggcactgtctggcatagtgacccatctggttgcaccggaaacactgaactgctgacggtccctgcggtgacttgaaagaggtaacactgttaggcgcagtattgccactaggggcacgctgctgtggctgaggtgccggacggtttatctgaggacgaggggcgtagcctggctggcggttagcctgagtgaccgactggtggtattgcatgggttgaccgtagcgagggcgaggtgcgcctcgggaagaatttccctgatggttagacttgcgtttcttgtattcttcggtagcctcttttctggcatcctcaagtagaagtgctgcgattcctttcaagaatttcctgatcttcttcttgtctgtgtccacttcctcaggggcgtaccgagccaacttgttgaactgacttaggtactcattgatactgctgttgccttgcttaagtctgttgaattcttctttcttcatgtcaatagtgctttcaggcacatgagctgcacggaaagccgtagcgaactcatcccaagcaatgttagtgggttcagggtgtgcattgcagtaattctcccaccaatctgcggcaggtcctctttgttggtgagaggcgtagagcgtcttctcaacaggagtacactgcactaagttgagttttctatcaacatctttcaaccaatcgtcagcctcgacgggctcgacggtctgagagaactctggcggacgagacctcagaaagtctgtcagcttggatctgttgttgcccatgtgagggtggccatttccatgcgcattatgctgaaaactggctatggctgtgtttagtccttgcaagatttgtgtctgaactgccattaagtgttgcatgttggtttccacatgaggtggggaagggaggcgttcttctccagaattgtgactggcagtgcggtgagagcggtgagactgtcccatctctgcatcacgggaaactgtgcgatgcgagcggctgctgtggcggggttgctcaacctctgcattgcgggaaacagtacgatgcgaatggttgctgtggtgagactgctcattagctgatccatgattttcttctggctcaactctaccatcctcaaaaccaaagcgggctcctgtagtcggctcctcagtcgaagaaacgtcgatcggctggcgcgaagggaccggcggaacctgtcgagggccggcagcagcacgggccgctggcggtaggggagctgggtagtggaaacggaacacagtggcagaaccaacaacacgcttccgcgcagtgcggataaagcgtgggccacggcgggaggaagcaactggggtgtgtcctggggtgtaggaagggctaactgggtgtgggtagggcgagtacactggtgagtacggcgcacgcgagttgggggagcgcgggccactgggagtgcgggcagagccgcgggagctgtgggaggacaggtggctggcgtggcagaggcggcctgagtcccaggagatagtgtcaactgaggtgacaccctcctcggccagacgggcctccaaggcggcgtagcggcgggcaagggagcggtaagcctcaaggagtaggtcgtgctgagtggcctgagcctccgaaagctcaaccatgcgagtcagcactggctgagactcgctgtatggacaagggtacctggcgtctgagtggccagaaggaaggcgtggaagctgccggaaggaggagcctccgagacggtgggcgatctggagagtgggcctggctacagtgaagtggtgtgggcgaaggccagctccgtgtatacctccacgggggtaaaggtacacagagagctcacagtgagggggaacacggtccacggagtaccccgtgtactcgggacacgagaagccaggaaacgggcgaggtcacgaagctgagcgacgtggtgaccctcaccaaaaccgtgggaactgaagctggcgttcactgccatctgttaatcgataccagtcccaggaaatagtgctggtatcacagggagacagagtatcacagcaacagaggtctctttattatagagtagaagtacagtcatattgggatgcggacagatcccgagctcacaactgcattataaaaggaaagcggaagccaagacttggaccaatcatcacaggcgcgacttgggaactaggccgaaaccctataactcatcgtagccgacttgctcctagaagaactcctcgtcagcaggatccacttcatcttcttcagcaactggggggggattatttatatagagcaaggtttgttaacctctgcagagggggtacactttacccacacgacattactaacccggatcacccagcccgtgggggatcagccacgtcgggagacctccaagctttcatgacaaggcatttccaaagccgacacaggtttaccatatgccgacgagaggggtcccagaccaacaacaggttaggtcccagaccatactgtgccaagaagcccaggggtcctccccgacaccaccccggcgaatccacatgtctctcggcatcaaggctcccctgataagctagttactcagccaagggtgtcccattccacccatgtggtcgtacttgtcttatgtttggatgaaattccaaggaaatcggtccttaagtgcgagagcgggaaaccgtacacccgttatggcagtgaacgctagcttcagttcccacggttttggtgagggtcaccacgtcgcccagcttcgtgacctcgcccgtttccttggcttctcgtgtcccgagtacacggggtactccgtggaccgtgttccccctcactgtgagctctctgtgtacctttacccccgtggaggtatacacggggctggccacttcactgtggccaggcccaccctccagatcgcgtaccaggacctctcctggactgcgcttcgtcgcctggcccacgactacagccaccgtctcggaggctccgccttccggcagcttccacgtcttccttctgggcactcagacgccaggtacccttgtccgtacagcgagtctcagccagtgctgactcgcatggtcgagctttcggaggctcaggccactcagcacgacctactccttgaggcttaccgctcccttgcccgccgctacgccgccttggaggcccgtctggccgaggagggtgtcacctcagttgacactatctcttgggactcaggccgtctctgccacgccagccacctgtcctcccacagctcccgcggctctgctcgcactcccagtggcccacgctcccccagctcgcgtgcgccgtactcaccagtgtactccccctacccacacccagttagcccttcctacacccccggacacactccagtcgcttcctcccgccgtggcccacgttttatccgcactgcgcggaagcgtgttgttggttcttccaccgtgttccgtttctgccacccagctcccccaccgccagcggcccgtgctgctgccggccctcgacagacacaaatcttacaaggtctaaccacagccatagccagctttcagcataatgcgcatggaaatggccaccctcacgtgggcaacaatagatccaagctgacagactttctgaggtcacgtccaccaaagttctctcagaccgtcgagcccgtcgaggctgacgattggttgaaagatgttgatagaaaactcaacttagtgcagtgtactcctgttgagaagacgctctacgcctctcaccagctaagaggacctgccgcagattggtgggagaattactgcaatgcacaccctgaacccactaacattgcttgggatgagttcgctacggctttccgtgcagctcatgtgcctgaaagcactattgacatgaagaaagaagaatttaacagacttaagcaaggccacagcagtgtcaatgagtacctaagtcagttcaacaagttggctcggtacgcccctgaggaagtagacaccgataagaaaaagatcaggaaattcttgaaaggaatcgcagttggaatgagactccagttgcttgctcatgacttccccacttttcaacatatgatcaacaaagcacttctacttgaggatgccagaaaagaggccaccgaaaaatacaagaaacgcaagtctaaccatcagggaaattcttcccgaggcgcacctcgccctcgctacggtcaacccatgcaataccatcagtcgctcactcaggctaaccgccagccaggctacgcccctcgtcctcagataaaccgtccggcacctcagccacagaagcatgcccctagtggcaacactgcgccaaacagtgttacctccttcaagtcaccacagggaccgtcagcagttcagtgtttccggtgcaaccagatgggtcactatgctagacagtgtcctcagaatcctaccaacaccaactcagggcatgctaatggcagcaccgccagaactcctactccagcggcagctcagtctcgtcctagctctcaggcaagtggacaaggttctcgtgcttccaaccactttggtcgaggacgtgtgaatcacattcaagctgaaaccgctcaggatgctccagacgttgtgatgggtatgttctctgtcaactccgtacccgcaatagttctgtttgattcgggagcttcccattctttcatatcgcaagcttttgtgaaaagaaatggttggaaaacccaaaatttgcgtgtaccaatgatagtacattcccctggaaagaatataggggcaactcaaatatgcccggaagttaaccttagaattgaggaagttgacttcctagccaaaccgatagtcctagactcgcaaagcttgaacatcatccttgggatggattggttggctaagcacaaaggacagatagattgtgccgaaaagtccatcaccttgcaaggacctggaggaaagcaagtccgctttacccctaacacccctaccgcaagtcggtctatcctaacctgtttgcaagtcacctccttggagtcggtgcccatagtctgtgaatatcccgacgtatttccggaagaattaacaagaatgccaccagaccgagagatcgagttcgccatagaactggcaccaggcacagctccaattgcaaaaagaccctaccgaatggccgctaatgagttagcagaagttaaaagacaaatcgaagaactggaaagtaaaggagccccagtgcttctggttaagaaaaaggatggctctgagagaatggtaattgactatagagccctgaatgaagtaactataaagaacaagtacccgttgcctcggattgacgacttattcgatcaacttaaaggagcaagagtcttctcaaaaattgacttgaggtcaggttaccaccaactgaaaatcagatctgaagatattccgaagaccgctttctcgatgcgttatggtctatatgagttcacagtaatgtccttcggactcaccaatgctccagcattcttcatgaacttaatgaacaaaatctttatggaatacctggaccagtttgtcgtggtattcatcgatgacatcctgatatactctaagaacgaggaagaacatgctgaacacctgaggctgataatggaaaagctcagagatcatcaactattcgctaaattctcgaaatgcgaattctggttggaccgagtagcatttcttggacacgtgatctcctccaacggtgacgaagtagatcccagcaaggttgaagctgtacttgcttggaacccgcccaagaatgtgtcagtgattcgcagcttcctcggcttagctagatattatcgaagattcattgaaggattctctaagctagccagacctatgaccgagctgttaaagaaggaaaagaaatttcaatggtctacagcctgtgaagacagctttcaagaaatgaagaaaagattgaccactgccccagttctcaccttgccagatatccgaaaagatttcgagatcttctgtgacgcatcaagacagggcttaggatgtgtcctaatgcaagaacgaaaggttgtggcctatgcatccaggcagctcaggcctcatgaagtcaattatcccacccatgatctcgagttggcagccgtgattcatgctcttaagatctggaggcactacttaataggaaacagatgtgaagtatacaccgatcacaaaagtcttaaatatatcttcacacagaccgagttaaatatgaggcagagaagatggttggaactaatcaaggattacgatcttggaatccactatcatcctggtaaagccaacgtggtcgctgatgcgctaagtcgcaaggcctattgcaatgtagctcaaatacggcctgaccaagatcatctgtgcagagaattggagaagttaaggctgaccgtggtacagtcaggagtcccagccagcttgacagtacagcctaccctagagtcgcaaatccgggaggctcagaaagatgacgaagggataaaagagttaataaaaagaatacaggagaagaaagacaccaatttctccatagacgatcaaggcacagtttggtgcggttcacgcatctgtgtaccggccaagaaggagttaagagatctcatcctaaaggaagctcatgagtccgcttactccattcatccaggaagtacgaagatgtaccaggatatcaaggcatacttttggtgggctggaatgaagcgagatgtcgctgaatacgtagccttgtgtgacatttgccaaagagtcaaggcagagcatcagaggccagctggtctgctgcaacccctaccgattcccgagtggaaatgggaagagatcggaatggatttcatcaccggtttgccaagaacccccagcgggtacgactccatttgggtaatcgtggaccgactcacgaaatcagctcatttcgtgccagtgaaaaccacctatgatggaaagaaactggcagaactctacatgacccatgtcgtatgtagatttggctgccccaagaaaattgtgtcagaccgaggcactcagttcacctcaaggttctggaagcagttgcatgaagccctcgggactgatctaaactttagtacagcctaccatccgcagaccgatggtcagacagaaagggtaaaccaaatcctagaagacatgctgcgtgcgtgtgccttggatttcgaaggcacttgggatcgttgtttgccgtatgccgagttctcttacaacaacagttatcaggccagcattcagatgtcaccgaatgaggcaatgttcggaagaaagtgccgtacccccttgtgctggaacgaggtgggcgaagccctggtattcggtcctgacatactcaagtcagcagaagaacaagttaagctaatccgagaacgattaaagacagcgcaggaccgtcagaagaattacgctgacaatcggaggcgtgaccttgagttcgaaaaaggagatcatgtatacctgcgggtatcacccctccgtggtatgagaaggtttgggatgtccggcaagttagcaccccgctacatcggcccctacctcataaccgccagacgtggcgaagtggcttatcagcttgagctacctgaaggtctcgcagatgtgcacaacgtgttccacgtatcccagttaaagaaatgtcttcgagttccagaagagcaagttcccctgggtaatatcgagctggaaaagaatctgacctacaaggaaagaccgatcaaggttcttgaagaagcagaacgtcagactcgaaggaagacaatcaagttctacaaagtccaatggagcaatcattctgaagatgaagcaacctgggaacgagaagatcttctccgcgccaagtttccggagctgctcccttag

SEQ ID NO: 89727 - DNA, 1681 bp, Oryza sativa
  Clone ID: PAT_MRT4530_8845C.1
caagagcgaaaattccattactcgataaccagagggcggatctgcaaaaagcctcctcctctccacccctcgtcggcggcatctcgtcgcccccgcctcgaagcttccagaagcttctcctcctctctcctcccctccccatggcgcggcggggccaccaccaccacctggcggaggtggccctcctcgcgtcggcctccgaggacctcgccgccgtgggcgccggcgagagggaggggtggctcgacgaccccgccgtgctcccctccctcgcgccgcgcgcgcgcgccctcgccgtcgccagcgcggcgaggtccgtgctcgcggttgtcccggtcgccggagtaggcggtggggtcacggtgaggcccgcgctggggcccgacgacggccggatctccgcggtggagtgggtcccgctcgtcggggaggacgccgaggaggctggtggggagggagtggccgtcgccgtgggcaccgacgccgggtggcttctgttctactctctcgcaggcgatctactgcacaagcagagtatttatccttcaaagatactgaaacttaacttccgtgagaggaaggaaaacgcctgggaagattcgggttcagatgagctttctgtggttttccctggtgttattgcacgttttgatggtgctgaccttcagttattggttatttgcagaacatgcttcaaaaatcattacatgaagttaaatcacacctgtggaaagacaaatctgaacaggaagatgctgaggaagatagttcctttggaagaataccttttcaaatttggaatctgcttttatattgctgggcagtcgagtcagcgccattattgtgcaattacagttggagaggatgctgtagtttctgcatataggttatcagaagacagaagcaggtcaattgttggagcaattttatcaagaggtgttgctgcaacattttcaacaatatcatctctgtctaaaattatatggcggagcgaaccatcaccaaccaagaaatcacgtcctaagcctcagtcctttgcaaaaacatcaccactaacttgcttgaaagattcaccgaggaagggtgaacggcttacactatctccaagtggtacattggctgccataactgattctcttggccgcattctactattggatactcatgcccttgtggctgtacggctgtggaagggttaccgtgatgcttcatgtctttttgttgagatgcttctgaacaaagataaagcatcgagctcactgcacacagaatatacaaagagtgactattgcctgtgcctagcgatccatgctccacggaaaggcatcattgagatctggcaaatgcgtaccggggcacgtcttctgaccatcccgtgccccaagggaagcaggatcttacagccatcgacgaggttcatgtcatcgcccttctcatcgttgtattcaccattggaggtttacctgttcaacggtgactctgggcagttgtctgtattgaataggcacattggttaaatatctcttctcttgtgctgttttcttttttttcttttaccgcccagggttgtacagtactattttaattcctgaatggctaggtgtttatgatttggcctttcaaggagataaataaataaagctagttttgtgtgattttgccaaaaaaaaaaaaaaaaaaa

SEQ ID NO: 89728 - DNA, 381 bp, Oryza sativa
  Clone ID: PAT_MRT4530_88460C.1
tcacgggcgatcgcctccatggccgccaccgctagccgttgccccctctatgtcaccgctccggttcgcggcgtgggggtggaggagaatgccgccgccccccacctgcgccccgcgcctctcgccgccgccgccgccggcgacgacgaatttcttccacccgcatccccctcctcctagcaagctagccgacggcaacgcctcccggttccccctatgaactgacgtcgagacctcatcccggccgccaccagcgccaacgccgctcctcctcctccacgagccggtgcctggatatttctggatctgaggccggcccgtggctgcaggactgcgtgcaccattcttccgacccgacgttctgccgccgcgcgcctccat

SEQ ID NO: 89729 - DNA, 558 bp, Oryza sativa
  Clone ID: PAT_MRT4530_88461C.1
atggaggcgcgcggcggcagaacgtcgggtcggaagaatggtgcacgcagtcctgcagccacgggccggcctcagatccagaaatatccaggcaccggctcgtggaggaggaggagcggcgttggcgctggtggcggccgggatgaggtctcgacgtcagttcatagggggaaccgggaggcgttgccgtcggctagcttgctaggaggagggggatgcgggtggaagaaattcgtcgtcgccggcggcggcggcggcgagaggcgcggggcgcaggtgggggaggcatttaacctggcaaaccccacccctcttgtcttcttccccgcacaaggcgagtcgacgccgcgctcccctccttccccggcgagaaaaaaaggtgagatcgcgtccatctcgtcccccccacgccgacgcgacgcacgagttgatcgtattccccacatcccattccttgcaggcggcggcattctcctccacccccacgccgcgaaccggagcggtgacatagagggggcaacggctagcggtggcggccatggaggcgatcgcccgtga

SEQ ID NO: 89730 - DNA, 7402 bp, Oryza sativa
  Clone ID: PAT_MRT4530_88462C.1
ctaagggagcagctccggaaactcggcgcggagaagatcttctcgttcccaggttgcctcatcttcagaatgattgctccattggactttgtagaacttgatggtcttccttcgagtctgacgttctgcctcttcaagaaccttgatcggtctttccttgtaggtcagattcttttccagctcgatattacccaggggaacttgctcttctggaactcgaatacatttctttaactgggatacgtggaacacgttgtgcacatctgcgagaccttcaggtagctcaagctgataagccacttcgccacgtctggcggttatgaggtaggggccgatgtagcggggtgctaacttgccggacatcccaaaccttctcataccacggaggggtgatacccgcaggtacacatgatctcctttttcgaactcaaggtcacgcctccgattgtcagcgtaattcttctgacggttctgtgctgtcttcaaacgttctcgtatcagcttaacttgttcttctgctgacttgagtatgtgaggaccgaataccagtgcttcgcccacctcattccagcacaagggggtgcggcactttcttccgtacattgcctcattcggcgacatctgaatgctggcctgataactgttgttgtatgagaactcggcatacggcaaacaacgatcccaagtgccttcgaaatccaaggcacacgcacgtagcatgtcttctaggatttggtttaccctttcggtctgaccatcggtctgcggatggtaggctgtactaaaattcagatcagttccgagggcttcatgcaactgcttccagaaccttgaggtgaactgagtgcctcggtctgacacaattttcttgggacagccaaatctacatacgacatgggtcatgtagagttctgctagtttctttccatcataggtggttttcactggcacgaaatgagctgatttcgtgagtcggtccacgattacccaaatggagtcgtacccgctgggggttcttggcaaaccggtgatgaaatccattccgatctcttcccatttccacccgggaatcggtaggggttgcagcagacctgctggcctctgatgctctgccttgactctttggcaaatgtcacacaaggctacgtattctgcgacatctcgcttcattccagcccaccaaaagtatgccttgatatcttggtacatcttcgtacttcctggatgaatggagtaagcggactcatgagcttcctttaggatgagatctcttaactccttcttggccggtacacagatgcgtggaccgcaccaaactgtgccttgattgtctatggagaaattggtgtccttcttctcctgtattctttttattaactcttttatcccttcgtcatctttctgagcctcccggatttgcgattctagggtaggctgtactgtcaagctggcagggactcctgactgtaccacggtcagccttaacttctccaattctctgcacagatgatcttggtcaggccgtatttgagctacattgcaataggccttgcgacttagcgcatcagcgaccacgttggctttaccaggatgatagtggattccaagatcgtaatccttgattagttccaaccatcttctctgcctcatatttaactcggtctgtgtgaagatatatttaagacttttgtgatcggtgtacacttcacatctgttcccgattaaataatgcctccagatcttaagagcatgaaccacggctgccaactcgagatcatgggtgggataattgacttcatgaggcctgagctgcctggatgcataggccacaacctttcgttcttgcattaggacacatcctaagccttgtcttgatgcgtcacagaagatctcgaaatcttttcggatatctggcaaggtgagaactggtgcagtggtcaaccttttcttcatttcttgaaagctgtcttcacaggctgcagaccattgaaatttcttttccttctttaacagctcggtcataggtctggctagcttagagaatccttcaatgaatcttcgataatatcccgctaagccaaggaagctgcggatctctgacacgttcttgggcgggttccaagcaagtacagcttcaaccttgctgggatctacttcgacaccgttggaggaaatcacgtgtccaagaaatgctactcggtccaaccagaattcgcatttcgagaatttagcgaatagttgatgatctctgagcttttccattatcagcctcaggtgttcaacatgttcttcctcgttcttggagtatatcaggatgtcatcgatgaacaccacgacaaactggtccaggtattccatgaagattttgttcattaagttcatgaagaatgctggagcattagtgagtccgaaggacataactgtgaactcatatagaccataacgcgttgagaaagcggtcttcgggatatcttcagatctgattttcagttggtggtaacctgacctcaagtcaatttttgagaaaactcttgctcctttaagttgatcgaataaatcgtcaatccgtggcaacgggtacttgttctttatagttacttcattcagggctctatagtcgattaccattctctcagagccatcctttttcttaaccagaagcactggggctccccaaggggatgagctaggtcgcacataacctttactttccagttctttgatttgtcttttaacttctgctaattcattagctgccattcggtatggtctttttgcaattggtgcagtgcctggtgccagttctatggcgaactcaatctctcggtctggtggcatactcgttaattcttctggaaatacgtcgggatattcacagactatgggtaccgactccagggaggtgacttgtaaacaggttaggatagaccgacttgcggtaggggtgttaggggtaaagcggacttgctttcctccaggtccttgcaaggtgatggacttttcggcacaatctatctgtcctttgtgcttagccaaccaatccatccctaggatgatatccaagctttgcgagtctaggactatcggtttggctaggaagtcaacttcctcaattctaaggttaacttccgggcatatttgagttgcccttatattccttccaggggaatgtactatcattggtacacgcaaattttgggttttccaaccatttcttttcacaaaagcttgtgatatgaaagaatgggaagctcctgaatcaaatagaactattgcgggtacggagttgacagagaacatacccatcacaacgtctggagcatcctgagcggtttcagcttgaatgtgattcacacttcctcgaccaaagtggttggaagcacgagaaccttgtccacttgcctgagagctaggacgagactgagctgccgctggagtaggagttctggcggtgctgccattagcatgccctgagttggtgttggtaggattctgagggcactgtctagcatagtgacccatctggttgcaccggaaacactgaactgctgacggtccctgtggtgacttgaaggaggtaacactgtttggcgcggtattgctactaggggcacgctgctgtggctgaggtgccggacggttcatctgaggacgaggggcgtagcctggctggcggttagcctgagtgaccgactggtggtattgcatgggttgaccgtagcgagggcgaggtgcgcctcgggaagaatttccctgatggttagacttgcgtttcttgtattcttcggtagcctcttttctggcatcctcaagtagaagtgccttgttgatcatatgttgaaaggtggggaagtcatgagcaagcaactggagtctcattccaactgcgatccctttcaagaatttcctgatcttcttcttgtctgtgtccacttcctcaggggcgtaccgagccaacttgttgaacatacttaggtactcattgacactgatgttgccttgcttaagtctgttgaattcttctttcttcatgtcaatagtgctttcaggcacatgagctgcacggaaagccgtagcgaactcatcccaagcaatgttagtgggttcagggtgtgcattgcagtaattctcccaccaatctgcagcgtgtcctcttagctggtgagaggcgtagagcgtcttctcaaccggagtacactgcactaagttgagtttcctatcaacatctttcagccaatcgtcagcctcgacgggctcgacggtctgagagaactctggcggatgtgacctcagaaaatctgtcagcttggatctattgctgctcacgtgagggtggccatttccatgcgcattatgctgaaaactggctatggctgtggttagtccttgcaagatttgtgtctgaactgccattatgtgttgcatgttgttttccacatgaggtgggggagggaggtgttcttctccagaattgtgactggcagtgcggtgagagcggtgagattgttccatctctgcattacggaaaactgtgcgatgcgagcggttgctgcggcggggttgctcaacctctgcgttgcgggaaacagtacggtgcgaacggttgctgtggtgagactgctcattagctgattcatgatttgcttctgcttcaactctaccatcttcaaaaccaaagcgggctggtgcacgagctgcacggcgggggcggctagccatggacggctgctgaagactgcctcctctactcctcgtcggcctggctgcctcctgtagtcggctcctcagtcgaagaaacgtcgatcggctgacgcgaagggaccggcggaacctgtcgagggccggcagcagcacgggccgctggcggtgggggagctgggtagtggaaacggaacacggtggaagaaccaacaacacgcttccgcgcggtgcggataaagcgtgggccacggcgggaggaagcaactggggtgtgtccgggggtgtaggaagggctaactgggtgtgggtagggggagtacactggtgagtacggcgcacgcgagctgggggagcgcgggccactgggagtgcgggcagagccgcgggagctgtgggaggacaggtggctggcgtggcagaggcggcctgagtcccaagagatagtgtcaactgaggtgacaccctcctcggccagacgggcctccaaagcggcgtagcggcgggcaagggagcggtaagcctcaaggagtaggtcgtgctgagtggcctgagcctccgaaagctcgaccatgcgagtcagcactggctgagactcgctgtacggacaagggtacctggcgtcgtgcggagggagcacgcgacgcacgcgcgcgggcggggaagggacgcggtgcatgcgcgcggtccgcggtggacgcaggtgacccatctggttgcaccggaaacactgaactgctgacggtccctgcggtgacttgaaagaggtaacactgttaggcgcagtattgccactaggggcacgctgctgtggctgaggtgccggacggtttatctgaggacgaggggcgtagcctggctggcggttagcctgagtgaccgactggtggtattgcatgggttgaccgtagcgagggcgaggtgcgcctcgggaagaatttccctgatggttagacttgcgtttcttgtattcttcggtagcctcttttctggcatcctcaagtagaagtgccttgttgatcatatgttgaaaagtggggaagtcatgagcaagcaactggagtctcattccaactgcgattcctttcaagaatttcctgatcttcttcttgtctgtgtccacttcctcaggggcgtaccgagccaacttgttgaactgacttaggtactcattgatactgctgttgccttgcttaagtctgttgaattcttctttcttcatgtcaatagtgctttcaggcacatgagctgcacggaaagccgtagcgaactcatcccaagcaatgttagtgggttcagggtgtgcattgcagtaattctcccaccaatctgcggcaggtcctctttgttggtgagaggcgtagagcgtcttctcaacaggagtacactgcactaagttgagttttctatcaacatctttcaaccaatcgtcagcctcgacgggctcgacggtctgagagaactctggcggacgagacctcagaaagtctgtcagcttggatctgttgttgcccatgtgagggtggccatttccatgcgcattatgctgaaaactggctatggctgtgtttagtccttgcaagatttgtgtctgaactgccattaagtgttgcatgttggtttccacatgaggtggggaagggaggcgttcttctccagaattgtgactggcagtgcggtgagagcggtgagactgtcccatctctgcatcacgggaaactgtgcgatgcgagcggctgctgtggcggggttgctcaacctctgcattgcgggaaacagtacgatgcgaatggttgctgtggtgagactgctcattagctgatccatgattttcttctggctcaactctaccatcctcaaaaccaaagcgggctggtgcacgagctgcacggcgggggcggctagccatctgtcgagggccggcagcagcacgggccgctggcggtaggggagctgggtagtggaaacggaacacagtggcagaaccaacaacacgcttccgcgcagtgcggataaagcgtgggccacggcgggaggaagcaactggggtgtgtcctggggtgtaggaagggctaactgggtgtgggtagggcgagtacactggtgagtacggcgcacgcgagttgggggagcgcgggccactgggagtgcgggcagagccgcgggagctgtgggaggacaggtggctggcgtggcagaggcggcctgagtcccaggagatagtgtcaactgaggtgacaccctcctcggccagacgggcctccaaggcggcgtagcggcgggcaagggagcggtaagcctcaaggagtaggtcgtgctgagtggcctgagcctccgaaagctcaaccatgcgagtcagcactggctgagactcgctgtatggacaagggtacctggcgtctgagtggccagaaggaaggcgtggaagctgccggaaggaggagcctccgagacggtggctgtagtcgtgggccaggcgacgaagcgcagtccaggagaggtcctggtacgcgatctggagagtgggcctggctccacgggggtaaaggtacacagagagctcacagtgagggggaacacggtccacggagtaccccgtgtactcgggacacgagaagccaaggaaacgggcgaggtcacgaagctgagcgacgtggtgaccctcaccaaaaccgtgggaactgaagctggcgttcactgccat

SEQ ID NO: 89731 - DNA, 487 bp, Oryza sativa
  Clone ID: PAT_MRT4530_88463C.1
acgtgtttgtcccgaatctcgagaggctctcgtggacgggtcgaatgctatcacgtgctcaagatgcagatctttgggaagacattgaccgggcagactatcaccctgtaggtggaccgctctgacaccatgcttaatgccaagggtaacatccaagataaggaggggatgctcgcggaccagtagcgcgtcatctacggtggcaagcagctggaggatggcaggacccttggtgactacaacatgcagaaagagttgacccttgaccttgttctccgtctccgaggtggcatgcagatctttgtcaagactctaaccggcgagactatcacccttgatggggagggtgttgacaccatacacaacgtgaagggcaagatccaggacaaagagggtatccgcgcagaccaggagagtccattttcgccgctagcacctgaagatgcgacgacccttgctgactacacactcaaaggagtccaccctc

SEQ ID NO: 89732 - DNA, 338 bp, Oryza sativa
  Clone ID: PAT_MRT4530_88464C.1
gcacgaggcgattcttgatccagaagagcatcgcaggttcagaagctttacgttggatttctcctacccaagggttccaagcagcgtaaggaatgcatggccagcaattcaaccaggcgatcggatctccggtggtatccagtggcacaggaacgtagctcctcatggtcactctagtgcagtggcgggatatggtgccaacacatacagcggccaaggtagctcttcttcagggccaccggtgttcgctggcccaaatctccctccaggtggatgtctcgcaggggtcggtgccgccaccgactcgagctgtgctctctctcttctgtcaacccagc

SEQ ID NO: 89733 - DNA, 419 bp, Oryza sativa
  Clone ID: PAT_MRT4530_88465C.1
tcgctatgaaccaaccacaggaaaaatgccaatccagtgcttattccctcatcaaagcgcgagccttgtggcctctgccgcgggtggcgccagcggcgccggccacagggcggtgacagatggcgggcggaccctggtgcgtggggaataggagctacaacgggacgctcctacccggtgacggcatcaggccagaagtggtcgccctccccaaggacggtctgtccctcgccggtgctatggaaggcggacagttccgcttacaggagaagctgatgggcggtgaggcaggggatgcttacagagggccgatcccggaggagacgctcagggcggcgcatgcatttgactcctgtatccatctggccataagacggtataagtgggattacaaagagaagcacctacagccagacact

SEQ ID NO: 89734 - DNA, 3351 bp, Oryza sativa
  Clone ID: PAT_MRT4530_88466C.1
atgggccgtcgtggcgcaagcgctgggacctgcagagtgctgctggcctggctgatgcatttcacagttcaagaaggcgccaggacttgttttatatcatttggtaactttgggagggttctctggttctttcgtggtcatagattagcaaaagaattggattcaaaaagtggtgccaaaaaccaaaaggttgttagaaagaatcgtctgtgtgctgaagaaatggcccccacgacagaaatcaaggaaaagtccccaagtcaagtcaactgtggaggtgtatccaaagacccaaacccctgctcatatagcagctcatctccatcttcttgcaaaccatcagtagttaagttcatctctccatctgcacgacttcaagccatccaatgctacaatcttcagaggaaaacccaagattttcttggaatctttgagctcaactccatgagctctgtagagaacccaagcaatggcaggagcaatggccatgctcctgccaacgcttctgctgctactgctaattcggcacaagcgacgcagcaaggccaaaccgagcagaatccgtgcgacgcgggctccgaggccgatctcctgtggaagctgaggaagtacctggtgctgcttgccatcctagcagcggccatcaccttccaagccgggctagggccccccggcggcttctggcagcaggaccagcacggctaccacgccggcgacgtggtgctcaggtacagctacccgaggaggtacctcgtcttcttctactgcaacaccacggcgttcggggcgtccctcatcgtcctcatactgctcctcgtcaaggagctgagccgcgacgccatttggctccggtccctccagttcgccatggtgctcggcttgctcggcctcatgggtgcctacgctgccggcagctgcagggaggtgaggacctccgtctacatctgggctttgcttgttggcatctttgcatatatcactctccatgtcgtattcttccggcatctggcacctcaatggctgtgtgaaatattctacacgattcggaaacactggaaggagattctggggagtatacatggagatggaggaaccgataagacgggagaaactggggattctgaaaagacgaaacgtctggaacagaatcgcagcttcttgctggttcttgccacattggctgcaacggtgacatacactgcggggctaaacccaccaggtggattctggcctgatgacaacaagcctagccatcttgccggtgacccggtgctgcgagatcactacccgcgccggttcaaggcgttcttggtctgcaatgccactgcatttgctggatcacttgtcatcatcatcatgctgctcagcaatacagcagtggatcatgttgtcaagtcaaatgctctgcggttgtgtgtgttggtgagcctctttgggcttatgggtgcctatgctgctgggagttgcagggaagtccatacatctatatatgtctttgcccttgttggtgctgttttcctctacctctgtattcagtggatcgagcatatggtgccaataccttgcataaagagttccatggaatgggtgggaaaaaagaagacccatttacttcagaagctgggttctttcatcatgcgggggactaggaatcctactgaagaatcgcgctctactcccagagcacaaaatccagtgaacaacagaaggtcaggcacttccgatactgctaaggatgatgttgagaagttgcgcacatatcttctgttgcttggtatccttgctgccactgtcacataccaagctgggctaaatccaccaggtggcttttggcaagataataatggacatactgctggtgacccaatcttggaggccatcaatcccaagcgctacaaggcattcttctattgcaatgctaccgcgtttgtggcatctttggtgatcatcatcttacttcagagtcaactgattactgttggtgccatgaagcgtcacatattgcaaacagccatggcattagacctttttggtcttatgggggcctatgctgctgggagtagcagaaagttctcaacgtcagtgtatgtgttcatcttggtccttgttgttttcacttatttcacgcttcatgttctgctgtccatggctctcaagactcaactgaagacaaaaattgaacatgtgccaaacttattccatcgttttacgagattttgtttcagaagaactgaaggggggagtgatgatggacgaagtgattcggtggagctgcaaaatgaagaaaaagatttggagaagcggcgcaagtttctgatgatgcttgcgattctagcggcttccatcacatatcaatctggtctaagcccaccaggtggcttctggagtgacaacgatcgtcaccgagcaggcgatccagtgctccatgatgagtttccaggccgttacaggattttcttctacttcaacgccactgctttcatggcatctctggcagtgattctgttgcttgttaacaagaggctgtgtgacaagggtctgaagtcctatgctttgcgcgcttgcgtgctggttgatttgattagtctcatgggtgcttttgctgctggaagctgcaggagagtgtcgacatctatctacgtcattcttgtcgtcgctgcagtatttgcatatgtcatgattcaaatcctggttctacaagttgcagaacaaaaagtggacttactgaagaagcgccgttctggttttgagagccagcaaagatccatgactctgactggtccaactggaagcactgataagaaacgaacagaacacaaatggcgcaaagatttgatgctgattggaactcttgcagtcactgtcacataccaagctgggctactccctccaggtgggctttggcctagtgaccaaggcaaccattatgcgggagacccaatcctcaaggttacccatcctataaggtacaaggtattcttctattgcaatgcaacagcattcatggcctcaacggtcatggtcatcctccttctgaacaacacaataagcaagtacaagagatcactccttgccatgaagacagcaatggtattagacttgcttggtctccttggggcatatgcagccggcagctgcaggaagttcaagacatctgcatacatttttgcacttgtcatcgccgtgtttatctacatcgtcattcatgtattgctgtcatttgatgaggtcgcattgttagtgaaagagaagggaaagaaatggatgccatgccttaagatgtgggatcagattgaaacaggagcttcggatcaaccttctgctacgcaatcaggagctccacctgtgtaa

SEQ ID NO: 89735 - DNA, 446 bp, Oryza sativa
  Clone ID: PAT_MRT4530_88467C.1
gggggaatggccaagtgtttttctaaaattgcaaggttgtattacatgtttggcaacaaaaacaaaatgctggtggacaaatgaaaggagagaaacaatcagcctttgtattcaaacctatgaagaggtgaatctcctatgtatatacagatctaatctcggaaaacacagaaagactaaaagaacaaaagtgaggatgggaatgccacccagggtgtgctgttagccttagccacctatatcatcatatgaaataatcaacttccgtgctgtttaccattgggggggggcttacccccctttttttgttttttgcccaaaccccctttttttaatggttttaaaaaaacttcccgggggttaaacaaattgggggaaggaacaaaggaaattttgtttttttttgaaactgaaacctataaacatgttctgaaacccgatgccct

SEQ ID NO: 89736 - DNA, 1905 bp, Oryza sativa
  Clone ID: PAT_MRT4530_88468C.1
atggcggcgtacttcacaggcggcggcgccggcaccgacgtcgtccaggccgccggcaccgacggcctgcagacgctctacctcatgaaccccagctacgtcggcttcacggacgccgccgcggcgcccggcggcggcgccgccgccgccaacatggtgttcctcaactcggcggtgagcaccctcacgccggcgagcttcagccaccaccaccagccgacaccggcggcgcagcacttcgtcggcatccctctccagtcggggtacaacctgtggggccctgacgccaccggcggcaacgacgtgtcgccgccacgccacggcgcccagcagcaagcgccagcagcagctggcacgtcggcggcggcggtcagccccgtgctgagcctgtcgtcgcgtgaggcggcgccgccggtcaccgtggccgccgccgccgccgccgccgccgtccccggcggcacggaccaggagaaggtggtgatgcgctccaggtacctgaaggcggcgcaggagctgctcgacgaggcggtgagcgtcagcaagggcgccgcgacggcggtgaagaagaaggaggactcggagggcggcgtgtccggtggcggcggcggtgcggaggacggtggcggcagcaagagcggcgccgccgccgagatgtcgacggcggagcggcaggagctgcagatgaagaagagcaagctactgaacatgctcgatgaggtggagcagcggtacaggcagtaccaccggcagatgcagggggtggcggcggcgttcgaggcggcggcgggggccgggtcggcgacgacgtacacgtcgctggcgctgcgcaccatctcgcggcagttccggtgcctccgcgacgccatcgcggcgcaggtcagggcggcgagccgggggctcggggaggactgcggcgacgacgagggcggcggtggcggcgggaggacgacggtggggtcgcggctgcggttcatcgaccaccagctccggcagcagcgcgcgatgcagcagcttggcatggtgcacgccgccgccgccggtgggcgccgccggcggcgggtggcggccgcagcgtggcctccccgagcgcgccgtctccgtcctccgcgcttggctcttcgagcatttcctccacccgtgtcgaactggttcatcaacgcgagggtgaggctgtggaagccaatggtggaggagatgtacgccgaggagaccaaggccaaggaggaggaggaggaggagcacgacgcggcggcggccgccgccggcgaccgtggcggcgtggcggagcaggctccgagtaagccggacgacagtgctggcattggcatgtcgtcgtcgtcgccggcggtggcggcgtccaggtcagttggtgtgcacgccggagaccagcacgctcaggcgagcttctacggcggcggcggcggcggcgacgatccgttccagtgcaggatcaagaaggcgaggacgacgacggcggacgagccggcggcggccgcggcgttccacgtctccggcgaggccgccgtgagccaccgggagctgctaatgaagttcactgaggccggcggcgagggcgtgagaacgggccacccgcacgtcaacgacgacgacgacgacgtccctggcggcgccggcgggtactcgctgttcacggcggcgcagtacgggcatcagttcggctcggaccatttcgcgttcgccgggcacggcggcggaggcggcggcggcgtgtcgctcacgctcggcctcccgcacggcgccgaccagacgccggcgtcgtttctcataggcgccggcgccggcagcgacggcggcggcgcgccggtgacgacggccggctacgacatgaacatgcagagcaccaagtcgttggctgctcagctcatgagagacttcgtggcatag

SEQ ID NO: 89737 - DNA, 438 bp, Oryza sativa
  Clone ID: PAT_MRT4530_88469C.1
caacttggattgatgcatcgaaatttttaaatccccattattttttaatggcagaaatgaaagctcatacgtttggaatttttcgtaggacaaaaaaaatttacattgagatgctgaaaccaaaaccagcaaattcgcgcgtttgggaaacaaccttcactatgcttttacactggacaaaacacaactgtgttacagggaagccttcatgcggttcaaataaatcaaatgtgcataaaaattttacatgatcttggaagctgcacatgtcacaaaactcacgcccgatacagggcacgctttaaactaaatccaaaaaagtccggctaagctgtcccaactacatggatatggaatggaaatccacggcttattttaggttcgttgggcgactttgcctttgcccgagcacaaaaaacattggttgcgtcaattata

SEQ ID NO: 89738 - DNA, 1784 bp, Oryza sativa
  Clone ID: PAT_MRT4530_8846C.1
cagacagtgacagtcctcagttcattgaccttcacgaccgctcgtccggtaaccaaaacacataagctcagcttcagctcagtctcctccatggagcccaagtcttcttcttcctcacactatctgcagccatctgcaacattgccatcaacaagaagaaactcattccaaggagtgggagctgaagctggaggaggaggaggaggcatgaacccattcgggcccacattcagtgacccactctgcagcctcaacctcaaggagacctcagagttcgtgaggtcatccttccccatggctaccatggcgaggagcaacagcagcaacggcgccaccggcaatggcggccatggctaccaccgcgagacctccacggcctcttcatcctcttcctcctcggcctcagctcagaggaggcgagccgagcagcagcagcagcaggtgccagctactccagggcggccattgctgttcttcaattcctcgagccctgcacatcaccagctcgtctccgcgaggaggtcggtgccttccaagtgggaggatgcggagaagtgggtgaggcaggcgtcgtccgaccaccatggcggccatcaccaccaccatggcaagggctccaagcttcaggaggagaagagggcgtcggcggtgaggaggtcggtggatgctgacgtcactgctcttgctctctacactgctcctgctgcagaagtgttcctcaaagacaagttcactgacaatgtggagccctccaaggagagcttcgtgttccggagctcctactgcgagccaacaaagaacacggcggcgcaggcggtggccgccggcaacggcatcgaccaccggcgtgacatcggcacggagatgactccgctgggcagctccaccacctcgaggtgccacacgccgatcaagagcacctcgccggcgaggcacaacacgccggcgagccggtcgggccccctggtgccgtacgccggcggtggcggcggcgccggccaggacatctcggacctcgccgactgccacttcgccaagctggacctcggcgcgcagttcgacgccatgctcatcaactggagctccaaggaggaggaggaggaggaggtgtccaagagcttgaggcacttcgaggccagcgtcgccgccgtcggcgagaagcgcggcggcgccggcgactgccggtgggaggacgatgacagggccaagagctgcataaggtatcagagggaagaggcaaagattcaagcttggatcaacctggagagtgccaaggctgaagcacagtccagaaagctagaggtgaagattcagaagatgagatcaaacctggaggagaagctgatgaggaggatgacgaccgtgcaccggcgcgccgaggagtggagagcgacggcgcaggcgcagcacctccagcagctgaagcgcgccgccgagcaagtccggcgggccaaggccaccagccaccatcaccaccaccaccacctcgccggcagcaacgcctcctgcggctgcttcccctgcaatggcagcaacaacatcatcagtggcaacctcctgaactactattagatatgatcagctagccgccatggaagaaggatcaagaatgccaatttgttcgggagatcaacgggttcttgttgattgtagtggatgtttgggacgtgtgaagatggagatgtgggagataatggtgtcatgtgtatcaaaaaactctgatttttcaaggtgatatataccagattgctgaatgccaaatgtcatgaaaaaaaaaaaaaaaa

SEQ ID NO: 89739 - DNA, 3699 bp, Oryza sativa
  Clone ID: PAT_MRT4530_88470C.1
atgtggggcctacataaatcatatcctccccctctctttctcttcgtgagcgttggacgggagctagcggcggtggccggcgcctcctccaactccatccacagcctcctcctcccctttcccgcggcgtcgttgctggcggcggcggtgcatcagcccgcaagcggcggagacccgggagtggcactggagcggcgacagcgacgtgcgcgcgagggccatagcggcggcggcggcggagatcgaggccgccgtggaaggttggctgttggaaggaagaaaacgagccatgagaacggccgcgtcctcgccaccctcggccccgccaccgcactatccaccgctgcgctcgacgccctctctgccggccacgacgcacctgcctccgcagttctcccgccgtgcccacgaacacgtaagggccgcctgcgtctcgccaccgcgactcacgtcggcatcctctcgaagatggcggcattcggcggtggcttcttctgcacctgcggcggcagcgttgaaggttccggcggccgcgcctcgggcagcggcgggagcgaccgcgggctggtgatccaccgcgtggtcaaggaagcaggaggtgcagcgaactacccgctgttgacaagaaccaactacaacgattggtctttgctgatgaagatcaaactgcaagcccggtgcctgtggggcgccatcgatccaggcggcgtcgagcttcatgaggataggatggcgcttgacgccatttgcagcgcggtgccccccgagatgatctcgaccttggccaccaaggcctcggccaaggaggcatgggattgcatcaggatcctgcgagtcggcgacgaccgaattcgcaaagcaagcgcacagaaggtgcgcatggagtacgagtcgctcgtccttcgcgacggtgagaccgtggaggacttcgccatgcgcctgacctccaccgtcaatcaactcgcgacgctcggcgatcccgagccggcagacaaggtcgtcgagaagtacctgcgcgtcgcccgtcccaggttcacccaactcgtcctttccattgaaactctccttgatatctctacactgtccctggaggaggtgaccggcagactcaaggcagctgaggacgccatgccattgccatcttcgtcctcagacaacgccggcaagctctacctcaccgaggaagaatggctagagcgccacaataaaaaggagcaggaggcaaagaagaactcaggcagcccaagcaaccgtggcaagcggcgaggcggcaaaggccgcaacggcggcggcgctggagtcggcggcgcgaagaatacgaactccggagcggcccgtcgtgaagacaaatgccgcaactgtggcaaatacggccactgggccaaggattgcaggagcaagcccaagcgggatgaacaggcccacgtggcacaagacgacgagcccaccttgcttctcctcacaggaggagtaatcacacatgcatgtgaacaggagcatgcaccagcgccgtctgcgccaactccgtcatccgatcccatctacctggaggaaaagaagctgttcgcggcgctcgacgacgccgcgaagcgtgatccgggccgctggattgtggactccggcgcctccaaccacatgaccggctgccggacggccttctccgacattgacacaggcatcaccggcaacgtccgactaggagacggctccgtcgtccgaatcgaagggcgaggcaccgtgctcttctcctgtaagaatggggagcatcgaaccctctccaacacctacctcattccacgcctcgctgctaacatcattagtgtcgggcagctagacgagaccggtttcaaggtggaggccgaggatggcgttatgcggatatgggatgagcagcggcgcctgcttgcccgtattcaccgcaatcctggacgtctctacgtcctcgacgtcgagctcgcgcgcccggtctgccttacggcacgcatcggcgacgaagcatggaagtggcatgcacggttcggccacattaacttcactgcgctgcggaaaatgggcagagagcagctagtgcgcggtcttccggctgtgtcgcaagttgaccagctttgcgaggcttgcctcgccggcaagcaccgtcggacgccgttcccacagcaggctcaacagcgctccctggagccgctccaactactccacggcgacctctgcggcccgatctcgccaccaactccgagcgacaaccggtcgtcatccaaaagtattggtgggaagacaccatacgagctgtggaacggatcgccgccggccgtccaccacctgcggacgttcgggtgtttggcacacgtcaagaccaccacgccgaatgtcaagaagctcgacgacaggagtaaacccatgatctttgtgggttatgagccggggtcgaaggcgtatcgctgctacgaccctgcctctcggcgcgtgcacatctcacgtgacgtcgcattcgacgaagaggcgcaatggaggtgggacggcgagacggcgagtgagctggacttcaccatcgagtacaccactgtgtaccacccagctgtggtgaacgcgccacgagctgactcggagcagccagagctgccgactccgtccgcgacatcgacaagtccatgcacacctgccgccacggcgggcacaactgcgacatcggcggaattcgcgactccaccaaccatcgccgcggacgacctcgacgccgatcatgatgatgctccgcttcggttccgccgcgtcgacgagatattaggaccggcgaccccgccgggactggctgtgcgcgagttcgatgacgaactcatgatggcaagtgctgaagagccagcgtctctcgccgaggcgcaacagcaagactgttggcgtcaagctatgctggatgagatgaaatcaattgaagaaaacggaacctggctgctcgtcgatcccccacctcgccagcggcccataggactcaagtgggtcttcaagacgaagaaagacgctgccggcaacatcaccaagcacaaagcgcggctcgtcgcaaaaggatacgtgcagcggcagggaatcgactacgacgaagtgtttgccccagttgcacggctcgagtcggttcgcttgctgctggcgtacgcggcgagcgaaggttgggccgtccatcatatggacgtgaaatcagcgttcctcaacggcgagctcaaggaggaagtctacgtcgcgcagccgcccggtttcgtcgtcgacggcaaggaacagaaggtgctgcgcctggtgaaggcgttgtatggacttcgtcaagccccgcgtgcatggtacaccaagctcgacgcgtcgctgctgtcacttgggttccatcgcagtgcctcagagcacgctgtgtacatgcgcggagctaacgcacgtcgactggtggtcggggtgtacgtcgacgaccttgtcatcaccggcggcaaccactccgagcttgatcaattcaagaaggagatgcgggagacgttccagatgagcgacctcgggctacttcggtactatcttggcctggaggtgagtcagaccgacgagggcatcaccctgagccagggtgcgtacgccaagaagatacttgaggcagcaggcatggttggatgcaacccgagccagactccaatggagccacgcctcaaactcacttgtttgtcgatcacttag

SEQ ID NO: 89740 - DNA, 444 bp, Oryza sativa
  Clone ID: PAT_MRT4530_88471C.1
gggggtgggttttttttttttttttttttttttttttttttttttttttttttttttttttttttttttttgaaaaacacataaattttttaaaacagaaacaaatttaggaaataaacccctttactttcccaaccaaaaaacccctccttaaaagggaagttggggctaaactacaaaaccaccctttcttaaataccctaacttcaaaaaagagagcaagtcaacaggaatttggggaaaacccgaaacaactgttaccctggccctaaaaaaatgggcaacccgtttaacaaaccgttaatccccatcggttccctccagggaaacggcccaaaaccaaggtttaatcctaaccccaaaattttgggggggccgcccccggacttaaaaaaggatccccacgggccttaaaagggggatcaagctaaacccaaaaaacaa

SEQ ID NO: 89741 - DNA, 1146 bp, Oryza sativa
  Clone ID: PAT_MRT4530_88472C.1
atggaggcggccgccgcgacggcggcgcaaggacgacgggactggtcgtctctcccgttggacatgctcgtgctcgtcctggaatatcggctcgggtggtcgacccaccccagcttcgcgtcgacgtgccggcactggcgctccgccgtgtcgcccttctacccggcgtggatcacgcctctcctcctgagcgccgccgacgtcggcgtcacgagcgccaggtactacagcccctactaccacaagtgtttccagatcgccgacacgctcgtcaaggtgcctaacgctaggatctgctgctccaccggacgacgcctcacgctgtgctcacctaaatcgatcctccaagccgatctcgtactactcgccggcagcaccatccatgagctgccgaagccgacaccgcctttcgactcgtcgcccgatttcatcgtctacgacgaccgcgcgcgaaggatgtattgcgtcaacacgacgtccgcgctacggctcgcccgtgcgatccaacaagacgatggccaatgggggccctgggaattgacgggcttcggaccgcaaattctggcggcaccgaccagcaacccggtgctccacggtggcttgctgtacgttcttggcgaagacggggagctcgcggtgtacgatccgtgcaaccatggcgatagttttaaggttcttgataagcctgggagctttggaatcgaacaccaagtcgatagccacctgtttgagtccgaccaagctggcgcgctcatggctgtcctcgttggctacagtggtgcgcctgtccatgtcgtcaagctcaatgaagagacgatggagtgggagaagatgcggtcattggaaggacatgcgttgttcaccgggacatacacgacgatgttgaggaagactaagcttaggttgatgcacaacaaggtgttcctcccgaggctgtacgactggcccgagaccatccatgtcgaccttgttatacgtgacagcgaaatagcatttgttcccaagtcatacagttcgtctgccacaagggagatcacctcggacataaatatttggtcctgcgagtttgggcagcacgaagcaagagagttttggggatcggagagagtagattatagtatttgggttgattttagtactaattga

SEQ ID NO: 89742 - DNA, 2427 bp, Oryza sativa
  Clone ID: PAT_MRT4530_88473C.1
ggacagaacacaggaaagccttggttatgatttaatataccgtcattacttgtatataatagatttatagaaaagaacaagggtatccagagagacactaccaaactcattaacaacacctgttgactgtagttgcatgttttcaccaagggtaagcaactgagggcaggcagcaaaccaacctataattgcctgttcagttcttccagttccaggccatataaaaatctgaaaaattccgaggttgtgcgcaagcaagcatattcaatagtattatacacagactgagaaatgagaacatcgagcaccaatgatgcgcatcacaacttatcgaccgaaccatcctttctggggctgctgtacatcgctgtcgttcatcagcttgtcgagcaccacgttcagatccacattctgcccattctcggtcagcctccgcacagttgccctcacttgctctcttgagaatcccattgttgcaaccttctcaactacatcatcaaccggcaccctgttgccagaggaaccacttgggctggaattgataggcactgcttgtggtagtatttgggctgtggggagcctgccatagttgccacttcccccagatgatggccctgagggagcaaaaggtgagggtgacgacttcatccctgcattgccacggtgtgaaggggatccgctgtaaccatatgattcagagaaaccacttcctccctgtggcccgtacccgccagcaccataggacggtggtgggccagagtttggcctgcccacaggaggttcatacatgctttggttttgcccatagaaaggaggggcaggtccactaggcggtggcatataaggtgaaggagggcggacatttggtggatagctctgtggaggtgcatacgacatggcttcttctggctgctggggtgcagcgggtgggagtggggtcgaagggttaaccattccagactgaggcggttgtgaatattgaggaaattggggtggggtttggtactgctgaggcggcgctgggggtgcctgtggctgtggaactggaggggcctgatactgctggtgcatggtttcagtcggctgagcaggtggagcatagtagggatcccgtggtaaagctggcaccgaaggaactggagcagaaggaggaaccggtggtacttgtgaatgtggcagatggcctggatactgtgatggaggttggctttgaagcgttggaggtggaggaggcgcatttggagcaggaagggcaggaagtgctagtggttgtgaagaggtgagggcttgatgctgtggttgaatggctgcctgctgtggagctactgcatgctggtgcgaatctgtctgagaagatccaacattatctgatgccagggcatcagacttgggtggctggagcttcgcaagatggagctgtgtctcaacaatttcctgtttgtcacgcaaaatctgcacaccagcttggacctccctcagcatgttctcgagctgccttagttttccatcagtgctgccattatagttgccgattgttatcttcaaatcgtcaacagaattttcaagatggtgtgttctaccctccagctgtgaaagccttgaacttacaccttccagtgcatgcaataggttatcagaatatttcttcatggttcgatcaatgtctgccatggtaaccgtgccgaaattactcctgtcctcctcgtggctaactttctttagcacatggggctccaatacgccagcactcttcaagttgtaggacgcggaggcggccttggagccggagtcgagggacccccacgaggccggcgcggcggaggcggaggcggcggcggagggggcggtggtgcggatgggctggaagtcgtagctgggcagcacgtcgtcggcgctgccgttggaggagctgtggcggcggcggaggcggtcctcgccctcctcctgcgggttggggctcatcagatcgaggagctccggtcccccgccaccgacgccgacgccggaggaggtggaggcggaggccgcgaggccgaggatctgcttgtccatgaactgcgacgtgttcatcggcgcagctccgccacggcggcgggtggtaccaccgccttccccgcccgtgctgctcctccctccttcaacgccgccgccgtaggtgcagaagaagccaccgccggatgccgccatcttcgagaggatgccgacgtgagtcgcggtggcgagatgcaggtggcccttacgtgttcgtgggcgcagcgggagaacttccacggcggcctcgatctccgccaccgctgccgctctggcctttgcgcgcacgtcgctgtcgccgctccagtgccactcccgggtctccaccgcttgcgggccgccgcaccgccgccgcgggaaggggggaggaggcaaacaggacttgtatcgaaccat

SEQ ID NO: 89743 - DNA, 4847 bp, Oryza sativa
  Clone ID: PAT_MRT4530_88474C.1
ctaaaccttgcacgtccccttaagttggttttattgacagaacacaggaaagccatggttatgatttaatataccgtcattacatgtatataatagatttatagaaaagaacaagggtatccagagagacactaccaaactcattaacaacacctgttgactgtagttgcatgttttcaccaagggtaagcaactgagggcaggcagtaaaccaacctataattgcctgttcagttcttccagttccaggccatataaaaatctgaagaattccgaggttgtgcgcaagcaagcatattcaatagtattatacacagactgagaaatgagaacatcgagcaccaatgatgcgcatcacaacttatcgaccgaaccatcccgtcagcggctgctttccaaggcagacgatgacaccggtggtgatttcccgcttgtcgacgtcatcggcgacatcgctgtcactgaatccaactagatgaacagctcctttcttcctccggtagctacagccgcgattgatggtgccggcgacatagcgcagcacacgtttcacggctgccagatgctcggtagtgggtttctccatgaatctactcacataacccactgagaacgccaagtccggtctcgagttcaccaaatagcgcagcgacccaacaattttcctgtaatcagttgcatccacgcaaggagatgtgctcaacttactgagtttgaggcgtggctccattggagtctggctcgggttgcatccaaccatgcctgctgcctcaagtatcttcttggcgtacgcaccctggctcagggtgatgccctcgtcggtctgactcacctccaggccaagatagtaccgaagtagcccgaggtcgctcatctggaacgtctcccgcatctccttcttgaattgatcaagctcggagtggttgccgccggtgatgacaaggtcgtcgacgtacaccccgaccaccagtcgacgtgcgttagctccgcgcatgtacacagcgtgctctgaggcactgcgatggaacccaagtgacagcagcgacgcgtcgagcttggtgtaccatgcacgcggggcttgacgaagtccatacaacgccttcaccaggcgcagcaccttctgttccttgccgtcgacgacgaaaccgggcggctgcgcgacgtagacttcctccttgagctcgccgttgaggaacgctgatttcacgtccatatgatggacggcccaaccttcgctcgccgcgtacgccagcagcaagcgaaccgactcgagccgtgcaactggggcaaacacttcgtcgtagtcgattccctgccgctgcacgtatccttttgcgacgagccgcgctttgtgcttggtgatgttgccggcagcgtctttcttcgtcttgaagacccacttgagtcctatgggccgctggcgaggtgggggatcgacgagcagccaggttccgttttcttcaattgatttcatctcatccagcatagcttgacgccaacagtcttgctgttgcgcctcggcgagagacgctggctcttcagcacttgccatcatgagttcgtcatcgaactcgcgcacagccagtcccggcggggtcgccggtcctaatatctcgtcgacgcggcggaaccgaagcggagcatcatcatgatcggcgtcgaggtcgtccgcggcgatggttggtggagtcgcgaattccgccgatgtcgcagttgtgcccgccgtggcggcaggtgtgcatggacttgtcgatgtcgcggacggagtcggcagctctggctgctccgagtcagctcgtggcgcgttcaccacagctgggtggtacacagtggtgtactcgatggtgaagtccagctcactcgccgtctcgccgtcccacctccattgcgcctcttcgtcgaatgcgacgtcacgtgagatgtgcacgcgccgagaggcagggtcgtagcagcgatacgccttcgaccccggctcataacccacaaagatcatgggtttactcctgtcgtcgagcttcttgacattcggcgtggtggtctggcagccctttggctttgagcatgctccgcgccgtcccgaccaccgattggttgcgacgttccacgacgccgttttgttgcggcgagtagggcgccgtcgtctcgcgtcggactcccagctcggcgcagtaatccgcgaagtggtggaccaggaactctccccccctatccgtgcgaagagcacgtagcttcttgccgctcttgcgttcagccgcggcttggatgcgcttgatggctgccgccgccccatccttggaggggagcagtgacaaccacatgaaacggctgtaatcatcgacgagaaggagaaagtaccggttgccgctcggagttggtggcgagatcgggccgcagaggtcgccgtggagtagttggagcggctccagggagcgctgttgagcctgctgtgggaacggcgtccgacggtgcttgccggcgaggcaagcctcgcaaagctggtcaacttgcgacacagccggaagaccgcgcactagctgctctctgcccattttccgcagcgcagtgaagttaatgtggccgaaccgtgcatgccacttccatgcttcgtcgccgatgcgtgccgtaaggcagaccgggcgcgcgagctcgacgtcgaggacgtagagacgtccaggattgcggtgaatacgggcaagcaggcgccgctgctcatcccatatccgcataacgccatcctcggcctccaccttgaaaccggtctcgtctagctgcccgacactaatgatgttagcagcgaggcgtggaatgaggtaggtgttggagagggttcgatgctccccattcttacaggagaagagcacggtgcctcgcccttcgattcggacgacggagccgtctcctagtcggacgttgccggtgatgcctgtgtcaatgtcggagaaggccgtccggcagccggtcatgtggttggaggcgccggagtccacaatccagcggcccggatcacgcttcgcggcgtcgtcgagcgccgcgaacagcttcttttcctccaggtagatgggatcggatgacggagttggcgcagacggcgctggtgcatgctcctgttcacatgcatgtgtgattactcctcctgtgaggagaagcaaggtgggctcgtcgtcttgtgccacgtgggcctgttcatcccgcttgggcttgctcctgcaatccttggcccagtggccgtatttgccacagttgcggcatttgtcttcacgacgggccgctccggagttcgtattcttcgcgccgccgactccagcgccgccgccgttgcggcctttgccgcctcgccgcttgccacggttgcttgggctgcctgagttcttctttgcctcctgctcctttttattgtggcgctctagccattcttcctcggtgaggtagagcttgccggcgttgtctgaggacgaagatggcaatggcatggcgtcctcagctgccttgagtctgccggtcacctcctccagggacagtgtagagatatcaaggagagtttcaatggaaaggacgagttgggtgaacctgggacgggcgacgcgcaggtacttctcgacgaccttgtctgccggctcgggatcgccgagcgtcgcgagttgattgacggtggaggtcaggcgcatggcgaagtcctccacggtctcaccgtcgcgaaggacgagcgactcgtactccatgcgcaccttctgtgcgcttgctttgcgaattcggtcgtcgccgactcgcaggatcctgatgcaatcccatgcctccttggccgaggccttggtggccaaggtcgagatcatctcggggggcaccgcgctgcaaatggcgtcaagcgccatcctatcctcatgaagctcgacgccgcctggatcgatggcgccccacaggcaccgggcttgcagtttgatcttcatcagcaaagaccaatcgttgtagttggttcttgtcaacagcgggtagttcgctgcacctcctgcttccttgaccacgcggtggatcaccagcccgcggtcgctcccgccgctgcccgaggcgcggccgccggaacctgaaacatgcacggacggtgacgccgaccgccggcgcggggagtgcgtgcgtcctcgaggcatgaagacaccctcaagagcgcgatctcgcgtccacgctctgaaccgagctctgataccacttgtcaggtttcctagatacatcgtgtaaggtttatttccaacagtgccgttgtcggccggctcggcatgctgaccacgtccatcggtggtaccgccgcctccctcacccgcgctgctcctcccaccttcaacgctgccgccgcaggtgcagaagaagccaccgccgaatgccgccatcttcgagaggatgccgacgtgagtcgcggtggcgagacgcaggcggcccttacgtgttcgtgggcacggcgggagaactgcggaggcaggtgcgtcgtggccggcagagagggcgtcgagcgcagcggtggatagtgcggtggcggggccgagggtggcgaggacgcggccgttctcatggctcgttttcttccttccaacagccaaccttccacggcggcctcgatctccgccgccgccgccgctctggccctcgcgcgcacgtcgctgtcgccgctccagtgccactcccgggtctccgccgcttgcgggctgatgcaccgccgccgccagcaacgacgccgcgggaaaggggaggaggaggctgtggatggagttggaggaggcgccggccaccgccgctagctcccgtccaacgctcacgaagagaaagagagggggaggatatgatttatgtaggccccacat

SEQ ID NO: 89744 - DNA, 428 bp, Oryza sativa
  unsure (1)..(428): unsure at all n locations
  Clone ID: PAT_MRT4530_88475C.1
tctttcccaacccacctataacaagaggnatccacggagcggtacaacatatatatctacagcaggttagtttcgttctgttttgtcaacacagaatcatgaggaattttagatgtgttcattctgtgatgctgtctataattctatatngtattaaatttatatgacacgtgagtgtatatatgcaatgccattacgaactgctactatagtctccctgtgttcttctctttgtatacatgaataacaaatatggcacaatttaaggcaattgcagttttacaggctctgtgcaagtagctgtttatgttttaacggtaaatatttagtttttcccctgaagaggagttagcaaaaaaaaagttctttcatctggagatgcttatgatttgtggctaatgtcgtcttagtcgttcttgttaggccga

SEQ ID NO: 89745 - DNA, 417 bp, Oryza sativa
  Clone ID: PAT_MRT4530_88476C.1
atggcgtggctggaggaagacgagggagagggagacacacgtcggctatataaagcaatgccttgttgtcggcggcggcgcgatggcaaggagccagtggagacctatgaggtgtgggcggacaaccttcaggaggagctcgcgttgacccgcgacgtcgtcaacgagttccccttcgtcgccatggacacggagtcatcggcatccgctcccgtcgccggccgccgcagccaagcatcctcccgcgctgccgacctgtacgggctccaggtgctcgccgacggcatccagcgcaagagagagatgaagagaggggaggtggggagagaggaggaagaagagaatgggatcgaattgccacgtaagcgccacgtcaatgccacgttagatgaagaccgagtcaaattagccacgtag

SEQ ID NO: 89746 - DNA, 735 bp, Oryza sativa
  Clone ID: PAT_MRT4530_88477C.1
atgaggtacggcgaggtggtgcacttcagccacccgcaccaccggctgcggctggagcacgccgacacgccgttccggtgcgacgggtgccgcgaggtcggcatcggcgcgcgcttccgctgcccgttcgccggctgcgaccacgacctccaccgccagtgcgcgctcccgctgtccccgccgccgccgccgctccgccacccgttctacccgcgctgcgccttcgtcttcctcgcgcgggcgcccggcgcgccggggacgcgctactgcaacgcctgcggccgcgacgtcgccggcttcgtctaccactgccgcgcctgcggcttcgacctccacccctgctgcgccacgctcccacacgtcctcgacgccgccgccggggccgcctccggcggcggcgggcggaggcgcgaggctgtacctgcacccgaaggcgacggcggcgtgccaccgagctggaacggcgtcggccgccacaagggcggcgtcgccggcggcggcaatgtgtacgacggcgtgacggtggcggggagcggcgggtacagggtgccggtgatacgcggcgcggcgaagagcagccacgcgagcaggggagggtcctactggggaaggaaggggaaggtgaagcggtgctgcgagatcgccggcttcgcggcgcaggtggtcatctccgccgtgctcggcgaccccaccgccctcatcgccggcgtcatcggctcgctcatcgcgcggtga

SEQ ID NO: 89747 - DNA, 925 bp, Oryza sativa
  Clone ID: PAT_MRT4530_88478C.1
ggctgcaggaattcggcacgaggcgtacacgtagtggcagagtagtaccacctcgagaaactcggcaactcgcccgccgccgccgccgccggcggcgaggatgaggtacggcgaggtggtgcacttcagccacccgcaccaccggctgcggctggagcacgccgacacgccgttccggtgcgacgggtgccgcgaggtcggcatcggcgcgcgcttccgctgcccgttcgccggctgcgaccacgacctccaccgccagtgcgcgctcccgctgtccccgccgccgccgccgctccgccacccgttctacccgcgctgcgccttcgtcttcctcgcgcgggcgcccggcgcgccggggacgcgctactgcaacgcctgcggccgcgacgtcgccggcttcgtctaccactgccgcgcctgcggcttcgacctccacccctgctgcgccacgctcccacacgtcctcgacgccgccgccggggccgcctccggcggcggcggcggaggcgcgaggctgtacctgcacccgaaggcgacggcggcgtgccaccggtgcgggcaccgggggcggagctggacgtaccggagcagctgcaagagctacagcctccacgtggcgtgcgtcatggacatgctcgtcgagagctggaacggcgtcggccgccacaagggcggcgtcgccggcggcggcaatgtgtacgacggcgtgacggtggcggggagcggcgggtacagggtgccggtgatacgcggcgcggcgaagagcagccacgcgagcaggggagggtcctactggggaaggaaggggaaggtgaagcggtgctgcgagatcgccggcttcgcggcgcaggtggtcatctccgccgtgctcggcgaccccaccgccctcatcgccggcgtcatcggctcgctcatcgcgcggtga

SEQ ID NO: 89748 - DNA, 1349 bp, Oryza sativa
  Clone ID: PAT_MRT4530_88479C.1
gccgaagggcatcgcgacgcgagggcaatttcttccttcccctttccttttcgctcgcggcgcgaggcgatcggatggcggcgtcgtcgtcgtcgtcgtcgtccgccggccgccgcctcgccggaaacctaagcctgaggcctggcgtggcgtcgattatccctgggctgccggacgacgtggccgccgtcatcctctgcctgctcacgttccccgaccagtcccgactccgggccacctcccgcgcgtggcggctcctcctctcggcggccacgctcctcccgctccgccgcagcctgcggcttccgcggcgccacctcctgtgcctcttccccaccgacccctccctcgcctccccgatcctgctcgaccccgccgcgcccaccgcctggtggtccctcccgccgatcccgtgctcgccgcagcactacggcctcgccaacttcgccgcggtcgcggtcggcggccaaatctacgtcctcggcggctcccgcttcgacgcccggagctatcccctcgacaacccctccccctccgccgccgcctaccggctcgacctcgccctctcccgccaccgctgggagcgcctccccgacatgcgcgtcccgcgagggagcttcgcctgcgcccccgcgcccagcggcggagtcatcgtggccggaggtggctccaggcacccgacgttcccctcctacggcagccgcaccagcggcgtcgagttgtacgacgccgcagcgcgcgcgtggcgcgtcaccgcggcgatgcccagggaccgggccgggtgcgtggggttcgtcgcgcacggggcgggggatgggagggaggatgagttctgggtgatgggcgggtacgacggctacaccacggtggggggagtggtgcctagtgacgtatactgccgggacgcggtggcgctcgggctgtggagcggcaagtggagggagattggggacatgtgggaggaatgggagagagagcgccttgggccggtggctgtcatttctgctgaagatggaagggtcacagaggtgttcatgctcgatggtcatgatatcttcaggtataacttctcttcgaacagttggtcaaaggaagctacattgaggagaaagatcccaagtactcaatcatgtggtttcatagcaatgaatggcgaactttatgttcttacatctgcaaaactccctgtcgaaacctcaagtccatggaagcagtcgaagaagaggttggcgctggagtttcaagtttacaaccctgcagcaaagatgtggagggtgctcaccacacatccccctgttaacgtaccaattgatttcaggactgcagctctctgtacggttgagctgtag

SEQ ID NO: 89749 - DNA, 3700 bp, Oryza sativa
  Clone ID: PAT_MRT4530_8847C.1
gcgtcgtgcctttgtgtcatgtagagcttcgctgacgtaataaacctgtctttgcaccttctctctctcgacaacaatgacagtactcacagaatatggcgtggcagcgatatagaggaataattcttcattaggttggggagcaacaagtacagggggatttgacaagtagcacttgagtgcgatgaacgcgtcttcggcttcctgtgtgcacacaaatttgtcttgtttcttcagcacggcgaagaaaggttgtcctcgctctcccatcctagcgacgaatctgctcagtgccgccatgcatccagttagcttctggacttcctagagtcttgtcggcgatttcatgttctcgattgccttgatcttctagggatttgcttcgatccctcttccggagacaaggaatccaaggagcttgcctgacggtactctgaacgtgcacttctctgggttgagcatgaggcgatatcgttggaggttgtcaaacgtttcccggagatcatcgatcaatgagttgtttttcttagtcttgacaacaatgccgttgacataggccttgacattgtgtccaagctggtcattgagcgccccctgaaccgtgcgctggaaagtgtttccagcggtattagcccaaacggcatcatgacgtagcagaatacaccaaacggcatgatgaatgctatcttctcctcgtcctctttcgccatgctgatttggtggtagccagagtaagcgtcaaggaaacttaacaactcacaaccggctgttgagtccaccaactggtctattcgaggaagagggaagtgatccttggggcacgccttgctgagatcggtgaaatcgacacacatcctccacttcccattggccttgtgcaccatgactggattggctagccactctggatggagaacttcccggatgaagccggctttgagaagtttatcgagctcttctcatatggcttgtttccgatctggtgtaaatctccgcagtttttgttttactggcttggcatcgggtcgcaccataagtttgtgctcgatcacctccatggggacccccggcatgtcggacggctacaaagcgaacacgtctacattgtcgcggaggaaggtgatgaccgtgagttcctatttgtcgtccagtgatgccccgaagagcggaacgatcttaattgcgctgtctggcttcggcgtcttgttggtttgctcactttcttgggcggctcagctgtggcgggcgggttgggagtttgctcgaccatgtcgaggcacgcttgtcgcactgtactgctagcttcgcgttgccctgaatagtgattgttcccttcggccatgaacttcgcgagtgcagtcctcccgatgatggcgttatacgttgcgtcgaactcagctcatcaaaggtgatctgctctgttcggaagttgtttgcctgaccgaaggtcactggtagcataatcttgcccaatagcttggacgacgattcaggagtgattccgtggaaaggttgatcagtgggcgtcaactcgcttcgtggaatccccatcgcgtccaatgtgctggcgaagagtaagttgattgagctgccaccgtcgatgagaacccgtgctaccttgatattccgaatagtgggctcgaccatgatcggatatcgtcagcgtggaacctccgaagatgtgtgagacatggaggtcggagtcagggtatgctaaatctgagtcctgagtagccgcttcggcggccttctcgactacacgtactcgcttgcacttgtccaacgctagttgccttgcgagtgcctttttgaagacgagacaagtctctaaagagtgcttgtccgacttgtgtatagggcaccatgttttcctcgtatcgtcgccttgtgggtctggatgcttgggcgggtcaatgtactttgctgcgaggatctccgcttgagctttccgtttcccattcttgcgactctttttcttgcttgactcaggtgtgtccttggcacaatttcgaacagcttgcgagcagttgtgatccgtcttgtcgccaattcctgggttgtgtagcgatctcggacgccggacttgaaagcgcggattacagaagcatcagtgatctcggggatcgtatttctgcactcgttaaagcgccgaatatagtccctcaatgattcacccgaattctgcgtcaacgcgtttaggtcgtcctcgatcgtgtggcgcttatatgttccttggaagtttgcgacaaactgttgccacagatctgcccacgaagaaattgagtagggcgggaggtgaaccagccatgaacgcgcagatcctttcaacgcagctggcaagtaatttgccaatgcgttgttgtctgctccggcagcatagagtattgtggaatagacctgaagaaattcttcagggtcggtgcttccatcgtatttctctattgctcccggtagaaacttcttaggccaccggacatctcgtacagtacgagtgaaagccacgcacccgccgccaggggcggtgggttgtcggcgatcatacactcgccgtggatgtctgtccgatgacgatgatgatgatgagtcgctcggctccggggtacggtttcagggattgcgcccgggttcccgtgaacctcgtcgtcaccaatcatcgttgtcccggcgtcgacctctatcgtcgttgttgcgtttacctcgactagcatcgcctggcagccgctgctcgcggcggtcgtggcgaccatcatggtctcagtttccgctcgggtgtccacgtcgctctatgttctcgtgatgttgcgaagagatgcgatgtcgagaacgattttcgttgtcttgcgtgtgtcgcgcttctcggcgcatatttaggtggtcgcggagatcgctagcaccgcgaggtggaggggtagattgatgaggtgacacccgctgatcaggcagttcttcgtcagcgccgcgggtcagcggttgtttcgagggtgctctggcagcggcctcctcgaacgcgttactgatgttggccaccgattcccgtagtcgttccgtccactgatcgaggtcagcgtttagaacgggatcgtaaggggtttccctcggtattgcattgatggctctaatgtgttgggctggcgtagccaattgttcctccgtttccgtgttgccgcctctagaggtgccggttacatcgatggcgtacacgtcacgtagcgtactcgtcgatgatgaggcctaatcttcgagtagatgtaggacagatgtctcgtggggatcgatatcgattaccccaacgaaccgatctgaggtagtcgccgcaccttgttccttgtctgcatccctaaaagagattcgtgactgcgggaccttagggagcgacgtcttcatggcactgagaagaaccttgcagcttgatagatcgtgagtcttagccttgtgaatggggcaatagacatcacgagttggggaagcgcatgttgaattccacgctccttgcaggcgcggatttcagcttctacgtcgagaaaaaccttgcaagtttgcaggtcgtgcccttttgtcttgtgacccggtcctcgtcgcctcaggagttgttcttgtcggctcgtgctcccgtcggaaggacaagagctggccgcactaggatccttctcgggcgcggaagttgtcgatgttccgttctccgctcctgcaggaggatctt

SEQ ID NO: 89750 - DNA, 195 bp, Oryza sativa
  Clone ID: PAT_MRT4530_88480C.1
caccctccgtctccttctccctcgtctccagatccgtgggtcgaagcagcggctgcgcctgggccacggctgacacttgctcttccatgaatcctgagttcgactactttctcaaacttttccttattggtgattctggtgttgggaaacctgtgctttgcttcttagacttgctgactattcatactccggtct

SEQ ID NO: 89751 - DNA, 1296 bp, Oryza sativa
  Clone ID: PAT_MRT4530_88481C.1
atggggaggaggatattccactgcctcgagagccacagcccacgccacgcagtgcagtgcacaggagaggaccaggagaaatactatgatgagctggtttcatacctcgaggaggagcttgggttgaaaatgcataaagcaagacgttttgatcttgattgtaccaatcatcttgtgaagcatcatcctatgctgcctgaccgaaatttatcagcacaagctcagatagacagtgatacaataaatgaatcaccacaagctcttcccacaaacattagttctcagattgtcagctgttcagtagatgaagcaccgcaggctctccccactagcagttctccgataagcaacaacacagaaggtctatcactccaggctctcccaacaagcagtgaatcagcggcaggagtgacgatagatgatctacactctttttgctctcaggagtttatcactgacccagtgaacaggttatcagatagaattgacagcgaatatgtcttgcttgtgaatcctgcaatgccacatctgctaggaaactcctcagatgctactgatcttgattgtaccaatcaacttgtggagaatcatcctaagctgcctgaccaaaatttatcagcacaagctcagatagacggtgatacaattaatgaagcaccacaagctcttcccacaagtgttggttctcagattggcggctgttcagtagatgaaacactgcaggctctccccgctagcagttctctgataagcagcaacacagaaaatctatcaccccaggctctcccaacaagcagtgaatcagcggcaggagtgacgatagatgacctacgctctctttgctctcaggagtttttcactgacccagttgtggtccatgctttcaacagtcaggatccccatctgttgggtgaaggtacacactggagcctcctagtgtttgaccgcaaccttggaggcagaccatgcttagcccaccatgacagcagtcctggtgatgctaatttgagagctgcacgccgtcttgcggcatcactgcttccttacctacctcctgagacgaaatgcactaaagctccgacacctaagcaaaacaatggaaccgaatgtgccctttacatgattaaatgtgctgaggtgatctgtggttggtggcgaaaccacgctgctggaggatcagagtcgcattggcttggagttgtggcccgaggtgttaccatggacagcgtggacaacttgagggcacagctaatccatgatattggacagctcctcaacggctcatcatcatcatag

SEQ ID NO: 89752 - DNA, 558 bp, Oryza sativa
  unsure (1)..(558): unsure at all n locations
  Clone ID: PAT_MRT4530_88482C.1
ccagccccgaccactttttcagtttttcacatgctttaactggcggttcataggcaatcgggctgttttggccgtttcgcccattcgccctggccaggggggttcatctatcgtcttgggccccaccgggcattacctggccccattcccctggccaggtattttggggaaaaccaccccggccaggtggtttcccagaatccagcccctttctttcttgggggttccctttcctaaccgaaaccaaaaaaccggctctttttggggggcccccttggccccccggggggggggggggccaatttcccttgaaggcttgggccccggagaccggggccggccatttggctcaccgggggcgggggctttccccccatgccctcctggggggttttttacctgggacctgtgcgtttccaccttcgcccggccctgccctggggggccggctccccccgtcggtgtctcctttccggaccttccccttcgggctcncccgcctttgggggggcttgggttgggcccccttcccggtcccccctggggggcccccccccc

SEQ ID NO: 89753 - DNA, 1962 bp, Oryza sativa
  Clone ID: PAT_MRT4530_88483C.1
atggagttctacgtctccaagttgtatgaagttgtgcctccaatcctcactgagcttggcaaggtcaaaaacccatggcctaatgttgatgctcacagtggagttctgctgaaccactttggattatctgaagctcggtattacaccgtccttttcggagtttcgaggagcataggcataggatcccagcgcatcctccgcttcgcgccggccaacgaggccgcgtccaccgccctgctctcagcgcggtggcgctcgctctggcgctccaccggcgccgtcaacctcgccgtgcgcctccccgagcccgacgacgggcgccgccacggccaccgcgtcagccacgacgccgtctcctcctgccatgacgccttcgtccgctccgcgcaggcggcgctctccgccgccgccgccgcagccggaggccgaggccgccacgtcacgaggctcaccttggaccttcgggcggcgaccatggatgtgatcgacaggttcgtgcacacggagaggccgcttggtgcggacgcggcgcccgacacggacgtgtggctgcggctcagcgacgacgtcgagcgagaggcggacagatgggtgaagaggggagacgtggtccgcgacgtggtctcccacccggcggcgcgccgcgtggaggagctccgcatcagcgccagcgcgccggccgtcgacgacgacgacgacgacggcgaggtcgggcgtctcgtcggggtgttccacctggacctccgctacgtcccgtcggagaccctccgcgtgctggacctctcccggtgcagcggcctgcgcatgccgcccgccgtggaaaccccgcggctgacgacgctgcggctgcaggcctgcgccgtgaacgtgaacgacctgcagcgcgtcatcgacgccgcgccggcgctcgccaccgtgcacctcgactccgtctccttcgacgggatggagcacggctgctaccgcctccgcctcccggcggccaccaccgcgctcgtgctggcgaggtgcaggacggacgcggagccctaccgctaccggagaagcggccgcccactggggaccagctccgtcgagatcgacgcgccggggctccgatcgttcaggtacgcgggctacgcgcggcgcttctccctcgcctcgccgccggacatggcgcgtgccgacctccacttcttccacgacatgtacgcctccgcctccacgagccgcgacctcttctggcgcttcgtccgcagcttccgcggcatcaggtccctcaagctcaaggtgagcgacctcaagcacgtcgccgtcgccggcagggcgacgcgcgccgagctcctcgtcgcgttccccaacgtcgagcacctcgagctggaagggcaccacgaatccgcgagcgagacggccgccgcggtggccatcggcaacctgctccggtgctgccccgccgcgcgccacctcgcgctccacctcgccacggcgccgccgcgcgagcgcgactccgccatgaacggcaggtacggccgcgatctcctgcgagcgagacagcaagccgacctcgccgagtctctcgatcgcttcgctcgccgccgccgacgcaaacccaatcctccgccgccgccgccgccgccgacgccggtgaactccatggacgaacacctgagcatcgtaggattgagtggccgatccttcgcctgcttgaagaactcgctgagaagattcgtaatccagtttcggatggatcgacccaactgcattggcgtcaagctgatcaagttcttcgccgagaacgcgattcacctcgaagagatgcgcatcgacggtggaaatcagaggatgcacgatcacatcaaccacatggttgagggatggatctccgattcatcgtcagcgaaaaagagggcgaatcacgagagttcgcagggtatcgacgcgagtacgccacgctttagattattaccccttgagagacggtga

SEQ ID NO: 89754 - DNA, 384 bp, Oryza sativa
  Clone ID: PAT_MRT4530_88484C.1
atgccgcatccttccaaaaccaagagacagagctcgtgctcctctccctcgttctctctccctccttcctccttcctcccaaagtggcaagggagccaagctcttttccctccccttttcgcctttttccccgaccacaaccgctgtcaccacctgccgctccttgaccgcaagcgccgcgccagccgagcaagcttgaccaccaatctgctcgcccccgcgactgcctcctcgctgccgcgctgtgtcaatggccgcgtgagcctcggcgtcggcctcgtcaagctcggtgccgcactgccgtggccaagagcccgccgcgcgcagtcgcgcgccgtcgtcgggccccagctcatcgaccaccctcaccaacaccgtccttga

SEQ ID NO: 89755 - DNA, 805 bp, Oryza sativa
  Clone ID: PAT_MRT4530_88485C.1
cacgaggctttgagctaagctctcatctttcgtctaaatcttctcagaaaattcacaacacgaagaaatcttctccttgatttcaatctcatcatcgccatgggcaactgcctagtgatccaagacgacagagacaaggagatcaagatcatgggaatggacggcggcgagatcctcaagctgcaccgggatgccgccgtctccgactccgacgaccccgcggccgacatggcgaaggcagcagctgctgccgccgccgccgccgctgccgatacggccggcggcgtcgtccgggtgaagctggtgatcagcaagcagcagctgaagaagatgctgcacaaggatggcgtctctcttgacgacatggtttcgctgatgcagagagaagcaagtgagcaggagatgatcagctgcagagggtggcgacctgccttgaagagcataccagaaggcagtgattgttagctactagtacataattaattaattaattaattatacttaactagttcaatatatatacaagatatattagctagacctgctagagttatactagtagatgttttggaataagtgaaagaaatatctagcataggaccataggtatatatatgctcaacagatacatgtaaatatggagatagatatggtgtatccacttaaaaaaaagttttgagagatgaggattctctttatcttttctttttggacacatgcacatggatgcatggttgtaaagaaaaggcaagatgatcctagaaattaattaatcagaagctcttgtcttaaaaaaaaaaaaaaa

SEQ ID NO: 89756 - DNA, 1108 bp, Oryza sativa
  unsure (1)..(1108): unsure at all n locations
  Clone ID: PAT_MRT4530_88486C.1
tctccnggngggnttggcaggggaattttccggggnaccgaaagtnccccnaagttttcttggttccncctgggggaaggaanaaaaagccncgccaaggggaattgcttngccntnccttggccgcaaaanccccnaaaaggcttttccccccanntttggggccggttccccaattggggnangaaaactnggaaanggggtttccccctggggcncnaaanaaaaangggggcaccnagcttccccnggattccgttttaacnctttatttgccccnnccggaaaangggttcgccccccananancnnagcccaagccggaaacttggaaanaaaaacccttggcccccttttggccccaaaccggggggaccccggttccnaaaaaggctttaaggttttnaaccttggggatttccaccatttaccccccccattggttttccccccttaagcctttaggccccctttggaaaagnaaaacaaaagaaacggggtccccttggaaaagaaaaacttcccaaaccaaggggccntttggtttggttcccccccaaggggaaactttgaattggggtccttggggaaaaaaacttccttttattccttgtttgaaaaaaccttggggccaagccaaccgggggccccccanaagaattcccttggccttggcttttggggcttggccttaacttgggggggggaagccaaanttttggggctttaagtttttaaggtttttttggcccttaaanttttttttccctttttttggccccggttattttcccccccttttttttcccggggtttttgggcttttttttttttttttaannccttcccgcctcctttnaaanaaacttccccccnttttttaatttanntttattcccnttccccaaaaaaaatttggcccccnnaaaaaaaaaaaaaaaccccttnnnccgggggggnnnaaangaaacaaaaaccaaaaantttttgtccnnaaaannaaanccaatnntttctttgggggctttttttggggttggccnnttttnnccgnttttttcccccccgcctnttanttttcccnntttnggggggggggggggggggg

SEQ ID NO: 89757 - DNA, 513 bp, Oryza sativa
  Clone ID: PAT_MRT4530_88487C.1
atgaaagaactgaagtggaatggccaaagaatgagctgggatttgaactggagggttgccaggaggttccgggtaaaagtgccaggaacttccgggcagcgcttaggaaaattctcgctatacctcggtgcccggaagttccggccagaacatacgggggatttaagtgcatcttcagggagatggggagagaggaggaagaagaggacgccgtcaaacccgtcgctgtcatcgtcgtcgtcgtcttcagcggcggcgggagaggaagtagagggagaagtcggctaccgcaaccctttctcgccggccgccgactacacggacgcgccgctccaaccctccctccggccggcgcctgcacacagctcctttctctcccgccgcctccctcacatgcaccactcctctcctccctacggccggcgcccacgcaccgtttctttcccagtggccgccagtgagatgaggagaggggaaataggggggagaggaggaagaagaggaggggactga

SEQ ID NO: 89758 - DNA, 566 bp, Oryza sativa
  Clone ID: PAT_MRT4530_88488C.1
ggaccctcccacattcccattgtttaaatggggtccaaagatcagcaaccacagagcacatacgtgagcgggaatagagactaggccacataacggcctaatttttgaagcagcccaaaaaacccactcgggacatcccttgcttgaggtgaaaaatcacactcagggccatccttggatgagtcgaagccccctccaacaaaacaagtttttgaatgtaacaggtccaattggccctaaaatccgttgtcaccccccgcagaacccattggttccctgtaacctgccaaaggatccacaggtcccatgtcaccttccaaagcacccacaggtccctttttttctggagcaaaattgggaaaaaggaatatggaacgctccagcttaatcatggttatctgaaactgcaggcgacttttaaccaacatggtaaactgcctttgatactccagaaagaggacactgctcttcggttgaaaggcgaaaggagtttttgtcgcaaccacccggaactcacaattttttgatacgacctgcgctatcttaccataaacatatgccttgac

SEQ ID NO: 89759 - DNA, 1114 bp, Oryza sativa
  Clone ID: PAT_MRT4530_88489C.1
ctcctcctcctccccccccgcggccccctcgccgccgaaaccctaaccctagccgccgccggccgccatgtcgaacccgaagggctccaagatgctccagttcgtcaactaccggatgcgcgtgacgatccaggacgggcgccagctggtcggcaagttcatggcgttcgaccgccacatgaacctcgtcctcggcgactgcgaggagttccgcaagctcccgccctccaagtcctccaagaccaccggcgagcgcgaggagcggaggacgctgggcctcctgctgctccgcggcgaggaggtcgtctccatgaccgtcgagggcccgccaccgcccgacgagtcccgcgccaaggccgccggcgccggcgcggcgatggcggggcccggggtgggccgcgccgccggccgcggcgtccccgcggggcagatgctccaggcccagccagggctcgccggcccggtgcgtggcgtgggcgggccggcccccggcatgatgcagccgcagatctcgcgcccgccgatgccgaacctctcggcgccgccggtcgcgtacccgcaggtcgtgcgcccgccgccggggcagatgccgccgcccatgcggccgccgcagatgccgatcccgttccagcgcccgccgggcgtgccaccggcgttccctggtggccctccgccgcctcctggcccgttcatgaggggaccaccgccgatgggcccgccgcaggtgaggcctgggatgcctggaggaccgccgccggggatgaggccagggatgccgcctccgcccttcaggcctgggatgccaccgccgcctcccggtccgcagcaacctggacaaaaccctccgcaatagctttgctggttgttcttgctataccaactatggaagattcaccggtgccaccgttgcttcactgttctatctcatattggggttacaagtagttttcttgcggtatcagctcagagaagagatattaatccttttattatcagtggagcactcttgtttctatgcgaggggactgtacgtagatgttaagagttagggacttggatagcctgtttcatcgtgtgtcctgatagctgttgtactcgactactccctcgtgcc

SEQ ID NO: 89760 - DNA, 480 bp, Oryza sativa
  Clone ID: PAT_MRT4530_8848C.1
atgcacgctgtcgctcgccacctttggggccatgtactctcgagcgccccgacgaacgagcacgactgctccgtcaccggcttgcccatgaactccggaggcgccaccgaggcacgcagcctctacgtaccgccgccgcttgaaccggaggagaccttagtagcgctcaagctcagccccggccagaaggcgtcgaccttcccggatacccatgcggctggcaggcatcatccgctgcactgggactcggcgccgacccaactcgaactggatctcaaccctctcgaggaagttggcatactccaagcggcagtggggtcgaactttagcttttcgaattcgaaggaggcggtccgcggtcgtgggttagcaacttacacccttagccgtagggtccctgcctctggcgacgcggaagacttcgtcccggattgcggcagccacctcgggatggttggaaaggagcaagaagaacgcggt

SEQ ID NO: 89761 - DNA, 455 bp, Oryza sativa
  Clone ID: PAT_MRT4530_88490C.1
gcagattgagtacctgctgagctacaagcgggtgccctgtctagagtacaacaaggtcggattcgtctaccgtgagaaccacagatcccgcggatactacgatggaatgtactggaccatgtagaatctgcccatgttcggatacactgacgccacccatgtgctcaaggagctcgaggaggccaacaaggcgtaccctgatgcattcgaccgtatcatacgtttccacaacgtcaggcaggggctgctgatgagattcatcggctacatgcccccaggctgcgacgagtctggtggcaactaagccgtcatcgacatatatagccttgtttaattgttcatctctgattcgatgatgtctcccaccttgtttcgtgtgctcccaggttgttcatcggcgtttgattttaccggccgtgctctgcttttgtttttggttcacctgatctctctct

SEQ ID NO: 89762 - DNA, 459 bp, Oryza sativa
  Clone ID: PAT_MRT4530_88491C.1
atggggcacccggtgtggttagaccccgccaccaccatcccggcgatgagctccggcaatggcgagtgcgcactcatctcaatctccaacatccacgttgaggagcaggatccatcctggcgaccccacgtctctgattttgatctaatcatcatcgcacggtcggtcgtcttcgagccgtcgcgccacctcccgtcgcgccgtctcccgtcgacgagcccgccgccgcgtctcctccgcgagcccgccgcctgccgccaccaacccctggtgagcccaccgcccctgccgcctccttccctcgctctggcggaggagagggcttatccccgccggcgagcccttggccgcctcccctccttgagcccgccgcccgccgccccctcctcgagccctccgctgcctcccctccttgagcccgccgccgataatggatctggccaccccgcccaccgctga

SEQ ID NO: 89763 - DNA, 107 bp, Oryza sativa
  Clone ID: PAT_MRT4530_88492C.1
gactcatctaatttatttctttcctaacaaagccgaggtactgttcacgcggttcctgtgctgcgctaaattagtgggcccaggcctagactcggtcctactaccat

SEQ ID NO: 89764 - DNA, 703 bp, Oryza sativa
  Clone ID: PAT_MRT4530_88493C.1
atggatctcccagagtccaacgacaacaaggcagccatagacaagttctagtgtgacggggcacttccaagttcatgatcgatgggacacacagaaggaggtaccaatagtgatcctactctcaaaaaaaaaaatcatgatcctttcttctttcgtccatgtggattcttgcctcctccctcggaatttctcactctcctcctcgacttctatgaccttcacctccttcacttgaatccaaactcgattgctttcctcggcatcttcacccaccttcgtgaggcgtacttaggagtgcagccgtttttggatctgtttagatatttttacaaggttagattcatggagcagtcaaggattaactcatctccccttgtctttccctacccagccgatagcaaaccagtctgataaaagccctgggttttttagtcctccgatgatcgaatccttaagacttttaattgcgaagatcaaagacctttgggatcgtggtttggcggggcacaagatcgttggcaatttcgtgcgtcgttggaaccaacctcaccaagctcatgctcatcctgcgtacgagtacacaggaaatgaagacatgacatgaatatcgtcctggagtatattatccagaagccgtacttgttcctgctgccgctctgctgcattctcgcccgtgccgagttcttctatacacgtgcgcctc

SEQ ID NO: 89765 - DNA, 295 bp, Oryza sativa
  unsure (1)..(295): unsure at all n locations
  Clone ID: PAT_MRT4530_88494C.1
cagtggcgcacactgagcacttcccttagagctaatcccctggctgcttttgaagtgcaccggaaggacacatagataggtacatggctctgctgctttgtgatatatcctgttttatttcataattatttcataagggagatgtggaattgctatggctgctattaagttgcttgagtaacctcgcccccatgaaacttcacattgtgaatttgataggttncctgtggcaaaaaaaaaaaaaaaaaaaaaaaaaaaaaaaaaaaaaaaaaaaaaaaaaaaaaaaaaaaaaaaa

SEQ ID NO: 89766 - DNA, 345 bp, Oryza sativa
  Clone ID: PAT_MRT4530_88495C.1
tacacacgatcgtacacgcgtacgcccacgcgtgcggccacgcttacgacgaggaaaggggagcatccaggtgaccttcttggctgacgggacaccggttgtctaggaatcctaagaaaaatggtctccggccacatgaatgtcattgaggaaacttcagaagcaggggtggatttgagttttgcacaagtgaagaagatgaaccgtgaaacggtgttttgcaaatgctttacgtgggcaacagacattttattggttatttgattctgatgatttttgtagagaaaatacagactgtcttattcagaaagttccagacgttggatttatgagacatatgatgag

SEQ ID NO: 89767 - DNA, 120 bp, Oryza sativa
  Clone ID: PAT_MRT4530_88496C.1
atggctcaagatatgcaggaggacagaagaaagctcagcagccgtggtggtcatatccctaactttgggaagaaaaattgtgtaatgagcctggaacatgctcgtgtattcttatcatga

SEQ ID NO: 89768 - DNA, 1103 bp, Oryza sativa
  Clone ID: PAT_MRT4530_88497C.1
ctcatggatcggcagctgcagctgggacccatccacaggtgtttactgtcattctccctacttgacccattttttgtccccgggtcgacgtcacaaaaaaaggctgagcatgattacgcaccgctagtttcactttcatcggttggctgtaggccactggtgatcatcctggggaagaacgccatcaagatgaagcggaccatcatcgtcaaagtggacttggaatgcgagcgctgctatgccaagatcgacagggtgctcaccaggatcagagacaagggtgagttcgtcatcgacgacatcgagttcgacgtgaagcacaacaaggtgatcgtgtcggggcccttcgacccggacaagctcgcagacaagctctgctgcaaggcgtgcaagatcatcaaggagatcgagatcgtcgacctcccgccgccgcctccgccgccggcgccggagccggagccggagccacccaagaaagaagagccccagccaccgcctcctaaggaggaggagaagcccgagccgccgccggcggtgattatcgtggagccaccggcgccggcgcccgagccggagcccgagccgccgaagaaagagccgccgccgccgccgcctcccaagcaggagccatgcccgccgccgcccaaggtcgtcgaggtcccttacccctggccctacccctacccgttcccgtcgtggccgtccgactgctgctgccaccatggccacggcggctgccactgctgctcctgcgggaaggcgccggagccggcgccggcgccggcgcctccgccgccgcagtacatcccctgctacccgccgcagcagccctacccttgcggcggctacaggatcgtctgcgaggaggacccctcctacgcctgcgccatcatgtgacctaatgatcatcgttatcttctccttaattaccttctccgatctctcctcctgtataattaagcacgcaccgtacagacacgcacatatatactacacatcctacacgtactcctctttatctactcttatacactccctctgtaactgttgatttccttacgtcccatttagaggtgaaaaataagtaagtatatatcgtcatt

SEQ ID NO: 89769 - DNA, 798 bp, Oryza sativa
  Clone ID: PAT_MRT4530_88498C.1
ccacgcgtccgcctcttcttcctcctctctacgacctcttcccgccgctccctccccctccatttcctcttctccaccgcctccaagaacagcaaacccaactcctcccccctcctctcctcgcatttcttcgacctgccattccacacccgcgcgcgcctcaaactctatgtgagggaagggaaacaatcgacttcccagctgagaaaccaagaagcagcagcagcagccatgcgtccgtccttcctcctcctcctcgtcgtgtttgccggcgtcttggccggcggggcgcgcgcggggccgccgttggcgggcgagaatctgccggggcagctgttgccgggcgagaagccgccggggcagccgttgccggggcagccgttgccggggcaaccgttgccagggcaatcgttgccggggcagccgttgccggggcagccgttgccagggcaatcgttgccggggcagcctttggtgggcgagaagccgccggggcaaccgttgccggggcagccgttgccagggcaatcgttgccggggcagccgttgccggggcagccgttggtgggcgagaagccgccggggcagccgttggtgccggggcagccgttggtgggcgagaagccgccggggcagccgttgggggggcgacaagctgtcgccggattactacgcccagacgtgcccgcgcgcggagcggatcgtcgcggaggtggtccagtcgaagcagatggcgaacccgacgacggcggccgggggtgctccgcctcttcttccacgactgcttcgtcagcgggt

SEQ ID NO: 89770 - DNA, 249 bp, Oryza sativa
  Clone ID: PAT_MRT4530_88499C.1
atggccgaccgcgtccaccccatgcccgctccaccgccggcgtactactcccctccgctggaacacgccgccgccgccacggagaccacgccgctgcaccccaacttccgcggtgcgcgggcgacgtatccgggcacgtacatcatgcatatacccaaggaccaagtcctccgggtcccgacgccagaccagccgcgccgctacaagaagctagcggcgaggcccgaccccgacgacgctccagcacga

SEQ ID NO: 89771 - DNA, 1586 bp, Oryza sativa
  Clone ID: PAT_MRT4530_8849C.1
tgcaggaatcggcgggcgcctcgagcgcgacttacccaaacccgccaccattaatctccagtgaaaaagagggtaacttcatatcattaaaagctcggatatcgcaggaattggcgatcttttagttgaagtccttcagatttcttgggacacctgtaatggcagcttaccaaactggccccgtgtctgagccaccgatgctgaacactgagattatcactcaaaaagtcaccgggtttaatactgagaccacgaccaaagaaaagcccataggctaccttgatgtttttgtacaccaagcacgcgatattcacaacatatgcatctaccacaagcaggatgtttatgcaaagctgtgcctcacgagtgacccagatgtgtcatgctcaaccaaggtgatcaacggtggtgggcgcaacccggtatttgacgatggtctaaggctcgatgtgcgcactgtggatgcttcccttaagtgtgaaatatggatgttgagcagggtgagaaactacctggaagaccagcttcttggctttgcccttgttcctctggcagacattgtaatggctgatggaaagcttgtccaggaattctccatgacatccactgacctgctccacacccctgctggatttgttcagctgtccttgtcttatgttggatgttctccagatgtcatccccattccagcacccaacaagtcagcgttagtagttaacggttctggtaatgatagctctgtcccttgcgaacttgaaaagattgaattcccggacttgaatgtggtgaatgagaatcaaattatggtctccaagtatttcgagatggagaccttgagctatgaggattcagttaaggttgacaacccaaagttagtgcaatctgatgcagctgttcctggtactgaattatttaacaagaatctcgatgaatatcgggagggaagtcctcaaagttgtgtatcaaccacagactactccacagccacatctgtcactccacattcagtttctgagccatcagacaccatccttgcagcatctcccactggaagccagagggagaaaagccaggatgttaccgatggcgaggctgattcttccgatgtaccactcaagggtgaagttgtcaagcctgtgatcagcattaatctcaaccctggtgagtctgttgttcaggaggacatagttaacatgtacatgaagagcatgcagcagtttactgaatcccttgcaaagatgaagctgccattggatgtggagaacagtagcccctcaactgaaaacaacactgactcgattacagctgagaagccatccccatcgaagggttctagggtcttctatggaagcagagccttcttctaagatgctgatactaagtaggatcgtgtattagtatacatggttcgtatttgtccgactggctgtcatgtgtttaatagttatatatatgcttcctaagtttctgttgctacaatgagtttctaggactcactctacacttgtattgcttacaatgtcatggtcagttaaaaatataagcattttggaataaaaaaaaaaaaaaaaaaagagtttcctatt

SEQ ID NO: 89772 - DNA, 533 bp, Oryza sativa
  Clone ID: PAT_MRT4530_884C.1
atgccgagtaggagccggggcgggggaagcgacggcgtgtcgtcgaccgtgaggtggctgcagcaggatgaggaggaggtggagggcgagaaggggagtggaagggagggaacggagaaggagccctcctccaagccgaacgcaagacgcccggggaggccaagccccgagcccacgtgccgccctcggcccggcctcctcctcctctctgcgtcgccggcccaagccgccgccgaccgagcccacgccggccacgccacaagcccaatcgggcgccccaaatcccgcaagccgcgccgccaaattcggagccgccgcctttccaaaccgccgccgccgttgctccgtgccgccgccgggagccacgccgtcgtcgtcaccatctccttccggtgccgccgccgctgccgccgtgcaccttcgccgacgaacgccgccgacgccgccgcgctggagccgccatggcgccatggccagagcacgcccaggcctgtggtggagcagctactcctcctcttccctgtgacactgac

SEQ ID NO: 89773 - DNA, 1055 bp, Oryza sativa
  Clone ID: PAT_MRT4530_88500C.1
tttattttctccaataatattccttcaaggaagccgcttggattcccacatcggagatggcggcttcctccggccgccgccacgcgccgccgtcgggttaggaagggctcgaggttggagaggcaacaatggcgatcgcttcgtcatcgtcgtcgttgctgctgctgatgtttcttgcgttcttggatcatggcgccgcggtggcgaacctgtcgtccatcgaggccgccgtccgcgaccgcgcgttccagctgttccgccgcacgagcgagatcgtcgccgtcgacgtcccggcggtgctcgccggcgccggcgtcgaggcctcggcgacgcgcgtgcgcagcagcgccctgtgggccgatggcgtcaacgccaccgtgcccgggctcgccgtcgccgtcccgccgcgggtcgtcccggcgccgttcgcccgccgcgtcgccatcgtgttcgtccgcttcctcggcgacgcctcctcctggctgttcgacgcgccgcccgggtacgcgctggccgcgccggtggtcgcgctgctcgcgttcgacgcgtcggggcccaacggcggcgtcgcgctccgcgcgctcggcgcgcccgtccgcgtcgagttcagggacatctcgccggcgagcgggttcaacgccacggcggcgaggtgcctgaccttctcgtccggcggcgggaaggcggtggcggcgcacgccgtggccatggagcccggcccgtcgtgcgtggtgtccggcacggccacggggcactacggggtggcggtgcgcgtggagacgccgccaccaccgccaccgccacgaccaccgccggtgagggagcggtggtgggtgtggaaggtcggggccaccgccggcggggtggcggcggcgagcttcctggcggtcaccgtggtcggcgccgtgaggtggaggaggaggcggcggagggaggagatggagcggcgcgcgatgtgcggggaggagctcgggaggatggcggtgagggggagcaggatgccgtcggcgaagatggtgaggacgcggccggagttggtggaggagctaagctaa

SEQ ID NO: 89774 - DNA, 172 bp, Oryza sativa
  Clone ID: PAT_MRT4530_88501C.1
agatgtgtattgtgcaaagccccctttgctgtcggtcaacaaagattcatgactagtaattccgcgccagttttagtagcttccacctgaaagagtattagtcggagtacggggggggaattaagacaaaaattcataagggtgacgcatgaagcatgatctcacaattatt

SEQ ID NO: 89775 - DNA, 174 bp, Oryza sativa
  Clone ID: PAT_MRT4530_88502C.1
atggtggaggccaggggctcccacacgacaacgagcaacgatgctggggacgacaacagatcagactcgtcggcgggagcaatgttgggactgcagtggcggtgcccgtgctgcgggtccgacgcctttattggatgcgatgtcatcgcccttcccctacagcgcccgcaatag

SEQ ID NO: 89776 - DNA, 219 bp, Oryza sativa
  Clone ID: PAT_MRT4530_88503C.1
ccttgggagatagataggtgtgtgattgtgtgtggccagaggtgtaaagaaaggctgggctgttgtgaggacctgggtggaccaaaactgcccagtgtggcgtgtgatgagtgatgccgccagaccccccaccaagtggatgcgccaatgtgcgtgtgtgtctgtgacacgccgatgggcgtgtctgatgtctggggagaaaaaaaaaaaaaaaaaaaa

SEQ ID NO: 89777 - DNA, 333 bp, Oryza sativa
  Clone ID: PAT_MRT4530_88504C.1
atggcgcggggcggcccgagcggcgacggcgccaactccgaatcgacgttggcctcgacctcgagcgcatccgcttctccgatgcctccctctccccttctcatctcctccgccgcgctttccccctcctcctctggctgccgtagcgtagaatggggcgacacagcgctgacgtcgacgatgacgtcatcactagcggcggctcggcacctcgtgctcgccagtgaacgacggcgcggcggcgcaaacggagggcaccaacaagtagagggtgacgcggcgaactcaccgaaggctcggacgacggcggacggcaacggacggagacggtga

SEQ ID NO: 89778 - DNA, 216 bp, Oryza sativa
  Clone ID: PAT_MRT4530_88505C.1
tccgcccggggagagcggagggcctgaccaagtcttttcgttttctcccgccaaataacagggctcaggaatctgccaaccatcgccaatcggccgatttcagggcggccccccctgtgtccccctttccttttggcaaagctgtaaattgtaaatagatccaggtgtatcaatgccaagagtgagctttttttcctcagtcaaaaaaaaaaaaaa

SEQ ID NO: 89779 - DNA, 226 bp, Oryza sativa
  Clone ID: PAT_MRT4530_88506C.1
gttaccttcggcttcgtcttcctctcgccgctgattcgattcgatccgatccgatccaaggggaggggaagcaatggcgacgaagaggagcgtggggacgctgggggaggcggatctgagggggaagaaggtgatcgtgcggtgacatctgctgtaatgggatcacagaaagacaagtatcctgcaaattacaatcctgcactagtgggctatcactgtgaagttt

SEQ ID NO: 89780 - DNA, 264 bp, Oryza sativa
  Clone ID: PAT_MRT4530_88507C.1
cgtcagcagtttcacttaaagtctcataggggagagcgtagctcaagccactagcaaacttctgcggggagctaactcttatcgggcataaggcaagcgtatggtgacggtcgtacacgaggcaagtctgaaggcaatgtaagtctggaagtagcctacgaaggcttcttgactcttgagactgcgaggttgccgcaaagaagccttcatagtcgcacatgggaagccctcaggaagcattcaacataggaactctcgtttgca

SEQ ID NO: 89781 - DNA, 1838 bp, Oryza sativa
  Clone ID: PAT_MRT4530_88508C.1
atggatttggaagctaagttcgatctcctgctcaaaaccatttctgacaatgagaagaagagagtggaaggggaggagcgtaccagagcagagtacctggagctgaggaaaacggtggaatcaaggataccggccgtggagaagaaggcggaaacactgggagaatcggtgcagtcgttgaacgctaaggtggatcacttggagggcaacctgttgcggcaagtcaagtcggaggcgttcggcagcaccgccgcgggtggagctccaggcaactccaagcaggatcaagctgctgataagtcgggggcaactgcgacgccaatgtttggtatgaaggacaatttctccattccccacattaattttggttctgaacctgaaaccccatctcctggtagtggatctgctagttttaatctgagtaattccatcccacctatgatttgcccccaatttagtggtgataacccccaaatgtggaaggctaattgcgagcaatattttgatgtttatggcatacagtcagtttattgggtgaaaattgctacattaaatttctgtggtaatgctgcattctggttgcaatctgtgaggaatcagatatgtggaatttcttggactggtctctgtgagttggtgtgtaccagattttctaaggatagacagcaggctctcatacgtcagtggattcatattagacaggagggttttgtttcggagtatgttgagaagtttgacagtttaatgcaccaactcttagcttatgacaattctctgttacctgtgtactttgttactaaatttgtggaaggccttagaagtgacatcagggttgtggtattagttcagagacctcaagatcttgactcagcttgtgcagtagccttactccaggaagaagctttggagggtataaagtttaaccaatacaggaaacctgacagctctattcctgttcgcagttttcagaaaactcctgcacttgctcatactgctacaccacagaagcaatttactccacaacatacagaagacaagaggggtactgagtctgctcgagctagagaagagaaactagctgctcttaaatcttatagacgatctaaggggctttgtttcacttgtggggagagatggagtagggatcacaagtgtggttcagctgtacaattgcatgttgttcaggagttattggatgcattacaggatgagacccctgatggagaccctgaaactccttcagatagtaacagtgatctgatggctatttctcagcaagcattgtggggaactgagtcttctaaatccattcggctgagaggtttggtccaaggctctgaactactcatgctgttgctggctgtagatggtggatgcaaggacttaatttcatcagtaatttcagactgctccatctgggaagctatgatattatccttgggcatagtaccacagaccactcactgttcagtcatatcaacagaacagtatctgggcatggtgaaacaggggtcaattatgcacatagtacagctttctgcatctgatcctgtgactaaggagcctttaccttctgatgttcaggaactcattaactcttttcaagatgtcttctctgaacccactggtcttcctcctaagagatattgtgaccactccattccactcattctaggagcagctcctgtcagtcagaggccttacagatttaaccctgccttgaagaatgaaattgaaaaacaggttgctgaaatgttgcagtcaggggtaattcaacccagctcaagtccattttcctctcctgctttacttgttaagaagaaagatggtacttggag

SEQ ID NO: 89782 - DNA, 558 bp, Oryza sativa
  Clone ID: PAT_MRT4530_88509C.1
atggcaggtgttagctgcttctaccacccagagcacttggtaaccgagcaccactacggcgaggggtcgggttcggggtcgggcaacccctgcgccgcgtgcgagcgcgtcgtcaccggcgacggctaccgctgcgagcacggcgagtgcgacttccacgtccaccggagctgcctcgccctcccggcgtccttcgccctgcacgagcgccacgagcacgagctcacgctcacccgcctgacgggcagccggtggtgcaacgtctgcgacgtgatctcccacgccgggtgccgcatgtacgcctgcgcgccgtgcaacttcagcgcgcaccctcggtgcacgcctgtgttggacggcgcacaccagcagccgcagccgccgcagcagcaggagggggaggagaaacggagcgtgggggtacgcgccgcgaaggttgctctcaagatcggcgtcgccgtcggtttgaccgcggtggatgtcggaacgaccggcgggttggcgaccgtgggatcgctggtaatcgctcccatagtccgccgggcgattgacaaaatctaa

SEQ ID NO: 89783 - DNA, 2760 bp, Oryza sativa
  Clone ID: PAT_MRT4530_8850C.1
atgccgatctcgactggcccagcaatcatcgggagcaagaacggtgtggttacgaccccggtcgacaaccccatgtcgaaagatcctcccgcggaagcggagaatggaacatcgacaacacccgagcccgagaaggatcctaaggcggccaaatcttgccctttccgcaagaagtacgagccgacaaggacaactttcggggcgacaagaacttggtgtctcatccacaagactagcaagcacaccttgcaagcttgttcggttttcctcaacgtacgagctgaaatccgtgcctgcaaagagcgtggaattcaacatacttctccaactcgtgatgtctattatcccatccataaggcaaagactcacgacctttcaagctgcaaggtccttctcagcgccatgaagacgtcaccccctaaggtccagcaatcacgaatctctcctggaaatacggacaaggaacaaggtgcggcgactacaacagatcggttcgtcggggtaatcgatatcgatccccatgagccgtctgtcctacacctgctcgaagaccaggcctcatcatcgacaagtacaccacacgacgtgtacgccatcgatggaaccagcacatctggaggtggaacatacaagcgccacgcgatcgaggacgacctacatgcgttgacgcagaatctaggcgaatcattgagggactatattcgacgctttaatgagtgcagaaatacgatccttgagatcaccgatgcttctgtaatccacgctttcaagtccggcgtccgagatcgctacacaaccaaggaactggcgacaagatggatcacaacaactcgcaagctattcgagattgtcgaccgatgcgctcatgcggacgacgccctgagacgcaagaatgacaaaccgaagataggagatgagaagaaaccaaccaaggacgcgcccaagtcaagcaggaaaaagagtcgcaggagtgggaaatggaaagctcaagctgaggtcctcgcagcagaatacgttgacccacccaagcacccaaacccacaaggcgacgacacgaagaaaatatggtgccctatacacaagacggacaagcactctatggagacttgtttagtcttcaaaaaggcactcacgaagcaactggcgttggagaaaggcaagcgagtacgtgtagtcgagaaggccgccgaagcggctactcaggtctcagactcagcataccctgactccgacctccatgtttcgcacatcttcagaggttccacggcgtactcctcaaagcgagagaacaagaaagtggagcacgaagtttgttcgacatggcagggggctatgtccaagatgaagtggtcagagcagaagatcgagttctctaaaacagtccaccccaagactaccgttaccccagggcgatatccgatcgtggtagagcccactattcggaatatcaagggaaacgcgaagctggaagtgcagtgcgacaagcggagcctcgacatggtcgagcacattcccaacacacccaccacatctgagcttcccaagaaaccgtccgacatgctgggagtccctagggaggtgatcgagcacaaactcatggttcgacctgacgccaagccagtaaaacaaaaactgcggagatttgcactagagcggaaacaagccatacgagaagagctcgacaagcttctcaaagctggcttcatcagagaagttctccacccagagtggctagagtggctagccaacccagtcatgcgcacggttcaaggggcactcaatgaccagctcggacacaatgtcgaggcctacatcgacgagattgttgtcaagacaaagacaagcgacccattgatcgatgacctccgggaaacgttcaacaaccttcgacgatatcgcctcatgctcaacctagagaagtgcacgttcggagtaccgtcgggcaagctcctcggatttttcgtctccggaatagggatcgaagcaagtcccaagaagatcaaggcgatcgagaacatgaagtcgccgacgagactcaaggaagtccataagctaactggatgcttgcgacactttgcagctatcaagccacaggttcttgctgattttgtagctgactggactatgcctgagaacaggtcagacagtcaaacagacagcgaaacatggacaatggcattcgacggcgcactcaacaaccaaggagcaggggcagggttcatcttgacatcaccttcgggagaacagttcaagcatgcaattcacctcaacttcagggcgaccaacaacatagccgagtacgaaggactacttgccaggataagagcagcagccgcactcggagttaagcgactaattgattactgcatcggattgggagtcaagatttgcttcgcctcggtttctcaccctcagagcaatggacaagtcgaaagggcaaacgacatagtgctacaagggatcaagacccacgtctacgacagactcatgtcgcacgacaagaagtgggacgaagaacttctctctgccctatgggccgtgcgtaccacaccgacaacatccaataaggagacacccttcttcctcgtgtatggctcagaggctatgctccccacggagctacgacatcagagcacacgagtacagaagtactccgaagaggagcaagaggaccagcatagcgacgatgtgaatctacttgaggaacatcgagaaagagttgccgtcagagcagtcggctaccaacagacccttcgctga

SEQ ID NO: 89784 - DNA, 393 bp, Oryza sativa
  Clone ID: PAT_MRT4530_88510C.1
gtgttggggtttttttttgtggggggtgttttttatttaaaaattaaaaaggttggaacccttatttagtcccggtttcgaaccgaatccccccccaggggcatccctgggggggtttattttaccccacccccatcccaggtctcaaataccttaccctgagggcccgctttccgacccattccataatcccggggagtattggtggtgaaatctaggagtgaaggcccccggcccttcccccctgttggtcttgaggcttcgggcttgctcccttgagaagccatacccattagccactacctcaactggcaaggcaccgaataccgagtttttccccgccagggggccgaccaaggccttagcgtttgtcttgattgccatatattggcc

SEQ ID NO: 89785 - DNA, 546 bp, Oryza sativa
  unsure (1)..(546): unsure at all n locations
  Clone ID: PAT_MRT4530_88511C.1
accacagtgtggaatatgattgaaccgagatagtgtgatgtgtgcccgtgtgtgtgggcactgcacaaatgatatatgaggaggggtgatggaaccttttgtggtccactgggtggtgtggcaatgcaatgtggtgtgtatgttggtaagatttgggtgttttncacgagtgatgctgatgactgcctgtgatgaataanagggagtagtgggtgatggattgctggctaccaacccacctggacccaactgcttgatgctgtgtgtgttttgaaagggacatctgaggattaagtggggcccacatggtgcatgtgactctgcaccaagctgtgtgtgattgcttggtgaaacggttattgaccgtgcgaatgataatagagggtttggaacctgtgcgttgtggttatgatgcactgcgatggtatnttggattggttttgtgtntttgcacaaggagtatacatatattaagggcacagaataattgtcagtcgctaaaaaaattccatccatcagtcgatctgtgtcaaaaaaaaaaaaaaa

SEQ ID NO: 89786 - DNA, 403 bp, Oryza sativa
  Clone ID: PAT_MRT4530_88512C.1
acggatgggggtttcacaatacaatgccgtgcaccacgtctaaggtttcatcacacacgactcaaaatgtctccatccactgagaagcgtgcacacacaatggtgacgatccaagtcctccgctaccaaaccacgacagatgctagcattacaagttttacaacaagcccaaaagggtttttgctcaactgtggcaaaaagactcgcgcttgaagatgtacaaagatgaatctctgctcgaccgttggtctatgaactttcggtatttgccacggcttgaatttcgaagaaacacgccaagcttcagagctagcccacaagaagatccacttgttctctgtacatctcttttaggtcaacaatgtcatttcttagctctttcaactttcatcacgttccccca

SEQ ID NO: 89787 - DNA, 2613 bp, Oryza sativa
  Clone ID: PAT_MRT4530_88513C.1
atggaggaaagagtacaatggtatcaatattattctgttgttcgatccaattggctcaaaacaatgagctggtatgaacccacagttttagactgcaatatcagaagaaggagcctttattgctgttttttttctctcttccttgctccttattcacctgtaagaattgggagcggcagattgaaggcaaagcgcaagtgctttgctttttcttggagtgtttctcagaaaccacagaacgattttgtaaaggaagaaatccagcatctgcaaagcgatttatggcagctacagacaactctgccaaaaatgcgcaaccttgttgagatacttgagtggcaaatctataaaaaaccagctgcagaactcctcccacatatcaaggatgcattgctagatgctgaagacatcattgatgaatttaattactatgagctcaaggcaaagatagaggggagaatagaggaatgcctaacatcgtctggatgccaggaattctatatgagtgtcattcgaggaagctttaacagagtgaaagaaatccaagagaagctagaccatctacatcgtcagtctatggacttgggcttgcattgtgcagcacaaagatttgacaaaattgttaggccagaaacaagttcttttcttaacagtcagatttttggacggcaagaagaagagaaaatggtgttggagttgttaggagtacaattacaagctaatgctggctacaaacgcaagcgaagcagtagagtggaggtcttgccaattgttggactgggaggtgtaggaaagactactttggcccaacaaatttgcaagaatcaaatggtgaaagctcactttgatatgatcctttgggcatgtgtatcagatgactttaacgcaaagaggttaactaaagaggtaatccaatcttccaagaaagaaacatcatttgacaatttggattctcttcagtctattttaaaagatactgttgagttaaaaaggtttttacttgtactagatgacatttgggatgatgtcatggcagatggtgggcaagattggcaaaggttttgtgcaccgttgtcaaatgctcttcaaggaagcatgattttgatcaccacccggtcacagaaagttgctgataagagtgaactatggaagttggagcaggacaggacagatattctacctgccctgcgtttgagttatatgtatttaccaccccatctaaagaggtgtttctcattttgtgctgtgtaccccaaagactacaggtttgaaaaggataccctagtcgacatatggctggcagaaggtttcgttgaacatgcaagtagctttccaactgtaactgttgtgcagcaatattttgaagagcttctaagccgatccttctttcagaaagtgacgcacggcaaatatgtgatacatgacttgatgcatgatatggcacagctagtttcgcaagatgaatgcttcatcataaggaatgcaaatgaccttcgaacaatcccttccaatgttcgccatctatcaattttcacaaaaagatatattggatgccatgatttaatgggactatgcagaagcctgccttgtgactttggaaacctgatcagcctaaggaaatttagagcgaaaaatttcagttatctcccaggagaggattcacgcatgcagtttctaagaggagagagaatcaaagtgttgaaatatgtaaatcaggtacagggaagtttgcttgtcaatttgcctggtctcaaaagtaaaaagaatattggccttactgtgttgaaaaaggagaataatctctactctctccatatatctcaatttgcagaggatgctagatatgaacaggaacaattggaagtctgtgaaaacctacatcctcatccggatcttcaacatttggaggtcactggttaccaaggagagaatttttgtcctagctggttcctgcctgacaacttaccaaacatgatatcgcttatatttgaggagtgccataatgctaagaagatatcattgcatagattaccatgcacaggattccagtatttgattaacctgtacatcatcgaatgcacaaatttatcaagcatcgaacaatttctgcaaccatgtcatataccggctatcaaaatgataagcataaagggatgccaggagttatcgttgatatcagctgaaagatttggaggttttcgtttcttagaagctttggtgatccgtgattgtccaagaatcagttgggaaaatgggctggcattgccgcccactctcacaagcctttcgttggtgaggtgtggggatatttctaagtggatacctgactgtctactgaacctatcctcccttgtccgcctgcagttggttgggctttcagggacaatgtttattcctgggagtatctggaggaataatcttccattgctagattacttggagatctgtaatttccaagagcttcgttttactggtgtaccagaagcaattgaagaaataaacaatgtgcttattgacaagtgcccaatgctgaaagaactaaagcagcctttctccagaggtgatgttaccttcttgtgggggattccgactagtaaatggtacttgtcttaa

SEQ ID NO: 89788 - DNA, 1517 bp, Oryza sativa
  Clone ID: PAT_MRT4530_88514C.1
gcatcaaaacagcgggtcaacatataagcacaagtgcacaacgcctacattcacctgagcattgacaattttcatgacccccccaagggaatattacgtctgcatattgccgaaggtcgcactcgcagttgcgaatcacacaagacgatgaaatgacaggattaattccggcagttgattcacctatacataatttatttagtgacagaaaaaggaagattaacactaaggatgccttgacctgtattattaattatttctcctcttgtatatgtaactacagcacaaggcagccaagattctggtggccgtcggctaccctagggaagtacagttctcaccaccttcctgtccacaccaaatgactccaaaccgcagtcattaacatatacatttgtaaagagctcagatggatcgggcattggactttcctttgctttcgcgatggcagtgtcgacttgcttccttatttctttctccatgtccttgagttcttgtgtggttgcaaagtcatgggccagtagtagcttcctaaccctttcaattggatcgcgctcctgtcttatgcctgcaatttcatctctggtgcggtaagtgctccctggatctgacatagagtgtccgtggtatctgtaggtgtccatctcaagaataatcggtccattttcaagagcatgttgcttggcaaatttacaagcttgtttgactgcaagaacatccataccatcgaccttcaatcctggcacatagtcgccgcgtttgtagtatgcggggcttttcgatgccctccattccgccgtccccatcccatagtggttgttctcgcagacgagcacgacgggcagcttccagagcgccgccatgttgagcgcctcgaacagctgcccctggttggcggcgccgtcgccgtagaggtcgaacgtgacggcggcctccttcctgtacctctgcgcgaacgcgaggccgcatccgagcggcacctgcgcgcccacgatgccatggccgccatagaagttggcgtccttcttgtacaggtgcatcgacccgcctttccccctggagcacccgccgcggcggcccatgagctcggcgaagagggcggcgaggtcgccgccgcgggcgaggtaggcgcagtggtcgcggtaggccgtgatgatggcgtcggcgcgggtggtggccgcctccatgcccaccgcgacggcctcctgtccgtcgtagaggtggcagaagccgcggatcagcttcgccttgtacagcgagtccgccgcgatctccgcgcggcgcatggcggacatgtcgcggaagaaggtggcgagctcgcgcgccgtggtggccacctcgcgcgggggcgggtccacgatgtgggacttgtaggggaccgaggtctcgatggtgagcggctccgtcgaatcggagacaccccggacgctcgtggtcaggggcagcgccgccgccgcgcgccggggcgccgccgtgacgccgcgcaggcggcggaggaggacgacggccgcggccat

SEQ ID NO: 89789 - DNA, 1576 bp, Oryza sativa
  Clone ID: PAT_MRT4530_88515C.1
atggagaaattggatttcaaatattttaggaaattcaagctcgagaattatcctcaatggaatccctgctgcctcaacatcatttgcaaggaaatctatcggactggtggagcagtttctgcactatttcgccaagacaaaacaggaacaagggctcccctccacccgtcgtcgtcggcgccgtcgtcgtcgtcatcgtcaccgtcatcgtcgttgtcggcgcggcggcggagggggcgaggagatgaagcggctggtagaggcggcgaggagggaagccggcggcgcacggatctggagccgtcgtcgtcgctcgtcgtggccggcagcggagggatgcggcggcgcgcggacgttgtcgtgaagggagccagtggcgcggacgtgggagaggagggagccggcaacgcgcggatctggagccgtcgtcgtcgctcgtcatggccagcgacggagggatgcggcggcgcacggacgtcgtcgtggagggagccggctgcctggacgtgggagaggagggagccggcggcgcgcggatctggagtggagggagcagtcggcggcgtcacgggctcctccatgtcctgctgcaactgatactctgaaggcaggacaagtgctctctgccggtgacaagctcgtctcgaggaatggcaagttcgcgctcggcttcttcaacccaagcgcaaacatcagtaagtcatctgacaacatctcctccagttggtacattggcatatggttcaacaagatcccagtttttactgtcgtgtgggtcgctaatagggagaggtcaatcgctgagcccgacttcaagctaacacagctcaaaatatcacaagatggcaatcttgccatcgtaaaccatgccaatgaatccataatatggtccactcgtattgtcaataggacagaggccagcatgaacacaagtgttcttctccacgacagtggaaatcttgtcatacaaagcacatctaatgcagtgctgtggcaaagctttgactacccaacagatgttgctcttcctaatgccaagattggctggaacaaggtaaccggtctgaaccgtgttggtgtttcgaagaagagcctcattgatatgggcactggctcttatagtgtacaactatacaccaatggcaccagaagggtgaccctcgagcaccgaaacccttcaatagagtactggtattggtcgccagatgaatcgggaatgaagataccagcactcaagcaactactgtacatgaatccacagaccagaggtttagtcaccccggcatatgttaacagcagtgaagaggagtactacagctacaattcatcagatgaatcatcttccacattcctcttgctagacattaatggccagatcaaattcaatgtttggtctcaagacaagcactcatggcaaagcctatatacccaacccgttgatccgtgcaggtcatatgatacttgtggaccattcaccatctgcaacggcaattcacaaccattttgtgactccggtgctgatgagattgtcaacgtacacgccgacgatcaaccgcgaagctcggcacacgtgtag

SEQ ID NO: 89790 - DNA, 3115 bp, Oryza sativa
  Clone ID: PAT_MRT4530_88516C.1
ttaaaccattttcgcaagcgcgcccgtggcccgccagcgaaaatcatcccaggaaaataaaaaaaaccacggggcaccgccggccagggctcccctccacccgtcgtcgtcggcgccgtcgtcgtcgtcatcgtcaccgtcatcgtcgttgtcggcgcggcggcggagggggcgaggagatgaagcggctggtagaggcggcgaggagggaagccggcggcgcacggatctggagccgtcgtcgtcgctcgtcgtggccggcagcggagggatgcggcggcgcgcggacgttgtcgtgaagggagccagtggcgcggacgtgggagaggagggagccggcaacgcgcggatctggagccgtcgtcgtcgctcgtcatggccagcgacggagggatgcggcagcgcgcggacgtcgtcgtggagggagccgacagcctggacgtgggagaggagtgagccggcggcgcgcggatctggagcggagggagccgtcggaggcgtcgcggttgtcgtcatcgtcgaggagggaggccgccggtggcgaggagggatgcggcggcgcacggacgtcgttgtggagggagccggctgcgcggacgtggaagaggagggagccggcggcgcgcggatctggagtggagggagcagcggaccacataaggcgtcgcttaagtggtctgattttcgcaggcgccgcttaacagtgaatttcatgccggctcctccatgtcctgctgcaactgatactctgaaggcaggacaagtgctctctgccggtgacaagctcgtctcgaggaatggcaagttcgcgctcggcttcttcaacccaagcgcaaacatcagtaagtcatctgacaacatctcctccagttggtacattggcatatggttcaacaagatcccagtttttactgtcgtgtgggtcgctaatagggagaggtcaatcgctgagcccgacttcaagctaacacagctcaaaatatcacaagatggcaatcttgccatcgtaaaccatgccaatgaatccataatatggtccactcgtattgtcaataggacagaggccagcatgaacacaagtgttcttctccacgacagtggaaatcttgtcatacaaagcacatctaatgcagtgctgtggcaaagctttgactacccaacagatgttgctcttcctaatgccaagattggctggaacaaggtaaccggtctgaaccgtgttggtgtttcgaagaagagcctcattgatatgggcactggctcttatagtgtacaactatacaccaatggcaccagaagggtgaccctcgagcaccgaaacccttcaatagagtactggtattggtcgccagatgaatcgggaatgaagataccagcactcaagcaactactgtacatgaatccacagaccagaggtttagtcaccccggcatatgttaacagcagtgaagaggagtactacagctacaattcatcagatgaatcatcttccacattcctcttgctagacattaatggccagatcaaattcaatgtttggtctcaagacaagcactcatggcaaagcctatatacccaacccgttgatccgtgcaggtcatatgatacttgtggaccattcaccatctgcaacggcaattcacaaccattttgtgactgtatggagaatttcactcgaaagtcacctcgggattgggaccttggtgatcgaacaggagggtgttctaggaatagtccattagattgcaccagaaacacaagttcaacagacatcttccacccattaattcatgttacattgccccgtaacccccaaaccatacaagaagctaccactcagagcgaatgtgcacaagcttgcctcagctcctgctcctgcactgcttattcctaccaaaatactagcacttgctctatctggcatgacgaattgtttagtgtaaaccaagatgatggcattgaaattcattctcaagatgttctttacctccgccttgccgccaaagatttgcagagtttgagaaaaaacaaaaggaaaccaattgttgcagttgttacaaccataagcattattattcttgtgttaataataatgctcatggtgttggtaatggtttggaggaatagattcaagtggtgtggtgtgccattacacagaagccaaggtggtagtggaattatagccttcagatatagtgatttagaccatgctactaaaaatttctcagagaagttgggagaaggaggtttcggctccgtgtttaagggagtgttgagggacttgactgttgtagcagtgaaaaggcttgatggtgcccgtcaaggcgagaagcagttcagggctgaggtgagctcaatcggattgatccaacatatcaacctagtcaagttgattggtttctgctgccaaggtgacaagaggctacttgtttatgaacacatgttaaacggttctcttgatacccatctgtttcagagcaatgctactatactgacgtggagcacgaggtatcaaatagccataggagttgctagaggactttcctacttgcatcagagttgccacgaatgcatcatacactgtgatattaagccacaaaacatacttctcgacgaatcatttactcctaaaattgcagattttgggatggcagtatttgtaggaagggattttagcagagttctgactacatttagaggaacagttggatatcttgccccggagtggattagtggtgtcgcaattacaccaaaagttgatgtttacagctatggtatggtgttgctagagatcatatcaggaatgagaagtttacctaatgtacacagtagcaacagtcatcatgctgcttacttccctgtgcaagccatcagcaagcttcatgagggagatgtgcagagtttggtggatccacgtttgagtggcgacttcaatttagaagaggctgaaagggtttgcaaagttgcttgttggtgcattcaagataatgagttcgatcggccgacaatgggtgaagtggtcctggttcttgaaggtctacaggagtttgatatgccccctatgccaagactacttgcagctataacgagatcttctaatgtagctgagatgtaa

SEQ ID NO: 89791 - DNA, 357 bp, Oryza sativa
  unsure (1)..(357): unsure at all n locations
  Clone ID: PAT_MRT4530_88517C.1
ttggttgcggattcggcncgaagtaaattgcgagagagagaactcagttagtttgttgagtggaagcagatcnggaagatgctggagaagctgtgggacgacgtggtggccggtcctcgaccggagaccggcctcnanaanctccgcnaggccgctncaacccgcccccttgtcntctacaaanatggcgacngcgangcgagcggagtggcgttctancggacgcnctcgatgccgacgaccccgacgacgccggtgacgccgtcgtcttcgtccccgacgacngcgacgactacaacgccgcggggcngcaacntgtggangancgtgttcccccngggagcaacctcgcctcct

SEQ ID NO: 89792 - DNA, 435 bp, Oryza sativa
  Clone ID: PAT_MRT4530_88518C.1
atggatcggatcgatctgaaccgcttcatcattcctcggtcaaataatgtatggagtacgtactgcgctttgtacgtgcgggccgacagtttccacatactgcagcgcattgcacggtacgaccagctacgaaacaaacgcatcacgccacggaatatggattgcatgatcagtattaattatatgtgcatcagacaccaaagaccatattttgcacagctcgccgaggaggaggaggaggtagcgcacttacatgtggagggggcgaactggagcggaggtgggacgtacaactcgagcgctgcgccagcaagctcgaccgcggcccatcgggtccagcgcatcggcaaggagggaggtcgatgggcagcaaaggggcaaggatcggaggaggtggcgacgctcggctaccgagatgcgaacgagcaggagagc

SEQ ID NO: 89793 - DNA, 174 bp, Oryza sativa
  Clone ID: PAT_MRT4530_88519C.1
ggcctgaccaccctcagagggatttggttgcttttttttctctccccatcttgaattctgtgagaagctagaagcgtcgacaagatttaaaaaaaaagtgaagatcacattcatgatcatggggtggtcaaggcgctgacatattaatcaaggaatacaaacctgtttgttgtc

SEQ ID NO: 89794 - DNA, 6171 bp, Oryza sativa
  Clone ID: PAT_MRT4530_8851C.1
cggagtccacagatagaaggaatccgactcgaacagaactgggtcgttaccatatcgtgaggggtccgatatctccgagttctacttagagatcaactgatccgtggtataaaaggtaccccctgggtaagacctaaggcatcgaatctcaccgccaacacatccaccacagcctacgaaatcctcgttctaatgtaccccaataccctctatatccggtctacgggtttcccccatcgacagtagcgcgccatgtagggggacttggtgctcaaggttctactagtatgacttcaagccttcttgacgacagcgtcaaccccgccatcaaccaaggatcttctaactcaacgatgctggtgtggacccaagtcggcgaaatcgtcttcccggtctacaccacgatgccgatcttgactggcccagcaatggctggaagcgagagcgacgtggttacgaccccgacagactccatgtcgaaggatcctcccgtaaaagcggaaaacggaacatcgacaacgtctgagcccgagaaggatcctaatgtggcccaatcttgtccttccgacaagaagtacgagccgacaaggacaacttccgaggcaacaaggtcctggtgtcctatccataaaaccagaaaacacaccttgcaagcttgctgggattttctcgacgtacaagccgaaatccgtgcttgcagagagcgcggaaatcaatgaacttctttaacccgtgatgtctattgtcctatccacaagacaaagaatcacgacctctcaagctgcaaggttcttctcagtgtcatgaggacgtcacctcctaaggtctagcagtcacaaatctctcctagagatacggacaaggaacgagaagcggcagctatctcagatcgattcgttggggtactcgatatcgatccccacgagccatctgttctacatttgctcgaagaccaggcctcatcgtcgacaagtacaccatgcgacgtgtacactgtcgatgggactagcacatctagggacggcaacacggaagcggagtatcaagtggctacaccggcccagcacatcaggaccatcaatgcaatactgagggaaactccttatgatcccgtcctgaacgcggatctcgatcagtggacagaacgactacgggaatcagtggccaacctcagtaacgcgttcgaggaggccgctgccagggcaccgccagagtaaccggcggctggcggcactaatagggaatagcctgcgcagcggacgccacctcgtcaagctacccttctgcctcgcggcgccagtgatctccgcgaccatctaaaaggccgccgagaagcacgacgcgcccaaggcaacgagagtcgttcccaacgtcgtgtctcttcgcgacatcgtgagaacggtgataatcgccacaaccgccgcgaacatgataatcgcgaacaacgggtgcctggcgatactggtcgaggacgccgacgcaatgatgatgacgacggagatcagcgccagaacaacaatggtgggcggcgacaaggttctcgagaacccgagcgcacaccggaaccgagtgtagacatcggatagacatccgcggaggacacatgatcgccgacaacccactgcccctggcgacgggtgtagggctttcagtcgtgccctgcgagatgtccgattgcctgagagatttcgaccgggagcaatagagaaagacgacagaagcaccgaccctgaggagtttcttctagtttattccacagtacctacgctgccggagcagatgacaacgcagtagcaaattatttgccggaggcgttgaagggatctgcacgtacatggctagttcacctcctgccctactcgttttcttcatgggcagatctgtggcagcaattcgtcgctaacttccaaggaacatacaactgccacgcgatcgaggacgacctacatgcattgacgcagaatccgggcgaatcattgagggactatatttggcgcttcaatgagtgcagaaatacgatccctgagatcaccgatgcttctgtgatccgcgctttcaaatccggtgtccgagatcgctacaccacccaggagttggcgacaagacgaatcacgactgctcgcaagctattcaagattgtcgatcgttgcgctcacgcggacgatgccctaagacgcaagaacgacaagccgaagatagggggagagaataaactagccaaggacgcacctgagtcaagcaagaagaagagtagcaagagtgggaaacggaaagctcgaacggaggtcctcgcagcagaatatgcagacccacccaaacactcagacccacaaggcaacgacacgaagaaaatatggtgccctatacacaagtcggacaagcactacctagagacttgtttcgtcttcaaaaaggcactcgtgaagcaactggcattgaagaagggcaagcgagtacgtgtagtcgagaaggttgctgaagcaactactcaggactcagactcaacatacccagactccgatcttcatgtttcacacatgttcggaggttccacggcggcgatatccgatcgtggtcgaacccactattcggaatatcaagtttgcacgggttctcatcgacggcggcagctccatcaacctacacttcgccagcaccttggacgcgatggggatcccacggagcgagttgacgcccactgatcaacccttccatggaattacccctcagtcgtcgtccaagccattgggcaagatcacgcttcctatgactttcagccaagcaaacaacttccgaacagagcagatcacctttgatgttgctgagtttgacacagcatataacgccatcatcgggaggattgcactcgcgaagttcatggccgcatctcactacgcgtatcaaatactcaagatgcctgggccgaagggaacaatcactatttagggaaacgcgaagctggcggtgcagtccgacaagcggagcctcgacatggtcgagcacacccccaacccacccgccacagctgagccacccaagaaagtgagcaaaacaaacaagacgccgaagccagacggcgcaatcaagatcgttccgctctccagtgccaacctcgacaagaccgtactcgcgctcatcatcttcctccgtgacaatgcagacatgtttgcttggcagccgtctgacatgtcgggggtccccagggaggtgattgagcacaaactcatggtgagaaccgatgccaagccagtaaaacaaaaactgcggagatttgcaccagaccggaaacaagccatacgagaagagctcgacaagcttctcaaagttggcttcatcagagaggcactccatccagagtggctagccaatccaatcatggtgcgcaaggccaacgggaagtggaggatgtgcgttgatttcacagacctcaacaaggcgtgtcccaagcatcacttccctcttcctcgaatagaccaactagtggactcaacagctggttgtgaattgttaagctttcttgacgcttactccggctagcaccagatcagcatggcaaaagaggacaaggagaagacaacattcatcacgccgttcggtgtattttgctacgtcaagatgccgtttggactaataaccgcaggaaatactttccaacgcacggtccaagggaacaatgtcgaggcctacgtcgatgacattgttgtcaagactaagacaagcgactcattgatcgatgatctccgggaaacgtttgacaacctccgacgatatcgactcatgctcaatctagagaagtgcacgttcggagtaccatcgggcaagctactcggattcctcgtctcaggaagaggggtcgaagcaaatcccgagaagatcaaggcaattgagaacatgaagtcgcccacaagactcaaggaagtccagaagctaactggatgcatggcggcattgagcagattcgttgctaggatgggagaacgaggacaacccttcttcgctctgctgaagaaacaagacacaggaagccgaagatgtgtttatcgcacttaaaagctacctgtcaaatccccctgtacttgttgccccccaacctaatgaagaattattccgctatattgccgccacaccatattctgtgagtaccgtcattgttgtcgagagagagaaggtacaaagaccagtttattacgtcagtgaagctctctacgacgcaaagacaagatacccacatatccaaaagctgttttatacagtaatcatgatatcaagaaagctacgccactacttccaagcccacagagtcacagttgtttcctccttccctcttggtgaagtcatgataaacaaagacattatcggccgcatcacgaaatgggtagtcgagctaagccaatttgatgttcactttgtgccacgaacaaccttcaggtcccaggtcctcgccgatttcgtagctgactggactatgcctgacaacaggtcagaaagtcagaccgacaacgagatatggacaatggcgtttgacggcgcactcaatagccaaggagtaggggcagggttcatcctgacatcaccttcgggagatcagttcaagcatgcaattcacctcaactttagggcgaccaacaacacagccgagtacgaagaactactcgctgggataagagcagcagccgcactaggagtcaagtgactaatcgtgaaaggggattctgaactagtcgcgaaccgggtgcacaaagagtacaagtgctctagccccgagttatccaaatacctcgcagaagtcaggaagttggagaaaaggtttgatgggatcgagatccgacacatatatcgcaaggacaacatcgaaccagatgacctagcatggcgtgcgtccagacgagagccactcaaacctggcaccttccttgacgtcctgacaaaaagaggcaaacaacgaagatagcacagtcgtccccgacattgactcgggggctacaaaggcagtacacgtcgttgccgacatcgagaccacagacgactagcggaccccactcatcaggttcctgaatagcgacgagttgcccaaggacgatgcagaagcagataaaataacccgacaagccaagatctactgtatgatcggcaacgatctatacaaaaaggcgccaaatggggtacttctcaaatgcatttcattcgacaatggcaaacacctcctcctggacatacacgaagggatctgcaagtcacacgccgccggccggacattggtcggaaaagctttccgacaagggtttttttggccgaccacgcttaaagatgcttgcgacatgtaaacacacaaggctaccagcgcaagcgctccagactatccctcttacttggccgttctcgtgctgggggctcgacatactcggaccattcccatgaggacagggcggctataggttcctattcgtggcgatcgacaagttcaccaagtggattgaagcaatgcccacgggggaaatcaaggccgacaacgccatcaagtttatcaaagggatattctgcagatatggtttgcctcaccgcatcataatagataatggttcccaattcatcagtgccgacttccaggactacttcatcaaattgggagtcaagatctgcttagcctcggtttctcaccttcagagcaatggataggtcgagaggacaaatggcatagtaatacaagggatcaagaccctcctatgggccgtgcgtaccacaccgacaacgtccaacaaggagagacccttcttcctcgcgtatggctcagaagctatgctccccacggagctacgacatcagagcacacgagtacagaagtactccgacgagaatcaggaggagcagtgaagcgacgatgggaatctactcaaggaacatcgagaaagagttaccgtcagagcagccagctaccaacaggcccttcgccgataccacgagaagcgcatcagagcacgcacgctttcgatcggcgattacatcctccgacgggttcaaagccaagcaaggcgtaacaaactctcacccaagtgggaaggaccatacacgatcacgcaagtcttgcggccaggtgcattcaagattgcagacggcgatggtcgcgagttagcaaattcctagaacattgatcaattacataacttctatgta

SEQ ID NO: 89795 - DNA, 238 bp, Oryza sativa
  Clone ID: PAT_MRT4530_88520C.1
ttaaaaaaattttcccatgtcatcctctttcatctcccctaatttagtgactgaaatcacatatatatatagcaatttaagttctgtccctcactgatagctcttttaatgttattgaatttttattttgtactttctattatatcttcatgctcactaatattcacttttgcaatacctaactgttcattaatgccacctattgtattttatattagacattgtagttttcatctct

SEQ ID NO: 89796 - DNA, 870 bp, Oryza sativa
  Clone ID: PAT_MRT4530_88521C.1
atggcagagatggtggtgatcaggccgctggtctccttgctgaaggagaaggtgtcgagctaccttgtggagcagtacaaggtgatgaaaggcatggaagagcagccactcaagaatgtgtcctatgaagtgatcgatgtctttgatgagttcaagtatgaagcgctccggcgtgatgccaagaaaaaggggcactacaacaagctcggtatggatgttataagcctcttcccttctcgtaaccctattgtattccgttacagaatgagcaagaagctgagcaaggttgtgcgtaccatggatgtccttgtcagacagatgaatgactttggattcacacaaaggcagcaagtgacaccatcgatgcagtggcggcagactgatagcataatgattgactctgacaaggacattgccagcagatctaggaacgaggagaaggagaagatcataaagatattggttgagcaggagggaaatgggggtctcatggttcttcctatcgttggaatgggtgatgatttcgacattggtaacattgcaagaaacatctgccatagccaggagaaaaatcatgagaaagctttgcaggatctccagaaagaattaagtggacagagataccttattgtgctggatgatgtatggaatcgggatgctgacaagtggggaaaactgttgacatgccttaagcaaggtggcaggggcagtacgatactgacaacaactcgtgatgcagaagtagctcgagttatgaccatgggtgtacctggagcatataaccttgaaaaattgggtaacaagtatatgaaggaaataatccagagcagagcattcagagtgcaaaagccaaacagtgacgagctagat

SEQ ID NO: 89797 - DNA, 181 bp, Oryza sativa
  Clone ID: PAT_MRT4530_88522C.1
gggaaaaggaacttttttgctaattgggccggtcgtcctccctttgcctaaaaaatgataaacctgaatttccgtgtctaacgttaaactgttcattttatataaaatttttttataataagtattttcattattgttagatgataaaacataatcggacccttgggcggccccttggttc

SEQ ID NO: 89798 - DNA, 224 bp, Oryza sativa
  unsure (1)..(224): unsure at all n locations
  Clone ID: PAT_MRT4530_88523C.1
cacgcgtccggttatttcttacttgaaaaatgaatttatatgatactttaaagccacttctattatataaagttttgttattgaaatacattctttagcagtttgcaaaaatcgtaatcatgtttaaacaggtgtaagtgttgtaatatggagtttagaggttgcccnnatttcttgtctntcnttctctncttcttgggggggggggntnatttttttttttt

SEQ ID NO: 89799 - DNA, 430 bp, Oryza sativa
  Clone ID: PAT_MRT4530_88524C.1
acatcgacccgtcgttcgccgcggtgcgccgccgcgcgtgccccgccgcggcacccaacggcgacaccaacctggcgccgctcgacgtgcagacgcagaacgcgttcgacaacgcctactacggcaacctgctggtccggcgaggcctgctccactccgaccaggtgctgttcaacggcgggtcgcaggacgcgctggtgaggcagtacgccgccaacccggcgctgttcgccgccgacttcgccaaggcgatggtgaagatggggaacatcgggcagcccagcgacggcgaggtcaggtgcgactgcagggtcgtcaacgacagctgatcatccatgggctgtatatattttcatgtggatttgtggtgacgtatctttgttgtaaatactgtgatgcaataaagcagcgtggtaccatcgttgctatt

SEQ ID NO: 89800 - DNA, 1162 bp, Oryza sativa
  Clone ID: PAT_MRT4530_88525C.1
tttttgtatttgagggacaagtgcaaagttcaaagaaaaactaagtaactacacacgggggaacaatagactggccgagtacgatgagacgaagagaatgaagtgatgaactaataggaatcccagtgctgataaattacagttgagcaacccgactatcctcctccttcgaagcttgcacaaaattctcccgaggaatctcactaaccagacgctccaaggcggcaccatcagagacaacgccgtcgtgagacgtgccggcgatcttgacggacttgtagtacccctgcctcggatcttcgccgatcaccgtgtcgagagccagtatgctcgccgaattgacgaccccatcgccgtcgccgtacaagatctccggggcctggctgaagtcgccgtcccagtacaccagcttctccgtcgtcggcacgccgacgccgttgatgcacgtcgtcggcaccgccggcgccctgaaattcatcgccaccggcagcgccctcgtcttgtatagcgtcacctcgtacgccgggagaccgactgccgtcaggagctccggtagttcttgtcccgcgtgaccaccagcggcgtgtcgcggtcgaacaccttgggtgacggcagcgacgtgaacttgcaggcgaggctcctcccggcaaggcccatcggggaggcgtcgctgacgccggagaccagggactgcaatcccagcacgaacccgccggcgccggtggacgccatgacgaagtgcttgacgtgcctccggcgccacgccatggggctccggttgatgaactcgagcgcgaagtagccgccctggctgtgcgacacgaggacgaccggttggtccccgttcgtcctgctcgcgtgctcgacaagcgcccggagctgacgccggaaccgcgagaacgccctgcacggcttccccggtgccgctggcgcctgccggaagtcgtacggcgcgccgaacaaggtctcgccgtcgcggtagccgactttctccaacgcctcgacgagccttcccatgcagaggtctcggggggagaccaccggagggcgcgtcgcgccggcgcggcggggaggtggtggtgtgcccccgtccgccggcgaggtagaagaatgggaggaagaggaggagcggcagcagccgatgcagctgtgtggtggccat

SEQ ID NO: 89801 - DNA, 247 bp, Oryza sativa
  Clone ID: PAT_MRT4530_88526C.1
atgaggctcagttcgagctcggctcgagtctctactgagctcgagcttacacagacaagcacgctcgagctcggctcgttgacaaccctatttgtgcgccgccctagcccgctgacgcgctgccgcccgagctgccgcaccgctgccgtcgtcgtccccgccattgtcgccctcgcgtcgccgataatccgcgccgccgtcgccgttgatcccccggactgcgcccccggcggcgagttccccgctg

SEQ ID NO: 89802 - DNA, 2076 bp, Oryza sativa
  Clone ID: PAT_MRT4530_88527C.1
atgggggagttgaagaggctttacctgagacctcaacaagtggctgaagaagaaaatgaaatacatgttggttatgaggatgatcagtttggaggttgctcttgctgggcatcaaacatgggtctggtgaaggatggcgccgccgatttggaggaggggaccctggagatcggcatggagtacaggactgtttctggtgtggcaggacctctggttatcttggataaagtaaagggcccaaagtaccaggaaattgtaaacatccgattgggagatggcaccactcgccgtggccaagttctggaagttgacggtgaaaaggctgttgtgcaggtctttgaaggcacttcaggaatagacaacaaatataccactgtgcagttcacaggagaggtcctgaaaactcctgtctcacttgatatgcttgggcgcatttttaatggatctggaaaacccattgataatggcccacctattttgccagaggcctacttggatatctctggaagttcaattaatcccagtgaaagaacctatccagaagagatgatccaaacagggatatcaaccattgatgtcatgaactccattgctcgaggccaaaagattcccctcttttctgctgctggtcttcctcataatgaaattgctgcccaaatttgtcgtcaggctggccttgtgaaaagcttggagaaaggcaagcatgcagagggtggtgaagatgacaactttgctatcgtgtttgctgctatgggagtgaatatggaaacagcccaattcttcaaacgtgattttgaagagaacgggtcaatggagcgggtcaccctttttctgaatctggcaaatgatcccaccattgaacgtatcatcacccctcgaattgcactgacaactgcagaatatttggcatatgaatgtgggaagcacgtgcttgtcatcttgacagatatgagttcatatgcagatgcgctccgtgaggtatcagcagcccgagaagaagtgccaggtaggcgtgggtatcctggatatatgtatactgatctggcaaccatatatgagcgagctgggcgtattgaaggaagatcaggctccattacccaaattcccattctaacaatgcctaatgatgatattacacatccaactcctgatcttacggggtacattaccgaaggacagatatacattgacaggcagctgcataacagacagatatacccacccatcaatgtcttgccatctctctctcgattgatgaagagtgctattggtgagggtatgacccgtcgagaccattcagatgtgtctaaccagctttatgccaactatgcaattgggaaggatgtccaggccatgaaagccgttgtgggagaggaggcgctctcttctgaggatctgctttatttggaattccttgacaaatttgagaggaaatttgttacacaaggagcatatgatacaagaaacatctttcagtcacttgacctagcatggacattgcttcgcatattccctcgtgagcttctccatcgtatccctgcgaagacattggatcagtactacagcagagatgctacccactgatctatgttcagaaaaatcaaatgttttctctcaagtgcagcttgaataaattgaaatgtttgaacttgtggcctttttgctgtagttatatatagtccggtcctattctttctgtcgggtgagcataattcgttcgtagatcactttgtcacggcaacttctgtaatattgtgccatgtatctttaaactttcacacttgagctctttttggttttcattcgccagaattgttagcaagagcattgtaggccaagatgctcgaacctccaactctccaaggcactggctgtatctacttttgtgaatgaataaagatggaacaataaactgcgatgaaatatacatgttaaacaatgcgggttctgaaaaataaatatatgcaaatttggtacgcttcaaaaaaaaaaaaaaaaaaaacacttaaatacttggggtgtattacaaaaaaaaaaaaagctgcatgccgtcgatcgtcatgctcattataagta

SEQ ID NO: 89803 - DNA, 405 bp, Oryza sativa
  Clone ID: PAT_MRT4530_88528C.1
ttaaataatcgatgcgcattgtttgatatttctgcgtgggaaaattgaaatgctcctgtgtgtgcgatactggacgcagaaacagtttcttttcttcctgaaggctttagctattgctgacatagataaacaagagaaaattttgaccctcgcttgcctcgccgacttaccaaaaaaaaaaaaaagtctccggccagccacctcgccgccggccgtttcacgacgagtagtcgttgctacctcgccgggacgaccgctcgccgacgcttgtgatccgctgcatggacccgtctcgcacgtactgggcgtgcgacgagcttctgctgctctcgccaccggccgcttgatgcctctccctcaccgtcgccatggccgcggcgaccacctcctccaccctcgccgcgg

SEQ ID NO: 89804 - DNA, 1062 bp, Oryza sativa
  Clone ID: PAT_MRT4530_88529C.1
atggcgtcgctgctgatcgccagcacggggggcgcccaccgcctcgcgtggaaggacgccgccgccctgggacccgctccgcggctggcgcgaccttggcccgccgccgtggctgcaccggcgccgctgctcaggacatcaacagctgatatcactagtctcagagtaattacagcggtcaaaaccccatatctgcctgatggaagatttgatcttgaagcatatgattcactgataaatatgcagatagatggtggtgctgaaggtgtaatagttggaggaacaacaggagagggccaccttatgagctgggatgaacacatcatgcttattggacatactgttaactgctttggtgctaaagttaaagtggtaggcaacacaggtagtaactcaacaagagaggctattcatgcaacagagcagggatttgctgtaggtatgcatgcggctctccatatcaatccttactatgggaagacctctatcgaagggttgatatctcattttgaggctgtcctcccaatgggtccaaccattatttacaatgttccatctaggactggccaggatattcctcctgcagttattgaggctgtttcaagtttcacaaacttggcaggtgtgaaagaatgtgttggacatgagagggttaagtgctacactgacaaaggtataaccatatggagtggtaatgatgatgaatgccatgattctaggtggaaatatggtgccactggagttatttctgtggctagcaaccttattcctggtctcatgcacgatctcatgtatgaaggggagaataagacgctaaatgagaagctctttcccctgatgaaatggttgttttgccagccaaatccaattgctctcaacactgccctggctcagcttggagtggtaaggcctgttttcagattaccatatgtacctcttcctcttgaaaagagggtagagtttgtccgaatcgttgaatctattggacgggaaaactttgtgggtgagaacgaggcacgggttcttgacgacgatgattttgtgttggtcagtaggtactaa

SEQ ID NO: 89805 - DNA, 3372 bp, Oryza sativa
  Clone ID: PAT_MRT4530_8852C.1
atgtcgtattatgtagatcctcgtaccagcgtaccccaataccctccctatccggtctacgggcatcccccgttggcagtggcgcgccaggtagggggacttggtgctcaaggttctactactatgacttcaaactttttcgacgacagcgtcgaccccggcatcaaccaaggatcttcaacctcaacgatgctggtgcggacccaagtcggcgaaatcatcttcccggtctatactacgatgccgatctcgactagcccagtaatggccggaagcgagagcgatgtggctacgaccccaacagactccatgttgaaggatcctcccgcagaagcggaaaacggaacatcgacaacgtctgagcccgataaggatcctaatacggcccaatcttgtccttccgacaaggagtatgagccgacgaggacaacttctgaggcaacaaggtcctggtgtcctatccacaaaaccagaaaacacaccttgcaagcttgctgggtttttcttgacgtacaagccgaaatccgtgcctgcagagagcacggaattcaccgtacttctccaacccatgatgtctattgtcctatccacaagacgaggaatcacgatctttcaagctgcaaggttcttcgcagcgccatgcggatgccacctcctaaggtccagcagtcacaaatctctcctagagatgcggacaaggaacgaggagcggcaaccatctcagatcgattcgttggggtaatcgatgtcgatccccacgaaccatctgttctacatttgctcgaagaccaggcctcgtcgtcgacaagtacaccacatgacgtgtatgctatcgatgggactagcacgtctaggggtggcaacacggaaacggaggatcaagaggttacaccggcacatcacatcaggaccatcaacgcaatactgagggaaaccccttatgatcccgttctgaacgatgatctcgaacacaacgcgttcgaggaggccgctgccagggtaccaccagaacaaccaccaaccggcggtgctaatggcgaactacctgagcagcgggcatcacctcgtcaagccacccctccgcctcgtggcaccagtgatctccgtgaccatctgaatggccgccgagaagcacgacgcacgcgagacaatgaaaatcgttcccgacatcgcgtctcttcgcgacgtcacgagaacgaagagcaaggaggacatttgagcgagaaccaagaccatgataatcgccacaaccgccgcgaacacgataatcgcgaacagcggatgcctggcgatactaggcgagggtgccgccgtaatgatgacgacgacggagatcagtgccgggacaacaacggtctgtggcagcaattcgtcgctaacttccaaggaacatataagcgccacacgattgaggacgacctacacgcattgacgcagaatccagacgaatcattgagggactatattcggtgctttaatgagtgcagaaatacgatccccgagatcaccgacgcttctgtgatccgtgctttcaaatccggtgtccgagatcactacaccacccaggagttggtgacaagacgaatcacgactgctcgcaagctattcgagattgtcgattgttgcgctcacgagaacgatgccctaagacgcaagaacgacaagccgaagacagggggagagaaaaaactagccaaggacgcacctgagtcaagcaagaagaagagtcacaggagtgggaaacggaaagcccaaacggaggtcctcgtagtagaatatgtggacctgcccaaacacccagacccacaaggcgacgacacaaagaaaatatggtgccctatacacaagtcggacaagcactctcaaaaaggcactcgcaaagcaactggcattggagaagggcaagcgaggcgatatccgatcgtggttgagcccactattcggaatatcaaagttgcacgggttctcatcgacggcggtagctccatcaacctactcttcgctagcaccttggacgcaatggggatcccacgaagcgagttgacgcccactgaccaacccttccatggaattacctctcagtcgtcatccaagccattgggcaagatcacgcttcgtgtgactttcggccaagcaaacaacttccgaacagagcagatcacctttgatgttgctgagtttgacatagcatacaatgccatcagcgggagaactgcactcgtgaagttcatggccacatctcactacgcctatcaagtgttcaagatgcctgggccgaagggaacaatcactattcaagggaacgcgaagctggcggtacagtgcgacaagcggagcctcgacatggtcgagcacacccccaacccacccgccacagctgagccactcaagaaagttagcaaaacaaacaagacgccgaagccagatggcgcaatcaagatcgttccgctctccagtgccaaccccggcaataccgtcaagatcagggcatcactggacccatccgacatgccgggggtccccagggaggtgattgagcacaaactcatggtgcgacccgatgccaagccagtaaaacaaaaactgtggagatttgcaccagaccggaaacaagccatacgagaagagctcgacaaacttcttaaagctagcttcatcagagaggttctccatccagagtggctagccaatccagtcatggtgtgcaaggccaacgggaagtggaggatgtgtgttgacttcatcgacctcaacaaggcgtgtcccaaggatcacttccctcttcctcgaatagaccaattggtggactccacagctggttgtgagttgttaagctttcttgatgcctactccggctaccaccagatcagcatggcaaaagaggatgaggaaaagacagcattcatcacgccgttcggtgtattctgctacattaagatgctgtttggactaataaccgcaggaaatactttccaacgcacggtccaaggggcacttaacgatcaacttgggaacaatgtcgaggcctacatcgatgacattgttgtcaagaccaagacaagcgactcattgatcgatgatcttcgggaaacgttcgacaacctccgacgatattgcctcatgctcaatccagagaagtgcatgttcggagtaccatcgggcaagctactcggattcctcgtttctggaagtgggatcgaagcaaatcccgagaagatcaaggcaattgagaacatgaagtcgcccacaagactcaaggaagtccagaagctaactggatgcatggcggcattgagcagattcgtcgctaggatgagagaacgaggacaacccttctttgctctgctgaagaaacaagacaaatttctgtga

SEQ ID NO: 89806 - DNA, 489 bp, Oryza sativa
  Clone ID: PAT_MRT4530_88530C.1
cccacgcgtccgcccactcgtcctttcacgctgggagaaaagggatgtgtaaaggagagggcatgagcaccttggtgtgatatggcttcccacaaaccggacgcacagcgcgcctgctcctgctctcttaaggcacgtatgcttgccaagaagcttgaacgtggtgccaccctccagggtcttggctccaagcgcggagactgtctaggatggttgtccgtgttgttgcctacgacgacaaacttgtgaagaccgtgaaaaccattgcatcaccctgaaggggtatccttgccatgtatgaatgaacgcgacctgccaaagaggctcgctgaattgatcatgaagcacagagtcaaccggaggcttactgtaccgtgcttgcaaacgtaccggtctaggcacagaccattaacgatgccattgtcgtcgaggagacaatgtaccatgcaacagtatataggcagatgagtgtcatgatactcactgagc

SEQ ID NO: 89807 - DNA, 191 bp, Oryza sativa
  Clone ID: PAT_MRT4530_88531C.1
gaacaccaatccatcaaggggaaaataaaccaatacttgagggacgtccttaccattcacaaccgctattataagaaacttttacagtgcattacagcaaacgcaatcgcttgcaacagagttatttatttataaaaataatccttaaccaaattgccaacacaagaggattcctccgcattataaacgac

SEQ ID NO: 89808 - DNA, 244 bp, Oryza sativa
  Clone ID: PAT_MRT4530_88532C.1
ggcgcccctctttttttttttttttttttttagacttaggacctcccccagacgtagatgcataatagggttaatacccctataatgaagaaagtttagatcccccttaaatgctaataaatagcctatgagatacggttcataggcagcttataggaggctgcaggccaagcactgagatacaacacactgtaatttgagttatcagagcaaacgcctagaatgttttgaagccctagggcac

SEQ ID NO: 89809 - DNA, 819 bp, Oryza sativa
  Clone ID: PAT_MRT4530_88533C.1
atgggctatcgtgccttcgtgcaggcccggcacaacccgagtcttgttgggccgtgtctgggctgggggcacagcctagcccggcgtgttggtcgggccgtcggctcggtgaggaggagcggcggcggtttggcgaggaggagcggcgacaacggcggttcggcgaggaggaggacacgcggcggtgacgccgccgctgtcaaccacctcaccaccttcgtctcccgcctccacggccggcgaacgaagggcggcggaggagtcctcggcggcagcggctgcggttcggcgaggaggaggacgcgcggcggtgacgccgccgccgtcggccacctcaccaccttcgtctcccacctccacggccggcgaacgaaggggcggcaacaggcagcgtctggcggcgctggctcaggaggcgcggcgacgctcgatagggcggcggatggcggggaggcgcgaggcgacgtgcggcggcgggggcgcggctgcgcgaggcggcggcctgcaggctgcagcgtgcgggccgtgtggcggcggcgtgcggcgtggctgcgcgaggtggcggcctgcaggctgcaggcgtacgggtcgtgcggcggcggcggcggcgtgcgggcttgtggtggcggcggcgaacggagggtggcgacgtgcgggcttgtggtggcggcggcgtgcgggcgtgtggtggcggcgaacggcgtgcggcggtggcttgcggtcgtgcgggagtggaaggcgctaggtccgtttgaagtcagtgctgtctccgaaggccgaactggattccaaaactcattgaattttgatatcttgtag

SEQ ID NO: 89810 - DNA, 636 bp, Oryza sativa
  unsure (1)..(636): unsure at all n locations
  Clone ID: PAT_MRT4530_88534C.1
atttcccttcaattgccttgagaataatggtccatgtttacattgtccttcgttcgcttntggtcctgtctaggcgacgaatgattttcgctgttaatgttttagagttattttttttattttgcctagcggtgaaaaaaaattgccttggtatgatgaaaactggatttgttacacgctattgttatggattatgggctattcttttagttcaattatgtcttccgtgtttatcatggcttactctcatgctctttttcctccattcatcagttattgattcttcttttgtgctgtctgtagatcttgtttcttcagataagaatatcattgttgctgcatggttgtgtgacctgattagtatgttcttcgactcatggtacgttactgatctttttgttataccatattgtgcaggttcttcattcgttacatgatattgccctgttctaagcatggtatacaaggcaaggtgaagcttagaaagtgatatatcgcctttggtgaaatatcgattacgttttagagatctgtttttgttagtggttgcaacgttggttgccctccaaaaacatatacaggggtatagtccaataggtttttttttttcttggggatgcatgtagttaagcctgg

SEQ ID NO: 89811 - DNA, 981 bp, Oryza sativa
  Clone ID: PAT_MRT4530_88535C.1
atggcagctaccaacaacgtcggcgcgggcgcgctccccgtcgtggacctggcgccgttcttggccaccggcgacgacgagggcggcgtcgcccgcgccagcgccagcgccaccggtgccgtgcgcgaggcgtgccgggactacgggttcttccgcgccgtcaaccacggcgtgccggccgagttgatggcgcgcgcgctcgagctgtcggccgcgttcttcgcgctgccggacgaggagaaggccaaggcccggccggtcgagggctccgaggcgcccctccctgccggctacgcgcggcagccggcgcactccgctgacaagaacgagtacctgctggcctttgaccctcagctcggcttcaatctgtaccccgatgagccatcaggattcagggaggcattagaggagttgtacggcaagctcacggagctgggcgtgctcatccaggagatcctgaacaagtgcatgggcctcccgccgggcttcctcaaggagtacaacggcgaccgcagcttcgacttcattgcggcgctgcgctactccccggcgacggcggaggagaacaacggcgtcagcgagcacgaggacggcaactgcatcaccttcgttctccaggacggcgttggcggcctcgaggtcctcaaggatggcgcctgggtccccgtcgaccccgtcgagggcagcatcatcgtcaacatcggcgacgtcatacaggtgctgaccaacggcaagatgaagagcgcgacgcaccgggtggtgaggaagccggcggtgcacaggcactcgctggtcttcttcttcaacgttcacggcgacagatgggttgagccgctgccggagtacacggagaagatcggggaggcgccgcggtacaggaggttcctgtacagcgagtaccagcagctgcggatgaggaacaagacccacccgccgtcaaggcccgaggacgtcgttcacatcacccactacgcgatctaa

SEQ ID NO: 89812 - DNA, 145 bp, Oryza sativa
  Clone ID: PAT_MRT4530_88536C.1
tcttacaatacaaattgatagaaggagtatggtgcaagaggagccttcattcgtgactgatgggtacagccacttagaaagaccctgccagtttttaacaaataaaaatgaagtctatgatgcagagttcaagctagatatatac

SEQ ID NO: 89813 - DNA, 700 bp, Oryza sativa
  unsure (1)..(700): unsure at all n locations
  Clone ID: PAT_MRT4530_88537C.1
ttgtttttttaattgcacgggaacaacacgctttgatcgctgcaaacgttgatgtacgatgcggccaatgctagtagcttttaccatgcatacactatttagcccgttccatacaggacgtattagcaaggggaacttaaccaactttatgtagccagccagcgcgcagcacagcatgcatcatcatcacaaaccctgtacaactgccaaaaagaaaaacttcacagcttcatgtcctttttcaccacctaagctgcttcacccccttcttcctgacgaccgcgtcgaggctgccgtcgaccaggctgatctggtccatcagcgaccgccggatgtggcccggcggcgtctcggtgatgccggcgaggtacacgtcggaggagaggtcgaacttgagtgtggccagaggggtgttgggcttcttgatcaggtcatcttccagcagaatctctgctaccctggacagtatgctgaatgccaccccaacaagaacccttgagtaggcctccacaatggcatgccccacgtccacattgtattggatctttacaacttctataaaagttggaggaangctcgggaatctggattttcagaagctgcataagtgttcaaacctttctatgcacatgggaaatcttatcgagttntgatgaactatccttcatgaaattccagggaatgnctttcctggggaatt

SEQ ID NO: 89814 - DNA, 201 bp, Oryza sativa
  Clone ID: PAT_MRT4530_88538C.1
tcggactcctactgcgactatacttgacagtcggacgctatcttcttcttgtgcccaccaccaccaccgctgctatggcggctaccgtgtcgatcgacatggtggacccgttcatctggcgcgcgtggagaggctgaatggacagccccaatgtcatcaaggtgccccgcttgtggtctcaactagcgcagcctttgttcc

SEQ ID NO: 89815 - DNA, 1738 bp, Oryza sativa
  Clone ID: PAT_MRT4530_88539C.1
cgctagtgtttcgttgtctcttgctgtcacttattgtttcttttgttttttttgtgactatcttctcattcattttcaaatatcgatcgtttaaattaattgttcgtctacacatacaccatctatgttcagtaatgatggctcacattgtccgtaatccctgcttaactacatattggctccctcattttctactggaaaattacacacatgaaactactccaagcaactccacattaggccagaaaacctcgctgaagtggagacttattctgtactcgactcccactgagagttatcttattgcttcctccttccactctggcagcctaggttcaaatttaatggtgtttgctttaagaacacctaaggggacagcaatgactgcagcatccgcaacaaatgttttaccactgcttacagtaacctccaccctacttcctgtggcgaacaatctcaacaaccctgtggccaaggcgtatatctaggccttttgccagagtatttattactggacgatatccacgaaccatgagaccatggccaccaggaagcagtacctcctggtcccaaccctgaagagagattgcgtccgcatcagtagcaaaccaaccttccatgcggcacaaataccactgaagaacatcatgaggcaatcccttcttgcctcaagtgtggatttctctccataacaattgcaatggccttcgcaatagaaatgtcttccttagtttcttccctcagtttgccagtctcttccaatatagtctcaaaaaccttccctatcttttctaccagctcttggggaacttgatggcccttagtgtcatagagagcataactctcaaggtcatgatcaaacagcacagagtcatctccacttgtgcgatacagtggaagtccaagccttccaataattggtgccaggggattttcctcacaaacaccatgaagccaggatgctcccagatcaacaggaaagccaaaagagtaatcagtgtgaattctaccacctatcctgtcacgagattctagaagaacaacctcaaatgatgcattcctgagagcgttggctgcagcaatgcctgcaaacccactgccgataacaatagcagaaggtgtgtgggactttctcctaacattttcaccatatgaactgttgttcgccattgttggggttctgtttctctccttcacgattactactcgaattcgaattacaattggatggatttaacagaaactgcggggagaaatgcagcaggaagatgatgaggcaggccacgtagtggttcgagttcgagttgagtcccaggttcacgaaacagttcatgcagtcgtgcagccaaatcgccgcaacctcctagcaatttgatgtccaaccctttcacgatctcacgtcagcgccgagaattcgcgcgatcccatcaacttctcaggcaatccggtttaagtctggatcaactcccgcgtgatatcactcgagatttcgattcgaggcgcacgcagtcgatcggagcaagagcaaaaaaaaaacccgaagcagtcttgcggcgatcgatcgatcgatggatcggatggttttcgctggatttttggagattttcggagagggggatttggttttggggagaggaggagaacgagaccttccgctttcctggcgtttcgggagctttttgggcttttggaggtgacggtgcccctcgtccgattcctgcagcccggggatccacta

SEQ ID NO: 89816 - DNA, 462 bp, Oryza sativa
  Clone ID: PAT_MRT4530_8853C.1
atgtacctgctcttttccttttctctctctctccttcttctcgtcttcttcttccttcagccgatagaagggagagggagggcggttggggcgacggcgctccggtggctgactggctgcgacgtcggcgtccacgcgtgttcccgagcacgacgcacctggggagggcggtggctggcggagagagtgaaggagttggccggaacggcgacgacaggagctcgaccgtggcaacaaaaggagtggcggtggtggcttgatgtggtggctaaaagagaggggaaaggggaaaaatgggttcacctcgtcgaggcaaacacgatggcgcaagggcttggcttgtggagatgcggaagaggagatcgactgatggtggcagtggccggtcaaggcaggagagagagaagagagcttcaagctctgatgtggggagaagagggcgatctcgccggctatttatag

SEQ ID NO: 89817 - DNA, 443 bp, Oryza sativa
  Clone ID: PAT_MRT4530_88540C.1
atgaacttctccaaagtccttgttgtacttgtattaattgctgccttgtgcttctctgttgctgatgccagaaaagccaagagaagagtcggtggatgccgtatcttcagaaccagaaagggtcgcgttgttaagcaatgccgtctctcccgtacccgtgtctctcgccgtgtttgcactgtcatcagacgtgttggtcgccgtgccaccgtttgctgccgtggtgccaagcgtgtcgttcgtcgtgtcgtcagaagacgtagagtcatcagacgtagacgtgtgatcagaaaaagacgtgttattcgtcgcagaagaaacaacagacgtagacgtgttatccgccgtaaacgtgtcgtcagaagacgcagaaacatcagacgtagacgtgtcattagacgtagacgtgttatccgccgtagacgtgtcatcagacgtagacg

SEQ ID NO: 89818 - DNA, 375 bp, Oryza sativa
  Clone ID: PAT_MRT4530_88541C.1
atggacacaggggaagtctcgccgcggcgcggagggatgtctcacggctgcgacggcgagggggcggcgtggcttgacatggagaggaggctacaggacatgggagcgcgtgtgcgtgtgtcgtcaagttgtgagctttggatggggaggacgcaaggtgaagaggagacgatggaggaggaggagaagcaacaaaggaagggagaagagaaaaaagagagtttttgggaagccaaggatggctctgcctctgcctggatgttggatggaactatggaagatggaatgtgtctttacgataagggagaaaaaagggttcacaccgtgacttgcaccaaccaagagccgtggttcacactacacgttgtgcactaa

SEQ ID NO: 89819 - DNA, 189 bp, Oryza sativa
  Clone ID: PAT_MRT4530_88542C.1
gcgccacctcaggttctcaacaaacatggcgcgacctctcgccactcccatcgccggcggtgagacggccctcctccctcaaaccctgccgctccttcatctctttaccgggggtgaccccccctacggcgctttgaggttactctgcgcctccgtgctacagacgccgcgctctctctcccaccgtga

SEQ ID NO: 89820 - DNA, 1350 bp, Oryza sativa
  Clone ID: PAT_MRT4530_88543C.1
atggcggatgcttcatccaccaaaagcccaagaaagagaagatcacaagaactcaaggttggccatgggatccaccatgcaccgggagccaagaaggagaagtactcatgcctggatctccttcctgttggattaggggaacccaaggaagaagaagcctctaggactgacaacatcagcctcccagaagaaatccttggtaccatcgtctccctcctttacacccgagatgcggctcgcacgcaggccatctcccgccaatggctcccgctctggggctccacctcactcaaccttgacatgaacgcgctctccgtgcacgaacacaagcgaatcgacatcgctggaagtatccttgctgctcaccggggtcctgttcatcgcctggtcctcatctccgactgcctcgagtgctgcaacacgaccttcgaggactggctcaagttacctgggatgaagaacaacctctctcaccttgatttcaggttcgccaccggcaacaccacgccggccgatcaggcaaatgacatgacctactcgctggtaatctctgcgcttcgcttctcctccaccttggaggtggtaagcttctctagctgctgcttccgtgatgacatgatcaatcagccactccatttcccgaagctgcggaagctcaacctccattcggtcgccacttcggaggatgctctccatgccgtgatttctgcctgtccaacactggagagcctccatgtcaactacaccatcgggctgcgtcgccttcataggtctgcatcgctgaggagcatatgcgtaggcaccacacatggcctgaatcaggaggtcgtgttccaagaggtagttgtcgaggatgcgcccctcctcgaaagattgatgccaactttgctagacgatggccctccaagcatccgggaaatgcctcctgttagcgtgtcagtgcccactgtgaagattttggttctccagtctgttggtccaaaccttgctgctgttgtcaacatcctcaaatattttccctgcttggagaagttgtacatcaaaataactttgcaaagtactgcaaaaaatgagcttcgcaattatgtccctggacctgttcactgcctggaacaccatcttaagagtatagtgctcaaaagatatcaagcgaagacgcccgtggttaactttgccaagttcttcattttgaatgcaaaagttcttaaggcgctgaggcacccggagaggtggcggcagtggtgcgtagatatgagccctcttcgctcggatccgcgtgcaatggccgtgggagttggaatcggcgagaagcggaagcgggtcagagtggcagtggggaagaggacatag

SEQ ID NO: 89821 - DNA, 281 bp, Oryza sativa
  unsure (1)..(281): unsure at all n locations
  Clone ID: PAT_MRT4530_88544C.1
caaagattcagaagcagntaaagatggttcttggcctggactgctttggtgttcttgagaggaagaggtcaaagccatcaccaaagcagcaggaagctgaagatgcaaagatgcagaagggagcagtagaagtaggaggatcatcaaaggctggggagaagatggaagagaaggagaagagcaagaaggggaaggagtgcagaggggctcctcttctggtgcctcactttccttgccgttctacccatggcctgctctagtttcagtatcattttgttctt

SEQ ID NO: 89822 - DNA, 478 bp, Oryza sativa
  Clone ID: PAT_MRT4530_88545C.1
tttcgtggacgcgtggggcaaaataaaaagatctattgtcccgatataacgaagatcatttacgtgtttcgtctcctggctattgctgtatgcagcgcctctgcacacactgttgtgttaggtctcagttctaggcaccgtcagctgcggtcatgtgtcctgctgcaccatcaggcgcttagtcgataccatgagtacgtggggcgtcaaaagcccacagcggttggcctctactcgcattccgatgcgtgtcaactgagacacaccgctgtatgtcgacatgctgcgctgtgggcgcaacaatgtcactgtcctgacagtgacattgttgaggccatagcgcaagctgtacaactacaggagtgtggtgaactctactctgatcggaatgctggtcaggcttaggctctgtggcctactgacgcgccacgtacatatggtatgtaccctacgcactatggtgcacccagaaccatta

SEQ ID NO: 89823 - DNA, 327 bp, Oryza sativa
  Clone ID: PAT_MRT4530_88546C.1
atggccggtggaggctcggcagctagcggggtaggcgggcgtgcggccacgctgggaggcaggcggcagctagccggccaggtccaggcagcggcgcggcggcgtgggcatgctgcgagttattggacctggggctctcgtagcgcatgcccaagtactcatggaagccaaaatgttgcagtagagatggaggaggaggaggggcagatggaggagcatgttgtccaagagcttggggaagaatgtgttgaagagaattttgaaggtataactgagttcaacccagattacattatttctgatccggggcttcgcgctagtccatag

SEQ ID NO: 89824 - DNA, 660 bp, Oryza sativa
  Clone ID: PAT_MRT4530_88547C.1
atggcgttgttccgaatattgtggtggttgttgattgaggtggatctcgatcgtggtgaccatgttgatcgtgttgatcgtctcctgttgttccgaatattgtggtggttgttgattgaggtggatctcgatcgtggtgaccatgttgatcgtgttgatcgtctcctgtcaattcttgggagggatatgacattaatagatacacatttagtacaagagcctgagataggggaaaaacaatcatactttgggtttattgaagaaatctgggaaatcgactatggactcacaatgcaattcctcatatttaagtgccagtgggtaaaatacccgaacagggtcagtattgataagtttggtattactattgttgaccttgcgaatgtgggtcataaggatgacccttgggtactcgccaatcgcgtggcacatgtgttctatgtgacagaccttgcaaatttgaagaaagaaatagttctatcaggaaaacaaaagatcttgggagtagacggggtcgaagatgtcgaagattacaaccagtacgatagtatgccactttatacgtaatttgtacaaaagattaagcttgtagaggcatcaactcagaagaccatgaagccttacatgcacaaggacggtgtggggaaaaatgttaaagag

SEQ ID NO: 89825 - DNA, 963 bp, Oryza sativa
  Clone ID: PAT_MRT4530_88548C.1
aatcatacaagttaatgtgccagcataattctaatttgcaatcatacaggatatcaacttcttcctgttgatggtggcatgtcctcaaattcaggcaactcaatgcttcaccaagcagcagcaaccaatcatataccaaattagacatttgcaaccaggttctcatatatccctattcgccggcgacgaagtgggcggccgaccggtgcgggctcggaagctgaactccatcaacaagtcgaggccgccaaaattggaggtccggcgcgggcggagcgtgttcccgacggccggcaggagcaccgcggcctcctccacgcgctgggctcgggctggggcctcgcccgcctgcatcagcgcgccatcagtcttggcggccggccgcctccacgcgcccccggtcgcggcggcagggcagggcggcctggcgcctctccggttgcggcggcggtgctggtgcctccccactcgcggcggcgcgcctcccagccggacgagagcgaccggcgaggcgaagcgcggcgaagctgagtcctggcgtgttcgggccttcggggacctcctcggcaacgggatcttcaactccgacggggagacgtgggtggcgcagcggaagactctggccgggcgtgcaccgctgattctctcccaccggccgccgcgcgccgctccctcccaccggttccgcgcgccgccgctcctctcccgccctcccgccggtcgccgaccctcgggcaccgccgctcctctccctccttcctgccggccgacgcacgtcgccgctcctctcccatcggccggcccgacgagctcacctccttcctcgcggagctcccgtcggccgccctctccgccggcgcggcgcttgcgtcggtcgccgtcgaccagcatcaaggcgcgcaagctcgagctcgcagccgaaagcggcaagggcgacgcgtcgtcgccggcggcggcgtccat

SEQ ID NO: 89826 - DNA, 167 bp, Oryza sativa
  Clone ID: PAT_MRT4530_88549C.1
atgggcgttggcgttggcgttggcatggctgtcatcccatggagaagcatccaaatctcggggattacgggaaagggatcacgacgagcgaggcaaaccgcgcatacaatcgagagggcagaggcgacaagcgagaagaaccgagacctggggctacctgccgtcag

SEQ ID NO: 89827 - DNA, 600 bp, Oryza sativa
  Clone ID: PAT_MRT4530_8854C.1
atgacaatacaaaattatacaagtgccaatttttgccacgccgagcaatgtggcgttgcagcatctgtctgccacgcgcaggaatcatggcgtgacaagatcacgacgtggcataaccttccagtctgccagtttttcatggatgactgccttcaacaactcattgatcgcattgatgctggagagggagagctgttgaagaacttgtcccaaccagcaaacatttcaacaagtttaaagcagagagctgtccttgttgatgagatttggcatgctgctggagatgctggatcagatattgattggtatgtgaagcgtactgtgcttggtggtatctactctacctcagaggtgtatatgttaactgacaattctccagatttccgcgatacatggacatttgtgagccgccgtatcaaggatgctcttgatcttcagaaaacttttcaggaggatgatccggaaccagagccagatgaagccccatcagtcctagcaggagcagacgatgtcggggtggggcgaggtcatgacaccggatgccgccctgacgaggcgcgggctgcggcgatgcgggcaccaccaagccaggggacttga

SEQ ID NO: 89828 - DNA, 173 bp, Oryza sativa
  Clone ID: PAT_MRT4530_88550C.1
acatcgacatcagagataagcctagacagacccaatatggtgcctgcggaggccgacaaaagggatctagcgccatctctgatctcgatgagttcgtactcgaggaggaagactatcttgtcgtcgactacatgttggttatctatgccgccaagtcgatgacagctagatag

SEQ ID NO: 89829 - DNA, 209 bp, Oryza sativa
  Clone ID: PAT_MRT4530_88551C.1
cctgtactggccggagcccagcgcgtccgacctatctaacttttccggcgaactccccgacgagatcgatggccgccggcgaacggcaatcgaacaaggagtactaggacgcccttctttgttgtttcttctcggcaagatcagttggctggcaccacctgccattcttggtttggaagtgtgggagggaggggttcggatgataaata

SEQ ID NO: 89830 - DNA, 271 bp, Oryza sativa
  Clone ID: PAT_MRT4530_88552C.1
agccaggaatcggctacccgacgtacctgctgccgcgatgccggtcgttcgagaagcgccagtgcgtcggccccggtacggtggaccagcaggtccggcgcggctgctgccggtaggtcgccgccatcgacacgctattggtgcaagtgcgatgcgctcaaccacatgctgaggatcatctacagcgagagcggagctgtctacgctgtgcactacatggtcattgagttccttggctgcaggtaaggtgacatccaacccgcggtgtgga

SEQ ID NO: 89831 - DNA, 279 bp, Oryza sativa
  unsure (1)..(279): unsure at all n locations
  Clone ID: PAT_MRT4530_88553C.1
ggaagcganccgagcacggaagaacaagggaagcgtgggccccacgcggtcagcgcgcgcagtcagcgcacgcgcggcgcgcgtgcacgcggctggctcggctcggcctggcttgggccgggctgctgggcctaggcaggccgggaggaaggagaagggagtggcctgcccgggaggaaagagagaaaaacaaagggaggggagagggacttggactgcgggccgagggggagagagggagactttggtccagacttggcccaaagggaggagggggat

SEQ ID NO: 89832 - DNA, 639 bp, Oryza sativa
  Clone ID: PAT_MRT4530_88554C.1
atggagtattacgtttccaagggcgtatttggttgggtaataaggttgccgttcagtctaagattttggctgctttgcattgttctgctcttggtgggcattccggaatttaggtcacttatagtcatatacgccgtttgtttgcctggccaggttttcctcaaggctcagccctacgttcagagttcgctggctgttcgttccaaccacaagttgactttcagtcttgattttccggtacgtcttccactggtggttaatcctgacaccattgaacctgttcaagttttggctcgtcgggttttgaagaaaggagctggtacttctgagcaggtccttgttcgttggactggacaaatgtcggaggatgcaacttgggaagatgcggggatgcttcgtcagcaattccctactgcaccggcttggggacaagccgattttgatggagggaggaatgttgcagactctacagtatctggtacggttcctgatctggcaatctatgcgaatccagtgaaaaagataccagtgcgagcaaggcgggccaacgtaggaatgggcctgagttgtgttgtaaagatgcggctatataagcatctgtggtgtggagaaggggtatcgaatatgaaatggatgtga

SEQ ID NO: 89833 - DNA, 258 bp, Oryza sativa
  Clone ID: PAT_MRT4530_88555C.1
atggagatgggaatttttatacatgttcgggctcctgaattgtcaggccatacacaatgcaccaaggtgcaaagcaacctcggacttccacatcagttcgcgtacgccagcaaggccgagattgtcccccgtgatggcacttgtgccttgcagagggcatgggtgactagttgtggtgcactgcaacccccgtaccactatcttgttgtgcgtcctcgtgtagtcgtgtctggtcctcacaagaagaaggtgccgtga

SEQ ID NO: 89834 - DNA, 189 bp, Oryza sativa
  unsure (1)..(189): unsure at all n locations
  Clone ID: PAT_MRT4530_88556C.1
gctcaagattaaacatttatttttccccaatactagatccacattttaacatacctatacaagctgacctgagtancaccaaagctgtgtatcaagaaactgaatactaacggacacacatattacatacaaattatnagcttctatcataaagcaagagagctttttatcnacttaggaacccatctt

SEQ ID NO: 89835 - DNA, 138 bp, Oryza sativa
  Clone ID: PAT_MRT4530_88557C.1
atgtcgaggtacgagagatcgctacggcctactggtctgagaaccaggagtagccttatttctcgaccaattgaagtggtgcgaggaccactacgctactggtcgaagaccactcatagtcgtacctcgaccatctga

SEQ ID NO: 89836 - DNA, 1488 bp, Oryza sativa
  Clone ID: PAT_MRT4530_88558C.1
ttgagagttcacatatcctcagtggtcagagttcagagttgagacgacagccgagccttgcatattgagcagacaagctcccatggcttcgtacactatgactccggccactgatggcgacgacgatgagacgacatgcatccgtgccttggagctaatgttcacctttgtcgttcccatgacactcaaggcgacgatcgagcttggcctcctcgacgcactcaccggcggcggccacgcactcaccgccgacgagctggccgcggccgcgcaactgccggccgaggcggcgtcgtcggtggaccgcatgctgcggctcctcgcgtcgttggatgtcgtcaggtgccccccgacagacactggaggcgaagcagctgtccggcggtacacgccagcgccggtgtgcaggtggtttgccggcgaaaggtctctggcaccgctggccatgttcctcctcgacgacgactacctgagcacctggaatcagttgccggcggcggtggccggcggcgacgggcaggtggcgttcgagaaggctcgcgggatgcccatgttcgagtacatggggacgaaccgccggctgaacacgctcttcaaccaggccatggtgcagcagtcgacggtggtgatcggcaagctgctcgagcgattccaggggttcgacggcgtcagcgtgctcgtcgacgtcggcgggggcaccggcgccaccctggagatgatcacttcgaggtacaagaacatcaccggcgttaacttcgacctgcctcatgtcattgctcaggctccatctcttccgggtgtcaaacatatagctggaaatatgtttgagagcgtacctaatggagatgcaattttcttgaagtcgatgctccacctacataacgatgaggactgcatcaagatcctcaagaagtgccaccaagcactcacacacaacgggaaggtgattgctgttgagatacttctcccagcgattccagagccggtcccaacagcacaaaacccattccggatggacatgatcatgctcaacaatcactggggaggaaaggagaggacggaaccagagtttgctaagctagccgtggaatgtggctacaccggtgtatttcaagcaacctatattttcgctaactattgggctcttgagttcagcaagtagcacttcaaaagcatgtgatcatgcttttatatttactgggtttagtagtaaatttcgaagctgaagcgtaattcccaagccatggattcttgtttaaattgtgtttacctgaaaaataatatcatgttcaatttcctatgcattttaatgtgtgcatggttctttcaataccatacaaatggtgatcagaatctgtatatatacttgacaatatatgtcaaatatacaataatgaatgtaaagtgtcccttaaaattgaacaatattgtacatatgtttaaacataaaaaataaaagaatccaactcaggttatggccccaacccc

SEQ ID NO: 89837 - DNA, 258 bp, Oryza sativa
  Clone ID: PAT_MRT4530_88559C.1
atggcgcgtcagcttagcacgccgcacgtctgcctcactgtattaaatgcgacagggggcagttggggcgttgcgctcattaaaggaggctcagcctgggccccctcctcgctcgctccccccgccaaatggcggctgggcgagggcctcggggcaaagcggtgcaagggcccgaggggcatgacgtggcaccccgaggcctcgaccccccggccgctcctgcggttcgcggactgcgggggcaggactaggctgtag

SEQ ID NO: 89838 - DNA, 4518 bp, Oryza sativa
  Clone ID: PAT_MRT4530_8855C.1
atgtcgtactatgtagatcctcgtaccaacggaccccaataccctctatatctggtctacgggtatccaccgtcgacagtggcgcgccaggtaggggatcttggtgctcagggttctactactatgatttcaagccttctcgacgacagcgtcaacaccggcatctaccaaggagcttcaacttcaacgatgctggtgtggacccaagtcggcgaaatcatcttcccggtctacaccacaatgtcaatctcgactagcccagcaattatcgagagcgagaacggcgtggttacgaccccggtcgactccatgtcgaaagatcctcccacagaggcggagaacggaacatcgacaatatccaagcccgagaaggatcctaatgcggccaaatcttgtccttcccacaagaagtacgagccgacaaggacaacttccggggtgacaaaagcttggtgtcccatccacaggactagcaagcacaccttgcaagcttgttcggtttttctcaacgtacaagctgaaatccgcgcctgcaaagaacgtggaattcaacgtacttccccaactcatgatgtttattgtcccatccacaaggcaaagactcacgacctctccagctgcaaggttcttctcagcgccatgaagatgtcactccctaaggcctcatcatcgacaagtacaccacgtgacgtgtacgccatcgatggaaccagcacatctggaggcgttaacacgggaacggcggatcaatcggttacactgacgtcggcccaccatatcagaaccctcaatgcgatactgaacgaaatccctttcgatcccgtcttgaacgctgatctcgatcaatgggcagaacgactacgggaatcagtggctaatctcagtaacgcgttcgcagaggccgccgccaggaccccaccagaacaaccgtgggccgacggtgctaatagggaacagcctgatcagcggtcgccaccttgtcaagctacccctccacctcgcggaaccagtgatctccacgaccatctaaatggccgccgagaagcacaactcactcaagataatgaaaaccgttcccgacatcgcgtctcttcacgacatcgcgagaacgaagaacaaggaggacgtccgagcgagaaccgagaccgtgatgatcgccacaaccgccgtgaacatactaatcacgagcagcgggtgccatgcgacaccagtcgaggtcggcaccgtgacaacgacaacgacggagatcaacgccgggacaacaacgatgggcgacgacgaggctcgcaagaacccgagcgtcgtcctcgaaaccgctccccggaaccaagtgactcatcatcatcgtcgtcatcttcgtcatctttatcatcggacagacatccacgacgagcatatgatcgccgacaacctactgcccctggcggtgggtgcagggctttcactcgtactctgcgagatgttcgatggcctaagaagtttcgaccgggagcaatagagaaatacgacggaagcaccgaccctgaagaatttcttcaggtctattccacagtactctatgctgccggagcagacgacaacgcattggcgaattatttgccggctgcgttgaagggatctgcacgttcatggctggttcacctcctgccctactcaatttcttcaaatacgatccccgagatcacagatgcttctgtaatccgcgctttcaagtctggcatccgatatcgctacacaacccaggaattggcgacaagacggatcacaactgctcgcaagctattcgagattgccgatcgatgcgctcacgcggatgatgccctgagacacaagaacaacaagtcgaaaacaggagaggagaagaaaccagccaaggacgcgcctgagtcaagcaagaaaaagagtcgcaggagtgggaaagggaaagctcaaacggaggtcctcacagcagaacacattgacccacccaagcacccgtacccacaaggcgacaacacgaagaaaatatggtgccctatacacaagacggacaagcactctctggagacttgtttcgtcttcaaaaaggcactgacgaagcaactggcgttggagaaaggcaagcgagtacgtgtagtcgagaagaccaccgaagcggctactcaggactcagactcagcatacccagactccgacctccatgtttcgcacatcttcggaggttccatggcgtactcttcaaagcgagagtacaaaaaagtggagtatgaagtttgttcgacatggcagggggctgcgtccaagatgaattggtcagagcagaagatcgagttctcagaagcagaccaccccaagactgccgttactccagggcgatatccgatcgttgttgagcccactattcagaacatcaaggtcgcacgggttctcatcgatggtggcacctccatcaacttactcttcgccagcagcttggacgccatggggatcccacgaagcgagttgacacccactgatcaaccctttcatggaatcactcttgagtcgtcgtccaagccattaggcaagatcacgctacccatcacctttgatgtcgctaagtttgacacagcatataatgccatcatcgggaggactgcacttgcgaagttcatggccgcatctcactatgcgtatcaagtactcaagatgcctagaccgaagggaacaatcactattcagggaaatgtgaagctggcagtgcagtgcgtcaagcggagccttgacatggtcgagcacactcccaacccacccgccgcagttgagccgcccaagaaaccgtccaacatgccgggagtccccatggaggtgatcgagcacaaactcatggtgcgactcgatgccaagctagtaaaacaaaaactacggagatttgcaccagatcggaaacaagccatacgagaagaactagacaagcttctcaaagctggcttcatcagagaagttttccatccagagtggctagccaacccagtcatggtgcgcaaggccaacgggaagtggaggatgtgtgtcgacttcaccgacctcaacaaggcgtgtcccaaggatcacttccctcttcctcgaatagaccaactggtggactcaacagccggttgtgagttgttaagttttcttgacgcttactccggctaccaccagatcagcatggcaaaagaggaggaggagaagacagcattcatcacgccgttcggtgtattctgctccgtcaagatgccgtttggactgataaccgcaggaaacattttccagtgcacggttcaaggggcacttaatgaccagctcggacacaatgtcgatgcctacgtcgacgacattgttagtagtgcacgttcggagtaccatcggcaagctcctcggattcctcgtctccggaagagggatcgaagcaaatcccgagaagatcaaggcgatcgagaacataaagtcgcccacaagactcaaggaagtccagaagctaactggatgcatggcggcattgagcaggaagccgaagacgcgttcatcgcgctgaagcactacctgtcaaatccccctgtacttgctgctccccaacctaatgaagaattattcctctatatcgttgccacgccatattctccgactggactatgcctgagaataggtcagacagtccaacggacagcgaaacatggacaatggtgttcgacggcgcactcaacagctaaggagcagggggcgaccaacagcacagccgagtatgaaggactacttgccgggataagagcagcagccaccacactcggagttaaacgagtaattgtgaaaggggactcagaactagtcacgaaccagccatcggtgaaagaggcaagcgatgatggtagcacggttgtccccgacatcagcttgggggctacagaggaggaacacgtcgttgccgatatcgagaccacagacgactggcggaccccactcaccaagttcctgagtagcgacgagttgctcgaagacgatgcagaagctgagaacataactcgacaagccaaaatctatcgtatgatcggcaacgatctgtacaaaaaggcaccaaacagagtacttctcaaatgcatctcgtctgacgacggcaaacatctcctcctggacatacatgaagggatctgcgggtcacacaccggcggacggatgttggtaggaaaagcttttcgacaagggtttttttggccgaccgcgctcaaagacgcctgcgacatggtgcagcggtgtgaagcttgtcattttcacagcaaacacataagactgccagcgcaagcgctccagactatccctcttacttggccgttctcgtgctgggggctcgatatactcggaccattcccacgaggacagggcggctacaagttcctgtttgtggccatcgacaagttcaccaagtggattgaagcgacgcccacgggggaaattaaggccgataatgccatcaagtttatcaagggatattctgtagatatgaattgcctcaccgcatcataa

SEQ ID NO: 89839 - DNA, 626 bp, Oryza sativa
  Clone ID: PAT_MRT4530_88560C.1
cgacgaagaggggccgaggacggtggcgagcgagggcgaaggccatgcggatgacacgctccaccgccgcctccaccgtcggtcacctgagctcgctctgccttcgcctccactgccagccatccgagctcactctgtctccgccgttggcttgccgagctcgctccgcgtccgcctccaccgtcggccactcgagcttccagtcaagtggcgccacggtagttgggggcgggaacaacgagagggagcttggggacgggaatagcacaggggagattggggatggggatggggatggtgcggtggagattggggtgaggacggcgaactcgcaaaggacaccggtggatctagcgagcgagagagaaggggggagagggatcaagaacattgtgccaccgttgcaagctccatcctccccctcaactccatcactcaccggtggcgggacggaggccgcacaaacgatgcgctctgcctccacctccactgtcggtcgcccgagcttgccgcccgtgaccacccgagctcgctccgccgctgtcaccggcctccagagctcgatccacctccgcctccactgccagccactcgagctcactccgcctccgccgctacccgcctaa

SEQ ID NO: 89840 - DNA, 756 bp, Oryza sativa
  Clone ID: PAT_MRT4530_88561C.1
atgcggatgacacgctccaccgccgcctccaccgtcggtcacctgagctcgctctgccttcgcctccactgccagccatccgagctcactctgtctccgccgttggcttgccgagctcgctccgcgtccgcctccaccgtcggccactcgagcttccagtcaagtggcgccacggtagttgggggcgggaacaacgagagggagcttggggacgggaatagcacaggggagattggggatggggatggggatggtgcggtggagattggggtgaggacggcgaactcgcaaaggacaccggtggatctagcgagcgagagagaaggggggagagggatcaagaacattgtgccaccgttgcaagctccatcctccccctcaactccatcactcaccggtggcggtgacaaagaggggccgaggacggcaacagtcggggacaaagccagcggactgaagcagaggggggcgaggatggcagtgggcagggacggaggccgcacaaacgatgcgctctgcctccacctccactgtcggtcgcccgagcttgccgcccgtgaccacccgagctcgctccgccgctgtcaccggcctccagagctcgatccacctccgcctccactgccagccactcgagctcactccgcctccgccgctacccgcctaagcgagttccacctccgctaccggccatctgagcgagcgagcgagagagcgagagagagagagcaaggggacttggatggatttggttga

SEQ ID NO: 89841 - DNA, 510 bp, Oryza sativa
  Clone ID: PAT_MRT4530_88562C.1
cttcccacagataaaattaatacgatacccttggaatactctcgggtgaaatttgtagcccataaagccaaaaacctaggcacaatttgatgtcttcgctaaaagggtagaaagggctgagcctgtgcgggatgaaatagctagtgcaccgaccccagtccttaatgccatatttcaaaatagcttgggctccaactcggaagatggcatagaaatctttgacaagttaagaagttctccaagcaaatatttcaagagtatcaaagaggatgccaccaggggagctagccaggccttggcgatgacaaaatctttgtatccccgagtggatataactgccgctaggatggcttcgccgatgggacgtcagaagagcacgcacttgagctaattgatgaagcctaggagtttgctcgggaaatagctgtagatgtacttgagaacttccgggataacaacttatttaataaaaaatatttacaaataggttctcagcacaagagtagttgg

SEQ ID NO: 89842 - DNA, 174 bp, Oryza sativa
  Clone ID: PAT_MRT4530_88563C.1
gcaaagtcactactctgtaccaaggtttctctcttctcaatttgtgtcagatatggagggcttttgttcttgtgggtgttgatgcgcttgctggtgatgcacggaaggatcagtcaggtaggaatctcaactagaaggaaagataagcagcattatcaatagatgaaaaccttt

SEQ ID NO: 89843 - DNA, 172 bp, Oryza sativa
  Clone ID: PAT_MRT4530_88564C.1
aacgacaatgcatcaatccatggtcctcacatatatatcggcagtggtagagcttgatctgctgatcagttacacgaatcagagcacaaacgtgcttgttatttatataatataatatatactctatatatcatactatatgtatatactatactatatactatactatact

SEQ ID NO: 89844 - DNA, 690 bp, Oryza sativa
  Clone ID: PAT_MRT4530_88565C.1
atggaggattgggtgatgggatctgagagtggatggacgtcgccggcgttcgaggagcttctgccgcagctgccccgcggcgagcagctccgcctggagacccacctgcacgaccgcgaccggaggtggaggcgaatgcgatacaacaacactcctccgccgtcttccaccaagattcgccgccaagagaaagagcgtgacacttggatgatccctcacgtccaaaatgctctccgccattacaatgccagacacccgggtggtgagttcgatgtagtgaaacccctgatgcaagcaagggtggtgttcaaggggcagcactggttccacatcaacttctgggctcgcagccgcagcagcaacaagatcaagcgcttcttcgctgaactgcactacaagccattgataactataagcggatttgtcagctgggagcagctgctgccagatccactccctgctccagttgccattgttgaaacatgcaccatcattgaagaaccacttgaccagtacaagagaagctgcgcattttgtccggccgggtttgacattttgcaccccaagggcgacccaatcgtcggcaatcagcacgacgtcctgaaccctgggagtcgggagccgcgcgactgcgccgctctcgtcgcgtcaggtcacgccgcctctcgccgtcttagtgtggcgtcgtag

SEQ ID NO: 89845 - DNA, 488 bp, Oryza sativa
  Clone ID: PAT_MRT4530_88566C.1
aaaaaacacccggccgcccccttggggttttaaacccttttggaaaccttgggggggggggccccctttgcaacaaagggagggggggggccccaacctaggggggccccccccaaggaaggggggggaattcccaaattttggccccctttttttaaaaaaaaaaatttttttttaaacggttttggcccctccccctgtccctttgaatccccaaacaaaacctttggggggttttttttttgacccttttgggggcccaccccttttttttcccccccccccccggggggttttttgttgggacccccattatcctggggggcacccatggttttgtttttaaatacatccccgcggggggaaaaccaaaacctttacgagggggcgggaccaaattactttgggggccgaaaaaacccggaggaaaggggggttttttgggtttttttaaaggcccaaattttaaattttttggaacctttttg

SEQ ID NO: 89846 - DNA, 560 bp, Oryza sativa
  Clone ID: PAT_MRT4530_88567C.1
attagggggaattaatcccctttccttcctcttcaattccccctttattctcccttgattcgtgctcttattcacccggaacggtcgcgccgttcccggccaccttccatggccgccggccgccaatcccgccgccgttccccgctcctcccgtggccggctcgttcccctccgctataaaatgggaccctctccttccgttctctagtttttgcctcttcccgagctcccccgtggccgcaccacccctccccgccgccgtcctctctctcccgtgccgccggccgcctccagccgcctctccctcctcacccgagcgccgtccggccgcgctgtctcctccctcggcgtctcagccgcctcctctcccccgcgtccttgcctccatgcagctgctgccatctgccatcgtcgcctcctcgctggccccggtcgtcgtcgtcgtcgtcctctcgtcgttcctggttgcgctcttcgttggccctcccttcgtcaagccgtgctcgttcgttgcccgcgtttcttcaagagtacgtcgcaggcccgtcatcgtcttcgtc

SEQ ID NO: 89847 - DNA, 267 bp, Oryza sativa
  Clone ID: PAT_MRT4530_88568C.1
atggcgagagaactcgccgagattctctcacctgatacgtcgccgtcgcccgatgccgccgccggcaagcctaccctctcctcttccccttcaccggcctcctcttctccccgcaaccgctactcccgtcctccacctcgccggcgcccgcctgctcgtgaccgtggcagccctcgtgatgacggcggcggcggagccggagaggcgaccttcgccggcgaggcggcgcgagagatgcagaggaagtcagcgagacacggagactga

SEQ ID NO: 89848 - DNA, 437 bp, Oryza sativa
  Clone ID: PAT_MRT4530_88569C.1
ttttgttttttttatcttacaaggaacagtttattgtttgagtgtttcgatttaactatgtacaacaaaagttaaattaggatttagaggattgttccaggtttttcgtcattacaaacattttcatagagtctgcggaatcgtccagcattaatattctgtagtccttggaacttattcacactagaagttgttctttcaaagtctgaagatacttgaattcttaggaatttggataatactcgattgtcacgaatgagtcgggcaatacagttttgacctgatagttatttggtgtcaatatcgaaatgttggacttgttgcattgctttatatgatacagcgagtctgtcattacaatgatgcacctagcgcaataagaaagttcctggctctcgatgagatagcatcttttgtgcgtttgtcgtagaaataaa

SEQ ID NO: 89849 - DNA, 1209 bp, Oryza sativa
  Clone ID: PAT_MRT4530_8856C.1
gcttcttctctgcggttgccccgccgccgcctcccccgccccccacccctcctcccccgccgccgccccgggtccccaccctccagccgcccccgtcggtgcgcgcccccgccgctcccgcctcctcgtccgcccgccccggccgcgcccttcggccgcccccccggcccccgccggggccgcgccgcgccggcggcgcgggctgcgcgggggagcaggagaaagtgctccgcgcgtcgctgctccacgtgccaaggatggggtggagcgacgtcagccatgatcgccggggcgagggacgtgggcgtgtcgccggccatcgtcggtgctttcccgaggaaggaggctgcgctcgttgagtttttcatggatgactgccttcaacaactcattgatcgcattgatgctggagagggagagctgttgaagaacttggtactgagtgagagactttccaaacttgtccgaatgaggctggaaatgcagggaccttatatatcaaagtggcctcaagctctcagtatccaatcccaaccagcaaacatttcaacaagtttaaagcagagagctgtccttgttgatgagatttggcatgctgctggagatgctggatcagatattgattggtatgtgaagcgtactgtgcttggtggtatctactctacctcagaggtgtatatgttaactgacaattctccagatttccgcgatacatggacatttgtgagccgccgtatcaaggatgctcttgatcttcagaaaacttttcaggaggccgcgtatctagcagaagccgtcggtgcaggcatggggggctccctacagggtgtcctgaacagacttttcaagaaatgaagtgcataagcgtgcgtttgatacttttcattctcgacatttccaatatatatcgctttttcgattcagctgttagtgcattccaagttaaataaagcaaactggattttgatcaaaaaaaaaaaaaaaaggtagtgatgatgctacatagtagcatgtttttttacgatgaaatatcgtcaggacccacatgcgcaccaagatgaggttgctagatctacttattaacacttgagttgttttcttttcatgattacctgtgaaccgaaaaatgttcaacttgtggttatgtaatgtcccacttcaggtagcgttggtttcgtcttcccattagaaaaaaaaaaaaaaaaaaaa

SEQ ID NO: 89850 - DNA, 333 bp, Oryza sativa
  Clone ID: PAT_MRT4530_88570C.1
gccacgcgttcgggtgagctgaagctgttcgtgtgactcttctacacctttcaggctatccggaatcaggagggttgtccaataagaaagcagctcacgacttcagagcggcgttagagaggattcacagatgaccaaccaggcgccaggtgcgcaagccggaacaagctactcggtctcagacatcatggcagatgccgggaccatggcgtatctatcattcggagacaacagaacattgcgctttgacacttgcgcccggagagcatcaatgaacacatgatgttttccatggctctttgtgtagcagatggtcatggaagaacacacttc

SEQ ID NO: 89851 - DNA, 4476 bp, Oryza sativa
  Clone ID: PAT_MRT4530_88571C.1
atggcggccgagccgtcggagcccgacgcctcgcaggagcccgcgcccgctgcagccccggccgccgccataggtggccccaacccgtgctgcgccaagctctggaggaagtaccagaagtcggaggcgagccgcgcggcgctgcgcgagggtttgaagctcctgcagggcgagaatgacaagctgctgaaggagcgctccgagctcagcagagaacttgaagactgccgcaagcctgtcactattgaagcatatggaattttggtcatgattttacatctgcgtcttgaaacttctgtgtgcaatgaggagcgtctccgaggtgattcggcagaagcagctaggatctctgagtctgatgccagagatatgctagagaaagagataattgaattgaaggcacagaactctgctttgcaacaatcacaaagtgtttgcaaagatggtaatgaacttatacgcatcactgagttggaggaagaaattagaagactcaaacaggttttagtagaagaaaagaagaagagtaattccgagaagaaaaatgccgaagaagaaaagggcaaggttttagaactgcaaaggttactgaatatggaaacacacaagtctgaagagtataaacggctttctgatacagaaagaaaagcagccaatggtctgagggcatcgtgtgaaaaattgaggagtgaagcaagtgaagccagagaaaggctggttgctcaggtgaagaaaacagaggaagcaaataaaagggctgaagaagagaagcagaaagctgccagagaaaagaaatgtgccaactcagagaagtcgttagcggaaaagaacaaaaatctgattgaaaccgagaggaaaaagttgacagaagagaagagtcgtgctgagtgtttatttgcaaagttagaggagcagaagaagttgaatgaagatttacgagttagaattgaggttgaaagaaagaatgcagtggatcagaaaaaccatatagaccatctatcccagaagctggaagaagagaaagaacgaagtgaaaatttgcagaggaagcttgaaaaattatgtgcagttaaagatacaacttcttttggcaaacatggacagcaacgcattgatgtggttacggaaggtgcaaatataaggcttctcaaagagaaacttaagctgaagaaacaacaattaaagcatgcgaaaaatgtgtcaaagctagataaagcaaaaaatgcgctggtaagaagagagcttcagcgccttaaacaggattggatccagctgctgagccgatttaatatgcttgacgaacatcttgctgctgatggtgttgaaggtattcatgtcttaaccgagttgaagcgacatccggagatacataactttgaacaaaatctacttccacataattcagccccatattttgggttgccgtctggaatagttcctttcagttcatctgtaccaagagactacacttcatatcagttacccagagaaagctgcacaagaccaatctcaggtactagttctgaactagagcctccttttggtagctctctcagaacgaagtcaaaaagtccacacagatcttcatgtcccacatccatatctgataaaaagttaatggactcacagggtaaggataggttgttagtccctgcatcaacagatatcagaagaaaacaaagctcaatggttcccgagttaaccagtaaagatggtaatgatacaaggaaacccagtgatagagctttgcctgtagtttctggtgatccctttcaacagaaggcactgcaatcatccatgtttggtgctacagaagttacagataaaatgcccaaaggagataagaagagaaaaaggaccaaaatgtctctaaagtcaactgattgtctttcatctaaacataagcggttgcatctggaaatgaaggcccatgattccacttcaaatggcattttatgcagtgatgatcgttctcgtgtgcagcaaggaagcagcatcatgcccgttgtgaatgaagatgacgtgcaaactcgtaggaggaaatgctatgttattgctggtaaaactcctttcttgagtgttccagctaaagttccttttgctgaagcaggaaatgcttatgcagttagcaaatttccttcgctactctcttttgaggaaatgatcaagggggactgcttgaaattactcgatttggacaatgatgcagatgaggaaagatacagaagggcaatgcagagaactctttcaccagatctgcccataattctaccacaggcaactaaagcgcctacccatgaaaaatcccaccatttgtctgatatgatgcccaatgcttttgaatatgagagagattgtccttcctctggagccaatgccacagatttggagatgaggcccaatttgttaggagtcgaggggcctgcaattcagaagttgattcagagcactggcaagcttggacataatagaatagattgtcatgataatgttaagcaactgcgtgcgaatgataatgataaatctaattcagtagtcaatatttcttgtagcaccaagttggataatgtgccaactaagcgctctttgagctgcattttgcatgaggatcaggcccaaaatgttgtagcttctcctactgatgtgcctagcaatactagtaatagccatccaaattctactttggatttacagcattcgcacaaggaggcatctaatgaaaacagctcaaatcagatacatagctcatccatatcagattctggacagcagaatattgttggtggatgtaaaacaaaagcagccgggttaaccgatttgaacttaaatagtattattgggcttcgtcatggagacaaaagatctcctatgtgttttgttggtcttgtaagcatgaaaaaaaggaacataataagaatgtttcgatattgggagaccctgattgctgaagccagagaaacttctgaggaagcttttgttgatactccattatttgaaagaatatcatctgaaccattgctacttttagaggagaaggtagcactcatcatctccttactgttgtgggatatttgtagagtcatcactgcagatcctgttttagatggaaatttcgcttcatcagttttcgccttgactgtgaaatcttacatggaaacaagatgggcgtttctgaaaagcaatcagctggatgttcctgtctctttaattgaggattttcttgtgaaaagagaagttgtggtctgtaataaaacggggcatgtgatttctgacgtggacagatacagtctcttggatgatgagactggtatacaagtgtctactgaacctgccaccatagatcaattcatctctgcttgcgctttgttggcttcgatatgtgttaaagtggagagaatggacattgttttagaggtttcatacaaagttcttctgatgggtaaaagtaatctttcgtggactctgctggctattcatatcattggttccatgtgtggtgacaagtttctctcaaagagtagcaactttctcatgacaactatacggttggttgtcctgcttcttgaggcaaaaaacaattctttgtgccttttgtcatcatatgttcagtcaaacaggccagccgtttttccaacttgtgcacattgcctatttgatgtggtggattcagtttcagttgacggttttatctcttctctgttggatgagctgcatttgtgttctcagcaatggaacagttgttctaacacaaataaaataattgcaagatgcagtccacatttgggatcaagtggattggaggtcaactgtggtgaaccttgctatatctccaagcaagtaaaactttctgaggatggtcataaccatactgcaggaagggacttatgctattttgcggagataacttcattgttggagttgttcgggaattacatgagctgcgaatggacatacaataatgttgttgtccgcctcctgaagattttggagtcatgcacatgtgaggagtattcagctgctctcttaatacttctcagccaacttggaaggatttttaatagaaaaacatattctgagaactcacaagagctaagctggttctttgttgacgatgttggttatgagcaaagagcagttagtgacctgaggaatcacttatcagtgctaatgagaacaaaagtttcaaactcaaggaacatgcctgttcagctttctgctattggggcattgcttagcctcctcccattggcattcgataaaatagttgcacattctgggcaattaccagatctatatgttttgcaaggaagacagatctctgaatggcagtcagttttaaccactgtgttggagttacctcttgatttggccttttatggactggcgaagaaattcctagtggttttctgggtgttccttgctgaagaggccaatgttcttgatttgatgtgtgaagattcaaatgcagaaccgtga

SEQ ID NO: 89852 - DNA, 1280 bp, Oryza sativa
  Clone ID: PAT_MRT4530_88572C.1
gcacgacggccgcttgccccccccagcgcgcgagtctgtgtgccgccgccgccgccgccgctccgatggaaaccgccgcggcggcgccgccgcgcgtgcaggccctagccgacgccggcgtctccttcctcccggcgcagtacgtccagccgccggaactccgcccggaccccaccaccaccacccaccgccgcgccccgaccgccgcctccctctccgtccccgtcgtcgacctctcatcgcccggtgcgggcgacgccgtccgccgcgcgtgcgccgagtggggcgccttccacgtggtcggccacggcgtccggccggggctgctcgacgcgatgcgtggggcggggctcgccttcttccgctcccccatggaggagaagctccggttcgcctgcgaccaggccaggggcgccgccgccgaggggtacggcagccggatgctcgccaacgacgactccgtgcttgactggcgcgactacttcgaccaccacaccctcccggattcccgccgcgatcccacccggtggcccgatttcgtccccggctacagggacactgttgtgaaatacagcgacagcatgaaagatctcgctcaaaaattgctgcgcattgtctctgaaagtctgaacttgccaccttcgtatatagaagaagcagtgggggaagtttatcagaatattactgttagctactattctccttgcccacaacctgatcttgctcttggattgcaatctcattctgatatgggtgcaataacacttctaatacaagatgatgtgggtgggcttgaagtactgaaggacgggctgtggatacctgttccttctttgcctgatggaatccttgtaattttggctgaccagacagagatcataaccaatggaagatacaagagtgctgtgcatcgagctattgtcaatgctgatcgtgcccgcttgtcagtagcaacattctacgatccatccaaatctcgaaaaatttgtactgctccacagctcgtttgcaaggagcatccacagaagtaccgggatgtgatatatggtgactatgtctcatcttggtatagcaaaggcccagagggcaagcgcaacattgatgccctcctgatcgagcaatagaaccagagcagcattatatagacagaatagagacattcatgcgtgttgtgatgctgtccaagattgccgatcttgattaataaagagaataaccttgtaccatatgaatggttcctggtttttgaagtttctatgattcttatcaaaaaaaaaaaa

SEQ ID NO: 89853 - DNA, 423 bp, Oryza sativa
  Clone ID: PAT_MRT4530_88574C.1
cttacatatgctgcagtagaatatatttgaagctatccgaatagccggactcacggaattgagtaccgggactcatatggcacactggttagaaacctaaagtatatattgtacaaactgttgctctaatatttacagattgtgtattattgctttctgcagagaacttgactccttggcaacgcataacatattcttatggcaacttgctgagtattgcgaatactcacccttgctgttattaaccatttttcagattcgggtgaagaggaggacccctatgactatgactatgatgaccctgataactcacaaaatccttagaggctatacctctctagctagaatgtactagaactaccgctgtgtaatattagcatatatgttgaattaggtgagtacctagccttgtaaaagccctag

SEQ ID NO: 89854 - DNA, 193 bp, Oryza sativa
  Clone ID: PAT_MRT4530_88575C.1
tcttttcgcccttttttttttttttttatatcaaagagagcatctgcttcgctcttcaacagttccaatggaggggaacattcacatttgtgaggtgaaatgtatgtatataacggacagaaactagaaaacaaatgaaattgtccaatggctatattctagctgtgatgaactatgcgggtaaaaaattgac

SEQ ID NO: 89855 - DNA, 607 bp, Oryza sativa
  unsure (1)..(607): unsure at all n locations
  Clone ID: PAT_MRT4530_88576C.1
gcgtggtgcctctgtagcaggcgcgncgcttcttttttttttttttttttaaacctcaacaagaaggcaacattcttggtatatataaagcatacctgagaacccacagctaggacctatttgtgtaaaaaggaacaacatatactatgtcaaacaggcaccaatcgaccgctatgatctgagggttttatcgtcggatatgccgatcttaaagcacgcccaatgattatacaagtggaggagaccggtcttcacatactcatagtctgagtcagcatcctttacaagctgaatcagggtatgaggatgctgtcccgctgtgacactatcgatcaggagtcaatatcttggtgaactacagcttgtatgctgatgattcttaggagctcggaccccactcgtactcgattataattatcaggcacagggacagcaccattagttgaactataagactcagcgatgaaccaaggtgggaagtctttgatttcttttgggtaagcactggatatagcatgtggcagtgtcatgttttatttttatttgggagtaccttctttagatgtatatgcatacttttgaaagcttccaccagagtgtcattggg

SEQ ID NO: 89856 - DNA, 272 bp, Oryza sativa
  Clone ID: PAT_MRT4530_88577C.1
atggagaaggggagaaaggaggcgccggccagggagaggggtggcggcactatgaggggagcaccctcctctcctcctcccctccatatccacatcctctcctcctcccaggcgacgacggcggggttctcgggtggcggcggcggctccacagctgtgcatggtggcgacggtgacgggaggcgggcacgcagctgcgacgggaggcagttgtctgggggtgcggcgacagcaatgggaggagccgtcgaggggctcgacggcaacgggag

SEQ ID NO: 89857 - DNA, 3509 bp, Oryza sativa
  Clone ID: PAT_MRT4530_88578C.1
tggtgtgtgctggaaaggtggcagtgggggagtaacgctagggagtgacggcggaggtggtggggtcaagttcaagatattgggagctgtggcggcggaggaggagcgggggactagggtttaggtggcggagatggagcacgagcgcggtggcggtggccgcggccgcgggaggggtcgcggtggcgggcgtggcggcggtggcggcgatggtcgcggaggcggttatggtggtgctggtggtggtggtgtcggcgggcgcggtgggcgtgggcctcctggtggtggtggtggacgcgggtacgagcccggcggcgggcgtgggtacggtggcggcggcggcggtggtggacgtgggtatggcggcggaggcggcggtggtgggtacgagtccggcggtgggcgtgggtatggcggcggtggacgtgggtatgaatccggcggtgggcgtggacctggcggcggcggccgtgggcacgagtccggcggtggcggtggccgcggcgggaacgtgtgggcgcagccggggagagggcgcggaggagcccccgccccggcgccggcgccagcaccagcagcgaggaggatccaggacgagggggccgcgaggtcgtcgggtaccgttgagcgccttgcttctactgaggttgtaagagtacaaccacctgcacccccagttgctgtgtctcgtagtggcacgcgtgtgccaatgcgaagacctgatggtggaggctcagtatcgaaagccaaggtcaaattgttggtgaaccattttatagttaagtaccgacaggcatcaactgtttttcactatgacatagacatcaagcttgatataagttcccccaaggcttcagacaaggagctatccaagggagattttcttactgtcaaggacgagctcttcaaggatgagagctttcggcggctttcatcagctgttgcttatgatggaaaaagaaatttatttacttgtgctgagctaccagatggtttgtttcgtgtcaaagtccgttcacggacttacattgtatctgtggagttcaagaagaagcttcctttgagccaactctcggaactgcctgtgcccagagaggtcttgcaggggcttgatgtcattgtgcgtgaggcctctagctggcgcaagattatcattggtcagggattttactcgcagggccgcagtgtgcccattgggccggatgttgtagctctcaaaggaacccagcagaccctgaaatgcactcagaaaggactgatcctttgtgtggactattcggttatgccgtttcgcaaagctggacctgtgttggatcttgttcagaagtctgtgagataccttgactacaggacaacactaaacaaacaccaattggacactttgaagaatgaactcaaaggccagcgtgtcactgtaaatcataggaggacaaagcagaagtacattgttaaaggtttgactgataaacctgcaagtcagataacttttgtagattctgaatcaggacagaccaagaagcttcttgattactattcgcagcagtatggcaaggttattgagtatcaaatgcttccatgcttggatttgagcaagagcaaggacaagcaaaactatgtgccgattgaattgtgtgatcttcttgaagggcagagatacccaaaagcaagcttaaataggaattctgataaaacactgaaagaaatggctttgatccctgcctcaagtaggaaggaggagattctggagttggtgaatgctgacgatgggccttgcaggggtgaaattgctcagcagttcgggatttctttggatgtacaaatgatggaagtcactggtaggacccttcctcctcccagcctaaaacttggcacctccagtggccaaccccccaaattcaatattgatcagcctaactgccagtggaaccttacgaggaaaagactagcagagggcggggtgctacagtgctggggcgttgtggacttcagtgcagattctgggcagtacgccctgaatgggaacatgtttattgacaagattgtcaggaagtgctgcgaccttggcgtacagatgaaccgtaacccatgcattgtgcaactgttagatatggaggtgctatccgatccacatcagctcttcgaggagcttaacaaagctaagcaggcggcagccagtaagaaacagaagctgcagctcctcttctgcccaatgtctgatcagcatcctgggtacaagacgctgaagcttatctgcgagacgcagctggggatccagacccagtgcttcttgagcttcctcgcgaacaaacaacagggacaggaccagtacatgtccaaccttgctctgaagatcaacggcaagattggaggaagcaacatccaactgtttggtgaatcgctcccgcggatctccggcgcgccatacatgttcatcggcgccgacgtgaatcacccatcgccggggaacgtcgagagcccgtcgattgcagcagtggtggcctcggtggatcaaggcgccagcaagtacgtgccaagaatccgcgctcagcctcaccgctgcgaggtgatccagcacctcggcgacatgtgcaaggagctcatcggcgtgttcgagaagcggaaccgcgtgaagccccagaggatcatctacttccgcgacggcgtcagcgacggtcagttcgacatggtgctgaacgaggagctggcggacatggagaaggcgatcaagaccaaggactactccccgacgatcaccgtgatcgtggccaagaagcggcaccacaccaggctgttccccaaggacctgaaccagcagcagaccaagaacggcaacgtgctccccggcacggtggtggacaccggcgtggtcgacccggcggcgtacgacttctacctgtgcagccacaacgggctgatcgggacgagccggccgacgcactactacagccttctggacgagcacggcttcgcctccgacgacctgcagaagctggtgtacaacctctgcttcgtcttcgcccgctgcaccaagccggtgtcgctggccacgcccgtctactacgccgacctcgccgcctaccgcggcaggctctactacgagggcatgatgatgtcgcagccgccaccgtcttccgcggcgtcggcgtcgtcggcatcctcctccggcgccggcgcttccgacttcaggagcttcccggcgctgcacgaggatctggtggacaacatgttcttcatctgacgacagcctttcgtcgcatggtccggtggtctctctctgttcttagtttacctcttactgcgtggagtctcaggtcatagactcattagtcacagactcacaggttgtctatcttttgacttttgttgaccgtgtcgtcggtcttggtagttggtagtcttatacatactgttgaggctgcattatggttgcacaagaaagtttaagagtactatactggtactctgtattttgcaattcgggtgcgggtgctatgcagtaggatgttact

SEQ ID NO: 89858 - DNA, 271 bp, Oryza sativa
  unsure (1)..(271): unsure at all n locations
  Clone ID: PAT_MRT4530_88579C.1
ccgactacttcctgccgccctccgncctcaagaaggacatcgacganaagcgcgccggctgacccgcccggctagaataagatcccatgcaggcctgaattttggtanaggtggccataggngtatggggtttgttcttgattccttaacattttttttcttcttcttttcttggctaattgcaaagtaattcaaccatgatccaggaataaaattacttaaaagggttcatttttttagggcnaaaaaaaaaaaaaaaaaaaaaaaaaaa

SEQ ID NO: 89859 - DNA, 2219 bp, Oryza sativa
  Clone ID: PAT_MRT4530_8857C.1
atggtatcggcgaagggcctactggtagttggctgctctgacgtcaactctttctcgatgttcttcgagtagattcacatcgtcgcttcgctgctcctcatgttcctcgtcggagtacttctgtactcgtgtgctctgatgtcgtagctccgtggggagcatagcctctaagccatacacgaggaagaagggtgtctccttattggatgttgtcggtgtggtacgcatggcccagagaatagaggggagttcttcgacccacttcttgtcatgtgacatgagtctatcgtagacacgggtcttgatcccttgtagtactatgccatttgcccttttgacctgtccattgctctaagggtgagaaaccgaggcaaagcaaatcttgactcccaatccaatgcagtaatcctggaagtcggcactgatgaactgggagccattgtctgttataatgcggtgagggcaatccgtatctgcagaatatccctttgataaacttgatggcattgtcggccttgatttctccaatgggcgtcgcttcaatccacttgtgaacttgtcgatcgccatgaaaaggaacctgtagccgccctgtcctcgtgggaatggtccgagtatgtcgagcccccagcacaagaacggccaagtaagaggggtacagtctggagcgcttgcgctggtagtcttgtgtatttgctatgaaattgacaagcttcacaccgctgaaccatgtcacaagcgtctttgagcgcagttggctagaaaaacccttgtcgaaaggcttttccgaccaatgtctgaccggcagatcccttcgtgtatatccaggaggagatgtttgccgtcgtcgaacgaaatgcatttgagaagtaccccgtttggcccctttttggcttgtcgggttattttctcggcttctgcgtcgtcctcgggcaactcgtcgctactcaggaatttgttgagcagggtccgccagtcgtctgtggtctcgatgtcggcaacgacttgttctgcccctgtagcccccgaactgatgtcggggacaactatgctaccttcgtcgttttcttctttcatcgatggctttgtcagggcgtccaagaaagtaccaggttcgagtggctctcgtatggatgcacgccgtgctaggtcatctggttcgatgttgtccttgcggtatacgtttcggacctcgatcccatcaaaccttttctccagcttcctgacttctgcgaggtacttgggtaactcggggttagagtacttgtagtctttgtgcacctggtttgcgactagttctgaatccccattcacgattagtcggttggctcctagtgcggctgctgctcttatcatggcgagtaatcctttctactcggctgtgttgttggtcgccctgaagttgaggtgaattgcatgcttgaactgatctcctaaaggtgatgtcaagatgaaccctacccctgctccttggctattgagtgcgctgtcgaacgccattgtctatgtctcgctgtcagtctgactatctgacatgttgtcaggcatagtccaatcggctacgaaatcggcgaggacctaggacttaatagctgttcggggcacaaagtgaacatcaaactggctttgctcgactacccatttcgcaatgcggccgacgatgtctttgtttctcacaacttctccaaggtggaaggaggaaacgaccgtgactctgtgggcttggaagtagtggcgtagctttctcgatgtcatgattactgcataaagcagcttttggatatatgggtatcttgtctttgcgtcgtggagagcttcactgacataataaaccggtctttgcaccttctctctctcgacaacaataacggtactcacagaatatggtgtggcggcaatatagaggaataattcttcattaggttggggagcaacaagtactgggggatttgacaagtagcgcttgagtgcgatgaacacatcttcggcttcctgtgtccacacaaatttgtcttgtttcttcagcagcgcgaagaagggttgtcctcgctctcccatcatagcgacgaacctgctcagtgccgccatgcatccagttagcttctggacttccttgagtcttgtgggcgacttcatgttctcgattgccttgatcttctcgggatttgcttcgatccctcttccagagatgaggaatctgaggagtgtcacgcccagaa

SEQ ID NO: 89860 - DNA, 2265 bp, Oryza sativa
  Clone ID: PAT_MRT4530_88580C.1
atggcggagccagcggctgcggcggcggcggcggaggccccggcgacggtggggcaggcggtgatcccgctcgtcaacaggctgcaggacatcgtcgcgcggctggacggcggcggcggcggcggactggagctgccgcaggtggcggcgatcggcgggcagagcagcgggaagtcgagcgtgctggaggcgctcgtcggccgcgacttcctcccccggggccccgacatctgcacgcgccgccccctcgtgctccagctcgtgcgccactccgcccccgaggagtggggggagttcctccacgcacccgcccgccgcttccacgacttcgaccagatcaagcgcgagatccagttggaaacggataaagaagctgggggcaacaaaggggtttctgagaaacagattcgtctgaaaatattttcaccaaatgtcctagacatcaccttggttgacctccctggaataacaagggtgccagtaggagaccagcctagtgatattgagtcaagaataaggtcaatgatcatgcaatacattaagcatccaagttgtattatcttggctgtcactccggctaatgcagatttagctaattcggatgctctccaactggcaaagcttgctgatcctgatggttctcgaacaattggtgttatcaccaagttggacatcatggacaggggcactgatgctcgtaactttttactgggaaatgtgatccccctcaagcttggttatgtaggtgttgtaaatcgtagccaagaggatatcaactttaagcggagcgtcaaagatgcacttgctttcgaggagaagtttttctcaactttacctgcttatcatggtcttacacattgctgtggtgttcctcaactggccaagaagctaaatacgattctactaaagcacattacatatatgcttccaggcttgaaatctcgcatcaattctcagttggtagcagttgcaaaagagcatgctgcatatggtgatactgcagaatcaacggctggtcagggggtcaaactgttgaatatactcagaaaatattgtgaagccttttcttccatggtggaagggaaaaataaagtgtcaacagatgaactatctggtggagcaagaatccactacatttttcagtcaatttttgtcaagagcttggaggaagtggacccctgtaagagcataactgatgaagatatccgtacagccatacagaattctgacggtccaaagggtcctatgtttctgccagagttgccgtttgagattcttgtgcgaaggcaaataagtcgtttgcttgatccaagccttcaatgcgcaaattttatctatgacgagctagtcaagatggattacataaatacttcacatccaaactttgttggaggcaacaaggttgttgagcttgctaggcaagaaattttacctcccaaagcaccaacctctgtaacgattcctaaggatggtactgctattagtcctgagatacaattaacatctgacagaagtcaaaagtcacgtgctatttttgcaagagatgctactagaggagccacctctgatcagggagtgcagcctgatgctgatacagaaaatacaggaacaagtgtggcaggcagaaatcagaggggtcactcactggttgctgggagttcatcaagcaagtcagttgcacgagttcacagcctagataaccttatctctatcatccagttaagagagccacccatcactttgaagccatcagaaaaccagcctgcacaggatgcaacagaggtagccattgtgaaactattgatcaaatcgtactatgacattgtcagaaagagtattgaagatgctgttccaaaggctataatgcattttctggtgaaccacacaaagcgtgagctgcataatgttttaatccggaaactgtacagagaaaacctgctggatgaaatgctgagggaaactgatgaagtaattatcagaaggcagcgtatacaagaaacactccaagttcttgaacaggctcataggacgctcgaggaattttcccttgaagctgaaaaggttgagaagggatacagccctgctgaatatgctactggcctgccaaaaatccatggtctcagcaatggcgaccccagcatcatttacgcatcctcgcctaaccacaatcgaaagaaagcatctcacgaagatcaacatgggtcggtagcgtcatatagttcgacttcctatccagatgctaatggtgggcttctttccacttga

SEQ ID NO: 89861 - DNA, 1014 bp, Oryza sativa
  Clone ID: PAT_MRT4530_88581C.1
cggacgcgtggggttggtagcagttgcaaaagagcgtgctgcatatggtgatactgcagaatcaacggctggtcagggggtcaaactgttgaatatactcagaaaatattgtgaagccttttcttccatggtggaagggaaaaataaagtgtcaacagatgaactatctggtggagcaagaatccactacatttttcagtcaatttttgtcaagagcttggaggaagtggacccctgtaagagcataactgatgaagatatccgtacagccatacagaattctgacggtccaaagggtcctatgtttctgccagagttgccgtttgagattcttgtgcgaaggcaaataagtcgtttgcttgatccaagccttcaatgcgcaaattttatctatgacgagctagtcaagattagccgtggttgcttaaccagcgagctgcagaaatacccgattcttaaaaagcggatgggtgaagcagttagcaatttcttgagagatggtcttcgacctgcagagacaatgataacccatattattgagatggagatggattacataaatacttcacatccaaactttgttggaggcaacaaggttgttgagcttgctaggcaagaaattttacctcccaaagcaccaacctctgtaacgattcctaaggatggtactgctattagtcctgagatacaattaacatctgacagaagtcaaaagtcacgtgctatttttgcaagagatgctactagaggagccacctctgatcagggagtgcagcctgatgctgatacaggaacaagtgtggcaggcagaaatcagaggggtcactcactggttgctgggagttcatcaagcaagtcagttgcacgagttcacagcctagataaccttatctctatcatccagttaagagagccacccatcactttgaagccatcagaaaacagcctgcacagggatgcacagaggtagccattgtgaaactattgatcaatcatactatgacattgtcagaa

SEQ ID NO: 89862 - DNA, 575 bp, Oryza sativa
  Clone ID: PAT_MRT4530_88582C.1
atggaagggagcaacctcaagtcggctgcgctactggagcagttgcgcgtccacctcgcctccggcgccggcaaggagctcgtcgaaaagatcggcttcgtttaccagctcaacatctctcccaagaagctcgctttcgacgaggaggtattcgtcgtcgatctcaagaagggcgtcgtctccaaagggccgtacgaagggaagccagacgcgaccttctccttcacggacgacgatttcctggccatctccagcggcaagctgaaccctcagatggcgttcataatgggtaaattgaagatcaaggggagtataagcgcggcgcagaagttcacgccggacatcttccccaagccatccaaactgtagggttgagtggagttcgacaattaatacaaacaggcagttggagtagtaattttagtctgaaaaatagttcagagatgttcttgtggtaccatagagatgctgttggcgttcccctcgagcttgttttcataagatgcggaaaatattggactgtccaaattcttctaccgcgatcttactttctaaacaacaaattgcatgagtaa

SEQ ID NO: 89863 - DNA, 510 bp, Oryza sativa
  Clone ID: PAT_MRT4530_88583C.1
cggacgcgtccgcccacgcgtccgctcaagtcggctgcgctactggagcagttgcatgtccacctcgcgtccggcgccggcaaggagctcgtcgaaatgatcggcttcgtctaccagctcaacatctctcccaagaaactcggtttcgacgaggaggtattcatcgtcgtcgatctcaagaagggcgtcgtctccaaagggccgtacgaggggaagccagacgcgaccttctccttcacggacgacgatttcctggccatctccagcggggcaaattgaagatcaaggggagtataagcgcggcgcagaagttcacgccggacatcgatcttccccaagccatccaaactgtagggttgagtggagttcgacaattaatacaaacaggcagttggagtagtaattttagtctgaaaaatagttcagagatgttcttgtggtaccatagagatgctgttggcgttcccctcgagcttgttttcataagatgcggaaaatactggcccgtcc

SEQ ID NO: 89864 - DNA, 389 bp, Oryza sativa
  Clone ID: PAT_MRT4530_88584C.1
ggccgcgggttttttttttttttttgctataattttcatttattcatacgaacagccaaagactattccaaattttattacatgacacacacgatgatgtgtgacactttatttatccaactatacatacatcgttggtacacactaccacacactgacatcgccaacaacggctttatttaggcggcggggcgaaaggcaaggcctgcctacatataagctgagtactaaagcaagcaaagtaaggcctcgatcaaagctctgatcgacagtagcaggatccatacgataaatcctcatgcagccgggcgacgacgacgaaagattcagttgcaggagcaggaggagcagccggggcagctggggccacacttgcaggtgttgcaacc

SEQ ID NO: 89865 - DNA, 359 bp, Oryza sativa
  Clone ID: PAT_MRT4530_88585C.1
ggtcagggtcacgacaatgatccttccgcaggttcacctacggaaaccttgttacgactgctccttcctctgaatgatagggttcaatggacttctcgcgacgtcgggggcggagaaccgcccccgtccccgagatcgggggaggtgaccggaccattcaatcggtaggagcgaacggcggagtggacaaagggaagggacgcatgcaacgcgagctgatgactcgcgcttactaagcatacctagttgaggacctacaattgctatgatctattcccatcacgatgaagtttgccaagattacccggtcctgtcggtcaaggctatatactcggtggatacatcagtgatatgcgcgc

SEQ ID NO: 89866 - DNA, 537 bp, Oryza sativa
  Clone ID: PAT_MRT4530_88586C.1
atggtaagcaacaataaagacgacaacgacgacgacgtcgaagctggcctcacggtggcggcggcggcggcgagacggtcgtcaccggatcagccgtcgccatggtgggatgacgaggcgatctggctccgctgggaggagctcaccagcagcgagcagatacggaagctgaggaccacggtgaccgtcctgctgtgcgtctccgtggtaattgggctctgcgcggcggcggcgcaggcgatgttcgtcccggcgacgacgacggcgctgtccagcgccggcgtcggggtgctcttcttcctcgcgccgttctcgctgtacatgcgcctgatgctgcggccgtgcctcgtcgaggacatgcacaggggcacgctcgcttgcctggtggccgcgcccgtgctcctgcacaccgccgcggtggcgtatttacagctgatggggcgcggccaggtggcgttcgccgcgttgggcgtatggctggtggacgtggccgccgcggcggcgctcggctggtgcttctggaatgacaggcgatga

SEQ ID NO: 89867 - DNA, 231 bp, Oryza sativa
  Clone ID: PAT_MRT4530_88587C.1
cccacgcgtccgatcatgttttatcatctaacaataatgaaaatactaattataaaaaaatttcatataagatgaacagttaaacgttagacacggaaattcaggtttatcattttttaggacagagggagtacgaccggaccaatgagcaaatatgttgttttttcaaaaaaaaaaaaaaaaaaaaataaaaaccaaaatggtgcgcgcggtgtggaaaaaaaacagaaa

SEQ ID NO: 89868 - DNA, 837 bp, Oryza sativa
  Clone ID: PAT_MRT4530_88588C.1
atgctgctctcctccgccgcccgcctcggcgacggcctcgtcggcctccaaaccctaatcgcccccgacgccgccgccgccgcctcccgctcggcgagcggctacgtcgccacgcgcacgctcaaggcctcgccacgcgcggtcgggtgccccggcggcggtgaaggggatggggaaagggaggaggaggaggagggggaggagggaggactagaaaaagcgggcatcgggccaaggacccccccactaccaggggccgacagggcctatcatgcgacatgtacgggtggccgccgccggatccgcaggctcccgccgacgatcccgtcgctccggcgcgccgggaacgcgccgtgggcgctggcgagggcgcgcaccgcggacgggcggctcgtgatctcgacggagcccgcgccgccgcgggggcgcgtcgtggcgacgaaggccgaggggcggcttgtcctcgacctcgtcgagcgcggcgacagcccgcccccgccgccgcctcgccggcggtcatgcttctcgatcgtgcatcaagaacccgtctcgcctgctgctgcggcggcggcatgcgacgacgacgactacggcgtcgaggaggcgagcgccgccgagcgagcatccgctcgccgcgtcatcccaataataaccggcgccccggcgccggcaatgctgtccgcggtgggctatgccttctcgccgtcgctgtcgctgcacccggctgtggcgccgctgccgccgctggtgtgctcggagggttgctacgaggacgtgatccgcgcgtcctcctccctgcccaagatgccattgatcctgcccaggatggtgcattga

SEQ ID NO: 89869 - DNA, 2070 bp, Oryza sativa
  Clone ID: PAT_MRT4530_88589C.1
tgttgtgtttctggaaataattttggtcatcactccaccgaacgtctccagaccaagagacaatggagttttttttttttttttttttttttttttttttgcacagggaactaatgatatttttattttcaaggaacaaggtcatatcaatcagctacttcttcgatcaaaacctttgcctcctctttttttgaaggctactttttataatccttcattcaacatcacaggaaaatgttggcaaaaccctacgctatcaaattgcaaactaaagagcctattgaacatgggatccatagtaaacaaaaagaacaatttgttcactcccttcttcctataccatcacccatcagaccctcacagccatccaccacagatcatccttccatcaataatcttcaatcgctagaactatcaattgctgtcagtgaaatccgcatcaataacatctccatcattcggtcccttaccgcctgagcttgtcggtccagcatcggcaccaggagtaggtccagcagcaccagcattaggctgctggttgtacatggcctggccgatctgcataacttcctcgtttaaagcagccatggcatccttcatgctctgtgttgatccacccgcaatggcctctttgagctcgttgagctttgcatccaccttctctttcacaggtgcaggtaccttgtcacctagctccttcagttgcttctcagtctggtagaccacagagtctgcctggtttttggtatcaatggcatctcttttctctttgtcctcctgagcaaacttgtcagcctcttccaccattctctcaacctctgattttgaggtgggcagtgttgtgtttctgggaataatcttggtcatcactccacccaacgtctccagaccaagagacaatggagtaacatcaagaagaacgacatctttcacatctccggccaaaactccaccctgtacagctgccccaagagaaacaacctcatcagggttgactgtgacattgggatccttgccagtgatcttcttcacaagctcttgcacggaagggatacgagtggatccaccaacaagaatcacttcgtccaggttatcaacagacagtttggcatctctcaaggcattagtgacaggagttttaagcctatcaatgaggtccgaacatagctcctcaaatttggctctggagagagttgtctcgatgtgtttaggcccatcagcagtagcagttatgaaaggcaagctaatgtttgtctgagacagcgtagacagttccatcttcgcttactctgctgcctcattgagtcgctgcagggcttgtttgtctttcagaagatcaacggcttcatctttgtttaacttgctagcaagccaatccacaactttaggagtttcatgagtcatggctccaaagtaaaatacccaacagaaataaaacttatcgaagtcatcgccaccaaggtgtgtgtcaccagatgtggaaagcacctcaaacacaccatctccaacctccaatacagagacatcaaaggtaccgcctcccaagtcaaacacaagaatcgtttcgttgtttttcttctcaaaaccataagcaagggatgcagcagtcggctcatttataatgcggagaacttccaatcctgcaatacgtccagcatcttttgttgctgtcctctgtgagtcattgaagtatgcaggaacagtaaccactgctttggtaattttgtcattcaaaaacttagatgcatcgtccaccaacttcctcaagacctgcgcggaaatctcctcggcggcgaactgcttgccgatggcggggcagtcgagcttgacgttgccgttgtcgtcgcggacgacgtggtaggagacctgcttggcctcgtcgtcgacctcggccatcttgcggccgatgaagcgcttgacggagaagaaggtgttctccgggttgacgacggcctgccgcttggcgatctgcccgaccagccgcggcccgcccttggtgtacgccaccacggagggcgtcgtccgctggccctcggcgttggtgatgaccgtcggcttcccgccctccat

SEQ ID NO: 89870 - DNA, 1755 bp, Oryza sativa
  Clone ID: PAT_MRT4530_8858C.1
atgctcaacccggagaagtgcatgttcggaggaccatcgggcaagctcctcggattcctcgtctccggaagagggatcgaagcaaatcccgagaagatcaaggcaatcgagaacataaagtcgcccacaagactcaaggaagtccagaagctaactggatgcatggcggcactgagcagattcgtcgctaggatgggagagcgaggacaacctttcttcgctctgctgaagaaacaagacaaatttgtgtggacacaggaagccgaagacgtgttcatcgcgctcaaatgctacctgtcaaatccccctgtacttgttgctccccaacctaatgaagaattattcctctatattgtcgccacaccatattctgtgagtaccgtcattgttgtcaagagagagaaggtgcaaagaccagtttactatgtcagcgaagctctccacgacgcaaagacaagatactcacagattcaaaagctgctttatgcagtaatcatgacatcaagaaagctacgccactacttccaagcccacagagtcacagttgtttcctccttccccctcggagaagtcgtgagaaacagagacgtcgtcggctgcattgcaaaatgggtagtcgagctaagccaatttgacgttcactttgtgccacgaacaactattaagtcccaggtcctcgccgatttcgtagctgactggactatgctcgacaacaggtcagacagtcagaccgacagcgagacatggacaatggcgttcgatggcgcattcaatagccaaggagcagggacagggttcatcttgacatcaccttcgggagatcagttcaagcatgcaattcacctcaacttcagggcgaccaacaacacagccgagtacgaaggactactcatcgggataagagcagcagccgcactaggagtcaagcgattaatcgtgaaaggggattcagaactagtcgcgaaccaggtgcacaaagactacaagtgctctagccccgagttatccaagtacctcgcagaagtcaggaagctagagaaaaggtttgatgggatcgaggtccggcacgtatatcgcaaggacaacattgaaccaaacgacctagcacggcgtgcgtctagacgagagccactcgaacctggggcagaacacgtcattgccgacatcgagaccacagaggactggcggaccccgctcatcaagttcctgagtaccgacgagttgcccgaggacgatgcagaggccgagaaaataacccgacaagccaagatctattgtatgatcggcaacgatctgtacaaaaaggtgccaaaaggggtacttctcaaatgcatctcgttcgatgacggcaaacatctcctcctcaacatacataaagggatgtgcgggtcacacgccgccggtcggacgttggtaggaaaagctttccgacaaggttttttctggccaaccgcgcgtaaagacgcttgcgacatggttcagcggtgtgaagcctttcaatttcatagcaaacacacaagactaccggcacaagcgctccagactatccctcttacatggccgttcttgtgttgggggctcgacatactcggaccattcccacgaggacagggcggctacaagttccttttcgtggcgatcgacaagttcaccaagtggattgaagcgatgcccacgggggaaatcaaggctgacgacgccatcaagtttatcaaaggatattctgcagatacagattgcctcaccgcatcataa

SEQ ID NO: 89871 - DNA, 2586 bp, Oryza sativa
  Clone ID: PAT_MRT4530_88590C.1
atggagacctatcagccagggcgctgccgccgcctcgccgccgaccaccaccgtcgcggcatcctcgctgcaggtagtgcaagctgctacccctacgccgctaatccctaccgcatggcgccggcggcgagcttgttgcgccacgtcggtgcgggcggcggcgcgatgaacacggcgttcaccgagacgacaaccaacggcggcggcgacgcctcctatagcatcgggccaagcttgagcttgcgccagcaccacaccggtgtgggcggcgccggcgaccggaccacggtgttcgccggcggcgacgcgctcgccgcgaactacccctacagctacgcgataccggttccttactccgctcaaggctggcaccgcatcggtgcggggggcggccggaacacggcgctccccaacttcgacgtggccccttactttgctacggcggatctccatcacatcggtggaggtggcgaccacaacacggcgttcttccccaacatcgacgacctcgccatgaacgctttcagcctcgccgcaccaaaccagtactctgctgcggaattctattacaacagtgcaggtggcgagcagaacatcgaggaattctactacaacggtgcgagtggtgtgcagaacatggtgcccccctacatggacaccctcactgcgaacgctttcagcttcaccacaccgggccattactctgctacggaattctactacaacaatgcagatggtgagcagaacattgaggaattttactataacgctgtaggccatgagcagaacatagtgtcccctaacatggacaccctcaccgcgaatactttcagctttgccacaccgatccattactctgctgcggaattctactacaacggcgcaagcggtgagcagaacattgaggaattctactacaacggtgcgagtggtgtgcagaacatggtgccctccaccgtggacaccctcaccgcgaacactttcagcttcaccacaccgggccattactctgctacggaattctactacaatggtgcaggcgatgagcagaacatagaggaattctactacaacggtgtaggcggtgagcagaacacggtgtcccccaacatgggcaccctcaccgcgaatgctttcagcttcgccacaccagcccattaccctgctgtggaattctactacaacggtgtaggcggtagcagaacatcgaggaattctactacaatggtgcaagtggaattccaccaaatcagtgcaggcgccgagcagaacatggtgtcccccaacacggacaacctcgccatgaatgctttcagcttcgccaccccgttcaatcactctgctgcagaattcttccaccacatcggtgcaagcggcgagcggaacacggtgtgccccaacaacgacacccacctcgccgcgaatgctttcagcttcgtcgcgccagtccattactccgatgccaatgcagacctccttctccatgtggtggatgccggcggtgagcaagacacggtggccgccaatgtcgacgtgctcggcatcccaccagcaccggcaagcatcaccaatgccatcgtgaagagcgtgtggcgggagaactacagggagcagttcaagctcgtggtcgacgcgctcaaccaacctcgtcgccacctctacatcgccgtcgacatggagttcgccgcagacgccaccaccaacatccgccgaaggccggcagatgcggaggatcatggcttcagcgggaagctcactgggctcgccgagcacctcggaatccggcgtaccggcggcgccgcgcaccatgccggctccgacgcgctgctgacactgtcgtgtttcttcaagatcttcagatccctctcaggacagcagctgcatcagctggatgctcggcgagggttactcgctgggttagaggagtggaacatggcgatcaaatgtgctcgccacattgacgatcacactagaaacatcaaggtgatcgaggtggtggcagaaaacctcggcgaagaggcgcgacgaatcggagagctggtggacagcaacttcagcatcattggagtagaggtaaatcaggtagtaatccatcctcaattggacaggaaggcttatgaaatggtcatcgcgttcatgaaccctgaaggaatgttggcttacgggcgtgcctggaaattctgcatcagtcgtttcacgtcagacaatggcaatgtactgaatctgaaacagcttgctgaacttgtgcaatcttgtggagcaaccgataaccctgatgtatcctgggtgacattccacggatcagatgtgatctgcagactgatcaggtcagccaatggtggtgttattccttcatcgatcagcggagagagtttcctccctagcttgtatgatgtcgcattgatcgttcgtcgattccttggcattggcacactccctacaaccgagcgcaatggaggtatttttgatgttgctcgagcgctggaactgaaggccatcgaggccgacaaggaggcagagagggttcttcttactctgagatgcttcatgagattggcagaaatggagtcggctgtccaatggtag

SEQ ID NO: 89872 - DNA, 4420 bp, Oryza sativa
  Clone ID: PAT_MRT4530_88591C.1
atggaggcggcgctggagtcggcgcgcgccaaggacacgaaggagcggctggccggggtggagcggctgcacgaggcgctggacgcggcggcgcggcagcgcgggctgacggcgggggaggtgacggcgctggtggacacctgcatggatctgatacgggacgccaacttccgggtcgcgcagggcggcctgcaggcgctctccgccgccgccgtcgtcgccggggaccactttaagatccacctgaacgcgctcgtcccggccgccgtcgagcgcctcggggacggcaagcagcccgtccgcgaggccgcccggcagctcctcatcaccctcatggaggtttcttcgccgacaatcatagttgaaagagctggaagttatgcatggactcacaagagttggagggtccgggaagagtttgtacgtacagtggcaaccgcggttgggctttttgcttcaaccgagctcccattgcaacgagttcttctttcacctgtcttgcaattgatgaatgattcaaatcaaagtgttcgagatgctgctatctattgcattgaggagatgtacacacatatgggatctcagttccatgaagagttgcagcgccataacttacctccgtacatgctaagggagataaattcaagattggaaagaatagaaccaaaggttcccacatctgatggtaatatcatgcaatataaggctgtcgaatctagatctgttagtgttaatccgaaaagaggcagtccaaggacaaaaagcacaccacgggaaagtacattattcggaggggacacggatataacagaaaaaccagtggaaccagtaagagttcactcagagaaagaattacttcgggagtttgagaagattgcagctacccttgttccagaaaaggactggtccgtgcgtattgctgccatgcaaaggattgaagctttggtgtatggaggtgctattgattatccatcttttcttatgctcttgaagcagttggttccacctctatcaactcagctgtctgatcgacggtctagcattgtaaaacaggcatgccatctactcaatgtactatccaaagaactccttggtgattttgagccatgtgctgaactatttattccgatgctttttaagcttgttgtcataacagtgcttgtcatagctgaatcagccgatacatgcataaaaaccattctacggaactgcaagatttcacgaattcttcctcgcatagctgacacagcaaagaatgaccgaagtgcagttctccgtgctaggtcctgcgagtacgctcttttaatactggagtattgggctgatgccccggagatacaacgttcagctgatttatacgaagatctaataaagtgctgtgtagcagatgcgatgagtgacactataaacgatgaagatggggttgtgcacaagcggtatgcttcaccctctcttcgtgagaggtttgtgcagccttctcgttctttatcacatgcaagtggtacaagtgcacttggatatggcacttcagctattgttgctatggacaaaactgctgctatttcttcagattcatccttttcatcaaatactcttcgtttgtcacagtcaaagactgttgggagaagttctgaaagaagcctagagagtgtgcttaactcaagcaaagaaaaggtttctgccattgatcatctgtccttacagaattcagcactgctcgactcatctgttcctagcaccataaatgctagtgcacgaaatggaggctcccgcttattggagtcaatgacaacccagttgggcaccagagagcgatcaagatcaccgtacttgggtaatatatcatctgagtccatgacaagcttatcactgccttttccaagaaggtctttggagaggccacaagaaggaggccgcatggatgagggtagtgatatccggtcaactaggagattcccccaaactcaaaactatgttgacatgccctacagagatgccatccacagagattcacataataatcatgttccaaatttccagagacctcttctaaggaagcaagtaatgtcaagggcttctgccagcatcaggcacagctttgacgatagccaagtacagtcaggtgacgtgtctggttatacggatgcactggcttcactaagtgatgctctttctgagggtctcagccctagttcggattgggtagtgagagtctcagcttttgaatttattcggaatcttctgcaacaaggccagagaggtattcaggaaattacacagaattttgaaaaggtcatgaagctgttttttcgtcatttggatgaccctcatcataaggttgcacaagcagccttttctactcttgcagaacttattccagcttgcaagaagccatttgagagttatgttgaaagaattttgccatatgttttttcccggcttattgatccaaaagaattggtaaaaaaaccatgctcatcaaccttggatgttgttgggagaacatatgcaattgatatgttgctacctgccctagtgcgctcactagatgaacagaggtccccaaaggcaaagttggctgttcttgagttcgcaaataaatcgttcagcaagtacactgtagattctgaaggttatagtaacagtgggttccttaaactgtggctttcaaaattggcacctttagttcatgaaaaaaatgcaaaactgaaggaggcatccatttctggtatcatatctgtttattctcattttgattcaacagcagtgctaaattttattctaaacttatctgttgaggagcaaaacctcttgaggcgtgcactgaagcaatacacacctcgcattgaagttgatttagtgaactacttacagagcaagaaagatcgtccccgtcccaaatcttatgatcaagcagattatggaacttcttccgaagatggttacgcgcttgcatcaaagaaaagctatccatttgggcggtattcctctagttcccttgatgctgaaggtgggaaatggatgaattcagtgcaagagtcaacaccgcgtaatgcgcctatggcgagaactacttctgatatgagcatagatcatactagtcaaagcatagaactggacactggaagtgaagttcttttaactagaagtagagaatcaaagaataatactagctcactagtggaaactgctcgttcttggccaaactatcctgaaaaaactgatgcgcctttggatgatgaaactgctatcagtactcctcgcttagacttaagccatcgcgctgcttctgatgggcacaatgctgttggttctactgctgaagaaaatgttcaagagggagatattgctgtgaaacttagttctataaagactaccctacatgctgacaacgaactgagcataccacaacttcttcatcagataagcaacggtaccgaagtttcaagtttggaaaagcgggaagcattacagcagttggttaaagcttctgttgataatgacatctccatttgggcaaagtatttcaatcaaatcttaacggctgtgcttgaggtgctggatgattctgattcatctactagggagattgctctgtctttagttgccgagatgctcaacaatcagagtggtgctatggaagaatctattgaaattgttctggagaaacttctgcatgttaccaaagacatggtggcaaagatttcaaatgaggcaaaccagtgcttaaatgttctgttagcaaaatatgatcctttcagatgtcttgctgttgtggtgcctctattggtcagtgatgatgaaaagacacttgttgtgtgtatcaactccttgacaaagcttgttggacggctttccgaggaggaattgatgaatcagttgcccacatttttgccagcactgtttgatgcttttagtaaccaaagccctgatgttcgaaagactgttgtattctgcttggtggatatctacatcatgcttgggaaggcattcgtcccgtatttggaagggcttaacagcacgcagctgcgccttgtaactatctacgcaaaccggatttcacaagcaaggtctggcgctccgattgatgctaaccaatgacctgaggtgcaacacaacgccctgttattatttgtgttctgtatgaatacctgtttggcaggggtgcatttttgggtttcatttgtttgtgcatgtgtatagtataaacaaagccccttgtgtatcgagctcctgcccttctttttctctttgtgtgattatgtattcctttttttttttcaacctcttctttttgtcagcatggtgagtgttaatgagtgttttccttttgtaccacttagtgcttaccctgtacaaagaaaaaggatagtgtaggttcatggagagacctagtgtctgccccattttcatttgggga

SEQ ID NO: 89873 - DNA, 1031 bp, Oryza sativa
  Clone ID: PAT_MRT4530_88592C.1
ggccaaaactcccaccctgacagctgccccaagagaaacaaccttcatcagggttgactgtgacattgggatccttgccagtgatcttcttcacaagctcttgcacggaagggatacgagtggatccaccaacaagaatcacttcgtccaggttatcaacagacagtttggcatctctcaaggcattagtgacaggagttttaagcctatcaatgaggtccgaacatagctcctcaaatttggctctggagagagttgtctcgatgtgtttaggcccatcagcagtagcagttatgaaaggcaagctaatgtttgtctgagacagcgtagacagttccatcttcgctttctctgctgcctcagtgagtcgctgcagggcttgtttgtctttcagaagatcaatgccttcatctttcttaaagttgctagcaagccaatccacaactttcttatcgaagtcatcgccaccaaggtgtgtgtcaccagatgtggaaagcacctcaaacacaccatctccaacctccaatacagagacatcaaaggtaccgcctcccaagtcaaacacaagaatcgtttcgttgtttttcttctcaaaaccataagcaagggatgcagcagtcggctcatttataatgcggagaacttccaatcctgcaatacgtccagcatcttttgttgctgtcctctgtgagtcattgaagtatgcaggaacagtaaccactgctttggtaattttgtcattcaaaaacttagatgcatcgtccaccaacttcctcaagacctgcgcggaaatctcctcggcggcgaactgcttgccgatggcggggcagtcgagcttgacgttgccgttgtcgtcgcggacgacgtggtaggagacctgcttggcctcgtcgtcgacctcggccatcttgcggccgatgaagcgcttgacggagaagaaggtgttctccgggttgacgacggcctgccgcttggcgatctgcccgaccagccgctccccgcccttggtgtacgccaccacggagggcgtc

SEQ ID NO: 89874 - DNA, 435 bp, Oryza sativa
  Clone ID: PAT_MRT4530_88593C.1
atgtgtgagatatcacggtatagaatgaaagagtggtggcggattattggacggtttggattatcatcagcacagaaaaatgcctactgcagctctacttctccacaacaacgaaggcatgcgaatacactactgcgtcgatttagggacaaaattatccaaacctggaggcatgaagaaacacgtgagatgatactgaatgtctctgcaatgctgggtttggttgctgtcgtcgccgtcgtcggatgcattatgaagccccactttgaggcccagctagagaagcttgcccaagcttttgttttgttgtttctactggctctacttcaagcaatggtagaaatgcaaaaggaacgacggcaaaagagcctagaagatgatcatgctgatgattctgaagagagcaagaagaagctgaagccaacaaaaacttag

SEQ ID NO: 89875 - DNA, 493 bp, Oryza sativa
  Clone ID: PAT_MRT4530_88594C.1
gcttcgcgattcgtgctctgacgaccttagctcttctcctacagctccggcaacatcttctctaactccgacgaccccgacgaaagcaatggaattaggccgtgggaggcctagcccgacggtgggcggtgacacgggcggacggcgaggcgccggcggcggcgccgaagccgcggggatggaggagggcggtgggccggcgtcggcggcgggggcaaatggctaagagacagtggatccggcggttagtggttaggaggtggcggctagtggtggcggatccggaggcagggagccgccgaagacggggaagacggtggggcgggggcactcgcgcgatccattgaggaagagagggggtagggggtagggggtagggtaggggaggggaggaggagggctcgctggcgccgttgactcctttcggccaactagcgagtccgggcgacggcacgtggggtggtggcggcagaggcacagtgcgcgcgagaga

SEQ ID NO: 89876 - DNA, 1248 bp, Oryza sativa
  unsure (1)..(1248): unsure at all n locations
  Clone ID: PAT_MRT4530_88595C.1
agcattagctgcttggttgtacatggcctgnccgatctgcataactcttgggttaaaagcagccatggcatccttcatgctctgtgttgatccaccgccattggcctctttgagctcgttgagctttgcatccaccttctctttcacaggtgcaggtaccttgtcacctagctccttcagttgcttctcagtctggtagaccacagagtctgcctggtttttggtatcaatggcatctcttttctctttgtcctcctgagcaaacttgtcagcctcttccaccattctctcaacctcatcctttggcagtgtactagcgccggtgatggtgatatcctgtttcttcccagtacccttatcaatagcagcaacagagagaataccattggcatcaatatcaaacttgacttcaatttgtggaacaccacgtggtgcaggagggattccatccaagcggaagcttccaagagacttgttgtcccggacaaactctctctctccctgaagaacatttatctcaacacttgtctgtccatctgcagctgtggagaatacctctgattttgaggtgggcagtgttgtgtttctgggaataatcttggtcatcactccacccaacgtctccagaccaagagacaatggagtaacatcaagaagaacgacatctttcacatctccggccaaaactccaccctgtacagctgccccaagagaaacaacctcatcagggttgactgtgacattgggatccttgccagtgatcttcttcacaagctcttggacggaagggatacgagtggatccaccaacaagaatcactttcgtcaagttatcaacagacagtttggcatctctcaaggcattagtgacaggagttttaagcctatcaatgaggtccgaacatagctcctcaaatttggctctggagagagttgtctcgatgtgtttaggcccatcagcagtagcagttatgaaaggcaagctaatgtttgtctgagacagcgtagacagttccatcttcgctttctctgctgcctcagtgagtcgctgcagggcttgtttgtctttcagaagatcaatgccttcatctttcttaaagttgctagcaagccaatccacaactttaggagtttcatgagtcatggctccaaagtaaaatacccaacagaaataaaacttatcgaagtcatcgccaccaaggtgtgtgtcaccagatgtggaaagcacctcaaacacaccatctccaac

SEQ ID NO: 89877 - DNA, 256 bp, Oryza sativa
  Clone ID: PAT_MRT4530_88596C.1
gttgttttttttaattaggtagatactgaataatgatggacgatttgatggagacttacaccaggcaggagagagaaaaatacaccagtgcgtggagaaaacaacacctaagccggctccaggaaggccccctataggcatggaaacacagacacttgataacgataggaatgaagactcgagaggcaggatcttgtaataagcaatccgatgtcctcgaaagacgggccgacaacaccaggaggggcgtgcatgt

SEQ ID NO: 89878 - DNA, 446 bp, Oryza sativa
  Clone ID: PAT_MRT4530_88597C.1
aggaattctactgttctaaacaactaacacccagcattttaattgcattgctaacattcttgattgtttcgtggttctttagggcgtctctttgaccaaagctgtattgagtaaatatgtagatgaaaaccagaagcttcaacaagaactggtatggattttctttagataagaatttggagaaaattgatactttcaatgttttaaaaaagaactgaccgtttaattcgcttcaacttctccataattgaataattgagtgattcgtatgaaattattttttcttgctacctttaatgaggttcatatcatgatatttgttacgagacattgctccctttcgatagttcttttttacttaaccttttttgcatacaacatatcgtaaatttacaacatctgcgtgcaaaagcaccagatccaccaaaagaaaagagaagcaagac

SEQ ID NO: 89879 - DNA, 754 bp, Oryza sativa
  Clone ID: PAT_MRT4530_88598C.1
gggctacggacagatcccgagcttacaactgcattacaaaagggaaagcggaagccaagacttggaccaatcatcacaggcatgacttgggaactaggccgaaaccctaaaactcatcgtagccgacttgctcctggaagaactcctcgtcagtgggatccacttcatcttcttcagcaactggggggaggattatttatatagagcaaggttttacccatcgttggatattttaaatttgagggggaccgcgcgcgcgagcggggcggaggggagcggcgggccgaggtcggcttgacccggtcctggctgaggtggcgccgacgtggcgcctgcgtggctgccacgcgggccggcgggaggttgaagaaggcgtcagccgaaatggatggcggacggcggctgcgaacggtggagcgaaccacggcgatacaggcgaaagcgagcacaccgggaggtagcgcgggactagaggagacgagctaacggctcggattcgccggagggagtgcgacggcggcggattgtggtggcggcaaccggcggtgagagaagggggaaacggtgacggcgcgatgggagttcgattcctttgcactagagcatctacgcgactccgggaatccattccttgcgccgaattaggaggaaacgcaccaagggaggccggcgatgagaggcgctacagagctcgggcggcgacggcggcgagcacacagcgggcggcggcaacgggcgcggggtcaaacggcat

SEQ ID NO: 89880 - DNA, 4170 bp, Oryza sativa
  unsure (1)..(4170): unsure at all n locations
  Clone ID: PAT_MRT4530_88599C.1
atgaggcggcgccaggcgattggccgcaatttcccgcgcagaaggcgcaagtacagagcgcagtccaggtatttgcattggccgccttgcccgcaacagcggcagaaagaggcgaatcccaacccgttaggatttggcaccggaaacagaaagcggcagcacacgacatttgtctcaaagatccagaagcagcaacagctgaagcagaaacccattccttgtggttttggggtacaaggtgcaaatgcccagtgacgtaatgctcctggtcatgcgaagacttttgaaaataagtgggtaagggacccctcggctccgacgaagcaaaaagaggcggtgcagccaccgcaggcgcaggttgcccacaccttctgtcaataccatcagatttgcagacaacaaagttctgaagattataagaacgaggctcctatttggaagcgtacttgttatgctcatctcagaaatggcccttgcaatattaagggagacattagcttcgaggaactaagagcaaaagcatccaacagaaggaaattattaatgctatggataaatgggctccacaagctgagcaaaggatctgtgctagagcacatatatgctaacttgaagagaaatagtgcacgtccatcacaaactccaagctttcctactatgagttccttccctgaagtgaaaaacaactcatcattcggggcttctcaaaccaatggaccacctgtgttcagtagtttcagtcaaattggagcagcaactaatattggacctgggccaggaaccaccgcaccaggaatgccagccagtagtccttttggtcatccaagctctgcaccacttgctgcccctacttttggcagttctcaaatgaagtttggagtttcgagcgtgtaagtaatggttaggatccatgaaccatttgggagctttcaagccccacgttttcccagttcgaagtctcctgcttcctctgtccagcacagagacattgataggcaatcacaagagttgcttaatgggatggtaactcctcctagtgtgatgtttgaggaatctgttgggaacaacaaaaatgaaaatcaggatgatagcatctggttgaaggaaaaatgggcaattggggaggtgtgggatactttcctcttggtcattttcgaagttctgtttgctagaaatgtttgctcatttacaacttttgttcctgctatggaagttattggaataagaaacagtattgcaatattgagtgattggccgggagattggtccggcctcgagaaatttcacgacttgccactgaatatgcaagcttttgaaatttaccatttaattcatgtgacttttgaaatttgtaccgaaatgcgaatttcttcgccctaccacttcggtccatctgaagaaattgacagatggtgcaaatttatgtctatagttgcaattgttcacactttctatgggaacctgtggatgagggatggcgtcttcataacggaaattcaagacaggtggcaagacaaaatccaattggacataatggacaatatattagtggtatgcaagtccacattagctgacgatgaatcagctagtgaggtatcttcagggagtgacagtgacagtgattgcattcttggagatgattgcccatcagatgatgatgaagaggctgcacagatacacaagcgttttaaagaactgaaggagaagttaaagacaggaaaagtagataagttggatgatgttgtttttgaagctggtgctgaacaagatggtaatgacaccccatcttttgatagcgatgatgaagagtcggtagaagaggttgcaagcgatgaagaggtttctgctagaaaactcatcaagtatccaaggttcaaggagaagcctggtgttccaacatttgaattaggaatgacgtttagctgcaagaagcagttcaagaaagctattacagcatatggtttagctgagaggaaggcgatcaactttgtcaaagatgatcctaagagggtgagggcaagatgtgactggcctagctgcccttgggtttgcctactgtcaaaaaactcaaggactgacggttggcagatagcaacactagaaaattctcatctatgcccctctagaagagataacaagctggtgacttcttctaggattgctgagaagtatggcaagtttatagttgcaaatccctcatggaaattagcacacatgaaggcaaccgtacaagaagagatgtttgctgatgttaacatctccaagctgaagagagccaaatccattacgatgaagaaagctataaatgcagctaagtggcagtatcaaaagttgtataattatcagctggagctacttagaagtaaccctggaagcactgttgtggtggatagagaggtagatatggatccacctgttttcaaaaggatctacatatgcttagatgcatgtaagaaaggcttcctagctgggtgcagaaaagtgataggacttgatggctgcttcttcaagggagcaaaaaatggagagctcctttgtgccataggaaaggatgccaacaatcagatgtatccaattgcatgggcagtggtgcacaaggcgaacaaggaagaatggcactggttctgtggattgttgtgcagtgacttgcaagttggtgatggatctggctgggtgttcatatcaaaccaacagaaggaaattattaatgctatggataaatgggctccacaagctgaacacaggatctgtgctaggcacatatatgctaacttgaagagacacttctatgacaatgaacaccagaagttttggaagtgtgccaaggctccgtgcataacgttgttcgacttggcaatggcagagctggtacaacttacaactcctgcagtacaaaccatcttgaataaccatccgcagcattggagccgagcgtggttcaggtcaggctctaactgtgacttagttgacaacagtatgtgtgagtccttcaataaatggattctagaggctaggttctttccaataataacaatgcttgaaacaattagaaggaaagtaatggttaggatccatgatcagagaactatatcaggtagatggaccacatcagtttgcccaaacattctgaaaaaaatgaatgtatatatcaccgagtcagctttttgtcatgcaacatgtaatggaggtgatagctttgaagtaaaacaccatgacaataggttcacagtacacctagacaagaaggagtgttcttgtagatattggcagctgtcaggattaccatgccctcatgcaatatcatgcattttcttcaagactaagactaattcactggatgagtacattgctgagtgttattcagtgaaagagtttaagaaaatctatagtcaatgcctggaaccagtagagggcatgagcagctggccagaagatgacaaagagccacttaatgctcctgggtatatcaagatgccaggagagaccagaagagaatccaatgaaccattaaaagccaccaaactgtcaaggattggctcaatcatcagatgcagcaagtgcaagcaaattggccacaacaaatccacttgtaataagcatcatggaggaggctctagcacaccagattctctccaagttgtaaatccagctgataatttaatgctctcaaacacacaacaaagctctaaacaaagcaggaaaagaaagtcacgtacagctgctaacaccaattctgcaagtcagtcaaggaaaacagtgtcttcaaagcaaaaggcactagtggaattgcatgcccattctcagggttctacaagtgcaacaattaaggtcacttctgggcaagcttttgtcaatgtttcaactcaagaatcagcaaagttcaagccaaagaagcttacacctgttgccagacttaatggcatattgatgcagtcaagaaaaccatctgggagttttggctccagctgttccagcatcaacaattttctgaagtcctctgcaggaacgacaaaaatgaaaatgaagatgaataatctggtgaaggaaaaatgggcaattggggagtttgtatgccatttatcagagggcattgattctggaagctatgttgcagctccagggtcaacaaaggacctctccaacaaccagaagaagaatacncaagagtga

SEQ ID NO: 89881 - DNA, 242 bp, Oryza sativa
  Clone ID: PAT_MRT4530_8859C.1
atggcttttcgtaatagtgtgggcattgaggaggaaaaggcaccagatatacggaatgcacgtgttctcgtctcgcggagtaccgaaataatacatcaacgcaacacagatattgcggctgcgagcaacacgtttggacgattacatgagaaaactcctcatgtcacgccgcggaagcgggagccatcgcgacacgcattgccaccgcctctctcatgggactctgctcttccaaagcttga

SEQ ID NO: 89882 - DNA, 1167 bp, Oryza sativa
  Clone ID: PAT_MRT4530_885C.1
atggcgccgccgcggccctcgccggcggcgaggctgctgagggagtacgggtgggacctgttgctcggatcgattgccgcgttctacgccgtcatggtgccctacaccaaggtggaagagagcttcaacgtgcaggccatgcatgacattctctaccacaactatcatattgagaagtatgatcatttagaatttcctggtgttgtccctcggtcatttatagttcggatagtgttgggtagtattatcctgatgactttgagacttctccgagttcaggtaaaaaggaagtttggtcatcatgctgaagcattctatctgatactaactgctacccagtttcacttattgttctactcaaccaggccccttccgaatgtcttagctttagcttttgttaacttgacatactatttctggttcaagggaaaccatcgacgcacattacaggccctgattgtcgcagcagttatttttaggtgtgacatgattttgcttcttggtacaataggacttgcacttttgctggtcggtgctcttcttgacagaaggatagtgccatacatacttccagtcttctcatttgttgtgctttattcaaagcttccacataaggagcttcgcttcattatggcttcgattcccatgcttaatgtgtctgcttcactagcagcaagcagaatatataataacagaaagaaaactgggtggaagttactttatgttctcatgattggtggctttctttccagtctaggatactctggtgtaactttcatggcatcctacaataattatcctggtggatatgctctaaaggctctacatgaagcagattctgtaatgaaggacaaaattgttcacattgatgccttcactgcaatgagtggagtttcacgtttctgtgaaagtgaatatccttggagatattctaaggaggaaaaaatttccatcgaggaatatcaggaaagaaatttcacatatctgctgaatgaacaccgccatatcagtggctacaagtgcttgtttgccgtggatggattctccagagcgaaaattcaacctcgaatcccactactctcactggtgaaagagccaaaagtgtttgcacatgggaatacgagagaccctgatattctttcgctgaattggcccggttgcccttga

SEQ ID NO: 89883 - DNA, 306 bp, Oryza sativa
  Clone ID: PAT_MRT4530_88600C.1
ggaacgctgagtgcacttattttatggtactatcactacactcttcaaactgagtttgaggaactgcagcttggaaggacctgcactgatggagtggaataccccaacgaggctatcttgatcttagctggaatcagttaaggggttcaataccatctgggcgaccagcgagcacacataaccacgatagatctttcccacaatcttgtacatggatcacttactggaagtccgtctggccttgcgaatctacaacgactgtctttggacactaacagtttgtgctgcactgctccatcatatgtc

SEQ ID NO: 89884 - DNA, 534 bp, Oryza sativa
  unsure (1)..(534): unsure at all n locations
  Clone ID: PAT_MRT4530_88601C.1
ctctagcagcnaccagattccctctccaagnttgtaaatccagctgataatttagtgctctcaaacaccaacaaagctctaaacaaagcaggaaaagaaagtcacgtacagctgctaacaccaattctgcaagtcagtcaaggaaaacagtgtcttcaaagcaaaaggcactagtggaattgcatgcccattctcagggttctacaagtgcaacaattaaggtcacttctgggcaagcttttgtcaatgtttcaactcaagaatcagcaaagttcaagccaaagaagcttacacctggtctactgctgcttatgcctccatgggaatctgacaaactgtgatgtaatgttagatcaagttatctgttattaaacttgtgtgtgatgtaacgccagacaattaggccatctattagacttatctgtgatgtaatgcaagactttatggcctgtcattgtagttgccagacttaatggcatattgatgcagtcaagaaaaccatctgggagttttggctccagctattccagcatc

SEQ ID NO: 89885 - DNA, 365 bp, Oryza sativa
  Clone ID: PAT_MRT4530_88602C.1
ggcacaatatctgtcatacattattgctccatctcgctttccgcaagaagaccgctcgctgcggggaaaacactaaaagaagacctatatcgatcacagcacgtcggaagtactccaacacgtacgtacggtactgcactagatcgtcaaacctctctagaagagggaaaccggtccatctatttgagagcgctttacacctagggctgatcagatcagccatgaccttgggttgccagcttgccaatcattaatggaaaatgacctttaaccagagcgccgcctgcaattcccaatccatcgctgatgactatctctagtagaatgcctaaggggttgcaacactgtgtagttctgccggatcg

SEQ ID NO: 89886 - DNA, 495 bp, Oryza sativa
  Clone ID: PAT_MRT4530_88603C.1
ttcgtgagttcgttcgccttcgccgccgccgacgccgccgatccccacccatcccgcgagcggagcggaggagggggggcgccgccgttcgtcctgctgcttccgccgcatcctgcgtcttcataacggaaattcaagacaggtggcaagacaaaatccaattggacataatggacaatatattagtggtatgcaagtccacattagctgacgatgaatcagctagtgaggtatcttcagggagtgacagtgacagtgattgcattcttggagatgattgcccatcagatgatgatgaagaggctgcacagatacacaagcgttttaaagaactgaaggataagttaaagacaggaaaagtagataagttggatgatgttgtttttgaagctggtgctgaacaagatggtaatgacaccccatcttttgatagcgatgatgaagagtcggtagaagaggttgcaagcgatgaaagggttctgctgaaaactcatc

SEQ ID NO: 89887 - DNA, 1275 bp, Oryza sativa
  Clone ID: PAT_MRT4530_88604C.1
atgagtcggcggcaggagatttgccgcaacttccagcgcggaagttgcaagtacggagcgcagtgcaggtatttgcatgcctcccctcaccagcaacagcagcagcagcaggcgaagcccaacccgtttggatttggcaccggaagcaggcagcagcagcagccgtcatttggctcacagttccagcagcagcaacagcagcagcagaagcccaatccttttggttttggggtacaaggtgccaatgcccagtcacgtaatgctcctggtcctgcgaagccttttcaaaataagtgggtaagggacccctcggccccgacgaagcaaacagaggcggtgcagccaccgcaggcgcaggctgcccacacctcctgtgaagaccctcagtcatgcagacaacaaatttctgaggattttaagaacgaggctcctatttggaagcttacttgttatgctcatctcagaaatggcccttgcaatattaagggagacattagcttcgaggaactaagagctaaagcctatgaggaaggaaagcaagggcattctctgcaatcaatagttgagggagaaagaaatctacaaaacgcaaagttaatggagtttactaatctgctcaatagtgcacgtccatcacaaactccaagctttcctactatgagttccttccctgaagtgaaaaacaactcatcattcggggcttctcaaaccaatggaccacctgtgttcagtagtttcagtcaaattggagcagcaactaatattggacctgggccaggtgattgtgttactaatctactccctccgtttcacaatttctcaaatgaagtttggagtttcgagtatgttgctgaaagttgtgcatttactagcatattcgtagctgtgtatcatggtcgtattttggaaaccaggggttcaggtcaaccatttgggagctttcaagccccacgttttcccagttcgaagtctcctgcttcctctgtccagcacagagacattgataggcaatcacaagagttgcttaatgggatggtaactcctcctagtgtgatgtttgaggaatctgttgggaacaacaaaaatgaaaatcaggatgatagcatctggttgaaggaaaaatgggcaattggggaggtgtgggatactttcctcttggtcattttcgaagttctgtttgctagaaatgtttgctcatttacaacttttgttcctgctatgcttcatgacgatacaaaggaattatacaacaaacaagagaatttgcaagagtga

SEQ ID NO: 89888 - DNA, 1242 bp, Oryza sativa
  Clone ID: PAT_MRT4530_88605C.1
atggatcacctctcctgcgttgtggagcacttcccatacgcatatatattcctgaaggagttgtattgtcacccctccgcggatgtcttcgatccaagcatcattggttattgcctcaagaaccgacctgtttttccttttggagtgcttgaagagggcggcggggttcctatccatggttttttcgggcttgtccactcataccagagccaacgtagcctcagcgatcgtgagaacttctccaaacaagctggttctttaattcttgtctacaagaacatacaggaggcaattagtcgtctccagacgacgacgaagagcaggatcctggtggtcggcggcacggggtacatcggccggcatgtcgttgccgcgagcgcgcggctgggtcatcccaccaccgccctcgtcagggacctcgccccctccgaccccgccaaggcgcagctgctccacaccttccgcgacgccggcgtcaccctcctccacggcgacctccacgaccacgccagcctgctgcgcgccgtccgcgacgccgacgtcgtcatctccgcggtgcgcgcgacccaggtccccgaccagaccaggctcatcgacgccatcaaggaggccggcggcggccgcgtccggaggttcatcccctccgagttcggcatggacccggggcgcggcgccagcgcggcggtggagccggtcaggtccatgtacggcagcaaggtgggcatccggcgcgccgtggaggcggcgggcatcccgcacacgtacgtggcgtgcaactacttcgccggattcgcgctgccgtcgatcgggcagttcatgccaaaggcggcacccgtggatagcgtggtgatcctcggggaggggcacaccaaggtggtgttcgtggaggagggggacatcggcacgtacacggtgctggcggcggtggatccccgggcggagaacaagacgctgcacatacggccgccggcgaacaccatgtcgcacgacgagctggtgagcatgtgggagaagaagacggggaagaagctggagagagtgtacgtgcccgaggacgccgtgctcaccaaaatcaaagagttagagtacccgaagaacgttttggtgtcgatcgcgcacgcggcctactgtagaggggagatgagctcgccgctggatgatccgcaggacgtggaggccactcagctctacccggaaatccaatatacaaccgttgacgaatatctcaacaccctcctctaa

SEQ ID NO: 89889 - DNA, 201 bp, Oryza sativa
  Clone ID: PAT_MRT4530_88606C.1
atggacgcgggaagggtagatctaacgcggcggcgggaagaggcccgacgaggaaaggaggtggagctcaccaccatctcgccgtcctctgacgtcactggagaagagatgtggtgcttgagctcgagcattgtctacacgacggctatggtgtgcgccaatccgtgcttcatgggcattgcctcctctttcagggattaa

SEQ ID NO: 89890 - DNA, 248 bp, Oryza sativa
  Clone ID: PAT_MRT4530_88607C.1
ggagaatttgatgcgagtttgttgtgaatttgtgatggtaggtggtgagctgtgtaaatgaatggggggaagaggaggagaaggataggctgtttgaattcgtttctttttgttttgtttttggagagtagaagtagatggagctgaggaattaggaagaactagaacctgcagaagcaaaaagcttgatggctttgttttgttagtgttcagtgtatgcctgttgaataaagatccaagattacctt

SEQ ID NO: 89891 - DNA, 275 bp, Oryza sativa
  Clone ID: PAT_MRT4530_88608C.1
cccacgcgttcgacgacgcctgggtggtcacgcgcgtggccctgttcaagaccgtgatgagtgttaacctgttcagggaccgtgtattcgatgcggtcgtcactgctcacaacgccattctaagaacagtggactctgatcaactgctctatctgtttgattcaactcctgctttcaatgaaacgattgtactttcattccatttatatgatgatcagagtcaagattatattgggagatatgatgttaaggctatgagatgcattacgcatggc

SEQ ID NO: 89892 - DNA, 1293 bp, Oryza sativa
  Clone ID: PAT_MRT4530_88609C.1
atggctgatcggcctcggcggccatgggcggcggcggacgacaacgtcctgtacgaggtcgtccgccgcatcccgtgcgagatcgaccgccgccgcatgagtcgcatctgccactcctggcgcgtggcgctccggagggtcagggccccggcgccgcctccgccactcccgtggctcctcctcccgagagccggcggccggccgcctaccttctcctgcgccctcagcggcttccgcacccaccccttcctcgtcccgcgcggcgcgcaccgcgcgcgctacttcggctcgtacgacggggaatgggtcttcctcgccgttgatggacaaggaaatcaagctcaagagtacccgcgtcgagtggctcaagaccatgtcctcgtcaacctcaacaactttcattacttcaacctccccaatcggatccgcttcggagcagtggtagtgtatccgtcaccacagcattggtactaccgcaagatggccatcgtcgccgccaccctctcctgcaagccaactgaacagggatgcatcgtcgccggcttcctcgaatactttcccttccccggccacgcagagcagcatgttgcgttctggcgcatcggcgatgatatggtcttaccgccgttctgggaagggatgaatcgagaggcggattggtttaggccaccaatggaggacctcatattctatggtggagccttccttttcctcgaccgaggggaacacatccttgcgtgtgaagaacgaccggtcttccaagaatatggcgtggaactcgtcccggtaggcatgttcttccagccgcgcgtccacgacaagaacgagactgtccttgctcgctacctcgtggagtcccgcaagaatctgctcatggtcgtcaagttgaccagtgggcgtcagcacttgccgacgtcggcgttccgggtgttccggaagaaaaagctcaacaatggcgaagaggacgagccgctctacaatggcatgtttcagtttcagtactactggagcgagctggacaagctcgaaggccggatgctgttcgtcggacgaggctgctccagatcctacgaggcgggcgacaggtactccggcatggaggagggcgtctacttcttggatgaccggagcttccgcaagccgatcatggcgttcgatcgtgatgcagacgaactgccgtaccgctgcagcgacaacggcaaatggtcgaaatcaccaagtccccatgtggaccgctgcttcccggcgcgaggcccgtcgatcgactcgcctccggtttggattctcccttga

SEQ ID NO: 89893 - DNA, 4862 bp, Oryza sativa
  Clone ID: PAT_MRT4530_8860C.1
cggagtccacggatggaaggagtcctactcagatagaactgagtcgttactatatcgtgtggagtccgatatctccgagttctagttggagatcgactgacccgcggtataaaagggaccccccgggaggaccaaagggatcgaatctcaccgccaacacaaccaccacagcctacgaaattctcgtaccaatgtaccccaataccctctatatccggtctacgggtatcccccgtcgatagtggcgcgccaggtagggggctttggtactcaagtgtcatcaagcttcgtcgacaacagcgtcaaccccagcatcaaccaaggagtttctacttcaacaatgctggtatggacttaggtcggcaaactcgtcttcctggtttacaccacggtgtcgatctcgactggtccatcaatgaccggaagcgagaacaccgtggttacaaccctggacggctccatgtcgaagaatcctccctcagaagtggagaacggaacatcgacgacatccaagcccgagaaggatcctaatgcggccaaatcttgtccttccgacgagaatcacgagccgacaaggacaatttctgaggcaacaaggtcctggtgtcctatccacaaaaccaggaaacacaccttgcaggcttgctgggtttttctcgacgtacaagctgagatctgtgcctgcaaagagcgtggaattcaatgtacttctccaacccgtgatgtctattgtcatattcacaagacaaagaatcacgacctctcaagctgcaaggttcttctcagtgccatgaggacgtcacctcctaaggtccagcagtcacaaatctctcttagagatgcggacaaggaacaaggagcgacagttatctcagatcgattcgttggggtaatcgacgtcgatccccacgagctgtcggttctacacttgctcgaagaccaggcctcatcatcgacgagtacaccatgtgatgtgttcgttatcgataggaccagcatgtctgcgcgcgctaacgcataagcggaggatcaagtggttacaccggcccagcacatcagggccatcaacgcaatactgagggaaaccccttatgatcccgttctgaacgatgatctcgcacagtggacagaacgactacgggaatcagtggctaacctcagtaacgcgttcgagggggccgccgccggagtaccgacagaacacccgccaattggcggtgccaatggcgaactacctgggcagcgggcatcacctcgtcaagccacccctccacctcgcggcaccagcgatctccgtgaccatttgaatggccgccgagaagcacgacgcgcacgagacaacgaaaaccgttcccgacatctcgtctcttcacgacgtcgggagaacgaagagcgaggaggacacccgagcaagaaccaagaccgtgataaccgccacgaacgcgatgatcgcgaacagcggatgccgggcgagactgatcaaggacgccaccaaaatgatgacgacgacggagatcgccgtcgggacaacaacggtgggcgacgacaggattctcgagaacctagacgtcatcctcgtattcgtaccccggaaccaagtgactcatcgtcatcctcatcatcctcgtgatcagacagacatccacggaggacatacgatcaccgacaacccaccgcccccggcggcgggtgtagagctttcagtcgtgctctatgtgatgttcgatagcctgagagatttcgaccgagagcaatatagaagtacgatgggagcactgaccctgaggagttccttcaggtctattccatagtattctacgctgccggagcagacgacaacgtgttggtgaattatttgcaagcggcgttgaaaggatctgcacgtttatggctagtccacctcccaccatactagatttcttcatgggcagatctgtggcagcagatcatagccaacttccaaggaacatacaagcgccacgcgatcgaagacgacctacacgcgttgacacaaaatctgggtgaatcattgagggactacgttcggcgctttaatgggtgcagaaatatgatccccgagatcatcgacgcttctgtgatccgcgcttttaagactggtgtcagagatcgctacaccacccaggagttggcgacgagacagatcacaactgctcgaaagctattcgagattgtcgatcgatgcgctcacgcggacgacgcactgagacgcaagaacgataagccgaagaagggaggagagaagaaaccagccaaggacgcacctgagtcaagcaagaagaagagtcgcaagagtgggaaaaggaaagctcaaacagaagtcctcgtagcagaatacgcggaaccacccaagcacccagacccacaaagggacgatacgaagaaaatatggtgccttatacacaaatcggacaagcactccctagaagcttgtttcgttttcaaaaagccactcgcaaaacaattggcattggagaagggtaagcgagtacgtgtagtcgagaaagccactgaagcagctactcaggactcggactcagcatacccagattcccatattcatgtttcgcatatcttcggaggttccacggcatactcctcgaagcaagagtacaaaaaagtggagcgcgaagtttgttcgacatggcagggggctacccccaagatgaagtggtctgagcagaagatcgaattctctgaagcagaccaccccaagactgttgttgacgcccactgatcaacccttccatggaattactcctcagtcatcgtctaagccattgggcaagattacgttgcctgtaactttcggccaagcaaacaacttccgaacagaacagatcactggatttgatacagcatacaatgccatcatcaggagaactgcactcgcgaagttcatggccggttctcactacacgtaccaagtgctcaagatgcccgggccgaagggaacaatcactattcagggtaacgcaaagctcgcggggcagtgcgacaggcggagcctcgacatggtcgagcacacgcccaacccacccgccacagctgagccacccaagaaagtgagtaaaacaaacaagacgccaaagccagacgacgcaatcaagatcgttccactctccagtgccatccccgacaagaccgaactcgcgctcatcaccttcctctacgacaatgcagacgtgttcgcttggcagccgttcgacatgcccggggtccccagggaggtgattgagcacaaactcatggtgcgacccgatgccaagccaataaaacaaaaatgcggagatttgcaccagaccggaaacaacccatacgagaagagctcgacaagcttctcaaagctggcttcatcagagaggttctccgtccagagtggctagccaatccagtcatggtgcgcaaggccaacgggaagtggaggatgtgtgttgacttcaccgacctcaacaaggcgagcccaaaggatcacttccatcttcctcgaatagatcagcatggcgaaagaggacgaggagaagacaacattcatcacgccgtttggtgtattctgttactttaagatgccgtttggactgataaccgtaggaaatactttccaatgcacggtccagggagcacttaacgatcagcttgggaacaatgtcgagacctacgtcgatgacattgttgtcaagaccaacacaagcgactcattgattgacgatctccgggaaacgttcgacaacttccgacgatatcgcctcatgcttaatccagagaaatgcacgttcggagtaccatcgggcaagctgctcgggttcctcgtctctggaagagggatagaagaaaatcccgagaagatcaaggcaatcgagaacatgaagtcgcccacaaaactcaaggaagtccagaagctaactggatgcatggcggcactaagcacgttcgtcgctaggatgggagagcgtggacaacctttcttcgctctgctgaagaaacaagataaatttgtatggacacaggaagccgaagaggcgttcatcgcactcaagcgctacctgtcaaatccccctatacttgttgctccccaacctaatgaagaattattcctctatatcgctgccacgccatattctgtgagtaccatcattgttgtcgagagagaaggtgcaaaggccagtttattaagtcagcgaagctctccacaatgcaaagacaagatacacacagatccaaaagctgctttacgcagtaatcatgacatcaagaaagctacgccactacttccaagcccacagggtcatagttgttttctccatccctcttagtgaagtcgtgagaaataaagacattgtcggccgcatcgcgaaatgggtagtcgagctaagctagtttgatgtccactttgtaccacgaacaaccatcaagtcccaggtcctcgccaatttcgtagctgactggactatgcctgaaaacaggctggacagtcaaaccgacagcgaaacatggacaatggcgttcgacggtgcactctacagccaaggagcaggggaagggttcatcttgacatcaccttcgggagaccagttcaagcatgcaattcacctcaacttgaaggcgaccaacaacacagccgagtacgaaggactactcgctgggataagagcagcagccgcactaggagtcaagcgactaatcgtgaaaggagattccgaactagtcgtaaaccaggtgcacaaagactacaagtgctctagccccgagttatccaagtaccttgcaggagaaaaggtttgacgggatcgaagttcgacacgtatatcgcaaggacaacatcgaactcgacgacctagcacggc

SEQ ID NO: 89894 - DNA, 1500 bp, Oryza sativa
  Clone ID: PAT_MRT4530_88610C.1
atgggcacagagctctcgttgacttcatccgttcccctgctcctcctcttgctgtttcctttgctctgtttcctctgcctgcgccatggcagcaccaggaagcagcctcgcgccgacggcctcaaggcctacccgatcgtcggcatactgccacacttcgtcaggaaccagcaccgcctcctcgagtggtcggccggcgtcgtggcgcgctgccccacgcacaccatgtccttcaacttcaagggcttcggcctcatcgccggcgccatcaccggcaacccggccaacgtcgaacacatcgtcaagaccaacttccagaactactccaagggggagtacgtggtgtcagtcatggaggacttcctcggccacggcatcttcaactccgacggcgaccagtggctgtggcagcggaaggccgccagctacgagttcaacaagcgctcgctgaggaacttcgtggtcgacaccgtcaggtccgaggtcgtcgataggctgctgccgctgctcacgcgggcggagcgcgacggccggacgctggacgagcaggacgtgctcgagcgcttcgcgttcgacaacatctgctgcgtcgccttcgacgaggacccggcgtgcctcgccgaggacagcatggcctcgccccagagcgcgaagttcatgcgcgcgttcagtgacgcgcagaatgccgtgatggaccggttcatgtcgccggtcaagtcgcggtggcgcttcaagaggctgttcaacatggagcccgagaggcagatgcgggaggcgctcgccacgatccacggcttcgccgagcggatcgtccgggagcgcagggagagaggggaggccgggctggcgcgcagtgacgacttcctgtcgcgcttcgccgcgagcggcgagcacagcgacgagagcctccgtgacgtggtgaccaacttcctcatcgccgggcgcgacacgacgtcgtcggcgctgacctggttcttctggctggtgtccggccggccggacgtggaggacaggatcgcgcgcgagatccgcgcggtgcgcgcgtcgagcgggagcacggacgcggcggcgttcagctttgacgagctgcgcgagatgcactacctgcacgcggccatcacggaggcgatgcggctgtacccgcccgtggccatggactcgcactgctgccagaacgacgacgtcttgccggacggcacgttcgtcggcaaaggatggcaggtcacctacagcgcgtacgccatggcgcgcttggaggagttatggggcgcggactgcgaggagttcaggccggagcggtggctcgacgaggacggcgtgttccggccggagagcccgttcaagtacccggtgttccacggcgggccgaggatgtgcctcggcaaggagatggcatacatacagatgaagtccatcgcggcgtgcgtgttcgagaggttcagcttcaggttgagttctggatattatccattttttcgcctgatagtagcaaaattataa

SEQ ID NO: 89895 - DNA, 221 bp, Oryza sativa
  Clone ID: PAT_MRT4530_88611C.1
atgacgtggacgcccagctggacggtcaaagcatcggtctccggtcgtcgggtcaaacagcggtcagcaacggtgacgtcggcgaccagataaggcaggcgagccccactcgtgcggattccggtatttatatatccatcatcaacggctcagattggtcgtcttcggccactaggggcgacatcctggccgtccaaaatgatccacctgtgtggcattga

SEQ ID NO: 89896 - DNA, 4937 bp, Oryza sativa
  unsure (1)..(4937): unsure at all n locations
  Clone ID: PAT_MRT4530_88612C.1
tcagacgagcacttcgaccttcttcttccccttgaggaagacctccctgtcaacaagctcacgcatgtatccatcaaactccacaggaactccaccattgagcctcttcatctccagaaaccacttgctatctctcgcccagagttcctcaaacgcatctaggtaatgcacactgctgtactttgccttcagcgcatccaacaagaccacgttgatgccctctcccgcaacatacacctgccttcctcctccattgagtctctcctcaatccttcttctgaggttcccatcattgccaccaacatgaacagagtcaaaatctacttgcatccttgatatgataccatcaacaatgtccatcaagcttggcgccgtgcgtattgctccctgcggtggacggaggacatgctcagcttcgccctcgcacacattgtaccaataattccctggctccacgtccccaaatttcctaacgatcaggggatccctcgacttggagaacttggtgggcgcaaccctgctgtcctcgatgatgcggactccaagctgaccctgtgctccccacttgtcccaatcctcccagaaccgcttgtgttcaacgatcccgaccacggattgcaggtgctcaatgtcaatatagaaggcgaggcgcttgccctcctcgggcatgcccccggcgtaggcggcggcgagacagacgctgagatcgaggacgagggtgcggttgaggtagcgggcctcggcgatggagcagaggagactacgaagataatgcggcatgggcttgcaccggtcgccgccgccaaggtaagagaggtacttgcccgcggcgaactgggagcgcgagagcgcgggtgggggcggcggggcggtggcgttggtcccgccgcggcggggcttgcgggcgagggggccggagtggtattccccgatggaggtaacggagtaggcgcaggtgacggggtcgcgggcgacggagaagcggcggtagtccttgtagttggcggaggcggtggatcgggcgcgccaggccatgtcgcaggaggacgacggcgggtcgccggggacggggcggccgaagcggttgaagtggacgtcggggaaggcgtcgatggcgcggcgcatcatgaggtggaagagctgcgggtcggcgcagtcgagcgtggaggtggtgtcgcagctggcctgatcctgctgctccaggtgggacgtggtgggcgtcaaggcggcggtgggaggggagagggagatggggaggttgcggagggtgaggaagaggaaggcgacgagcaagagggcggcggcggcgtgggcggaggaggtgatgagggcgccccgccccagcaacggccggctcgggtccatccggcgacggcgacggccgacggcgatgagatctggtggctgattgtgtaataaagccccgtcgcacctcgactccccaaacatggcgctcgccctcgtctcgccaatggcggctctctcactccactccgggaggatctcagcggcggctatcggcggcggcctccgctctcgcagggcatccccgatgggcgccgccgccaccccgttcctccggagctccttcgtctcctcctcctccacgtcatccgcctccgcctcccccgccgcgctctctgccgcggtctcggcgtcgctgaccttcacctctgcctcctcatttgaaactgaatccctcctcttcttcactcgcatcggcaggccgccttccatccgcagggtcgcccagagcacgagccctggccgtccctcgccgccggcgtaccggaggctgaaccgctcgagcacgcacgccgcgatggacttcatctgtatgtatgccatctccttgccgaggcacatcctcggcccgccgtggaacaccgggtacttgaacgggctctccggccggaacgcgcccgcctcgtccagccaccgctccggcctgaactcctcgcagtccgcgccccagatctcctccacgcgccccatggcgtacgcgctgtaggtcacctgccaccctttccccacgaacgtgccgtccggcaggacgtcgtcctcctggcagctgtgcgtgtccagggccacgggcgggtacagccgcatcgcctccgtgatggccgcgtgcaggtagtgcatgtcgcgcagctcgtcggggctgaacgccgcgccgcttggcccccgctgctcgacgcgcgccgcaccgcgcggatctcgcgcacgatcttgtcctccacgtcgggccggccggacaccagccagaagaaccaggtcagcgccgacgacgtcgagtcgcgcccggcgatgaggaagttggtcaccacgtcgcggaggctctcgtcgctgtgctcaccgcccgcggcgaagcgcgacaggaagtcatcgctgcgcgccagcccggcctcccctctcgccctgcgctcccgtacgatccggtcggcgtaaccgtgaatcgtggtgagcgcatctcgcatccgcctctccgggtccaagttgaacagcctcttgacgcgccatagcgacttcaccggcgacatgaaccgggcaatgatggcgttctgggcgtcgctgcacgcgcgtatgaactccgcgctctgggacgagaccatgctgtcctcggcgaggcacgccgggtcctcgtggaacaccacatggcagatgttgtcgaacgcgaagcgctcgagcacatcctgcacgtccagcgtccggccgtcgcgccgcgcccactccagcagcggcagcagcctctcgacgacctcgaaccggacggtgtccaccacgaagctcctcagcgagcgctggttgaactcgtagcttgcggccttccgctgccacagccactgctcgccgtcggagttgaagatgccgtggccaagcaagtcctcgagcaaggacacggagagctcgcctttcgggtagttactaaagttagtctttagtatgtgctcgacgttggccacgttggctgtgatgacgccgcctgtgaggccaagcgccttgaacgtcatggtgtgcgtggggctgcgcttcattacgtcggtcgaccactcgagaaacctgtgcctgttcttggcgaagtgcggcagcgtgccgactacagggtaggacttgagtccattggaacctgcaggctgcttcttggtatcttgcatcggtaaaccgcccttcatgcgcaacgtcaaccagagcacgaaccccgggtgtccctcgccaccggcataccggagactgaacctctcaagcacagatgctacaatggacttcatctgtatgtaggccatctccttgccgaggcacatcctcggccccgcgtggaaaaccgggtacttgaacgggctctccggccggaacgcgccggcctcgtctagccaccgctctggcctgaactcctcacagtccgcgccccagatgtcctccacccgtgccatcgcgtacgcgctgtaggacacaaaccaccctttccccacgaacgtgccgtccggcaggaagtcgtcctccttgcagctgtgcgagtccatggccacgggtgggtacagccgcatggactcggtgatggcggcatggaggtattgcatgtcacgcagctcgtccaagttgaacgtcgggtcgcctgtgccaccggaagcgcgccgcactgcgtggatctcgcgtacgatcttgtcctccacgtcgggccggccggacagtagccagaagaaccaggtcaacgccgtcgacgtcgtgtcgcgcccggcgatgaggaagttggtcaccacgtcacggaggctctcgtcgctgtgatcgccgctcgcggcgaagcgcgacaggaagtcgtcactgcgcgccagcccggcctcccctctctccctgcgctcccggacgatccgctcggcgaagccgtggatcgtggcgagcgcctcccgcatctgcctctcgggctccatgttgaacagcctcttgaagcgccaccgcgacttgaccggcgacatgaaccggtccatcacggcattctgcgcgtcactgaacgcgcgcatgaacttcgcgctctggggcgaggccatgctgtcctcgcgcgaggcacgccgggtcctcgtcgaaggcgacatggcagatgttgtcgaacgcgaagcgctccagcacgtcctgcacgtccagcgtccggccgtcgcgctccgcccgctccagcagcggcagcagcctctcgacgacctcggacctgacggtgtccaccacgaagttcctcagcgagcgcttgttgaactcgtagctggcggccttccgctgccactgccactgctcgccgtcggagttgaagatgccatggccgaggaagtcgacgagcatggacacggcgagctcgcccttggggtagttaccaaagttagtcttcagcgtatactcgacattggccgggttggcggtgatgacgccgccggtgaggccgagcgccttgaacgacaaggtgtgcgtggggctccgcttcatgatttcggttataaactcaaggaagcgatccttgttcttggcgaagtgcggcagtgtgccgacgacggggtaggacttgagcccatgggcgtgaggctgcttcttggggtcgtggcgcgtcaccgccatcgtcgccgtcaccaccgtcgtcatccaagcgccttgaacgtcatggtgtgcgtggggctgcgcttcattacgtcggtcgaccactcgagaaacctgtgcctgttcttggcgaagtgcggcagcgtgccgactacagggtaggacttgagtccattggaacctgcaggctgcttcttggtatcctggtacaggtagagaaagtataggagaggcaggaaagggaggaggaggatgaataaaggggttgaggtcgaggagaatttcatggcgcgagagagtgagtgtgtgagaggagcttttggcatgaggcttgtgacaagcagncaagtggtctgtatcag

SEQ ID NO: 89897 - DNA, 321 bp, Oryza sativa
  Clone ID: PAT_MRT4530_88613C.1
atggccttagatggaattaccatcagaatggcaattttcagggcaacatattggctccgatcttgggcacaactacaaatgtgtgatgaagatggagagcttctgaaggttgcatgtcaggtatttgcttgggtgaaagaaaagagaccgagtgtaaggaatgcatggatgattgaagaagttgattggggaccaaaccaagaccttctccaagtattttttcatctcaccatgtcacttttggtctatagaagacaagagataaagttctacacgggattagccttctcggcgaggtcaaccgggttttggcatggttga

SEQ ID NO: 89898 - DNA, 1158 bp, Oryza sativa
  Clone ID: PAT_MRT4530_88614C.1
gttctaacggccttcaatgaggattggtaacacaattcagcataacagagagtaaaactcgcaaaatgcaccaatgctgtacgcgttcatatggatatgagaattgtaaacacggtgaagagaaacctaaacattccagagcacataaattaaggttcgctaattcaaaatttggattttttaagacataagttgaggttgaggataagacagcagttcttgctgccataatgcaaaattctttctcagctctttgctgcaaaatttctaagcttctatcttctcagcaggtgcctcgatcacgagcccctttggcctagccaagaggtccgtgtactcctggaacggcgtcttgataaacctggtctctctccagaagtcaggagtcaggaacccataggtcttcatgagacaatcgaaggtggccttgacgaagttgccgagggtcttggtggagccgcgcgacgaggtgaagacgtcctcgatgccggcgaactggagcaccttcttgggcacgtgcgccgccacgatcccggaccccctgggcgccggcaccatgcgcacggtgacggagccgcacttgccggtgaccttgcacggcacggtgtgcggcttcccgatcttgttcccccagtaccccctcctcacgggcacgacggagagcttggcgaggatgatggcgccgcggatcgccgttgcgacctccttggcgcacttgacgccgagcccgacgtggccgtcgccgtcgccgacgacgacgaacgccttgaaccgcgtgcgctgcccggcgcgcgtctgcttctgcaccggcgtgatcttcatcacctcgtccttgaggcccggcacgagctgctccacgatctggtgctccttgacggggagggagtggaggtagatctcctcgatcttgtggatcttgttctccttcacgaggcgccccagcttggtcacgggcacccacttctcctcctcctggcgggggccgcgccgcccgccgcgcccgcccctgccgcggtcgccgcgcccgccgcggccgaacccgcgcccgaacccgccgcgctcgccgcccctctcgccgccgccgccgcgctcggccatgcttgcttgtgctcggatcgccggggcgtggagatgcggcggcgtgaagggtgggagagc

SEQ ID NO: 89899 - DNA, 513 bp, Oryza sativa
  Clone ID: PAT_MRT4530_88615C.1
ccggggcaaattacccacttacatgacttcctttcaaacggatcatcatcatcatcaggctaaattaaccacttacatagttaattacatcggacaaaacactggaccactcatttaaaatcaacctgtcaatctgaactttgaaaaacccccccaaacccaacttaataaacatcggatggataaactatgtattatatatatcattcacgatcttgatcgatcgatcgatctcgctataaaaaaatattggtccttcatcgaccgagggatcatatcatcatcatcatcagtataaacaaataattattaatttgatcatgaggaaaccctaaatggtttgaaatgggcaacggatttaatgaggccctgaatgaacccgccggcggcaaggagggaaacaacaaggcaggcaaggctgaccacgttcatccacgtccacgtggggaaaaatcgccgaaccttggcctgagacatgtacttttggacggggaattaaacggggagcggcca

SEQ ID NO: 89900 - DNA, 840 bp, Oryza sativa
  Clone ID: PAT_MRT4530_88616C.1
atggagtccttgtccaacgtcctcgcgcggcagccgatgatggaggttttccaggaggtggagttcgcggcgctgaggatctggaagagcggctcctacctccacgccgacgaggacgggaggtccgtctacgtcggcagcctcccccgcgacggcggcggtgactcgaggcactgcgcggtgtgggccgtcgagccgccgatcgacgccgcggcgccgctgccgcagtacgtgcgcctccgcggcgcctacggccgctacctcggggcccccgactcctacggctccccgctccccttcctctcggtggacgccgcgcagcgcgaccgcgacagggtggagatggacgccatcatatggcagcccgtcgcgtgctccggctccgacgtcgtcggcggtcgcgatgcccgcggcgtcgtcctcctgcgcgacagggagatgactagatgtggtgctcgggttgatggcggcggaagcgattggcgatccaatcggtgggttggacacttcaggcaggtgccggcgggattcggcgcgggccggctccggtcattggaggcggtgacggtctattcacagagcagcaaattggtatcggaatccaattgcagaggatgtgcagtttgtgtagctggtggaggtcgacacggttgcggagttgtttatcaactcggagtcgcgatggacgtggagatcagcacggaggctaggtggctggaattgacagcaagaataactgtgcatcagggcttctgcgttatgattcgaaggcaaggctgcggtggtgcaggagtggggcaaaggaagagcgagcgctatggtgataatttcttcgggtga

SEQ ID NO: 89901 - DNA, 162 bp, Oryza sativa
  Clone ID: PAT_MRT4530_88617C.1
acggcgacgtgttcggtgatattcacattttcagagtgagtgctcgtgtgttgtgcgatcagtgcgcgcagtttgatcgatccgtgtggatctttgaaagaaagatgtctgctgcggggaaactgtggtgcgatccagattagtgcggagggttgggggatc

SEQ ID NO: 89902 - DNA, 203 bp, Oryza sativa
  Clone ID: PAT_MRT4530_88618C.1
cctggggctaggcatccaatgatatcatcactctcttacaaattattgtcccccaaaaaacattaaaaaaaatatatgtaacaatatataattaacaagtgagaggtgaggaaatatataaaaaattatcatatgatggaagagtaatttttttccagttttttacttgccctacttctcctactattttcccaccatcttac

SEQ ID NO: 89903 - DNA, 641 bp, Oryza sativa
  unsure (1)..(641): unsure at all n locations
  Clone ID: PAT_MRT4530_88619C.1
gcacganncgctcgtggagatcatcgacgacgacgacgacgtcgccgccgcctccacccctcccgccctccacaagcgctcccatgcggtcgccgccgccgcccccgattccaacgacgccttgtccatttccccttcagacccgaatcggcggtagctcgggggggggggcatattgctcgacgacacgcctaccccttcgaagcggggggcggcgcccggtagctcccgaccggtgccccttcgaggtggtagattctctccgggggttcatgggcgactcccttcggaaaccacgccattggtgggggatacggcccgatctggggcttccggggcccggggggagcaccgtagagcttcccggtttcccgggaccccggggttcgggggttgccctggctccggggggggttgaaaaacattgtgtccggaaacccttgacttttaaatttccacaccctggggggtgggatccggcgcccggcagggggtaagctgtttctattagagggggcggggggagtattttgtcggggtgttctgtgggacaagtaagggggtgtgttgctgagtcgacaatgggtggtactatttatcacccgggggtgttttttcggcccggagggggggacgttttt

SEQ ID NO: 89904 - DNA, 423 bp, Oryza sativa
  Clone ID: PAT_MRT4530_8861C.1
gcggtcgcgatctaaaactaggctttttttttttttttggttgaacttactttgattggactaaatattatggagcacattatattattccaccccttattaaatttgggtggtcttaattttgacctcttaattctttttggttttaaaccattttcaatttggccaaacgaccaaaacacacttaagggttttccttgaccaaacccttcacaaaaaaacttatggcacaaggcttttggttaactggaagggcaaacattctggatttgatcattccaaaacggcttattaaccaagcccacacctttattcacaagaaaagggatggtcttttcaacattggaagttagacctgggatggctgttaaaaggcgtattggttttgggattcaaaaaaggacccagttgcctggtccaaaa

SEQ ID NO: 89905 - DNA, 387 bp, Oryza sativa
  Clone ID: PAT_MRT4530_88620C.1
actcacttggaaggggtatttagattccttttttttaagggtaattggatccatgccactggaactttgggagaacaaaaaagggaaaattagaactttgccattataattttacaaaatttaagatatgccatcctgacccacatggaattgactcatggggattctacatgtcattgagataccgatgacatattttaaattttacaaaattataatggtttatttaaaaaggccactcctattaaaaatatggggtactcccgtcccctttttcgactactttcccacaccgttttcgttcccgtcccacatgtgggtcccatttccccattttttccttcatccggggcgaccgcaaaaggacaacggcagcagcggctcccg

SEQ ID NO: 89906 - DNA, 739 bp, Oryza sativa
  Clone ID: PAT_MRT4530_88621C.1
tgtggtcctctgtttgcttgtgtaaagcttcttatccggcctagccgttcttattatagtggtcctaattgttctagatgtgttgtattttggtattatgaaagggcacaccagaacaagccccagcctgaagagactattgtttacaataagcgctgtcatcgagggcatgtttcgatgcatgctttcaaggaatggcctcatcctttgacatagcttatgcgatttgatggttatagccgttctaattattttacgatttttcggcgctatagttagttgtttgctttcacgttacttggtgttaatgttgataaatctattaataccgaagacagtcctaatgtcttccatataaatggtgttgttcaccatcgtattggttctttgttgccacaacatgaccgtacacctcaatttgctcagctttacatttgtgatacttcaaatgaaataaacaagagaaaatcttcatctttggtcctgcaatgctaatggtgataatgctgatcgtactatagttcaccaacttacgagtacatatgcttaattaatacttccaatccattggtgcagacgtttcgtatggcatgtgacagattattttcacctaagctacctagtgtggctatctgtcttatcgaaacaatttcttctcctagtgatcgttattcacttccaactacaaatgagcttgctacttttattgtgggcgagcttactatgcaactttatcaga

SEQ ID NO: 89907 - DNA, 1011 bp, Oryza sativa
  Clone ID: PAT_MRT4530_88622C.1
atgggggatgttctcatgcactacgtgacgagatcgaattctcagaatgccatatgggaagatgcctatcaggtcataacacaagatccagaggactgtctgactctgatccatcgatcttacatatacaatgtaaacatggctattgaaagtgccaaagtattgcatagacagatagactccataatggtcaccactgacgggctcaaaccctcaactttgaccggttcagcccctggtcagagattagcggtcactgatgactttgagtcacctgtgacgggtgaaggcctgtcagaagtaagagccacctcaaacggcccccaactaaaacctgtcacaggaatcagaatcatcaatcacagtagcaacaattggaacaacatgaacatcacaagacaaaattcatgggtgaaagaggacttgctggcaatggatctgagctcgttgtgtgtgactggaggcaagccaacgcatgtggatgcaggcggcgacgacttgggcgcagaggagacaaagaaacggcggtcgacgtacgtggatggaggcggtggatctggcgtcaagaagggtgaaggaggcggcgaccagcaaccttggagcccgggggttccagatccggtggtccccaaccacctagagaccggatcaggcgcccaccacctcgaggcgatcaccggcgaccaccaccgatcctcagggacgaagaagcggtcgccggagctcagggacgaagaagatccgtcggagatctcccgcatccagcaggggtgggaggggaggtgcggttgcgcgggggctgccgacggcgggaggggaggcggccgaggcccgacgacggcagcggtctccaccgcccgtgggtcggccgccattgacacctccagccgcgcctccgcctccgcccatgcaagccggccgccagcgccaccgacgatggagccagcgatggaggccgcctctttaggtcccaacaccgtccgcccctccgccggcgctcggggtgagtga

SEQ ID NO: 89908 - DNA, 462 bp, Oryza sativa
  Clone ID: PAT_MRT4530_88623C.1
gttgtggggtttttttttttttttttttttttttttttttttttttttttttgttttcaaaacatttcattattcattatttgttttgatcactatctcgttgcatgcaacacaacaaccgtgtgatcctactatcttttaagcaagccaggtaagcctaatactggcccgcggcgaatttttttaactgctggggctcaacccggcacattgacggcagctgccccccgtactgccttgcccttgtcaacctcacccgggtcatccccggctgctgctgcttctcccccaaatagccctccttcaacaacccctcgccgtaatacccctgctccaacaacaaccccttgccgccgtagtactccgacgaccacgacgaccagccttgctccaggggcatcggcatgctctcctcgtaactcctcaccatccggcggatggcggcgcaacggcacttgcggc

SEQ ID NO: 89909 - DNA, 306 bp, Oryza sativa
  Clone ID: PAT_MRT4530_88624C.1
atgggggggcatcatcctccgtccaatataaaaaaagggagtggccgccaccccatctcgggcctcactcccctcgggggagggggggcacgtgacattggggggcagcctcctccgactagtctttgggaaggagtggccgccaccccacctcgggcctcactcccctcgggggagggctacttggcattggggggcagcctcctccgactagtctttgggaaggagtggccgccaccccacctcgggcctcactcccctcgggggagggccacgtggtattggggggcagcctcctccgactag

SEQ ID NO: 89910 - DNA, 1441 bp, Oryza sativa
  Clone ID: PAT_MRT4530_88625C.1
tttaaaacctgccccttgcattctgttgatgagcgcccgcggcccagcctagttagcaatggcggctgatcaccttgtcgtggccatgcttctcctgctggctttgtcgccgccggccgttgctgacgacacggcggtgctcggccggaaaggcggcgtcgtggaagggcaggcggcggggccggggaggtacgccgtgatattggacgccggcagcaccggcacacgggtgcacgtcttcaggttcgacaacaagctggacctcctcaaggtcggcgacaacatcgagctcttcgctaaggtggatcctgggctgagctcctacgctggacgtcctcaggatgccgcaaactccatattgcctctgcttgacaaggccaacaccgttgttcctgccagacttatgaacaaaactccccttaaacttggggcaactgccggactcagacttattggagatgaaaaggcgaaccagattcttgaagcggttagggatgtagtccacaccaagagcaaatatcagtataacccgaactggatcaacgttcttgagggatcccaggaagggtcatacatatgggttgctctgaattatctcctggacttctcgcgagcagatccttgagagaaaggatggaccatttagcaactggcatgctgcgcggattcagtggtaacttcacctacaacggcaagcagtacgatgcaacggccgcaccacaaggtgcagactaccacaagtgcagagaagaagtagtgaagttactgaaggtgaatgcgccctgcgaaaccaagaactgcagcttcaatggcgtctggaacggtggtggcggagcagggcaggatgacctctacgttgcgtccgccttctactacatagcctcccatgttgggttcatcaacagcgatgcacccagtgcgaagtcaacccctgcaacgtttaaggctgttgcagaaaaggtttgtaaactgagtgtcaaagaagcaaaagtagaataccccaacgttcgtgatcatgcctacttatgcatggatcttatctacgaatactccttgctcgttgacggcttcggtctacatccaagtaaggagataacgctggtagacaaggtgaagcatggggagtactacattgacgcggcttggccattgggtacagctattgaagctgtgtcacccaaaaaacggcttcgagaaatatacaaatgatcttgagatcgatgtactagctactttggaagttaggatatcgattgttgtatgatcgatgtctgtgtgctggttattacagtataactgagtatcatgatatataagtagtatgttaataatgggtcgagctatcaatagatcgaggcggccatgctctttgtcctagactccaagttgtgtatgtttgaataaatagcagctttctatttataattacgtactatcacag

SEQ ID NO: 89911 - DNA, 411 bp, Oryza sativa
  Clone ID: PAT_MRT4530_88626C.1
tcatcttgtcattgagcctgttagggcatggccgacacggggacgtggaccgcacccccagccctccacattagaccatccgccaaaaagcgtcgaggagcacgcgcccgtagggaggcgtggaccttctgcacgtgcgcgcacctctgcgcggggagttgatgcgaggcaaagctttgggtctgggcaccgcgttgtgtaggtcgattcctcgcgttgttggagcggtcccccctctctcaatccacaggggtacaagcttgtcgctcttgcccctctcgccattcgctcggccggtttgcccctctctttctgcctcggttcacctcgccgtgcgacgcaccgtcggtcatcgtcggccatcattcgcaggcattcccgtaggtcgcggcgagcctcgtcgagccccat

SEQ ID NO: 89912 - DNA, 387 bp, Oryza sativa
  Clone ID: PAT_MRT4530_88627C.1
ggttacggataaggtataccttctatcctacgacttatggaatataccgataaggtataccttcgcgtacacggatcgtttccatgtacaccgttaggaatccatccaaaattatggaaaatatctctacgagtcaggcgatttccaaagtcctactcggaaatctttcttggggtcaagatgatccacggtataaaagggtcccccagagaggggtgcaaggcatcgaatttcatcaccaacacacccaccatagtttgcgaaaccggagtacgcggagccaaatcgctggaagatctcgtcgaactcatcgactacgatctcaccctcgttccaacgtaccccaatactcaactcatccggtccacgagtatcactcatcgacac

SEQ ID NO: 89913 - DNA, 639 bp, Oryza sativa
  Clone ID: PAT_MRT4530_88628C.1
atggcggctttgctcggagctctccgcggcaagctgcacggctgcgcgctgcgcctgcgcggcgattcgctgcccgtcgtcgtctccgtcctcgccgtggctgctctgtgcgccaccgctctctcgagggtcgtcgtgttcttcctgccgctcgtggcgtccacctcgctctgctgcgcggcggcgtacctgctcgtcgccgcctcggagccggaccaggagggcgccgccggcgcagcggcggcgaaggaggtggtgctcgtccgcggcgacagggcggaggtcggggtgctgcaggtgttcgacggcgcgaacgccaccgtgtacgccgccgccgccgacgccgacgccatgcgtgtgggctgcttcctgcactacaggccccgcggcgcgggcggcggcggcgggtggacgaagcgcggggtcgacgaggacggcgaggaggtggtgttcgccggcaggctggccgccgtctgcggcggcgacggcgacgatgtcgaggaggagctcgcggcgctgcgggtggaccggctggcggagggcgtgtgggacagctacttcggcgggtggtcgaggtggaactacgtgacggatgggcactactacgacgaagacgccaccatttttctggactcttaa

SEQ ID NO: 89914 - DNA, 431 bp, Oryza sativa
  Clone ID: PAT_MRT4530_88629C.1
gcacgaggattgagggttcacatctggaaggaaccgacccgagcgggtgcaagatcgcggcgtcgatgcggcgagtaaatcgcgcccatcgagggcctaggagctcgcttcggcgctgttgcccacggcggcctagcgacggagcagacgagcagcgttgcgacggtgctgcaccgcgggactgcttccatggcaggggtaataaggagatgaagttcgacggagcgatgccggagatgtggctgactggggagattcggaatcgcggcggtgatgaggcagaacaggcccagcccggcgcgcacgcgaggtgttcgacggatgggctatgtgggcttgacgcagcgctatcgcgcgctccaggaagacatggacgccgctctcatacagctcgcatccatcgactggtcggcgaggtgcagcaagacgag

SEQ ID NO: 89915 - DNA, 6268 bp, Oryza sativa
  Clone ID: PAT_MRT4530_8862C.1
tacataaaatttacataattgatcaatgtttcaggagtttgctaactcgcgaccatcgccgtctgcactcttgaatgcgcccggccgcaagacttgcgtaatcgtgtatggtccttcccacttgggtgagagcttgttgcacccagcttggctttgaacccgtcggaggacgtaatcgctgatcgaaagtgtgcgtgctctgatgtgcttctcatgatatcgacgaagggcctactagtagccggctcctctgacggcaactctttctcgatgttcctcgagtagattcacatcgtcgcttcgctgctcctcctgctcctcgtcggagtacttctgtactcgtgtgctctgatgtcgtagctccgtggggagcatagcctctgagccatacacgaggtagaagggtgtctccttattggatgttgtcggtgtggtacgcacggcccatagaagggtcttgatcccttgtagcactatgccgtttgcccttttgacttgcccattgctctaggggtgagaaatcgaggcaaagcaaatcttgactcccaatccaatgcagtaatcctggaagtcggcactgatgaactgggagccgttatttgttatgatgcggtgaggcaatccgtatctgtagaatatccctttcataaacttgatggcattatcggccttgatttcccccgtgggcgtcgcttcaatccacttggtgaacttgtcgatggccacgaacaggaacttgtagccgccctgtcctcgtgggaatggtccgagtatatcgagcccccaacacgagaacggccaagtaagagggatagtctggagcacttgcgatggcagtcttgtgtgtttgcatgtcgcaggcgtttttgagcgcggtcggccaaaaaaaacccttgtcaaaaagcttttcctaccaacgtccgtccgccggcgtgtgacccgcagatcccttcatgtatgtccaggaggagatgtttgccgtcgtcagacgagatgcatttgagaagtactccgtttggcgcctttttgtacagatcattgccgatcatacaaatagatcttggcttgtcgggttatcttctcagcttctgcatcgtcctcgggcaactcgtcgctactctggaactcggtgagtggggtccgccagtcgtctgtggtctcgatatcggcaacgacgtgttccgcttctgtagcccccgagctgatgtcggggacaaccgtgctaccgtcgtcgcttgcctctttcaccgatggctttgtcaggatgtccagaaaagtgccaggttcgagtggctctcgtcgggacgcgcgccgtgctaggtcgtctagttcgatgttgttcttacggtatacgtgtcggaccttgatcccatcaaacctcttctctagcttcctgacttctgcgaggtacttagataactcggggctagagcacttgtagtctttgtgcacctggttcgcgactagttctgaatcccctttcacgattagtcgcttgactccaagtgtggctgttgcttttatcccagcaagtagtccttcgtactcggctgtgttgttggtcgccctgaagttgaggtgaattgcatgcttgaactgatctctcgatggtgatgtcaagatgaaccctgccccttctccttggctgttgagtgcgccgttgaacgccattgtccatgtctcgctgtccgtttgactgtctgacctgttctcaggcatagtccagtcgattacaacatcagtgaggacctgggacttaatagctgttcgtggcacaaagtggacatcaaactggcttagctcgactacccatttcgcaatgcggccgacaacgtctttgtttctcacgacttctccaagggggaaggaggaaacaactatgactatgtgggcttgaaagtagtggcgtagctttcttgatgtcataattactgcataaagcagcttttgatctgtgggtatcttgtcttcgcatcgtggagagcttcgctgacgtagtaaaccttctctctcttgacaacaatgacattactcacagaatatggcgtggcagcgatatagaggaataattcttcattaggttggggagcaacaagtacagagggatttgacaggtagcgcttgagcgcgatgaacgcatcttcggcttcctgtgtccacacaaatttgtcttgtttcttcagcaggacaaagaaaggttgtcctcgctctcccatcctagcgacgaacctgctcagtgccgccatgcatccagttagcttctggatttccttgagtcttgtggacgacttcatgttctcgatcgccttgatcttctcgggatttgcttcgatccctctttcggagacgaggaatccgaggagcttgcccgatggtactccgaatgtgcacttctctgggttgagcatgaggcgatatcgtcggaggttgtcgaacgtttcccggaggtcatcgatcaatgagtcgcttgtctttgtcttgacaacaatgtcgtcgacgtaggcctcgacattgtgtccgagctggtcattaagtgccccttgaaccgtgcgctggaaagtgtttcctgcggttattagtccaaacggcatcttgacatagcagaatacacagaacggcgtgatgaatgctgtcttctcctcgtcctcttttgccatgctgatctggtggtagccggagtaagcgtcaagaaagcttaacaactcacagctggccgttaagtccaccaattggtctattcgaggaagagggaagtgatccttgggacacgccttgttgagatcggtgaagtcgacacacatcctccacttcttgttggctttgcgcaccatgactgggttggctaaccactctgggtggagaacttatctgatgaagccagctttgagaagcttgtcgagttcttctcatatggcttgtttccgatccggtgcaaatcaccgcagtttttgttttactggtttggcatcgggtcgcaccatgagtttgtgctcgatcacctccctagggactcccggcatgtcggacggctgctaagcaaacacgtctgcattgtcgcagaggaaggtgatgagcgcgagttcggtcttgtcggggttggcactggagagcgggacgatcttgattgcaccgtctggcttcggcgtcttgttggttttgctcactttcttgggcggctcagctatggcaggtgggttgggagtgtgctcgaccatgtcgaggctccgcttgtcgcactgcaccgccagtttcgcgtttccctgaatagtgattgttcccttcggtctaggcatcttgagcacttgatacgcgtagtgagatacggccatgaacttcacaagtgcagtcctcccgatgatggcattatatgctgtgtcaaacttagcgaaatcaaaggtaaggtgatctgttcggaagttgtttacttggccgaaagtcatgggtagcgtgatcttgcccaatggcttggacgacgactcaggagtgattccatgaaagggttgatcagtgggtgtcaactcgcttcgtgggatccccatcgcgtccaaggtgctagcgaagagtaagttgatggagctgccgccatcgatgagaacccgtgcgaccttgatatcctgaatagtgggctcaaccacgatcggatatcgccgccgtggaacctccgaagatgtgcgaaacatggagaccggagtctgggtacgctgagtctgagtcctgagtagtcgcttcggcggccttctcgactacacgtactcgcttgcatttctccaacgccagttgcttcgtgagtgcctttttaagatgaaataagtctccagagagtgcttgtccgtcttgtatatagggcaccatattttcttcgtgtcgtcgccttgtgggtttgggtgcttgggcgggtcaacgtgttctgctatgagaacctccgtttgcgctttctgtttcccactcctgcgaatctttttcttgcttgactcaggcgtgtccttggctggtttcttctcctctcctgtcttcgacttgtcgttcttgcgtctcagagcgtcgtccgcgtgagcgcatcaattgacaatctcgaataacttgcaagcagttgtgatatgccttgttgccaattcctgggttgtgtagcgatctcggacgctagacttgaaaacgcggattacagaagcatcggtgatctcggggatcgtatttctgcactcattaaatggttgaatatagtccctcaatgattcgcccggattttgcgttagcgcgtgtaggtcgtccttgatcgcgtggcgcttgtatgttccttggaagttagcgacgaactgttgccacagatctgcccacgaagaaattgagtagggcgggaggtgaaccagccatgaacgtgcagatcccttcaacgcaaccggcaaataattcgtcaatgcgttgtcgtctgctccggcagcatagagtactgtagaatagacctgaagaaattcttcagggtcggtgcttccatcgtatttctctattgctcccggtcgaaacttctcaggccatcgaacatctcacaaagtacgagtgaaagccttgcacccaccgccaggggcagtaggttgtcggcgatcatatgctcatcgtggatgtctgtccgatgatgaagatgacgaagatgacaatgatgatgatgagtcacttggttccggggcgcgatttcgagtatgatgctcgggttcttgcaagcctcatcgtcgcccatagttgttgtcccggcgtcgatctccgtcgtcgtcattgtcacggcgtcgacctcaactggtatcgcgcggcacccgctggtggcgatcatcacggtctcggttctcgctcggacgtcctccttgttcttcgttctcgcgatgtcgtgaagagacacgatgttgggaacggttttcgttatcttgagtgagtcgcgcttctcggcggccatttagatggtcacggagatcactggtgccgcgaggtggaggggtagcttgacgaggtggcgtccactgatcaggctgttccccattagcgccgccggtcggcggttgttctggtggtgccctggcggcggcctctgcgaacgcgttattgaagttagccactgattcccgtagtcattctgcccattgatcaagatcagtgttcaggacgggatcgaaagggctttcgttcaatatcgcattgagggttctgatatgttgggccggtgtcggtgtaaccgattgatccgccgttcccgtgtggccgcctccagatgtgttggttccatcgatagcatacacgtcgcgtggtgtacttgtcgatgatgaggcctggacttcgagcagatgtaggacagatggctcatagggatcgatatcgattaccctgacgaatcgatctgatgtagtcgccgcaccttgttccttgtcctcatctctaggagagattcgtgaccgctggaccttagggggtgacgtcttaatggcgctgagaaggaccttgcagctggagaggtcgtgagtctttgccttgtggatgggacaatagacatcatgagttggagaagtacgttgaattccacgctctttgcaggcacggacttcagcttgtacgttgaggaaaaccgaacaagcttgcaaggtgtgcttgctagtcctgtggatgggacaccaagcttttgtcgccccggaagttgtccttgtcggctcgtacttcttgtgggaaggataagatttgaccacattaggatctttctcaggcttggatgttgtcgattctccgttctccacttctgcgggaggatcttttgacatggagtcaaccggggtcgtaaccacgccgttctcgctcccgataattgctgggccagtcgagattggcattgtggtgtagagcgggaagacgatttcgccgacttgagtccacaccagcatcgtcgaagttgaagctccttggttgatgccagtgttgacgctatcgtcgagaaggcttgaaatcataatagtagaaccttgagcaccaagttcccctacctgatgcgccactgtcgacaagggatacccgtagaccggatataaagggtattggggtccgttggtacgaggattccgtaggctatggtgggtgtattggcggtgatattcgatgtcttaggtcctacccagggggtcccttatataccgcgggtcagttgatctccaagtaggactcagagatatcgtacccctcacgatacagtaaagacccagtcttgtctgagtagaactccttccatccgtagatacca

SEQ ID NO: 89916 - DNA, 3717 bp, Oryza sativa
  Clone ID: PAT_MRT4530_88630C.1
atggcgttttacttgatggctggaggtggtgtcaaagctgcgggcgtggtggcatcggaggtgaaggtgtgcgacgtcgtcgtttgggagcttctctccgttgacccgttgaactacgacgacacccccatcgaagggatcaggaagatcctcgaggagttgtccggggagaggatcatgcggtcgtccaagattcccacggccaaatggtcaattggagcgggagccaagcggcagcgcacggtgacggcggcagcacggcgcacggcaactggggcgacgcagcacggtgacggtggcagggttggagcacggtggcgagcagagcaggggaggggatcctggggcggcacattcaccgacatctacgcagaggtgcccgggaggagggaaggctacgtgatgaaacttctctccgtcgacccgtcgaactacgacgacgcccccatcgaagggatcaggaggatcctccaggagttctccggggagaggatcccgcggtcgtccaagattcccacgggcaagattgattggattcggatgggcaccacggtggccacgaatgcgcttcttgagaggaagggtgaaaggatcgcgctgtgtgtcacccggggattcagggatttgcttcagattggtaaccaggctcggccgaacatattcgatctcaaggtgtcaaagccgtcgaatttgtatgaggaggtggttgaggttgatgagagggttgaacttgttggtggtggtgatggtgagagggatgatggtttatctgttaaagggatctcaggggaattggtcagggtggcgaagccggttgatgtagaagcattgaagcctttgttgaaaggtttgcttgacaaaggaataagatgtttggcagtggttttaatgcactcatatacttatcctcagcatgagcttctcattgagaaattatctcttgagatgggattcaagcatgtatcgttgtcttcatcattgacgccgatggtccgtgctgtgcctcgtggcttgacagccagtgtggatgcttatctcacaccagtcatcaaagagtacctatcaggattcatgtccaggtttgaagggggaggtgagcaggtgaatgtgctgtttatgcagtcagatggtggtctggcaccagagaggagattctccgggcacaaagcagtgttgtcaggtcctgcaggtggtgtggttggctactctcagaccttgtttcaacttgagacatcaaaaccgctgattggatttgacatgggtggtacatccacagatgttagccgctacgatggaagctatgaacaagttctggagacccaaattgctggggcaataatacaagctccccagcttgacataaacacggtggctgctggtggtggatcgaagcttaagtttcagtttggagctttcaaggttgggccagattctgttggagcacatcctggtcctgtatgctatagaaaaggtggtgagctggcaataactgatgccaatttgattctgggaactgttattcctgagtacttcccatccatatttggtcctaacgaagatttaccccttgattatgacgctactaaaaaggcatttgagattcttgctgttgagataaactctcaccgaaagagtcaggatccatcagcaaaggacatgacggttgaggagattgccctcggttttgttaatgttgcaaatgaggcgatgtgccgacctataaggcagttgaccgaaatgaaggggcatgacactaagaaccatgctctcgcatgctttggtggtgctggtcctcaacatgcatgtgctatggcaagatcccttggcatgtctgagttacttattcatcgctactgtggcatattgagtgcatatggaatgggccttgctgatgttattgaagatttgcaagagccatactctgctatttataatgttgattctgctgcagaggcatctcgaagagtagatcttttagttaagcaggtgaaagaaaagttaatagagcagggttttggagaggacagcatcaggacacattcatacttgaacttgaggtacgagggaaccgatacagcaatcatggttaaacaaccagagagggaatctggaagtgattatgctgatgagtttgtgaaactgtttcagcaagaaggtcaccatgcagagatcggtggtatcaccccaggaagcatgcctcctttctcaaaaagcatctgggaggaaggtgctgccatcaaagcatttaaacttgttgagagaggtgttttccaagaggaaggaataattcacttgctacagtcaccgtcctatgatgaacttacaaaccataagattccaggaacacgtaagatccaagataatctttctgacctccatgctcaggtggcagcaaaccagcggggaataacacttatcaaagaactgataaatcagtatggtttgatcactgttcaatcttatatgaatcatgtccaaaacaatgctgaagaagctgttagagaaatgcttaaggtagttgcatcgagagttgaaaaggagaatgggtcttgtgtcatcgaagatgaagattacatggatgatggttctgtgctccatttgaagctcacccttgattcaagtaaaggcgaagcaacctttgactttgaaggcaccagtcctgaggtgtatggtaactggaatgctcctgaagcagtaacagcggctgctgtgatatactgcttacggtgcttggtcgacgttgatatacctctaaatcaaggctgcctagcccctgtgaagatcctaattcctaaaggctctttcctttctccaagtgacaaagctgcagtggttggtggtaatgtattgacctctcagagagtgacggacgtagtcctaatggctttccaagcatgcgcctgctcccagggttgcatgaacaatttgacatttggagacgacaccttcggttactatgagaccattggaggcggttcaggagctggggcgagttgggatggtacaagtggtgttcagtgtcacatgacaaacacaaggatgactgacccagagatctttgagcagcgataccctgttcttttacatagatttagcatcagggagaacagtggaggttctggtttccacagaggtggtgatggccttgtgagagagattgaattttgccagcctgttgttgtgagcattctttcagagagaagggtgcatgctcccaggggactgaagggaggaagaaatggggcccgtggtgcaaactatctcgtcaagaaagatggtcgtagagtttaccttggagggaagaacactgttatggttaatgctgctcatctagtggactccactgaggttgttgggcattttcagaaggttcttacctccagaggcaagttctgtatctgctcaatcgccattggtgtgattgttgaggttataatcatgttcccaatccagcaccggtttccggtggacgccggcatgttcccggagcacaagtacgagatcgtgaggatcattcaacgggagggccacctgtgcgggatgaccggcaacggcatgaacgcgctggcgctgaagaaggccgacatcggcacagccaacatcgcacgcgctagcactgaagaaggccgacatcgcgctcacggagcccggctgagaggcacacatgctgagagcgcatgtgcaatctgtgatgagaccaaagcgtgtggattctga

SEQ ID NO: 89917 - DNA, 791 bp, Oryza sativa
  Clone ID: PAT_MRT4530_88631C.1
atgtgggccccacatgtcagcctcacttctctttccttccctctccattctctcttctcttccctttcccctctctctctccttctgggcagcggacggtgtgtgtgggcggcggagcaggcgagctccggcggctgcggcgagcgtggtcggtgctaccccccgaccggagcgccgtggacagcgcggcgtaggcgcgcgggtgaccgaagaagcgcgtgcgccgggcagtcggagtcggcgagcgccgcgacgtcggaatcggccggcggcgggaggatgttggagagcgcgaggatgtgggacctcgccgtctcccaccaggacggggtagggtcagatgcggacactgccgacgagttcgagggggcgaggctgccccggtggcgagttgggggtgccagcggagaagacagagacgggggcgacggcatcctccgcttgcgccctggggccccgcgcgccgccgacaccctcctcgatgccgccgccgctagagctagcgccgtgtagacccgagcgccgccgccgccctgctcccgcgtcggcgtgccaccgcggcccaaggccatgctgcccgtcgtcttcgtcaacggcgaccaaaccgtcgaccttgcaaccgtcaccgtcccacctccttctcctctcgcctgccggcttcgctcgtcgccggtggggcgcatctctgtgacgggcgccgactcccgcgcccacaccttctccttgtcctcctccgcccactcgatccagttgcctccgtcctccatcaccgccgccgccgacgcccccat

SEQ ID NO: 89918 - DNA, 204 bp, Oryza sativa
  Clone ID: PAT_MRT4530_88632C.1
atgaacaagacaagcagccagatatatctgcttgagcttgacagcaagggcgagagggcgttgtcgtcaaccgtcagcgctgcttcttccccagggaatcaacgtgatccaacagaacctgcggtgaaggacggagcttttggtcttcaaaagctccttagtgggacggcaagcctagacaaccaagctctccgggtggtctag

SEQ ID NO: 89919 - DNA, 873 bp, Oryza sativa
  Clone ID: PAT_MRT4530_88633C.1
ctgagttcacctatatccaatgtgagatcaactgcagggggtctattcccctccatgggacagaatggtgaaggtccatatttaaaggggactaaagaactcagttttacgaaaggagagtctggtttaaaaaagggaactagacctgctggttatgattcactccctatgtatttcaacatgggttctgttgatacacctatgaaggagtaccgatcaagtttgttgaagactgaggttaacaaaaccactccttttcaagtaaaagattctgtcggaaagggggagtttgacttcggttcacgtgctgagaaacctttcatcttaagtggcacaggtgctggtcaaaatggtcactcaaagatatccgataatgctggttttcatgaggttcacatccagaaaacaaaagtacctcctaaagagaatgttctcagctttggtaagaaatcttcagttgatgaagcaccacctgggaaaggtgtgtcaaggtggagatccgatgagtctagtgaagacgaagatgataaaagaacaagtgggtatatggagagtggagcttcacttgctactcgaagacgagccagattttctagaagatgatatattccatctggtccaggtgttttgatcgcgcgcaggggacatcttgtcgaattcttttccagacataatacttacaccccaaatgtaactgcgatttgtttgaggaaaggtgcaacttacccaatgtcttgggggaaaaattgtggcaactatattgcaaaattttggtgtgccatggccgcaatgatgtattgtaactaaagtaaatcgatatgtgtgttgcatcaaaatagtttggcatttaaagctcacaagttctttattttt

SEQ ID NO: 89920 - DNA, 226 bp, Oryza sativa
  Clone ID: PAT_MRT4530_88634C.1
cacgtggtggtgtgtgtgctggcagtgaaacaaaatgaaggatgggggtgcctgccctgatgcattgcctgtgtggtggatggagtggatggcttggtgcgctggagtgccttgctggaatgttacagttggtgttgctggtgctgtgagtggtggtgtggcatggcatgcaatgaaagatgcttgcccccagttgggttggtggtggaaaaaaaaaaaaaaaaaa

SEQ ID NO: 89921 - DNA, 416 bp, Oryza sativa
  Clone ID: PAT_MRT4530_88635C.1
ttgcagaatgacagacgtggaccaaccccaaaatacaggggatcgaacacccacacacacacaggaaaaggcatacatacatgcactgccgcaaatggaacagcagggtcggtgcgtggctactacaagcgtacacatgggacgatggctggcaccatctcgatcgtgtcgttgagctcacttgccggggacgaagatggtggcgtatgcccaggcgttgttggcgacggggccggcgacgcggccgaaaaggttctcgatggggcccttgccggtgacgatggcctggacgaagaagccgaacatggagaacatggcgaggcgggcgttcttgagctccttcaccttgagctcggcgaaggtgtcaaggtcgtcggcgaggccgagcgggtcgaaagcgccgactgggtacacct

SEQ ID NO: 89922 - DNA, 541 bp, Oryza sativa
  Clone ID: PAT_MRT4530_88636C.1
gcacgagggagaaacaaaatcacgccgcccgccgggtgtcgaacacctggtgagcggggctgtgccgccgccgcagggcttctcggccggtgtgggtggcggggtgtggagaggaggtgctcgcgttgctgttgctgctgttggggagagtcgggagccgctggacgaggagtgccggacgtcgaacacctgcgagcgtcgccaaccgctagtcgcccctgtttcggccgcaccgcgccgcgcaccaccgaactccgccgtctcgccatctcgtgattccgagggaattgttgagtcgactgaggagcagggatagcaagactatgatccagaggttggcaatggacccaaggaagatccctatgcttatcttcaggaggatgctgatgatgacggtgctccgtaggtcttaattacggttgttgcttgtgtcaatggcgtggccgctacctaaattctgttgccttatctatttctgcttttgaatgtattccggaccgttcggtcctatgttctaagactatgcctgcgggcctatgat

SEQ ID NO: 89923 - DNA, 178 bp, Oryza sativa
  Clone ID: PAT_MRT4530_88637C.1
atggcggagcggagcttgcggcggcgaggtaagcgcacggtgttattgcgatggaatcgtgcgtccacttggtacggatggggattcggtgatttcaccgtcgcatcgcaaagacttagccagccacttctgtctttgcggtggacggtagggaggctgaaagtgccgcggatggacg

SEQ ID NO: 89924 - DNA, 1914 bp, Oryza sativa
  Clone ID: PAT_MRT4530_88638C.1
atggcgaacctccctgatgccgagttccggccggagctgtttcttccccacggcaccaacatcgaaatcccctggaatggccgctcgcctcgggccgacttcacctttcaagactggcattatcaagacagggttctcgggagggttttggtgaaagccaggtataagattgtcagtgatatgcctcgtaaactggttatgagtgacgccatggcttatgggggccaagatgaggaccttccaactatctgggaaatgattcccccaaaccctcatctcaacgagcataagcatcaaggcaactgggggaataatgcaaatcatgatatcaagcataaccataatgggctggaacatgagattgatcatatgagggagcaacaggatgaaaatgatatgttagtggaacctatccctggggaacagcaagactccatcacagctcttggtgacagtcctagcccagccaagagacaaaagacttcaaggattgataaccctgttgtcagagcacttcagttttcagttattgatgaggcttctcaaccagctccaatcacacccaagccaagaaaatccagaccaaaggtgccaatcacctctgcaaaccttaggagaagcccaagattcctgggccaagacaagatggacctggcctttgatgtgcccaaaaagaaatccaaagtgcagcccatcaagaaattcaagtttgaagccggcaaggggctcccccctcccattcctgttctaacagctgcagaagattgggttttttcaacctcatcccgacatgaaacctggaacctcacaaatatatatggcccatgtgcgggtgagttacgaaataattttgtttcctggttatataacctcgaagtggatttgaatcagaactggattttcatgggagactttaacttcatccgatcagttaaaaatagaaaccttcctggtggagatgtaaatgatattatgctttttaatgagatcattagcaatgtgggtctgactgaaatccccctcacaggtatggcttacacttggagtaatatgcaagatcaacctcttttacagcaactagactgggtgttcacctccactgcctggaacctagccttcccaaacacttcagctactgctctatcaaaatacatatctgaccatgctccatgtctaatcagcatagaaacctcagttcctagagccaacctcttcaggtttgaaaatttttgggtagatatgccaggttttcaagatcttgttcaacagtcatggaatactaatgtcagaagctctaatcagacagtaatcctgaatggaaaactaaaaaatctcaaaagaaagctgaaattttggagtaaaaggctatccaatttgcacactctaatcacaaattgcaatgaagttctggtgtttttggacagtatcgaggaacaaaggcctcttcttattcatgaatggaactttagatcaattctaaagaatcatatcttggttcttctgaaatacaaaaatgagttttggaggaaacgatatactgctaggtgggttaaatttggtgatgaaaatccctccttttttcaagcctctgctactgacagctacagaaggaataaaatttcccacctgaagttagacgacaacaggatagtcaccactcatgaagaaaaagctcaggcccagttcaatacctattttcagagaatgggcactgctgttttgtcagaaaatcatctcaacctgaatggcttgctacatacagacactgatctaaaccatttgacatccattccatctgaggaagaaatgaataatatcatcaagaacatgcctcttgatagagccccaggccctgacggattcaatggattgttcctaaagaagtgctggcacatcatctctgcagacttctaa

SEQ ID NO: 89925 - DNA, 572 bp, Oryza sativa
  unsure (1)..(572): unsure at all n locations
  Clone ID: PAT_MRT4530_88639C.1
ggggcttaataaaccctggggaacccccaacctgggtnacgcccnaagagaattcctccccattgtgcccggtnnagtgtgtgcttcatggattggtngtgagggttcccgcttcgcgcgcccgttcgcgaggccctcgacaaggtgtacccagcggcgccttcgacccgctcggcctcgccgacgaccctgacaccttcgccgagctcaaggtgaaggagctcaagaacggccgcctcgccatgttctccatgttcggcttcttcgtcaggccatcgtcaccggcaagggccccatcgagaacctcttcgaccacgtcgccgaccccgtcgccaacaacgcctgggcatacgccaccaacttcgtccccggcaagtgagcacaacgacacgatcgagatggtgccaaccaacgtaccatgtgtacacttgtagtagccacgcaccgaccctgcagttgcagttgcagcagtgcatgtatgtatgtaccttaattgtgtgtgtgtgtgtgatcgatcgaggagatttctagcttaattaatttctgtctgtcaaaaaaaaaaaaaaaaaaaa

SEQ ID NO: 89926 - DNA, 1431 bp, Oryza sativa
  Clone ID: PAT_MRT4530_8863C.1
atggccaagcacaagcaggacgagatggcctgccgcgccgccgcagcaggggcggacggcaacatcggcgaagatcgagggcacctgccgccgcatgagcgactctcttccacgccctgccgagaagcctcaccgccgtcggagcccacgcctattgctcccatggtggtgctcaaaatcacaattttctccatccatggtatgcgcgggaatctcccgccgctcgccgccgtcaccgccgccgccgcaaatggcgccgccgtcctcctcccactcccccacgcgaaacagctccacgcgcgcctgctcgtctccggccccgccccacccgaccacgacctccgcctccgcctcctcctcctccgctcctacgccgcgcggggcgacctcgccaccgccgcccgcctgctcgacgaggcgccgccgccctcgcccctcctccacaacgccctcatccgcgcccacgcccgccgcctcgacctccgcgccgcgctcgcgctcttcgcccgcatgcgccgctcccgctcctccgccgccaccgccaccgcgcccgacgcccacaccttcgcctgcgtcctccgcgcctgcgccgactgctcgcgccccgacgtcgccagggtcgtgaacgggatcgtggtgtgcgcggggatgtcctcgcatcctgtcgtcggaagcgcgctcgtcagcgcttacgcaaagcttgggccagtcggcgatgctcgccgcgtgttcgatggattgcctgagccggatttggttctctggaactgcatgatgtctgggtatgggtaccggggaatgtggaacgatggtcttgatctcttctccgcaatgaggaaagctggggagcgaccggatggggttggagctcacactgacatcagagtctcgtcttctctgatggatgcttattcaaaatgtggttttgctgatcttgcatatggagtgttcttccaaatgcctgataagaatttagttatgtacaatacagtcatatcaaaccttggttctcacgggtttgcaatgaaagctattgaagtccttgatgagatggtaagtgacaagctcaagcctgacagcgtaaccttctcagcattacttgctgcatgctgtcatgcaggtctcttggaggaagggtggaagttgtttaggagaatgagagatgagttcaacatggcggttaaaacagagcactatgtatatattgtgaggcttcttgcaacatttggtcagctcaaggaggcgtatggtcttatacaaacgatgccagcaccagcagattctgacaaggcttcctacagggtcatgctttcaaacctttatgcatcccaggagatgtggtgggatgctgaggaggtgagggaagagttgtggaatgaagatgtgcataaaaacacagggattagttgggttggcaatgcaaggaaataa

SEQ ID NO: 89927 - DNA, 735 bp, Oryza sativa
  unsure (1)..(735): unsure at all n locations
  Clone ID: PAT_MRT4530_88640C.1
gagccacgcgtcacggctgacgtgcggggaggcggtgtggttcaaggccggcgcgcagatcttctccgagggggggctcgactacctggggaaccccaacctggtgcacgcgcagagcatcctcgccatctgggcggtccaggtggtgctcatgggattcgtcgagggctaccgcgtcggcggcggcccgttcggcgagggcctcgacaaggtgtacccaggtggcgccttcgacccgctcgggcctcgccgacgaccctgacaccttcgccgagctcaaggtgcaaggagctcaagcaacggccgcctcgccatgttctccatgttcggcttcttcgtccaggccatcgtcaccggcaagggccccatcgagaacctcttcgaccacgtcgccgaccccgtcgccaacaacgcctgggcatacgccaccaacttcgtccccggcaagtgagcacaacgacacgatcgagatggtgccaaccaacgtaccatgtgtacacttgtagtagccacgcaccgaccctgcagttgcagttgcagcagtgcatgtatgtatgtaccttaattgtgtgtgtgtgtgtgatcgatcgaggagatttctagcttaattaatttctgtctgtcatcatctttgcttctttggatcgagatttaatgtaacccgcagccgcatccagggatgatcggattaatgatgtatcgtaattatagggtcctnaaaaaaaaaaaaaaaaa

SEQ ID NO: 89928 - DNA, 2172 bp, Oryza sativa
  Clone ID: PAT_MRT4530_88641C.1
atgccaacaagaaaaaaaggccttgcaagaaatgccaccactgagcatatcaatcccccaaatagccgaaaatcaagcagatcaactcaggctgcagctgctgaacataaagtcaatgatctgatcacttcttcctccaaaaagcagatcggtggaggccttctgaagaaaaatcgagctcttaggggtgggaaaaaattgaattctatttatgattctgctggtactggaaatgatgtcgcgggcgtgccaagtagcagtttcttcaatcacaagcaatctcatgaaaatgatgaagatcgttcatgtgattccatattttctcccagttttcacaatcagaaggaagatgttactgactgcttgagcgaaggcttagtacatgaagaagtcatacatgagcctgttcagaatgctgaatatgttaccaatagcatatcatgcaatacttttgatggtttgagcaaacactcttatgatattcatatgcaatcggcatgtggaagcacgctcgaaggtgatgaattcagtgaattgggcagcctttctcctgaagtgtctgctatatatcttgcaatgcagcactcaaagctagagtgtattgatgaacaaagccaagattctacctcaacagatgggtgtgctgatcctgatgaaactgtagagcttgattattttgatccgtatgccttcataaaagatttgcctgatttatctttggtggttcccaagtttcaacctgttcttcttccaaagcaaactcggagctgtcctagaactacccttgtccttgatctggatgagacactggtgcactctactcttgagccctgtgaagattctgacttcacattcccagttcattttaatctcagagagcacacaatctatgtgcgttgccgtccatatctgaaagagttcttggagacagtagcaagcatgtttgagatcatcattttcacagctagtcaaagtatttatgcagaacagctacttaatattcttgatcctaaaaggaggttgttccgccatcgagtttaccgcgagtcctgtctctttgtggagggaaactacttaaaggatctatcagttcttggacgtgacttggctcgtgtggtcattgttgataattcaccacaggcctttgggttccaattagacaacggcgtccctattgaaagttggtttgatgatcgtaatgacagagaactcctaacattacttccatttttgcaaagtttggttggggtggaagatgtccggccatgtattgcaaggaagttcaaccttcatagaactgctcagcacacaatagattatcctcttggtccaaaaacgatgctgaacgagtcgatgggggagggggacgccgcctacgccaagcgcgtgctgctcacccgccgccgggcgacgacgtctcccgggggatcgcctccaccctcgccacccatggctgccgattggttttggtcggcgacgagggcgccctggctgggacggcggaggaggcgcggcgcggtgggggcggaggagatgcggtcgctgtggtggggctggatctccacggctgcgacgaggcggccgtcgacgcggcggtgggcacggcgtggcgctgcttcgacggcctagacgccatggtgaactgctactcctacgagggtgaagtacaagactgcctcaatataagcgaagatgagttcaagaagcaatgaaagcgaatgtaatacaacttggtttctagtaaaggcaattgcaaagcgactccgggacttagaatccagtttttgagggtctgttgtattcttaactcagattattggtgctgagagaggattgtatcctggtgctgctgcatatggtacaagtttaggtgccattcaccaattggtccggctgtcagcaatggagctgggcaagcacaagatgagggtgaacgcggtgtgccgtgggctgcacctgggcgacaggttcccggtgtgggtggggaaggagaaggcggagaaggcgacgggggaggtgatgccgctgcggagatggctggacccggagaaggacgtggcgtccacggtgctgtacctggttggggacgagtcccggtacatgactggcagcaccatattcgtggatggcgcccagtccatcgtgcgcccgcgcatgcgctccttcatgtag

SEQ ID NO: 89929 - DNA, 214 bp, Oryza sativa
  unsure (1)..(214): unsure at all n locations
  Clone ID: PAT_MRT4530_88642C.1
ctcatatagangnnaggnnggnacgaaacnncanaganggggnngangnnannancgnggcaagaaacaagncncagggcacgaacccgncaggggannncaaaggggcngagnncgnngngaanaaaagggagnagacangaacccgncaggggannncanaagnnncgacgncgacangaacccgncagggggcncnncgggnggaaaaggc

SEQ ID NO: 89930 - DNA, 714 bp, Oryza sativa
  unsure (1)..(714): unsure at all n locations
  Clone ID: PAT_MRT4530_88643C.1
tttttttttttttttagaataaatttatttgtttttttatagcaacttctatgtaaaaagctttcacttttgttggttttgtgtgctttcgttttccgtggtttaatctgaatcatgttgaagtttagaacggggcaacatttatctgacaactgaaatatgatcgagactataaatccaaggaccaaggattatattataatggggttacatccagaataaggaaaacaactcagtttcaggtttagcacagtggcggcccttactgctagaaatgctagctggcatgcatatgtcgtacttatcatataagctgtagctacagttctgaagcttcaatcttccgcatgaagatcttttttaaaggtttcctaagtacatcataatataagccttcatagtatcttgtttccatccaaatctgggtaagatcttgtctccaattatcgcataatactttcaacaacctgttcaaaagaattttcccaggtactgtcgctccgttgtgacatttcccaataatccataattccttgaatgacaaggtatctaggaaagcaatgtcctctgaaaactaaatcttcaaaattgtcaataagtcgtnagaagcaccctttctcccaatctgtgcnattgttattcacgtcgaagaaaccttccacttctagctcactcatcaaaacttgaagaccatcttttcagcntcagatccgt

SEQ ID NO: 89931 - DNA, 243 bp, Oryza sativa
  Clone ID: PAT_MRT4530_88644C.1
atgacggcgggctccgtcggcgcggcgagggcgaccctggctggttggggcggcgcggtggagatgaccgggggctgcgtcggctacacgacgtcgccgagcacgccacagcagcacgcccaccaggccgccaccatcaccaggatcatcgtcatcatcactaccatgattatactactccaatctgtaattttaggacgtcaaaatgaaatggaagcaagccgacgagctcgccatagctga

SEQ ID NO: 89932 - DNA, 172 bp, Oryza sativa
  Clone ID: PAT_MRT4530_88645C.1
atggaatcatggaaggatgtagcggtgtggtctagagacgagctcgacgttgcgcagtgctgcccagcgttcggtagcgaggcccgaagcagtgtcgtcgcctcaattgccgctggccaccactcgccagccactgccatcaaccgccacggtgtcatcgtcgtcctccatg

SEQ ID NO: 89933 - DNA, 798 bp, Oryza sativa
  Clone ID: PAT_MRT4530_88646C.1
caaatgcttgcacttggcttccgctcatgctcataaaaaagaaccgctgctaacgttgcgaatgccctgatatagcaagctgttcggccgccggcgcgaagaacatggagtccgtggtggtggccggagatctggccgctgcaccggcgccggcgacgccgatgtggttcgtggcgctggtcgccgtcggcctgcacgcggcggtcgtgtgggcggggacgttcctcgcgtggctccgccgcgcgttcctccggcccgggaagggcctgtgccggcggtacggcgagtgggcggtggtcaccggcgccaccgacggcatcggacgcgcggtggcgctggagctggctcgccgcgggctccacctcgtgctcgtggggcggaaccccgggaagctgtcgggcgtctgcaaggaggtccgcgcagcggcgccggcgtgcaaggtgaggaccgtggtgttcgacctcgccgccccaggggacgacgacgtcgggggcggcgagctgtcccgcggcgtggcgagggtggcggcggccgtggaggggctcgacgtggggctgctcgtgaacaacgccggcgcgacgtacccgtgcgcggcgtacttccacgaggtgcccgacgcggtctgggaggcggtgctgcgggtgaacgtggtggcggcgacgaggatcgcgcgcgccctcgtgccggccatggcggcgaaggggaggggtgccgtcgtcaacgtcggctccggctcccccgtcgtcgtgccggcgttcccgctctacgccgtgtacgcagcgaccaaagcgtacttga

SEQ ID NO: 89934 - DNA, 4632 bp, Oryza sativa
  Clone ID: PAT_MRT4530_88647C.1
atggctcaagacaacaaactggatctgctcttgaaggccggcggctcaaccctgttgggttgggagcaagattatcctagtaaaagattgcctaaacacatctctgttcttcctgagttgttcgagttcttccacttttccttttcattttccttagttgtgttgagtccatctggtgacgctgacaatttctggtatcagagccctttcgccccaaaatcttcttggcttggttgtaaaattccagggaaggattgggatctattcttcggaattgaatcccgcgcaaaggcaacttgccttctcctggtataatcgaggtcggagcgtgggtaagagagatcttagcacgaatatcctagtgctgaaggcaagcttaaggttccatgagtcaagccaacaaactgggatctcctcttgaagcactatatcgaaaaataagaagaagaggctagaaacagaagaacgttttcttggatgatttctgggggcaatgcagcgttctggttgcagtcaattaggcaacaaattgtggggattacctggcagactctctgtgaattggtgtgtgctagatttacccgtgatagacaggaagctctaatccgtcagtggtttcatgcacaacaatccagttcagtctcagaatatgtggaaaaatttgacagcataatgcaccaacttatggcttatgacagtgccttaactcctgtatactttgtccaaaagttcattgaagggttaagggatgagatcaggggagcagtaatgttgcaaaggccccaagatttagactcagcttgttctatagctttgttacaagaggaaatattggagggtatcaagactgtgagcagcaaaagaactgaatcttcttctagcatcaggcaggttcctagaactaatcaattcagtccagtgaatcatagtcctaggactcctactgtggttatgacagaagataaaagggcaatcgatgcatccaaggccaaggatgacagattggcttcattgaaagcttatcgtagatccaagggactctgttttgtttgtggggaaagtgacacaacagggacagatgaaggggaccctagtatgctaatggctatttctcagcaagccttatggggaactgaatccaatagatcagtcaggttaaggggatgggtgcagggagctgaactgcttatgctaatagattcaggaagttcacattcttttattgatctaggtgtgggaaagaagttgccaggaatctctcctttgcctaagccggtcactgttaaggttgcagatgggggaaccatgagttgtacacatgaaatcgttgattgcagctggtggatgcaaggacacaattttaaaaacactttcaaactattgcaattgggaagttatgatgtgattttgggtatggattggttagaaagattcagccccatgcaagtagactgggttaacaaatggatggatgttgaactatctggtaaaattgtgagattatttggcattactccacatacaacaacctgttgtcctattacctctgaccagttggaaggaatggctaaatgtggctcaatactttgcttagtgcaattagcttcagttttacagactaccactgatccaattccggcatcagtacagcaaatcattcaggaattttcatctgtctttgaagaaccaaagggcttacctcccaaaagagcctgtgaccacagcattcctctaattcctgatgctaagccagtgaatctgaggccttatagatacaaccctgcattgaaggatgagattgaagcccaagtggccgaaatgctacagtcaggggtaatacagcacagtcagagtgccttctcttcgccagccttgctagtacgaaagaaggatggaacttggaggttagtgattgactaccgacaactaaatgccattacagtcaagagcacatacccaatgccagtcattgatgaactattggatgagttatcaggagcaaaatggttctccaagcttgacttgagagctggttatcaccaaatcaggatgaaggcaggtgaagagtataaaacagcattccaaacccacactggacactatgagtataaggtaatgtcctttggtctcactggggctcctgctacatttcaaggagcaatgaatgccacattgcaatctgtgctcaggaagtttgctctagtgttctttgatgatatattaatctatagtcctgatcttgagtcccatttggatcacatcaaacaagtactatccctgttgcaaagacaccaatggcaagttaaattgtccaaatgctcatttgctcaacagcaattaacctacttgggtcatataattagtggagcaggagtatcaactgatcccagtaaggttcaggaggtggtggattgggccattcctactactcctaaaaagctcagagggttccttggattggctggctattacagaaagtttgttaaggggtttggcattatcagtaaaccacttactcaactattaaggaagggggttccctacaaatggtctgccgagactgacaaggcattccagacacttaaacaagcactggtaacagctccagtgttagcccttcctgatttcaatcagccgtttacagtagaaacagatgcaagtgattcaggcattggagctgtactgtcacaagggggacacccaattgcttttattagcaaggctttgggtcctcgtaccaaaggactttcaacttatgagaaggaatgcttagcaatattgatggcagtagaacactggagatcttatttgcagattggggagttcactattcttactgaccacaacagccttatgcatctttcagatcaaaggttacatactccatggcaacacaaagcttttaccaaactgcttggattgtcatataagatatgttacagaaaagggagtactaatgcagctgctgatgcactttccaggaaattccaagatgaatctgagttaaacttggtttccagttgtactccaacctggttgttggatgttgctaagggttatgagactgatcaattttcattagatttgctcactgctctagctcttaaaccagatgcaaagcctgggtacaccttgcagtcaggaattataaagtacaagggacgaatctggattggtcagaacagcactatgcaaaatgcgttacttgcagcattccatgccagtcctattggagggcactcaggattcccggttacttatagcaaattgaagaaactttttgcatggcctggaatgaagcaacagactaaacaatttgttcaaacctgccaaatctgtctgcaagctaaaccagacagggcaaaataccctgggttactgcagcccttacctgtgccagaagggtcgtggcaagtggtgacactagattttattgaagggttgccaagatcttcatcttacaattgtatactggtggtggtggataaattttcaaaatatggccatttcttgcccttatcccaccctttcacagcaatagatgtggcaaaaacttttatgctgaacatttataaactacatggtcttccccagactataatctcagacagagataagatctttacaagccaattgtgggagcagctgtttactagatcaggaacacaactgcatctgagcactgcttatcaccctcagtcggatggccagactgagagggttaatcagtgcctggagatttatctcagatgttttacacatgcaactccttctaagtgggcagtgtggcttcatttagctgaattctggtataatactgcattccactcagcactgaatacatctccctttgaagttctatatggccacccacccaggtattttggaattcattcagaggattgtgctattcctgaactacaagtttggctcaaggagcgtagactgatgcattcattgattcagcagcaccttaaccgagcccagcaacacatgaaaaatatggctgacaagaaacgcagtttcagatcttttgaattgggtgactgggtttatattaagttacagccctatgttcagtcttctgtcgcagctagggctaatcataagcttgcattcagatattttggccctttccaagttattcagaagtttggctctgtggcatacaagctccaacttcccactactagttctatccaccctgtgttccatgtgtcccagcttaaggcagccaagggtttccaaggagcattgcactccactctgccttcttctgatgatgctttccagtatcctatcatgctcctggataaccggctgattaagaaaggtaacaccaccgtttcccaggttttaatacagtggtctgatactgcagttgaagatgccacctgggaggaccttgaggatctccgggcgcgttttcctgaagctttggcttgggggcaagccactttccaaggggaagggattgtcaaggcgtcaggcgaggaggagccgagtgcaagcgccaagctgaagatgaagcctgtgccggatggtgagcaggaaggaggagaagaagacttgaggccggccagagtcattaggcctaatcgtaaatatgttgggccggaatgggccatgtaa

SEQ ID NO: 89935 - DNA, 639 bp, Oryza sativa
  Clone ID: PAT_MRT4530_88648C.1
ttagtatataatagataatagatagatagatagatagaagatagatagattttcacacttgatgcttgtaatcttcgaaaacaaatggcaatgagctcccccaacccactccacaaggtctggcatattaataagttcaactttcttcaagtgcgagatacttttttgtgttacaccaccaaaatcaggtccgaactgatgtatgcctgaaatactcttcaaagtaagttcctctagctgcaccagttgaccaaaaagtgggagattgccccaacagacaccctctagatggaatgatttcaagtattttacacaaatataactgcacaaccaactaggaccaaccgaaccaccatggtttattatgacaagtgttttaagattaggaggtggttggagaccgtcaagaacatcagatcgtgttgtccgttgcaccacactccaaactagcttcaatgttttcagatttgttttgatcatcaacttggcttcattagcttcttcccttgttgtcacgttctcaagattaaatattttcagttcacctccaagctctgtcaaatcccctagctcactcagctcaaacccaataccctctttcttaacatggtactcttccaacctccgcaaatacttcat

SEQ ID NO: 89936 - DNA, 417 bp, Oryza sativa
  Clone ID: PAT_MRT4530_88649C.1
atgcctggtctcggcggcggcgaacggtggggattcgagctacgcgaccaaaagaagaaatgtataggggtcctctgcgaactcgaagatgatccaatcacgggctatggggtcttggagactcattcgatgtcccgcgtggcccagcgaagcttggatgacggcggcagcggcttcggactccggaaaatgctcgatccagccatcaatctgccatgcgtgcatgcgcagggggaagcctatggcgcggtggctcgccccggcttgctccagatcgacggcgacggacatgatgtcttggcggcggctctcagagcgtgctccaggacgaccgagagcgcggcggtgttcccagcgattggctgcacaaattggaccgcggttaaaaggaatggaatcggcatggaagtgggatga

SEQ ID NO: 89937 - DNA, 176 bp, Oryza sativa
  Clone ID: PAT_MRT4530_8864C.1
tccgacttggaagcagagagttcatgccatacccgacagttatatacccaatctcgaatggtatgtacacctttcagaaactgagtggtgttgttagtgccaatacaagtgtactcgccatggctcgactacttatgtggtatcatattacttagcatttagtttcaccctgtctg

SEQ ID NO: 89938 - DNA, 2449 bp, Oryza sativa
  unsure (1)..(2449): unsure at all n locations
  Clone ID: PAT_MRT4530_88650C.1
aaacagtgtatcangaatagcattagacctgaatcttcccagacccctattccgttaccttttgcaaatgacacaggcatgacctattgaaatttaaaatagggtttagggttagacgacctacgccgtttttcacgtgccgacttttttttttttttgaatgataatcacaaagcgataaactatacccccattttatgacaaacactccctcagagagtactagatttgcttccatttacaatcctgagggcctatatatttaactaaacaagcaaagaaagacacagaatccctttttggcagattaaccattcgccatagcaaactacaagtaacaaaataagccaggagtcccaagacatctgatttacaaaaatgaaagctagtctaactgacccaactggccttctcagaatttttccccccttcatttgcacaccttcatagaccttgtatatacattcaatcctgtacagtatctcatgattctccaagacctttaacaaagttcctacacaagtgatgatgtgcgagcaagggatggagagatgaggacggcctcgccacttgtggcttttgctgatgcaacctcttctaggcgtttccatacagattcttgcttcaatttatgatccttttctttagctttgttttcctcatacttcctcaaacattctttgtaaagttcagggtcacgatcagagaataacttttgtacgttaagagagagacttttgacagcctggttccagtgctcaattacatttttctccagtgcagaaaagatgataggcaatatcaccttactgttttgtctaattaaattctcaatgtggtcgttgttccacaaaaacaatgccctctcggcaacctgaaagtgagaactattaaggcagcatgcaatctggcggaaaaggggaaccatacatttttggaactctgcaggttgggttgcatcgagtatctcctccaattcccccaaaaacatcacctcctttgtgctgtttgtgataggccagtattttatgaggcctctgataacagtatctgcgagcttgcaatctttttcaacaaactgtgtgatgctgtaagacaactgttgatggtacagtgcgatgcactttggcttgtgaagtggaattaaggtccgtaccaggaacaacttatgctcttccttgagtggtaaagcaaatccattgatgatacttcctaaaatttccaagagctcagctatgccattgtgtttttcagtttcatagatgaactggtagaatatattattgatagcttttctaataaatggccgatacaccatgaactttccatagatacgatgaagtgtcatctttaagtactccctctccctagggtcttctgagtcaaagatgtcaagtagtcttaaaatgaaggaatggtcgatatatctcttagctaatttggcatctgtttctggagattgaataaatttcaatagcaactcatagacaatctgcaagtgtgaccatgcaggatccatcactgcttcatcctcttctaaatcaaaagcttgaagcacctttttctctctgggtggagaaattagtgtcctgaataagtttgctgaaatcattcttgtaatttccagcataactatttcaggaaacttaacagtggcagacacaacataatcgacaatttccaacagagtttggcttttcatttccttctcctgtatgttctttgtcggatcagtaaagtcaaacacaatgcagcacaattttaactttctgatcagcagattctgtttctccgaatttggcacatctttaaagctcggcaacggttgaaagctagaagaatacaaattgccatttgtccttgtgtttggattctctacacggtttccactcccatagctgagcccagtactagagataattggcggttggctacccaagttagacgtggccctatcagcaactccgagacctgaaacctggtccaacacggaagggctcgtcccagaaaagaaatccttatcagctgacttggcattcttccgccgcccaaatatttgcttcatcataatatcacccaatatagctcgaaacccttctcccttccgcccccgcagaaccaccagcttttgctcgaatcggtgccggattttgcgacggagcggtgtcagggggcggcagcgggtgacccgcggcgcgcagcggcagggggaggcggaggcggaggcggcggcggcggcgtggaggtcgtgggcggtgggcggcgcggttggtggcggcgtggcgttggggacgaaccaaaggtggttgctgccgctggtttggcgttccttcgctggaacctgactagtactactactgctgctacctgggcaaagagccaaagacggcagacgcgagtggttgactgggttgcccagctttgtgggccgtgggtgaatcgggcccat

SEQ ID NO: 89939 - DNA, 1670 bp, Oryza sativa
  Clone ID: PAT_MRT4530_88651C.1
atggcagagtccagaatattcggaggtctcaagcccaccaagtccaggttactgggccctactatcagaggcccaccacccaacggcgcggccactcatgccccacgtcgcatcctcttctccttttctccggagagtcaatggctcggtcaaagctcaacgagagcatgtcttcctcctctccgttctccgtgtctccccgccccatccgccgctagccccgcctaccctcgcctcgcctcctccgccgcctccgcctccgcccccgcccgcctccgctcccgcattaccctccccggtggcagatctcccgtccccccaatggacccggccgcctccgccgcggagtcgtcgtcgctgtcgtcgcgcgacgtcgccgcgatgccggactcgccgccgcggcgggcggcgaggcaccggcgcgcgcagtcggagatcctcctcggggcggcgctcccggacgacatcgccttcgacgccgacctcggcgtggtcggggaggtcggcggcggcggcggggacgactacgaggaggaggaggaggatgacgaggaggaggagatggagggggcgggcggcagccggatgttcgagatgttcctcgaggccgggggcaagctcgagaccccggagcccgcggcgccgctgccgccgccgcccgctcggccgcgtcaccagcacagcatgtcgatggacgggtccacgtccctggcgtcgtccgccgcgggtgtggcggggaggatgggcgcggacgctaagaaggccatctctgacgccaagctcgcggagctcgccctcgttgaccccaagcgcgccaagaggatcttggcaaaccgccagtcagctgctaggtcaaaagaaagaaagatgcgctacattgcagagcttgagagaaaagtacagactctccagacagaagcaactacactatcagcacagttgtccatgttacagagagataccactggtttaacaagtgaaaatagtgatttgaaaatacgggtgcaaacaatggagcaacaagtcaggctgcaggatgcactaaatgacaggctaagagatgagattcagcagctaaaggttgcaacaggtcaggttaatgccaactgcggcaaagtgggaaactttggcctctcctcatttggaggcgccaatccacaaggttaccagcgcagtcacatacaatctcttctggcagcccagcagctgcagcagctacagatccactcccagcaccagcagcaacagatgcatctgcagcagcatcatcatcttagcacggtccaacagcagcttctgcaggaggggttgcccttgccaggggatctgaagatgaaaggaattgtggcggcatcccatgcacagaacgccggcgcatctgaaagccacgctctgaggagtgagccgtgagttggcataggctcatggcggttgtcagtaataataacatgttgtatctgagtgactcatgcataggctagcgcagtatctaggtaaaatttcagactatctatgaagcacttagatgcctgcagcctgtagaatgtagatcccattcagttgtaagttgtagaactgatgaggcaaaactgagtaattcaccggtgccatggagtatgttcacgtcacctgcagcccggaaaaactcgagactagttctctctctctcc

SEQ ID NO: 89940 - DNA, 2592 bp, Oryza sativa
  Clone ID: PAT_MRT4530_88652C.1
tgcgctccctgattctggctaaacaagaactggtgaatgaatctaaagcggtggtagtttgggatggtggtgttggagaagtgttggaacatgaatctcaagagttggaccttccactgaaggtgctggacaacactgaaacaacatatgacacatagtctgctttgggagaagatttggagagatatgaaattccttctatttcagacattgagagacagagagaggaggaagaaaaagaggaagaataaagtttcaaagaggtgtcatacaagaagaaggcaaaatccaagatggaagaacctgtagtcacttcaagaatgagtccgagacacaaggatttggcagcgatccctgtgcccaaaagagcagagattctggcttagaagaaaaacttggggaacacagaccatgatgagttgaataagattgttgttgctgcaaatatttctcttggtaataatgaattagagatagataggaccattgatactattaaggctaaagaactagtccaggccaaattagcagaattgagatggaagaaagaagaggagaacaaaacttagcatgaagctgagacccaagaggtccataattaagggtttagtcaaactctgagaggtgaaactgagagttgtgttggtactattcaagaagagagatgtgaagaagagaattccatcacaaattctgactcagtgaggaaacatcatgtgggtgcttatttcttgagttgtgttattaagaataaaagggataattttacttgggaggtgatggtagtttatggtcctgtgaatgattctttaaagcctgcttttatggagtatttgagttggcacattcttaataaacatattccttttgtcattggaggtgatttcaacatgtatagatttgctagtgagaagtcaaatagtaatttgaatactagatctatggagctgttcaacaattttatttccaattttgacttaagtgacttacatagatgtggtcctacgtttacttggactaacaaacaagaccccccgactcaagaagtcttcgatagagttgtagttagtgctgattgggaagctaagtatccaaattctattctttcctttcttcttcaagttggttcagatcatactccccttatttttgatactagagagaacctggaaagaaagccaagctattttagatttgaatcagcttggttgaccaaagaagggtttaaggatttggtgattcagaagatgatacctagatatggaagttacatcatgacatactggaacaagaaacaaacagagttcaaaaagttcctaagaggttggggcatgaatcttaacagaaagttctttattgaaaaatgatttacaatccctgctcaaaaacttagatacccaagctgatgagagagagctgtcaatggaagaatggaataagaggtatgaattggaggaagatctggaacacttgtatgagatggaagaacttttctagcataagagatgtggggtccaagagctgttgtatggggatagaaatacagagttttttcatagaatggctaatgggaggaaaaggaaatgtactattacatcgcttgaagaagatggtagggtgctgaacacaaaggaagaattgacatatcacatcttggaatattggaaatctcttttaagagctgaggaactgtccacagtacacctatctcaaatggtttggcaagaggaacttaggttgcatgaaacacaaaaaagtcagtttattagacctttcaagattgatgagttggataaagttctgaaagaagctaaacttaacactgccccaggcctagatggattcaatgtttatttttatagagttttttggcctgagattagaaatgatctatttgagatgctgttaatgctacacaatggagacctagacttgaagagattgaactatggagtcatctcactgatccccaagagctgtgatcccaccaacataaaacaatttagacctatatgtgttttgaatgaatgtttgaaatttctgagcaaagtggtagccaataggctaactgaggtgattcatacaatcatctcccccacccagactgcttttatcccaaggagatttatcctggaaggctgtgttattctccatgaggtgctccatgagttaaaaattaagaaacaaaaagggatcatcatgaggatagacttcgagaaggcctatgatagagttagttggagctttttgtttgaggttcttcaaaagaaaaaattccctgagatttggatagattggatcaaggcttgtgatataggaggtagggtttgtgtcaataccagtggagagagaagtgagtttttcaagacctatagaggccttaggcagggtgaccccctctctcccttgttgtttaacttagtgagtgatgttttggctgctatttttgattctgctaagaaaaatggtttgttgactggtctggttcctgatattttcgctggaggaataactcaccttcaatatgctgatgacaccgtcatctttattccttatgactcctcccaaattaggacaactaaattcttgctt

SEQ ID NO: 89941 - DNA, 259 bp, Oryza sativa
  Clone ID: PAT_MRT4530_88653C.1
atggtgggttgtgagcacatggttttgatggtagtgctcatgacaattaaggaccggttcacgattttcggttgtgaaacattaaccgtgccaaccacaagccagcatgggcaacagctttaccttttgcatagcatgattcattgcggggcaccagactgagaagtggcggagataagcccacaggggtcgttggggagtccatgccttgttttataagggggtgattatgatccaggaatggtgcgctatggtggat

SEQ ID NO: 89942 - DNA, 363 bp, Oryza sativa
  Clone ID: PAT_MRT4530_88654C.1
tttgttttttttttttttttgtttttttttgttttttttgtttgatttatttattcttttgataatgtacatttgttttttttaaacaaaaaagacaacgggaaaaaatttcatcccaaaaagatgcaccccgattagacaaaaggggtcttgtttgggggtagggtccccccccaccccgggggtttaacaggggtcccgcccatgaactcagggggggggcattatcactgctattaaaaggggtacaggggattacactaacggcttttatgaagggaaaagggggcgggacctggaacaatttggtgggaccagctaatacaagggctgcgcacttgacaaaaacaacaagggccgggg

SEQ ID NO: 89943 - DNA, 284 bp, Oryza sativa
  Clone ID: PAT_MRT4530_88655C.1
ggtttaccctaccacggcctcaagctggaagcatgggcgacattagagggccatgcgggccagacacacagagaggaaactgcacctggccgccaaggagaggccatacggcacagaggcgtgaaccatatgaagctccaaccagatgaagagtgaaggagtagctgatgatcaggacgcagaccgcaaaggaccacctagaagaaagcgccgaccttgtcaagaatctaggcgagcacctggcaaagggcgaaggcatcaaagagatgccaacggtgagcttc

SEQ ID NO: 89944 - DNA, 1649 bp, Oryza sativa
  Clone ID: PAT_MRT4530_88656C.1
atgatctctacggaagaggactctgattcttttcaggatgacagcgaggaactgcaaatgcaggtgacaaagaagacgttgaagcgtgtcatatcactagccgaaaccttcatcgccatagcaaccggcatcctcgcggcagctttctcggcaggcaaagatgtccacctgcaccgccacgtcctggccgccggcggctgcttcctcgtcgtgacatacctgtccgctctcctgctcatctacatgaagctgttcttgtcagatcacaggcggctgcgccgatggcacgtccggtccctgcagctcctgtgcgtgaccagcggcgcgtcgctcgtcgccacgaactccctgctcctcgtcctcatcggcgaaggcaatggcttgctgtcgctcaacctgctgcccgtgcagggcatcgtcggcgtgctcgcgtaccacgcgacgccgacggaggggagcgcgcgcgacgaggcgttcgaggcgcaggtcaagagcgcccgcaaggtcgcgctgttcgcggcggccacggccttcgccgtgcagaccacgctcgtgtttggcgcgttcagcaacgccgccctgcaggcgatgggcggacgccggctggacctctcggtgtcgttcctggcgtcggcgctcagcgtgttcttggtcgtggcgacgtgcatgccgctcgggttcaggaaccagggcgccagggacaaggtgctgtccatcgtgaggtacctcaagaaaggcgtcatggccgtgctcgcggtcaccgcggtgactctcggccaggagttcctcggtggcgccgcggcgctcgcgctcttcccggagatcaccgtcgccgccatgtactacgccgtgagcatgcccgccgacgaggcggccgcggccgctgaccgcaagatggaggtgcttccgaccgtcgtcgtggcgacgttcggcttcgggatgctcggggcggcgtacgcggcgctgttcggcacgccggagtacgacctgtacaccaaggccctggcgttcaccctgctcaccgccgtcgtgtccagcctgggccgcgtggcggggccgctctgcaacgcccagcgtgacaagagctcggcggcgtgggtgacattcctcagcagcatcctccccatcgtggagatgctggtcgccgtcccgctcgccgccaaggtaatggttgattttctcgccgttcctggtaatggctgattttctcgccgtgcactcactagcacttgatgtcttgatcacttgtacaaattcttcgaacacgatacgtgcatactctgacacgcaccatgttgttgttgtactttactgactttgtacaatggcatgtacttatagtagtggacctctcttggacaccctgaagagcacatatttttttgtgtgattttgtctgaaatagtactgctaggagtagtatttgccggcacagcattgcgggagttgccaacgcctcgaaagtattcatggggcttattaagattgatggggctggttttggaacagacaatcacgggccccggttggctgtcagcctataacttcttagatgggggggggttttgggtttagaaagaaagagcaattttaacatttccgaggacccatgagggacccattttttttatttggaaatttgaaatctc

SEQ ID NO: 89945 - DNA, 537 bp, Oryza sativa
  Clone ID: PAT_MRT4530_88657C.1
atgtcggccttgtcgtcgtcgtcgacatcaatgtcggccggcgtcaccttcgccttggtggatgacgacccaggcgtggacgagatgcggtgggtgaaacccggtggtggtgagttgggcgagtaccggcatgtggacgtctaccccggcgtggtcaaggggaagcgaggtatggttgctgccgttgttgccctggtcgatgggcggctgtcaggaattggtcatgatctattcctccagattgatgctgcgagcagctatcgagactttgctggttggttccgtgtcttcaggggcacatatggggacccgctctcccctctcctcttcatcctagccatcgaccccttaaaggcagtgctactgaaggcaaccgacttcggcatgctcgcacaactcaatgggagaacagcacaccttcgtacatccctttatgcgaatgatgttgccatgccgaaacatctgggtggcctcggtgtgctcgacttggaccggttcgctcgagcactcaggctaaggtggctgtggtacgaatag

SEQ ID NO: 89946 - DNA, 714 bp, Oryza sativa
  unsure (1)..(714): unsure at all n locations
  Clone ID: PAT_MRT4530_88658C.1
atgccgtggcatagcattccctacccacgaggcactacactgttgtattggacacgcgcagacgcccatgccacaaagcgaacatcagttcctttgctagaaggtggaggaaggaagaaaaaggaggaaggagaagggcttcccctcgaccacccangggtcggcgcccacgtccacccaccgcccatcgaccagggcaacaacggcagcaaccatacctcgcttccccttgaccacgccggggtagacgtccacatgccggtactcgcccaactcaccaccaccgggtttcacccccgcatctcgtccacgcatgggtcgtcatccaccaaggcgaaggtgacgccggccgacattgatgtcgacgacgacgacaaggccgacattgcagatacggcccgcatcaacaaggataatgaatacctttatgagttcatctatccacatatgaaaatatgtttaaaagactttgatgacgacgacaagggtctcgaaggggaggttccatcttacaaggagtgcggtgcccgtactgaagacagtcctcacatcgcctcacaggccctcccgtgttggagggacctccacccgaggatctcagcactccatgcattcagaactctatcctttagggagaacgtctacacgccagtagtatgcgacatcaccatcctcctggagttctttgattgctttcaacagaccggcattccg

SEQ ID NO: 89947 - DNA, 789 bp, Oryza sativa
  Clone ID: PAT_MRT4530_88659C.1
gggacccgctctcccctctcctcttcatcctagccatcgaccccttaaaggcagtgctactgaaggcaaccgacttcggcatgctcgcacaactcaatgggagaacagcacaccttcgtacatccctttatgcgaatgatgttgccatgttcgtccgaccaacagtcaatgatatgcgacatcttacccaaattcttcattccttcggagaagtaaccagatttcggataaacatatcgaaaagtcaaattgcgtcctttcattgcactggcatagacctccaagagatactataagtcttccccgctaacgtaaccggctttcggataaagtatgtcggcctccatctaacggtctccaagctaaaaaaaaaaaaaggtccacattcagccgctgctggataaatataagaccaggctggcgcccaggcaaggcaagatgatgacgaccaccggtagaaaatcactgaccaaatccgtcctcacggcacaaaccatttatcacctaatagccattaaagttccggacagcatgctccattcaattgacaagatgagacggaaattcctctgggcaagaggagaggacatctcgggtagggggaggggggtgaatgcaaagtgaattgggacagaatttgcaggccgaaacatctgggtggcctcggtgtgctcgacttggaccggttcgctcgagcactcaggctaaggtggctgtggtacgaatagatggagccggacaaaccttggagcggcactgtaagtcagtgcagacagcagccggacgaac

SEQ ID NO: 89948 - DNA, 1173 bp, Oryza sativa
  unsure (1)..(1173): unsure at all n locations
  Clone ID: PAT_MRT4530_8865C.1
aattactagattcgcacgagcaacagttagctagctatagccggcgccatcatgccctcgtcgacggccgtcgtcccggcagcggcggaggcgagcagccgcatcatcctggtgcacggcacgggccacggcgggtggtgctggtacagggtcgccacgctgctgcgcgccgcgggccaccgcgtccacgcgcccgacctcgccgcgtcgggcgccgacgcgcgccggctgcgcgacgacgacgcgcccacgttcgacgactactcgcgcccgctgctcgacgccgtccgcgcgctcccggacggcgagcgcgccgtgctcgtgggccacagcttcggcggcatgagcgtcgcgctcgccgcggacacgctcccggacaaggtcgccgccgccgtgttcgtcgccgcgctcatgccagactgcgccagcccgcgccccgacgtcatcgagaagcttccattgacggactgggtggactgcgcgacggacgaggagcacgcaccgccgtcggtgctgttcgggccggagttcatgcggcggaagctgtaccagctgagcccggaggaggacatcacgctgtcgcggagcctggtgcgggtgagctcctactacgtggacgacatgcgccgccagccgccgttcggcgaggaccggtacggcgcggtgcgcaaggtgtacgtggtctgcgggaaggaccaggccatcgtggaggcctaccagcggcggatgatcgccggctgccccgtagaggaggtgagggagatcgccggcgccgaccacatggccatgttctccgcgccggtggagctcgccgggcacctcgccgacgtcgccaacacctacacttgattttgattgtactagctgacaacacgtcgccagcataacataccaaggccgtgtttagttagatacccaatttttttttgacgtatacggacacncattttaagtattaaacatagactaataacaaaacaaattataaattccgtctatcaactgtgagacgaatttattaagcctaattaatccatcattagcaaatatttactgtatcnccatattgtcaaatcatagngtaattaggctcaaaagattcgtctcacaatttacatgcaaactgtgcaattgttttttccgtccaaaaaaaaaaaaaaaaaaaaaaaaaaa

SEQ ID NO: 89949 - DNA, 444 bp, Oryza sativa
  Clone ID: PAT_MRT4530_88660C.1
atggcaaagtggggcgatggtggcactctggacaccgggaacaccgacgagcgcaccagcaaggaccttttagattccgtgcggccgcggcgtagtggtggtgggaggagcgcgccggcctcctccatgtggcggcggtggagggcgtgggatctggcgggcggcggtagcccctacacggatccagcggcagtggccgtcaacgcaagaatccagcggtggtggccatccccgcacggatccggcagccggccgccttctccccgcgcgggatccagctccgctcctctccccttccttccctccctagatccggcggaggggaggggtgtcggcggcgttgcggctggaggggagcgcggatctgatggcgggtggcgcggaggccagcgggaggcaggaggcactgtggccatcgggtggaagcccaccgccggattctag

SEQ ID NO: 89950 - DNA, 3743 bp, Oryza sativa
  Clone ID: PAT_MRT4530_88661C.1
atgggtgtcggcggggagaagttccagctggggacggtgggggcgctgagcctctccgtggtgtcatccgtctccattgtcatctgcaacaaggcgctcatgagctccctcggcttcaactttgcattatggatgaagttcttcgagcacaagcctttcgactcgagaactgtcatgggatttggagtgctcaatggcatctccattggcctcctcaacttgagtcttggttttaattctgttggattttaccaggtacaagatgacaaagctggctatcatcccatgcactgttattttggagactcttttcttcaggaagaagttcagtttttcattgtattatcgtgcttgatatctgtctcagtgaacttcagcactttccttgtgatcggaaagacttctcctgtcacttaccaagtcctgggccatcttaaaacatgcctagtactgacctttggttatgttttgcttcatgacccatttagctggagaaacatactcggcatcctaattgcagtagttggaatggtcttatactcatacttctgcacattggagggccagcaaaaaaacgccgaagtctccccacaacaggcgaaagaaggcgattcggctcctttgatctcagactctctgagcaaagttgagaatggaggtggagtggttgatgatgagcctctcaagctgcgcgcttaccagatctatcaaaatagtggaaagagcgacgagaatggcccaaacaaaatgagaggctttattggttgcaacgctctgcctgtctgcctgcatcttgctagatgcaacaccattttaccccccttttttttctgtgagaattgcgatctgggctacttcaaaactggaagaggccgtcgcagtagcgtcgttgcaggcgcggagctcgtcgtggcggtggcggctgtgattgcggtgggagggggcacggtggtgacgaccgtggctgaggtgggaggaggcatgacggcctcggacggctatccgagggtgtggcagacggctgcatctggccgcgcagcagcgtttggaggaggggtcagagaccggcttggcgcagagaggcgcagccgatggcagcggaggccggctcggcgcgagaggcgtaggcggcggagatggaggccggcttggcacgagaggcgcggccgatggagggaggccggattagcgcgagaggcgcgtccaatggaggaggctggcttggcacgagaggcgcgaccggcggtggagaaggcgacctcggtgcgaggaggagctgtcggcggatgtggtgcggtcttcggcgcacgaaggctggccgcgccggggaggggggaggggggcactgttgcagtggtcccacatgtcggcagagttcggggcgcgcggctgcttccgccacctcctgggggtggaatgcttgccaagatgcagtcgtgccgatggatcttggcttacttgctcgtcgttctcgtgagcctgcacggtggtgccaatggcttctacctcccgggcacattcatgcacacctacaccccaaatgaggtgatctcagccaaggtcaactcgctcacctccattgagactgagttgcccttcagctactacagcttgccctactgtaagcccccggaaggcgtcaagaagagcgccgagaacctcggcgagatcctcatgggtgatcagatcgacaattcgccataccggttccgagtcaacgtgaacgagtccgtgtacctatgcaccacggacccactcaccaaggagcaggccgagctgttgaagaagcgggcgcgagatctgtaccaggtcaacatgatccttgacaatctgccggtcatgcgattcaccgagcagaatggggtgactatccagtggaccggattcccggtcgggtacaacccgatggggagtaacgaggattacatcattaaccatctcaggttcaaggtcttggtccatcagtaccaggcgcagggtgatgttgtgatcaccagtgaggatggcgttgccatggtggagtcggatcgcaagagcggattccagattgttggcttcgaggttgtgccttgcagtgtgaggcgtgatcctgaggcgatgtccaagctgaagatgtatgacaaggttgattctgtcaagtgcccattggagcttgagaaatctcaggctatccgtgagaacgagaggattacattcacctatgacgttgagtatgttaagagcaacattaagtggccatcaaggtgggatgcatacttgaaaatggatggtgccaaggttcactggttctcgatcatgaactcgatgatggttgtcttcttcttggctggtatcgtgtttgtcatattcttgaggactgtccgtagggatctgacacggtatgaggagatggacaaggaggcgcaagctcagatgaatgaggagctctcaggatggaaacttgtggttggtgatgtcttcagagagccttgctgctcaaagctgctatgtgttatggtcgctgatggtatccagatcactggtatggcagtggttacaattgtctttgctgctctgggtttcctctcacctgcttcaaggggaatgctcttgaccggaatgatcatcctgtacctcttccttggaattatcgctggatatgtcggtgtccgtgtttggaggacaatcaaaggaacctcagaagggtggaaatctgttgcttggctgacctcctgcttcttccctggcattgttttcgttatcctgactgtgctgaactccatcctgtggggcaagaagagcactggagctttacctatctcactgtttttcacactcctggccctgtggttctgcatctcagttccactcacacttattggaggtttgctgggtacacgtgctgcaagcatagagtaccctgtccgtaccaaccaaattccacgagagatccctgagcgcaagttcccgtcatggctgcttgttttgggtgctggaacattgccctttggcaccctcttcattgagcttttcttcatcctgtctagcatttggttggggaggttctactacgtctttggcttcctgttcattgtccttttcctgctggtcatagtctgtggtgaggtttctttagtcctaacctacatgcatctttgtgtggaggactggaagtggtggtggaaagccttctttgcttctggttctgtcgccttctacgtcttcctatactcaatcaactacctcgtgttcgaccttaggagcctaagtggaccggtctcagcaacgctctaccttggctattccctgatcatggcccttgccatcatgctgtctactggtgctattggcttcttgctgtccttctacttcgtccattacctcttctcatctgttaagattgactagaggcacccacactcttgctgcaataggatcacctgagcatggtgatagttatcccttagaaacatatcacacaataatattgaattgaaaagaaaaatgtaaacatggcaacgcccatggcttttggccctgattaattctatcatttagcatagcacagtttctttaagttcatgcttatgttttgtaggcatgtctgcaatgtttcagctatgttttttgactttgtaatactattatgttttgttttctctgggcatttgtgagcagcctttgttggaacactttgacagatattcaatattaaagagctattcgattacaaaaaaaaaaaaaaatccaaaaaaaaaaaaaaa

SEQ ID NO: 89951 - DNA, 474 bp, Oryza sativa
  Clone ID: PAT_MRT4530_88662C.1
atggagggtttaggcggccaagccgaggcaccagaagaaagagcacgacgaggggaactcactgaggggcggcacgacgatgaaaaacggctggcgatgagatcgggagtgacgacggggtaccgatcgatggtggcggcggagtttcagcgacgggagacgacaaccgaggggtggacggggttctcctcgcagctgcgatgccgagggaggctgcggcgaggtccggcgaccttggggtcgatgaggaggcttcgccggagatcaaaacaaggcggcaacccactggttcacggtgacggcaatctcccggcgggatttggcgcaaaagaaccggtggccggggtagagctgacccttgcgaagccgagggaggcgacggctcaaggcggcgttgaccagagaggcggcgcggcgctgctggagatggtggcggcgctggagagagagggactcgcagggagagacggctag

SEQ ID NO: 89952 - DNA, 3590 bp, Oryza sativa
  Clone ID: PAT_MRT4530_88664C.1
atggctgccggctggatgggcaaggttgtgactcgtgtgaagtgtgactcacaagtcctgcgaccgtcggtctacgatcactgccggacggggcacccgacggcgacgaacaaacccgaggatcccacaaacgaagatgacgagaatgagcacaagaacgttcaagcagctaatgcaatacttagcgccttgagtggaagtgagttcaaccgtgtggacgacatcgagagtgccaaagtgatttgggacacgcttcggaatttgcatgaaggcacggatagtgttcgcgagtccaaggtggagatcctcaaggggcaatttgagcggtttgtgatattggatggtgagagcccaagcgacatgtatgatcgattgaacaagattgtcaatgagatcaagggatttggctccaaggacatgatcgatgaggttgtggtcaaaaagatgattcgagcaatcactccaaggaactctatcttggtaaccataattcgtgagcgtccggactacaagactctcacaccttatgacttgctcgggcatacccttgcccatgacatgctcaaacaagagtccaaggaggtcatccaattcatcaaccaaagctcaaccacaagcatcaagaaggaagacttggcgttgaagggaagttcttccaagcactactccaacaagtcaagtggaagacactccgcaagagtgtgctatatgtgcaaagagcccgagcacttcatcgcagattgcccccacatcaatgaagaaaagaagaagattgagaagaaggttgagaagaaggagaaacacaagcatagcaagcatgatcactatggccaatctcaccttgggatgatctttggctctgactccgagtcaagctcaagtaatgaagaaggagttgccacgttcgccgtcaagccttcatcagcaccgagactcttcaactactcaagtgatgaggatgctcccatttgcctcatggcaaagaagcctaaggtaccttcctccctcaagtcattcaatgttgatcttgttagtgatgaggaggatgatgttcaggatgaggttatggatgaggaattgttcaagtccataaccaaggaatctctaccacacttgagtgagtttcttgggagaattgaggatcagtatgcaacccttgagaggcaagaggcattactcattcgtgaaaaagagcggtctcatgaactcaaggggcctcaaattggtacaacagcgaccttcacagaacttgggaaacgtgaaaaggtagcctctgttaacgcgttatgtaaactttttgaccaaccaaccgcgatccagcagtggagcacagtcacggcactcatcagcagctatgcgactgccaggcgacggggccatggcagcttcccatcagcagcttctcacggctgccgcagtggtggttctcgcctctctgcgtgcggtggcgcagcccgccggcgacggctatggcaacgccaccttctccctctgctccggcgtcgacaacacccaggcggcgggccgttctacttggtccggcagactactgcctccgaagccgtcaaggcggccaccgctgcgacggcggacaggtcctcgagcgtggttagcgacggggagtactacgcgctcgcgcagtgccgcgccgacgtgcccgcgggggactgctcgcggtgcctcgccgcctgcctcggagtcatcggcgggagcggagacgacttgtgcgagaaagccgcggtgcgctacgacgaccgctgcctcctccgcttcgccaagggcgacgacttcaccggcttcgacgtcgacgagcacacggcgaccgtgttcgacggcgggcgcagcggcctcaccgtcgccgaggaggtgcccacccgcctgctcgccacggtggcggccgccgccccggcgagcaggtcgaggaccgccgccgggatagcgtcctacggcggcggcggcagcctgtacgggctggcgcagtgcaccacccagatcccggcgccggactgcgccaggtgcctccgcggcgcgctgtcccgcctctcggaggacttcaactccaccgccgccgggatgcaactgcttcgctccagctgcatgctgcgctacgggagctccctcttcttcaaccagtcgtcgccgctcctccccgtcgcccacctcgccatcgccccggccggtggaggcgccggcccgcccgcagccgctccaccatcaccaggccaccgtcctgctcgagctcgaacgatcgccatttccgctgggcagcctggttaccagactctggtgaactcgacaggtaaattcgcagagcgaaataagcttggatctggtggctgtggcacagtctacaaggggatattgcataacaatgaagaaatagccgtgaagaaactcaccagaaaagatttgagagaagtggaaagggaggtttccctggtggcgcagcttcagcacgagaacattgtcaagttcttgggccactgcttccggcacgacaaaatgttcctcgtctacgaatacctgagcaacgggactctgagccgctatttcaaatccgactgtcagaagctggactggccaaaatggcttaacatcatcagagggatcgctcgtggcctttcttatctccacagagattctgggaaggacatcgtccatcgtgatctcaaaccttccaatgtcctccttattccaacttcaatgcaaagattgctgactttgatcttgcaagaccatacgaccggaacaaaagccatgagagcactcaaaagagagcaggcacccagaaaaaataccacaaggatttattggtttcactgtttctcactgaagtggatacatagctccagaactgtatgcgggaggggaatactctaccaaatcggatgtgtacagtttcggcgtgatgactctggagatcatagttggtcagagcaccagcaagttcgacaacgataactgcacgggcctcgtagaatatggcatggcaacactttgtgaggcgtacggttgaagacatgctggacggtgaccatctcggcctggtgaacgacgagcaggtgcagcaggcgtcacggtgcgtgcacgtcgcgctcctctgcgtccagagcaaccgctccgtgaggccctccatggacagggtccacggcgtgctcggcagcaaggaggagctggaggagccctccacccccggcttcgtcgcggcggcggcggccggcgtttcgccgtcggcttactctgtgaacagcgtgacgatcagcgtcatggagcctcgaccatgaatcaagaagccttttgaggtttccaaaaggatttgtacaaagactgttttcagaagtttggatggatggaagcgtttgggaatgaaatcaatgtatgtatctctgacagttcggtgtggcttgccaggcagtttttgatcagtgcaatgccatttcaagcttcgaagaactagcctgtttacccttttcttctcttttcccctgtttcggtgcaatgcagataggcacaagactacagtagtaatgttctttgaaatacttggctgttacaccgtgctctttgaaaaaaaaaaaaaaaaaaaaaaa

SEQ ID NO: 89953 - DNA, 614 bp, Oryza sativa
  Clone ID: PAT_MRT4530_88665C.1
atccacggttgatgcaccgatgctccaccatcactcaacctctgccgacatgtgggaccactgcaacagtgcccccctcccccctccccggcgcggccagccttcgtgcgccgaagaccgcaccacatccgccgacagctcctcctcgcaccgaggtcgccttctccaccgccggtcgcgcctctcgtgccaagccagcctcctccattggacgcgcctctcgcgctaatccggcctccctccatcggccgcgcctctcgtgccaagccggcctccatctccgccgcctacgcctctcgcgccgagccggcctccgctgccatcggctgcgcctctctgcgccaagccggtctctgacccctcctccaaacgctgctgcgcggccagatgcagccgtctgccacaccctcggatagccgtccgaggccgtcatgcctcctcccacctcagccacggtcgtcaccaccgtgccccctcccaccgcaatcacagccgccaccgccacgacgagctccgcgcctgcaacgacgctactgcgacggcctctgccaccacaccgtcagcgtcaccgtcgcagcgccctgccgccgagcatagaattacttacgttgtga

SEQ ID NO: 89954 - DNA, 246 bp, Oryza sativa
  Clone ID: PAT_MRT4530_88666C.1
atgggggcacatgtcagtcggcgcgtggatcctccgtccctgacctcaggagcagtggcgggagcgggcagatccgccgcccccgacttcggaagtgaaggcgatgggcgggcggcgacggcggctggatccggtggccactccgccccctatgcgcactgtctgcataagcacacgcataacgcaaatcgctatctttatagaccattcgtgcagatggctagctcaaccgcatgggaaatttga

SEQ ID NO: 89955 - DNA, 255 bp, Oryza sativa
  Clone ID: PAT_MRT4530_88667C.1
atggacatctctaggacaaatgaaggctacacgagctgcggcccggtagtcgagatgtcatggcacagggccggtgtcctgctgctaggggctcagtcctgcctacctgtcccgggggttccggccgtagcgaaggcccagcacacacaaagacaaacgggaaacagcggaagactagggcgacgaccacaggcgcttgacggcaggcacgagctatacaccaaagccttcatcttcaaggaactcctcttctgg

SEQ ID NO: 89956 - DNA, 294 bp, Oryza sativa
  Clone ID: PAT_MRT4530_88668C.1
atgggagaggaagatagtgccgtggaggcggacttgctcaacgcctcggtctccaccctcaccactggtgaaacaaacattgattcattccgccagcactacaccggagctgaagagcgcgccgccatgccaattcggagccggaaaagagcacgccgccgccacgccatgccgctccggagacgcggccacgagccgccggtggcaagggtggaggccgaggcgttgagcaagtccacctccacctccacctccacctccacgacactatcttcttcctttcccgcgcgctag

SEQ ID NO: 89957 - DNA, 1613 bp, Oryza sativa
  Clone ID: PAT_MRT4530_88669C.1
tcggcacgaggggaatcgcgacttcgccgccgcggccgcaacaccgacttcgccggcggcggcggcgatgggcaacgcgcaggcttccgcctcctccaccagctccccccgcttctccatggcgtccagggccttctcgaggcaggagctggacgacctccgcgcgctgttcgtctcgctggcggcgcagtcgcagaccggcggccgtgccatctcccgccccgtcttcctcgagtatttcgggatacgtggggcgctcggggatcggctgttccagctggtggcgagggagagcggcgggggtgagggggtcaccttcgaggactttgatcgtctccaaagcaacatacgagagaggaactcgagatgaagttgatgaattcatttatcaactatgtgatgttacaggagatgaagtcttagaaaggtctgatctggaaactatcttggcatctattcgtgaaaccatattttcagaaaataaggaagctggggaaggctcaaacaagaggacatttgaagcatttatcaactctgcagtattttcgaaggatgctgaaggagtcgcaaggaagtctatgtcgctatcagactttaggagctggtgcattctcattccatccttgaggaagttccttggaagtttgttgatgcctcctgattcaggcagaccaggcttccaagtaccagcgcttcattacctagaaaacatctccccagatttgctacttttaaataaagagtatgcttggcatattggaggtggtttttcacaacaggaggtgcaagaatggaggcttctatatcacagttctcttcatggacaaagcttcaacactttcttaggcaatgtaacgaatggagatgcacagactgttatcatcgttaaagatactgaaggatttgtttttggtggatacgcatcacatccttgggaaaggcacagtgatttttatggtgatatgaaaacattcctgttcaagttatatcctgaagcatccattttccgccctacaggagggaacagaaacctccaatggtgtgccgtgaacttcagctctgactccattccaaatggcattggctttggagggcagccgcatcacttcggttttttcctatccgcaaattttgatcaagggcactcatttacatgtaccacattcaccagtcctgccctttcaaagacaaataggttcaggccagaggtaattgaatgttggggcatacaaacgaagggggcacttgatgaaaaggcagagcttgtcaaggggacagtcctagagagattcaaggaggatcggaacatgctgaagctggttggtttggcgaacgcgagtgattgatgaactgagctttatgaaacttgtttagctgcaagttggtctgtactgtgtgttgtggctctattagatcaacttcaatgccgaattcgagatatgatgagagagaaactgactgtattttgaaacattgtctatttgtttgttaatataaatgttgactgctgaatatagatgtatgacatgtactttaataaaaagatactcccttcatttctaaaaaaaaaaaaaaaaaaaaaaaaaaaaactcgagactagttctctctctcc

SEQ ID NO: 89958 - DNA, 1233 bp, Oryza sativa
  Clone ID: PAT_MRT4530_8866C.1
ctttacgttctaccgttttagcctcttcccgagctctcccgtggtctctagccacctccccaccgtcgccctctctctcccacgttgccggccggcctccagccgcctctcccgcctcgccggagcgtcgtccggccgcgccgtcgcctcctccagcgtcgccgccacctcctccaccccggcttgctctccgtttcgcgaggtgacccccggagctgcgttcccgccgtcgcccttctctttccttcgcgccggccacctccagccgccttcctctcctcgcccgagcgccgcccggccgcgccgtcttctccctcggcctcgcagctgccccctctccctcggtcagccctccgtttcgcggggaaagcaccggagacgcatcctcgccggcgtccagtggcgtcgccaccacttctccgcctccggccgcctctgccacgtccccggagcgccggccgacgtcgccaccaccttcctcggctccacgacgccgctctcatccccggcaccacctcctcctcgcccgaacttcgccggaacgccgtcgtctccgcgccggcctctccttcctcctcgtcggctcgtcgccccgctgcaccaccaccttcaccaacgtcgcagcggcgtgttccacgtcgtcctcgtctccgtgcagccgctgccagctgtcctcgtcgcctcctcgccggtcccggtcgtcaccgtcgtcgtcgtcctctcgtcgttcccggtcgtcgtggcgttcgtccctccgtcgagccgttctcgtccgtcgtccgcgttcgtcaagcgagccgctgcagccccgtcctcgtgttcgtcctcggctccgcgtcgtcaagtctcgtgccggccgcgtctcgcctttgcccaaggatcgccgccgaagccgtcccctcgccgttcgtctccgttgtgcccgtctgtctccgccgcgcccgttcgtcgttgtcgttcccacgcctcgtcgcgtggtggtaaggtttcctcccctcgctgccccgtcctcgccctttcggtgtcgcccgtgctcgttgtgcggtcgtcgaccccggtacccgtgtaccggtgtcggtagtcgttcacgcgtgcgggtggtgaccgtgtagtgtccgctttagtgtgcccgctcggtagccgcgtggtttccacgtgtgcaacccgtgtggtgtctagtggagtccgtttgtcggccgctcgcctcggttgacacacgagatccgcttccgt

SEQ ID NO: 89959 - DNA, 244 bp, Oryza sativa
  Clone ID: PAT_MRT4530_88670C.1
agttccatccagacccatgtaccctccagctagtgctgctgtgaaacactcgtcgtcataccctgaagctagaggcagcaaggcattggcagtcctgtttgtttgcattgggggcattggtgcatctggaggtgtggctgtggacgacgatgaaccatcctcgaaagaggctgcaaattgctcggaggtatgtactgattggcctggggagcagcatgtcgtcatctcagttacaatccaatga

SEQ ID NO: 89960 - DNA, 1216 bp, Oryza sativa
  Clone ID: PAT_MRT4530_88671C.1
cggcgctggcatgcggggggtcacgagcgtgtcgcccacgaagcgggcggcaccgcaccgcaccgaggaggaggaggaagcccggcgaagtttcggtgggatacctgcctcgcgtcgccatcgaggagcagctatggtggtggcgagctagctcaaggtacgcacgcgcggtggaggaggaggaggaggaggaggaaggagaagaggggaggaggaggaggaggaggcagtgatggtcctgtgctccatgcgcaaatcgttcaaggactcgctcaaggtgctcgaggctgacatccagcatgccaacaccctggcctcggatttctcgagggattatgacggggcttgcctccagatgcggatgtcgtacagccccgccgcgcagttcttcctcttcctggtgcagtggacggattgtagccttgccggtgctcttggcctcctcaggattctcatttataaggtttatgtagatggaacgaccaccttgtcaactcatgaaaggaaagcgagcattagggaattctatgctgttatatttccctcactcatgcaactccacaagggtatcagcgatgtcgatgaccggaggcagaaggcaatctgtactgagagatacagaagaagagatgaggatgagagcaagaggcatgtttctgagattgatgtcgagagagaggaagagtgcgggatttgcatggagatgaataacaaggttgtcttgcccaactgcagccatgctatgtgcatgaagtgttaccgtcaatggcgctcaagatcccagtcctgccccttctgccgtgacagcctcaaaagagtaaattctggtgatctgtggatgctcacagatgaccgagatgtcattgacatggcaacgattactagagagaaccttaggcgcctgtttatgtacattgagaagctgcctcttgttgctccggacaacatcttctatgcctatgattctcataggatgttccttgtcgtaggatgtggctaacccccggacccgactgaactttgaccagagaacttgtgaattctgactagatcccatgctgtggtcagatgttgtaaatgcttgtacagatttgtaatttcccagtgtaaaaaaattagtgaggaaaaacccttgtgttcccccttgaactcctagtgtgaaattcccagtacatatatgctccttaaaaaaaaaaaaaaaaaaaaaaaaaaaaaa

SEQ ID NO: 89961 - DNA, 396 bp, Oryza sativa
  Clone ID: PAT_MRT4530_88672C.1
ttttttttttttttttttttttttttttttttttttttttttttttttttttttttttgaaaaccaaaaaacccaacacctaaaattattgggccgaaagggaaatcaaaaaataaaaaccccaaacaaaaaggcaccgccgcccttaaaaatgggacagctcgacacactaaaaccaaacaacttcaagtgttcaccaaaccccacccgttggggaaagacccccttatggggaaaaactactcaagcgcgttcccaaacaccgatgccaacaaaaaatgggcttgacaggggcagcaggccacacccagggtcaatttgaggccaacgtaggggggaaagaggttactctaaatgaaaaccaaacccaacccggaaggtggtacacgtaagggg

SEQ ID NO: 89962 - DNA, 150 bp, Oryza sativa
  Clone ID: PAT_MRT4530_88673C.1
atggggagggaggcaaaagaggtaaatggaggttttcacagaaaacaaaggacatatcttagatgggagcagtggataaagaagttgcagttcattaccattggttcaaggagtaaagccagagaggctggtacagggtctatctcctag

SEQ ID NO: 89963 - DNA, 581 bp, Oryza sativa
  Clone ID: PAT_MRT4530_88674C.1
gtcatggtaatgagcatatatgtacttggattttcacactaggagttcaatgtggaacacaacgtttttcctcactaatttttttacgctgcaaattacaaatctgtacaagcatttacaacatctgaccacagcattggatctagtcagaattcccaagttctcttgtcaaagttcagtctgctcctgaggttagccacatcctgcgacaaggaacatcctatgcatgaatgaataacacatgcgtcactctccgaaaacaattatgagtaggtcattatgagtagctctggttattttacatgagaatcataggcatagaagatgttgtccggagcaacaagaggcagcttctcaatgtacataaacaggcgcctaaggttctctctagtaatcgttgccatgtcaatgacatctcggtcatctgtgagcatccacagatcaccagaatttactcttttgaggctgtcacggcagaaggggcaggactagggatcttgagcgccattggcggtaacacttcatgcacatagcatggctgcagttgggcaagacaaccttgttattcacggacgcgtggg

SEQ ID NO: 89964 - DNA, 579 bp, Oryza sativa
  Clone ID: PAT_MRT4530_88675C.1
atgcatggcaatggtatgatggcgctagccagctccatctcgcgatcgagcaaagtgcactactactgtggaaaagatcatcacaaagtttgcaagtttgcagccattcatgcatattctagtgcgagtagtttgccaacaaatgtgaacattatggtactgatgattcaagttaaggggatcaaccgatcagatgtgtccaaaagacaaggaatcatgtctggctttgcaaaagggtcgtataaatcccttggttcccatcccatccgcgatggtaacagctcgctctctccgctgtattcggatcgagcgctagctactggcgactcgaagcggagcaacatggcgttcccaggcggtgccgacccttgtggcgacggtatcacggcatcgatccatcggctcttcctatctagccgtctgcccatgcgagacacatctatcgtgggcatagatggtgctgacaacagaacactccagcatgtatggtcgtctggcgacggcgctgagtccgtgattccgttgatccagcaagctggcacattaatactcgtttccctctccggcgcgtgtttggcg

SEQ ID NO: 89965 - DNA, 3391 bp, Oryza sativa
  Clone ID: PAT_MRT4530_88676C.1
ccacgcgtccgccaactcgcttgacttcccacccctcccagccagcagaaataaaccccctgaagctcccttggttcccaacatctctaccccgcccgacatggctggcgtccctagtgacctggtctcaaggccagaattgagctactgcatggtggctggtactgtcgaagtcgagaggctccatgtgctttacacggtgcgctcggtggtggcctggacaggtgaagggcaacatgttgatctcaacaccattgcagatgatgtccactcggcttaccgcattcatcgcaacgacatccaagtcaccaagtaccatctggaaaatttcttcctcacgttcaccatccatggtgatagggaggcagtcctgcaggagccaaggttggtgaccagaagtggacgggagtacttcttccggccatgggatgagaagaagaatgcagaagcagcggatatcattgaaggtgtcccaatgcacgcacgaacagaggattcagtggccaagctcattggtccttggtgctcggtgcactacattgaagaagacacgcgtcgccgcaactacaatcgcacctttgatgtctgggtgtggacgtcggacccaagctccatcccgaaggttttgcgtctcactgtcactagaccagatgaagaaggtcacccgatgaacactccttttcctgatcttgaaccagagcagccagcaccaagggagccgaagaagggtcttacttatccggtcatcatccacctgagatggctcactccatgtactcccctgacactactatcccacgccctgtttcccctgtctttatcctttcagctgcagggcaaggctctcaggcgacaactagaggaaaaggggagcagactgctgatgttttctttgctgaactctcgacgccggtgctgcagcctctgttgccggtgcctggacacaaacagcaccgcccttgtcgcaacaaggtgacaatctctgcacatcgtcacagcgcacgcctagctaccaaagctagatgaaacacaaaactagaaacaattgcacaggagattcttgcaaataagtttggtgttcttgatgataacaaacgtcttgacacccaaattaaaaatctttacttgcagcagtagaagaagcctctttctcctgcagctgtgaagaccatcgcagccctggtcgagaaaggtggctgcaaatcagtccgcctgcgtggaggaaggaagctggcggctcaatcatgtttcatcctgtattggaacataagagggctcaacaatccagcaaagaaagacagtgttaagttgctaattgatgatatgaaaggttcaatcgtgtgcctgcaggaaacaaaactataagtagtttcagattctgtggtgctcagaactctaggtagtcgttttgtctctgagtttgctttcctcccagcaattggaaccagaggcagtatgctgctggcctgtgatgacaatttttttagcctctcagatgtagttctttagcagtatagcctttcggcaacaatcacaatgaaaatggaatcgatatcttggtcaatcacagtggtatatgggcctcaattagaagagcaaaaaattgaattcctggaggaacttcaagaactagaagcaaacatgagaccggcttagttgttaattggtgatttcaacctaatctacaaagctgcttacaagaacaatgatcgtttgtatcgaagaatgatgcagcgttttaagggtgcaattgacagattgtgtataaaataactaaaccggaagacgttttacttgggcaagggatgggacaaaccctacacaaactaaaattgacagagccttctgtacacctgattgggataccctatttggcatggcccacatgtctggtctttcctcttcatgctcagaccatgcgcccttgttcatcgtgggctgtgaacaaagagagataaacatgaattttcgttttgaggctttctggctgaaattgcctgacttcatggaaactgtggctaaatcttggaacaggccaatcagatccatcaatccttttgcaaaacttcacctgaagttatgtcggttggcaagggacctcaggaggtggagtaaatcacatataggtgacttgagactgagactagccattgcaaacgaagtgattttccagctcgatgtcgcccaggaggatagaactttatctgacgaggaacagtgtttacacaaagatttaaaaatctctcagacctagaggcagattttgatgaagaagatatcaaagaagccgtctctaatctggcagcagaaaaggcaccagggcctgatggattcattggatccttttttaagaaagcttgggaggtaataaaatcagatattatacttgcagtctcacacttgggtgatctcaattcagacagacttcaggatctaaacttggcaaacatctgtttgattcccaaaaaagaagaggcatttagagtatatgacttcagaccgatcagtcttatgcattgttttgccaagattctatccaaaattctagcaaacagattggcccccaagctaaatgaactaatctctcagaatcaaagtgcttttatccgaaagagggcgattcatgacaatttcttatacattcagaatatgattagactgcactcccgacagaaaaaaaccttccctctttatcaaggttgatatttcaaaagcgtttgattcagttagctgggcatacctcctagaaacgcttcaaaactttggctttggacagaaatggcgaaattgggtttcaaatctccttgggacctcatcttcgaggattctgcttaatggcaacccaggtgaacacatctatcatgcacttgctaatctttttggctggcagaggcatttccgttgctctttatatgccgatgatgtggctctatttgcaaaaccttcagaggatgaactcacagtgcttaaaagaattctacagttctttgctcagataagtgggctggacacaacatgaacaaaactgaaatttacccaatatcctgctcagggctggacctcgatggaatcctgacttctttccctggaaatagaaagtctttcccctgtaaataccttggcctaccacttcataccagaaagctaaggaagattgatttgcaaccactggtggacaaaataggatcgagaattccaggatggaaaggcatgttcttcacatcagcaggaagggaggttcttgttaaatcaacactgacctctacaccaatctaccaccttgcagttttgccacaaaataaagggacaattgcttatttgaccccgtttcgctctgagggggtctgggtcggcggcagcggcggtctgatggggtgcggggcggcgctga

SEQ ID NO: 89966 - DNA, 484 bp, Oryza sativa
  Clone ID: PAT_MRT4530_88677C.1
ccggccggggccgcgattctcgccgtcgccggccgccaccaaccggcgaatcccccctctcgccgccgcggcggaggggctagcgatgaccaccgctcctgacgagctcatcggtagccggcgggccgtgggaggggaggcttctaacgccgtggaagaaactccggccgccgccttctgccgccggtcacctgctgaatctgaatgcttgaggttgatgaaccaaatggcatgtgcattgcttcgatgaaggaggccactgttgtaattggactagagtcacacgcccactgtaagaccagaccttgtgttttttttttttaattttatgtttccttctccttgccaaacatgaatcccaacaggactagacagactaacaggatttcaaactaggaaacacacagaggaccaaatcacttcaatcgaaatatcaaatgcatatccatatttgttgggtaaaaaaaaaaaaaaaaaagcggcc

SEQ ID NO: 89967 - DNA, 1536 bp, Oryza sativa
  Clone ID: PAT_MRT4530_88678C.1
atggccgccgccatcaccagatctagagaagggaggagggtggaggaagaggatgagaaagggccccagggagaaaggggggccggcgagcctcctcctcctctgccaccgccgccaccaggtccgcttcaacgccggtcttctctaccaccgccgccaccactagatctggagggagacgaccaggagagagactctcgacacctaatccggtcaaatttgcagcgtcaagccccaagccaatggctcaggcggtcctccgtgattacttggctccatatgttgccaacgtgcccatcagacccattttcaaacactggagatgcaaactttcagatcaagacgggtctcatcatactgatgcaggctagctcatcctgtggaaaagccgatgaggacgtagacgctcatctccagcaattcttggaactctacgataccattgtcatcaggcaagtagcaaatgagtcaattccagaggcatgggaaacacttcatgagtacatcctggcttatctgcaccatgggatggatgattggctcattgtccagaacttctacaacaggatgattcctgcagcctatgatcacatcgacagtgctgttgaaggagccttcttctcactgattgttgcttgtgctacagatttgattgagaggatgggcatgaacacagttaatgaaacagacatgctcgtcgctaaaatggatctcctcatgaagcgcttggatgaacgtgcttgtgataaggtggaggtgtccggaagtgttcttcatgaacaacaacaacaacaacaacaacaacaacaacaacaacaacggtttcttatagctgttcagaatgtgcttgtgttatgggattctgtaatcctaactggtgttcttgggggactacctcattgtcactttgctatgcttgctcactcttcccaatggacacaagctcaaggaccagaatctaatatgcagaatgtttcctactcgctactggtgacacacattgttcaatttgctttgttggttgttgttctgctactggtggctaagattgaaaggcatggggaaagccgacatatacgcccagtgacaacctcggcccagttgggagtggagacccaacaatttgaaggtgttatgctggtggatccaatctcatgcatccctccttatgccaccctaattgaactgccagctgatccttttcctccagataatatttcaagtataccttcgctcaaaaagtgcaagaaatccaagggaacaaatgttgtcattactgacacagatagaaggagtgctcgcctaaacaagttgactaagggtttcttgtctcctaatcccaatgttgcaattggcaaggcaagggggaagagtgcaaaaatactaaagttaattgctgaacaaagtggtataatctcttccctgcgtcctcttccccctagttttttcaatccagatgagggcaatgaactagagaggtggagctgggttttggctgctccacaactccactccagacataactcctggagctaa

SEQ ID NO: 89968 - DNA, 380 bp, Oryza sativa
  Clone ID: PAT_MRT4530_88679C.1
aacagaaccggtttttaaaactcacttcaattaaaggggaaccccaaatggcaggtctaaggttttgggcaaaaaaaaggccaatacaagggccaaaaaatcaacttaagttaaaaaaagctcacagggatagggaaaaaaaaattccatacccccaacccagcaacacaacttctgggtagcggggtcccccaagaaaattttccctagattttgggaaaagaaacatttttaaatggaccaaatttcccgtttttgggccaatttagggggaaaagcccccccaaaattttaaaaaggatgatcccccccaggacccaaaatcccaaaggccccctgaaaaaatggttggcacagctttggaagaaattttgggttgg

SEQ ID NO: 89969 - DNA, 1729 bp, Oryza sativa
  Clone ID: PAT_MRT4530_8867C.1
atgggagagggaggagtcgggcgggaggaggacgacgaccgggtgggtggcacccaccggtccacgcgatcagcgcgcgtgcggcgcgcgtgcgcgggagggctgcggctcgggttgggccagggcaggcccaggcgggaggaggataggagggagtgggccggggaggagaggagggaggggcggcccgagaaccaaggagaatttaacgaaaattctccgggccacattcaaatttttcttgacgtgacactcttcttgcacaagctgccgattggcttggatagttgcttcaatgtccttccgctcccgccgatcggctatccgttgcttaggcctttccagcttgaattgatgttgctcaacgaggtgaaggaggaggaggaggctgaaaagacaaagggaatcaaggtgagtggtttacccttgaaaagtgagcaggggcagcaagagttggaggagtttgcttggaaattcccgaatagaatttcaagcagaatgtgcattaaaatccccgtccaggaccggccggggtacacaaacgacaatgttgacattcagatccacgtcggaaagaggtcgtgacaggacccttcgcataaccccctctagccaagcacaccacacctcaggtttcacccccgttcccagcgggcaactggcagtcccctctcgtgcctaggtgaatccgaaagcgacagaggccgtcgcagggcccgccctgctccatcacgcccacccttgcttgggagcgtcggctagagaaaagctacactacaaacccagccgttgcccacgctggcttgtggcgggccccacacgtcagcgagacaaggaggtcggtccaccgtggaccgggaccacaagggcggtccaccgccggtccacacggaccgacggcccagatcagcccgagctgatcgggcggccacgggatggcgcggctgggcacgggcacggctcaggccggcccggccgagcgacggcgcgcggcggcgcggtcaccggcggcgacaatcggcgatggcgcacgcgggcgacggcggcgcacgcgggcggcggcggcgcgcacggccggcgaagaggagggggaggaatgagggcttctcacccgggtggcggccggagcggaggaaggcgacgacgacagcgatggtccggcgacgttccgcgagcgggaaacggcggccgatggtcggaggggggaagatgagtccggcgacgactggcgaacacggagggattgccgagccacggacgacggctgcggtaccggggagggcgacggcacagcacggggcggactgaagaggcggcgcggcgcgtccggaggcggaaatggcgacggtagctctggttggtagtggggagggcggctcggtggtggattggaggaacgaggaggtggccggtgctcggcttggagaggtgaagccgacagtggcggtggcgcggcttggcggtggctagcgtggcgaggagcggcggccggagttcggcggcaagcggcggagagaggttacacggtggggagggcgggagagggcgcggggagctcgggaatttggggaaaatgggagagggggccccgggggatgctttttataggtcccggaggtggagatcgtggtcgtggcgggcggcaacggccggcggagggagctccggcgacgtgggcgagtggggcttgaacggcgccgatttttgggggaaaatgggggagaaagtg

SEQ ID NO: 89970 - DNA, 336 bp, Oryza sativa
  Clone ID: PAT_MRT4530_88680C.1
atcagcatccacatacaattcacaacaggtactttatcagcatccacatacaattcacaactggtacttcacaggcatcctcgtgatccaaatgctaaagccaaaaaaaggacaagagaataaaactcacggaactagctatgatagtttaaccatggataacacatcaccacttcatcttaacagccagctttcagaactcagaactgatgccacagatagctaaatttagagggcggcattcactggccacagcatcgaccttcaccatgtcaacagaaaactagggagaagagcactgttactcaatcttcacagacaactagggtagaagag

SEQ ID NO: 89971 - DNA, 711 bp, Oryza sativa
  unsure (1)..(711): unsure at all n locations
  Clone ID: PAT_MRT4530_88681C.1
ctcaaagtgtcgcctccctttgttgacgtacctgcgtatcaacataagggatcttccaaagcctccttganccctaaatataagagtttgggtngaaccttgaatctgggatttacccctgctggaattgcaccccgctggtttcctggcctaaaccttgttgggatgatgacgcaagggtggcaagtataactgtgcctttgcttgctgcgggtggattggtttgaccaattgggaaattttggggctactatttctaagcatacgcctaaatgtgtgagtgaattcgccctttgctgttgttggctgtctgagggcagacttagctggtggctgatgtacagctgtgctggtnatggctgttggcctgactggtgagtgcatgacagcgtggataatgccggcctgagtggcttatccatgatatgagggaacctggaaccctattatgatgggacccaaatgtgttgtgcggtggtgatgctccctctgttgggtaatgctggaccttgtgtggtgacgtggtggatgcaccacgagcttggctggccccaagaccctggaaatatgtgctagnccgnggattctggccttggagagttttcacangtaccaattaggactgtaaaccttttcctgaagancttctaaaaaaataccaatctctattaaaatatttaaaaatncctccaaaaaaaaaaaaaaaaaaaa

SEQ ID NO: 89972 - DNA, 198 bp, Oryza sativa
  Clone ID: PAT_MRT4530_88682C.1
cactggtacctatcaacgaagggcggcaagttactccgaaggacgggaaacatcatattacctttccagcaggcatttgtactgagattgacacgttcaggagctgatccagaccgatgggttaattagacacagaactgattacactgtcaaatgatacgtgttcctatcttagacttgggagcagatggtactaac

SEQ ID NO: 89973 - DNA, 429 bp, Oryza sativa
  Clone ID: PAT_MRT4530_88683C.1
gggagctagaacactgtttctaccatgagatagtttatccccctgtagttctgttcatcaaaaattcaccacttaacttacccccttacccattcattcagatccatgcctgccggaaaccatttccccaacacacccagtaagtttgaattttattacattcatttttttttttttccttcccccaattcattaacatttttttcattcgtcctccacaaaaaaaaaacaaaggagaaccccggtggggacttctttcatcgcccaattattggtttcaccagcctgaacttattaagcttcttgagatgccctggcccttatgaaattgatcacaccctcaacctgacagctttttgattattgttttttgccacgggtcaaacaggtgcttcaacaatgttttaaagggccccttttgcgtcacgt

SEQ ID NO: 89974 - DNA, 984 bp, Oryza sativa
  Clone ID: PAT_MRT4530_88684C.1
atggcgtcgaacatcgggattgcggagaccaagaacgcgcgccgccgctcggaggcggcgagcagcacggccgtcgacgccgcgcgggaggaggcgacgatggcgtacgtcgaggcgcacggcgggcgcaaggacaagctgctggtctcgtcggagcggccgcgcgtccgcgtccgcgccgacgcgctgcgctgcctcgccgtgcccctgtcccgcgacggcccggagaggcagatcaccggggtgctcctcgacgccgccctcgacctcctccgccgccgccaagccggccgccgccgccgccgcaacggccgtcgcgtgctcctcggctccgtcgaggagcaggactggctggagtacgtcagctccctcccgccaagaacggcggcggcggcggggcacgacgcggacatgtcggccacgggcgccaggtacctcgcccacgacacggtgctcttcccggtgaaccaccagtcccacttcttcgtggcggcgctcgacgtcgccgccggcgagtaccggatcctcgactcctccaactacggccgccgcttcggccccagattctacgacgccgccatgtccaagatacggggcggcgtcgcgcggtgcgtggcggcggccgggcgggcgggggcggaggcggacgccggcggatggaagctgcggatggtcgccggcctcccggcgcagaccgacgagtcgtcgtgcgggctcttcgcgatcaagtgcatggagctctgggacggggagaagctggagcgggggttcaccatggacgacgtgcacgagctccggcggaagctcgccggcgagctcatcttctgggagctgaacgagatgcaggaggtgaaggatgagatcgagttcatggcgagaaagatgatgatgatgatgagttcatcttctcctctgcgaaattgcggcgatcgtgtgaaattggcaacattaggaggagcgggaggagttcgtgtgtgttactaa

SEQ ID NO: 89975 - DNA, 1740 bp, Oryza sativa
  Clone ID: PAT_MRT4530_88685C.1
atggggttggaggaaagccaaaagcatctccttggccttaattaccatgagctccaatctttgtgcaaacagtataatcttcctgcaaacaagagtcactctcagctagcaagctcgcttgccttgtttcttgaggttgccaaggtagccataaaagaggtccgcaaagtgaaagagatgatggtgatagacctcttctgcatgctgctggatataagctctttagtttttaataatataaggaattccttcagtatagaccagctggcgatggactctggaaccagagtgagttctacaccagtttcaatcaacaatggaaaagtagactgctttagccactcacctcctcgtcaagtgattgcttctaatgtacattcacaaagtgctgatggtattggaaagaacttgggaactcaagagcatccaattcatcttgattcaactgctaaggtagatgatgaaatttctccggaaacaagctaccaggcacctaatgttgttgaaacagttacagatattggtagtggctcatctcataagatctcagaaaatgcaaagtcttcgtttgaattttttgtcatgtcagatgagggacttgatcttgttgttgatctgaattccactccatcaatgttacttgatagcttgaagaaggaagtgttcatcccctcaagtacctgtcgttctgaacctggaaatttctctcattttatcagtagcctgacgacaaaagatgacagcaacaactccatttcttcatctgggaatattactgtggacatacaaaataagggagatgacagcattgctccttgcaccaattcatcactaggctcaaccggtggtgacaattctcactcagagccctatctgcctgatgcaactgctgtaaactctatgtcatttgcatccacattacctggtacttcactagaaatttctggatcacaggagggagttccagtcgtatcttcttcatgcttaacctctatgactgctaatgctttgaataatgaagtgcttcctcaagaatctgttgtgctctcaaagtgtccggaaagaaaccatgctccccttgcttatgattccacacatccaactggtaacaaagacacagtcaatcctgtcaaaatcggttgcactcaaaatgttgttgctgatactgatagagctggagcattctcctcagggggtgtggttagaagtgcctccaatgaaaacttctgcccaacttctgaagaaaaacatgaaacgttaaatgttcctggagcgcagcttacccccaacggtaatacccatgaagttatattggaaaatgaaccagtggaagcagtgccagtggatgaagatagaggttgtcatgacaggctgtcaatgtcttgtcaactagccagacaaacagtaactaaactgccagttacagatgcccagtcagaagctagttctgcagatcattgtattgccggaagcttcaaacccacaagcccaacgccatcacctgctgcttcgatcaaattattgacctttaactttcttgtgcagggcaatgcttttagctccaagcatgatgcagagtcagcacagagttctgatgagcttgaggagttagagagcaagacaccatcaagttttgaacctcccagaaacatactacttagcttaagaagtgcttctgctaaacagaccaaaccaacattacctagaaggtcagcaaggcttgttccaaagtattactag

SEQ ID NO: 89976 - DNA, 1533 bp, Oryza sativa
  Clone ID: PAT_MRT4530_88686C.1
ccgggggtggacttcgacgaggtgtttgctccagtggcacggctggagtcgatgagaatgctgctcgcgcgggcagcgcaggcaggctggcctgtccaccacatggacgtcaagtcggcattcctcaatggggagctcaccgaggaggctcggcacgcatggaacgcgaagctggacacgagcctgctgtcgctgggcttccggcgcaatgactgcgagcacacggtctacgggcggggcagtggcgacagccgactgctggttggcgtgtacgtcgacgacttgatcatcaccggcaacgtagtgatggagatcgaccgtttcaaagcggagatgatgtccctgtttaagatgagcgatcttggtcccctctcgttctacttggggattgaggtcgaacaggtggcggacggcgttcgactgttgcagaaattgtatgcacaatgcatacttgagcgagccgggatgcagggatgtaattcctgctcgacgcctatggagcctcatctcaagttgaccaaggcgagcacagcagcgatggtggacgccacccagtaccgcagcatcgtcggctgcctgcggtatctggttcacacgcggctggacctcgcgttctttgttgggtacgtgagccgcttcatggaagttccaaccaccgagcatgacgtggcggtgaaacgcatcttgtgttacgttgccggcacggttgatttcggctgctactacaataggatggagatgccacctgagcttgtcgggtactgtgacgcagacatggcaggcaatgtcgacactcgcaaaagcaccagcggggtcgtcttcttcctgggcgccaacccggtcagttggcagtccatcaagcaaaaggttgtcgcgctctcgtcttgtgaggcggagtacatagtggcgatgacggcggcgtgtcagggaatctggctggcgcagctgctgagagaaatcgaacaagaggagccacaaagcttcaagcttctcgttgacaataagtcggcaatcaccctcagcaaaaatccagtgtttcatgaccggagtaaacacatcgccacatgctaccacttcatccatgagtgcgtggaggacgggagagctcaggttgagttcattggcaccgatgggaaggttgctgacattctgaccaaggcactcgggcgggtttgttttcaagaattgcgacctcgtatcggcgtcgtcgaggattcttggcaaaggccaattctcgccacaaacagcctagccaatttccgcttgaaactacgacgtcttgcccgcgacattaagagatggagccgtaatcaagttggagatatcaagttacaacttgctgttgcatccgaagtgatattccaactagaggaaacactggatcttgcacagctggaagatgatataacggaagaagagcttaaggtgactgttttctccatgccacctgagaaggcactggggccagatggttttattggggtgttcttcaaggcagcctgggagataatcaaggaggacctcctaacaaca

SEQ ID NO: 89977 - DNA, 1815 bp, Oryza sativa
  Clone ID: PAT_MRT4530_88687C.1
atggcatataagctacctaaaaagggaaatcataaccatgatgaaaatagaaggggctacgatgacaaattcaaagctataattgctgatgagaggacgtataagtggaattatttaaaggataaacaaaagaaggttacgttgcaaataccagtgctatatcctagcaagagtagcatcaggccaccgtttacccagctaacggataaaaacataggtccaatggctaaaggtgattccaagtcaaatcatgtgcttgcacctatgctcagaaaggaaggattgctagctaactcgattgaaaagtcaaatccacaactaacgtccccaattcgtgcgcacccaattcatgcattggtgcgcacgaagaaaggaattccagctagatcagttttaaagtcaaatccacaaccaattcgcccaaaacaaatgcgtggatcggtacgcggtgttagcttaaaggggcaatcaacaatggcaaatgataatagtggtgaagaattgaaatcttgcaaggtgaaaaattattctatttcaaaagagtctgcaaaggaactcatggtgcacaagggcaattcatacgaagacaataaatgtgataagatatgtggtgaagttacgatgggcgatcgtaaacatcatgtaaatttaggctcaactaagagtttgaagagagattacattccttctacatgtggtgatcattataaggataacacgaaggggaatgaagttccaaatcctagcccattaacaaaagatgggcctaagaaacatgatagagatgagtgtgaagattataagaatctaaggcctactaagaaacggagacgatatattgtaaatgttgatgaagaggatgattatgatgacaaaaatcctatggatattaaagattcaaccaaagtcgctatgccaattgccgcagagtctatcaagagacagttctatcattgtatacaaccaattgatgaacctatctggagcggaatctttaagattgggggcaatgattatataccattctcagcacatctatcaactaaatcatgcaagaaagtgtgggatttgtcggtatcaataccttcaattgtccaagtgacaaagctttctaggtcagtggtctggcctaagagtttggaggcatcaagtcccacagatgacagcattggcttgtatttcttcccccctaaaatgaggctagataaaggcatggatcagctagttaaggaaatcgtggagaaggatatggccttatctgctgttattggtgaagctcagatgctaatgtttccttctacactattgcctgaaaaatatcgaacttttcaagggaagcactacctctggggagtatttaaacgtagaggaggagacgagcaacaagctgcagccatggcggctgagcagcagcgtggttcagatcagcgtgtcaagcaggagcaagagaacacacagtttcagggtgacgagacacagcaacggatcaagaaaccaaacagtaacctgcaggaaacggcagtgatcaagcagcagccgtcgtcgccgtcctcgtcgtcggtgacggctgcccacattggcgtggacgtagtgcaggagaagagcacggcagctagcggagggcgtcctgctgtgcctgcagggagccatggaagggtgatcggcttggtggtccggcaaactccgggggtggaggagctgatccagcagatgcggcgcggaggcgcgctgctggctaccatggagggggagatgatgggaggttttgaagcaaacgacgacgacggcgcgaagaaattcaagatggtggagtga

SEQ ID NO: 89978 - DNA, 4353 bp, Oryza sativa
  Clone ID: PAT_MRT4530_88688C.1
ccagcgggcggagcggcgatgggtgggtggcgggcccgcgcggcagcgaagcggcggcgggcgggcagagcaaccccgtcctcttcgtgctccgccccttcgtcggaagcgagcggaaggcgaagcaggtagggggcagcggtagagcggcgacgggcgagcgcgacaacgggcggaaggcggtcacgggcggcgggcggagtggcagagggctggtgcttaggcgcgtggtcaaggaggtggggggctcagccaactatccgatcctcacgaagacgaactacagcgactggtccctcttgatgagggtaatgctccaggcgcgcggcctctgggaagctgtcgagacgggtgacgtcgacttccaggaggataggatggcgttggaggccgtcctcaaggcggtccccgctgatctgctgccggtactcgctgtcaaggagacggcgaaagacgcctgggatgccatcaagacgatgcgcgtcggcgtcgaccgcgtccgcaagtccaaagcgcaggagttgcgcaagcagttcgacgcgaatgagttcaaggaaggcgagtccgtggagttctccgtccggctgagtgggctcgtcaacaaccttgccgtactcgggttccagctcgaggaatcaaaggtctgtgaaaagtttcttcatgttgttcctgatcatcttgagcagattgctttgtccatcgagactcgtctgagaaatgcggaggaacgccgtcccaagaagaagtccggtgatgagggcggcaaactgtatctcattgaagaacagtgggctgctcgcgccaaggaacggcagtccggtgagggatcgttgggcaagaaggcgggcaacaaccgtcgccgccgcggtggccggaagaaatccaaggccgctgcggatggcgagcgtggcgcgcgcgacacgcacgatcaagggcgtgataagtgcaagaactgtggctgtctcggtcactaggcgaaagactgtcgtcagcccaagaaacaagtcgcggcgcacatcgcccatggtgaagaggaggatgatgagccagcgttgctgatggctcatgccattgagttggcgccacctccgtcggcgtccccgcctccagcggggttgctcgaccttgatgaacccaaggtgttcgctcccctgcatcgccaggaacacgttgacaccggtgtgtggcaccttgacaccggtggtaccaatcacatgcccggcgtgcgtgatatcttcgccgagctcgacactgctgtgcgcggcaaagtccgtttcggcaacggctccgtggtcgccattgaaggccaaggtaaaattatcttcgagtgcaggaacggtgaacaccgcgcactcacaggggtgtactacatccccaagctcaacgcgaacctcgtcagtctcgggcagctggatgaaaatggctgcaacgtccgcatctttcatggcgtctgcacgatccgcgacaccgcgcgacagctcctcgctcgcgtgcagcgtacgcgcaatcagctgtacctgatcaagatcaccgtcgctcggcctatgtgcctctcagcacgcacgcaggaggccgcgtggctgtggcatgctcgcttcggccacctctacttcgacgcgctccggcgactcgctcgacaggacatggttcgtggtcttccccaaattgatcaagttgagcaactgtgtgactgctgcgtcatcaccaagcaacgacgttcaccgtttccctggcggtccctgttctgcgcggaggatcgtttggagctggtccatggtgacctctgtggtcccatttcgcctgcgacgcccggcggcaagaaacactttctgctgttggtcgatgacgcgagccgctacatgtggctcgcactgcttcagaacaagagggaggcggcagtggcgatcaaacgcttccaagcccgcagcgaagctgagtctggctgccgtctcaagctccttcgcaccgacaatgggggcgagttcacctccgccgagttcgccgcgcattgcgccgagagcggcgtcaagcgacagctcaccgcgccgtattccccccagcaaaacagggtggtcgagcgccgcaaccagacgattctggggatggcgcagagtcttctcaaggccaagtcagtgccggcgtgctactggggggaggcagtcactacggctgtgttcttgctcaatcgcgcgccgaccaaatgcttggacaacaagactccgtatgaagcttggtttgggcggaagccggccgttgggcacctgcgcacgttcgggtgtctcgcgtacgtcaaggatgttcggccgcatgtcaccaagctccaggaccgcaacaagcccacggtcttcctcgctacgttgagggatccaaagcctacaagttgttcgacccgaagtcgggtcgtgttcaagtgacgcgcgacgtggtgttcgacgagggcgccagctgggattgggatgccactgatggtatgcattcccctccctcgtctgacttctctgttgaatacattgtcactcaggagccggaacgtgcggagttgtccacgccgacgctggccacaccgagacatggcgcggttgcgcacgacgcgccgtcactgacggcctcactgctcaatgcgaggtcaccgagattcgtcagcccgccgcaggacggcgacgacaacctcgacgccgacgccgacgactgtccgccccggtaccgctccatcgatgggattctgggggagcgtacacgccgggtctagcaacaagggacctggcggacggcgagctttacttgctggcggcggaggaacctaccaccttcggcgaggccgagcatcaccaagagtggcggcgtgccatgctgcaggagatttcctccatcgaggacaacaagacctggcgccttgtcgacttgccacccggtcatcgcgccatcggactcaaatgggtctacaagatcaagaaggacgcgcgtggcatgatcaccaagcacaaggctcgtcttgtggcgaagggatacatgcaacagccaggggtggacttcaacgaggtgtttgctccagtggcacggctggagtcggtgagaatgctactcgcgcgggcggcgcaagtaggctggcctgtccaccacatggacgtcaagtcggcgttcctcaacggggagctcaccgaggaggtctacgtcaagcaacctcctgggttcattgtggacggacgcgaacatcaagtgcttcgcctggacaaggccttgtatggtcttcggcaggctccacgcgtgtggaacgcgaagctggacgcgagcctgctgtcgctggggttccggcgcaatgactgcgagcacgcggtctacgggcggggcagtggcgacagccgactgctcgttggcgtgtacgtcgacgacttgatcatcaccggcaacgtggcgatggagatcgaccgtttcaaagctgagatgatgtccctattcaagatgagtgatcttggtcccctctcgttctacttggggatcgaggtcgaacaggtggcggacggcattcgactatcgcagaaatcgtatgcacaacgcatacttgagcgagccgggatgcagggatgtaattcctgcttgacgccgatggagcctcgtctcaagttgaccaaggcaagcacggcggcgccggtggatgccacccagtaccgcagcatcgtcggctgcctgtggtatctggttcacacgcggccggacctcgcgttctctgttgggtacgtgagccacttcatggaagctccaaccaccgagcatgacgcggcggtgaaacgcatcttgcgttatgttgccggcacggttgatttcggctgctactacaaaaggatggaaacgccacctgagctcgtcggatactgtgatgcagacatggcgggtgatgtcgacactcgcaaaagcaccagcggggtcgtcttcttcctgggcgccaacccggtcagttggcagtccatcaagcaaaaggttgtcgcgctctcatcttgtgaggcggagtacatagcggcgacgacggcggcgtgttagggaatttggctggcgcagctgctgggagaaatcaagcaagaggagccagaaagcttcaagctcctcgtcgacaataaatcggcgatcgccctcagcaaaaatccagtgtttcatgacaggagtaaacacatcgccacgcgctaccacttcatccgtgagtgcgtggaggacgggagagctcaggttgagttcattggcattgatgggcagattgcagacatcctgaccaaggcactcgggcgggttcgttttcaagaattgcgagctcgcatcagcgtcgtcgaggtcagttcacggtgccaggcttagggggagaat

SEQ ID NO: 89979 - DNA, 168 bp, Oryza sativa
  Clone ID: PAT_MRT4530_88689C.1
atggagcgggatgggccctgcgacggcctttgtcgcttccggattcacctaggaatgagagtggactgcccgctgcccgtggggagtgggggtgcgatgacatgctggtggattgtgtcttgtgggtacagtggtgcatctatggccagagtaaaactatttgaatag

SEQ ID NO: 89980 - DNA, 276 bp, Oryza sativa
  unsure (1)..(276): unsure at all n locations
  Clone ID: PAT_MRT4530_8868C.1
ggtcggcgccggccggtgcggcaatggtgccgggcggggaggaggcggcggcgaggaagcgctacgacgcgctgatgcaggtgcgtgccaaggcggtcaaggggaagggcgcctggtactgggcgcacctggagcccgtgctcgtaccgccgccgggttccggcgtgcctcccaaggctgccaggctgcggtgcgtgttgtgcgcggcgacgttctcggcgtctaacccgtngcgnacggcctccgagcacctcaagcgcggtgcnccccaacttc

SEQ ID NO: 89981 - DNA, 582 bp, Oryza sativa
  Clone ID: PAT_MRT4530_88690C.1
ggatcccgggctgcaggcttttgtcaagcacatgtttaaaaaccgtaatctttattaagttacaggtttattgctaacatggcagacgatgggttggataatactgctggagctgttgcttccgaattgccagaaattaaactttttgggcaatggtcttgcgatgatgtccatattaatgatatggctcttcatgattacacatcagtcaaagataaatatgcaagatacgtacctgagttcagcaggtagatttgctgcaaaaagatttaggaaagctcaatgcccaatcgttgaaagattgacaaacagcttgatgatgcatgggagaaataatggaaaaaaattgatggctgttcgtattgtcaagcacagttttgaaattattcaccttcttactggagaaaaccctcttcaggtcttagtaactgcaatcattaattctggaccaagggaagattctacaaggataggacgtgctggtactgtaagaagacaagctgtagacgtatctccattaagaagagtgaatcaagctatttggcttttatgcacaggtgctagagaagcaggtttcagaaa

SEQ ID NO: 89982 - DNA, 618 bp, Oryza sativa
  Clone ID: PAT_MRT4530_88691C.1
ttttttttttttttttctacaggataatatttatttatttccattggaatgtagaagtcaatatcttacatatagccttccagatgtctaaggtctctaagtaggaacagcaaaaaagaaaagaataacaaagatgacaaaacaatgtaatggctgtcattacacacttcagatgagcctgaatgtacaattttcccagtgtgcaggcggcaccaaagtcactatctcccggacattaggttgaccaaaccttggttctcatacaggttgttcatgtcccagaactcacttgtggatgaaagcgtcatcagcgcgacgaccacggatctcattgaaggcctcagcttggggtcttcttgtgtgcacacctttgcgagttgtgtcagcttgagaatggaatcaataggataatcttctcctagctttggatcaatcaacgtcctaaggccttccttgggatccggcgagttgagggcctcctcaaacagataaaccagcccctttgaatcacttgaagattcggttgatctgactatggcttctttcgctgaaataagttcgtagaggacaacaccaaaggcgtagacgtcaaccttaggagaaacatctccatatcga

SEQ ID NO: 89983 - DNA, 650 bp, Oryza sativa
  Clone ID: PAT_MRT4530_88692C.1
aaaagagagaaaaagatggcacacgagagcggcgacactttgcttcgcttgggtttcatcgtcgtcccctcctcctccttcctttgacctcggctcgatcgaccatcccgcggaggagacgacgccgcggcggcggcggaggactcgccggcggcggggatggacgtgccgtggctgctggtggcgcacgggtcggtgacggcgctggtggtggtgtccttcctctgcgggcagtggcccatcttcgagggcaccttcgtgcagcgcatcaaccacttcctcaccttcggcgcctaccaccacctcctgcggctcgtccacgcggcgtgcggcaatggggccagggatctcgtcctcggcgtcgagagctactgctgcgaccggcccaacccgatcctgcagattttttacgttgccataataggggtaacatattttataatcgtccagacatctttccagtacattcctgggtactatgtgagtggactgcacagatacctgagtatcgtggctgttgctattggtgctttactcttcgtgctgactagcttttctgatcctggaactgtcactgctgagaatgtttctcaatatctatctgcctatccatatgatggcatcatttttgaggagaaagagtgttctac

SEQ ID NO: 89984 - DNA, 1248 bp, Oryza sativa
  Clone ID: PAT_MRT4530_88693C.1
ctccttgcctccctgatctcctcggggggggcaggtgcaacaatggcttcctcctccgctgctccgatcctgctgctggagctggccgccgcggtgctgctcgtgctccaacgagtggctgccgcggacgcggtggtcaccacattccccggggacgccgcggcgctcgcgtcgctgaaatcggccgtggacgccgccaccgtgccggcctactcctgcctcgcgtcgtgggacttcgcccgcgacccctgcgccgctttcccgtgcggcgtccgctgctacgcgccgcccaactcctcctcctaccaccgagtcaccggcgtgtcgctcgacccggcggggtactccggcacgctccccgccacggtcctcgcctcgctccctttcctcgcgttcctctccctcgccagcaaccgcttccacggcgcgctcccggcggggtccccgctgccgccgagcctccgcgtcctcgacctctccgggaacgccttctccggcgagataccggcgtcgctcttcaccccggcgtcgtctctcgaggagctctacctctcccgcaacgcgctcaccggcgccatcccgccgcaggtcgcgtcgctgggctccctgaaacggatggagctgcagcacaacggcctcaccgggaccctgccgcggatggacgcgatgcgctcgctcgcctacctcgacctgagcggcaacgcgctgtccggctcgctcctcgacgcgcccgggcggctgccgggctcgctcgtctccgtcgtggcgcgcggcaacggcttcgcggggccgctgcaggccgcggcgctggccgccctgcccgcgatgcgggtgctcgacctcacgggcaatgcggtgtccggcgcggtcccaggcgccgcgttcgcgcacccgtcgctgcagcaactgcggctggggtccaacaagctcggcgccgtcgaggaggcgcccgacggcggcgcgtcgagccagctcgtcgagctggacctcggcgggaacaggctgaccgggcggctgcctggatgcgtcgcggcgatgccgcggctcgcggtggtcgggcttgaccggaacatgttcgccggcggcataccggatcagtacgcggctcgggccgcggcggacgggcccacggacaagtgggtcccatttgtcaggctcatgctgcaggggaactttctctgtggggccctgccgagccagctgaggcagctgaaggaggacggcgcggtggttgaagaaaccgtgtaa

SEQ ID NO: 89985 - DNA, 326 bp, Oryza sativa
  unsure (1)..(326): unsure at all n locations
  Clone ID: PAT_MRT4530_88694C.1
aactgtggttggccaggccagtaggattgaaaaccccacttgggcttcattgcaattcatagcttcacctttttttttcagtctgtagtgttatttcggtgaaaggaaagcgctcgcctcttatttcagtgtatatgttgataaatatttcatgtaccgcttcacttgataatttgccaatgcgtagtgttgcaaatgtctaatttcatcgcatctcctagaatgtcagaacggatgcagctgctcagctgcagatttgacatatttcctcgatttttgttatgaacatgcaaatgaatgatttttttttaaaaaaaaaannnaaa

SEQ ID NO: 89986 - DNA, 225 bp, Oryza sativa
  Clone ID: PAT_MRT4530_88695C.1
acaacagtaaaaatcactactatgcgtttgcctaagaccgaagagacattgaggatgccgaccgcccatgtgaccatgcagactaatcatgctgacacactaattgggcagaatgcgcataatgagcgacttcatttacttgaagacttatacatgacctttcctctataatatatcctccatacaggtctagtagcggctttgaggcaacctcactcagagcct

SEQ ID NO: 89987 - DNA, 207 bp, Oryza sativa
  unsure (1)..(207): unsure at all n locations
  Clone ID: PAT_MRT4530_88696C.1
atggtgtggaaatggccctggtatatttatggttacagaagtaatccgcaagcgcacggatatactattgtagcatttcacccggaagtattccaagtgcctnctagggctcgagagacaacccggtttgcgagttnttacgacacctcgtcatggccgtcaactggngctaaatacngaccagtaccctcccagaaaattgcttag

SEQ ID NO: 89988 - DNA, 270 bp, Oryza sativa
  Clone ID: PAT_MRT4530_88697C.1
atggatcttctgaacaatgtctccaaggaggaaaacaacgccaagagcgccgccgccgcctgtcctaaagaatcaagacatgggtttcacctgaagaaaccattctccggcaatggccacaaccttgtgcgccacctgtacgccgccaacctactcgtgcattgcctgccatggccttgcatgtcgtcggcctcctttcacgctctttgcgccggccacacgcagatatcactgcccatgcggcactcctgcacgtcgcacctctactga

SEQ ID NO: 89989 - DNA, 1383 bp, Oryza sativa
  Clone ID: PAT_MRT4530_88698C.1
tcagattttagaggtgatcatgcctgcccgcttcgccgagctaccactcgctggccggagaccaagatactccgccgtcaccggcttgaagatgcgccccagccgctcgtcggactcgagcgccgccgccagcctcggccacagcagcgcgctcgcgatccacgacccgtcgccgccgccaggccgcgcggcgatctgcacgaaccccgtgcacagcctcgcgctggaggacgacgtgggcagcgccatcgcggcgtggccgtggccgaagtcggtgtccacctcgaacgacgcgaacgccgtcacgctcaccgccgggctgcccagcccgacgctcgccgtgtcgatgtaccgctgcttcccggccttgtgctcctcgacccagtccacgagctcctggaagtgctcgccgtacgccggcgcggcgatcgcgtcgcgcgccatggacgccacctccgccaggggcttccgctggatctcctccatggtggcctccgcgaccgcgaaggtcgtgacgttgcccacgtagctgcgcatcgcggcgcggagctccggcgaggaggagagagtgagacgccggcggccgtccacccaccacaccatgcggcagcgcgcgtcgcgcgagcccaccaccgcggcgagggccttccacaggtacgcggacactgcctgtacccgcgtcgcccgcgcctgctcgcgtagccgggcgatgtccgccgcctggcgcgcgccgtcgagcggcgtgaacgcctcgtcgagcgacgcgccgtacgacggcggggagcgcggccggaacacggagcggtcgtggttcggccgtgctccggcggcgagcgttcccgaccgcgcgagctccgaccacgcgctgacgagcatgctcagggcgctcccgtccacgacgacatggttggtgccccacgccacggtgaagccgccgcaggcgaacgacaccacctgcaccgacagcgccacgtcgccggcgtacggcaacaggatcttcccgaccgacgcgcccaccgtaccgtagtccaggctagcgagggccacgtcggcctcgccgacgacgagctccgcgccttggttgtggcagtggatctcggggaggccggagcaagggttggagacgatgcggccggcgagcgggaagaagtggttgagcaacgacggcaagccggcggcgaacgccgcgacgacgtcgtggaaatcgccgccggtggaaggcttggggtagatgcagaacatggagacctggatggtccgcgggatgaggtcgaggttggagacggcgaggacgtgaggccggatggactcgtcggaggccttcacgagtcgccggtgaacaacacggacgtgcagctcgccgccattgatgcagctggccat

SEQ ID NO: 89990 - DNA, 189 bp, Oryza sativa
  Clone ID: PAT_MRT4530_88699C.1
atggcgttgacgttggcacccctcaaggtgaagcaagaagatggcaagaaggcattcctagtgggccctgagccaggaagttctgacccaatctctctgtttgggcgaggagggaagtttgtgagggcgttattccacctccgaaaggaaacagaatacccggtgagtggattccgagctaaggtttag

SEQ ID NO: 89991 - DNA, 1052 bp, Oryza sativa
  Clone ID: PAT_MRT4530_8869C.1
ttggatttattgcgtcagccgaggggaggggcgcgcggaccgggtccacgggagtggggcccacgcggcagcctcacggtccacggtggaccgggtgctcccggctcacaccggccggcgccgtgggtcccacgcatcagccgcacccgagggcgcgggcggctgacggccgggccccacatggcagccgcggggcgcgcccgaaggcggccacgccggcacagccgacgggaggcggcgcacccgcgccccgatggggagggaagggggaaacgaatcggcggtccacagctcaccccgggtcgacggcgacgacgggaacggcgaccggagcggaggaaggcggcggcgcggctcgggtagacggggacggcggcgttccggcggtcggcgggcgaaacggaggggtggacgaggtcggcgaggttgcggcgaaaccaaaggaggcggcgccgaagcgggagaaggtccggggcgacgacggcggcaaaccggagctcggtggtgacggcggagagagagagcgacggcgcgagctcgattccggcggagagagagagcggcgagtggcggaaacggtggagggaggcacggggagtgtttatatagggttgggagtgagagagggcggccggatgagggggaaacgggcgcggaagatccggccgccattgatgcgccggcgaggtttagggggaaagattccgaacgaatccgaggaagagagggagggaaaaatggggggaaagagggagggaatcacggggaatatttcccccctcttgattgcacgcggggcggacgggagcggcgggatttgcggcggcggcggcgctagggcacgggcgagacggcgggagcggcgggaggaaggggatgacgggtgggccccacccgtcagcgagggtggcgggcgggcccgcccgtcagcggcgcgcgcgcggggaggaggccgaatgggccgcggggaggaggagagagagggaaggagatgggccgagccggcccaagagggggaggggggaaaagactttttaggatttttcttttta

SEQ ID NO: 89992 - DNA, 593 bp, Oryza sativa
  Clone ID: PAT_MRT4530_886C.1
ccggccgggactagccggtgacgcgtgtccttcgcctcccttccggcgacggcgacggcgccgtcgtgcgaacccatcggtgcgaacacggagaagttgatggggttccttcgtctagttcccggcgacggccgccgatcccgcgccgccctagttcggcgaacccatcggtgcaggggtagtagtatcattgtatcaagccatgcggcaaatggcgagcgagcgagagggggaagaagaggcggcgggaggaggatgaggggcaaagaaggcggcggaaggccgctatggggaacgaggtgcttttccaattccagattgatctcgtactcagaaattcgcaccctgatgaatggggaaagcagcctatgggtgctatatcaataatacattttatgcatacttttcccccttttttgggagttgactctgaaatcaaacgtgagaaaggtacatctcgaccaagggcaatcttcactccataatactccatataatagtggtcacaccacttccaagtgtctaattcctttttgatacacgcagagtactgttttgtttgttgtatgaaaaaaaaaaaaaaaaaagcggcc

SEQ ID NO: 89993 - DNA, 839 bp, Oryza sativa
  Clone ID: PAT_MRT4530_88700C.1
acattcacttattgtgaaattttctcattctgccaaattagtttgttgaatattgagtaggggatcttgaaaaacatcatggcatggatatcgtcaaggaagggcttaagcaactttgcgagctttcgaatctcctccttcagagcagcacaatcttggcatttgccaacgagcaggttgatgaacatcttcctgtcaggaatgagtttcattgcgatcttgtaggctgctgaagagatccacccatgccatggctttagagtgaccatgtatgcagattctacaagctgtgcaaaacacttctgatcagaatcctcctccaatctctgtaatagtgcaatagtgaaatccatggatctagtaagccaaagaatagctctcgcgcagctatcaaccttccttgcagtgccctcatctacctccttctccagtatctcctctagattatagtatttggatgggtccaacaagtacaactcctgcagcctctcgatgtttcgttggacgtcgagcctcagcacagccatggtcggaccgatcttatcgagcacctggaggaggaggtgagagagcgcgaggaaggtcagcgtgggaggaggcggcaacggcggcggcggcttcccgccgcggcgctcgacgtcgacggcggagagctcctcgatcgccagccgtatctccgaccacccgcgcttcgccgcctcctcctcttcctcctctcgatctctcccgtcctcctcctcctccttcggctcgtctccttcgcccgcgtccttcgctcctacggccttcgccgccgcgtctcctcctccttcgctttcgccgcatggcccgtcgtccat

SEQ ID NO: 89994 - DNA, 1693 bp, Oryza sativa
  Clone ID: PAT_MRT4530_88701C.1
cccacgcgtccgcccacgcgtccgcccacgcgtccgctcatttcctatgcaaaagatagcaaagcccatagcagtgtggtccttggccttagccatgttaggtctctatctgctccatccatggtgataataaactccacaagatttgacttcttggacatcatagaaccagtaacaacatatacagatggctaccttctttccctaaacctgggcatgcccccacaggtttttcaggtgtacttggacacagggagtgacctcacttgggttccttgtggcaccaactccagctaccagtgtttggagtgtggcaatgagcatagcacctccaagccaattccatccttctccccatctcagtcctcttcaaacatgaaggaactatgcggcagccgcttctgtgtcgacatccatagctccgataactcccatgacccctgcgctgcagtgggttgcgccattccttccttcatgagtgatctatgcactagaccctgccctcctttctcctacacctatggtggtggagcactggtccttggctcccttgcaaaggacattgtaacactccatggaagcatatttggcattgccatcctcttggatgtccctggcttctgctttggctgtgttggtagctccataagggagcctattggcattgcagggtttggcaagggcatactctccctgccatcccagctagggtttcttgacaaaggattctctcattgcttcctaggattccggttcgcgaggaacccgaacttcaccagctcgttgatcatgggtgacctcgcgctgtctgcgaaggacgacttcctcttcaccccaatgctgaagagcatcactaacccaaacttctactacattgggctagagggtgtcagcattggagatggtgccgccattgctgctcctcccagcttgagcagcatcgattccgaaggcaatggcgggatgatcgtcgacactgggacgacatacactcacctccctgatccattctacaccgcaatcctatcatcccttgcctctgtcatactctatgaaagatcttacgacctcgagatgaggacggggtttgatctctgcttcaagatcccttgcacacacaccccatgcacacaggatgagctgcctctgataaactttcacttcctcggcgatgtgaagctcacgctgcctaaggacagctgctactacgcggtcaccgcgcccaagaactcggtggtggtgaagtgcttgctgttccagaggatggacaacgatgacgacgacgacgatgttggtggcgcgaataatgggccaggagcagttcttggaagcttccagatgcagaatgttgaggtcgtctacgatatggaggcagggaggattgggtttcagcccaaggattgtgcccttcactcctagtgacgacgtcgttggagaaatctattcgtgatacttttcattctatccctttagcgcacgatcgaacggggtttcaggtgttcttggccatttttatttcagtcgagctgctttgtgtgtgttaatggtacgagtggccgtacgaagtcactagcaaagagaaattgttagtggggagttgatgacgagaaagcaaagggatcacactcatgtaatgcgaaactgccacttctgttttaagttcaaaataaaggcgtgctttatgtgttggaat

SEQ ID NO: 89995 - DNA, 147 bp, Oryza sativa
  Clone ID: PAT_MRT4530_88702C.1
atgggtagggttgcaaagaaccgtgcgtgcagctgcggcgctgatgttgttgctgggtctcaaggtcctgccgtcgccggacgccaggagaggattggtcaaggtcttgccaccggcgcgccaaaatcccgcaccgcctcctcgtag

SEQ ID NO: 89996 - DNA, 450 bp, Oryza sativa
  Clone ID: PAT_MRT4530_88703C.1
atgaccgggatcagccgacacacgatcatgcgggctcatcgtatgatggcgcacggggcggccacggcagactggcgcactgaggacagtccgactggacagtggtggcacgtggcccaatggatgctggtgcagcacccatctggcttggcgatgagctcgggaagcggcgcaaaggagtgggacgggatggggtcttcaccgaacgacgaggaggacgtcacgtggagctcgacactgaggttctggtggtggtggccttcagctagcagtggtgacggtcgtctggatgcgcttgttgaggaaggagcagtggtcgagtgtctctgggacctagggattttagaggagggccagggaggcacttgggttgtcaccgacatcgaggaaccggcaaccggaattgctctcaacctcaagaagacgtggaagggttttccgttttcatag

SEQ ID NO: 89997 - DNA, 240 bp, Oryza sativa
  Clone ID: PAT_MRT4530_88704C.1
atgcgaggcatgaactccgtcgtcgtgtgcatctctgagcacctcctccgtcttcatgcaagtgggtgcgggcggcttcagctcccccgtccgcaccgaggagaggaaccatggcgggggagtgttaacgccaaaatttgtgtttttcgcatcaacagggagcggatcgccaaccttagcccatgggcactcgacacagtagacttggggatgttgacttgcggcgcaccgccggcttga

SEQ ID NO: 89998 - DNA, 230 bp, Oryza sativa
  Clone ID: PAT_MRT4530_88705C.1
aagcttttgatccatattctcaatatccacaacaaatgccaccacaagcaccttacgggggcacctcctcagtactcttctgccccatttggatcaaatccatacaatccttatccaaacggcccatattaaccatttgtaaagaattgcttgtatttatttattttattgtgaatcaacttcatatatcaaataaattgtagtttgtttttagcaaaaaaaaaaagctt

SEQ ID NO: 89999 - DNA, 439 bp, Oryza sativa
  Clone ID: PAT_MRT4530_88706C.1
ccccccataattgccgggtccaaccacgcttgtttttaccgatctatataccttgtgttttttaagcacctaggttaacaaatacaccctttcataactcttgtactagtattatgtgatcgaggagccaagaaaatccacagctatatggccagatagcaccagcctcgtaggatacacatatggttcgcttggtattcttatacctttgtaagagatcatctcggatccaagactacatctgtattctaggacttcagcattcaaatgatattgcacacttcggatatcccatggcctgtattatggaagttctagtttacaattgaattctcatgagtcatggtcgtcattcaatcaataggctaaattgcttcatatcaaggagagttacttatttccagcatactcatccatgctattgccaaccacatctgat

SEQ ID NO: 90000 - DNA, 488 bp, Oryza sativa
  Clone ID: PAT_MRT4530_88707C.1
gtcaaactgcataaatttctcaaagacattgcacctttgtgtttcaaattggcaaagagaaagcaaagaagtgttcaacaagacatggcaccgtcggtgtggaagctggtgcttgcctcggccgttgtgtcgttcgtgctcgcactctatgatggcgcagaggacgacgaggtcagggcaaccgccgttgtggaacccttcgtcatctagctcatcctgatagtgaacgtcgtcactaaagtctggcaggagagcaatgccgagaaggcgctcgaggcactgtaggagatccagtccgaggacgcaatcatcaagctcgacgctcggtggtcccatgggcttccggcgcgcgatctcatcggcggcgacctggtatttcttacgatcatagataaatccgcaagcgcacggaatatactgatgaaagtaaattcaaatgtcaatctaatgcaggggcgcatctacagtaataccactggtgtcaggcg

SEQ ID NO: 90001 - DNA, 591 bp, Oryza sativa
  Clone ID: PAT_MRT4530_88708C.1
atggtgcacatctaccgtcagatgtgtgaacgatgttttgttgttgctggagagaatcaagtgcggcgctgctgctgttgttgcctgccgctggcgtcaagggagtgcgtgctgctgctgccgctgctgggacaggagcatgaggacgcggcccttgctgccgcagcacagccctcccaaactccaccgccgccgctgacgaccaccgccagccgcggacgggataccagaggaagaggccgtgcgtccgcaccgtgtgctacctttgccacggtcgccgccgatgagatcgcgcgccggaagcccatgggaccaccgagcgtcgagcttgatgattgcgtcctcggactggatctcctacagtgcctcgagcgccttctcggcattgctctcctgccagactttagtgacgacgttcactatcaggatgagctagatgacgaagggttccacaacggcggttgccctgacctcgtcgtcctctgcgccatcatagagtgcgagcacgaacgacacaacggccgaggcaagcaccagcttccacaccgacggtgccatggaggtggtggggcacgtcggcggcgaccgtga

SEQ ID NO: 90002 - DNA, 721 bp, Oryza sativa
  Clone ID: PAT_MRT4530_88709C.1
atgatgcttaaacaacacatggaatctgtcgtgcctaagcccccaattcaattggatgatatccaatacctagacatcctgcagaaggtgttcctagacactaagccctcacacgccaaggaaaccagtaccaatactgctactacattgggtgaggatcacatcaaagaaatcctcaacaaccacaagattgcactagacatcgttcgggagttgcttcgctggtcccagcttccggaaggcaactctgtcaaggaactagccaaaggtgtcctgcagggtgttcgtgatcaaaatagtgttattgatgctgccatctcagaaacagaggagaagatgaatgagaacccaagggacactaaggcaaaaggtactaatgctgcaatacaagaaaccaatgagaaggttggggagatatcgtcagcaattaaattttcactgttcatcaaagggatagtggacaagattaaggtgcctctagaaagaaaaaggacccttttcatcctcattgatgatagaggctacatatccgagtgggaggggataaaaaatgctttgagcctgttggattgctccaatggcaatgcagtgatagtgatcacaaacaacaaccagaaggcccaaggattttgttcaacaccgtgggagcctataacatattcccttgttggtctctactatgatattgtgctgaagatgacaagccaaagggagaatgaag

SEQ ID NO: 90003 - DNA, 197 bp, Oryza sativa
  unsure (1)..(197): unsure at all n locations
  Clone ID: PAT_MRT4530_8870C.1
gccgaagggaaaaggaagaagaanaacaatatggtaatatataattacattgttttgtatgangttaatcactttgancagtgcggtgcacagtttgcagacactagctaacttaacttaattactgcccgtattcggactgaactctactgagaaatccctacttctgttggtcagcttctaaaaaaagggggggc

SEQ ID NO: 90004 - DNA, 546 bp, Oryza sativa
  Clone ID: PAT_MRT4530_88710C.1
atggcgacaacggacggacccacacttctcgccacttcccagtcggacctatccgcccaggcgccctggtatcggtcttatcctcttttcctcgctttctccgtcatccctcgttttctcgcgccgctgcttgcctccgctgagctcatctcgctgccctcctcacccatcgcccctggccacgccttcactgccgacttcgccgccttggctacgctcgcggtcgcgctcgcctggagggccgccgcgccgtggcgggatggggtcgtcgcgcagactccaccgcaccaggtcgccgcgctacttatctccaccgcaccgtcggccatggagataaaggctgctgccaccggcgataaggcgaaagcactcgcagttgtaggcattgacgacggtgtgcagcacgtgagcgaagaggaagacgagccgttggcatcgaaggtgaaggttacgaaaacctgttttcccgatcgttggtacatcgacaagcgggatggagtagactacgagcgacggtgcagtacagaggaagaggcaaagccctag

SEQ ID NO: 90005 - DNA, 183 bp, Oryza sativa
  Clone ID: PAT_MRT4530_88711C.1
atatatgtaggagacaaaaatgatttacaattacatacgcccacagtgagatgttcttagcacaattcgtacttaaaaaaggggggggtcaccgaaaacgtaaactagggacaacaagttaactgaggcaaattttgaggggattcctaagcttgatttaaccgactggatcgttgggtaaaa

SEQ ID NO: 90006 - DNA, 404 bp, Oryza sativa
  Clone ID: PAT_MRT4530_88713C.1
ccggttgcttagcagaaagcactcgcagttgtaggcattgacgacggtgtgcagcacgtgagcgaagaggaagacgagccgttgtggttgaacatggagcaatcgcgcgaagcgcttccaaaaactttattaccaccttctcccggtacagggcatcgaaggtgaaggttacgaaaacctgttttcccgatcgttggtacatcgacaagcgggatggagtagactacgagcgacggtgcagtacagaggaagaggcaaagccctagattgatttcacgtgtattgcgtggaggcgacgactcgacttatatagagatatcaggacacttgatcaggacgcctgcacgatctccactctgcgtaaccgaaacgaataagtcgcatgcaacttatccggactccac

SEQ ID NO: 90007 - DNA, 477 bp, Oryza sativa
  unsure (1)..(477): unsure at all n locations
  Clone ID: PAT_MRT4530_88715C.1
gcagaagcgcccccgttngngcactntgnntgccgtccnngacgccatccttaccgacctcgtntaccccgtcgagattgtcggcaagcgcctccgcaccaaggaggacaactccaagaccctcaaggtcgtcctcnacgagaaggagcgtggtggtgttgactaccgcctcgacacctactccgaggtctaccgccgcctcnctggccgtagcgtcgtcttcgagttcccccagactggtgcctccgactactagatatctggcattctgtttggctgagttgggtggggctatgacaaaaatttctttttccatgacgggtggttttcacggcgtgtgggatgggaatgatcttggttttccgtcatgaactgccgcgatcnaatcaaaaaaacagggaaaacnccgttgtntagtttgtagcttgtgaaacaatacaggctcggtcatttcatgataaaaaaaaaaaaaaaaaa

SEQ ID NO: 90008 - DNA, 507 bp, Oryza sativa
  Clone ID: PAT_MRT4530_88716C.1
gcaccgtgcacgccgccacctctcgccatgccggcgccggcgagctcccggtacgtgccgctcgcggcggcgccggagcagcggcacgacggcgaggcggaggagtgctgctacgcggcgacgacgacgaggtacgtgccgctgcggcggcggcggggggagcaggatcaggccgagtacgcggcgaggcgggcgctgttcctgcagagctaccggttcacgacggcggcggtgtccgccggcgagcgggacgacggcggcgtcggcggcggcgggctgcgcgggcgcgtggcgcggcgggtgcgggaggcggtggcgagggcggtgtcgcgcgcgcgcggcgcggcgcggtggtgggtcggcggcggcgtcggggtggcgagggcgtggcctcgcgtcgggtggtggtggcggccgccgtcgccgcgcgcgcgcctcgggtgcttcggcggcggcggcggcggccacggccgcagtaagctgcactacctgcaccacttcgcgtga

SEQ ID NO: 90009 - DNA, 337 bp, Oryza sativa
  Clone ID: PAT_MRT4530_88717C.1
aaacatgacacgcggaaacataattatattttcaagctgaatcaacgatacgggagcatctatggatagaccgttacgtacctggcctcacgtaggctcaataccatagtacacatactatatatgtgtaaccaatggggactatatacagctacgaagagtaatctttgaaggcatagaggccacttgcgaagcgaaactatgagtaaaacctgcacctgacgacacttcaggtgatgcatttacatacagaacatcggcaacatgggaagaacatacggtgctaagtacgtagtttgccctaacacacatccacaaaaaaagggaacacgttatg

SEQ ID NO: 90010 - DNA, 473 bp, Oryza sativa
  unsure (1)..(473): unsure at all n locations
  Clone ID: PAT_MRT4530_88718C.1
gcaatcaaaggatatgcaagcaaatccattggacagagcctttttaacttacaatttgctgacatttacatgtgccatagattcttttacatnttccacgtacgctgatttcatgacttcatgtacttgccctgagaaatcgtgttggctcaggaaaagcctggaaatttgacaagattgaattctagacatatccaacttatccaccagagatgataagatgcatttgcattcccatgaagataaaaacatagctaacattccaggtaggcatacaatttttccatccttaagaaagattgaccgccactctgatatttaccctggtcaagaatgtcacctagacttcagctttctcttcttaccaccaccaaggggtataccggttgtgtattttgaatttgcaagttccctgggaattggagcacctgcagtcttcagaatctgaacaagctctctgaaaagattcctgt

SEQ ID NO: 90011 - DNA, 546 bp, Oryza sativa
  Clone ID: PAT_MRT4530_88719C.1
caatgcaggagagtgaaccttggtgatgcacaacgatgccaggttcgtcgatgccaagatgatgcttaccagccccatatcactgggttatctgaaacagcaacaggataatcaacctcccatcaccatgccaaaaattcggggaagatttgtgcttgccggtgggggccgaaaattaccaaaatttcaaaccatgtgcatgagttggaagaacaaggaagagaggtggctccgccgtgagatcgagcaacggaggaggcggggacgaaggcaacgcacgagaggcggagatgacagcggtggaaggaaggcgggggagcagaggaggaaacggtggcgagagagaggaggcggcggtggcggggagaagggcaacgatggaactttgcagtcgcacgaaggaagaattgaacttcggcatggataaaatggaaaaaaaatgagaactgaaaatctgcttaggggtttccttgtgtaagcaatgaattggaaaaggacagggcgttcttgtgttttgctggttaaaaaaaaaaaaaaaaaaaaaaa

SEQ ID NO: 90012 - DNA, 1215 bp, Oryza sativa
  Clone ID: PAT_MRT4530_8871C.1
ttaattacgctcgccgaccgaagcgacgttaccatatctccagacgaaacgaatctgcacgcccagattcgagcgctgctcaagtgatgtggcagtcttgaagagaccgcccatgactgacggccaagacaccgttaccgatatgcgtggtttgagaccgttgggtttctgcccaatcacggagaccggtcccactgtcggtgatatgggaccgggagtattgcgcccggaggcttgaggcagatggaatcgcccacgtggcctggcaccttcggggacgtcgggcccgagggtgaggtgtccgccctcctcctgatttccccaagggggggtcgggttgctcctgccccggccccgagggacgagcgcacagccacgttcccacgacgcgcctgcccccggcagaagtggagccgagggagcgggcgcgcggaccgggtccacgggaagtggggcccacgcgtcagccccacggtccacggtggaccgggcgcacgcggctggcggcggtcggcgccgtgggtcccgcgcgtcagccgcacccgcgggcgcgggcggatgacggccgggcccacctggcagccgcgagggcgcgcccgaaggcggcctcgccggcacggccgacgggagcggcgcgcccgcgccccgatggtcaccgccggcgaccaccggcgcggcggagcggcgcccgagagagcggagagaaggggggaaagcgaacggcggtcttcggctcaccccgggacaacgacgacgacgagaacggcggccggagtggaggaaagcggcggcgcggctcgggatgacgatgacgacggcgctccgacggtcggcgagcgaaacggaggcgcggacgaggtcgacggcgatgcggcgatgccgagggaggtggcgccgagccgggaggaagaccggagcgacgacggcggcgaaccagagcggaggaaggcgacggcgcggttcgggatgccgagggcgacggtgctccggcagtcggcggacgaagcggagcggcggacggggtcggcggcaacacggcgaagcggatggaggtgtcgccgagtcgggagggagaccggagcgacgtcggcggcgagccgaaggtcgacggcgacggcggagagagaggagcacggcgcgagcacgaatccgacggcgagagcgagcggcgagcggcggaaacggaagagcgaagcacggggagcaaatatatag

SEQ ID NO: 90013 - DNA, 243 bp, Oryza sativa
  Clone ID: PAT_MRT4530_88720C.1
atgaagtccaagatcacccaaatcggagttggcatgaaggcactaggtccgtttgaagtcagtgttgtctccggaggccgaactggacttggacttggaattataattggaaagggtcatccttggaggtatctcatcgtgaaaaacaccctcatattcctgcaaaaagttagtaatagcgggtagaatagccggataattaaattacaaaaggactcaagcactggaaagacaattaactaa

SEQ ID NO: 90014 - DNA, 134 bp, Oryza sativa
  Clone ID: PAT_MRT4530_88721C.1
gagcacaaaaggccgttttatttactaggctttaaaactttacgagacgaaaccgcaagccagtacacagtgatatattgatacaatttgacaagctttttggaaagcagcaagagagacttattaatgattaa

SEQ ID NO: 90015 - DNA, 363 bp, Oryza sativa
  Clone ID: PAT_MRT4530_88722C.1
atggcggccaggcgagggcggcggcagatagttgctgggagcgagcggcggcggcggcggcggcggatgggggcgggcgacgagcgacggccgtgcggcgcggatccggcgcagggggcctgccgatttgcttggattgggtgcctctgcgaacgtctatgccatcgtggccgtggtctccaaggccaccagcacgccagcacgtccactgccattgcgcctgccgctgctgtgctgcctccctccggcaaggacctcaagaacttggacgccgacttcgtcaagcaggccaccctcttcgacctcatcgtggtctttaggccgtttcgtaatatacaaggaaacgtaatacccaagtcataa

SEQ ID NO: 90016 - DNA, 667 bp, Oryza sativa
  Clone ID: PAT_MRT4530_88723C.1
atgcactcgttgttgcaatccggcgacaagggacaggaaggagaaaggaataatgatctgatggagacggcgacgtggagatgcaggcggacgatgacttcgcctccgcgctccgacgaagcctcgccggtggagccggagcgggaggcggcgggcgaggtcgaggagcataagcggctcggcaagcgatgcgcgcagcgcgtccaccagcggcgccgccgccacgagcgggaggtgcgccgacacgagctttctcgaaggctaccaggtaccaggtaccacgggtaccaggtatcgtgggtgtcgacgtttgatgtcgcgattccggttcaggcccctgaattgtcagtcgacaacagggtagtcttcctcctcgagttcgtgcccggtgagatcagagatagcgctttcgtctctcctgacagtatccggagacaccgtaagggactagccgtgcttatccctgaagtcgatatccggcgtcttgtcttggcgtacgttggcttgtatgttgatcttctgtcttctatggtgggtgttgattgaggtggtcgtgtcccttctcctcctagggggccttgtatttatacccataggtgtccccttgtccaagtagaactagggaaaccaatatggataccatccgagtagtccttatcgtttccat

SEQ ID NO: 90017 - DNA, 866 bp, Oryza sativa
  Clone ID: PAT_MRT4530_88724C.1
atggtgagtcatcatgctcattgccggagtgtgtacaagtacattgtgcaatgtatcatccatagccggtaccccgtaggtaccatgtctggtacatgtggtatcaccgctgatacccagatatcagatctggcacctttaggtatcatggctggctgcaaggtatcaggtatcataactggttgcgtggtatcaagtatcatggttggctacgagctcgcaaccaatgtcactctctgcatcgccaagcgttggttcaagacgtgtggggcgcgataccaaggaggatattggaggaagagggcactgcagctccggctagctgcagcggcgctccgccgacgaggtgttgcgtgcggaggcacgcgagaccgaggagggtccggctggggaaagcaacgaggaatcgcgtggatagcaggtgacgcggtgactaaggtgagaggttggagtctgctcacgcggttccccgtctgtgggggaggaaaacgagatgaagccgcgtgatccgtgtgtgggacaacacacttgggggtcgttgcgtcgtctccactggacctgccaatgtctttgttgtcgtcttcgtctcctcgctccgctgccgcgccgcggtcgaacgtggccgcgcctctcgtaggtcgaggggcgcgcagacgccggtcggtgccgccgtcgaactgtggccgccccttcaggtcggttgacccagagctgctgccggtgccccgccggccgaactcgcgccgccgccgccgccgcggctgtcgccctccagcatcttcgccagctaaattgttgccagcaaatgtttcagaggaatggagaaggctggagatcgaaaggaaaatccttgaaaactccaccat

SEQ ID NO: 90018 - DNA, 1406 bp, Oryza sativa
  Clone ID: PAT_MRT4530_88725C.1
gctggtgctggtgctggggttcggttcggctccacggaggcggcgccgcccattgctcgaatcggaatggattgcgggggtgtgagcgcatttgatgtcgcgattccggtatttgcatagtatggggatcgttggtactaagatatacgcgagactgaggtaaaagagatggagacgatgatttttatacaggttcgggcccctgaattgttagtcgacaacagggtagtcttcctcctcgaatccgtgcccggcgagattagagatagcgctttcgtctctcctgacagtatccggagacaccgtaggggactagccgtgcttatccctgaagtcgatatccggcgtcttgtcttggcgtatgttggcttgtatgttgatcttgtgtcttgatctattgttccgtgtattctatggtgggtgtgtcccctctcctcctagggggtcttgtatttatacccataggtatccctttgtccaagtagaactagggaaaccaatatagatacaatccgagtagtacttgttgtttccatgtagaactctggttgtctttccttatccggaactcctcctatatccgcaggttgtttccgtataggacatggtatgtggtgggtcctgccgagatttagtcgactactattaggcatgtggtatctataaccatgtggcggtgcttcgccggcgtcttgctctccctcctccaccggcgatggggaagacggcgccacgcagagctgctcctgccagctcaggaacgcgcagcgcggcggtgaagcagcatgcgagttgtcgcgtcgtcgcgcccctgccgacgaggaccgcgagctcctttgtccttctacccccacgcggcagtgctgcaccgccgccactcccctccatccatctgcctccccatgccggtagtgctgcgccgctactttgcatcccttccttcgataccagcctgtgttgtactgctccggctgcagaggagcgacaccggcgacgaggtatcgataccgagtaggaaccggataggtatcgcgcctcctcgcagcctcgccgcgtcgcgaggcgttagcacagactggcattctgccaatcgactctcgccggctgctccgcgcggagctcctcccgttgtcgctcgccggtatcttcattgacttcaacggccttatgttttcggaattcttctcccgtccatcgccgacaatgattagcggcgtgctcgatattttgccccctggtaccctaattcgtcggccttcgccggagtttgggttgttgccagcaccggacaagaagaggagtttgttagagtttgtcacaccctgaagttcttctcctaagcctctccaccgccgtttcctgctgcgggaaccccgttcgcaccgcatgccagtgagcttcgccat

SEQ ID NO: 90019 - DNA, 2012 bp, Oryza sativa
  unsure (1)..(2012): unsure at all n locations
  Clone ID: PAT_MRT4530_88726C.1
tcagggttcagacaggcgacttttctttggagacaacaagtttacaagtgacttgattttcagcgatcccgacagctcgtgtcccgcgatcccatggcggttctctgatcccatctggctcgcgaagccgccgcgttttgacgggaattgcgtgggctgcgggcggctggacgccatggattccggcggcaacagcgtgaattctgcggtggagtcggtggcggagtcgccggcgccggcttcaccggcgagcaatcccaccgcacccgccgtggtcaccaaggggcgtgggctatggtggtggcgttttattcccccttttacccgattccctcgtcctcgcgttaccccaccgttttcacatttccgttatcagctttccgattacgcatcgcgccggttnttaccggaggcgccaccgtcgccgccggtccagaccaagctggacccggatctcggcttcctgatcgcctcggcggggttctcggtgggcgccggcggcgccgactcggacaacagcgacgaccgggccagcaagtcctccaccaacgccgccgcgccgcgccacgacttctcgttcggcggcggcttcggccgcgagcgcgacaggccgcgatcccgcgccccaggcgccgccgcgcacgccaagggcatccgcacggcgcgcacgcgcggagcccacggcgcgcgcgccgccacaccgaccccctccatcgtggagccggagaactcgcgctccagcgttgaatccaacctccggagctctgccgctgctcatgcgcgccaatccagtgctggcataagcagcaatggcgttcacaaggttctctatgatgatgatgacgatgatgatgatgatgccgagcagagtgacggcgagcctccgagcgaggaggcggcgcgctctggagcaggaggtttctacagggagaatggaagtgtagtagggagattggtaaagggcagcagtgattccgatgccgatgatcatggatacgatgagaggagtataggcaagggtgagaatggggaaattcattcgggtctcgatccgtatgtgcagtcgatcgcgatgctccggtcagccgaagaagcaattgagaatgagatccagaagtttattgaaatgagaaatgaaacgtgtgaaaattctgcaaacaaccacagtgaaactgaatggagtagttcatgccattttgacgaatccacagaagaactgagtgagaagttgaagcttctcgagtctaggctaaacgaagcttctaccctcatcaatgataaggattcagaaatacttgaactcgatgtgctcaaccacaaacaaccaaagcagcatgttctatgcaataccgagctgctgtctctgcaatctgatatggatcaactgttcctggagaagatggaagcagagactcaatgcttcatcctgacaagagcatcgcaagcttggaatcccctgactgaggatcaagctgctatttttgacattcagaaatctctacctgaggatcacaaacagcttgaagctaagctacggcacaccgagaacagggcactgatgctagaggagatggtggagaagctagaggcacagtgcaaagatcttgctaggacttcagaaatcctgaagctgcaggcaagagcaagcagagcttcgctgttttgctccgtccagtttgttctgctgttcatcgccgtcggaaccttcctcgtccggctatggccctcttcctctgaatttgtacctacctgaggttagaaaatccggcgccaatgagcctttgtgtaggcattcttgaaaagttccttattgtaatttactaagcattggtcaccctataatttttcaagtctgtaacatcaactcaattttgctagtaatctcttcttatctttactgtacttcaatcaccaatgtacttctcgattatctggattctgtaaatgtcaaaagttcctatataaatgtatttctttgcagaccgtataaattgaaattggaaataggttcc

SEQ ID NO: 90020 - DNA, 2883 bp, Oryza sativa
  Clone ID: PAT_MRT4530_88727C.1
cggaatcgagcgccgtgctctcgcgacgccgccgccgccgatcgatcgatggacgccgaggccggcgtcggcggcgccgaccagctgccgtggaggcaacactacaggaatttactgcttttagcataccagagttttggtgttgtttatggggacctaagcacatcacctctttacgtttataaaagtacattctcaggaagactacgtcgatatcaagatgagcaaacagtctttggtgttctttccttgatattttggaccttcacacttattcctttgctgaagtatgtcactattgtattaagtgctgatgacaatggtgaaggtgggccgtttgctctttattcactgctttgcaggcatgcgaaacttagttttcttccaaatcaacaatcagcagatgaagagctatcgacatactacagaaatggttttacttcacgtcatggatctttaccttggctaagaaggttcatggagaagcacaagaatgccagaaccgtgcttctcctcatagttctgtgcggtgctagcatgatgattggtgatggtatccttactccagcaatctcagttctgtcatctatgtctggattgaaagttcgagctactggtttacatgatcgttctgttgtactcctttcatgcattgtgttggttggtctatttgcattgcaacaccgaggtactcagaaggtagcgttcatgtttgcaccaattgtcgtcatctggctcttttgcattggtggaattggtttatacaacataatacattggaacccaaggatataccaagctctctctccatattatattgttaagttctttaggacgacaggttggttactatttactccttactcttggggtataatctgtattcttgttgtactttactttggctgtgaagctatgtttgccgaccttggtcacttcacgagtgcatctgtcaggctagcttttatcaccatcatatacccatgtcttatattacaatatatgggtcaggcggcatttctgtcaaaaaatatccttgacatgcccacaggtttttatgattctatcccaggacctatattttggcctgtgtttgtggtggccactctcgctgctgttgttggtagccaagctgtcatttcagcaacattctctattgtgaagcagtgccattcgttgggatgtttccctcgagtgaaggttgtccacacatcaaggtggatctatggacagatatacattcctgaaataaattggatccttatggtgctctgtgtagctgtcacagttgcattccgtgatattacacttattggtaatgcctatggtgttgcgtgcatgactgttatgtttgtcactacattcttgatggcattgatcatgatcttcgtttggcaaaagaacataatatttgctctatctttctttttattattcggatccgttgaagttgtttatctctcctcatccctcatgaaggttactcagggaggatgggtgccgcttgtgcttgctttaatattcatgtctgtcatgtatatttggcactatgggacaaggaagaagtaccagtatgatcttcagaataaggtatcaatgagatatatcctgtccctgggtccaagccttgacgtagttcgtgtcccaggaattggtctgatttacacagaactggtgactggtgtacccaacatcttcacacatttcactactaatctccctgcctttcatgaagtcctagtctttctttgtgtcaagtcagtaccagtaccatatgtgtcgccagatgaacgataccttgtgggcaggattggacctagagcatatcggatgtaccgctgcattgttaggtatggttacaaagatgttcagagagatgatgacaattttgagaacatgttagttatgaacattgggaagttcattatgatggaagctgaggatgcatcttcttcagcaagttatgatactgctaatgaaggacgaatggccgtcataacaacatctgatgactatgactctccactagctgtgagagattccaatgacctagctgactccatgacgatgaggagcactaaatcagagagtcttcgaagcttgcaatcctcttatgagcaggaatcacctaatgtgagccggaggcgacgtgttcgctttgagctgccagaggaggatgacatggatcaacaggttaaagatgagctgttagcacttgtggaggcaaaacatacaggggtaacctacgtcatggggcatgtctatatcaaagctaggaagaactctagtttttttaagagatttgcaattgatgttggctactctttcctccggaagaactgcagaggtccatcggtcacactgcacattccacatattagtctgatagaagttggaatggcgtaccaagtgtagcgcgatgctcatcgcaggtcacgacgtcacgtggatacccggtagcaacaaatcatgtgctacctgtggccgcctttttggagtcgaggctttgattcctatgctttatccatttttcagtttcagttggtacagatgaagaggctttctctatgttaatatgatcatttagctcaaataaagcatcagatctaatgatcgtagtttgctcttcccttttggtatatttacatgcatgctctgtaatttttatgggagctatgtaatggaaatatgcgtccccgtttttattgcagctatgtaatggaaatatgcgttctcgtagctgatatatcccaatttttgttaggaagcgattaccacatatattctttcatgtatgaatttcttatggaacagaacatctgtagatatacagtgcctcgtggaatttctctacaaataaaccagatactagataacatcagt

SEQ ID NO: 90021 - DNA, 1191 bp, Oryza sativa
  Clone ID: PAT_MRT4530_88728C.1
atggagatcttgtgtgcattcctcgattcagtctcaagctatattgttgccgatgctgaattacatgagcacacggaagtattggtcttccaagatatcatcataagacaaaagtaccagaagaagggactagactgtacaaaacctacaccctcatgggtccttgctgcaaccaaactctacgacttcgcgtatctgctcatgtcattgcagaggactactactgaaggttgcaagtgtgagaggagacacatgcctctaaatttggcctacatcaaagttgttcttccacccccaaaatcaacatgcatcgatcggttcatctcatggggggacaagacaagggcgacgcattcagatattgcgaccatgtgtgtcagtaagacaagcaagtatacccaccaagatcgcggcaagatcggaaagctagggcacggatcgcagcgaggagatgtgtacaggagactagaaagcgaagcgagcaaaagtgcagtggaatctttggttggtaatggacggaacgggcgcacactgaccgagcggaggcgcggacttcgccgaggtggcggtgacggcgacctcgcaccctttcccttcccccaccaccggaggaggaaggggagggcgccgtcggaggggagggcgtacggcccgcgcttggaaggggacgccattgacgagggcgcaacacaacacatcttgttctccttccttgtctgctccaccgtcatcattgtatcctccttttgcgcctcggtagcgctcgtcaccgccgtcgatgttggcgatggccacttctcgaccattacctcgccaagaactaagaatgacagcctctgcatcgccagcgcagacgcgcccttctccctgccggtggtcatctcaacaggtattgtcaacacttaccggacgcgcaccactaccgtatcgcctcacaccgggatggcgctcctcatcgtcacctccgaatccgatgtagcaaccgcggtgggggtcgacatcatcggcgccaagccacctcagttagcgggagagtcaaaccgcttgtgcacgacaaagtcacccaacaatggcttgaggatgagcgagaaggacatggtatcggcggttttaacctcgataatcacagtgatggctaaggtagcggtgccgaagataaagaggacgagaagggacaaccgccagggctag

SEQ ID NO: 90022 - DNA, 203 bp, Oryza sativa
  Clone ID: PAT_MRT4530_88729C.1
gttacctagagtatcacgatcaggtggaccgtacaggtgcaagtacgagggttgcggcatggagtataagacacaccaggggatgggtggccacgtggctggccacatcaaacagggacaagctggctgccgccggcggcagtggcggcgccggtgccggcaagacggagggcaagcacccgtgcaatgtgtgcgggaaatag

SEQ ID NO: 90023 - DNA, 6929 bp, Oryza sativa
  Clone ID: PAT_MRT4530_8872C.1
ctcctggtttggaatggtacattcctggtttggagatagaactgtgcagccgggatggttgttcaaaatggttgggcctatacaacaggatgccgcgttacaagcctgagtacctgtttggtgttgagggttttgtccaggagttgcgtacgatgtcctttgtcattggatttggaactgcccctttttatgcccagattgctcatgatcgtcatgaagagaagtgccgagtcaaagtcaccttgaacagtaatagtgaagatatcccctcagtgatgtttgaagctggaggaagaaactacatccatgcatgtcaggaggtggcaaggatcgccataggagagctccgtgatcgctacagtgatcaattggccgacactgagtatcgctaccatcctcgccaaccacagggaagtgaccgtggcagttaccttgagactgaaggaattgagaatgatgttaccacaaagcatttggttgagatgttgtgggctatggatgaaagtcgtgcggagactgtgttagcagcccaagatcgtgaagattggaatcgtggtaagatttgcaagttagaagacaaggtggatcgtttggagaaggaattagccgcattaaagggagaagcaccgccgcagaaggccaggattcgtcttaccgcaaggaagagagctctatttgttcctcgctatcaattggcgccaaaggttcgtgtggtggagaaagaagttgccccagctcaagcggatcctccggtcatcatcataagtagtgatgaagaagaagaatccaagcgcaacaattccaagattgagtgggtagcaacccaagttgataaagacgagccttcaatcgacctccgatgcttggaagaactagagactactgctgaacctatcacttggcttgaattcaccgctgctttccggaagacgcatataccatcaggagtagtgtctctcaagaagaaggagttcaggtcgcttacccagggatctcgctctgttacggagtatctgcacgagttcaatcgtcttgctcgttatgctccggaagatgtgcgcaatgatgaagagcgccaggagaagtttttgggaggacttaatgatgagctttcttacccactcatggttggagattatcctgatttccagaaattagtggataaggctatacgtcaggaggacaagtacaatcacatggagcagaagaaacgtcggattgctcacttcaaggcacaacagggaaataatcagaagccgcgtcttactttaggaccccagtccatgccacagggaggttcttcgtctgttgttcgtccgcagcgtcagttcttcaacaacaatgctggcaacaacatccgtaatcaagctccacgtcctgttgcagctccagcacagcaacaacctgccaagagagagcaaggcagcaagcccgtggtgtgtttcaactgtggagacccaggacattatgctgacaagtgtccgaagccccgacgcgtgaaggttgtccctgcccagaataactctgctgtaccagcatccaaggctcgtgtaaatcatgtcgctgctgcagaagctcaagatgctccagatgtgattttccttgttaactcagttcctgcaacagtacttttcgattctgccaatgagttggcagaagttaagaggcaagtagatgatttgcttcagaagggatacatcagacctagttcatctccatggggagctccgccgtcgccgtcgctcgggaagaccaccgtcgtgctcgccaagtcgtcgccgtcctcgttcgccccttcgccgtcgccggagatcaccggagcagcttcgccgtcgtcgacccgaaggttcccgccgcttcctccttgtcgccgtcgccgtccgttggtcttccgccgccgtttaggtcaccggtggtacacctctgatcagagtaaaactattcgaatagccgtgcccgcggttatgggcgggtctaacaatgtctttcctcctggtttggaatggtacattcctggtttggagatagaactgtgcagccgggatggttgttcagaatggttgggcctatacaacaggatgccgcgctacaagcctgagtacttgtttggtgttgagggttttgtccaggagttgcgtacgatgtcctttgtcattggatttgggactgcccctttttatgcccagattcctcatgatcgtcatgaagagaagtgccgagtcaaagtcaccttgaacagcaatagtgaagaggtcccctcagtaatgttcgaagctggaggaagaaactacatccatgcatgtcaggaagtggcaaggatcgccataggagagcttcgcgatcgctacagtgatcagttggctgacactgagtatcgctaccatcctcgccaaccccaaggaagtgaccgtggcagttaccttgagactgaaggaattgagaatgatgctaccacaaggcatttggttgagatgctgtgggctatggatgaaagtcgtgtggagactgtgttagcggctcaagatcgtgaagaccggaatcgtggtaagatttgcaagctagaagacaaagtggatcgcttggagaaggaactagccgcgttgaagggagaagcaccgccgcagaaggccaggattcgtcttaccgcaaggaagagagctctatttgtccctcgctatcagttggcgccaaaggggtgggatgtaagtgcatgcgtttgtttgcttttgagtgttaggaagttgtttcccccggtttctcttcttgtgccctgtccatgccagatggtgaacactcgcagcaacgggaatggccccaacaacaacaataacaataacaatggagagaatcccacacttgctcaagttcttgctcaacagactcagcttatgaacatgatgatgcagcaacttcagaatcagcagaaccaaggaaataaccatgcacctcctcagaataagttagcagaatttcttcgtgtgaggccgcctgttttctctagtaccactaatcatgttgaagctggtgattggctgcatgccatagaaaagaagttggatttgcttcagtgcactgatcaggagaaggtctcatttgcatcacatcagttgcatggccctgcctctgaatggtgggatcacttccgcctgaataggattactgctgaacctatcacttggcttgaattcaccgctgctttccggaagacgcatataccatcgggagtggtgtctctcaagaagaaggagttcaggtcgctcacccagggatctcgctctgttacggagtatctgcacgagttcaatcgtcttgctcgttatgctccggaagatgtgcgcaatgatgaagagcgtcaagagaagttcttggaaggacttaatgatgagctttcttacccactcatgactggagaatattctgatttccagaaattagtggataaggctattcgccaggaggacaagtacaatcgcatggagcagaagaaacgccggattgctcacttcaaggcacaacaggggaataatcagaagccgcgtcttactttaggaccccagtccatgccacatggaggttcttcgtctgttattcgtccgcagcgccagttcttcaacaacaatgctggcaacaacatccgcaatcaagttccacgtcctgttgcagctccaacacagcaacaacctgccaagagggagcaaggcagcaagcccgtggtgtgtttcaactgtggagacccagggcattatgctgacaagtgtccgaagccccgacgcgtgaaggttgtctctacccagagcaactctaccgtaccagcatcaaaggcccgtgtcaatcatgtcgctgctgcagaagctcaagatgctccagatgtgattttgggtacgttccctgttaactcagttcctgcaacagtgcttttcgattctggtgctacacattcattcttatctatgagttttgcgggaaatcatgggatggaagtagaagatcttagacgtcctttgatggttagtaccccaagtaatcaagcactctctttgcaacgtagcccctctgtcagaatagaaattaaaggagtaccatttctggccaatcttatcttattagaatccaaagaccttgatgttatcctagggatggattggttagccagacataaaggtgtgatagactgtgccaacagaaaagtaactctcaccagtaatgatggtcgagttgtaactgttcatgcattgtcttctgagtctttaaggtcaagactgaatcagataactttggaagagattcctatagtccgggagtatcccgatgtgttcccagatgatttacctggtatgccgcctaaaagggatatagagttcagaatagatttggtacctggaacaactccaatccataagagaccttatagaatggcagccaatgagttggcagaagtcaagaggcaagtagatgatttgcttcagaaaggatacatcagaccgagttcatctccatggggagctccggttattttttgtggaaaagaaagatcatacccagaggatcttaaaagtgccactgttttctccaagatagatcttcgatcaggatatcaccagttgagaatcaaagaggaagatatacctaagacagcttttaccactaggtatgggttgttcgaatgtactgttatgtcttttggacttaccaatgcccctgctttcttcatgaacttgatgaataaggtgtttatggaatacctagacaagttcgtagtggtctttattgatgatattcttatctactctcgaaccaaagaagagcatgaagaacatcttcgccttgcattggagaagctacgagaacatcaactgtatgctaagtttagcaagtgtgaattttggttgtctgaagtgaaattccttggtcacgtcatctcagcaggaggagttgccgttgatcctagtaatgtggaatccgtaactaattggaagcaaccaaagacagtttcagagatccacagtttcctaggcctcgcaggatattaccggaggtttatagagaatttttccaagattgctaagcccatgacacgactgcttcagaaagatgtgaagtacaagtggtcggaagaatgtgagcagagttttcaagagttgaaaagtcgcttaatatcagctcctattttgattttacctgatccaaagaagggtttccaggtgtattgtgatgcatccaaacttgggttaggttgtgttctgatgcaagatgggaaggtggttgcctatgcatctcgtcagttacgtccgcatgagaagaactaccctactcatgatcttgagttagctgcagtagttcatgcgttgaaaatttggcgtcattatcttttcggtactcgtacagaggtgtataccgatcacaagagtttaaagtatatctttactcagccggatctgaacatgagacaaaggagatggttggaattaattaaggattatgacatgggaattcattatcacccgggaaaggctaatgttgtagcagacgctcttagcaggaaaggctattgcaatgctacggaaggacaacagttgccattggaattattcaaggaatttgaaagattaaatttgggaattgtcagtagaggtttcgttgcagccttagaagcgaagcccactctaattgatcaagttagagaagcccaaattaatgatcctgatattcaagaaatcaagaagaatatgagaagaggaaaggctatcggtttcttggaagatgagcaaggaactcgagtcaaggcagaacatcagaaacctgccggtttgttgcagcctttgaagattcctgaatggaaatgggaagaaattggtatggattttatcactggtttacccagaacgtcatcaggccatgactctatttgggtgatagtcgatagacttaccaaagtggctcattttattccggtaaagacaacttattctggaagtcgattggcggaattgtatatggcaaggattgtgtgtttgcatggcgtccctaagaaaatagtgtctgatcgaggcaatcagtttacttcaaatttttggaaaaagattcaggaagagatgggttctaagctgaactttagtactgcttatcatccgcagacagacgaacaaaccgaaagggtgaatcagattttggaagacatgttgagagcttgtgctttagatttcggtggaagttgggataagaatctaccctatgcagaattttcgtacaacaacagttatcaagctagtcttcagatggctccttacgaagcactgtatgatcggaagtgtcgcactccgcttttgtgggatcaaatgggagaacgtcaggttttcgggacggatatcctaagggaagcagaagaaaaggtaaaaatcattcaagaaagattgcgagtggctcagtcacgtcataagagttatgccgacaatcgtcgcagagatttgagttttgaagaaggagattatgtgtatcttcgtgtcacgcctcttcgaggggttcatcgttttcacaccaaaggaaaattggcaccgcgttttgtgggaccttataagattgtcagtagaagaggagaggtcgcttatcagttggagttacctcaatctttggcaggagtccataatgtgttccatgtgtcgcaattgaagaagtgtttaagagtacctaccgaagaagctaatcttgaacagatagaagtccaagaggatttgacttatgttgaaaaaccaatccgtatcttggaaatagatgagagaagaaccaggaatcgagttatccgtttttgcaaagtccagtggagtaatcactcggaagaagaatcaacttgggaacgagaagatgaattgaagtcagctcatccgcatctgttcgccagttcttccgaatctcgaggacgagattctgtttaa

SEQ ID NO: 90024 - DNA, 2058 bp, Oryza sativa
  Clone ID: PAT_MRT4530_88730C.1
atggctcctcgcaagctgaacccagcctccacgacgggccccgatcccggtcggatcgacgatgacaccaccggctttttaggggcttcgcttgtggatgatgacgagctggcgaagttggtcacctccagcgcggtggtggaggggcaggaatttgccccggggaaggccgtggtgccgaaacccggcgacaaccggaaggtggtattcgccgtgttctttgaggcggggcttcgatttccgtgcagcatgttgttgccggaaatccttcgccttttccaggtggagctcccccagctgagcccatcggcactcgtccggatcgccatcttcgactgggcgtgccggaccaccgggttcgaaccgagcgccgagcttttcggcaccgtgttctacgccactgtaaactcaaagacggtgacagtgaacgccgccatgttgaagtgggatcgccattggatggcgatgtggttctactactccatccccttcgaggctgggtccgatgcggcgaaagccctccggtggcggcgcagggcgatttcactgaacaggaagcccaagatcgccgtcgatggagccatggaggcccggttcgccctgctgcgaaaggtctgctcccgccttagctgccgcgacttggtggaggagttctgtatgcttcgcattttccccctctcccagtcgtggcaagtcgaggtcgatcaagataaggaggtcgacggtttgccaaagctcgtcatgcctgtgggggcgaacggtgagtctatgcttttcctatgtgcatccgtgtttcgctcgtcatgcctgcgggggcgaaaggttgcagtcgaaagtgatgaggaggaggaggaagaagaagatgtggaggctggttctgaggatgatggctctcatggctatacccccagtcctactactgtgaaatccgcggcgggctctcatgtttcgcctacgcggtcgcaagatatcgtcgtggcgaacaccctcctggcgatttccagcacagtcgcgaaaccggtgatgaccgctaggaggaagaagaagaaagggaaggttgcgcaggtcggccgtggctttttggacagcgatgggtccgacgggactcttacttcaccggttttacgacgcgcatcttcccgtggtaggcgcatgtctctgccacctgctagcgataccgaagcggcgacgggtggaagtgcctcagccccagccgctaaggcgaatgttgctgaggatgaacgggttgaggcagttccttcgcctgttcgtcaacgagagggaaaggctccggcggttgaagcgagcgtttcggacgtcatagcaccgaccgatggccttgggctcttcaccgagctaaatgagttcgccgaaagctacgtggccgtggaaagcctatttgtgcagggccttgccgcgcatctaagtgccaagaagtctgccttagagcgactagatgggtatggccttcgcctccgcatgatcgaagaagatcttcaccacaaggaaaacgaaagacgtgttttggcggagactttgaagaaggcgaatgctgaaaataggtctctctgctctgaccttgaaacagcactcaaacgggatgccgaacgagaccgacaacttgcttcggccgaggagaagattaaatccctcgaagcccgtcttgtgtcagccgaagctgtcgccacgaccgtggtaccagccacagagtctgccaagcaggcctattacactctccggctggcccttaacgaccttggggcatgggcggaaggtgctccgggtgaaggcgggacaacattcaatttttccgattggatgcaggaggcggccggctcagttgtcgaagtggcaggtgcctacggggactgctgcactcgtgtttcggcgggattcgtccttagcctcatgcacgcgcacggctgcgaccacatcgggagttttcccgatttcgtgaaggatgaatggcctagcaatacgcagtgctctggggctgcgttaagggcctttcgaaaggggttttgggaggatggcggccgggactgtgcgaagacttga

SEQ ID NO: 90025 - DNA, 1134 bp, Oryza sativa
  Clone ID: PAT_MRT4530_88731C.1
atgggcgcgttctccggctgcgcttggccgatctccatcaacctgcgctctggccccgccgcggtcgaggtgcgccgccgcctcctcctccgtcgactccgcgcctgcacccccaccctccgcgagctcggcgccggccgcgtcccggatcccggccgccggagggctgagcagggccgctgcgtcgtccctccccaggggcaggcgcaatctcttccttggccgttttctcggcatgcccttcgccactctccaccaccctacgctctggcctcgctccgttctcgatgctccaccgcctccgcctcagtctatgccgcgtcctcgccgcaaccgtcggcgaggtttccgccggccgcgttccggagcaagtcctccaaagggctgagaagattggctgtgacgtccctaacgaggtgcaggagccatgcttgcctgtcctcatgtatggccaagactgcagtctccacgcaccgacgggctctggtaagtgactctcctatctatttgcgctgtattcggccatagagttcgggagatcttcggtgtatgcgctggttaggttccgaagagggtaattttgtttttgggtcgtcaaagcaaactgatgtggttcatgttcatgtcaaccctgtacaacccatgccctctcacctccagcacaaatatgcgatctgcagtaagaaggaaaggttgcatgttttactatccttgcttgagaaggatgcaccaaagtcagggattatatttgttgctgaacagtctgagaaatcaaagaaggctggacaccctccttcaactactgttgttgttgaattcctgagaactacgtacatgggaagcctagaggaggtcaagggaaaaggctttcttctagtttccactgacatagcaagcagagggtttgacctcccacaaaccagccacatatacaactttgaccttcccaagacggctattgactatctgcatcgtgctggaagaactgggagagaaccattctccaagttagcttgcagcgtgacaaccctcataacagaggatgagcactttgtattacagagatttcagaatgaactcaagttccattgtgaagagctacctgtagaatccatgttcgcatttaacttgtga

SEQ ID NO: 90026 - DNA, 343 bp, Oryza sativa
  Clone ID: PAT_MRT4530_88732C.1
gtctgaactggccataataaatacagtcatgcggtggatgcagcatgagggttacattaaatctcagggccaaagacatcaaagcttgcgacagtcacgacttgattaaccttgaaagatctgcgtgcgctaacactcacacactcaaactaggtcactgccttcatgcactgctgccactcaaaatgtgggggcgactccagattatttcaagcgtacacaaggacccatccatggcacgatttgaagcgtgtcaaaccacttactccatagaagctaaaagctgggcgaatgcccagaacttgaaatgagcagactgatcaaattggataaagaggattat

SEQ ID NO: 90027 - DNA, 1480 bp, Oryza sativa
  Clone ID: PAT_MRT4530_88733C.1
tccttcttcatccattgttttttttttttttttttttttaatgaaaatgaataatgctaaccaattaatatacttgttcctcacaagattctgatttacatacaaaacttgacacacaaaacccattgagtgatcagcttcacttgagctatcacaagggttctctgacaaataagagcagcatttacaacactagtggagaccaaacatagtttacagggccactcacatctaattacagatgcaataaacatgctttctgcttttccagcctctagaaatgggaatgctgattcaaaagaatgggatgctaaaatagttcacccattcctcctctcccaagttactctaggaaagttgattttgaagatcatctgatttccaaacaacatcctttaaggttctggagaggttcttgtagaacttgtgaaattcgagggtgtcgccttttgcttttcgtacttcaaccatatgaagagagggtgcaacctgcagtatctcagtagcaacattgagtcatttccctcatacgaccatggttaacaattgtatcaaagagctcaccaccggtaacatattctaaaacaatgtagatatttgtcttgcttcccatcacctcatatatacggacaacatttgggtgcttaatcaacttcatcgtcgagatttcccttttaatctgttcgaccatcttatgcttgagaactttctccttgtctaggatcttgatggctactggatcaccggtctcggtatccctcgcgaacttgaccttcgcgaatgtgccctctccgattgttcttcctagctcatactttcccacacgtctcttcactttggttgtactcatcccctgccttgtgaccctttggaatctcagagagcttccacgcccttgaagatgctttcacttcactgtccggcaattaagctgaaatctgcaaagactgcaatgcaattcgatctgcggctgctcttatggcgatggaagaaaaggaatagaagaggagatcccggggaagggaaaaatggctgctgagatgcgaagaagagcatgaaaggagaggttgaagaagaagaagaggagacgaaaaggagaggttgaagaagaagaagaggcgacttaggcaaggggagcagatcttgtaatttttcttctgaacatcaaatcctagaggttttgcggcttcctcaatcttgcggacaatttcttttggtggacattttgatgtgaaccttgtttcccttttgaattcctgctctgagtcaaacaaatttccaagattgaggcctgctgacattgaaatcagttcaaatgcattgagagcttctggttcttctttcttttctgtcacatggtgctcttcagagtcattgaagacagcatcaacatcatccaatgtcgtgtcatatttttcgtcaaactctgggcgtttgtagccctttttgaaccattcatcctctaatatttatggaaatg

SEQ ID NO: 90028 - DNA, 1548 bp, Oryza sativa
  Clone ID: PAT_MRT4530_88734C.1
ctaggaaagttgattttgaagatcatctgatttccaaacaacatcctttaaggttctggagaggttcttgtagaacttatgaaattcgagggtgtcgccttttgcttttcgtacttcaaccatatgaagagagggtgcaacctgcagtatctcagtagcaacattgagatttccttttctccctgcttttaccttttccaaccttaacttgtaatttttcttctgaacatcaaatcctagaggttttgcggcttcctcaatcttgcggacaatttcttttggtggacattttgatgtgaaccttgtttctcttttgaattcctgctctgaatcaaacaaattcccaagattgaggcctgctgacattgaaatcagttcaaatgcattgagagcttctggttcttctttcttttctgtcacatggtgctcttcagagtcattgaagacagcataaacatcatccaatgttgtgtcatatttttcgtcaaactctgggcgtttgtagccctttttgaaccactcatcctctaatatttctggaattgttactctcgtcattgggtttggatcaaggattcttgttaacaacctcttggcaggaaaagacgtccaaggtggaaacgtaaactctgcatttgatattttcttatacaacgtcataagattagagtcctcaaaaggcaaataccctgctagcagaacgaacaggataactccacatgaccacaaatctgccattgctccatcatatccttgatcttcaaggacctccggtgcaacataatttggtgtcccgcaggttgtgtgcagcaaaccatcatccttaatttgctgagaaagtgcactcagcccaaaatcagagaccttcagattcccatatgaatctagtagtaaattttctggttttaagtccctgtggtacacacccctgctatgacaataatcaacagcattaattaattgttggaagtaccttcttgcctcatcttccctcatacgaccatggttaacaattgtatcaaagagctcaccaccggtaacatattctaaaacaatgtagatttttgtcttgcttcccatcacctcatatatacggacaacatttgggtgcttaatcaacttcatcgtcgaaatttcccttttaatctgttcgaccatcttatgcttgagaactttctccttgtctaggatcttgatggctactggatcaccggtctcggtatccctcgcgaacttgaccttcgcgaatgtgccctctccgattgttcttcctagctcatactttcccacacgtctcttcactttggttgtactcatcccctgccttgtgaccctttggaatctcagagagcttccacgcccttgaagatgctttcacttcactgtccggcaattaagctgaaatctgcaaagactgcaatgcaattcgatctgcggctgctcttatggcgatggaagaaaaggaatagaagaggagatcccggggaagggaaaaatggctgctgagatgcgaagaagagcatgaaaggagaggttaagaagaagaag

SEQ ID NO: 90029 - DNA, 364 bp, Oryza sativa
  Clone ID: PAT_MRT4530_88735C.1
ggaaaccaaactttgaaaagttttgtttttttgattagtttccaaacatgggcgggggaacaaaaattttttgaaatttgattttaaaaaaccacagccttggcgaatggggctaactgagttcctggtcaaaatctttaccctgaaaaatgaaacttcggggggggtttaaggggggggggggaatttaatttaggtcatccggtggggggcctctttagggagaagcttttccctggccttggtctttgcctgggacttggagcccatgaccccgccttcccatttttttttgaccttgtgaaacttgtcgttgaagttcgctttgatggccttaaagattttgttgaattccggacgcgtg

SEQ ID NO: 90030 - DNA, 218 bp, Oryza sativa
  Clone ID: PAT_MRT4530_88736C.1
atggaacagttaattcctgtgtaaaaatcgttacgtactggttgctagctattggatattgcaaatgtttggttctttttacccatgtatatatacatatctagctttactttatatatacataaaccattgtacatgtacaaatgttacccaaaatgtattaattgtagtagtagtaaaaaaaaaaaaaaaaaaaaaaaaaaaaaaaaaaaaaaaaa

SEQ ID NO: 90031 - DNA, 1102 bp, Oryza sativa
  Clone ID: PAT_MRT4530_88737C.1
gcacgagggccgtccgctcgttctctcgcttcgctcgctcgctcgcgtccctcccaaattcccccaaaataattggaaccccactccgccaccggtgcggccgcggcggcgccgagatcggagagagagagagatggtggtgcggcggctgggcggcgccggccgcgcgctgctgtcccgccaggcgctctcgctgcccaacctccgccgccgcgcgtccaactcctgggccgccgtgcgcgacaccttcttctccaccaaggaagtgttcgagagccaccgcgtcgtgttcaccgtcggtacatccatcgcctccgtcctcaccgcatgggccggttattctttgcggcacatgcaacaatcaaggattgataagagacttaactcaattgaacaatctctgaaggatactcacaaagtcgaacatgaagagattaaaaagattgtcacttccagtaatatcagcactccagcctgtgtagccactgcattgacaacttcagttgtcgggtatgcgctagggtggcggggtggaacctggtacgctcggagaggcttccgaagagagcaacagaagctgatgggccaaatcaattcacaccacagatggcactggcggcctttcagtaaactcaaaaacagactcagaaggaaccgaccagcggccaagactgtcgaggcccctcggttgacaggcgaaagcaccatctgaaaatgttaacagtaactctcaggcagcaggatgtgcatgattcctctgaaatacagatgaacatcgatgcccatgtgcctgagaatagaaaccaaagaagcctgttcatatgactggcagacgttccaaattttgcaggattggaacatccttttcaataagattaggatcggaactagggagattatcttcctaattctcataggaaaatgccttgcgctgatgttaccgtttactactagccaggctgatatttgtcagttttgtcatgctgttttccctttcaaaaatgtgcctgcctcgtcgaggcattgcacctgtaattcgtcgatggacacatgagaatgcacaagcatttgttggtgaccggaaaaaaaaaaaaaaaaaaaa

SEQ ID NO: 90032 - DNA, 426 bp, Oryza sativa
  Clone ID: PAT_MRT4530_88738C.1
attcggcacgagggaaatcttcgtataaaaatgtcaatttatatcaattttattagagatgcaacaagcctctttaatcgtagttgtaaccacagcgcaggcatatacagagtaactgtgtacactttttgatatattttagtgatgttggccatggcaacttttgcatgtttcatgaatactggtgggctataatctcctggtgaattgcctggatgcacagcacataagggcaaaaaacgaaatacttggcgtattaattattggttcatggcggcaagtggcaaccaataggttttgttattgtcttaagctgactacatttccctgaggatattttgatatggttgacacaaacaagttggaaaagttaaaaaaaatatatgggtattagtggtgattttccctagtgcaggctcatatttt

SEQ ID NO: 90033 - DNA, 794 bp, Oryza sativa
  Clone ID: PAT_MRT4530_88739C.1
ctccatcgcctgtcatcctcgctggtggcgcccaacttggaattgtcgaagatttctcatacacctagccgtcgggcaaccccaatgctcccttccactgaagcagtgtgtggctcgggctgcctaaccctttctccgagcctccagctggttcaatggccggccaagtttcagcccaacctgcttgagaagtatgatggccccgtcgacctgacggagtacctccagatattatcaccgccatccaggcagccgacagcgatgagaaggtgatggcgaactacttccccatcgctctcaaggcccaggggagttcccagatgatgaacctcctcgagagctcaatctactcctgggaggatcttcgccaccaattcatggcgaactttcagggaacgtttcctcttcccggaatggaagtggacttgaacgccctccgctagggcatggatgagaccttgtgccatttctccaacgattcagccaggtctgcaacaccatcccgcacatcgcccaccatgttgtcatacacgcatttaggtcaggcgtttgcaacaagcgcatgctggagaagatggctctgatcgtggcccagctctttagccttgccaaccgttgtggccagaaggaggtggtccggtgtggaacaacagtggggggcgcgcccatggcgtcgctgcccaagccgccgcctccgccgcgccccaagacgcgtggcagctacaactgcggccgctgcggcctccccaagaagggccacgtctgcgccgccgggggccccgcccccaccccct

SEQ ID NO: 90034 - DNA, 2741 bp, Oryza sativa
  Clone ID: PAT_MRT4530_8873C.1
atctcttatgcacatacttttgaaatgttagagaaaacaattaagggcacagcagcaggcataacttctgtattagcagccgctcggggaggtcgccatcgtggtcgccgtcgcgtcgccgtcctcgtccgccccttcgccgtcgctgtcaaccgccggagcaccgtcgccgtcgtcaagccgaagagtgccgccgccttctcctcgatgctataactggtaataatttgattagctcctggtttggaatggtatattcctggtttggagatagatctgtacagccgatgccgcgctacaagcctgagtacttgtttggtgttgagggatttgtccaggagttgcgtacgatgtcctttgccataggatttgggactgcccctttgtatgcccagattcctcacgatcgtcacgaaaagaagtgccgagtcaaagtcaccttgaacagtaatagtgaagatatctcctcagtgatgttcgaagctggaggaggaaactacatccatgcatgtcaggaggtggcaaggatcgccataggagagctccgcgatcgctacagtgatcagttggccgacaccttatcgctaccatcctcgccaaccacagggaagtgaccatggcagctaccttgagactgagggaattgagaatgatgctaccacaaggcatttggttgagatgctgtgggctatggatgaaacccgtgcgaagactgtgttagcggctcaagatcgtgaagaccagaatcgtggtaagatttgcaagctagaggacaaagtggatcgtttggagaaggaactagccgcattgaagggagaagcaccaccgcagaaggccaggattcgtcttaccgcaaggaagagagctctatttgtccctcgctaccaattggcgccaaaggtccgtgtggtggagaaagaagttaccccagccctagcggatcctccggtcgtcaacgtaagtgatgatgaaggagaagaatccaagcgcacccattccaagatcgagtggggagccactcaagatgatggagacgagccgaacgagccttcaatcaactccgatgcccggaagacctagacgacgggaatggccccaacatcaacaataacaacaacaatggagagaatcccacacttgcccaagtcctggctcaacaggcacagcttatgaacatgatgatgcagcaactccagaaccagcagaaccagggaaataactatgcacctccccagaacaagttagcagaatttcttcgtgtgaggccgcccactttctctagcaccactaatcctgttgaagctggtgattggctgcatgccatagaaaagaagttggatttgcttcagtgcactgatcaagagaaggtctcgtttgcatcacaccagctgcatggccctgcctctgaatggtgggatcacttccgccttaacaggactaccgctgaacctatcacttggcttgaattccccgctgctttccggaagacgcatataccatcgggagtggtgtctctcaagaagaaggaattcaggtcgctcacctagggatctcgcacggtcaccgagtatctgcacgagttcaatcgtctggctcgttatgctccggaagatgtgcgcactgatgaagagcgccaggagaggttcttggaaggacttaatgatgagctttcttacccactcatgactggggattatcatgatttccagaagttagtggataaggctattcgccaggaggacaagtacaatcgtatggagcagaagaaacgccggattgctcaattcaagacacaacagggaagtaatcagaagccgcgtcttactttaggacaccagtccatgccacagggaggttcttcgtctgttgttcgtccgcagcgtcagttcttcaacaacaatgctggcaacaacatccgcaatcaagctccacgtcctgttgcagctccaacacagcaacaacctgccaagagggagcaaggcagcaagcccgtggtatgtttcaactgtggagacccaggacattatgctgacaagtgtccgaagccccgacgtgtgaaggttgtccctacccagagcaactctaccgtaccagcatcaaaggctcgtgtcaatcatgttgctgctgcagaagctcaagatgctccagatgtgattttggaaaggatacatcagaccgagttcatcaccatggggagctccggttatttttgtggaaaagaaagaccatacccagagaatcttaaaggtgccactgttttctccaagatagatcttcgatcggggtatcaccagttaagaatcaaagaggaagatatacctaagacagcttttaccactagcaccttagcgccgagtagcatcgagccgccgtcgccgccgttgctccagccgtgcgccgccgccgttccggtcatcgtcgtcgctcgggaagactgccgtcgtggtcgccaagtcgccgccgtcctcgtccgcctcttcgtcgccgccgaagaccgccggagcaccgtcgccgccgtcgacccgatcttctccgccgtttcaacctcgtcgccgtcgccgtccgttggtcttccgccgctcctttggtcaccgcgccaccaccaccgcgccgccgccgctgccttcctctccttcctatgcctagtgagcggtggggacggggtaaagggaggaggagtacgaatacgtgttcatcagacgcagcggcatggcgaagttgaacctgctggcacgggatga

SEQ ID NO: 90035 - DNA, 378 bp, Oryza sativa
  Clone ID: PAT_MRT4530_88740C.1
atggtcttgttatggcatcgccaccgccggaggagggagagggatccgttgcggcggtggaaacgcgctagtcaggcgtcggtccgtagggagcgctgcctgtggtatgaggaagaattgggcgggcagcctcaccctgacatcaccgccagcggaggagagggagggatctgctgcagcagcggtggaggatgtggtcagcgaggagcattgccctgtggtaggaggaagaagggacggcctgtgcggtgtccaccgttggacaacaccacaggacgtggtggcgaggctggtgagcaccgtggcagccatttgctgctccctcgtctccaatcgattgggcgagaaccttccaaaagctttgggaagcccacctga

SEQ ID NO: 90036 - DNA, 1144 bp, Oryza sativa
  Clone ID: PAT_MRT4530_88741C.1
tttatttatgtagcctaaaagaaagcaaatctgaatttctgatttaatataatcagtggaacaagtgataagggagtttcaagacagattccaggaacgtacagagttacctccaaattggcaatttgaccttcacatacctctacttccttttgctaagacagtcactaagaagacatacagatattccccacgccgaaaggatgagatagaacagcaagtggtgcaaaatgctgaaatagagaattatatacactagtacaagtccttttgcatcacctgtactcttggttaaaaagaaggatggtcttggagattctgtgtagattacaggggctcaatgacatcactgtgaaaaataagtatcccatacatgtggtagatgaattgttggatgaactagctgaagcaaattcgctcactaaacaagatctgcggtctgggtaccatcagataaggctaattaatgagcatgatgaacacaagagagcttgcagaacccaccaaagtttgtatgagttcagggtgatacccttcgggctcaccaatgcaccagccacctttcaaggcctcatgaatactgtcaaaaagtttgtgctagtatttgtggatgatatattaacatacaacaagaccctggatgaccatgtaaaacatttaagaatggtgctcactctattgcaacaacatcagctttttgtgaaagaaagcaagtgttcctttgcccaacaggaattgaaatacttcgaccatatcattggcaccaatggagtagcaatagatcttgaaaaggtgaaagtagtgcaataatggcaggtacctagaaacttgaagcaactcaaagattttttgggtttggctggttactacggcaagttcatccaagtatatggtgtgatgacaaaacctctcactacattgctgaaaaggaactcaagtaatctgggagtgatgctcagaaacaagcctttgaagctgtgaatcaagctctcagtggagcaccagttcttgcattaccagattttactaaggagtttgtggtggagacagatgctagtgacaaagcgattttagcagttttaatgcaacagggtcacccattagctttcatcagcaatgccttggagatcaaatcccaagcaaa

SEQ ID NO: 90037 - DNA, 747 bp, Oryza sativa
  Clone ID: PAT_MRT4530_88742C.1
atgaaggtcgatgtggtggcgcaggttgacatgaatgaacctagtgtggtggaggacagcgactgccacgatcgcaagttgacggtcggactttgcgaggaagatggcatcgacggtcggattgggcggtccctgtatgctctcaccatcgaggcatcgacacataggatcatgaagggattgaggtgggatgagatggacgaatttgtactcaccgttagtaccgtctgggggcggagtagctcggcggtgctcggatctgagaggagcagcggcggcggcgttcgcggaggtggcggcggttgcagacaagcggcggttgtggacgagacggaggcggcggcgggtgcggaggcgaggcggctcccggatctgagaggagcgccggcggtgctcgcggaggtggcggcgctcgtggtggtggcgctcacggaggtggcggcgctcgtggaggcggcggcgggcgcggtggcgaggcggctcccggatctgagaggagtggcggcagtgctcgcggaggtggcggtgctcgcggacaagcggcggcgctcgtggaggcggcagtggtcatggaggaggaggaggcggcggcgctcgtggacgcgcggaggtggcggcgggcgtggacgaggcggcggcgctcagggaggcgatgacgctcgcagacgcgcggcggagctcgcagaggtggcggatggcgcggtgacgccgttcgctcgtcccaggtgggacgagttcgtccgctag

SEQ ID NO: 90038 - DNA, 1474 bp, Oryza sativa
  Clone ID: PAT_MRT4530_88743C.1
ccggccgggacgcactcccgtgtcccagccttccactgcaaaccgcagcattcaaagccaaaaaccctcgccttctccccctttgcccagatcgagcgaatccaatccacccccgaatcgaatccgcgatggcgacccacccggcctccccggtcgccggcggcgagaaggccacgccgccctccacgccgccgccggtgcgcctggcggggggtgcggcggcggcgatccagcccaactcgccgcggttcttcttctcctcgctggcggcggcgtccgcgtccgcctcctccccgcaccgccgcatcgccatcgccgtcgacctctccgacgagtccgccttcgccgtcaagtggtccgtgcagaactacctccgcccgggcgacgccgtcgtgctcctccacgtccgccccacctccgtgctctacggcgccgactggggctccatccccgtctccgtcgacgacgacgactccgcccccgacgccgcccagcacgccaacgcccacgccgccacgcgcgacgagcccgaggaggccaagaagaagcgggaggaggacttcgacgccttcacctccaccaaggcgcaggacctggcgcagccgctcgtcgccgcgcagatccccttcaagatccacatagtcaaggaccacgacatgaaggagcgcctctgcctcgaggccgagcgcctcggcctgtccgccatgatcatgggcagccgcggcttcggcgcctcgcgcagggcgggcaaagggaggctcgggagcgtcagcgactactgcgtgcaccactgcgtctgccccgtcgtggtcgtgcgctaccctgatgatggtgcggcggctggcggtggggaggccgtgggggatgagctccgcacggtgcctgaggatgaacccgtctaccatgaagctcccgagggtcagaaagaaaattgaggtgaaaagagacgcatccagatcacaaggagagcgtgcgacttgctaatgccgatccctgtgtaactgtgtggtcgcttctatgttctgctccgcgatgcatttcgagcatgtatcagacttgtagatcgttgccctttgctgccatttgcttcctgagagatatttattatgttgtccggaggagaataatctatttctgaaagaattgtagccgtgggtaaaaaagaaagacactgtgtatggaatgttttcgttggtcacgaatccatgttgtttcataccaaatccaggcttcataatgtggcgcgtcttgtgttcttgccaaagttttctgttttatacggtatttcagctgctctattcagcctgtttttttgtagaattgaatacgtgataacggaaaaccctgttgattggaaatctggaacctaaaatcctgaaaacgtttagctgctcgaaacatggaacatatgttttagtgtatatactcctttgtataatgttcaaactactttgcaactatgatggatttatcc

SEQ ID NO: 90039 - DNA, 357 bp, Oryza sativa
  Clone ID: PAT_MRT4530_88744C.1
ggagggcggaaaaagttttttggggcaaacaaaaacagtccctaactaaaaaccaaaatctttgaaatgtttcacccttatagagatgctgcccatcacaagtagcctatttaacaaaacattaccaaactcgacaaaggaaacagcttgttttaaagtaggcaagccccccgtccccattcagggcaaacaaagatgcgtgcccccctcacacttaggggtgggttgccctggagaaaatctgctggcttgaggaaaccgaaaccatgcggtttaagccccgggtcattaaaacattgatggccctccaacccagggccccgttgatcctgagtctttcaaaaaaaaccgaggggg

SEQ ID NO: 90040 - DNA, 349 bp, Oryza sativa
  Clone ID: PAT_MRT4530_88745C.1
ggcgtggcgttggcaggcggcggcggcgttgcgcggcggccaaggcggcggcatggcgcgtcgtagtcgtggcgcgtcgtcgtcgtggcacggcgtctcgtggcgggcggcgcgacggagagagatcgagatcggagagatcgagatgcaggaagggagatctggcggctgcggctctcaccccagagatgcggcggcagcggaggaggcggaggcggcggcgaggacgacgagctcgagacgacggcgagatacggcggcgtcggtgcggggatttgccctaggcagtggcggcaaaggagagaggccgagagagatcgatcggccgaaaacgtctaagtgttggtga

SEQ ID NO: 90041 - DNA, 249 bp, Oryza sativa
  Clone ID: PAT_MRT4530_88746C.1
acgatcgcaatttattaagcgcgtaaattgagtcgtacgggttgcatatgtttaacaccagagatatgaaatgtaggggttggggaagtcatatgcctttagttatggccataggaaaccacactggcggtggcgcagaactcgccgcaggacttcgtggacctccacaactcggcgcgacgcgtggagggcgtcggctaggtggtctgggacgacgccgtgtcggcgtacgcggagaactactcggcg

SEQ ID NO: 90042 - DNA, 241 bp, Oryza sativa
  Clone ID: PAT_MRT4530_88747C.1
atggctatcaatgaagctcttcgactgaactggaatctacagcgcgaaaaggccatggtaggcgatgtaccccgtcgacagcgaggcgccacaaattcgtcaatctccaggatttgtcaacctagtcttcgaagatgggcgccacgacttcgtcaatctgctagatttgccggcccagtcttcaaagatgcgggagattgctgattcgttcaacaaaaaagtgctcatctctgaagactag

SEQ ID NO: 90043 - DNA, 535 bp, Oryza sativa
  Clone ID: PAT_MRT4530_88748C.1
atgccatacagcacgaagacggataaaagggagaacaaagaagacacaggcagagtagggctgcgtcggaacggcataggcggcggccgcctggcgatgccagccgcagacggcgttgcccggcgtcgaaaacggcggcgtggcgcgtcgtcgtcgtggcgcgtcgtcgtcgtggcgcggcgtctcgtgcggggggcgcgacggagagagatcgagatcggagagatcgagatgcatgaagggagatctggcggcggcggctctcaccccagagatgcggcggcagcggaggaggcggaggcggcggcgaggacgacgagctcgagacgacggcgagatacggcggcgtcggcgcggggatttgccctaggcagtggcggcgaaggagagaggccgagagagatcgatcggccgaaaacgtctaagtgttggtgaagaagacgagggcgcaccgggaatatatatacccctggatctttactcccggttgttctcaacaaccgggactaaagatatctttattcccggttgttga

SEQ ID NO: 90044 - DNA, 966 bp, Oryza sativa
  Clone ID: PAT_MRT4530_88749C.1
atggcggcggtggcggccgtgttcctggcgttcgtgctctgcttctacatattcgtttgcgccaagaggtacaggggcggcgcgccgccggcggagggcggggtggcggcgaggctgtggttcttgcttggaggtggcggcggcgggggaggcgcggcggggtcaggggacgccgcgtggtgctacgacggcgggctcgacgaggcgtccatggcgaagctgccgtgcagggtggtggggaaaggggaggaggcggtggactgcgcggtgtgcatcacggagctcgccgcgggggagacggcgcgcgtgctgccgcggtgcggccacgggttccacgtcgcgtgcgtcgacatgtggctcaagtcccactccacctgcccgctctgccgctgccccgccgtcgacgagccgccgcccgccgcgccgccgccggtggtggcgccgcccgaggccgacccggagtcccccaacttccccaccaacgtcctcttcttcggctcccaggacgagttgcttcgaattgaaaagaaattagttgacctgggaggtaagatagttgagttagcagcaagcatggttttgcaaagcagttggccaaacaagcagcaaacagcaaagccagcgacttcaaagaactggaggaatggagatagtccagctaatcacttgcaaattactagtagtagtgatttgctgtgtgacgccacaggaaaatatattttttttgtgagaagaaaatttcgctactccgcgttcacaaaatcaaaagattctttcctcattcatatgagattaagttgttgcatggaaatgttccaatttcagtcgcatcctgacacagaaagaatgatcctcgcgatatggggtttgaaactgacatcggctacggacatcaagtacctgctccgttgggtatggactataatcgacacaaaccgagatgagcagctagtagcagaaatgtag

SEQ ID NO: 90045 - DNA, 827 bp, Oryza sativa
  Clone ID: PAT_MRT4530_8874C.1
atgacgtcaccaccggcggcggcggctcggcggctcgggcttgcatgctcgccggcgaacgacggcacggcggcgcgaacggaaggcaccaacgggtagcggacggcacggcgaactcaccggcgaccaaagcgacggcggaagaggaacggacggcgacggcgacgaagaagaagcggcgacgctcttcggcttgacgacggcgacggtgctccggcggtctacagcgacagcgaaggggcggacgaggacggcgacgacttggcgaccacgacggcggtcttcccgagcgacggcgacgtctggaacggcggcggcgcacggctggagcgacggcgacgacggcggcgctagggcacacggcgctagggcgtttccgacgacgagaggcgaaggcgaaggtggcggcgggtagaggagacaccggggaaccttttaaaggggctaggagacgacgacgaaggcccacggcggctggcgacgagaaggaaagttcgggaaaatcgaatccgaaacaaactcgaatccacgaatttccaaacgattttagccggtgtttccaaaggagaaaaggtagaggagatctcgaggatcatttctcctctattgattcggccggagaaggaaaggatcggccgaattggaaagcggcggcggcggcgcggcgcttgggtttcggccggaggaagacgacgacctgacaggcgggccccacctgtcagcgggcggacgcgcgggcgccggcggctgcggactgggtcggctgggccgaggagagagagaagggttttgggccgactttcggcccaaagccaaaagagactttt

SEQ ID NO: 90046 - DNA, 268 bp, Oryza sativa
  unsure (1)..(268): unsure at all n locations
  Clone ID: PAT_MRT4530_88750C.1
tacgacgtccagaaggagaccgctgtcgtttgctccggccaagtgcagcacgctctgatcacgaccgagagttgtaccgatcgatttcatgtgacacgtgtacatttttctggttattagtagtatatgtttctggttatttttgtatagtttctacctcgtttcttgaggttctngatcggtagaaatttctgtaaaaagcttcttaaaaaaatgttgtatgagactancccaggaaagattcagcctttaaaaaaaaaaaaaaaaa

SEQ ID NO: 90047 - DNA, 590 bp, Oryza sativa
  Clone ID: PAT_MRT4530_88751C.1
cagaaatgctcaagtgacatagcacaagtgcgttataattcttcatactgatctgttgcatcacatggtcagtatctgctataatatcagagcaatcagtaaacataatatctttatatgtgctcatactatggactgaagcttgaatttgtgacataacttttgttgcggatgtttagctttcatgaaagttgagtgggtcttgggcactgataggatattgagaagaaccttagggacaagtcacacctaattctatctccatagagaatgctagttgctgtttcatactctagtagtctattttattttttttctaggaaacctatgtaagtatgtattgttgatgcacttctgagatacttatgttttgcatacaagagttacttatgttttgcatataaaatattgtttggttgtattagttgattcttctgttcacacttgttcttacttgctctggtttgagcaatcagcacacaatgacaccggaaatagcggtgcatggctttccggctgacaacttcacacgatcagggagcagagggataaatcttagtcgattgtcgcttggtgttgagcttaatgaa

SEQ ID NO: 90048 - DNA, 230 bp, Oryza sativa
  unsure (1)..(230): unsure at all n locations
  Clone ID: PAT_MRT4530_88752C.1
cncganagccaagccaagattctggaggcttcccgcgctactgcaagtggacagcgttgctcccgcacgccaccaccaccacacccacccttccttcctttcctcgatcgatcgatccgcaacatggcccgnggcggngncggcggcggcggcgcggacgcgacctgtacgncgtcctcggactcagcagggagtgcaccgacgncgacctcaggctcgtctaccgcaag

SEQ ID NO: 90049 - DNA, 1671 bp, Oryza sativa
  Clone ID: PAT_MRT4530_88753C.1
atggggatgttggcgctgaggcgtctcatggctgcgcagcgggatcgccgtcgtcgtcgcaaggcccaagctcgcaatggagcaattacttccatggctaaacgaaagggcacattcctacgagggggtgatagttctcagggtgctaaaagattgaggtattcagggccatacctcacggaggacatttggcgccatatacattccttaatgccgctgcgagatgctgcccgtgctgcttgtgtatctcaagcatttcttcgttcgtggagacgctatcctaacctcatcttaacaacggaaacattgggcttggaacagaaaaaacattggaaggttcatatggcaaggtatttcactagagttgatcacattctgaagaatcactcgggcattggtgtgaagagatttcagcttgtttgtggtcgccgcaaacttatatgtcgtctcaacaattggcttcagattgctatttcatctggaattgaagaaatcactctttcgctgccttcggaatacagcttcccatgctcacttttgtctggtgggagtggaaggtcgcttcagcatcttgagcttgtcaattgtgccttccgccctatggctggccttggttgctcgagaaatctgacgaagctgcatttgcattctgttcttattacggatgatgagttagcttgctttctttctgagtgttttgctttgaagcatttggatctcagctattgcagagagttagtatatctgaagataccatgtttgctggagcaactcagctacctgaatgtggatttgtgccatctgcaaatgatagagagcaaagctccgaacctgtccagtcttatatattctggtaacctaatagaactctcacttggacaatcatcgcaagtgaagaccctagatataaacttctatgataagaccaacttcctctgttatgttattaccaagcttcaaaatattgtcccaaatcttgaaagtcttaccatatattctgatgatgagaggattaatacacctatggttgatgccaaattcctccacctgaagtacttggagatttattttgatggtcttgatggtagtgatgaggccttccccccagaatacgattatttgtctttggtttcagttctccacgcatctcctgttttggatactttcatcttgtctgtgcagcagggaggaatgaagcatgattcagtttccggtgacacaaccacaaatttgagaactatgcctggacacaagcatgagaggctgaaggaggtgatgatcattggattctgctccgcgacgagcatggttgagctaacatgtcatatactcgagaacacaacatcgctggaaactattacattggatgctgtatgtgatgtgcatgatcttgaaaatattgggagatgttgtacgactactatccgcaaaaccggctcatgctacccactaagaagggagatgatcttggaagcccatagaggggtcatggcaattgaaagatacatcagggggaaagttccatctattgttgagttaactattcgtgagccttgtacgtggtgccatgatcttgaacgcttagacgccttagaaaaggaaaacaggtcacattattccccacctcatcttaagcttgaggacatttcattattgttaaaacctgtataa

SEQ ID NO: 90050 - DNA, 760 bp, Oryza sativa
  unsure (1)..(760): unsure at all n locations
  Clone ID: PAT_MRT4530_88754C.1
ccggccgggtcgccgtctcgcgatcgagcgagagagcctttgcctttgccctcgcctccctccctccctcgtctcgctctcgccctcctcctcctcatctcatctcgcgattggtgaaattctagggttgtgcggatttgctcccccgggccaaccggatccaggtcgacgagcgcgcgcgcgcgaggggtcttcaaaagcgctcttcgggatcgcgttcgcgtgagcgccagctatacactcactccgccgccgcgacgaacgacttggggcttctccgttggctactgggtctagtctgaagtctgaacataaatgatgaatcttctcagaatgtggaagtttgagctctaaatccacttggtttgtgaggtgttaagagcactggacagtgatagttgttactgtgcaaaatgttttggcacgtacctggaatctctgctgcatcaccggtggatactattttagacaaggaaaatttcaagttggaggaccttcttgatgaggatgaaataatccaggagtgcaaagcactaaacacccgcctaatcaatttgtactatttctcttttagagtactgtttctctgtagttgttttcttgtacaatttctattctgggacacagtttttccgttgcatttttttttccttccttgagttgtgattgatcttagagcgtatgctgatattgttcaccaaatggatatgtgtgactatctatgttatctatatgtactaccaaaaaaaaanaaaagggc

SEQ ID NO: 90051 - DNA, 682 bp, Oryza sativa
  unsure (1)..(682): unsure at all n locations
  Clone ID: PAT_MRT4530_88755C.1
gcatttttgtgtaccacaggagaggcccnacntatgtattggggcatgatactggtgcgatgcaaccctgccgtgcaccanaaggccctggctctgatacccntccccttcgntggagctgagaaactccatgcgatgggtggaaagggaaaatggggaactatggtgacaaatgcnataaccccaatgaaattgatgtgggccccacngtggaaatgtgttgtgacccgagtgtgtgtgcatgcaaagtggcctgattgtgcacccgtgggctggccctgttgacacagccctggagaggagataatgacccaatgtgcgacctgtgaggaggacttggcaataactgtgtgcaccccagcattattgcgcgttattaccgagagtgtctgtgtgtgtgtcctgtganggtgttgagaatatagcccaaaccaaccagtacacgggaggttgttagagtggaaaagggtagatcatttgatcgttggtagccccctatagaagagtagactagcggtaggtaccagtaagtgtgtggtccgttccacgccctaatgtgangttggcgtgtggtagccatgtggtaaacaccggagccaccgaagtgngcccttgtaaatgttagctcttttatatagaaaaaatattttttattttgttntaaaaaaaaaaaaaaaaaaaa

SEQ ID NO: 90052 - DNA, 348 bp, Oryza sativa
  Clone ID: PAT_MRT4530_88756C.1
atcagagaaggtgtcaatagacattgtgttgttcctttttgccggactcggatttggtgttggattcgcaattgcaattctcttaacatggggaacctcaaggagcttgtccttagctttacgactgtcgcaatgagctaccagggcaatgctctgtctttcactcgtccagctacttcacctaaccaattacagtatcttaagaggggacacgcaggaagtgtccctagcctagctagctcagataggtgccctcgtgcatccaaacaacttaattttgagtcctcttcaactcaaatttgtgtgcctatttcttcttcttaataaagaaacaccgagcttctgcta

SEQ ID NO: 90053 - DNA, 528 bp, Oryza sativa
  Clone ID: PAT_MRT4530_88757C.1
atggccctcccggttcactacttgtcggttttacaattgccaaagtgggcaatcaaggatattgaaagaaaatgtcggggcttcctttggaagggtcaggaggaggctctccggttgcaatggcctgcgaggtcgctggagcagagggagaggccctggaccttggctgcctttaagctagggaacgatgtgaatctcatgttcagatcagtggtgaagtacattggtgcactgtccaatgaagcaatgggcgaattttttcagttatgggatgaggtccacgatttctccctgctcccatcgcctgacgagatcagatggaagctgacgggcgacgggaaattctcggcggcgtcggcttatgatgttttcttcatagctgctgaggactgctcctatggcgagctactgtggcgatccagggccccctcgcgtacggtgacagcagacttgctgactggtggcttgcaacgcgacgccgttttcggacgagctacaaagtggacttcgacagtgccttcatgttaa

SEQ ID NO: 90054 - DNA, 447 bp, Oryza sativa
  Clone ID: PAT_MRT4530_88758C.1
atgacggtgctcgtgcacaccactcccacctcaccgatgccgcatgaggcccgatgccccgagcgcgttgtcccccaacaccaggctcgccgtctcattgcccgcgacgacctcgccgaggccacgcgcctcgtcgaccgctcacgcggggaggcacccggcgccgccgtcgctgccttgaagacaaacgccaacgtgccccctgtgctgcgccgacgtgccggttccggcgaggccgacgagctcgacgatggcgaaggggaagcagcagcaaaccgcggacagcgccttcctcctcatacagccttgccgccggcctctccgcctttttttttcttagtgccctccgccgctggcctattccggcgccggttgcagccggtcccatacactgtcaccgccaaccggtgggagagtgcatcccctcacccgtcaacgtccgactga

SEQ ID NO: 90055 - DNA, 956 bp, Oryza sativa
  Clone ID: PAT_MRT4530_8875C.1
ctctattgtatcctcttcaattgcccccaaattcccccttgattcgtgccttcaatccccgggaacggacgcgccaagtccgaccgctttccatggccgtcggccgccattcccgccgccgttccgacctcccccgtggccggctccctcttctctcatataaaatgggatcctcatcccccgttctctcgttttagccccctcccgagcctccccgtggtccctagccatctccccgccgccctcctctctctcccacgccgccggccgcctccagccgcctgtgccgcctcgaccgtgcgccggccggccgcgccgtcgcctcctccagcgtcgccgccacctcctccaccccggcctgccctccgtttcgcgcggtgaccgccggaggcgcgttcccgccgtcgcccttctctttcctccgcgccggccgcctccagccgcctctccctcctcgccggagcaccgtccggccgcgccgtcttctccctcggcctcgcagccacctcctctccctcggtcagccctccgtttcgcggggaaagcaccggagacgcgtcctcgccggcaaaacagtggcgttgccgccactggtccacctccgggcgccactgtcgcgtttcccgtgcgccggccgacgtcgccaccacctccctcggctccgcgacgccgccctccaccccggctggtcctcggtttcgccggaacgccgtcgccgcgccggcctctccatcctcttcgtcgccggcgtcctttcggccacccattcctcctcgtcggctcgtcgccccgcgttcgtcctcgccgatcgacgtcccgtcgctcgcctggctcatcgtctcgcggcgccgcctccgtcgtcggcatcgcagcggcgtggtccgcgccatcctcgcctccgtgcagccgctgccggcagccctcatcgcctcctcgccggccccggtcgtcgccat

SEQ ID NO: 90056 - DNA, 682 bp, Oryza sativa
  Clone ID: PAT_MRT4530_88760C.1
tttgaggtagtcccacatctctttagcagtagagtgatgcctgaaactcatccgaataggcacctctacactcatgaatatgaatcccataacacgatcatctgctgttttccacgccttaattttagttgcatccgttttctcatcaggaggatcatctgtgaggtgagatgcttgaccaatcgacctcaaaagcatacgagctgaaagttcccattcttgataattttgaccatttagcttaatgtccgtggagagcagagctccacctccaagaaaggggttggatgttgccatcaagaccagcagaagaaaatttgacaaattgactggacagagacttgcttacaggacttgatgtattgtctcttgaattagcaccagcagcacacagcggcagcagtagtggaagagcagcaacaacggctgagcggagcaaccgcctgacgagcggctgcaatgagcgatgcactcacgcgtgacggacgaatcacactgacttgctgtgaatcccgctgctgatccggacgaggaggacgtgaagaagatttgcccgatagggagccaccgccggcaagccggagcgccgccggacgacggggatcgagggctagggttcagcccatgagctctgataccatcttacagtgatagataacctgcagcccggggatccactagt

SEQ ID NO: 90057 - DNA, 4245 bp, Oryza sativa
  Clone ID: PAT_MRT4530_88761C.1
atggagcaagcgagcgaggacgatggaacaagcagcagcatcgatcttgaatcgagtagcgaagtaattaaaagttctaacattggccctcttttacatgtagtcctgtatacagttgagttccagaagcgtggcctccctcgttatgctttagttgatgaatttatgattcatggcccttgtggcaatcagaaccgggcatgcccatgtatgaaaaagggagaatgctccaagcatttccctaaatcttttcaggaagagactatgatggatgaatttggatttactatttacaaacgcagaaacaatggtcgatatgttgtgaaaaatggtattaaactttacaacagatgggtagtgccctataacctagaacttctgaaaaaataccaagctcacattaacgtagaatggtgcaacaaatctaatatgatcaaatacttgtttaaatatgtcacaaaaggagctgatagaactaaagcattttttgagatttctggaaatgcatcgaataaaacatctgaaagctctacttctccacgaaatgaaatacaagaatgcatcgatgcaaggtttctatctacatgtgagtctcattggcgggcttttgaattggatatacactatagaatgccttctgtagaacgcctaactgtgcaccttccaaatatgaactttgttcgatacaagaaaggatctgacctacaatctttgctatccagccctgcagtgaaaaaaacattgttaacggagtggttcgaagcgaacagaaaatatagcagtgcacatacgcttacttactgtgatttcccgagagaatggacatgggacggtagctcatgtagttggcgtcctagaacaccgtgtgaaaaaataggcaggatgtactatgtgagtccagtgagcgacgagctttattatttacaaatgctattaatgatcttaaaaggcgccatgtcttatgctgatgttagaacttacgatggggttgtttatccaacctttaagcaagcatgtgaagcaagagggctccttgaaagtgataatgaatgtcacttactatttgatgaggctatagtatatgcatcgtcaggccagctaagacaactctttgttactgttgtgatgttctgttctgttggaaatgtccagtcactatttgaaaattattggacctattttaccgatgatattcaacgacgtgttaggacagctttgtcaaatccttcttacataataccttctgatagactgctgtccttactaatgaaagaactacatactgtgttttcaaacagcggtggtagcatagatgattatgacttaccacgagcagcaatttattcagatgacattgtaggaaacagaatggtcgatgaagagcttgctcctgatgccgccgccctagcctcagaagctaacctgaatatacctaggctgaatactgatcaaagaaaattttttgacacaatcatacaacgaacaccttctaacagtatagttccattcggtggtaaagttattattcttggaggtgattttcgacagatattaccagttataagaaaaggttcgcgtgcctccatagttgatgcatccattacgaattctcctctttggcgacatgttactcttcttagactgacaatcaatatgagacttcttcacggtgaccttggtgagcaaggttgcagagatcttaaggactttagtgattgggttctagtgcttggtgatgaaccaacatgggtggatattcctgatgatcttttgatcaaaacatccggtgacaaaataaaggccataatagatgaggtatttccgcgcttcatagataactatacaaatcattgctaccttgcatgtcgagctattgtttgcccaaataactcaacggatgatcagataaatgacagtattgttgacatgatacctagcgagccaaaagaatatcttagctgcgatacaatttcaaaatcaagtgaacacttacctgactttgatatcctttaccctcctgaatttttgaattctattaatgtcaacaacttcccgtctcacaaacttgtgctcaaaaaaggtgtgacaattatgcttctacgcaacttaaatcagtccatgggtttatgcaatgggacaagatcaacatcaagggaaggtattagaatactcatagaggatgaggatgaagtatgttgttcacaaaccagaaatgtggtttaccatgaagtactagaggctgtcagctctatgatgggcgaattgcagattgctagccttgagcttggtgatgggaatccaactctccgcatacgcatttcatggttatgggaataccatgaccaaaatgatgaaactaacttgcaccatattggattggttttggttgatcaaaagaaatttaagcccctcatcactgaaggcaaggtatacttgcttacgtactatcgtgtgaaaccttgcacgaagcactactggccagttgacaacaaactggcgattactttcacttggtggagtacagtagaagaatgtgttgatgtgccagataactttgctcagtatgcttactcccttacgccttttaatgagctacgctcccttgtggacaggaaagactccttcacaggaaacgtttctctatcaggtaactcggcctgcaaatggtacataaatattgacacaccagatgccaaatccttggctgctagtgttgaagggagctatgagccaataaaatggcttgatctgccggctggacctgctgcccacaacaatggtgaagaaaagacaattgctgagatcagagaacttcacccttttaagttcaagacaaccaaaccatatggaagtacttatagatgtggaaacaacaaatgcccaccagttgtttcagcttcacctaggttcaaactgagtgtgatagcaggcggtcatatagccgacactacatttattgtttttggccgtttggctcaaaggctcattggtcgttcagttgatgcactggtgatggaaaatccaaccggcaaggaccacataccaagagagatcactgatcttcttgagaaagaatttgtctggaatgtcagctttacagagaacacaatttctagtggcattgtcgctttccaagtgaataggattattaaaggaggtcagaattattccttggctcttctacagtctccatctggatcccaggcgtcttctgtggtaccttccatggccctatctccagctgcatctcaggatgtttctgttggtcagcacacagagacagaaactccatcagtagggtttactgatgctcagctagctctggttagcccatccactggtacacaagaagataagaatatagacaatgagtttgcatcaaagacccctggagaggatgtggctgctgataatgaagactatgaccaggatgatgagcatcttagccttacacagaaggctcctgattctgcagctaaaagcaccatttccaaggcatacaaaaagaggcccagaccatctcctggaaccggtgcagctaagaagttgttcaaggacaatgatgctggtggtactgatgatgctgctggaagcagcaacatggaacacaaccaagacagggaggttactaggccaataacacaaccatcgacctatgtgaagaaacggccactagcagcagcaaaattttccaatagaaaggagacgtcccaattactagccgacattatataccagaatgcaatagttgtcagggtccatggagctggtaatccaaccacaacccagatatcagcgatgctaggttttgtctgtgactgccaggttgatgattttgccttgcttccattccgtcaccggatatatattaccatttttatggatcatgaccagcaagaagaacaatatgagaaagcactgaaccaaaaaacatacacattcagaacaacaaagcttgaatttcagcctttcaaaatgaacttcgatagtaccatcagtccactacgtcaaagggtgatactagcattagaaggagtgccacctgaacaatggaacaaagaggctataatagagttgctcgacaactgttgtagaatcgaagaactgtatgaagagcaccatatccaggatctttcaatgtttagattggcagcatggacaacaaactgtgatcttatcccaaagatcatagagtggaacattgacacaaaccagccagggcaacaatccactgatctgaattga

SEQ ID NO: 90058 - DNA, 355 bp, Oryza sativa
  unsure (1)..(355): unsure at all n locations
  Clone ID: PAT_MRT4530_88762C.1
gaagggggggccggtacccattcgccctatantgactcattttacaggacactgggcntncatngaccnaancngnngctgccacagctgagccgagcaacnanccaaatcagtnngcaataatacgatcaggcgngngncccntnaanactgnnaannacgcgtgttacntctnatcnncgnntgcggngcactgtctnggctngtgnagtgcgnngcttgcctntcnatatcntattctccacccnatctgccnctggtttctatnnctnaatgtnaanaccngccggntgaaatctgaagncccccnattttnctntnncaaanncannnacattcggntcancctcgtgcc

SEQ ID NO: 90059 - DNA, 6801 bp, Oryza sativa
  Clone ID: PAT_MRT4530_88763C.1
atggccgctgtgggggtttcgttcgtttcgttgttgaacgctgctgcttctcattgccagttgcccatggtgtcctacctgtgggagctggacggtgatggtatgcttctagccggtgtagagcttgtccttccggctgaagaccttggcaaaagttcagctaggaagtttttttgggtagctgccacagatccattgattgtttcccatgaaatggttgctcagcaggccgttaggttcctgcaagcgaagtacggttttaccatccatgattacaactttgagatgttactttcctatagaaaggttgcttcttctgcggtggacgctgctctggcagcagctgcatgtcttgctaggttccaggcacgttatggtgcactggatctgccctgtgacagctatctgcaggctcccatttttgatgccataggttctagaggcttgcaatcatgccatgcttctacaagttctgcccagattgcattcccagatactcagcagcaatatcctgctgctgttgcagagccagtcatcgaaacatccggtggatgtgaccccacagtagcaattgctaaaagtcccaggcctactgctgatgacatcttgcctttacctaaggactatgttgcatccttgaaagctttgtatcctgaacggtcttattacggtgggccatctcatgaatgcccctattgcggtgcggtcttttggtaccaagaaagggttaaaaaggggacagttctttcgcagcgaaaaattgtgtacaatctgtgttgtagaggtggcaagattagtctgcccgaattaaagcatccaccttctttgctggctgagctcttaaagtttgatggtggtgtgcgatcaaaacgattcctacgacaaatccgatcatataactccctctttgctttcacttctctaggggctaatattgataagacgataaataatggaactgcgccttgtgtgttcaagattaatggtgtggtgcaccatcgtattggcggtttactgccacagcagggtgccccacctaaatttgcacagctctatatatatgacaccgaaaatgaaacagcaaatagaatgaatatcttcgagcgagacaacctttctgatgaaccagacccagaaattgttagagaccttggttctatgctcgatgagcacaacgatttagttaaagcattccgctttgctagggatcgactaaaagatcacggtgatcaaaaagttgcgcttagattgcttggctgtgattcaagggatgagattcagtataatttgccaacaagtggtgagattgctggcatagtagttggagactattcagctggtcaatatacgtacgatgttatggttcaatcctccaatgctaggctccgacgtgtctcagctttgcacccatcatatatggctcttcagtacccctgcttttcccgtatgggaatagtcgatgcaatagatcatggcctagattctggagattctgtaggacagcgatatgtgcttccctccagttttactggagggcgacgctacatggtccaaaattatcaagatgcaatggctatttgtcgtgtctttggatctcctgatctttttgtgacttttacatgcaactcaaaatggcaggagatatatgatgccctgctgtttgaaccaggccagctcccaagcgatcgttccgatatgattgtgagagtatttaacatgaaagtaaatgagtttattgcagacattagagagggaaaaacttttggtccagtccttgctgtcctgtatacagttgagttccagaagcgtggcctccctcatattcattgcttagtttggcttgctgctgagaatgctgagtttagtgctcccattgtcgatggttttatttctgctgaaatacctgatgtgttgactgatcctttaggttatgctttagttgatgaatttatgattcatggcccttgtggcaatcagaacagggcatgcccatgtatgaaaaagggagaatgttctaagcatttccctaaatcttttcaagaagagactacgatggatgaatttggatttactatttacaaacgcagaaacgatggtcgatatgttgtgaaaaatggtattaaacttgacaacatatgggtagtgccctataacctagaacttctgaaaaaataccaagctcacattaacgtagaatggtgcaacaaatctaatatgatcaaatacatgtttaaatatgtcacaaaaggtgctgatagaacaaaagcatattttgagatttctggaaatgcatcgaataaaacatctgaaagctctacttctccacgaaatgaaatacaagaatacatcgacgcaaggtttctatctacatgtgagtctcattggcgggcttttgaatttgacatacactatagaatgccttctgtagaacgcctagctgtgcaccttccaaatatgaactttgttcgatacaagaaaggatctgacctgcaatctttgctatctagccctgcagcgaaaaaaacaatgttaacggagtggttcgaaacgaacagaaaacataccagtgcacatacgcttacttactgtgatttcccgagagaatggacatgggacagtagctcacgtagttggcgtcctagaacaccatgtgaaaaaataggcaggatgtactatgtgagtccagtgagcggcgagctttattatttacgaatgctattaatgatcgtaaaaggcgccatgtcttatgctgatgttagaacttatgatgggattgtttatccaacctttaggcaagcatgtgaagcaagagggctccttgaaagtgataatgaatggcacttattgtttgatgaggctatagtatctgcgtcgtcaggccagctgagacaactctttgttactgttgtgatgttctgttctgttggaaatgtccggtcgctatttgaaaaatattggacctattttaccgatgatattcaacgacgtgttaggacagctttatcgaatccttcttacataataccttctgatagactgttgtccttactaatgaaagaactacatactgtgttttcaaacagtggtggtagtatagatgattatgacttaccacgagcagcaatttattcagatgacattgtaggaaacagaatggtcgatgaagagcttgctcttgatgccgccaccctagccacagaagctaacctgaatatacctaggctgaatactgatcaaagaaaaatttttgacacaatcatacaacgagtagatgagaataaacctggttttttctttgtttatggccatggtgatcgaaccttacgtgatttgctttccgaacagacaccttctaatagtatagttccatttggtagtaaagtcattgttcttggaggtgattttcgacagatattaccagttataagaaaaggctgcagagatcttaaggactttggtgattgggttctagcgcttggtgatggtaggttgactgcgacaaaaaaaattgatgaatcagaaccaacatgggtggatattcctgatgatcttttgatcaaaacatccggtgacaaaataaaggccataatagatgaggtatttccgcgcttcgcagataactatacaaatcattgctaccttgcatgtcgagccattgtttgcccaaataactcaacggttgatcagataaatgactgtattgttgacatgatagctagcgagccaaaagaatatcttagctgcgatacaatttcaaaatcaagtgaacacttacctgactttgatatcctttaccctcctgaatttttgaattccattaatgtcaacaacttcccatctcacaaacttgtgctcaaaaaaggtgtgacaattatgcttctgcgcaacttaaatcagtccatgggtttatgcaatgggacaagattattggttacttcccttggtcataggttgctagagtgtgtgattctaactggatctaatatcggtgagacaacattcataccacgaatcgcgcttaccaccacgagccctaagtggccttttacacttcagagaaggcaattccctgtccgtatatgctatgcaatgacaattaacaagagccaaggacaaaccctttcacgagtcggtgtatacttgaaaaaacctgttttcacgcatggccaactatatgttgctgtctctagatcaacatcaagggaaggtcttagaatactcatagaggatgaggatgaagtatgttgttcaaaaaccataaatgtggtttaccatgaagtgctagaggctgtcagctctatgatgggcggcctgcagattgctagccttgagcctggtgatgggaatccaactctccgcatacgcatttcacggttatgggaataccgtgaccaaaatgatgaaagtatcttgcactatattggcttggttttggttgatcaaaagggatccagcattgctgctatgatttatcctccatgcgacaacaaatttaagcccctcatcactgaaggcaaggtatacttgcttacgtactatcgtgtgaaaccttgcacgaagcactaccggccagttgacaacaaactggcgatcactttcacttggtggagtacagtggaagaatgtgttgatgtgccagataactttgctcagtatgcttactcccttaagccttttaatgagctacgctcccatgtggacaggaaagactccttcacagatgttattggaatcatcactgaaatatcatctgttacaaccgttcagacacgcattaaagacggtgatagcttgaaaaggaacgtctacatccgcaatgctgagttagatctcttccctaaatttgaaacgtttctctgtcagataatattatatagtgttgaagggagctatgagccaataaaatggcttgatctgccgtctggacctgctgcccacaacaatggtgaagaaaagacaattgctgagatcagagaacttcacccttttaagttcaaggttgtattgactgtcaccatcttatggaaacagaaacatgagttcttggttactgtggtcatcaaaaaacttaacatggagtattcctggtggtatactgcttgtgatatctgcaagaagacagcaaaaccatatggaagttcttatagatgtggaaacaacacatgcccaccagttgtttcagcttcaccttggttcaaactgagtgtgatagcaggagatcatacagccgacactacatttattgtttttggccgtttggctcaaaggctcattggtcgttcagttgatgcactggtgatggagaatccaaccggcaaggactacataccgagagagatcactgatcttcttgagaaagaatttgtctggaatgtcagctttacagagaacacagtttctagcggcattgtagctttccaagtgaacaagattattaaaggaggccagaattattccttggctcttctacaatctccatctggatcccaagcatcttctgtggtaccttccatggccctatctccagttacatctcaggatgtttctgttggtcagcacacagagacagaaactccatcagtagggtttgttgatgctcagctacctctggttagcccatccaccgctacacaaaaagataagaatatagacgatgagtttgcatcaaagacccctggagaggatgtggctgctgatgatgaagactatgaccaggatgatgagcatctcaaccttacacagaaggctcctggttctgcagctaaaagcaccacttccaaggcatacaaaaagaggcccagaccatctcctggaaccggtgcagctaagaagttgttcaagggcaatgatgctgacagtactgatgatgctgctggaagcagtaacatggaacacaaccaagacagggaggttactaggccaataacacaaccatcgacctatgcgaagaaacggccactagcagcagcaaaattttccaataaaaaggaaacgtcccaattactagccgacattatataccagaatgcagtagttgtcaaggtccatggagctggtaatccaaccacaacccagatatcagcgatgctaggtttcgtctgtgactgccaggttgatgattttgccttgcttccattccgtcaccgaatgtatattgccatttttatggatcatgaccagcaagaagaacagtatgagaaagcactgaaccaaaaaacatacacattcagaacaacaaagcttgaatttcagcctttcaaaatgaacttcgacagtaccatcagtccactacgtcaaagggtgatactagcattagaaggagtgccacctgaacaatggaacaaagaggctataacagagttgctagacaactgctgcaaaatcgaagaactgtatgaagagcaccatatccaggatctttcggtgtttagattggcggcatggacatcaaactgtgatcttatccccaaaatcatagagtggaacattggcacaaatcagccagggcaacaatctactgatctgaattggaaaccaaatggggatctatctatcgtactaattcacatcgaaaagctgtttgactacagtgatccaaccaatggaaacgaagacaatccagaggctctcatagagtatgaaaacaaagtgcatcatctcccaattatcaaaagattccagtggctgcccggcaggatcgactctgattatggcccaatcgaaggaggcacaccgttagtgccacggcaacagcttccagacaaccttcacgaagagcagccgtttgatcatcctcagtag

SEQ ID NO: 90060 - DNA, 429 bp, Oryza sativa
  Clone ID: PAT_MRT4530_88765C.1
atggaacatcttcggacggctctgtggataacgaacaatggtgggttagcgcactggacaagaacagaagaactagctgaggggagcgggggaggaaagctcaccagggcctccctgcaggtggcgtggcgagaactcgatcggcctatatgcgttcgcttcaacgcccattctgtcaggagagtaaggcaagggattcagacagcacacacggtgctggactgctgggagggatgttaccgtggcccaaccggcaagttcttctccgacgtggacagctacaccttcttggacgtacgccacctagaccccgccaccgctcgctggcctctgttcggggtcaatatctatacgcggagggagatggccaagtttttccacgccaagagcaggttccacaagagtcaagaccatggaattccactgtag

SEQ ID NO: 90061 - DNA, 553 bp, Oryza sativa
  unsure (1)..(553): unsure at all n locations
  Clone ID: PAT_MRT4530_88766C.1
ccacgcgtccggggcgggataggtgaggggaggggagccgcctactgtggctgccgttagctcttatcctagtcgtcgcgcgcctccacactaccgatggccgccggctctccttctagtcattgtgcgcctccatgctgccggtggctgccgnctccaccctccacgccgncggctctcctcctggtcgccagtggccgtcgtctccaacctgtgcaccatcggctctcctcgtggtcacagcgcacctccccccttcttcccctcccggcaagatctgggagggagggagggagaggagcagntgccgccaccaggagcagcctccgncaccgccctcccccttccccccttcagccggatctgcgagggaggggaggcgagccgtgccggggtgcgtngncatntncctctggccggatctgcaccggggataaggaaggagaggtgggcgggagaggtgaggggagggagagttgggaagggagagncggagaggtgatggagaggaaattaangatttttggntgggngtaagtggtgtttttaagat

SEQ ID NO: 90062 - DNA, 654 bp, Oryza sativa
  Clone ID: PAT_MRT4530_88767C.1
atggctgagctgatgcggcgcctagtcgcacaccatggttgcgccgcctcgcttgtcacgttctccggcctcgcctcgccaacatcagtgtcctccgtcgctgctatcatggacctcgatgaagcgacacatgattgccaacgacgcagtattagaggggacgaagcgagcggcggacgagctcgaagatcaggacgccgcgctgtcgtggacctcaaatccttcttgacgaatggccggcgggcagaacggtggagggcaagcgcggcggcgggatgcgagcggagcggcgacgagcgaatgcggcagcagttggcggaggcgtcggtgagcttggcgcgcgcgggggaggtgtcgccggccacgccctggggaggggtcgcctaccgcggccgcgcgtgcgggggaggcgtcggcgagctcggcgtgagctgggcgggggccttccccttcccctgctccttctccttcccatcgacgacggcgagcggctgccggaggggtatgaggcgcgtcaccaggcgcagcgtggttgagacaggtgggtgccgcagagatcctttggacctcaatgagtcacttaaacaagatggtggatcgagatgtgcaatttacaaggttatggacctaagtgacacccgcgctcaactttaa

SEQ ID NO: 90063 - DNA, 5097 bp, Oryza sativa
  Clone ID: PAT_MRT4530_88768C.1
atggctattccaatagttggggggcatgtgttaacgaccaaatttgtttttgctttcaagttgggctacatcaggttcgatcttcgacgaaaaggatcaaaccagctggcacgctcagaacccaaaggcaatctctttggacctgcactagagttaagcagatctcttaggccagtgcgtgttttttgcgtcaacagaggtgtacaactttacccacaagacacgattccacacatgttaccatgccctgaagtaccgccacgatactacaaaggtggaaatcgtgacaaaacccgccgtacaaccctccctaaccaaacatacccacctcaggtttcaccccctccttgtgccaagttgggcagtcccttctcgcgcctaggtaaatccagctacagcagagaccaatatcaaggtccgaactgcaccatcgcctctacctttgccatgtgttgggaaataagattagatcaaagcggaatccaagacgaagatcgttacggaaacagagcaagaatcggctatgatccaaattggctacagacaggattggcagagttcgagtcgaacagggatattttatgtaatttccttagagataagtgtgggcaaaagtctgccgcaaagacttatgccgaactggcccctagtattattgttccaatcacattggataaattgacgactgagcaaagggatgagctcgagcagatgatgagcaatgtaaaggatcagttcatgaattctttccaagaaacccgcagaggaaccatcgtccagaagtacaagctgaaggtagttgcagccgatgaagctggttcgggttcatctcaaggtgacaaaggtgatgttcctcaagatggcactgttgaagattttggtgcagatggcaaccaagagccgttgcagtttaacaattttcaggataggatcgactatgccgtgcaacatgccttgattaaccaatctggagtgttagttaataccttaaccaacatggtgaagactgttgtcgatgattctcagctagccgatttagcttttcaggggttgatagcaccgatcaaagaaaagttttcggctcaagattttgagagtttatcacatctcacacaaaaggtgactcttcatgagcagaggtttgctaaggccaagaagaacttcaaaaagattaatcatgtatatccttacatgtatggttctgatgatgaagacgatgattccgaggtggcggcagccgaatgggtcaagagcaagaaagtaataccatgccaatgggtgaaaagttctggaaaagaggaaaaatttgacttcgacatcaccaaggatgacaagattttcgacctattgcttcgagaaaaacaaattcagcttccggctggtcatgtgatcccatcagccgaagagctgggcaaaagaaggtattgcaagtggcataattctagttcccattcaactaataattgcaaggtttttaggcagcaaatccaggcagccattgaagggggaaagatcaaatttgatgattcaaagaagcagatgaaggttgatggtaatcctttccctattaataaggtgcatacatctagaaggacagccgatggggggatgaatagaaattttcacatgaattcgactaggattatcaacaaataccaaagaaagtatgataaacagcatgagaaatatcatgaaaaagatgatggttttgaccctcattgggattgtgagtttttcagattttgctggaatgaaggtatgaggttgccatcgattgagaattgccctggatgcagtgaagatacagggagttcaagccgatcctataatagaggcattttcaccaagaatcaaaagagaagggttcaaaggttgaggaacagggagcaatttcagagggtgcatcaagagattaatcatcggctgaggaaaacaaagactaagcaagaatggcgtgttaaaagtacagttgtatcagccgatgaggtcgaagccgaaaaggcaaaaagggtgctcaaaggcaaggctcttgcatcggcatcagtaaatatggtttttatgctaccggccgaatttgaagctaggcaagccgatgttgatgatgttgaggaagcttcagctaagttagttttgtcaccagagcaggcggtctttgagaagccagaggggatagaaaattggcatctcaagccattgtatatcaatgggtttgtcaatgggaagccaatttctaaaatgatggtcgatggaggagctgctgtgaatttgatgccatatgccacactcaggaagttgggcagaaatccagatgatctcatcaagactaatatgattctcaaggattttggtggcaatccatcggaaaccaaaggagttttaaatgtggagctgacagtcggcagtaaaactgttcctacaacattttttgtcatcgatgggaagggtgacaaaattaaaattgtaccagctgacagccgattgaagatgcagagcccaaattgttattttgagggcgtcgtggagggttcaaatgtctacaccaaggatgcagtagatgatctcgatgacaaacaagggcaaggttttatgtcggctgatgatttggaggaaattgacataggtccaggagatcgaccaaggccaacatttatcagtaagaatttatcttccggatttagaaccaagttaatagaacttttgaaagaatacagagatttctttgcttgggaatatcatgagatgccaagactcagccgatcgattgttgaacatcggctacctataaagctcggggttaggccatatcagcagccaccaaggagatgtaaagccgatatgcttgtggctgttaaggctgaagttgcacgcttgtatgatgctgggtttattcgtccatgtcgatatgctgagtggatttctaatatagttccagtcatcaagaaaaacgacaaagttagggtgtgcattgatttccgggatttaaataaagctaccccaaaggatgagtacccgatgccagtagccgatcagttggttgatgccgcttcaggacacaagattttgagttttatggatggcaatgcaggttacaatcggatcttcattaccgaagaagacattcataagacagccttccgatgtcctggtgcaatcggcttgtttgagtgggttgtgatgactttcggcttgaagagtgctggagctacgtatcagcgagctatgaattacatattccatgatctgatcggctggttagttgaggtttatattgatgacgtggttgtcaagtcacgggaagtagagaaccacatagccgatttgaggaaggtttttgagaggactagaaagtatggcttaaaaatgaacccgacaaagtgtgcctttggcatatcggctgaaacgaggtattctcctgtggaaaagttgtgcttgtgtttatatttctcttgtaccaagttaaggcactatctattgtcaaatgaatgcattgtgatatgtaaggccgatgtggtgaaatacatgctatcggctctgattttcaaaggaagggttggcaagtggatatttgctttgacagaatttgatcttcgatatgagtcaccaaaggcgattaagggacaagctatagccgattttattgtggatcatcgagatgactcaatcgactcggtagaaattgtgccatggactttattctttgatggattggtatgcactcatggttgtggtattggcttggtcataatttctcctcgaggggcaagttttgagtttgcctgcactattaaaccttatgcgactaacaatcaggctgagtatgaagctgttctcaaaggattgcaattgcttaaggaagttgaagccgacgctatcgaaatcatgggtgattccttattggtaatcagtcaattggcaggagaatatgaatccaagaatgatacattgatggtttacaatgagaagtgccgagaattaatgagtggatttcggctggtaactttgaaacatgtgtcaagagagcaaaacattgaagctaatgatttggctcaaggggcatcgggatataagccgatgttgagagatgttgagatagaggttgctacgattacagccgatgattggagatatgatgtatttcagtatttgcgaaatccgtctcaattggcttcaagaaaattacgaaataaagctttgaaatacaccctgttggatgatgagttgtattaccggatgattgatggggtgttactcaagtgtttgagtgccgatcaagccaaggctgcaatcggcgaagtacatgaaggaatctgtggaactcatcaatcagctcacaagatgaagtggttacttcggcgtgtggggtatttttggccaacaatgttggaagattatttcagatattataaaaggtgtcaagattgtcaaaagtttagggcaattcagagggcaccagcatcagctatgaatcctattattaagccatggccatttagaggatggggtatggatatgatcggccaaatcaatccaccttcaagcaaggggcataagttcatactcgttgcgaccgattatttcaccaagtgggtagaggctattccattgaagaaagttgattcaggggatgctattcagtttgttaaggaacatatcatctaccgatttggcattcctcagacgattacaactgatcaaggttcgatatttgtgtctgatgagtttgttcggtttgccgatagcatgggtatcaagttttcttctccatattatgcacaagccaatgggcaagccgaagcatctaacaaaagtttgatcaagttgattaaaagaaagatttctgattatcctcggcaatggcatactcgattggctgaagcattatggtcttatcggatggcttgtcatggatcgattcaagtttctccctataagcttgtttatgggcatgaagctgttttaccatgggaagtgagaatcggctcaagaagaacagatttacaggatggattgacagtcgatgagtattacaatctcatggtcgatgaacgggaggacctggttcaatcaagattgcgggctcttgaaaaagttacttag

SEQ ID NO: 90064 - DNA, 264 bp, Oryza sativa
  Clone ID: PAT_MRT4530_88769C.1
atggagaacgcaataccttggaggggaataggggatgcatccaacgttgaggcaggtgcccccgagcttgcacctaatcttgatgcgcgggccgcgtttgaggggagggaggcgggggtgtggagggtggggaggcgggggtgtggagggtggagaggcggcagccggcagggccgggtcgccgggaaagacatgcccggaggatctcgtcgcctggccgccgaccaggaggacgatgacaatgacgtcccgccgcctcattaa

SEQ ID NO: 90065 - DNA, 366 bp, Oryza sativa
  Clone ID: PAT_MRT4530_8876C.1
atggccggcagctggtccttccggcggcggtgcgggacggaggcggagatgaggacggcggcggcgcgaggcggaggcggggacggcggcgcggagcggtggcgacgccgacgcgacggcggcggcgcgagtggaaggcggaagcggcgccgcgagcgggcgacggcggcggaggcggcggggtgccggtttttaaatatgtggcgcgtgaaggtgggtgcacaggcggggaagccccaccgtgggacttccacacatagacagaaacacatcccccatcaccgcgccgccgacgtcgacggcggtgccacgctgctgcctcctgcatattacccaaaggcgcgtcaggtgaatacacatatttag

SEQ ID NO: 90066 - DNA, 936 bp, Oryza sativa
  Clone ID: PAT_MRT4530_88770C.1
acttcgttgggctccacatctcctctcctcccacagtcggcggtcctgcctctccccatccggcggcctcgagcttgagctcctcttcctcttctctcctccgatggctggcggcctcacctctccccccatccggcggtcctctcctcggtggagcctcgaatcggacaacgtcgaccagatcgacacgacaaggaggttgatgtttatgtggatcgaggcggccttcgtcgggccaccactgcggacgggtcgaggtggccgtcgtcgagctgctactgcacaggttgacaacgacgatgagcgacggcttgtaaatacatagtacaatatgtacatgagcaatccaggaggcgactccaccagatgctgaaccatggcatcgcgcacgagctgatatggcatcgcgcacgagctgatggacgaggtggagcgggtgagcaaggcgcactacgccaactgccgggaggagaagttcaaggagttcgcgcggcggatgctggaggccggcgagaagggcgccgacgtgaagggcatcgactgggagagcaccttcttcgtccgccaccgccccgtctccaacctcgccgacctccccgacgtcgacgaccactacaggtatacttaccctgcatgcatgcgtcatcatcaatcatcattaacaaactcaatttagtctttgttaatttatctgcatgcttctgaaagaaaagcttaagttgcaaactcgcctaaatgatcgtcagtattttaatcggaagtagtacactcacaaagcaaaggcttacaaagtatcctagctactgtagagtgtaggcctgaccaaaacctcaacaaagttacacctgacacgacgcgctctactatagaaatgcccacttctgtaaacagctactgcaaccaaaggtgacaggattatcgaccaaaaggagatgc

SEQ ID NO: 90067 - DNA, 618 bp, Oryza sativa
  Clone ID: PAT_MRT4530_88771C.1
atggcggcaagccaatacatggacagtgtggctgccggcctccgctcctccttaatccctctccaccctggtgtcggcgtcaagctccctttccgccttcctctccggtgggacgtgtgggtcgaggaaattgagaaggcggcggttgatggtgctagagcggcaggtggggggaggttgggggagcggtgttctggtggagggcaaggcattgggggcttgagctccagtgtcagccagctccagcggaggcccacgcgcatggagatgggtggatttggcggcatagtcgctggaggagcgagcatggttggggagagcaaatctggcagtggggcgaggcgctgggggctcgagctccggcccgttgtcgatggggatgcaatggcgctcaccagggcaaaacctccttgggtagccatgttccctttctccatcgctaccgacaggtacatgcgaccgctgaggttgcggtcgacgttgtacatggcatccttccacttgatgcaacaacgcggggtggatgatcaggacggagctcttgttgtcgtagctcctgcggcaggccttgagagagggcgagcgacgcggcggccaacatcgagctcctctgcctag

SEQ ID NO: 90068 - DNA, 506 bp, Oryza sativa
  Clone ID: PAT_MRT4530_88772C.1
aaggggtaacatcatatctcagcagcacagaaaacacaaatgttgtgagagcctgtcaggtgaggtgcccatacaagtacacacaacgtgttttctatatgcatgtgaaaattgcaaaactaaagaatgctaatgtcaatatacttcttttatttacaagacgtgcaaaaataaaatgctaggatacatgtaggcgcaaggtgggaggaacctggcaaggtcgctgctttccgatgattttgtcctgcatcattcatctcacataaccaaatggtctgtttcgtgagaattccacaggatcattttgtaagaaaataatgtcattttcccttattttccattggcaatccactgatccaaacagggcccaaaaccttaaaaagtttgcctttttggggagctactgtaagctcacaaaggaggttctgtatccgattgtgaaataagtaaagctgcctaatcaatcctttctagattatatttcaccatgttctcaagagtgcttc

SEQ ID NO: 90069 - DNA, 468 bp, Oryza sativa
  Clone ID: PAT_MRT4530_88773C.1
gccacgccgtccggccaacggcatctacaactaccacatgaacctctccgtctgctccctcgtccccgacttctggggcgtgggccagctcttccgatgatgccggtgagccgcttgaccgagaagccgaccatcaacggacgctggtcgacttaacttgcgacagcgacggcaaggtagagaagttcttccgtgacgccgtgacgctgccgctgcacccactcgacgacgcggcagcgtatcacggcggctactacgtggcggcgctgctgtcgggggcgtaccaggaggccctggcgtgcagcacaacctgtcagtgctccacgctcgtgcgcgtcgagagcgccggcgcggcggcgcgttcaagatcgtctacgttgagctcggcccgactgcggaagaggtcatcggcacgatgaggtaccacgtgaagaacgacattagcgatgtgatcgagaaagttgcgac

SEQ ID NO: 90070 - DNA, 166 bp, Oryza sativa
  unsure (1)..(166): unsure at all n locations
  Clone ID: PAT_MRT4530_88774C.1
aaaaaaattgggtnncataacatcagcataatttttacaaaaaatagttctttaaagctagttaagcttagagtaaaaagtcagagcgtctcccaaccaagtgggagtgacaaaaaaaaaatgtgcgggactctttcacactttgagatatcacagaagcgggaca

SEQ ID NO: 90071 - DNA, 1549 bp, Oryza sativa
  Clone ID: PAT_MRT4530_88775C.1
atgggaggagcaggggaaggcgacggccagacggaaccgctcctcgagaagctctcgaattcctcgtcgtcggagattgacaagagaacagcatatcaagttatgagcagccgcccaacacctcatatgcttgcacataggacacgagaaactgatcaattggaaggaacggcatggacggcgacggcgcacatcataacggcggtgatcggctccggcgtgctgtcgctggcgtggagcgtggcgcagctcggctgggtcggaggaccggcggccatggtgctcttcgccggagtgaccctagtccagtcctccctgctcgccgactgctacatttttcatgacccggacaacggcgtcgtcaggaacaggtcctacgtggacgctgtgagggcgattcagaaggcaaactgctaccaccgggaagggcacgacgcgccgtgctccgtcggcggagacggctactacatgctcatgttcgggctcgcgcaggtggtgctctcgcagataccgggcttccatgacatggcgtggctctccgtcctgtcggcggccatgtccttcacctactccctcatcggcttcggcctcggcgtcgccaaagtcataactaatggagtgatcaagggaggaatcggggggatcgccatggtgtccgcgacgcagaaggtgtggcgagtctcgcaggcgatcggggacatcgcgttcgcctaccccttcgcgtcggttctgctggaaatcgaggacacgctgaggtcgccgccgccggagagcgagacgatgaggacggcgtcgagggcgagcatcgcggtgaccaccttcttctacctctgctgcgggtgcttcggctacgcggccttcggcgacgccacgcccggtaacctcctcaccggcttcggcttctacgagccctactggctcatcgacttcgccaacctctgcgtcgccgtccacctcctcggcggctatcaggcaagaacagggtttgaaatttcggtgtactcgcagccagtgttcgcggcggtggagcggcggatgggcggcgcgggggcgggcgtggtggaggtggcggtgccggcggcggtggcgtggccgtcgcggtggcggcgcggctgccgcgtgaacgtgtacaggctgtgcttccggacggcgtacgtggcggcgacgacggcgctggccgtgtggttcccctacttcaaccaggtggtcgggctgctcggcgccttcaccttctggccgctgtccatccacttccccgtcgagatgtacctcgtgcagaagaaggtggcgccgtggacgccgcggtggctcgccgtccgcgccttcagcgccgcctgcctcgccaccggcgccttcgcctccgtcggctccgccgtcggtgtgttctcctccaagaccagctaataattgaaatgcatcagctcgatcagcaaatgaatcgaagaaagatggtctgtaaatatcaaaggaagtgttaatttgttcttgtatggagagagcatttatgtacagatcggtaaaattaaatgcgcaaaatggcacttaaatc

SEQ ID NO: 90072 - DNA, 160 bp, Oryza sativa
  unsure (1)..(160): unsure at all n locations
  Clone ID: PAT_MRT4530_88776C.1
atgaacaatttgcaattggaaagaaaactgaagctcagtgatgcatataggctntatcattacttcttctgcatgcagttcaagaatcctagctttttctatgctttggactttggcaaggactcctgcctgagaaatgttttctgggcagatgcaaaaa

SEQ ID NO: 90073 - DNA, 223 bp, Oryza sativa
  Clone ID: PAT_MRT4530_88777C.1
gccgcgacgcggcgtgggcctgtggttgctttgtcgccctttttttttcactacggggagaacattatcgattgacttcttcatagtacgaaacacatatggccatgaagtgcagacagttgagaatacggtgccaacgcacaggcaatcaattcatgacgatgtgggcagtattctgcaggcacacgagttctggactgagaagtcaagtgtactacttggt

SEQ ID NO: 90074 - DNA, 222 bp, Oryza sativa
  Clone ID: PAT_MRT4530_88778C.1
gtctgcagcgccaagcccatcgtcctctgcctcttcaccaagcctaaagatcaccggagccgtccactcagtcgacccgttcgtctccctcgtcatcctacgttcgccatcgtcgagccaagctcgtcatcggttgccgccgctattccttcaccgcatcgtgcccgtgggtctcactccgttctctccgtggatcgtctatgtgaacatggtacacggtga

SEQ ID NO: 90075 - DNA, 1890 bp, Oryza sativa
  Clone ID: PAT_MRT4530_88779C.1
atggacatgcagatcggcgtcggcgtcaccgccgtgcgcaccgtcgccgacctcttctacctcgcccacatgatcctcaagttccgcaccgccttcgtcgccccgagctcccgcgtcttcggccgcggcgagctcgtccgcgaccccgaccagatcgccatccgctacctcaagaacgacttcatcatcgacctcgccgccatgctccccatcccccaggtgattatctggtttgtcataccagccgtgaacaactcatctgcaaaccacaccaacaacacgctctcgatgatcgtgctgatccagtacatccccagagtgttcctcatcgtctccttgaactccaagatcgtcaagtccagtggagtcgtcacaagaactgcctgggctggcgctgcttacaatctcctactctacacactggcaagccatgttcttggggcgctgtggtatcttctgtcgatagagaggcagtacacatgctggatggacgtgtgcactagggagaacggcacgaacccggcgatacccaagtgctacatgagctacctggactgcaagacgctggaggatcccatccggatggactggcactcgcgcagcgagatcgaccaccagtgtctcctccctgaggccacctacgtctacggcttgttcgccgatgcgctcaacctggatgtcgccaaggtgaacttctgggacaagtatctctactgcctctggtgggggttcaggaacctcagttcgtatggacagaacttggagaacagcacatacaggggagaaaccattttctgcatcctgatatgcatcatgggactcgtcttcttctcacatcttattggaaacatgcagacgtacttgcaatcgatgacggtgaggctggaggaatggcgggtgaagcggcgggacatcgaggagtggatgcgccaccggcagctgccgctggagctgcaggagagggtgaggaggttcttccagtacaagtggctggcgacgaggggcgtcgacgaggagtccatcctccagtcgctgccgctcgatctccggcgagagatccagcgccacctctgcctcgccctcgtccgccgcgtccccttcttctcccagatggacgagcagctgctcgacgccatctgcgagcgcctcgtctcctcgctgagcaccaaggacgcctacatcgtccgcgagggcgacccggtcagcgagatgctgttcgtcatccgcggcgagctcgagagctccaccaccgacggcggccggaccaacttctttagctccatcaccctccgccccggcgacttctgcggcgaggagctcctcacctgggcgctcatgcccaaccccagcctcaacttcccgcagtcgacgaggacggtgaggtcggtcaccgaggtggaggcgttcgcgctccgcgccgaggacctcaagtacgtcgccaaccagttcaagcggctgcacagcaagcggctgcagcacgcgttccggtactactcccaccaatggcggagctggggcgcgtgcttcgtgcagggcgcgtggcgccgctacaagaagcgcaagctcgccagggagctcagcaagcaggaggagctctactacatgcagggccagggcggcgacgacggcgacgggcacgacgacagcgacagcgcgccgctgctcggtgccggcgtcggcgccggcggagaccacagggacggcgccgccgccggcgcggcgcacctcggcgcgacgttcctggcgtccaagttcgccaagaacaccaagaagagcgccgcggcgcaccacggcaaggcgaggatggaggacgtgtccagcatcaagttccccaagctggccaagcccgacgagcccgacttctccctcagctccgacgacgtgctgtga

SEQ ID NO: 90076 - DNA, 1131 bp, Oryza sativa
  Clone ID: PAT_MRT4530_8877C.1
atggggatcctagcatatctgttcctactggtggtcgccatcatcggtgtgttcgccgttctcgcgtccctgctcgaccccatccacggcttctacctgcgatcgatcaaggaagcactcgagtgggccgagttcatattcacttggacaagctcgctgtactttatactgcccatttcacgccaaaatttgaagtttagttcaaattggaacgatgtgatggaaaagttggtcttcttctcgaatgccacaaattgggcttcaactttctatgattgctttaccccgctaacactgtggttagaggggatttactctggaatcgttctgctcctcttcgtgctctttattggaaatctggatgaaaactggggccgcataatgatagagttttctggggtggccatacagatggctggaatattttgctttgtgatgataaaggtgtcacgtgatgacaattacacgatgaaagaagctcaaaaacagagtatcatggcccttgtcatcttcaagattttctcttttattatccttacgttcatcaaggctaagttggtgcccacagaagataacgtcgtgatcccaagagcatttgctgccataggttgtctgatccaatttgtgctaatgttgagttcgcctatcggccgttggttggacaacaattttaatgatgatgagcctaccacccgcaagatcaagttgtcggcagctctgatcaggctaatcacgctatcattcgactgctggcttttcactgtaagaggatactggagctcgccactgaagaagccattggcggaaatgacagcaaccaacttggtctttaccagcattgtggtggtctgtcgttacataggccccaacaagctcaggaacttttgtgttgatatttggaattggcttcgggctgtcccggaaaagcttcaaggcaagtggaatagcttcatacagtggaagaccgacaactggactccattcacgaatacagtgaaggtagcattacagagtttctgtactggctgttgcgctatgtttcaaactgggtggaatgcattgaagaacagggtgagtcaatgcattgaggacatgtggaatatactggctggtccgggtggaatgcattga

SEQ ID NO: 90077 - DNA, 847 bp, Oryza sativa
  Clone ID: PAT_MRT4530_88780C.1
ccggaattcggatgccaaacacacccaaatttgtctctctactagtatctcttgttgttagactagaatagacagaagaagagagaagttgagaatagagaggggaatgggatcggggatggaggcggcccggcgtgtgctggagcatccgactccgacggacgcgtcgtcggcggcggcgctgccctccgggttctacgacgccttcgtgctgaggggcatccgcgtggaggccgcggagcccggccgcctcctctgccgcttcaccgtcccctcccgactcctgaattcgggcggcttcctgcacggcggcgccacggcctcgctcattcacctcgtcgcctccgccgtcttccacaccaccggcaacagcagctctagctctagctctacctcgcccctggagatgaacatctcctacttggatgcagctttccccgatgaagagattgagatcgaagcaaaggttcttcgtgccggcaaggcagttggggtggcgctcgtggacctcaagaagaaatcgggcaaactcattgctcaagcccgctactccaactaccttgcaccatctagcaaactctagtaatcatctgtaataggagtataggaaaccaattcgccaaaccaagagtgagttcatcatccatccatccatctaggatcaggatagataactctactcctattcctatttatttatttatgttaaaagcatcctgatactgccgtgtagtgtttctatctatctctgtgtaacagtgtgtgtattacactactatatatactccatataagagagaatcgcaatcagttaaaagcgtaatataaaaaaaaaaaatttgcggcc

SEQ ID NO: 90078 - DNA, 636 bp, Oryza sativa
  Clone ID: PAT_MRT4530_88781C.1
gaactgacgctgtgtttttgttcatggtcagatttctgctgaatacgctaagaaaaataaattactgaatgaatgaagagagagcatctctaagattttgtacaatgtggaggggcaaagttatcactaatggagcgccccgggctccaggtggtcggcgcgagggcatctctctatcatgtggaggtggaggagaggaagaagtagctttgctattagtctttccttttttagaggagaaggcagtggttttgccgatcggttaacgaggaaatgagattacagggagctggcccaactagggtgacagcccaaagtttttacaatttgatgttcctagagaactcaaggggaaccaatgccacgctagtgaatgctctcctcctttgctgttaatctcttgtgaaaaactttgattgggtagatcatttctaaggtttcatttatggagtggcagaaataactggtggatacatctagtgggaactttgaaggacagcaactgctcttcgatcaaatggatcgaaataaatggaaaaggaggtttgtcacacatatggatcgaaccaaatgaaaagaaaaaaaaagaagtttgtggtattcttgcaattcgatatataatctgcatgtggtgcc

SEQ ID NO: 90079 - DNA, 758 bp, Oryza sativa
  unsure (1)..(758): unsure at all n locations
  Clone ID: PAT_MRT4530_88782C.1
ccggccgggagacagaagaagagagaagttgagaatagagaggggaatgggatcggggatggaggcggcccggcgtgtgctggagcatccgactccgacggacgcgtcgtcggcggcggcgctgccctccgggttctacgacgccttcgtgctgaggggcatccgcgtggaggccgcggagcccggccgcctcctctgccgcttcaccgtcccctcccgactcctgaattcgggcggcttcctgcacggcggcgccacggcctcgctcattcacctcgtcgcctccgccgtcttccacaccaccggcaacagcagctctagctctagctctacctcgcccctggagatgaacatctcctacttggatgcagctttccccgatgtatgtatctgtctctaattttgttttccctctccaacactagggacgggactgcttcacttttccttgatgatttttgtttcgcactcgcaggaagagattgagatcgaagcaaaggttcttcgtgccggcaaggcagttggggtggcgctcgtggacctcaagaagaaatcgggcaaactcattgctcaagcccgctactccaactaccttgcaccatctagcaaactctagtaatcatctggtataggagtataggaanacaattcgcaaacccagagtgagttcatcatcccatcatccatctaggatcaggatagataactctactccctatccctattatttatttatgttaaaagcatcctgatactgg

SEQ ID NO: 90080 - DNA, 3021 bp, Oryza sativa
  Clone ID: PAT_MRT4530_88783C.1
atggcggcgtaccgcggccggcgggactacggtggcgggtggtggtcggcgtcggccggctcggggaggatgacgctggcggcggtgatggcgacgagggcgccgcggccggcgtttatccggcgggaggcgatccgggcggcggaggcggccgcggacgaggtggtgttacgggtgcaacccacggaggaggcggagcggacgcggcagggcatcatcggctacctcaagctgctcttcggcaccgcgctcggctgcgaggtctttgcatttggatctgttcctttgaagacctacctccctgatggggatattgacataactatacttgggaacacagctccggacagcactttcattagtgaggttcgtggtatacttgagttagaggagcaggaagatggtgctgatgttgcaatcacgggtttgcaattcatcgatgctgaggtaaagctcatcaaatgtgttattgacaatattgttgttgacatctcgttcaaccaaattggtggggtgaccacactctgtcttcttgagctggttgaccatgaagttgggaacgaccatctgttcaagaggagcattatgctaatcaaggcttggtgttaccatgaaagccacatactgggagctcatcgtggactaatatctacttatgccttggaagttcttgttctttacatattcaatatatttcacaaatcgctgcatagtcccttagaggtcttgtataagtttttggaatattttagcaagtttgactgggataagtattgcataagtttaaatggtcctgttcctttgtcatccttgcccaacctaactggtgagtcatactcagttgaaccttcagggatacatgatgaattactgtttggccctaatggctcgtgtgatagacttattgtacttaaaaaggattctgatggatctaacatgaattttcgcccgaagtatctaaacataattgacccaataaagtccagtaataatcttggcagaagcgtcagcaaaggaagcttttaccgcatacgaggtgctttctcatttggtgcacaaaacctgagtcaaattctcatgttacctactgaccttattcctactgaaatctttggattttttgtgaacaccttgaagagccatggaagaggaaaaagatcagacgttggcaataatggttcattcgaaccgtcacttgatcctgaaagtgaatatgcactttgggaagattcatcagacgtaaaagaatctgatatgagtgaagatgaaaatagaagtcctgatctgcagaggacttcagatagttgtttttacaacaaggtctcaggagacagtttcagtagccactcaccattttcccaagagaagggcaacaacatgaaacgacactacgactgtgcaagagaggaatatttacccctcggtagatcatctatggagcaacatatttatgcgaacaaccagtcacaaatattgactccctctactcgtataaatactttggatatttccaattcttgcccagctgagacaaataggagcgatctccatgaagaaaaactgccactttctcatttttcaccatcaaatttgttggatctatcaggagatctggatttgcacttagaatgccttcgaaaagttcagtaccacctggagtccatgtttgattggttgattcaggaagcaagtttttctggcgcagtaaacaatgactccttcaatattccaacccagagcagcttctcaaatactgatggaagggctctaaggccattgttagtttcatctgcttatacccagagagggaacctatctcgagtttactgttcgcatagcacaagagaaatttctcagaaatcagtatcacgcactgaggtccaagtgaatgcggtttgtcagcagaatgtggcattgccctctggaacaaataacagattggcgttgcctccatctcctgtcgctgattctgagaaatctccagtttctccgctccataacacagtggatattgttgggacgcatggagctggcatgcatactctcaataatgtatcattgctttctggaacagatgtattatccaatgcattcgcacagctttcatttcctgcagttaattcagttgactataaatattgttggtcttataccacaacaaataatcgtgcgacatcaagtcaaaaaacaaaccgtgggaagggtggaactggcacatacattcccagaatgaattatcatacttacaaggaacgcatattctattataatggaagaagccagagagaaatgttaccagatcggccgttcaagattaaaactaacccaattggctacattcgccggcgcagttcgcctgaaatgggatgttcaagttcaagcaatggcggtattacatttgaaaatacaagtcatacaccatcaaagaaacaggatcactcaagcaaaagtacagttacagctgaaggaagttttgctcaggagagagcaccagcaagccaggaatggaatatttgcacaaacatgaacatggttgacagccaaaaacctggtaatgatgaagaccttgtcagaccaaacaatgaatcaagggaactacggacactccatccatcagaagtgcaaaacagggaaatgacggcatcatcatcatctagtgtggagcttcctcattgtgttggcaatggtctccaagaatccaatacatctcagccatcctcacctgcaactgaggcttcttctccaatcaaaacatcactagtcgaaggtcttgagtttggatctttcgaacctatcttaggtactagttttctctgcgaaaagttttgcgaagaattcccacctctgcctgctagaaagtggcctgcagtagccgctgtttcaacgcctgtgactgtgagctcttcgcctgctgaaacaggaagcaagccagaagggctctaccaactgagagatgaagctgacttccctcctctcaaggctggtgctcgcaatggatttaatcatagagttggaagatga

SEQ ID NO: 90081 - DNA, 179 bp, Oryza sativa
  Clone ID: PAT_MRT4530_88784C.1
acactacgacacgaccacttacaccgcctggaccttgacactctggacacgtacttaccatactgaccccggcaacacggcattacacactttttctcgactgacacggcaacctcgacaccgacggcacgacacgcacttggtgtatcgacaccttgctgactgacgacacggtggct

SEQ ID NO: 90082 - DNA, 570 bp, Oryza sativa
  Clone ID: PAT_MRT4530_88785C.1
gtcgactctagaggatccccgattagaggcctttcaaaggcagaaagacaagaatatgcccctccagcaggctctggcttcatctctggcttttcatctatctcaggccggtcattgatagacaaaatttcatcagctcgtgattctccttttggtcctacctcatatttatcagcacaggcaagagtagttgatgattataccatgtcacaaattattctgaaagagcttaatggcggggatacttcaaggatgctaattgttataacgggtgcaagccatgttatttatgggtcacgaggaatcggtgttcctgccagagtatctaaaaagatgccaaagaaagaccaagttgttgtactacttgatcctgagagacaaagcataaggagggaaggtgaaatcccggttgctgacttcttatggtattcagcagctaaaccttgcagtagaaactgctttgaccgtgctgaaattgcacgagttatgaatgctgctggtaggagacctgaagctttgcctcagctttttattctggttttcgagttccagaaatgtgccccagagtag

SEQ ID NO: 90083 - DNA, 300 bp, Oryza sativa
  Clone ID: PAT_MRT4530_88786C.1
ggtggggggggttttaattttttttttttttttttttggtttttttttttttttttttttttttttttttttttttttttttgggggaaaaatttcaattattcaaaccaacaggcaaagaccattccaaaatttattacaggacacacacgggagtgggggacaccttatttaaccaaccataaaaaaaggaggggccacaccaccaaaaaccggaagggccaggagcaaccttgcagggggggccgcaaaacccaggggaggcccacgcggtccgggggacccgggggggcgacccgg

SEQ ID NO: 90084 - DNA, 276 bp, Oryza sativa
  Clone ID: PAT_MRT4530_88787C.1
acacacaaataatgtataattaagtaacaccacgggggggaatttttaataaggagcacatgcacatacatccactctaatgtacccctgctgacaacaacatgcatgcaatgacttgcattgacagcatggactgcactacactcatttctcaagtactcttctgtacatactcaacgccttctaaccactctctctctggaagcccaagacgccaataatcagcacactaaatcggtcatctataagccctgtgaagatcttgtggtacttaat

SEQ ID NO: 90085 - DNA, 1917 bp, Oryza sativa
  Clone ID: PAT_MRT4530_88788C.1
atggcggaagaaagagaaagtttcgagagtcagtgggcgccctccgacgtgatagaggagaatctgaaagaaatggtggtgcatggcattcttccggcgaaggagatcatcgggtggcgaccggcgttcggcgaagcgttcccaacccctgatacacacaaggtcgtggtattttctcacttcttttatggcggattttctcttccaacttcaagattcttccgaggaattctgaacttttatggaattagcctgcatcatctgaatccgaactccatagtgcatattgccaatttcattcaagcctacgaagcttttctgggcattaggcctcattttgctttgttctgccgcatcttcttcctcaagccccagccgaacaagagcaaaccatgtgttgttgggggcgccggtttccaactcaaaggaacactgagccaaaaatatttctccatgcccttcaagacctcaaacaaaggctggcacgcaaattggttttacgttcaaaatcctgaaacagcactccccgagtactcctgtctccctccagtctatcaggatacatggaattcattgcctatgggagatgaagctgctcaggcagtagaactgatggagcgcatgctaaagctgaaggaacaaggtttgcagggagaacagatcactcggcacttcatcaaaagtcggttagctccaatcaaagagagatcccgcatggctttcgagtttgacggcaaacatgatccaaatcgcgaaggtccagactctcttgactttaaggtcatgaaggaaaggatgtacaagatcttctcaaatactatcgtcgtcagctattcgcatctgctgcctgttatgccatacaatgcattcaatccccctccaccggaattcgctttgatgaagtcggaccccccaatcgctcagcgccgatcacctcgccatcaaactggtcaggggagcgggggaccaaagatccggtccgaagcccagcccaacacctctaatccagccggccaatcggattcccgcaagaggaagttagtgctgagtgacgacgaaggcgacgacgctaaaaagcctggagatagagaaacaactagaaaactaccgaagcaggctattccaaagaagaaaacatctagtcgtcctatgccgaagatcaggaagtcttccaggaataaagcgaagaccgcaaccctagagcagttagttcctcatcttggaaaccttgaagctgtcagggatcaactgcacgaggcgaaagagcttgccaagaaaaccgagcacgatctaagagatcggattgcccagctccaggagtctaactttgaactaagtggctcatcaaaagtcagtgcagtacaagccgccaagatgtctcaattggagaaacagattcaaactctagaaagcgataaagcggagctggcaagacagagggactcggctctgaaggaagttgaagaccgcaagatcaagtcgcaagctcaattcgacgtcctggttggcaaaatcaaaaggcttgaaggggctagggatgaagttgctaacgccgctactccactcgtccaagcaatgttcttcaataacaatggtccgagtacattcgacgcttccgagatcttcgacaagctgagagttgctccggatacatatttcaagaacatcaaagaagctggaagtatgggagcaagtctagcgttggcgatgaccaaatccctttacccgaaaatcgacattgatgccgttgatggctttgtgaacgggacgagcgaagaggctgctctcgatcttatcaacgatgcgcagaaagccgccgacaagatagcagttgatgtagtagagagagtccaggacaccgatcttcaaccgactggtcctgatggctctgatgatgaaaagactgatactgattga

SEQ ID NO: 90086 - DNA, 238 bp, Oryza sativa
  unsure (1)..(238): unsure at all n locations
  Clone ID: PAT_MRT4530_88789C.1
cagcaggaattgctcaaatcaggtaaatcaatccgtggatttggttcaggtaatcgatgactnatatgaacanacttaacaaatcggntcatgttcttgctaattgttcctgagactgatatttatgnacctgctaatcattattttcaatgaatgatcctnaggaanacnctagtgatttcccttgatcattgaatgtgaaaaaaaaaaaaaaaaaaaaaaaaaaaaaaaaaaaaaa

SEQ ID NO: 90087 - DNA, 908 bp, Oryza sativa
  Clone ID: PAT_MRT4530_8878C.1
tttacgaatttcttcatttaaattttaattaaaaatctcatttattgcgtcagccgagggagagggcgcgcggaccgggtccacgggagtggggcccacgcgtcagcctctcggtccacggtggaccgggagcacgcggccggcgccgtgggtcccacgcgtcagccgcacccgcgggcgcgggcggctgacggccgggcccacttggcagccgcgagggcacgcccgaaggcggcctccccggcacggccgacgggagggggacgcgcccgctccccgaggggcccggccggtgaccaccggcgcggcggagcggcacccgagagagaggagggaagggggaagcgaatggaacggtcttcggctcaccccggtcgacggcgacgacgggaacggcggccgaagcggaagaaggcggcggcgcggttcgggatgacgatgacgacggtgctccggcggtcggcgagcgaagcgaaggggcggacggggtcggcgacaacgcggcgaagccgatggaggtggcgccgagtcgggaggaggaccggagcgacgacggcggcgaaacggagctcggcggcgacggcggagagagaggagcacggcgcgagctcgattccgacggggagagtgagcggcgagcggcggaaacggaagagcggagcacgggggacgattttatagcgtcgggagggagagagggcggccggagagaaaggaaaccggccgtggagttctcgggctccatagatgcgccggcggagattgcgggattcaaatcggacgaatccgagggagagagagagggaaaagcgggggaaacgggagagggaatcgcggggagtaattcgcccctctttatggcgcgcggggaaggcgggatgcggcggattcggcggcggcggcggcgc

SEQ ID NO: 90088 - DNA, 171 bp, Oryza sativa
  Clone ID: PAT_MRT4530_88790C.1
atgacggcaacagtagggtggatctggcaatgcccgactcaagagcagtggattctgccaccctcggctcaggaaggggaaaatccgttggtgtcgacctccgaagcggcaacaagagtattcttcgctgaagttctcaccaacggggacgaggacactagtttgagttag

SEQ ID NO: 90089 - DNA, 2337 bp, Oryza sativa
  Clone ID: PAT_MRT4530_88791C.1
atggaggctgctactaaaataaaaaactgcgctgacttggatgatttccatgagaaagtaatgctcattctggacggtttgcgggtggttgtcgctctcccgctgcctgcggacctgctgattcttctggcttctgccgcggagagcatctccggccggcctgccgccggttgccagacacggtgcggtgacgtcagcatcccctacccgttcggcatcggccccaactgctcccatgggaagggcttcgagatcgcctgcgatacccgaacccgaaacggcagcggcgagttggtgccgaccctcgccgccgccaatggcaccatccatgtgcagagcctgtttgtagcgccgatcccggaggtcaaggtgatgctgccggtggcgtaccagtgctacaactccagcgacagcgtcaccgagagtttcttcggcgcggtagacctcaacaacaacggcgtgtaccgcatctccgacaagcgcaacatgttcgtcgtcctcggctgcaacaccatggcctacacgaacaacggggacagtcatggcaaaggcccttacgccggcctctactacaccggctgcgtctcctattgcaacgactcgtcgagcgcgcaggacggcatgtgcgccggcatcggctgctgccatgtcgacatctcgccgggcctcagtgacaacgtcgtcaccttcggcgagtggtcacgctatttccaggtggacttcaacccctgcaactacgccttcctcgtcgccaaggacgaatacaacttccagaggtcagatctccaaaaggacctcaaccggaccaagccggtgtggctggactgggcgatccgcgacggcggcaactcctccgcatcatcgtcctgccctgcgccggaggtgagggagaagatgccgcctgagtacgcctgtgtgagcgacaacagcgaatgcgtcaactccaccaatggcccaggatactactgcaagtgcagcaaaggctacgagggcaacccctacctagtcggaggttgcaacgatattgatgagtgcgctcgctcggatgaatatccctgccacggggactgcagaaacaccgtaggagattatcactgcaaatgtcgcacaggttaccagcctagaggaggcggtcccaagatagacgagtgcagccaaaagttccctctacctgcacaaattgctctcggcataagcctgggattttctttcctgatagttgctgcactttttactctaatgatgctccaaaagagaaaaattaatgagtatttcaaaaagaatggtggttcaattctacagaaagtggacaatatcatgattttctccaaagatgatctaaagaaaatcacaaagaacaattcacacgttattggccaaggaggttttggtaaagtgttcaaagggacgcttgaagataatacaatggtggcagtgaagacttcaattgaggtaaatgaagctcggaaggaggatttcacaaatgaagttataatacaatcgcgaatgatgcacaataacattatcaagctattgggttgttgcttggaggtggatgttccaatgttagtgtatgagtttgccgctaatgggagtctgcaagacattctccatggtgatgccaatcgctcactccttctcacactagacatacgcttggacattgcaattgaatctgcagaaggtctaaaatacatgcactcgtccacaaattgtaccatacgacatggtgatgtcaagcctgccaatatacttttaacagacaagttcgtccctaagatctcagactttgggacatccaagcttcttacagtagataaagacttcaccatgtttgttgttgggagcatgggatacatagacccaatattccataagactggtcgtttaacgcagaaaagtgatgtttatagttttggtgttgtattgctagagctcattagtagaaagccaactatatatggcgagaactttagcctcatcatcgagttccagaaggcctatgatgaagtacacagtgggagggcaatgtttgataaggagatcgcggtggaagaagatatctttatcttggaagaaattggtaagttggcaatggagtgtctaaaagaaaaggttgaagaacgacctgatatgaaggaagtagcagaacgacttgtgatgttgcgaagagccagaaagcatggacaaggaagctataatttgagtcctagacaccatgaggagattagtattgaaacaactcctacgagttttggtgctgattttagcacaaatagtagtgtgagtctttctgcaacatgcactccagaacgcaaagaactctacaagctatag

SEQ ID NO: 90090 - DNA, 1373 bp, Oryza sativa
  Clone ID: PAT_MRT4530_88792C.1
ctcacttcctccgccgaaagccacgccacgctgcccataaaaaggcgacgctgttctcaaaacctcagaaaattcctatatcctctgttcgtcactgccttcctctccaagtccatccccttccccgatctaagatccatccgatccaggccatggcggcgaccatccagagcgtgaaggcccgccagatcttcgacagccgtggcaaccccaccgtcgaggttgatatttgctgctcggatggaacatttgcgagggctgctgtgcctagcggtgcatctactggtgtatatgaagctttggaattgagggatggtggctctgattacttgggaaagggtgtcctcaaggctgttgacaatgtgaactctattattggaccagcattgattggcaaggaccctacagaacagactgtcattgacaacttcatggttcagcaactggatggaaccaaaaacgagtggggctggtgcaagcaaaagcttggtgctaatgctatcctggctgtctcacttgctctatgcaaagccggagctattatcaagaaaattccgttgtatcaagagttcatgatcctccctactggtgcttcatctttcaaggaggctatgaagatgggtgttgaagtataccataacttaaagtctgttatcaagaagaagtatgggcaagatgctactaatgttggtgatgaaggtggttttgctccaaacattcaggaaaacaaggagggccttgagcttttgaagactgcaattgaaaaggctggatacactggcaaggttgtcattgggatggatgttgctgcttcagagttctacactgaggaccaaacctatgatcttaacttcaaggaagagaacaatgatggttcccagaagatatctggagatagcctgaagaatgtgtacaagtcatttgttagtgaatacccaattgtctcgatcgaagacccatttgatcaggatgactgggttcactatgctaagatgaccgaagaaattggagatcaagtgcagattgttggagatgatctccttgtcaccaacccaacttttccttgttggcttcaatattcaaaccaatttgacttgcagagggtagccaaggcaattaaggacaaggcctgcaatgctcttctccttaaggttaaccaaattggatctgttactgagagcattgaggctgtcaagatgtcaaaacgtgctggctggggtgtgatgaccagtcacaggagtggtgaaactgaggatacattcattgctgatctggcagttggtttatccacgcttcttaggatcgaggaggagcttggtgctgctgccgtctatgccggagccaaattccgtgcaccagtggagccctactag

SEQ ID NO: 90091 - DNA, 603 bp, Oryza sativa
  Clone ID: PAT_MRT4530_88793C.1
gtccgacccacgacccacgcgtacgcgtacgtgtcactcgcaaacatatatatgcgccaggagcgcatgtgtgaatgcgagagtcgtgagcaagaatgtttgacatcacaaggaacactctctccagtcgatgacaaaagggttgcttctccaggaaggacagggatatcttttgtgtgtgtcacaggaatatctccacatttgtcacgctggtgacaaccggatgccatgtccacacacaatgagacgtcatgtaaatggttttcgtttcggttaaacatgctagggcaccatacacatcaaggtagtagtagggattttgttgcgacatgtcacccacatttttgctcagcctatgatcagtgtaggaattaaagataggagtcgctttagcctttagcatccacttgctggtgtcaactgtacccatcatactgtacttaaaccattatcctctctctgcattggtgagagagagagagagcacacaaagcttcaggtttcttgctgttaaatagagccacctaaattcaactccctggccgtctataaccagggcggtcgctataaagtaccaatgcttacctcccttgccttccaacc

SEQ ID NO: 90092 - DNA, 1365 bp, Oryza sativa
  unsure (1)..(1365): unsure at all n locations
  Clone ID: PAT_MRT4530_88795C.1
ntccgaggcnncggccggnaaaaaaaaaaaaaaaaaaaaaaaaaaaaaaaaaaaaaaaaaaaaaaaaaaaaaaaaaaaaaaaaaaaaaaaaaattgggaaagggggtttccaaggctgtcgacaatgggaactcggttattgccccagctctgattggcaaggaccctacgtcacaggctgagcttgataacttcatggttcagcagcttgatggaaccaaaaatgaggggggggggggcaagcaaaagcttggggctaatgcaatcctggctgggtcactggccatttgcaaagttggagctatcatcaagaaaatccctctgtaccagcacattgccaaccttgctggaaacaagcaactggttttgcctgtacctgcattcaacgtcattaacgggggatcacatgctggaaacaagcttgccatgcaggagttcatgatccttcctactggggccgcttcattcaaggaggccatgaaaatgggtgttgaagtgtaccacaacctgaagtctgttatcaagaagaagtatggtcaggatgccaccaatgttggtgatgaaggtggttttgctcctaacattcaggaaaacaaggagggtcttgagctcttgttcacaacagttatctggtgatagcctgaagaatgtatacaagtcatttgtcagtgaataccccattgtctcgattgaggatccgtttgaccaggatgactgggaacactatgctaagatgaccgctgaaattggagagcaagtgcagattgtcggtgatgacctccttgtcaccaacccaacaagggtggcaaaggcaatccaggagaagtcatgcaatgctcttctgctgaaggttaaccaaattggatctgtcactgagagtattgaggccgtgaagatgtcaaagcgtgctggctggggtgtgatgaccagccacaggagtggtgagactgaggataccttcattgctgatttggctgttggtttggccacgggtcagatcaagactggagcaccctgccgatcagagcgccttgccaaatacaaccagcttcttaggattgaggaggagcttggtgcggctgctgtctacgctggtgccaagttccgcgcacccgtggagccctactaaacttgatggtgaagacaggatgctcatttctatccgtaattgacttcccggtcgaactctagttaaaaagctcgtagaatcgagaaataaatcctccactgtatgagcggatatgtacccccaaacttgctccaattttggtgatgtgtagttctgagcttgcgtgttctctgaacctgttggatctttaatacagagagtatggcttttgttattaaaaaaaaaaaaaaaaaaaa

SEQ ID NO: 90093 - DNA, 528 bp, Oryza sativa
  Clone ID: PAT_MRT4530_88796C.1
aggaacggaaaaatatatcattaccgccctcgaaattgtttcctgaaggcaatctggggatcatttttacaaaaagggccaaaggggcatattatgtgaaccccacacgggttttatggggaaaaaaacatatgctttacaaggggaaaaggatcccccttttgattttggcaaaaatctgagtctcaaaaacatatcaggcaggggttcttttttaaaacaaaaaatgccggggaaaaaaagttgttagctttatctgggaaaggggccccaagttcataaagctcattcccttggttaactacaaacccggagcaaacataaaaacttttgttcctagcaggggaatcatgcaatggtttgacacaaatatttggtacatgggggcaactgaaaccctgggaaattctgttcccttgatcaaaaaacaaagccccctgaccaccaggtttttcctgcaggggaccagggggtactattgggtatccaaggcccgaccttttaaaagcatcctctccagcctttttt

SEQ ID NO: 90094 - DNA, 669 bp, Oryza sativa
  unsure (1)..(669): unsure at all n locations
  Clone ID: PAT_MRT4530_88797C.1
atccatcgaaaccccactttattagcaccaaccccgtctccttcctccattcctccgccgctagaaccttctagaagctctcctcctcctcccatggcggcgacgatcgtgtccgtcaaggcgcgccagatcttcgacagcaggggcaaccccaccgtcgaggtcgatgtgtgctgctcagatggaacctttgcaagcagaagcttggtgctaatgcaatcctggctgtgtcactggccatttgcaaagctggagctatcatcaagaagattcctctgtaccagcacattgccaaccttgctggaaacaagcaactggttttgcctgtacctgcattcaacgtcattaacggtggatcacatgctggaaacaagcttgccatgcaggagttcatgatccttcctactggggccgcttcattcaaggaggccatgaagatgngtgttgaagtgtaccacaacctgaagtctgttatcaagaagaagtatggtcaggatgccaccaatgttggtgatgaaggtggttttgctcctaacattcaggaaaacaaggagggtcttgagctcttgaagactgcaattgaaaaggctggatacactggcaaggttgtcatttggatggatgttgctgttttcgaatctacaatgacaaggacaaaacctatgacct

SEQ ID NO: 90095 - DNA, 2700 bp, Oryza sativa
  Clone ID: PAT_MRT4530_88798C.1
aatacaccggccatccgaggagagaaaggcaggcgagagcagcagcgagaatcaataaacggagacaaagaagaaatacaaaccgactgatacggggactaaactaccataacaataagagaataactaacacacaaccatcgagtagaccatcagccacaccatatcaccccgcgcactgggcgctacgcccaactcaacggacgtggagggcacctatagcgcggcgcgcccgggagtgcgcagtggacgacgggggtgggtggcggtcttccctgttggctggtctcgtttgtttttttttttcaaactaaagaaaaagcaatcggtctcattaaatccaccatgtgaatatcaccaaacaaggcatagcatagcgaaatagaatacacagggggagagaaactactgccgccatcattcgtaccatcaatcatcatcgactttagctagcaatctcttccagcacaaatgaaatatctcttgtctcagaacgtcagccagggacgcaagtactccatctgccatcacgtaatgtgcagcagcaattcagtggcctccgtggcggtagagcagcagagaacggtagacagcagcaaggtggaggaacacgatcagcagcacgaggaagtcatcgaagaatccaaacagccccagcacgttttcaggaagaatgtcgatggggctcaggacataaattgcactcagggctaccatcatgaccatcctcgccctgaagacaagtgggagggtcctctggggatccagtagttccctgaacagtcttctgatgaaaaagggtaggtcttgcaacctctgagtcaggttgcggggtgttccaccaaatatgcggttgtaatgctgaacctctcctagaacatgctgaatttgcggatcatcatcattatctattgatacatttgctggtaccagaagattaataaggcgacggcaaatgggacacttgcaaggctgtacagaaggtccatgattccaaacacggataatgcactctcctatagccccatttcgctcgaattgatagattatatgatttccatgatagctatatgagggtacagacaaatggattacccgtagaaatcgagaaaaagaatatctacgtgcaaaggaggtgctagactgcaacgagattatgttcttcttcagtggtgatatgtactgggcaccgtgaaacgctgcagccctaagcacattgaggggtccaaaatcaacagagtacatcttctggaaaccatctagcagcgctgccattgcaacattggctgctttgcgattattctcataccttttgagcaaggaaatatccccaaaatcagcacccacagaaactccttcagcgataacttttgctaaagcagctgcatctccaaaacctaagttgacaccttggccagctaagggatggactgtatgagctgcatcaccgactagtgctaacctttttgaaatataatcatgtgaatgcttcagcgacaatggaaatgccattctctcacagactaccccgattgcttttggaggtacttcaaagcattcctttgtagatgcagcagtacttccaatgtcagaaaataacttttccatgtaatagtcaagactaccagagtgtggatgtggaccgtaaccaaaatccaatgcattgttcacagacttcacaaaatcttcaggactcattgacttatggcgcaatgactcctctgggctcattgtccacacaatattgctgtagttgtcacctattggaagtagagcaattggcccagaagggagaaacctctgccatgcacaatcgttttcggtaatatgctccactgtacaaataattgcactttgaggataattccaccctgttgtttttatgcctgctgtttgccttacattggacttggaaccgtcagctcccaccactagttttgaatataaagtttgtccatcacttagctcaagtttaactaaattgctgcgatttaattcttctggagggtaaccactggatattgcttcccttgttggtgcttgtctgctctttgatggcaaagcaagagaaatcagtctagtagggtagatcatcttttcaatgtctccattttcctcctgtaatcgtaacaacagtgagttgcaaagcaccttgttctccaccacgcatccgagatattcttttcccacatcccttgcactataccttgtgtaacccagtccagtgtaatcccatacagaacaaatcatttcatcaggacaagcaaggtatatcacctgcattttaccaaagaaagcgtgtctttgctgttgaacatgatcccatgcaccaatatctctgaagaaggatatggtcgcgggagtaatagtactgacccttgaatcaggtacaccatctttcttcagataatttcttgacttcaatgcaggattgctatcaatgatgccaaccctcagatgtttagtcaatggcatattggacaatgcacaagcaacagccaatcccaccatgcctccaccaacgatagcaatgtcgagctcgtcgggtctagctttcacatcatcaaccttctctgtgtgatcctgcgagctgggcaccccggcggccgcatcctggagcgaaggcggcacgtcgcagaaggccctgaccagcggccggatccgactcgccgccgggaaacatcttcctctggagagcat

SEQ ID NO: 90096 - DNA, 626 bp, Oryza sativa
  unsure (1)..(626): unsure at all n locations
  Clone ID: PAT_MRT4530_88799C.1
cggcaacgggattgaagaatcgtatgctcgcatgcctgcaggncgactctagaggatccccggcaaaggcaatccaggagaagtcatgcaatgctcttctgctgaaggttaaccaaattggatctgtcactgagagtattgaggccgtgaagatgtcaaagcgtgctggctggggtgtgatgaccagccacaggagtggtgagactgaggataccttcattgctgatttggctgttggtttggccacgggtcagatcaagactggagcaccctgccgatcagagcgccttgccaaatacaaccaggcaagattgaggaggagcttggtgcggctgctgtctacgctggtgccaagttccgcgcacccgtggagccctactaaacttgatgttgtaccgggcacatgtgatcttctgtatcgagaagctctagtgtggaacaggatgcctatttatgtgatggggcatggggctaacaccaacaatctactaaccttccacaggatgcctatttatgtgatggggatatggggccaagggcctatccctggcgacgccgttcaaatgccgtaccttttcgagctggaggtgttccccagcggccagcgtagagccacgacgtctttg

SEQ ID NO: 90097 - DNA, 161 bp, Oryza sativa
  Clone ID: PAT_MRT4530_8879C.1
gcacgaggaaaagggtttagaacaaaatattgattttaatgtgctcagattcccagatgaaaatgcatggaggaataatttgggaagattcagtatgattggcaatattgaacaactatatactatgaagatgcaaactagtggtgctagtgaagataaat

SEQ ID NO: 90098 - DNA, 4540 bp, Oryza sativa
  Clone ID: PAT_MRT4530_887C.1
tcgtttgcctccatttggtgttttcatacgggcgagggcaatgccagatcgtgagatttagctataatttatcaccctctttcttggctttcttgatcatcaccgtgttcccaaatattacagacataagttggtggtatcgattgcatcatgggatagaattgatgtctacaattttggctcgataattccatcctacgcaatggcttccaagagtcgtttcgttgtgggatctcatgtctgggtcgaggacccagatgaggcttggatggatggcctggtagaggagatcaatgaaaatgatctcgtagtaaactgcacttctggcaagaaggtcaccattaatgtgggaagtgcctatcctaaggatacagaatctccccgaggtggtgtggaggatatgacaaggctagcttatttgcatgagccaggagtactccaaaatctaaagtccagatatgcactcaatgaaatatatacttatactgggaatattttaatagctgtcaatccatttcaaaggcttcctcacctctacaacaatcacatgatgggaatttacaaaggagctgaatttggtgagctgggtccccatccatttgctatcgcagatcgttcgtatagacttatgatcaataatcgtatcagccaagcaattttagtaagtggagagagtggagctggcaagacagaaagcactaaaatgcttatgcagtatcttgcatttatgggtggcaaagctcaggctgaagggaggtcagtgcagcaacaaattctggagtccaaccctgttcttgaggcatttggcaatgcaaaaacagtcaggaacaacaattcaagtcgttttggcaaatttgttgagattcaatttgatgacaatgggaagatttcaggagctgccataaggacttatcttctagaaaggtcacgtgtttgtcaaatatctgacccagaaagaaactatcactgcttttacatgctatgtgctgcaccttcagaggattgcaagaaatataaattgggagaagccaaaacatttcactatcttaatcaatctaattgtattgaacttgatgggttggatgactccaaagaatacacggataccagaagggctatgagtattgtgggtattagttctgatgaacagtttagaggtttacccaaaatttcctacttccatcccttacttggacatggattggctacattttacaggtgtgatgaaaagggtctcgaggaatcattgtgtaagcgtgttatggcaacacgtggggagagtatcacaaaaaatttagatccacgagctgcagctcttagtagagatgcattatctaggattgtttattcacgtttgtttgattggcttgtaaataaaatcaatagttcaattggtcaagatcccgattcaaagattttgattggtgtactggacatttatggttttgaaagtttcaagacaaacagctttgagcaattctgtatcaatctaaccaatgagaagcttcaacaacattttaaccagcatgtgtttaagatggaacaagaagaatatacaaaagaagaaattgattggagttacatccaatttgtagataaccaagaaattcttgatctcattgagaagaaaccgggagggataattgctctactggatgagacatgcatgttgcggaattcgacccatgaaacatttgctgagaagctatatcaaaaatttaaagacaaccctcacttcagtaaaccaaaattttcacgatctgatttcacaattcatcattatgctggaaatgtagcggtatcaggttatctggaatcatggtgtttgtatggcataactagactttgcattgtgatgcatgtcacttatcaaacagatcttttcctagataaaaatatagattatgctgtaaatgaacaccaaatcttgctaaatgcttcaaaatgttcttttgtttcaagtctttttccaccttgtgaagaatcaacaaaatcaactaaattttcttcaataggatcaagtttcaagcaacaactacaatctttgttggaaactctaagtgctatagaaccacactacatccgttgcataaaacccaataatgttctcaagccagcaatatttgagaacagtaatgttctccagcaacttcgatgtgggggagttttagaagcaataaggataagttgtttaggataccctacgaggcggacattttttgaattcattaatcgctttggtattttgcaacccaaagttctaggtcgaagtcatgatgaagtagctgctactaagatgcttcttgggaaagccaatcttacaggctatcagatagggaaaacaaaagtgttcctccgtgcaggtcaaatggctgaattagatgctctcagaactgagattttgggactatcagctaaaaagatacaaaccaaagttcgatcgcatgtggctcgtaaaaaatatgtcatgttgcaacattttgctacacaactccaggcaagtcattgtcgttgctacttagtgctctcaaattacaaaaggatgatgaaagccataataacaactcaatgtgcatggagaggaagagtggctagaagagaacttcgagaattgaaagtggctgcaaaggaaactggtgctctacaagctgcaaagagtaaactagagaaggaagttgaggagctcacttggcggctacaattggagaaacgcatcagatatgcctctattattatatgtgctacatataatattgattacacttgtccatttatagcggatgtagaagaagccaaggcacaagaaaacaagaagctccagttacaattgcaggacttacaaatgcaattgaatgatacaaaagaattattaaaaagggaaaaggaatctactaaggcggaaatggagaaaactttggtgccagaaatttgtgttgatacaactcaagtcaatgagctcactgctgaaaataataggcttaaggcactagtggtctctcttgaaacaaatattgaagaaatgaaacagaagtttggagaaacagataacgtgagggatgagtggtgcaagaaagctacagatgcagaatcacaaattaacgagttaaaaagcatgatgcaaagccttcaagaaaagctgaatagcacagaagcagaaaaccatgttctccggcagcaggccatgagaacaagacctgataatatgcctttgcttaacatgcatcgaaaatctgtaatccccctgacctacaccccttcttcctctaaatgtttcattttagtagtgaaatgtgcttgtcatgttcacattcttatgacacctcatggaacatcaatggaatatggaaggacatcctatattgaaaggcaacaagagagtgttgaagcactgataaattgtgttgttgaaaatgttggatttagtgaaggaaagccagttgctgcagttactatatacaaatgtcttcttcattggagaacttttgaggcagaaaaaacaaatgtttttgatcgccttattcagatttttggttctgcaatgcagaaacaagaaagcaacgctgatcttgcatactggctatcaaattcatcatctttgttgataatactacaaaagagtctcaaacctgttggctcatcagtaacaaccccgctaaaaagaacacagacgcagacgtcatttcttggtagaatggtatttcgtgcttcaaacattactgttgacatggatcttgtgcgccaagttgaggccaagtatcctgcatttctttttaagcaacaacttacagcttttgtggaaggcttatatggaatgatccgtgataatgtgaagagagatatatcttcagtactcacacttattattcagacaccaagaagtgccaaagctggtttattaacagatcaaggtaacaattggcaagcaatagtcaatcatttgaatgacctcctgaaaaccttacaagaaaattgtgtcccatcaatttttgctcggaagatatttacgcaaatattctcattcatcaacgctcaactcttcaatagccttcttgtacgccgagagtgttgttccttcagcaatggagaatatgtaaaacaagggctgcaagaactggaagcatggtgtacacaagccaagccagagtcgtacctaactgagacactaacagtcatcttcaaaaagttcaggatttcatacgacgaaataatcaatgatctgtgcacggcactgagtgttcaacaactttacaaaatatgcacgcagtactgggatgacaaatataatactgaaagtgtatcggaagaggtcctaaatgagatgaaaacattgatgaatggaaaggatgcttcggatggtaccttgaaatcattgatgaatgaaaaggatgcttcggatggtacctttttattaaatgaggagataagcatgccgttatcattggaggagataggcgattcaatggatgccaaggaatttcagaatgtggttccacctcaacaactccttgacaaccccgcgttccaattcttgaagagctga

SEQ ID NO: 90099 - DNA, 302 bp, Oryza sativa
  Clone ID: PAT_MRT4530_88800C.1
accgattctcgcaattccgacctacgacccacgcgtacgaccactcgtacgcgctcacccgaaaaaaaaaaaaaataaaaaaaaaaaaaaaaaaaaggggggacactataaagagatgcaggcttacattcccttgcatccaacagaaataactcttctatatatgccacctaaattcaggggcggtcccctttaatatacaaaatcttccactggcataaccctacttttacccatttttatagggtcgacaaaataaaaaattttgccagctgttttaatagacgaaatgttggaacacc

SEQ ID NO: 90100 - DNA, 528 bp, Oryza sativa
  Clone ID: PAT_MRT4530_88801C.1
taaggcaagggcctgcaatgctcttctccttaaggttaaccaaattggatctgttactgagagcattgaggctgtcaagatgtcaaaacgtgctggctggggtgtgatgaccagtcacaggagtggtgaaactgaggatacattcattgctgatctggcagttggtttatccacgggccagatcaagactggagctccttgcagatctgagcgccttgccaagtacaaccagcttcttaggatcgaggaggagcttggtgctgctgccgtctatgccggagccaaattccgtgcaccagtggagccctactagatgggaatagaaccacttcgtttccgtaaattttgtgaagatggtgctttagatttgctcgtagggtttgagcaataattccccacggtcagatgtgggtggacatgctcccacaaaacgcttaattttgatgttgcgtggcgcaagcgtgatttgaaggaacgcaaatgattatattaaacgttataagcaaagttcaacaccatgtttggatc

SEQ ID NO: 90101 - DNA, 238 bp, Oryza sativa
  Clone ID: PAT_MRT4530_88802C.1
ataaacgaaaacaaagtggatgaacagagggggcaacctaaatggggggccagcacaataaacactgaggtttaatgctatacacataacggcggaccgatcaagaacacaagcgggaacgcaaggaggcagcgagaagccagcagagaagcgaacaccagatatgcaacgagagccaaggcatgcatggtgctcatttgcaggggcgatgctgtatacagaaacagaaacaagggta

SEQ ID NO: 90102 - DNA, 486 bp, Oryza sativa
  Clone ID: PAT_MRT4530_88803C.1
cccacgcgtccgcccacgcgtccgcccacgcgtccgcccacgcgtccgcaagtccatccccttccccgatctaagatccatccgatccaggccatggcggcgaccatccagagcgtgaaggcccgccagatcttcgacagccgtggcaaccccaccgtcgaggttgatatttgctgctcggatggaacatttgcgagggctgctgtgcctagcggtgcatctactggtgtatatgaagctttggaattgagggatggtggctctgattacttgggaaagggtgtcctcaaggctgttgacaatgtgaactctattattggaccagcattgattggcaaggaccctacagaacagactgtcattgacaacttcatggttcagcaactggatggaaccaaaaacgagtggggctggtgcaagcaaaagcttggtgctaatgctatcctggctgtctcacttgctctatgcaaagccggagctattatc

SEQ ID NO: 90103 - DNA, 822 bp, Oryza sativa
  Clone ID: PAT_MRT4530_88804C.1
atggatcccttgtcggatgaagcgttggccatcgttgttcccatcgtggtgtactggctctactctggcttgtacatggcgctcggccactccatctccatggacaagtatcggctgcattccaaggaggaggaggatgccaagaacttggtctccaagcgcgacgtcgtcatgggcgtcctcctccagcagctcgtccaggccgccgtcgccgccgccacattcacgctcgccggcgagaggagaacgacgacggcgacgacggcgtcgccgtcgtcgtggctggcggtggcggcgcggttcgcggtgggcatggtggtgctcgacgggtggcagtacgcgtggcaccggtggatgcacaccaaccggtttctgtaccggcgcgtccactcgtggcaccaccgcctcgtggcgccctacgcgttcggcgcgcagtacaaccaccccgccgagggcctcctcctcgacaccgtcggcggcgccgtcgccttcctcgcctccggcatgtcgccgcgcgcctccgtcgtcttcttctcgctgtgcacggcgaagggcgtcgacgaccactgcggcctgtggctgccggcggcgagcccgctccagcgcgtgttccggaacaacgccgcctaccacgacgtgcaccatcagcgccgcggcggccggtacaacttctcgcagccgttcttcgtgacgtgggacaaggtgttagggacgcatatgccctacgtggtagaggagaggcctggaggagggctccaagtgcggccggtggccatgtcgccgtcgtcggcgactgcagcggcaggcgccagcgggaaatga

SEQ ID NO: 90104 - DNA, 682 bp, Oryza sativa
  Clone ID: PAT_MRT4530_88805C.1
caccccaaccagggtggcaaaggcaatccaggagaagtcatgcaatgctcttctgttgaaggttaaccaaattggatctgtcactgagagtattgaggccgtgaagatgtcaaagcgtgctggctggggtgtgatgaccagccacaggagtggtgagactgaggataccttcattgctgatttggctgttggtttggccacgggtcagatcaagactggagcaccctgccgatcagagcgccttgccaaatacaaccagcttcttaggattgaggaggagcttggtgcggctgctgtctacgctggtgccaagttccgcgcacccgtggagccctactaaacttgatggtgaatatcatgcggttcatgcccactgttgtgtgcatgggttttgtgaagacaggatgctcatttctatccgtaattgacttcccggtcgaactctagttaaaaagctcgtagaatcgagaaataaatcctccactgtatgagcggatatgtacccccaaacttgctccaattttggtgatgtgtagttctgagcttgcgtgttctctgaacctgttggatctttaatacagagagtatggcttttgttattatggctgtgattatttgacgtatgcatggtgaaaataaaatcaattgcacagtttgcaagactaaaaaaaaaaaaaacaaa

SEQ ID NO: 90105 - DNA, 1220 bp, Oryza sativa
  Clone ID: PAT_MRT4530_88806C.1
ggctgcaggaattcggcacgaggatagaaacaaaatctcctgttgatgatcagcaatggctcacttactgggtcggggagaaaggaggagaaaagtagtaaagaggaaaggggggagtgagtctcccgagcaacggctctccactactagcccacagctcccaagaatctctgccatttcttgagctggtcgatccatcggggagggagagaggtcgaggaggcggcggaaggggagaggatggggtctggatctttcctcaagctgctggccaacaacttcgacgtcctcgccgggccattagtttcacttgcttatccattatatgcctctgtgagagcaatagaaacaaaatctcctgttgatgatcagcaatggctcacttactgggtgctgtactcgtttatcactttgtttgagcttacttttgctccagtaattgaatggcttcctttttggtcctatgcaaagttgttcttcaactgctggttggtcttaccttgcttccatggtgctgcttatgtttatgatcactttgtgcggccaatgtttgtgaatcgtcaaatagtaaatgtctggtatgttccaagaaaagaaaacctgagtaaacctgatgatgtgctatcagctgcggagagatatattgaacagaatggaccagaagcatttgagaaactcatcagcaagtctacgaggccttcaacctccaaaagaagcacaaagcaatctatcttggaggaggtagaatctgaacacatggccagggctgaaagagaatcatggggcgaaaatccattctatgataaaaattatcgatgctagaacaatctgttgttcacgaccacatactcatcaggttgccggcttatctgggttgaggataaagctttccatgtatctgacttcaggatttgtactttgatgcatcatgcatccactgaatgtcattcagtcccagttcccagaaccaattgtgcattggctgaactattgtaaataggtgctagtgttgacaatatcccttagttcttaaatgatgttatgtaattctgttaatctgccttgcgtggtagtgacaacctctggacttggttggcagttatatttttcccttcttggagaagggccagaattcaaaaatagtcctgatatctatattctactgcttgcaaggcagaggagctgttgacatcccctgcatgatcaaaaaaaaaaaaaaa

SEQ ID NO: 90106 - DNA, 3412 bp, Oryza sativa
  unsure (1)..(3412): unsure at all n locations
  Clone ID: PAT_MRT4530_88807C.1
atccacgcgtccgcactgccttcctctccaagtccatccccttccccgatctaagatccatccgatccagaacttgtctggacgattcggttcctcgaggccggccgggatccatcgaaaccccactttattagcaccaaccccgtctccttcctccattcctccgccgctagaaccttctagaagctctcctcctcctcccatggcggcgacgatcgtgtccgtcaaggcgcgccagatcttcgacagcaggggcaaccccaccgtcgaggtcgatgtgtgctgctcagatggaacctttgcaagggctgcagttcccagtggtgcatcaactggtgtctatgaagctctcgaattgagggacggtggatctgattacttgggaaagggtgtttccaaggctgtcgacaatgtgaactcggttattgccccagctctgattggcaaggaccctacgtcacaggctgagcttgataacttcatggttcagcagcttgatggaaccaaaaatgagtgggggtggtgcaagcagaagcttggtgctaatgcaatcctggctgtgtcactggccatttgcaaagctggagctatcatcaagaagattcctctgtaccagcacattgccaaccttgctggaaacaagcaactggttttgcccgtacctgcattcaacgtcattaacggtggatcacatgctggaaacaagcttgccatgcaggagttcatgatccttcctactggggccgcttcattcaaggaggccatgaagatgggtgttgaagtgtaccacaacctgaagtctgttatcaagaagaagtatggtcaggatgccaccaatgttggtgatgaaggtggttttgctcctaacattcaggaaaacaaggagggtcttgagctcttgaagactgcaattgaaaaggctggatacactggcaaggttgtcattggaatggatgttgctgcttcggaattctacaatgacaaggacaaaacctatgaccttaacttcaaggaggagaacaatgatggttcacaaaagatatctgggtgatagcctgaagaatgtatacaagtcatttgtcagtgaataccccattgtctcgattgaggatccgtttgaccaggatgactgggaacactatgctaagatggaccagctaaaaattggagagcaagtgcagattgtcggtgatgacctcctttgtcaccaacccaatggagggtggcaaaggcaatccaggagaagtcatgcaatgctcttactgtctgaaggttaaccaaattggatctgtcactgagagtattgaggccgtgaagatgtcaaagcgtgctggctggggtgtgatgaccagccacaggagtggtgagactgaggataccttcattgctgatttggctgttggtttggccacgggtcagatcaagactggagcaccctgccgatcagagcgccttgccaaatacaaccagcttcttaggattgaggaggagcttggtgcggctgctgtctacgctggtgccaagttccgcgcacccgtggagccctactaaacttgatggtgaatatcatgcggttcatgcccactgttgtgtgcatgggttttgtgaagacaggatgctcatttctatccgtaattgacttcccggtcgaactctagttaaaaagctcgtagaatcgagaaataaatcctccactgtatgagcggatatgtacccccaaacttgctccaattttggtgatgtgtagttctgagcttgcgtgttctctgaacctgttggatctttaatacagagagtatggcttttgttattaaaaaaaaaaaaaaaaaaaatcgaagggggacccggtacacaactttccctatagggtgtcgttttactttctcccagatcaagactggagctccttgcagatctgagcgccttgccaagtacaaccagctttttaggatcgaggaggagcttggtgctgctgccgtctatgccggagccaaattccgtgcaccagtggagccctactagatgggaatagaaccacttcgtttccgtaaattttgtgaagattgtgagggtttgagcaataattccccacggtcagatgtgggtggacatgctcccacaaaacgcttaattttgatgttgcgtggcgcaagcgtgatttgaaggaacacaaatgattatattaaacgttataagcaaagttcaacaccatgtttggaactagataaaaagaatcgagctccagggtacccgctccttttttggtgaggtgtagtttgagcttgcgtgttctctgaacctgttggatctttaatacagagagtatggcttttgttattatggctgtgattatttgacgtatgcatggtgaaaataaaatcaattgcacagtttgcaagactttgaggatccgtttgaccaggatgactgggaacactatgctaagatgaccgctgaaattggagagcaagtgcagattgtcggtgatgacctcccttgtcaccaacccaancaagggtggcaaaggcaatccaggagaagtcatgcaatgctcttctgctgaaggttaaccaaattggatctgtcactgagagtattgaggccgtgaagatgtcaaagcgtgctggctggggtgtgatgaccagctacaggagtggtgagactgaggataccttcattgctgatttggctgttggtttggccacgggtcagatcaagactggagcaccctgccgatcagagcgccttgccaaatacaaccagcttcttaggattgaggaggagcttggtgcggctgctgtctacgctggtgccaagttccgcgcacccgtggagccctactaaacttgatggtgaagacaggatgctcatttctatccgtaattgacttcccggtcgaactctagttaaaaagctcgtagaatcgagaaataaatcctccactgtatgagcggatatgtacccccaaacttgctccaattttggtgatgtgtagttctgagcttgcgtgttctctgaacctgttggatctttaatacagagagtatggcttttgttattatggctgtgattagttccctttaaatttttaacttttctgtcacattaaatatttgacgtatgcatggtgaaaataaaatcaattgcacatcttgagtctaattctattttcttagttgtaccgggcacatgtgatcttctgtatcgagaagctctagtgtggaacaggatgcctatttatgtgatggggcatggggctaacaccaacaatctactaaccttccacaggatgcctatttatgtgatggggatatggggccaagggcctatccctggcgacgccgttcaaatgccgtaccttttcgagctggaggtgttccccagcggccagcgtagagccacgacgtctttg

SEQ ID NO: 90107 - DNA, 468 bp, Oryza sativa
  unsure (1)..(468): unsure at all n locations
  Clone ID: PAT_MRT4530_88808C.1
cttattaccaatctttttcattcccctctcttggaacgtgctggtctcctcgcttctacactctcttgatcagctctcaccactatgtacacttgatcgtcatttgccacaagttaaaattgatacagagcaacacaaagagctaaactaggggcagtaacgcggtagttgtactcgatcatatcgatccatggctgcggtggcgaatggcggtgctgcgccggagtggcgggtgacggtgccggagggcgcgacggngacggnggagcgcgaggccggccgctgccggcgggccgccgnggggtgggcgtggcagctggtttcctgcgtcgccgcgctcgggagcagggcgtccggcctcgccgggcgtgtctggaagatcggcgcggacgacccccggagggcggtgcacggcgtcaaggtcggcctcgcgctcgccctcgtctccgtgttctactacaccaggcc

SEQ ID NO: 90108 - DNA, 502 bp, Oryza sativa
  Clone ID: PAT_MRT4530_88809C.1
ccacgccgtgccccttcgctgccctgtgcgatgtttcacttatatccatgccacaactagtgagtgaacatgttagttctatagttgagtcaccatttattgagtttaaacatgttattcacattgctagcgaaaatgaagagtttaaattgttgtcttttttaaatacttggagctatattcaatttgatgatctttgtctactcaactgtttagacaagaaattatttgctagttatttaaatgagttacaggttggtttgcaagaaggggagtgttgtggtttttcggctacaaagattttaggatccaaccatatgaccatcaagaaatatcctcacctgatgttgtgataaataaagataagttcaataggctaaatgacaaggtgaaatcaaggacggtttccaatcaagaaggggaggatggtgaggacacaactagcttggatatgaccatgactaacttatgtattcatcaaccaaaggttcatatgttctat

SEQ ID NO: 90109 - DNA, 1146 bp, Oryza sativa
  Clone ID: PAT_MRT4530_8880C.1
atgagtagagtgtccactagttggggttttgtttaatctagggtgaacaagccgggagagaggagcgcgcggaccgggtccacgggggtggggcccacgcggcagcctctcggtccacggtggaccgggcgcacgcggctgacgccggccggcgccgtgggtcccacgcgtcagccgcacccgcgggcgcgggcggctgacggccgggccccacctggcagccacggggcgcgcccgaaggcggcctcgccggcacggccgacgggaggcggcgcgcccgcgcccctatggtcgccggcggcggccataggcacggcggagcggcggccgagagagaggagagaagagggaagcgaagcggcggtcctcggctcaccccgggtcgacggcggtgacggaaacggcgaccgaaacggcgagaggcggcggcgcggttcggatcgacgaggacggcggcgctccggcggtcggcgggcgaaacgaaggagcggacgaggtcgacgaagacgcggcgaagccgaaggaggcgacgccgaagcgggaggaggtccggggcgacgacggcggcgaaccggagctcggcggcgacggcggagagagaggacgacggcgcgggcttgattccgacggggagagcgagcggcgagcggcggaaacggaggagggaggcacggggaacgattatatagcgccgggagggagagagagaggccggaggggaaggaaacggccgcggccatctcgggcgccattgatgcgccggcgaagatcgcgggagcaaatccgaacgaacccgagggagagagagaggggaaagcgggggaaaagagggagggaatcacggggagtgatttccccctcttaatggtgcgcggggatggcgggatgcggcggaatccgcggcggcggcggcgctagggcacgggcgggcggcgggtgcggcgcgaggacagggatgacaggtgggccccacccgtcagcgagggtggcgggcgggcccgcccgtcagcagcgcgcgcgcggggagaggccgagtgggccgcggggaggaggggagagagggagggaactgggccgagccggcccaagaagggaaggggggggggaaaaagactttttagggtttttctttttataaaatcattt

SEQ ID NO: 90110 - DNA, 1614 bp, Oryza sativa
  Clone ID: PAT_MRT4530_88810C.1
catggcgttgtcgccactacacgttcattggttttgacgagagaaaaatcgttcacatgatgcttgccatttgccaatggcaatcagtctaaaaatcaatgctttcacgtggcctcctcaactcgttatcttcgtttcacggacagaatcgatcatgaacagctcgtctcgttgaattcatcgtatgaatcaaatcaaatcaaatcaaatgagaaattgtgtgagtggagacgagctagcgatacagtgaagcaaactgtaatgtcggctactgcaagttcaagaatgtggagcactaggaggcggcggcggcggcgcggcggcggttgacgaaggcggtgacttcggtgagcagcctcttgctgtcggcgaggtcgtcgaagatgtagaacgcgtggatggcgtcggggaactcggcgacgacgacctcctcggcgccgcccgcggcgcggagggcgtcggcgtagtcgcgctgcctgtcctggtgcgcgtcccacccgccgacgcagaccatggtcggcgggaacgcgcggcgccgctcggcgtcgcgccggagcgcggcgggcacgttggccgcctcgtggtcccgcgtggcgccgggtgggaggaacgcgcgccacagccaggatatccgctccggcgacccgaacggcgcgtcgcggagccgctgctcggaggcggtcggcgtctcgccggcgaagaacggctgcagcgcgatgagcccggacacgctgctcggcgtgcgggcgacgacgtggtgggcgacgttgccgcccgcgctgtcgcccgccacgaagacggtggcgggcggtgacgggagggcgcccccggccccggcgaggacccagcggagtccccccttcccgtcgtcgtaggggcgcccgggaaaccgtgctcgggcgcgaggcggaagtcgacggacccgacgacccccggggatgggccgaggcgaagcgacggcacagcgcgtcgaactgcgcggacgccacggagtggaacacgaagccgccgccgtggaagtataccaccaccggcagatgatcgccgccgccatccctggcagctgcccccggaaagaacatcctgacgcggaggtcgtcggacacggcatggtccgaggacgccacgccggcggcgtcgggggccgggttgggcggcacgacgcggtcgaacagcgacaggaggaagcggttgacggtgccgtcgcggcggagcgacgccgagtgcagaacggagacggcgcccacgagcagccgcgcgcgccacggaagcggtggtctgtcgctcggcaccgccgccgccgccatcgccgccatgtctctcgccttccgggcgcgccacgcgcacggcgtggcgagggataaggcgacacaaagaaggtggcaagtgtttgtcgcggtctaccgcgtggcccgcgacgtccaaccgcagcgacgtgcgtgtgtcgctggaaatttggagatttgcagctttcaagcgacaacaacatgtgctgatccatcttaaggatggtaaattttaatgagggattacctgaaagttaaactttctattaaaaaatccttttcaaaatcttccaaatacaatcatattgtaattgtattatacaatcac

SEQ ID NO: 90111 - DNA, 210 bp, Oryza sativa
  Clone ID: PAT_MRT4530_88811C.1
cccactcgtacgcccacgcgtccgcccacgcgtccgccccctgtcaaaattaaaaaaaaagcgtgctgttcttttctcctcctctcgtgcgcctcctccccctcacccactctcgtcctagtgatcccaatgcgatcccctccggccacccaaaggacgcgtggtgaaatctacattgcctaccacagatggttcttttccctattttga

SEQ ID NO: 90112 - DNA, 417 bp, Oryza sativa
  Clone ID: PAT_MRT4530_88812C.1
atggcagggaagcagccggtgggaaaaggaggggtgcgcggtggccgggagcggcgcacggtggcaggggaggccgctacggcgaaggtgaccatgacgacagtggtgaaggcggctatggtgggggcaaccgcgtctatggcgtctgtggcgtgggaggtggccacaggtgccgtgccgccaccgccgaacctcgtcccttgctgccatgtgaagacgatgaagcgttgctccctactacccatctccgttctcccccgcagcggtgaagacgatgagatgggtgctgctagatccagcaagcagcaggtcggcagagaggagaaggatggtgccggagaggatgaagaggacaccataaactccaaatcaacgcgacagaggcttgttgcgccgatgatccctccgatttcttga

SEQ ID NO: 90113 - DNA, 1825 bp, Oryza sativa
  Clone ID: PAT_MRT4530_88813C.1
atggcggacggcggcggcggggtggaaagatgctagtgacaaagtaatgcctgtcaaacagtggcttgaagagcgcaggtgtctgcagggtgagatgcagcaacttcgtgataaacttgctattgcagaacgaacagctcgatctgaagctcaactaaaggaaaagtaccagctgcgcctaaaagttctagaagatggattgagggggccacctagtggttctagtcgtcctacagaaggaaagagtatcggtaatggaccatcccgtcggttgtctctaggtggagcagataatatgtcaaaaatctctccgaatggcatgttggcaaggagatctccatcatttaattcaagatcctctctttctactagcagcagcttggtcatcaagcatgcaaagggaacttcaaggtcatttgatcccggtacgaggttgatatgccacgtattgaagctattcttgctccacttgaagctgaactaaagcttgctcgtcaagagattgcgaaactccaggatgacaacagagctttagatcgtctaacaaaacaaaaggaggcagcgctgctggaagcagaaaggactgtagaaattgcatttagcaaaagcggccatggttgatgacatgcaaaacaagaaccaagagttaatgaaacaaattgagatctgccaggaagaaaataagatcttggacaggctgcaccgccaaaaagttgctgaagtagaaaagcttagtcaaactgtaagagagctggaagaggctgttcttgctggtggtgcagctgctaatgctgtcagagattaccagcggaaagttcaagaaatgaatgaggaaagaaaaattcttgaccgtgagcttgcgcgggcaaaagttacagcaaacagagttgctgttgtagttgcaaatgagtggaaagatgctaatgacaaagtaatgcctgtcaaacagtggcttgaagagcgcaggtttctgcagggtgagatgcagcaacttcgtgataaacttgctattgcagaaggacagatgaccctgcgacacctagattggggaaagagtaggcttgcatctgacatcgactttgctgtaatgtagtgaagataatccttcggtaaggtttaaccttgcggcacgctcccattttgtcaaggcagtgcacgttgtggttgtataggctggaggaccttgtcttcttcccttctgtaatttagatagtgtgtttgcttttgcttgtcagggttgtgaatatattattatcgcaatatattagggtcaccctctcccgctctatttgcttcaaggtcatttgatggtggtaccaggtcattagaccgtggaaaagtccttgggaatggacctcatttgctcaatagatctacggatgctgttagagattgtgagacaactgatgattggaaggcggctaacacagaagaaaaaggtagcgaggccacaaatagtagttcaactgacacagtatctggtgtactctatgacatgctgcaaaaggaggtcatttcattgagaaaggcatgccatgagaaagatcaaagtctaaaagacaaggatgatgcaattgagatgttggcaaaaaaggtagatacattaaccaaggctatggaagtggaggctaaaaagatgaggcgagaggtagctgctatggagaaggaagttgctgctatgcgtcttgacaaggatcaagaaaacaaggctaagcggcctggaaatttcaaaggacctggaaccacttctcaggcgcctcatggaagggttgtgaatatattattatcgcaatatattagggtcaccctctcccgctctatttga

SEQ ID NO: 90114 - DNA, 270 bp, Oryza sativa
  Clone ID: PAT_MRT4530_88814C.1
atgacagattgtcataagaaacttgacaacctagggtggtctctcgaagcaccaggagggcactgttacggggtattgcctggacgtggcgacagcgaggctaacaaggatgtcatcctggggttcgtcagggcggagctgacggccatgcatgccgcgctacgggacctcaccgacctgaccccagcgcagctcgacgagcaggccaaggctggggccagccacgccacgtcgaggacgccgtcgacgctttcatggtttggagcctag

SEQ ID NO: 90115 - DNA, 443 bp, Oryza sativa
  Clone ID: PAT_MRT4530_88815C.1
gcacgaggacccaacccgcccaacgccacgtcaccgtctccctcccaactcctcggcctcgtcgtcggcgtcgtcgtcgcaggacgccgcggctcgcgcgccggccgattccgtgcccctcctcgcatcctccggcgggatggacgaggagaaggcgagcaaggggaggccgctcaatgccccccgcctggatttggacctgaacctggatctgtgtgctgcggccgtgcccgatcccggatgcggcgacacggcttcgccggaggcgagcaagccggaagagaaggcgagcaaggggaggccgctcaaagccccccgcctggacctggacctgaacctgcttgctccggccgtacccgatcccggatgcggcgacctggctttgccgggggtgagcaagccgggagagaaggcggcggcgacgaccagcaacaccgatgagg

SEQ ID NO: 90116 - DNA, 629 bp, Oryza sativa
  Clone ID: PAT_MRT4530_88816C.1
ccggggatcactgagggatttggtcacaccggacaaataggtgtggtccccaaacatgatttcttttttaactgtgtagtccaactgcacggtgccgcagtcctggcagtataaaacccgcaggggataatagggttcctggcccacttccgccggggtgagaaaatggttacaccagggttgttcccccaaatcgatcgccaaatctagacgggtagaatcacaaacacggcactgcataggaactaaccaaaaaactaagaaccaggacgacgggcaagggctatcttcccacgtttgttgtttcggctcaagctggggctaggccgttgggggtgtttagggctggcagtgaatttgctgtaaatcggcgatggtggcgtcggtccccactaggtttccctgggcataaccaggccagtgaatggcgatcgccccttgggcatgggcccctttggccatggtgatatccccctgggcatccccaatcatcaaggtgtgctccggtttcacgcccaactcccggcaggttaaaaggtataaagctggatcaggtttactgagtccttggtccgaccccttagccacatccactaggctttgcaattggtgatcctctagagtcgacc

SEQ ID NO: 90117 - DNA, 253 bp, Oryza sativa
  Clone ID: PAT_MRT4530_88817C.1
ggtgcccacgcgtcgcgcgagtgcttttgtgcgggtaccgtggggggaactattacaccgggcctggggttttttaccgggggggcttcggcttttgttaggctatctacttatcgccgtggcgccatactttggccgtctgttctcgccagagtttacgtgaaggaccactctgtcctggggggcagaagggcgttttttgatcttccatgcaaaaaaaaaaggcggcgttagaggatcagtactcctgctg

SEQ ID NO: 90118 - DNA, 354 bp, Oryza sativa
  Clone ID: PAT_MRT4530_88818C.1
atgaacagcatgggagcggcggttggcggcgaaccacgacacaataaagcaaacggagggcaccagaaggtagagaaggcgacggcgattcttacttacacttacacgatgacagacggcgacggaagatggccggcgatgagcttgaaaaggcggcgagaggagattgagaggattccattcccgcaactaatttggaaaaaggagcaacgggaaggccggattggaggaggagatcggcacggctgcacaggctcggcctctgtccagaggttgaagaaggaattgagctctgaaaaatccgagaaaatttcagagagtataattaatcatggagaatttaatacaaattaa

SEQ ID NO: 90119 - DNA, 1813 bp, Oryza sativa
  Clone ID: PAT_MRT4530_88819C.1
gcacgagggtcagttccacacctctccttcctttaatttctctctgctcgccggagacagactagcttagctagtaggagagggaggaactaatggccgccggagacaaggccggcggcgacgacgctgcggcggcggcggcggcgccattgctggtgtcggcggcggggaggcggcggcggtgccccgggtgcctgacggaggagaggtgcaaggccgacgccggcatcccctacctcaacttcttctacatctgggtcgtctgcctctgctcctcgttgccaattcagtcgttgtttccgtatctgtacttcatgatcagggacttgaaagtcgcaaaggaagagcaagatattgggttctatgccggttttgtcggggctacttatttccttggaagaactatcagtgcagtgccatggggcatttttgctgacaaatatgggaggaagccctgcattgtgatcagtatcctctcagtgattgtgtttaacacactctttggcctcagcacgacttactggatggcaattgttaccaggggattacttggattactctgtggtatactaggaccaatcaaggcctatgcttcagaggtctgcaggaaggagcaccaagctcttggaatttcccttgtcacatcctcgcgagcaatagctctggttgttggaccagctattggaggatttctttcgcagcctgcaaagaaatacccaaatcttttctctgaagaatcggtatttgggaggtttccctactttctcccttgcttcgtcatatcggtactagcagcaggagcatgtgttgcgtgtatttggcttccggaaaccctgcacatgcaccatgatgacaaagaagtcattgatgcactagaggcacaagatgcgacttcagacttaggagaaacaactaaagaatcaggatcagggagaatgggccatacaaagagtttgctgaagaactggcagctgatgtcagcaattaccctctactgtgtcttctctctccatgatacagcttatcttgagatattttcactctgggctgtgagcagcagaaaataccggggcctgagttttacatcccaggatgttggtatcgtgctagctatttccggttttggtgttttggtgtaccaacttgcgatttatccgcttcttgctaaatatgttgggccaatcaagccattccgttatgcagcggtcttgtctatacttctcctttcaacatatccattcatggctaacctgtatggtctggagctcaaagtactcatcaacattgcttcgcttttgaaaaatatgttcgctgctacaattactattgcatgcaacatcctgcaaaacactgcagtgacgcaagaacaaagaggggttgcaaatggaatctctgtcactctgatgtcaatcttcaaagccgtagctccagcagcagctggaattttgttttcatgggcgcaaaagcacattactgggttgttcttaccaggtgagcagatcctgttcctgatgctgaacatggtgtcagtgattgggttcatcctgacattcaagccatttttcgccttgccggatatgcgatgatgtgtagttaggtaacaaaaaggccagaatttatcagacttcagcctggattctaacctgcaagaggaattcatgtactgtaccgcgtgtaatgttcagttgtgtaatcagtttggtggtatctttgatttctgtctgaactccgaaccattggatggtcgaggcatatgataaacagctaacgggatcttgtttcatctaaaaaaaaaaaaaaaaaaaaaaaaaaa

SEQ ID NO: 90120 - DNA, 360 bp, Oryza sativa
  Clone ID: PAT_MRT4530_8881C.1
atggtgacgggagcaaataatctcacggacacggatatgggtaggcactacccgtgcccgtcgcgcccgattgccatccctagggacagcggtgacgggagcaggctggggcacctactgctcaccaaggcggcgtcggcgtcaacctctccgcgacatcgctgtctcaggctcctctctcatcgaccgaagtggggcggagcggcgaacaaggaggatgccgcctcctgctccgggctctccttcctcctcccaactcaccagccacgaagcttgccgcccgcggcctcctcaacgccgctcccccatcatcatcccgctggtgccacagcaggatggcgcaactccgcgctcgtgtaa

SEQ ID NO: 90121 - DNA, 739 bp, Oryza sativa
  unsure (1)..(739): unsure at all n locations
  Clone ID: PAT_MRT4530_88820C.1
ctgaacataaacatcctgtcagatgcaaaaatttctggacttaaaataaactttgacaaaagtgaggtgttttgttttggagaggctaaggagaatcagcttctatatagctagattttcacttgcaagattggggagttacccatgacttacttaggtatccctattgacaaaaagagaatcttaaataaagactggaagaaagctgaaaataaaatggagcataaactggggtgttggcaaggaagacttcagtctattggagggagattagtgctgatcaattcaagtctgaccaatgttcctttgtacatgatctatttctatagactgccacagggtgttagggataggatggactatttcaggagaagacttttgtggcaagaagaccaaggtattaaaaaataccacctggtttaatggcctcttgtttgctcttctatagatcaagttagggtttgggtgttcctggatttagatattatgaataaagttctattgggtaaatgggggtaccgaattgccaatggnnnnnnnnnnnnnnnnnnnnnnnnnnnnnnnnnnnnnnnnnnnnnnnnnnnnnnnnnnnnnnnnnnnnnnnnnnnnnnnnnnnnnnnnnnnnnnnnnnnnnnnnnnnnnnnnnnnnnnnnnnnnnnnnnnnnnnnnnnnnnnnnnnnnnnnnnnnnnnnnnnnnnnnnnnnnnnnnnnnnnnnnnnnnnnnnnnnnnnnnnnnnnn

SEQ ID NO: 90122 - DNA, 485 bp, Oryza sativa
  Clone ID: PAT_MRT4530_88821C.1
ctgcaggaattcggcacgaggctcagagttgcagacgacgccgagaagacgaagaagaaaaggcgggcgcgggagtggagagcaaggtgaggtgcgtgtggtttctcctggtggttgcggtggtggtggccgccgggtgtggagaccgtgcgcggcgcgggggagtgcggccgcgtgcgcttaagctggcgccgtgcgcggcggccacgcagaacccgcgcgccgcggtgccgcgccaactgctgcgcgcaggtgcgcagcatcgggcggaaccccaagtgcctgtgcgccgtcatgctgtcgaacaccgcgcggagcgccggcgtcaagcccgccgtggccatgaccatccccaagcgctgcgccatcgccaaccgccccatcggttacaaatgtggcccatacaccctgccatgaggagcaaagggatggaactggaagggcactcgaacactttgactatccgatatatatataaactgatg

SEQ ID NO: 90123 - DNA, 781 bp, Oryza sativa
  unsure (1)..(781): unsure at all n locations
  Clone ID: PAT_MRT4530_88822C.1
ttctcagcgagctagcagctatagcttagctggagatcgatcgagaggtagaagaagaagaagaagaagaagaagaagaagaagaagaagaagaagaagaagaagaagaagaagaagagaggcctcgcatggcgatgagagctcgcatctggtagccaaggatgacttgcctgtgtctctgctcatgtgcagtagaagaagatgcatttctagctgctttctgcatatgtgatctcacaggcagtctccttggctagcctgagcggctctcatccttcatgcctggctcatctcttcttaatgatctcttattagtcacagatcctgtagagattagttgatgtttgatgcttgtccacttcagtgccacacataaacatagcggccgtgatcaactgatcagtccagcctgacagagnaattcaagagagcatggcaagatcagcttctgacaaaccgcgcgagattaaccaacaaatgcaggcaagatcaagactacagcggtgcgtgcttcctgaactgcctgtggacgaagacgaacagacaaagctagtgatcgatcgatgctctgacgacagccactcctgcaggctgcagcttatgcactggtgcatctgctagatagagcctaggagagtaggaggatgcacttacagagagacagaatgtgttgttctctgcttaatttgttagttaccacactgtttaattcctctgttcaatgggaaattcgtttagggtgtgtttaaaaaaaaaaaaaaaaaaaaaaaaaaaaaaaaaa

SEQ ID NO: 90124 - DNA, 594 bp, Oryza sativa
  Clone ID: PAT_MRT4530_88823C.1
atggtcctcgaatttccagttaattacgcgccagtctctgctaccccaccgtccgatctcacgttgcgattgatctggccatacacgtgtcccgccatggcggccctttcacaccagtgggatcgtcgaatcgcgaacagacgcccgcgctcttctagccatcgtcgccgcgtggacgagagggacgcaagccgccactgccctcttctcccttttcatcccagctatccccgccaggtcgacgaactctctcttcgacgggttgtggtttgtgtgctcacgcaaaacatttacggttttacctgtcaatacggttcggctcatggaatgtgtgtgcccaatcgaccaaccgtatttggtgacatgagcaagtgggagcgaccaactgaacgtgtcaccagctcgatcataacttgtaacctgcccagcgcatttgatcatttccaaggacgactggggcccaaccaaaggcacatgagaagtaatcgaggaaaaaaagcagtggcgggcaaaatcaactccaaaataaactttgatgaccgctgcgggattgatggcggcgcgaagagaggagatcggcgaggcaatggcggg

SEQ ID NO: 90125 - DNA, 344 bp, Oryza sativa
  unsure (1)..(344): unsure at all n locations
  Clone ID: PAT_MRT4530_88824C.1
aaataggtgattttatttagatttatttgacatcaagtttcaactgtcacgcatgatgatgcatgactttttttttaacatttgaaccattttccttttccaattcagtccccggcaccaccaacggtgggaatgctcctcggggcattgttgttgtttgggttgttcccacttttggttggcatgtttttggcccgctttgcttgtgcttgtgcttgggtctgctcaccgttgccccctccttcctgctgccgctgtttttgctgccccntcgccttaacgcttcttttggcctggttgtgtgattgttgcccttcccttctgtgcttttggccccccttttg

SEQ ID NO: 90126 - DNA, 379 bp, Oryza sativa
  Clone ID: PAT_MRT4530_88825C.1
cttaaatatttcactcttggaacaggttcatcttcttattcacatcatttacatcattgcacaaaacctcactcaacataacatacagggctccatccacaattacattccaatataccaccacctttcacacactactccgattccaaaaaaaagaggtaactcccttcgacaaacagtcttttcattttcctccattggcaaccatttctaacactccaacacctgaaaaactcctcattcgtgggtcaaagcctggaaaatcctgccttcgcctgtcttccctagatccccctacaccttatccatggggcccgtccctgtgtactcttcctcgaaccaacctcccatgactgcgagcatccccagcctccccttc

SEQ ID NO: 90127 - DNA, 2207 bp, Oryza sativa
  Clone ID: PAT_MRT4530_88826C.1
gcgagcccgcagcctccggtcgcctcctccgccatctactcggagctcccggatcgaggggagcgctcgccgccgccgcagcgacctcgccggatcacggcggcgggggccgatcgatcggaggtcggtcgattgccttcggcgggtgggagatggatggcggcgtgggaggcgcgcacagctcgcggaggagcgtgtcctcgtcgaccggatccaggaggagggccgggcccacggagaacggccaccacgacgccgccgctgccgccgccggcaggaggtcctccgcttccatctcccgcgcctcgcagcagtcgatgaccggggagaggaccgtgaagaggttaagattgtccaaggcactgacgattccggatcacacaaccgtctacgaggcttgtcggaggatggctgcacgcagggtggacgctgtgttgctgaccgactccaatgctttgctgtgcgggatccttactgacaaggacataaccacaagagtaattgctcgcgaattgaagctagaagagacacctgtttcaaaggtcatgacaagaaatcctctctttgttctgtctgacacactcgcggtcgaggcattgcagaagatggtgcaaggtaagttcagacatttacctgtcgtggagaacggtgaagtcattgcactgctcgacatagccaagtgcctgtatgatgctattgcgcgaatggaaagggcagccgagaaaggaaaagccattgctgctgctgttgagggtgtagagaagcactggggagcttctgtgtctggtcctaatacttttattgagactcttcgagagcggatgtttaggccatcactatctaccattatttctgagaattcaaaagtggtgactgttgcaccaactgacacagtgttgacggcatcaaaaaagatgcttgaagttaaagtaagttcagcggttgtagcaattgaaaacaagcctggggggattctgacctctagagatattttgatgcgtgttatagcccagaatctcccacctgaatctactactgttgagaaggtcatgacccagactcctgaatgtgccacggttgacactccaatccttgatgccctccatacaatgcacgacggaaagtttttacatttgcctgtcttagacaaggatggaaatgttgtaactgtagttgatgtccttcacataacccatgctgcaattgcaactgttggaaacagcgcgggatctggatctgaggcgacatcagctatgatgcagagattttgggattcagcaatgtccattggacctcttgatgatgatgatgactccagaagtgaaggatcaactaaagtggcgtctgaggcaacagatgtaggaagatcagctttttatccggcttctggtttgtccaacacattcgggttcaagattcaagacaaacaaggcaggatgcacagatttaactgcgaaacgagcagcttgacagagttgataaccagcattctacagaggcttggcgatgacatcgatagaaaaaacctaccacaaattttgtatgaagatgaggatcatgataaggtcatactttcatcggacagtgaccttgtagctgctgtggaccatgcaaggcaaatcggttggaagagcttgaagttgcacttggattacgccggtgttggtcgccggaagagaggcggtggtggcacttcagacttcgagtacgctggaaaggatgcgtgggcttcagcctacagcgctgtggctgcaggagcagctcttgttgcaggccttggcgtgatggcttacctgaagagagcaggctaggcttgcagctttgcagttgcaaatgcagatgcagatgaggctttcatcttgtgatgatgatgatacgaaatgttacagaatcaaatttgagcagattggtgtgtaaattaattcttgtggggaaaaaaatctgtaataatctcacggcagcggatggctgcctacatataatgacgaaattttccggtggctaaaaaaatgtctggtattcagcttgtatcgcccctgtacaatgaagcaaatgctttgtactatcttgggccccagtgtgaattcttttcccgtttgctcgtttgacaaccccccatgtgtccgtctgcaaattcaaagcccttttggcaaaaacaatggaacgaggcctataataactggtgttggtagtaacaatttgccgcc

SEQ ID NO: 90128 - DNA, 192 bp, Oryza sativa
  Clone ID: PAT_MRT4530_88827C.1
atggcctatttggcctcggttcttggtgcccttgcacgtgccgagtgccagtttgggcagccgtctccggccgccttttcaccccggcgcgccgctgccttttcacccgtacgcgagcgaaaggctctgcctttgcctgcaacctgcagctttgttgattgccacatcacatgcactaacccaggtggctaa

SEQ ID NO: 90129 - DNA, 855 bp, Oryza sativa
  Clone ID: PAT_MRT4530_88828C.1
atggaggcgactggcggcgacgtccgtggtgctgatgcggtggaggccccctggtcgactgaatgcatcctcagccatctaggcgccgtttccactgctcccgccgccacctcctcccatgccggcggctacacattgttgcggagcgagacgccggcggcgacggacctcgtcaacaccttcatggattgggcgggcgacgcgccactcgatgctcctcctcgccgtcttcatgctgccgccctacttcgcctacaggctcgcctcctcgcgctcgccaccgtgtcgctagaggacgtcgccggcaaggtcatcctcgtcacgggcctcatccggaatcggcgagcaggctgtcggagctgtggtgcccagcagacgatagcgggcgcggtgagggtgtcagaggatcccaattgcgtgctctcaacatggagggacgccgacaatgacccctgcggctggctcggtgtcacctgcgtcgacgacggcggcggtggcagggtcggcgacgtggagctcgccaacttctcactcacgagctacctcccatccgagttgtcgctaccctacaaccagcttgccggccagatcccggtcgccatcacgacgctgcagaagctcgcggcgctcctggctcacaacctcctctccagctatattcctgcggagattgggcggcggtggaggtgtggtggagatcttggaggagggttcgagcatggggatgcacattgccgcatgcgaggggcatgccgagaagcggcggcggtggcagggccggtgaggcagtggtgcgccgggcaggtggcatccaacccggttgcatccatgaagaggacacagctcaacgagtag

SEQ ID NO: 90130 - DNA, 853 bp, Oryza sativa
  Clone ID: PAT_MRT4530_88829C.1
gcggcggaaagctagggtttctcaggtcctcggcaatgtcgtcggcgaaaaccctagcgcgggcgggctcctccctcctcggccgcctcctcgcgtccccgtctccccttcgcgcggggctgcctccgccgtcgctgctctccaggatccagccgctcgtccccccgccgccgccgccgcagccgcggccggagacgacggtggaggcctacgaggcgcaggcggtggcgaggctgagctcgctcccaggagagatctccttcccctgcggcctcccctcgctccggttcatcatcgaagacggaaaggatcctgttgctaatgaacccctggagctacttccaaaaagaacttatcagcccagtaccatcaagcggaaaagaacccatgggtttcttacacgaaaatcaaccaaaggtgggcgtaaggtgattgcgcgcaggattgccaagggcaggcacagaatttcagtgtaacgaaaaacccatagctcgtctgcaccttcacctcatccatttcgtcaacatctcaccgctcacactttctgcacctgttcctgcccgcgctgtcgagggccggccccagcagaagcagtagtgccatgtaccgaattatctttacgaaataaactaggcaattggactgattggccaaatttttacacatccaacatctgcaccatcgcagctggcagggttcaacttccaacagccgtctgtgtgcgcttcttggctctcctaaccactgccttctgtccttgaatccatttcaaccattcttttgctagtagtttattcgtgaacactaatcatgatctctcatctggacgccaaaaaaaaaaaaaaaaaaaaaa

SEQ ID NO: 90131 - DNA, 301 bp, Oryza sativa
  Clone ID: PAT_MRT4530_8882C.1
aacaataaaagcatattctttttcctattttcccatattcccatcaaacaacttttttttttcttcacttcatcaaatttctattttacagcggggcccaattttaaatcaaacaacttcccaaggttcttcccaaaaagggcttttccgttaaaccacacctactttcttttgaaacatttgcacccccccccttttaacctttgcccaacgaccaggcgggactttaatttttttcccaccccacataaccggcaaaaaaaaaaaaagacccctgggtacacccacaaaacaccaaccc

SEQ ID NO: 90132 - DNA, 1585 bp, Oryza sativa
  Clone ID: PAT_MRT4530_88830C.1
atggcgtcccacgccgccgtcgtcgagatcatcgacgacgacgacgacgtcgccgccgcctccacccctcccgccctccacaagcgctcccatgcggtcgccgccgccgcccccgattcccccgacgccttctccccttcccctccagacccgaagcggcggcagctcgcggcgtcaaccatcgtgctcgacgacacccccacccctccgaagcggcggccgccgccggtagctgccgaccggtccgcctccgtggtggcagatacgccccggtcgttcgtgccgtgctcgctccgcaaccgcgccattgctggtgatacgcccgattctgttctcccgagcccgtcgttccacctcgacgctcccgattccgcgacccctggctcggatgtcccgtgctccgtcgggcttgacgacattgttcctgagaccccgggcttcaactccccacgcttggctcgtcccccggccgtgcctggcttgacgtctcctatgaccgcgaggaaattttctggagtatcttgtccaatatctctggatagtgatgacgaattggatgacactgtatacagggagtctttaaccaggacgccaagcaatatggcgaagccagaacacgcaattcagccttgtactacttcctgtactgataaagttgagaatgcaaaaagtacagataagaaggattattcaaaatcaaatgttggatatcaaacaaacaattctgcatgcaaaaataatggaacaaccagctacaatcaaccccctcgtgctaattctccttgtgaagattctaccttgaaggaggctgatccttttatcaataaccattgtccgcaggaagaaaatgccctaccgattgaagaaaggaagaagaaacaacaggaaaccaaaaagcaaaaggaagctatgaaagctgaactagcagaattgaagaagctggagaaagaaaaaaagaagtgggaatcagggaagttagctacaaaatgtattgttgctgagattgactcaagtgttattgaaagtggctcagttggaggtgtgttaaacaaaagtcatcttgtgcaaggatttcatgagaagggcctttgttttcgagtaacatctaattcaatcaaggggtcaattttatggaagatgcaaattcctaatgagtttacccaggaccaagcttcaacatcacaagtgccatatattctctttgtgcttcaagctgaggaattctgcgatcttaaagttcgaagacagtatccagaattcacaatttgctacgttactaataaactgatgagcttcataaaaagacgtgagcagaatcagtacaacaagaccacatcaaattctaatagttggaagcgtccaccagtggaagaggccttatgcaaattagcgacacactatgctagagtgcgctcaaggcactgcacagatgaagctgaagtgacagagcatattgttggcttgacatatagtcttgcgaattgcaagttcaggcaagaaccattgacatggtatctgtgcatgctaatggttcaaatatttctaaaggttgcgttgataaagatcggattaagaaaagtgcctg

SEQ ID NO: 90133 - DNA, 504 bp, Oryza sativa
  Clone ID: PAT_MRT4530_88831C.1
aaaaggggaaaccaaaaaaaaacccgaggggtaaatttcacggaaaaaaggggggggacataaaaaaaaaaaaattaatacgttggtacacccaaagggcccaaaacaaccagttgttaaaaaaaaaaaaaaaaaacgggtttaattcaacaataattagcccaaaccaaaacccaccccattggggggggttttatgggggacaaaaaaagggggggaaccccccgggggcaaagggtcgggtgttttgggaatttaattgcccaacttgaaaacgggggaagaacaagtggggcccaatttggagcccgcgtttttcttgggggggggaacactttaaaagggcttttttggggtaaaaaaaaaaaaaaaccaaaaggggggccttttttaaaaaaagggtttttggaaaaacaaaaagaagtggggaaatttttccgaaatgggggaaaaaataaatagctaagggggggggggggaaacccggggggaggaaaaagtttt

SEQ ID NO: 90134 - DNA, 203 bp, Oryza sativa
  Clone ID: PAT_MRT4530_88832C.1
atggtcgagtgcaccgtcgccggccatgtcggacgacgagaaggtcctatcctcgcctcctgctccactaacgctgccatctgctgtcggtccgccgctgcggccgacggggcggatgaccttgtttcccacagcggcatgcggcacaacttaaaactactggccctcaccggctcaccgcttgcggctcacctccagctaag

SEQ ID NO: 90135 - DNA, 573 bp, Oryza sativa
  Clone ID: PAT_MRT4530_88833C.1
agaaagagcaattggcacggatgcagggactgttaatatttaaatatactttcatgtatacatatagttttacatatgtgtgtgtctatatatatatatatatatatatatatatatatatatatatatatacatatatatatatatatacatatatatatatatatacatatatatatatatatatatatacatacatatatatatatatatacatatatacacatatacatacatacatatatacacatatacatatatacacatatacatacatacatatatatacatatatacatatatacatgggagcgtatactatgcacacaggccctcgcgtgtacacacctttttggtgatattttttagttggtgtacacgtgtgtacacgtgagggcctgtgtgcataggatatgttgcctatatacatatatacatatatatatatacatatatatatatatatatatatatatatatatatatatatatgagagaatccactcatgtatatatatatatatatatatatatatatatatatatatatatatatatatatatatatatata

SEQ ID NO: 90136 - DNA, 675 bp, Oryza sativa
  Clone ID: PAT_MRT4530_88834C.1
atgcacgccatcttggcaggagcatcccggtgtccggcggggaacacgtgtactcggcggcccggcgaccttggctgcaacacctccgcgtccggcaagagcgcgcgccctgaggaggagacgatcgttggagaggagcaagacgtcgccgctccgtgcatgcacgtcgggatggtgttcatcagcagggaagacgccgggtgcactgccatcgccggagttgccgggtcaaccgattcgttgacatcatccgtttcctcactggtactaactatcgatgtagccgccagtgacgacttcaagctcgtcgctgcagttggcatccttatcacaactattgtggtgtcatttgcatgcccgtgctactgtcggcgcccttggactgccaccggagatggtctacgactcatctttgtcaccagcatcgtcctcatctcatccatacacccatcacgatttcccgtggctgttgtcaccgacgtgcttgaacttggccccgttgccggcctcacccatatgccgccgaccatcatttttaggaggttgttgtcgacaacgtgcttgagcttggcgaaccgctggcctcaacatgcttccgccagtgatgtgcctgagctcaaagccgctaccggcatcctgtggctgcctctgctgacatgctcgagctcgaactaa

SEQ ID NO: 90137 - DNA, 501 bp, Oryza sativa
  Clone ID: PAT_MRT4530_88835C.1
tcgacggggcaaggtccgaaaccttgcctgctttctctcgtccgatgctgtcgccactgcgcttgcattgcggggattgcattttgtccagcttcaatgccggagagactgtgcattgtcacagagggctttggtgcaatgtggctggtgtgagcttcgtggtgccaaggattctgaaccattgttgtctgtcaatttcttggcagtcccttcttacttccagattttgcacttgttaatagcactcgagtcaatgtatcttccagctgtgattcgtacgagaatgcatttggttggtggagctgaagaaatttatcctcgcaccctattggaggaggattctgaatctctgagcactggggatactgatcctgctgttgacctgtgtagcaacaaactttgcagtgtggctcaagattatgtgccccttgaagagattgcaagagtggtggtccatggtctgaggctaaagaagcatcaaaggaagagaagctctatgcg

SEQ ID NO: 90138 - DNA, 1446 bp, Oryza sativa
  Clone ID: PAT_MRT4530_88836C.1
tcaacgtggagccggagcagcatacgtggcttcaccgccattgccaccctgctggtagaagggcaggacggtgtagacggtctgcgccaccgtcatggcgaggaggaagacggcggcggcgagcgacatgaacgcccaggggctccggaagtaggtgtgcaccaggttggcgcgccacacgtggcacggcttccggcagtagcggctcaccgcgcgccgcacggcgtagagctcgccgtcgccgccagcgccgtccagcgcgacgacgtccttggagagcccgttgaacagcctcgccaccgccttgtcgctaccgacggcgttctggatcacccccctcgcggtgagcagcgccgcgtcgcgggccgagtcgatgatgctgtccatgaagaggacgtaggcggtgacgtcgttgccggcgccggcgtggaggcgctcgaacgccatgaggttgaggaacgcgtactcggtggagtcgtcgacgacgacgaacggcagggcgagcacgccgcggcggaaggtgatgtcgtggaggctcgccgtcgggctacgcctgaaccggatgcccgcctcgtagagctccgccgccgaccggatgatgccgccgttggcctcctcgtcgtcgtcgcggcggcggtcgtctctcccggcgcctgcgctgcccctgtcgccgcgtggtctctggtgctggccgctgagcaagctcttgcggaacaagtcgagcgggtggagtgcccggtgttccttcgccggcggcgtcttgcacgacggcgagatgaacctcagcaccatcttcttcacttcatactcgacgtcacccaaatcttgggattctttgccggtctcgacggcgacgagcttctggaggaggaggagaggcagctggttctccacgatgagcatgtcgcggcggacgtacggcaccatgtacaccgcaccgtggcggccgaacaccgggtcgttgtgcgcgtatccgccgacggcgccgctcgcttcgtcgtgctttccgccgccgccgccgccgatcaccttcgccgtcctcatcatctcgagcaggaagcacccgtcggtgaacatcacctgcaggaacctctcgccgcgccactcgccggcgaggtcctggtacgactcctccagctccgccgccgccgcctccacggcggcgacgaactccgccaccggcctgcgcctcctcccgacgaagcgcgcgacgacgcggagcttgtgcggctccatgggcaccagccgctggtcgccgtggtggaaggggcccagcgacaccacctgagggcggtaggcgtgcgggtggaggtccttgacggcggcggggacgcggtggacggagtgcttcgaccacagcgcgcgctccgacgccgcgccggcgccggcgaggcccccctccaggtcagccacccacgccctcttgttcccgccgccggaggccat

SEQ ID NO: 90139 - DNA, 397 bp, Oryza sativa
  Clone ID: PAT_MRT4530_88837C.1
tattggaaagctggtcgcctgcggcgccgccgcggactaaccgccgggacccaccccgccggctgtgtttttgactggcggtcttatcgctcaccaggggcggaaggtcaaactgggtacagaaggaactcctgcacacgatttggggactgacccacctggggaagagatcatgcagaagcctttacctctggcagtggactggcaaagcaatcactggatcctcatgacggatatggaccttggggctgcacggtactgatttggcacacgtggcaaatgacttataagtaggacacacaatgggtctttgctgggaatcgacctgggtggtgatggtcactctcttgtctacgactcccagccttgaaactggggccggggacccttatgggga

SEQ ID NO: 90140 - DNA, 861 bp, Oryza sativa
  Clone ID: PAT_MRT4530_88838C.1
ctcctaggtcgtaggcgcctaaatgagataaaaaatgctggctacaatgttaagctctctgcccctttggataatgttcccttctcaaccagccctgaacgtgagcgcatagaagaaaatgtgttcagaaataagttggagttctttgctgcagcaaaaatttcgtcatcatttcctcctcctacgctcccagagatagcatttgcaggggtatcaaatgttgggaaatcatcactactgaatgcacttacaaggcaatggggtgttgtgcgaacatcggataagccaggacttactcagacaataaatttcttccggcttgcatcaaagctatgccttgtcgatctgcctggatatggttttgcttatgcaaaggatgaagttaaagactcatggcaagaacttgtgaaggagtatgtttcaaccagggtcggcctagaaagagtgtgccttcttgtgcacactaaacgtggaatgaaaccattggactacgagcttgtagacctaatggaaaggtccaagacgccatatcagattgtattgaccaagactgatttggttttccctattgacgttgctcgccgtgctgtggagatccaagagagcctgaaaaagaacaagtcagtggtcagaccggtgttaggccgggactgggctttgagccccgtggacccggaggagattgaatcccggctcgcaggagaagcccagtctgggtgctaacaagaaggttcaaattagtttggggagtttggagagttttagctcttaagcaattttcaagctagcttagaacttgaggccatatcgtagcatgagcaaaaggtttctgggaataaggaggcgtcttccatctaagac

SEQ ID NO: 90141 - DNA, 3144 bp, Oryza sativa
  Clone ID: PAT_MRT4530_88839C.1
atgccaccgaagagggtcgtgaaggagaaggttacaaggcgaaaggaaaacgaagccggggaggatatggccgtcgaagagggagcagagccttcggcgtccattgccgaagagggagggccgccgcctgcctctgcacccgcaccatcattaccgacctcggctcctgtcgtctctgggcaggtgccgaacacagctgacatggcgaaggcagccgcggcggcaagggcactccagaccagggcggaggtcctttcgacaagccaaccgctggtgtcccaaactgtatcagcacagccggcgatggcaccgactgcgcttgccgccgctcaagtcaatcctgaccctgaaacacaagccgaagccgacatggaggccatgcggcaaaacatgacacaactccaagacatgcttcgacagatgcaagaacagcagcaggcatatgaggcggcgaggcgggccaaggccgcttcggccctaatcctacagtattcggcaggctatgtcccaccccaagtctttccacaagcgccgatccagccccttctgccacaggccacgcaagcgccagtgtacttcgccgggcagccttcgactgcagccctgcacgtgcagccgcaagctcagcgtgtcgctgcccaagcacactctcaaccacctggccaagtatcgcaagcaatggcagaaggggcttcggctctgcaagcacagcttcaagctttccttcagcaattcaaccaaccccacaacatttcaagtacaaccccttcggcccagccggagggaaatacaggtcaaggtgcgcctagttggttgccgtcgaaccagccgggtccgggggcttcgccttggagtcaaggaccgcagttcgacttcgtcaatgttgctccggcaccaaccgctcggccacaagcaccgacaccaggcttcgggacaaaccaagcaccaaaccaggtcgccatggcatggacccagactacgtttgacccatccatggcgcctcaccaagcatcaccaatcggagctgggcagccgaacatcatgatacaacctcatgcgcaagccatgacttcacccttcgccacgccatacccgcagcaaggtgccgtgaacagggtaggggacgaaaaggggctaccactgagtgggggaatcaagaatcgtccaatcccaccccagttcaagttcccacccgtcccgcgttactcaggcaaaaccttcagcacaggcgaaaacagacgcgaagagcaaatattgttcgatgttgtcgacatcccgtacaaatacaatgccatcttcagccgtgcgaccttgaacaagttcgaagtcatttcccaccacaattatcttaagctcaagatgcctggcccgacaggagtgatcgtggttatggggctccagccttcggccgcctcaaagggcgatctggccataatcagagctgtgcatattgttgaggccgaaccgcatgaccggccgaagcacgcaccaaaacccgcccctcatggcaaggtaatcaagatacagattgatgatgccgaccccacaaaactcgtatcgctgggaggtgacatgggcgaagaagaggccaagaatatcctagaggtgctcaagagaaacatcgatatcttcgcctggggacctgatgaggtgggagatgtttcgaaagatctcatcatgcaccacctggcagtcaagccggatgccaagccaaggaaacataagctacacaagatgtccgctgatcgccaagaagcagcaaaagccgaagtccaaaaattgctcaaggctgggttcattcaagaaatcaaccaccctgagtggctggcgaacccggtgctaatccacatgaacccggccaacatccccaagacagccttcataacaccattcggcaccttttgccacctcaggatgcctttcggcctgaggaatgccggggcaaccttcgccaggctagtgtacaaggtcctttacaagcagttggggcgaaatgtggaggcttatgtcgacgatatcgtcgtaaaaagccgcaaggctatcgaccatgcatccaacctacaggagaccttcgacaacttacgtgcggcgggtatgaaactaaatcctgagaagtgtgtttttggtgttcgcgcgggcaagttgttgagtttccttgtttctgaaaggggcatcgaggcgaaccccgagaaaatcgatgccattcagcaaatgaagcccctgtcgagtggcgcgggaaaattcacctggacaaccgaatgccaagcagcattcgacgagccaaagcaatatctgcaaagcccacccgctctgatcagcccagcaccaggaagcgaactgctactgtacctagtggcttcgccagtagcagtcagtgctgccctcgtccaagaaacagagtcaggccagaaaccggtctatttcgtctctaaagcattgcaaggagcgaagacaagatacattgaaatggaaaaacttgcttacgccctggtgatggcttcatgcaagctggtagaaggtcatgttgacaagtcctttgaggcaaaggaagaaggaatgaagaggtatttgaaggctgttcggtctatggaaaaatgcttcgcaggcataacggtcgaacatttacctagaggccagaacgaggaagcagacaccttggcgaagtctgctgcttgtgggggcccacattcgctgggcatcttttttgaagtcctatacgcaccaagtgtgcccatagagagcttggaggtcatggcaatcgaccaggcagaactgggcaatgatccagaggactggcgaacaccgttcgtaaagtacctcgattgtggctggcttccggaagatgaagcagaagcaaagcgccttcaactcagagccgcaaagtacaagatggtctcgggccaactatatcgttccggggtgcttcaacctttgcttcgctgcatctcttttgccgaaggcgagaaaatggcgaaggaaatacaccaggggctctgtggcgcacaccaggacgtaagagcagttgcctcaaaagtgtttcaacaaggtgtgtactggcccaccgtgctgaaggtctgtgtcgagcaggtcaagaaatgcgaaagctgtcagcgccatggccgaagcccaactgcgccccaataa

SEQ ID NO: 90142 - DNA, 734 bp, Oryza sativa
  unsure (1)..(734): unsure at all n locations
  Clone ID: PAT_MRT4530_8883C.1
ccggccgggattctgtccctttttctccttgtcaagttacttctccgaagcgtctcagcactttgtgatatctctacattcaagatggcctctgctacccgacagtttgcccgcgcggccactcgtgccactcgcaatggcttcgctattgctccccgacaggttatccgtcagcagggtcgccgctactactcttccgagcccgcacagaagtcctcttcggcatggatttggttgacaggtgctgccgttgctggaggtgctggctactacttctacggcaacagtgctccttctgctaccgccaaggtcttcaaccctagcaaggaggactaccaaaaggtttacaacgagattgccgctcgcttggaggagaaggacgactacgacgatggcagctatggtcccgttctagttcgtcttgcctggcacgccagtggcacctacgacaaggagactggtaccggtggcagcaatggagctaccatgcgattcgctcctgagtctgaccacggtgccaacgccggtctggccgctgcccgtgacttccttcagcctgtcaaggagaagttcccttggatcacctactcggatctctggatccttngncggcgtttgtgctatccagnagatgctgngtcccgctatcccttaccgacctgggcgttccgaccgcgatgtctctggctgcacacccgatgcccgtcttcctgacgcttccaagcgccaggatc

SEQ ID NO: 90143 - DNA, 789 bp, Oryza sativa
  Clone ID: PAT_MRT4530_88840C.1
atggcaagaagaagggcaagaaatcttgcacgcctccgagaagtgccgggtccgccaccgccaccgccaccgccaccgccggcgtcgtcgtccacatccgacacatcaccagatggacgaggacgcgtcggagggtgcctgcattgcgtttgggaggcgttgaagagatgggcgtttcggcggcgcaccacttcgactgcaccgcgcgtcgccgccgagccaggaccagcaccacccaagcgcgccgccgctttcatcgcgacaggtaaccatgcatggaagtaccaactcgccacggcaagaaagaaagaggagccggatgaggaagagggagacgatcagccgcaggacggcgatctgaaagatgaccaggttttggataatccttaccagaaaaagaagaaatacaaggaattcaatgatgccagggcaaaattctcagaaaagttcgagttatgtcatttgtgcttcttcgaaggagcacccagatttccttgggatggagtcatccgtcgcaaagatgtaatcaaacatgtttacgaaaatcatggactttatggtgctgcctgccctgagaacggatgtgctgtgcgattccgtacggaggagcatcgtttattacacgttcagaactgtcaagaactcctcgagcgtcgctgggagggcgcggtgggcggtggggcgccgaggaggatagtggaggtggcgggaggcggaaacgtggtgagggcgcggtggccggtgggccgcgcagaggatagtggaagcggcggacgctgccaaggctag

SEQ ID NO: 90144 - DNA, 3348 bp, Oryza sativa
  Clone ID: PAT_MRT4530_88841C.1
tttttttttttttttttttatgacaagaaatggtgagcttgcatacgatgaaaataatgctcagggctcagtgcaactgccttcggcttaagatgaaactaagcattagtggttggcaataaagttcagtgtgattacatcattacataaagtgacaaactccagaaaggaaagaaaatggtactctaccaaccagcaaggggtactgctacgctactggtagtcttggtactgcgctgctccaggtcgcaatccacatgagcagaaacagagactaacattcctaagctgcactacatacataatacattactttccatatcaatttacagtagacagtccaaagctgcacggacagttccaagtcaagggggataattcacagaaagcattcagaggggcagatcatcctgcagcaggagacgatgataaaccattattacacatggacaggagggcctggtgcagcttgtaggactaaatttgagttaggcataatcagtattaggaacatcatttgttcccctttcttttctttctcttccttgtggagttggaagccacatcacccacattggctgctggtgctggaggtggcactgcaggtgctaccactggtggtactgcaggggtgaaaggtgggaaaaccatcggatgtgggtgcattggtaccaaaaacattccggcgggcacagttgccgaagtaggcgctatagccaccattgtaggcgttgcctgcattgttgtagatgtggccaccgcgactgtcgccactgttgtagtcgcaggtgttgaatctgatatgccattgcccccatcctcattggatggtcttgaagacttgccatttctcttaccagtagaaactggactgtctccaggccttctatcttttcgagattcctcgaacttccgtaccttctctttggcttctttcatgaccgacaaaacatactccattgcatcagggtccgttgctcccatttccacaatgtcagcaaagtactggtgaccatgcttgtacagattgtccactttatcttcacgggcattttccggttttgtgcccttccctgtagctttgatcgcttttggtgagatgggagtttccttggattcctcggggcatttgtagtccttcctccagcgatcgagaatatatttataaggtatcagcatcacaagttcctgtctcaagacagcaagagcatggctacacaaaatacctttaaactggaaggacctgcagatacaccacacctctttctcagcactgttatacatcactttgtagtcatacttcctctccttaccaatgacggtcacagtgtaagtcactattgatccattcctactgacttcagtgcaagtcacgttcatcagctgcttcaagtgatcttggaacttctgaaacatatttattgtataaacatttgcaaattgctcctcaaagagtagaccagacaagacttgaggcctttgctgaaatgagcgaaaatcatcatacgcttctcggtcagacctaagcttcatagcagtatcaaattgttcaataaatgtcttaattgtggtctctggtgtaatgtatccatcaaaaaaggcctccaaccgctcactgcggcgaacagtggatataccagcccagaaagtatccttgacatatgctggtacccattttgccctctcttcaaataaggttgtaagccaatgattatcatgaaggttatactgattgaccatctcaacccattccctctcaaaatcagttgatgtaatagtgtcgaagactacctttttcattcttaggctaattgcctccttatcctcaactcttccagacatttcaggaagctctttcatgatatgccaaagattgtatctgtgacgagtatttggaaatacctcagcaacagctttgaccactggtcttgagtgggtggtaataattgcttcaggtgatttatcattcatacattttagccatttcttgaataaccaagaaaaagtctctggagattcgtccccaagtaaaccgcatcccaacaacacaaattgcccatgatggttgattccaagaaaagcaaccaatggaatgacaaattggtatgtcaaataaacagtatcaaagcaaacaacatcacagaagtgctggtatgcagctctcgatctagcatcgacccagcaaacattcttgagccgaccttcatcatccatgtcccagttgtagaaaaagtttgaattttgagcttgcatcttatcaaagaagaccaagagtgcctcaacatcaccctctgcaaatctcagctttccagccttgcctgctgcttcaatggaataatttgattgtgagaaggtttttttcaccatgaagtctttgttttggttgggtggcctgcctctgccagagtgaatctttggattcaatctagtcttggcattgaatgggcggtgctccctctgccagtcagggagatctttaaagcacatcatgaatctaaccatttcaggattacatggatggttatgctccagctcaacaaaaactacctcccactggttttcagttgtgttatacttgactaccatcattgctttgcaaccagtctttgcaacaagcctccttcgagctttgagaccaggcttgatcctagcaatgccgcctttgtaacaaacaaatgttgcacggtatttcaccccatcaacactatgggaagtcctctttgagaccccgaaccctgcacggtagccatattctaagtagaaccgatatgccaaatcggctgtctcaaaagtcatgccaacttgagggcttgtaatatcatgcttatccaaaacagaattgttgttttcaaaggaaacagaggtgtccctgaattgcagctgcaggctgctctttgcatattgatcgctgtgatgggtgtccatcacatctacacttgggtaatcagaaaccccaccccctcccctccactttgccttcctccatatcccactgcaccgatccatcttccttgcatccgctgcccctacgccacctccttccccatacccggcggctagtgctgtcatccacctcggaacttctcgttccccttcgtccctgctgctgagccctcccactgccctctcctgactcagtgactctggttgtgccagtactgcccagacctccctccaaacccaggaaactgcccccgccccaaccccaaatcctaacttatcatcctcgccgctgcctggtccatgagcttgtccgagatggaggggaagggtcactgaagcacgaaccatggagcggatcagaaagtaaggaatttgcaagaatttgccaccaattttcattcccat

SEQ ID NO: 90145 - DNA, 717 bp, Oryza sativa
  Clone ID: PAT_MRT4530_88842C.1
atgacgccggcggggaggggaaaaggaaaaaggaagggagaaagggagcttgccccttgcctctttggggaaaaggaggagggagcgggggcgacgcggcagagggaggaggagctctgcctccgtcccttggaggctagcgcgtggagtggcgggggccgggtcatgacgacggcgatgacggccgggcggtttggagcggagcgacgacacgggcggcaggcgcgggcaggcgctgacggcggcggcgactggccggtcggccaccatggcgcgcgcgcgcgggaagcaacgggcggcgcggcgatttgggcggcgtcggagggaaacggcagcgagggcggagggcgctcggctcggcgcggctcacgcggccgcacgcaccgcagccgcaaggagtgggcaccctccggcggcgcctctaaccttggcctcttgctcccccccggcagatctagagcgggtgatggcgggaggtatggaggtggctgcggcaacctcagcggcgggcgggtgatgacgggagtggcgacgatggttgcgatgacctcagcagcggtggctcagtctcagacggttggctgggcgtgggactgccgtcgacgaaggagccggaacagcggcggcgacaggctcagcctcaaacggccgacggtcactctactgcagcctgttgagggacaaatgcgatttccttggaacaaaactaacatgtaa

SEQ ID NO: 90146 - DNA, 1114 bp, Oryza sativa
  Clone ID: PAT_MRT4530_88843C.1
atgggtcgtcgcgccgcccgtgcctccaccgaccgtagtcaccgccaccgccgtcggggaggccagaaccgccgtctgggggggccggagggagcggcggaccggggtcagcttgacccggtcgcggccgaggtggtgccgacgtggcgcctacgtggctgccacgcgggccggcgggaggtagacgacgacgtcggccggaacggacggctgacggcggcggcgagcgattgcggcggcggcaaccggcggcgagagaagggggaaacggcgacggtgcgacgggagaccgattcgggcgagctagagcatctacgcgactccgggaatccgttgctagcgtcggattgggcggagctacgccgagcgaggccagcgacgagcggacgctacggagcacgggcggcgacggcggcgagcacacagcgagaggctgcaacgggcggcaatgtcggtttggaaaccgaccttgggcggtcaaggcgcgagctggcgctcggcgctcgcggccaaaacggtgacagaggcggatgacgccggcggggaggggaaaaggaaaaaggaaggcagaaagggagcttgccccttgccactttgggaaaaggaggagggagcgggggcgacgcggcagagggaggaggagctctgcctccgtcccttggaggctagcgcgtggagtgtcgggggccgggtcgtgacgacggcgatgacggcggggcggtgtggagcggagcggcgacacgggcggcaggcgcgggcaggcgcggcagcgaccaggcagtcggccaccatggcgcgcgcgcgcgtgggaagcaacgggcggcgcggcgatttcggcggcgtcggcgggaagcggcagcgagggcggagggcgctcggctcggcgcggctcacgtgcacgcatcctccctcggacgaagccgacgccatcgtcaccgtcgaggccgacggggagagggagagagggacggacggccgtcgccgccatctctgccgcaccccgccgtcgctgcgccgtgccggcgagacgggaaggagagccgccgccgtcaccgccgctagcgtgaggaagggagccgccgccgctcgccgtgggcgaagccgcggctgctaa

SEQ ID NO: 90147 - DNA, 498 bp, Oryza sativa
  Clone ID: PAT_MRT4530_88844C.1
atggacataccgacagcggtggtggcggccggcgcgggcgccgccgcgcaggaaatcgtcttggcgagctccgggcgcagtgccgccacagtccttgcgcaggctgagcaagcagtacttggcggcggcaccgtcggtggcggcggcgagggtgtcgacgaagctgaccccgaccggctcggcgtcccactgcgtcctcaccgaccggagcaggagcgccttggggtccagcagcgtcacggcgacgcggatagtgattctagcatggtgataaacaagaatatgctaaaaggaacaaaagcatttagcaatatgtttaacaccaagttgagagaagtgaaatacccagagaacgctccagttgataatgaggcactggtattgcctccattgatattgacgttctctcctgtgctgtcgttccatcctcctccaggtgtgccgtcgttccctcctactccagttgcactgatgtcggtggaagacatcgtgatgtag

SEQ ID NO: 90148 - DNA, 164 bp, Oryza sativa
  Clone ID: PAT_MRT4530_88845C.1
tcgtttacgcgtagagtgcatgtttaattgtgcgctcggtgtgtagcagggtgcgcatgcccaaggggcccgttacagaggacgactccaaggagtgggtactcggcgtgtacgcctaggtgaggtatctagacacggagttgttcggcgcagcgaacgaaacg

SEQ ID NO: 90149 - DNA, 109 bp, Oryza sativa
  Clone ID: PAT_MRT4530_88846C.1
atactctctgagctgaatgatcctcacactcgggaaggacccacgcaagagtacttgtgctgttacatgaccaaccaggccacagaaatctggatcgtccacgcacacg

SEQ ID NO: 90150 - DNA, 207 bp, Oryza sativa
  unsure (1)..(207): unsure at all n locations
  Clone ID: PAT_MRT4530_88847C.1
gatttaagtcccaagattgttttgtttttnagtaaatgggctgaatcatttgtntcctcaggcgttaattcgttatcccctgtacctcctacgccaccagtcttatgagtggattgacagttgcttgctcaaacatgttcctggaaggtatttatttnacaaaaaaaaaaaaaaaaaaaaaaaaaaaaaaaaaaaaaaaaaaaaaaa

SEQ ID NO: 90151 - DNA, 364 bp, Oryza sativa
  Clone ID: PAT_MRT4530_88848C.1
aattccttcttttgatatggataggagattcctctttgatgaaaactgggaaaaataggcttatttctgctacaatggcaaaaacattaagctgaatcaacagaagaagttgtgcttaccatcggggaagagaaaaatataacttggtacgtgccgggaagcgggatgattaacctcatgactcaccgaactgttggatgtgccagcattgaatgtgcagttaacacaaaacccaacattgtcgtgcattgcataataaagttgagattaatcaacaattacccaagtaaaaccccaacgactctggttattggtctccacttttaggaatatattattatccatgaaataccaggctaataaa

SEQ ID NO: 90152 - DNA, 1799 bp, Oryza sativa
  Clone ID: PAT_MRT4530_88849C.1
caaatttgtgacaactctcacggcacgccgcgcaaccacatctagtagtttatatgggcacttgacctccctagtacaaggaaataatcattatttctccctaattaagactttccttgttgaaaaactttccaaatctctaatccttgattgtgttgttgctgcttgctgcgcatgtgcctggcttccatctttgctgcttgctgcacatgtcgccccacatgacaccttcactcttcttagagcagatacagtagcagactataagccagctataaacatatttgaggaagataaaagaggagagataagagcagataaaagaggagagattagagcagcgggctattaacacttcttttgtgttaattcccatcaagacttcttttgtggctggctattaactgtgttatggactatgcacaggtttcaaaggagcatgggggtttcatgagatttatccaggtttcttgcctaggagcatcggcctcttcttctagaatgctcggacgcgtgggtgctggggaagaatctgtgttgaaggaatttcctgaggctacaattatgaggcctgcaactatgattggcacagaagatcggattttgaacagatgggtacagtttgctaaaaattgattcccggtctacaaagattcagcctgtttatgttgtggatgttgctgctgctattgtcaactccctcaaggatgatggcaccagcatgggaaagagctacggacttggtggaccagagatttatactgttcatgatctggctgagctgatgtatgagacaatatgtgaatggccacggtacatcgatgttcctcttcctattgcaagggtatgaacttaaataatatcttgtgttggtcaaggcgaatggccacggtacatcgatgttcctcttcctgttgcaagggctatcgcatctcctgaaagctgatagattgggattttttttttcaatactctaagcctctaatgaaaggagctattcaaggcaaaagaataaataagatcctatcgtcttcaacgtggtgctatcatccttggtcatcagggaaaactcagaagaccatgaaccactccggccactcatagatgaaaagaatacttgtgatatactggtgtaataattgtggagcgatgattcacaaacaaaggatgctgtagttgcttaaatgcatttaagttgcgaggacagcaggacagtggtggtgaacagcgtggcattcatgacaatagagataggcaatggctgaggcagaaagttaatgctacacgggagctagctagctactactactccagaagatactgattcctagcgggcatgtggagttgtactactagttaattaatggggcatgttcaattaatgttggtcgctgtgtgaagtggatcggagtagtagtatttatatgggcacccagcaggcaggggagggatcaaaatcgagcgcacacgtactgtacttactgccagccactaacaagagtcagacaatggactcaaagaaggtcgcgtatgctgtttttatcgtcattctcctaatgacggaggtagcggccgccgctgccgctggaggcagcgcccgtgggactggtggtacaggtgatcgcgccaacgatgaagagaaatttatctttggccatctgagcaaagcaatattaatttacatagccagtcacttcccaggtcacattaaagagtgcgtcaaccacgtcgaaaaccagtgtggctgggctccggcgcctggatgcctgaaagaggcattagccacatgcgccaaataa

SEQ ID NO: 90153 - DNA, 210 bp, Oryza sativa
  Clone ID: PAT_MRT4530_8884C.1
ctgggtggggttttttgaggtctacaaatgatattgtgtagtataggacaataaacaaaaaccaattacccatacatatcagccgatctgatcaaaattgagcaaagtttgtgctagacgaggcagtccaaattcatgtatataatatatatatgtgtatagttagggggacactctctttatatatatatatatatatatatatatata

SEQ ID NO: 90154 - DNA, 1814 bp, Oryza sativa
  Clone ID: PAT_MRT4530_88850C.1
atggcgatggcggcggcgaagggcagggtcctgccactgctggcggtggcggcggcgctcgcggcggcgctcctctaccgcgcgcccttttccaaggtctccgggagattccctttcccccggtattcgaatccgcgatctcttctctcgtacgagaaagctgaggagaatccctttgtctttgcagagcctgggcgtggaggtgaagggagggctgatcaacgcgatcgccgtcggggattaccggagcttcctgctccggcgaccggtggtggactacggcacgcgcatcttgatgagccaggacgtgctgagtgggaggggttctccactggtacaagagcagcagctgcaggtggcattacaacattagtggacatgcctcttaatagctacccgtcaactgtttctgaagaaactctcaagctgaagttggatgcagctaaggataaactacatgttgatgtagggttctggggaggcctcgttccagagaatgccctcaatccaagtgcactagagagcctattaaattcaggcgtcttagggctcaagtcatttatgtgcccctcaggtataaatgacttccccatgacaaattcaactcatattgaggagggcctggttacattggcaaagtataaaaggccgttacttatccatgcagaacgcatacccgatgttcagaatgaagatgggatcgatggtgaactagatcctaaagcctatacgacatatcttaaatctagaccaccagcatgggaggaagcagcgatcaaagatctgcaacgtgcgatgaaagacacggagatagggggtcggtcagaaggagctcatattcacatagttcatctctcagatgcaaaaacttctcttgggcttcttaaggatgcaaaacaaaatggtgcaagggttagtgtagaaacctgtcctcattacctggcgttttcagctgaagaagttcctgatggagatactcgctttaaatgtgctcctcctatacgcgattcaaccaacagagataatctctgggaagctctgcttgatggacacatagacatgttgagctcagaccattcaccatcagctcctgatctcaaactcatggaggaaggtaacttcttaagggcatggggaggcatatcatctttgcagtttgttctccctgtaacatggtcgcatgggaaaaaatacggtatcagtttgaatcaactggcatcatggtggagcgaaaggcctgctatgcttgcagggttaaagaaaaagggtgctgttctgccgggataccgtgctgatattgtggtatggaaacctgaggctcaattccatcttgatgacagccatcctgtctaccataagcatcggaatatttcggcatatttgggaaagcagctttcagggaagatactgtccacctttgtgggtgggaatcttgtgttcgctgaagacaaacatgcaaaggctgcatgtggtgctccaatcctcgccaaataaaattcaggtggatccagtgcttacagttgttgatttgtagtgtatatgatcgtatgcgctacacattttgatttgcggcaaaactgcaaatggcaatgtccctgtgtgtataatttagcccggctcttccattgttatataccactctccatttcgattgtgctacattgtacttcatgtggacagcgtatagtgattgtattttctcatattattcagatactcctgtaatctagtttacgtggaagtgtaaattcagttactttaacagctgtttatgtagatgaactggaataataaaaaaaaaaaaaaaaaaaaaa

SEQ ID NO: 90155 - DNA, 377 bp, Oryza sativa
  Clone ID: PAT_MRT4530_88851C.1
ggggggaaaaaagttttatgcatgttaaaatacgggttctgattctgaaggaaaacagcctgttttatttggtggggcccctcagttggttttttaaggaacaacttaacaggtgccggtggtaactgcaattgaactaatggtggtttttttgggaatgtttccaaaaagctttaaaaaagttcggcaggattggaaatcctttcagcatattttccaataatccaaaatattggtgccttaacctttggttcatttaagggggttaggctttcacaaaggggtgggatgatcgactcataccttttaggggagcgcctgaaaatgtccttaaaaacaattatagccccctgcccaacataattaacctttttttt

SEQ ID NO: 90156 - DNA, 684 bp, Oryza sativa
  Clone ID: PAT_MRT4530_88852C.1
atgtctgcccttggatttatgcagacaaacaaaggatcgagcggcggcggagggcggcaagcgccggcgtggccgagcggcggcggctgtggagggtggtggcggctggtcgagcggcagcggctacggagggcggcggcggcgggccgagcggcggtgggcggtcgagtggcggcggctgtggagggcagtggcgggcaaattgggcatttcatcatatatttgcatcgaaagatgacatggcatgcccacatggtaattttcgatgagccaaggactgtatatgtccacatgataaaatctaagggcttgcttggacaatttgaaagccgcctcctcctgccggccgccgctcgcctcctcccgccgccgcttcctcccaccagccgcctcctcccgccggccgccgccgccgccacctcctcccgcggcgctcgccgcccgcatcgttgtcatcgtcgccgcattctcatcgtcgtcgcggcggctgccgagctcgtctcctctctcgtcgcccgccttgtggggaatctttgcgtcaacgctgccgttaccctcatggaggtcattgaagctataatcactacactagatcaggtcagcactgacgggctcaaaccctcaactttgacgggttcagctcccggtcagagattagtggtcactgatgacttgagtcacctg

SEQ ID NO: 90157 - DNA, 239 bp, Oryza sativa
  Clone ID: PAT_MRT4530_88853C.1
cttcacacaattcaaacattatagttgaagcatagtagtagaatcctacaaaaatgaagatcattttcgtatttgctctccttgctattgttgcatgcaacgcttctgcacggggtggtgcgcttagtccccgttatagaccctatcgactacaatcgcgtctcctgctgcggcgccccgcgctccccccctgccgtgacgccgtggggccccccccctccctccccggcccccccccc

SEQ ID NO: 90158 - DNA, 723 bp, Oryza sativa
  Clone ID: PAT_MRT4530_88854C.1
ccggccgggttcaccataaaaccccatcgcctccacaccccagcacaaaccgactcggccgctggcccgctgctgctgctgctgcacacgccatttttgaatgtgagaaagagagggaaacccaaccaggagagggcaatgccgaggtcgtcgtcctcctccaagccgattctcgggagggccatggcgatcctggcgctcccgctgaccccgatatccaaggccaagggccccatcgccaggaacctgctgctcttcaagaagcgcggcgccgccgggaaggctcgccggatgctgtcgtcgtacgggtacaagccgcaccgccactacaactacgactacgtcggggagtaccagttctccccctccagctccccgctcatcgcgtaccctccgggcgtctcgtcgtggcggagggccaccaagaagcggaggagcaaggccaggatgatcctcgcctccctcctctgcggcggcgacggcgacctcgacgtcgccgtgctcgacggcttgcctcgagccgacgagccgcgcgccgccgtggagtgggaagagtgccgccgcgacggcggcggcgcgtacggcgagggtgatcagtacgaggaggaggaagaggaggaggacgacgagggggtcgacggccgggcggagcggttcatcgagaggttctacgaggagatgaggctgcagaggcagcgctctctggtccagcgtctcctctga

SEQ ID NO: 90159 - DNA, 285 bp, Oryza sativa
  unsure (1)..(285): unsure at all n locations
  Clone ID: PAT_MRT4530_88855C.1
cccacgcgtccggcatgccatggtgcaaaagcttatagaattcagatgccataaatactactatccctggagctaaaggttggtgggtcgaggagaccatcttgtcaccaagaaagctctcagaactctccatctctaggccagcttagggctggaccagcttgttgccattgggagcctgtatcagttcataaggggaggaggggaaggcaaggaggcanctagcgaagaagaaaagcanacaccaaaactcaggnatgcatgacaaggaagaacatgatccta

SEQ ID NO: 90160 - DNA, 297 bp, Oryza sativa
  Clone ID: PAT_MRT4530_88856C.1
gatagtcaaaatccttggacattaaaaatgcaaatacctgtatatttacagatatgaaatatcccctgagaaaacgttttatgaaaaccacatagggtagagcaatgatctgaactctattaacaatgcacggagcattaaaccgtgggagcaggttgatcctacgaaaaagctactcataataaaaaacaaattgtgttgagaagacatctttccaaattactgattttcttgtcgggccttctcaaggcgctctttgagcttgcggatctacccatctgaacggagcctaacttc

SEQ ID NO: 90161 - DNA, 286 bp, Oryza sativa
  Clone ID: PAT_MRT4530_88857C.1
ttcttctaaattccccggactatctttctgtagagcgccgcatacagcaggcctcctaggtagaaatttgctcgccttcccgtaacaatactcggccctactcttatcgcgccggatttcgacctctgagttctccgtataggtgtcggatcccctccgtgccttctacgaactccgactacaacgcatcgccgagccttctcttcgcgctcgagccgggctccgcccttcgcctactccgcatcgtagatatatggcgggcggagccgcgcgcgatcgacgcgcc

SEQ ID NO: 90162 - DNA, 150 bp, Oryza sativa
  Clone ID: PAT_MRT4530_88858C.1
atggccaaaaggcctagggccctccccacggcatggggttttggctcggcccaggcacgacatgcaccgactggagtcaagcccatgctagcctaccccgaccgttgggcggtgcctgggcctctgcctcggcacgatgggccgacctga

SEQ ID NO: 90163 - DNA, 810 bp, Oryza sativa
  Clone ID: PAT_MRT4530_88859C.1
atggaggagaggtacgaggcgttgaaggagctcggggccggcaacttcggggtggccaggctggtcagggacaagaggagcaaggagctcgtcgccgtcaagtacatcgagaggggcaagaagattgatgaaaatgtgcagagggagatcatcaatcataggtcgctccggcatcccaatatcattcggtttaaggaggcaaggtacttcttccagcagctaatatcaggtgtcagctactgtcattctctggaaatttgccaccgtgatcttaaacttgagaacaccctcctggatggaagcccaacacctcgtgtgaagatttgtgactttggttactcaaaggtagcagacgtttggtcctgtggtgtgacactgtacgtgatgcttgtcggttcatacccgtttgaagatccaggtgatccgaggaatttccgcaaaacgatcagcagaattcttggcgtgcaatactccatcccggactacgtgagggtgtcttccgactgcaggcgccttctatctcaaatatttgttgccgatccttcaaagaggatcacgatccctgagataaagaagcacacgtggtttctgaagaatctgccaaaggagatatcggagagggagaaggccgactacaaggacacggacgccgcccctccgacgcaggccgtcgaggagatcatgcggatcatccaggaggccaaggtccccggcgacatggccgccgccgacccggcgctgctcgcggagctcgccgagctgaagagcgacgacgaagaggaggccgccgatgagtatgacacctactga

SEQ ID NO: 90164 - DNA, 216 bp, Oryza sativa
  Clone ID: PAT_MRT4530_8885C.1
atgaagctgttgaaggtggatcaccctcggagccaccacaccgtcttcctttatgcttcattaacatccatagctttatatacgtcactaacaatcatagtagaaaaaaccggactagcggttcaaccggaaaaaaccggaaccagctccctgaccggctcggttccctcaaaggatcgttcacgcaatcgacccggtgtgaaccttgccgaccac

SEQ ID NO: 90165 - DNA, 1395 bp, Oryza sativa
  Clone ID: PAT_MRT4530_88860C.1
atggaggagaggtacgaggcgttgaaggagctcggggccggcaacttcggggtggccaggctggtcagggacaagaggagcaaggagctcgtcgccgtcaagtacatcgagaggggcaagaagattgatgaaaatgtgcagagggagatcatcaatcataggtcgctccggcatcccaatatcattcggtttaaggaggtttgtttgacacccacacacctagccattgtcatggagtatgctgctggtggagaactctttgaacaaatctgcaccgcagggcgattcagcgaagacgaggcaaggtacttcttccagcagctaatatcaggtgtcagctactgtcattctctggaaatttgccaccgtgatcttaaacttgagaacaccctcctggatggaagcccaacacctcgtgtgaagatttgtgactttggttactcaaagtctgctttgctgcattcgaagccgaagtctacagttggtactccagcatacatagcgccagaagttctttcaagaaaagaatatgatggcaaggtagcagacgtttggtcctgtggtgtgacactgtacgtgatgcttgtcgggtcatacccgtttgaagatccaggtgatctgaggaatttccgcaaaacgatcagcagaattcttggcgtgcaatactccatcccggattacgtgagggtgtcttccgactgcaggcgccttctatctcaaatatttgttgccgatccttcaaagaggatcacgatccctgagataaagaagcacacgtggtttctgaagaatctgccaaaggagatatcggagagggagaaggccgactacaaggacacggacgccgcccctccgacgcaggccgtcgaggagatcatgcggatcatccaggaggccaaggtccccggcgacatggccgccgccgacccggcgctgctcgcggagctcgccgagctgaagagcgacgacgaagaggaggccgccgatgagtatgacacctactgaccatccatgatccatattgcatccatggtcgttgtgctgcagctgtaaatatgatccggaatatacgtgatcgccagaccaaatgatatgcgtattctgatgcattttctgccgtgtatactctgcaccggattttcctgcagcgtaaataataaagaaaaaaaataattatttgtttccaaaaaaaaaaaaaaatttggcaaggactattcagtttgcatggtcattttcccagtttattcattgaattatgtaattggattatttgtgctacacttccttgtctttggattatttaaacatattatttgcgcttctcaaaatatttttctattttaaaaaaaaaaaaaaaaaaaaaaaaaaaaaaaaaaaaaaaaaaaaaaaaaaaaa

SEQ ID NO: 90166 - DNA, 383 bp, Oryza sativa
  Clone ID: PAT_MRT4530_88861C.1
gcacgagggcggagacggcgatgccgcgcatatggcgtgggtgacggcgcggccactcggcggggaggccaagacgtcggcgaggcagcggccgggcgtgtcggcgcaggcgacggcgcggcggcaaccagactcggctgcgcggcggcgcggccgaggcagaccttaaaagaaaaataaaaaaaacaacctgccgcccgcgccgtgcaacctggaggatcgaggcgggttgttctggtcgatttcggccacgacgggggctgggcagttccaggaggcgcttcgcatgacgggctcggcagggggcagcgcactccgagtccacggcgtcaccaccatgagcaggaaccccgacggctgtcctccatggctcatacgactgc

SEQ ID NO: 90167 - DNA, 366 bp, Oryza sativa
  Clone ID: PAT_MRT4530_88862C.1
cccacatttcttccatccctactcatcaacctcacccctctctccctttctagcttgtgcatcaaactcccatatcaccaacatcaaagatctcatccatatagatcaacctctaccctagctacatcaccctttcttcttccacaccaaattaattaaccctatctctcgatctctccctctcttctttcttccattgcacctagctttcatcttcttctcttcttcttcttcctctccggccatggcgtccaccagcgacagcctcccttcgtcgccgtcactgcccaccaccgccggcctcgacgccgccggtggcggcgaccaagaattctcctcctaccaggaccaccagagtctcttcct

SEQ ID NO: 90168 - DNA, 237 bp, Oryza sativa
  Clone ID: PAT_MRT4530_88863C.1
atggcggctgctggatttggcgcccatggccagatccggtggcccgtgagtggcaccggtgagggagtggtggcagcaagccctcttggcgaggaggcgacagccattaccggagctggccccacgggccaccttcggccgtatctgaccgaagcacagccggtgcagcgaactgacggcggctacattggggcggagcggtggcggcgtggcatgaggaggtgcggccggcggtag

SEQ ID NO: 90169 - DNA, 1293 bp, Oryza sativa
  Clone ID: PAT_MRT4530_88864C.1
atggcgcagtgggacgcgctcgtggacgccgcgctggcgaggctggcgtccaggagcctcctgcgcgccacgcgccccatcgccctcgcgccgccgcccgcgccgccggagaccttcccctgcccaggcccgtgggaccgcgcagccgtcgagatccggctcgaccgcgcaacgctccaccaatggctggctgaaggtggtgaggggagtggccaagaagagaaagtggacgagaaactgattcttttctccgggaatgattacatgggcctcagctcgcatcctgcaattcgccatgccgcagtgaaggcagctgaagagtacggcatgggccctagaggatctgcgttgatttgtggatatactacctatcacaaaatggtggaggaatcgttggcagagctgaagaaaaaggaggattgccttctttgtcccactggattttctgccaatatggctgtaatgacggctctgggaaacatcagctctctgttggctgctgggagaaaacctgcggaggacgaaagaatagcaattttctcagatgctctgaaccatgcttcgatcattgatgggattcgccttgttgagcgacagcaagaagtggtatcatttgtgtacaagcactgtgacatgtcccatcttgaacttttgctatccagttgctcaatggaaaagaaagttgttgtcacagataggcaagttatacatccaagtaaatttcatcatttaagaagcatttattctctgtattacctgttcagcatggatggtgattttgctccattgcctgagcttgtcaagttgcgcagaaagtatgggtttttgttggtgatcgacgatgcacatggaacacttgtttgtggtgagaatggtggtggtgcacctgagctgtttgaatgtgagaatgagattgacataagtgttggcaccttaagcaaggctgctggctgccagggtggttttatagcatgcagtacccgatggaagaggctgattcaatcgcgaggtcgttccttcatattttcaactgctttaccagtgccagtagttgcttctgtgtatgttggaagtgaaaaagcagcacttagagctggaagggatatgctaagatctggatttcatgtcacgccaatccgaccacccacagtaccgcccaactcatgcaggttgcgaataactctcagtgcttctcattcttcggatgacatcaaaaggctggtggatgcgctgacgccgtggctccctcacaaacatgatattcagatatatgctgtggcatcaaagctctaa

SEQ ID NO: 90170 - DNA, 234 bp, Oryza sativa
  Clone ID: PAT_MRT4530_88865C.1
atggggacgaggatttttatacaggttcgggcccctgaattgtcagtcgacaagagggtagtcttcctcctcgaatccgtgcccggcgagatcagagatagcgctttcgtctctcctgacagtatccagagacaccataggggactaaccgtgcttatccctgaagtcgatatctgccggcgtcttgtcttggcctatgttggcttgtatgttgtggcttctgttgttctgtag

SEQ ID NO: 90171 - DNA, 511 bp, Oryza sativa
  Clone ID: PAT_MRT4530_88866C.1
gcaaatgtattaggtatttgatcaagaactcaatattggtcaatcctctattgctacagaagaatgaatgccttaccaagaaacctctcaattccttttctcagatcgagttgagtctctctcactatctatacattctacggatgattttttttctctctcttttttttttcaaaaaattctatgccaagattgactttatcaagaacagccaggcagatctggccaattacctgttgaatcgtatgatcaattagctcggactcgtgggaagtagaagtggctgttacttaggagatcttggcgccgacggcatggaccgccgggtcggccctgcctggacgggaacgggctccttcttttccaccacggccgggggttcctcctggccgttgttccgcagccggggacggcagcgagggccccttcaggttgcatcggacgcgaaaggaggtgcggagaacgatggccggtacggcgacggcaagtgcggcgaggaggtcggggttgg

SEQ ID NO: 90172 - DNA, 999 bp, Oryza sativa
  Clone ID: PAT_MRT4530_88867C.1
atggattgcgagggggcggcggcggcggagatctaccggctgccggaggagtgcgtggcgtacgccatctcgatgacgacgccgggcgacgcgtgccactcgtcggccgtgtcgccggcgttccgggccgccgccgactccgacgccgtctgggacagcttcctcccccccgaccacgccgccatcctcgcccgcgccgacgacggtatcgccgccgccggcgaatgcgcctccaagaaggacctcttcgcccgcctctgcggccgccccgtcctcctcgacgacgccaccatgagctttgggttggatcgacggagcggcgcgaaatgcgtgatgctgtcggcgagggcgctgagcatcgcgtggggagacgatccctcgcgctggagatggactcctggcctccccggatcaaggttccctgaggtggcggagctcttggacgtgtgctggctggagatcaccggcaagctgcagctctcgctcctctctccggcgacgacgtacgccgcctacctcgtctactccttcgccgactacaccaccggcctcgagtgcaacatcggcatgccgactcccatggccacggtgaccgtcgtctccggcgccggcgggacgacgagcaggccgccggcggcgccggcgaccacgacgacgacggagcagcacaagatctgcctgcagcacatgggggaggaggagacgatcatgcaccggcaggagctggtgatccgcctccgcaaggccttcggccggacggtgaggttcgatcccgacatggacatcaggtgcccgcggccgagggacggcggcggcggcggcggcgggtggagggaggtcgagctgggcgagttcgctgtgccggccgccggcggcgaggatggcgtggtggaggtgagcttcaaggaggagactgggcggtggaagacggggctcatcgtgcaaggcatcgagctaaggcccaaatgcaccagcaaattaattaaactcgatagctag

SEQ ID NO: 90173 - DNA, 393 bp, Oryza sativa
  Clone ID: PAT_MRT4530_88868C.1
atggcggcggcggggctttctcgcagtggcgccgtttctctgcgcgagggaagcgacagtcgccggggaggggggggaggggggttcttcaggcagggcggcggcagatctggcaccaccgccgccggatctacaacggcagagaccgaaagtggggcatggtggcaggcggtagccttccagctgggtgcgaacggtggccgtgtcctattctctttgttggaggtggacagctgcggcagcaaccttagcttctacccaggccataggggaggattaggcaagggtgtaatgactggcctcagtgtgggaagcaggcgccgacaagggtgtcaaggaagtgcgacctttctttcaagaaggagatttcatcgatggaggatcgaggtatag

SEQ ID NO: 90174 - DNA, 191 bp, Oryza sativa
  Clone ID: PAT_MRT4530_88869C.1
tgttgtgaccaggtcgacggctaggagctgcggttgttttttttagctcgaggtccgggaagtgcactcttaccacgagttcgacggctacgaaaggcctattgtagctggctgcgtgatcaaggcgctcgtgaacctcatgggcattcttggcatgaatcgctggtattataagtgggtggacgggatct

SEQ ID NO: 90175 - DNA, 424 bp, Oryza sativa
  Clone ID: PAT_MRT4530_8886C.1
gcgtcacaggctgcagtatggttggtggttggatatttggtggagcaggataacaaatgtgtgcaaacaactaagggaaacaagctgatggaccacaatggattagacaagcacataagcatgctgaatgacagactgcaacctgataggggatatagcctgggtgacagcactggcaaggtacacagggtgcacaggaaatgtgcccacaggggtgctagacacacaacaggcagtgcacagaataatatgttgtgtgcacacacaatgcaatgcaaatagtctggaaaaggttgtgggaggcaaaatggttgcttttgcccacacaggcacaacatggtgcccacatggcacttgatgttatgcagtggctcctcgtccaatggagtaaggggggaaaatgaaaggacgatacgcgaacgta

SEQ ID NO: 90176 - DNA, 2306 bp, Oryza sativa
  Clone ID: PAT_MRT4530_88870C.1
gccatgctatagactatgctcaacagcagaagttaacctgagaacttttagatcctgctttagacatttgatattgagacagaaatcatgtcctgtagatagtgaagtttggtcatgccatgcctgacatcttgtaaaactgaaactgaatagtttacttctttatttatttttttttgaagaaaactgaaacagaatagttacatacttacatttgctcctgcaaactttctatattttactcaatggtagatcatgtattcaagtgaagtttacatagtctgaactctgaaggtttatacctggacagaactgtgtccaggtgtcttctctatacctctgcttcccattagtcctctaacatgttcgacatcatcccattgactttcttcagcatgtaagtttgaaacgagcacatgcactcccacatcattaggagctacgttaacgatatgctgtccaattacctttcctagatccattctgtgatgaactctacaagcagcaagaagtgatccccaaattacaggattgggttctattggcatcttcttgataaagtgaaatgcctcgtctaacataccagctctccccaggaggtctactatgcaaccatagtgctcagtatcagggacaacaccaaggcttgacatcaaatagaagtaacggagaccttcatcaaccattcctacatgtgcacaggcaccaagaactgccttaagagtaatgccgtccggttttggatcctgtaactccagcatttgatcaaagagctccactgcttcttttccataaccattgcttgcaagacctccaatcatggcattccatgagagggtctgcttatgctgcatttttctaaatatttcagaagcagtgtcaatgcagccacattttgcatacatatccaccagggcactttctaggcacaaatctttggctacattcatctcttctatataagagtgtatctctcttcctttatcaagtgctcccagctgtgaacaagcagaaagtagactaaccagtgccatttcatgtgccacgacttctgcaatcttcatttcttcaaataggttgaaggccattgtaaattgatgtcccttcacataaccacaaaccataactgtccaggaaacaacatccttttttgtcatagtttgaaaaaccctttcagctgcagccatatcaccacatttggcatacatgttgatcaaagaatttgtaaggatattgtcacaacagatcccattatctttgatataactgtgaacatgcatgcctttccgcaactcaccaagttgagcacatgctgataagacacttacaagcgttataccatctggagttacgccatgcaacagcatctcttcaaatattcttagcgcttctttgtgctcatgattttgcacaaagccatcgatcaacgtattccatgatttagtatatcttgcaggcatggcttgaaatgcttctaaagcatcagacaagcatccacatttcgtgtacatgcttatgagagcattcctgatatccacatctgcctcgataccaaatttaccaacctgattgtacacccaccggccttcatcaacagcctgtgtttggccacaagcagaaagcaggcttataatcgtgaccttgttaggaataattccttctgcttgcatctcagaaagcatctttagcactttgtcccagtgaccacactgtgcacaagctgatatcattgacgtccaagacaccacgtccctctcatacatttcctcgaaaaccttgcttgcttcctcaacacttctaaaggcaccataataattaacaagacctgacatgacgaacacatccgatgtaaacccaatcctccgaaccagcgcatgaattgcgtccccatttgaccgccacttcaagccagcaaaggcagcactcgccgacacgaccgctgccatagtgtaattatcaggagagactcccctccgacgcatttccctgaacaccgccaatgcatcccggggggcttcgcagctgctgtaccctctaatcatgcagttccacacgaacgcgttcggttgggccattccgtcgaacaccttgcgcgcgtaccgcatgtcatgcctcgccgcgggggacgcgaggagggcgatgagccggccggcgacgaagctgtcggaggtgaggtgggcccggacgagccggccgtggagctccgccaggtgggcccgcgaggcgcaggcgtcgaggtaggcgaggaggtggtggcggataggccgagcctggcttgcgttgccgtggaagtagaggtaacgcat

SEQ ID NO: 90177 - DNA, 696 bp, Oryza sativa
  Clone ID: PAT_MRT4530_88871C.1
tcaatggcgcggctcagcacggcggctagcggcggctagcggcgaccggagcggcggcagcagtggcggagagcggggcgacggcgctagggtgttagagggcacgggaaagctcggcgagatggggaaaaagagagagggggtggcggtggagcttaaataagggaggaggagctcggacgtggccggtagaggcgggaatcgccggccgacgtggggagtggaggaggagagagaggcgggattcgaaatttgaatcccggccatctcgggcgcgggcgcgagcgggagagatggggaagtgggtggggggaacgcgggcgcgagggcgacgtgggcgacgtggcccgggaggcgcgggagcggggcgcggcggcggttgagggcgcggcggctccggctggaggaaggggacgggcccgacaggtgggccccaccaggccatcccgccgccgggccgcctggttgcgcctcgacgggccttctcgccgcctggccgctcctcgccgcgcggccgccccggctggcctcaccgcacggggccacctcgccgcctcgccgctccgcatcccgccgcctggtcgcgccgcgccgccaccccggctggccgcgctgcatcgtgccaccccgccgcctggccgcgccgccgccgcacaggcgcgccatcaccggccggcggccacacatggcaagtag

SEQ ID NO: 90178 - DNA, 651 bp, Oryza sativa
  Clone ID: PAT_MRT4530_88872C.1
atgactccatcgttgttacatgtcaagatgctaacaagtctgaatgtcacgacttccatcaaccccttcaaactggacattaagtgtaaaacagatccatggaggttggaaaggatacatagcagaatatcaaggcacatgatctgtttccttaagggaacatgttgcattcctggccatgtggttagaaagagatgtattatgtggttcaacctatgggccaactgcaaactatcagcactttgctcaatttttggtttagaagaagcatattcctctaaggaaatatctgcttggctcagtttatcgaatgcttcactctgttgcttgcaatatttagaagataaagtaatcaattatggaggtccttggtggttcatgcagctgtggattaacatgtacacaaggccatcattagctttgtcagctttcccaacaacttatactgatgatgaagatgtcagcacaagaagaaaggagacaatccaatacaacttcagcgcatcgccacccttttcgcttttacttttcgacgagttcgcttcgcaagaggacaagtgccctcgtggccaggttgtcatcttccgcctctcatcgaaagatcgtgacagaaaccctcacgggtcccatcatttagtagtgatactatag

SEQ ID NO: 90179 - DNA, 1151 bp, Oryza sativa
  Clone ID: PAT_MRT4530_88873C.1
gctccattcagtttgcttagcgagttaggggggaaaaaagctacgaggttttcttggatcatccgacgaactcgagtgattgattgatttacccaagtctgttattgtagtgatttacccgaggttttttgttttcgttttcgttcttgcgaggggtgggtgagagattacaggggggattttctccgacttggaaggagcagagaaagatttgcgtttagaagatctgaggtcaggttactccactaatttctaccacgaaacagagtagagtaggatttgacatcggaaggggaaacaaaaatggcaattggacaggcgaagacgaagagctctctctccacgagcttgagcttctcttgcagcagcacgaggatcctggggaggaagagggtcgccgtctcgccggctccgcccccctccggcggcccgcactcgccggtgcggactctccgcaagcagcggagcaccaggctccacatggacgacgccgtcagcctgctcgaatcactgcctcaagatgtcttgattaaggtcttgtgcaaggtgaaccacagtgacctgaggccgctgctcctagtgtcaaaacaagttagcgaagcaacggtggttgcgagagagcagcatttcgcgtttgcgacgccatcctcgaaggccgccttgagaggcggcgaggaggaagaagaagctcccggggcgcccaagctgcaacgcagggttgcgaggtcgtcgcccgtctggggcaagaaccttgccagcatcagcgtcaacctgttcgaggcgttcgaatcggaggttgtagagatgtaaatattattacaggacacgcgcttcagtttcagcaattcagcttatactttgctcgtgtatattttcatccttttagtgttcttagtgttaggttataaaatgttaggagtgcattttgtagctcacgtcaaacagaggagaaaaaaaacttaggtagtgatactgttattaatctcatactagtagcatgtgttaggagtagctataaatggtcgttcttcaatgctgtgattgaagagaacacgacgccttgtgtaataagtttcatataagcatcgaatgcatgaattatcaggagatctctcttcaaaaaaaaaaaaaaaggggggggggaaaaaaaa

SEQ ID NO: 90180 - DNA, 438 bp, Oryza sativa
  Clone ID: PAT_MRT4530_88874C.1
ttttgttttttttttttttttttttttttttttttttttttttttttttttttttttttttttttattttttttttttggtatctgggcttatttttaacttccgaaccacaatattgggaaaattcagtacaagacaccgccaaggggggggaggctatcgggggccctataggaccaaggggggataccatatgtagatgggaaggtaaaagccaacagggcttgggcttgagccaaattccgggcaatggaaaaattgccaaactgctggaggggtaactggggccctatggcctggacaacgttaatgtcccgggagggagaatggtgccccaccagcctgagctgttgcaagacttgggtggttctcaattgaaacccaactgattgcaaaaaggggcttgccccaaagctatactggtgccttacgaactca

SEQ ID NO: 90181 - DNA, 432 bp, Oryza sativa
  Clone ID: PAT_MRT4530_88875C.1
atgtgctgtgccatccttcaggtctcgtaccaccgaacatccgaacagcagtcagatgttgataccggaaccaacaaccatcagtccaacacagacgttgctcccgtgagctcgcatgcggcgcgaaatctttacacgggagacaagcgcgcaacgcagatcagcataacgacgacggggacgagagcaagcgggtgcagccgcaggcccgcagcgcagctctgctccgagtcgacaggacggtgcgcgctacgggcgaaccaaaaccaaggcgcgatcccgagaactgtcgacccgcgcggcctcgtgcagcgccatgatgcgccgcatgtcaccttgatgagaattttaagcggagcattggcgcatgggcagggggcgaaagtgaaagtatccgatgactcacgcaccgaacaagtcagaaaatgtgag

SEQ ID NO: 90182 - DNA, 213 bp, Oryza sativa
  Clone ID: PAT_MRT4530_88876C.1
cggacctcgcccctgcgaggagacccgctgcgaactcccgtctcctcaccgctcccgggagatgcccttcctaccctcggcccctcgcctctctcccacggcggcgcccactcgtcgatccgctccaccggccgccatcgaccggcgggcggggaggtccgcgacggcagggaggagctcggcggcctcgaagaggaggggggcgagccagtc

SEQ ID NO: 90183 - DNA, 622 bp, Oryza sativa
  Clone ID: PAT_MRT4530_88877C.1
tcactcctcgctctcccgccgcgagcgcgcgctctctctcgccgcgaccacgcgcaatccgtcgccgagctcgaggacgtcggcaatggcgcggccgcagcagcggtatcgcggcgtgcggcagcgccactggggctcatgggtctccgagatccgccaccctctcctgtagtccagcgtcgccctgggcacgttcgagacggcggaggacgcggcacgcgcgtacgacgaggcggcgcggatcatgtgcggcccgcgcgtgcgcaccaacttcccccacgacgtcgccgacgaggccgcgccgccgccgccgccgcacagcgccgccgcagcctcctcgtcgttcctctccgcggcgctcgtcgccaagctccaccgcttcaacctcgcctccgtccaggctgcgcagcgcggcaacagcaacgacgacgactccaccacctcctcctccgccgccgcgtcgtcgcgcgccgtgattccgtcccttcccgccgccgccggcgcattgggcaatgcggcggcgacggcggagtggagcggcgggttcctcgaggagcagtacgtggaccagatgatcgaggagctcctcgactccaacttctccatggagatctcctgctga

SEQ ID NO: 90184 - DNA, 209 bp, Oryza sativa
  Clone ID: PAT_MRT4530_88878C.1
gggccaataaaaaatccactcaaaaaatggttcacaaagcaaaagaaaaaattcaacatatcaggggggtttatctagccaaatggcccgatcaacgccccttcgagccagggggaccaaaccattaccctgactaaaaccatagggaaaaacccgggttttacaagaagaaccgggaggccactcaaaacaattgggggggggtgggg

SEQ ID NO: 90185 - DNA, 387 bp, Oryza sativa
  Clone ID: PAT_MRT4530_88879C.1
cggccggaatgcccggccgacccacgcgcccgggtgattctccacgcctcggcccatctcccggggggtttgttaagacagtgatgcctttacgccctccccccctctggatggggcgctgacctcggcgctcccctaccggtcctcccctcgtcaccaccttcacctgcacgacgccgacgggtgcggcggtggcggcggccaggagggcggcgccccggtgcgactactccacgggggagagggtgcggaacgccccggtcccgctgcgcagcgggacgggccggacgtccgacatcacgggcggctagaagcgcaaggcggacgggcggtccgacacgggggacctgcactggcggaggcgccccctcggtactggcggttgcg

SEQ ID NO: 90186 - DNA, 210 bp, Oryza sativa
  Clone ID: PAT_MRT4530_8887C.1
atggcagcagcacccggcgtgggcggtggatgcgtcggcgcagtcgcgcgtacgacggcagaggcagtgcgccacaatgggtcggtgtcaatcggcgtcgggcagcatcgccgatcggaagacgagaaaacaatcaagacgagaagtcaagtctgtttcgtgtgcggctgcggcgtgtgcgcgtccaaaatctcgcctttagcttcgtga

SEQ ID NO: 90187 - DNA, 1227 bp, Oryza sativa
  Clone ID: PAT_MRT4530_88880C.1
atgtcgcaaaatcatgagttcagtacggactcaggagcacttagaaattcagtttgcactctagaattctttcatatggaatctccaatgttagaccagtacaggaagcctgaagcaaagaagcagcaggctgcttttagcttatcctacactgagcacatttttggttactctatttggggttttgggcaccgtcctgcaggtcgtggagtatgcgcaatgagcacttcatggagggataaacaacagccaagcctcatcaactttattgctgcattcttagctgcaaactcataccgcctaaacttcctgtcaatatctcctgactttatattcaacaatggggagctatctgttgcatttatctttgagacaaactgggattgtcaaaatgaaggtgctgtctttagcagggtgaatatgctgaagaggcagttaaaacatctatatgttgttgttgctgttcctacaaaagagcaaaacgaatcatttaatcgatcatatcacaagtatggtatgaagcttggctttcctacgtttgtgcctgttactgatccggagatggggttcgagaaaatcgtgaagatagctcatgcacttggagtatgcaagcagcaagacattatctcaagactgaagaatgagcgggagcaagcagttcagtgcactgattcctttctacgtgtgctcacctctattcctggtattgacaatcatgacgccaatgcgcttgcccaagctattgggtctattgaagcaattgcaaaagcatccaagaaatttattctagaaaacactgacctttccacggataaggcagagacaattgtcaggttcttcagagatccgcagtactacttaagccctaaaattaactagttacaggcagaaggtgattgtgaacctgagctatggactgaatcaactgggcggactgactgcctgcggaagcctgtgcacagcttctttatccttgtggttgctatattgttacgtagtatttttagaccattaatactctgtgtcagagagaatcctgaggcttctgcttagttgtgagttgcgactcctcaaaggctcctgattgcgttgggtcagcaggcagtcttttgatcttaactagatggaaaaagagaaacaaagtctacttatatagcaatcactgttaaatgtcctgctaaattgattgtcccaaatcaagcgcaatgctagctatgtttacttccc

SEQ ID NO: 90188 - DNA, 319 bp, Oryza sativa
  Clone ID: PAT_MRT4530_88881C.1
cttggcaacaaaaaaaagccctttaattaatcggagggggaaaaaagggggaaacccaccgttttttctacgggggaaggaacatttttgtttttacagggggccctgggaacccccatcccaccccgcaaggatggtttgaagccccggaacaggaggccttaaaagggggtccaggaacttttcggaagggaaaataaaggccatcctgcccttgacacaacactttttaacttcggggggggggacaagcggaacaaagcctccccaaccactgggggaatcccgatcaactgaagcctgggaagcttgggagaaa

SEQ ID NO: 90189 - DNA, 231 bp, Oryza sativa
  Clone ID: PAT_MRT4530_88882C.1
atggacgcctcgcctgacgcgtcaagccaggtgcgaaacggctactccgcgaacgttcgccaaattctgatctggcgaagctggaaggcggacgcgatggactggcggcacaaccgtgtagataatgacgagcgtggccttggtgtcatcgatcctcgcgaggaacgtggcctcggtgctggaacgccgccaccgcgcgtggtctccccgtccccgatctcccatacctag

SEQ ID NO: 90190 - DNA, 322 bp, Oryza sativa
  unsure (1)..(322): unsure at all n locations
  Clone ID: PAT_MRT4530_88883C.1
naaggcctaccctggaacgggcaggttggaacggctaggcatgcccgtcaantactgancatatgccggattctcgcgancaaccgggacaantgaatgaaaacnacaantntgtcaaactgtgtttancaaggaccgantgaatttancaaatggtcgttgttaggcttganctttttangggtgctgttaccgtcacanattttctttcttgtttttaactagttntgaantgtaanttgctggtanctgtttggtgaantatctatgcgtccttnaccttcctgacaaaaaaaaaaaaaaaaaaaaaaaaaaaaaaaaa

SEQ ID NO: 90191 - DNA, 250 bp, Oryza sativa
  Clone ID: PAT_MRT4530_88884C.1
gttgttcttagctgttgtcttaaatatgaaagacaactttttttctatttatatctcccaaagtttcacatgccccatttaatgttatttaggcttatttttaactactaaccactatactgttaaaactcattacaagacacgcgcctagggtgggaatggtactggcagcatcttagcacctagggtggataccttatgtagatggcacgttaaaagacaacagagcttgaccttggactagatttcg

SEQ ID NO: 90192 - DNA, 543 bp, Oryza sativa
  Clone ID: PAT_MRT4530_88885C.1
atggccccacttgtcatactcactatcctcctccttatctctcttccttccctctcctccgtggcaatggcgactggtgacggaggaagtggtggtaggggcccggggcagcgagatatgcttgggcaaaaatctgccgtaaagacttgtggtatcttagagtttgttagagatagtagtcgtgtccggatcaaatcaactggcacgctaacacacccgaaggcaagctttggacctgcactggagttaagcagatctcccaggcctcgtgttttacgtcaacagacgcccaagcggcacggcgcggtggcagtgatggcagcagcgtcagggttggcgtgtggtcgagaagagaagggagagcatgctcgtcgctcgctattgagacttgtggtggcggcggcggcggccggagcaagtagctcgccgtggcgcggcatgctagccgcggtgcaatcccttgccatcgtcaccctgctgccgcccgccgccgtgcacctcctactgctgccgagaaaacatgggagagagatagacgggtag

SEQ ID NO: 90193 - DNA, 756 bp, Oryza sativa
  unsure (1)..(756): unsure at all n locations
  Clone ID: PAT_MRT4530_88886C.1
aaaaaaaaaaaaaaagtgacacaggctcccattttaaagcgccaattaacgacacttggccatgggaggcagacagatccggcccgcaagggtcttccagaccgtgacggaggagctcaaccacaacattctcggcaagaagtcggtccctacgccgccatggtacaacatcatgcaaaaagtccctcccgccgagaccctcgtccgaaacgtcacccctctaatcaaaccaagccgtgaaagtaccaccaagatcaagaacatcttccgacccctaccaataaggtacttggaggacgaactacgaggcatcttctaccgcgaccatccttgggagcttgcgaggccccgtgttattctcgagttggacggaaggattaccagcactgcgattggtccaagggcttgaaacagcccaacactcccttgacgggcgaaagtgttgtccagtactggatgtggttactcgagaatgggaaggagactgtgggtaatggtaggagaaagagaaaggtaaaatggacaagggtacgagcatacgaccatgtccgccatcaattttatcgtctacgtcaagaggagcagatcgagaagcgagtggctcaagaagaagccaggtacgtaggcgcttactttggccaaccccgcatcgatgtctcccacgcctcgaaagacgcgagttcgagaactggaagctctgngctggaaaggaacagagcgacaggagcagaaccgtaacggagaaattgacgactt

SEQ ID NO: 90194 - DNA, 519 bp, Oryza sativa
  Clone ID: PAT_MRT4530_88887C.1
ggggatgcatggaaagtagatcacatcaacacattcttgagagttcttcctagatatgatttttggatataatagtttgttatcatcataaaaaggagagagaagagagagaaggaccttcaattagaggatatgtttttcttttcttaatatttacagcagtcattatgtaatgttcacaagcctttcttttttctttataatattgtaaaccagtaagaggtatcatagaataaacagcactggacaaatttggaaggacaggctgcaattagaaaaaatgatcgctcttttctattttatttatttatttattttgcaaccaaaggagtaaggacaaccatgacctaccagctctcaaaagctggcttggttcagttggttcaccatgatgtcacaatggaatctttaattttttgcattaacatgcatgattgtaccctagaacgttaaacaaatactcagagcagaaccacacacgtaatgtcaaaacaccgcaaaacaaaaaaaaaaaaaaaa

SEQ ID NO: 90195 - DNA, 487 bp, Oryza sativa
  unsure (1)..(487): unsure at all n locations
  Clone ID: PAT_MRT4530_88888C.1
cccgggtcgaccttgcgtccgcccacttttgcgcatcaacattttcttgggctgtggaatgagtacattaggcatcagtctagcatttcctcaagccccttcttgcaatcagctgtattccaagtaataaacaaccaactcttgcaacagctcacgctgtttgcccaacaatctcactaccatttcattaacattgtcgctgtggataccccaacatctacacctacatcaatacatcgatctctacattgaccaaactctagctcaagctcaagcactcttggcttttaacttgccatctacatatagtatctaccctacgtactatagtacacccactatcattaccacccttgactgaatcttgtactgaattttcacaatattgtaattactaagttaaaatataatctcatgtatcatcgtatgttacatgtgaaacttatggtgatataaatatatataatattatctttcattaaanaaa

SEQ ID NO: 90196 - DNA, 165 bp, Oryza sativa
  Clone ID: PAT_MRT4530_88889C.1
atgaagacgggggaagtctgggtgtggtcggtagagtggaggagctccatcttcgcctccatcccagcgagctccagtatcaaggtgccgctgagcgtcgtgtggcttgaggagacgggaattgaggcgaaggatggtgtgccgtcgtggacgggctcgctgtag

SEQ ID NO: 90197 - DNA, 4825 bp, Oryza sativa
  Clone ID: PAT_MRT4530_8888C.1
atgacaggtttcgacttgccggaaaattttcaagaaaatccagaagtcttcttccgaagcgtaaagccgcgggttgttcccccgcagaagactcttccgacaaagaagccagccgtaccagcgccaccaactttcaagactatggctgacaagaccctccgcgagttcgctgctccctcctctgagaacgtggccactgggccgcaactcaacatgggagacgtggactttgacctgaaatccagcctcattacgatggcgcaggctagcccattctgcggcaagcctaacgaggatgctaatgcacatatgcaatggttcctggagatctgcagcacgtacaccgtaaagggcgtcagtcctgacgtcgtcaggctgcggctgtttccgttttccctcctcgggaaagcgaagcagtggttttatgccaatcgtgccgtgatcaatacctgggacaaatgctcgatagtattcttgtcgaagttctttccgatgggcaagacaaatgcccttcgtgggagaatttcgagcttccagcagacacgtgatgagtccattccagaggcatgggaacgtctgcaggaattggacgaacacgagaagaagccccaaggcaccgtcaaggccttggactcacacgttacgtgtgaagtctgtggcaacacgggtcactctgggaacgactgcccgaaaacccatgaggaggtgatgtacatgggtaacaacaacaataacaacaatgggtatcacccacaaggagccaaaactaccgacgcactcaacaaaaagatggctgccaatgacaagatcttagaaaatataaatgtgaaactagatggctttgcttccgcatttcaaaaccagttgagtttcaataagatgattgaaacccagttggcgcaacttgccgctctagtacttgcaaatgaaactggaaggatcccggggcaacccaaaccctccattgaaaatgttaaggtgatcacgacgaggggaggacatcctcaacaacaagcgaccactaccaacaaccgaggtggtcaagctgacggaggaatgcagcaacgtgatcctccacaaactcccggagaagaagaaggatccgaaggatccgagaaattcgacctggcgctctgcgatcttggggcaagtgtaagtgtcatgcccaaggatgtctttgacaagctcaacttcacggtgttgacaccaacaccgatgcgccttcaattggctgactcatcggttcactacctagctgggatagcggaagacgtaccggtcaagatacgagattgctttatcccggtcgacttcgtggtgctagacatagacactggcaaggagacaccgctcatcctggggcgtccgttcctgagcactgcggaagcaaacattgatgtcggaacgggaagtatccgtttccgcatcaacgggaaggaggagaagttcgagttccagccaaggacggaacaatgctccatgttccgaataaagatgaggtcccgttattggaaaacgccggtaaaacccaagacaccggccaagaaggaagaaaagctggctcagaagaagccgccgcccataccaagaacaaagaagagcttgactcaggcttctcatcaaccggtggcaaatccaccttgtgtctttgaattactgtacccgaacgagtcagaacaaatgaatctacaagcctaccacatgctgaaggaccgggagttcggccacaccagggcgtatgatccagaacttctaagaaaaacaggtgatcttagacccattcggggagatgagttgattatcatgtttgccaaggttaggaagactaaagttgctcctgttaaatatatgattaggcaatggttagaaagtattaagtataatgcccctgttgagtgcacttccttgatcacccgcatagcgaacggacatggagttatcaccactgatcaaatcgagtatatcttcactgtccatccctatgtggatgaaacatatttaatgcaagggcatatacttaagcatggagccgatggctctttgatatactttttcccctgtacaaatgaaatcccgttacccaatgcggggtatcatttgtacaactgtcaggaactaaccattcccctgcagaccatagaagaatctcgtgcaggtacatcctacagggaaacacgcaacaaaccaaggcaaaaacacgaggagtcatcatcatcaacacccatgcagatgtacgaggcggactgggaaccaacgggggatgcacccggttggacccaagcaccacgacacaacacaggaggtatgccatgtttgatccctaccaagctccacatactaaaccttagagtaggaatcaacaaggttactttgggcaaggtaaagcaatgtctcgcgggaatcaggtgtaaggaaataccaacacgtactgtcggccggcgacggcggcgacacgaggagaatctccacgctcggcttggcgatgaggtgggaaggagggggaacttgatctacgccggcagcgatgaccagtcgaggcagagagccaagacgcagcagctgaggtccgcggatgaagctgctcggtgggaaatcccgaggtgcgggaggaagaagcagcggctggcgacagggtcgcagacacagaggtcggagggcgccgcctgccgccggccaccgctgtcgtcgtcgctcacccgcgcgtgacggaggacgatgaggccaccgcgcaacgtcacgggctcatagccatctccgtcttcaccacctccgactccatgctccgatctccacgcctcgcccttaatgctgctgcagccactatctctgcccgtctccctcactcgacttccgcggttgaatcggacggaaccgacgaacacgaggtgtgagtagcatggccactcgtcgtcgatgtggacgaggactgcgtcacacctgaggacgacgacaacccagagcccgagaacgatgacacgctccatctctgtaacatcgtagtcatcgttgagacgcacgtcgacaaccttgagaacatctcccttgccatacagatcccaagcccactcgaccagccgaaagacgccatccgtttggctgtctagtaggctcatcggtttcctcccgcatgccacctctagcaggacgatgccaaagctataaacgtcagactttacgcttgctctgccggtgatcaagcattcagggtcaacatagcctggtgtcccggacactgcagtcattgtccgcatccccacagtgtggtcaatgaaccttgcgagcccaaagtcgcctagcttggcattgaagaactcgtcaagcatgacattgctcggcttgatatcacggtgcacaacacattgcccccactcctcatgaaggtagaagagggctgatccaatcccaagaacaatcttgaccctcattggccatgtgaggaaggtgccattgccgtggagatggatgtcaagactacggttggggacaagctcgtaaataagcaggagttcatcgcggccatggcaccagcctatgagctgcacgagattgcggtggcgtagtcggcttatcaccttgatctccgacttatactccttcctcccttgcttggaggaatctttggcgaagcgtttaatggcgacggcgaggccctgttctctcaggtagcctcggtacaccgcgccaaagccgccttgcccgagcttctcttccgccgcgaagctcttggtggcctcaacgagctcatagtatgggaaccgtcttggcccagtccccatctcgatctccacgatgggctcgccgtcgtcgtctaagctgtccgagcttatgtcctgctcatcctctgcctccctccttttcttgcacgccaactgtggctcccgctacaactccgccacgtctggaatgcgacgttatcggggtcagggaaggcggtggtggtgacggtgacgacggcggcggcggagatgctacttttgctgccagcttctgctcgaacgacgaactcgacttgaagtaccaagaagtcagctgatgctgctcataggctgagccaattgatgccgagaagccgacggtgatgttctccggcaaggctctcttgagatcaaccatggagctaaggttgtaatccggccggtgacgggggccactaagcccatagccgaggtgcagcctcatggccaggatgctggacacgttgtcgtactcgacgacggcggtcatgttcccgacgagggtgaagctgggcaaggtcaaggtcgtcttggactcgacggagttgacgtcgacgccgaggtggtcgtaggtggcgtcggggtcgtgcacgatggtgtcgttgaaggtgtcgaactccacggcgacgaaccggtcgtcgccggcggccacctggtcggcggtctggttggtgaggccgaggttttcgccaccttcgtggcccactggtaacctcgatggatagctggtgaggaagaaggccataccgtcgccctttttgcttctatcgctcggagcgataatgttgaaggagaagcgcgtggtgaagctggccacctcgccggtggcggcgtcccagagctgcaccggcggcgcgtacaccacccgtccggcgctgttgcccatgtcccgacacactgttcgcgcttatgtcgacatacccgacgctgacagaggcttggccttgaatgtcgatgttctgattgtctgaggaggcgaaggtggggtagttgaaggacaaggcggcgacaggagccggaggctgcatgtagcagacggagaagaaggtgacgaggccggcagcgcaagtgatcaacgaaaagccggccat

SEQ ID NO: 90198 - DNA, 310 bp, Oryza sativa
  Clone ID: PAT_MRT4530_88890C.1
aagggagccaaatttcatactatttaagagctgccttgatggagtacaaccaaagaccccacccatcaatatgaaaaagaaaaggggttctgaatccgggagagccccatcaaaaagggggggacacttggggcttatttaaacagttaattgggaataatttttagaactgggcccaacagccattaatagaggcccccattagtgacccaatacaaaaacgggtcggaggaaggagggggtttttataacgaacctcttacatgcagcaggctggcattaaccggaggcggaagggacaaggaggagg

SEQ ID NO: 90199 - DNA, 110 bp, Oryza sativa
  Clone ID: PAT_MRT4530_88891C.1
cttaaatctcaactatgaattgagattatcaaatttcgtggctattcctgctattgagttacatatcttttacaggcaataccaggccagtgaaataataattagtctat

SEQ ID NO: 90200 - DNA, 440 bp, Oryza sativa
  unsure (1)..(440): unsure at all n locations
  Clone ID: PAT_MRT4530_88892C.1
nacggttcatnggggtcacggagtcaancaggcgattatccnttcttgatccgctaccgcntataatagtgatataaggggaagttaccacaggangtcagtgttnttagggtgttattatggaggaggcgtttctccagttgttgtttggtcgcgaaatgggancagtgaacagtggtttgcgctgtntatcgtgcaggagggacaggaaagtgtcagagtgcctgagtgagtctgcaaagccacagtgagtttgcttgggttgggatttgccccctcgatgttgggttgctgtgttgagatcttggagagattgtttttccatgggggttgtgaattaatgtggcctgcataatgctgtggnatgcccccagattatcaantaatcaaacactggaaaagaaaatcatttttttgcccaaaaaaaaaaaaaaaaaaaa

SEQ ID NO: 90201 - DNA, 1260 bp, Oryza sativa
  Clone ID: PAT_MRT4530_88893C.1
atgcgcgcggcgatcgaacagctgagagtccaggcggcggcgcgcgcgcgggggccggcggggcggtggatccaccgaggcgcgcgcgactaccgacggggcggacagggggatcggtcggccagccgaccggccaccgaggcgggagaggcgcgcgcatacaccaacaaaggaacacagacgagatcgccctacagcaagggggtgccaaaacgacgtcttcaagaagagaagcgacggaagaccgccgccgccgtccatcagggctcaaaggagccaagactgggctttcgcccggcaatcacccttgagggccttcgtgcgccgaagaccgtgccacacccaccggcagctccaccacgcaccgaggtcgcctcttccaccaccagccgcgcctctcgcgccaagccggtctcctccaccggacgcgcctctcgcgccaatccggcctccctccatcggctgcgcctctcgcgccaagccggcctccatctccgccgcccgcgcctctcgcgccgagccggcctccgctgccatcggctacgccactctgtgtccagccggtctccgacccctcctccaaacaatgctgcgctagccgatgcaaccgtctgccacgccctcggcaagccgtccgaggccgccatgcctcctcccaccaccgtcacggtcaccacctcaccgtcgccgccgtcacctcacacccaactccttccccgcctccactgccgcatccttcgacgttgccaccgtctcctcagtcacggccgctgcaagtcggccgccgtcgctgatgccgctgttactagccacgacgccagcagtcgtcattgcaaaccgccggcaccgccaacgcaaccgccccaacgccgtcgccgagctctccgctgccgtcgcgaccaccaccgaggcaaaaccatctccagcgcctggatccggtcgccgatgccagcctcaccgctagatccggcctccgtcgccaacctcaccgccacctccatccccgccgccatctccaaccccgccgccgacgcccccagcaagagaagcagcatgccaccagcacgcacgccatccctgtcgccgtcgccgcctcccccgccaccgtcgtcgccttcctcggcgccagccaccaccaactgccgccgccaccccaccaccttccatccccgccgccaccaccaccaactgctgccaccacctcacaccgacccaccaccggcggccttcccgccagatccggccacggcggcccggatc

SEQ ID NO: 90202 - DNA, 279 bp, Oryza sativa
  Clone ID: PAT_MRT4530_88894C.1
atgaaattggatgtggtggtcacctctgctataaaacttgccctaaagaagaatcaacgtatggacccaaatgcaaaagacctcgcgaatgcgctgctgtctgtttggtggcgcactgctgtagcgcagtgtgtagcaccacacaccggcacggggaacgcaaagcgcaacgggtcgagcatgggcgccgagccgccgagaagcaaccggctgctgcaacaaagcggcatccatcgaacgaaccctttcgatccaccgccgcacgggagccccgcgcca

SEQ ID NO: 90203 - DNA, 1923 bp, Oryza sativa
  Clone ID: PAT_MRT4530_88895C.1
atggggaagctgtgttgcagccagacggacgacgatccggagttcaacctgctggggctgctcgtcgccgtcgtcctcgcgttgctgctgctgatgctgtgcacgccgccgcggcgcaggcgctgcgtgcaagggggtgccaaaacgacgtcttcaaaaagagaagcgacggaagaccgccgccgccgtccatcagggctcaaaggagccaagactgggctttcgcccgccaaggccgggttaggttttcacccgccgctcaccatctgcgaatctacggctgatgcaccgatgctccaccaccactcaaactctgctgacatgtggggcccctgcaccgacgctcccgccggccagccttcgtgcgccgaagaccgcgccacacccaccggcagctccaccatgcaccgaggcgcctcttccaccgccggccgcgcctctcgcgccaagccggcctcctccaccggacgcgcctctcgcgccaatccggcctccctccatcagctgcgcctctcgcgccaagccggcctctatctccgccgcccgcgcttctcgcgccgagccggcctccgctgccatcggctacaccactctgcgtccagccggtctccgacccctccttcaaacgatgctgcgccggccgatgcagtcgtctgccacgccctcggcaagccgtccgaggccgccatgcctcctcccaccaccgtcacggtcaccacctcaccgtcgctgccgtcacctcacacccaactccttccccacctccactgccacatccttcgacgtcgccaccgtctcctcagtcacggccgctgcaagtcggctgccgtcgccgatgccgctatcaccagccaccgacgccagcagttgtcgtcgcaaaccgctggcactgccaacgcaaccgccccaacgccatcgccgagctctccgctgtcgtcgcaaccgccaccggggcaaaaccatctccagcgcctggatctggtcgccaatgccagcctcgccgccagatccggcctccgtcgcaagcctcgccgccacctccatccccgcaccatctccaaccccactatcgacgcccccagcaagagaagcagcacgccgccagcacgcacgccatccctatcgccattgccgtctcccccgccaccgtcgttgccttccccggcgccagccgccaccaattgctgccaccaccccgccacctttaatccccgccgccaccaccaccaactgccaccgccacctcacaccgacccgccgccggcggcctccccgccagatccggccgtggcggcccggatctgggcggcatatgtaggttttgcaagtgatatcaatgctatagtagttgtatttagaggaactcaagagaacagcattcagaactggatagaggacttgctatggaaacaacttgatcttgactaccctggtatgcctgaagcaatggtgaactatgggctagatggtgtgaagctaatgacatttgggcagcctcggattggcaatgctgcttttgcttcctttttcaagaaatacttgcctcacgcaatccgagttacccatggtcatgatatcgtgcctcacctgccaccatacttctcattcttcccacagaagacctaccatcatttcccaagagaggtatgggttcataacgtcggactaggaagcctagtgtactcggtagagcagatctgtgatgattctggtgaagacccatcgtgctgcaggtctgtgagtgggagcagcgtgcaagaccacatatactatctcggcgtcagcatgcacgccgaggcatggagctcctgcaggatcgtcatggactacagcaagctgcgttaccggatggacatcaatggcaacatcgtcttgtcaaagcatctgggtttgtcaggtgacctagaacacagtgaccaatga

SEQ ID NO: 90204 - DNA, 1305 bp, Oryza sativa
  Clone ID: PAT_MRT4530_88896C.1
atgggccaagcccatactctattcgttcttctctccctcccttgttcgttcttctcttcctcacgaccgctggtggcggcggcgacgacggctgcggcggcggcgcggagctgctgcgagggcggagcggcggcggcggctccccgttctgcacgtggctgccaccagctcgtgaccggctgcgccgttgagtctcctccgcgcgaggggccagtgcggctccctcctccacccgcgccgcctccgcttctctgttgcgccagtagcagccgcaaagcccgaggccgtcggttccatttacaaaaacataaaatgttttcattttcaaccttcgcagcactgccgccctcgcagcagctctgcgccgccgccagcggtccgtcaaatagcatggcgctggatttagacacctcagcgccaaatagcgtggcgctgaatgcacactggcacgccgactcagactcccatccgcggtggcacggcattcaacgctgtcggagaatgaactccttcaccagggaaccgcggcggccccagcccagcgccccactggcgtctcccgccccgtcgtctcctccccgccctcgctccgtcgccgcggccgccgcctacggttacggcggcgacgtgctgatgaggcccttcgacacgcagacgctcctcatctccgccgccgtcgtctccgccgtctccctctccctcgtcctcggcctcaagaccaacaaaggaacacagatgaaatcgccctacagcaacggggtgccgaaacgacgtcttcaagaagagaagcgacggaagaccgccgccgccgtccatcagggctcaaaggagccaagactgggctttcgcccggcaatcacccttgagggccggtctccgacccctcctccaaacgatgctgcgccggtcgatgcagccgtctgccacgccctcggcaagccgtccgaggctgccatgcctcctcccaccaccgtcacggtcaccacctcaccgtcgtcgccgtcacctcacacccaactccttccccgcctccactgccgcatccttcgacgtcgccaccgtctcctcagtcacggccgctgcaagtcggccgccgtcgctgatgccgctgtcaaacgggagagtcagatagatctgcgccgtccagcaccgatccgacggttgctagatgagaggggtagtttggtaatttggcgggaggaaatatctgcgttggcggtggggccgggggggaggcggtcggtgcgtgtgtgttatataaaaagggaagacatgtactacaagctgactgatcattttgtttat

SEQ ID NO: 90205 - DNA, 1590 bp, Oryza sativa
  Clone ID: PAT_MRT4530_88897C.1
atggcccatcgtgccttcgggccggcccggcatggcccgaggcgtgttgggccgtgcctgggctgtgagtgcggcacgtgggctggcacggcacggcccggtgcgtcggtcgggccgtgccggcccgacaagcctcggcccaggcacggccgggcctgggccgtgccgtgccgggcggcccacatggccatctatagttgggggtcttggggatttgtgggagacggaaaaaaatacaagattacaaccctggagggtcataaccaggagaaaggaaaaaaatataccaccacccactacggccaggagaagcaaggagggtgccaaaacgatgtcttcaagaagagaagcgacggaaaaccgccaccgccgtccatcagggctcaaaggagccaagactgggctttcgcccggcaatcacccttgaggggtgagacaacacgacaacgccctcaggagggagaattaaccatcgttgtcggtccggccaacgccgggctgggttttcacccgccgctcaccacctacgaatctacggctgatgcaccgatgctccaccaccactcaaactctgccgacatgtggggcccctgcaccgacgcccctcgccagccagccttcgtgcgccgaagaccgcgccacacccaccggcagctccaccacgcaccgaggctgcgcctctcgtgccaagctagcctccatctccgccgcccacgcctctcgcgccgagccggcctccgctaccatcggctatgccactctgcgtccagccggtctccgacccctcctccaaatgatgctgcgccggccgatgcagccatctaccacgccctcggcaagccgtccgaggccgccatgcctcctcccaccaccgtcacggtcaccatcacctcaccgtcgccgccgtcacctcacacccaactccttccccgcctccactgccgcatccttcaacgttgccaccgtctcctcaatcacggccgctgcaagtcggccgccgtcgccgatgccgctatcaccagccaccgacgccagcagcaattgtcgcaaaccgccgtcaccgccaacgcagccaccccaacaccgtcgccgagctctccgctgccgtctcgaccgccactagctgccgcgaccgcccccagccgcccaggcgaggccgtgggcgccagatccgtggcaaaatccagcgcctggatccggccgccgatgccagcctcgccgccagatccggcctccgtcgctagcctcgccgccacctccatccctgccgccatctccaaccccgccgccgacgcccccagcaagagaagcagcacgccgccagcacgcatgccatccccgtcaccgtcgccatctccctcgccaccgtcgtcgccttcctcggtgccagccgccaccaactaccgccgccaccccgccaccttcaatccccgccgccaccaccaccaactgccgccgccacctcacactgacccgccgccggcggcctccccgccagatccggccgcggcagcccggatctgggcggttttcgccgtcccgcgcgcggccccccaccgcgacgggagagggagacgaagacgagggtga

SEQ ID NO: 90206 - DNA, 321 bp, Oryza sativa
  Clone ID: PAT_MRT4530_88898C.1
tcacctcacacccaactccttccccgcctccactgccgcatccttcgacattgccaccgtctcctcagtcacggccactgcaagtcggccgccgtcgccgatgccgctgtcaccagccaccgacgccagcagtcgtcgtcgcaaaccgccgacaccgccaacgcaaccgccccaacgccgtcgtcgagctctccgctgccgtcgtgaccgccactggggcaaaaccatctccagcgcctggatccggtcgccgatgccagcatcactgctagatccgacctccgtcgccagcctcgccgccacctccatccccgccgccat

SEQ ID NO: 90207 - DNA, 114 bp, Oryza sativa
  Clone ID: PAT_MRT4530_88899C.1
atgaagaacggtggggccaccgaggggaaatctctaggattcgccgaggtctatctggcgcgaggagggcgaggaatgggaaatatcagggagcagaaggcggagtacgactag

SEQ ID NO: 90208 - DNA, 360 bp, Oryza sativa
  Clone ID: PAT_MRT4530_8889C.1
atgcttacgttcacgatgatgtccttcttggcctatgggaggttgcttatcggcatcgggatgtcagcagtggccgatggtggatcgaccactacctgccctacccacttcaccacggctgcatcagaaacagctataacaaagataacaggtgagcacgggcttggagagactggattagacgacgaacaaagtcttctctacaacttcgtacccaagcaggggtcagagaatgtttggaggtccatgaccccagaatatgagggattttcttcgggaatagcaagacaaggagtgagctatgaaaagctgtaccccaagatggagaaggtgcatatcatagaaatcaagaagaagtga

SEQ ID NO: 90209 - DNA, 819 bp, Oryza sativa
  unsure (1)..(819): unsure at all n locations
  Clone ID: PAT_MRT4530_888C.1
ttaaatgtcacttttgcccctccctttccatctctcttcttcccctctcctgatggagagacgagatgggtgtcgggcgtcggcagcaccagcgatgaagctcggggccgatggcggcggagctcgaggcccgacgcatcctccatcggtagcccggagctgtccttcgaccctcctccatcgccatagacaacaccggtgaccctcctcgccagatctgggcagaggcggtgcggctcgcagacgaccacgacgaggacaacaacggcggcggcggctcccaagctctcccgcgcagatgaggtcaatgacggcggcggcggtggctcctgagcttcccgccgcagatagggtcgaagacgacggtgtcgacggcagtggctcccaaggcctcccaccgcggaggtggtcaacgatggtggtggagagaaaggaagtcccgaggactcccaccgcagagatggttgacgacggcgactgcatctcgacctccttgtagttgtctcggagtntaaagcaccgtcgcgtgagcccgagtgccccgggatgtcgccctcgtcgtcagcccgagaccaccatctacagtggtggagagaggaaggggaaagaaaagagaagggagggaggtgggagatagaactaacagctaggtcccacttgcagttggggcttacggattttttgacggaaaacatgatggagtggcacggttccattttcccattatcagtagcacacgtagaagatatgctgaatagtagtgcatttttctgaattgacatattcaatgcatggatcaaaaaaaaaaaaaaaaaaaaa

SEQ ID NO: 90210 - DNA, 309 bp, Oryza sativa
  Clone ID: PAT_MRT4530_88900C.1
atggaggtggcggcgaggcttgcgacggaggccggatctggcggcgaggctggcattggcgaccagatccaggcgctggagatggttttgccccggtggcggttgcgacgacagcggagagctcggcgatggcgttggggcggttgcgttggcagtgccagcggtttgcgacgacaactgctggcgtcggtggctggtgatagcggcatcggcgacggcagccgacttgcagcggccgtgactgaggagacggtggcgacgtcgaaggatgtggcagtggaggtggggaaggagttgggtgtgaggtga

SEQ ID NO: 90211 - DNA, 433 bp, Oryza sativa
  Clone ID: PAT_MRT4530_88901C.1
ccagaaaggatataatgatggatgagaatattcagacagtagtacagcttcaggattgctgcaagattagtcataaaataatactagtagtagtatcatcttactaccatccatggggttcaggacaaattagttgaactaggagtacatacagctgatacagttgtgcagtgaagcggtgacaattgtcaattgacaaagtgccaaggtctcacagctaatccccagctcagctgcctgctgcccccttgatggtctgcacatctttgcccattgaaatctttggtcagcaccatcctctggctgtcaagagttaggtgcagcccgatttgagtcaaccctttgattgcatcaagcaaaggtatactagtatcaatgcccctttatccaattctgcaaagtttttttcccaacttgctgtgtcctgaacaac

SEQ ID NO: 90212 - DNA, 612 bp, Oryza sativa
  Clone ID: PAT_MRT4530_88902C.1
atgcacgcaaggggaaggaggagcggggcctggaggcttaccgacggcctcgggctttgcggctgctactggcgcaacagagaagcggaggcggcgcgggtggaggagggagccgcactggcccctcgcgcggaggagactcaacggcgcagccggtcacgagctggtggcagccacgtgcagaacggggagccgccgccgccgctccgccctcgcagcagctccgcgccgccgccgcagccgtcgtcgccgccgccaccagcggtcgtgaggaagagaagaacgaacaagggagggagagaagaacgaatagagtatgggcttggcccatattaccttttcaagggcaaggttggcatagctgcggcgctgttggtgattgcggcgaccatgctgccggcggcggcgagcggcgacagggttgtggcggcgccggcgtcgacgggcggcgccggcggcggcgaggcggaccagtgcgtgagcaggtgcgtcggcgagatgcaggcgtgcgaggccgaggcggcgtcccggtgcgcggccacgttgtcgcggcgcggcggcccgtgcggcggctgcgaaaacgagtacctcggctgcatcgacatctgctga

SEQ ID NO: 90213 - DNA, 362 bp, Oryza sativa
  Clone ID: PAT_MRT4530_88903C.1
ggccgcacatttttttttttttttttctttgtgtctctgtttcttttgttttttttaatttttcttattttttttcgttcttttggttagagcagcacaagaaaccattgggataaacaaatttggggccgcttacaccacaagcccacctgaaggggttctgccctacatgaaagcttttggacagattggttttgactcggagcgattgcaccaaccacacttgctctaacaagcttgaccattatgaccttttcctgtgaaaaagcaaaaggcaacaggataaccatgacttgggaaacaacgcaggatggaactttttgcggaaaggggggaaacaacatgagcacggaatggtctta

SEQ ID NO: 90214 - DNA, 1512 bp, Oryza sativa
  unsure (1)..(1512): unsure at all n locations
  Clone ID: PAT_MRT4530_88904C.1
tcgttaatctttaattaatttatttctcgcctctctttaacttattttgctcctcactttctcttgactagctcaaacacttacacgaactcggattgttaataatcttttactactcctatatacggcaataaaatcttcgatttcaccgattggtcgccactctccgattccccccaactcgtcggtagcaggtagctcgatcgcgcggcggcagaatttccagggtggatttggccgatttggggcatcagggcatggagcgccgcgggctactaaaggcggcgcttttggtgtgcttgattgtgctttgctccgggagagaaattcaggtcattcaacgccatccctctaccaccatatataacccaaagcttgccaagacacttgtggaatatgcttcagctatctatactgctgacctgacacaattgtttacatggacatgtgctagatgtggtgacctgattgaggggtttgaaatgatggatatcatcgtagatgtnggagaactgcttgcaggcatatgtaggttttgcaagtgatatcaatgctatagtagttgtatttagaggaactcaagagaacagcattcagaactggatagaggacttgctatggaaacaacttgatcttgactaccctggtatgcctgaagcaatggtacaccgaggattttattctgcttatcataacacaacaatgcgagatggagttgtcagcggtattcagaagactcgaaaattgtttggagatgttccgatcatggtaacagggcattcaatgggtggagctatggcttcgttttgtgcacttgatcttgttgtgaactatgggctagatggtgtgaagctaatgacatttgggcagcctcgggattggcaatgctgcttttgcttcctttttcaagaaatacttgcctcacgcaatccgagttacccatggtcatggatatcgtgcctcacctgccaccatacttctcattcttcccacagaagacctaccatcatttcccaagagaggtatgggttcataacgtcggactaggaagcctagtgtactcggtagagcagatctgtgatgattctggtgaagacccatcgtgctgcaggtctgtgagtgggagcagcgtgcaagaccacatatactatctcggcgtcagcatgcacgccgaggcatggagctcctgcaggatcgtcatggactacagcaagctgcgttaccggatggacatcaatggcaacatcgtcttgtcaaagcatctgggtttgtcaggtgacctagaacacagtgaccaatgattcaaaatggaacagatttagtataatggtagcttagatgtgttatattattgtacagtactactacacgtgtgttcctctctctgatgctcatatgtgtcaaaattgttcatgcgtcagaagaggattgggagatgcttgctgtaaatgtggtttggtaatgtgaagcattgttcagttcacaaaaaaaaaaaaaaaaaaaaaaaaaaaa

SEQ ID NO: 90215 - DNA, 232 bp, Oryza sativa
  Clone ID: PAT_MRT4530_88905C.1
atctgagatgggtttatcaagtagatcaccctgataccagtgggtgggaagaagactctgcttgagtacctaatgacgcatataaatgtggtgggtctaaagacatcgtatgatggtatggaacctgcatgaagttcttcttcgttctttgttgttgtttcctacccctgctatctaataataatatcaataatacccgaagaacccctcttggttctccataaaaaaaaaa

SEQ ID NO: 90216 - DNA, 243 bp, Oryza sativa
  Clone ID: PAT_MRT4530_88906C.1
tgaggggggaagagaggatctagtaaagtgccgggattcttagatacagatgccggattatttagaggcattaggaaactagtatatatcgaaaaaaagttaatgtttaatcacattgtttaaagaataaccatacctcaatttctataaataaaaattacttacatttatatcttatataatcaaaatccactatctctaatctttatcataaatattaaatatttcgttccttaaccaaat

SEQ ID NO: 90217 - DNA, 300 bp, Oryza sativa
  Clone ID: PAT_MRT4530_88907C.1
atggcggcagggatggaggtggcggcgaggctagcgacggaggccggatctggcggcgaggctggcatcggcggccggatccaggcgctggattttgccacggatctggcgcccacggcctcgcctgggcggctgggggcggtcgcggcagctagtggcggtcgagacggcagcggagagctcggcgacggtgttggggtggctgcgttggcggtgacggcggtttgcgacaattgctgctggcgtcggtggctggtgatagcggcatcggcgacggcggccgacttgcagcggccgtga

SEQ ID NO: 90218 - DNA, 420 bp, Oryza sativa
  Clone ID: PAT_MRT4530_88908C.1
tttttcctaaagtagattgaagaatgctagtcttcactaactttggttttagtggggcatggccattatggttatgatctttagtggtccattaccaaatcaatgttggggtggatgaatgatagttgtctcatgtttagtcgttattcagtgtaattgcaatagccagatgacaacttaatattgattttttttccgatgtgcttattcatttgaatatctttatgcagcttgatgcatgtgcacatcctttctttgatgagctgcgagagccgaatgcacgcttgccaaacggacgtccatttccaccactattcaacttcaaacacgaactagcaaattcttctcaagagctcatcagcaggctcataccagaacatgttcgacggcaagctacccacaacttcttcaatactggga

SEQ ID NO: 90219 - DNA, 1896 bp, Oryza sativa
  Clone ID: PAT_MRT4530_88909C.1
ggtggcggcgctctaaactagtggatccccgggctgcagtgaattcggcacgaggagagagagagagagagaactagtctcgagttttttttttttttttttttgttgggcaaaaaaatgattttctttttcaggtttgattaattgataatctgggggatacaagattatgcaggcaattaattacaaccccatgaaaaacaatctctcaagatctaaaagaaccaaatcaatcgaaaatccaaccaagaaactaatgttactttgagactactaggactctgaactttcctgtccctcctgacgataaagcgaaaaactgttcactgctccatttccgacaaaaaatggagaagctcctcctatacacctaaaaactgaatcttgtttttcttttttatttttgttggtttgtttggtatcgctgttgatcggaccaagaacggcgatgatgcttgatcagaagaaggatgcgccgccgccgctgtggaggaggttgtgggcgatggcgtcgcgggcctgcgcggcggcggaggagcggacggcgttctcggcgaccatgtcgtcgtcgaagaggtcgaaggcgcagtcgtcggcgtcgacgacggcgtcgccgctgcgctcgcagatgttgtggaggacgcagcaggcgccgagcacggtggggaggtcgagcagcttcacctcggtgcgcttctggaggcagccccaccggcgcttgaggcgctcgaacgcgtcgcgcgccacgccgcgcacggcggcgaccttctcgttgagcatgtgctgcgcccacgtcaggttctggtgggtgtagggcacgagcatccagtccatgagcgggaagctcccgccgccgaccacccactggccctggatcaggccgggaacgccgcggtgcaggtacagcgccgacttctcgagcacctcctcgtcggagttggaccccggccagccgatgcagacgtcggtgaaggcgccggtggagtcgacgacgcactggacggtcatggagtaggaggtcttctggttgcgctccgtgtggcggcggttgtagtaggaggcgacgttggacttgggcgcgatgatggggatgtgggtggtgtagatcgcgccgacgacgccggagatcccggagatggcctcgaagtgcgcggcgatggccgccgcgtcgccggcctcgggccagcgcaccaccttgggcatcaccatggccttgagcgcggcgcagacctcgagcacgagcttgtggcaggtggagatcccgaggccgaagcgcttggacaccagcctcaggggctcccccgtggcgaggcgccagacgcagacggcgacgcgcttgcgcaccgggatggcggcgcggagcatggtgtcctccttggcgacggcggcggcgagctcgtcgcagaccacctcgaacgtggccttggacatgcggaacgccttcctgaactccgagtccgggtaatccgggctactcaccatgtcccaccactccgagtccctctccttcacccacagcctcctccccccacccctccccaccgccgccgccatggccgccgccgcctcagacacctcctcctgcccaccctcattactcccgctactattctccctcgagctcgtcggcgaccgctgcctcttcgccgccaccgccccagacccctccccttgatccacctcctcccaccccctcttcccctgcaactccaccggcgccgccaccgccgccgcctcatcatcaccaaacagaaacgagatatcctcccctcctgccatctcaaacagcgaccggaactgcgccgccgtcagtgagctcatcgccgcgccacgacctcgccgggatcccctacgaccaccactgccgcgcagcaccgtcgccgtcacgaccgccat

SEQ ID NO: 90220 - DNA, 2664 bp, Oryza sativa
  Clone ID: PAT_MRT4530_8890C.1
atggcggcggcggctggggaaggggaggcggaggtgacgcgggaggtgatatcggtgtcgacggagaaggcgttcgaggggaaggcgctgccggcgtggtcggagcagatcacggtgaggtcgctggtggtgagcgcggtgctgggcacgttcctcagcttcatcgtcatgaagctcaacctcacctcgggcatcgtcccctccctcaacgtctccgcggggctcctcgccttcttcctcatgaagacgtggaccagcgcgctcgagcggtgcggcgtgttccccaagccgttcacccggcaggagaacaccgtcgtccagacctgcgtcatctcctgctccagcatcgccttctccggcggattcggcacctacatcctcggcatgagcaagaagatcgccgagggcttcgacgaggcggaggccaagaccagcatcaacgtcgaggagccgtcgctgggccgcctcatcgccttcctcttcctcgtcagcttcgtcggcctcttctccatcgtgccgctccgcaagatcatgattatcagctacaagctcacctatcccagcggctccgccaccgcgcacctcatcaacagcttccacacgccgcagggcgcgatccaggcgaagcaccaggtgtccatcctcttcaagtcgttcgtcgggagcttcctctggtcgctgttccagtggttctacgccgccggccccgggtgcgggttcagctcgttcccgacgttcgggatggtggcgtacagccgccgattctacttcgatttctcggcgacctacgtcggcgtcggcatgatctgcccctacattatcaacttctcgctgctcatcggctccgtggtgtcgtgggggatcatgtggccgtacatcgagagcaagaaggggagctggtacgacgcggggttacccaagagcagcctccatgggctgaacgggtaccaggtgttcatctccatcgccatgatcgtcggagacgggctcttcaacttcttctccatcgtgctccgcaccgcctacgacctctacctgaagcgccgcggcggcgccagcaagcagccgcaggagacgccgttcgccggcgccacggggacggagcggcaggtgctcagcttcgacgaccggaggcggacgcaggtgttcctcaaggaccagatcccgacgacgatcgccgcggcggcgtacgtgctcctcgccgccatctcggtggtcgccatcccgcacatcttccggcagctgcggcccaagcacgtggtgtgggcgtacgtggtggcgccgctcttcgccttctgcaacgcctacggcacgggcctcaccgattggtccctctccagcagctacggcaagctcgccatcttcatcttcggcgcgaacatcggcgccaaggacggcggcgtcgtcgcgggcctcgccgcctgcggcctcatgatgggcatcgtctccaccgcctccgacctcgtccaggacttcaagaccggatacctcacgctcacctcaccccgctccatgttcgtcagccaggtgctggggacggggatgggatgcataataagcccgatggtgttctggatgttctacaaggcgaacaacatcgggatggaggaagggttcccggcgccgtacgccaagatctaccgggggatcgccctcctgggcgtgaacgggtgggaccagctcccccgctactgcctccgcttctgcctcgccttcttcctcctcgccatcgccatctgcgccctcaaggaggtggccaagcagcgcgggtggtggatccaggacttcatccccagcgccctcggcatggccgtccctttcttcctcggctccttcttcaccatcgacatgtgcgtcggcagcctcgtcctcttcctctggtcccgcagcgaccccgtccgcgcccacaccttcgcccccgccgtcgcctccggcctcatctgcggcgacggcatctggtcgctgccctcctccatcctctcgctcgccaacgtcaacccgcccatgtgcatgcgcgtcttctccaccgccaccaacgacaaggtccagctcttcctcaggacgctgcccacgccgccatgatccatccatccacttcaagctcaagctagccttccatcgatcttgccacgcgtacgtgtaggtcgattaattagttctttagtgactctacttaatgcattaatctgacgattgcgctatatatattaaccttgtaattgtgaggtgtggaagagaagccactgggtgtagcatacatgcctacttctgttgtttactgtttggtgcttaacatgcacagcgtgtcctcgacatcgaccaattgaacgcgttcgattggttctacgggcatgtgaaagatgttgtgtgccaggctgttgctgtgtacccgaccataagatgggctgtgctcggcccagcgtctccggtggggctgggcgtgcgaccgtccgcccccggccgacctaacctctatgcagaatccccccatcccgtgcatgttaccaaactgtgtattctctcagcgcgggcccctgttggatgcgcgtcgttccctaccccccatgcgccacctcgtcttggccgccctagattggtctctcctctgctgacatcttggtttctctctacgcatagccgaccccgcattttgcttagtaccct

SEQ ID NO: 90221 - DNA, 363 bp, Oryza sativa
  Clone ID: PAT_MRT4530_88910C.1
gacgacgaatgcacacgcacgcaagcgtgaattctgtagagcgacagcggctcgtccttttttttttagtcgcatatgaaaaagagatcgcacagtaatgatctgggtatatacaatggccgtaagacttttatacatactcaagctgggctaagtgtatatactccatagatccaattgcaaagtatgtcattttagataagaacatcatacaagcgagcagagtccataaacgtacatttgaattgtgatgtggcaatgcacttatagggtatattctccatggctatggcttatgaaggtagtgatatgagcaaagctcttgacgtgcattccgtgccattcttttccaatttgcaaatt

SEQ ID NO: 90222 - DNA, 106 bp, Oryza sativa
  Clone ID: PAT_MRT4530_88911C.1
gttggagccactgactatgaggaactcgggagggcatttttggtgttccgtgcttgacactcacatcatggttgactatattggctgagccactcgcaactagact

SEQ ID NO: 90223 - DNA, 297 bp, Oryza sativa
  Clone ID: PAT_MRT4530_88912C.1
atgggcgccaccgttccccgaccaacattccccgcctcgcctcttcaccccacacacgactacccgatggcatcgatggataagcaagagaatgttcgtgtcctcggagaactgtcgccggtcggagacacgggcaatacgacaacccggttcccgtcgagaatgtcgccgtcgaattattggttagctccggcaatggccggcggcacggtggtcgccgtcgatctcccggtggcgcccacacgggtgccgaggtgtgagaactgcatccacttcagaggcccctctgaagtctga

SEQ ID NO: 90224 - DNA, 477 bp, Oryza sativa
  Clone ID: PAT_MRT4530_88913C.1
atgactacgccgcacttccgcccgcaaattgttttcttcgacaaaactgccgcctgccctccaccccaccggtggccgcgccttcctaccaccggcaccatcgggcacacctcccttcccctggtggctgcgcctccctaccgccgccgcgggcgtcgtcgcctgcccctcaaattccgccggtggctacgcctctctactgccggcgccggcgccgttgcctgccctccaaccagtccgcgcctcaccgccgccagcgctagggctccaccccgcacgtgccttccccaccgccagtgccctgaggtgcagccgggaagaagcatccgatgcagattggttggaggcctggctgacttcaatgtcagtgccagcacgacttcatggatgagctccatgaacttgaccgcatcttctttgtctatgagccatcaattccctgtatcagtccatcatctaaatttgtttgattcctga

SEQ ID NO: 90225 - DNA, 2109 bp, Oryza sativa
  Clone ID: PAT_MRT4530_88914C.1
atgcgggagccacgtcgccctctcctccccctccccctcccccacctcctcctcgtctctctcctctcctcctctgccgccgcaccgggagcaggagcaggagcaccgccaagaaccggcggcggcggcgtcgcgaggagcatcgccgacatggatacaaaggaggctgtttctgcaaaagatgtttccagaaaagaaccaattactggtgtgattgcattgaaggcttccatgaagtacttcgatgctgattttttcaacgattcaaaacttcgggagatggaagatggtgcaaaagaatttaatgtacctgcatttagagacaaccggaaattggtggcgttagagaatggtggattgcataacccgtctgcattggtctttaaatcatcatggagcgatgaaagcaaaatcagtgagaacaaaagctttcaatatccccatacatcttcagtacatcgccctagtaaagatgaagatattgcttttatgtcgataattgagctcggggagcttataaggacaaagcaagtcacatcgcgtgaacttactgctgtgttcttaaggagattaaagaggtatggtcctataatcgaatccgttattactatcactgatgatttagcatacaaacaagcgaaagaagctgatgacttgctggagcaaggaaaatatcttggtcccttacatggcattccgtatggccttaaggatataattgcagtaccagaatacaaaactacctggggctcaagaacttttgaaaaccaaattcttgatgtcgaagcctctgtctacaaaagattgaagtcaactggggcagtccttgtagcaaaacttgtaacaggctcgctcgcctatgatgatatatggtttggggggagaacaagaaacccctggaacattgaggagttttctactggttcatcagcagggccagcagctagcacctctgcaggttcagaaactgcaggttccataacatatcctgccgctagatgtggagtaactgctttgcgcacaacatttggaacagttgcacggacgggcgtcatgagcatttcagagagcttggataaacttggtcctttctgcagaagcgcgatagattgcgcagttgtacttgacgcaattcgcggcaaggatgccggcgatccatcatctcgtgaagttgctatcgaggatccctttcatgttgacatcagacaactcactgttggatatcttgacagtgctgagatggaggttgttcatgttctttccgctaagggtgttaagctagtgcctttcaagctgaactacaccgttcaatcggtccaatccatactgaacatcaccatggatgttgacatgcttgcgcatttcgacaactggcaacgcgagcgacacgacgacgactatgaagctcaggaccaatggccagtggagcttcgccgcgcacggttaatccccgcagtcgactatatacaggcacaacgagcacggggtaaactgatcagagaagtcagggagagcttcacggtcgatgcattcatcggcaatgtgaccgactgggagctcgtctgtcttggaaaccttgtggggatgccggtggctgtggtgccgacaggcttgaagagcatcaagaacccaccagaaggcggcacgcggagaagaaccaccgtgacgacgggcatatacgctcctcctgaccatgaccacgttgtaagttctttctcgtctcaggacataaacattttatgtgttgacatgaagaacagtgatgatgagttgatgacctgtcattttgatccgtgcattggggagcaggctctagctctggcaatggcgtaccagtctgtgactgaccaccacaaacaacgcccagcgatcgacgatctaggaccgggagatgacatacagcggtaaccagtgggtggatgacgatgatggggtattttcatgaaagctgaagttccagatgattggcccctgtgttaatttccttgagaaacatgagatgtaatatatatgaacttccagaatttgtttcagttgcgagtcatttgagaaagtaacagggctcatcagagggatacccagcttgatagtgaattttttttttttttt

SEQ ID NO: 90226 - DNA, 678 bp, Oryza sativa
  Clone ID: PAT_MRT4530_88915C.1
atgggtctaccgcggctcacgggaagcgacgacaatgacgtcggcgatgacgtcatcaccggcgacggctcggacggcgcaagctcgccagcgaactacggcacgacggcgctaacgaaaggcatctacggcggtggaagatcaacggacggtgacggcgacgaggttgatacggcggcgaccttcggcttgacgacgacggcgatgctccggagacctacggcagcgacggaggggcggacgaggtcagccatggcttgtgatcacgatggcgaccttcccgagtggcgacgacgactggagcgacggcgacgcacggctagaccagcggcgatgacggcggcgcacggctgcacggtgctagggctctaccggcaacgagaggcgaaggcgagggtggcggcgggtagcggagggcttgggggtccttttataggggctagggggcggcggcgaagtcccacggcggccggcgacgagaaggaaagttttagggttcgggaggaaaggggaatccgaatcgagctcaaatccgatgatttccaaagcgatatagacgatgcttccaaaaggaaaaaggtagaggagatctcggggatcctttcccctcaatcaatttcatcggatcgggaaaggggcgacggaattggatgggcggcggcggcgcggctcggctag

SEQ ID NO: 90227 - DNA, 528 bp, Oryza sativa
  Clone ID: PAT_MRT4530_88916C.1
atggggcccacgagtctgtctctgttcctctttctcttcccctctctctctggcttttctccccatattttccagacagtggataccgagggcaatggcagagacggtggaagccacgaggcggaggcgcggtccgagcggtggcgcggcggacggcgtcggcgtggtcggagcagtggcgcggcggacggcgtcggcgctcggaggggaggcgccgcggacggcgtcggcgaggtcggagcggtggcgtggcggacggcgtcgacgaggtcggagcggtggcgaggcggacggcgtcggcgctcggaggggaggcgcggtggacggtgtcggcgaggtcgaagggcgcgacggaccgcgtcggctgttgggaggggaggcgcggtggacggcgtcggcgtggtcgggaggggaggcgtggtggatggcgtcgacgtggtcggagtggaggcgcggtggagaggcaatggacagcgcagtctccttgtccccgccgccgttcttcttcccctctccttcctaccttga

SEQ ID NO: 90228 - DNA, 871 bp, Oryza sativa
  Clone ID: PAT_MRT4530_88917C.1
gacattctaaagaagtagaagaagccttgggtgttgagacccagaaacttcagggagcaattgaagataatattattttgaagagaaaaaccaagagatgctctcagagtgcgtggaacagatggagtttaatgcgagatggtgtcatgaacaaattgaaagacttcgcaaggacaccgaggagaaagagaatgagtttgagaggttgctgcaggaggagctagcaagagctatagagtgtgatgttgactctgaaactacagaaaattgcaagctaagggaggaacagatacaaagaatcatagattgccaggtgaaggatgcggaggagtttgatgctgaacaagatgaattgatcaaaacacacgaagagaagaaggcgaacgtcaagatggagtatatggcaaaggatgttgagctcgaggaggagctttatgccgctctcacaagtctgatggagaaacacaagccggacatcttccaaccgtccagcccttgaagagctgcaggcttgcagctcaccatatatatgccctgctcccaataatctcaagaggtccctctcccaaatgaacttcaatttacatgccgataaattgcttgaaatgctcagaaactctcccgagtggcgtctctgggcaattgtgttgcccccccaatttggtgttttgatctgcaatttttatgcatctgcaaaggtcaatttgattcacccccccgaacccctgttgctcaactcaaagatgatgtgctattcttgtcaaacatataactctacacggttttgatttcacttgcaagtttgtgaaaataaaagtacaacagatggttttactctgcaagtaaaaaaaaaaaaaaaaacccccaacac

SEQ ID NO: 90229 - DNA, 1133 bp, Oryza sativa
  Clone ID: PAT_MRT4530_88918C.1
atcggcacgagggcactactactcaagtgcatgagctagctcaaacaatcgatcgatggcgatgaaggcggtgatcaagggcggcgatggcggaggcgggtgcatggtggtggtggcgcacgtgctagcggtggcggcgacggcgatggtgttggtgtggtgcgttcacttccgcggcggactcgccctgcgctcccacaacaagcagctcatcttcaacacccacccggtgctcatggtgcttggcctcgtcgtcctcgccgccgaggccatcctctcctaccgctccctctccatcatcgtcagcagcagggacgccagaaagaaggtgcacctggggctgcacgccgtggggctcgccctcggcggcgtcggcatctacgcggtgttcaagtaccacgccgaggccgacatccccaacctctactccctccactcctggatcggcatcgccaccatctccctctacgcgctccactggctcctcgccttcctcaccttcttcttccccggcgcctcccacgacaccaggcgctccgccgtcccgtggcacgcgctcctcggcctcctcgtcttcgcgctcgccgtgggcaacgcccagctcggcttcctcgagaagctcaccttcctgcaggccccgccgctgcgcctgtccaggtacggggcggaggcgctactcgtcaacttcacggcgctggtggtcctcctcctcggcgtcgccgtcgtcctcgccaccgccaacgtcgactccactaaatacaccgccatgtaattccattttattatacatatatttcatcatcttttctttattattactctacatataatcgatcgatctagctacacacccgtagtacgcagtgtcgtaccatatatacatgcatcgcgctgagtgtgtgcgcgcgcgcacgtgtcatgtggctttgtgtaattaattaattattattattcctcaattccatcgtgcatctttaattaccatgcatgtatatatatatctggccgagtgtaaatactatgtatgtatgtatgtatgtatgtatgtatgtatgtatgtatgtatgtatggatacacacttacgtactcatctgtaaaatacataatatattgcgtctaaaaaaaaaaaaaa

SEQ ID NO: 90230 - DNA, 354 bp, Oryza sativa
  Clone ID: PAT_MRT4530_88919C.1
atggagtggtggcgtacctccctgcgctccttctcatgcttggtcgcctgcaacgggaatgttgtttctaggtggatggagattaaagccaacgaggaggtgggatatggcggcccagagagtaatattccccttagatgttggatgcggtgctccggccagcggaggaacatgttggcatcgaccgacggggggtgtggtgaccggcagggcaacaaacaatggcgagggtgcgacgatgactggtgggggcaggacacgatgagtgggacggtgactggatctagaccaccgcagcttccgagctcctcctcatcgggatctggaggcgtcaaatccagtgaggcgtactga

SEQ ID NO: 90231 - DNA, 1157 bp, Oryza sativa
  Clone ID: PAT_MRT4530_8891C.1
atggatccattggctccaagtcccagcggcactgcagttcgcgcgtacagcaacccatcaaacgagcgaggaaagctcagcatcaaagcggcgtctccggtgagtgggggtggtctttgtgaagcggacttgaaggatcggaggtgttccatggcaagctcgcagtgctgggagaacccgccggcgctggacccggccggcggagggggcgaggtcgtcggcgacttcggcgggcagaaggcgtacgtcgctggctcggccggctccaaggccgccgtcgtcctcatctccgacgcctttggctttgaagccccaaacctgaggaagatagcagacaaggttgctttgtttggttacttcgttgtggtgccagatttccttcatggggacccataccagccagacaatcccaacaatcctggaatttggttacagtcacataatccgaaagaggcatttgaagaggcaaaaccagttattgccgctctaaaggagaagggagcatctttcatcggggctgcaggttattgttggggtgcaaaggtagtggtggagttaggcaaagtccatgaaatccaggctgctgtattgctacacccttctttacttgctgtcgatgacatcaaagaagtcaaatgcccaatttctatacttggtgctgaaattgacaagacgtctccaccagagctgttaaagcagtttgagcagatcctttctcctaaccccgagattgctcacttcgtcaagattttccccggcgtagagcatggatgggctgtgagatacaatcacgatgatgcagctgccgtcaagagcgctgaggaagccctggaagacatgatggattggttcaagaaatacctgaagtaaaatctgaattagcagctctccatgtaccaagatattgctaagtgctagctaatgcacgaacagctgatcttgatatgccattttgggcctgaacttcgtttatgccattgtgttgtaatggcgtgtgtgcttccgttccatgtgcctcatgatacttacttttagtactatttctgaacatgtgtgtgaggttgatccaatcctgcaccaacaaacctgaaatttttgctgtgcattggagttgattttccagcaatgaaatttgcaaatgccaggaaggtttagag

SEQ ID NO: 90232 - DNA, 398 bp, Oryza sativa
  unsure (1)..(398): unsure at all n locations
  Clone ID: PAT_MRT4530_88920C.1
ccatctcaaacttcttaattngtatcaactgctatgctattgccattcttcttcttctttagctttggataataaatactcctactatgcaataacaaatactactagcagagtctatcttgttaagccgtgagataattaatccccaaatgggacacttgccaacacatttggctaccaaattggatataattaaaaatgtttatattttggagcaaagagagtagtacaatctaaaagggagtcacaaaaggattggtttctttggaatatttttcatgtggctttgtttgtaacaaaagagattgcatctaaagttctcaaggaaagttgagaatttttgtacttcaatggaaataaacagtgagattatccagaaaaaaaaaaaaaaaaaaaaa

SEQ ID NO: 90233 - DNA, 5442 bp, Oryza sativa
  Clone ID: PAT_MRT4530_88921C.1
ctagacataaaagcgcttgagggaggcagcattccaggagtggtcgagcccctcgccttccaatgttgccagccgaaaagaccccgtccttgatttgtgcttgatgaggtacgggccttcccatttcgattcaagcttgccgacagccactgggttcgccttttttcttaggacgagctgaccgggcaagagatctgtcggtcgaacctttttgttgtaggttgccgaagtgtttacggcatatttgcgcatgtgctcgagtgcttcgactcttactccttctaatagttcgagcgacacctcgcgtccttcttcgcccccagagaacaccacccttggtgagttagcccctagctctgctggggtcattgcctcgtcgccatagaggagcatgaacgggctaaacctcgttggtcttgtgggggtcgttcgcagggcccaaagaacagatagcatctcttctggccatttgcctttcgctgccccctcgagccttttctttagtgcttccaggatcttgccatttgttcgttcggccgctccgttggactgcgggtgtgcgaccgatgcgaattttatttccaggttaagcccttcgcacatttgtctgaacttttcagagtcgaactgcttgccgttgtcggtgatgaactcctttggtactccgaaccggcagataatgtttttccacacgaacttctgtactgctgccgaagtaattgcaccaaggagttcggcttcgacccaccgagagaaatattcaacagccacaatggcgaacttatacccgtttcgtgccgaagggattgggccaatgatgtccagtccccatctggcgaagggccaaattggcgcaatgggcttggaggccaccgttcttgcagcttggtgagcgccacatagcccctggtgtatctccttcgccatttgctcaccttcggcgaaagaaacgcaacggagtagaggttgaagcatcccagaacggtaaagttggcctgagattaacttatacttcgtggctctgatttgcaagcgctttgcttctgcttcatcatccggaagccagccagtttcgatatatttaacaaacggggttcgccagtcatttgggtcttctcccagttttacctggtcaattgttaagaccagactgtccacagacacgcttggtgtgtgcagtacctcgaaaaatatgcccggcaaatgcggtccgccactagcggcagatttcgccagagcgtctgcttcctgattctggcctctgggcaagtgttcgactgttatgccggtgaagtacttttccatggttcggacagcctccaaatactttttcattccttcttctttcgcctcaaaggacttgtcaacatggcttgctaccaacttagaatcggttcgaattagcaagcgccgaactcccagtgctttcgcctttcttaggcctagaagaatggcttcgtattctgctgcgttgttggttgtgttaaactgcaaccttgcggcgtaccgaactggtacaccgttcggcgaaatgagaattgccgcgacgcctgctcccttgtgcgaccatgaaccgtcggagcacattatccagggctgctcgacgggctcgggttcagaggttgacactggggtccattcggctacaaagtcggctagcacttgagacttgacagcagtgcgcgcaacgaaatgcaaatcaaacggggatagttctgctgcccatttactaagcctcccaaagatttccttgcctcgtagtatttcgcccaaagggtactgtgaaggcaccattattttatgggcctggaagtagtgcttgagcttgtgcgaagccatcaccaaggtgtaagcaagcttttccatctcgatgtatcttgtcttcgcctcttgcagcgcttcggagacaaaataaactggtttctggccgaactctgtttcttgaacaagggcggcgcttactgccgctggtgaggctgctaagtacagcagcagttcgcttcctggattcgggcttatgagggctggtgggctttgcaagtattgttttaggtcgtcgaacgctgcttggcattctggtgtccaactgaactttcctgcgccccggagggtcttgaagaatgggagacctctttcggccgcttttgagaggaatcggctaagcgccgcaattcggcctgcaagcttttgtacatcatgtgtgcttgatggaggcttcatttgccgaatggcatcgattttttctgggttcgcctcgattcctctttcagaaaccaggaatcccaacaacttgcccgcgcgaactccgaagacgcacttctcaggattcaattttatgcccgctgtgcgcaagttgtcaaaagtctcctgcagatcggacgcatgatcgaaaaccttacggctttttacgacaatgtcgtcaacataagcttccacatttcgccctaactgattacaaaggaccttgtacaccaatctggcgaaggttgccccagcattcctcaagccgaaaggcatcattcgccatttgccgtttgacttccgcaccagtactggattcgccaaccattctgggtggacgatctcttcgtcagggccccaggcgaagatatcaatgttcttctttagcaccgctaggatgctctcagcttcttgtttgcccatgccgtctcccagcgatacgagctttgtggggtcggcatcgtcaacctgcacttttactatcttgccgtgaggtgtgggttttggcgcgtgttttggccggctgtggagttcggcttcgacattgtgcatggccctgttgactacggcttgatcgcctttcgacgcaggcgaaggctgaagccccttgaccactatcactcccgctgggccgggcatcttgagtttgagatagttgtggtgggaaatggcttcgaacttgttcagggtcgcacggccgaggatggcattgtagttgtacgggatgtcgacgacatcgaacagtacttgctcttcgcgtctgttttctcccgagccgaaagctatcagcagaagtgcctggccgagaacttgaactgcctctccgccgaacccccggagtgacgttggtgctggtgtaagagcctgggtgggcaaccccatcttagcatacgcctcggcgaagatgacatcagccgaactccctccgtcgaacaggattcgccggacttcaaagccggctatctcagctgatattaccagtggatcttgatgtgggaacatgactccttcggcgtcttctggcccgaaagaaattggctggttcatatactgcggcgccccctcccccgtcgaagtgatgctgtggaccgctcggatctgcatctttttctgccttttggacaaatggccgagcgggtcggccctcgtaatcacttggattactcttcgctgtgcatcttgacgttgttcgaccgggggttgttcttgggctgcttcacgaggtgcttcgacggttgctccttgctgtggtctagtatcttgcgtgttgccacgttgcctgatgtttcggcattgctctgtggtatgcgaagagcgtccatggaaagcgcagtaaaggtcttttcggaccttcttacggaccggctgatggttgcttgcttgctgggcgtcgaactccttgcggagggcttgcacttcttcgacggccatcacagccttgcccgcgcggtcggtcctgaactttttccaggttatgggagcttgaccttgtcttggcggctgcccttggatcgccgtttgaggctgacgaaccgcgaggggaggtggttcggcaacttgaacttgtgcttgagcttgggcggcggcaatagaagctttatcgtactcagcttgtatggcttgccgtcgcttggaatcctcttcaccccttgcaaaaccgtcaatgatgcgaagcaaatgctcaagtgtttgtggttccttattggcgattttccttgtgagttcgccttcgagcaaaccggccgaagcagcatttatgactaacgcctcagttatgtcttgaacttgacaccgggcttgcgagaagcgacgcatgtattctcttatcgattctcccggcctttggcgaatgccgagcagatgctgctgcgtcttcggctcctcataagtgcctcgaaagttaagaacaaaaacatcgcgcaattgctcccatgagtaaatgctattggctggcagattgaaataccaagaacgggcgatgccgtccagagcgaggtgaattacctttgccttggtattttcgtcgccatgagccgcctcgatcgcggactcatagatggataggaactccttcgggtcagtttcgcccgagtagcgtgggacgggtgggaatttgaactggggtggaattgggcggttcttaattcccccactcagcggcagccccttctcgccccccgctctgtttgctgcaccttgctgcgggtacggcgtggcgaaaggtgaaattacggcttgcgcgtgagtttgagccatggtgctcggctgcccggttgcgattggtaatacttgctgggtcgccatggatgggtcgaaaactggctgcgaccatgtcatggcgacttgggctggtgcttggcttgttccaaagcctggtgtcggtccttgcggccgaacagtttgcgcctgggcggcattgacgaagtcgtactgaggtgtctgactccatggcgaagcccccagattcggctggttcggcggcaaccaactaggtgcaccttgacctgtactcccctctggacgagtcgagggagctgtactcgaaatgttgtggggctgattgagttgctgaaggaaagcttggaattgcgcttgggccgcgatctgctgagcttgtccatagggggcctggtgcactgctgcggctgccggctgcccggcgaagtgcaccgatgcctgtgagacttgcggcggaacgggctgggactgcacttgtggacagacttgaggcgggacataccctgccgaatattggaggattggtgccgaagggaccctggaccgcctcgccgcctcgtacgcttgttgctgttcttgcatttggcgaagcatgtcttggagtcgtgccatgttctgcctaatagtttccatatcggcttcggcttgtgtttcagggtcggagttgacttgaacttgcacggcagggagtgcggcttgggccactgttggctgcgacggagcggcagggggcaccagcagctgtcctgccgaaaggatctccgccctggtctgaagcgcccttgccgctgcagccgccttcgccacttcatccacccttggcgcctgctcagaggtggcaggggccgaaggcagcaatgctgtgatcagcgccgaagcagacggtgccggtgccgaagcggacggggctcctcccacttcggcgattgatgccgaaggttccgctccttcttcggcggccat

SEQ ID NO: 90234 - DNA, 484 bp, Oryza sativa
  Clone ID: PAT_MRT4530_88922C.1
gaggattttttctaacctaaaaatcctcaataacaaaccacctgttctttcctaaatccaagatctggcagacggaactagaaaatctggatctactaatcactttacaaggaggggtctacatctaatctaactaccacaaggaggcgtgcgaaaaaattacaccctcttggctaccaaatcagaccaataatgttacaccaaaaacaaagcagaacaccagaaactaaaaggctctggaactctctatcctgtacaccaacaaaggctcaaaatcaatggaataaaacaacattgatcctcatgatgaagtgatctacctgctggaagacccaaaaactcgctcaaatctacggctaacctacctttatcaaacctgacagagatggagtttgggtgattaaggcttttggattggattaggctttctggatgtgtgagaggccttgattgctcaaattagtgggtctcagtccctagtgac

SEQ ID NO: 90235 - DNA, 4035 bp, Oryza sativa
  Clone ID: PAT_MRT4530_88923C.1
atggcatggtcgcagccagttttcgacccatccatggcggctcagcaagcatcaccaatcggagccgggcagccgaacgccatggctcaaactcatgcgcaagccgtaatttcacccttcgccacgccgtacccgcagcaaggcaccgcgaacagggcgggaggcgaaaaggggctaccgctgagtgggggaattaagaaccgcccaattccgctccagttcaaattcccacccgtcccacgctactcgggcgaaactgacccgaaggagttcctatccatctatgagtccgcaatcaaagcggctcatggtaacgaaaataccaaggcaaaggtaatacatctcgctcttgacggcattgcacgttcttggtatttcaattttccagccaatagcatttactcatgggagcaattgcgcgatgtttttgttcttaactttcgaggcacttacgaggagccgaagacgcagcaacaacttctcggcattcgccaaaggccgggagagtcgataagagaatacatgcgtcgcttttcgcaagcccgatgccaagttcaagacataaccgaggcatcagtcataaatgctgcttcggctggtctgctcgaaggcgaactcacaaggaaaatcgccaacaaggaaccacaaacacttgagcacttgcttcgcatcattgacggtttcgcaagggacaaagaggattccaagcgacggcaagccatacaagctgagtacgataaagcttctattgccgttgctcaagctcaagcacaagttcaagttgccgaaccacctcccctcgcggttcgccagcctcaaacggcgatccaaggacagccgccaaggcaaggtcaagctcccatgacctggagaatgtttagaaccgaccgtgtgggcaaggctgtgatggtcgtcgaagaagtgcaagccctccgcaaggaattcgacgcccagcaagcgagcaaccatcaacagccggtccgtaagaaggtccgaaaagacctttactgcgctttacacggacgctcttcgcacaccacagagcaatgccgaaacattaggcaacgtggcaacgcgcaagatgctagaccacagcaaggagcaactgtcgaagcacctcgtgaagcagtccaagaacaaacacccccggtcgaacaacatcaagatgcgcagcgaagggtaatccaagtgattacaagagctgacccgccaggccaattatccaaaaggcagaaaaagatgcagatccgagcggtccacagcatcacttcggtgggtgagggggcaccacagtatgtgaaccagctaatctctttcgggccggaagactccgaaggagtcatgttcccgcatcaagatccactggtaatctcagttgagatagccggctttgaagtccgccccgacgaagtgggtggtgtttcgacagatctcatcatgcaccacctggcagtcaagccggatgccaagccaagaaagcagaagttgcgtaagatgtccgtcgatcgtcaagaggcggcgaaagccgaagtcaaaaaactactcagggctggggtcattcaagagattgaacacccagagtggctggcgaatccagtactggtgcggaaatcaaacggcaaatggcgcatgtgtgtagatttcacggacttgaacaaagcatgtccgaaagacgatttccctttgccacggattaatcagctcgtggattcaacagccggctgcgaactcatgagtttcctggatgcatattctggctaccaccagatccatatgaacccacccgacatccctaaaacagccttcatcaccccgttcggcactttctatcatctcaggatgcctttcggcctgaggaatgccggagcaactttcgccagactggtgtacaaggtcctttgcaaccagttagggcgaaatgtggaagcttatgtcgacgacattgtcgtaaaaagccacaaggctttccatcatgcgtccgacctacaggagaccttcgacaacttgcgcgcagcgggcataaaactgaatcctgagaagtgtattttcggcgtccgcgcgggcaagttgctgggcttcctggtttccgaaagaggcatcgaagcgaaccccgagaaaatcgacgccattcagcaaatgaagcccccgtcaagtgtacatgaggtacaaaagcttgcaggccgaattgcggcgcttagccggttcctctctaaggcagccgaaagaggcctgcccttcttcaagaccctccggggcgcaggaaagttcagttggacaccagaatgccaagcagcatttgacgagctaaagcgatacttgcaaagcccaccagccctcataagcccaacaccaggaagcaaactgctgctatacttaacagcttcaccagtggcagttagtgctgccctcgtccaagaaacagagttcggccagaaaccggtttattttgtctccgaagcactgcaaggggcgaagacaagatacatcgaaatggaaaagctcgcttacgccctggtgatggcttcacggaagctcaagcactacttccaggcccacaaagtaatagtgccttcacagtaccccttgggcgaaatactccgaggcaaggaaatctcaggcaggctgagcaaatgggcagcggagctatccccgtttgacttacattttgttgcgcgcactactgtcaagtctcaagtactagctgacttcgtagccgaatggacaccagtattcgcctccgaacccgagcccgtcgaacaaccctgggtaatgtgctccgacggttcgtggtcgcacaagggggtaggcattgcggcaatactcattttgccgaatggcgtcctagttcgtttgacgatcttggcaattgatcaagtgaaactgggcgaagaaccaaatgactggcgaaccccgtttgtcaaatatcttgaaactggttggcttccggacgacgaagcagaagcaaagcgcttgcaaatcagagccacgaagtataagttggtctcaggccagctttaccgctctgggatgcttcaacctttactccgttgcatctctttcgccgaaggtgaggaaatggcgaaggaaatacaccaggggctatgtggcgcgcaccaagctgcaagaacggtggccaccaaagtatttagacaaggggtttactggccaactgtgttgaaagtctgtgctgagcaaattaagaaatggggactagacatcattggcccgttcccggtggcgcgaaacgggtataagttcgtaattgtggctgtagaatatttctctcggtggatcgaagccgaaccccttggagcaatcacttcggctgcagtacagaagtttgttgggaaaaacattatttgccggtttggagtgctgaaagagctcatcactgacaacggcaagcagttcgactctgaaaagttcagagagatgtgcgaaggacttaacctggaaatcaggttcgcgtcggtcgcacacccgcagtcgaatggagcagccgaacgtacaaatggcaagatcctagaagcactaaagaaaaagctcgagggggcagcgaaaggcaaatggccagaagaaatgttatctgtcctttgggcccttcggacgacccccacaagaccaaccaagttcagcccgttcatccttctctatggcgacaaggcgatgaccccagcagagctaggggctaactcgccaagggtggtgttctctagagacgaaggggggcgcgaggtgtcgctcgaactcttggaaggagtgagggtcgaagcactcgaacacatgtgcaagtacgccgtaagcacttcggcgacatataacaaaaaagtccaaccgtcggagctcttgcccggtcatctcgtcctaaggaaacaggcgaacccagtggccgtcggcaagcttgaatcgaagtgggaaggaccgtacctcatcaagcacaaatcaaggacggggtcctttcgactggcaacgcaggaaggcgaggagttcgaccattcctggaatgctgcctctctcaagcgcttttatgtctag

SEQ ID NO: 90236 - DNA, 564 bp, Oryza sativa
  Clone ID: PAT_MRT4530_88924C.1
atggctcaaactcacgcgcaagccgtaatttcacctttcgccacgccgtacccgcagcaaggtgcagcaaacagagcggggggcgagaaggggctgccgctgagtgggggaattaagaaccgcccaattccaccccagttcaaattcccacccgtcccacgctactcgggcgaaactgacccgaaggagttcctatccatctatgagtccgcgatcgaggcggctcatggcgacgaaaataccaaggcaaagcctcaaacggcgatccaagggcagccgccaagacaaggtcaagctcccataacctggaaaaagttcaggaccgaccgcgcgggcaaggctgtgatggccgtcgaagaagtgcaagccctccgcaaggagttcgacgcccagcaagcaagcaaccatcagccggtccgtaagaagagcaatgccgaaacatcaggcaacgtggcaacacgcaagatactagaccacagcaaggagcaaccgtcgaagcacctcgtgaagcagcccaagaacaacccccggtcgaacaacgtcaagatgcacagcgaagagtaa

SEQ ID NO: 90237 - DNA, 3328 bp, Oryza sativa
  Clone ID: PAT_MRT4530_88925C.1
gtggcgaaggctatgaaccaaggatgatgcgaggcgaagggtcgcgtgagtacctgccgaagaaggagacggcttcgccatgtccagttcgccctggcatccagctcgaagaaggacggcttcaccatgtccagttcgcccccgcaaaggccgaagaagccttttcggcccatcaagcttaggggctatagggccgacggtcgcctgacggcccatcaagggcccataagtcctcttgacattatgtaaccctataaacgtccctttcataagggcaaccatttgtcgtttcgacaacagctggcgccgaccgtggggacctccgagcgaaaccactgagagcgaatgccaccgaagaaggtcgcgaaggagaaggttacaaggcgaaaggaaagcgacaccggagtgggcatggccgccgaagaaggagcggagccttcggcgtcggtcgccgaggttggaggggcaccggcaccatcactgctgccttcggcccgtgccacctctgagcaggcgccgagtgtgaatgacgtggcgaaggcgaccgcagtggcgagggcacttcagaccagggcggagatcctttcgacaagtcagctgctggtcccccaagctgctccgtcgcagccagcagcggcccaagctgcgctccctgccatgcaagtccaagtcaactccgaccctgaaacacaagccgaagccgatatggaggccatgcggcaaaacatggcatgactccaagacatgcttcgccaaatgcaagaacagcaacaagcgtacgaagcggcaaggcgatccaaggttgcttcggcaccgatcctccagtattcggcaggttttgtcccacctcaagtctatccgcaagtgcagcccaagcccgctccgccgcaagtcttgcaggcaccaatgtactttgtcggacagccgacagtggcagcagtgccccaagccgcgacccaagtacagcctcagccacttggccagctgtcgcaagccgtagcagaaggggcttcggctctgcaggcacaattccaagctttcctccagcaaatcaatcagccccacaacatttcgaatacagctccctcaactcgtccagaggggaattcaagtcaaggtgcgctcagttggttgccgccgaaccagccgaatctggggacttcgccgtggagtcaggtacctcagtgcgactttaccaataccgctcaggcgcaaaccgttcggtcgcaagcaccaacaccaggcttcggaacaagccaagcaccatcccaggtcgccatgacgtggtcgcagctagttttcgacccatccatggcggctcagcaagcatcaccagtcggagctaggcagccaaacgccatggctcaaaatcatgcgcaagccgtaatttcacctttcgccacgccgtacccacagcaaggcaccgcaggcagagcgggaggcgaaaagggtctgccgctgagtgggggaatcaagaatcgcccaattccgccccagttcaaattccttcccgtcccacgctactcgggcgaaactgacccgaaggagttcctatccatctacgagtccgcgattgaagcggctcatggtgacgaaaataccaaggcaaaggtaattcatctcgctcttgacggcattgcccgttcttggtatttcaatttgccagccaatagcatttactcatgggagcaattgcgcgatgtttttgttcttaactttcgaggcacttacgaggagccgaagacgcagcaacatctgctcggcattcgccaaaggccgggagagtcgataagagaatacatgcgtcgcttctcgcaagcccggtgccaagttgaagacataaccgaggcatcagtcataaatgctgcttcggctggtctgctcgaaggcgaactcacaaggaaaatcgccaacaaggaaccacaaacactcgagcacttggttcgcatcattgacggtttcgcaaagagcgaagaggattccaagcgacggcaagccatacaaactgagtacgataaagcttctattgccgctgctcaagctcaagcacaagttaaagttgctgaaccacctcccctcgcggttcgccagccttaaacggcgatccaaggacagccgccaaggcaaggtcaagctcccatgacctggagaaagttcagaaccgaccgcgcgggcaaggctgtgatggccgtcgaagaagtgcaagccctccgcaaggagttcgacgcccagcaagcgagcaaccatcaacagccggttcgtaaaaagtatgtgaaccagctgatctctttcgggccggaagacgccgaaggagtcatgttcccgcatcaagatccgctggtaatctcagctgagatagccggctttgaagtctggcgaatcctggtcgatggagggagttcggccgacgttatcttcgtcgaagcatatgctaagatggggttgccaacccaagctcttacaccagcaccagcgtcgatccgggggttcggcggagaggcagttcaagttcttgggccagcacttttgctgatagctttcggctcgggagaaaacagacgcgaagagcaagtactgttcgacgtcgttgacatcccgtacaactacaatgccatcctcggccgtgcgaccctgaacaagttcgaagccatttcccaccacaactatctcaagctcaagatgcccggcccagcgggagtgatagtggttaaggggcttcagtcttcggccgcgtcaaaaggcgatctagccataatcaacagggctgtgcacaatgtcgaagccgaattgcacagccggccgaaacacgtgccaaagccaaccccgcatgacaaaatagtaaaagtgcagattgaccatgccgaccccgcaaagctcgtatcactgggggacggcatgggcgaacaagaagctgagggcatcctagcggtgctcaaaaagaacattgatattttcgcctggagctccgatgaagtgggggggtgtttcggcagacctcatcatgcatcacctggcagtcaagccggatgccaagccaagaaagcagaagttgcgtaagatgtccgccgatcgtcaataggcagcaaaagccgtagtccaaaaactactcagggctggggttattcaagagatcgaccacccagagtggctggcgaacccagtactggtgcggaagtcaaacggcaaatgacgcatgtgtgtagatttcacggacctgaacaaagcatgtccaaaggacgatttccctttgccgtggatcgatcagctcatggattcaacaactggaaccaaactcatgcctgattccatggccttgtgtatgcatcat

SEQ ID NO: 90238 - DNA, 185 bp, Oryza sativa
  Clone ID: PAT_MRT4530_88926C.1
atgccgtctcccagcgatacgagctttgtggggcgaaggctgaagccccttgaccactatcactcccgctgggccgggcatcttgagtttgagatagttgtggtgggaaatggcttcgaacttgttcagggtcgcacggccgaggatggcattgtagttgtacgggatgtcgacgacatcgaaca

SEQ ID NO: 90239 - DNA, 342 bp, Oryza sativa
  Clone ID: PAT_MRT4530_88927C.1
cccacgcgtccggtgctatgcttgttcttgcaaaaaaaaaaaaaaaaaaaaaaaaaaaaaaaaaaaaaaagggaaaaaaaaaaaaaaaaaaaaaaaaaaaaaaaaaaaaaaaaaaaaaaaaaggggcggccgttcccaatctaaaacaaaggaagtctcatcctccctgaaaaaggtcggttccaaccctgacaagattccctttgtccccatctttgggtttgggggggacaccttgattgaaaggtccaccaaccttgactggtacaagggcccccccttgtttgaggcttttgaccaaatcaacgagcccaagaggccatcaaacaagcccctacgttt

SEQ ID NO: 90240 - DNA, 612 bp, Oryza sativa
  Clone ID: PAT_MRT4530_88928C.1
atgaccgaagaggagctccgggagcttctccgatccatcgactgctccctggcggccgcgagccacgcgatccagaaggccgccgacgaggccgaacagaagctctcgctccagcgcgcgggcacgctcatggcggtggactcctcctcccaggacgccgtgccgccacatgccgcgcccatggacatgggagacgaggtgcagggcgcgcagccaccaccggatcggtggttcgaagaggaacgagagccggtaatttgctccaaaaagaaaccagagccgtgctccgccccgccgccgccgccgccgccggcgaaccggaacggcgtcgcctacgaggccgaacaaaggcgcgcgtgcgcgctcatggtggactcccaggaggatgccgcgccgccgccgccgccgccggcgagcgggaatggcgtcgccgacgacggcgagtacatcaacctgggcgggtacatgatcgagcgcaaccgattcgaagcaatctggcgcgaacacgcgatccctcctccacaaagcctcctgccggagtcgttgccggacgacgacggcgagccgctgcggctgtggtcgttcgacgccggcgagagggtaatcctttga

SEQ ID NO: 90241 - DNA, 180 bp, Oryza sativa
  Clone ID: PAT_MRT4530_88929C.1
gcgtggtcaaatctcacccccgcaccaaggagccgcctttccgacgcttcaaaccaacggcgccgccaccctgacaggcggcctcgcccagatctcccagggagcccagccgcgcggcccacccactacaggtgcgcaaaccgacgaggcccgaaccggtgccgtcagggccggcccgcg

SEQ ID NO: 90242 - DNA, 609 bp, Oryza sativa
  Clone ID: PAT_MRT4530_8892C.1
aattaatttatacttgctttaataactcagtggttgatgcttactaaaatttttaaatcttcctaaatgtgatgtattagtgttcataataactaagttatttggaaattaatgtaattcaatctcatctatgacggagaatttatctgtaccaacatcatttttacgtaggtgaataatgccaaccctgtgtcccccctatctacatcctaataaacaatctgtgactaggttaatgtatattacataatgggagtttgcaatgtgattaaattaaggaccttgaaatggaaagagagcatcctggattaattggttgagcccaatataattttgtggtttaaaaccagagaggctttctcagttgtggtcagaaagaggagattatgactgaaggaaaatgaagatggagaaagaaagccagagccagcaaaacaggtggtcttgagaatctggagaaggcaaggaaatggagcctagagccccccggagagatggcaaccctgccaacgacttgttgttagcagcaagtccaatgagacccaggtcagatttttaatctgcggaactgcaagacaacacatttgtgcagtttaagacacatttgtg

SEQ ID NO: 90243 - DNA, 623 bp, Oryza sativa
  Clone ID: PAT_MRT4530_88930C.1
ccgggctgcaggaatcggcacgagggaaagaatgcctaaagaaaccttaatatatcattagcttaaggactagcaaaactgacatttgtttgctaattaacaagtcaagagatagtgacacgtcaatgaagtagacaaaatagaactaagattaacattcataagattccaatcctactcgcctgctcggtaaggcaatagccgcaaaaggtaagcaaacactactagttcattacatcgctaaggctaatttattatctcatcgtcatgtcatatatattttggcagaaggacaaccagcacatgtattagatgggcacaaaatgaagctaacagaagaacctaatcgagcaattcagacattgcgttcttcctgttgaatggatcggtagcagcaagcaaagacgccacagccctattggggaaaatgtcatcagccttcatcctctccttgaatccataaggtggggtctttgcattcagatatgcctcaagaagcagctgatactgtctaatcctcccagtataacccatctgccgcaccttgctgaacaatttctctgcattatggacgtctcctttcttggataactatcaagcagcatcaagtatgggtgtacata

SEQ ID NO: 90244 - DNA, 222 bp, Oryza sativa
  Clone ID: PAT_MRT4530_88931C.1
atggagctcatccagttgccaccatactcggcgtcggaggcggtggaggcagaacgggggcgtcgacctggggtggcggcgcacagtgctagcggcgctgctcgacggcggggtggtggggcgacgcacccgggcggcggccgctcgtcggcgcggtggtggggcggagccgctcggcggcgcagtggtgggtccatgggcaaaaacgtccacaaaccttga

SEQ ID NO: 90245 - DNA, 125 bp, Oryza sativa
  Clone ID: PAT_MRT4530_88932C.1
atgcccaatcctatcattgccctggcgtggctgattgacctggcagctaatggaacctcacgatgccctttctcgtcccgacggctggcgtgcactcgtgtccaccttgctgacgcgctggccca

SEQ ID NO: 90246 - DNA, 379 bp, Oryza sativa
  Clone ID: PAT_MRT4530_88933C.1
ggtgttggcgcaaaattgcaattgggcaatgcgtgtcgagttttgctggatgctgcacaaggagtggattatctgcacaaagggttgcaacaagtcaataattcaccgggatgtgaagactagtaacattctgttgggtcaaaacttacgagctaaaatagcagattttggactttctagaacttatattagtgattcgcaatctcacatgtgagccactgtagctggatcaatgggttacattgaccccgagtactcacacactggctggatcactgagaacaatgatgtctatagctttggtgttgttcttctagaggtagtcaccggtgagcttccgatattacaaggccatggtcacatcattcagcgtgtgaaa

SEQ ID NO: 90247 - DNA, 168 bp, Oryza sativa
  Clone ID: PAT_MRT4530_88934C.1
cggactggctctctggaatcacgccgagttttgtctacgacgcactaaatctacggttcgcccactggtcgctgctgtactatgatgtaccatttctgagatgatacgaggctgctaattcatttggctcgatgatgaggatttgccctattgaaaaaaaaaaaaaaa

SEQ ID NO: 90248 - DNA, 229 bp, Oryza sativa
  Clone ID: PAT_MRT4530_88935C.1
ataaggggataagctagcggccgctctgttttgttctggatgcactattccttgttcattgatgaatcaagctctgaggtaaggtggatgaattcacctttacttagtgaaggaaggcaccactttaagatacttatgactatcaacatttgttagccgagcttgtcggttattatatttattaaacatgtgtaatactatataatcccaaagcggccgccctctttcc

SEQ ID NO: 90249 - DNA, 553 bp, Oryza sativa
  unsure (1)..(553): unsure at all n locations
  Clone ID: PAT_MRT4530_88936C.1
cactgcnctgcgtccacctaaaacgcgccaacgannnnnnggagnagggacgacgccccccccacaggacggggngnggcgcaacacaaaccgcccccacaccctcgcaacccccggaaacacacacccccacccccgnnnncacaagaacgacaacacaacaaacaaagaaaacaaagccacgggaccgccacgcaagggccacgcaacccacacagggagaggcagngggccaccaagaaacacgaacaaccaacgccccgcccaacacccnnnngcacccggacaacaccaaagaggaccacccacnccaccagggacacccgcccgcgccaccccccccccccgggggaacagcccacgaaggaacaaggccacagnaaccaagccaacaggaaaaaaagaacagacggggccgggagaggggagggggcgatgggccgagagaaattcggcccatcgaccccgggggaggcaaaatagacttttgcggaggaatttgattggaatgattggattcggaattgaactcgacgatagatcggggatttga

SEQ ID NO: 90250 - DNA, 627 bp, Oryza sativa
  Clone ID: PAT_MRT4530_88937C.1
atgagtctatggaagcatctggccgcggccggagatggcgaggtggagacggtggtcgagctgctcgcgcgtccgggggatggtgcctccggcgccgggcgcggccgacgcggcgtcgggcacatcgaggcgaagaaccgtgcggtggatggtcttctcgaggcgctcaacaaggacgagaaaagcgtcctctcggtgcttggtcgcgccaatgtcgccgctctggtgcagctgctcacggctccggcgaccaaggtgcgagagaaagccgccacggtgatatgccagtttgcggagtccagcggctgcgaggggctactcgtgtcagagggcgcgctgctaggatgcgcggggagccgcccgccgccgcctcgcgcctcacgttctgggagccgtcgtcgccaccgccatagcctcctgcctcgcgcctcgcgcgcgcggggagacgtcgccgccgctgcctcgcgtgcgcggggagccgtcgtcgccgccacctcccgcctcgtgcgctgggagccgtctggccaccgcgaggcagtcgagaatccgatgcgggagaggaggaagagaaagagaaagaggaggaagaagaaggaaatggaggctgacatgtgggtcactttttaa

SEQ ID NO: 90251 - DNA, 244 bp, Oryza sativa
  Clone ID: PAT_MRT4530_88938C.1
gctggacgacgtggacgtggaggaattggaggaccccacgcctccgttgtacaagtgggccgttcgggcgcctcgcctcgggttcctaaagatggctacgcgcttggacatcggctgccggatcccggaggagcccccattgctggaggaggcgtacatcgacattggtaacagcttcatgagtttccacgaaattttccgagggattattactgtcaggaagctttggttcaacattcacgag

SEQ ID NO: 90252 - DNA, 3175 bp, Oryza sativa
  Clone ID: PAT_MRT4530_88939C.1
gcacgaggggtgcagcaggagaggagacgcgagcgacgacgacaaacaaagcagcgctcctgctcgctcgcatgccgtggctccccctccctgccgtcgctgtccatgtcctagtgaagtgtgaagccgccaatgaagacgatgtgaatatgctgtccattgcacaaggttgggcgagggcgggcggcggccagatcctgcctcccccaggatacttcggcccgcgttcccctccccccctcactcccacgggacacgcgccgccctacgcctcctcctcccttctccaactcccccaagactgcttgtgagagaagctactctaccctgctcggtttcttgattctctctctgcctgtcgtcggattgattgcaagatcaagataggctgcacagtggcgtgtgtgattaatcatgtgtgcctgatgcacttgtagctggggatgcaggtgaatctgaggccgttactgtaccaagaacaggaggatcactagaggggaagagattcttgacgaagcacacaaagggaggatcctaaattgatgtagcaggaatgtcgagtgggctcaagaagaagggcctggagtgggatttgaacgattggagatgggattcaaacctgttcttggccacaccatccaacgcttctccatccaagtgcagcaggagggaattgggccgagccgagggggagatcgattttggtgtggttgataagaggagaagagtctcaccagaggacgatgacggcgaggagtgcatcaatgcagcaaccacgaatggggacgatggccagatttctggtcagagaggaaggagcagtgaggacgagatgcctaggcaaggcacctgttctagtagcggtccgtgttgccaagtcgacggctgcacggtcaatctcagcagtgccagggattacaacaagaggcataagttttatggtaattatttgacatgccttgtcaggtttcactttcttcaagaatttgatgaaggaaagaagagctgtcgctcacggctagcacaacataacagaaggaggaggaaagtacaagtgcaggctggtgtagatgtgaattccttgcatgaaaatcattctttgagcaacacattactcctgttgttgaaacaactttctggcctagattctagtggtccatctgagcaaatcaatggtcctaactatttgaccaatcttgtgaagaatcttgctgctcttgctggtacacaaagaaatcaagatatgctaaagaatgcaaattctgctgcaatagcatcacatactggtaattatgttgcaaaaggcaatagtctacatgactcaagaccacatattcctgtaggcactgaatccactgcagaagaacctacagtggaaaggcgtgtgcaaaattttgatttaaatgatgcttatgtggaaggagatgagaatcgaacagataaaattgtgtttaaactcttcgggaaagagccaaatgattttccttctgatttacgtgctcagatcctcagctggttgtcgaattgcccaagtgatatagagagctatatcaggcctggctgtatcatcctaactatttacatgcgcctccctaattggatgtgggataagcttgctgccgacccagctcactggatacagaagctaattagcttgtccactgataccttgtggagaacaggatggatgtatgcaagggtgcaggactacctgacattgagttgcaacggtaatcttatgttagcgtctccctggcagcctgcaataggcaacaagcatcagatattgtttataacccctattgcagttgcttgttcttcaacagcaaacttctcagtgaaaggtctcaacatagctcaaccaaccacaaagttgaagatcttgatcaaagcagcctttcatttccctttgttgttgctgaagaagatgagccacatacgagctacatctgagactccaaaagattgtactgagggctttcctgctgcaagatttagatggttgctgtcctttgcagttgatcgggaattttgtgctgttataaagaagcttctggacaccttgtttcagggtggtgttgatctggatgtccaatcaacagttgaatttgtcctgaaacaagatttagtatttgtggctgtcaacaaacggtcgaagcctttaattgactttctgttgacatacacaacatcttctgctccaatggacggaactgaaagtgctgctccagctcagttcttgtttacacctgacatagctggtccatcagatattacacctcttcatattgcagccacatacagtgatactgctggtgttttagatgctttaactgatgatcctcagcagctgggaatcaaagcatggaagaatgctcgcgatgctactggattgactccggaggattacgctcggaagagaggccacgaatcctacatcgagatggtccagaacaagattgacagcaggttacccaaagctcatgtgtctgtcaccatatccagcaccacatccaccaccgacttcaccgaaaagcacgcgagccaatcgaagactacagatcaaaccgcatttgatgtggagaagggccaacagatcagcacaaagccaccactgagctgcaggcagtgtctcccagaactcgcttaccggcatcatttgaacaggtttctgtcaaccaggccagcagtactctccttggtcgccattgctgctgtctgtgtctgtgtagggttgatcatgcaggggccaccccacattggaggtatgagaggtcctttccgctggaattctttgcgttcaggccccaagtgatatggtagattgactgccaagcatctgcaaatacagttcagctgtatcatgcagcatggagatgttttgcttcgagtctgtatattcttgtaacatagatttatctttttacggaataactatatttgtttactactttactgtacaacatttagaattcgaaacttgcatatctagaaattccattggacaggcatcctgaccttgatagaatgcagtactatctgaatggttttaccgtgagcagagcagctgacagagtgacagtgcttccatgctctttaataatactccatccgtctcataatataacaaaaaaaaaactcaactagtctctcccctcgtgccgaattcctgcag

SEQ ID NO: 90253 - DNA, 294 bp, Oryza sativa
  Clone ID: PAT_MRT4530_8893C.1
atgccgcagtcgctcgccacggcagcagcatcacggtccactggcagcgtgctgcgggtggtggcgttcaggggccggggtgtccggtctccggtccggccgtgcatggcgatgtacactgtcaacgctgatgccccagccagccagcccacagtgtcctacctctgttggtgtgtcatgcactcatgtgtgcatgtggccacagccgagctttatcgggtttctcgcatggagccgaggtactgcgaaaaggtcgccacaaaatgcagttcaaaggggctgtttggttcctag

SEQ ID NO: 90254 - DNA, 588 bp, Oryza sativa
  unsure (1)..(588): unsure at all n locations
  Clone ID: PAT_MRT4530_88940C.1
gagctcacttctcggagagnctcccttnnngncnnannncantngttgtgggctttgtggtttttggggactaaacggccgccaattaaaactgggaaacaagcaaaaggcatacagagacataccggctatcaaaaccaaaagtaaagcacagaaccaacaaagcatgtaaaggaatgaagctcctaaaacatccataaagcaaaactagcaaatgaagcatccaccctttcctcctccaagaataaagactttcctgaaggttttgccagtaaatctgggtactcttggaatggagatttggagaagcgagcctccttccaaaattctgggggcaggaatccataggttttcatcaagcaatcaaaagtagccttaacgaaggtgccgagggtcttgggggatcctctggaggaggtgaaaacatcatcaatccccgcgaactgcagcaccttcttgggaaccctagccgccacgatccccgaacctctcggggcgggaaccatcctaacggtaacggagccgcacttccccgtaaccttgcacgggacgggggggggcttcccgatcttgttcccccagaacccc

SEQ ID NO: 90255 - DNA, 1725 bp, Oryza sativa
  Clone ID: PAT_MRT4530_88941C.1
actagtggatccccgggctgcaggcaataactccctcctccttctccttctgctcctagtactagtagagcagcggcggcaatggcggcgcctcctctgctgagcctgagccagcggctactcttcctctccctctccctccccaagccacagctcgcccccaacccctcctctttctcccccacgcgcgccgcctccaccgccccgccacctccggaaggggcgggccccgccgcgccatcccgcggggaccgcttcctcggcacccagctcgcggccgaggccgccgcccgcgtcctcgctccggaggacgccgagaggcgccgccgccgccgggagaagcgcaaggccctcgcgcggaagccctccgccgccgcctgctacggctgcggcgcgccgctgcagacggccgacgaggccgcgcccggctacgtccaccccgccacctacgacctgaagaagagacaccatcagctgagaaccgtgctatgtgggagatgcaagctcttgtctcatggccacatgatcactgctgttggtggccatggcggctatcctggagggaagcagttcgtttccgcggaccaactcagggacaagctctcctaccttcgtcatgagaaagctttgattatcaagctggttgacatagttgacttcaatgggagcttcctggcgcgtgtgcgcgattttgctggtgctaatcctattatactagtcatcacaaaggttgatctccttcctagagatacagatttgaattgcattggcgactgggttgttgaggcagttgtcaagaagaagctcaacgtacttagtgtccatttgacaagctcaaagtcactcgttggcgtcactggggttatatcagagattcagcaggaaaagaagggccgagatgtatatatactgggttcagcaaatgttgggaaatctgcatttataagtgctatgctaaggacgatggcatataaggatccagtggcagctgcagctcaaaaatacaagccgatacaatctgctgttcctggaacgacccttggtcctattcaaattgaagcatttttaggaggcgggaaattatatgatacacctggagtccatcttcaccaccggcaagcagcagttatccatgctgatgatctgccttctcttgcaccacaaagtcgtctaagggcacggtgttttcctgctaatgatacagatgttggattgagtgggaattcattattctggggtggactagtccgtattgatgttgtcaaggctcttccacgcacacgactgacgttctatggacccaagaagctaaagattaatatggtcccaaccacagaagcagatgaattttatgagagagaagttggagttacattgactcccccagctggcaaagagaaggctgaaggatgggttggtctgcagggtgttcgtgagttgcagataaaatacgaagagtctgatagacctgcttgtgacattgcaatttctggtctcgggtgggttgcggttgagccacttggtgtgccatcaagcaacccagatgagagtgctgaggaagaagacaatgagagtggtgaactgcatttgagagtacatgttcccaagcctgttgagatctttgtccgacctccattgcctgttggtaaagcagcatcgcaatggtacagataccaggagttgaccgaggaagaagaggagttgagacctaaatggcattactga

SEQ ID NO: 90256 - DNA, 409 bp, Oryza sativa
  Clone ID: PAT_MRT4530_88942C.1
cccccctttttttgttgttttttttgaactttgggttcctcctttacaaccgggacatcaaatgttacatgagaatatactaacggttctactgtactgcacaaacttgccactgcaagcatcaggtctacactttcctgtcatcactcaggggaactcaagggggaaaaaagcagatcattgatattattgcaaatcaacaaactacaatacatgagcacgtatattatgtgcatacgagcagatgaaacaagcaaacatgctagagaagaagacatggtctattcagcgaatctgaaactcggtatacccatttctgtcatccaatcaacacacccgcgaccaaagggcaagccaaaaaatgatcgaaccacagcctcaatttttgactagcagagcgggcacacta

SEQ ID NO: 90257 - DNA, 283 bp, Oryza sativa
  Clone ID: PAT_MRT4530_88943C.1
accacgcgttggtggacaccctgttgcctaattatggctcaacctgactgctaatgagagggcagaaaaacagaaattgtgttggtagggattgatcctaatcactacaaggcacataatacatatgtgcctgtcactaggaagggatactgtgagttcaataaggacgactacctaattgtagggcactccacaggattctgcgaacctgggcgtgcacgaatagcaaatgatgcaacttcactgcttactgctcacacggtcataattactcagataaatg

SEQ ID NO: 90258 - DNA, 481 bp, Oryza sativa
  Clone ID: PAT_MRT4530_88944C.1
gaagaacaaggtgagtataaaaatataaaatcctaaagagtggatcttcgtacacttcgttgacaccgtggaagcctacttaagtgttccaaaatcgagcagtcatgatacaagtaaaatttgccgggcaaatgacatccgcaggtcaaacaaaaaaccacggcagcataaacctgtaaaccagaagaaaacaaaatcaccatcctttgttgcttgcaaagtcgccaccaactacggcagcatatggtcgatagctcagagcacaataaaaatccatgctggcatcaaaatctgttggtgcaaaaccaacctagaagaccttgcacacaacaaaggtgttcctccgagtcatgaataattacttttccatacttctagttgctctcgtgtccaagttcttcaagtatctgttgcgcttcagctagcaacccctgcaatgtcaatgcctccgacacagcccacgcgtccgcccacgcgtccg

SEQ ID NO: 90259 - DNA, 321 bp, Oryza sativa
  Clone ID: PAT_MRT4530_88945C.1
atatagttatggaccaaaaaccacggactcttattaggacctgatcactaactttacaagcttgttggtccggaccgaaaatattaacttttcaaggatgtgtacattgggccgggaaactttacttggaggaaaggttgggccgtaaggcgcgggagggcccacaagtatttaaaggagcaagtagaggaaggcatgatcagggggtcttcaattgacgccgtcgttgacgttgggcgaacgcgccgtctggtgcccctgctggcggagcggtttcgggaggtaggactccaacccccggaggaggttcttcccacccag

SEQ ID NO: 90260 - DNA, 282 bp, Oryza sativa
  Clone ID: PAT_MRT4530_88946C.1
ttttgttggttttttgagaatgatggcaacaaactcaattcgtactgctcatcattttactatgacatcacgaatccatggtgctaatcctaacacttatggaggtacattgcaatttgcaaagctcattctgtgcctcccattaatacaacgatcttgcccgtgacatggacttgcatgcacttagcccaagccttctgtgctctgctcaaagggtccttggaatctatggtggtcttgacctttcgttgcttggccatgtcgaccagccactccatctac

SEQ ID NO: 90261 - DNA, 347 bp, Oryza sativa
  Clone ID: PAT_MRT4530_88947C.1
aaacaggaggggtttgttttcgacgcggccccccgggccccgttccagacaaaaaagtgttatggggggggggcgggcaaaacgtgacccccatatttttttgtgggggggggggggcagaaccgcctccctcagggggcccaggagcactgcggccgggacggggcccccgcacaagaacgggatgggggccacaacactgcaaagggaaaggcgggctctgggacctctggcgcccgcgcgggggggggggccaaaaaggccgacaaccgtccgggggctcacaccggcgcgggcgtttaagcccgggccggggacggcccgacccccggagcccgggggggggg

SEQ ID NO: 90262 - DNA, 1128 bp, Oryza sativa
  Clone ID: PAT_MRT4530_88948C.1
atggagttcactacaagcagtaggttttctaaagaagaggaggacgaggagcaggatgaggcgggaaggcgagagatccccttcatgacggccacggccgaagccgcgcctgcgcccacgtcgtcgtcgtcgtctcctgctcatcacgcggcttccgcgtcggcgtcggcgtctgcgtcagggagcagcactccctttcgctccgacgatggcgccggggcgtctgggagcggcggcggcggcggcggcggcggagaagcggaggtggtggagaaggagcacatgttcgacaaggtggtgacgccgagcgacgttgggaagctgaaccggctggtgatcccgaagcagtacgccgagaagtacttcccgctggacgcggcggcgaacgagaagggcctcctgctcaacttcgaggaccgcgcggggaagccatggcggttccgctactcctactggaacagcagccagagctacgtgatgaccaaggggtggagccgcttcgtcaaggagaagcgcctcgacgccggggacaccgtctccttctcccgcggcatcggcgacgaggcggcgcggcaccgcctcttcatcgactggaagcgccgcgccgacacccgcgacccgctccggctgccccgcgggctgccgctcccgatgccgctcacgtcgcactacgccccgtgggggatcggcggcggagggggattcttcgtgcagccctcgccgccggccacgctctacgagcaccgcctcaggcaaggcctcgacttccgcgcttcaaccccgccgccgcgatggggaggcagggcggcgggctcaccggtggtgctcgactcggttccggtcatcgagagccccacgacggccgcgaagcgcgtgcggctgttcggcgtgaacctcgacaacccgcatgccggcggcggcggcggcgccgccgccggcgagtcgagcaatcatggcaatgcactgtcattgcagacgcccgcgtggatgaggagggatccaacactgcggctgctggaattgcctcctcaccaccaccatggcgccgagtcgtccgctgcatcgtctccgtcgtcgtcgtcttcctccaagagggacgcgcattcggccttggatctcgatctgtag

SEQ ID NO: 90263 - DNA, 999 bp, Oryza sativa
  Clone ID: PAT_MRT4530_88949C.1
atgagagaagaagaaataaagtggtataatagggctaaatctaaagatattatggacggtgattctaatacaaagtatttccatttggttgcgaatggcaagcataggaaaactataatttttcaattacaggatggtgatcaagtaataaatggtgatgcgaatttaaaatcacatattaccacttattataaaggtttatttggtcctcctgatgattctactctccaatttgatgaaaatagaactgaagatattcctcaagtttctcttttggaaaatgatgctttgacacaacctttctctgaaaaggagattaaggaggccatttttcaaatggaacataacaatgcaccagacgctgaggatgatcaaattggtggtcatggtggtcatgttggtattaaagtgaatgatcaaattggcaataatttccaaacttataaaggtcttaggcaaggggatcatttatctccaatcctctttaatatagtggcggacatgctcgctttactaattaagagggctaaggagggtcttttcctgtcaagtaccttggcattccaatgcattttagaaaacttagtaacaaagattggaaagttattaaacaaagaattgagaaaaaacttagtagttggaaagataccgaaaggggttcttcaaaagattgattactacagatcacgtttcttttggcaaggagatgatcacaagaaaaagtatagactcaccagatgggatataatttgtcaacccaaagatcagggtggtctggggtccataatttggaggaataatgtggtttttgacaaatcatcatctattacatatatgcaggtaattttcagggcaacatactggctccggctctgggctcaactacaaaggtctaatgaaaatggtgagttcataaaggttgcatgtcagaagcttgagacgatggttatgcaactctttgccaattatggatggggattcacaaatagacttcaataa

SEQ ID NO: 90264 - DNA, 327 bp, Oryza sativa
  Clone ID: PAT_MRT4530_8894C.1
atggctgtgctgccccagccgccgttccgccgccgacgagctcaccgtggacaggccatccccgccgagctcggctatggcgcagccatggcggccatgcgccccgtccctccaagcgccgccgcagccggtgggtggtcgccggagcttctccgcacctcccctggccgccgccgggtcgccctcggccggccttccgtgcgcgccgtgttcccctgctgctcccgctcggtcgagaggaagaagacgaaggaggtgaaggttgatcaagattatatcaagaataagaactaccctgagcaggcaagtcatcaccccatcccttga

SEQ ID NO: 90265 - DNA, 1722 bp, Oryza sativa
  unsure (1)..(1722): unsure at all n locations
  Clone ID: PAT_MRT4530_88950C.1
gattcctcctctctctgctcttctccctctccctagctagagcttggcttgcttcctccaaacacagctcgagatcaataggaattcataggaacaacaatacaatacatacacgcatacataggtagatcatatccccctctctagtatcctatagcttacttctttgtaacagtgcctatcctcgaacatcttgcagaggaggaagaaggaagaagaagaaggaggagttgggagagaggagcaagaaatacagccaagaatttgaggaaatagtgatagttttctatggagttcactacaagcagtaggttttctaaagaagaggaggacgaggagcaggatgaggcgggaaggcgagagatccccttcatgacggccacggccgaagccgcgcctgcgcccacgtcgtcgtcgtcgtctcctgctcatcacgcggcttccgcgtcggcgtcggcgtctgcgtcagggagcagcactccctttcgctccgacgatggcgccggggcgtctgggagcggcggcggcggcggcggcggcggagaagcggaggtggtggagaaggagcacatgttcgacaaggtggtgacgccgagcgacgttgggaagctgaaccggctggtgatcccgaagcagtacgccgagaagtacttcccgctggacgcggcggcgaacgagaagggcctcctgctcaacttcgaggaccgcgcggggaagccatggcggttccgctactcctactggaacagcagccagagctacgtgatgaccaaggggtggagccgcttcgtcaaggagaagcgcctcgacgccggggacaccgtctccttctcccgcggcatcggcgacgaggcggcgcggcaccgcctcttcatcgactggaagcgccgcgccgacacccgcgacccgctccggctgccccgcgggctgccgctcccgatgccgctcacgtcgcactacgcccccccctcgccgccggccacgctctacgagcaccgcctcaggcaaggcctcgacttccgcgccttcaaccccgccgccgcgatggggaggcaggtcctcctgttcggctcggcgaggattcctccgcaagcaccactgctggcgcgcgcgccgtcgccgctgcaccaccactacacgctgcagccgagcggcgatggtgtaagggcggcgggctcaccggtggtgctcgactcggttccggtcatcgagagccccacgacggccgcgaagcgcgtgcggctgttcggcgtgaacctcgacaacccgcatgccggcggcggcggcggcgccgccgccggcgagtcgagcaatcatggcaatgcactgtcattgcagacgcccgcgtggatgaggagggatccaacactgcggctgctggaattgcctcctcaccaccaccatggcgccgagtcgtccgctgcatcgtctccgtcgtcgtcgtcttcctccaagagggacgcgcattcggccttggatctcgatctgtagcgacctaaagagagaaaaacaaaggaaagttcatcaacgattcttttttcttcttctgttttgatttggtttgttcttcttctcgcagcaacatcgatctcactttctcttgtgattccattataacctgaaatttgatgacagcattaggatttgacatttttgttttgttggccacttaattggaatctttctgttggtttgagaagantatagagaatntattaggag

SEQ ID NO: 90266 - DNA, 2022 bp, Oryza sativa
  Clone ID: PAT_MRT4530_88951C.1
atgactaacaagactctccgtgaattcgctgctccctctgctgacaatgtgaccattgggccacaaattaacctgggagacgtggattttgatttgaagtctagcctcatcacgatgcgcaggctagccctttctgtggcaaccaaatgagaatgccaatgctcatttacagtagttcctagagatttgcagcacatacaccatgaagggtgtcagtccaaacaacgttaggctacgactgtttccgttttctctccttgggaaagcgaagaagtagttttatgctaaccatgctacgatcaatacctgggatagatgcttcacgacattcctctcaaagttctttccgatggaggcacgggaacgacttcaagaatatgtggccgcctgtcctcatcatgggatggatgactggctgatcttgcaaaatttctataatggactcactcccatgtcccatgaccacctagacacggcagctggatgagatttcttctcaaagacggttcgaggagccatcgatttgatagagaagatggtctctaatatgggttggagcgaggaacgactccaaacccgtcagcgaggcatgcacaccgtcaaggagatggaaatgctcgctgccaagatggacctcctcatgaaatgattggacgaccatgacaaaaggccacaaggcatcgtcaaagccttggactcacacgttacatgtgaagtctgcggcagcacgggtcattctgggaatgattgcccggaaacccatgaattggcgatgtacatgggcaacaacaacaatgggtatcgtccacaaggaggtcaggggtggaatcagccatgcccatattatcaaggagctaacaacaacggtaacttttctaaccaaccctccttgaaagatctcgtttttgtgcaagctaagaccactgatgctttaagcaaaaagctagctgccaattctcaattagctgccttagtacctgcaaatgagtctgggaggattccggggcagcggactcctccattgaaaatgttaaggtgatcaccacgaggggaggtaagtccacttgtgatctgccatatcctaaccctgtaggaactaacaaggaagcgccatctggtacttcagctgacaaaaagattcagctagagaaggttgtgccacaagcatactatgacacgcaattgctgccatttcctcaaaggaacaggaaaccgtcagtggacgagcagtttgctcgttttgttgaagtgatctagaagattcacatcaatatgccgtagttggatgctatataagtgctaacatacgcacgttacctcaaggatatcctcaacaacaagagaccgctcccaacaatggaggtggtcaagctgatggagcagtgcaacaatgccatactccacaagttcccggaaaagaagaaagatccggggtgtcctacgatcacctgctcgatcggggcacaacagttcaaccaagccttttgtgatattggagcaagtgtcagcgtcatgcccatggacgtctttgaaaagctcaacttcacgatgttggcaccaacgccaatgcacctgcagctggccgactcattagtccgttacccaacagggatagcagaggatgtgccggtcaagatacgggattctttcatcccagatggtttcgtggtgctggacatggaaacaggaaaggaaacactgctcatcttggtgcatccattccttaaaactgcaggagccaacattgatgtgggaacgggaagtatccgtttccgtattaacgggaaggaagagaaatttgagtttcagccaaggactaaacactgctccatggtcagaatcaagtacgggccaaacctacaaaatatcctggtgaagttcatgcaaaatttcctggaaaaggaaaccacgtttcccaggaaccgttattggaacacactggtaaaacctagtgttccggccaagaagctagagcagccggcttagaagaagttgtctcccgcaccaaagccaaagaaggtg

SEQ ID NO: 90267 - DNA, 717 bp, Oryza sativa
  Clone ID: PAT_MRT4530_88952C.1
agggccgcggtgcccggctcgcggggcgccacccgcgccgcacgactgcccacccggtcccttccccttgccggccggcccaaccaatcccccgtgcccgcgcgcaccaaaccgaccatcccgacggcgaatcgcgtggtgtgttccgcgcgcgcgcggtcttagctctcggacgatcgcgctcgcggagtcgcgggggttcggccagtttccgcgaacgttcgctcggcggagggcggagagtagatcctgtccaccgttgcgtggaccggaggcgggccgcgggggaggcaggcggaatcttggggcggccagtcggcacgcacgtctcaacgtggcccagatgcgatccgggggggaggactagtttactcgcggccgtacggtgccgcacctgtacgcttgtactcctacgtgactgaacgaccaggaaacggaatgtgttgttggcctttggttctgaggagagaacggccggggaagctgcagagatcgagtcgatttggatcgccgacgcccgttgatccgtagagaacgatcggttgaaattggtagaggaagaagcacggaaattacaacagcacatgtacagctagaggagagtaggagacagggttttttttcttggttgacccttcatacaaatgccgtgcaaaatattcacaaaacccaaccctgcatcaagctagagtatttaaaaaaaaaaaaaaaaaaaaa

SEQ ID NO: 90268 - DNA, 1929 bp, Oryza sativa
  Clone ID: PAT_MRT4530_88953C.1
gttgtccagttcaccaccaaagctgtggtcgatcccctccacacgaagaatggcggccgtcgatacgccggagaagccgtacgagggtaagccggcggcggaggcgaggagctactggcggtggcagaaggaagatttcttcccggagccgtccttcgcgagctggggcgcgtaccgcgcggcgctggccgcgacgcccgcgcggttccgcgaccgcttcgccggccgctccaccgacgccgacgagctcggcgcgctgcgccgccgcagcgagaacgagatgcgccgctgcctcacgtggtgggacctcacgtggttcgggttcggctccgtcatcggtgccgggatcttcgtgctcaccggccaggaggcgcacgaccacgccggcccggccatcgtgctctcctacgtggcctccggcctctccgccatgctgtccgtgttctgctacacggagttcgccgtcgagatccccgtggccggcggctccttcgcctacctccgcgtcgagctcggcgacgtggcggccttcatcgccgccgcgaacctcatcctcgagagcatcatcggcacggccgcggtggcgcgctcctggacgtcgtacctcgcgtcgctcatcaacaagccggcgagcgcgctgcgcatacagacgtcgctcgccgaggggtacaacgagctggaccccatcgcggtggtggtgatcgcggtcacggcgaccctggccattctgagcgccaagggcacctcccgcgtcaactgggtcgcctccgccgtgcacgtcctcgtgatagccttcgtcatcgtggccggcttcctccacgcgaagaccagcaacctgaccccgttcatgccgcacggcgtgccgggcgtgttccgcgcggcggcgatcgtctacttcgcctacggcgggttcgacaacatcgcgaccatggcggaggagaccaagaacccatcgagagacatccctctcgggcttctcggctccatgtcggtgatcacggccatctactgcgtgatggcgctggtgctgagcatgatgcagccgtacacggcgatcgaccggagcgcggcgtactcggtggcgttcagcaacgtcgggatgcggtgggcgcagtacgtggtggcgctcggcgcgctcaaggggatgacgacggtgctgctggtcggggcgctcggtcaggctcggtacaccacgcacatcgcgcgcagccacatcatcccgccggtgttcgcgctggtgcaccccaggaccggcacgccggtgcacgccaccgtgctcatcgccgccgccggcgcctgcatcggcctcttctccagcctcgacgtgctctccagcctcctctccgtcagcacgctcttcatcttcatgatgatggccaccgccctcctcgtccgccggtactacgtgcggggcgtgacgagcaggacgcacgcgaggcggctggtggcgttgctatcggtggtcatcggctcgtcggcgggcatcgcggcgtactggggcgcggcgccggagcggtgggttgggtacaccgtgctggtgccggcgtgggcggcgggcacgctcggcatccagcttctggtgccggcggcgcgcgcgcccaaggtgtggggcgtgccgctcgtgccgtggctgccgtcgctgtccatcgccaccaacctcttcctcatgggctcgctcggcgcgcaggcgttcatccgcttcggcgtctgcaccgccatcatgctgctctactacgtgctcgtcgggctgcacgccacctacgacgtcgcgcacggcgcgtgctccggcgacgacgtcgacgaggaggtctacgctgatgccgcccacgtggacgatgcgaaggcggcggccgcggtcgctgccaacgcagacgtggagagggcgggcgcgaagatctgacttctatagtgtcacctaatcattcctgc

SEQ ID NO: 90269 - DNA, 1045 bp, Oryza sativa
  Clone ID: PAT_MRT4530_88954C.1
gctcgtgggccacggggcgagcagagaagtgtcgcttctcggttcccacctccgaccccgagccgcgccgccgcctataacgaccacttcacgtgccctatctttctccgcctcctcgctcacgagctcgtcctcctcttcttctcctccttccacggaagtctaggttcatctctcctctcctctcctctcctcctcgagcgccaagaaacccaaaccaccgacgtgtatggactccaggaagaaatcgccgccctccaccgccgccggggccgcgccggcggcggcgaacgggtacttcagcaccgtcttctccgcgtcgcccacggcaaatacgaaagacgcgaagcaggcggacctgtacgcgatgctgaacaagcagaactccaaagggcagaatggcggtggctttgcagatggcaaatcgcacagccctactaaagctcgtggtgcatacaaggatggtaaacaatcatatccaaacgagtcatcggagtcgccatattttggctcttctgtgcattacggtgctcgggagttttatggcaacactccaccaaagcagggtgatgcatcaccaggaaatcaaaaggagcaggagcagaatccagatggctccctggctaccagaggtgattggtggcaaggttcactctattactaagtactttgcagagggctctccttttgtcaaacaagaaataaaaggagtggtccaagccggtttgcaagtcatagtggaactatacatctgttctaccggtggaggcagtatttggatgcgtcatttcacctgagcagatgtggttgtgtgtgttactgtgcatgtgtgtgttgttttcctttttttttcctcttgccctttgttttgctgtttttacctgatgaagtataatgaaatggtagggcagcaacaggtagccctttgttttgctgttttcacctgatgaaatgtgatgagatggtagggcagcaacaggtagccttcaataaaagaaaaggttgctacttgcaacattactgatctttcttcttcagtggggcg

SEQ ID NO: 90270 - DNA, 369 bp, Oryza sativa
  Clone ID: PAT_MRT4530_88955C.1
atgactcccgatgagaggaaatcttacatagcacaaaggcatcaggaaaaggtgctagatgtcgctatgtacatagctatggcgcttgaatctacgcaggacaaggacaatcctaaggctaccgccagcgaagacatgtctttgctggtggacgttcctttgtcagccgccagcgaagatgtattttggctggcggccgctcgaccttctcccctcctgacgctcgcgcgaggcggccgggagcggcagcgccctccccatgcccggatccggcggcggctgctgccccttgcccggatctggcggcggcggcagtcccccgtccggatttggcggcggtggcggtggggtgcccggatcttgggttag

SEQ ID NO: 90271 - DNA, 801 bp, Oryza sativa
  Clone ID: PAT_MRT4530_88956C.1
ttttttttttttttttgaacataacagaatcttattttcctcacaattggaatagcgaaattgcaagagacaacgatattttgcttaacacattgttattgcctcagaaacaataatcatgtcttaaaatcaccaagagtacagcaatggagtatcacctagttaaggaagaagctttccagccataaagcaggcaaacttattgctccgggaatactcatacggcacgccggccacggtgagcaaccgctcgaggacctgcttggcctgctcgggctccgccgtttcacactccagctcgtagttcgtaccaaagtcgaagcgcgtctcgtcgagctccacgacgagcccgagggtgtcgccctcctccagctggtacacggcgcgggtgttccggaacccgccgaggcagacgaacggcgcggcgtccccgccgacgccgtactcttcggagacgagccgaatgatcggggactcgaccccgccgaggcttgccgggtcgtcgacgcaggcgagggcgatggcggggtcgagaggctcctcgacctcctcgacgcggctgacgcccgcgtcgatgcgcgggcggcgcttgagcgcgaggacggcgcgggagggggcgcggtcgtcgaggccgtagaggcggacgcggagcgcggcggtggcggcggcgagggggcgcgcggcggcgtcgaagaagaggttgcgctgggcgtcggtgcgccgcaggcggggcgcgaggaaggaggagagccggcggtgcgcgccggcgtcggggaggcggagcttgatctcgacctccat

SEQ ID NO: 90272 - DNA, 386 bp, Oryza sativa
  Clone ID: PAT_MRT4530_88957C.1
attagcagctctttcaaaaagcacttatgtatttttaatgccaaatgtagctgagtgtcagtgtagcagcaatggaagcagcagggcacctggatagttttaaataagaggaaactcagatcattatttttgaaactgtcagcttctacgccttttaatggattcactttctctcatctctttccccacatctgtgctctttgaagattcccaggcattctccgtgggagaaaggaacagaggcacaggtctgccatatggaaggacctgggctttagttccaaccagggacactcagagtgtccccgggagggaggctttaacacatgcgcttgcaaagagcatcagagagaagaggaaagagagagagttccagcctgagatac

SEQ ID NO: 90273 - DNA, 1481 bp, Oryza sativa
  Clone ID: PAT_MRT4530_88958C.1
atgggggcgtcggggaagtggatcaagtcgctggtgagcctcaaggcggcgccggaggggacgacgaaggggcggaggtggacccggctgtggcggagcagctcgtcggcgtcggcgtcggcgtcgaccgcgggggacgcgtcggagtcggcgtcgtcggaggccgacgcgttcagctcggtcgtcgccgccgtcgtccgcgcgccgcccagggacttccgcgtcatccgccaggagtgggccgccgtccgcgtccaggcggccttccgcgccttcttggcgcggcgggcgttgaaggcgctgagaggcatcgtgcggctgcaggcgctggtgcgggggcggctggtgcggcggcagctcgccgtgacgctcaagtgcatgaacgcgctgctgggggtgcaggagcgcgcgcgggagcgacggacgcggtgctcggcggatggccgggactcgcaggacgcggtcggcgagcgcgacggccgcgccgacccgatcaaacaagcagaggctttaatattgcaactactccctccgtttcacaatgaacaatggtgtgacagtcaaggatcggtttctgaagtaagatcgaaaatacacatgaggcatgatgctgtggctaagagggaaagggcaattgcttatgcgctttctcaccagcctaggagttcaaaacaaagtgcaaggccaagctctcctgctagatctctgaggaaccatgagtctaataggtgcaatcacgactggagctatattgaaggatggatggcaacaaagccttgggagagcaggctcatggagcaaagccatgctgaattgaagtgttccaagaacagtggcgaactgaacttagctggcgcccaactttcaaatgcaagctcagttaagatgagagggaacagggtggcagcaaagcctccttctgtactctcagcttcttcttcagacttcccgtgtgatgtgagctctgcatcgacatcgtcagcaactccagcaagatccgacggtggacatggtgaaggtccgagttacatgagcttgacgaagtctgcaaaagcaaggcagagctgcaacagtccattccagattcagagacagcgatctggaggcatgtcatcttacaaaagggttgcactctctccattagatgttcagagcaacgcctgttcagaattttcagtcacctccaggaagttaaacagtctgtctctgaaaggccgtagcatgacaaggagcttggacaaggagaatgacaatctgttctagcttgctgttctatggacaaattagctaatttgcatcttacatatatattatctgatccgttgttagcatttatacatccaagccaagctcaatgcctcattgcctctatcatgttttttgtatgcacaactgagattagtcattagttaaatgtctgaacctctttttatccctaaatgctgtgtagtagtattataaagagctgcagttctaattgg

SEQ ID NO: 90274 - DNA, 2590 bp, Oryza sativa
  Clone ID: PAT_MRT4530_88959C.1
ctcaaaaaagggaaaaaggtcgcctcgcctcacctccttccacggctccaccgccgctgccgcgacggcgaccatggcggaggcggcaacgcgagggctgccgccggtgagccccggcctcccgctcccggaggagctcgtggtctgggagatcttggtacgcctaccccccaagcccctcctccgctgccgcttggtctgccgcgcatggcgccgcctcacatccacccgcgacttcctcctcgcccaccaccgccaccagccctccctccccctcatcgccgcctgcgactacgccgatattatgtacctcatcgacgtcctcaccctcaccctcggccgccgcaggggcgccgccgcgcggctccatccggtcgcccggtacgccagcaccgccgactacctggattcgtcctgcgatggactccttctcatctcccggaacaccggccccccgcaatactccatctgtaacccgaccacgcgccaattcggtgacctcccgctgatctccggattcatgttcttggggttgtaccagcacagccccaccggcgactaccggattctgctctaccgagctgagaaggtggtgttggaagatctgattcctgggcatgtcgagagagatgccagctacgtctacacattgggctccaacgacatgcccaggcgcatcggttgggcagagccagaggtgtccatgttagccggccacagcagacgctgcagacctgcccagcttcatggcagcctgctgcattggtaccatagcatcaaacatatgattctggtgttcgataccacggccgagtcattccggtggatgcgcgcgcccattgacaagacggagaatgaattgaaccgggaactctgggcagatgtgcttgagatggattctacacttggcttgtactgctgtaatcatgacaagacgattgtaaatatctgggctctgcaggattacgagcaagaggtctggtccatcaagtaccaggttgaattgccggttacatgtatcaggggggaacttgacgtgggtgattcttggagtgtgatggtttcgtccgaggatggggatgaggttgtggttgtgctggttgattgcggacaatcggtgctttgctttgatactgacggcaagctgttggcgcgtctcgaacatgatgaaagaaaaagccaaaggcccaaaagggtatctccgccgtcagcccgtctctggcctcgtcacttcactccactggcggcggcggcggcggcgacaggactcccgccgccgctcagctccggcgtcgccctcccggaggtcctcgtcgtctgggacatcctggtacggcttccccccaaacccctcctccgctgccgcctggtgtgccgcgcatggcgccgcctcacctccacccgcgacttcctcctcgcccaccaccgccaccagccctccctccccctcgtcaccggctgcagaaacggcgacgtcctcgccgtcgaccgccggcgccggctcctccaccccgtcgcccggttcgacagctccgtcttctgcgtggaggaggcctcctgcgacggcatccttgtcctctggaggaagagggccatcggtgcccattccagtgtccgcttctcgatctgtaacccgaccacgcgtcagtccggtgacatcccgctgccgctgctcaccgggttcatgctcatgggcttgtactggcaccgccccaccggcgagtatcggcttctgctctacaggatagagctacctgcttcggagcggctcgttgatgttctgatccccggcgatagaaacgcctgctacgtctacacattgggctctggcgatttgccgaggtgcattgggtggccagaggcggaggcaaacggcgcatctgtgctgctgcatgggagcctgcattggtataagagaatcgaagatatgattttggcgtttgacattacagccgagtcgttccggtggatgcggtctccattcggcaaggcggtgtggagagcgtttcatggcctgtttgagattaattgtatgctcggcatgtactgctgtgacgatggtgcgacatttgtagatatctgggtgctggaggattatgagagagaggtctggtctctcaagtaccgggttgaattgccagttctagagatcaggagagagcttgatgtgaagcgtgatctttacagtgtgatggtttcttccgaggatggggatgtgcttgtgctggttaactgcaaacgagccatgctctacattggtactgatggcaagctgttggcgagtttgccacatgataatgacggcctcagtattactccagtgaagcttagagcaagccttgttccgcatgcattctttccatctctgctggactatgtcgtgaatgcttcgcctttcgtgtgatgtctgctaaatgaagtttgagcacacaaacttattattttctgaattgtgcttttatgtatgaaaacttcttagctgaacttattgtagatgaatgtgcaaccaggatacaataattgtatttggccacatgaatagttggttcattgtgacttataatacaaaaaaaaaaaaaaaaaagcggcc

SEQ ID NO: 90275 - DNA, 989 bp, Oryza sativa
  Clone ID: PAT_MRT4530_8895C.1
tcacagtgcaccttctgcccttggaattacggctctgttggaagaccatgcatcattctcatctgaacttttgataatgttaacagttactcctgttgtaacgaagtgtacaccatcaccaccaccactgcttcctccactggctccggtggtgccagtaccatctccacctcctcctgcccctacttcatcgcctgttagaatgtcagggccctcctcccccacctcctccacctgcaccaaactcgtgtcccagtagacctgcaccacctccacctccacctccaccacttgcttcaacttcatctcctccccgacctgccgcaccatcaccgtgtcaactacatacttcaacttcatctcctgcacgaccagttccaccacctccaccaacattattgtacaatctgcattttgagcgccaacaccacctctactgactggagctacttctgcaccatccccaccaccaccaccactggcgtgtaggtcatcaaatcaactgtctgctccgccaccgcctcctccaagcttctcaaagaacaatggcagtattgcgcctccgccagcacctcctggtggtaatgctaaattgcctggtatgagggggcgtggacctgcacctccttcaggtccaatgtctaggagccttcaatctggtcaggctgcatccagaaggtccaacttgaagcccctacactgggttaaagtaacaagagcaatgcagggaagtctctgggaggagtcacagaaaactgacgaagcttcaaaacctccagtgtttgacatgtcagaactagaacatcttttctcagctgtcctgccaagttcagatgggaagcgttcagataagtcaggaagtcgtgcatctggatcaaaaccagaaaagattcaccttattgaccttcgccgagctaataattgcggaatcatgctaacaaaagtcaaaatgcccttgcctgacctaatgagcgcaattcttactttag

SEQ ID NO: 90276 - DNA, 499 bp, Oryza sativa
  Clone ID: PAT_MRT4530_88960C.1
gcacgagggctaaacatcaagcgctatctacttatctaataatttttctgtcatatgatttgagatgagagtgaaatataacatttttcatgagataagtagcacatcattttggccggtaaaaaaattctgagatttgattgcgtgacttcaatctactctctaggaaccagcagagatcatttactgtttaactgaaaattttcacattagtgcaggtaattgtttatatactcttaactaatgattagatttatctatttactccagttagaattctagctaatgagttgttctatacacctgtttgctctctgtagctgttgaaataaattctcccaacatgcactaaaccgtgcttccagttgtatttttctttatgatatcatatcttaagacaaaatttgatatttattaactactaagtcatctaaatcgttgttcctgttgtctttgcagatatgccgagcacttgcttacatacataactgtgttggca

SEQ ID NO: 90277 - DNA, 1229 bp, Oryza sativa
  Clone ID: PAT_MRT4530_88961C.1
ccttccaatcaaatcatgttgcttaagttcctatggccgagctctttctcttcctcctcctcgccgtcaccgccaccacccgaggccttctggttcttcctcttcactcttacagcagggctgccgcccagcgggctggtgagggagaaggcgatgtgcttctcagactcaagcctcacaatgaatgatggaatgttgacgagctgccttcccaccctgatgtggtgctgcctgataaggacacgtgcatggtggattgacttggccatgccattcttgaagacgatggtcttcacaaaaccgagtataaagacttgcccatctccgaaaaaacggtgagaacgaatagagtgactttatacccaattttacggttgagagacgattcacgcgcggccaccgtgggagcatcacgggaccgattttgccaagcgtccttacttggctgaggccgtgttacatggtcagaaatcccgtgttcttgtgacggttcgctgtcttcgctggtcgcagactcagggaagagctgaagttctcttggcgtggcggcatagtgctgctcgatgataaccggtagctgctgaggaaatgctgccgtcgtggtgactggtaaatgtggcaggtgctgtactgggaacactccggttgtcggataaggtaccctgagagctggtctggtgtttacatgactccaaacaggattgccttccatccgcgtcctaagctcgttttgaagctccaagatttcagtacgaagcatgctgttatcgtcgtgcagttcatttctctccaatgcaacataatgagattcattcttcagtgaactattctccttccggagagattccacttgtgaaagtaaatcttttagtattcgtgtagtttcacccagtacacatgccttcccattgttctgcctgtcaggttctagcaagtttcccagctcattaaagaggtcattctgcttgtcccgcttaagtttctccctctctgatttatggattctctttggagccttcttatcacacttcttgttcactataccgctctggaccagcctcccctcgccgccgccaccagcggcagcggcattcaccctgtccctgggcaccatctcgacctccccctcccagatcggagccgcggcggcctcccggttcgagggttccttgcgctacttgtcttcgtcgtcttcctcctcggcctcggcttcctcggctcgtggctgg

SEQ ID NO: 90278 - DNA, 210 bp, Oryza sativa
  Clone ID: PAT_MRT4530_88962C.1
atgttcttccctgacgcggacgacgagtctgacgacagcgacttcatcgacgccctcatcaacccctccgatcccaccttccctaacctgacccccgtcgccgctgccgtcgccatggcttccgctgtgggggggcgggagtgggagggcgggcacgccttggtcgcgcaaccttcctccctcgccgatccgctcggccagccggagtag

SEQ ID NO: 90279 - DNA, 724 bp, Oryza sativa
  Clone ID: PAT_MRT4530_88963C.1
tgcttatgggtcttgtttcttgtttccttggagatccctccactgttccagaacagcaatacgtcaccgtcggcaactacaccgcttacccttactctcgaggccacatccacattacgggacccgagatcgacgaccaacttgatttcgacgtgggattccttagcgatgagcacgatatcgatctcaagaagcaagtatgggcttacaagaaggcccgagagatcatgcgccgtaccaagatgtaccgcggtgaagttgcagctggccacccaacatggcctgaaggatccaaggctgcctcatcggacctcactgaggccctgagcgatgtcaaggatatcgagtactctgccgaggacgacaaggcaatcgaacagtggatccgaaacaacgtcggaacaacatggcactccatggccacatgcaggatggctcctcgtgagcagaatggtgtcgttgacgagcgcctgaacgtctggggtaccaggggtctcaagttggcagatttgagtatcgcaccagagaatgttggcgccaacaccaacaacactgctattgttattggcgaaaaggctgcggatatcatcatcaaggatctgggcctcgcacaataagtttcacagcaataattaaaatatatatagcgtggttccagttgtggtttcaatagcattgtgttgcatctataatagatagattacaattaataaatctttggacc

SEQ ID NO: 90280 - DNA, 1498 bp, Oryza sativa
  Clone ID: PAT_MRT4530_88964C.1
cgagctctcgccccaacgagatttcctctttttcgggaggattttcctctacccggatccggttgctggtgccatagatcgacgcgccgtcttctcctgatcgcggtggtgttttttttttttgttttggatttccggtgctgggagtggagagattcgctcggattggatctgtgtgtgctgatccgtgtgggtggtggatctgacggagaatcggaggagaggaagaggagagtctggttggttggtggagacgacgatttctgtggaggattcgacttgcgcatcggctgtagatctggaagggctttgggtgacctactgctccaagctgcctaagttatatcgcgaagtgtcgagctttcacgcccaccgcaatcatcttcaccatcgccgacgatggagggtcttgtggttatctcacagcagcgcaaccaccataaccaacactctggtggccgaggcaagatgacggggcctcacttctcatcgccgccgttctcccatggcttccgtggcatgaactgccggtctttccattccggtgtatgtgctggcctcctgccctccccaccacctccgcctgctcgcacgtactcatcaccagagcctaagacaccaaagcagcagcaacagctgcagcgccgtggtggcaagcgtagccggcccatctcaataagcccttcaacttctcctccatcccgccctgagctgtgggcgggcccagcattctccaattcaccacctcctagttcgctcccaatccccaagttctctctgcgacagaaccgcagcatctcacttgaattgccactatttgagcggtctgatgaagtggaggtgaagccgcatgctaaatcggctccttcctcgccggtgggtggatcagggtttgacttcttcaatgataatgaaactgctgttgcgacggagaatcttaggaggattctccatctggatatttccgatcattgaatgatgggaggatggaagggtagtgtctgtgtacataggttatcatccactgactttagttgttcacatgcatagtagtgtatagagtaatgagaataataagttaggtagtactgtatggtcaaggttatggtggaggtggagttttgtaggtgaagcatcttctgaaagttgggtagtgaaaactgtcatatgtaggtgttgttaaggtggacagtggggtaaggatagggtggatggcagttgacataccttcatagcttgggctcacctatgatgttttaggtgtagtataaaatcttatttgcatccatggcacctgtgatgaactgacagtggcactctgccagtgcagaaacatctgcggttagttcatttcaggtagaatagcatagtctggcagcttgttaacgatagcatacattctagtatcttagaccccaatcagatgttaaatagttctagggaaactacttttcttgcatttctttgcatatatataacctcctagctaactgattct

SEQ ID NO: 90281 - DNA, 298 bp, Oryza sativa
  Clone ID: PAT_MRT4530_88965C.1
ctgtgttctttttttaatttttttgggttttttattttttttttttttttttttcaaaaaaaaggcaataatttttataaaggaaaacccccaggttccattaccagttaattgttcaaatctcaatgaatgtacagcttatttttttttcacacttttccacaaataaaccccaggtaaatttttttaaacactgtttccaaccaacaaaccggggttaaatttttccttccattttattgtaaacccaagcaaaagcaagttttattttttcatccaaataggggggaaatttttt

SEQ ID NO: 90282 - DNA, 357 bp, Oryza sativa
  Clone ID: PAT_MRT4530_88966C.1
gatcataacccaaagaccgggaaactatttattatcatattcgggttcggatcatcctaataaatctaatgcatgtatctaatacaattaaagaacatgagagtggaggattcacaaaagttataatttaatgaagaaggggtcatagttaattgcctacatacatgcatgccttatattatggcacatctaaaaaaaagtggttgtgccttatattatggaatggcgggagtattagagattatattgagactatttgattttatgaaactttactaaatatttaaaaagatcaggtgcctgagtgttttgcaagcatttactttcgctcggtcatcgaaggttaacagttcaaaa

SEQ ID NO: 90283 - DNA, 1390 bp, Oryza sativa
  Clone ID: PAT_MRT4530_88967C.1
cccacgcgtccggccgggctcctctctctctgtccacgcgcccgcccctctctctccataaacctcaccattggtgttcttttaatcggtgagaaagcaagtgctccaagaattgcaaaggggagaggagagatgagagagtgaagaacaactacataactaaagcatctctctctctctcctctctctctctctagaacacaagaacaatttagcgattactagctagtgttcatcaaaactgaacttggacaagaaatttacctaaagttagtattccacgatgagctttcttgagcaggcaaccgagcggaaggcaccaccgccggcgaggctcggctccatcaccaagctgacggcggcatcgtcgtccttcgccaacctcttctccaccttcctcgggccagtgagctcccccgagccgaggccgaggcgcagcttcgacggcggcgccaccggcgtcgggcttggcatcgtcgcggccatgagccacgcctgcctgacgaccgaggccgagccgatcgccatcggcgcggcggctcggcgccgcgcgagagaggaggccgagctctctgagagctacacttgcgtcatcacgcacgtcgccggcgtcgatggcgccagcggcagcgtgaggaagcgggtgtactttgggttcggcgacggtggcggcggctggcttgtggaagccgacgaggagccggcgccggcggctgacttcttgagccggtgcttcctgtgtgacaagaggcttgatgggctcgacatctacatgtacaggggggagaaagccttctgcagctccgagtgcaggtgccaccagatgctaatggacgaccatgcagacaactgtggatctgaagccctcaaggccaacgactactcggcctcgccgcactctgcgccattgcccttctccctcagcgtcgcagctgcctagtcgatcgaataatcgactgcatgatgtagcaccgtcaggctgctcttcaattctgtagcagcaaagaaatatatagagagaggtcaaagagatcatttaattaagcggatgaaacatataaagagtaatcactagaatgcttcttaactgtggcttgaataaaaaaaaatggagaggattctcacactaaagaaacagattaaacagatgaagaaagttttgagattatatgctcaccgcaagacactggaaacttcgtgcttgcaatattatgtacgagcagaagtaattagtaaaggaatttgatgttatgttctcttctgaaatttcagtaagagagagtgtattacatatcaggtgcataattggctcaggtaaaagttttatggtctagacgacagatttgttctaatgaataaccgaatttcagtaaaaaaaaaaaaaaaaaaa

SEQ ID NO: 90284 - DNA, 324 bp, Oryza sativa
  Clone ID: PAT_MRT4530_88968C.1
atgcagctcaacccgaaagcaagaactcgtcgaaataaaacaaaagcaaaagggtggcgatgcgccgaaattgtattgaatgtgactctatccttgcgtggcaaccaccatgaagcatattaactcaacccgatgacatacaccaaatcgtattgccggaatcggctgtatcggctagccccgtccgactcgaactctgccgatcctaaccgtagccgatttagattgcagccgattcttgctctgtttccacaacacccttatcttcgatttcgcttagatcccatcttcatctccgatgccgatattaccaaatttggtcgt

SEQ ID NO: 90285 - DNA, 355 bp, Oryza sativa
  Clone ID: PAT_MRT4530_88969C.1
ttctaaaatgccactcactttccccacacgcgttcgtcactccaagctcgatgtctctctcccccgccgctttggatcaatcgtcagcgactcaccattcggcgactcggccattgacagcgatagtcgcacgggttcttgcttatttggatccgttcttccggggagcgagctaaccgggcgagcgagatgcagcaccagcaaggatttgatacacacaggctacaccaggaagtaaaatcgcggtggttaaagcctaaagaggttctgcagatattgcagaatcatgatcggttcatcaccacacataagactcctcataagccaccgtgtgaaggtcggtctgttcttaacc

SEQ ID NO: 90286 - DNA, 3357 bp, Oryza sativa
  Clone ID: PAT_MRT4530_8896C.1
atggcgctcttccgcaagttcttctaccggaagccgcccgatggcctcctggagatcaccgagcgcgtctacgtatttgattcttgcttcactacggatgtctttaacgatgataagtaccaagactacattggggacattgtcgctcaacttcaatgccactttgctgatgcctcatttatggtgttcaactttcgagagggagaaagtcaaagtttgctggcaaatatcttatcgagctatgagatggtagtgatggattatccaagacaatatgagggatgtccacttgttaccattgagatgattcaccatttcttgaggtcaggggagagctggctgtctttgagccagcagaatgtgttgataatgcactgtgagcgaggtggctgggctgtacttgcattcatgttggcagggctactgttgtatagaaaacagtacattggtgaacagaggacactggagatgatctacaggcaagcacctcgtgagctgattcagttgctctcaccactaaatcctataccctctcagatacgatacttacattatatatctcggaggaatgtgagcgcagtgtggccaccaggtgatcgggcacttaccttggattgtgtaatactaagaaatattccaggtttcaatggggagggtggatgtagaccgatattccgtatttacggaaaagatcctctacttgctacaagtaacacccccaaggtgcttttctcaacaccaaagaggagcaaatatgttcggctttacaagaaggtagactgcgaattaattaaaattgacattcactgccatattcaaggtgatgttgtccttgaatgcattagccttgatgcggatcaacaacgggaagagatgatattcagggtcatgttcaatacagcatttattagatctaacattctgatgctaaatcgtgatgaaattgacatattatgggatgcgaaagaccgattcccgaaagaattcagagctgaggttcttttttcagaaatggactctgtaaatcagttagattccatggaggtgggtggtataggagagaaggagggcctcccagtcgaagcatttgcaaaggttcaagagatgttcagcaatgtcgactggttagatccgacagcggatgctgcagccctactttttcagcagcttacttcatcagaaaacattcagctgagaaagggtttgttgtctccaaataagaaagacttccatcttagctcaatttctccaaccaagaaacagtctgacaatgttgaagataaattaagcaatgctgaactctcaaccatctatgtgcacaaacaagaaaataatgacgttcaggggttgatcccacagaaacaagccaccattcctgatgaaaaatcagggtcgtctgtcatccatgagaagatgatttctctagttcatgaggagataacacaggtagttgacatcaatactggttgcctatcttcattggatatgacagttccttccaccatgaactctagcagaccagttctaatcgaccaaaattctaagcttgatgatcagtttggttcactacagagctcttcacccacaatgattatgtcgcagcagtttccagtttctaggtcaagttctgtcctttccagtgactttagtcctagattactttcagcctgcccaagatttcacagtgcaccttctgcccttggaattacggctctgttggaagaccatgctgcatttggagacactaagaattctgtcaaagtttcaagtgccgtggtcaaaattccatcaaaacagtcatcacaacagcatccaataacagttactcctgttgtaacgaagtgtacaccatcaccaccaccactgcttcctccactggctccggtggtgccagtaccatctgatgatcaaatgatatcccaggaaaaagacatgtctcaacaggctcaaaagcatccaggtccaatgtctaggagccttcaatctggtcaggctgcatccagaaggtccaacttgaagcccctacactgggttaaagtaacaagagcaatgcagggaagtctctgggaggagtcacagaaaactgacgaagcttcaaaacctccagtgtttgacatgtcagaactagaacatcttttctcagctgtcctgccaagttcagatgggaagcgttcagataagtcaggaagtcgtgcatctggatcaaaaccagaaaagattcaccttatatatgctacagaagatttttgcttcattcatgatggtactattgaccttcgccgagctaataattgcggaatcatgctaacaaaagtcaaaatgcccttgcctgacctaatgagcgcaattcttactttggatgatactatcctagatgctgatcaggtggaaaaccttattaagttcactccaactaaagaggaagcagaacttctgaagggttacaaaggagataagcaagtacttggagaatgtgagcagttcttcatggagcttatgaaattaccccgtgtggattctaagctgagagttttcttatttaagattcaattcccttctcaggtttctgaccttaagaggagcctgaacattgtcaactcttccgcggaagagataaggggttcagctaagctgaaaaggattatgcagacaattctttcactgggaaatgcgttaaaccaaggaactgctagaggttctgctgttgggttcaggttggatagcttactcaaactaagtgacactcgtgcacgtaacaataagatgactttaatgcattatttatccaaggtgctttctgagaaacttccagaacttcttgattttcctaaagatctcgctagcttggagttggcagcaaaggtacaattgaagtcattagcagaggaaatgcaggccataaacaaaggactcgaaaaagtcgagcaagaactaactacatcagaaaatgatggccctgtgtcagagatattccgcaagacactgaaggattttctaagtggtgctgaagctgaagttagatccttgacctcactatattctaatgtgggaagaaatgctgatgcattagcactttattttggagaagacccagcacgttgtccatttgagcaagtggtcattacactccaaaactttgtgagattgttcgtacgttcccatgatgagaactgcaaacaattggatctagaaaagaagaaagcactgaaggaagcagaagcagagaaaaccaagaaggagccagaaaacgcacagaaaactaaggaaccaggaaatgacaaagctaagcacaacaattcaatcaaagagttggatatctcactccaatcaccagcgcaaactgccagtgccaaatga

SEQ ID NO: 90287 - DNA, 184 bp, Oryza sativa
  Clone ID: PAT_MRT4530_88970C.1
tcgaccacgccttcggggaccccttgggttttgttgaatttccaacttccttttgaatgggggccttaaggcaatggaggtcctggccccttcaagaatgttgggcaccgggttaaatttagcgggttcttccggttacgcaaccggggaaccaacaacggaagcgcaaagagatcgttccttt

SEQ ID NO: 90288 - DNA, 387 bp, Oryza sativa
  Clone ID: PAT_MRT4530_88971C.1
atgaggggaggagtgaagctggtgggcggaggcggaggcggggtggcggcgacgtcgtcgtcggcggcggcgggtggtggtggtgggcacccggggatgtggaggacgccgacgccgtaccttttcctggggttcgcggtgatgatgggcctcatcgcggtggcgctgctcgtgctggtctgcacgcgccgcaagaaccacggcgacgcggggtcgtcggcgtcggcggcggcgtcggtcaaggtgctggtgccgctcgaccgggagcccaaggtggtcgtcatcatggccggcgacaccgcgccgtccttcctcgccagcgccaagccgctctcctccttcgtcctccccccgccgccgccaccggccgccgccggcgagccgtag

SEQ ID NO: 90289 - DNA, 336 bp, Oryza sativa
  Clone ID: PAT_MRT4530_88972C.1
atgggggcggcggatccagcggagacagcggcggcgcgtggcccctctcctccctctccctttggctctcctccccctcccctccctccccttggagatccggcggaggggaggggcgtcttcagccggcgaccacggggacaacggccggaggggagggtggcatcggcagcagtgaggaggcatgggggtggcggatccggcgtcggtgataggagtgggcgacggatccaacgtcgggagcgggcgacgacggcggcggtgacggcagcggtcttccagcgtctggatccgtcgccggcgaccgcgcgggcgacggcgacggacctcggctag

SEQ ID NO: 90290 - DNA, 227 bp, Oryza sativa
  Clone ID: PAT_MRT4530_88973C.1
tagaacttgagccacaacattggtttacctattacagggcttaacagaaactgctacaaaatcacaaatcataatattgcataagtaaaaaatgactaccaaagttggcgaaagccttcatgttgcatcgtatccaggtgtccactcacttgcaagcaatattgtttggggaataatattttgacaaccaatctgatgggcaagaacgagtccttatttgagggtgt

SEQ ID NO: 90291 - DNA, 363 bp, Oryza sativa
  Clone ID: PAT_MRT4530_88974C.1
ttgtgtttttttattttttggggtttttttttttttttttctttttttttttttttttttttttttttttttttttttttttttttttgggtaaaaacaaaaccctaaaaaaaatccaaaggtaaaaaaaacaaggggaacaaaggaaatcccgaaaaaaaaaacccaggggaaaggccaaaattttttttgggccccaacgcctccggggaaccaccacgtttgggggaattttttttaccctggttaatttgctaagggggccacaaacccgccggggacctctgaccccaggaacaggtccgggggccccccccaccacacgtctttttgaaccggcccgcaaaggggtttggccggcca

SEQ ID NO: 90292 - DNA, 346 bp, Oryza sativa
  unsure (1)..(346): unsure at all n locations
  Clone ID: PAT_MRT4530_88975C.1
atgtctccacatgccgcatctcaattaccttcccgaaggagcggtggcggtggacgcaaggggaaaggagggcggctcaccggcggcggcagcggcgacgacggcggcggcgacggtggcgcacggcggcgcgggaacggcggcgcggcagcacgagagcgacggcgcggcagcacgggaacggtggctcggtggcacgagagcggcggcgcagtggagagggaagaagggaggaagggtgagattgggggtggggcgcttgcttcgtcccgttctcgccgtgtgcgggtgtcgggggtgngggggggctgtgtggcgcgtggccgtgcggcccgtcgcgccggcc

SEQ ID NO: 90293 - DNA, 487 bp, Oryza sativa
  unsure (1)..(487): unsure at all n locations
  Clone ID: PAT_MRT4530_88976C.1
ggccggcgcgacgggccgcacggccacgcgccacacagcccccccncacccccgacacccgcacacggcgagaacgggacgaagcaagcgccccaccacgccgcgcgaaccgagcaaccccacccncacacaacccccacgaagaacgaacaacacgcaaccaccacaaaacaggcaacacccacgccccacnccacaggccaaccacacgggaaaaggtgangccaaccccaatctcacccttcctcccttcttccctctccactgcgccgccgctctcgtgccaccgagccaccgttcccgtgctgccgcgccgtcgctctcgtgctgccgcgccgccgtttccgcgccgccgttcccgtgccgccgtgtcgccgctcccgcgccgccgtgcgccaccgtcgccgccgccgtcgtcgccgctgccgccgccggtgagccgccctcctttccccttgcgtccaccgccaccgctcgggtgggatag

SEQ ID NO: 90294 - DNA, 558 bp, Oryza sativa
  Clone ID: PAT_MRT4530_88977C.1
ccagcaggggaacagaccatgacagccaggtgctccgggctcagagaccacactctcattgtcacagtttgccaagtggttattgctatgcaagaggcttggtgaaatggcatatccattttccatttgtccattttggcggagaccatggctgccaatatttaaggattttaatccattgctcagttccttgtcgacttgccttgagggaaaaacagtgtccgtttcgggcatcctgtggtactgttcaccactaattcgtggcacaacttgatttctctcaggtctcatttgattcaaaatcccaggtgcatgtttttcaacagcctgaagccatgcactttctaacctttgctcctcaacagtcacggctttcgcttgttcaacagagacttctttccctctagttctatgcattcctgtgttcccttcagtggtgcatgactgcaaacctccactagcagctgaagcacagctgaatttctccagttttttctcgatctcttcagattaatttaaatttcttgatggggttcgaattccctttagtcgatcact

SEQ ID NO: 90295 - DNA, 1102 bp, Oryza sativa
  Clone ID: PAT_MRT4530_88978C.1
caaaagaagccaaaaacttgatcaaatttctgagcaactccgccactcttctcctccgatggccaccgccgcgcggctcctccccaagatccagtcccccgcctccccggccgtcgcggaggcgcggaggcgccgcccctccagtctccgattaggagttactagtggacccgcaagaactctgaagcaaaagcttgttgctaagagtgctgtttctgtggtggaaggtgaaaacgcatttgatggagtaaagcaagatactagaccaatcatagttatagataactacgatagcttcacgtataatttatgccagtacatgggtgaggtgggagctaactttgaggtgtaccgcaatgatgatatcaccgtggaagaaattaagaagttagtaaacatccttgttacttgcacacctcaagattcaggaatatcattgcaaacagttcaagatcttggaccttctacacctttgtttggggtttgcatgggtttgcagtgtattggggaggcatttggagggaaggttgttcgttctccttatggagttgtgcatgggaaaggatcccttgttcactatgaggagaaacttgatggaacactgttttctggtctcccaaacccattccaagcgggaagataccacagccttgtaattgagaaggatagcttcccacatgatgccctggaaattactgcttggacagacgatgggctgatcatggctgctcgccacaggaagtacaaacatatacagggtgtgcagttccatccagagagcatcataacaacagaagggaggctcatggtcaagaatttcatcaagattattgaaggctacgaggccttgaattgcttaccgtgatccactttgagtcgaggttctggtacatgtattgattgatacggctatcaccaggatgtaaatcatattaaatagtcctaaaaaacatcttcaatgaaaattacacctgcaaagctgtacgatcaactctgtatacgtcttggttttctgtcggacatgcaaacttctacgtcctatattatcagttgttcagtttgtatctcaggctcacatttttaaaaaaaaaaaaaaaaaaaa

SEQ ID NO: 90296 - DNA, 235 bp, Oryza sativa
  Clone ID: PAT_MRT4530_88979C.1
tccacgcatgcggaggagctcatgcacaacgatctaggagcaggcacatctgttgatgtgtacttatcgaggaacatgaacatttgtacctttgtactaggctgggctactgccatctgaatcctttttgaaatggtcgtcatactcactttttggacttttgtcttgtcattgggctcatagcctcattagggtattaacatgtctctggtctaatgcctcataagtgattaac

SEQ ID NO: 90297 - DNA, 2516 bp, Oryza sativa
  unsure (1)..(2516): unsure at all n locations
  Clone ID: PAT_MRT4530_8897C.1
atggacggcgacgcgagggcgaggagcggcgatggcgcgggggcgggccctggtgctagtggcgccacgacgtcgtacatgagcattgacggcgaggagaatggtggcgccggcggggcgaaggtgtgggtgctcgtgctgctcttctcgctgatcgtgctcatgctcttgccgtcggcggtgcggcgaggcgggccatggggagggggaggaggaggaggaggaggagggggagggtaccagcgaggacgaggaggggggattagcctcaagagcggctgggacgtcgtcaacctcttcctcgtggcgttcgccatcctgtgcggcctgcttggccgcgccggcgacggggagtcctcttccggctcggcttctaccgcggcggcggcgggggcggcgtccgagggtggcaggagagagcatcaggtctcgccgtccttggcggcggcgccggctgccgaggctgtgggggaggagccgtcgaccgccgaggtgtgggcgagtctgaacacgtcggcggcggcgagctacggcggcaacaaccactacgggagcacggggatccgacggttgaagagcagcagctcgtacccggagctgcggctcgacagcgacggcgtctggggcctcacgtcgccggaggcggcgtggcggttctacgacgacgccgagctttaccggacgcggcggcctgagcggagctgggacgtggacgcgccgcaaaagcgaacaacgacgacgccggaggtgaagacgatccctgtggacacctacgaggtgcgccggaaatcgctcccgcccaaggaagagcggcggcggcggcggggcagcatcgagaggctcccgagcatggccgagatcgccgaggaggagagaccacacccgcagccgcaacaaccggtggagacggtgacgccgacgccgccgccgctggcgaggagcaggaggtggaatcccgagatgttggaggtggtgctggagcaggagtcacgggtggaggagacgacgatgccgccgccgccgccgccgctgacgaggagcagaaggtggaactccgagaggctagacgcggtgctcgatcaggtggcgcgggtggatgagacggcgatgccgccgccgctgacgagaagcaggaggtggaactccgagaggctggacctggacgcggtgctggatcaggtggcgcgggtggaggaggagacggtgatgccgacgcagacgctggcgaggagcaggacatggaatcccgagatgctggacgcggcgctggagcagcagcaggacacgttgatgccgccgccgacgctgacgaggagcaggaggtggaactcggagaggctggacgcggtgctggaggagatgagggtggaagaggtggcgccggcagcgacgccgccaccacctgctcggccacgacggcgcagccgcagcgtcgagagcctgccaaggacagaggagttggaggcagagatagtcgtggaggagatcaagtaccccctcccatcgtcatcgccggccatgttcccgccgggaacgccgccgccgcctcctcctctgcctccggcgacggcgccgcggagcaagaagaagcggagcgggagcgtgggcggcgccaaggacctcgcctccgccattgctacgttctaccagaagaagcgcaagagcattggcatcaagagcaagaagaagcatcaccacaaccaccaccaccaccatcacctctccgatggccactactcgtcgccgtcgtccgacgcctcggcgagccctgactccacagtccgcaccaccaaccccgctccggcgccgccgcggcggccgccgccccctcccccgccgcctccggccgccatcttctacaacctcttcaagaaaggcggcagcaagagccgccgcatccactccgtcgcgccgccgcagccgcctccgccacctccgcccaccacgcgccgatccaggaaaccgccacagccaccgtcccgccccgctcctcctccaccgcctccgccgcagcagcagccgccgttttatcccaggcgcgctgtcgtctactacacctacccgctcccgccgccgtcgccgccgctgccaccgccgcctcctcctccgccgccgccaatgtcggagggggaagaggaggcgcctccctccgtcacggcgtcgccggcgccggcgtactgcgcgagccccgacgtgaacgcgaaggccgacaagttcatcgagcgattccgcgcggggcttacgctggagaagatcaactcgtaccgcgagaagtggcagaggcagatccaagacgactcatcgtcggccatggccgtggccgaggaggagggagagttcatggtcatcggctccctcttcgacgacgacgacgaagaggatatcatctccttgccggagacgccggcgaccgcaaccgccgtcgccgtcggcttctaactactaaggtagcgacgtgaggtgtggcactgacccctganaaaaagagaaaaaaaagaaaaatggggaaaaacaaa

SEQ ID NO: 90298 - DNA, 391 bp, Oryza sativa
  Clone ID: PAT_MRT4530_88980C.1
ctttcatttctgcctatatatccacgaggccacgggtggggtgaggtcacttcagaattttactgctgcagacctttgccatgggggagctatgctacctcacccgtcaatctgttgcacggagacaaggcgtgacgcatgctaaaagaggttacaagttgatacctgcgcgcatcatgttctcgacaccttgatctcgaagcggctttcgcccctttcaacccccgtgcaaagattggcactaaaggtggtacttagtcaatcgctcgactggtagccatgcattagcgactctaaaggcccataatgaactacagccttgatagaggcctgtctatgctgctcggtacactgagaccggccattagtattgattacctctaacttccac

SEQ ID NO: 90299 - DNA, 473 bp, Oryza sativa
  Clone ID: PAT_MRT4530_88981C.1
gcccccgggatgttcgggtgggccccggcaccccgccttctgctcgtggacgggggtttcctgtgttctcgggagggtggtggcgctggatctctccaaccggagcctctcccggacctcgcttcgcggcggcgagacggtggccgggtcggcccggcttccgagcctgaggcgcctcgacctcagcgcgaacggcctccccggcgcgttcccggcggcgggcttcccggcgatcgaggtggtcctgcggttctcggcgaatgccttctctggtaatgtcccggccggctttggtcagtgcaagctgctcaacgacctcttccttgatggcaatggccttactgggagcctccccaaagatctcttgcagtccttaaacttggcttccaaccaattgaatggcacattgcctctatccctgtcgacctgcccgatgcttagagtggtcagcgtgaggaacaactcgctgtccg

SEQ ID NO: 90300 - DNA, 975 bp, Oryza sativa
  Clone ID: PAT_MRT4530_88982C.1
cgggctgcaggaattcggcacgaggcacccacgaaccctcacctccacctgcacacgcagcagacgacgccgacgagtggccgccgctcgcctcccctccccgcaccgcgccgggcgccagatcttccagaagcttctagaacccgcccgctccatccaatgggggacaacgcctccgcctccgcctccgtgctggcgccgccggtgggagcgggtgagggtgacgcgccgtcgttctcctacctcgccgcgctcggcaactgcccgctcgtcgccgccgtcctcgccggcgccatcgcgcagttcatcaaggtgttgaccacatggtacaaggagaatcggtgggacgcgaagcagctggtggggtccggcgggatgccgtcgtcgcactcggccaccgtcgtcgcgctcgccgtcgccgtcggcctccaggaagggttcggcagctcgctcttcgccaccgccgccatcttcgcgtccgtggttatgtatgatgcttttggtgtcaggctacatgcagggaagcaagcagaggtcttgaatcaaattgtgtatgaactcccatcggagcatccactggctgaaacaagaccactccgagaactccttggacacacaccagctcaggtttttgctggtggggtgcttggatttgcagtggccacatttacaggcatgatagctgggcttggtaacactggttcattgccctgactgccggattggcgatatttgtagcttcacgccaaatttgttgaagtgttagaatccaaatcggttatgcgttttcgggtcgcgtacaggagtatgtaaagttttttttttcttttgtggaattcgtaagccaatctcatgtgagaaagaaaactcatgtcattcttttgtagctaagaaataatcagcttatttgtattcacaaaatcacaagtgctcctacttgaggtgaaatttgatggtgatcgaccattaccaggt

SEQ ID NO: 90301 - DNA, 3495 bp, Oryza sativa
  Clone ID: PAT_MRT4530_88983C.1
atgctgctctccctctacgcccgcctctccgccgtccccgacgccctcgcgctcctccgctccacgccgcgcccctccgtcgtctcctacaacaccgtcctctccgcgctctcccgcgccccgcgccacgcgcccgagggtctccgcctcttccgccgcctgcacgcgtcgggcctccgccccaccgcacctagcctctgcgccctcctgcgcaccgccggcgaactgcgcgaccgtcgcgcgggggccgccgcgcactcgcaggccgcgacgctcggcttcctcgcgagcgacatcgtgcccactgcgctgctgcagatgtactcccagtgcggcgcgccgagggacgccaaccaggtgttcgacgaaatggcgacgcgggatggggtggcgtggaactgcgtgatgcactgcaatgtgcggtatggctaccttgaccgcgctctaggtcagttttgccggatggtgaggggtggattgccacccaccgagagcacgctctcgtcagtgctgagtggttgtggacgagctggggattgcctccgagggcgtgtgctccatggatgggtggtgaagttggaggagcttgatcctgacatgccactacagaacgcgctgctcgacatgtactcaagctgtggtgatctggatactgcactgcgcgtgtttgagagaattgagacgccggacttggtgtcatggaatactctgattgctgggttttctggagttggggatgggtgcagcgctgtgcatgcctttgtgcagctgaaggctgtacagttcgatgaacgagttgtccctgatgagtacacgcttgcagctgtggtgtctgcttctgctactttgcctgcaatgtttggtgggaagccgcttcatgccgaagtgatcaaagctggactggagaacagcgtgtttgtagggaacacactgctcaacatgtattttacaaacgatgatccccattctgcacggattttgtttgattccattacccaggaggatgtaatcatgtggactgagatggttgcaggccactcctcattgggtgagggagaattggccttaagccactgcggactagttgagaaaggaaaattctattggttctgtatgatgactgatggtattgtgcctgggttcaagcactacactagcatggcgctagagcaggacccagatgatatttcaacacacatattgctttcaaacctttacgcctctttaggtaaatgggactttgttgctgaaattaggaaaagaatgagagggctaatggctgataaggagcctgggctgagctgggtcgagatgaaaaatgtggaaatgagcctcctttcccatttctgcctctgcctccagcggaaggcgggaagctgctgccgttgcatccgcttcttacatgtgttcgtcttcgtgctccacatccatggcggccactcccagatgtgcgaccccgccgacctggcgtcgcttctggccttctccgatggcttggacaggatgggcgccgggctggtcggatggggtcccaacgacacctcctgctgctcgtggacgggcatttcatgcgatctcgggagggtggtggagctggatctctccaaccggagcctctcccggaactcttttcggggcgtggcggtggcgcagctcggccgcctgccgtgcctgcggcgcctcgacctcagcacgaacggcctcgttggcgcgttcccggcgagcggcttcccggcgatcgaggtggtgaacgtctcctccaacggattcaccgggccgcaccccgcgttccccggtgcgccgaacctgacggttcttgatatcaccggcaacgccttctccggcggcatcaacgtcaccgcgctctgcgcttcgccggtcaaggtcctgcggttctcggcgaatgccttctctggtgatgtgccggccggctttggtcagtgcaagctgctcaacgacctcttccttgatggcaatggccttactgggagcctccccaaggacttgtacacgattccagagttgaggtggctaagcttacaggaaaatcagctctctggcagcctcgataaggccctcggtaacctctccaagcttaccctgattgacttgtcatataacatgttcaatggcaatatccctgatgtgtttgggaaattgaggagcttggagtccttaaacttggcttccaaccaattgaatggcacattgcctctatccctgtcgagctgcccgatgcttagagtggtcagcctgaggaacaattcgctgtccggtgagattaccattgactgcagattgctcacgaggctgaacaactttgatgctgggaccaacacgctgcgtggtgctataccgcctcgccttgcctcgtgcactgagttgaggacgctgaaccttgcaaggaacaagcttcagggggagctaccggagagcttcaagaatttgacatcactgtcatacctttctcttacggggaatggttttaccaacttgtcatcagcattgcaagtcttgcagcacctgcccaacttaactagcttggtgctcaccaataacttccgtggtggtgaaaccatgccaatggacggcatcgaagggttcaagagaatgcaggttcttgtcctggcgaactgtgcactcttgggcacggttccaccttggctgcagagcttgaagagcctcagtgtgctggatatttcatggaacaatttgcatggggagatcccgccatggttaggcaacctcgacagtcttttctacatcgatctgtccaacaactcattcagtggggagcttcctgcaacctttacacagatgaagagtttaatttcaagtaatggctcaagtgggcaggcgtcaacaggagacctcccattatccttcgtcaagaagaattcgacttccactggtaaaggcttgcagtacaaccaactcagtagcttcccgtcatcactgatcctctcaaataacaagcttgttgggtcaatattgccatcctttggccgtctagtgaagcttcatgtgctggacttgggctttaacaatttttctgggccaattcctgatgagttatcaaatatgtcgagcttggaagtactggatttagctcacaatgatctcagtgggagcataccatcatctctaacgaagctgaactttctgtccaagtttgatgtttcgtacaacaatttgtctggagatgtcccggcaggaggccaattctccacgttcacagaagaggagttcgcgggcaatcctgcgctgtgtcgtaaattcagagatgcagagaagaccaaaatggagcaggcccgtgagtgggagactggagagtacgagcaaggacaacgccatctgatgggaggacccggaggagttggtgacgcgcacgcggctggagtcggacagccggagccggtggatgaggtcggttggtggggcgcagacggctcggccatctcgtgcccgtggaagactgcagtgtgcaaccagtag

SEQ ID NO: 90302 - DNA, 2160 bp, Oryza sativa
  Clone ID: PAT_MRT4530_88984C.1
atgccaccggactggtcgcgcctcggactggaggaggcgctcgccgcggcggcgctgctgctccgatcgtgctcccctcgccgcgctgtcctccgccgcgcgcgcgcggtccacgcgctcctcgtggtctcctccacgccctcgtcgcccgcgctgaccaccttcctcgccaaccagctgctctccctctacgcccgcctctccgccgtccccgacgccctcgcgctcctccgctccacgccgcgcccctccgtcgtctcctacaacaccgtcctctccgcgctctcccgcgccccgcgccacgcgcccgagggtctccgcctcttccgccgcctgcacgcgtcgggcctccgccccaccgcacctagcctctgcgccctcctgcgcaccgccggcgaactgcgcgaccgtcgcgcgggggccgccgcgcactcgcaggccgcgacgctcggcttcctcgcgagcgacatcgtgcccactgcgctgctgcagatgtactcccagtgcggcgcgccgagggacgccaaccaggtgttcgacgaaatggcgacgcgggatggggtggcgtggaactgcgtgatgcactgcaatgtgcggtatggctaccttgaccgcgctctaggtcagttttgccagatggtgaggggtggattgccacccaccgagagcacgctctcgtcagtgctgagtggttgtggacgagctggggattgcctccgagggcgtgtgctccatggatgggtggtgaagttggaggagcttgatcctgacatgccactacagaacgcgctgctcgacatgtactcaagctgtggtgatctggatactgcactgcgcgtgtttgagagaattgagacgccggacttggtgtcatggaatactttgattgctgggttttctggagttggggatgggtgcagcgctatgcatgcctttgtgcagctgaaggctgtacagttcgatgaacgagttgtccctgatgagtacacgcttgcagctgtggtgtctgcttctgctactttgcctgcaatgtttggtgggaagccgcttcatgccgaagtgatcaaagctggactggagaacagcgtgtttgtagggaacacactgctcaacatgtattttacaaacgatgatccccattctgcacggattttgtttgattccattacccagaaggatgtaatcatgtggaccgagatggttgcaggccactcctcattgggtgagggagaattggccttaatgtactttgttagcatgcttcaggaaggttacaaggtcgacagcttctctttgagcagtgctttaaactccacgaccgagcttgcaggccttaaacaaggagagatgctccatgctcaagtggtaaaaagtggttatgaaggcaatatttgtgcctccggaagcctagttgacatgtatgcaaaaaatggtgctctcccaggggcttatttggtgtttcgtaacatacaaagaccagatttgaagtgctggaattctataattggaggatacggtaaccatgggaattctgaaatggcatttaagttatttggtgagatgattcgggatgggctgcaacctgaccatgtaacttacatctccatcctctctgcatgtagccactgcggactagttgagaaaggaaaattctattggttctgtatgatgactgatggtattgtgcctgggttcaagcactacactagcatggtcagtttgttgggtagggcaggtttgttggatgaagcagttgatttaatgatgaaatcccctttcgccaagaaatgccctgaactatggagaattctgctaagctcctgtataacatttagaaatttatccattggtgttcatgctgctgaacaggcgctagagcaggacccagatgatatttcaacacacatattgctttcaaacctttacgcctctttaggtaaatgggactttgttgctgaaattaggaaaagaatgagagggctaatggctgataaggagcctgggctgagctgggtcgagatgaaaaatgtggttcatgtcttctctgcagacgatgaatgccactctcatatagatgactgccacagcgaattgcttagacttaaaggaaacatggaattattggatacttgtgaaaatgagttcatgtcaagtggctaa

SEQ ID NO: 90303 - DNA, 3808 bp, Oryza sativa
  unsure (1)..(3808): unsure at all n locations
  Clone ID: PAT_MRT4530_88985C.1
caaatctggtgaagaggttgggaggaagaagaacggctgctgatgagagtcgcattggagtcaaaaccaaccgtctctttctctcctctgactttcccccactctcctcctcttcttcttcttcctcctgtgatgccatcctcctctttcggcgcctcacaatcttgcgatccagctcatgtggcggacggaatgagagggaatttcccgttcttgcgctcctggatttcttgcccagaggaggagtcttgactcttgcgagcgtgttcgttcttggtgattagattcatgctgcctcgttgcaaggtggtgtgagttgttttcctgggattcttgaagttgttcaatgccctgcaggaagaaggggttcaatttctgattnccgtcgacggcggaagatgagaggttactactgcttcttccatttcttggtggtgtccgttctgctccacgtccatggcggccgctccgagagccagacgtgcgaccccaccgacctggcggcgctcctggccttctccgatggcctggacacgaaggccgccgggatggtcgggtggggccccggcgacgccgcctgctgctcgtggacgggcgtgtcctgcgatctcgggagggtggtggcgctggatctctccaaccggagcctctcccggaactcgcttcgcggcggcgaggcggtggcgcggctcggccggctgccgagcctgcggcgcctcgacctcagcgcgaacggcctcgccggcgcgttcccggcgggcggcttcccggcgatcgaggtggtgaacgtctcctccaacgggttcaccgggccgcaccccgcgttccccggcgcgccgaacctgacggttcttgatatcaccggcaacgccttctccggcggcatcaacgtcaccgcgctctgcgcttcgccggtcaaggtcctgcggttctcggcgaatgccttctctggtgatgtgccggccggctttggtcagtgcaagctgctcaacgacctcttccttgatggcaatggccttactgggagcctccccaaagatctgtacatgatgccagcgctgagaaaactaagtttgcaggagaataagctctccggcagcctcgacgacgacctcggtaacctcactgagattacgcagattgacttgtcatataacatgttcaatggcaatatccctgatgtgtttgggaaattgaggagcttggagtccttaaacttggcttccaaccaattgaatggcacgttgcctctatccctgtcgagctgcccgatgcttagagtggtcagcctgaggaacaattcgctgtccggtgagattaccattgactgcagattgctcacgaggctgaacaactttgatgctgggaccaacaagctgcgtggtgctataccgcctcgccttgcctcgtgcactgagttgaggacgctgaaccttgcaaggaacaagcttcagggggagctaccggagagcttcaagaatttgacatcactgtcatacctttctcttacggggaatggttttaccaacttgtcatcagcattgcaagtcttgcagcacctgcccaacttaactagcttggtgctcaccaataacttccgtggtggtgaaaccatgccaatggacggcatcgaagggttcaagagaatgcaggttcttgtcctggcgaactgtgcactcttgggcacggttccaccttggctgcagagcttgaagagcctcagtgtgctggatatttcatggaacaatttgcatggggagatcccgccatggttaggcaacctcgacagtcttttctacatcgatctgtccaacaactcattcagtggggagcttcctgcaacctttacacagatgaagagtttaatttcaagtaatggctcaagtgggcaggcgtcaacaggagacctcccattattcgtcaagaagaattcgacttcgactggtaaaggcttgcagtacaaccaactcagtagcttcccgtcatcactgatcctctcaaataacaagcttgttgggccaatattgccagcctttggccgtctagtgaagcttcatgtgctggacttgggctttaacaatttttctgggccaattcctgatgagttatcaaatatgtcgagcttggaaatattggatttagcccacaatgatctcagtgggagcataccatcatctctaacgaagctgaactttctgtccaagtttgatgtttcgtacaacaatttgtctggagatatcccggcaggaggccaattctccacgttcactagtgaggattttgcaggcaatcacgcactacactttcctcggaattcctccagcacaaagaattctcctgatacggaagcaccacatcgtaagaagaacaaagcaacccttgtggcccttggacttggtactgcagtgggggttatttttgtcttgtgtattgcttctgtggttatatcaaggattattcattcaagaatgcaggagcataatccaaaggcagtagcgaatgctgatgactgctcagagtctccgaactcaagcttggtgctgcttttccagaacaacaaggatcttggtattgaagatatattgaagtcaaccaacaactttgatcaagcctatatagttggttgtggtggttttggacttgtttacaagtcaacactaccagatgggaggagagttgcaatcaagcggctttcaggcgattactctcagattgagcgggagtttcaagctgaagtggaaacactatcacgtgcccagcatgacaaccttgttctgctagaaggctattgcaagataggcaatgacagactactgatctatgcatacatggagaatggcagcttggattactggcttcatgagagggctgatggtggtgccctgctggattggcagaagaggctacggattgcacagggatcggcaagggggctggcatacttgcacctgtcgtgtgagccccatatattgcaccgagatatcaagtcaagcaatatcctcttggatgagaactttgaagctcatttggctgatttcgggttggcaaggctcatatgcgcatacgagacgcatgtcacaacagatgtagtgggaaccttgggctacattccacctgaatatgggcagtcacctgtggctacttacaagggtgatgtgtacagctttggaattgttcttctggagctactcactgggcggcggcctgtggacatgtgcaggccaaaagggagcagagatgtagtgtcctgggtgcttcagatgaagaaggaagacagggaaactgaagtatttgatccaaccatatatgacaaggagaatgaaagccagttgatcagaatcctggagatagcactgctttgtgtgactgctgctcctaagtcaagaccaacatcgcagcagctagtcgaatggcttgaccatatcgctgaaggttaaggttcagtcaagttcttaaatggtttcagtttgatcgatcaagatccatcctgatagtttcttaagatgattagttctgtaaataatatttacatagcgtgaaatgccaagagttcaatttccttctcatgccacccttcaagtaatagttcatatcatcctctttcctttcttcataaggtggttgcaagatcaccacaatgtaaaaaatgcattgtaggtttaaaccctcaggataacaccctagcagttacataaccggcttttctacagatttattgtatgttctgtaatttcagctactgctatggtatgaatgaacttttgtggggcatttgttttcagtgatttgctccagctagtgctatctt

SEQ ID NO: 90304 - DNA, 969 bp, Oryza sativa
  Clone ID: PAT_MRT4530_88986C.1
ggcgggcccccggctcggggtgccgccgcgatggcgaactgtagggtagcttcgccttagatggcgctcgctagggtttctccccccgcgttctcctcccccttcctgatccattccttactgcgccccttctcttcgccctcctccgtcttgcgccctcgcgtgactcgcgtcccccaccaccgaggcttcgccatcgccgccgccttatctcaggcctctccgcttccctctgcggacggggatggggcggtgatggaggcgccgccgcgggcgagctccaggcgcgcatggatgcccgcgtgcctgtactacacccaaggtaaatgctctatgttgaatgatactttgcattttgagaaattcaatcacaatctgtcaacggaccttccagtgaattattcagctgcagataaagtgaaatctcagaaattggattactttttggtccttgatttggaaggtaaggttgaaattcttgaattcccagttgtaatgattgatgcccaaagcatggagttcgtcgattcatttcacaggtttgtacaccctactgtgatgagtgagcaaagaataagagaatatattgaagggaaatatgggaaatttggagttgaccgtgtatggcatgatactgctatacctttcatggaagtacttcaagagtttgaagactggatcgaacatcacaaattttggaaaaaggagcaaggaggagcactcaacagtgcagcattcatcacttgtgggaattgggatctgaagacaaaggctaccggaatgatgacaatgatgagggagctacaaatgccaatcgtcggaagccatcatctcggtatagatgatgcaaaaaatatagcaagggttgttcagcgtatgctagctgatggtgctgtaatgcaaattactgcaaagaggcaatcagctactggcgatgtgaaatttcttttcaagaatcggatcaggtaa

SEQ ID NO: 90305 - DNA, 2313 bp, Oryza sativa
  Clone ID: PAT_MRT4530_88987C.1
atgaggaagccattagtactagcagtagcgttgtcggctatattgctgctggcggcggcggcggcggacgtggacgtgacggtgagggacagtgacctggagtcggaggagacgatgtgggatctgtacgagcggtggcgccgcgtgtacgcgtcgtcgtcgcaggacctgccgtcgtcggacatgatgaagagcaggttcgaggcgttcaaggcgaatgccagacaagtgaacgagttcaacaagaaggagggcatgagctacacgctcggcctcaacaagttctccgacatgagctacgaggagttcgccgccaagtacaccggcggcatgcccggatccatcgccgacgacagaagcagcgccggcgccgtgagttgcaagctgcgggagaagaacgtgcccttgacgtgggactggagagacagtagagctgtcactcctgtcaaggaccaaggcccttgcgggagctgctgggccttctctgtggtgggggcagtggagagcatcaacaaaatcaggacagggattctgctgacgttgtcggagcagcaggttctggactgctccggcgccggcgactgcgtcttcgggtaccccaaggatgcattcaaccacatcgtcaacacaggcgtatctttggacagtcgcggaaaacctccgtactatcctccatacgaggcccagaagaagcagtgcagattcgaccttgagaagcctccatttgtgaagatcgacggcatatgcttcgctcagtctggcgatgaaactgctctgaagctggcagtgttaagccaacccgtgtccgttatcatccaaatcagcgacagattccattcgtaccacgggggtgttttcgatggaccgtgcggaacggagactaaagataaccacgtggtgttagtggtagggtatggcgtgaccacagataatattaaatactggatcgtcaagaactcttggggcgaaggctgggggttgtgggctgtgctgctggtggcgacggcggcggcgcaggacgtcgacctgacggtgacggacaaggacctagagacggaggagagcatgtggaatctctacaagtggtggtgcagcgtgtactacgcgtcgtcgtcgtcgagggacctcgccgacgtcgagagcaggttcgaggcgttcaaagcgaacgccaggcacgtcaacgagttcaacaaaaaagagggcatgacctacaggctcggcctcaaccagttctccgacatgaccttcgaggagttcgccggtaagttcaccggcggcaggaccggatccatcgccggcgatctcagagatggcgccgtgacttactgcaagccgccggcggtgggctacgtgcccccttcctggaactggacaaagtatggagttgttactcctgtcaagaaccaattgacttgcgggagctgctgggcgttctccgtggcggcggcggtggagagcatcaacatgatcaggacagggaacctgctgacgctgtcagaacagcagattctcgactgctccggcgccggcgactgcaacggcgggtacccatacgatgcattcgactacgtcatcaagacaggcatatctttggacaatcggggaaatcctccgtattatcctccttacgagaaccagaagcagaaatgcagattcgaccctaggaagcctccatttgtgaagatcgacggcgagtgcttggtgccgtccggcaacgagacagctctgaagctggcagtgttaagtcagcccgtgtccgtcgtcatcacaatcagcgatgagttccgctcctaccgcgggggtgttttccgcggaccctgcggaagtaatccgaatgtggataaccatgtggtactggtggtggggtatggagtgacgacggacaacataaaatactggatcatcaagaactcttggggtaaaacatggggggagtacggttatatccgcatggagcgggatatcctcaacaagaatggtatctgtggcattaccacctgggcaatctgcccgttgaagaacaagcccagactcgcctctgccgatgctgctgctgctgttgctgcctactgatacctatagtcagccacatgcataaaactccagattttgtcgtgtacacgtgcatgtacgcatagcatataattagtcagtaaattagtactaggtatatatctgcacgtgcgtttaggccatcggggttgaataaatataatgtacaagacttatctagcagcgtgtgctgtaatatgtgttgatgtgcttcgaaaagcaatataaaagtccaaatggtgtgtatttatgaattatatc

SEQ ID NO: 90306 - DNA, 146 bp, Oryza sativa
  unsure (1)..(146): unsure at all n locations
  Clone ID: PAT_MRT4530_88988C.1
ccgccacccccatatggatacaattctccgatcccaccaaccaacaagtatttaccacccccatactacttcaactccccanngccacaataccagcattcgccacctgcaaacagctatgtatgccaccactagctcaccaatat

SEQ ID NO: 90307 - DNA, 353 bp, Oryza sativa
  Clone ID: PAT_MRT4530_88989C.1
gggggccacaaaccaaaattgggcatacatatgacgggaacttttggctcggcaaaacttattttaaaaaaaaataaaaggacccccgcccatagcttttgcccataaaaatttttaagtaaccgactggggcattgcccttactgaaaacagaaacctagctagaaccgccccaactggagttttaaaaggggactggcaaacatgcccaaggcttcaaaaagaggggaaaaatcatcataagcttaagcctcagggatcaacaccggggggggcagctcctccccctccttgggagcagggatggttacaaaaaccggcaaaggggggggcgggccaaccttgcccttggg

SEQ ID NO: 90308 - DNA, 1102 bp, Oryza sativa
  Clone ID: PAT_MRT4530_8898C.1
gaaaagagggttgctgacgtcatcaaaggggaggggcggcgccggcaagcgggccccaccggtcagcgggacaagggcgccggtccaccgtggaccgggaccaccaaggcggtccaccgccggtccacgggaaccgatggcccggatcggcccaaaccgatcgagcggccaggggcggcgcggctggggcacagcacggcacaaagccagctggccaaacgacggcgcgcggcggcgcggccacccgcggcgacggccggcgacagcgcggggaggagaggagggatgctcaccaagggcggcgacggcgagactacaacgaggaagccggcggcgggctcctcggggaggcaacggtggtccgtggttcccggaggcgaggaagcggtggccggggtgcggctcggagttgccgatccgagggaggaaacggcgcagtccggcgtcgaccggggaggcgaggcgacacagatggagatgacaaacacggcggcgatctcggggcggcggtggtgcacggctagaggcggtgaaaggggcggcggcctcgggtgtgcggtgggagtggtgctcgagcggtggagagggggaaataagaggcggccggacttccccttgcggtggcgaagctggcggtggcggcggctcggcgcagcgacggctgtggcggcgggaaacggcgaccggagttcgccggagtgtggcagcgcgtgggtgcggcgtggggagagcgagggagagtatgccgggctcgggaaaaatggggaaacggacgaggggagcacggggatgctttttatgggctcgggaaggcgggatcgaggccggacgtggcggaatcggccggcgaagtggggcgccgacgtggggtggtgaagggattaaccggcgccgattttcgctgggagagtggggagaaaggtggaggatgtggaggggatcgatttcacgcgctcgtgggacggggtggagcgcgggagccgcggcgtcgtggggcgaaaccggcggccatggcggcagttggggcgacgggaggttggggaagaagatgacaggtggggcctcgggtcccacctgtcggggagagagagaggggaaaacg

SEQ ID NO: 90309 - DNA, 1096 bp, Oryza sativa
  Clone ID: PAT_MRT4530_88990C.1
atgtggtataactggctgcttctttatactgagtggttgcggcggcgctgctactgctttgttagatcttgttgctataagagggactatccagttggtacggaggaacctgcacaagagcagcgtcggctcgtgcagatcaggtccaaaacgttgctatctgaggttttgagaggcataggcgcaaatgaggcacgatacagttgccgtgctgtagcagatggctatgttgggtttgctgaggcaactgtttatggtgcaagaggagttggagagccttttgttgttcgtgcacagggtatttcagctataagaccatgtgatgcggaagaaagcgctgcacatgctttaatttctgttatcaagaaagaatgtagtgtggagttcgatgatacaaactggtttgacatgaatcgctatcatgttgagacagagcgactgaagagagctcttgggagagctaggaagaaatgcaatactcttgcaaagaaggcacggttgctggaaatcggctgggatagagctttagattcattgggttctgtcaaccaaatatgtgatgacatatgttcttttgttctaggaggtcctgatgctgatgatcttagtcatcgtgaggttggagtattctacgatgtgcaccgtcttggtgaatatgctgaatcttttgtggacgaagggttggctaatcttaccagtgttgctgctagatatatctaagcctaaggagacctgcatggattgtttttgggaactaagctgagcgaaaacaacagatgttgtgactgatattatgtccagtattttatcagtagggatcctgcagttgattgtaataagcgtctgttatatagcagcagttgtgtatagctgggtgtgtatgcatggaacagcatgtaggcatgatatatggtggttatgtatttgtctatagtatatagtcagacatatgtaatctgtgatggaatggtagtgtaagtagtaaagccctataatttctatgtatggtggttagctatgtttgtcggtatctggaaattcttgaatactataacagcgtgatcaattaatatgtgcatgtaaaaaaaaaaaaaaa

SEQ ID NO: 90310 - DNA, 174 bp, Oryza sativa
  Clone ID: PAT_MRT4530_88991C.1
atggtgggtcaccgtatatcacgtagccatgctggggtcaatctaagagccgctgaacaagatggtctgaggctgcgaggtgtgctaccagtctaccactaccagaagaacatcaccgtggaggactacgccaggttggctcagctatatattaatgaaataaccagcttataa

SEQ ID NO: 90311 - DNA, 1601 bp, Oryza sativa
  Clone ID: PAT_MRT4530_88992C.1
ccttctcttcttcttccctcacctcctccccctctttccctctcagctcccgcccggcgctctctcccctctctctctctctctctgatctgcagagccggagcccggaggcgcggctgcggctgccaagcctcctcctcctcctccagcgcgcggccagcgagcagcctcggaggccaccgccgccgcctcctcgcccggacggcgggggagcgggcggtgctccgtccagcggagcgagcccccccaatcttggccggaatcggattgaaggatcttgcgttagttactgtgctgttcgctggatgctggcaatggggtcagaggagtgggagttgtatccatcttccttcattggtgctcaggtcatagattatgggcatgtttctggagacatggatgatgatcagagtggagacttggccgtgtcgatggacgccgttctccctgatgatcttttagaaaaggtcctctccttcttgcctgttgcaagtgtcataagatctggatctgtttgcaagagatggcatgagattgtgcatgcccggaggcagacatggagcaaaatggtgcctcagaagccttggtacttcatgtttacctgcagcgaggaagcggtctcggggttcacctatgacccgagcctgcgtaagtggtatggattcgacttcccttgcattgagaagaccacctggtcgatttcctcatcgtccgggttggtgtgtctgatggacagtgaggataggagccgcatcatcgtgtgcaacccaataactaaggactggaagaggcttgttgatgctcctggtggcaagtcggctgattacagtgctctcgccatttctgtgaccaggacctctcatcagtacatggtggctgttgcaaggtgcaaccaggtgccatcagagtattatcaatgggagttcaccatccatttgtacgagtcagagataaatacatgggtgtctcccttcactgaactattgattggatggcgaggaggtgatgagtgcgtgatctgtgatggggtcctctactatctggtgtactcaacaggcgcgcgtccgcccacgcgtcagcatcgccattgtcttctcatgtatgacctatctaccaggcctactcacacttctttgatgagcatggctataccagtgccgtgccctcttacatgtggccgtttgatgaacctcaatgagaggcttgtcttggttgggggcattggcaagcaagataggcctggtatcatcaagggaattggcatctgggagctccggaacaaggagtggcatgaggttgctcgaatgcctcacaagtttttccaaggatttggcgagttcgatgatgtttttgcaagctgtggggcggatgaccttatctatattcagagctatgggtcaccggccctcctcacatttgaattaaaccagaagctgtggaaatggtcactgaagagccctgtgacgaagaggtttcctctgcagctgtttactggtttctcttttgagcctaggctggacattgcttcctagttttattttgtttcacttccacgggaattcttgcattatttgcctggtttggagttaccaagtgaagag

SEQ ID NO: 90312 - DNA, 301 bp, Oryza sativa
  Clone ID: PAT_MRT4530_88993C.1
ccggggtgcagacaccacgcgtgccagtggatgcatgctgcatggggctgattggggaacgaatgcaaatgcaagatgggttgctgatgttgctgcaaacactgtgtgctggacttggctgcctgacaggaaccaaggtgcgaaagggattggaataaagtgcagtgcatgtgcacaaccactggatggaaggattcctcgaaaagttaaggattagtagttctttttcgaaatcgatttcgaaaaagaatggattcggtcttatacatacgcgaggaaggtaaaaaaaaaaaaaaaaaaa

SEQ ID NO: 90313 - DNA, 403 bp, Oryza sativa
  Clone ID: PAT_MRT4530_88994C.1
ggaccacaaggtgcctatttcctggattatggtggaaatatattatgttatgatatccgtaacatcgttgcatgaatgggacatttcaacagacatcacacaaatggagggaagcatgaaaataaggattcatgcattattcagtacaatatagaacagatcaaagaaatctggaggagaacgggttgtacatacgcgaatggaatagtcaggcagtagaacaaggttttttatgtttcctaacagtagcacaatcagttagctcctcttcagcataaatgtcagtgtgatgttcagtgttgttttgctctgcattccaaattatacaggtttttatgcgaaccctgcatttttttgcagaaccctgtcccggaggaatggcttatgcagttctggagttgga

SEQ ID NO: 90314 - DNA, 405 bp, Oryza sativa
  Clone ID: PAT_MRT4530_88995C.1
aaataaatatataaacctcatgcggtaatatctaaacgggagatttacactttccaaataacattacaccactctactttacacacattctcccattataatcatatccctggggttaagaccttaaacaaccacattaccaggagtacacacaaaacttgtatccataacctctcttgtgcatcaacctcactctttaacaaaaattacctacataattaatctacgtcctacatggcttccaccatatactttatagcttcaacagattaatccagcataccccaaagtctatccaccaacaaccttgaaaattgatgagcacaaacaattaccaacattatacaagtcatctctgaaacaccatgtaatcaacacacgtcatcacagcacaacatcatcatc

SEQ ID NO: 90315 - DNA, 666 bp, Oryza sativa
  Clone ID: PAT_MRT4530_88996C.1
aaacctccggcgccgccaccgacccgccggcgcagtgcggcacccaccggcaaggagaagccatcatggagcatgggtcggtgacggactcgacggcctcgacgttctccatcgtggaggaggatcacacgctcgccaactccgttagatttgttcttaatcaggacccaagggtagcattctgtggatacagtatccctcatcctgctgacaacaaagtcaacataagagttcagactacaggagacccagcaaaggatgttctgaaagactctttgcaggatttgatggtgatgtgccagcatgtaagggggacatttgacactgcagtgactcaatttcggcagaacaatcctacaggcatgaacatcgatcagaacaaaaagaagtagcttctgggtggtcttcgctgcatggcaacaatttgcccagacattttctatgtaatcgaccaattagttggtctatttgatatgaatgctccctgtatccattgtaagaaatgctattataacacaacgggacttgcattcatacttcagttttcatggtcaatggacatctcggtcatttatcctgtttagcgatgtatgttgcctggataacattttttttacaaatgaacattgaattaagctcttctacggataaaagcgacaggactgg

SEQ ID NO: 90316 - DNA, 686 bp, Oryza sativa
  Clone ID: PAT_MRT4530_88997C.1
cggtgctcaccggcgcacggcaaggagtgaattccggcggtggattccgacgaagaaggggtggacggaatggcccgcacgacggcgaacgcgatggcgtcgacggcgcggctcggcacggcatctagcggtggctagcggcgaccggagcggcggcgacagcgacggagaggagggtgatggcgctagggcgttagaaaagacgggaggactcggcgagctgggaaaaaaaagataggggtggcggtggtgcttaaatagagagaggggtccggacgtggccgggagaggcgggaatcgccggccgacgtgggggagtgggggaggagagagaggcgggattcgaaaatcgaatccgggccgtcacgagcgtgggcgcgggcgggagagagagggagtgggtgcgggagacacgggcgcacgcgcgggcgtggccgacgtgccccggaagacgcgggagcgaggcgtggcggtggttgcggggcgcgtcggcgccggctggagaagggagacgggcccgataggtgggccccacctgtcggcgaccccaggagagaggagggaggcggccggctcagttgggcctcggccttcggccggcccagcgggaaggggagggaggagagaatgggccggcggcccattcaaaagagaaaagggaaaaagaaaaagaaaaggaaggaaat

SEQ ID NO: 90317 - DNA, 635 bp, Oryza sativa
  Clone ID: PAT_MRT4530_88998C.1
gtaccaatatgaccaaaattttagaaattttgattattttggtcagaaataatttaaatatttgaataaaaatgtttaaatttgaatttttttgtcaaattcacaaaaaaagacaaaaaaaaatttggccaaaataatttcgtgggggaatttcgaaccctgactttgccacacccacaagatgtatagtactattggaacctggcctctacatctaacgtagtagatgtacacggccaatggatgccaatatatgttcagaaagatatagcatggcaattcaaccaatgtttgctctggatggattgaccgtttcttgccagtagcctactgcctgcggccttgtacgccattgtcgtgttccaagttgtaaataatgcagaaatttctttcaatgctcttttatcgtttcgagctctttgccggcgttgcaggggccggagaggtcgatgacggggagcgacaccgccatggtgcaggctggtgggtaggggtgtaagtgaccaacccgcaaaacccacttatatactaaaataagccacaaacccgcttattttgaactataagttggttcgtggctgatccacttatagccctaccggtgggcgccgatcggccgggaacatgaagcagtc

SEQ ID NO: 90318 - DNA, 1138 bp, Oryza sativa
  Clone ID: PAT_MRT4530_88999C.1
ccggccgggcttccccaagaagcagcagcagccgggcaactagtcttcgctccccaccaagctccgccaccgccggaaccctagacccgccggcgatggcccgctacgaccgcgccatcaccgtcttctcccccgacggccacctcttccaggtcgagtacgccctcgaggccgtccgcaagggcaacgccgccgtcggcgtccgcggctccgacaccgtcgtcctcggcgtcgagaagaagtccacccccaagctccaggactccaggtcggtgcgcaagatcgctagcctggacacccacatcgcgctggcgtgcgcggggctcaaggcggacgcccgcgtgctcatcaaccgcgcgcgggtcgagtgccagagccaccgcctcaccgtcgaggacgccgtcaccgtcgagtacatcacgcgctacatcgccggcctgcagcagaagtacacccagagcggcggggtccgccccttcggactctccaccctcatcgtcggattcgacccttacaccgacaagcccgcgctgtaccagaccgatccctccggcaccttctccgcgtggaaggccaacgccacggggaggaactccaactccatgagggagttcttggagaagaattacaaggagacctctggcaaagagaccatcaagctcgcaatccgtgctctccttgaggttgttgagagtggcggaaagaacatcgagattgcagtgatgacacagaaggatggtcttcgccaactcgaggaggctgaaatcgacgaatatgttgctgagatcgaggcagagaaagctgcagctgaggctgcaaagaagggtgcccctaaggagacctaattcttcgctgtaccaaattttcattccatcaacacatttagcgcattacttgtgttccacagcactgtttttaactgttctagaggaacgctagattgtttggagagtgaatgattctattcttattgcacatcaagatcccttagacccaaatgccttgtgatgtacttgttttctatatacatggcttcttttgaacaaaaaaaaaaaaaaaaaaagtgtagccttcattaagtcttgagggcaactgtcaaatcttgtggaacaaaaaaaaaaaaaaaaaaggggcggcc

SEQ ID NO: 90319 - DNA, 488 bp, Oryza sativa
  Clone ID: PAT_MRT4530_8899C.1
aaaacaaaactgaatccctttttttcccctaaacggaccttggctttctggacaaaaaaaaaaaatgaaaaaaacttttttttaaacccaatccaaattccaaacaaccctttccttggctcaaccttttttttggaacaggaaaactaacttttgcttttacaagacaattttaaaaatcccccccttttcccttttccaaaaggggggaaaatcaattgcaaattttgcaaaacaaccttttacaaagctctcaatttcaagggaaaaggggggggcccaaaagggaattaatctcaaaccccgttctttgtaaccttgccgggtgtcaaaacaacagttgcttccccccaaaaaaaaacctgccaaataacccaaaacttcctgaaaaaacatttacttttttggccaaaatttgggtaacctcccccaagttaagggttaaagggggcaaatccccccactgaattgggccccccaaaaccaaa

SEQ ID NO: 90320 - DNA, 583 bp, Oryza sativa
  Clone ID: PAT_MRT4530_889C.1
ctgctttccaagctcacctctcttgctcgacgatccacacacgaatttcctcgacctcttcgttcatcccaatctcatcgttcgatcgatcaacaattctcctcagcaatggcgcaaaagatcgtgatcaaggtgcacatggggagcgacaagtgcaggcggaaggcgatgtcgctggtggcggcgaccggcggcgtggtgtcggtggagctcgccggcgacgacaggagcaaggtggtggtggtgggcgaggtggactcggtgaagctgacgagcttgctgcggaggaaggtcgggccggccgagctggtggaggtcggcgacgccaagccggccaagaaggaggagaagaaggaagagaagaaacctgagaccgtcccgccgtactactactactacccgtaccaccattacagcccttacggctacatcatgtagaataccatgtgtacacataccgtccgtatgtatgtacactggtagtgtatacatcgcgtagtgcgaatattctttttgtacggtattgcaagagagattattatggtgatgttttgttttgctctcccgcggttaaaaaaaaaaa

SEQ ID NO: 90321 - DNA, 908 bp, Oryza sativa
  Clone ID: PAT_MRT4530_88C.1
atgtcggtgggcggcgacgatgagaggcggccagccgccccgcagtggcgggaacgcaacgagattccaccgagatggaatgaggtggacgggagcgcgcaaaacatgggaaacacggcaacgcagcatcatggcaaggaaaggggggcaggaagggtgagcggtacggagatggaagggcacaatcgtctgtggcccccctccccattttccccgctccatctcccccttcctcttcctcttccccttgtccacgcgccgccgttgtcttgccgccgcgccgccaccttcgaagccgctgcgccgtcgccccggagccgccgcgtcgtgcgtcgccgccttgcgccgccgtcgccgtcgggccgctctcgcgccgccgcactgccgccttcgtgccgccgcgccgtgcgccgtgcgccgtcgccgccaccgccgtcgagaccgagggagccgcggatccgggtgaaggccaagacccgcaagaccttgagcaaggcaaaggcgggagatgaagcttcggaggatccctatgcctactaccaggagggagatgaagacgatggcgctcagtaggtcttagtacggtcgttgcctgtggcaatggcatgccgctgcctgaattccgctgccttatctatttctgcttttggatgtattccggaccgctcggtccaatgatttaagactatgcctgcgggcttatgatgtaataattcgtattccctacctagtggactcgacagcggcacaaccacctgtcctggagttggtgcacactccactgatccctacaccttctccgcagctgggttccagtttggagactccgatccaggtcgactccgagacagaggggaccgacaccgagccagagatcgagccagacatcactgatccttcagaagatg

SEQ ID NO: 90322 - DNA, 167 bp, Oryza sativa
  unsure (1)..(167): unsure at all n locations
  Clone ID: PAT_MRT4530_89000C.1
accaattttnctttttcttttttgcaagcacaaaggccgngttcttaaaataataaaccagttcacanctaaccatattacgncacataacgctggtccttataggaacaaaaacaacacataatcggaattaactcatcaatcattgttctcatcatgattgggtc

SEQ ID NO: 90323 - DNA, 313 bp, Oryza sativa
  unsure (1)..(313): unsure at all n locations
  Clone ID: PAT_MRT4530_89001C.1
cggacgtgncngngacgcgtgggtttcccttctcctccaccccccccccccaaccacctcaccgccgacgacctcatcctcgtcggcgccgtcggattcaccagcgagggaggttgcggcggcggcggagagcgcgagggaggaaagcgggggaggtgaccgccagcgatggggcagcagtcgctgatcgccgcggcgcttcgtcgcctccgccgccgccttcctcttcgccgcatccgcactnagccccgtcccgtctctccgtcgatgggagatccgctaagtgccgctttgcttaganctaataattttg

SEQ ID NO: 90324 - DNA, 211 bp, Oryza sativa
  Clone ID: PAT_MRT4530_89002C.1
tccacccaccgccgcctatcatcgctccgcccgcagcccggcgccgcttcacgcactgcgctcgctcgccgttgcccatcgccgctccgcctactgccgcgctcggccaccgctgcccatcaccgctccaccctccgccgctctgctgccacgcgggcctgccgcctgcccattgccgttccgcccgccggccgccggcctccctcactga

SEQ ID NO: 90325 - DNA, 441 bp, Oryza sativa
  unsure (1)..(441): unsure at all n locations
  Clone ID: PAT_MRT4530_89003C.1
caaaacaacaaggggggagagggggagacaaaaaaaaanggcnnccaacaggggagngancncggcgnngcacgncgaaggcgnaaccgagcacgaagcaacgacgacaanggaggaccaccaccaagaacaggnggnnaaccacancgaccagcaaagacaaccaagaagggggggggggacgaacccacaaccgngaagccaggcgancgngaagcgccagagcgaagcccccgacacggaggacgagcaagcccggcgaggcagangccggcagnncgccgacaacgacagaagcaggagcaggagcgaagcgcccaaccacaagcngaggagcaacnacagggagagcggngccgacgacgccggacaccccaaggccgaggnganccgcggaagacggagaggggacaaagagcgcgcggaggggagccaaccggc

SEQ ID NO: 90326 - DNA, 468 bp, Oryza sativa
  Clone ID: PAT_MRT4530_89004C.1
tgtgaccaaccaaccgtataggcgaggacaccagtcgggatgaaaacggagcggatagtttccgtccattctggagagaaacgaatacggataccttcagatcggatagttcggatacaaatacggatatttcctcccggatacggatatgaatatgatatcggggttttcgtcggatacgaatagtaatttggatatccaaaaaaattgtttccatattcgtgtccgatcatattcgattcttattcttattcgagataatccatatttgtttccgtattcgagctatccgtattcgtttttgtatccggtaaaaaaaatatgaaaacgaatacagtatgagcattatccgttcgtatccgctccgttttcatccctaggagagatgggggtgccagtgcccggccaaagaggagaaagcagagaagaccgtgacggagcgctggtcaccaccacagcccgctctgg

SEQ ID NO: 90327 - DNA, 560 bp, Oryza sativa
  Clone ID: PAT_MRT4530_89005C.1
gccgcacccccgcgcccgcccgctccgcgcccgcccccctgccggaagtcatcccgtcccgctgctctgccccggccccgatggcggctatggcgatgcgcactcttccgaggaagggcacagcatctcccaagactacaactcctactggcaagggccgtgcctctactcttgaagaggacatcaggtttcttgctgaattggctaaacgacatgcagatgaagcgagatattacaggatcatggcgctgtccgctgtttctgcgtctggtgctgtgttcttcaccctgttagcacttcgcaatcatgtgaatcacctgtctgaatgttaggagtgtctcaaccatagaggcacgcgcgctacgttggttccatcatctgggacggcttgtagagggcggtgtagtttgtggaacgaggcggcggcggctttcgtcttgaaggtggagagagcggtagtggttatagtatagtgggtggtggcatggggcaatgaagcataaaaaaaaaagaggcgtgttcctctgcatcaggggtcgagggcgagcacgatgcagtga

SEQ ID NO: 90328 - DNA, 327 bp, Oryza sativa
  Clone ID: PAT_MRT4530_89006C.1
atggcggggttggtggtggtggccacctatccgaatcctcgctccgtcacggtagccccaacacagcctgaccgatcagcgaagaaggtggtggagacggcgagcgcgatgccaacgagggagggcgggaacggcatccaagatcatagcgaaggttgtacccgtttgcatcaacaacatgcgccacttgtgcaagttggccacttgtgcaacctgtcttatggctcattttcatggcacattatggctgccctgagagttttagcgacatacatgtttgtgctttctaagtgggatatttacattgtccttgtccatatgtattag

SEQ ID NO: 90329 - DNA, 1080 bp, Oryza sativa
  Clone ID: PAT_MRT4530_89007C.1
atggcgaccactcagagcaatgaccacggtgctggcctcctcgatgcacagctcgagctctacgccaacacgttggccgtggtcaagtccatggccctcaagaccgccatggacctcggcatcgccgacgccatccaccaccacggcggcgccgccaccctgccccagatactcaccagggtcacgctccacccctccaagatcccgtgcctgcgccgcctcatgcgcgtgctcaccctcaccggcgtcttcgccgtcgagaagcctactgcggccgatgagccgcccgtctacgcgctcacgccggtgtcccgcctcctggtcagctccgggaacctgcagcaggcgcccatcatgtcgttgctgctccacccgagctgcatcacccccttcctccggatcggcgactggctccagcgcgagctgccgggctcgtccatcttcgagcacacccatggccggagcttgtgggaggtggccgacggcgacgccgccttcagcaaggtcttcaacgacgcgatggtctccgacagccgcctggtgatggacgtcgtcgtcagggagcacggcgatgtgttccggaggatcagctcgctggtggacgtcgccgggggccacggcacggcggcgcaggccatcgccagggcgttcccggaggtgaagtgcagcgtgatggacctcgcccacgtcgtcgccaaggctcccggtggcaccggcgtggagtacatcgccggcgacatgttcgagagcattccaccggcaaacgctgtcttcctcaagtggattatgcatgactggggtgatgacgaatgtgtcaaggtactaaagaatgccaaaaaagctatcccctctaaggatgctggaggaaaggtgataatcatagatgttgtggtcagagcaggttcgcctgatcaaaaacatatagagctgcaagccttgtttggtgcatacatgatgcttatcaatggtgtcgagcgagatgagaaagagtggaagaaggtttttatcgaagcagggtttagtggctacaagatcataccggttctaggctttcggtcaatcatcgaggtttacccctga

SEQ ID NO: 90330 - DNA, 1314 bp, Oryza sativa
  Clone ID: PAT_MRT4530_89008C.1
tcaaaacagagagcaaaagcagaggcatctcccggctcgccggccggcgatcagcggccgccggcgagctccacggcgagctcgtgcaggagctggtcgagcacggcgcgtctcgaggtcggcgccgacgccgtcccggtccggccgcacgtcgccggcgccgatccgcgacgagctcggcacctccgacgccaccatcgccgacaccctggttagctccgccctctgcgcctcccagtacgcggcggcgggggcgagctcgccgccgtcgctctcgtggtggtagcagcagtcgtcgtcgtcgtcgtcgtcggaggcggcggcggcggcggcgtcggccgtggcgttgatgaggtcgtcggtcttggagaggaggtgggtgagcagcgccggcgagtacgccgcctcgaggaggtcgcggacgaacgccatggcgttcttcggcgaggccaccgggctgaactgcttctcgtcgtcggactccgagtcggtgtactctatctcctcctccttctcgtcggcggcggcggcggcgtcgagcgggtggtgcttggtcgagcacggagacggcgcggcggcggcggcggcgaccttcttgaagctgaacgactccgacgactgaagcgccgccggcttccggttgctcgccgccttcatgtcaagctggcatgtctgattgtctgatgaaaccacaacaagcactccttttggctgcttctgcagcagcagcacatcaccaattggtttcttaaatgccctggtctcccaaggaggcttcatgtcaccttcatccaaatgccctgattccattatgtctcttaatcctgtattttcaatagcgctaggcctccgtccctgcgccggcaagaggttaggagcgccagcccgccggcagcaagtcgtgcctccctgcgtccctagcctgcgctccagcccgaggtcgtcgccgtacctgcctacatcctttaacagcgccatcccgccgccaagctacctgctcgctgctcgctcgcttgctggccgacggagccgccggctcctctccgccgcgcgctgaccgcggggccaccggccgccgcgccgcgcctccatgcgcgcgcgacgccgccgccgcagcgcctccctgcccgcgcccgactccgccgcgcgctgttccgtggcagctggccccgccgccgctcctccctgccgcgcgctggccgcgcatagccgccgccaccgccgggttttggagtggaaatcgggatagggattggggatttggttctttcattgaaccaagggtagaatggtcatccaaagagggcctacctt

SEQ ID NO: 90331 - DNA, 471 bp, Oryza sativa
  Clone ID: PAT_MRT4530_89009C.1
ttgttttttttttttttttttttttttttttttttttttttttttttttttttttttttttttttttttttggaaaaaggggaaagcttttttctaagaccacctaaccctggccccggattaacccaagaccccccaagggggcctgaccaaattggttaaagcccccccccttattgccaagccacccggtttatcattcccagggctttttgggcccatgtccaaaaagccccaacccaaccttgggcgatccaagcaagcaaccatttccatttggcatcccctcacttcccctttccatcccttcccgcccccacggggttggcggcaatgtatttgcccccggttataaacctttccttttccccccccccagcccccggggcggccggcccataaaacttttgggccccggttaaccccccggggggccccaaggacattcccccccccccgttttttatcccc

SEQ ID NO: 90332 - DNA, 1188 bp, Oryza sativa
  Clone ID: PAT_MRT4530_8900C.1
ggcgcggctattcgaatagattatactctccgggagaggggcgcgcggaccgggtccacgggaagtggggcccacgcgtcagcctctcggtccacggtggaccgggcgcacgcggctggcggcggtcggcgccgtgggtcccgcgcgtcagccgcacccgcgggcgcgggcggctgacggccgggcccacctggcagccgcgagggcgcgcccgaaggcggcctcgccggcacggccgacgggagcggcgcgcccgcgccccgatggtcaccgccggcgaccatcggcgcggcggagcagcgcccgagagagcggagaggagggggaaatggaagggacggtccacggctcaccccgagacacgaggacggcggagacgacgaacggagtggagaaacgcggcggcgcggctcgggatgacgatgacggcggcgctccgacggtcggcgagcgaaacggaggcgcggacgaggtcgacggcgatgcggcgatgccgagggaggtggcgccgagccgggaggaagaccggagcgacgacggcggcgaaccggagcggaggaaggcgacggcgcggttcgggatgccgagggcgacggtgctccggcagccggcggacgaagcggagcggcggacggggtcggcggcaacacggcgaagcggatggaggtgtcgccgagtcgggcggaggaccggagcgacgtcggcggcgaaccgaaggtcggcggcgacggcggagagagaggagcacggcgcgagcacggatccgacggcgagagcgagcggcgagcggcgggaaacggaagagcggagctcggggagcaattatatagcaccgagagggggagaacgcggccggagaggaaggaaacgggcgcggggatctcgggctccatagatgtcgccggcgaggattacgggatgaatccggacggatccgagggagagagagaggggaaatcgggggaaacgggggagggaaacgcggggaatagcggcgggcggcgggcgcggcgggaggaaggcgatgacaggtgggtcccacccgtcagcgagagtggcgggcgggcccgcctgtcagcggcgcacgcgcgcgggggaggccgatgggccgcgggggaggagagagagagagggagggagaagtgggccgagccggcccaagaggggaaggggggggggaaaaaagaa

SEQ ID NO: 90333 - DNA, 267 bp, Oryza sativa
  Clone ID: PAT_MRT4530_89010C.1
ggctgcaggattcggcacgaggccgcgctcttcccccatcggcggcggcggcggcggcggcggaggaggagaagcgaaggtgagtgtacatgtgttagggtgaactcccagacgcggccgctcaacggagagggaagcgattttctgggggacagggggtttattggtctgcattggatatcaatcaggggtgtagcgtctgcattcattcactcgaacgaagaagagggtttgtgcctgatcaaaattgcgcacaaagaataagag

SEQ ID NO: 90334 - DNA, 206 bp, Oryza sativa
  Clone ID: PAT_MRT4530_89011C.1
aaataaatagcttcaaaggtcatcttatataactatcgtatatgatatcacaaaacggtaaggagtcctcttcaacaacatacccattacatacaatgcaaacaatctaaaaacaaacacccagtttcttgaaacgttctatattgatttaacacctatccaatattcacatttctttataccaaaaagggacaacacaagacaaa

SEQ ID NO: 90335 - DNA, 267 bp, Oryza sativa
  Clone ID: PAT_MRT4530_89012C.1
atggctcatgcaaccggtggcggaggtggaaggcgccctcccatcctctatgttgatgctgttagcgttgacgggagcggctgggagagcggcagcgggcgcggctccggccggcagcgggcgagtcggggaggggaacggtcggcggcgagcggcggcgggcgcggatgggaggcagagagaaaaacggagatgtggcacaagggagaggagaggccatcggcagccaggcagagcggtggcggtcgtggtgaagcggcggcctag

SEQ ID NO: 90336 - DNA, 254 bp, Oryza sativa
  unsure (1)..(254): unsure at all n locations
  Clone ID: PAT_MRT4530_89013C.1
tgtatttgtacaaaaaanggaaagtggataaagccctgatggaatttccctaggcaaagtggnagtttcggttgagacccanagatttttttttgcccaagtgttccccttttcagtgcttgtttggatgaggatgatttaactaggattttgtagttcaacggctgntcncncaatttaagggagacaaancctagtagtatanttttgaacttcaaaaaaaaaaaaaaaaaaaaaaaaaaaaaaaaaaaaaa

SEQ ID NO: 90337 - DNA, 900 bp, Oryza sativa
  Clone ID: PAT_MRT4530_89014C.1
atgaggtttggaacttatgaagattcttatcccaatcttcccccactattggaggtgatgcaggcaagaaacccgggcacacacatggctattctcgacgaggcggaatttgttgagcacgttcaagtagagttcgacaccctgttgcaaagactagagacgagacctccagtcgtcaggcctgacgatgtggcgagcgtccttcgcaacttccgtgcctgtgctgccgcactactttgtcgtgtctcctgcgggagcgcagcagatgtggtgcagctgtcggcctcacaccccagcactggagtacaccagggggtcagctggatcaggggtacccacatcgagcacggcacagccacgtccgcaggtattccaaactccgccttatgttcaccccacccagggagcatctgggttggcacacctcccttacatgccaacaggggacaacgtgttgaacacaccggcatggggacttcatgtcactccgcagatcgctgccaggttgcaacgtccttctcacaagatacatatggcaggcggtacttcgtctgtcccaacatagacgacaacttcgttgggaatccaaggatgtgtgcttttacttcatggatcgacatggtcagcccgacgtatgaaggcggaagagtggggcccacctgtcaggtcgtccccttcctccagccacccgcctctgacggcaaccgccgccgaatccgccacgtcgccgcctcctccgctcttcccgcgcccacgccgcgccgctcccgcgtccccctcccacgtcgccgcctctcccccgcgtctcccgccctcgcgcgcctcgcaaatgggcgggattcgaatttgaatcccacccctctctctctcccccaccttcccacgtcgccggcgcaatag

SEQ ID NO: 90338 - DNA, 426 bp, Oryza sativa
  Clone ID: PAT_MRT4530_89015C.1
ccggccggcggctggggagaaggccgccggggcgagggggaagaggagggcggcgccgcgacggcggccggcggcggcgtcgacgccagcgatcaccaccacggctaaggttgtgttccaggacagctccatggcgcagttcgtggcgccgactagcatggtgagggacgcgcgtcgtcggcgtcggcgtccacctgcttcgtctgctgctccgacgagctccgcttcgacgcgccggcgcgcgcgatggcggtgcacgacgcgctccagctgggccaactctacttcgtgctgcccgtctcagcgctccaccggccgctctccgaccaggacatggccgcgctcgccgtcaaggccatcgcggcgctcggtgcttccgccaccgccgccagtatggactcctcaatctacaaatgtgggagcatc

SEQ ID NO: 90339 - DNA, 1683 bp, Oryza sativa
  Clone ID: PAT_MRT4530_89016C.1
ggcacctatcgaacgacgggcagtcgacaaagccctgtcgaacggctggcgttcgacacgctcacctgtcgaacggagggagttcgacagggcccacaacccggcgccgcgaggcctgtcgaaccgggggcgttcgacaggatgtcaggtgatatgcccattcgtctgtattatggcgatgctcctatacaaatatgtgatagcggggtggatttgactgtatatgccttccatgatactagtctgaatgcaccggagcatatgggtttgaacgacgtgttagggtggttgtataatatgtttggggtagatccagtgcacgataaatttgtcataaatgccgtgtggctagtgaggggtcaacatggatggcagtggagagtagtggaggttgcgtcaactgggagttggaggaagtttgttagtaaagtaagggagaaaggctatagtctggcaatagtggtgcagaagacaacatgtgttgatcgatcgggggagtcaagtcatgccgtggtggaagaaactccgttggaaggtggacaagctgaaaatgtttggcggactgagcaaggtcgaggggaagaagtagtagagggtaatacacaaggagaggtcattgttcgtggtactaatcgtgaggccaacgactcagacgatgaagaaccggattcgcctatgcgtgttgatgcagcggaggagaataaggcggtagtggatcagatggaagtggaaaacgaggaataccttgcgcttgtagtggaaggagaatatacaacactgtgggacaacgaaactaacatacccgatgattggacgaccatatcaatgagtcgtatgaaggcggaatttgttgagcacgttcacgtggagtccgacaccctgctgcaaagactagaggcgagacctccagtcgtcaggcctgacgacgtggcgagcatccttcgcaacttccgtgcacgtgctgccgcactactacgtcgtgtctcctgtcggagcgcggcagatgtggtgcagacgtcgggccgacggccatcaccaccactaccccgacgttccagcgtggatcggagtggtctatcctcttcacgtcgcgggtacgaagcggcccacacatctcatggtcgtccttcctttcagcacaccccagcaccggagtacaccagggggtcagccggatcaggggtacccacgtcgagcacagcaccaccacgtccgcaggtattccaaactccgccttatgttcacccctcgcagggagcatctgggtcggcacacttcccttacatgccaacgggggacaacgtgttgaacacaccagcatggggacttcatatcactccgcgtgcgccagagcagggccacacacagcacacatacgatgagtacagttcggcgtcgacgcatcacggaatgcctgcttactcccctcgcacagcattcattgaggacttcttttccactgatcctccccagggggaagtagggatggattactggcacgcagcacctcaggtcacacagctgacgcaggagacaaaggccggtcaggggccagacgtgacaccacagcaggcagctagagataggcacccccctgataatttgacatatcccactgagcagattaggcgtaggaagaagggaggacctagcaagcgtgcgaagggcactgatcgtccttga

SEQ ID NO: 90340 - DNA, 2307 bp, Oryza sativa
  Clone ID: PAT_MRT4530_89017C.1
atgagccgctttttcgctggtttctcgaagggcacctatcgaacgacgggcagtcgacaaaaccctatcgaacggctggcgttcgacacgccacctgtcgaacggagggagttcgacagggcccaccacccggcgccgcgaggcctgtcgaaccgggggcgttcgacagggccctccaccgaccctgtcgaacaatgggcgttcgacaggccggccggagaggaggccgaggaggcgccggccgggaggaaagggttggcgacgccctccagcagtgaagttaaggtgaaagttggacagatgtttcatgacaaaggtcacttacaagatgcggtgaagaggtgggcatttgtccagaagcgtgagttcagggtgaagaaagcattggagatgaggtttggaacttatgaggattcttatcacaatcttcccccactattggaggtgatgcaggcaagaaacccgggcacacacatggctattctcgatgaggtgaatgaatatggggagaatgttcttcgtcgggctttctggtcatttgggtgcatgatagaggcctttagaaattgcattcctttgctctgtgttgatggcactttcatgacaggcaagtacagaggaacaattctaaccgcgatcggagtcgacgcggatagccatgtcgttcctgttgcttttgcatttgttgaaagcgagaacacatcaagctggctatggtttttgcggcacattaaaatgtgtgttgttgaaaacagaccaaattacatggatgagaaaagtaagaagggaggaatccacagagtgtggcctgctgggaatagagagttgttatttgagatacgacttcgtgacaagagtggtgtcggcattgggactactgacatcacattggaatgcacgttgtggccagagtatccacagtacagttgggggtcggcggtacttgcggcgacatatgccggactgtgtgatgcttgcgtgaggaacaacaagcaaagttcactccctggatgcccgttgctacttatgttgtgggcgcacgagcgcttcgacattgggaggcctcagcttgactcgtacgcaaactacggtttgcgagagatgtacaggtctggtgttgatgacatcgacgatcgtcccactatgggatccttgtggacacaccgtgagccgcagtgggttagcgggacaacacgtcgtgtctacactcagtttgtagctgactttgatcagcttacgcctgaccgtgttcggtggactccctacactcagcacgatgtcaatgatcgtgcaccgcacggtctcgcggatctttgcacgcgagatatgcaactctggatgacgacttgtcacctcgtggtggacgtgcacgtcgagccacacaatgtccacagggttctcaaacagttgggcatgtatcaggatttccctccgagagatggtcgtcctttggctgatagtcttcataggtactccagaaaggggctcgggctttcctacgagctagttattgtgaccacggttcagccgacggtacaagagtgggagcacgcagctgataacttggcacttcagacacctccagacgatgggagttattatggagcttaccttcgttggtaccgcagtgttacacgatggaggtgttttcctccacaaggagatagcaccgtcccccaccaggcagcgattactgacacgtttgcccctcagcctagatcagcttacaactcaatggcggaatttgttgagcacgttcacgtggagtccgacaccatgctgcaaagactagaggcgagacctccagtcgtcaggcctgacgacgtggcgagcatccttcgcaacttccgtgcacacgtcaggccgacggccatcaccaccactaccccgacaatccagcgtggatcggagtggtccatcctcttcatgtcgcgggtacgaagcggcccacacatctcacggtcgtccttcctttcagcacaccccagcaccggagtacaccagggggtcagccggatcaggggtacccacgtcgagcacggcaccaccacgtccgcagcattcattgaggacttcttttccactgatcctccccagggggaagtagggatggattactggcacgcagcacctcaggtcacacagccgacgcaggagacggaggccggtcaggggccagacgtgacaccacagcaggcagctagagataggcacccccctgataatttgacatatctcactgagcagattaggcgtaggaagaagggaggacctagcaagcgtgcgaagggcactaatcgtccttga

SEQ ID NO: 90341 - DNA, 665 bp, Oryza sativa
  Clone ID: PAT_MRT4530_89018C.1
acgccttcctaccgtgctcgcgctgctcgccctcgggagcagcggcagacggctcgtgcgacagcggcaggctcggcgacggcgaccacgcagggctcggcaacgcggaccgcggcggtgggggggtttggcgacggcggatccagtggtggggagggcggtggcggtggatccggcgatggggaggactgcggcggcggattcagcgatggggaggagcggcggcggattcagcgacggaggaggagctcgcgggggaggagcgacggcggtgtgcgaggaggaggtctaggggcggcagcagatctggcgatggtgcggcggcggattcggcgatggggaggtgctgcagcggcttgtgatgaggagctcacgggggaggagcggcggcggcgtgcgaggaggaagtcgaggggcggcggcggatccagcgatggaaggagcggcggcggcttttcctcttgctcttgctcgccgccggcttttcctcttgctcttgctcgccgccggctcatcctcttgctcttcctctggcgatggggaggactgtggtggcagatccggcgatcggttgacggtgattgcaaacggcatccatcccttccctctctcatcccttcaaccaaacaaaaaattaggattgtcccatcttataaaccaaacat

SEQ ID NO: 90342 - DNA, 4842 bp, Oryza sativa
  Clone ID: PAT_MRT4530_89019C.1
atgtcaaacagtactaaaaacaatgtaaaattgctcactatcacggtcctgtattttggagctacgggactatcgcggagccacgcgactgtcccgcgggactgtcggtcccgtattttggagctgcgggaccatcgcgggacaggatgtcacgtgatatgcccattcggtctgtattatgccgatgctctgatacaaatatgtgataacggggtggatttgactgtatatgccttccatgatactagtctgaatgcaccggagcatatgggtttgaacgacgtgttaggggagaaaggctatagcctggcaatagtggtgcagaagacaacatgtgttgatcgatcgggggagtcaagtcatgccgtggtggaagaaacaacgttggaaggtggacaagctgaaaatgtttggcggactgagcaaggtcgaggggaagaagtagtagagggtaatacacaaggagaggtcattgttcgtggtactaatcgtgaggccaacgactcggatgatgaagaaccggattcgcctatgcgtgttgatgcaacggaggagaatgaggcggtagtggatcagatggaagtggaaaacgaggaataccttgcgcttgtagtggaaggagaagatacaacactgtgggacaacgaaactaacatacccgatgacttggacgaccatatcaatgagtcgtatgaaggtgggcatttgtccagaagcgtgagttcagggctgaaggtttcaaataggacgacgtatgacgtgaagtgcatacagggtggatgtccttggagagtgcatggttacaagccacaacatgacactttatgggtagcttcgagagttgagcaacatacgtgtttgttggagaatacccgtctggtgcacagaaacctgacagcggcatttgtggcacaaatggtatattcaaaggtggttagaaaaacatctttgtcccctttcaccataaggcatgacgttgagaaagagtacggatatgagatatcgtacgacaaggcttggagggcaaaacagaaagcattggagatgaggtttggaacttatgaggattcttatcacaatcttcatccactattggaggtgatgcaggcaagaaacccgggcacacacatggctattctcgatgaggtgaatgaatatggggagaatgttcttcgtcgggctttctggtcatttgggtgcatgatagaggcctttagaaattgcattcctttgctctgtgttaatggcactttcatgacaggcaagtacagaggaacaattctaaccgcgatcggagtcgacgcggatagccatgtcgttcctgttgcttttgcatttgttgaaagcgagaacacatcaagctggctatggtttttgcggcacattaaaatgtgtgttgttgaaaacagaccaaatgtgtgtgttctgcatgaccgacacgccggtttgctatcagcgatacagaagcttcaagaagatgtcacacagtccgtgccatggccagatttacatagcagatggtgcatgcgacattttggggctaatttttatagacaattcaggagtaagagattgatggacctgttcaagaagttatgcaagcataatcaacaaagaaagtttgatgccatatgggatcaactggatcgtttgaccactacacacatggaagatgttaggaaaaaacctatagttgccagacaggaggagccggagggacttgaacccattcctaatgaagcaccaagtattactcggcgcaggaagcgtggaagggccacgaagtgcttcacggagtgggtagaatttgagccaagggagaaatggtcgttgttgtacgatacagatggatcgaggtatggtgtgatgacaacaaatcttgctgaagtgtataactgggttatgaagaatacacgacctctaccacttgttgctatcctggagggcatcacgaggggtacacagaaatatctctgtaaaaggtattccatggctagtctgaaccttagcaaacccagtgttaagtatagccccgttattacacagtacatggatgagaaaagtaagaagggaggaatccacagagtgtggcctgctgggaatagagagttgttatttgagatacgacttcgtgacaagagtggtgtcggcattgggactactgacatcacattggaatgcacgttgtggccagagtatcacgcttgcaaatgcaattgcaacaagacttacctgttacatcggccatgttcccatgttcttgctgcttccgcaaaagggggtgttgatggaaacatttttgtttctccctactttagaaaggaatcgtgggaggcaacttggcgtggtgaattgcgtggttggcgtgccttgtgcgatttcattcgtcctcctccagggcaagccaattgggttcctgactcaaatttattagttgatactaagggtcgtcgccagtcgcgcaggatcaagaaccttatggatgaagctgaagtgaaagatcgttctcgtcgtatggctgatcaatatgatgggcagctgatagacaaggagatcgataggaaccatcgatcgcgacgtcttagtacaggaactttctgcaatgtgctaaagatgcgaggaccggatcaatattggcgtattgatcctcgttgggtttcaaggctgagagcagctgggttgttgacgtttgcacggttggtcgagccttcacgtgcaaggtccgaacgaatccacattgacgcggcgcttctgagtgctcttgtggatagatggaggcctgagacccacactttccacctcacagttggagagatggtgcccactctgcaggatgtgtcttatttgttggggctgctgataactgggccagcagttggcccaacaatggtgaatgctggatgggcggatgaccttctggccagttttggtggtgtgctgcctgttgcactggaggatctcacagatgggcacgggcctacgaaaagttggttgaatcagtttcgacaggatgtcttccctgatgaccaggaggagtggatcgtgcagcggcacttagtcgcttacctgttgtggttgtttggatgggtgatgttcacgggaactcacgctgactccgtggacaagcacttcatccactttgcggagcagattgcagagttacctatcgcggagattccacagtacagttgggggtcggcggtacttgcggcgacatatgccggactgtgtgatgcttgcgtgaggaacagcaagcaaagttcactccctggatgcccgttgctacttatgttgtgggcgcacgagcgcttcgacattgggaggcctcagcttgactcgtacgcaaactacggtttgcgagagatgtacaggtctggtgttgatgacatcgacgatcgtcccactatgggatccttgtggacacaccgtgagccgcagtgggttagcgggacgacacgtcgtgtctacactcagtttgtagctgactttgatcagcttacgcctgaccgtgttcggtggactccctacactcagcacgatgtcaatgatcgtgcaccgcacggtctcgcagatctttgcacgcgagatatgcaactctggatgacgacttgtcacctcgtggtggacgtgcacgtcgagccacacaatgtctacagggttctcaaacagttgggcatgtatctggacttccctccgagagatggtcgtcctttggctgatagtcttcataggtactccagaaaggggctcgggctttcctacgagctagttattgtgaccacggttcagccgacggtacaagagtgggagcacgcagctgataacttggcacttcagacacctccagacgatgggagttattatggagcttaccttcattggtatcgcagtgttacacgatggaggtgttttcctccacaaggagatagcaccgtcccccaccaggcagcgattactgacacgtttgcccctcagcctagatcagcttacaactcaatggcggaatttgttgagcatgttcacgtggagtccgacaccctactgcaaagactagaggcaagacctccagtcgtcaggcttgacgacgtggcgagcatccttcgcaacttccgtgcacgtgctgccgcactactacgtcgtgtctcctgtcggagcgcggcagatgtggtgcagacgtcgggccgacggccatcaccaccactaccccgacgttccagcatggatcggagtggtccatcctcttcacgtcgcgggtacgaagcggcccacacatctcacggtcatccttcctttcagcacaccccagcaccggagtacaccagggggtcagccggatcaggggtacccacgtcgagcacggcaccaccacgtccgcaggtattccaaactccgccttatgttcacccctcgcagggagcatctgggtcggcacacttcccttacatgccaacgggggacaacgtgttgaacacaccagcatggggacttcatatcactccgcgtgcgccagagcagggccacacacagcacacatacgatgagtacggttcggcgtcgacgcatcacggaatgcctgcttactcccctcgcacaacattcattgaggacttcttttccactgatcctccccagggggaagtagggatggattactggcacgcagcacctcaggtcacacagccgacgcaggagacggaggccggtcaggggccagacgtgacaccacagcaggcagctagagataggcacccccctgataatttgacatatcccactgagcagattaggcgtaggaagaagggaggacctagcaagcgtgcgaagggcactgatcgtccttga

SEQ ID NO: 90343 - DNA, 849 bp, Oryza sativa
  Clone ID: PAT_MRT4530_8901C.1
cccgggctgcaggaatacggcacgaggcctcgtgccgaattcggccggcgccttatcctaccctcatctcccgtacaaaacccactccctccctcccgcgcccccgcggacccactccaaccccccctgcgccattgccggccacactcctcttcctcctccatcgccaagaaccaccacgagcaatggcgtcgctgtccatggccacaacgctgccgtcgctggccggcgccgcaccggcggcgaggaagaggagcggcgtgacgtacgtggaggggatgaacgcgtacagcgggctcaaggcgctcaacaaggtgaccctgctcggcgtgcgcaagaccgccgactactcgttcgccaaggtggtggccaagctgagccccgccggcgggaagagccgcggcggcgcgttcggggcgcagtgcaacgccgccggtgagatattcaggatcgccgtcatcatgaacgggctcgtgctcgtcggcgtcgccgtcggcttcgtgctgctccgggtggaggcggccgtcgaggagtcggagtagtggaccccgatcgagccatagcaggcagggcccagccagccatggctggttggccccgataagccgtgatatataactgtgatgtatgtttcgattaaaatttgctttcgttttgtacccatgacgattggtgaatacccttggaacgaaacacgttttggaggcagaacctgcaaatgcaattggtttttcagctgtacaaaaagcggacttgctacggtctgtccaattcttcttccagagtttacttcggttttgaaacattcaaaaaaccagaatgatcacatcatcaccatcattcatcagc

SEQ ID NO: 90344 - DNA, 2099 bp, Oryza sativa
  Clone ID: PAT_MRT4530_89020C.1
cattattgttgtgattaatcacaagtaatggaagttcactatcatgtaccctaagatgtatcatcctgaccaccaaaagccatgggtgtaccacccagccctatgacactaactctccctccgcctgaacctaactaaactgtagctttctacagcagaatgaatggcaatgcaacactgcgacaggttgcctacactggtcaacataagattcactaaaagaatccgagataactagccaccctcattcatccgtttaacagatgagcagaaatcttgtcacgtacccgagaggagttacctcccagtaactggggattacacactacagctgtctcaagatctagcaatgaagcttggtaggaatagtcagctgaacctgtagagcgttgatactgcacgccatttataacagcaacagtagtcacatttggatagttcatcatcactctctttccccttgatttcgccacgcccatacaagacttcagcagccgacttaagtatgcattcagcccagagttgagcacatcagcacactcctgagtcaagctaagaccttcagcttgcagcttattctcaagtagcttcaacaagcgctgagcttctggcaattcaccatttttgtagcatatcaacgaaggatgaggaatcgaaggccgagaattctgagccttcggatctccaaacgaaacacccaaaggagccctaatcgggcttctgctctgcgcatacactggactgcccccggcctggttaacctcctcgccatcctccacagacacaacctccaacggcgccttgctcccagccgacacaaactccccggtgccctgatgaccaagcggcgacttcccgagcgggctcggcctctcgaacctcgcctcccgggtagccaacgccggccctctcatcacacccgccatcacgccatggttggccacggccccgttggacacggacacggtgctcgtctgcgagttcccggtggttgcctgcctgctcggcggcggaggcgggggcggcgcggtcgccaagtaggcattgctgaggatcgacctgatgagaaaattgtgatacttgatgttatccctccccattgtagccacgcagatcttgtcgaactcctccttcccaagctgcccacccaggaacttcttcaggctatggaagtagtgctcggagcgctcggcgcccagcttcttcgcaatctgcgacttgatctccatcgtgtccacgcgagcagccaccttcttcgccaccggcggctgcatcttggagaccaaatgcagcagctcaccggcgaccaaaaccctagccgccgcggcgcgcggcgagattcgaagcggcaacatgtttggtttgtaagatgggacgatcctaattttttgtttggttgaagggatgagagagggaagggatggacgccgtttgcaatcaccgtcaaccgatcgccagatctgccgccacattcctccccatcgctggaggaagagcaagaggatgagccggcggcgagcaagagcaagaggaaaagccgccgccgctccttcccatcgccggatccgccgccgtccctcgacttcctcctcgcacgccgccgccgctcctcccctgcgagctcctcgttgcaagccgccgcagctcctccccatcgccgaatccgccgccgcaccatcgccagatccgccgccgcccctagacctcctcctcgcacgccaccgccgctcctcccccgcgagctcctcctcgcaaaccgccacagtccccatcgccggatttgctgccgcccctcgacctcctcctcgcatgccgccgccgctcctccccgtcgccgaatccgccgccgcagtcctccccatcgccggatccaccgccgccgccctccccaccactggatccgccgtcgccgtcgctgagccccccgccgccgtggtcgtcgtcgccgagccctgcatggtcgccgtcgccgagcctgcagctgtcgccatcgcacgagccgtatgctgctgctcccgagggcgagcagtgcgagcgcggtaggaaggcgtcgtcacgccgttcgctcgtcccaggtgggacgagttcgtcagccacat

SEQ ID NO: 90345 - DNA, 2620 bp, Oryza sativa
  Clone ID: PAT_MRT4530_89021C.1
tcagtcaggaaattgctgcatctttgtccagatgtctatgaccggatagttcagttctttagcaactgccagacatgcctgtgcattagtgccagcagggacattccggtagttttgaagggtcatcttctccatatatctcccttgcgggcgaagtggtcggcgagggcggcgccccagccgccggcggcgaaggagagctcggtgatggtgtcgccgaagagcaccagccgcggcctcatctcttattcccttttgctgtgtgttgtaatcgatcctttctccgtgggtgtcggcgaaatagaaatacgtcggattaatcagggccaccgtctgttcacgtgatctgatcaccacctgtcgaacggagggagttcgacagggcccaccacccggcgccgcgaggcctgtcgaaccgggggcgttcgacagggccctccaccgaccctgtcgaacaatgggcgttcgacaggccggtttaaagccccgtccacccaggccgcgatgcttgttcgatttgtttgaggaccacatcgccagccgccgccgagagtcgccacatcgtcgcctgaggggtcaacatggatggcactggagagtagtggaggttgcgtcaactgggagttggagaaagtttgttagtaaagtaagggagaaaggctatagcctggcaatactggtgcagaagacaacatgtgttgatcgatcgggggagtcaagtcatgccgtggtggaagaaactccattggaaggtggacaagctgaaaatgtttggcggactgagcaaggtcgaggggaagaagtagtagagggtaatacacaaggagaggtcattgttcgtggtactaatcgtgaggccaacgactcggacgatgaagaaccggattcgcctatgcgtgttgatgcagcggaggagaatgaggcggtagtggatcagatggaagtggaaaacgaggaatacattgcgcttgtagtggaaggagaagatacaacactgtgggacaacgaaactaacatacccgatgattggacgaccatatcaatgagtcgtatgaaggtaaacgatggtttagatgcctactggtgttatgatagtaagcaggtgaaagttggacagatgtttcatgacaaaggtcacttacaagatgcggtgaagaggtgggcatttgtccagaagcgtgagttcagggtgaaggtttcaaataggacgacgtatgacgtgaagtgcatacagggtggatgtccttggagagtgcatggttacaagccacaacatgacactttatgggtagcttcgagggttgagcaacatacgtgtttgttggagaatacccatctggtgcacagaaacctgacagcggcatttgtggcacaaatggtatattcaaaggtggttagaaaaacatctttgtcccctttcaccataatgcatgacgttgagaaagagtacggatctgagatatcgtacgacaaggcttggagggcaaaacagaaagcattggagatgtggtttggaacttatgaggattcttatcacaatcttcccccactattagaggtgaagcagccgatggtacaagagtgggagcacgcagctgataacttggcacttcagacacctccagacgatgggagttattatggagcttaccttcgttggtaccgcagtgttacacgatggaggtgttttcctccacaaagagatagcaccgtcccccaccaggcagcgattactgacacgtttgcccctcagcctagatcagcttacaactcaatggccgaatttgttgagcacgttcacgtggagtccgacaccctgctgcaaagactagaggcgagacctccagtcgtcaggcctgacgacgtggcgagagtccttcgcaacttccgtgcacgtgctgccgcactactacgtcgtgtctcctatcggagcgcggcagatgtggtgcagacgtcgggccgacggccatcaccaccactaccccgacgttccagcgtggatcggagtggtccatcctcttcacgtcgcgggtacgaagcagcccacacatctcacgatcgtccttcctttcagctcaccccagcaccggagtacaccagggggtcagctggatcaggggtacccacgtcgagcacggcaccaccacgtccgcaggtattccaaactccgccttatgttcaacccacgcagggagcatctgggtcggcacacttcccttacatgccaacgggggacaacgtgttgaacacaccagcatggggacttcatatcactccgcgtgcgccagagcagggccacacacagcacacatacgatgagtacggttcggcgtcgacgcatcacggaatgcctgcttactcccctcgcacagcattcattgaggacttcttttccactgatcctccccatggggaagtagggatggattactggcacgcagcacctcaggtcacacagccgacgcaggagacggaggccggtcaggggccagaagtgacaccacagcaggcagctagagataggcacccccctgataatttgacatatcccactgagcagattaggcataggaagaagggaggacctaacaagcgtgcaaagggcactgatcgtccttga

SEQ ID NO: 90346 - DNA, 525 bp, Oryza sativa
  Clone ID: PAT_MRT4530_89022C.1
ggccctccaccgaccctgtcgaacaatgggcattcgacaggccggtttaaagccccgtccacccaggccgcgatgcttgccggagaggaggccgaggaggcgccggccgggaggaaagggttggcgacgccctccagcagtgaagttaagggagtatctgggtcggcacacttcccttacatgccaacgggggacaacgtgttgaacacatcagcatggggacttcatatcactccgcgtgcgccagagcagggccacacaccgcacacatacgatgagtacggttcggcgtcgacgcatcacggaatgcctgcttactcccctcgcacagcattcattgaggacttcttttccactgatcctccccagggagaagtagggatggattactggcacgcagcacctcaggtcacacagccgacgcaggagacggaggccggtgtttcaccggtgacgtacgacctctctccggccgggcagatcagcctgaccgacatcaacgacgacctcgagcagcagctctga

SEQ ID NO: 90347 - DNA, 493 bp, Oryza sativa
  Clone ID: PAT_MRT4530_89023C.1
aaaagcagccatgagacgttctccttcggccttcattgattcatcaataaataatgttacatgtaatattatccgagtgttatatgggggctatagtctactggaagaatgattaccagccacaaatcaacgaactttgagacatttcactcacaaacaaacgagaaaagcatggactaaaacatagccacgaacaaaaccaggaatcactctgagctatatgctatggctatttttcttggatgtttacaaggtatttcctgtgaagtgtcaatgcatcaacgcatgccttaatcgcttccgaattcccattaacatcattcagaatcctaatcacatcataaatgcctcgagctttctgcgggagcttcttactgcactgcttgagaacactagcaaccagcaaaactgaaatctgcacaggaccatcgttggcactcgtattcccattcttcatattggcactctcgaacttgccaaagtggccaattga

SEQ ID NO: 90348 - DNA, 1356 bp, Oryza sativa
  Clone ID: PAT_MRT4530_89024C.1
atggcacctccttcccggccgttttacctcgtgtacgtcgtaatatttgtggccgtctcactctcggccacggctgccactgccaccgcggcggcggtattgcccagaggagccctgccgaccaagtcgggctacctccccatcccaccggcggcgaacgcttcgctctacttcgccttctacgaggcaaccgagccggtgacaccgctggccacgacgccgcttctcgtctggctagagggcggccccggctgctccggcttcctcagcaacttcctccagatcggcccttaccttttcgccggcggctcactgtctcccaaccccttcgcgtggaaccgccgctttggtctcctcttcatcgacagcccgcttggcaccggcttcagcgtcgcgccttcccccgccaacatccccaccaaccagtccgtcgtcgccgaccacgtcctcgccgcgctccagtcgtttctctctctcgaaccgagcttccgtgcccgccctctgtacctcaccggcgagagctacgccggcaagaccatccccgcggccggcgcgctcatagtagcaacaaacccgacgttgccggagcagaagaggattaacctgcgcggcgtggccatcggcaacggcatgacgcaccccgtcgcggaggtgacgacgcacgcggacatcgcctacttcatgggcctgatcaacgcgaagcagaagcgcgcggccgaggcgatgcaggcggaggcagtggcgctgacgagggaggagaggtggcgcgaggcgtccgccgcgcgtgcgcggctgatgtcgtggctggagaacgccacgggcgtcgtgacgctgctcgacgtggaagttcagcagtcggtggcggtgatggccgcggggctcgcggacttcctcagcaccgccgaggtgaaggcggcggtgggcgcccgccccgacgtcgcgtgggaggcgtgctccgcggcggtgggcgcggcgcaggaggaggacgtgatgaagagcgcgaagcgtgacgtggaggcgctgctgcaccgcggggcgtcgccgacggcgacgccgacgccgacccgcgtgctgctgtacgaggggatccgcgacgtggggaacgggccggtgtgcgcggaggcgtggctgcgggagctggagtgggacggcctcgccgcgttccaggacgccggccgcgccgtgtggcgaagcggaggcgggctcgccgggtacgtgcagcgccatgacgcgctcgtgcatgtggccgtgtatggtgccgggcacttcgtgccgtattctcaggggcgcgtggcgcaggagatgatcgaggattgggtgttcagaaagggattattcagcgcgggcaccgtctag

SEQ ID NO: 90349 - DNA, 3630 bp, Oryza sativa
  Clone ID: PAT_MRT4530_89026C.1
atgtcaggtgatatgcccattcgtctgtattatggcgatgctcctatacaaatatgtgatagcggggtggatttgactgtatatgccttccatgatactagtctgaatgcaccggagcatatgggtttgaacgacgtgttagggtggttgtataatatgtttggggtagatccagtgcacgataaatttgtcataagtgccgtgtggccagtgaggggtcaacatggatggcagtggagagtagtggaggttgcgtcaactgggagttggaggaagtttgttagtaaagtaagggagaaaggctatagcctggcaatagtggtgcagaagacaacatgtgttgatcgatcgggggagtcaagtcatgccgtggtggaagaaactccgttggaaggtggacaagctgaaaatgtttggcagactaagcaaggtcgaggggaagaagtagtagagggtaatacacaaggagaggtcattgttcgtggtactaatcgtgaggccaacgacttggacgatgaagaacctgattcgcctatgcgtgttgatgcagcgaaggagaatgaggcggtagtggatcagatggaagtggaaaacgaggaataccttgcgcttgtagtggaaggagaagatacaacactgtgggacaacgaaaccaacatacccgatgattggacgaccatatcaatgagtcgtatgaaggtaaacgatggtttagatgcccactggtgttatgatagtaagcaggtgaaagttggacagatgtttcatgacaaaggtcacttacaagatgcggtgaagaggtgggcatttgtccagaagcgtgagttcagggtgaaggtttcaaataggacgacgtatgacgtgaagtgcatacagggtggatgtccttggagagtgcatggttacaagccacaacatgacactttatgggtagcttcgagggttgagcaacatacgtgtttgttggagaatacccgtctggtgcacagaaacctgacagcggcatttgtggcacaaatggtatattcaaaggtggttagaaaaacatctttgtcccctttcaccataatgcatgacgttgagaaagagtacggatatgagatatcgtacgacaaggcttggagggcaaaacagaaagcattggagatgaggtttggaacttatgaggattcttatcacaatcttcccccactattggaggtgatgcaggcaagaaatccgggcacacacatggctattctcgatgaggtgaatgaatatggggagaatgttcttcgtcgggctttctggtcatttgggtgcatgatagaggcctttagaaattgcattcctttgctctgtgttgatggcactttcatgacaagcaagtacagaggaacaattctaaccgcgatcggagtcgacgcggatagccatgtcgttcctattgcttttgcatttgttgaaagcgagaacacatcaagctggctatggtttttgcggcacattaaaatacaattcaggagtaagagattgatggacctgttcaagaagttatgcaagcagaatcaacaaagaaagtttgatgccatatgggatcaactggatcgtttgaccactacacacatggaagaggttaggaaaaaacctatagttgccagacaggaggagccggagggacttgaacccattcctaatgaagcaccaagtattactcggcgcaggaagcgtggaagggtcacgaagtgcttcacggagtgggtagaatttgagccaagggagaaatggtcgttgttgtacgatacagatggatcgaggtatggtgtgatgacaacaaatcttgctgaagtgtataactgggttatgaagaatacacgacctctaccacttgttgctatcctggagggcatcacgaggggtacacagaagtatctctgtaaaaggtattccatggctagtctgaacctcagcaaacccagtgttaagtatagccccgctattacacagtacatggatgagaaaagtaagaagggaggaatccacagagtgtggcctgctgggaatacagagttgttatttgagatacgacttcgtgacaagagtggtgtcggcattgggactactgacatcacattggaatgcacgttgtggccagagtatcacgcttgcaaatgcaattgcaacaagccttacctgttacatcggccatgttcccatgttcttgctgcttccgcaaaagggggtgttgatggaaacatttttgtttctccctactttagaaaggaatcgtgggaggcaacttggcgtggtgaattgcgtggttggcgtgccgtgtgcgatttcactcgtcctcctccagggcaaaccaattgggttcctgactcaaatttattagttgatactaagggtcatcgccagtcgcgcaggatcaagaaccttatggatgaagctggagtgaaagatcgttctcgtcctgactttgatcagcttacgcctgaccgtgttcggtggactccctacactcagcacgatgtcaatgatcgtgcaccgcacggtctcgcggatctttgcacgcgagatatgcaactctggatgacgacttgtcacctcgtggtggacgtgcacgtcgagccacacaatgtccacagggttctcaaacagttgggcatgtatcaggacttccctccgagagatggtcgtcctttggctgatagtcttcataggtactccagaaaggggctcgggctttcctacgagctagttattgtgaccacggttcagccgacgatacaagagtgggagcacgcagctgataacttggcacttcagacacctccagacgatgggagttattatggagcttaccttcgttggtaccgcagtgttacacgatggaggtgttttcctccacaaggagatagcaccgtcccccaccaggcagcgattactgacacgtttgcccctcagcctagatcagcttacaactcaatgcgcggcagatgtggtgcagacgtcgggccgacggccatcaccaccactaccccgacgttccagcgtggatcggagtggtccatcctcttcacgtcgcgggtacgaagcggcccacacatctcacggtcgtccttcctttcagcacaccccagcaccggagtacaccagggggtcagccggatcaggggtacccacgtcgagcacggcaccaccacgtccgcagacgatgagtacggttcggcgtcgacgcatcacggaatgcctgcttactcccctcgcacagcattcattgaggacttcttttccactgatcctccccagggggaagtagggatggattactggcacgcagcacctcaggtcacacagccgacgcaggagacggaggccgaacgcgaccctgtcgaactgcgccagttcgacggatatcctgtcgaacaggggcagttcgacagccctcctgtcgaacaggggcagttcgacagccctgcctgtcgaacgggggctgttcgacaggtcctgtcgaacggcagccttccgatctcctcgccagtcgcgctctggccgttcgataggcgccctatcgaactgcacccgttcgacagggacctactttcgcgattttctccggttgaccactacttttgcgattttccataa

SEQ ID NO: 90350 - DNA, 1188 bp, Oryza sativa
  Clone ID: PAT_MRT4530_89027C.1
atggccttctcggggatgttctccgggagggttgacaaggagtacttcgtgtacaaggccggatccggcaccgagtcgccgtctcttcgccggatcccaacccacgatccacgatacaatcgcggcgaggacattggtatcatccggtgtggtgaccatggacaattcttcctggctgctctcctgttcacctcttgcaatattcgtgagtttactctccacctttattcctcggcatcggatcagtggactatgaaatcagtgccattggacccttcttgcaatcttgaaagggttgatagtaagtattacccagccttaccacacaagacgatccagcttggaggaagcctgctaggatgggtagatctttggaagggcattttgatctgcgacgtgcttgctgatcaccctgtggtacgtttcatccgtctgccagagctcatgccgggtaattattgccatgattctccgcatatgattcgagatgttcattgtatgggtggagtgatcaagtttattgagatggagcactttttgatacctactgttgaacccactcaagaacctactcaaggtagaagacgccctggggaagaagcaaacatactctatgactgggacttagaaccaccctgcaaagaagatgctcctgatcctgatatctggcttaaaagctttgttggttggaggacagtgatatgggataggatggtttatgggaattgttggaataaggtttgcaaggctagttatgatgagatcatggttcctgatccaagtcactatgagatgttaagtgaattaggagatggcagtgctggaaacctggtattgatgaatttgagtactgattcccccacattaagtattggtggtgataatgtggttcatatgagttccattgtcaaattggaccgtggaagatcagtgatgatggctcttaaccttcaaaggaagacagtggaagcgcttgcactatatggtcctgaaagaaagacctgccacccatacagaccttgtacgctgtcaaagtatttgaagataagtccaggttcttttcgtgattggaaagtgaatgatcttccacgggccatttctaaacctgttccgcaacctattagcatgcggccctggcgcactgatcttggtggcagccggcatcaacgacgggctgcaccttactag

SEQ ID NO: 90351 - DNA, 1707 bp, Oryza sativa
  Clone ID: PAT_MRT4530_89028C.1
atgggcgttcgacaggccggtttaaagccccgtccacccaggccgcgagttcgatttgttttgaggaccacatcgccagctgccgccgagagtcgccagatcatcgccgtacaaaggatgtcaggtgatatgcccattcgtctgtattatggcgatgctcctatacaaatatgtgatagcggggtagatttgactgtatatgccttccatgatactagtctgaatgcaccggagcatatgggtttgaacgacgtgttagggtggttgtataatatgtttggggtagatccagtgcacgataaatttgtcataaataccgtgtggccagtgaggggtcaacatggatggcagtggagagtagtggaggttgcgtcaactgggagttggaggaagtttgttagtaaagtaagggagaaaggctatagcctggcaatagtggtgcagaagacaacatgtgtcgatcgatcgggggagtcaagtcatgtcgtggtggaagaaactccgttggaaggtggacaagctgaaaatgtttggcggactgagcaagatcgaggggaagaagtagtagagggtaatacacaaggaaaggtcattgttcgtggtactaatcgtgaggccaacgactcggacgatgaagaaccggattcgcctatgcgtgttgatgcagcggaggagaatgaggcggtagtggatcagatggaagtggaaaacgaggaataccttgcgcttgtagtggaaggagaagatacaacactgtgggacaacgaaactaacatacccgatgattggacgaccatatcaatgagtcgtatgaaggtaaacgatggtttagatgcccattggtgttatgatagtaagcaggtgaaagttggacagatgtttcatgacaaaggtcacttacatgatgcggtgaagaggtgggcatttgtccagaagcgtgagttcagggtgaaggtttcaaataggacgacgtatgacgtgaagtgcatacagggtggatgtccttggagagtgcatggttacaagccacaacatgacactttatgggtagcttcgagggttgagcaacatacgtgtttgttggagaatacccgtctggtgcacagaaacctgacagcggcatttgtggcacaaatggtatattcaaaggtggttagaaaaacatctttgtcccctttcaccataatgcatgacgttgagaaagagtacgtatatgagatatcgtacgacaaggcttggagggcaaaacagaaagcattggagatgaggtttggaacttatgaggattcttatcacaatcttcccccactattggaggtgatgcaggcaagaaacccgggcacacacatggctattctcgatgaggtgaatgaatatggggagaatgttcttcgtcgggttttctggtcatttgggtgcatgatagaggcctttagaaattgcattcctttgctctgtgttgatggcactttcatgacaggcaagtacagaggaacaattctaaccgcgatcggagtcgacgcggatagccatgtcgttcctgttgcttttgcatttgttgaaagcgagaacacatcaagctggctatggtttttgcggcacattaaaatgtgtgttgttgaaaacagaccaaatgtgtttgctatcagcgatacagaagcttcaagaagatgtcacacagtccgtgccatggccagatttacatag

SEQ ID NO: 90352 - DNA, 1363 bp, Oryza sativa
  Clone ID: PAT_MRT4530_89029C.1
aatgtttgttcacagttagcattaccaactatagctgtcaagggccaatgtggcctatccagtacaccattcatacccaaatatttttgtgtgcaacccattgatgaacctaattggactggaatcatgaagataggtacaaactacattccagtgggtgcacacttctcaaacaaagcatgcaagaaggtgtgtgaactatctatgtcgttgccacaaataatgaaagtgacagagctccctaagttgaaagcctggcctaagagttgggagaaggcatcagtacctagtgctgagagtattggcttatttttcttttcacagaatacgaggtcaaataaagaatttgatgacctagtgaagcatgtcattgattatgatattgttctagaaactgatgttagttttgccaagctgctagtcttcccttctgttgtacttccagctgaatatcgggatgaagatgtcccagaacagaatgccttagatattgtgccatgtaaagccctggatcaagaaatggcgcttgttgtgagcgatatacatcatgataatcaaccatcgctaaccacaagccaagtggtagaaagcgaggcttcatctgacaaaggcccatcccatcctgtgattaactcccctgaaagacccatgtacctgattttggatacaagttgcaaggtcctaaagaaatggagctgcgaaaggatggatacgaagttatcgatgctttagttaccctccaaaaagaaaaaaaatccatcctacatgcagtcctccctgttccattttagaagattcagcatccgagccgtttgccttcatcattccacagacagcatcgatccaaggagcttattcaagagactgaaaatgaagatggactgttgttttttgcacactgggttggcgaaaccttggcctaggaggcactgataatggtgtaggacaagaacttggtcatgatgatcgatcgtgtcgggtactggttctagttatggtgcagcacattgacccctcttctggggtaaaagcgcaagctatgaaatggtcctaaaacttgttaccatggagcgagttcattgcgcctttggtggctatgtgctgtttacatgaatctctagttaaaccctctttttttgatgaccgagctgtggactgtagttgtccctggctgttcaggatgtatcatcctactcaatcagagttgaattgcccccaaagtttcactgcactctctggtgattgtcatcagtaaaacttgcagcatgaatttgtacatgattcttaagcaacctcacctagaactgtcatgcatgaagtgccatcactactctgcaagtctatttgaaaaaaagttggttct

SEQ ID NO: 90353 - DNA, 675 bp, Oryza sativa
  Clone ID: PAT_MRT4530_8902C.1
atggcgctcgaggaccgaagccgcgatgccctcgacggctgccacccgtgcccagctccttccccggtggctgaggctgggggagacgtcgacgccgtcttcctcggcttcatctacaaccacgcgccgctgccgcccttcacgccgcccgtcccatgccggtccagtgtcattatagcaaaggttaatgtttgcagtgtcataattgcaaaccctccgggtgagaggggcgggggcggcggcgtcggggagcggcgcgatggcctggcgcggctcggctcggtggcgtccgggtggcagcctgggggcgttggtggcggggcgacgcgcgatggggatgcggcctggccgaggagggaggagggggcggcgaagtggcggtcgggggcggcgcagcgcggccaggtagtggctagcggcagggatggatgggagatgggggcggcggtagtgaggtggaatggaggggaggccgtcggcgtggtggcggctgcggtctggcgacggcgcggcgcggttgggcagcgcccgtgcgcggcgccgcagccatgggggaagggaggcggcacggaagtcgaaggggggagcggcgtcggggcaggagggtggcggttcgaggtggaggtgatacggcgatgccgcgcatatggcgcgggtgacgaagcggcagtgtag

SEQ ID NO: 90354 - DNA, 500 bp, Oryza sativa
  unsure (1)..(500): unsure at all n locations
  Clone ID: PAT_MRT4530_89030C.1
ccggccgggcttcctcctccacacgagcggcagcgccaccaccacctccgccgctctctccactgcgccgccggcgccatgagcctcctcagcaactccctcctgctccaagggcggttgcggcatgcggcggcttcagcggtggcggcggcggcgatggggcggcgcggggtggcgacgtcgacggaggagtacaatcgccggaactacgccaacaacatctccgagtacaataccgtcttcgggtccctcaccgcgcagcgcaggcactacctattgcgtgatgcttatgatgacatgatgcttgatggggttcagcctgtgcgggacacattccacaatctcatagtcggtgccatgaaaggcagccggctacaagatgcattctactttcgtgatcagatgaaagaaatgggtttgcagcctaatgttaacctttacaacttcttgatctccacttgtgngaaaagcaaaaaatcagatgcagcgatcatgctttt

SEQ ID NO: 90355 - DNA, 819 bp, Oryza sativa
  Clone ID: PAT_MRT4530_89031C.1
atggcggaggaggccatgctttggaagtcggctaatcacgggatccccgctgtttggcctttacgaggtcgtgtcgacagagccctgtcgaacggctggcgttcgacacgcttgcctgtcgaacggagggagttcgacagggcccaccaccccgcgccgccaggcctgtcgaaccgggggcgttcgacaggtccctccaccgaccctgtcaaacaatgggcgttcgacaggccggccggagaggaggcgccggccgggaggaaagggttggcgacgccctccagcagtgaagttaaggcggaatttgttgagcacgttcacgtggagtccgacaccctgctgcaaagactagaggcgagacctccagacgtcgggccgacggccatcaccaccactaccccgacgttccagcgtggatcggagtggtccatcctcttcacgtcgcgggtacgaagcggcccacacatctcacagtcgtccttcctttcagcacaccccagcaccggagtacaccagggggtcagccggatcaggggtacccacgtcgagcacggcaccaccacgtccgcagcattcattgaggacttcttttccactgatcctccccagggggaagtagggatggattactggcacgcagcacctcaggtcacacagccgacgcaggagacggaggccggtcaggggccagacgtgacaccacagcaggcagctagagataggcacccccctgataatttgacatatcccactgagcagattaggcgtagtaagaagggaggacctagcaagcgtgcgaagggcactgatcgtccttga

SEQ ID NO: 90356 - DNA, 505 bp, Oryza sativa
  Clone ID: PAT_MRT4530_89032C.1
tttcttaatacgaagataggtacaaactacattccagtgggtgcacacttctcaaacaaagcatgcaagaaggtgtgtgaactatctatgtcgttgccacaaataatgaaagtgacagagctccctaagttgaaagcctggcctaagagttgggagaaggcatcagtacctagtgctgagagtattggcttatttttcttttcacagaatacgaggtcaaataaagaatttgatgacctagtgaagcatgtcattgattatgatattgttctagaaactgatgttagttttgccaagctgctagtcttcccttctgttgtacttccagctgaatatcgggtattccaaggaaaacactatttgtggggagtgttcaaacgcagtaaagatatggctgaaagagatgccttagtggaacagaattgtacgacatgtctggcagatgaagatgttccagaacagaatgccttaatattgtgccatgtaaagccctggatcaagaaat

SEQ ID NO: 90357 - DNA, 404 bp, Oryza sativa
  Clone ID: PAT_MRT4530_89033C.1
gttcccgatatggaagcacccgaccggtcagttgcagcatcaccatcttaaaagggggctatctaaagaacatggcgcacgtgctgacataaaccaactctcaaccggcactgatcaaagtgtctgtacttgaacagaacacttgtctaatgttctatcactcgatgctcaggactacatggttttcacagaatcaaaaaacgcaaatggcgaccctatcacattgcggcctgacgcacgaagcacatctgctcataaccaatacggatggggcagcatgcaccatgactgccgtcttcttaccacttaaaatagcgcaaggaacgcaacctgactattaaaagatccagctgaattcatgcccattactttagaagaggcatcagaacctctgccacagcaca

SEQ ID NO: 90358 - DNA, 426 bp, Oryza sativa
  Clone ID: PAT_MRT4530_89034C.1
cccacgcgtccgcatagatctagtgatgggttgtggatgcatgaacaacaatcttgccaatctatgaaaaagaagtgaattaacaccaacaaatttagtaatgtgtcaggcagaatatctactttttttaaatattaaatgattaattaataaataattcgaagtattagtcaatgaagagaataagacatactgccttttgcttggctccctaaacaatagtctcattttgtatttattatccacatcatagtaaagtaattatgtgtagatgtatttgccctgattttttctttgtgggaagtcaattttggacctcgacaaatttctgtcttccttttcacacgataaagtggcaaaccatactgtaactgtagagttgtagaccatcttcaatttacctgatgctattctagaaagagaaag

SEQ ID NO: 90359 - DNA, 141 bp, Oryza sativa
  Clone ID: PAT_MRT4530_89035C.1
atggcggcggcgcgcgagcggctcactgcgtatatgaccctttcggccgattcgatcggccgcatgccgattgcgcgcgcgtacgaaggtcgtgctcgtgcgccagccgtcttggcttcagcaggaggattcgacatctga

SEQ ID NO: 90360 - DNA, 363 bp, Oryza sativa
  unsure (1)..(363): unsure at all n locations
  Clone ID: PAT_MRT4530_89036C.1
gattttggttgtcgagagtcgactttaaacagctcccttgggcacacttcccatgtccttgtgagagtagcttcgtcaattggtggcttctagatgtaggaaaggggggacactgttagatgtacatgatcactagcttgttcttgggattgtgctgtccaattctgcaacttccgatcttcatgctaaggtggccaaaagctttctctagattgaaatgaagatggtagatgttgttgcaacctgattctgccattctttggtaccaccattttgatttggggcgaatatatttcttttgtagggggtatatgaggctatggtattgctgtggtctttanaaaaaaaaataaaaattaaaaa

SEQ ID NO: 90361 - DNA, 309 bp, Oryza sativa
  Clone ID: PAT_MRT4530_89037C.1
cgctcacgcgtacgaaaaaaaagatatacaagcatagtcatggacagggcgtagacaagtgaggtcataagcgtagacatgagtgctggggctcttatggagcactatctgggcacagtttgaagcctgcacagatggtctaagccagcagcaagcgactgtgcaaccgatcgtgaaccccagcaaagagtgctagaggcaacacagcaggccgctgagcgtaccttggaagcacctcacaagctacaactgagctcctacgacgagacgcgctagctctgctgatgcaaggctagcatgatggcgcaa

SEQ ID NO: 90362 - DNA, 558 bp, Oryza sativa
  Clone ID: PAT_MRT4530_89038C.1
gcagcattgctgcccacagcttcacgccgctggccatggccgcgctccggccaaagcctcgccgaccgccacctcgcacaccaccggccgccgccttgccttggcccgcggcctcgtcctcctccttcccgcccatcccgcacgcgtcgcgaactcacagcctaccggcgacgacggccgacgggagcacgggcagagcaagccggcgccgtcgggctctcagcaaatcagcgcggtgacaacacccgtgccgccgccggttccaggctgcctcgccgtcctctctcgcaccgctagccgcttgctccgcctctaccgccgcgtcgcccatcgcgccggccggatccgcgggtgggggggccagatccggccacagaggtgccggatccgctgccccaagccgacccgccgtctccgcctccggccgcgtcatcgtcggccttgccccgtcctcctcgcgcaagggcggttccgccaagctgtttggcctcgccgccgccttcccggctcaccgccggctttgccgccggcgagctctggcggcggcgaggtggagga

SEQ ID NO: 90363 - DNA, 309 bp, Oryza sativa
  Clone ID: PAT_MRT4530_89039C.1
cccagacccacccttacgttgacgcgtggcctaccacccagccatgggggacgcgtggacatgaccagcaccacgcaaccaccggcggctgcgccgacctcggctgcatgctgtgcgcgcgagctgacgcgactgccgcgggcgacgccgcctccccgctgtggaagcgcggcgagggtggcagcaccgggagcgggagcggatgcactagctgcaggcaggtgcggaggagggccgcggcggtgagggtccgtgcggcggtgcctaggagggtggaggcggtcgcgatggagttcgcggcggagaccg

SEQ ID NO: 90364 - DNA, 2280 bp, Oryza sativa
  Clone ID: PAT_MRT4530_8903C.1
ctaccctagagggtggcttaggttctgcgacgggttctccaagatcttcactgcttcctccacttcgctagcagatcgggtgcggcggaggcggccgggaacgacggagacgaacggcgaggggacgacttcggcggcgatccttggacgaaggcgagacgcggccggcgcaacgcttgacgatgcggagccgaggacgaagacgacgacgggggccacgacgaccgggaacgacgggaggacgacgacgatgacgaccggggccggcgaggagacgacgagggcagccggcagcggctgcacggaggcgaggatggcgtggaacacgccgcggcggtgttcggccgaaggggaagcgttgccgaggacgacgtcgcggctgcgatgccgaaggtggtggaggtgcggccgaccggtgcacgggcgaggagggacgggcggccgaaccactccggtgaggcggatggagaggtttgcggcgacgtacgtgccgagggaggggacggcagcgccggctgacgcacgggcatggcgaaaggggctgccggaggagatgccgacgaggaggaaggagaggccggcgcgggcgacggcgttccggcgaaattcgggcgacgccgtggcctggccgggaaagaggacggcgctccggtgctgggagaggtgatggcgacgtcggccgacgcacagggggcgtggcagaggcggccggatgcggaacagtggcgacaacgccactgtcgccggcggggaggcacttccggaggtctccgtggaaaacagaaggcaggccggcgaagaggaggcggctgcgatgctggaggaggcgacggcacggccggccggcgcacggtcgaggagggagaggcggctctgggtggcctgaacctgtgtgcgggtatacgaggcatccacaccaatatgcttagtaagctcatgtttgataggatcacgagcaatactaatagcaccctctggaactaaatagccttgaggtggccgcatgtaaacctcttcatgcaattccccattgagaaaagcattcttgacatcaagttgcgatatattccaatgacgagcagaagctattgcaagaagtgttcgaacagtagtcatgtgagccacaggagcaaaagtttcatcatagtcacgaccatgttcttgttggaaaccacgcgccacaaggcgagccttatagcgttcaagagttccatcagagcgagtcttgaccttatagatccacttacaagtgatgggacgagcatgagaaggtaagggaacaagatcccaagtaccagtacgctcaagtgcagcaagctcctctgccatcgcatgttgccattcctgatggacaacagcatcacgataagaacaaggttcagcaagaactgtagcaacataaccatagcgatcctctggacgaatcgtaactaaattacgatcatgaaaattgtatcgaggaggagcaaccggagaagcatccagagaaggctcctggatacgaggtttacgactataaaccacaaagatgtcccaaccgatgatgccactgtgcaaaagacaccgtagaggaagcagcggaagcaagaagactagcaggcgcagcggaaggaacacgaagccagtcaagctcccaaagacgctgagaatcacggcggcgagggccagtaccaaccaggagacccgtgcgacgatcccttcgaagaatggccacgacgtatatccttcttcttccatagcaagataaagagcatcactagtaggagcataacgatcacgtaggtgtgtccacatgagatgagctgaagtaagagtaaccacctcaccagtaagatgaatctccatactagctacaagaatagcagaagctcgagcatcctcatccaaccaagccttgtataaagcaaactgactctgataattttccatggcatcatcaaactgctctttagccttttctctatcgtcatcagtagcttgacttgcaagtgaaggcatagttggagcaatagggcaaggaggacagggtagctcaccagataaaacatcccaaagacgctgaccacgcatatgaagacgcatgtgctgagcccaatggctcccgatccagatccggatcgggaaacagacaccaagcgacggcgccctacaacccaggcggaggcgcccgcgacgaggggcggcggcggccgcgacgagcggcgacgaccggaggccggcgacgaggggcgacggccggaggcccgcgacgaggggcgacggcggccggagtcccgccat

SEQ ID NO: 90365 - DNA, 414 bp, Oryza sativa
  Clone ID: PAT_MRT4530_89040C.1
atggggtgttggtggctcgtggtgaggtcgtggtggtggaactggtggaactacggcttgacggtggtgtgccctaacccaacggccatggacgaaggcagtggcctcgtcgcccgcgccgggcccgccgcggcccgcgcgaaggacagggacagcgacatgctacggcacctcgtcgttgcttgcgcctcctctcgagggaagaggaggagctcaaccacggcggcatggccctgctacgatggggagatgtggtggtggaggaggagcccgccatatttgactacgcaggatatcgttggtgcccgcaccatcgcctacccaccggagagacttaccgcgctgcaaaacgcaggaccgagcctgcccggcccgattgggctgccgggtcgggcggcccacgagcaggtctag

SEQ ID NO: 90366 - DNA, 1536 bp, Oryza sativa
  Clone ID: PAT_MRT4530_89041C.1
atgaagatggtgagcgagcaacaagaagcttttctccacttgatcatgaggcttggatattttggcatcactatggaggtcaaaaaggctttgaggttaggaaaagatttacaagcttttgaaattgaaacagctgatgatgcaagaattgggccaaaggcagcacatgagttggctagtcgccaagtcagtggatcacatagtcttagctatagccttcgtgatcgcaagaattatttgcggagcaagcggcaaagagagatggcatatggtcaggcaggtagcatgcttatgtatttccaggataaaattgctgagaacccatcattccaatatgcattgcaaatggacagtgaagaacagatagcaaatattttctgggctgatgctaagatgataagtgactatgcacattttggggatgttgttagttttgatactacttttggaacaaacaatgagagcaggccttttggtgtctttgttggattcaatcattttagagaaacagtagtttttggtgctgctctcatgtatgatgaaacattcgactctttcaagtggctctttgagacttttctaaaagcacataatgggaagcatcccaaaacaatatatacagatcaagatatagcaatgggaaaggccattgaggaacattttgaaagagtggtgcaaggaaaaagaaatacggaactagcttccgaatttgattcaaggaaaaaattacctagaatcaaaatgaggacacctatgctgctgcaagctagcaaggtgtacacccctattatatttgaagcttttaaaggggaatatgagagatcaatggcagcatgcactaaagcattggatggcgataatgaatttctagtatcaattgggagttttgagggagatctaacatttgaggaggagtacagagttgttggtgatccttcagagcagacatctatttgcagctgtgggaaatttaataggattggaatattgtgtgggcatgctctaaaggttcttgatttgatgaacatcaagtcacttccagcacaatatatattaaagcgatggacacgggaagcaaggagtggaatagtaacggacagcaagggaataaatataattgagaacccaatgatggaagcttcccttcgctacaaatttctatcccacaggtttctcactttggcccaacaagctgctagctatcctgagtgcacattgttagtaaataatacacttgacattcttagcaagcaaattgaagagcacctcagtggatgtgctagtacttcagatcaaagtgcaacccacaaggaggttatgcccccaaataacttgttgagtaatgcacgcctaaagaaaaaggaggaacaaaagactaggcaaaaagcactccatgttggtgcagcaacacaagtggcagaagatagttttgctatggacaaggaggagcctggagaatacatgcacctaattagcttcactcagcttttgacggggcaaataaatgatgatcttttagttgacgatgcattttag

SEQ ID NO: 90367 - DNA, 1110 bp, Oryza sativa
  Clone ID: PAT_MRT4530_89042C.1
atggctgcccgccgctccgctgcggctcgctgccttcctcgacgcggagaaatgctagtaccatgttctgtacctcatattggaatggaattcaaaagtccagatgaggcttggatattttggcatcactatggaggtcaaaaaggctttgaggtcaagaaaaggaaaatttcagatttacatgcttttgaaattgaaacagctgatgatgcaggaattgggccaaaggcagcacatgagttggctagtcgccaagtcggtggatcacatagtcttagctatagccttcgtgatcgcaagaattatttgcggagcaagcggcaaagagagatggcatatggtcaggcagtttttggtgctgctctcatgtatgatgaaacattcgactctttcaagtggctctttgagacttttctaaaagcacataatgggaagcatcccaaaacaatatatatagatcaagatatagcaatgggaaaggccattgagtacagagttgttggtgatccttcagagcagacatctatttgcagctgtgggcaatttaataggattggaatattgtgtgggcatgctctaaaggttcttgatttgatgaacatcaagtcacttccagcacaatatatattaaagggatgtacacgggaagcaaggagtggaatagtaactgacagcaagggaataaatataattgagaacccaatgatggaagcttcccttcgctacaaatttctatcccacaggtttctcactttggcccaacaagctgctagctatcctgagtgcacattgttagtaaataatacacttgacattcttagcaagcaaattgaagagcacctcagtggatatgctagtacttcagatcaaagtgcaacccacaaggaggttatgcccccaaataacttgttgagtaatgcacgcctaaagaaaaaggaggaacaaaagactaggcaaaatacactccatgctggtgcagcaacacaagtggcagaagatagttttgctatggacaaggaggagtctggagaatacatgcacctaaatagcttcactcagcttttgacggggcagataaatgattatcttttagttgacgatgcattttag

SEQ ID NO: 90368 - DNA, 459 bp, Oryza sativa
  Clone ID: PAT_MRT4530_89043C.1
atgacggatgacgacggcggcgaggttgaagcggcggcggtcttcaggtcggcggtgacggcggtgctccggcgggaaacggtggcgacggaggggtggacgaggtgctgctcctcctcgcgatgccgatggtggcgacgacgaccgaaggcggcggctgcaacggcggcgtggcgcggctggatcgacggtagcagtggagagctttgggtcaacggagtcggcggcgctccgacgtgctacggtggcagcgaagcggtggacggggaaggcgacgacctcgcgatgctaaagaaggagacggcgatcgacggcgacgaccgaagcgacggcggcgcccgactggactcccgccggcggcggcgacgcaaagaaccacgcggagacggcgctagagaaggcggcaagctagggcgaaggtggcggcggatagaggaggtcccggggatccatttttag

SEQ ID NO: 90369 - DNA, 1626 bp, Oryza sativa
  Clone ID: PAT_MRT4530_89044C.1
atggcatatggtcaggcaggtagcatgcttatgtatttccaggacaaaattgctgagaacccatcattccaatatgcattgcaaatggacagtgaagaacagatagcaaatattttctgggctgatgctaagatgataagtgactatgtacattttggggatgttgttagttttgatactacttttggaacaaacaatgagagcaggccttttggtgtctttgttggattcaatcattttagagaaacagtagttttttgtgctgctctcatgtatgatgaaacattcgactctttcaagtggctctttgagacttttctaaaagcacataatgggaagcatcccaaaacaatatatacagatcaagatatagcaatgggaaaggccattgaggaagtatttcctgcagcatggcatggattgtgcaccttccatatttcacaaaatgctgcaaaacatctatcgcaagggaataatggagaatcaagtattctttcagatttaagcgcatgcatgtatgagtatgaggatgtgacaaaatttgaatatgaatttaacatcatgagggaaaaggtgagcaagcaaacttggctagatagtatatacaagttgaaagaaaaatgggctaaatcttatatgaggaatgttttcacattgggaatgagaagtacgcaattgagtgagagtttcaacaatgacctgaaaattcatttcaaatctgattttgatatcattcgttttttcaagcattttgaaagagtggtgcaaggaaaaagaaatacggaactagcttccgaatttgattcaaggaaaaaattgcctagaatcaaaatgagggcacctatgctgctgcaagctagcaaggtgtacacccctattatatttgaagcttttcaaggggaatatgagagatcaatggcagcatgcactaaagcattggatggcgataatgaatttctagtatcaattaggagttttgagggagatctaacatttgaggaggagtacagagttgttggtgatccttcagagcagacatctatttgcagctgtgggcaatttaataggattggaatattgtgtgggcatgctctaaaggttcttgatttgatgaacatcgagtcacttccagcacaatatatattaaagcgatggacacgggaagcaaggagtggaatagtaacggacagcaagggaataaatataattgagaacccaatgatggaagcttcccttcgctacaaatttctatcccacaggtttctcactttggcccaacaagctgctagctatcctgagtgcacattgttagtaaataatacacttgacattcttagcaagcaaattgaagagcacctcagtggatgtgctagtacttcagatcaaagtgcaacccacaaggaggttatgcccccaaataacttgttgagtaatgcacgcctaaagaaaaaggaggaacaaaagactaggcaaaatgcactccatgttggtgcagcaacacaagtggcagaagatagttttgctatggacaaggaggagcctggagaatacatgcacctaaatagcttcactcagcttttgacggggcagataaatgatgatcttttagttgacgatgcattttag

SEQ ID NO: 90370 - DNA, 183 bp, Oryza sativa
  Clone ID: PAT_MRT4530_89045C.1
atgctacttcttgtggcaagtttgagcatcctggtaggtgacatcgaagattggccagcgtcggagcgctacacctacttgatggttgggcattgccgatgcaaggaggtcgctgtccatgcgaaccgcctgtctaacccctccccgaagtcgactgcctctacttccatcgttgtcctctag

SEQ ID NO: 90371 - DNA, 1617 bp, Oryza sativa
  Clone ID: PAT_MRT4530_89046C.1
ctttcggatcccttcttctccgggcggcgatttctttcttcccatcggccttgttggtttgaaatacagagtccaggtgcgagccaagtcccctctcttcgcgactgattgcgtttccttaaatatgcaaggctggtagagggccgggtgagaaattttgagatttcgaccaacagagggcggaaaacccttggattttagattcactcaaggcttcgtcgcgtcatgggtattttcaagttgaatctgctcctaaagctgcagcggcagcggcagcgccgtcgtcgccaaatccaagcccgtaatggatcagttttgattcatccacgggataaaataaacgctccagcctgtcaaaataacacacactcttggagtggccaagcgaagtgttcagacccaacgcttccggaggacatctcgtgtcatatacattccctgatgtctatgcgggatgctgctcgtgttgcctgtgtgtctcgggcgtttgcacgttcctggagatgccttcccaacctcgacttcagtgaggaatcattaggaataaatagaagtacatgcaaaaaagatgagaaactgggagatttgaccagcaaaattgattggattctgaaaaatcactcaggcattggcataaagaaactcatcattcaggttggcagtgtatacagtcgggacagtagtcatcttgctcatctcgatagttggcttcagtgtgctgttaaaccagggattgaagagctgattgttaatctgtcatcaatgaatgcaaaatacaatttcccatgtgaacttttatctagtggaactggagattcacttcgctatatttatcttgcctcttgcaacttccatcccacacgtctcagctacctagatgttatgacttgcaccgggctgcaagttatagagagcaaagctccaaatctctccagtattcgctttgaaggtgacctctatgtacaattgtcacttggtgaaccactgcaaattaagcaattgtacaggttatgtaatgatgctgccttttatgctcgtactgagctgccatccagcatgccaaatcttgaaaggcttattatacattctgacactgagatggtcaatacaccaatggtgcctagcaaattctatcacctcaagtacttgagtattgcccttggtggacagacctatgattacctttctctggtttccttttttgatgcttctcctttcttggagacttttatcttgaatgcactccgagaacgcacggaacgtgccacaatttttggggatccttcaggtctgaggatgatgccagagcaccgtcatgacaaactcaagtgtgtgaagataatcaatttctcttctgtgaagactttggttgagttaacatgtcacattgttgaatcagcgacagcactcgaatgtcttacgttggacacaacgtcaggttcgcctagatgttctgtgaacagacttggtaaatgcttcttgatgcgcagagagacactcatggaagcccacagagcactcaaggctgttcaaacatacatcgagctcaaagttccctccaaagttgagttaaacgtcttggagccttgcagccggtgccatgctcttgacctttag

SEQ ID NO: 90372 - DNA, 245 bp, Oryza sativa
  Clone ID: PAT_MRT4530_89047C.1
gattaattcctttatttctcttttttttttttttttttttccttttttttttttttaattgaattttttttttgggaaaccaactcttcttatttatttcttcgggttatttttatcatcacattcgcggggaaggcggcttccaaccttgtttaatgcttctagcaaatttcgatatttaattttccgggaccccgggtaactaattaaataattaattaagcaagggcctaattatttaattt

SEQ ID NO: 90373 - DNA, 207 bp, Oryza sativa
  Clone ID: PAT_MRT4530_89048C.1
atggcggctggcaacgcggtgtctaggcgactcagtgaggaggaggcgaggcggcaccgcgaagagtctccgtccgacaaggaggcacgccgcggagtcaacgaccaacgaggaggcatggcggcacgacgaatagagattaaccgacctggacagaattggcaagagtttttcgctagaattggcaagactagagaagctgagtag

SEQ ID NO: 90374 - DNA, 711 bp, Oryza sativa
  Clone ID: PAT_MRT4530_89049C.1
atgacacctcgagctaaagaggaggcggcgattccagcggacagctgccgcggagacattgtcggaggccagccaagaggcccaaggcaactgacatggaaagtgcaacggcgtgatgagagctggaacaacccacactgttcagggacagctgcaaaagatgcagttgaggctgtcgatgttagcccaggcattacggcggtgattatcaaccgatgctgccgcctggagctcagcccacctattttggtcgcctggacgaggctaattgcacacctgagatggattaggctaggcaggtggaaagggccctcagggcaacaaccaaacaaggttcaggcaaggctcgggctcctcttccatcaggcaagttctcctcagggcagcaaccaaacagccaatgcttatagattcttcccccatgggtcatgggatgcgtcgttctcccgatgccacaagcccagcgagggggacaggatggaggcagctatcatgaggttattaccagcttcagggattgtgaggctggttgcgttggtgttcttgctgatcttcagctcatcacttcagcagcaggcaggtgtcggtgccatcaggctgcatgacagaaagcagcacggggagcagtgggaggaggagaggacgcagatgaggtcgttcatgaccatggactatagctcagtgaggaggcggaggccgatacacaactga

SEQ ID NO: 90375 - DNA, 4948 bp, Oryza sativa
  Clone ID: PAT_MRT4530_8904C.1
atggtcgaggttttggaggaagaggtgctggtgcacacccccgctccctctaggagtgaagatgctagcgggagtcgcagcccccgtcaccgctgccgcaactctcggactccgccccgctgtgaccccctgcggagagaggatcccacccgatagggtggcttggccctctccccgcctccagacggggggcggccgcggctcgtcggagcgcgccgccgcctgacatatggcgacagcggctcgccccgaggtgcgcttcaggtggcaggagcccttctacggcatcctccggtgaacgcagagccggagacccccgtcaggcgatggttggacgacgtcgccaacctggtcaccactacccagcggtagctggctgtgggtggccgttccaccgccactggtatgtcacgcacccccccaccatttcctcatcggtgaaaaggagcgcccgtcggtcagccatgacctcgaggcggtccacggccccaacatcgtcgggggcctcgggaaatcagaggcatcacgatggcctctacggggagcaggacgctcggatcaacatcgagcgacgccaggacgagcgccgtgctgcccgcatgggagaaggcgcatcctcctccagagtgtagtgttcctccttgcgaggcggcccgccccccacgttcacccctggatggactggttgtaggggcttcgttgtgagtctccagaacgtccggtggcccccgaagtttcgtcccaacctcacggagaagtatgatggcagcattaatccctccgagttcctccagatctacaccacgatcatcgtggcggcggggggggggggggaggggaagagaccgggtcatggcaaattatttccccatggcccttaaggatcaggcgcgtggctggctcatgacccagccccccgactccatccactcttgggaggacctgtgccagcagttttcatcacgaacttccagggcacgtacccccgcctaggagaggaggcagagctgcatactgtgcaatggaaggacgatgagtccctccgctcgtacatacaacgcttctgccaggtccgcaacactattccatgcattccggcccacgcggtcgtttatgcatttcggaatggcgtgcggcacaaccgcatgctagagaagattgcctccaaggagcccatgaccactgccgagctcttcgagctggcagacaaggtggcgcggaaggaggaggcatgggcctggaactcccccaccaccggtgcggcggctgcggctgcccccgaatctacttcccgctccaagcggcgggataggaggggcaaacggaagccggcccgctccgatgacgagagccacgtccttgcggctccgcgcaagaagaaaaccactgggaacaagccgagctccaccgctccctctagtgagggtcggtcggcggacaagtagtgctcggtgcataacacttatcggcatagcctcgccaactgtcgctcggtcaagaacttagccgattggtttcggaaaaccgatgagaagcggcaaagtcgacaggagggcaaagcccccgcgacccctgccaatgaccggcgaggagaggccaagaagaagcccccgccgatgacggcgacagtgaaactgtcgccacactcgacggggggggggggggggggcttgcgctcacacctcccgccgcagtttcaaggccatgaggcgcgagcttctggccgtcgtcccaactcatgaggcggcatggaacgcgcgctggtcggaggtgaagctcaccttcgatcagagcgaccatccgacagccccggggatgaagctccagccgtctctgccaatcatcggtgtgaccccggggcacacgtggcctctgggtcatgttgaactcccggtgaccttcagcgactccaacttccgcaccgagcggatcgacttcgatgtggcggacctcaatctgccctacaacgcgatcctgggcaggcccgtgttggtaaagttcatggccgccacccactacgcctacctccagatgaagatgcagggccctagtggccccatcaccgtctttggcgacgtcaaggtcgccctcgcctatgcggagcagcgtgccgacagcctggcggcaagtacagagccacaggccccggaagcctccgcgccccgcgcttccaagaagcgcctcacctcggccgacgaggaaagctcgctcgtctccttcctgcgggcaaactccgacgtcttcgtgtggaagccgtcggatatgcccggggtcccagcgaggtgatcgagcaccgcctcgcagtgcggccagatgcacgacccatccgacagaaagtacggcgctaagccccagagcggcaagccttcattcgagaggtgacgcggctcctggaggccggcttcatccgagaagtcatccacccagagtggctggcaaacccggtggtcgttccgaaggccaacggcaagctccggatgtgcatcaactacacggacctcaacaaggcatgccctaaggatcccttccctttaccacgcatagatcagatagtcgactctactgcagggtgcgacattttgtgtttcttggatgcctactctgggaatcaccagatccgcatggttagggaagatgaggaaaaaactgctttcattacgcctgtaggcaccttttgttatacaactatgccttttggtctcaaaaacgcaggtcctacttttcagcgcatgactcgcattaccttgagtaatcaaatagggtgtaatgtagaggcgtatgtcgatgatctggtggtaaagacgcgccaccaggacacattgttgcaggacttggctgaaactttcgacagtcttaggtctacgcgcatgaaactgaaccccgaaaagtgtgtgttcggcgtgccgggccatgggaaggaaccaggggtccccttaactggtgatggcccctcgtccccccacggctcggagcccaaagcccccaacccccgagagggcccctaggcccccgtgggaggaagagaggctctgacggatggccccaaggcctataacccagagatggcccgagatccccccgaggcccctgagcatgggcgccccgggccaacagcccctgacaacaaggaccggccccatcgaaaggtgcagcggcccgtctactttgtcagcgaggcactccgagacgcgaaaacccgatatccacaggcacaaaagatgctttacgcagtcttaatggcctcaaggaaattgtgccattacttccaagcgcaccgggtttcagtcgtgacatcttaccctctcggtcaaatcttgcacaaccgagagggcaccggtcgggtcgtaaagtgggccatcgagctcgctgaattcgacctgcacttcgaaccacggcacgcgatcaaaagccaggttctggctgacttcatcgcggagtggacgccggtggacgaccctgttctgtccaatcttccctccctccccggaggcggaggagacccgaacgccgacattcgcgccgggcactgggttatgcactttgacgactccctcaacctccatggtgcgggggccagagtcacgctgacttcaccaaccggggatgtcctcaagtacgttgttcggctcaatttccgagccacgaacaatatggcggaatatgaaggactcctcgcgggattgagggcggggccggaaagggcatccgccgcctcctagtcctaggcgattcccagttggtcgtaaatcaggtctccaaggagtaccagtgcaccgacccgcaaatggatgcatacgtctacgaagtgcgacgcatggaacgccacttcgacggactcgagctccggcacgtgccccgacgcgacaacgctatcgctgacgagttgtcgcgtatcgcgtcgacacgagccccactcccttcagggaccttcgaggaaaggcttgcgcagccgtcggcgaggttggaccccccgagggaacccggctccacggcctcggccccgacccctgacgacccgcgggcctcggggcccgagggggtcgatcccaacccccctcgtcaggtcgcctggatgtctgacatccaggcatatctcgacaataatactcttcctgaggatcgcgcagaaactgagaagcttgcgtgtatctctaagcggtacgtgctcgtagaagggaccctctaccggcgggccgccaacgggatacttttgaagtgtatttctcgggaacaaggtatcgagcccattgctcacgctcatgaggacatcctcgaacccttcaaagcggctcgaggcgggtatcagcacctgtatgtcgccatcgataagttcaccaagtggcctgaggcttaccggtcgtcaagatcgacaagcattctgccctcaagttcatcaggggcatcacgtcccggttcggggtgcccaaccgtatcattacggataatggcacccagttcaccagtgagctgttcggcgactattgcgacgacatgggcatcaagttatacttcgcctcgcctgcccaccccaagagcaacggccaggtcgagcaagccaacgcagaaatcctcaaaggactcaagactaagacgtacaacgtcctgaagaagcatggggatttgtggctcgaggagttgccgccgcgagcagtcgcgcttagggctgagcaagctctcaccaatgtgggaaggaccatacaaagtgatcggcgttccccagccgggctccgttcggctaaccacggaggatggcacggagttgcctaacccctggaatatcgaacacctccgccgcttctatctatagcgacgcaattttttgctttctaggagctcgggccaacccccgcacaacccctcggtttgtgcgggcttggccgggggctaccactgtcaattactttgtaactttttccctttccaagcaataatttttttccgcttaagc

SEQ ID NO: 90376 - DNA, 2745 bp, Oryza sativa
  Clone ID: PAT_MRT4530_89050C.1
atggacatatctaggagtctctttagaagaatagcaagcagagatgataactgttctgataaacaaaaaggcaaatatgatgacatagatgagctgaaagatgttgcacaagtagataagcagctcgaaagatatcaacgagatactttaagggcaataaggcctcaacaagtatactgcatgggattttttgagaataagaatgggctttatagaatatctagagaactagaattaagtgttctaacaaagccactagaattaaaaatagtagctaaagaatttgaaaatagtttaaaatattcaggatataagtatattcaccaagaatcatctgacagagatattatagataacagaagacatagtatatctgaattgatggaaaaattagaccatgaaagtgaaataaaatattatgaagataaattaagagatatagcagatgaatataataactctatgaaaaagaactatccaggattaagaaaaaaaaaagagaaaagcttggccatagaaacccccagaacccaggaaattaaaatagaacaaataaagtcagaagaaccaagagaagaaatccaaaagttagataaggtattaagtgaggaagagcaatgggaagtaaatgagaaattattactagagagttatgaagaagaaaacaacctgatagaggaaatagagaatatagaagaagaagataatgcagaacaatataatgattttatagactcattggatgaggaaggtttgcataatctagataatgcaatggaagctatggaagtagatttgggaacaggaaaaaggaaaagatacggagagggttctgtaaaaaatgaaggagaaagagaaagaccagccagggcagcaggaaaatgcccccctgatagagaagaattttcatataactatataccaggacaatataggcacatgggtactaagagaagagactttgagaagcctgttaaatttcaaaaccagaggagtgatggtgctatattaaatttagccgcacatgaccctattgattggcctaatattattaatatttggaaatgtttaatagttcaaaaatatatacaaaaccagcacaatataggaagtaaagttgaagatatgataacctacttagaaacatttttaggtgaatctgctaaggttctatgggaacaattggttgaaaagaatcctaataattatgaagaattgaaaagagctggtagcaatccgcataattttgcaaatgttatatctaacattattatagctgaagatccggaattaggttatacaactttgtagaatgaaagattaaaagaaatagaaaaattaacgttaacaagttggaaaggcataaaagaattctcccaacattatttatataatgctacaactgctaaacaaggatataacaggggaatagttgaacgttatttcaataaattacctgacccactaggaagtatgatatttgaagaatataaaaaggaaactgaaggagctgaaatcaacatctcgcaagccataacttttgtgtttaagcaactaagaaaaatatgcacgggtatccaagtctaaagatctatgaaacactcggattacaatttctgcaataaaatagttcaaatacccttgtcatatggagaagacaagcctagaagtaaaatgatttataaacatcaaaatagaaacaacaacaacgaagacaccattcagagcaaagcttccaagcgcgctctcaccctccattccaccgttcttagtagtagtgactttagcctaccttgcatagtatattgaagcaaggagttgtgttataacgctgtgtaaggtaagaacagcttgcttgtacctaccttcgggtttcccgaaagggaaaaccgtatgtaagcttatctgtttaatatgaagtaattttccttaactattcctgcacgtttgttctagacaagtgtttatgctaaggaccctataggagaaacctcttcggtttgttctcgtttttagcctgcatcttgcataggcgtctggagaatcggtatccgtagagaagtgttcccttcgggtgaaactgccctcggatttcgatcgtccagcgcgcggtcgcggcggaggcatggagatcggagaggccacggcccagcgcaacacagcggcgaacgcgacgtggagcaacgcctcatgattattcgttatgtgcatacgcatgacactattctggtttctgtagcagccgtcgagcacgtaagcaaccaagctatcacacattcgtaccggtctactacaactcgacgccagcccatgctcggtcgcaggccgcggtgtctttccaactcggtcgatcagcactccagtatctggtcggcacagcatttgcgtaggcaaccacatctccacacatacaagcagcacgtacagcggtacaactgctcttgcggtagtttgaaaccaacccaatgctagagctagggtcaccacatctgcagggcctagcccatggtttggagggaagcggttcctctgacgtgaactgtcacatgacgtagtcactgacaggtgggcatttccttgggtcggtacaccttgggccaagcgacaaggcaattccggctgtagaccaagtttgaccacttccaaaggaaagctttcaaggtccaatccggcaagcccgatggcaagggagaggtgcaccgaggtggaggagaggacgagttgcaccaaggtcatcatgtccat

SEQ ID NO: 90377 - DNA, 2208 bp, Oryza sativa
  Clone ID: PAT_MRT4530_89051C.1
atggacatatctaggagtctctttagaagaatagcaagcagagatgataactgttctgataaacaaaaaggcaaatatgatgacatagatgagctgaaagatgttgcacaagtagataagcagctcgaaagatatcaacgagatactttaagggcaataaggcctcaacaagtatactgcatgggattttttgagaataagaatgggctttatagaatatctagagaagtagaattaagtgttctaacaaagccagtagaattaaaaatagtagctaaagaatttgaaaatagtttaaaatattcaggatataagtatattcaccaagataaaatgagttttggtttccaaacaaaaggatacgaagagtttaagggaacaaatttattaataagtatagaatttataggaagattgactaatagaagtgcctccaaatacaaaatcaatgtaaatgatgtgatagaaaaaatgcattctaaaggaataaaattcatgagccctttaataatagactctgaagaaagagcaggagaaaaatggccaattagtgaatttataaaaaataaaaccttgagtcagcctgaaaacttcataagttaccaagacagcaaagggaatgttagtattagatttacaaattataaaaccagagcttcggatgatttggatgcagaatcatctgacagagatattatagataacagaagacatagtatatctgaattgatggaaaaattagaccatgaaagtgaaataaaatattatgaagataaattaagagatatagcagatgaatataataactctatgaaaagtgagtggcctaaaattagagacaagaaactttatttctatagagaactatccaggattaagaaacaaaaaaaagagaaaagcttggccatagaaacccccagaacccaggaaattaaaatagaacaaataaagtcagaagaaccaagagaagaaatccaaaagttagataaggtattaagtgaggaagagcaatgggaagtaaatgagaaattattactagagagttatgaagaagaaaataacctgatagaggaaatagagaatatagaagaagaagataatgcagaacaatataatgattttatagactcattggatgaggaaggtgaatctgctaaggttctatgggaacaatgggttgaaaagaatcctaataattatgaagaattgaaaagagctggtagcaatccgcataattttgcaaatgttatatctaacattattatagctgaagatccggaattaggttatacaactttgcaaaatgaaaggttaaaagaaatagaaaaattaacgttaacaagttggaaaggcataaaagaattctcccaacattatttatataatgctacaactgctaaacaaggatataacaggggaatagttgaacgttacttcaataaattacctgacccactagcaagtatgatatttgaagaatataaaaaggaaactgaaggagctgaaatcaatatctctcaagccataacttttgtgtttaagcaactaagaaaaatatgcacgggtatccaagcccaaagatctatgaaacactcggattacaatttctgcaataaaatagttcaaatacccttgtcatatggagaagacaagcctagaagtaaaaggatttataaacatcaaaatagaaaccataataatattagaacaaagaaaaggttccttcaacaatcagtacaacccacagtaatacatgagcaaggaattacttttatcccatatcaaaataatgttccatatatctcagaggtacgaaagtgtggtggagtctcccccaaactcgacaacttagaagtacctaatcttgagtctgaagaaagaattaatgaatatgagcttagtgagaatatagacaactattctttctcatcatatcttccaaaattctatggaattgccagggaaatggcttcacagaagtctgaatggctcacaaatatgagttcatggagactgccccaactgcccagaggccatggagaacgatttaatcacaattttcagaataacagagctacaacaagggttattaaacctcttgtggcaaacaaaaaacaaaaaagaaaaagctcatgccttaaatggcctggcatattatttcaaaaatttcgtgccctcagatcaaaagataacagaaaaaagggctaa

SEQ ID NO: 90378 - DNA, 198 bp, Oryza sativa
  Clone ID: PAT_MRT4530_89053C.1
agggagttccaatctacacgggaagatcttgctccacgtgctgcacggtatctagtgtatatcatcaacaatttcctgcaaataatattagcaaatcaaggcttcatgtaaaacttttcatctccagtcttaagttctctttcatgtaaaacttttcatctccatgtataactaaaacttttgagacttttttttttt

SEQ ID NO: 90379 - DNA, 2355 bp, Oryza sativa
  Clone ID: PAT_MRT4530_89054C.1
atgagtgtactgttccgcctcacagcgtgggtgtctaagtttgtccaatacaatgctgaatgcctcatgggaagagttgcttcgccacggtgtcaggctcctatcgaatgggggaggaacgacaaggggcttatcgaacatccagccttcgattgggccctatcgaactgtagccatttgacaggacggcctatcgaaccggggttgttcgactgggcccaccacccggtgccgcgcggcctgtcgaatacggggagttcgactggtcccgccgccgcccctgtcgaacaatgggcattcgacaggtccctttatatcggcagcccgaacctagctttctctaaaccgattgaggaggaccacatcgccatcgtcaccattgcagtcgccagtgctgtcgccgtgcgcgctggagggagtgaggggagggtgtgggcggccagagacaaggccagggcggcgccggcctggagggcacggagagtagtggaggttgcgtcaactgggagttggaggaagtttgttagtaaagtaagggagaaagggtatagcctggcaatagtggtgcagaagacaacatgtgttgatcgatcgggggagtcaagtcatgccgtggtggaagaaactccattggaagaggtcattgttcgtgacaataatcgtgaggccgacgactcggacgatgaagaaccagattcgcctatgcgtgttgatgcagcaaaggagaatgaggcggtgcaagttgggcagatgtttcatgacaaaggtcacttacaagatgcggtgaagaggtgggcatttgaccagaagcgtgagttcagggtgaaggtttcaaataggacgacgtacgacgtgaagaagcgcggaagggccacgaagtgcttcacggagtgggttgaatttgagccaagggagaaatggtcgttattgaagcgtgggaggcaacttggcgaggtgaattgcgtggttggcgagccgtgtgcgatttcactcgtcctcctccagggcaagccaattgggttctggattcatttattagttgatactaaaggttgtcgccagtcgcgtaggatcaagaaccttatggatgaagctaaagcgaaagatcgttctcgtcgtaagaaagcttgcattctttgtggggagaaccatgcccgtaaagattgtgccatgtacaatgtagggaaagacgccgcacgagctgatgatgtgtcttatctgttgggtctgccgatagctgggccagcagttggcccaacaatggtacaagctggatgggcagacgaccttctggccaattttggtggtgtgctgcctgttgcactggaggatctcatggatgggcacgggccgacaaaaagaactcacactgactcggtggacaagcacttcatccactacgcggagcagattgcagagttacctatcgcagagtttccacagtacagttgggggtcggcgcaagcaaattcactccctggatgcccgttgctactcatgttgtgggcgcacgagcgcttcgacattgggaggcctcagctggactcgtacgcaaactacgaattgcgagagatgtacaagtccggggttggtgacctcgacaatcgtcccactatgggatccttgtggacacactgtgaggacttttctcccagagttggtcatgctttggctgatagtcttcagaggtattcccgaaaggggctcgggctttcctacgagcttgttattgtgaccatggttcagccgactccgtcaggcctgacgacgtggcgagcatccttcgcaacttccgtgcccgtgctgccgcactacttcgtcgtgtctcctgtcggagcgcggcagatgtggtgcagccgtcggcccgtagggcatcaccaccactaccccgacattccagcgtggatcacagtggtccctcctcgtcatgccgcgggtgtgcacgagggcgggcggcggacggcggcgtcgcggcgacggccgagcgaaggcgactacggtggcggctacgggcgcgacgcatgggggcgggcggtggacgtgcccgtggtgcctgtggtgctcgtggagctggagctccctgctcccctgcagcaggtcggacagcaggggcgccacgaagccgccgcggcagcgcgggcgcgtggcattgttgggtgcagcaagcagggcggcgcgcgcggtgtcccgggcgagaaggtgcgcgagcacatcggaagcggtggcgttgagcgcgaagtgctcgcggtgggtgaggcggaagtggagcgtggaggcgttggtgcgaggcgagtgcccgcctccgccggatcggtggtcgcggggttgcatcctctggctaagttccctattatg

SEQ ID NO: 90380 - DNA, 1401 bp, Oryza sativa
  Clone ID: PAT_MRT4530_89055C.1
atgcgggagggagaagaccgcggcgtctccgcaatccgtagcgcggaggcctccttctcccgatgcggcgacgccggtgtggaggtggtggagtcggggaaagtggggggtagcgacgacggcgtggaggctgtgacggttggacgacgtgggggaaaagcggggagggagagcgacggcggcgacgctggcttggaggcggtggagtcggggaaaatagggggcggcgacggtggtgtggaggcgatggcgaatggcaaattggctggtgttgaagctgcagagggtaatacacaaggagaggtcattgttcgtggtactaatcgtgaggccaacgactcggacgatgaagaaccagattcgcctatgcgtgttgatgcagcggaggagaatgaggcggtgaaagttggacagatgtttcatgacaaaggtcacttacaagatgcggtgaagaggtgggcatttgtccagaagcgtgagttcagggtgaaggtttcaaataggacgacgtatgacgtgaagtgcatacaggaccaaatgtgtgttattgtgaccacggttcagccgacggtacaagagtgggagcacgcagctgataacttggcacttcagacacctccagatgatgggagttattatggagcttaccttcattggtaccgcagtgttacacgatggaggtgttttcctccacaaggagatagcaccgtcccccaccaggcagcgattactgacacgtttgcccctcagcctagattagcttacaactcaatggcggaatttgttgagcacgttcacgtggagtccgacaccctgctacaaagactagaggcgagacctccagtcgtcaggcctgacgacgtggcgagcatccttcgcaacttccgtgcacacgtcgggccgacggccatcaccaccactaccccgacgttccagcgtggatcggagtggtccatcctcttcacgtcgcggggagcatctgggtcggcacacttcccttacatgccaacgggggacaacgtgttgaacacaccagcatggggacttcatatcactccgcgtgcgccagagcagggccacacacagcacacatacgatgagtacggttcggcgtcgacgcatcacggaatgcctgcttactccccttgcacagcattcattgaggacttcttttccactgatcatccccagggggaagtagggatggattactggcacgcagcacctcaggtcacacagccgacgcaggagacggaggccggtcaggggccagacgtgacaccacagcaggcagctagagataggcaccctcctgataatttgacatatcccactgagcagattaggcgtaggaagaagggaggacctagcaagcgtgcgaagggcactgatcgtccttga

SEQ ID NO: 90381 - DNA, 777 bp, Oryza sativa
  Clone ID: PAT_MRT4530_89056C.1
atgggacctcctttgaacgatttgaataagtttaggggtaaacatttctggttttacaggatgtcaggtgatatgcccattcgtctgtattatggcgatgctcctatacaaatatgtgatagcggggtggatttgactgtatatgccttccatgatactagtctgaatgcaccggagcatatgggtttgaacgacgtgttagggtggttgtataatatgtttggggtagatccagtgcacgataaatttgtcataaatgccgtgtggccagtgaggggtcaacatggatggcagtggagagtagtggaggttgcgtcaactgggagttggaggaagtttgttagtaaaggagcatctgggtcggcacacttcccttacatgccaacgggggacaacgtgttgaacacaccagcatggggacttcatatcactccgcgtgcgccagagcagggccacacacagcacacatacgatgagtacggttcggcgtcgacgcatcacggagtgcctgcttactcccctcgcacagcattcattgaggacttcttttccactgatcctccccaggaggaagtagggatggattactggcacgcagcacctcaggtcacacagccgacgcaggagacggaggccggtcaggggccagacgtgacaccacagcagacagctagagataggcacccccctgataatttgacatatcccactgagcagattaggcgtaggaagaagggaggacctagcaagcgtgcgaagggcactgatcgtccttga

SEQ ID NO: 90382 - DNA, 2718 bp, Oryza sativa
  Clone ID: PAT_MRT4530_89057C.1
atggcggcgccagttccatgccttccagaccaggcatcggcgctgctccagctgaaacgctccttcaacaccacggtcggtgactactccgcggccttccgatcatgggtcgccggcacagactgctgccactggaatggcgtccgctgtggcggatccgatggccatatcacctccctcgacctgagtcaccgtgatttgcaagcctcaggtcttgatgatgcactcttcagtctaacctccctcgagtaccttgacatctcttggaacgacttcagtgcgtccaagctcccagccattgggtttgagaagctcgccgagctcacccatcttgacctctgcaccaccaacttcgccggccgggtacccgttggcatcggccgcctcaagagcctggcctaccttgacctgtctacaacattctttctatatgagcaggacgaggagaacagcatcacctattactactcagaaacaatgtcacagctctcggaaccgagcttggagaccttgctcgcaaacctcaccaacctggaggagcttcgcctgggcatggtgaacatgtcaagcaacggcgcacggtggtgcgacgccatagccaggtcctccccaaagctgcgggtcattagcatgccgtactgctcactctccggtcccatttgccactcactctcggccttgcgatcactttcagtgatagagctgcactacaatcatttgtctggtccagttcctgagctcctggctactctctccaaccttactgttcttcagctttcaaataacatgcttgaagggagtatatctgtgagcaacaccaacttctccggcacaattccagcttccatcagcaacctcaaatatctgaaggagttggcacttggagctagtggtttctttggaatgctgccatcttccattgacttcagcggcaatatgattcaaggacagctaccaagatctttggttgcctgtaggaatctggagatccttgacatcggcaacaatcaaattagtgaccacttcccatgttggatgagtaaacttcctgaacttcaagtcttggtcctcaagtctaacaagttccatgggaaaataatggatcctttgtataccagagatggaaacaactgtcaattttccatgttgcggattgctgacatagcctcaaacaacttcagtggcacattgccagaagagttgtttaagatgctcaagtccatgatgaccaggtcagataacgagactttagtcatggaacatcagtattcccacggccagacataccagtttactgctgcactcacatacaaaggcaatgacataacaatttccaagatcttgagatcacttgtgctcattgatgtctcaaataatgaattcgatggtagcatcccttcaagcattggggaacttgcgttgcttcatggactcaacatgtctcataacatgcttacagggccaattccaactcagtttgacaatttgaacaaccttgagtcgttggacctctcctcaaataagctttctgaccaggcagcggcgctgctccagctgaaacgctccttcaacgccaccatcggtgactactctgccgccttccggtcatgggttgccgttgccggcgcagactgttgcagctgggacggcgtccggtgcggcggcgccggcggccgtgtcacctcgctcgacctgagccaccgtgatttgcaagccgcctcaggtcttgacgacgcactcttcagcctaacctcgctagaataccttgacctctcttccaacgacttcggcaagtcccagatgccagccacagggttcgagaagctcaccgggctcacccatcttgacctctccaacacaaacttcgccggcctggtacctgccggcatcggccgcctcaccagactctcctaccttgacctgtcgacaacattttttgtagaggagttggacgacgagtacagcatcacgtactactactcggacacaatggcacagctctcggagtcgagcttggagaccttgctcgcaaacctcaccaacctggaggagcttcgcctgggcatggtggtggtgaagaacatgtcgagcaacggcactgcacggtggtgcgacgccatggccaggtcctccccgaagctgagggtcattagcatgccgtactgctcactctccggtcccatttgccactcactctcagccttgcgatcacttgcagtgatagagctgcactacaatcatttatctggtccagttcctgggttcttggctactctctccaacctaagtgtccttcagctttcaaacaacaagtttgagggatggttccctcccatcatcttccagcacgagaaattaacaactattaacctcaccaaaaatcttggaatctccggaaatttgcctaatttctcaggtgagagtgtcttacagagtatatctgtcagcaacaccaacttctccggcacaattccaagttctatcagcaacctcaaatctctgaagaagttggctcttggagctagtggtttctctggagtgctgccatcctccatcggtaagatgaaatccttatctttactagaggtgtctgggaatctggagatccttgacattggaaacaatcagattagtgattccttcccttgttggatgagtaaacttcctgtgcttcgagtcctggtcctccagtctaacaagttcattgggcagctctga

SEQ ID NO: 90383 - DNA, 1716 bp, Oryza sativa
  Clone ID: PAT_MRT4530_89058C.1
atgggctttcgacaggcccttttaaaccgcgtgcgcctaggccgcgttgcttcttcgtttttctctagaccacatcgccagccgccgccgagagtcgccactgtgtcgctgtcggcgccggagggagtaaggggaggggctagcaggccggagaggaggcgccggccgggaggaaagggttggcgacggcctccaccagtgaagttaaggatgtcaggtgaaatgcccattcgtctgtattacggtgatgctcctatacaaatatgtgatagcggggtggatttgactgtatatgacttccatgatactagtctgaatgcactcgagcatatgggtttgaacgacgtgttagggtggttgtataatatgtttgggggtcacttacaagatgcggtgaagaggtggacatttgaccagaagcgtgagtttggggtgaaggtttcaactaggacgacgtacgacgtgaagtgcacacaggctggatatccttggagagtgcatggttacaagccacaacatgacaatttatgggtagcttcaagggttgagcaacatatgtgtttgttggagaatacccgtccggtacacaggaacatgactgcggcatttgtggcacaaatggtatattcaaaggtggttagaaaaacatctttgtcccctttcacaataatacatgacatagagaaagagtatggatatgagatatcgtacgacaaggcttggagggcaaaacagaaagcactggagatgaggtttggaacttatgaggattcttatcacaatcttcccccactattggaggtgatgcaggcaagaaacccgggcacacacatggctattctcgacgaggtgaatgaaaatggggagaatgttcttcgtcgggctttctggtcatttgggtgtatgatagaggccttcagaaattgcattcctttgctttgtgttgatggtactaggcaagcggaatttgttgagcacgttcaagtagagttcgacaccctgttgcaaagactagagacgagacctccagtcgtcaggcctgacgatgtggcgagcgtccttcgcaacttccgtgcctgtgctgccgcactactttgtcgtgtctcctgcgggagcgcagcagatgtggtgcagctgtcggcctgtagggcatcaccaccactaccccgttgttccagcgtggatcacagtggtctatccacgttacgttgcgggtacgaagcagcccacacatctcacagtcgtccttcctttcagcacaccccagcactggagtacaccagggggtcagctggatcaggggtacccacatcgagcacggcacagccacgtccgcaggtattccaaactccgccttatgttcaccccacccagggagcatctgggttggcacacctcccttacatgccaacaggggacaacgtgttgaacacaccggcatggggacttcatgtcactccgcgtgcgctagatcaaggccacacacagcacacatatgatgagtactcccctcgcacagcattcattgaggacttcttttccactgagcctcctcaaggggaagcagggatggattattggcacgcagcacctcaggtcacacagccgacacaggagacaaaggccgttcaggcacccgagatgaattcattttttgcatacccttccaatgaatcaggacaaatgattcgcttcgaactttgcggcgcactatag

SEQ ID NO: 90384 - DNA, 3060 bp, Oryza sativa
  Clone ID: PAT_MRT4530_89059C.1
tcaggcttgctgcttcctgttgttgcttccccatatcactaaaattgtaattccaaagcagacaccaaatcccaacccagtgaagagaaaaagtagaacatctatgggatccttcttggaagcatgtggcatgatgtttggttcagatcggtcgctacattgtttagacaatgggggtccgcagagcccaatatttccctcaaaagaggcattggaaaatgtcgagaagtgtgacgattgtggtattcttccagccaacatattataggacaaattcaatgttgcaaggaagttcaacgatgctagctcttgtggaatctcaccagaaagcttatttgaggagaggtccaacgactcaaggttgttcaaattgtcaaactgagttggaattggccctgtaagcatgttatgagacatgttgagtccatgaagcaacgcaagttccccaatgcttgaagggatgctaccatcgaattcattatttgagacatcaatgagcacaagtgatctcaagatcttggaaattgttatgtcattgcctttgtatgtgagtgcagcagtaaactggtatgtctggccatgggaatactgatgttccatgactaaagtctcgttatctgacctggtcatcatggacttgagcatcttaaacaactcttctggcaatgtgccactgaagttgtttgaggctatgtcagcaatccgcaacatggaaaattgacagttgtttccatctctggtatacaaaggatccattattttcccatggaacttgttagacttgaggaccaggacttgaagttcaggaagtttactcatccaacatgggaagtggtcactaatttgattgttgccgatgtcaaggatctccagattcctacaggcaaccaaagatcttggtagctgtccttgaatcatattgccactgaagtctaatgcacttaatgcacaaccttccttgatattatcaggtaactcgccagtaagatggttttgttttagacttaatacctgcaatgcacttgcattttgcgtcagacatgatggcattgagcctgtcaagttgttattagagagatcaagtagttgtaaactcttaattgcatcacaaatcgatgagggaatgtttccagagaggctattgtcggaggctttgagaacgactgtactcttaaggtaactggagaaattaagaggcatagatgagaaccggttggttgagtaatcaagtgtgatacttcctttttgtggtactggtattgctccatcaaaattgttgaaactgagatcaaagtattcaatgtaaaggggaagtaaaggattggatccaatactcgtaaagttattatgtgataggttcaacaagaaaaagttcatcgtccatgtctcccatgtccactgaggtattgcaccttggatctggttatatgaaaggtcaagactagtaatattagggagatgcctcaagatgttagggaagctagatatgctgcaagatgctagacgtaagaagctaatactggggtaggacactactgaagaactattttctccatcaaccacaactagtttattatttgagagattgaggacagaaagattttgcagttttgagtatgaggctagctccactgtgccaataaagttgtttgaatggagcaggagggtttgcaagcgagtcaaatttgatatcagcgcagatacctctcctgaaaagtggcaattgtacagtgccaattctctcaatttcgttaaggatccgacagaagcaggtattggtccggacaaaccacaatggaagaacttgagaacattcaaaaaagtcagatttgaaatccatgacggcatggatccttgtagctctaacccagacacctctagtatacgtaaagatttcagcttaccaatggaagatggcagcattccagagaaaccactagctccaagtgccaactccttcagatatttgaggttgctgatggaagctggaattgtgccggagaagttggtgttgctcacagatatactttgtaagtaactgtgagcagagaaattaggcagttttccggagatcccaagattattagtgaggctaatactagttaatttctgaagctggaatatgatgggaggaaacaccccttcaagcatgttatttgaaagctgaagaacagtaaggttggagagagtagccaggagctcaggaactggaccagacaaatgattgtagtgcagctctatcactgaaagtgatcgcaaggccgagagtgagtggcaaatgggaccggagagtgagcagtacggcatgctaatgacccgcagctttggggaggacctggccatggcgtcgcaccaccgtgcgccgtttctcgacatgttcaccatgcccagacgaagctcctccaggttggtgaggtttgcgagcaaggtctccaagctcggttccgagagctgtgaaattgtgtctgagtagtaatagatgacgttgttctcatcgtccagctcatcttcaaagaatgttgtggacaggtcaaggtaggccaggctcttgaggcggccgatgccaacgggtacccggccggcgaagttggtgctgcagaggtcaagatgggtgagctcggcgagcttctcaaacccagtggctgggagcttggacgcactgaagtcgttccaagagatgtcaaggtactcgagggaggttaggctgaagagtgcatcatcaagacctggggatcgtagccatcggtatcccaagtcgagggaggtgacggcacggccttgggcgccgccgcatcggatgccctcccagcggcagcagtccgtgccagcgatccatgaccggaatgcggcggagtagtcgccggctgttgcatcgaatgagttcttcaggcggagcagcgcccaagcctggcctggaaggcatggagctggctgtgccgatgccgacgagctcgtaccgtcggcaagcgtgctcctggactgaacctgtatgaggaggatgagtagcatggctaggagaggcatggaactagtgtaagcaaatgtcatagaggccaacat

SEQ ID NO: 90385 - DNA, 5877 bp, Oryza sativa
  Clone ID: PAT_MRT4530_8905C.1
atggtgaatactcgcagcaacgggaatggtcccaacaaccccaataataacaacaatggagagaatcccactctggcccaagttcttgctcaacagacacagcttatgaacatgatgatgcagcaatttcagaatcagcaaaaccaaggaaataaccatgcacctcctcagaataagttagcagaatttcttcgtgtgaggccgcctgttttctctagtaccactaatcctgttgaagctagtgattggctgcatgccatagagaagaagttggatttacttcagtgtactgatcaggagaaggtctcatttgcatcacatcagttgcatggccctgcctctgaatggtgggatcacttccgccttaacaggactactgctgaacctatcacttggcttgaattcaccgctgctttccggaagacgcatataccatcgggagtagtgtctctcaagaagaaggagttcaggtcgctttcccagggatctcgctctgttacggagtatctgcacgagttcaatcgtcttgctcgttatgctccggaagatgtgcgcaatgatgaagagcgccaggagaagtttttgggaggacttaatgatgagctttcttacccactcatggttggagattaccctgatttccagaaattagtggataaggctattcgtcaggaggacaagtacaattgcatggagcagaggaaacgtcggattgctcacttcaaggcacaacaggggagtaatcagaagccgcgtcttactttaggaccccagtctatgccacagggaggttcttcgtctgttgttcgtccgcaacgtcagttcttcaacaacaatgttggcaacaacatccgtaatcaagctccacgtcctgttgcagctccagcacagcaacaacctgccaagagggagcaaggcaacaagcccgtggtgtgtttcaactgtggagacccaggacattatgctgacaagtgtccgaagccccgacgcgtgaaggttgtccctgcccagaataactctgctgtatcagcatccaaggctcgtgtaaatcatgttgctgctgcagaagctcaagatgctccagatgtgattttggtccgggagtatcctgatgtgttcccagatgatttacctgaaaggatacatcagaccgagttcatcaccatggggagctccggatattatcggaggtttatagagaatttttccaagattgctaagcccatgacacgactgcttcagaaagatgtgaagtacaagtggtcggaagaatccttagaagcgaagcccactctaattgatcaagttagagaagcccaaattaatgatcctgatattcaagagatcaagaagaatatgagaagaggaaaagctattggtttcttggaggatgagcacggaactccgtgctccgccgtcgctccagctgtcgccgtcgctcgggaagaccgccgtcatgctcgccaagtcgccgccgtcctcgtccgccccttcgcagccgtcggaacccgccggagctttgtcgccgtcgacaacccgaagcgccgccgttcgccggtgagtgtccgccgcccgagccgtcttcttcgccgagccgccgccgtcgtcggtgatgtcattgttgacgtcatcgggatcctctcccgtgagccgcatgggtcactgccgggcaccagactgagaagtggcggagataagcccacgggggtcgctggggagtccatcccttgttttataaggggaaattccgggcgtgacattgactcccagtccgatgcagtaatcatggaaatcggcgctgatgaactgggagccgttgtcagttatgatgcggtgcggtagtccgtatctgcaaaatatccccttgatgaatttgatggcgttgtcggccttgatttcccccgtgggtactgcttcgatccatttagtgaatttgtcgatcgccacgaataggaacctgtagccgccctgtcctcgtgggaatggcccgagtatattgtggaattgacaggcttcacaccgctggaccatgtcgcatgcatctttgatggcggttggccagaaaaacccttgccgaaatgctttcccgaccaatgtccgaccagcggcgtgtgacccacagatgccttcatgtatatcaaggaggaggtgtctgccgtcgtcggacgagacgcatttgagaagtaccccgtttggcgctttcttgtatagatcgttgccaatcatgcagcagatttttgctttacgggttattttctcggcctctgcgtcgtcctcgggcaactcttcgctgttgatgaatttgatcagtggggtgcgccagtcgtctgtggtctcgatatcggcgacggcgtgttctgcctctgtggcctccgagctaatgttgggggcggctgggctgacttcgccgctaacctctttcactgatggctttgtcaggatgtccagaaaagtgccaggctcgagtggttctcgtcttttctccagcttcctgacttctgcgagatacttggataactcggggttagagcatttataatctttgtgcacctggttcgcgactagctcggagtcccctttcacgatcagtcgcttgaccccaagtgcggctgcagctcttatcccggcgagtagtccttcatattcggctgtgttattggtcgctctgaagttgaggtggattgcgtgcttgaattggtctccggaaggagatgtcaagatgaatcctgcccctgctccttggctgttgagtgcaccatcgaacgccattgtccacgtttcgttgtcgatttggttgtctgatttgttatcaggcatagtccaatcagctgcgaagtcggcgagtacctgggacttgatggctgttcgtggcacaaagtggacatcaaactggcttagctcgactacccatttcgcaatgcggccgacaacgtctttgtttctcacaacttcaccgagatggaaggaggagacaactgtgactctgtgggcttgaaagtagtggcgtagctttctgcttagtgctaccatgcatccggttagcttttgtacttccttgagtcttgtgggcgacttcttgttctcgattgccttgatcttctcgggatttgcttctattcctctgccagagacgaggaaaccgagtagcttgcccgacggtactccgaacgtgcacttctctggattgagcatgaggcgatatcgtcggaggttgtcgaacgtttcccgcagatcgtcaatcaatgagtcgcttgtcttggtcttgacaacaatgtcgtcgacgtatgcctcgacattgttgccgagttggtcgctaagtgcgcccccgaacggcgtgatgaatgctgtcttctctccgtcctctttcgccatgctgattcggtggtagccagagtaagcgtcgaggaagctcaacagctcacagccggctgttgagtccaccagttgatctattcgaggaagagggaagtgatctttgggacacgccttgttgaggtcggtgaaatcgacgcacattctccatttctcgttggccttccgcaccatgactggattggctagccactctggatgaagtacctctctgatgaagccagctttgagaagtttgtcgagctcttctcgtatggcttgtttttggtctggtgcaaatcttcgcagtttttgctttactggcttggcatcgggtcgcaccatgagtttgtgctcaatcacctccctggggaccctcggcatgtcggacggttgccaagcgaacacgtcagcattgtcgcggaggaaggtgatgagcacgaattctttcttgggtggctcagttgtggcgggtgggctgggcatttgctcgaccatgtcgaggctccacttgtcgcattgtaccgccagctttgtgttcccttgaatagtgattgttcccttcggtcccggcatcttgagcacttgatacgcgtagtgggatgtggccatgaacttcgcaagtgcagttctcccgatgatggcattatacgctgtatcgaattcagcgacatcaaaggtgatctgctccattcggaagttgtttgcttggccgaaagtcacaggcaacgtaattttgcccaatggtttggacgaggattggggagtaattccatggaaggattgatcggtgggtgtcaactcgcttcgcgaaattcccatcgcgtccaaagcactggcgaagagaaggttgattgagctaccaccgtcgatgagaacccacgcaaccttgatgttccgaatagtgggttcgaccacgatcggatagcgtcctgggatgacggcagtcttgggatggtcttcttctgaaaattctatcttctgttcagaccacttcatcttgtgtgcagccccctgccatgtcgaacagacttcacgttccactttcttgtattctcgctttgaggagtacgctgtggaacctccgaaaatgtgtgaaacgtggaggttagagtctggatatgctgtgtccgattcctgaggagccacctccgcatccttctcgaccacgcgtactcgcttgcctttttcaaatgccatgtgcttctcgagcgactttttgaaaacaaggcaatcttccaaagaatgtctgtctatcttgtgtatggggcaccatgctttcttcgtgtcgctaccttgtgggtctgggcgcttgggagggttcgcgtattctgctgcgagaacttccgcttgagctttcattttcccacttttgcgatttttcttcttgcttgactcaggtgcgtccgtggctggtttcttctctcccccggtcttcggcttatcgttcttgcgtctcagtgcatcatctgcgtgggcgcatcgctcaacaatctcgaacaatctccgagtagttgtgatgcgtcttgtcaccaactcctgggtagtatagcgatctctgacaccagacttgaaggcgcaaattacagaagcatcggtgatttcggggattgtatttctgcactcgttgaagcgccgaacatattccctcaaggattcacccgagttctgtgtcaacgcatgtaggtcgtcttcgatcgcgtggcgcttgtaagttccttggaagttggcaatgaactgctggcacaggtctgcacacgaagagatcgagtagggcgggagatgcatcagccatgaacgtgcagagccttttaacgcagttggtaaataattcgccaatgcattgtcgtctgctctggcggcgtagagtactgtggagtagacttgaaggaactcttctgggtcggtgctcccatcgtacttctctattgctccgggtcggaatctcgcgcggcgtactcgctttgatgagccatagtcctcgagtagatgcaggactgatggttcgggtgaactgatgtcgattatgccaacgaatcgatctgaaaccagcgtcgttccttgttccttgtcttcatctctaagggatatgcctaactgctggaccttaggggatgacgtcatcgtggcgctgagaaagaccttgcagcttgagaggtcgtgattctttgtcttgtgaataggacaatagacatcacaggttggagaaatacgctgaattccacgctctttgcaggcgcgaatttcggcgcggacgttgagaaaaacccaacaggcgtgcaaagtgtgtttcctggttttgtggataggacaccaggaccttgtcgcttcggaagttattctcgtcggctcgtggctcttgtctgaacgacaaggtttggccgcattagaatccttctcgagctcggatgtcgtcaatgttctgttctccgcttcggcgggaggatccttcgacagggagtcgtcctgggttgtatccactgcgttctcatttccggtcattgatggaccagctgagatcggcat

SEQ ID NO: 90386 - DNA, 4908 bp, Oryza sativa
  Clone ID: PAT_MRT4530_89060C.1
gttgttgtttgttattttttttttaagatctttctagaacggacgaaaaacctcgctttatcctcgcccctcaccccactgcccagcaggcgggccctagacgtgtacacgaaaggttgagggggctctcggaggtgtggtgggttcagaggtcggactaggtgggcataactggacaggctgcgcgggcgcaacgtcgaagggggattctgtaatcagcagctgcaagacgagggccgctttgagccggaacggctccggactaggacgcacgagactggccgagtgatggaaaacgaaaactcgacgacataaagcttcattttgttcgatcgccaatattctgcactgtgtcaactggcacagacgaatccagttagaacgcaacggagaggtcgaccgtacgaggactgggcaaagaggttggatgcgcccgtagggacgcagtgggtcttcggggccttattgatcttgtccgcggccgcgcccttcggcgtccaatgtacacgccggcggccttccgacggccgcgaacgcagttatgccgtcaccgttgaccagagtcactgctgcgccggtgagcggccaggatcatcgtcaccctgcgtgaacttctcgaaatcgccggtgacgacgtcgcggaagaagcgcgtcgtcggcggcgagctcgtcggcggacttgccggcccacttcttggccaagcgccagcacgggcgcgccctcctccaggtacacgccgatggacgtgaactcgatgaagttgccggctatctccactcccctcacacctgcgccaacgaggaagtgggcgtggccggagcccggcgggcggcccaccatgcgggaacacgacgccgtcgacctcaacctccgacacggcccccatttatacagggttggctgagaaactgaagatccaagtatagtacgcgtcgagtgattcgtgtgtgtgactttgctcccgttcgggctgcgacgcgttgtaggcacagaataaccctgtgacggcagcgcagtctgaggcggcagacgccgccaccatcgccctcgcctgcagcggcggcgaccacccctgtttgttggcgatgaacccgcgggggcacagataggccacggcggcgaattgggcggcgagggtggatccaaagccggcgtgggcaaaagatatgtcggtgatcaagacaacgaagaacaccaagcaagaccacatctatgatatttcggacgaagagtatccgccgggggaagtgaaaggctagtgctgtggtattggagcctgagcggatgcttatcacaatcttcccccactattggaggtcaggcaggcaagagacccgggcacacacatggctattctcgatgaggtgaatgaatatggggagaatgttcttcgtcgggttttctggtcatttgggtgcatgatagaggcctttagaaattgcattcctttgctctgtgttgatggcactttcatgacaggcaagtacagaggaacaattctaaccgcgatcggagtcgacgcggatagccatgtcgttcctgttgcttttgcatttgttgaaagcgagaacacatcaagctggctatggtttttgcggcacattaaaatacaattcaggagtaaaagattgatggacctgttcaagaagttatgcaagcagaatcaacaaagaaagtttgatgccatatgggatcaactggatcgtttgaccactacacacatggaagaggttaggaaaaaacctatagttgccagacaggaggagccggagggacttgaacccattcctaatgaagcaccaagtattactcggcgcaggaagcgtggaagggccacgaagtgcttcacggagtgggtagaatttgagccaagggagaaatggtcgttgttgtacgatacagacggatcgaggtatggtgtgatgacaacaaatcttgctgaagtgtataactgggttatgaagaatacacgacctctaccacttgttgctatcctggagggcatcacgaggggtacacagaagtatctctataaaaggtattccatggctagtctgaacctcagcaaacctagtgttaagtatagccccgctattacacagtacatggatgagaaaagtaagaagggaggaatccacagagtgtggcctgctgggaatagagagttgttatttgagatacgacttcgtgacaagagtggtgtcggcattgggactactgacgtcacattggaatgcacgttgtggccagagtatcacgcttgcaaatgcaattgcaacaagccttacctgttacatcggccatgttcccatgttcttgctgcttccgcaaaagggggtgttgatggaaacatttttgtttctccctactttagaaaggaatcgtgggaggcaacttggcgtgccatgtgcgatttcactcgtcctcctccagggcaagccaattgggttcctgactcaaatttattagttgatactaagggtcgtcgccagtcgcgcaggatcaagaaccttatggatgaagctgaagtgaaagatcgttctcgtcgtatggctgatcaatatgatgggcagctgatagacaaggagatcgataggaaccatcgatcgcgacgtcttagtacaggaactttctgcaatgtgctaaagatgcgaggaccggatcaatattggcgtattgatcctcgttgggttccaaggctgagagcagctgggttgttgacgtttgcacggttggtcgagccttcacgtgcaaggtccgaacgaatccacattgacgcggcgcttctgagtgctcttgtggatagatggaggcctgagacccacactttccacctcacagttggagagatggtgcccactctgcaggatgtgtcttatttgttggggctgccgatagctgggccagtagttggcccaacaatggtgaatgctggatgggcggatgaccttctggccagttttggtggtgtgctgcctgttgcactggaggatctcacagatgggcatgggcctacgaaaagttggttgaatcagtttcgacaggatgtcttccctgatgaccaggaggagtggatcgtgcagcggcacttagtcgcttacctgttgtggttgtttggatgggtgatgttcacgggaactcacgctgactccgtggacaagcacttcatccactttgcggagcagattgcagagttacctatcgcggagattccacagtacagttgggggtcggcagtacttgcggcgacatatgccggactgtgtgatgcttgcgtgaggaacagcaagcaaagttcactccctggatgcccgttgctacttatgttgtgggcgcacgagcgcttcgacattgggaggcctcagcttgactcgtacgcaaactacggtttgcgagagatgtacaggtctggtgttgatgacatcaacgatcgtcccactatggaatccttgtggacacaccgtgagccgcagtgggttagcgggacgacacgtcgtgtctacactcagtttgtagctgactttgatcagcttacgcctgaccgtgttcggtggactccctacactcagcacgatgtcaatgatcgtgcaccgcacggtctcgcggatctttgcacgcgagatatgcaactctggatgacgacttgttacctcgtggtggacgtgcacgtcgagccacacaatgtccacagggttctcaaacagttgggcatgtatcaggacttccctccgagagatggtcgtcctttggctgatagtcttcataggtactccagaaaggggctcgggctttcctacgagctagttattgtgaccacggttcagccgacggtacaagagtgggagcacgcagctgataacttggcacttcagacacctccagacgatgggagttattatggagcttaccttcgttggtaccgcagtgttacacgatggaggtgttttcctccacaaggagatagcaccgtcccccaccaggcagcgattactgacacgtttgcccctcagcctagatcagcttacaactcaatggcggaatttgttgagcacgttcacgtggagtccgacaccatgctgcaaagactagaggcgagacctccggtcgtcaggcctgacgacgtggcgagcatccttcgcaacttccgtgcacgtgctgccgcactactacgtcgtgtctcctgtcggagcgcagcagatgtggtgcagacgtcgggccgacggccatcaccaccactaccccgacgttccagcgtggatcggagtggtccatcctcttcacgtcgcgggtacgaagcggcccacacatctcacggtcgtccttcctttcagcacaccccagcaccggagtacattagggggtcagccggatcaggggtacccacgtcgagcacggcaccaccacgtccacaggtattccaaactccgccttatgttcacccctcgcagggagcatctgggtcggcacacttcccttacatgccaacgggggacaacgtgttgaacacaccagcatggggacttcatatcactccgcgtgcgccagagcagggccacacacagcacacatacgatgagtacggttcggcgtcgacgcatcacggaatgcctgcttactcccctcgcacagcattcattgaggacttcttttccactgatcctccccagggggaagtagggatggattactggcacgcagcacctcaggtcacacagccgacgcaggagacggagaacgcgaccctgtcgaacgcgccagttcgacggatatcctgtcgaacaggggcagttcgacagccccctgtcgaacaggggcagttcgacagccctgcctggggctgttcgacaggtcctatcgaacggcagccttccgatctcctcaccagtcgcgctctggccgttcgatag

SEQ ID NO: 90387 - DNA, 4824 bp, Oryza sativa
  Clone ID: PAT_MRT4530_89061C.1
atgggtttgaacgacgtgttagggtggttgtataatatgtttagggtagatccagtgcacgataaatttgtcataaatgccgtgtggccagtgaggggtcaacatggatggcagtggagagtagtggaggttgcgtcaactgggagttggaggaagtttgttagtaaagtaagggagaaaggctatagcctggcaatagtggtgcagaagacaacatgtgttgatcgatcgggggagtcaagtcatgccgtggtggaagaaacaacgttggaaggtggacaagctgaaaatgtttggcggactgagcaaggtcgaggggaagaagtagtagagggtaatacacaaggagaggtcattgttcgtggtactaatcgtgaggccaacgactcggatgatgaagaaccggattcgcctatgcgtgttgatgcaacggaggagaatgaggcggtagtggatcagatggaagtggaaaacgaggaataccttgcgcttgtagtggaaggagaagatacaacactgtgggacaacgaaactaacatacccgatgattggacgaccatatcaatgagtcgtatgaaggtaaacgatggtttagatgcccactggtgttatgatagtaagcaggtgaaagttggacagatgtttcatgacaaaggtcacttacaagatgcggtgaagaggtgggcatttgtccagaagcgtgagttcagggtgaaggtttcaaataggacgacgtatgacgtgaagtgcatacagggtggatgtccttggagagtgcatggttacaagccacaacatgacactttatgggtagcttcgagagttgagcaacatacgtgtttgttggagaatacccgtctggtgcacagaaacctgacagcggcatttgtggcacaaatggtatattcaaaggtggttagaaaaacatctttgtcccctttcaccataatgcatgacgttgagaaagagtacggatatgagatatcgtacgacaaggcttggagggcaaaacagaaagcattggagatgaggtttggaacttatgaggattcttatcacaatcttcatccactattggaggtgatgcaggcaagaaacccgggcacacacatggctattctcgatgaggtgaatgaatatggggagaatgttcttcgtcgggctttctggtcatttgggtgcatgatagaggcctttagaaattgcattcctttgctctgtgttaatggcactttcatgacaggcaagtacagaggaacaattctaaccgcgatcggagtcgacgcggatagccatgtcgttcctgttgcttttgcatttgttgaaagcgagaacacatcaagctggctatggtttttgcggcacattaaaatgtgtgttgttgaaaacagaccaaatgtgtgtgttctgcatgaccgacacgccggtttgctatcagcgatacagaagcttcaagaagatgtcacacagtccgtgccatggccagatttacatagcagatggtgcatgcgacattttggggctaatttttatagacaattcaggagtaagagattgatggacctgttcaagaagttatgcaagcataatcaacaaagaaagtttgatgccatatgggatcaactggatcgtttgaccactacacacatggaagatgttaggaaaaaacctatagttgccagacaggaggagccggagggacttgaacccattcctaatgaagcaccaagtattactcggcgcaggaagcgtggaagggccacgaagtgcttcacggagtgggtagaatttgagccaagggagaaatggtcgttgttgtacgatacagatggatcgaggtatggtgtgatgacaacaaatcttgctgaagtgtataactgggttatgaagaatacacgacctctaccacttgttgctatcctggagggcatcacgaggggtacacagaaatatctctgtaaaaggtattccatggctagtctgaaccttagcaaacccagtgttaagtatagccccgttattacacagtacatggatgagaaaagtaagaagggaggaatccacagagtgtggcctgctgggaatagagagttgttatttgagatacgacttcgtgacaagagtggtgtcggcattgggactactgacatcacattggaatgcacgttgtggccagagtatcacgcttgcaaatgcaattgcaacaagacttacctgttacatcggccatgttcccatgttcttgctgcttccgcaaaagggggtgttgatggaaacatttttgtttctccctactttagaaaggaatcgtgggaggcaacttggcgtggtgaattgcgtggttggcgtgccttgtgcgatttcattcgtcctcctccagggcaagccaattgggttcctgactcaaatttattagttgatactaagggtcgtcgccagtcgcgcaggatcaagaaccttatggatgaagctgaagtgaaagatcgttctcgtcgtatggctgatcaatatgatgggcagctgatagacaaggagatcgataggaaccatcgatcgcgacgtcttagtacaggaactttctgcaatgtgctaaagatgcgaggaccggatcaatattggcgtattgatcctcgttgggtttcaaggctgagagcagctgggttgttgacgtttgcacggttggtcgagccttcacgtgcaaggtccgaacgaatccacattgacgcggcgcttctgagtgctcttgtggatagatggaggcctgagacccacactttccacctcacagttggagagatggtgcccactctgcaggatgtgtcttatttgttggggctgctgataactgggccagcagttggcccaacaatggtgaatgctggatgggcggatgaccttctggccagttttggtggtgtgctgcctgttgcactggaggatctcacagatgggcacgggcctacgaaaagttggttgaatcagtttcgacaggatgtcttccctgatgaccaggaggagtggatcgtgcagcggcacttagtcgcttacctgttgtggttgtttggatgggtgatgttcacgggaactcacgctgactccgtggacaagcacttcatccactttgcggagcagattgcagagttacctatcgcggagattccacagtacagttgggggtcggcggtacttgcggcgacatatgccggactgtgtgatgcttgcgtgaggaacagcaagcaaagttcactccctggatgcccgttgctacttatgttgtgggcgcacgagcgcttcgacattgggaggcctcagcttgactcgtacgcaaactacggtttgcgagagatgtacaggtctggtgttgatgacatcgacgatcgtcccactatgggatccttgtggacacaccgtgagccgcagtgggttagcgggacgacacgtcgtgtctacactcagtttgtagctgactttgatcagcttacgcctgaccgtgttcggtggactccctacactcagcacgatgtcaatgatcgtgcaccgcacggtctcgcagatctttgcacgcgagatatgcaactctggatgacgacttgtcacctcgtggtggacgtgcacgtcgagccacacaatgtctacagggttctcaaacagttgggcatgtatctggacttccctccgagagatggtcgtcctttggctgatagtcttcataggtactccagaaaggggctcgggctttcctacgagctagttattgtgaccacggttcagccgacggtacaagagtgggagcacgcagctgataacttggcacttcagacacctccagacgatgggagttattatggagcttaccttcattggtatcgcagtgttacacgatggaggtgttttcctccacaaggagatagcaccgtcccccaccaggcagcgattactgacacgtttgcccctcagcctagatcagcttacaactcaatggcggaatttgttgagcatgttcacgtggagtccgacaccctactgcaaagactagaggcaagacctccagtcgtcaggcttgacgacgtggcgagcatccttcgcaacttccgtgcacgtgctgccgcactactacgtcgtgtctcctgtcggagcgcggcagatgtggtgcagacgtcgggccgacggccatcaccaccactaccccgacgttccagcatggatcggagtggtccatcctcttcacgtcgcgggtacgaagcggcccacacatctcacggtcatccttcctttcagcacaccccagcaccggagtacaccagggggtcagccggatcaggggtacccacgtcgagcacggcaccaccacgtccgcaggtattccaaactccgccttatgttcacccctcgcagggagcatctgggtcggcacacttcccttacatgccaacgggggacaacgtgttgaacacaccagcatggggacttcatatcactccgcgtgcgccagagcagggccacacacagcacacatacgatgagtacggttcggcgtcgacgcatcacggaatgcctgcttactcccctcgcacaacattcattgaggacttcttttccactgatcctccccagggggaagtagggatggattactggcacgcagcacctcaggtcacacagccgacgcaggagacggaggccggtcaggggccagacgtgacaccacagcaggcagctagagataggcacccccctgataatttgacatatcccactgagcagattaggcgtaggaagaagggaggacctagcaagcgtgcgaagggcactgatcgtccttga

SEQ ID NO: 90388 - DNA, 1225 bp, Oryza sativa
  unsure (1)..(1225): unsure at all n locations
  Clone ID: PAT_MRT4530_89062C.1
gaagagtaacaagttaggactagattatccccaatcaccggccccaaaaaaatgtgaatcaaatcatctacggagtagaaacaaaccaatcatccgagatcagttcctatgattccatgagagtactagaacaatcagagattcacaaagcagtggcacttgacacgaaattaggaacaagnaaactgaatcatcttaaggattggactttcaaacttgactgttcttgatgcgatcgacacatggctcgcttcttctcctggaggaactccacgagggccctgagcgcggcgtcgacgtcgtcgctagctgcgcagcagcatctccgacacctcggccggcgtggcgtccacgccggcgagcatgcatgtccatccgccccggccggagcagcgccgcgtcgaggcgttccttgtagttggtggtgaagagtgaagacgaccacccgctcctcgccgctcgtcgaccacagcccgtcgatgaagttgagcagcccggacagcgtcaggctctgctgctcaatcctcgcttccacgccctgccccgggtcgaggtcggcgacgatggatcgcttcagccccgggtccatggcgaccgtgtcgaacgtggcggggtggtggtggacgatgccgcgccacgaccagctctcgttcatgtagatcttgagctcgcgctcccgccgccgcgccgccttccgcggggacggaagtccacctgaactccacgccctcgaagacgtcggacatcgagtagccggcaccatggacagcgaattccatcggccgcgctcgcccccgcccccgacgccgctgaggcggaaccggcccagggcacggggatcgatcttggtggcgaggtacgcgtgggcgtccgcgaagcagctgtcgtggcggccgtcctcatcgacgcggttgatgatggcggtgcggcgctccgccgggcgaggcccgaggcgggcgtggacgagtgtcgtggcccagctcaccaccgcgcataggtcgtgcggcacgacgagctccctcgccatgccgcgcgccagcaccgcgtaggcggtcatcgtggtagccgtggccaccgccctcctgtagcctgtaggtctccaccgccttggcgtacgacggcgacacccccgccgccgacgagaggtccatgcccaccaactgttcggcttgagggctacatgacgtaggcgtggcgtcgccacagaattggaggtagattccta

SEQ ID NO: 90389 - DNA, 199 bp, Oryza sativa
  Clone ID: PAT_MRT4530_89063C.1
actgcaaggtgttgaaaacacatgtggacaccagggccaacaaattggtgatgcaggcacagttatttggcaatgcggctgccatgcaaacctgcgatgcaaactcaacactgtcccttgttgcaagccagatgacaaacaatgcacaaccagatggcagtggtccgactccaaatctatcgattcacaccaaatccat

SEQ ID NO: 90390 - DNA, 3175 bp, Oryza sativa
  Clone ID: PAT_MRT4530_89064C.1
atgaggtttggaacttatgaggattcttatcacaatcttcccccactattggaggtgatgcaggcaagaaacccgggcacacacatggctattctcgatgaggtgaatgaatatggggagaatgttcttcgtcgggctttctggtcatttgggtgcatgatagaggcctttagaaattgcattcctttgctctgtgttgatggcactttcatgacaggcaagtacagaggaacaattctaaccgcgatcggagtcgacgcggatagccatgtcgttcctgttgtttttgcatttgttgaaagcgagaacacatcaagctggctatggtttttgcggcacattaaaatgtgtgttgttgaaaacagaccaaatgtgtgtgttctgcatgaccgacacgccggtttgctatcagcgatacagaagcttcaagaagatgtcacacagtccgtgccatggccagatttatatagcagatggtgcatgcgacattttggggctaatttttatagacaattcaggagtaagagattgatggacctgttcaagaagttatgcaagcagaatcaacaaagaaagtttgatgccatatgggatcaactggatcgtttgaccactacacacatggaagaggttaggaaaaaacctatagttgccagacaggaggagccggaggaacttgaacccattcctaatgaagcaccaagtattactcggcgcaggaagcgtggaagggccacgaagtgcttcacggagtgggtagaatttgagccaagggagaaatggtcgttgttgtacgatacagatggatcgaggtatggtgtgatgacaacaaatcttgctgaagtgtataactgggttatgaagaatacacgacctctaccacttgttgctatcctagagggcatcacgaggggtacacagaagtatctctgtaaaaggtattccatggctagtctgaacctcagcaaacccagtgttaagtatagccccgctattacacagtacatggatgagaaaagtaagaagggaggaatccacagagtgtggcctgctgggaatagagagttgttatttgagatacgacttcgtgacaagagtggtgtcggcattgggactactgacatcacattggaatgcacgttgtggccagagtatcacgcttgcaaatgcaattgcaacaagccttacctgttacatcggccatgttcccatgttcttgctgcttccgcaaaagggggtgttgatggaaacatttttgtttctccctactttagaaaggaatcgtgggaggcaacttggcgtggtgaattgcgtggttggcgtgccgtgtgcgatttcactcgtcctcctccagggcaagccaattgggttcctgactcaaatttattagttgatactaagggtcgtcgccagtcgcgcaggatcaagaaccttatggatgaagctgaagtgaaagatcgttctcgtcgtatggctgatcaatatgatgggcagctgatagacaaggagatcgataggaaccatcgatcgcgacgtcttagtacaggaactttctgcaatgtgctaaagatgcaaggaccggatcaatattggcgtattgatcctcgttgggtttcaaggctgagagcagctgggttgttgacgtttgcacggttggtcgagccttcacgtgcaaggtccgaacgaatctacattgacgcggcgcttctgagtgctcttgtggatagatggaggcctgagacccacactttccacctcacagttggagagatggtgcccactctgcaggatgtgtcttatttgttggggctgccgatagctgggccagcagttggcccaacaatggtgaatgctggatgggcggatgaccttctggccagttttggtggtgtgctgcctgttgcactggaggatctcacagatgggcacggtcctacgaaaagttggttgaatcagtttcgacaggatgtcttccctgatgaccaggaggagtggatcgtgcagcggcacttagtcgcttacctgttgtggttgtttggatgggtgatgttcacgggaactcacgctgactccgtggacaagcacttcatccactttgcggagcagattgcagagttacctatcgcggagattccacagtacagttgggggtcggcggtacttgcggcgacatatgccggactgtgtgatgcttgcgtgaggaacagcaagcaaagttcactccctggatgcccattgctacttatgttgtgggcgcacgagcgcttcgacattggtaggcctcagcttgactcgtacgcaaactacagtttgcgagagatgtataggtctggtgttgatgacatcgacgatcgtcccactatgggatccttgtggacacaccgtgagtttgtagctgactttgatcagcttacgcctgaccgtgttcggtggactccctacactcagcacgatgtcaatgatcgtgcaccgcacggtctcgcggatctttgcacgcgagatatgcaactctggatgacgacttgtcacctcatggtgaacgtgcacgtcgagccacacaatgtccacagggttctcaaacagttgggcatgtatcaggacttccctccgagagatggtcgtcctttggctgatagtcttcataggtactccagaaaggggctcgggctttcctacgagctagttattgtgaccacagttcagctgacggcggaatttgttgagcacgttcacgtggagtccgacaccctgctgcaaagaagagaggcgagacctccagtcgtcaggcctgacgacgtggcgagcatccttcgcaacttccgtgccgcactactacgtcgtgtctcctgtcggagcgcggcagatgtgggagcatctgggtcggcacacttcccttacatgccaacgggggacacggtgttgaacacaccagcatggggacttcatttcactccgcgtgcgccagagcagggccacacaccgcacacatacgatgagtacggttcggcgtcgacgcatcacggaatgcctgcttactcccctcgcacagcattcattgaggacttcttttccactgatcctccccagggggaagtagggatggattactggcacgcagcacctcaggtcacacagccgacgcaggagacggaggccggtcaggggccagacgtga

SEQ ID NO: 90391 - DNA, 468 bp, Oryza sativa
  Clone ID: PAT_MRT4530_89065C.1
ctactgctgcttcgcggacgcccacgcgtacctcgccaccaagatcgatccccgtgccctgggccggttccgcctcagcggcgtcgggggcgggggcgagcgcggccgatggaattcgctgtccatggtgccggctactcgatgtccgacgtcttcgagggcgtggagttcaggtggacttccgtccccgcggaaggcggtgggaggttgcgcgaatcgtggtcgctggagctcagcttcgacgcggagcacacggacatggcgctgggcaggcgcggcggcgggagcgcgagctcaagatctacatgaacgagagctggtcgtggcgcggcatcgtccaccaccaccccgccacgttcgacacggtcggcatggacccggggctgaagcgaaccatcggcggcgacctcgacccggggcagggcgtggaagcgagggtaccttctctacggcccgcccgggacaggc

SEQ ID NO: 90392 - DNA, 4506 bp, Oryza sativa
  Clone ID: PAT_MRT4530_89066C.1
atgtctagaggctgccggcccagctccctcatctcgatcgccctcctccgacccgcgcactgcccgacgtcctctcagacgccgccccggcgaccggcgggtggcgaaagttggatgtcaggtgatatgcccattcgtctgtattatggcgatgttcctatacaaatatgtgatagcggggtggatttgactgtatatgccttccatgatactagtctgaatgcaccagagcatatgggtttgaacgacgtgttagggtggttgtataatatgtttggggtagatccagtgcacgataaatttgtcataaatgccgtgtggccagtgaggggtcaacatggatggcagtggagagtagtggaggttgcgtcaactgggagttggaggaagtttgttagtaaagtaagggagaaaggctatagcctggcaatagtggtgcagaagacaacatgtgttgatcgatcgggggagtcaagtcatgccgtggtggaagaaactccgttggaaggtggacaagctgaaaatgtttggcggactgagcaaggtcgaggggaagaagtagtagagggtaatacacaaggagaggtcattgttcgtggtactaatcgtgaggccaacgactcggacgatgaagaaccggattcgcctatgcgtgttgatgcagcggaggagaatgaggcggtagtggatcagatggaagtggaaaacgaggaataccttgcgcttgtagtggaaggagaagatacaacactgtgggacaacgaaactaacatacccgatgattggacgaccatatcaatgagtcgtatgaaggtaaacgatggtttagatgcccactggtgttatgatagtaagcaggtgaaagttggacagatgtttcatgacaaaggtcacttacaagatgcggtgaagaggtgggcatttgtccagaagcgtgagttcagggtgaaggtttcaaataggacgacgtatgacgtgaagtgcatacagggtggatgtccttggagagtgcatggttacaagccacaacatgacactttatgggtagcttcaagggttgagcaacatacgtgtttgttggagaatacctgtctggtgcacagaaacctgacagcggtatttgtggcacaaatggtgatgcaggcaagaaacccgggcacacacatggctattctcgatgaggtgaatgaatatggggagaatgttcttcgtcgggctttctggtcatttgggtgcatgatagaggcctttagaaattgcattcctttgctctgtgttgatggcactttcatgacaggcaagtacagaggaacaattctaaccgcgatcggagtcgacgcggatagccatgtcgttcctgttgcttttgcatttgttgaaagcgagaacacatcaagctggctatggtttttgcagcacattaaaatgtgtgttgttgaaaacagaccaaatgtgtgtgttctgcatgaccgacacgccggtttgctatcagcgatacagaagcttcaagaagatgtcacacagtccgtgccatggccagatttacatagcagatggtgcatgcgacattttggggctaatttttatagacaattcaggagtaagagattgatggacctgttcaagaagttatgcaagcagaatcaacaaagaaagtttgatgccatatgggatcaactggatcgtttgaccactacacacatggaagaggttaggaaaaaccctatagttgccagacaggaggagccggagggacttgaacccattcctaatgaagcaccaagtattactcggcgcaggaagcgtggaagggccacgaagtgcttcacggagtgggtagaatttgagccaagggagaaatggtcgttgttgtacgatacagatggatcgaggtatggtgtgatgacaacaaatcttgctgaagtgtataactgggttatgaagaatacacgacctctaccacttgttgctatcctggagggcatcacgaggggtacacagaagtatctctgtaaaaggtattccatggctagtctgaacctcagcaaacccagtgttaagtatagccccgctattacacagtacatggatgagaaaagtaagaagggaggaatccacagagtgtggcctgctgggaatagagagttgttatatgagatacgacttcgtgacaagagtggtgtcggcattgggactactgacatcacattggaatgcacgttgtggccagagtatcacgcttgcaaatgcaattgcaacaagccttacctgttacatcggccatgttcccatgttcttgctgcttccgcaaaagggggtgttgatggaaacatttttgtttctccctactttagaaaggaatcgtgggaggcaacttggcgtggtgaattgcgtggttggcgtgccgtgtgcgatttcactcgtcctcctccagggcaagccaattgggttcctgactcaaatttattacttgatactaagggtcgtcgccagtcgcgcaggatcaagaaccttatggatgaagttgaagtgaaagatcgttctcgtcgtattgctgatcaatatgatgggcagcttatagacaaggagatcgataggaaccatcgatcgcgacgtcttagtacaggaactttctgcaatgtgctaaagatgcgaggaccggatcaatattggcgtattgatcctcgttgggtttcaaggctgagagcagctgggttgttgacgtttgcacggttggtcgagccttcacgtgcaaggtccgaacgaatccacattgacgcggcgcttctgagtgctcttgtggatagatggaggcctgagacccacactttccacctcacagttggagagatggtgcccactctgcaggatgtgtcttatttgttggggctgccgatagctgggcaagcagttggcccaacaatggtgaatgctggatgggcgcatgaccttctggccagttttggtggtgtgctgcctgttgcactggaggatctcacagatgggcacgggcctacgaaaagttggttaaatcagtttcgacaggatgtcttccctgatgaccaggaggagtggatcgtgcagcggcacttagtcgcttacctgttgtggttgtttggatgggtgatgttcacgggaactcacgctgactccgtggacaagcacttcatccactttgcggagcagattgcagagttacctatcgcggagattccacagtacagttgggggtcgacggtacttgcggcgacatatgccggactgtgtgatgcttgcgtgaggaacagcaagcaaagttcactccctggatgcccgttgctacttatgttgtgggcgcacgagcgcttcgacattgggaggcctcagcttgactcgtacgcaaactacggtttgcgagagatgtacaggtctggtgttgatgacatcgacgatcgtcccactatgggatccttgtggacacaccgtgagccgcagtgggttagcgggacgacacgtcgtgtctacactcagtttgtagctgactttgatcagcttacgcctgaccgtgttcggtggactccctacactcagcccgatgtcaatgatcgtgcaccgcacggtctcgcggatctttgcacgcgagatatgcaactctggatgacgacttgtcacctcgtggtggacgtgcacgtcgagccacacaatgtccacagggttctcaaacagttgggcatgtactccagaaaggggctcgggctttcctacgagctagttattatgaccacggttcagccgacggtacaagagtgggagcacgcagctgataacttggcacttcagacacctccagacgatgggagttattatggagcttaccttcgttggtaccgcagtgttacacgatggaggtgttttcctccacaaggagatagcaccgtcccccaccaggcagcgattactgacacgtttgcccctcagcctagatcagcttacaactcaatggcggaatttgttgagcacgttcacgtggagtctgacaccctgttgcaaagactagaggacgatcagttgagccgggccgggcaccgtagccagccggcgggatcaaagctagccactacggaagagccagcacaaggggtcccgggctttgacggcacccagagctcaactgcaagagtcctcccaggagtgaaccgaggcgacagcaggttcatgggccaaccccccgcttggcccctgagggccatggggaagacgctcgccatgacctggtcgccaccccccaccgcctctatgatcgccgtgcagatctggagggactcggaggggtcgacgtcgccgtcgtacttctcggtgaggcagggctggagctttgggggccatcagacattccgaagactcgccacaaagacctggcagccaaccttacccggtggggatgtggggggccttgccccctgcctagggtggcgtgacactcctgaggaggctgcaccttcccccgcatcggcagcgcgatgctaa

SEQ ID NO: 90393 - DNA, 4422 bp, Oryza sativa
  Clone ID: PAT_MRT4530_89067C.1
atgtcaggtgatatgcccattcgtctgtattatggcgatgctcctatacaaatatgtgatagcggggtggatttgactgtatatgccttccatgatactagtctgaatgcaccggagcatatgggtttgaacgacgtgttagggtggttgtataatatgtttggggtagatccagtgcatgataaatttgtcataaatgccgtgtggccagtgaggggtcaacatggatggcagtggagagtagtggaggttgcgtcaactgggagttggaggaagtttgttagtaaagtaagggagaaaggctatagcctggcaatagtggtgcagaagacaaaatgtgttgatcgatcgggggagtcaagtcatgccgtggtggaagaaactccgttggaaggtggacaagctgaaaatgtttggcggactgagcaaggtcgaggggaagaagtagtagagggtaatacacaaggagaggtcattgttcgtggtactaatcgtgaggccaacgactcggacgatgaagaaccggattcgcctatgcgtgttgatgcagcggaggagaatgaggcggtagtggatcagatggaagtggaaaacgaggaatacattgcgcttgtagtggaaggagaagatacaacactgtgggacaacgaaacttacatacccgataattggacgaccatatcaatgagtcgtatgaaggtaaacgatggtttagatgcccactggtgttatgatagtaagcaggtgaaagttggacagatgtttcatgacaaaggtcacttacaagatgcggtgaagaggtgggcatttgtccagaagcgtgagttcagggtgaaggtttcaaataggacgacgtatgacgtgaagtgcatacagggtggatgtccttggagagtgcatggttacaagccacaacatgacactttatgggtagcttcgagggttgagcaacatacgtgtttgttggagaatacccgtctggtgcacagaaacctgacagcggcatttgtggcacaaatggtatattcaaaggtggttagaaaaacatctttgtcccctttcaccataatgcatgacgttgagaaagagtacggatatgagatatcgtacgacaaggcttggagggcaaaacagaaagcattggagatgaggtttggaacttatgaggattcttatcacaatcttcccccactattggaggtgatgcaggcaagaaacccgggcacacacatggctattctcgatgaggtgaatgaatatggggagaatgttcttcgtcgggctttctggtcatttgggtgcatgatagaggcctttaaaaattgcattcctttgctctgtgttgatagcactttcatgacaagcaagtacagaggaacaattctaaccgcgatcggagtcgacgcggatagccatgtcgttcctgttgcttttgcatttgttgaaagcgagaacacatcaactggctatggtttttgcggcacattaaaatcgatacagaagcttcaagaagatgtcacacagtccgtgccatggccagatttacatagcagatggtgcatgcgacattttggggctaatttttatagacaattcaggagtaagagattgatggacctgttcaagaagttatgcaagcagaatcaacaaagaaagtttgatgccatatgggagcaactggatcatttgaccactacacacatggaagaggttaggaaaaaacccatagttgccagacaggaggagccggagggacttgaacccattcctaatgaagcaccaagtattactcggcgcaggaagcgtggaagggccacgaagtgcttcacggagtgggtagaatttgagccaagggagaaatggtcgttgttgtacgatacagatggattgaggtatggtgtgatgacaacaaatcttgctgaagtgtataattgggttatgaagaatacacgacctctaccacttgttgctatcctggagggcatcacgaggggtacacagaagtatctctgtaaaagagtatcacgcttgcaaatgcaattgcaacaagccttacctgttacatcggccatgttcccatgttcttgctgcttccgcaaagggggtgttgatggaaacatttttgtttctccctactttagaaaggaatcgtgggaggcaacttggcgtggtgaattgcgtggttggcgtgccgtgtgtgatttcactcgtcctcctccagggcaagccaattgggttcctgactcaaatttattagttgatactaagggtcgtcgccagtcacgcaggatcaagaaccttatggatgaagctgaagtgaaagatcgttctcgtcgtatggctgatcaaaatgatgggcagctgatagacaaggagatcgataggaaccatcgatcgcgacgtcttagtacaggaactttctgcaatgtgctaaagatgcgaggaccggatcaatattggcgtattgatcctcgttgggttccaaggctgagagcagctgggttgttgacatttgcacggttggtcgagccttcacgtgcaaggtccgaacgaatccacattgacgcggcgcttatgagtgctcttgtcgatagatggaggcctgagacccacactttccaccacacagttggagagatggtgcccactctgcaggatgtgtcttatttgttggggctgccgatagctgggccagcagttggcccaacaatggtgaatgctggatgggcggatgaccttctggccagttttggtggtgtgctgcctgttgcactggaggatctcacagatgggcacgggcctacgaaaagttggttgaatcagtttcgacaggatgtcttccctgatgaccaggaggagtggatcgtgcagcggcacttagtcgcttacctgttgtggttgtttggatgggtgatgttcacgggaactcacgctgactccgtggacaagcacttcatccactttgcggagcagattgcagagttacctatcgcggagattccacagtacagttgggggtcggcggtacttgcggcgacatatgccgaactgtgtgatgcttgcgtgaggaacagcaagcaaagttcactccctggatgcccgttgctacttatgttgtgggcgcacgagcgcttcgacattgggaggcctcagcttgactcgtacgcaaactacggtttgcgagagatgtacaggtctggtgttgatgacatcgacgatcgtcccactatgggatccttgtggacacaccgtgagccgcagtgggttagcgggacgacacgtcgtgtctacactcagtttgtagctgactttgatcagcttacgcctgaccgtgttcggtggactccctacactcagcacgatgtcaatgatcgtgcaccgcacggtctcgcggatctttgcacgcgagatatgcaactctggaggacgacttgtcacctcgtggtggacgtgcacgtcgagccacacaatgtccacagggttctcaaacagttgggcatgtatcaggacttccctccgagagatggtcgtcctttggctgatagtcttcataggtactccagaaaggggctcgggctttcctacgagctagttattgtgaccacggttcagccgacggtacaagagtgggagcacgcagctgataacttggcacttcagacacctccagacgatgggagttattatggagcttaccttcgttggtaccgcagtgttacacgatggaggtgttttcctccacaaggagatagcaccgtcccccaccaggcagcgattactgacacgtttgcccctcagcctagatcagcttacaactcaatggcggaatttgttgagcacgttcacgtggagtccgacaccctgctgcaaagactagaggcgagacctccagtcgtcagatgtggtgcagacgtcgggccgacggccatcaccaccactaccccgacgttccagcgtggatcggagtggtccatcctcttcacgtcgcgggtacgaagcggcccacacatctcacggtcgtccttcctttcagcacaccccagcaccggagtacaccagggggtcagccggatcaggggtacccacgtcgagcacggcaccaccacgtccgcagacgatgagtacggttcggcgtcgacgcatcacggagtgcctgcttactcccctcgcacagcattcattgaggacttcttttccactgatcctccccagggggaagtagggatggattactggcacgcagcacctcaggtcacacagccgacgcaggagacggaggccggtcaggggccagacgtgacaccacagcaggcagctagagataggcacccccctgataatttgacatatcccactgagcagattaggcgtaggaagaagggaggacctagcaagcgtgcgaagggcactgatcgtccttga

SEQ ID NO: 90394 - DNA, 4701 bp, Oryza sativa
  Clone ID: PAT_MRT4530_89068C.1
atgtcaggtgatatgcccattcgtctgtattatggcgatgctcctatacaaatatgtgatagcggggtggatttgactgtatatgccttctatgatactagtctgaatgcaccggagcatatgggtttgaacgacgtgttagggtggttgtataatatgtttggggtagatccagtgcacgataaatttgtcataaatgccgtgtggccagtgaggggtcaacatggatggcagtggagagtagtggaggttgcgtcaactgggagttggaggaagtttgttagtaaagtaagggagaaaggctatagcctggcaatagtggtgcagaagacaaaatgtgttgatcgatcgggggagtcaagtcatgccgtggtggaagaaactccgttggaaggtggacaagctgaaaatgtttggcggactgagcaaggtcgaggggaagaagtagtagagggtaatacacaaggagaggtcattgttcgtggtactaatcgtgaggccaacgactcggacgatgaagaaccggattcgcctatgcgtgttgatgcagcggaggagaatgaggcggtagtggatcagatggaagtggaaaacgaggaatacattgcgcttgtagtggaaggagaagatacaacactgtgggacaacgaaacttacatacccgataattggacgaccatatcaatgagtcgtatgaaggtaaacgatggtttagatgcccactggtgttatgatagtacgcaggtgaaagttggacagatgtttcatgacaaaggtcacttacaagatgcggtgaagaggtgggcatttgtccagaagcgtgagttcagggtgaaggtttcaaataggacgacgtatgacgtgaagtgcatacagggtggatgtccttggagagtgcatggttacaagccacaacatgacactttatgggtagcttcgagggttgagcaacatacgtgtttgttggagaatacccgtctggtgcacagaaacctgacagcggcatttgtggcacaaatggtatattcaaaggtggttagaaaaacatctttgtcccctttcaccataatgcatgacgttgagaaagagtacggatatgagatatcgtacgacaaggcttggagggcaaaacagaaagcattggagatgaggtttggaacttatgaggattcttatcacaatcttcccccactattggaggtgatgcaggcaagaaacccgggcacacacattgctattctcgatgaggtgaatgaatatggggagaatgttcttcgtcgggctttctggtcatttgggtgcatgatagaggcctttaaaaattgcattcctttgctctgtgttgatggcactttcatgacaggcaagtacagaggaacaattctaaccgcgatcggagtcgacgcggatagccatgtcgttcctgttgcttttgcatttgttgaaagcgagaacacatcaagctggctatggtttttgcggcacattaaaatgtgtgttgttgaaaacagaccaaatgtgtgtgttctgcatgaccgacacgccggtttgctatcagcgatacagaagcttcaagaagatgtcacacagtccgtgccatggccagatttacatagcagatggtgcatgcgacattttggggctaatttttatagacaattcaagagtaagagattgatggacctgttcaagaagttatgcaagcagaatcaacaaagaaagtttgatgccatatgggagcaactggatcgtttgaccactacacacatggaagaggttaggaaaaaacccatagttgccagacaggaggagccggagggacttgaacccattcctaatgaagcaccaagtattactcggcgcaggaagcgtggaagggccacgaagtgcttcacggagtgggtagaatttgagccaagggagaaatggtcgttgttgtacgatacagatggttcgaggtatggtgtgatgacaacaaatcttgctgaagtgtataattgggttatgaagaatacacgacctctaccacttgttgctatcctggagggcatcacgaggggtacacagaagtatctctgtaaaaggtattccatggctagtctgaacctcagcaaacccagtgttaagtatagccccgctattacacagtacatggatgagaaaagtaagaagggaggaatccacagagtgtggcctgctgggaatagagagttgttatttgagatacgacttcgtgacaagagtggtgtcggcattgggactactgacatcacattggaatgcacgttgtggccagagtatcacgcttgcaaatgcaattgcaacaagccttacctgttacatcggccatgttcccatgttcttgctgcttccgcaaaagggggtgttgatggaaacatttttgtttctccctactttagaaaggaatcgtgggaagcaacttggcgtggtgaattgcgtggttggcgtgccgtgtgtgatttcactcgtcctcctccagggcaagccaattgggttcctgactcaaatttattagttgatactaagggtcgtcgccagtcacgcaggatcaagaaccttatggatgaagctgaagtgaaagatcgttctcgtcgtatggctgatcaaaatgatgggcagctgatagacaaggagatcgataggaaccatcgatcgcgacgtctgactacaggaactttctgcaatgtgctaaagatgcgaggaccggatcaatattggcgtattgatcctcgttgggttccaaggctgagagcagctgggttgttgacgtttgcacggttggtcgagccttcacgtgcaaggtccgaacgaatccacattgatgcggcgcttctgagtgctcttgtcgatagatggaggcctgagacgcacactttccacctaacagttggagagatggtgcccactctgcaggatgtgtcttatttgttggggctgccgatagctgggccagcagttggcccaacaatggtgaatgctggatgggcggatgactttctggccagttttggtggtgtgctgcctgttgcactggaggatctcacagatgggcacgggcctacgaaaagttggttgaatcagtttcgacaggatgtcttccctgatgaccaggaggagtggatcgtgcagcggcacttagtcgcttacctgttgtggttgtttggatgggtgatgttcacgggaactcacgctgactccgtggacaagcacttcatccactttgcggagcagattgcagagttacctatcgcggagattccacagtacagttgggggtcggcggtacttgcggcgacatatgccggactgtgtgatgcttgcgtgaggaacagcaagcaaagttcactccctggatgcccgttgctacttatgttgtgggcgcacgagcgcttcgacattgggaggcctcagcttgactcgtacgcaaactacggtttgcaagagatgtacaggtctggtgttgatgacatcgacgatcgtcccactatgggatccttgtggacacaccgtgagccgcagtgggttagcgggacgacacgtcgtgtctacactcagtttgtagctgactttgatcagcttacgcctgaccgtgttcggtggactccctacactcagcacgatgtcaatgatcgtgcaccgcacggtctcgcggatctttgcacgcgagatatgcaactctggaggacgacttgtcacctcgtggtggacgtgcacgtcgagccacacaacgtccacagggttctcaaacagttgggcatgtatcaggacttccctccgagagatggtcgtcctttggctgatagtcttcataggtactccagaaaggggctcgggctttcctacgagctagttattgtgaccacggttcagccgacggtacaagagtgggagcacgcagctgataacttggcacttcagacacctccagacgatgggagttattatggagcttaccttcgttggtaccgcagtgttacacgatggaggtgttttcctccacaaggagatagcaccgtcccccaccaggcagcgattactgacacgtttgcccctcagcctagatcagcttacaactcaatggcggaatttgttgagcacgttcacgtggagtccgacaccctgctgcaaagactagaggcgagacctccagtcgtcagatgtggtgcagacgtcgggccgacggccatcaccaccactacaccgacgttccagcgtggatcggagtggtccatcctcttcacgtcgcgggtacgaagcggcccacacatctcacggtcgtccttcctttcagcacaccccagcaccggagtacaccagggggtcaaccggatcaggggtacccacgtcgagcacggcaccaccacgtccgcagacgatgagtacggttcggcgtcgacgcatcacggagtgcctgcttactcccctcgcacagcattcattgaggacttcttttccactgatcctccccagggggaagtagggatggattactggcacgcagcacctcaggtcacacagccgacgcaggatacggaggccggtcaggggccagacgtgacaccacagcaggcagctagagataggcacccccctgataatttgacatatcccactgagcagattaggcgtaggaagaagggaggacctagcaagcgtgcgaagggcactgatcgtccttga

SEQ ID NO: 90395 - DNA, 270 bp, Oryza sativa
  Clone ID: PAT_MRT4530_89069C.1
ccgactccgagccccgcggcggcggtgcccagggcgaagccggcggcgagcacggcgctgtgggacgtgctgacgttcagcgggccggcgcccgagcggatcaacggacggctggcgatggtggggttcgtgtcggcgctcgccgtggaggcgtcacggggcggcgggctcctgtagcaggccggcagcgacgactgtctcgcgtggctcgccgacaccgtcaccgtgctcttcgaggtgttggtggtgccgctgcttctcggcgagagc

SEQ ID NO: 90396 - DNA, 2058 bp, Oryza sativa
  Clone ID: PAT_MRT4530_8906C.1
atgatcgaggacattatggaggtcttcatggatgacttctctgtctatggaaagaccttcggtcattgtctgcagaatttagacaaagtcttacaacgatgccaagagaaggacctgggtgaacaaggaaataataacaataacaataataagatcataacaaaggaaaagagggttgctgacgtcatcaaaggggaggggcggcgccggcaagcgggccccaccggtcagcgggacaagggcgccggtccaccgtggaccgggaccaccaaggcggtccaccgccggtccacgggaaccgatggcccggatcggcccaaaccgatcgagcggccaggggcggcgcggctggggcacagcacggcacaaagccagctggccaaacgacggcgcgcggcggcgcggccacccgcggcgacggccggcgacagcgcggggaggagaggagggatgctcaccaagggcggcgacggcgagactacaacgaggaagccggcggcgggctcctcggggaggcaacggtggtccgtggttcccggaggcgaggaagcggtggccggggtgcggctcggagttgccgatccgagggaggaaacggcgcagtccggcgtcgaccggggaggcgaggcgacacagatggagatgacaaacacggcggcgatctcgggtactggcagtggtggcgcattggggcgacggctagggcggcggtggtgcacggctagaggcggtgaaaggggcggcggcctcggcgacggctgtggcggcgggaaacggcgaccggagttcgccggagtgtggcagcgcgtgggtgcggcgtggggagagcgagggagagtatgccgggctcgggaaaaatggggaaacggacgaggggagcacggggatgctttttatgggctcgggaaggcgggatcgaggccggacgtggcggaatcggccggcgaagtggggcgccgatgtggggtggtggaggggttaaccggcgccgattttcgcggggagagtgggggaaatggtggaggacgtggagaggatcgttcccacgtcgttggatgcgagctcgggtgcgggagggcgccggattttgcggcgatgtggacggcaatggcggttggggtcggccggcgagagccgcggggcgcgcccgaaggcggcctcgccggcacagccgacgggaggcggcgcacccgcaccccgatggtcgccggcagcgacctccggcgcgacggagcggcgcccgagagaggggagggaagggggaaacgaaatgggcggtccatggctcaccccgggtcgacggcgacgacgggaacggtgaccgaagcggaggaaggcggcggcgcggctcgggtcgacgaggacggcggcgttccggcggtcggcgggcgaaacgaaggggtggacgagatcggcgaggacgcggcgaacccgaagaaggcgacgccgaaacgggaggaggcccggggcgacgacggcggcggaccggagctcggcggcgacggcggagagagaggacgacggcgcgagctcgattccgacggggagagagagtggcgagtggcggaaacgaaggagggaggcacggggagtgtttatgtagtgttgggaggaggagagagcggccggatgagggggaatcggtcgcggaagatccggccgccattgatgcgccggcgaagtttgcgggagagtttccaaacgaatccgagggagagagagagggaaaagtgggggggaaagggagagggaatcacggggaatgatttccccctctttattgcgcgcggggacggcgggatgcggcggaatccgcggcggcggcggcgctagggcacgggcgagccggcaggtgcggcgcgaggtacgggatgacgggtgggccccacccgtcagcgagggtggcgggcgggcccgcccgtcagcggcgcgcgcgcggggaggaggccgatgggccgcgggggagaggagagagagggagggaggtgggccgagccggcccaagagggggaaggggggaaaaagacttttagggtttttctttttataaaaccactt

SEQ ID NO: 90397 - DNA, 1104 bp, Oryza sativa
  Clone ID: PAT_MRT4530_89070C.1
atggcgctggagggggagcagacaccaggacaggcgacggaggcggcgagggagatggacggcgacggaggcagggatggaggggaatggcgacgggaagtggtgaaatggtttcattctcttcaccacacgcagttccgcacaaattactccctttacatgccattctacgattatatctacaataccatggataaatcatctagcaccctatacgagagcatgctcaagatcagtaaggagaaatccctggatgtggttcacctcacgcatctcaccgacctccaatccatttatcatctgaggcccggattctccatgtttgctgctagaggatacaatcaaagtaactggtccatgataaccatcttgtcacccctatcatggctcatcgccatgtgtacctgggcgttcagttcttctccatttgctgtcgacagaagtgtcctagataaaaacctcaacatgcagacatgggccataccaagatacagtttccattaccacttaaaaagggagaataaagctatcaacgacttgattggaaaggcaatacatgaagctgacagaagaggtgctaaagttttcagccttggactcctaaaccagggcagcagcctagcagctgcggtggtttccaatagtgtagcctcaaggacagaccaagttattcttgcaggaaatcttgacaaggtggctcgagccgttgctatggcattatgcaagagaaatgtcaagatccgatgggaagcgctggaggtgtcggtcgcgaaagggattatgtggcggcagcgcggacaccgaggaatggatgggggcgacatcggcgatggcgaggcaagggcgacggtcgaactgactgttgagaaacagtcctcccaagaggtctcctcacaaagtcgcgaggatgacgtcctcacgaaagcgttgggaaccgaagaacaccgtggacggacaaggggaattggatccagtgttccctggaagcttgggtttccccaatacgcgtggcagtacaagaagcacaagctttcaaaggcacagaaatatgcacgccttaaggaacaacttcgtgcggagcttagagaagagctcagagaatag

SEQ ID NO: 90398 - DNA, 534 bp, Oryza sativa
  Clone ID: PAT_MRT4530_89071C.1
aactaaccatatgaaggtcaaaagatgataccgggttaggtatagaattttcgctgttgttggtatttcttacgaccacagataaatccgcaagcgcacggaatatcgctgtaacacttcaccttcgggtgaccccaaaaggatatcgaactcagggaacgattactaggacgggattcagggctgtcaccacctgccgcctacctctgacaaatccgtcggatatacaacaaacaaagaagaagttctctgaacccggagcagagtgtaccgacagctccggtactcctccagaattcctcctaggaagctacactcgtcgagaaagaagtcggatgagcgtcaaacttccgggcactcctccagagcttcccctcactctctacctatttctaatgtacaaatgatacaatagagcctcttataattcaactcaaagttgtgtgtgttggaatgagagtgaagacctccatatataggctccaaatgacggttaggggtatgggaaatgaccaaaacaccctgcaaccgcca

SEQ ID NO: 90399 - DNA, 506 bp, Oryza sativa
  Clone ID: PAT_MRT4530_89072C.1
cctccggcggaaatatcgagaaaatgcttgttggtatttcttacgaccacagataaatccgcaagcgcacggaatacagctatagcacttcaccttcgggtgactccaaaagaatatcgaactcagggaacgattactacgacgggattcagggctgtcaccacctgctgcctacctctaacaaatccgtgggatacacaagaaacaaagaagaagttctccgatcccgaagtagagtgtaatgacagctccggtactcctcccgaattcctcctatgaaagctacactcgtcgaggtagaagttggatgagtgccaaacttccgggcactcctccagagcttcccctcactctctaccttattctaatgtacaaaaaatacaatagagcctcttgtaattcagcacaaagttgtgtgtcttggaaataagaaggtagcctccttatataggctccaaatgacggttaggtgtatgggaaatgaccaaaacaccctgcaatcgcct

SEQ ID NO: 90400 - DNA, 484 bp, Oryza sativa
  Clone ID: PAT_MRT4530_89073C.1
aaatgcttgttggtatttcttacaaccacagataaatccgcaagcgcacagaataccgctatagcacttcaccttcgggtgaccctaaaaggatatcgaactcagggaacgattactaggacgggattcagggttgtcaccacttgccgcctacctctgacaaatccgtgggatacacaacaaagaaataagaagttctccgaacccggagcagagtgtaccgatagctccggtattcctccagaattcctcctaggaagctacactcgtcgaggtagaagtcggatgagcgccaaactttcgggcactcctccaaagctttccctcactctctaccttattctaatgtacaaaagatacaatagagcctcttgtaattcagctcaaagttgtgtgtcttggaaatgagaaggtgacctccttatataggctccaaatgacagttaggggtatagaaaatgaccaaaacaccctgcaaccgcct

SEQ ID NO: 90401 - DNA, 835 bp, Oryza sativa
  Clone ID: PAT_MRT4530_89074C.1
gcacgaggaaagaactcaaaaccgacgtgcgtgatcggtgtacgtgtactcgttggactgcaggtgaagagatcaccgatcgatggctgccgccggagatggagcaggaggcggcggcgagcagctgacggtgctcggcgcgtgggggagcccgttcctggtccgggtgcgcctggcgctcaacctcaaggggctcagctacgagtacgtggaggtggacctcgccggcaagagcgacctcctcctcgccgccaaccccgtccacgccaaggtccccgtcctcctccacgccgggaggcccgtctgcgagtccatgctcatcgtcgagtacctcgacgaggccttcccttcctcctcctcctccgccgccgcggccaccacgatcctccccgccgccgacgacccctacgcccgcgccgtcgcccgcttctgggccgccttcgtcgacggcgagctgctgagcgggtggatggggatctacgacggcgggaagaccggggaggagagggcggcggcgctggcgcggacgcgcgcggcgctggacgcgctggagggcgcgctccgggagcgcgcgggcgggcggtggttcggcggcgagcgcgtggggctcgtcgacgtggcgctcggcgggttcgtgccggcgatgctggcgtcggagccgacgaccggggtcaggatcgtggacgcggacaggacgccgctgctggcggcgtgggtggagcggttctgcgcgctggaggaggccaaggcggcgatgccgccgctcgaacgcctcatcgcggcgggcaagaagaggtacgccgatctgcaggcggcggcggcggcgagcgagtga

SEQ ID NO: 90402 - DNA, 547 bp, Oryza sativa
  Clone ID: PAT_MRT4530_89075C.1
cgtccaaggaggggagctgacagccgtccgcactgccctccccccttcatctcaaatatggcgctggttactgttggtatttcttacgaccacagataaatccgcaagcgcacgaaataccgatgtagcacttcaccttcgagtgatcccaaaaggatattgaactcagggaacgattactgggacgggattcagggctgtcaccacctaccgcctacctctgacaaatccgtgggatacacaacaaacaaagaagaagttctccgaacctggagcagagtgtaccgccagctccggtactcctccagaattcctcctaagaaactgcagtcgtcgagaaagaagtcggatgagcgccaaacttccgggcacccctccagagcttcccctcactctctaccttgttctaatgtacaaaaaatacaatagagcctcttgtaattcagctcaaagttgtgtgttggaaatgagagtgagctactccatttataggcaggtatgacggttacagcttatgtgaaatgtccaaaatgcccctaaactgcca

SEQ ID NO: 90403 - DNA, 334 bp, Oryza sativa
  Clone ID: PAT_MRT4530_89076C.1
aggcaacacacaaacggttttattatttgttagcagaacaaagccgcagttctcaatgtatggacagacggcaacgccacgggatctcccgtaacagaaacgagtgcacccaccggggaagatgagcaattcgagcacgtgacaagaaattgactgaccgtacgaaacgtgcggggcactacaagtgcaaggctgggagagtatagacctacattgacccacatgagcgggaacacaaactccatgccggacccgggcaacaggaaaccaaagggggagatcaagctgctggttgaaccaattctaggggctatactacacaggaaaacacgga

SEQ ID NO: 90404 - DNA, 505 bp, Oryza sativa
  Clone ID: PAT_MRT4530_89077C.1
atctccctcgtctgcatgtcaagggtgttggtatttcttatgaccacagataaatccgcaagcgcacggaataccgctgtagcacttcaccttcgggtgactcctaaaggatatcgaagtcagggaacgatacctggacgcgactctagaggatcccctcaccacctgccgtccatctctgacaaatccgtgggatacacaacaaacaaataagaagttctccgaaccaggagcagagtgtaccgacagctccggtactcctccagaattacccatatgaagctacacttatcgaggtagaagtcggatgagcgccaaacttccgggcactcctccagagcttcccctcactctctaccttattctaatgtacaaaagatacaatagagcctcttgtaatttagctcaaagttgtgtgttgtgaagtgtgaaggagagctctatttatagcctccatatgacggttacatgtatgggaaatgaccaaaatgccctcaaccatcat

SEQ ID NO: 90405 - DNA, 568 bp, Oryza sativa
  Clone ID: PAT_MRT4530_89078C.1
gggtggtgggtggtggttgcgcgaagggagagaagggggaagagggggaggaggaggaggaggaggaagaggatgacgccatggcggcaatgttggtatttcttacgaccacagataaatccgcaagcgcacggaataccgctgtaacacttcaccttcgggtgaccccaaaaggatatcgaactcagaaaatgattactaggaagggattcagggctgtcatcacctgcagcctacctctgacaaatccgtgggatacacaacaaacaaagaagaagttctccgaacccggagcagagtgtaccgacagcttcggtactcctccagaattcctcctagagagctacactcgtcgaggtagaagtcggatgagcgccaaacttccaggcactcctccagagcttctcctcactatctacctaattctaatgtacaaaagatacaatagagcctcttgtaatttagctcaaagttgtgtgtgagtgaagtgagggagaggagctttatttatagccttcatatgacggttacagctatgggaaatgtcctaaatgccctccaaccatca

SEQ ID NO: 90406 - DNA, 294 bp, Oryza sativa
  Clone ID: PAT_MRT4530_89079C.1
atgggggcaactcgcctcctagccacatggtgcaaagaagggaggagtcgggtatctcttggtctagaagaacttgaacagaaagaagattggaaggaggaaggaaaaatgaaaagagaaaggaaggggaaatggcggtacaaccacccgcctgcgaaaatatactctatgaaaaaaacccccgccaccacccctacccgccatcgtcgcctgctgtggcccacgccctccgctggatctaggtgggagagggaagggagggaagccggatctgggagggtgggaggaagctag

SEQ ID NO: 90407 - DNA, 263 bp, Oryza sativa
  unsure (1)..(263): unsure at all n locations
  Clone ID: PAT_MRT4530_8907C.1
gccgatcacgccgtggtggtggacgacggcggttcacgaaggatgaggccggcgtccctntngtcgtcgtcggacgccgaagacgacgacgccggcagcaagaagcagttcctgcgggcggcgggacgagcgctggaggcggcgccgcccgtccgggnaggccgggnaggccntcgcggccgntaaggatnttccacaccatgtcccggtcgctcccggtgctgacgccgggttgcgggcggntgcagccggccgggggcggc

SEQ ID NO: 90408 - DNA, 536 bp, Oryza sativa
  Clone ID: PAT_MRT4530_89080C.1
catggggacatcgctctgcaagattagtgccacaaatacgagatttgcacagaaatgcttgttggtatttcttgcgaccacagataaatccgcaagcgcacagaatactgctgtagcacttcaccttcgggtgaccccaaaaggatatcgaactcagggaacgattactgggatggaattcagggctgtcaccacctgctgcctacctccgacaaatccgtgggatacacaataaacaaagaagaagttctccgaacccgaagcagagtgtaccaacagctccggtactcctccagaattcctcctaggaagctacactcgtcgaggtagaagtcggatgagcgccaaacttctgagcactcctccagagcttcccctcactctctaccttattctaatgtacaaaagatacaatagagcctcttgtaattcagctcaaagttgtgtgcgttggaatgagagtgagctcctccttttataggctccaaatgatggttaggggcatgggaaatgaccaaaacacgctgcaactgcct

SEQ ID NO: 90409 - DNA, 503 bp, Oryza sativa
  Clone ID: PAT_MRT4530_89081C.1
gctgaccccggtcagccgctccctcctgttagtatttcttacgaccatagataaatccgcaagcgcacggaataccgctgtagcactttaccttcgggtgaccccaaaaggatatcaaactcagggaacgattactaggacgggattcagggctgtcaccacttgccgcctacctctgacaaatccggtggatacacaacaaacaaggaagaagttctccgaacccggagcagagtgtaccgacagctctggtactcctctcaaattcctcctaggaagctacactcgtcgagggagaagtcggatgagcgccaaacttccgggcactcctccagagcttcccctcactctctaccttattctaatatacaaaagatacaatagagtctcttataattcagctcaaagttgtgtgtctcggaaatgagaaggtgacctccttatataggctccaaatgacggctaggggtatgggaaatgaacaaaacacactgcaaccgcct

SEQ ID NO: 90410 - DNA, 558 bp, Oryza sativa
  Clone ID: PAT_MRT4530_89082C.1
caattaagaaataatagaaattcggaattaaaaataaagaatattagaagtagagtacagagtttatataggaatttgtgtctgttggtatttcttacgaccacagataaatccacaagcgcacggaataccgctttagcacttcaccttcgggtgaccccaaaaggatatcgaactcagggaacgattactaggacgggattcaaggctgtcaccacctgccccctacctctgacaaatccgtgggatacacaacaaacaaagaagaagttctccgaacccggagcagagtgtaccgacagctccggtactcctccaaagctcctcctagtaagctacactcgtcgagtaagaagtcggagagagtgccaaacttccgggcactcctccagagcttctcctcactctctacctatttctaatgtacaagagatacaatagagcctctggtaattcagctcaaagttgtgtgttgaaatgagagtggactcttccttatataggctccaaatgacgtttaggggcatgggaaatgaccaaaacaccctgcaatcgcca

SEQ ID NO: 90411 - DNA, 1198 bp, Oryza sativa
  Clone ID: PAT_MRT4530_89083C.1
acatctttatgatactctaatcctttctatgtgtgttggtatttcttacgaccacaaataaatccgcaagcgcacggaataccgctgtagcacttcaccttcagatgaccccaaaaggatattgaactcagggaacgattactaggacgggattcagggctgtcaccacctgccacctacctctgacaaatccgtgggatacacaacaaacaaagaagaagttcttcgaacccggagcagagtgtaccgacagctccagtactccttcggaattcctcctagaaagctacactcgtcgaggtagaagtcggatgagcgccaacttccgagcactcctccagagcttcccctcactctctacctaattctaatgtacaaaagttactatagagcctcttgtaattcagcttaaagttgtgtgttgtgaatgagtgagaggagctctatttatagcctccatatgacggttacagctatgggaaatgaccaaaacaccctcaaccgtcattgggaatgcatcagaagcatacacgtggaaggccgggatgaaaggagcttgtggtggttcgaccgaaccctgggccccacctcctggattcttctttggcaaggtcactgactggtgggccctgttggcggttatggcaattatgacccgttccatgacggttgcacctgtcttgtgggccctccaatccatgtgctcgcgtctaattggtcggaagtgtgtttcctcgcatgattgttgtgttttctccttaaaatacctagatagcatagggtccctattggatatgtcaccacaagtaacaagtaatgagcaaagaataataggcatgcatattattttcaggtagactatgaactctaattttactatccctagcttgagtttaattatcttgaaaatgttaccttcattgtggctcagcgtgacggctccatgtgatgaagcgtcaacgacggtatatggacccatcaatttgctttgaagttttccatgtccgaaaagcttcacccgtgagttgaacagcaacaccttctcccttgctttgaactccttgtgcttgattcgtttatcatgccatcttttggttttgtccttatatatcttggcattgtggtaggccttgtccctccattcctccagctcagagagctgcatcttcctgtgctgtccgaatccctttatgtccat

SEQ ID NO: 90412 - DNA, 184 bp, Oryza sativa
  unsure (1)..(184): unsure at all n locations
  Clone ID: PAT_MRT4530_89084C.1
cttgcaccttctacaccatacctggatacggttctccatcttcaggccgcacgtccgttttaatgcaaaganggatgtgccaacacagttatggaatgcccattccctgcaagtcctgtggcttggcttgaatgcagcatttggaaatgggtaacctnagaagattgttaagcaaagcccaact

SEQ ID NO: 90413 - DNA, 1482 bp, Oryza sativa
  Clone ID: PAT_MRT4530_89085C.1
ctgcaggaattcggcacgaggggcgtcgcaaccaccggagcacaagctgctgttgcgacgctaccaaattcccatctccactaataatagctgcggtcaccgccgccgccgccgccgccttggtcaccaaatccgcctacggcggcgccggcggtggggggcatcgtcatggcgtcgccgagcagccgcgcggtggccgtcggcggcgcgctcctcctgctcctcgtcttcgccgtcccaaccaccttcctctacctcacctccgcccccgccgcctcctccccgagcctcctcctcaacctcaagccgttcggcgcccggtgcgcgcccgccgccgccgccgccccgccgctcagggtcttcatgtacgacctgccacggcggttccacgtcggcatgatggacgcctccgcctcggggttccccgcgtggccgccgtcggcgggcgggatcaggcggcagcacagcgtggagtactggatgatggcgtcgctgcagggcgggggaggtggggggaacgggtcgtcgtcggaggaggggagggaggcggtgcgggtgacggatcccgacgcggcggaggccttcttcgtgcccttcttctcgtcgctcagcttcaacgtccacggccgcaacatgaccgatccagagaccgaggccgaccgcctcctccaggttgagcttatggagattttatggaaatctaaatattggcaacgatctgcaggccgtgatcatgtgattcccatgcatcacccaaatgcttttaggtttttgcgtgatatggtgaatgcatctattcttatagttgcagactttggaagatacacaaaagaattggcttccttgaggaaagatgttgtagctccatatgtgcatgttgtagattccttccttaacgatgatccacctgatccatttgatgatcgtcctacactgcttttctttcgagggcgtacagtcaggaaagatgaagggaagatccgtgctaaacttgccaagattctaaaagggaaggatggtgtgcgctttgaggatagccttgcaacaggtgaaggcattaaaacatctacggaaggcatgcgatcatcaaagttttgtctccatcctgctggggatactccttcctcgtgccgactgtttgatgcaattgtcagtcattgtgttcctgtgattgtcagcagtcggattgagctccctttcgaagatgagattgattacagtgagttctcccttttcttctcagtggaagaagctctaagacctgattatttgctcaaccagctcagacagatccagaaaacgaagtgggttgagatctggtcaaagctaaaaaatgtctctcatcactatgaattccagaatccacccaggaagggtgatgctgtgaacatgatatggaggcaggtgaagcacaaagtccctgcagttaatcttgcgattcacaggaataggagattaaaaattccagactggtggggatga

SEQ ID NO: 90414 - DNA, 608 bp, Oryza sativa
  Clone ID: PAT_MRT4530_89086C.1
gcgtccggcgctccctccttctcctccaccgctaggcgagcgcaaccctagcgacagcgcaggcaggggctcgtcgtctcctctctttcttctcttcttctcccctcggctctctcgcaccctcccctcgcctttctcacgcgtcggcggcggcctggcggtggaggcggtggtggcggcggcgggagggaaggcgacatcccggcggcggctccctccgcaggaggggaggcgggggcggcggcggcgcctcccctccgccagatctagccgggagtggcggcccggcaggaggggaggcgggggcggcgggcggtggtagagggaaggcgacggccccggggggcggcgggcggtggtggagggaaggcgacggcccggcggcggcgaacgggagcggaagcaaaactcttgtgttcatgtgtgttcttttgttcatcttttgtgttcatgttgtgttcttgaagtgaaagtgaaattgcttgatgagtaatggatttgtgcgaattttattccttttctttttctgggattattggtccggtgtagttcttgtatttgaaagggatgattgcttgattgggctttaatctatctttgattttgtg

SEQ ID NO: 90415 - DNA, 342 bp, Oryza sativa
  Clone ID: PAT_MRT4530_89087C.1
atggcgaaagtctcggtggggacgaagaagcgacgcttggacttcggtgcttttaggggatggagcgagctggcgcagccggcggcagttgagctcgggcagcgccggcgttaccactgcgtagtcaacagagagcaacagcagattgaagcaatcttctcgggagaacgttcagagctagcttgctatttggatgcttcttgttcttgggggacgcggatggattctatggaggaggtggctttcagcaatgtcgggcagttgcaggagtcgacagaggccgaggcagaagggaggaaaacgggccggttcagctgtgggctgaggcaagaaatgggctga

SEQ ID NO: 90416 - DNA, 439 bp, Oryza sativa
  Clone ID: PAT_MRT4530_89088C.1
ccggccgggaccgctgctccccttctcctctcggcgctccctccttctcctccaccgctaggcgagcgcaaccctagcgacagcgcaggcaggggctcgtcgtctcctctctttcttctcttcttctcccctcggctctctcgcaccctcccctcgcctttctcacgcgtcggcggcggcctggcggaggaggcggtggtggcggcggcgggagggaaggcgacatcccgggggcggctccctccgcaggaggggaggcgggggcggcggcggcggcggcgcctcccctccgccagatctagccgggagaggcggcccggcaagaggcgaggcgacggcagccgacggtggtagagggaaggcaacggccgcagtggggcggcgctacgaggagagacggaacgcgacccaccgaggaaggctgacggtaagcggaagc

SEQ ID NO: 90417 - DNA, 6609 bp, Oryza sativa
  Clone ID: PAT_MRT4530_89089C.1
atgggcggcggcggtggcggcgatggtcggcggcggaggccgtcggccggaggaggaggagggggagggggaaggggaggcggttggaggtctgggtcgtcggcggcgaaggaccagcggctgcggctcggagcggaggagctcctggagagcaggcttggctttgcgccctacaccgacagcgagcgccggctcggatggctcctgaccttctccccgtcatcatgggaggatgaggacactgggaagatatacagctgtgttgacctatacttcgtgtcccaggacggttctacatttaaagtgaaatacaaatttcccccttacttttatgctgcgactaaggataagatggagttagaagtcgaggcatatctcaggcgacgttatgaaggcgacattgctgacatagaaattattgagaaagaagatcttgatctaaaaaaccacctttctggtttgaagaggaaatatttgaagatccagtttgataccgtacagcaattaatgcgtgtgagaagtgacctattgcatgttgttgaaaagaatgaagaagaactaaatgctgcagaggcatttgaatcaatttatggtgtaaaaagcctatgttctgatgatcttgtacactatgacagggtagaaaggccacaagattacataaattgcatcattgatttgcgtgaatatgatgttccatatcatgttcgttttgctatcgataatgacgtgaggtgtggacagtggtacgatgttagcgtatctagctctgatgttttgcttcacagaagggaagatctactacagcgtgcagaagttcatgtatgtgcatttgatattgaaaccacgaagctgcctctgaagtttccagatgctgagtatgacactgtaatgatgatctcttacatgattgatgggcaaggatacctgataatcaaccgagaggttccagatgttcttttctctataatcatttatcagatttcagcttactatgttcaaattatggtttacaaacattcttttcctgtattcaccacctgctgcctggcttcaaataagaccgattatctagtactccctccgtttcataattgtgtaggggaagatattgaagatttggagtatacacctaaaccagaatttgaggggcattttaaagttaagaatgtcgcaaatgagttggatctactcaaagcttggttttctcacatgcaagaggttaagcctggtatttatgttacatacaacggcgacttttttgactggccatttttggagaagagagctgctcatcatgggattaaaatgaatgaggagattggattccaatgtgataataatcaaggcgaatgccgagctaaattttcttgccatcttgactgttttgcttgggtgaagcgagacagttaccttccacaaggaagtcatggtctaaaggctgttacaaaagctaagttaggctatgatcctctggaggttaatccagaagatatggttcggtttgcaatggagcagcctcagacaatggcttcttactctgtatcagatgctgttgcaacatactatctatacatgacttacgtccatccatttatcttttcccttgcaaccattatacctatgtcacctgatgaggttttacggaaaggaagtgggacattgtgtgaaatgctgctaatggtccaggcattcaaggctaatattatttgtcctaacaagcaccaagctgatctagagaagttctacaataaccgtctattggaaagcgaaacttatattggtggtcatgttgagtgtcttgaaactggtgtatttagatctgatcttcctacgaagttccaacttgaaccgtcagcatgtgagcaactgattgcaaatcttgatcgtgatctgcaatatgccatttccgtagaaggaaaattagatattgattctgtcacaaactacgatgaagtcaaggatgccattaaacagaagctagtttctttgcgagatcaccctattcgtgaagaatgtccacttatatatcatctggatgttgctgcgatgtatccaaatatcattttgacaaataggctccagccaccatccatagttaccgatgtggactgcacagcatgtgatttcaatcgtcctggaaagaattgccttcggacgcttgaatgggtatggcgaggagagacctacatggcaaaaaagagtgactatcatcatataaagaggcaaattgagtcagagatgattcaagctggtggggtgacaccttcaaagccttttcttgacctctcaaaaccagagcatttactaaaactgaaggatcgtttgaagaagtactgccaaaaggcatataaaagagtagttgacaaaccaattacagaagtgaggaacgctggaatatgcatgcgtgaaaattccttctatgtagacacagtacgaagctttcgtgatagaaggtatgagtacaaaggtcttaacaaatcatggaaaggaaaactggcagaagcaaaagccaatggaaattctatcaaaattcaggaagcacaggacatggttgtgctctatgattcgttgcaacttgcccacaagtgtatattgaattcgttttatggatatgttatgcgcaagggtgcaagatggtattctatggaaatggctggtgttgttacatatactggtgcaaagattatccaaaatgctcgtctacttgtagacaaaattggaaagccactggaactagatactgatggcatttggtgtgttcttcctggttcttttccagagaactttaccttcaagacaaatgctgggaagaagctcacgatatcctatccctgtgtgatgcttaatgttgatgttgcgagaaacaacactaatgatcaatatcaaacattgaatgacccagtaaataagctatatacaacacacagtgaatgttccattgaatttgaggtagatggaccttacaaggctatgattctacctgcctctaaagaggaaggggttcttctaaagaaaaggtatgcggtctttaatgaagatggtaccttggcagaacttaaaggttttgaaatcaagcgtagaggtgagctgaagctcatcaaagtttttcaggcagaggtatttgacagatttcttcatggttcaactttagaggaatgctatacagctgttgcttctgttgctaatcgttggttagacctactggataaccaaggaattgatatttccgacaatgagttgcttgatttcatatctgagtctagcacaatgagtaaatccctagttgactatggagaacaaaaatcatgtgctgtaacaacagcaaaaagactagctgaattcctcggggattcaatggtaaaagacaaagggctgcattgccaatacatagttgcccgggagccacagatttcgaatcctgttcctcgagttcttcatcctgattggttgcacaaaaaggtcagagagaaagatgatcgatttcgccagcgcaaactacgtgatatgttcaatcctttggagaaggacaggggggtgcagaatttggatgggacaggagatatggaagatttattaacgctggatggtggtatgagaaaaagtcatgtacccaatggttttggaaaagaaaataaaccaaacgacgcaccatcaacagaagctggttcaaagcatagcaagaataaacaaaaatctataactaggtcaaatgaaccccttgccgtacatattcaaaatgatgctgctgatgaacaagttgatagaagtactgattatcaaggatggcttgatgctaagaagagaaaatggaaatatgttcgtgagcaaaaaaagcgtcaaaggttgggtgctgcagtcacttctgatggtcccaccaatgatttgttttctgcaaggaatgtcgtaatatattcatttactttgatgcctgacaagctcatatattgcccacatcagataatacagcttgcttcgagtacattgcctggccacttttttgcatgggttgttgctgaggggatcatgttcaagattcctatcaatgtgccaagagtcttttacctaaactcgaaagctcctgtcacagaagagtttccagggaggcgtgtaaagaagattcttccacatggaaggccatgtttcaatctcattgaggttgtaactagtgaagaacagttcagggtggagggcaaaaagcttgctgcccatcttgcagagccagatgttgagggaatatacgagacgaaaattctgccagagctcaatgccattctccaaattggttgtgtgtgcaaagtggataagtctgcaaaaagacgaagtatccaagatggatgggatcttgctgaattgcaaatgaagacaactgcagagtgttcatacctggaacagaccgtttcatttttctatctataccacagcttgtcagaaggaaggggtgtatatgtcatgtacttccctacatctttcagaatacatgcagtggttgtcaatccgttccgcaataaagagctatcgccatcatttcttgaaaagcaatatcgagatgcttgtcaagctcttggctctctgcatgaaaacatcactttccttgtggattaccacacatcaattgatgcaggtagcaagcatgtgcaaagaatgttacttgaatacagacaacaacatcctggacctgtcataggcgtcatagaatgccctaaactccaagctctaaagtcagctgtacgggcacttgatgatttcccgtgtgtaaccattccttgcaatgcacgggataacaactatcaggctcttggttggcaagcgacagctggtagaacaagcatgcaacgttgtgctgcatcaacccaatggtttaatgaaagaatttcacttgctagatatgcacatgtcccattgggaaactttgaactggattggcttcttttcaccgctgacgtgttcttttcaagggcattgcgtgatcaacagcaggtactatggatatctgacgatggtattcccgatttaggaggcacatatgaaggagatacttgctttgctgatgaagtcatccagcctgctcttacttatcctggtgcgtatagacgagttgctgttgagcttaagatccatcatttggctgtcaattctctcctaaagagcagtcaagtagatgaaatggaaggagggccgatcggtagctttgcaaatgacatgcctgctggtccaaatggcactgaaactgaattcgatgatgctaccttatgtctacctgctttccaagtgctgaagcaactcattcagcgatgcatttcagatgcagtatcttctggaaatgtgtttgctgatgcaatattgcaacatctctaccgttggctttgcagcccacgatcgaaacttcatgacccagctctccatcatcttcttcataatgtcatgaagaaggtctttgctctcatgttggcagagtttcgaaagcttggagctaatgtcatctttgcgaacttttctaagataataatagatactggaaaagttgacctgttgtcagcacgtgcatactgtgatagcttactgaaaacattgcagacaagggatatttttgagtgggtggagctggaacctttgcattattggcactccttacttttcatggaccagtataactatggtggtattcaggctaaaatgcaaaatgcaacatctgagggcagctcagatggtgataacgatatcgacatcgtctcaagctggaacatagcagaatacctgcctaaagctacacaagatcactttgtcttaattgtatcggagtttttgtatgttccatggaaatacatgaaagaacaagtagctcttcgatcaactacaagggatgagacctcatgcacaccatctataacaatcatggctgctgaaaaccttgaggttcaagtcataggatatctccgtgatcagataagtaattactttgcagacaagcttctcaggattgtaagtgatatacttcatcatttcaaaggaaaaggcaagtccgaatcagttgaacttacaaacagagaacctgatcctcacacacataagggagatgctgcattagagttcattaagcatatatgtgctgttcttgctcttgatcagaatgttcagcatgatattctgagaatgaggaagaacttgttaaagttagttcgtgtaaaggagtttgctccagaagcacagttccaagatccatgtgcctcattcactctccccaatgtgatttgcagctattgcaatgattgtcgggatcttgatctctgccgtgattcaacactccaaggtcaggagtggaggtgtgctgtgccgcagtgcgggcagccataccatcgtgaacagatggaaaatgcacttctacaggatttggtctgcctccgctgcaggcaagtgaaagcggcacacttatctgagcagtgctcctgtggaggtgcattccggtgcaaggaagaatcatcgcaattcctcagcaagatgcgggttttcctaaatgttgcggtcagtcaaaagttcgagctgcttcaggatgttgtccaatggattctagagaggacagagaacgctgaggtcatttttattgtatcataa

SEQ ID NO: 90418 - DNA, 1037 bp, Oryza sativa
  Clone ID: PAT_MRT4530_8908C.1
ggaaaaagggatttattgcgtcagcgggctagggtttcggtggaccgggcgcacgggcggcggttcacgcgaacggacggccgagattcgatccaatccaaacggacggccgagatcgatcgggtccacggcggctcacggcggacgaccctgatgacgtcagcggtgacgtcaccgacagcggcggcggctcggcggagcggacggcttgggcggcgcacgctcgccgacgaacggcggcgcgaggacgctaacgaagagcaccagcacgtataggacgacgcggcgaacacaccggtgaccaaaacggcggcggacgaacaacggacgacaacagcgacgagaaggaagcggcggaaaccttcgggttgtcgacggcgacgctgctccggtgatctccggcgacggcgaaggggcgaacgaggacggcgacgcgacggcgaccacgatgacgtccttcccgagcgacggcgacgtctggaacggcggcggcgcacggctggagcggcggcgacgacggcaaagctagggcacacggcgctagagctcttccggcgacgagaggcaaaggcgaaggtggcgacgggtagaggagactccgggggtccttttaaaggggctcggaggcggcgacgaaggcccacggcgaccggcgacggcgaaggaaacctcgggcttggagagaaagaaaccgatccgaatcgaactcgattccacgagcttccaaaacgttttagccgatgattccaaaggagaaaaggtagaggagatcccggcgatcatttcccccctatcaattcggccggagaaggaaaggaacggccgaatttggaaaggaacggcggcggcggctcggcggcggcgcgctagggtttcggcccgaggaagacgacgggcctgacaggtgggacccacctgtcagcgaccgaacgcacgcgcgcgcgggcggctcggctgcggactgggccgacttgggccgggggagagagagagagagttttgggccgactttcggcccaaagccaaaagagaacttt

SEQ ID NO: 90419 - DNA, 257 bp, Oryza sativa
  Clone ID: PAT_MRT4530_89090C.1
ggccagcaaaaaatggcataattaatatttagcggggcaagattacatttgaagaataaagcggccacaagaattaatgtcatcaaacaagatagagggtgacactcaaacggtacaggcctgcacaacacagatctacaatggggcaacacacgaaaaactggaacagagatcctaacagaaagcaactatctggctacaaaatggaaaactgtgctgaatgacaagacgaacaaggagctataaacagggatgac

SEQ ID NO: 90420 - DNA, 1953 bp, Oryza sativa
  Clone ID: PAT_MRT4530_89091C.1
atggcgacggcggacgtctcgcggccctcctcctccgcgccgacggcggcggctgcgggggcagacggccacggggcgaaggggagcgccttccgcggcgacgggctgcggccgtactaccagtcgcgcatccacgacctgcagctccagatccgccaagggacggacaacctcagccgcctcgaggcccagcggaacgtcctcaattcccaagttataacgctgggggaagagttgaaggtgctccatgaaccgggctcatatgttggtgaggttgtcaaggttatgggcaagtccaaggttctagtgaagtgctgtgttttagtatttgtgcacatgagtgttgctttggagataatcggggaagataatattttgttggtgcacccagaaggaaaatatgttgttgatgtcgataaaagtattgatattacaaagctctcgccttcaacaagagttgctcttcgaaatgacagctatatgcttcatcttatcctgcccagcaaagttgatccattggttaatcttatgaaggttgagaaggttcctgattctacttatgatatgattggcggccttgatcagcagattaaggagatcaaagaggttattgagcttcccattaagcatcctgagctgtttgaaagtcttggaattgcccagccaaagggtgtccttctttacgggcctccgggtacaggaaaaacgctactagctcgggcagttgctcatcacaccgactgtacctttattagggtgtcaggttccgagttggttcagaagtatattggagagggttccagaatggttcgtgaactatttgtgatggccagagagcatgcaccatccataatctttatggatgaaatagactccattggatctgctagaatgcagtcaggatctgggggtggtgatagtgaggttcaacgcactatgcttgagcttctgaatcaacttgatggctttgaagcatcaaacaaaattaaggttcttatggcgacaaataggatggatattttggatcaagctctcctgaggcctggtcgcattgataggaagattgaatttccaaatccgaatgaagattcccgctttgatatcttgaagattcattcaagaaaaatgaacttgatgcgtggcattgatctgaaaaagattgcagagaagatgaatggggcatctggagcagagcttaaggcggtctgcacggaagcaggaatgtttgcccttcgcgagagaagggttcatgtcaaccaggaggatttcttgatggcggtggcgaaggctctccctgaccccgcggccgtggggtacccctccttcaagctcatcctcgtcggcgatggcggcaccgggaagacgacgttcgtgaagaggcacatcaccggggagttcgagaagcgctacgaaccgacgatcggggtggaggtgcggccactggacttccacacgagccgcggcaaggtgcggttctgctgctgggacaccgccggccaggagaagttcggcggcctccgtgatggatactatatccatggtcattgcgcgatcatcatgtttgatgtcacctcgcgtctcacgtacaagaacgttcccacctggcacaaggacatctgcagggtctgcgacaacataccgatcgtgctgtgcggcaacaaggtggacatgaagaacaggcaggtgaaggccaagatggtgaccttccacaggaagaagaacctccagtattacgagatctctgccaagagcaactacaacttcgagaagcctttcctctaccttgccaggaagctcacaggggacatgaaccttcggttcgtcgaggagttggccctcctccccgccgacgtcaccatcgacctcatcgcgcagcaaaagattgagacagagatagctgctgctgcggcgatgcctctcccggacgaggacgaggatggactgatggactga

SEQ ID NO: 90421 - DNA, 621 bp, Oryza sativa
  Clone ID: PAT_MRT4530_89092C.1
atgggtgggagggtagccagagattgtagtgagagcactcgcaatggtggattttggggggtcatggtggtggatttggagaagatatctggaagagagcagcactccattgggccacttgtgcattctggccttgtgggcgttgcatttgtaggttcgaaacaaataggtcgccttgccttcctcaccgtcttctcctcctcctcgtccgccgccaccgctggcggccatcaccgcaatgttcgtctggtccgtcacttccccctcctcccctcctcctcctctccaatttctgaaacaccatgctccccctcttgcagcggcaagcatggcggtgccgaggaggaccaagtcgatgtccgccgtgaagacaaagcaaggcgtgcacgtgttggaggtcctggggtacagccggcacaagggcatggggggcggcagcttcatcagatccggtacaccaccagtgatcggatctttggtgactaccccttactgtcacgaaaagttagaatgccgtccccaagaactttgttgacagtatgccatcacaaaacgcctatcacacttgattggtcacgaaatccaatatttggtgacggcaagccgtcacaagttatttag

SEQ ID NO: 90422 - DNA, 970 bp, Oryza sativa
  unsure (1)..(970): unsure at all n locations
  Clone ID: PAT_MRT4530_89093C.1
ttttttttttttttttttccaatgattacatttatacaggagatgataataataacatgagtaataagagtagaggctgaaaatttgggagaatatatgtgccaaactgctcaattaagctagctatgagatctgaatttgatagcagtgccaactgcccatgcatatataatactagtagaaaacagtaataatttaaaacagtcttggtttatgcatggtttgatgtgctgaacatcaaggaagcaccatgtagatagtagaattaatatgaggtaggatatatatggaggaggggagaagacaggatgagcaagaaagaagaagatagagattacagagggcagggcagacgaactgcagaaatgaagaaactaaagaagaagtaaaaattaatcggtggtgatgtgtactccgatgacgatgacaaagagggtgatgagggcgaagtagatgatggagtggacgacgatggacatggcgctggtgtgcaggttgccgaactcgacgaagtggtgcctcccggggagctggatgagcagccccggcgagagcagcacgaacagcaccaccgcgatcaccaccggcccccagtctgacatccttcctaatttcctttaattaatgcttgctttgctttccttccttaatccttcttcctcctatttctttcccgatagagcttccttgttgttgttgttgttgttgttgttgttgttaggagcaggagggtagtaagtaagcgaggcgagcagtagtaggagcaggtaaggtagggtatgcagatgcaaatgactcactcactgtactagtattggcaacgtacgtacagtacagagagaatgaaagagaaagaaggtgaggtgcggttcgtgggagtggatggatggaaagcacagcagagaagagaanagaagcgcaggttattaggctcgaattcgaccggtgcctgctctacactgcaactgna

SEQ ID NO: 90423 - DNA, 416 bp, Oryza sativa
  Clone ID: PAT_MRT4530_89094C.1
gcgacgacgcggatggcgaccgacggcggtggctccaccccctaaccgaaggagaagaaggccaacctgcgggacccctactccatgaagcatgtgcttaacctgaccgcctcctaggacgcaaaaagcaaggggttcccaaaggacgcgcggctgaccaaccgtaggctacctgccggcgcgtaagtgatcgccgctggcttctagccatgcttacccatagaagttcgaacagaacaggtacattctccttgcctgcatagaactgcacgcaacgctcaacgtggcgctgcaaatctgtacctacacgcaggagaagaacgccatcctcttgacgtacccttccgcgggatcatgtaataggacggggcgtgtatatcttcaaaggaaccaagattgtcagacatgtataccct

SEQ ID NO: 90424 - DNA, 381 bp, Oryza sativa
  Clone ID: PAT_MRT4530_89095C.1
atggcacgaccagtaaagatctcggtcgctattaagcgactagaacccacacaacagtccggtacagatcacacaaaacacggtcgcccacaaagaccctcccaggtaagttcacgtgactacacaattaatatccaaaggagacgcggcccaaaaaacacgccccccgcagacacccagcgcgacccgcaccgcgccgaggcgaaccaaacccctcccggcaaagcacaacccaaacagccacaaaaccccttcctcccccggaatgccccaacctgctacgccgcgtcaacagatcacaacaaccagaatccagaccacaacacccggtaccagaccccagagaaattcggcccatcaaccccgggggaggcaaattag

SEQ ID NO: 90425 - DNA, 342 bp, Oryza sativa
  Clone ID: PAT_MRT4530_89096C.1
atggccttgctatctagatccaacgcaccggcagttgccatgggtgggagaggaggaggtgagccaacgagagggcggggaggccggtggcaagaaacggagagggagaaggcgtggtcgtcgagggagtgggggaagccggcagtgagcgctcacagagagggaggaggtggggccagcgagggaggcggggaggctggcggcgagcgacggagagggaggaggctgggccgttgggattcgccgaaataccactctcaattgaggggcttcgccgaaataccattttcttttgattctccctttcctcgcatctttgttgacctatttaaatcaatttaa

SEQ ID NO: 90426 - DNA, 540 bp, Oryza sativa
  unsure (1)..(540): unsure at all n locations
  Clone ID: PAT_MRT4530_89097C.1
ggagattaaatgatcgacgcagtaaaccgtaaacatgatggaaacacagaactaacgaccccgccgcttcattgaaacccaggtcgatagtgcaatttacatacagaattagaggaacaagatatccaagttaacaggagtagaggatcacgcccagcttgtgttgcccatgttcctctcgagcaagggaacacatgcaaccaaagttataggagtacatcactattggacgcccttgggaattgaagacgtgtcataggagaacaaaatccccagaacattattacaccgtgcacagctctagcatctcgaagttcttacaaaattagctactactactcctaaatgcagggcaacggtcaatttcacttcttgacctcctcatactcagcctcaggagcctggtcacctccgccctgtgatcctgcttgcgagccaccagacccaccaccagacatgtgttgcccaatctttgagacagccttgttggccgcttcgatcttgctctttatcttctcaatgncatccgaggccatctca

SEQ ID NO: 90427 - DNA, 4548 bp, Oryza sativa
  Clone ID: PAT_MRT4530_89098C.1
atgtcaggtgatatgcccattcgtctgtattatggcgatgctcctatacaaacatgtgatagcggggtggatttgactgtatatgccttccatgatactagtctgaatgcaccggagcatatgggtttgaacgacgtgttagggtggttgtataatatgtttggggtagatccagtgcacgataaatttgtcataaatgccgtgtggccagtgaggggtcaacatggatggcagtggagagtagtggaggttgcgtcaactgggagttggaggaagtttgttagtaaaataagggagaaaggctatagcctggcaatagtggtgcagaagacaacatgtgttgatcgatcgggggagtcaagtcatgccgtggtggaagaaactccgttggaaggtggacaagctgaaaatgtttggcggactgagcaaggtcgaggggaagaagtagtagagggtaatacacaaggagaggtcattgttcgtggtactaatcgtgaggccaacgactcggacgatgaagaaccggattcgcctatgcgtgttgatgcagcggaggagaatgaggcagtagtggatcagatggaagtggaaaacgaggaataccttgcgcttgtagtggaaggagaagatacaacactgtgggacaacgaaactaacatacccgatgattggacgaccatatcaatgagtcgtatgaaggtaaacgatggtttagatgcccactggtgttatgatagtaagcaggtgaaagttggacagatgtttcataacaaaggtcacttacaagatgcggtgaagaggtgggcatttgtccagaagcgtgagttcagggtgaaggtttcaaataggacgacgtatgacgtgaagtgtatacagggtggatgtccttggagagtgcatggttacaagccacaacatgacactttatgggtagctttgagggttgagcaacatacgtgtttgttggagaatacccgtctggtgcacagaaacctgacagcggcatttgtggcacaaatggtatattcaaaggtggttagaaaaatatctttgtcccctttcaccataatgcatgacgttaagaaagagtacggatatgagatatcgtacgacaaggcttggagggcaaaacagaaagcattggagatgaggtttggaacttatgaggattcttatcacaatcttcccccactattggaggtgatgcaggcaagaaacccgggcacacacatggctattctcgatgagtcatttgggtgcatgatagaggcctttagaaattgcattcctttgctctgtgttgatggcactttcatgataggcaagtacagaggaacaattctaaccgcgatcggagtcgacgcggatagccatgtcgttcctgttgcttttgcatttgttgaaagcgagaatacatcaagctggctatggtttttgcggcacattaaaatgtgtgttgttgaaaacagaccaaatgtgtgtgttctgcatgaccgacacgccggtttgctatcagcgatacagaagcttcaagaagatgtcacacagtccgtgccatggccagatttacatagcagatggtgcatgcgacattttggggctaatttttatagacaattcaggagtaagagattgatggacctgttcaagaagttatgcaagcagaatcaacaaagaaagtttgatgccatatgggatcaactggatcgtttgaccactacacacatcgaagaggttaggaaaaaacccatagttgccagacaggaggagccggagggacttgaacccattcctaatgaagcaccaagtattacttggcgcaggaagcgtggaagggccacgaagtgcttcacggagtgggtagaatttgagccaagggagaaatggtcgttgttgtacgatacagatggatcgagtctgaacctcagcaaacccaatgttaagtatagccccactattacacagtacatggatgagaaaagtaagaagggaggaatccacagagtgtggcctgctgggaatagagagttgttatttgagatacgacttcatgacaagagtggtgtcggcattgggactactaacatcacattggaatgcacgttgtggccagagtatcatgcttgcaaattcaattgcaacaagtcttacctgttacatcggctatgttcccatgttcttgctgcttccgcaaaagggggtgttgatggaaacatttttgtttctccctacttcagaaaggaatcatgggaggcaacttggcgtggtgaattgcgtggttggcgtgccgtgtgcgatttcactcgtcctcctctagggcaagccaattggattcctgactcaaatttattagttgatactaagggtcgtcgccagtcgcgcaggatcaagaaccttatggatgaagctgaagtgaaagatcgttctcgtcgtatggctgatcaatatgatgggcagctgatagacaaggagatcgataggaaccatcgatcgcgacgtcttagtacaggaactttctgcaatgtgctaaagatgcgaggaccggatcaatattggcgtattgatcctcgttgggttccaaggctgagagcagctgggttgttgacgtttgcactgttggtcgagccttcacgtgcaaggtccgaacgaatccacattgacgcggcgcttcttagtgctcttgtggatagatggaggcctgagacccacactttccacctcacagttggagagatggtgcccactctgcaggatgtgtcttatttgttggggctgccgatagctgggccagcagttggcccaacaatggtgaatgctggatgggcggatgaccttctggccagttttggtggtgtgctgcctgttgcactggaggatctcacagatgagcacgggcctacgaaaagttggttgaatcagtttcgacaggatgtcttccctgatgaccaggaggagtggatcgtgcagcggcacttagtcgcttacctattgtggttgtttggatgggtgatgttcacgggaactcacgctgactctgtggacaagcacttcatccactttgcggagcagattgcagagttacctatcgcggagattccacagtacagttgggggtcggcggtacttgcggcgacatatgccggactgtgtgatgcttgcatgaggaacatcaagcaaagttcactccctagatgcccgttgctacttatgttgtgggcgcacgagcgcttcgacattgggaggcctcagcttgactcgtacgcacactacagtttgcgagagatgtacaggtctggtgttgatgacatcgacgatcgtcccactatgggatccttgtggacacaccgtgagccgcagtgggttagcgggacgacacgtcgtgtctacactcagtttgtagctgactttgatcagcttacgcctgaccgtgttcggtggactccctacactcagcacgatgtcaatgatcgtgcaccgcacggtctcgcggatctttgcacgcgagatatgcaactctggaggacgacttgtcacctcgtggtggacgtgcacgtcgagccacacaatgtccacagggttctcaaacagttgggcatgtatcaggacttccctccgagagatggtcgtcctttggctgatagtcttcataggtactccagaaaggggctcgggctttcctacgagctagttattgtgaccacggttcagccgacggtacaagagtgggagcacgcagctgataacttggcacttcaggcacctccagacgatgggagttattatggagcttaccttcgttggtaccgcagtgttacacgatggaggtgttttcctccacaaggagatagcaccgtcccccaccaggcagcgattactgacacgtttgcccctcagcctagatcagcttacaactcaatggcggaatttgttgagcacgttcacgtggagtccgacaccctgctgcaaagactagaggcgagacctccagtcgtcaggcctgacgacgtggcgagcgtccttcgcaacttccgtgcacacgtcgggccgacggccatcaccaccactaccccgacgttccagcgtggatcggagtggtccatcctcttcacgtcgtgggtacgaagcggcccacacatctcacggtcgtccttcctttcagcacaccccagcaccggagtacaccagggggtcagccggatcaggggtacccacgtcgagcatggcaccaccacgtccgcagacgatgagtactgttcggcgtcgacgcatcacagaatgcctgcttactcccctcgcacagcattcattgaggacttcttttccactgatcctccccagggggaagtagggatggattactggcacgcagcacctcaggtcacacagccgacgcaggagacggaggccggtcaggggccagacgtgacaccacagcaggcagctagagataggcacccccctgataatttgatatatcccactgagcagattaggcgtaggaagaagggaggacctagcaagcgtgcgaagggcactgatcgtccttga

SEQ ID NO: 90428 - DNA, 342 bp, Oryza sativa
  unsure (1)..(342): unsure at all n locations
  Clone ID: PAT_MRT4530_89099C.1
tggaaaggctggagcncggcaaactgcgcagcctcttcagtagggactaaagcagctgtaactacaaagcttcnccncttacacgttacgttgccaagtttttttttttttgttgtataacctgtataaaagatcacatcttgttttcncagtntatggaacacggggcttgtgcagtgcaaatgctcatcttgactgaatatactgaggtgtaattttccctatattctttgtgatggatactactcctatgtaggaaagcaaattatactatctggttaaaccgaaattaatggataaccggtgtactcaaaaaaaaaaaaaaaaaaaaaaaaaaaaaaa

SEQ ID NO: 90429 - DNA, 936 bp, Oryza sativa
  Clone ID: PAT_MRT4530_8909C.1
atggagcagtttgtcacttcggcgttcttctctgcctcagaggacttctccctcctctcgggaaaggtctcagacacaacgttcttcccgggcgatgggcgtggaggatgtgctggcccgccactcggcgcgcccgagggtggccaagccggcgcagccggcggggagacggcgcccgcgcccctatggtcgccggcggcggccataggcacggcggagcggcggccgagagaggggaagggaagggggaaaagaagcggcggtccacggctcaccctaggtcaacggcgacgacgaaaaaggcggccggaccggaggaaggcggcggcgcggctcgggtcgacggggtcgacggcgttccggcggtcggcgagcgaaacggggggggggggggggtggacgaggtcggcgaggatgcggcgaagccgaaggaggcggcgccgaggtgggaggtggtccggggcgacgacgacggcggaccggagctcggtggcgacggcggagagagagagcgacggcgcgagctcgattccggcgagaggcggaaacggacggaggaggtgcggggagggtttaaatagggttggaagggggggagagcggccggaggggaaggaaaccggcgcggcgttctcgggttccatcaatggcgtcggcgggattagcggagggtttccaaacgaatccaagggagagggaatcacggggaataattcccccctattgattgcacgcggggacgacgggatgcggcggattcggcggcggcggcggcgggagcggcgggaggaaggggatgacgggtgggccccacccgtcagcgagggtggcgggtgggcccgcccgtcagcggcgcgcgcgcggggagggaggccgaatgggccgcgggaagaggagaaagagggggagggagatgggccgaattcggcccattag

SEQ ID NO: 90430 - DNA, 2870 bp, Oryza sativa
  Clone ID: PAT_MRT4530_890C.1
atggctgcggcagtggcaatgcgagggagtagcagtgatggaggtggctatgataaggtttccgggatggactccggtaaatatgtgcgctacacgcctgagcaggtggaggcgcttgagcgggtgtacgccgattgccccaagccaacctcctcccgcaggcagcaactgctgcgtgagtgccccatacttgctaacattgagcccaagcagatcaaggtctggttccagaacagaaggtgccgggataagcagcggaaggagtcttcacggcttcaggctgtcaacaggaaattgacggcaatgaacaagctacttatggaagagaatgagcgactccagaagcaggtctcccaattggttcatgagaatgcccacatgcgacagcagctgcagaatactccgctggcaaatgatacaagctgtgaatcaaatgtgactacccctcaaaaccctttaagggatgcaagtaacccctctgggctcctttcaattgcagaggagaccttgacagagttcctctcaaaggctactggtacagctattgattgggtccagatgcctgggatgaagcctggtccggattcggttggtattgtggccatttcacatggttgccgtggtgttgctgcccgtgcctgtggtttggtgaacctagaaccaacaaaagtggtagagatattgaaagatcgtccatcttggttccgtgattgtcgaaacctggaagtctttacaatgattccagcaggaaatggaggaacggttgaacttgtctacacacagttgtatgctccaacaactttagttcctgcacgagatttttggacgttacggtacacaaccacaatggaagatggcagtcttgtggtctgtgagagatctttaagtggttcagggggcggtccaagtgctgcctctgctcagcaatatgtgagagcggaaatgcttccaagtggatacctggttcgcccatgtgaaggtgggggatcaattgtgcacatagtggaccatctggatcttgaggcatggagtgttcctgaggtgcttcggccactctatgaatcttcaagggtagtcgctcagaaaatgactactgcggcactccggcacatcagacaaattgctcaagaaacaagtggggaagtggtgtatgccttggggaggcaaccagcagtgctacggacttttagtcaaaggctgagcagaggctttaacgatgccattagtggtttcaatgatgatgggtggtctataatgggcggagacggtgttgaagatgtagttattgcttgcaactcaactaagaaaattaggagtaacagcaatgctggcatcgcctttggagcccccggaggtattatatgtgctaaggcatcaatgttactgcagagtgttcctccagcagtactggttcgatttctgagggagcatagatctgaatgggccgattacaatattgatgcatatttggcttcaactctgaaaacaagtgcatgttcacttactgggttgcgacccatgagattttctgggagccaaatcatcattccacttgctcacacagttgagaatgaggagattcttgaagttgttcgccttgagggtcaacctcttactcatgatgaagctcttctttcaagggatatccacctgcttcagctctgcactggaatagacgagaagtctgtgggatcctcctttcagcttgtgtttgcaccgattgatgatttcccagatgaaactccattgatttcttctggcttccgtgttataccacttgatatgaaaacattagaactaatagaggcatttggtttcaaatattcccttggaaaaataaagcaagatggtgcatcctctggtaggacattagatttggcatctagtcttgaagtaggttcagcaacagctcaagcctccggagatgcatctgcagatgattgtaacttgcgatctgttctgacgatcgcttttcaattcccttacgagttgcatctccaagacagtgttgcagctatggctcgccaatatgtccgtagcattgtttctgctgtgcaaagagtgtcaatggctatctctccctctcaaactggtctaaatgccggacagaggataatctctggtttccctgaagcagcaacccttgctcgatgggtttgccagagctaccattaccatctaggggtagagttacttagtcaatcagatggagatgcagaacaattgttgaagatgctatggcattaccaagatgctattttgtgctgctcattcaaggaaaaaccggtgtttacatttgccaacaaagcaggactggacatgctagaaacttcccttgtcgccttacaggacctcacattggacaggatctttgatgagcctggaaaagaagcattgttctcaaacattcccaaattgatggagcagggccatgtctacctgccatcaggcgtgtgcatgtcaggaatgggtcggcatgtttctttcgatcaggccgtggcttggaaagtgcttgccgaggatagcaatgttcactgcctggccttctgtttcgtcaactggtcctttgtgtgaccatcccacatccactgcgaagtgaagattcatttttgcttgttcaagactgttttgcactagatctagacctgagaatctagtagtatttgcgaaatttctcgcttatgtaaatgtaatctcgctcccattccatcaagtacccaagtacaaggcagtggccaagtggttttagttgtagggggattggaacaatcctgacggttggggacttggggtccttcccagcaaaggaaaaacggaacctgtaaggggtcaaaactccatgccagattttgaaatcagcccaattagct

SEQ ID NO: 90431 - DNA, 4659 bp, Oryza sativa
  Clone ID: PAT_MRT4530_89100C.1
atgtcaggtgatatgcccattcgtctgtattatggcgatgctcctatacaaatatgtgatagcggggtggatttgactgtatatgccttccatgatactagtctgaatgcaccagagcatatgggtttgaacgacgtgttagggtggttgtataatatgtttggggtagatccagtgcacgataaatttgtcataaatgccgtgtggccagtgaggggtcaacatggatggcagtggagagtagtggaggttgcgtcaactgggagttggaggaagtttgttagtaaagtaagggagaaaggctatagcctggcaatagtggtgcagaagacaaaatgtgttgatcgatcgggggagtcaagtcatgccgtggtggaagaaactccgttggaaggtggacaagctgaaaatgtttggcggactgagcaaggtcgaggggaagaagtagtagagggtaatacacaaggagaggtcattgttcgtggtactaatcgtgaggccaacgactcggacgatgaagaaccggattcgcctatgcgtgttgatgcagcggaggagaatgaggcggtagtggatcagatggaagtggaaaacgaggaatacattgcgcttgtagtggaaggagaagatacaacactgtgggacaacgaaacttacatacccgataattggacgaccatatcaatgagtcgtatgaaggtaaacgatggtttagatgcccactggtgttatgatagtgagcaggtgaaagttggacagatgtttcatgacaaaggtcacttacaagatgcggtgaagaggtgggcatttgtccagaagcgtgagttcagggtgaaggtttcaaataggacgacgtatgacgtgaagtgcatacagggtggatgtccttggagagtgcatggttacaagccacaacatgacactttatgggtagcttcgagggttgagcaacatacgtgtttgttggagaatacccgtctggtgcacataaacctgacagcggcatttgtggcacaaatggtatattcaaaggtggttagaaaaacatctttgtcccctttcaccataatgcatgacgttgagaaagagtacggatatgagatatcgtacgacaaggcttggagggcaaaacagaaagcattggagatgaggtttggaacttatgaggattcttatcacaatcttcccccactattggaggtgatgcaggcaagaaacccgggcacacacattgctattctcgatgaggtgaatgaatatggggagaatgttcttcgtcgggctttctggtcatttgggtgcatgatagaggcctttaaaaattgcattcctttgctctgtgttgatggcactttcatgacaggcaagtacagaggaacaattctaaccgcgatcggagtcgacgcggatagccatgtcgttcctgttgcttttgcatttgttgaaagcgagaacacatcaagctggctatggtttttgcggcacattaaaatgtgtgttgttgaaaacagaccaaatgtgtgtgttctgcatgaccgacacgccggtttgctatcagcgatacagaagcttcaagaagatgtcacacagtccgtgccatggccagatttacatagcagatggtgcatgcgacattttggggctaatttttatagacaattcaagagtaagagattgatggacctgttcaagaagttatgcaagcagaatcaacaaagaaagtttgatgccatatgggagcaactggatcgtttgaccactacacacatggaagaggttaggaaaaaacccatagttgccagacaggaggagccggagggacttgaacccattcctaatgaagcaccaagtattactcggcgcaggaagcgtggaagggccacgaagtgcttcacggagtgggtagaatttgagccaagggagaaatggtcgttgttgtacgatacagatggttcgaggtatggtgtgatgacaacaaatcttgctgaagtgtataattgggttatgaagaatacacgacctctaccacttgttgctatcctggagggcatcacgaggggtacacagaagtatctctgtaaaaggtattccatggctagtctgaacctcagcaaacccagtgttaagtatagccccgctattacacagtacatggatgagaaaagtaagaagggaggaatccacagagtgtggcctgctgggaatagagagttgttatttgagatacgacttcgtgacaagagtggtgtcggcattgggactactgacatcacattggaatgcacgttgtggccagagtatcacgcttgcaaatgcaattgcaacaagccttacctgttacatcggccatgttcccatgttcttgctgcttccgcaaaagggggtgttgatggaaacatttttgtttctccctactttagaaaggaatcgtgggaggcaacttggcgtggtgaattgcgtggttggcgtgccgtgtgtgatttcactcgtcctcctccagggcaagccaattgggttcctgactcaaatttattagttgatactaagggtcgtcgccagtcacgcaggatcaagaaccttatggatgaagctgaagtgaaagatcgttctcgtcgtatggctgatcaaaatgatgggcagctgatagacaaggagatcgataggaaccatcgatcgcgacgtcttactacaggaactttctgcaatgtgctaaagatgcgaggaccggatcaatattggcgtattgatcctcgttgggttccaaggctgagagcagctgggttgttgacgtttgcacggttggtcgagccttcacgtgcaaggtccgaacgaatccacattgacgcggcgcttctgagtgctcttgtcgatagatggaggcctgagacgcacactttccacctaacagttggagagatggtgcccactctgcaggatgtgtcttatttgttggggctgccgatagctgggccagcagttggcccaacaatggtgaatgctggatgggcggatgaccttctggccagttttggtggtgtgctgcctgttgcactggaggatctcacagatgggcacgggcctacgaaaagttggttgaatcagtttcgacaggatgtcttccctgatgaccaggaggagtggatcgtgcagcggcacttagtcgcttacctgttgtggttgtttggatgggtgatgttcacgggaactcacgctgactccgtggacaagcacttcatccactttgcggagcagattgcagagttacctatcgcggagattccacagtacagttgggggtcggcggtacttgcggcgacatatgccggactgtgtgatgcttgcgtgaggaacagcaagcaaagttcactccctggatgcccgttgctacttatgttgtgggcgcacgagcgcttcgacattgggaggcctcagcttgactcgtacgcaaactacggtttgcaagagatgtacaggtctggtgttgatgacatcgacgatcgtcccactatgggatccttgtggacacaccgtgagtttgtagctgactttgatcagcttacgcctgaccgtgttcggtggactccctacactcagcacgatgtcaatgatcgtgcaccgcacggtctcgcggatctttgcacgcgagatatgcaactctggaggacgacttgtcacctcgtggtggacgtgcacgtcgagccacacaatgtccacagggttctcaaacagttgggcatgtatcaggacttccctccgagagatggtcgtcctttggctgatagtcttcataggtactccagaaaggggctcgggctttcctacgagctagttattgtgaccacggttcagccgacggtacaagagtgggagcacgcagctgataacttggcacttcagacacctccagacgatgggagttattatggagcttaccttcgttggtaccgcagtgttacacgatggaggtgttttcctccacaaggagatagcaccgtcccccaccaggcagcgattactgacacgtttgcccctcagcctagatcagcttacaactcaatggcggaatttgttgagcacgttcacgtggagtccgacaccctgctgcaaagactagaggcgagacctccagtcgtcagatgtggtgcagacgtcgggccgacggccatcaccaccactacaccgacgttccagcgtggatcggagtggtccatcctcttcacgtcgcgggtacgaagcggcccacacatctcacggtcgtccttcctttcagcacaccccagcaccggagtacaccagggggtcaaccggatcaggggtacccacgtcgagcacggcaccaccacgtccgcagacgatgagtacggttcggcgtcgacgcatcacggagtgcctgcttactcccctcgcacagcattcattgaggacttcttttccactgatcctccccagggggaagtagggatggattactggcacgcagcacctcaggtcacacagccgacgcaggatacggaggccggtcaggggccagacgtgacaccacagcaggcagctagagataggcacccccctgataatttgacatatcccactgagcagattaggcgtaggaagaagggaggacctagcaagcgtgcgaagggcactgatcgtccttga

SEQ ID NO: 90432 - DNA, 342 bp, Oryza sativa
  Clone ID: PAT_MRT4530_89101C.1
aacgttctcgcagctaggcgctcgcttccttgggggacttttttatcctgacgcctgacgttcggatggagagcttcatcatgacacacgacctgcccagagctacagccccaggatgggacccagagaactccttctgagtgccatattcaccgtcttcttcttgcttttgctctgcctcggatgcaagtgcatagccttagagatacacttacacacgaccaagactgcggtccttaaggatgacgccctactgcaacatagctcgacagatccacgacatcgctatttggaatatttctttgaggaaaccaaccatgcaggagctggtggaataatggg

SEQ ID NO: 90433 - DNA, 363 bp, Oryza sativa
  Clone ID: PAT_MRT4530_89102C.1
atgttgctgcagttgacgcgctcccacaagcagcagtcgtcgccgcggccccatgaacgcggcgccgtgccatttgagcgcgtcagagaggagccgatgtccatcagcgccgtcctctcctccacgaagcagccatgggaggacgtggagatattggaatctggcaagcatagcacaaccaagaagaagcagaaggatccccacggaaagctgcagctcatcttggaacaagaagctccaccttctcctacgcttggctcactgagacacctgagaatgatcaatggtggattgctagattgtgtggttttatcatgctgctggggaagcaactttgctttttaccactcttgggctctgtaa

SEQ ID NO: 90434 - DNA, 5877 bp, Oryza sativa
  Clone ID: PAT_MRT4530_89103C.1
atgccgccgttgttgggcgtctacgacttcaccgccggcctgcctccgtcgccgccgactggtgtcctcgcctatgcggttggttggtcacaccaccgttcatgggcgtccacgtcttcaccgaccggctggccttcgccgccgccgactggtgtttccgcctgcacggctggcctattatgccgccgctgttgggcgtctacgacttcaccgccggcctgcctccgtcgccgccgattggtgcctccgcctacacggctggcctattatgccgccgctgttgggcgtctacgacttcaccgccggcttgcctccgtcgccgccgagtggtgcctccgcctacacggctggcctattatgccgccgctgttgggcgtctacgacttcaccgccggcttgcctccgttgccgccgagtggtgcctccgcctacacggctggcctattatgccgccgctgttgggcgtctacgacttcaccgccggcctacctccgtcgccgccgactggtgtcctcgcctatacggttggttggtcacaccaccgttcatgggcgtccacgtcttcgccgaccggctggccttcgccgccgccgactggtgtttccgcctacacggctggcctattatgccgccgctgttggacgtctacgacttcaccgccggcctgcctccgtcgccgccgactggtgtcctcgcctatacggttggttggtcacaccaccgttcatgggcgtccacgtcttcgccgaccggctggccttcgccgccgccgactggatccagatccagatatgcataaaagggattcatggctttaagcttatctcttacgctccaggaatggatcagtcagaacatcaccaccggctcgccttgaccgccgccgactggtgtttccgcctgcacggctggcctttatgccgccgttgttgggcgtctacgtcttcaccgaccggcttgccttcgccgccgccgactggtgtttccgcctgcacggctggcctttatgccgccgttgttgggcgtctacgtctttaccgaccggcttgccttcgccgctgccgactggtgtttccgcctgcacggctggcctttatgccgccgttgttggacgtctacgtcttcaccgaccggcttgccttcgccgccgccgactggtgtttccgcctgcacggctggcctttatgccgccgttgttgggcgtctacgtctttaccgaccggcttgccttcgccgctgccgactggtgtttccgcctgcacgctaccactactgatggacatcatcgtcttccgccgtcgactcgtcttcactaccgtcaaggtgctgtttgggtttatcaagcaattgattggatacaatatcattgctttttgccacgcggttggtaaatcctttatgagtttacttactcggatgttataccatatatgccatatatttccagggttgatgttagagctcctcagattcaatgatgagcctcgtggggatccttcgctgagtccggtgacgcatacaccaaaatctatagctcagcaacaaacctcggtcttgtgccgtttccgtggaggcagccgatggggattaacggtttgtcaaacggaatgcacatcttttgaggcccaggatagcagtcgtcgcggcttcgccgcagatccctgtcgacttgctactttttctgttgttaggatgtcaggtgatatgcccattcgtctgtattatggcgatgctcctatacaaatatgtgatagcagggtggatttgactgtatatgccttccatgatactagtctgaatgcaccggagcatatgggtttgaacgacgtgttagggtggttgtataatatgtttggggtagatccagtgcacgataaatttgtcataaatgccgtgtggccagtgaggggtcaacatggatggcagtggagagtagtggaggttgcgtcaactgggagttggaggaagtttgttagtaaagtaagggagaaaggctatagcctggcaatagtggtgcagaagacaaaatgtgttgatcaatcgggggagtcaagtcatgccgtggtggaagaaactccgttggaagatggacaagctgaaaatgtttggcggactgagcaaggtcgaggggaagaagtagtagagggtaatacacaaggagaggtcattgttcgtggtactaatcgtgaggccaacgactcggacgatgaagaaccggattcgcctatgcgtgttgatgcagcggaggagaatgaggcggtagtggatcagatggaagtggaaaacgaggaatacattgcgcttgtagtggaaggagaagatacaacactgtgggacaacgaaacttacatacccgataattggacgaccatatcaatgagttgtatgaaggtaaacgatggtttagatgcccactggtgttatgatagtaagcaggtgaaagttggacagatgtttcatgacaaaggtcacttacaagatgcggtgaagaggtgggcatttgtccagaagcgtgagttcagggtgaaggtttcaaataggacgacgtatgatgtgaagtgcatacagggtggatgtccttggagagtgcatggttacaagccacaacatgacactttatgggtagcttcgagggttgagcaacatacgtatttgttggagaatacccgtctggtgcacagaaacctgacagcggcatttgtggcacaaatggtatattcaaaggtggttagaaaaacatctttgtcccctttcaccataatgcatgacgttgagaaagagtacggatatgagatatcgtacgacaaggcttggagggcaaaacagaaagcattggagatgaggtttggaacttatgaggattcttatcacaatcttcccccactattggaggtgatgcaggcaagaaacccgggcacacacatggctattctcgatgaggtgaatgaatatggggagaatgttcttcgtcgggctttctggtcatttgggtgcatgatagaggcctttaaaaattgcattcctttgctctgtgttgacggcactttcatgataggcaagtacagaggaacaattctaaccgcgatcggagtcgacgcggatagccatgtcgttcctgttgcttttgcatttgttgaaagcgagaacacatcaagctggctatggtttttgcggcacattaaaatgtgtgttgttgaaaacagaccaaatgtgtgtgttctgcatgaccgacacgccggtttgctatcagcgatacagaagcttcaagaagatgtcacacagtccgtgccatggccagatttacatagcagatggtgcatgcgacattttggggctaatttttatagacaattcaggagtaagagattgatggacctgttcaagaagttatgcaagcagaatcaacaaagaaagtttgatgccatatgggagcaactggatcgtttgaccactacacacatggaagagaatacacgacctctaccacttgttgctatcctggagggcatcacgaggggtacacagaagtatctctgtaaaaggtattccatggctagtctgaacctcagcaaacccagtgttaagtatagcctcgctattacacagtacatggatgagaaaagtaagaagggaggaacccacagagtgtggcctgctgggaatagagagttgttatttgagatacgacttcgtgacaagagtggtgtcggcattgggactactgacatcacattggaatgcacgttgtggccagagtatcacgcttgcaaatgcaattgcaacaagccttacctgttacatcggccatgttcccatgttcttgctgcttccgcaaaagggggtgttgatggaaacatttttgtttctccctactttagaaaggaatcgtgggaggcaacttggcgtggtgaattgcgtggttggcgtgccgtgtgtgatttcactcgtcctcctccagggcaagccaattgggttcctgactcaaatttattagttgatactaagggtcgtcgccagtcacgcaggatcaagaaccttatggatgaagctgaagtgaaagatcgttctcgtcgaactttctgcaatgtgctaaagatgcgaggaccggatcaatattggcgtattgatcctcgttgggttccaaggctgagagcagctgggttgttgacgtttgcacggttggtcgagccttcacgtgcaaggtccgaacgaatccacattgacgcggcgcttatgagtgctcttgtcgataaatggaggcctgagacccacactttccacctcacagttggagagatggtgcccactctgcaggatgtgtcttatttgttggggctgccgatagctgggccagcagttggcccaacaatggtgaatgctggatgggcggatgaccttctggccagttttggtggtgtgctgcctgttgcactggaggatctcacagatgggcacgggcctacgaaaagttggttgaatcagtttcgacaggatgtcttccctgatgaccaggaggagtggatcgtgcagcggcacttagtcgcttacctgttgtggttgtttggatgggtgatgttcacgggaactcacgctgactccgtggacaagcacttcatccactttgcggagcagattgcagagttacctatcgcggagattccacagtacagttgggggtcggcggtacttgcggcgacatatgccggactgtgtgatgcttgcgtgaggaacagcaagcaaagttcactccctggatgcccgttgctacttatgttgtgggcgcacgagcgcttcgacattgggaggcctcagcttgactcgtacgcaaactacggtttgcgagagatgtataggtctggtgttgatgacatcgacgatcgtcccactatgggatccttgtggacacaccgtgagccgcagtgggttagcgggacgacacgtcgtgtctacactcagtttgtagctgactttgatcagcttacgcctgaccgtgttcggtggactccctacactcagcacgatgtcaatgatcgtgcaccgcacggtctcgcggatctttgcacgcgagatatgcaactctggaggacgacttgtcacctcgtgctggacgtgcacgtcgagccacacaatgtccacagggttctcaaacagttgggcatgtatcaggacttccctccgagagatggtcgtcctttggctgatagtcttcataggtactccagaaaggggctcgggctttcctacgagctagttattgtgaccacggttcagccgacggcggaatttgttgagcacgttcacgtggagtccgacaccctgctgcaaagactagaggcgagacctccagtcgtcagatgtggtgcagacgtcgggccgacggccatcaccaccactaccccgacgttccagcgtggatcggagtggtccatcctcttcacgtcgcgggtacgaagcggcccacacatctcacggtcgtccttcctttcagcacaccccagcaccagagtacaccagggggtcagccggatcaggggtacccacgtcgagcacggcaccaccacgtccgcagacgatgagtacggttcggcgtcgacgcatcacggagtgcctgcttactcccctcgcacagcattcattgaggacttcttttccactgatcctccccagggggaagtagggatggattactggcacgcagcacctcaggtcacacagccgacgcaggagacggaggccggtcaggggccagacgtgacaccacagcaggcagctagagataggcacccccctgataatttgacatatcccactgagcagattaggcgtaggaagaagggaggacctagcaagcgtgcgaagggcactgatcgtccttga

SEQ ID NO: 90435 - DNA, 1011 bp, Oryza sativa
  Clone ID: PAT_MRT4530_89104C.1
atgacggcgttccggcgaaattcgggcgacgccgtggcttggccgggagagaggacggcactccagtgccgggagaggtggtggcgacgtcggccggtgcaccggggacgcggcagaggcggccggaggcggagaagtggtggcgacgccactggacgccggcgaggacgcgtctccggtgatttccccgcgaaacggagggctgaccgagggagagggggcagctgcgacgccgggagaggtggcggcgcagccggagggtgcacgggacgtgacagcgatttcactcgtcctcctccagggcaagccaattggtttcctgactcaaatttattagttgatactaagggtcgtcgccagtcgcgcaggatcaagaaccttatggatgaagctgaagcgaaagatcattctcgtcgtaagaaagcttgcattctttgtggggagaaccttgcccataaagattgcagcatgtacaatgtagggaaagacgccgcagctcaacgaccaggagatcggttgagagcagctgggttgttgacctttgcacggttggttgagccttcaagtgcaaggcccgaacgaatccacattgatgcggcgcttctgagtgctcttatggatagatggaggcctgagacccacactttccacctcacagttggagagatggtgcccactttgcaggatgtgtcctatctgttggggctgccgatagctggggcagcagttggcccaacaatggtacatgctggatgggcggacgaccttctagccagttttggtggtgtgctgcctgttgcactagaggatctcacagatgggcacgggccgaggaaaagttggttgaatcagtttcgacaggatgtcttccctgatgaccaggaggagtggatcgtgcaacggcacttagtcgcttaccagttgtggttgtttggatgggtgatgttcacgggaactcacgctgactccgtggacaagcacttcattcactacgcggagcagattgcatag

SEQ ID NO: 90436 - DNA, 1116 bp, Oryza sativa
  Clone ID: PAT_MRT4530_89105C.1
ctagtagctagcatgcagatgctctgtgtcgtacgccctggcctgcacggacgtacgcgcagaaacatatggccttacttggataggatgggacccccaggccatgtgtagcagcagtacccagcagcaggcagctatctgccagccagccttgtgaacccattcatactccccattttttgtgtcaaaggtcccatgttgtaaggtgagcagcttgagggtgaagcgaggaccacattcctggaggcgacaaattacttgcttctcaggttggcttttgctttcagaagtcttagctttcttgtcctttgaagcaattttgttttctttcatctcaaagatgtaccttccaacacgatgaccaaggcgcgtagtgaaattgttcaacactaactctggcttatgacttgtggggttgccgtggttctttatgtccttccgcagaataagtttagatagtttaaaatgtgcagtaggaccagcaggtaaattgatgatcagtagagcatcaggttcccttcggtttgtgtggacaacaacaagtgaagtgaaatctctgttatttgcatattccacaattttcttgagttcataagttcctcttttaacataacacgaattgggtatcacttgcattaactcctcaataaaggcaggtcccctgcctgaattgaagcgacatgtggtaatcaacacttttggagttgtttgctgcttcagaactgcattgaattcatcagcatcattccctgcaaacagctcttggtcgtcgggccggcacacggtctcgtcaggttccctggtgttctcgatcgtccgcggcaccagcttctccggcggctgctcgccgagctcgacggcgcgctgcgcggcctggccgcgctcgcgggcgagcttgcgcttctggccttgcgcttgtccttgttcttgatctgcgacggcagcaccgggtcgggcctctccttcctcggcttcttctccctccggtggtccctcccctcgtcgtcgtcccccggcggcggcgcgtcggcgggctgcctccgcttcctctccttcgccatcgccgtcgccgtcgccgccgtcgtctcgggggaggttgaggtgtgtgcctcgtgc

SEQ ID NO: 90437 - DNA, 376 bp, Oryza sativa
  Clone ID: PAT_MRT4530_89106C.1
ggccctgcaaaagtagaaccccaaaataagcccaaatttggatttcattcttgggcttttatggcatatatatatatatatcagggaaaaggtgggtccatcgaagggaaagaaaactaaaatcaacttgctgcaatttcgacggggggacaaaagcttcaaaatgaggggggaagtaggttgggaacaaacacccagctttccttattccgggtacctaaaactttgccggggaggggacggcatttatatacaagggactgggcccaacctttatatatacaagttatcaaggggatatgatttcgccacgcagttcagggggccgagggcctcaggggggggggggcagccttgataaaccggaaaaattcct

SEQ ID NO: 90438 - DNA, 843 bp, Oryza sativa
  Clone ID: PAT_MRT4530_89107C.1
ggcagcctattgaacagagggagttcgacggggcccaccacctggcgccgcgcggcctgtcgaaccggggtcgttcgacaggtccccccaccgccccctgtcgaacaatgggcgttcgataggcccttttaaagactgtgcgccttggccgcatgcttcttcttgctttgctctggaccacatcgccagccgccgccgagagtcgccattgtgtcgctgatgtcaggtgatatgcccattcgtctgtattatggcaatgctcatatacaaatatgtgatagtggggtggatttgactgtatatgtcttctatgatactagtctgaatgcaccagagcatatgggttcgaacgacctgttagggtggttgtataatatgtttgaggtagatccagtgctcgataaatttgtgataaacgccatgtggccagtgaggggtcaacatggatggcagtggagagtagtggaggttgcgttaactggtagttggaggaagtttgttagtaaggtaagggagaaagggtatagcctgacaatactggtgtggaagacaacatttgttgaccgatcgggggagtctagtcatgccgtggtggaagaaactccgttggaaggtgcacaagtggaaaatgtttggcggactgagcaaggtcaacgggaagaagtagtagagggtaatacacaagcagaggtcattgttcgtgacaataatcgtgaggccaatgactcggacgacgaagaactggattcgcctatgcgtgttgacgcagcagaggagaatgaggcggtagtggatccgatgggcacggggcgatgaaaagttgtggcccgtatggaaaaagga

SEQ ID NO: 90439 - DNA, 1333 bp, Oryza sativa
  Clone ID: PAT_MRT4530_89108C.1
ctagattgcgagcggcgccctttttttttttttttttttatagctcaactcatttgatagatcatcaaaattgcttcaaatgtgcatagaggtctgttacatttgtgatacgattctaagtgcacaaaacgaatatgcagtaatttccgaacaacactaatatttcatctggtgtggcatgaggatcccatgctaaattacaagaaaaatcttcttctgctcgtgtccatgtccggcttgtgaacccattcatactccccattttttgtgtcaaaggtcccatgttgtaaggtgagcagcttgagggtgaagcgaggaccacattcctggaggcgacaaattacttgcttctcaggttggcttttgctttcagaagtcttagctttcttgtcctttgaagcaattttgttttctttcatctcaaagatgtacctgtgatgacggaaaaaaatatagtctctctgattatggaaggtcacaactcgccgaccacggaaattgggttcttgagggaaaagagattgtatcatccttccaacacgatgaccaaggcgcgtagtgaaattgttcaacactaactctggcttatgacttgtggggttgccgtggttctttatgtccttccgcagaataagtttagatagtttaaaatgtgcagtaggaccagcaggtaaattgatgatcagtagagcatcaggttcccttcggtttgtgtggacaacaacaagtgaagtgaaatctctgttatttgcatattccacaattttcttgagttcataagttcctcttttaacataacacgaattgggtatcacttgcattaactcctcaataaaggcaggtcccctgcctgaattgaagcgacatgtggtaatcaacacttttggagttgtttgctgcttcagaactgcattgaattcatcagcatcattccctgcaaacagctcttggtcgtcgggccggcacacggtctcgtcaggttccctggtgttctcgatcgtccgcggcaccagcttctccggcggctgctcgccgagctcgacggcgcgctgcgcggcctggccgcgctcgcgggcgagcttgcgcttctgggccttcttctcgcgcttgagcttcgcgtgcacctccttgcgcttgtccttgttcttgatctgcgacggcagcaccgggtcgggcctctccttcctcggcttcttctccctccggtggtccctcccctcgtcgtcgtcccccggcggcggcgcgtcggcgggctgcctccgcttcctctccttcgccatcgccgtcgccgtcgccgccgtcgtctcgggggaggttgaggtgtgtgttcgtt

SEQ ID NO: 90440 - DNA, 5832 bp, Oryza sativa
  Clone ID: PAT_MRT4530_89109C.1
atggctaacaagtttacaactaagccccatgttttcgatggttcggattttgcttattggtgtgataagatgcaatcttacattatggctgaggattatgatgtttggcaaaaagttgcactgccatatgttattcctgaacaaattgacactattgctttgaaaactgagtttaataacaattgcaaagctcgcaatattcttttgagtggaatttctcgtttggattttaatcgtgtttcgcatcttaaaactgccaatgagatttggaatgctttgaataactttcatcaagagtacataaattttgagatgaaacctggagaagctttagatgattatcttggtagatttaataagattttgagtgatcttcgatttattgattctacttatgatgttaactacacacaatctaaggtttctcattactttttgagtggtcttgacatgtctatttgggagatgaaagttacatcaattcaggagtctgttgatatgtctactttgactttggattcgctttacacaaaactcaaaacatatgagatgaatattctttctcgtaaagttgatcctaagtctagtgctttgttcgaggaggaggatttggctttggctgctaataagatttctcgagctatcaacaatgtcaggtacaggaaaagaggtggttcaactcattgctttgaatgtggtgctcttgatcacattcgatcgcattgtcctaatctttggagaggcaagaaggaagacaatggtggagagaagaccaaggacaacaagctcaagagcacgtttaaggggaagaagactaaggagaatctcaagaagatgtttgatcaagtctatgccgcttttgagccactaagcgatgtagatggtgagaatgaaaatgaagataagggaaagaacatctccggtgtttgcttcatggcacgtggtgaattggattcagagtgtaagacaatgagattagctcgtaaacagaaaaatgagagagaaattgcttttgcaaaatcgaagtggcaaaaatctggttttccctcgaggaaaccggctttggtggcgaggaaggagaacgtgtggatcatggattccggttgttcgcggcacatgaccggtgataaaaattggttctcctccctcaaacaggcatccaagactgaatcgattatctttgatgatgcttctattagtgccgttctttataggtttggtcaaggttttactcagatggagggtttggattttgatggaacttttactcctgttgctagaattgagatttatgtggatgatatcgtatttggttgttcaactcacgctttggttgtggagtttgctgagactatacgcagggaatttgagatgagcatgatgggtgagttatcgtactttttgggattgcaaattaagcaaacacctcaaggccagacatacaatttgctgggtatttgtgtgcatgttttcaagcttctcctcgtgcttcacatcgtcaaacggatgtcaggtgatatgcctattcgtctgtattatggagatgctcctatacaaatatgtcatagcgaagtggatttgactgtatatgccttccatgatactagtctgaatgcaccggagcatatgggtttgaacgacgtgttagggtggttgtataatatgtttggggtagaaccagtgctcgataaatttgtcataaatgtcgtgtggccagtaaggggtcaacatggatggcagtggagagtagtggaggttgcgtcaactgggagttggaggaagtttgttagtaaagccgacgactcggacaatgaagagccggattcacctatgcgtgttgacgcagcagaggagaatgaggcggtagtggatcagatggaagtggaaaacgaggaatacattgcgcttgtagtggaaggagaagatacaacactgtgggacgacgaaaccaacatacctgatgattggatgaccatatcgatgagttgtatgaaggttaacgatggtttaaatgcccactggcgttatgatagtaagcaggtgcaagttgggcagatgtttcatgacaaatgtcacttaaaagttgcggtgaagaggtgggcatttgaccagaagcgtgagttcagggtgaaggtttcaaataggacgacgtacaaagtgaagtgcacacaggctggatgtccttggagagtgcatggttacaagccacaacatgacactttatgggtagattcgagggttgagcaacatacgtgtttgttggagaatactcgtctggtacataggaacaagacagcggcctttgtggcacaaatggtatattcaaaggtggttagaaaaacatctttgtcccttttcacaataatgcatgacgtagagaaagagtacggatatgagatatcgtacgacaaggcttggtgggcaaaacagaaagcactggagatgaggtttggaacttatgaggattcttatcacaatcttcccccactattggaggtgatgcaggcaagaaacccaggcacacacatggctattctcgatgaggtgaatgaatatggggagaatgttcttcgtcgggctttctggtcatttgggtgcatgatagaggcctttaaaaattgcattcctttgctctgtgttgatggcactttcatgacaggcaagtacagaggaacaattctaaccgcgatcggagttgacgcggatagccatgtcgttcctgttgcttttgcatttgttgaaagcgagaacacatcaagctggctatggtttttgcggcacattaaaatacaattcaggagtaagagattgatggacctgttcaagaagttatgcaagcagaatcaacaaagaaagtttgatgccatatgggagcaactggatcgtttgaccactacacacatggaagaggttaggaaaaaacccatagttgccagacaggaggagccggagggacttgaacccattcctaatgaagcaccaagtattactcggcgcaggaagcgtggaagggccacgaagtgcttcacggagtgggtagaatttgagccaagggagaaatggtcgttgttgtacgatacagatggatcgaggtatggtgtgatgacaacaaatcttgctgaagtatataattgggttatgaagaatacacgacctctaccacttgttgctatcctggagggcatcacgaggggtacacagaagtatctctgtaaaaggtattccatggctagtctgaacctcagcaaacccagtgttaagtatagccccgctattacacagtacatggatgagaaaagtaagaagggaggaatccacagagtgtggcctgctgggaatagagagttgttatttgagatacgacttcgtgacaagagtggtgtcggcattgggactactgacatcacattggaatgcacgttgtggccagagtatcacgcttgcaaatgcaattgcaacaagccttacctgttacatcggccatgttcccatgttcttgctgcttccgcaaaagggggtgttgatggaaacatttttgtttctccctactttagaaaggaatcgtgggaggcaacttggcgtggtgaattgcgtggttggcgtgccgtgtgtgatttcactcgtcctcctccagggcaagccaattgggttcctgactcaaatttattagttgatactaagggtcgtcgccagtcacgcaggatcaagaaccttatggatgaagctgaagtgaaagatcgttctcgtcgtatggctgatcaaaatgatgggcagctgatagacaaggagatcgataggaaccatcgatcgcgacgtcttagtacaggaactttctgcaatgtgctaaagatgcgaggaccggatcaatattggcgtattgatcctcgttgggttccaaggctgagagcagctgggttgttgacgtttgcacggttggtcgagccttcacgtgcaaggtccgaacgaatccacattgacgcggcgcttatgagtgctcttgtcgatagatggaggcctgagacccacactttccacctcacagttggagagatggtgcccactctgcaggatgtgtcttatttgttggggctgccgatagctgggccagcagttggcccaacaatggtgaatgctggatgggcggatgaccttctggccagttttggtggtgtgctgcctgttgcactggaggatctcacagatgggcacgggcctacgaaaagttggttgaatcagtttcgacaggatgtcttccctgatgaccaggaggagtggatcgtgcagcggcacttagtcgcttacctgttgtggttgtttggatgggtgatgttcacgggaactcacgctgactccgtggacaagcacttcatccactttgcggagcagattgcagagttacctatcgcggagattccacagtacagttgggggtcggcggtacttgcggcgacatatgccggactgtgtgatgcttgcgtgaggaacagcaagcaaagttcactccctggatgctcgttgctacttatgttgtgggcgcacgagcgcttcgacattgggaggcctcagcttgactcgtacgcaaactacggtttgcgagagatgtacaggtctggtgttgatgacatcgacgatcgtcccactatgggatccttgtggacacaccgtgagccgcagtgggttagcgggacgacacgtcgtgtctacactcagtttgtagctgactttgatcagcttacgcctgaccgtgttcggtggactccctacactcagcacgatgtcaatgatcgtgcaccgcacggtctcgcggatctttgcacgcgagatatgcaactctggaggacgacttgtcacctcgtggtggacgtgcacgtcgagccacacaatgtccacagggttctcaaacagttgggcatgtatcaggacttccctccgagagatggtcgtcctttggctgatagtcttcataggtactccagaaaggggctcgggctttcctacgagctagttattgtgaccacagttcagctgacggtacaagagtgggagcacgcagctgataacttggcacttcagacacctccagacgatgggagttattatggagcttaccttcgttggtaccgcagtgttacacgatggaggtgttttcctccacaaggagatagcaccgtcccccaccaggcagcgattactgacacgtttgcccctcagcctagatcagcttacaactcaatggcggaatttgttgagcacgttcacgtggagtccgacaccctgctgcaaagactagaggcgagacctccagtcgtcagatgtggtgcagacgtcgggccgacggccatcaccaccactaccccgacgttccagcgtggatcggagtggtccatcctcttcacgtcgcggggagcatctgggtcggcacacttcccttacatgccaacgggggacaacgtgttgaacacaccagcatggggacttcatatcactccgcgtgcgccagagcagggccacacacagcacacatacgatgagtacggttcggcgtcgacgcatcacggagtgcctgcttactcccctcgcacagcattcattgaggacttcttttccactgatcctccccagggggaagtagggatggattactggcacgcagcacctcaggtcacacagccgacgcaggagacggaggccggtcaggggccagacgtgacaccacagcaggcagctagagataggcacccccctgataatttgacatatcccactgagcagattaggcgtaggaagaagggaggacctagcaagcgtgcgaagggcactgatcgtccttga

SEQ ID NO: 90441 - DNA, 954 bp, Oryza sativa
  Clone ID: PAT_MRT4530_8910C.1
aacacactaactacaagggtgcgtgtacgactactcttgcaagaagaagccaaagaacagctcaagtgcaactctacttgtacacgccatgaggccagtagccgagctcgcgagcgcgccggcgtcgtacgcgcacgcggcgaacgggacggcggcgcactcgccgtggcagtcgccggtgccgtacctcttcggcgggctggcggcgatgctggggctcatcgcgttcgcgctgctcatcctggcgtgctcctactggaagctctccggctacctcgacggcggctcggggaacggccaggcgtccgggtcggcggcggcgggggagggcgccgagggggagaagggatcggcggccggagcggccaggccggcgctggggttccgggaacacgtggtggtcatcatggccggcgacgagaggcccacgttcctcgccatgccggcgacgagccggcccgccgtcgagctcggtgccgccccggtggccagctcgtgcggctgctcgcactcggaggaggagaagaaggtggaggagtttagaacatgcaggcaaaaagaaaaaggaaaatgtttgaattccagctgtttcaatcagctgataactacgagtaacacaggtttaggaaacaatcagaaaggtacgcagcttcgtttccgaataccgattccagcttattccatttggcagcagccaggaacatttcatatcaaactagtggaagagcacctgaagaagcaccgggaattcgggagcttgggcctgcctgttgggagatccctgaatttgattcttctcctctcccacacttcaacttgtgccgggatttgatagtgggagagttgggtgagggagggaggtgggagaggggtgaggggtttacggatatgattgtagggggttggagagtgtaggaggtgaggtatgtgttgttgggtgataggggtggcggg

SEQ ID NO: 90442 - DNA, 1748 bp, Oryza sativa
  Clone ID: PAT_MRT4530_89110C.1
tcagtcttttttttttttttttgaaaatattgtgttacctctagtctaagctacaacatcgataaaaataaatgatccagcatgcaattcactccaacttaaatattctacaaggatttttactactatggcggaaatatactatagtatgacctggtatgtttatgttggaccaaagcggtgcagaaggctagccccgttaaccattactgttcatctccctatccgtctcctttcagtcacttttccactggagttacgagttctaacaagcgtgagttcttcggctgaccttggtcacagggcgccgcttttcaccccgcgcatggcggccagaagtccgctcccggagcccgctccccccgtcacaatgcatccgagaacctcgccgtctccgttaccctgctccgcgcgcagcgtgccctgctgcaccggcgtgccccgccggccgaccatgcccggcgcttggtaccaggcaagccagcttccacccactcattccggggtaagcgcgtggactgcccgactgcgatcagcggctgcagcctccccactagtccgtcccaccgcccgtcagcgcacaaaaacacaccggcgtgggttttcgagtcaagccatgcgaggcactggtggcgctctgtactgtcctcctcccgcggctttatcagtggccctatgcagtgcagcggcggcgttcgacgccctgggaacgtgcagagaccggcgacgatggcgtcggccgcgcgccgctcgagggagtggcagctatttaccataacaccgtgcgagttgcacacctgttcggacaaggcgaggaagtgcctgctgctcacgctgtcgcggtctaactgagacatggggaggtgatctgccggtatcggtgggatacccggcgcgtgcacgaggtcaccactgagatctctgaagctcatggtattctcctcttggatgactggaaggtacagcagaaaagcgaggctagcgatgcaagtggtgaggaagaagtacgtcgggatgcggagctcggcgccaacgtcgagggcgatagatcggggccggaagcccgtgcaaactcgaagacccgagcgagacacgtaatcatcagcgggcacgttgcaggggagcgtgggttgcgggaggcggtggaaggagagctctgggttggtggcggcggcgtccgctaggaaagacgcggtagcagcggcgcccccgtcgtcctggccgccgaggacgatggtgacatcgatgccgtgcggcacgagcagcttgccgagctccaccgtggagaccaggtggccgatcatccccggcggcgggtagatgacagccagcttcttcggactcatttcgggataagagcgtggactccgcgactcccacatggctgccaaactccgctctcggagctctcttccaccgtttgaatccatgatccacctcgccttctcctgaatctcctctgctgtaacgacccctttatcatacccttccaccgccacggccaagcgcatctcttctaccaagaacaccttgttcatcctctgctccgcgtacaacggccatgccagcatgggcactcccgctgtgagcgcctccagcatcgagttccatccacagtgtgtcacgaacccgcccaccgcgctatgctccagcaccttgcgttgcggtgcccacgacatgaccacgagcccccttcccttggtccggcgaaggaagccttccgggaagggggctttttccacgcgcat

SEQ ID NO: 90443 - DNA, 4835 bp, Oryza sativa
  Clone ID: PAT_MRT4530_89111C.1
atgggcgttcgacaggccggtttaaagccccgtctccccagctcgcgatgcttgttcgatttatttgaggaccacatcgccagccgccgtcgagagtcgccacatcgtcgccgtgatatgcccattcgtctgtattatggcgatgctcctatacaaatatgtgatagcggggtggatttgactgtatatgccttccatgatactagtctgaatgcaccggagcatatgggtttgaacgacgtgttagggtggttgtataatatgtttggggtagatccagtgcacgataaatttgtcataaatgccgtgtggccagtgaggggtcaacatggatggcagtggagagtagtggaggttgcgtcaactgggagttggaggaagtttgttagtaaagtaagggagaaaggctatagcctggcaatagtggtgcagaagacaaaatgtgttgatcgatcgggggagtcaagtcatgccgtggtggaagaaactccgttggaaggtggacaagctgaaaatgtttggcggactgagcaaggtcgaggggaagaagtagtagagggtaatacacaaggagaggtcattgttcgtggtactaatcgtgaggccaacgactcggacgatgaagaaccggattcgcctatgcgtgttgatgcagcggaggagaatgaggcggtagtggatcagatggaagtggaaaacgaggaatacattgcgcttgtagtggaaggagaagatacaacattgtgggacaacgaaacttacatacccgataattggacgaccatatcaatgagtcgtatgaaggtaaacgatggtttagatgcccactggtgttatgatagtaagcaggtgaaagttggacagatgtttcatgacaagggtcacttacaagatgcggtgaagaggtgggcatttgtccagaagcgtgagttcagggtgaaggtttcaaataggacgacgtatgacgtgaagtgcatacagggtggatgtccttggagagtgcatggttacaagccacaacatgacactttatgggtagcttcgagggttgagcaacatacgtgtttgttggagaatacccgtctggtgcacagaaacctgacagcggcatttgtggcacaaatggtatattcaaaggtggttagaaaaacatctttgtcccctttcaccataatgcatgacgttgagaaagagtacggatatgagatatcgtacgacaaggcttggagggcaaaacagaaagcattggagatgaggtttggaacttatgaggattcttatcacaatcttcccccactattggaggtgatgcaggcaagaaacccgggcacacacatggctattctcgatgaggtgaatgaatatggggagaatgttcttcgtcgggctttctggtcatttgggtgcatgatagaggcctttaaaaattgcattcctttgctctgtgttgatggcactttcatgacaggcaagtacagaggaacaattctaaccgcgatcggagtcgacgcggatagccatgtcgttcctgttgcttttgcatttgttgaaagcgagaacacatcaagctggctatggtttttgcggcacattaaaatgtgtgttgttgaaaacagaccaaatgtgtgtgttctgcatgaccgacacgccggtttgctatcagcgatacagaagcttcaagaagatgtcacacagtccgtgccatggccagatttacatagcagatggtgcatgcgacattttggggctaatttttatagacaattcaggagtaagagattgatggacctgttcaagaagttatgcaagcagaatcaacaaagaaagtttgatgccatatgggagcaactggatcgtttgaccactacacacatggaagagaatacacgacctctaccacttgttgctatcctggagggcatcacgaggggtacacagaagtatctctgtaaaaggtattccatggctagtctgaacctcagcaaacccagtgttaagtatagccccgctattacacagtacatggatgagaaaagtaagaagggaggaatccacagagtgtggcctgctgggaatagagagttgttatttgagatacgacttcgtgacaagagtggtgtcggcattgggactactgacatcacattggaatgcacgttgtggccagagtatcacgcttgcaaatgcaattgcaacaagccttacctgttacatcggccatgttcccatgttcttgctgcttccgcaaaagggggtgttgatggaaacatttttgtttctccctactttagaaaagaatcgtgggaggcaacttggcgtggtgaattgcgtggttggcgtgccgtgtgtgatttcactcgtcctcctccagggcaagccaattgggttcctgactcaaatttattagttgatactaagggtcgtcgccagtcacgcaggatcaagaaccttatggatgaagctgaagtgaaagatcgttctcgtcgtatggctgatcaaaatgatgggcagctgatagacaaggagatcgataggaaccatcgatcgcgacgtcttagtacaggaactttctgcaatgtgctaaagatgcgaggaccggatcaatattggcgtattgatcctcgttgggttccaaggctgagagcagctgggttgttgacgtttgcacggttggtcgagccttcacgtgcaaggtccgaacgaatccacattgacgcggcgcttatgagtgctcttgtcgatagatggaggcctgagacccacactttccacctcacagttggagagatggtgcccactctgcaggatgtgtcttatttgttggggctgccgataactgggccagcagttggcccaacaatggtgaatgctggatgggcggatgaccttctggccagttttggtggtgtgctgcctgttgcactggaggatctcacagatgggcacgggcctacgaaaagttggttgaatcagtttcgacaggatgtcttccctgatgaccaggaggagtggatcgtgcagcggcacttagtcgcttacctgttgtggttgtttggatgggtgatgttcacgggaactcacgctgactccgtggacaagcaattcatccactttgcggagcagattgcagagttacctatcgcggagattccacagtacagttgggggtcggcggtacttgcggcgacatatgccggactgtgtgatgcttgcgtgaggaacagcaagcaaagttcactccctggatgcccgttgctacttatgttgtgggcgcacgagcgcttcgacattgggaggcctcagcttgactcgtacgcaaactacggtttgcgagagatgtacaggtctggtgttgatgacatcgacgatcgtcccactatgggatccttgtggacacaccgtgagccgcagtgggttagcgggacgacacgtcgtgtctacactcagtttgtagctgactttgatcagcttacgcctgaccgtgttcggtggactccctacactcagcacgatgtcaatgatcgtgcaccgcacggtctcgcggatctttgcacgcgagatatgcaactctggaggacgacttgtcacctcgtggtggacgtgcacgtcgagccacacaatgtccacagggttctcaaacagttgggcatgtatcaggacttccctccgagagatggtcgtcctttggctgatagtcttcataggtactccagaaaggggctcgggctttcctacgagctagttattgtgaccacggttcagccgacggtacaagagtgggagcacgcagctgataacttggcacttcagacacctccagacgatgggagttattatggagcttaccttcgttggtaccgcagtgttacacgatggaggtgttttcctccacaaggagatagcaccgtcccccaccaggcagcgattactgacacgtttgcccatcagcctagatcagcttataactcaatggcggaatttgttgagcacgttcacgtggagtccgacaccctgctgcaaagactagaggcgagacctccagtcgtcagatgtggtgcagacgtcgggccgacggccatcaccaccactaccccgacgttccagcgtggatcggagtggtccatcctcttcacgtcgcggggagcatctgggtcggcacacttcccttacatgccaacgggggacaacgtgttgaacacaccagcatggggacttcatatcactccgcgtgcgccagagcagggccacacacagcacacatacgatgagtacggttcggcgtcgacgcatcacggagtgcctgcttactcccctcgcacagcattcattgaggacttcttttccactgatcctccccagggggaagtagggatggattactggcacgcagcacctcagaacgcgaccctgtcgaactgcggcagttcgacggacatcctgttgaactgcggcagttcgacagcccagcctgtcgaacgggggctgttcgacagccctgcctgtcgaacgggggccgttcgacaggtcctgtcgaacggcagccttccgatctcgtcgccagtcgcgctctggccgttcgataggcgccctatcgaactgcacccgttcgacagggacctattttcgcgattttccccggttgaccactcgccgatgccggaggaggcgccggtaatgaggacgacctttcctctgagttgctctctcctcagcggcttcacgaacgcccacaagaacagccggacaggtacagacagtgggatgtacaccaacaccaccagcgcggcgacgacgtgcatcagcacactgtggatcgggaggtaaacacgacccat

SEQ ID NO: 90444 - DNA, 4645 bp, Oryza sativa
  Clone ID: PAT_MRT4530_89112C.1
atatgcaaatggatttgatcgatcaaacgaatgtgttttgtgcttgtgtgtaacataatatacatatgcataccaagtactacatatacagaaagttacataaacgcgcactcaaaatacacagcttacaagcaacgtacacagatgtaggcaatagtatgtatgtactactaacatgtctgtatgtgtatgtactactaagaaacaaattagttaatgcacaagctgcattaacatgacagatcaggatcagccaactcacggtcacagtacaatcaccttctgcctgcggaacggtgacagtagggagaacgaccgagaagctttagatgaagaaccagagtcatctcgcgaaatgagggttttcagcattgacccatcaatggagttgctcttcaccgatagactgatagtattcaatggagttgtaaagcctgatgtgtggctctttctaccaaacttcaaaagtttcctgaagccttttgattccttattacgaggtttttcatttgcttcaggggtctcctccactgaaactgtcgatactgggtctagtactcgagccctaatgctctcggcatgcacaggtgtttcagattcaactggtagtgcatgggggtaagcatgaatggtggctgaatcattctccaacgatgtcaccctagcaaaaggggcctggtagggtttctccacagcagacaaggtcaattcctcagtctcatccttcagatgctccgtcatcacctcgtaattaccctggtcattgtgtctatggatggtggggttctcagcttcaggaagaacagctggagaaggtggagccctgatggcagtgtactccaattccatactgggcttctgtgttctgtcattgctagaagtttcattctctgatgttcttccaggaggtagaatgagaggaggtgttgaaaccacctcattttcaagaatcacaacagtcttctcaaccaccacattatcatcactgttgcttatcctggagacttctccaggatccccatcccttatttctctagcaattgtcttatttttcacagatatagagggagctcgtggagatttgactttgagttctggtagagttgctgatttcctctggtcgagctgcattatagcagatattttctttgtttgggtatcttctggcatgcttttccttcgtgaatggtccatgctagcaaactttgaatttgaaggacggtcggtcaaagcattacttttaggttcagcaagtttcttcaatctctcactggacaattcatttctcccatttttctctttcttcatcgctgccaatgatgaggttgatttactcactgcatttgtactactatcgcttagtttgctagcttttcctgttttctgatggtcactctctgcagtagttctagcaggaagctttcttagaggtgaaaaggatcctggttcagcatcactaaactttgaactcttgtaggtactgggagaagtctttggtgaaggtttcactttgacctgctgtggtgttgatattgaattagatgtgctacttcttgcagcaatcctcttctgcctctcttgcttaactggaccattcattttaatctgttcctcttcctgctctttctttgccttttgaaggtctgctttatatgcccgcaggttttgtgcacgtttctgtgcatctgttagccgggtttttgacgatggcaatctcctggccgaagcatccttctttttatccaaacattcctgtaatctaagcttcttatctttctctagcttctttacttcaccctcaacccccagtgatacatcatccgcatttgcatcttcatggtggagatattgaattagatgtgctacttcttgcagctatcctcttctgcctctcttgcttaagcctttccagccgtttaatctgttcctcttcctgctctttctttgccttttgaaggtctcagcctttgcatctgttgtcttcttaacagttccaggaagctcaacatctatatcaatggcggtacagctttctggtccaagattatcctgtgagttagacctaacaggtatcataaaggactcatcagccacactatgcatgttcttttccatcagggttggactcttgtactgtccctctgcaagaggatccaaataactcccactgtccattggcttttcctgaccataaacgatgaagtcttcacttgctcctctcctgtatcctccacctccagcttctatctccttaatatcgccatccacaaaactcctaccttcagccgagatcacaagttcgtcaccagacagcattttcctggacctaatcctcccatgggctgaattgaaaccaattgtcttcccttcattgaaatcggtagaatctcgctccactaaaagaagaggatcatcagtggttctgctttctttccttcttgctggcggtggtcctctctcagtagcaaataggtctgcgtcattatcttttgtcttctcttcagttcttagcaagaaactctggaagacattccagtttccttggtctccatcttgcctgtgagctacttcatccctgctatactcatctccaggctcaagaatgatttttctgctctcctttttctttgaactagatctcttattctttcgcttgctgtattcagtgtgtgaatcatcactgtcctcagatgctacatcagaactcgtttgtgactcgctctctgatgagccatgcttttttgacgtcacattgatgttccttatgacaactacactgggtttcttcttgcctgatcgcttgccctttttatgcaacttgtggccatgagagctctctatctctgaaccactctggccactttcatcatccaatgtttctgagtccttgctatctgacgagtgcttccttgatactctcctctctgagtggtggtacctaggatcatccattggggggtagggtggagggtagtatgggttcaccccagggtagtaaggcatgccttgcatgggatatggtggatgaattgcccatggtggatatgctgattgatatggaccatggaggtattcgctgggagctcctgagtgctgagctgtcctctgatcagctttagcagcatcttcaccatttgcatctccattcgaaatagaaagcgtttccaggttttgcttcatgttgtctcccataaacataattccagaagcattaaagggaggaaattcagaccgtgcagacattgcctccggttcaacttcaatccattggccagtttcatgctttcttctccacaactcagtgaactgtgtgcatgccttcatcaagcgtgaagcaccaaaacggtctgcgaatgtgatcaaaaatcccaggttgtcaatattaaacccagccgctacagcacgcgcaaaggccatagcctgctccttacgtaagacaattttgcgagtctccagaactctaagtaattgaacttttgaattctcctcctgagttgcattatcattctgcacaggtggaggtggttgaatgcccggcttgtacagaataagtgatttatccccatcaagatcgtaatttgtcttgctacctccaatgcattccgccaatttttcattataatcttctacagatctcaatccaagattgtcaccgccctggccagtgatggcatcctcgatctgcaatatctcagactctatagtcgttactcgttccaggacctctggtgtactgacgaaacggacaaacctctccacggtgccccttgtaaaccatggtgcatcaatctctgggtctacctcaagtgtgatggagtaccctccctttgcaatctgttgttgggcaaccttgagatgtgcaacgaacgggttcagcaaaccagaggctatcttctccttccgtccatttgctatcacaactaaatcacaccttgtgcgggtgggggtgagctggaacaccgctgaatcaagccgcgtctccggcctcattgcagagcgattcttcccaatccctccttctcttcagatcttggagtatgattggatcatcagatgctatggaccagcggaggaaagaacaaagaaaggagagaattttggaacagagcaaatgcaggttgagacagactccctccctcccagtactgggattgattggattccttgttaccagtagaagaagggaacaacgacaatagaaacagagataataaataatatcaagggcaggaaagaaaaataaatactgctagtaaattagatagataaacggcgaggcatggaaccaagagagaggagagtggtgcagacagagagacacaaggattggcttttattatcggagatggtggttgttggattagaaatgaagaaactttctctataataatgagatgagaaatgaagaaaatgtttttaagaataacgagaaacgaagaaacttcttttttttagaataacgaaaaaaattatagaaaaaaaatgagaaatggagaaactacgctatctccaacatatgtgtattggcatgaagtatccgattcagttatggatgacttaatgatgtggtaatgatcttgattataatgatgatgatgaggtggttgcgtagttacggacgcgtgggtcgacccgggaattccgg

SEQ ID NO: 90445 - DNA, 4650 bp, Oryza sativa
  Clone ID: PAT_MRT4530_89114C.1
atgtcaggtgatatgcccattcgtctgtattatggcgatgctcctatacaaatatgtgatagcggggtggatttgactgtatatgccttccatgatactagtctgaatgcaccggagcatatgggtttgaacgacgtgttagggtggttgtataatatgtttggggtagatccagtgcacgataaatttgtcataaatgccgtgtggccagtgaggggtcaacatggatggcagtggagagtagtggaggttgcgtcaactaggagttggaggaagtttgttagtaaagtaagggagaaaggctatagcctggcaatagtggtgcagaagacaacatgtgttgatcgatcgggggagtcaagtcatgccgtggtggaagaaactccgttggaaggtggacaagctgaaaatgtttggcggactgagcaaggtcgaggggaagaagtagtagagggtaatacacaaggagaggtcattgttcgtggtactaatcgtgaggccaacgactcggacgatgaagaaccggattcgcctatgcgtgttgatgcagcggaggagaatgaggcggtagtggatcagatggaagtggaaaacgaggaatacattgcgcttgtagtggaaggagaagatacaacactgtgggacaacgaaactaacatacccgatgattggacgaccatatcaatgagtcgtatgaaggtaaacgatggtttagatgcccactggtgttatgatagtaagcaggtgaaagttggacagatgtttcatgacaaaggtcacttacaagatgcggtgaagaggtgggcatttgtccagaagcgtgagttcagggtgaaggtttcaaataggacgacgtatgacgtgaagtgcatacagggtggatgtccttggagagtgcatggttacaagccacaacatgacactttatgggtagcttcgagggttgagcaacatacgtgtttgttggagaatacccgtctggtgcacagaaacctgacagcggcatttgtggcacaaatggtatattcaaaggtggttagaaaaacatctttgtcccctttcaccataatgcatgacgttgagaaagagtacggatatgagatatcgtacgacaaggcttggagggcaaaacagaaagcattggagatgaggtttgaaacttatgaggattcttatcacaatcttcccccactattggaggtgatgcaggcaagaaacccaggcacacacatggctattctcgatgaggtgaatgaatatggggagaatgttcttcgtcgggctttctggtcatttgggtgcatgatagaggcctttaaaaattgcattcctttgctctgtgttgatggcactttcatgacaggcaagtacagaggaacaattctaaccgcgatcggagtcgacgcggatagccatgtcgttcctgttgcttttgcatttgttgaaagcgagaacacatcaagctggctatggtttttgcggcacattaaaatgtgtgttgttgaaaacagaccaaatgtgtgtgttctgcatgaccgacacgccggtttgctatcagcgatacagaagcttcaagaagatgtcacacagtccgtgccatggccagatttacatagcagatggtgcatgcgacattttggagctaatttttatagacaattcaggagtaagagattgatggacctgttcaagaagttatgcaagcagaatcaacaaagaaagtttgatgccatatgggagcaactggatcgtttgaccactacacacatggaagaggttaggaaaaaacccatagttgccagacaggaggagccggagggacttgaacccattcctaatgaagcaccaagtattactcggcgcaggaagcgtggaagggccacgaagtgcttcacggagtgggtagaatttgagccaagggagaaatggtcgttgttgtacgatacagatggatcgaggtatggtgtgatgacaacaaatcttgctgaagtgtataactggtttatgaagaatacacgacctctaccacttgttgctatcctggagggcatcacgaggggtacacagaagtatctctgtaaaaggtattccatggctagtctgaacctcagcaaacccagtgttaagtatagccccgctattacacagtacatggatgagaaaaggggtgttgatggaaacatttttgtttctccctactttagaaaggaatcgtgggaggcaacttggcgtggtgaattgcgtggttggcgtgccgtgtgtgatttcactcgtcctcctccagggcaagccaattgggttcctgactcaaatttattagttgatactaagggtcgtcgccagtcgcgcaggatcaagaaccttatggatgaagctgaagtgaaagatcgttctcgtcgtatggctgatcaaaatgatgggcagctgatagacaaggagatcgataggaaccatcgatcgcgacgtcttagtacaggaactttctgcaatgtgctaaagatgcgaggaccggatcaatattggcatattgatcctcgttgggttccaaggcagagagcagctaggttgttgacgtttgcacggttggtcgagccttcacgtgcaaggtccgaacgaatccacattgacgcggcgcttatgagtgctcttgtcgatagatggaggcctgagacccacactttccacctcacagttggagagatggtgcccactctgcaggatgtgtcttatttgttggggctgccgatagctgggccagcagttggcccaacaatggtgaatgctggatgggcggatgaccttctggccagttttggtggtgtgctgcctgttgcactggaggatctcacagatgggcacgggcctacgaaaagttggttgaatcagtttcgacaggatgtcttccctgatgaccaggaggagtggatcgtgcagcggcacttagtcgcttacctgttgtggttgtttggatgggtgatgttcacgggaactcacgctgactccgtggacaagcacttcatccactttgcggagcagattgcagagttacctatcgcggagattccacagtacagttgggggtcggcggtacttgcggcgacatatgccggactgtgtgatgcttgcgtgaggaacagcaagcaaagttcactccctggatgcccgttgctacttatgttgtgggcgcacgagcgcttcgacattgggaggcctcagcttgactcgtacgcaaactacggtttgcgagagatgtacaggtctggtgttgatgacatcgacgatcgtcccactatgggatccttgtggacacaccgtgagccgcagtgggttagcgggacgacacgtcgtgtctacactcagtttgtagctgactttgatcagcttacgcctgaccgtgttcggtggactccctacactcagcacgatgtcaatgatcgtgcaccgcacggtctcgcggatctttgcacgcgagatatgcaactctggaggacgacttgtcacctcgtgctggacgtgcacgtcgagccacacaatgtccacagggttctcaaacagttgggcatgtatcaggacttccctccgagagatggtcgtcctttggcagatagtcttcataggtacttcagaaaggggctcgggctttcctacgagctagttattgtgaccacggttcagccgacggtacaagagtgggagcacgcagctgataacttggcacttcagacacctccagacgatgggagttattatggagcttaccttcgttggtaccgcagtgttacacgatggaggtgttttcctccacaaagagatagcaccgtcccccaccaggcagcgattactgacacgtttgcccctcagcctagatcagcttacaagtcaatggcggaatttgttgagcacgttcacgtggagtccgacaccctgctgcaaagactagaggcgagacctccagtcgtcaggtctgacgacgtggcgagtgtccttcgcaacttccgtgcacgtgctgccgcactactacgtcgtgtctcctgtcggagcgcggcagatgtggtgcagacgtcgggccgacggccatcaccaccactaccccgacgttccagcgtggatcggagtggtccatcctcttcacgtcgcgggtacgaagcggcccacacatctcacggtcatccttcctttcagcacaccccaacaccggagtacaccagggggtcagccggatcaggggtacccacgtcgagcacggcaccaccacgtccgcaggtattccaaactccgccttatgttcacccctcacagggagtatctgggtcggcacacttcccttacatgccaacgggggacaacgtgttgaacacaccagcatggggacttcatatcactccgcgtgcgccagagcagggccacacacagcacacatacgatgagtacggttcggcgtcgacgcatcacggagtgcctgcttactcccctcgcacagcattcattgaggacttcttttccactgatcctccccagggggaagtagggatggattactggcacgcagcacctcaggtcacacagccgacgcaggagacggaggccggtcaggggccagacgtgacaccacagcaggcagctagagataggcaccccctgataatttga

SEQ ID NO: 90446 - DNA, 566 bp, Oryza sativa
  unsure (1)..(566): unsure at all n locations
  Clone ID: PAT_MRT4530_89115C.1
gattctgcacgagcttcgctgctcaggaaaagtnnnacagaaaaatctccnanngctctccngncggccaccaccagctccttcctcccctccgcgctctccgcccgcaatganggancggtgaaagactcggcgttcttgggcgttcgtctcggcgacnggctcaagctgganaccantgctctcggcttcgcaccaanaaggtgagcacntcntcngtggccatccccgcgcatgcgtctgcngcggtgtcgtccccnacngtganacctgcgtctccctcnggcaancatacctncncaanggcacggcggtcntctccggcgcntcctccgggcttggcctcccgacagctaaagcgctggcggaaanaggcangtggcacntcntcatggggtgccccnacttcctcaangcgtcncgccccccaanggcgccggcatggaaaaaggcactacaccatcctccacctccaactggcgtcctcnacaacgtcnggcagttcgtcccccacntccngggggtgganataccctccaacttgtggtgttcnacccccccctgtt

SEQ ID NO: 90447 - DNA, 478 bp, Oryza sativa
  Clone ID: PAT_MRT4530_89116C.1
ctgttggtattttttacgaccacagataaatccgcaagcccatggaataccgctgaagcacttcaccttcgggtgaccccaaaaggatatcgaactcagggaacgattattaggacggaattcagggttgtcaccacctgccgcctacctctgacaaatccgtgggatacacaacaaacaaagagaagtttctctgaacccgaagcagagtgtactgacagctccggtactcctccagaattcctcctaggaagctacactcgttgaggtagaagtcggatgagtgccaaacttccagacactcctacatagctttctctcactccctaccttattataatgtacaaaagatacaatagagcctcttgtaattcagctcaaagttgtgtgtgttggaatgagagtgagctcctccttttataggctccaaatgacggttaggggtatggggaatgaccaaaacaccatgcaaccgcct

SEQ ID NO: 90448 - DNA, 777 bp, Oryza sativa
  Clone ID: PAT_MRT4530_89117C.1
atggggagggcgccgtgctgcgagaagatggggctgaagagggggccgtggacggcggaggaggacaggatcctggtggcgcacatcgagcggcacgggcacagcaactggcgcgcgctgccgaggcaggccggccttctccgctgcggcaagagctgccgcctccggtggatcaactacctccgccccgacatcaagcgcggcaacttcacccgcgaggaggaggacgccatcatccacctccacgaccttctcggcaaccgatggtccgcgattgcagcgaggctgccggggaggacggacaacgagatcaagaatgtgtggcacactcacctcaagaagcggctggagccgaagccgtcgtccggccgggaagccgccgcgcccaagcgaaaggcgaccaagaaggctgcggcggtggcggtggcgatcgacgttccgaccaccgtgccggtgtcgccggagcagtcgctctcgaccacgacgacgtcggccgccaccaccgaggagtactcgtactcgatggcctcctccgcggatcacaacaccacggacagtttcacctcggaggaggagttccagatcgacgacagcttctggtcggagacgctggcaatgacggtggacagcaccgactccgggatggagatgagcggcggcgatcctctcggcgcgggcggtgcctcgccgtcgtcgagcaacgacgacgacatggacgacttctggctcaagctgttcatccaggccggtggcatgcagaatttgccccagatttaa

SEQ ID NO: 90449 - DNA, 507 bp, Oryza sativa
  Clone ID: PAT_MRT4530_89118C.1
gtcgcctttaactccatccatcgcaaatgcttgttggtatttcgtacgaccacagataaatccacaagtgcacggaatatcgctgtagcacttcaccttcgggtgaccccaaaaggatatcgaactcagggaacgattactgggacggaattcagggctgtcaccacctgccgcctacctcggacaaatccatgggatacacaaaacaaaggtaaaaggttctccgaacccggagcagagtgtaccgacagctccggtactcctccagaattcctcctaggaagctacactcgtcgaggtagaagtcggatgagcgccaaacttccgggcactcctccagagcttgccctcactctctaccttattctaatgtagaaaagatacaaaagagcctcttgtaattcagctcaaagttgtgtgttgtgaatgaatgagaggagctctatttatagcctccatatgacggttacaggtatgggaaacgaccaaactaccctccaaccatca

SEQ ID NO: 90450 - DNA, 224 bp, Oryza sativa
  Clone ID: PAT_MRT4530_89119C.1
actccgagattataacattgaattatatccaaacagctaaaaccctggcagattccttcacgaatggactatcatgaaatgtgatagatagtgtatcaaaggagatgggcttgagacccaaaccattcttgaaagaacgcacctttttgaccttgactgttggtcgcagtctacggatattttgggtgaatcttctaggaagcttactatgagacaaaggagta

SEQ ID NO: 90451 - DNA, 133 bp, Oryza sativa
  Clone ID: PAT_MRT4530_8911C.1
gaagctcttggctgtcctcattgtctcgaccggcctccgccctccctcactaacgccgatggtgttcttcggcttcttttccaagacgctggccgaagaagttgaagaggatgccatcaatgtccttggctga

SEQ ID NO: 90452 - DNA, 2034 bp, Oryza sativa
  Clone ID: PAT_MRT4530_89120C.1
atggagcaacccacaattcaaaacctttatgctcctcgggctgatctttgtgagccatcctgttcttcaaaaccaatcctttccgatggctacgaaatcggtcctagctttatagccatgattcgagagcaaaccttctctggtagtatcagtgaaaacccatacatccatcatcgggactttgagctagtgtgttcaggcctatccatcgtaggcatgacacatgaaactgttaagtggaaattgtttcctttttctcttagagataaagcgaagcaatggtacactctgtctgtcaagaaattccacggtgaatgggaggagcttaagtgcaaattctaccttgctttctttccattaacctgtctaattaatcttcgattagacatcctgatctctttccgacagaatgagaaggaatctctcggtgcagcttgggccaagttctcactgttaactcagtctggcccagacttctcattacccgaccatgtgttgttacaacattttcggtacgcgttagacaaggagtctgccgcaaatctcgatatttctgctggagaatcgttcgcacacaagacaactgccgaaggaagagaactcttagatttgatcttagagaacgattctttcggccaaagcgaagccatcccggaggtcgagattatccatgaggaacctctgcacatggagtcggaacccgactcaactgccgaatcctcattccagttgctgcagccggaagaagaagaaattcatcctccggaaattccattacaattcagggatgatctttataaagattatggaaacaccctgaattattccagcaaaatcaaggctcatcccaagcatgagccgttcgaggaggtgatgtttgtatcttcgttcattttttcagaacctattgcccatcttcatgaaactgaacgatcctcatcaccctcgatgaaacctaagccttgtccctctggccttcagaacgttgttcttatttatcatcaagaaacaacccagttcttgcatgatgcatctcttgagaaggagaaccttcaggccacggacaagcttacgacatcgactctggaggacgagagaaaacattccacatatgagcatgaaagcttctctttcaaaattccccaggattcatcctcgcttaaagaatccccagagtcctgttcgattagtgccgcgtccctctgtgaggaccacaaccacctctcggtcctcatttctaacatgttcagaagtgtggttgtggatgcttatatttatcataaatactgcaaatctcatatttgtttgacactaatcttgcagagcaatgtccccatggtcaagcttgtgaccataaacaaagcactgccgggagataccccggattatcatgttggcacttgcacatttgccaaaaagagatgtatcctacgtctctacagtattgtgccaacggatcacgccttcaagacacaaggttcttgcacccgaggaaataaaaagacgatcaaggagcagtgtacagtaacttcaacacttatatcacgctccttattgttggtattccttacgaccacagataaatccgcaagcgcacagaataccgctgtagcacttcaccttcgggtgaccccaaaaggatatcgaacgcagggaacgattactgggacggaatttagggctgtcaccacctgtcgcctacctctgacaaatacgtgggatacacaacaaacaaagaagaagttctccgaacccggagcagagtgtaccgacagctccggtactcctccagaattcctcttaggaagctacactcgtcgagggagaagtcggatgagcgccaaacttccgggcactcctccagagcttcccctcactctctactttattcgaatgtacaaaagatacaatagagcctcttataattccgttctaagttgtgtgtgttggaatgagatgaagacctccttatataggctccaaatgatggttaggggcatgggaaatgaccaaaacaccctgcaaccaccatag

SEQ ID NO: 90453 - DNA, 1306 bp, Oryza sativa
  Clone ID: PAT_MRT4530_89121C.1
cccacgcgtccgctctgatcgcggtgaggctgccggggaggacggacaacgagatcaagaactactggaacacgcacatccgccggaagcttctcggcagggggatcgaccccgtcacgcaccgtcccgtcaacgccgccgtcgccaccatctccttccatccccagccgtcgccaacgacgaaggaggagcagctcatactcagcaagccgtccaagtgccccgacctcaacctggacctctgcatcagcccgccgtcgtgccatgatggggcgatcgccgtgctgcgagaaggaggggctcaagaaggggccatggacgccggaggaggaccagaagctgctggcctacatcgagcagcacggccacggctgctggcgctcgctaccctccaaggccgggctgcagcggtgcggcaagagctgccgactccggtggacgaactacctccggccggacatcaagaggggcaagttcagcctgcaggaggagcagaccatcatccagctccacgcccttctcggcaacaggtggtcggcgatcgcgacgcacctgccgaagcgcacggacaacgagatcaagaactactggaacacgcacctaaagaagcggctggccaagatggggatcgacccggtcacgcacaagccgcgctccgacgtggccggcgcgggcggcggcggcggaggtgcggcgcggcggcgcggcgggcgcgcagcacgccaaggccgcggcgcacctcagccacacggcgcagtgggagagcgcgcggctcgaggcggaggcgcgcttggctcgggaggccaagctgcgcgcgctcgcggcctccgcgaccccgggcgcgccgcacctcccggcaccccccgcgtcggcggcggcggcggcggcggctcacggcctcgactcgccgacgtccacgctgagcttctcggagagcgcggtgctcgccaccgtgctggaggcgcacggcgccgccgccgcggcggccgcgcgcgccgccatgcagcccatgcaggcgtacgacgaggcgtgcaaggaccagcactggggcgacgtcgacgccgccgacgtgggcttccccggcgccggagcggggttcacgggcctactcctcgaaggctccttgaaccagatcccgaggccggcggggagagacgcggaagccgacggcgagttccaggagaccgaggaggagaagaactactggaacagcatactgaacctggtgaactcctcgtcggcacctatgtcgacggccgtggttgtgcccgcctcccacgcgtactcgccggcgccggacttctga

SEQ ID NO: 90454 - DNA, 511 bp, Oryza sativa
  Clone ID: PAT_MRT4530_89122C.1
caaccgttccccggcaacggcgccagaaatgcttgttggtatttcttacgaccacagataaatccgcaagcgcatggaataccgttgtagcacttcaccttcgggtgaccccaaaaggatatcgtactcagggaacgattactcggacgggattcagggctgtcaccacctgccgcctgcctctgacaaatccgtgggatacataacaaacaaagagaaggttctccgaacccggagtagtgtgtacctacagctccggtactcctccaaaattcctcatagaaagctacactcgttgaggtagaagtcgaatgagcgccaaacttccgggcactcctccagagcttctcctcactctctaccttattctagtgtacaaaaatatataatagagcctcttgtaattcagctcaaagttgtttgtcttggaaatgagaaggtgatctccttatataggctccaaatgacggttaggggtatgggaaatgaccaaaacaccctgcaaccacct

SEQ ID NO: 90455 - DNA, 185 bp, Oryza sativa
  Clone ID: PAT_MRT4530_89123C.1
cccacacctgcgaagcagttacaacatatcacgctagcttgtctacaatggccttaggaacagaagtgactgttcacttcaatactgctgataagtgcatcactggcgtcctttactgctagcctgataaatggtgacatccaccatctattgatcggcacgatcataccttaccaatacaacca

SEQ ID NO: 90456 - DNA, 1230 bp, Oryza sativa
  Clone ID: PAT_MRT4530_89124C.1
gggcgaggcttttgcatgcattttccggcttgtgtacagtgcttgcagcagaataccatggcccgctgcttcgtcctcaacaccggcgccaagatcccgtcggtcgggctcggcacatggcaggccgagccgggcgtcgtcggcaatgccgtctacgccgccgtcaaggctggttatcggcacatcgattgtgctcaagcctacttcaacgaaaaggagattggggtcgctctcaagaaagtgttcgacgagggcatagtcaagcgcgaagatatattcatcacctccaaactctggtgcactaaccatgctccggaggatgtcccggttgcactggacagcacgcttcaggatttgcagaccgactatgtggatctttaccttatccactggccagtgaggatgaagaagggcgccggctttggcgggcaaaacgtcctcccgaccgatatcccggcgacgtgggcggcgatggagaagctccacgactccggcaaggctcgcgccatcggcgtcagcaacttctcgagcaagaagctggaggacctgctcgccgtcgcacgcgtgccgccggccgtcgaccaggtggagtgccacccggtgtggcagcagaccaagctccgcaagttctgcacctccaaaggaatccacctctcagcgtactcgccgttgggctcgccggggacagcgtcggtgaaagcggtgggcaattgctcgcgcacccggtggtcgtctccacggcggagaagctggggaagacgccggcgcaggtggctctacggtgggggattcagatggggcacagcgtgctcccgaagagcacccacgaggagaggatcaaggagaacattgacgtctatgactggtccatcccggaggacctgttcatcaagctctctgaaatcgagcagatgaagctgatccgtggagaattctggactcacccggaaggcgtctacaaatcaatcgaagagctttgggatggcgaaatctaatgatcgacttggctggactgaagtttgctttcttcgtgtgggtgaaaaactggaaactgccattgctgcaaataaagtggggaaatgttaatcaatgaatgaataaaaggagtttaagtctacagctaccattttgctggtactggcgtgtatttttacaagaaccggaatccagaatctttaccggcaaaattatcagtaatttggacatttgtttaaaaaaaaaaaaaaaaaa

SEQ ID NO: 90457 - DNA, 1933 bp, Oryza sativa
  Clone ID: PAT_MRT4530_89125C.1
atggctgagaagaccctccgctatttcactgcaccctctactgacaacgtgccggttgggccgcaaatcaacttgggggatggcgatttcgatctaaacaccagcctcattacgatggcacaggcaagcccattctgtggcaagcctaacgagaatgccaagtgcttatcttcaacagttcctggagatctgcagcacgtacgcaatgaaaggcgtcagcccagacgccgtcaggatcagactgtttccgttttcccttctagggaaggcgaagcagtggttctacgctaaccgtgcatcgttggatggatacctggaacaaatgctctacggcatttctctccaaattcttcccgaagggcaaaactaatgcccttcacataagaatcttaagcttctagcaaagaagggacgagtcgattcctgaagcatgggaaatgctacaggagtacgtggccgcctatcctcatcatgggatggacgactggctgatcctgcagaatttttataacggactcactcccttgtcccgggatcacctggacgctgcagctggaggggcgttcttctccaaaacggtcagaggtgtcgtcgatctgatagagaagatggtttcaaacatgggctacgtgccctcgccgttgctccttgccacacaaatcctccatgccccgccgcccacacctccaccccgtccctcatcagctttggccgccacactggaaaagctcttagctggcctagccagcccacccagagcgcctgccacctccgtcgccgtgtgccctgaccgggaatatggcgcttctaggaaatgccactacaaggcccatgcatgatgaatgcatcaacccttccaagacgatgccacgctgcttgctatcgtgtttgagacgctgcgacgaagacttctatcgtcgcaattcagcaaattggcattcctcctaccccctcccccccccccttcggtgcagaacctaatcaacatttttgcaccctctgtcgcaccgtgcctgtatcagccctacactgtccaaaatgatctgggcggaaatacaaagatggacaagggtggacctttgactacaagagtgggaaagactgcgcaacggtagaagattggtggtacaaaatctcgcgcacagtgaacagttcaagaaaggcacttaaatcgttgatcatcctaatagcgtgggagctttggtgcgaaagaaatggtagaattttcaggcaagtggcttctatgccggccaccatcatcgtcgatgctgctatctatgctcgcgtgcaggagacacatatctatttttcttatattgttcaaacaagtcctttaattttgtcacgtgggctgatatagtccttggtcccaccaaaatcgccacatggacatgccatgtcatattcctatgcaaaatctatataatttgtccaatttacccttatatatatcatagcaaaataaaaagacaaaaggtaaaatgtaagagcaaaagtatacctcaaaacggtgaaaaaaaaggatgagtatttttttcctatggttatgtctaattcactgttggtatttcttacgaccatagataaatccacaagcgcacggaataccgctgcagcacttcaccttcgggtgaccccaaacggatatcgaactcagggaatgattactaggacgggattcagggttgtcaccacttgccacctacctctgacaaatccgtgggatacacaaagaacaaagaagaagttctccggacccggagcagagtgtaccgacagctccggtactcctccagaattcctcctaggaagctacactcgtcgagaaaaaagtcggagagagcgccaaactttcgggcaccctacaaccgccataggggaaatccgagccgtccacgtgaagccagatggcgggaggcgctaggaattggtt

SEQ ID NO: 90458 - DNA, 342 bp, Oryza sativa
  Clone ID: PAT_MRT4530_89126C.1
atggcgtgctgcaggatagttcttgtcttcttcttcttcttcttcttcttctgcgtctgcgtcttggtggcgacgacaacgacgatggatgctgtgaagggtacgagtgctgcggccgctggcggcggcggcggcgggaggtggacggagttgacggcggggtcgccggcgaggtactcggccggtgcagacgagttcagaggcagcaagaggaggatccccaaggggcctgaccctattcacaacagaaattttatggcatttcgagtactaaattcgagtagaaacatggaccaaaatggcttggaatggacgactgtgccatgcatgaacattccttga

SEQ ID NO: 90459 - DNA, 1101 bp, Oryza sativa
  Clone ID: PAT_MRT4530_89127C.1
atgaacctcatggaatcctatgaaattccaatggaatgcctctttccacgtaaatgtgccggaaacgggcggaagtggagaagccacactgctctcgagttgtctacgtcatcctcgagggcggtaaaagccggccggcgtgctcgatgtgtgcatcacgcatcggcgctcgtcaggccgcccagctttggcagactggccatgtttgtgctcatactctcggcctctcgggtgacacagcgctggcgtgaagagtcgcatcaaggcgtccaagctggcggagttgaggagccacctctatttgaggccgagtgtgtgcatggtcggatagagatgagagcgaagaagcggaagcgagagcgggagctcttgcggatcgcattggagggggcgattgttgaatcccctcaagccgtgccgatctctgtccgtggcgccgatctggagtccggcgagggttcctccgactctgtcacctccgacgctggcagcgctaaggctgcagctgacgacgtggttcatatcgcgcatgccctttgtaaggtttgcgccaagtctcctaaagccgtcaacgagtttgttcgaagagtgagccctgccaccgtcggccgttcaattgattgggacctcgtccgcgacaacgactcatcgaaggctaccgggctgggtcgtgatccccttacttcagccattgtcgctaatgattcatggtgggaaagcaagaatgcggtatgtacactacatgaccgctggagcaggtcgccggagggtgcaggtccgctgggttggcggcaaggcttcctcctcagtccccttcctagagagggggcggcacggtgggtctcgcctggctccggcgagcgacgcagtggaggtgatgccgacggcggtagcggtcgcgcccggtggcagtcggcaaggcaggcgcctatggcgtcggttggccggggggtggtggcagcggtggaggttgccgactcggtgggcgacagcggcagacttggtgggcgacagcggcgcaaaggtggcagcgggttgggagtccaagaacggaggaggattctgaagtcaacggcagccctatgggcggcggaggcttag

SEQ ID NO: 90460 - DNA, 490 bp, Oryza sativa
  Clone ID: PAT_MRT4530_89128C.1
atatgcttgggcaaaagtctgcttttggtatttcttattaccacagataaatccacaagcgcacagaataccgctgtagcacttcgccatcgggtgaccccaaaaggatatcgaactcagggaacgattactgggacgggattcagggctgtcaccacctgccgcctacctccgacaaatccgtgggatacacaacaaacaaagaagaagttctccgaacccggaacagagtgtaccgacagctccggtactcctccagaattcctcgtaggaagctacactcgtcgaggtagaagtcgaataagcgccaaacttccgggcactcctccagagtttcccctcactctctaccttattctaatgatacaatagagcctcttttaattcagctcaaagttatgtgtcggaaatgagagtgaactcctccttatatatgctccaaatgccggttactgctatgggaaatgaccaaactaccccgcaaccgcca

SEQ ID NO: 90461 - DNA, 513 bp, Oryza sativa
  Clone ID: PAT_MRT4530_89129C.1
tttccctcctcatcatttcaaaatttttcaaccactgttggtatttcttacgaccacagataaatccgcaagcgcacggaataccgttgtagcacttcaccttcgggtgatcctaaaaggatatcgaactcagggaacgattacacggacgggattcagggctgtcaccacctaccgcctacctctgacaaatccgtgggatacacaacaaagaaagagaagtttctccaaacccagagcagagtgtaccgacagctccggtacaactccagaattcctcctaggaagctacactcatcgaggtagaagttggatgagcggcaaactttcgggcactcctccaaagcttcccctcactctctacctaattctaatgtacaaaagataaaatagagcctcttgtaattcagctcaaagttgtgtgtgagtgaagggagggagaggagctctatttatagcctccatatgacgattacaggtatgggaaacgaccaaaacgcccttaaccgtcat

SEQ ID NO: 90462 - DNA, 5782 bp, Oryza sativa
  Clone ID: PAT_MRT4530_8912C.1
atgtcggccagacgtcccggccggtttccttcctctcccggccgccctctcccccttccaaccctatttaaaccctcctgacacctccttcgctcgtttccaccctttgccgtgccttctcctcgccggaatcgagctcgcgccgtcgctctctctctcctccgtcgccgacgacgtccggccggccttctccgctcgccgggaccgtctcccgccccggcgtcgcctcctccggcttcacggcaccgccgccgtccccgtccaccccctcgtcgagctcgccgaccgccgaagcaccgccatccccgtcgacccgagccgcgccgccgccttcctccgctccggccgcctttttcgtcgtcgccatcgacctagggtgagacgtggaccaccgcctcttttcccccttcccttcccctctctcggccgccgctccgccgtgcctatggccgccgccggcgaccataggggcgcgggcgccgcctcccgccggctgcgccgtcgtggccaccttcgggcgcgccgagtggccaccgcgtggggcccggccgtcagccgcccgtgccctcgggtgcggcagacgcgtggggcccacggcgccggtcagtgcgagcccgggtgcgcccggtctaccatggacccacctcggccacataaggaccggtcttcaggcctctgttgcaaagcactaccgtacttccacatgtctagtggggcaaatgaaggctacacgagctgcggcccggtagtcgagatgtcatggcacagggctggtgtcctgctgctaggggctcagtcttgcctacctatcctggaggttccggccgtaggtagggttgggtcgatgtacacctctgatcagagtataacctattcgaatagccgcgccctcggttatgggcaagcctagcaatgtacccaaatggccggcagcctcaaccgtcgtggcctggacctgactggcttcgttttggagctgcggggcatgtgcgttgtcctggggtatccgcatggagtggactaccagggcaagcagctcccggagcaggagggtgacgatgcagagccccacgctgcttgggaggtcactgcagtgatcctcactggctcacccgagaggacttcgttggcagtcaccgcgggtggagattctttctccgccgcttgccagaacgccgcactccttgccatcggcactcttcaccagcgctacccggacgagttgcagcactcgccctaccgctaccacccttgtcgaggaggagcccgcgactacgccaccttcagggatgctagctcggaggatgatgctaccatcatgcatctggcgcgcatggtggaggcgtacaacgcggcccgtatcgacttccatcgtatggtgcgccgtgggttggtcgagaacaacatgaagatcctggagctgcgttaggagaatttgcagctgaagaaggacttggacgcggtggaggcgcagctgtgtcagctcaagatcgcccagggagaggtctgtcgccccaagcgccgccgcgtctgccgcagcctgaagatcaccgcccgcaagagtacctccaggcctgagcttgttcgtcagtccttggcatggacttgcttcgtggagacccctcgcgccgagcccacgccctcggttcctcaggaggagggagcctctggtgttggtagcacggaggatgtgctgttgcttaccttccatggtgacaaccaggagaagcgcggttaccggcaaaggcaatcaccccgaaggcagcaaccacagcaaccatggcaggccaccttcaccttcttccccgccaccaccaccaccacctgacaccaaccccatcctcacccaaatcctcgcccagcaggccaacatgatggctgctttcctccaccacatccaaaatccgccacagcataatgctccacctccaccaccacccccgcaacattctaaactcgccgagttcctccgcatccgcccgcctaccttctctagctccaataaccccgtggatgccttggattggttgcatgccgcggggaaaaagttagacaccgtgcagtgcaacgatgaggagaaagtcatctttgccacccaccagctgcaggggcccgcatctctatggtgggaccacttccaggctacgcagccagaggggtagcctattacctgggcctgcttcaccgccgctttccggaggacccatgtgcccgccggagtcatggcccttaagaagagggaattccgggagttaaagcaaggcaaccactctgtgatggagtatttgcatgagtttaacagcctggcccggtacgccccagaggatgtttgggaagatgaggagaagcaggagaaattcctggcagggatggaccctgagctgtctgtgcgtctggtctccggggattatccggatttccagcgtctggtggacaacagcattcgcctggaagccaagcacaaggaactggagtcgcacaagcgtcgcttggcaaatttccgcaatcaacagggggctaaccaaatgatccgatacaccaatccctatccagggggatcctcctcgcagcagcagcagcaaccacgctccgcgccccgacctcaattcgtggtgcgtgtcccacagtcgcagcaacagcagagtcagcaaggtacccgtgcgccccgtcctcctgcgccagccgtgcagcttggacaaggccgcagggatgctcaaggtcaacaacgtctgtgcttcaactgcttcgagcccgggcactttgcggataaatgcccaaagccgaggcgccagcaaggccaagcgcctccccgacccaacaacggtggtaaggatgtcactcggggtcgtgtgaaccacgtgactgccgaggatgtgctgacaactccagacgtcatcgttggtacgttcctcattcattccatccctgctaccattttgttcgactctggagcttcccactcgtttatatctgtgccattcgtggagagaaattagctgagggtagaaaggcttaggaaccctctgctcatcaccacccttggaggggtaatgacagcaaagtattatagccctgccgttcctatagaaatccagggaattcctttcccctcggatttgattcttctagacaccaagaacttggatgtgatcctcgggatgaattggttggctcaattccaaggagtagtggatcgcgcaagacgcactgtcactctgtatcgggggcctgatcaaccagttgttttctttgcacccccaacttccgccggcagttcagtacttaatcagctaggattgccagaaatacccatcgtcagtgagttcggtgacgtgtttccggaagaactacccagtatgccgccccagcgagagattgagttccagatagatcttgctccagggaccactcctctatacaagcgaccctaccgtatggcagcacatgaactggccgaagtcaagaaacagttggaagagttgaaagaaaaggggtatatacggccgagcacttccccctggggttctcccgtgatttttgtggagaagaaagacaagacaaagaggatatgcgttgactacagagctctcaatgaagttactatcaaaaaacaagtacgctcttccccggattgatgacctgttcgatcagcttaaaggtgccactgtattctccaagatcgatcttcgctccggatatcaccaattgcgtattcgtgaagaagatatcccgaagaccgcgttcaccacgcattatggactgtatgaattcacggtgatgtcgttcggtctaaccaatgcgcctgccttcttcatgaacttaatgaacaaagtgttcatggaatacttggataagtttgttgtggttttcattgacgacatcctggtgtacttacaatcagaggaagaccatcagcagcacctccgtctggcattgggaaagttgcgggaacatccattgtatgccaagcttagcaagtgtgagttctggttgtccgaagtcaagttcttagggcacgtgatatctgctaaaggagttgctgtggatcccgaaacggtgactgccgtcactgattggaagcaacccaagacagtcactcaggttcgcagctttttgggtttggcaggatactaccgaagattcatcgagaatttctccaaaattgctagacccatgacgcagttgctgaagaaggaagaaaaatttgtatggagcccgcaatgcgagaaagcattccaaactctcaaagaaaagctagtttcctcgccagtgttaatcttactggatactcgcaaggacttcctggtgtactgtgacgcttcgcgccaaggattggggtgcgtgttaatgcaggaaggtcatgtggtagcctatgcctcacgccagccacggccccatgaaggcaactaccctacccatgatttggagttggccgctgtggttcatgctctaaaaatctagcggcattatctcattggaaatcgctgcaaaatatataccgatcataagagtttgaaatacatcttcactcagtcggatctgaatcttcggcagagaaggtggttagagctcattaaggattatgatgtgggaatccattatcaccctggtaaggccaacgtggtcgcagacgcgctgagtcgaaaaagcagttgcaacactcttggcgtccgtggcattccaccggagcttaatcaacagttggaagccctgaacctaagcatcgttagccatggattcttggctacattggaagccaagcctaccttgctcgatcaaatccgcgaggcccagaagaatgatctagatatgcatgggatactcaagaatatgaaacagggtaaagccgctggtttcacagaagatgaacacggaaccctatggaacggaaatcgttgtgtcaaggcagagcaccaacgaccggccagacttctccaacctctccaagtaccagaatggaaatgggatgaaattgggatggatttcatcaccggacttccaaaaacccaaggcagatatgattctatatgggtagtcgtggaccgactaaccaaggtagctcggtttattcctgtgaagaccacctatggagggaacaaattagctgaactctacttcgctaggatcgtgagtctccatggcgttcctaagaaaattgtatctgatcagggaagccaattcacttctgacatctggaagaagctccaagaagagttgggtacccgattaaattttagcaccgcgtatcacccgcagacagatgggcagaccgagcgtctaaatcagatcctagaagatatgctccatgcatgtgttctagattttgggaagacctgggataagagtctcccctatgccgagttctcctacaataacagctaccaagccagcatacaaatggcaccttatgaagcgttgtatggccgcaaatgccagacaccactattgtgggaccaagttggggaaagccaagtgttcgggactgatatcctgagagaagctgaagctaaagtcagaaccattcgggataatctaaaggtggcacagtcccggcagaagagttatgcagatacccgacgccgtaacctggaattcgcagtggacgattttgtgtaccttcgggtcacgccattgcgaggagtacacaggtttcagatgaaagggaagctcgcacctcggtttgtgggtcctttccgcatcattgctcgacgcggagaagtagcttatcaattggagctgcccacatccttgggcaacgtgcatgatgtgttccatgtgtcgc

SEQ ID NO: 90463 - DNA, 375 bp, Oryza sativa
  Clone ID: PAT_MRT4530_89130C.1
aaaagcaagaaaaaaggcttttatatttccttgaccaacaatgggaaaaaataggacccttggaaaaaattgaaccggggaacaactgatcccttctttacagcataaaacttccaaaaaaaaaaaaaaacccggaaaagcccccccacctataatcgattcaaggaaacataagaaactgccaaaaatgcttggttgccctttgggccggaggtttttaaaaagaaacgtttctttagggtggggaccttttggaaaccaaggcttttttgacccacgggggccatggaacgggtttggtaccccccccccacgaggaaggccctgacaagggaacgctaaaccttttgggaatcttgcctcaaaaggggaacc

SEQ ID NO: 90464 - DNA, 1644 bp, Oryza sativa
  Clone ID: PAT_MRT4530_89131C.1
atggcgatcgcgacggccgccttgctctctctcctcgccgtgctacgcgccggcggcgatgtcgacgatggtggcggcgcgatcatggagccctgcctcgcggcggccggcgtgcggaacgtgacggcgcgccgggagcgcgacgcgtacgacgcggcgctgcgggcgtcggcgcagaacctccggttcgcgggcgacggcgtggcgaagccggcggcggtggtcgtgccggcgacgaggggcgagctgcgcgacgccgtgcggtgcgcgcgggaggccgggctcggcgccgtgcggctccggagcggcgggcacagctacgagggggtgtcgtacaccggggaggacgacggcgggttcgtcgtcgtcgacctcctggcgctcgacggcgtccgcgtcgacgccgcgtcgcgcacggcgtgggtggagtccggcgcgacgctgggccaggtgtaccaagccgtcgcggcggcgagcccggccctggcgttctcggcggggtcgtgccccaccgtcggctccggcggccacatcgccgggggagggttcggcttcctctcgcgcaagtacggcctcgccggcgacaatgtcatcgacgccgtgctgatcgccgccgacggccgggtgctcgaccgcgccggcatgggcgagaacgtgttctgggcgatccgtggcggcggcggcggcacgtggggcgccgtctacgcgtggcgcatccagctcgtcccggtgccggagcgcgtcacggcgttcgtcgtcaaccggcccggcaccgccgagtccgtcgccgagctcgtcgcggcgtggcagcacgtcgcgccatggctgcccgacgagttctacctctcggcgttcgtcggagccggcttgccggagatgaaccggaccggcatctcggtcacgttcaaaggcttgtaccttgggccggcacacgaagcggtcgagatactgacggctaggttgcccgaaatcgggttatcggatctgaacccgatagagatgagttggatcgaatccgtcgtcttcttctcgggcctacctcaagggagctctgtgtccgatctgacggacagggtgctccacaagaagaagtacttcaaggccaagtcggattatgtgcgccgtccgatgcgcatcggtgaactgatcagagccattgatctcttatcaacggagccaaaagcatatgttatcctggacccgtatggcggggcgatggatcggatcgggtctgcaagtctaccattcccacatagaagaggtaatattcatggtatccaatacttgatcgaatggacggcgaatgatgatgatcatagagaggagtatatggactggatacgccgattttatgagtttatgggatcatatgtaccaaatagcccacgtaccgcgtacataaactacatggatcttgatctaggcatgaacaattggtctaatcttcgaatgtatggaggtgatggaatccctaatccagaagtcgaggcggcacgggtatggggcgagaggaacttctcccttcccctgtctcccagctacaccacactccttgactccatccaaaacctccgctttgtgctccctgatgttagcaagccagttgcgcttgtcatcccgacctccaagttagatctccagtga

SEQ ID NO: 90465 - DNA, 2025 bp, Oryza sativa
  Clone ID: PAT_MRT4530_89132C.1
atgagccgccggcaggagggggctcgagtgccggcggtggtgggtgggtgccggagtggtggtggcggtgggcggtggacggtggacggtgtacctccggcgacgggcgcgggagcagctccttctaccgcaccgggcctcgggcgagtgggcgacggtggggagcacgggcggcgggagctaaagaggctgcggcggcagcggacctcgggcgagtgggcgacggtgggcggtggacggtggggagcacgggcggcgggagctaaagaggcggcggtgggctgctgcccgccccctccatctcctcctcctcgtagtcgtcgccgtcgacctccccgaccatgccgagtaccagatcgagaccagccgtccgccgcccctcgtacgcccgccaccgctgctgctctcgtctccgacctcgtcggctgcggccatagccaccacccacaggacgcgttgccgccgctccgggtcagcacgcggcagtgctatcgcgagcgcgagtgcgggaggaggcactggcggcgctcgctgcagaggccaaggaagccgaggtgcccttcccacccaatgctctccctctccccatccctcgtctgcctcctcgtcctcctccccttcctctccctgctcctcctccaccgctccgccttcccggcttcacgttctccgctcctcgcccacctcaccgcgtcctcctcctcgcgctcctcggcgagcggcttcgccggcggcgacctacgtgagatcgagttctcgtggaaccacctgccgttcaggcagtccaggccgccgccggcgaggctcaagatcgccgtgttctcgcggaagtggcccgtggcctcggcgcccggcggcatggagcggcacgcgcacacgctgcacacggcgctcgcggcgcgcgggcaccgcgtccacgtgttcacctccccgccgccgcacaccgaggccgcgcccccgcgctccgccgacgggccgcagctccacttcctcgacggcgaccccggggtgtggcgctgcgacgaggcgtggaagctgtacgaggccgaggccgagaacgacccgttcgacgtcatacactcggagagcgtggccgtgttccaccgctgggcgcgcggcgtgcccaacctggtcgtgtcgtggcacggcatctccctggaggcgctccactcggggatataccaggacctcgcccgcggcgacgacgagcgcatgtcgccggcgttcaaccacagcctggcacagtcggtgtaccgggtgctgtccgaggtgcgcttcttccggagctacgcgcaccacgtggccatcagcgacgccacgggggagatgctgcgcgacgtgtaccagatccccagccgccgcgtgcacgtcatcctcaacggcgtcgacgaggcgcagttcgagccggacgcggcgctgggccgcgcgttccgggaggacctcgggctgcccaagggcgccgacctggtgttcggcgtctccggccggctggtcaaggacaagggccacccgctgctgtacgaggccttctccaagctcgtgctgcgccaccccaacgtgtacctcctcgtcgccggcaaggggccgtgggagcagcggtacatggacctgggccgcaacgccaaggtgctcggcgccgtgccgccggagaagctcaaggcgttctacaacgcgctggacgtgttcgtggacccgacgctgcggccgcagggcctggacctgacgctcatggaggccatgcagtgcggcaagccggtgctcgccacgaggttccccagcatcaagggcagcatcgtcgtcgacgacgagttcgggtacatgttcgcgcccaacgtggagtcgctgctcgagaagctggaggccgtggtggaagagggcgcccgccgcgccgcgcagcgcggccgcgcgtgccgcgactacgccaagaccatgttcgccgccaccaagatggcgctcgcgtacgagaggctcttcctctgtgtcaagaacgacactttctgtgcctacccagctgagttcgattag

SEQ ID NO: 90466 - DNA, 515 bp, Oryza sativa
  Clone ID: PAT_MRT4530_89133C.1
attgttatctaagttattgattaataagagatgactgattgttagtatttcttacgaccacagataaatccacaagcgcacagaataccgctatagcacttcaccttcgggtgaccctaaaaggatattgaacttagagaacgattactaggacggaattcagggctgtcaccacctgccatctatctctgacaaatccctgggatacacaacaaacaaagagaagtttctccgaacctagagcagagtttaccgacagctccggtactcctccagaattcctcctagaaagctacactcgtcgaggtagaagtcggatgagcgccaaacttctgggcactcctccagagcttcccctcactctctacctatttataatgtacaaaagatacaataaagcctcttgtaatttagctcaaagttgtgtgtcgtgaagtgtaaaggagacctccttttataggctccaaatgacggttacaagtatgggaaatgaccattgtgccctccaaccgtca

SEQ ID NO: 90467 - DNA, 1935 bp, Oryza sativa
  Clone ID: PAT_MRT4530_89134C.1
atgggctgcgcgcagggcaagccctcgcagggctccccggcacgcagcgacggccgtggcatcgaccacctcatgcgcaagaaccgctacgtcccggtcgcctcctcccgcctctccgatcccctccccgccgccgcgccggccgccgccaggctgctgctgcggccgcaggggcagcagcaggacgccgcccgcggcagcggccgtcgcgccgccaccgccgccgtcgaaagggagctgcagaccgatcagcgggacggcggcaacgatcgtcagactgatcatcatcaagccatggatgaaagctcctcggcggcggtggcggaggcggaggcgacggcggcggcggcggccgtggatgaggaggaaactccggcaccggctccgcagccggcgccgcggcgggaggatgagctggtggggcaggggacgtacagcaacgtgtacaaggcgcgggagagggggacggggagggtggtggcgctgaagaaggtgcggttcgacacgtcggagtcggagagcgtgcggttcatggcgagggagatgatgatcctgcggaggctggaccacccgaacgtcatccgcctcgacggcatcgccacctccaggatgcaccgcagcatctacctcgtcttcgacttcatgtactccgacctcacccgcatcatctgccgtcccgaccaccgcctcaccgagccccaggttggaaagatgttggcaacgtggatcgagggtggagtagagagtggtgccgatgaggtcaaaagaaagctgagcacgaaggctattaatggtagggtggagaagggagcggtgcccgaccatgaggtcgagagcaagccgagagcagtggcagtagggcgaagtggaagctggttcgcaaggccacgtggaaccaggaggataaaatgctacatgcagcagctgctgtcggggctgcagcactgccacgagcgcggcatcctccatcgcgacatcaagggctccaacctcctcatcgaccgccatggcgtcctcaagatcggcgacttcggcctcgccaactactacggccgccgccgcccgctcaccagccgcgtcgtcaccctctggtaccgcgccccggagctcctcctcggcgccaccgactacggcgtcggcatcgacctctggagcgccggctgcctcctcgccgagatgttctccggcaggccgctcatgccgggaagaaccgagatcgagcagctctcccggatcttcaccctctgcggctccccgcccgacgactactggcggaagatgaggctgccgccgaccttccgcccgccgaggacgtacaagccctccatggtcgacaagatcgccttcctcccgccgcccgcgctcgccctgctcgccacgctcctcgccctcgaccccgccgcccgcggcaccgccgcccaggccctgcagagcagcttcttcagcacgccgccattgccgtgccatctgtcggagcttccggttgtgtacaaggaggaggatgaggttgctgcttcccatgatggaaggaagcccaaactgagagagcggtcacataagcgaagagacaacaagccgaaagctgaggagcagcataaagataaggaacaaaatctcaacagtagtcctagtaacaaagaggagaagattatggaggatacaaaaaaatcagcccaagattcaaaacgattttcagatggacaggttcaggaggtgttccccaaggggtcacctgcacctcaagatcagcaggtgccaagaacaaatacttacagcccagacaatgatcatcacaagaatcacaaggtggtcatcttcaaccacaacctttggacactagggatcgtgcttgtgtacgtcgcaaaaggccctctagcattctggattcctggctgttccatgactggattgcagggtggatgtcttcatgtctga

SEQ ID NO: 90468 - DNA, 612 bp, Oryza sativa
  Clone ID: PAT_MRT4530_89135C.1
atgggccccacttgtcaatccctctttctctctttctctgttcatcttcttcctcctgcacccccggggtgtggcgctgcaacgaggcgtggaagctgtacagaggctgaggccgagaatgacccgttcgacgtcatacactcggagagcgtggccatgttccactgctgggcgcgcgacgtgcccaacctggttgtgtcgtggcacggcatatccctcgaggcgctgcactcgaggatataccaggacctcacccgcggcgaggacgagcgcatgtcgccggcgtccaaccacagcctggcccagtcggtgtaccgggtgctgtccgaggtgcacttcttccggagctacgtgcaccacgtggccatcagcgacaccacgggggagatgctgcgcgacgtgtaccagatccccaaccgccgcgtgcacgtcatcctcaacggtgtcgacgaggcacagttcgagccggacgcggcgttgggccgcgcgttccgggaggacctcaggttgcccaagggcgccaacctggtgctcggcgtctccggccggctggtcaagggtgccgacctggtgctcgtcgccgtcggccaaatttctctctccttgccatga

SEQ ID NO: 90469 - DNA, 666 bp, Oryza sativa
  Clone ID: PAT_MRT4530_89136C.1
atgagccgccgacaggaggaggctcgagtgccggtggtggtgggtgggtgccggagtggtggtggtggtgggcggtggacggtgtacctccggcgacgggcgcgggagcagctccttctaccgcaccgggcctcgggcgagtgggcgacggtgggcggtggacggtggggagtatgggcggcaggagctaaagaggcggcgacggcggcggacctcgggcgagtgggcgacagtgggcgacggtggggagcatgggcagcaggagctaaaggcggcggcgggctggaccgtccggctgctgcccgccccctctatctcctcctcctcatagtcgtcgccgtcgacctccacgaccatgccgagtaccagatcgagaccagccgtccgccgcccctcgtatgcccgccgccgccgccgctcttgtctccgacctcgtcggctgcggccatagccaccacccacgggacgcgtcgctgccgctccggaatcgcctccgacccgcaggtgatcaccggatcgcacaactcgaccatcaggctctgggacctcgccgccggcaagaccgcgctcactctcactcactctcgtgctgccgccgccgcagccgaggacgaccttgaattcggtggcggtgagccagggcggcgtggtggcggctggcggtga

SEQ ID NO: 90470 - DNA, 518 bp, Oryza sativa
  Clone ID: PAT_MRT4530_89137C.1
aactttgttacttctctttgataacttcaaatctttgacatggccggtgcctattggtatttcttacgaccacaggtaaatcggcaagcgcacggaatactgctgtagcacttcaccttcgggtgaccccaaaagaatatcgaactcagggaacaattaataggacgggattcagggctatcaccacttgtcgtctacctctgacaaaaccgtgggatacacaacaaacaaaggtaatctttaacctagacaccacgcataagtccagtactcctccagaattcctcctagagagctacactcgtcgaggtagaagtcggatgagcgccaaacttccgggcactcctccagagcatcccctcactctctaccttattgtaatgtacaaaagatacaatagagcctcttgtaactcagctcaaagttgtgtgatggaaagtagagtgagctcctccttttataggtaggtatgactgttacagcctatgtgaaatgaccaaactaccccggaaccgcca

SEQ ID NO: 90471 - DNA, 720 bp, Oryza sativa
  Clone ID: PAT_MRT4530_89138C.1
atggaaaactttggtggtagctttttggtgctttctgctatggttttgggaggcttgcctgcatcaccaggagctgctgtaggccagattgtcttcacagctgacgatgctgaagcatggcatgcacaaggaaaatctgtcattctggtgaggacgggcatcgggctgtcggtgccgccggggttcacggtgtcgacggaggcgtgccagcagtggacccatccgacggagcggggtgggcggcggccggagcgggcgatggcggggcggagccgaggagcgaagcggcgcgccggccggcgggggagaagtcgcggcgcggcggtggccggaggggcgtggggcgccgaccgttgggagcagaggagccgcccgtggcccgcggccgtctgcgggtgcgtgccggcgtccaccttgatgttggcgttgccgttggcgaccagggccttgaggtcggcctgctcgtcgccggcgacgaagcggagcgggcacaagcccgcgctccacttcgacctccatgagcttggagaagacgccgaccatgggcgccgtgttgtacgtgcaggcctccgtctgcatgtacgcgttgcggtggtcgacgaacacgtcgttgctgttgggcccgccgatgacagcgtcgacgaggtcgtgcgactcccccccccccccccggccgcgctgtggaatgaaagcatactgctcgactacctggtgaaatag

SEQ ID NO: 90472 - DNA, 482 bp, Oryza sativa
  Clone ID: PAT_MRT4530_89139C.1
ttcttgttggtatttcttacgaccacacaaaaatccgcaagcgcacggaatacgattgtagcacttcacctttaggtgacccctaaaggatatcgaactcagggaacgattactaggacgggattcagggctgtcaccacctaccgtctacctctgacaaatccgtgggataaacaacaaacaaagaagaagttctccgaacccggagcagagtgtaccgacagctccggtactcctccagaaatcctcctagaaagctacactcgtcgaggtagaagtcggatgagcgccaaacttccggacactcctcctgagcttcccctcactctctaccttattccaatgtacaaaagatacaatagagcctcttgtaattcagctcaaagttgcgtgtgtgtgaagtgagggagatgagctctatttatagcctccatatgacggttacaggtatgagaaacgacctaaacgcccttaactgtcat

SEQ ID NO: 90473 - DNA, 864 bp, Oryza sativa
  Clone ID: PAT_MRT4530_8913C.1
atggttagtggaaagctgcaaggtgtcccgatgccagaagaacccctgctcgtgatcaacatttggtatccaggatcagaagatgggtgtattgatgcaggagatgcaaagctcgatgcaaggtcgaatgtagcggaagcaactctagcagtaatgttgataccgcaaccgcagagtccaaagcagcagatgcaacgacaatgtctccaacaacaagtacaagctcagatgcaagccggaatcaggatcagagtgaaagtcagtttgttttccaagagcaagcacctgcaacctcagacagtacgccaccaagtcttctgcagaccagcacagctaagtcaccccccaatcccggaggcaacaagtgctacctatagtggttatggtttacaaggtcagttcttgcaaggttgttcaacgtttttagttttcaaagtcagggctcttcgcaaaacagaggagtgttggttatttttcaaggacaacagttcaaaggttctcagtcaggcgaaatcaaaggatcgacgaggtgaaacaaagtggttagtagttaaaggagtcagttgcgagccactagcaaagttaccccaatctcaagtcaacaggttcgattcgaaggttatcaagttgctagcatcaacagttcagtccaagataagtaagtttcaggagtatccgcagttctggcctaggtcagttcaagcagaaccagtcggtccagttttggcaaagcaaaggaacagaaaggtcgaatccagccagtgcaatcgtgcagatcagtcagaccgcccaccagcaccggctttctttctagccatcccagaatctcgggacgagattcctgtaaggggggtagatttgtaa

SEQ ID NO: 90474 - DNA, 839 bp, Oryza sativa
  Clone ID: PAT_MRT4530_89140C.1
atgaagcatgtatttgagagcctgtcgtcatatggagacaaagttattgctacaggcttgcctgcatcaccaggagctgctgtaggccagattgtcttcacagctgacgatgctgaagcatggcatgcacaaggaaaatctgtcattctggtgaggacgggcatcgggctgtcggtgccgccggggttcacggtgtcgacggaggcgtgccagcagtggacccatgtggaccacacgtcatcctcactaacctcttctctctatcctctctctccctcttctctctctccagccgacggagcggggtgggcggcggccggagcgggcgatggcggggcggagccgaggagcgaagcggcgcgccggccggcgggggagaagtcgcggcgcggcggtggccggaggggcgtggggcgccgaccgttgggagcagaggagccgcccgtggcccgcggccgtctgcgggtgcgtgccggcgtccaccttgatgttggcgttgccgttggcgaccagggccttgaggtcggcctgctcgtcgccggcgacgaagcggagcgggcacaagcccgcgctccacttcgacctccatgagcttggagaagacgccgaccatgggcgccgtgttgtacgtgcaggcctccgtctgcatgtacgcgttgcggtggtcgacgaacacgtcgttgctgttgggcccgccgatgacagcgtcgacgaggtcgtgcgactcccccccccccccccggccgcgggccggcgttgtgggcggcgctgccggggtcgccgggggcggggagcagcggtggtggtgggcacgagtgcggcttcaagaacctgttcat

SEQ ID NO: 90475 - DNA, 193 bp, Oryza sativa
  Clone ID: PAT_MRT4530_89141C.1
aaagaagattggaaattggacattgagcccacccgacacgtatcgataggatccaaggagccgtttgaggagaaagaaggcattgcctccccgtgcagcataaggctgtatgctatgctgggtaagcagctgggccgacgacatagactgcgaaggactatgaacattgcgaaggtggctctgtgcctccatg

SEQ ID NO: 90476 - DNA, 654 bp, Oryza sativa
  Clone ID: PAT_MRT4530_89142C.1
atggctgctttcaacagggagttgactagacgtggtgctcgggttgatggcggtggaagcgattggcaaactaatcagtgggtcggacacttcgggcgggtggcccggactttccgattgatggtgttcaatcggatgtcgaagcgggtggatcctataggttgttttggaggtgttgacaggttccgctggagatacaaagaagcccaggaggtcagggtcgcggcggtgtgcgcgttttgcgtcgaagccgagccggtggcggagatcagggtggcgcgcggcggcgtggtactcggcggcgttcatcggagctcgggcaggagcttgcggcggcggcggcggctcccggatgaggagttggcgtcgaggactccggcggcagagctccctggtacgacggcggattccccaaggccggcggtgcggcggctccttgcggggccagagacgcagaggcggcggcttcccgaggtcggtgggcggcggctcctcgcggggttggcgcaggcaggacatcggcgggaggcagtggtggtgggcgacggcttcggcacagaggcggcgccgcattggggagaagcgcgtggaggcagggagcgagacaggcgcgtggaggaagagatcggctcgatctggatcgatctgatctga

SEQ ID NO: 90477 - DNA, 500 bp, Oryza sativa
  Clone ID: PAT_MRT4530_89143C.1
ggcagcgggctcttgatgcggctggagtccacgccgtggaggcgctctataactatggatcccccgggctgcagaattcggcacgagataccatatggcagacccatgcatcatgcatgtgcttcattttcaactgaagttcacttatgtacataattggtccacttcaattgaacacgaaaagaaagattgaattaggtcgtttctctttttcttcacttcaactttaccctactatcaaagctcgctttgtgctctcgatccttcttcttaggcgggggcgtctctggttatctcctttttatcttccccccagaggggggggggccccggggatccccaaatttccccccccccattttatgggaattctccgatttacaaaaaaccccccctgggggccgccccccttttttttaaaactccttcctttataaatctgggaaaaaaaaccccgctggggtttttcccccctcaattttttataacccgcctgttgg

SEQ ID NO: 90478 - DNA, 564 bp, Oryza sativa
  unsure (1)..(564): unsure at all n locations
  Clone ID: PAT_MRT4530_89144C.1
gatcggccgagaaatcgccggctcctcctctcccacgtccgcgcgccgccgcctccctcctcgccgccggcgggctccctcctcgacaacgacaaaaaancgtgacgccgccgactgctccctccgctccagattcgcgcgccgccggntccctcctcttccacgtncgcgcagccggntccctccacaacganatccgtgcgccgccgcatccctcctcgccaccggggggctccctcctcgacnanaaaaaaaaccgcgancctccgangggtccctccgctctnnattcgcgcgccgccgggtcactcctctcccacgtncacgctgtngggtccctccacnaaaaanatncgcgcgccgccgcatccctccgtcnctgggcncgaaaagcgacaaaaaaggtccngattngcgcgtnnccnggtccctcctctcccacnttttgggccgctgggtcccttcacaaaaaattcggggcgccgccggcatccntcccttgcngggcnnnaaaaanaaaaaaaaaagggtccnaattttttnggncgccggggtttcttcctt

SEQ ID NO: 90479 - DNA, 4595 bp, Oryza sativa
  Clone ID: PAT_MRT4530_89145C.1
cattaaggagaccgatgcagtataggtagtggccacgagtgaactgtaggctatctagaggagctacccatgtgtcaggatgtcaggtgatatgcccattcgtctgtattatggagatgctcctatacaaatatgtgatagcggagtggatttgactgtatatgccttctataatactagtctgaatgcaccggagcatatgggtttgaacgatgtgttagggtggttgtataatatgtttggggtagatccagtgctcgataaatttgtcataaatgccgtgtggccaaagacaacatgtgttgatcgatcgggggagtcaagtcatgccgtggtggaagaaactccattggaaggtgcacaagctgaaaatgtttggcggactgagcaaggtcgggggaagaagtagtagagggtaatacacaagcagaggtcattgttcgtgacaataatcgtgaggccgacgactcggacgatgaagaaccagattcgcctatgcgtgttgatgcagcaaaggagaatgaggcggtagtggatcggatggaagtggaaaacgaagaatacattgcgcttgtagtggaaggagaagatacaacactgtgggacaacgaaaccaacatacccgatgattggacgaccatatcgatgagtcgtatgaaggttaacgatggtttagatgcccactggcgttatgatagtaagcaggtgcaagttgggcagatgtttcatgacaaaggtcacttacaagatgcggtgaagaggtgggcatttgaccagaagcgtgagttcagggtgaaggtttcaaataggacgacgtacgacgtgaagtgcacacaggctggatgtccttggagagtgcatggttacaagccacaacatgacactttatgggtagcttcgagggttgagcaacatacgtgtttgttggagaatactcatctggtacataggaacatgacagcggtatttgtggcacaaatggtatattcaaaggtggttagaaaaacatctttgtcccctttcacaataatgcatgacgtagagaaagagtacggatatgagatatcgtatgtcaaggcttggagggcaaaacagaaagcacttgagatgaggtttggaacttatgaggattcttatcacaatcttcccccactattggaggtgatgcaggcaagaaacccaggcacacacatggctattctccacgaggtgaatgaaaatagagagaatgttcttcgtcgggctttctggtcatttgggtgcatgatagaggcctttagaaattgcattcctttgctctgtgttgatggcactttcacgacaagcaagtatagaggaacaattctaaccgtgatcggagtcgacgcggatagccatgtcattcctgttgcttttgcatttgttgaaagcgagaacacatcaagctggctatggtttttgtggcacattaaaatgtgtgttgttcaaaacagaccaaatgtttgtgttctgcatgaccgacatgccggtttgttatcgacgatacagaagcttcaagaagatgtgacagagtccgtgccatggccagatttgcatagcagatggtccatgcgacatcttggggctaatttttacaggcaatttaggagtaagagattgatggacctgttcaagaagttatgcaagcagaatcaacaaagaaagtttgatgctatatgggaacaacttgatcatttgaccactacacacatggaagagaatacacgaccgctaccacttgttgctatccttgagggcatcactaggggtacacagaagtatctctgtaaaaggtattctatggctagtcttaacctcagcaaacccagtgttaagtatagcccagcaattacacagtacatggatgagaaaagcaagaagggaggaatgcatagagtgtggcctgctgggaatagagagttgctatttgagatacgacttcgtgacaagagtggtgtcggcattgggactactgacatcacattggaatgcacgttgtggccagagtatcatgcttgcaaatgcaattgcacaagccttatctgttacaccagccatgttctcatgttcttgtcgcttccacaaaaggaggtgttgatgcaaaccattttgtttctccgtactttatgaaggaagcgtgggaggcaacttggcgaggtgaattgcgtggttggcgagccgtgtgcgatttcactcgtcctcctccagggcaagccaattgggttctggattcatttattagttgatactaaaggttgtcgccagtcgcgtaggatcaagaaccttatggatgaagctaaagcgaaagatcgttctcgtatggctgaacaatatgacgtgcagctgatcgacaaggagattgataggaaccatcggtcgcgacgacttagtagaggaactttctgcaatgtgctgaaaatgcgaggaccggatcaatattggcgtattgatcctcgttgggttccgttgagagcagctggcttgttgacctttgcacgattggtcgagccttcacgcggcgcttctgagtgctctcgtggatagatggaggcttgagacccacactttccacctcacagttggagagatggtgcccactttgcaggatgtgtcttatctgttgggtctgccgatagctgggccagcagttggcccaacaatggtacaagctggatgggcagacgaccttctggccaattttggtggtgtgctgcctgttgcactggaggatctcatggatgggcacgggccgacaaaaagttggttgaatcagtttcgacatgatgtctttcctgatgatcaggaggactggatcgtgcgacggcacttagtcgcttacctgttgtggttgtttggatgggtgatgttcacaggaactcacactgactcggtggacaagcacttcatccactacgcggagcagattgcagagttacctatcgcagagtttccacagtacagttgggggtcggcggtacttgcggccacatatgctggactatgtgatgcttgcttgaggaacagcaagcaaattcactccctggatgcccgttgctactcatgttgtgggcgcacgagcgcttcgacattgggaggcctcagctggactcgtacgcaaactacgaattgcgagagatgtacaagtccggggttggtgacctcgacaatcgtcccactatgggatccttgtggacacactgtgagccgaagtgggttagcgggacgacgcgtcgtgtgtacacacagttcgtagctaactttgatcagcttacgcctgaccgtgtgcggtagactccgtacactcaacacgatgtcaatgatcgtgcaccgcacggtctcgcggacctttgcacgcgggatcaagcactatggaggacgacttgtcacctcgtgctggacgtgcacgtcgagccacacaatgtccaaagggttcttaaacagttgggcatgtatcaggacttttctcccagagttggtcatgctttggctgatagtcttcagtattcccgaaaggggctcgggctttcctacgagcttgttattgtgaccatggttcagccgactgtacaagagtgggagcacgcagttgataatttggcgcttcagaaacctccagacgatgggagttactatggggcctaccttcgttgataccgcagtgtcacacgatggaggtgttttccgccacaaggagatagcaccgtcccccaccaggcagcgattactgacacgtttgcccctcagcctcgatcagcttacaactcaatggcaaaatttgttgagcacgtgcaagtcgagtcggacaccttgctgcaaagactagagacgagacctccaaccgtcaagacctccagccgtcaggcctgacgacgtggcgagcatccttcgcaacttccgtgcccgtgctgccgcactccttcgtcgtgtctcctgtcggagcgcggcagatgtggtgcagccgtctgcccgtagggcatcaccaccactaccccgacgttccagcgtggatcacagtgctccctcctcgtcacgccgcgggtacgaagcggcccggagatctcacagtcgtccttcctttcaacacaccccagcaccggagtacaccagggggtcagctggatcaggggtacccccgacgagcacggcacagccacgtccccaggcattccaaactcttcaccaaacaatagctcaccaatacctttcctctttacatttcccattgtcttcagcatagagttcaacacaatggaagctccattcatggcaagtaaatccacttggacttcccacttggcgagatcgtccagagtgtaggtgtggagaccgttgccaggtgataaggtcggtgaccaaaaccacggcggaagagcaacggacggcgccggcgacgaggaagaagcggcggcggtcttcgggtcgacggtgacggcggtgctccggcggtcttcggcggcggcgaagcggtggacggggacggcgacgacctcgcgatcccgatggtggcgacggcgaccaacgacgacggctgcaacggcggcgcggcgcggcactgaccaccggtcagaccgggccat

SEQ ID NO: 90480 - DNA, 4829 bp, Oryza sativa
  Clone ID: PAT_MRT4530_89146C.1
atggtacacgacggtagcacggtgcgcctcagcggtgcgtcttggtggcggtggagggaggccggaggaaggagggtggagccggggcggcagaggagccggcgatggagatggccatggcagtggctcgatccaggcgaggaggggatgtcaggtgatatgcccattcgtctgtattatggcgattctcctatacaaatatgtgatagcggggtggatttgactgtatatgccttccatgatactagtctgaatgcaccggagcatatgggtttgaacgacgtgttagggtggttgtataatatgtttggggtagatccagtgcacgataaatttgtcataaatgccgtgtggccagtgaggggtcaacatggatggcagtggagagtagtggaggttgcgtcaactgggagttggaggaagtttgttagtaaagtaagggagaaaggctatagcctggtaatagtggtgcagaagacaacatgtgttgatcaatcgggggagtcaagtcatgccgtggtggaagaaactccgttggaaggtggacaagatgaaaatatttggcggactgaacaaggtcgaggggaagaagtagtagagggtaatacacaaggagaggtcattgttcgtggtactaatcgtgaggccaacgactcggacgatgaagaaccggattcgcctatgcgtgttgatgcagcggaggagaatgaggcggtagtggatcagatgaaagtggaaaacgaggaataccttgcgcttgtagtggaaggagaagatacaacactgtgggacaacgaaactaacatacccgatgattggacgaccatatcaatgagtcgtatgaaggtaaacgatggtttagatgcccactggtgttatgatagtaagcaggtgaaagttggacagatgtttcatgaaaaaggtcacttacaagatgcggtgaagaggtgggcatttgtccagaagcgtgagttcagggtgaaggtttcaaataggacgacgtatgatgtgaagtgcatacagggtggatgtccttggagagtgcatggttacaagccacaacatgacactttatgggtagcttcgagggttgagcaacatacgtgtttgttggagaatacccgtctggtgcacagaaacctgacagcggcatttgtggcacaaatggtatattcaaaggtggttagaaaaacatctttgtcccctttcaccataatgcatgacgttgagaaagaatacggatatgagatatcgtacgacaaggcttggagggcaaaacagaaagcattggagatgaggtttggaacttatgaggattcttatcacaatcttcacccactattggaggtgatgcaggcaagaaacccgggtacacacatggctattctcgatgaggtgaatgaatatggggagaatgttcttcgtcgggctttctggtcatttgggtccatgatagaggcctttagaaattgcattcctttgctctgtgttgatggcactttcatgacaggcaagtacagaggaacaattctaacagcgatcggagtcgacgcggatagccatgtcgttcctgttgcttttgcatttgttgaaagcgagaacacatcaagctggctatggtttttgcggcacattaaaatacaattcaggagtaagagattgatggacctgttcaagaagttatgcaagcagaatcaacaaagaaagtttgatgccatatgggatcaactggatcgtttgaccactacacacatggaagaggttaggaaaaaacctatagttgccagagaggaggagccggagggacttgaacccattcctaatgaagcaccaagtattactcggcgcaggaagcgtggaagggccacgaagtgcttcacggagttggtagaatttgagccaagggagaaatggtcgttgttgtacgatacagacggatcgaggtatggtgtgatgacaacaaatcttgctgaagtgtataactgggttatgaagaatacacgacctctaccacttgttgctatcctggagggcatcacgaggggtacacagaagtatctctgtaaaaggtattccatggctagtctgaacctcagcaaacccagtgttaagtatagccccgctattacacagtacatggatgagaaaagtaagaagggaggaatccacagagtgtggcctgctgggaatagagagttgttatttgagatacgacttcgtgacaagagtggtgtcggcattgggactactgacatcacattggaatgcacgttatggccagagtatcacgcttacaaacgcatttgcaacaagccttacctgttacatcggccatgttcccatgttcttgctgcttccgcaaaagggggtgttgatggaaacatttttgtttctccctactttagaaaggaatcgtgggaggcaacttggcgtggtatggctgatcaatatgatgggcagctgatagacaaggagatcgataggaaccatcgatcgcgacgtcttagtacaggaactttctgcaatgtgctaaagatgcgaggaccggatcaatattggcgtattgatcctcgttgggttccaagactgagagcagctgggttgttgacgtttgcacggttggtcgagccttcacgtgcaaggtccgaacggatccacattgacgcggcgcttctgagtgctcttgtggatagatggaggcctgagacccacactttccacctcacagttggagagatggtgcccactctgcaggatgtgtcttatttgttggggctgccaatagctgggccagcagttggcccaacaatggtgaatgctggatgggcggatgaccttctggccagttttggtggtgtgctgcctgttgcactggaggatctcacagatgggcacgggcctacgaaaagttggttgaatcagtttcgacaggatgtcttccctaatgaccaggaggagtggatcgtgcagcggcacttagtcgcttacctgttgtggttgtttggatgggtgatgttcacgggaactcacgctgactccgtggacaagcacttcatccactttgcagagcagattgcagagttacctatcgcggagattccacagtacagttgggggtcggcggtacttgcggcgacatatgccggactgtgtgatgcttgtgtgaggaacagcaagcaaagttcactccctggatgcccgttgctacttatgttgtgggcgcacgagcgcttcgacattgggaggcctcagcttgactcgtacgcaaactacggtttgcgagagatgtacaggtctggtgttgatgacatcgacgatcgtcccactatgggatccttgtggacacaccgtgagccgcagtgggttagcgggacgacacatcgtgtctacactcagtttgtagctgactttgatcagcttacgcctgaccgtgttcggtggactccctacactcagcacgatgtcaatgatcgtgcaccgcacggtctcgcggatctttgcacgcgagatatgcaactctggatgacgacttgtcacctcgtggtggacgtgcacgtcgagccacacaatgtccacagggttctcaaacagttgggcatgtatcaggacttccctccgagagatggtcgtcctttggctgatagtcttcataggtactccagaaaggggctcgggctttcctacgagctagttattgtgaccacggttcagccgacggtacaagagtgggagcatgcagctgataacttggcacttcagacacctccagacgatgggagttattatggagcttaccttcgttggtaccgcagtgttacacgatggaggtgttttcctcgacaaggagatagcaccgtcccccaccaggcagcgattactgacacgtttgcccctcagcctagatcagcttacaactcaatggcggaatttgttgagcacgttcacgtggagtccgacaccatgctgcaaagactagaggcgagacctccagtcgtcaggcctgacgacgtggcgagcatccttcgcaacttccgtgcacgtgctgccgcactactacgtcgtgtctcctgtcggagcgcggcagatgtggtgcagacgtcgggccgacggccatcaccaccactaccccgacgttccagcgtggatcggagtggtccatcctcttcacgtcgcgggtacgaagcggcccacatatctcacggtcgtccttcctttcagcacaccccagcaccggagtacaccagggggtcagccggatcaggggtacccacgtcgagcacggcaccaccacgtccgcaggtattccaaactccgccttatgttcacccctcgcagggagcatctgggtcggcacacttcccttacatgccaacgggggacaacgtgttgaacacaccagcatggggacttcatatcactccgcgtgcgccagagcagggccacacacagcacgcatacgatgagtacggttcggcgtcgacgcatcacggaatgcctgcttactcccctcgcacagcattcattgaggacttcttttccactgatcctccccagggagaagtagggatggattactggcacgcagcacctcagaacacgaccctgtcgaactgcgccagttcgacggatatcctgtcgaacaggggcagttcgacagccctgcctgtcgaacaggggctgttcgacaggacctgtcgaacggcagccttccgatctcctcgccagtcgcgctctggccgttcgataggcgccctatcgaactgcacccgttcgacagggacctactttcgcgattttccccggttgaccactacttttgcgattttcca

SEQ ID NO: 90481 - DNA, 4960 bp, Oryza sativa
  Clone ID: PAT_MRT4530_89147C.1
atgggcgttcgacaggccggcttaaagccccgtccacccaggccgcgagttcgatttgtttgaggaccacatcgccagccgccgccgagagtcgccacatcgtcggcgtgatatgcccattcgtctgtattatggcgatgctcctatacaaatatgtgatagcggggtggatttgactgtatatgtcttccatgatactagtctgaatgcaccggagcatatgggtttgaacgacgtgttagggtggttgtataatatatttggggtagatccagtgcacgataaatttgtcataaatgccgtgtggccagtgaggggtcaacatggatggcagtggagagtagtggaggttgcgtcaactgggagttggaggaagtttgttagtaaagtaagggagaaaggctatagcctagcaatagtggtgtagaagacaacatgtgttgatcgatcgggggagtcaagtcatgccgtggtggaagaaactccgttggaaggtggacaagctgaaaatgtttggcggactgagcaaggtcgaggggaagaagtagtagagggtaatacacaaggagaggtcattgttcgtggtactaatcgtgaggccaacgactcggacgatgaagaaccggattcgcctatgcgtgttgatgcagcggaggagaataaggcggtagtggatcagatggaagtggaaaacgaggaataccttgcgcttgtagtggaaggagaagatacaacactgtgggacaacgaaactaacatacccgatgattggacgaccatatcaatgagtcgtatgaaggtaaacgatggtttagatgcccactggtgttatgatagtaagcaggtgaaagttggacagatgtttcatgacaaaggtcacttacaagatgcggtgaagaggtgggcatttgtccagaagcgtgagttcagggtgaaggtttcaaataggacgacgtatgacgtgaagtgcatacagagtggatgtccttggagagtgcatggttacaagccacaacatgacactttatgggtagcttcgagggttgagcaacatacgtgtttgttggagaatacccgtctggtgcacagaaacctgacagcggcatttgtggcacaaatggtatattcaaaggtggttagaaaaacatctttgtcccctttcaccataatgcatgacgttgagaaagagtacggatatgagatatcatacgacaaggcttggagggcaaaacagaaagcattggagatgaggtttggaacttatgaggattcttatcacaatcttcccccactattggaggtgatgcaggcaagaaacccgggcacacacatggctattctcgatgaggtgaatgaatatggggagaatgttcttcgtcgggctttctggtcatttgggtgcatgatagaggcctttagaaattgcatttctttgctctgtgttgatggcactttcatgacaggcaagtacagaggaacaattctaaccgcgatcggagtcgacgcggatagccatgtcgttcctgttgcttttgcatctgttgaaagcgagaacacatcaagctggctatggtttttgcggcacattaaaatgtgtgttgttgaaaacagaccaaatgtgtgtgttctgcatgaccgacacgccggtttgctatcagcgatacagaagcttcaagaagatgtcacacagtccgtgccatggccagatttacatagcagatggtgcatgcgatattttggggctaatttttatagacaattcaggagtaagagattgatggacctgttcaagaagttatgcaagcagaatcaacaaagaaagtttgatgccatatgggatcaactggatcgtttgaccactacacacatggaagaggttaggaaaaaacctatagttgccagacaggaggagccggagggacttgaacccattcctaatgaagcaccaagtattactcggcgcaggaagcgtggaagggccacgaagtgcttcacggagtgggtagaatttgagccaagggagaaatggtcgttgttgtacgatacagatggatcgaggtatggtgtgatgacaacaaatcttgctgaagtgtataactgggttatgaagaatacacgacctctaccacttgttgctatcctggagggcatcacgaggggtacacagaagtatctctgtaaaaggtattccatggctagtctgaacctcagcaaacccagtgttaagtatagccccgctattacacagtacatggatgagaaaagtaagaagggaggaatccacagagtgtggcctgctgggaatagagagttgttatttgagatacgacttcgtgacaagagtggtgtcggcattgggactactgacatcatattggaatgcacgttgtggccagagtatcacgcttgcaaatgcaattgcaacaagccttacctgttacatcggccatgttcccatgttcttgctgcttccgcaaaagggggtattgatggaaacatttttgtttctccctactttagaaaggaatcgtgggaggcaacttggcgtggtgaattgcgtggttggcgtgccatgtgcgatttcactcgtcctcctccagggcaagccaattgggttcctgactcaaatttattagttgatactaagggtcgtcgccagtcgcgcaggatcaagaaccttatggatgaagctgaagtgaaagatcgttctcgtcgtaagaaagcttacattctttgcggggagaaccattcccgtaaagattgcagcatgtacaatatgcgaggaccggatcaatattggcgtattgatcctcgttgggtttcaaggctgagagcagctgggttgttgacgtttgcacggttggtcgagccttcacgtgcaaggtccgaacgaatacacattgacgcggcgcttctgagtgctcttgtggatagatggaggcctgagacccacactttccacctcacagttggagagatggtgcccactctgcaggatgtgtcttatttgttggggctgccgatagctgggccagcagttggcccaacaatggtgaatgctggatgggcggatgaccttctggccagttttggtggtgtgctgcctgttgcactggaggatctcacagatgggcacgggcctacaaaaagttggttgaatcagtttcgacaggatgtcttccctgatgaccaggaggagtggattgtgatgttcacgggaactcacgctgactccgtggacaagcacttcatccactttgcggagcagattgcagagttacctatcgcggagattccacagtacagttgggggtcagcggtacttgcggcgacatatgccggactgtgtgatgcttgcgtgaggaacagcaagcaaagtttactccttggatgcccgttactacttatgttttgggcgcacgagcgcttcgacattgggaggcctcagcttgactcgtacgcaaactacggtttgcgagagatgtacaggtctggtgttgatgacatcgacgatcgtcccactatgggatccttgtggacacaccgtgagccgcagtgggttagcgggacgacacgtcgtgtctacactcagtttgtagctgactttgatcagcttacgcctgaccgtgttcggtggactccctacactcagcacgatgtcaatgatcgtgcaccgcacggtctcgcggatctttgcacgcgagatatgcaactctggatgacgacttgtcacctcgtggtggacgtgcacgtcgagccacacaatgtccacagggttctcaaacagttgggcatgtatcaggacttccctccgagagatggtcgtcctttggctgatagtcttcataggtactccagaaaggggctcgggctttcctacgagctagttattgtgaccacggttcagccgacggtacaaaagtgggagcacgcagctgataacttggcacttcagacacctccagacgatgggagttattatggagcttaccttcgttggtaccgcagtgttacacgatggaggtgttttcctccacaaggagatagcaccgtcccccaccaggcaacgattactgacacgtttgcctctcagcctagatcagcttacaactcaatggcggaatttgttgagcacgttcacgtggagtccgacaccctgctgcaaagaccagaggcgagacctccagtcgtcaggcctgacgacgtggcgagcatccttcgcaacttccgtgcacgtgctgccgcactactacgtcgtgtctcctgtcggagcacggcagatgtggtgcagacatcgggccgacggccatcaccaccactaccccgacgttccagcgtggatcggagtggtccatcctcttcacgtcgcgggtacgaagcggcccacacatctcacggtcgtccttcctttcagcacaccccagcaccggagtacaccagggggtcagccggatcaggggtacccacgtcgagcacggcaccaccacgtccgcaggtattccaaactccgccttatgttcacccctcgcagggagcatctgggtcggcacacttcccttacatgccaacgggggataacgtgttgaacacaccagcatggggacttcatatcactccgcgtgcgccagagcagggccacacacatcacacatacgatgagtacggttcggcgtcgacgcatcacggaatgcctgcttactcccctcgcacagcattcattgaggacttcttttccactgatcctccccagggggaagtagggatggattactggcacgcagcacctcaggtcacacagccgacgcaggagacggaggccggtcaggggccagacgtgacaccacagcaggcagctagagataggcacccccctgataatttgacatatcccactgagcagattaggcgtaggaagaagggaggacctagcaagcgtgcgaagggcactgatcgtccttga

SEQ ID NO: 90482 - DNA, 5325 bp, Oryza sativa
  Clone ID: PAT_MRT4530_89148C.1
tcaggaggcaagggtagctcttccacggcggtcgggcaggtagtctcggcggttctgatggcttctgtggaggcctttgtggggagcagcgaagcagccgttgggcttctcgttccggcctccacttgatgaccagctcgtggagctcgccgacgtcggcgccggactcccaaccttccaggatgacgtcatggaacgggcgattgccagggctcgaccgacgtagccgacgtcggcggagtccctgggcacgaagctggcgacgagttcgacggcttcaaggatggtctgcttgctgacgcgaacccccgccagattcctcgacccgccgaccagaccagggtagtcgtcggcgagccggaagaccgtcgccaccgggatgagctcccgcggcctattgctgaagatgtaccacaggccgctaccgtcggtgaagccggtgatgtagaggttgtcccggcgaatcgcgagcatgattttgttgtcgccggcgccgacaagctcgaggatgaaccacttgaagggcttcctgttgacggcctgctggtgcaagacccaaacgacggtgttgtccgggccccacattttgttgctgctgtcttgtatcagaagggtgtaaatgtacgacatgagttctccgtagtcgtctgtggccacattgaagctgatcaggtcgtaaggtcccctgtcgaacaatgggcgttcgacaggccggtttaaagccccgtccacccaggccgcgagttcgatttgtttgaggaccacatcgccagccgccgccgagagtcgccacatcgtcgccgtgatatgcccattcgtctgtattatggcgatgcttctatacaaatatgtgatagcggggtggatttaactgtatatgccttccatgatactagtctgaatgcaccggagcatatgggtttgaacgacgtgttagggtggttgtataatatgtttggggtagatccagttgcacgataaatttgtcataaatgccgtgtggccagtgaggggtcaacatggatggcagtggagagtagtggaggttgcgtcaactgggagttggaggaagtttgttagtaaagtaagggagaaaggctatagcttggcaatagtggtgcagaagacaacatgtgttgatcgatcgggggagtcaagtcatgccgtggtggaagaaactccgttggaaggtggacaagctgaaaatgtttggcagactgagcaaggtcgaggggaagaagtagtagagggtaatacataaggagaggtccttgttcgtggtactaatcgtgaggccaacgactcggacgatgaagaaccggattcgcctatgcgtgttgatgcagcggaggagaatgaggcggtagtggatcagatggaagtggaaaacgaggaataccttgcgcttgtagtggaaggagaagatacaacactgtgggacaacgaaactaacatacccgatgattggacgaccatatcaatgagtcgtatgaaggtaaacgatggtttagatgcccactggtgttatgatagtaagcaggtgaaagttggacagatgtttcatgacaaaggtcacttacaagatgcggtgaagaggtgggcatttgtccagaagcgtgagttcagggtgaaggtttcaaataggacgacgtatgacttgaagtgcatacagggtggatgtccttggagagtgcatggttacaagccacaacatgacactttatgggtagcttcgagggttgagcaacatatgtgtttgttggagaatacccgtctggtgcacaaaaacctgacagcggcatttgtggcacaaatggtatattcaaaggtggttagaaaaacatctttgtcccctttcaccataatgcatgacgttgagaaagagtacggatatgagatatcgtacgacaaggcttggagggcaaaacagaaagcattggagatgaggtttggaacttatgaggattcttatcacaatcttcccccactattggaggtgatgcaggcaagaaacccgggcacacacatggctattctcgatgaggtgaatgaatatggggagaatgttcttcgtcgggctttctggtcatttgggtgcatgatagaggcctttagaaattgcattcctttgctctgtgttgatggcactttcatgacaggcaagtacagaggaacaattctaaccgcgatcggagtcgacgcggatagccatgtcgttcctgttgtttttgcatttgttgaaagcgagaacacatcaagctggctatggtttttgcggcacattaaaatgtgtgttgttgaaaacagaccaaatgtgtgtgttctgcatgaccgacacgccggtttgctatcagcgatacagaagcttcaagaagatgtcacacagtccgtgccatggccagatttatatagcagatggtgcatgcgacattttggggctaatttttatagacaattcaggagtaagagattgatggacctgttcaagaagttatgcaagcagaatcaacaaagaaagtttgatgccatatgggatcaactggatcgtttgaccactacacacatggaagagaatacacgacctctaccacttgttgctatcctggagggcatcacgaggggtacacagaagtatctctgtaaaaggtattccatggctagtctgaacctcagcaaacccagtgttaagtatagccccgctattacacagtacatggatgagaaaagtaagaagggaggaatccacagagtatggcctgctgggaatagagagttgttatttgagatacgacttcgtgacaagagtggtgtcggcattgggactactgacatcacattggaatgcacgttgtggccagagtatcacgcttgcaaatgcaattgcaacaagccttacctgttacatcggccatgttcccatgttcttgctgcttccgcaaaagggggtgttgatggaaacatttttgtttctccctactttagaaaggaatcgtgggaggcaacttggcgtggtgaattgcgtggttggcgtgccgtgtgcgatttcactcgtcctcctccagggcaagccaattgggttcctgactcaaatttattagttgatactaagggtcgtcgccagtcgcgcaggatcaaaaaccttatggatgaagctgaagtgaaagatcgttctcgtcgtatggctgatcaatatgatgggcagctgatagacaaggagatcgataggaaccatcgatcgcgacgtcttagtacaggaactttctgcaatgtgctaaagatgagaggaccggatcaatattggcgtattgatcctcgttgggtttcaaggctgagagtagctgggtctttgacgtttgcacggttggtcgagccttcacgtgcaaggtccgaacgaatccacattgacgcggcgcttctgagtgctcttgtggatagatggaggcctgagacccatactttccacctcacagttggagagatggtgcccactctgcaggatgtgtcttatttgttggggctgccgatagctgggccaacagttggcccaacaatggtgaatgctggatgggcggatgaccttctggccagttttggtggtgtgctgcctgttgcactggaggatctcacagatgggcacgggcctacgaaaagttggttgaatcagtttcgataggatgtcttccctgatgaccaggaggagtggattgtgcagcggcacttagtcgcttacctgttgtggttgtttggatgggtgatgttcacgggaactcacgctgactccgtggacaagcacttcatccactttgcggagcagattgcagagttacctatcgcggagattccacagtacagttgggggtcggcggtacttgcggcgacatatgccggactgtgtgatgcttgcgtgaggaacagcaagcaaagttcactccctggatgcccgttgctaattatgttgtgggcgcacgagcgcttcgacattgggaggcctcagcttgactcgtacgcaaactacagtttgcgagagatgtataggtctggtgttgatgacatcgacgatcgtcccactatgggatccttgtggacacaccgtgagccgcagtgggttagcgggacgacacgtcgtgtgtacactcagtttgtagctgactttgatcagcttacgcctgaccgtgttcggtggactccctacactcagcacgatgtcaatgatcgtgcaccgcacggtctcgcggatctttgcacgcgagatatgcaactctggatgacgacttgtcacctcatggtgaacgtgcacgtcgagccacacaatgtccacagggttctcaaacagttgggcatgtatcaggacttccctccgagagatggtcgtcctttggctgatagtcttcataggtactccagaaaggggctcgggctttcctacgagctagttattgtgaccacagttcagctgacggtacaagagtgggagcacgcagctgataacttggcacttcagacacctccagacgatgggagttattatggagcttaccttcgttggtaccgcagtgttacacgatggaggtgttttcctccacaaagagatagcaccgtcccccaccaggcagcgattactgacacttttacccctcagcctagatcagcttacaactcaatggcggaatttgttgagcacgttcacgtggagtccgacaccctgctgcaaagactagaggcaagacctccagtcgtcagatgcggtgaagacgtcgggccgatggccatcaccaccactaccccgacgttccagcgtggatcggagtggtccatcctcttcacgtcgcggggagcatctgggtcggcacacttcccttacatgccaacgggggacaacgtgttgaacacaccagcatagggacttcatatcactccgcgtgcgccagagcagggccacacacagcacacatacgatgagtacggttcggcgtcgacgcatcacggaatgcctgcttactcccctcgcacagcattcattgaggacttcttttccactgatcctccccagggggaagtagggatggattactggcacgcaacacctcagaacgcgaccctgtcgaactgtgccagttcggcggatatcctgtcgaacaggggcagttcgacagccctgcctgtcgaacgggggctgttcgacaggtcctgtcgaacggcagccttccgatctcctcgccagtcgcgctctgaccgttcgataggcgccctatcgaactgcacccgttcgacagggacctactttcgcgattttccccggttgaccactacttttgcgattttcca

SEQ ID NO: 90483 - DNA, 1602 bp, Oryza sativa
  Clone ID: PAT_MRT4530_89149C.1
atgcgggcacagcggcgcgcggggaagaagcgggggaggggagaggaggcgggcggcgtggagcgagcgcgccagcggtggcgggagagtgggagagaggcggctgggacggcgggagcggtgggcagggcagcgggcgagagtggcagcggagcggcggcgctcgtcatgctccagctcttcaccgccggcgtcttcgtcgtgttggttgacctccacgagcgcggtaggcggagcagcggtgggcggagggcggcgggcaattacgacggagcgaggggcctgaggaagaacgtggtgcggcagcatctcctccagaccatcttcgtgctctggctcatcgtcaacacgacgagaggccacaacatgagctatcgggtggtcacctgggcgttctggagcctcagcgtgttcaaggcggcggcgatggtcgccgaattcctcgttgggcggagcaacgatgtggcctcgcggcggcgcatgggagtggaggtgatcgcgcggtacatggaaatcgaggagtccctcgccgcgggagaccaaccggctaaccccaggacgatgaaagggtacaagtacatcttccacggggaggccaccgtggcgcccatgagccgggacggcgacatcctggcgcagatcagctccagcaagtcggtcgtcaccattgactgggtctacccgtggatcgacgatcaggtcgggtactccgagttggagaaggatttggccagggacatatgcctcgcgttcacgctgtacaaactgctgaagctacggctctacggcaactggatgatgtacatcaagaccgtgtacggctgcgtgcgcgacgagcggccctggtacaacaggcgccgccgccacctctggtggaaggagtacatcgcgccgcccaagatgaattactgggaggacaatctcggcgaatatgtgctcctcgaggggttcaaccaccgaccgtgggtgtggaacctgctgtcgtggctgacgctgtgcctggtggagccacggaggcagggccagaagaggggacggaccaagcacctgacacgggaggtcagcggagccgtgctcctctccttcaagtctagctctgggcggctcaccaatggcatctccaccttgcgaaggcacggcctgtcgtctcggctggggtgggcgtgcactttcccaaacctcactgaccagatccttgtgtggcacgtcgtcaccacgcgctgcgactgggcgagtggccgtggccgtagccgccgcgacgacgaccaccataacaggctcgtggcgaggaggctgttcaactactgcgcctacttggtggcattcgtgccagagatgctcccggacccgagctacatcgcccagcagatcttcgacacgacggtgcagcaagcgcgggaccacttcgacggatgtaggacgacgagctccgtgctcgcgaggctacaggagatccaagacaaggagagatgcggtgcccgcgtccgagagacaagtcagctccaccatcatcgagaaggcggcgctgctcggcggccagctcaggatggctatggacaacgaggagcggctgtggcagatgctggccgagttctgggttga

SEQ ID NO: 90484 - DNA, 463 bp, Oryza sativa
  Clone ID: PAT_MRT4530_8914C.1
aacctctgcagagggggtacactttacccacacgacattactaacccggatcacccagctcgcatttcgaaagccgacacaggttcaccatatgccaacgagaggggtcccagactgacatcaggttaggtcccagaccatactatgccaggaagcccgggggttctcctcggcaccaccccgttgaatccacatgtctcttggcatcatggctccctcggtctgtggttttggaaattcatttagttcgcaagcaccgacccaggtgtcgggtattccaagtcttttgtaaaaccccaagttttacccatcgttggatattttaaattagaggggaggtgttccgatgcccgtgcccgaaggccagtgcatcgaagcacaacagtgacttgccttgctcgagatcttgagctcgatcctcgaaatcctcgcactgcgggtctgcgggctctgaaactacacg

SEQ ID NO: 90485 - DNA, 327 bp, Oryza sativa
  Clone ID: PAT_MRT4530_89150C.1
agataatacacctacttatctgataaatgccaagagctctggaaagtacatagatggcaaggagttcgtgaggctaatagaggtgttattatcgaacaatctgccagaccgcaaatctgaagatattagagtgggggaattgaagggaaagtacaagagctttttatccagcaaattcggcaaatatttacctaaggagttctctttctgagaatcattatcaatgctttagtgtacatttaccacactggataggtttactgtctacatttttaacttgatctgggattgtcacccctttctccctcatctctcaagtctcaacca

SEQ ID NO: 90486 - DNA, 357 bp, Oryza sativa
  Clone ID: PAT_MRT4530_89151C.1
atggtgcaagagtttactgtcttcccagccccgcccttcgctgccgcaccattcgacgactatgagagaaggcaacaaggtgcatggcaccgtcaccaccaccctccttgggcgctgacggacgaggaaagggagagaagaagggaaatagagatgggcgatgatcatgccaacattctcatcgtcttctacaaacagtggcggagcgctcggtatggcaaggcgcagcgcggcgtcaccgttgctgctgggcggttgggccactcggtgctccgtgcggccgtgcgccatgcgcgtgatgatgacgcggggaggccggcagtcggcggcagcaaggcgcaggtgctgtcccgctga

SEQ ID NO: 90487 - DNA, 283 bp, Oryza sativa
  Clone ID: PAT_MRT4530_89152C.1
gcatgccaacattctcatcgtcttctacaaacagtggcggagcgctcggtatggcaaggcgcagcgcggcgtcaccgttgctgctgggcgcgtgcggccgtgcgccatgcgcgtgatgatgacgcggggaggccggcagtcggcggcagcaaggcgcaggcgggcgacggtcggcggcaacaagaggcgcgcaagcggcgctggtgctggctgcggctggggatggcaccgcaccgcgcagcaagtagccaagcagggagcaggcgagcagagcagcacttag

SEQ ID NO: 90488 - DNA, 338 bp, Oryza sativa
  Clone ID: PAT_MRT4530_89153C.1
ggggcccaaaatcgcaaaaaaattttttccccccccggaaattaccccccaattgggggcccggccaaaaaaaaaacatttttccaaaaagattttggcaaaggggggactaattacgggccacaaaaaggctttttaaaggggggaaaacgggccccaaaagtagaaggccgggggacatgaaaaagtttaaaaaaggggggggtttaaagcggtaagtttttttaaaaaacaaaggccccccggtagggggaacgcaagcccaaaaaaagggggggggcctgccccccaaaaaacctcaggaggaggtcaaggccgggtccccttaaggcaagggg

SEQ ID NO: 90489 - DNA, 345 bp, Oryza sativa
  unsure (1)..(345): unsure at all n locations
  Clone ID: PAT_MRT4530_89154C.1
angaatnnnnncgtgcagggtccnaggatgtgaatgaggaatatgtggatgtcaaaatngaagttccatgataatggaatgctggtcaaactagtggcttcaagcaactgaatagggtgagtgtcaaattaacaaaaatgtttagatgccctgctatctagtattgtaacancntatatgagtgtccctacaatgtactgagattattttggtacagttaggagaaaactctcttcatttcttttgtacttgtgctgatgtacaagtctttatgatgcaaatttcattgattcttttgtaaaattctagagccgtatgcaatgcaatactgagcattnnntggga

SEQ ID NO: 90490 - DNA, 457 bp, Oryza sativa
  Clone ID: PAT_MRT4530_89155C.1
aaatcacacaaacacgacagtagtaggaacacagtgaactacacatggacgagtacagacagattttagaaacacaatacatatagagaacatatccatgacagacatggctatgttaattattttaaacggtgcaaactaaataccatttacctgttgtaaacttcatctgcaatggtatcacggagtgtattcattgccgccgctctgttaggtacatcgttccagccacgtagggtggagcatctgaaacgatggggtatccattgtacaatgggttctgtgtaaggaaatacatgtcggagctgtcaatcctgaagttatgtagaactaatgcacaatgtatgatcttggtatggtcgtcactcctaaggaaataaggtatttccctcaggattctcactggcttttgataactccaaatgtcctttccactatgttacgctacgaactgtgc

SEQ ID NO: 90491 - DNA, 480 bp, Oryza sativa
  Clone ID: PAT_MRT4530_89156C.1
attgttggtatttcttacgaccacagataaatccgctagcgcacggaataccgctgtagcacttcaccttcgggtgaccccacaaggatatcgaactcagggaacgattactaggatgggattcagggctgtcgccacctgccacctacctctgacaaatccgtgagatacacaacaaacaaagagaactttctccgaatccggagcagagtataccgatagctccggtactcctccagaactcctcctaaaaagctaaactcgtcgaggtagaagtcggatgagcgccaatcttccgggcactcctccagagcttcccctcactctccacctatttctaatgtacaaaagatacaatagagcatcttgtaattcagctcaaagttgtgtgtgagtgaagtgagggagaggagctctatttatagcctccatatgacggttacagctatgagaaacgaccaaaacgccctcaaccgtcat

SEQ ID NO: 90492 - DNA, 324 bp, Oryza sativa
  Clone ID: PAT_MRT4530_89157C.1
tgcctagatcgcgagcggccgccctggtggggcttctttaaaggagaaggtctttgaaaccaagcaagcggtcctcgtccaccgccacgaatgaccatggaagccaagggccacccgacgatcacgatactcacgcgactgacattcagaacatcaccggccacaccaacgctgaggacaggtggccagaatgagaccagaaccgcaaggggggcgccatcgtcatacccaaagacagaaggaccgccgatggtggagcatgagccaaggcccgctacaaggtggcggcagaggcccaaaaaggtggggacaggcaagatggga

SEQ ID NO: 90493 - DNA, 460 bp, Oryza sativa
  Clone ID: PAT_MRT4530_89158C.1
gtccacagataaatccgcaagcgcacggaataccgctgtagcacttcactttcgggtgaccccaaaaggatatcaaactcagggaacgattactgggatgagattcagggctgtcaccacctgccgcctacctctgacaaatccgtgggatacacaacaaacaaagaagaagttctccgaacccggagcagagtgtaccgacagctccggtactcctccagaattcctcctaggaagctacactcgtcgaggtagaagtcggatgagcgccaaacttccgggcactcctctagagcttcccctcactctataccttattctagtgtacaaaagatacaatagagcctcttgtaattcatctcaaaattgtgtgttggaaatgagagtgagctcctccttttataggcaggtatgacggttacagcctatgcgaaatgaccaaactaccccggaaccgcca

SEQ ID NO: 90494 - DNA, 606 bp, Oryza sativa
  Clone ID: PAT_MRT4530_89159C.1
ttataagtaatttttgacacaggccctaaaaagcaccatataaaaaaaattggtcaagtgaaaaatggcaaccgccgtcctccaccgacctccttcacgccgtccccgagcccgtcgccgcgtcagccgctgttggtatttcttacgatcacatataaatccgcaagtgcacggaataccgctgtagcacttcaccttcgggtgaccctaaaaggatatcgaactcaaggaacgattactaggacgggattcagggctgtcaccacctgccacctacctttgacaaatccatgggatacacaacaaacaaagagaagtttctccgaacccatagcagagtataccgacagctccggtactcctcccgaattcctcctaggaagctacactcgtcgaggtagaagtcggatgagcaccaaacttccgggcactcctccagagcttcccctcactctcgaccttattctaatgtacaaaagatacaatagagcctcttgtaattcagctcaaagttgtgtgtgttggaatgagagtaagctcctccttttatagcctccatatgatagtacaagtatgggaaacgaccaaactaccctccaaccgtca

SEQ ID NO: 90495 - DNA, 1457 bp, Oryza sativa
  Clone ID: PAT_MRT4530_8915C.1
aagccgaggcggcccaggaggaggggagggagagaagatgggccgggaaggagaggagggagggcgggcccagaaggaggaggagaggagggagtgggctgcccgggaggggaagagaggcccgggagagagagggactaacttgggtacattgctcggcttgcccataaccgagggcgcggctattcgaatagattatactctgatcagaggtgtacatcgacccaatcccacctacggccggaacccccgggacaggcaggcaggactgagcccctagcagcaggacaccggccctgtgccatgacatctcgactaccgggccgcagctcgtgtagccttcatttgccccactagacatgtggaagtacggtagtgctttgcaacagaggcccgaagaccggtccttatatggccgaggtgggtccatggtggaccgggcgcacgcggctgacgccggccggcgtcgtgggtcccacgcgtcagccgcacccgcgggcgcgggcggctgacggccgggccccacctggcagccgcgggacgcgcccgaaggcggccttgccggcacggccgacgggaggcggcgcgcccgcgccccgatggtcgccggcggcgacctccggcgcgacggagcggcggccgagagaggggagggaagggggaagtgaaacggcggtccttggctcaccccgggtcgacggcggtgacggaaacggcgaccgaagcggcgagaggcggcggcgcggctcgggttgacgaggacggcggtgctccgacggtcggcgggcgaaacggaggagtggacgaggtcgacgaggacgcggcgaagccgaaggaggtgacgccgagacgggaggaggtccggggcgacgacggcggcgaaccggagctcggcggcgacggcggagagagaggacgacagcgcgggcttgattccgacggggagagaaagcggcgagcggcggaaacggagcagagaggctcggggagcgattatataccgtcgggagggggagagagcggccggaggggaaggaaaccggcgcggcgatctcggctccattgatgcgccggcgaagattgcgggagtaaatccgagcgaatccgagggagagagagagggaaaagagggggaaaagagggagggaatcacggggagtgatttccccctctttatggcgcgcggggacggcgggatgcggcggattcggcggcggcggcggcgctagggcacgggcgggcggcgggcgcggcgcgaggtaggggatgacgggtgggccccacccgtcagcgagggtggcgggcgggcccgcccgtcagcggcgcgcgcgcggggaggaggccgatgggccgcgggggagaggagagagagggagggagttggaccgagccggcccaagagaggaaggggggggaaaaggacttcttttagggtttttctttttataaaacctttt

SEQ ID NO: 90496 - DNA, 672 bp, Oryza sativa
  Clone ID: PAT_MRT4530_89160C.1
atgggcggcggcggcggcgacgagcgcgagaaggccaagggcggcggcggcggaggaggaggaggaggtggaggaggagagtacgggacgttccagggcccgcccagctacccgcccccgcgcccgccggtcgtcgggtacccgcagcccgcgccgccgccggggctctacggccagggcgatccatactaccgcccccgcggcgggtaccagggcattcccgctcgagattatgaagcaggtgctcgtggacatggtcatgaccgccttccttgctgtgggattggcattggctggtttttattcatagtcggtttcttcctcggtgctattccttggtatgtcggagcattcctactgtggtgttctagagtggactacagggagaaaccaggatatgtagcatgcgctatagcggatattgacacaattcgcttgatcccagtgcacattgagatggatgatgtactggcatggcattatgacgagaaggggttgtttttggtgaaatcggcatataaagtgcaccgagactgggagagacagagacaaaggagaggaaatgcagctacatccaatgagagtaacaagcctgatctttttctggaagaaggtatggaatatgcaggttccgagaaaggtgaaacacttcatatggaggctttgtcataa

SEQ ID NO: 90497 - DNA, 525 bp, Oryza sativa
  Clone ID: PAT_MRT4530_89161C.1
ttctgtctgtgtgttcctccgtttctactctaactaccatatactctatgttggtatttcttacgaccacggataaatccgcaagcgcacggaataccgctgtagcacttcaccttcgggtgacccataaaggatatcgaactcagggaacgattactgggacagaattcagggctgtcaccacctgccgcctacctctgacaaatccgtgggatacacaacaaacaaagaaggagttctccgaacccggagcagagtgtaccgacagctctggtactcctcccgaattcctcctagaaagctacactcgtcgagatagaagtcggatgagcgccaaacttccgggcactcctccagagcttcccctcactctctaccttattctaatatacaaaagatacaatagagcctcttgtaattcagctcaaagttgtgtgttggaaatgagagtgagctccttcttttataggcaggtattgtggacaccccgagtattataccatccagtgtccaacgcgaccacca

SEQ ID NO: 90498 - DNA, 131 bp, Oryza sativa
  Clone ID: PAT_MRT4530_89162C.1
gttttatttaatcttgctaagacacagattatggggggttgcataattctcacatggggcataaaaacatccgtggaccggaaaaaacactcgatactaggggattagctggactcatataccagacttca

SEQ ID NO: 90499 - DNA, 504 bp, Oryza sativa
  Clone ID: PAT_MRT4530_89163C.1
gtttgtttttttttttttttttttttttttttttttttttttttttttttttttttttttttttttttttttttttttttttttttttttttttttttttaaaaaaaaaaaattttttttttttttttttgctcaaaaaactaaaaaaaaaaccggcggaaaggttaaaaaacttggggaattttattttttttggaaacccctatactatttaattagaacaaaactttggggcccctttccccccctaatttaaaaaccctaggggggtttttttttaatttttaggagggaaggcccccacctttttccccctattattataaagggttggggcttgccccccctaaatgcgggaagaattaagaaaaaaatccactggcatggcacgaaaaattaaatttttccctgaaagggggctaacaatgaattttgcattggtttaaaaaaaaatgaattggaatccttaaagctttgtttttttaaaaaaaaaaaatgttgggg

SEQ ID NO: 90500 - DNA, 192 bp, Oryza sativa
  Clone ID: PAT_MRT4530_89164C.1
gtgggatcgcacacaaacgtgcccggggggtcttctttactaccttcgctggcccccccgtcgtcaccgtcaccgtgaccgtgacccgcatgtgacctccgcccctggacgaggctcgccggcccgggcgccgccaggctgccttcgatgcgtggaagtctggtcggctttgcgcggatactcccttgccct

SEQ ID NO: 90501 - DNA, 658 bp, Oryza sativa
  Clone ID: PAT_MRT4530_89165C.1
cggaattcccgggtcgacccacgcgtccggggatggttcttcgtgggctgtcaatttcacagcgagttgggaagtcatcaataatttctagactgatgctaatttgaagagcaataaagcatatccatgtattatcggcaaggaagctgcatgtgacttggttagaagatggaaaagaacaaaatagtgggttttacgttttactaagagctttatagtgatatacttaccaccagctccatgccctatagtccttatgttgtaacttatgttcttctaagcaatcatgttcaacagaggtagagctcaaagggttgaatgtttggtaggtgccggtggttataggtagtggtgtagaacaatttcgctcgttcccaggggatgcgctggtcaaacccttcagtcggcttgccacccaactgttgtattttcttgtcctgtatgtgctcatggactcttagtcgtgagctcgtagcagatagttcaatcatgtttccctcgtgccaacatggcacagtacctcaaaattatttgctgtgtctttgaaattcttatggcggtattggaaggacaaatgtgggggttcggtttgtactggtttggccaaacctaagccaaactttctgcctaaggcagaaaattttgcagtccttttgtt

SEQ ID NO: 90502 - DNA, 594 bp, Oryza sativa
  Clone ID: PAT_MRT4530_89166C.1
gacgagcaacgtttcttgagtctataagagctcagttgtagagtacatccccggttaacatctacttccaacaaccttgtgtaccggttcagaaacaggtcacatacacagtctacttacaagcctgtgtatctagctcataaacagatcacaatacagggaacgctgattatattttacggagatccctgcagacgataatggatcaccaaactagcaaattaattcaatgctcaatgaaaattcccattttctaaagaactaaaattgattttcatgtcaatttttcactccagaaaccatgagatgcgctgttcattgtaaggcaccacacagcgcgtatatatatacagtacacatgtatattccttccttccacttccagaagttgtgcctatcaatggcaataggaaaataccatacacacacgaagctcccttcagaggtttagaggattgctttctgcactgatattcatcagaagtttaagaagtgttgctattctcaacagaaatgggatctgctccagaaggaacggcaatagctgacccatcatcagaagttcccatttgtttggaccatgtttctttaaca

SEQ ID NO: 90503 - DNA, 285 bp, Oryza sativa
  Clone ID: PAT_MRT4530_89167C.1
atggggggaaacaagtgtaataacttgagaggaagaggtggaaatgagtatcttattcttcaatttgcatggacattttgcttggtgtactcacaatgggcaccaaggacggaaatgccggaggcggtggaggtgaaggcacgctggctagaggcggcgccgggccggctggaggcggcgccggcggtggaggcggaagcggcgcccgacgatggagcgaagaaggatgcggatgggatggagacgggagtcgggacggcgccgctccaggatggatggggatga

SEQ ID NO: 90504 - DNA, 366 bp, Oryza sativa
  Clone ID: PAT_MRT4530_89168C.1
atggggggaaacaagtgtaataacttgagaggaagaggtggaaatgagtatcttattcttcaatttgcatggacattttgcttggtgtactcacaatgggcaccaaggacggaaatgccggagcaaaagcaaagcaaatcaacaattagtggaggcggcgcccggcggtggagccagcgccgggccggctgggggcgatgccaggcggtggaggtgaaggcacgctggctagaggcggcgccgggccggctggaggcggcgccggcggtggaggcggaagcggcgcccgacgatggagcgaagaaggatgcggatgggatggagacgggagtcgggacggcgccgctccaggatggatggggatga

SEQ ID NO: 90505 - DNA, 778 bp, Oryza sativa
  Clone ID: PAT_MRT4530_89169C.1
aattcggcacgagaagccgccgaaccctcgcttctcggggacgcggaggccaggccggccaccttccactgcctcgagctcctctccttctccgggttggtgtggcgtggagatccatcctggccgacctctttcgctaggcgagatgtctgagtaccagaacgtcgttgggggtaggctcaagctgaaggggaaggcgctggatgtgaaggaagggggagtcaagaagaagaaaaagaagaagcagcaccgcgaggagtcatctgaagccgggcacggagagcttcaccaaggtggaagctctgaagtaccagctgaccctaatgatgaattgactgaagctgataagatgggagaagaagggaacctgcaaggcgactatgatcacctcaccccagctgagaggcgttacatggagcagaagcagaagattgacatgcataagctagccaaagtagccaacaagtcacacagggaccgcatccaggacttcaaccaatacctggcaaatcttagcgagcactacgacatcccaaaagttggccctggttaactttgcctattcagagcttcgcaggaatgcttcctatgctgtacccatccagccatctgttagcttgtgatgctcctacctgtattgttctaaaacatttggttgtcttcgagtgttgtatttcgaaaacccaaaccatgtttaattcaagtgttcgtattctgagtaaaaaaaaaaaaaaaaaaaaaaaaaaacctcagcccggggatccactagttctagacg

SEQ ID NO: 90506 - DNA, 427 bp, Oryza sativa
  Clone ID: PAT_MRT4530_8916C.1
cggacgcgtgggcggacgcgtgggcggacgcgtgggcggacgcgtgggcaaaaaaaaaaaaaaaaaaaaaaaaaaaaaaaaaaaaaaaaaaaaaaaaaaaaaaaaaaaaaaaaaaaaaaataaaaaaaaaaaaaaaaaataaaaaaaaaaaaaatataaataacaagccattaatattgttaaaagcgattgtgcaacaacttcaaaatgaaacagtgtggtggttttttaatttgatcagatttaagcttaagcccaaactctgttgacttttaatttgccatccatatgtggtatttaccctaactactataaagctcttaggagtattgaaacttgttggtggtgcaatgttattggaattgtaacaatatatttttttttatgttaaaaataaaagtataaatgatcatgtgtgactgtttta

SEQ ID NO: 90507 - DNA, 389 bp, Oryza sativa
  Clone ID: PAT_MRT4530_89170C.1
agaaaaatcagttttaactggaacaaaccggtgggaaatttacaaatggggcctgaataaaacagcccccggaacaggactccccttaggagccctttgtgtggtgggagaagggaaaggtttacctacaaagggcgggctaaaagaatggcaaaaaaaggacaaggatggttgggccatttacccataccaccaagacttgccaccgcttttccaaaaaatggagattggcttgggcacacctgtccaagaagggccggagcttcgtggaagttttgggacctttcagccacaaaaagggggcaaaaagggccccttaaaggggcactcggttccctccaattttttccggttttattggggtttccaaccccctggcgtatgggggt

SEQ ID NO: 90508 - DNA, 284 bp, Oryza sativa
  Clone ID: PAT_MRT4530_89171C.1
tttgtttaataaaaaaaacaggggaatcttaaaccctttatccatatccctagaatgcaaacgctctactgaggaatccaacaataagcaacttgaactcaaaagcgaaggagaaccgctgatacccttgctcctaaaccgcaccaacgctttgactatctgggtgccgagaattgcgtaaatatatctagttagcctgaaacatgcccgaccatcatataggcattacctggcatactgctttgacaagataatcaccgatctaatatagtgctgagatcacc

SEQ ID NO: 90509 - DNA, 486 bp, Oryza sativa
  Clone ID: PAT_MRT4530_89172C.1
cccaaaaaactttaattcaaaaaaaaacagaaaacacctaacagcagaaaaaggggaaaaaagggaacaacaagggcccaaaattccccgggaaataaggaaagccgagggaaaggccaacccggccgggggcccattggccggaacaaataagccccccaaaaacgggaaacataggttggaaaacaggcaaaggggggcccccgggaatggaaaaaaatattttaaaagcccttttgggggtaaccaccaaacaggggggccattttaagggaaggctgggcagccatttttttctttgggaagccaggcaggaccctaaaatgggggcgcagggggccaatcttggacattacccgctccaaataattaaaaccggaaggctcattttaaaaaagctggtacccctgggggaaccagctggcagtttctcggaagcatcgggtgggggggaacccaaataataacaaacctcgctttgggggc

SEQ ID NO: 90510 - DNA, 121 bp, Oryza sativa
  Clone ID: PAT_MRT4530_89173C.1
aaagatcgcgatatcattcagctccaaccatttagactgttacaagacctatcccaagagggatcggtgatccaacctgatataaatatgaaacgtgtctgaaggcttttgccaaaccaaa

SEQ ID NO: 90511 - DNA, 3014 bp, Oryza sativa
  Clone ID: PAT_MRT4530_89174C.1
ccacgcgtccgcgcgagaggagacgagacgaagccatccgatccccacccttccccccctccccctcccccctcttcagcgctggaggcggcggcggcggcgtcccctggatccctcggcggcggcggtggcgcacggttatgccgagaggcacccaggttccaacaccgtgcactgccagggctctagcattctcattaaggatatggagtacaccctctacaccacaagttcctctgtattgcacatttcgctgctcgaggaagttcttggctggaggttttctctttacggagacttcctcgttatctcttttgtcaactgcacctgaagatcacacctcattcagcagccgtcttgcctggtcccatgctattgcacattagagtcgactattgattacagtgcagctgtagcacatttcttcgagcatggtgcatctcatcctcttgcatccttccggtagtttttgttgtggcactgatcagccagcaaaagttaccatcggaacttctttggacaatcggatctgacattagatcttcattgtcaggcttaatctctaggttctggttttctttacttccgtttgctctcttctcccctacactgcttgctttttgtttgatcatcccaagatttggtgcatactacgcagttctttgtcaggctttgtgtttgatggcgtaacaaaccgagtgaaggtgttcaagtttttttgtcagagtatgggtattgcttatagagtttttccagaagcgttgagtggctttgctgatctacccttcaaaggcatttcagcaatacacatatgagtcttgttcacaacagggctcttctagaataagaccagctttactctccagctagtaaaaatggagaggtataagattattaaggaagttggtgacggaacatttgggagtgtttggcgcgcgatcaacaaagagagtggtgaagtggttgcaatcaagaaaatgaagaaaaaatattattcatgggaggagtgcatcaatctccgtgaagtgaagtctttgcgaaggatgaaccatccgaacattgtgaaactcaaggaagtcataagggagaatgatatgttattctttgtttttgaatacatggaatgcaatctctaccagctgatgaagagcagggggaagcccttttcagagactgaagtccgaaattggtgttttcagatatttcaagctttgagtcacatgcatcagcgtggatattttcaccgcgaccttaagcctgaaaatttgctagttacaaaggagctcatcaagatagcagattttggacttgctcgtgagatttcttctgaaccaccatacacagaatatgtgtcaactcgctggtaccgtgcccctgaagttctgctccaagcttctgtttacaactcagcagttgatatgtgggcgatgggtgccatcatcgcggagcttttttcactgcgacctcttttccctggttcaaatgaagcagacgagatttacaaaatctgtagcattcttggtactccgaatcagcgtacctgggctgaaggactgcagcttgcggcatctattcgttttcagtttccccagtctggaagcatacatctttcggaagtggttccctcagcaagtgaagatgcgatcagccttatttcgtggctctgctcatgggacccacaaagaaggccaacagcggtggaggttttgcagcatcccttctttcagccatgcttctacatccccccttcacttcgattcagatcaacaaacggatatgcagcaacaccaccatcagttggggctaaaggagctgtggatcagaagaatgctaggagatattccgtggggcccttatctaatgggagaccagccgttaattactcatacttgagcgctaacaccccggcaagagcagctggtgtgcaaaggaagctggagttggatcaccaggtgaatatgaattcttgtcaggctccagagggtaaccataaactgacaaaggcagaggcaatgaatcagccttggtccagaccaccaccagcagcagcagcagtaaggagcaatggaaattacttcactaaagaccagggccctcgtgcgcctgacattgcggagaagctgtctcagctgacagtgggctccaacagggtgccaagcttggcttcggacaagtttgtggatatgaaggcaagaacccatgggaataccatgaagcggcctttgcctcctgtgggaaccaggacatggcacgccccggccgaccccttccggcgcccatacgagatgccaggcgacagggctttccttcccaggaagctcgttagctgaagactacgatgaaacggaagctgccgccacactcctctttgctaccctttcaccaatcctcctactatcctgaaaaataagaagccaacagagccgatctccctcgaagagtttttagtgctgtttcctagtagtgtcgtattggttgtgaatctcataccccaataaaaatggagatgtgccagcctgctggtactcctatcttgccttgcattggcatccatccatgacagcacctcgaggatgcagctgatcctcgggggcatgcaagcatggccgggcgcgtctgcatggaaaccttgtgtttcgagtcggaactgtgtgttatttgctccctagtgacgtgacgcttgttgagtcgtttctgctctgcgttggctggcccctgcctgtgacatcgcagctactacagtactactactactatgtcaaatattgttataggactattaccactacgtggtgcggctatgcttgtccagttgtttatgcaccatgcaggcatgcatgagtgcatgaccagcgcgtctgcagcaatcaaataataataataaatatatactattgctattattactgtatctaataaacaaaaaaaaaaaaaggagcgatgcatttagctgttgacactgcctgaaacgttttgattgcatgcgtaaaccaattctgcattgagtgtgcttc

SEQ ID NO: 90512 - DNA, 424 bp, Oryza sativa
  Clone ID: PAT_MRT4530_89175C.1
ctctctttctgtgtccatcccgctctctctctctctcgacgagagagagaaagtgcgaagagatgctttccgtcgcccgccggcccctctccgccgccgtccccgtcggcaacctcctcggcatccacctcttccaatgccctcaccaaccatggtttggtttgtccaaatcgggggaagaagaaatttacgaatggactggagtggaggaacaagatgactgatgctccatggtggggatataataaataacaagatgaacgtgtggagacacactggacatttgggtttctatttcacccattggaactctccaaatctcctctctgtttatttaattattattcctttcatctaaattaacgtcgactacatagatcttgctgttttaaagattatattggctagctattcttatcttatt

SEQ ID NO: 90513 - DNA, 699 bp, Oryza sativa
  Clone ID: PAT_MRT4530_89176C.1
atatctcaaccaatacaataaaagaatgaacgtaattacataaaaacaaaataagaacataagagttaaaaaaaagacatgtaaagaaaagtaaaagaaaaaaaaaaaaaaactaatacacgcctttaagaaaaaaaacaaaaaaaagaaaaagaaaaaaaaaaagaggaaaaacaaaaacaaaaccacaaaagaaactcaaataccaaaataaaaaagagcatctaagttccaaaacacaagaaaaaaaaataaaaaaaaaaaacaaaaacaaaaaaaccaaaaacaaaaaataaaaaaaaaaaaacaaaatacaaaaaaaacaataaaagaaacaaataaaaaaaaaacacaataaaaaaaaaaaaaaacaataacaagaaaaaaaaaaaaaaaaaaaaaaataagaaaaaaaagataaagcaaaaaaaatagaaaacaaaatgaaataaaaaaaaaaaaaaaaaaataaaaagataaacaaaaatggaaaaaaaaatacaagacagaatcaagtagaaaggaccaggcagagaccaacagacaaccaacagcaagagtcaagagtggagaaggagaggggaggggagccgggcgagctcagcttgggggcggcgggagcggcgtcgtcagcgtcgctccgcccaccgcccgccgccgctccatttcgccccactaccgctccgcttcctctcgtcg

SEQ ID NO: 90514 - DNA, 173 bp, Oryza sativa
  Clone ID: PAT_MRT4530_89177C.1
gtggatctccggtgtagtctccgtggcatgcctacatcggcggcgcgaatattcagcaccggcttagatcgatggcgcccctcgccgccgggcttccgtggagagcagagtgcaattaatcacgatgccataatgcatgctaatgatgaccagaagcttgacgccaatcggaa

SEQ ID NO: 90515 - DNA, 1305 bp, Oryza sativa
  Clone ID: PAT_MRT4530_89178C.1
atggcccacacggcggcggagctagcggcggcggcggcttggcgcggcggcggccctagtggcgacggcacgcggccggagatgggcggcggcggcggagctcggcgagcgcggcgcgacggcgaggttattaaactgttcgaacagccgtgcccacggtcatggacggatgtgagttccctgccgttgcctgtggcgttgggtgttagtccgttggttggttccgctgctgctgctgttgttggtgtttgcctcgtccgtgtcgccggttgcattctcgggctgtctgagctgcaacctaagttaaggacgcggttcacgccattttcctacgacacgctcctgtcaggtgccgttgtacggcggtgccagattggggggagagaccgccctcagcatccatgtggcaccttccccctaggaggtcgggccgtggatgggtggcagctgcccctttcgaacccgaggggtcggactgcccccgacccctcctggcagagcgagcgcatcatgacggaggtcctccccgtgtcggccttcgtcagccggcatgatttgatgggccttgcacagcagccgacgtgcagacgacttccggcttgcgcggtggcggtgctgctcgccgtggcggcgagcggagcggcagcgcagggcgtcgggtcggtcatcacggaggcggtgttcaacagcatgctgcccaaccgcgacaactcgctgtgcccggcgaggggcttctacacgtacgacgccttcatcgccgccgccaactccttcccggcgttcggcacctccggcggcagcgccgagctcatccggcgggagctcgccgccttcttcggccagacctcccacgagaccaccgatggaacgaggggtagttctgaccagttccagtggggttactgcttcaaggaggagataaacaaggcgacgtctccaccctactatggacgtggcccaattcaattgacagggcgacccgacctggtgtccaccaacgccgtggtctccttcaagacggccatctggttctggatgacggggcagtacaacaagccgtcgagccacgacgtcatcctcggccggtggacgccgtcggcggcggacaccgccgccggccgcgtcccggggtacggcgtcatcaccaacatcatcaacggccgcttcgagtgcgacgtcggccagaacgacgccaacgtcgaccgcatcggctactacaagcgctactgcgacatgctcggcgcagaccccggcagcaacctcgactgctacaaccagcgcgacttcgatagccagcctagttga

SEQ ID NO: 90516 - DNA, 978 bp, Oryza sativa
  Clone ID: PAT_MRT4530_89179C.1
ccggccgcgaacgactgcaagtgaagcggcgacatgacgacgacgacgacgaggtttgttcagcttgccgcgtgcgcggcggcgtcgctgctcgccgtggcggcgagtggcgcggcggcgcagggcgtcgggtcggtcatcacgcaggcggtgttcaacagcatgctgcccaaccgcgacaactcgcagtgcccggcgaggggcttctacacgtacgacgccttcatcgccgccgccaactccttcccggcgttcggcacctccggcggcagcgccgagctcatccggcgggagctcgccgccttcttcggccagacctcccacgagaccaccggtggaacgaggggtagttctgaccagttccagtggggttactgcttcaaagaggagataaacaaggcgacttctccaccctactatggacgtggcccaattcaattgacagggcaatcgaactaccaagcagccgggaacgcgctggggctggacctggtgggcaacccagacctggtgtccaccgacgccgtggtctccttcaagacggccatctggttctggatgacggcgcaggggaacaagccgtcgtgccacgacgtcatcctcggccggtggacgccgtcggcggcggaacaccgccgccggccgcgtccccgggtatggcgtcatcaccaacatcatcaacggcggcatcgagtgcggcgtcggccagaacgacgccaacgtcgaccgcatcggctactacaagcgctactgcgacatgctcggcgcaggctacggcagcaacctcgactgctacaaccagcgcaacttcgccagctagctagctgagtgatcgatcgatccatcggattgttatcctattgcatgatcgttcgatcagttagtactaccaataaaaactggcatgtagtgatgtagtatcccaacatgaataaaggtctttaatcaaataaaaaaaaaaaaaaaaaaggggcggcc

SEQ ID NO: 90517 - DNA, 842 bp, Oryza sativa
  Clone ID: PAT_MRT4530_8917C.1
cttatcctttgcggcgatgcggagcagcagccatggaggtgctcagctccagccgcttctctagggttttccccagcagcctcctcagccccgtctccaagccgctcaagcccccgcgccaccgccgccgccgcgtccagacgctatcctcctcgtcctccgatgccgcggcggcgccgtccacgccgccgccagtgtggccgcccgcctcgctctcccggctcctcgccgcggcgctgcggggagggcgcgcgggaggggagctcccggacctagccgtgggggcgggggcggcggcgacggcggcggggggaggggcgaggatagggacgctgctgatgagcacgacggcggcggcggtgaccaaggcgcgggagaacccgtacatcctggcgctcgcggcgaacccgacgttcgtgtcggggctcgtggcgtgggcggtggcgcaggcggccaaggtcgtgctcacctcgttcgtggagcggcggtgggacctgcggatgctgttcagctccggcgggatgccgtcgtcgcacacggcgctctgcaccgcgctcaccgcctccgtcgcgctctgccacggcgtcagcgactcgctcttccctgtctgcctcgggttcacattgatagtcatgtatgacgccacgggcgtcaggcgccacgcggggatgcaggccgaggtactcaataagatcgttgaggacctgtttcaaggccatccaattagtgaaagaaaactgaaagagttgttagggcatactccatcacagaaatggaaaaatcgttttgacacgaagatttttggtgcatctggtgtaaccattgttccaggagatagctaa

SEQ ID NO: 90518 - DNA, 484 bp, Oryza sativa
  Clone ID: PAT_MRT4530_89180C.1
acaaaaactactacgaacttcttcaaactctacatcctcaagtcgcacggattcgtttttcgttaatttggcaaataggtatggttttgccgatgtctcgcgcgacgagggtggccgggaggctgatgccagagatatcgttgctgagacgggggaggaagtcggcggcgagaggcggcgacgatgcggaggtggaggtgtcggtgccggcgaacttcgtgtgcccgatctcgcttgagatgatgagggacccggtgacggcgccgacggggatcacgtacgatcgggagagcgtggaagggtggctggcgagggggcacgacacgtgttcggtgaccggccggccggtgaggctcgccgacctggtgcccaaccacgcgacgcggcggatgatccaggactggtgcgtggcgaaccgggcgcgcggggtggaacgggtgcccacacccagggtgcccgtcggtgaggacgacgccgaggaggt

SEQ ID NO: 90519 - DNA, 183 bp, Oryza sativa
  Clone ID: PAT_MRT4530_89181C.1
atggccgccgctgctccactcgtccgtgcgccgttgccatcgtcggtggaccccggcgcttctcagaatctggagcaaaagctggactgtttgggggagcttatgattctgggagaagctgcagcagctagaagctcccccaaacagaccccaacttttggtccagattctaagaagctgtag

SEQ ID NO: 90520 - DNA, 5939 bp, Oryza sativa
  Clone ID: PAT_MRT4530_89182C.1
ttaatcagatcctttttttttgttttttttttttactactataaagacaaactatcgattaggggaattgtaaactgtacagaccgaccatgcggtaaattgttgaatgtttacaaggtcagcagtccaacgactccaaccatccatccagacatcgaatgcgaaaagtagattatttatccaagtcatcaacaaaaagaaaagtatctgatcactgtacagtttgcgcaaccaccattgcataaccatggcacgcctggacaagagagctgaagaacagtgccatcttgtgtgaggaagcgttgttaccattaaaaagcattgatcccaaattgcatccgcacagctccagaaaatattcacatcacaagatcctttggatattgtcccacagcacactgcactcaatcagatccataaatgctgatggttgtctgcctaagtacttcagaagtcctgtcaaggctgtgagatgccaccagatatgtgagggctgcgtatctttcttggcttagatacaaaggctttcctctgtgcatgtcatgatcctcctcaccgaaggcgtcaaggtagggagatggccaaaaggcgagacgaatagatcgctgcaacagtattgttgttttcctaaccaaaagaaatatgccaacgccagcaccacattgagacgcatgattaaggcactttccagtcctgcagcatggtttccaactaggcgaacatagcttgccacaaagtaaacataatgctggttcatcaggcactgaaccgcaatcagggcattgcatcttgacatatctttccaggagaacttgatagacaggaggcaactccatcagcctaaatggcactgctggggtagagaaatgaacgcctctatatttacgggttttgtaatcctcacagaaatgttgtgtccattttaacgcaagcatatgtacagattcatcttggagaattggatccagtgactgaatctgaaacaggtcttccaattcccttatcccattcagctccactgccagtgagtctgccgcgctattattcaagtaaagatgtgatgatccttcccagatattagaactgtcatacaaaggtgctgaggaagacgatcttagaagctcccatagtaacgcacacctccgaagatacggataagtcaatctccggaccatatcttttgggtgacaagaaggatcaatgtgtttggatacaaaatattctctagcaatatcaattgttgacatagtctggcaaacatcattaaggaggcagttgctgaaacttgatctgtcaaatgtttctcctcgacagcattttatcaatcacaatcttcgtagggaaggatctagagctggctctgtagtatcattgaccttcccacttaaagcttttaaaaacttgctttgtccaacaatttttccagcagtttcaagaagccagagtgcatgagggaactgtaagttacttgtcgtcgtccatgatgacgcaggaggagcttcagacggtatctgaacagatggcatcgtcttcctcaaagatttactagagaaatcaggtgatgctggaagaatagaatttgcaaatctgcgacagactggacacagcaactctcccagatccggatcaacaatatgaccagtttcaaaaccaagtctcctgacatatctttgtttcaaggagaataaatatcgatcatggcattcctggtgtacagcatgtccacaagaggatatgtggatgccatcacaatcaacaggaccaaatctgttccttgtaactgaaccagaagatttggacggatgaaggtgttttgttgaaagacaattaacatatgttcccagcacagaacttctggggcttctgtttttcttggagccaattgacaggttcgaagtattcactgtttgttcatcatctttagtttctacattgttgggcccaaacatatgatctaaaatagtcttacagacatcatcctcaattgtctcaagagaggtggtatcaccagcattgctgttagagtacacaccaggcaaagatgatatatatcgaatgagtggatgttgctcatttgagaaatcaaggaacgcatcaacttccatagcatctgaatcaaatgaaggctctactgctgtatcagcaatgaattcctccgaactaaaagaagaagcacctgagggatcagctgattcttcccttctgatggacccagatatcttgtttgatttagttggattttcccaggagggatgacccatctcaacaaaggttgcaagtcgagatctctgaagaagaatcagatagcacaatggacttttagaatctgaatccctgcacagggagcaaactggcagcgactcctctgagactacaccagttgaacaggacacatctggctcagacattggaacatcctgcccctcacttcctgatgacttcatactttcagcaaacttcgactgttctgctttcatttttgccatgattgcagcttggcgttggcgcgcctttgccttcttgtccatagaatctgaagatcctggattttgtttgcaactggtatcctgtggcatggacgggactatatgcggcgccatttgtcttattgcagaaaagcattccttacttaagttggcaaatttctttaacaagctctcaattagtgatggaatattgcagtacttggatccagaaaaggagatatcattctcttccttgtatttgtgcattaatgaaaccagcaaggtaagcatgctctcattcttcactttgccagaaactggaggtactagttcagtagaataggtcaatatgggaaaagcctcttctgcataagatgacaggacaacccatgattcatcatcatgctgcactatatccataccatattggttggcataccttttgctctccgattcacatatatcaagtgccaaccaaagcaagtgcaaaccagtcacaaggacgttgtcaggggcacgtgatacagataatggatcactgtaaacagcatagaacagaacagcgcgaacaatttgaaggacagctttcgatgttgcaattttagaaatattatgcaggggcctaaaaacatgtgtccattgaggtagctgagcattgagagcagatactttgcaaaaacggtaatatctctcctcggcaatttgtagttccctggaattccagcggggatgatacaagtccagctccttccagaatgttttgcgaagtacatacttaccctgcttcatgccagatggattagaataaactgcaagtgaatccagaacattctgaagctggtcacttgacgaaagggcacggggaagagacttcacaatctggctgtaaaagggtatgctgtcagccataaaaccacaaacaaaagaaaatggttgcggttttttccttaattgtaaagacagatataacatttcattctgttccgcaagatccaaagacgtataatttgacagtccaaatctctcctgaatggtcttaacaaaaagctcaggagaagatagtgcagcacagcattgaagaagaaacagatcagactccaaaccctgttcaagcctggaaagacgagtaacattattaccttcaggacattgcacagagcggtaccactcagcactcagtatagctgcatcaccattcttacgccacattccagcacgcacttgtgcgcaaaatactcttagtcgtaatggatgctccatcacaattgacgcaaacccatagggttcacagcctctaagtacctgagaaaaaaactcattggtctggacaactgaacaatgcccaggtttgacatcctctccaaaacatttccccattgccttccgcaataggaaagaaagcatacgatgcaaagggatatgaaatgatgtttcttgtgagctgacatcgaaaacaacatgaggccagcctactgtgttgattatacctagttcctcaattctagaatcagggtgggcatacaaaaggctgccgtcagtcatagtataagaaatggcattctcagggtgcaattgtgtatctgctgcattgctactttcgtgcatctttcttttgcctgccatgttactaggatgaggcaaccctatttgatcaattagcatcagattgtccggatcttgaacagaggaactaaatgactcaggaatatctgcaatatcacctggtcggggttcttcatttatcttggcattcacttcagcaatatttatatttggtttgcctttgttagaagtcaaaggctcctcaagcaaagccataaaattgtgaggatcactactgctcgcatcaaggaaagataacttgcccctcagagctatacctggtgccagccaaccttcaatagctttcaggcatgagctattttgggagacccttcccacttttgcaagccgctgattctcagaactttctatgctttttgttgcagtggagcaaatagtaacatcagttgactcatgttgctcaggaggagcaaatgctcctttcaccaaagaaccatgacaaactccaagatagtgtcccagcacaaagggtgcagataggttctcattctcatcttcaccatgaatacttgtcactctcttctgaggatccatcccttgtacaagtgacaggagcttaatccatgaccttgttaaatcaggcctctcataagcaacatatttagaaacttcctcatgactaaggacataacgtgtatcttccaatagtctgacagtagcatcatataagtttgtccatttgtttgtctgtaaatggccatcctcaccaatgcaagaaagaaatagatctgtcaggcatccaagaagaactcccaacaaattcacctcacgcacaagcctaggagtcagcgtaggcacggtgaatatttgcacagaaaaggtaggcatcagaggatactcctccaacagagaatcgttgcaccctttaataacttccccaaatgtaacaggatagtagtgtataaaaactttggcaaaatcatacttaaaagctggttcactgataagtttcaaaagcaactcatgcaattttttaacagccttcttgtccagcaacctttctgccttcgtcaatgcatctaataggtctggacattcacagattctttgggcgacaaaactaagaagactttcactgcagctgcagaattcaagcagcatattagcaacacaagttgtcaattcttcagcgaccctcttgcacgagttaccaccatcaccctctgcgtgtggcggaccttcaaccaggcatattctctccttccaaaactgcaagagcacatccagcacaggccctacagaacttgcaagctcctctggaagtggtttaatctgctcggcccccttgtgccttgagcaaaacccttcacgcttccaggcagttgtatccccacagtcacaacatccaccaccagtatacatgatggagtaatcatggtccttgtgattgccattctggaaacatggtacacagattgcacatgtgggatcatgctcacaggtccggcagcgataagcaagatcattctgtccccaaacagatccacagacagcacgctcccctgcagtgctacgttccaagtcatcaagcatcgcgtgtggctcattgttgaacattaaccactgtaaccaagacaaaatctcgtcacatgcttcactgttgctgctgtcaccatccttattcgatgctttccgggcctccaataaatcagcaccaactgacaagacgagcttggcgatttcaggaatcagctccttgtgttcctccaagtaaatgagtaagccttcttggtgttcctgaagctgttcttgtggaactccaaagagaatcagtttctgctcgatgagctcctgcgtggacaactccggcggcgcgtcggaggggcccccgccgccatccatcccagccat

SEQ ID NO: 90521 - DNA, 918 bp, Oryza sativa
  Clone ID: PAT_MRT4530_89183C.1
agacgacgacgacggcgaggtttgttcagcttgccgcgtgccggcggcgctgctcgccgtggcggcatggcggcggcagggcgtcgggtcggtcatcacgcaggcggtgttcaacagcatgctacccaaccgcgacaactcgcagtgcccggcgacgggcttctacactagcagcgccttcatcgccgccgccaactccttccggcgttcggcacgagccggcggcgcgccgagctcatcccgccgggagctcgccgccttcttcggccagacctcccacgagaccaccggtggaacgaggggtagttctgaccagttccagtggggttactgcttcaaggaggagataaacaaggcgacttctccaccctactatggacgtggcccaattcaattgacagggcaatcgaactaccaagcagccgggaacgcgctggggctggacctggtgggcaacccagacctggtgtccaccgacgccgtggtctccttcaagacggccatctggttctggatgacggcgcaggggaacaagccgtcgtgccacgacgtcatcctcggccggtggacccccccggcggcggaacaccgccgccggccgcgtccccgggtacggcggcatcaccaacatcatcaacggcggcatcgagtgcggcgtcggccagaacgacgccaacgtcgaccgcatcggctactacaagcgctactgcgacatgctcggcacaggctacgggagcaacctcgactgctacaaccagcgaaacttcgccagctagttttgatcgttcgatcgaattgttgtcatattatatatgatcgtttgatcagttagtactaccaataaaaactggcatgtgatgtagtatcccaacatgaataaaggtctttaatcaattgaaggcaaaaaaaaaaaaaaaa

SEQ ID NO: 90522 - DNA, 1080 bp, Oryza sativa
  Clone ID: PAT_MRT4530_89184C.1
atggctagggccgcgaaccgccgccggcgacgtggtggggtcgtctatgcggtggtgctcgacgacaaggaaggcagcctggtcttccgcttccgccgcaaggatctcttctccgacgacgacgacccgccaccggcggggcggcgccgctttccgcgccccgtggcgcacttccctcgcggctactaccactacgtgtttcactccttcaccgtctccggcaagcagatcctcggggtgagccccttcggcgccaccgtcgtcatcgaagacgacggccgccccggtggcagcggcgctatgcgggccggcccggagctgggcaccaccacgtgccagcctatcctgctccctatccgggaagacatggtgctcgtcatggcctatcttccacagccggccggccggagtaacttcgccgtgatgcggcggctcccagacggcggcggtggtggcggcgggtggcgtgtcgtccctgttccggagccgccgctcgggggccccggagactactactgccgcaagccagcgcccgtcgtgacggcctacatgaccatcggccggagagcgtgtgtctccatagccggcgaaggcaccttctccctggacgccggcggcgcggcggcgtggcggaaagagggaagctgggagctgccgctccacgggcaggcgatgtacgtgcgggagctcggcgccgccatcggcttgggacgcgggccgggcccctacggcggggtggtgctgtggctgtgcgcctgcgacgtcgaggccaggccgccggtgatccgccggtcgtggaacgagaccttccccagggagctggtggccgcgcactcgcagtatgactgtcctggtaacctggtgtatgtcggcgacggaaggttctgcatctgctgggtcgccggcgtcgagcacgaccgccccgagacaaacgacatggtcgcgcgcaccgccgtcgtcaccatggcagtgcggctgaggcgctccgccggcggcgagctccagctcaccaagctccgctaccacctcatgtcgccgcaaggcagacgcgcctacttcgtccagccccacattccttaa

SEQ ID NO: 90523 - DNA, 368 bp, Oryza sativa
  Clone ID: PAT_MRT4530_89185C.1
aaaaaaagaaaaaaaactttttttttttttaaaacccccaaaggttcaaagggcacaaagggggataggggggcttattttaaaattccgaaccccttttcggggaaaacctataaaaaaacccccccaggggggggaaggggccggggggccccaaaacccccgggggggaaccccaatttagaggggccggtaaaagccaacaaaggtggggcttgggccaaattccgctcaaaggggaaacccccaaccggggggaggtggaactgggggcctttggcccaaaaaaagtaaaggccccgaaaaggaaaatggggcccccccacggcggggggtggccaaaatgggttgtttttcaataaaaaccc

SEQ ID NO: 90524 - DNA, 471 bp, Oryza sativa
  Clone ID: PAT_MRT4530_89186C.1
caaaattatatcaagctgtgacatatcttccatttcagcagtcaaccctgctgatctatatgatgtccatgtttatacatcatctggtgatatgttttccaaaacaagaatgtttgatagcacaccccgcagtggacccaaggcatttgttagtgaatatgcggtgactggaaatgatgctggccgaggaacattagtagctgctctagcagaagctgcatttctcattggattagaaagaaacagtgatgtggtcgagatggcaagttgtgctccactcttcataaatgacaacgatcgcgggtttagtccagatgccatagtcttcaactcatggcagcactatggatgtccaaactactggatgctacacttcttcaaagactcaagtggtgcaacacttcatcccttgacaattcaggtgtcaaactatgatcaattggccgcatctgctctcacttggcagaattc

SEQ ID NO: 90525 - DNA, 2219 bp, Oryza sativa
  Clone ID: PAT_MRT4530_89187C.1
atgggcgttcggagaggtcgtttggattcctcattgttccacatgctggttctcgtttgcgccctgtctcaggtgctctttgttgggctggttaccggtcaaactgcacagttgagtgtggatgcttcatcccagaatggtcggacgatccctgacaaaatgttcggcatcttttttgaggagctcaaccatgccggggctggtggactgtgggcagagcttgtaagcaacagagtccaagttacaggtttcgaagctggtggcattaatactccttcaaatattgacccatggttgataattggagatgagtcaaatataattgtggaaacagataggtcatcatgttttgccagtaacccaattgcacttcgcatggaagtactctgtggagctaccggaactaatgcttgcccttcaggaggtgttggtatctataatcctggttactggggcatgaacattgaaaaaacaaaggtctacaaagttagcatgtacattaggtcatcagattcagtggatttggcagtttctttgacaagttcagatggtcttcaaaatctagccactcataccatcacggctgagaagggagattttgcaggatggacaaaggttgagtttgatttgcagtcaagtgaaagaaatactagttcaaggctgcaacttacaaccaccaaaaatggcataatttggtttgaccaagtatcagttatgccatcagacacttatatggggcatggttttcgtaaagatcttgccactatgctggcaaatctgaagcctcggtttttaaaatttccaggtggaaactatgtcatgggaaattatttactgaacgcattccggtggagtgaaaccattggaccttgggaagagagacctggtcactttaatgatgtttggaattattggactgatgatggactaggcttttttgagttccttcaattggcagaagaccttgatgcctgcccagtttgggtgatcaatgatggggccagccttaacgaacaaattccatctgcaacaatagctgcttttgtaaaggacgttgttgatggcattgagtttgctaggggagaccctaagactacatggggttcagttcgtgcagcaatgggacatccagagccctttccgctttattatatttcagtagggaatcaagaatgctcaaagccgtactacaaagagaaatacgtgaagttctattctgcaataaaagcgtcttacccggacatcaaaattatatcaagctgtgacatatcttccatttcagcagtcaaccctgctgatctatatgatgtccatgaataccttaggtggactttgacattatctctgtggcaggtttatacatcatctggtgatatgttttccaaaacaagaatgtttgatagcacaccccgcagtggacccaaggcatttgttagtgaatatgcggtgactggaaatgatgctggccgaggaacattagtagctgctctagcagaagctgcatttctcattggattagaaagaaacaggtttagtccagatgccatagtcttcaactcatggcagcactatggatgtccaaactactggatgctacacttcttcaaggactcaagtggtgcaacacttcatcccttgacaattcaggtgtcaaactatgatcaattggccgcatctgctctcacttggcagaattctaacgatggaaacacttacttgaaaataaaggttgtcaattttggtaacaaagctgtgaatcttaatatagctgtagctggactagagaatggcattcaggaattcgggtccataaagacggtgcttacatctggttggctgcgggatgagaactctttccaacagcctgacaaggtggtgccggcggcaagccccataaccaacgcgggcgagaagatgggtgtcattgtggatccatactccctcacctcgtttgatctcctcctggacaccaacacagacaaatacccactattggagtcgagctttcattcaagcatgtgaatacagcgcgaaatgtaatggcatagacattaggggaattcccgtgtgggaaatccaaatttgtgaataagtataaactacagatactgctcgcctgtctgcagaagcagtgaaagtcctggtatttgttgtgtatgttatcatgtattcaccgtctccgggcctatgagcattgtctcattgcgtgaattgctgag

SEQ ID NO: 90526 - DNA, 480 bp, Oryza sativa
  Clone ID: PAT_MRT4530_89188C.1
tttgcatttgttagtgaatatgcggtgactggaaatgatgctggccgaggaacattagtagctgctctagcagaagctgcatttctcattggattagaaagaaacaggtcttttgcctcttttatggcatttctagggcctgttcactttgatgccattttcaaccttaccaaaatttggtaaagttgccaataaagtggctacatttagtttgctgccaaattttggtaaatatataagaaatcctgccagttgccaaaattttggtaactatgccaaaatttggtaaggttttttttggcatcaaagcgaacaggccctagttttggcacctgggtgatacttgcttttattggaagcttacttgttttgcgagctgtttctgtgcagtgatgtggtcgagatggcaagttgtgctccactcttcataaatgacaacgatcgcgggtttagtccagatgccatagtcttcaactcatg

SEQ ID NO: 90527 - DNA, 419 bp, Oryza sativa
  Clone ID: PAT_MRT4530_89189C.1
aaaaaaggaaagacaactttttttttatttatatcacccaaaggttcacatggcacatatgggggtatctgggcttatttttaacttccgaaccacttttctggtaaaactcattacaaggcccccccaagggggggaatgggactgggggccccataatccctggggggggtaccatatttagggggggcgttaaaagccaacaaagcttgggcttgggccaaattcccatcaaaggggggatccccaaactggggggggtggagctgctgcgctatgggctgaacaatggtaatggcccaatagggggattggggcgccaccagcgcgggggggggccaaacttgggtggttctcaattgaaacccaccttattgcaagaagggggttgccgctatgccaaactgggggcttacaaa

SEQ ID NO: 90528 - DNA, 1910 bp, Oryza sativa
  Clone ID: PAT_MRT4530_8918C.1
tggatccccgggctgcaggaatcggacgaggcctaatcctacctgctctcaagctccatctccattccattcccttttttgtgtagtagcaatcataggtagtactagtatactggcattccccaaccattccttcctacaccaccaccacctatcaatcacccattcaccacctaaaaattcccaaggcacctgctcctcctcctcctccctcctcacctccgcctttcgtttcttggaatctttgcctctgccttcttcttgttcttgctccctccgcctcctccttccagccaagaatccattgcagaattttcgtgctcaatttcggataaatgttgggtgttctgtttggtgggttgagagcttgaattcgagccgttttcttgcttcttcgagctggtggtggttttcttggcccttggattgattctgggattcagcggcggagacacctacctccgcgtgaggatttctgccatttcttgcttgctgcgtcgagggatttggtccccgccctgcttgcttccagctcagttcggtgccttgttggtgttcatcgatggattccggcatgggcggcgacgccatggagacattacggtgaaattagctcggcccgtctctcgcctgcagatttgagagattggaggagaggtgtgattaggagggggaatcgagcgaggaggaagatgtcgttcaggagcctgatccaggagatgagggacgagttcgggagcatctcgcggcacagcctgcggtcgcggtcccaccgcggcggcggcggcgcgccgcgggtggcggcggtggggccggcggaggcggcggcgatgcagcagagctgctgggcgcagctgccgcccgagctgctccgggaggtgctggtgaggatcgaggagtcggaggtgtggtggccgtcgcggagggacgtggtggcgtgcgccggcgtctgccggagctggagggggatcaccaaggagatcgtccgcgtcccggaggcgtccggcaagctcaccttccccatctcgctcaagcagcctggcccaagagacggcactcttaaatgtttcataagaagaaaccggactactcagacatattatctgtatattgggctcacagaagcacttgccgatgatgggaagttcctacttgctgcacgcaaatgcaggaagcccacatgcacagactacctgatttcccttgacatgagtgatatgtcaaaggggagcaacacctatattggcaagctaaggtcaaactttctcggaacaaagtttaccgtctatgatgcccatccaccatatgatggagctgttgtctcaaaaagtcggtctgcacgtgtggttggtctgaaccaagtctccccgagagttcctgccgggaattacccagtttcacatatttcctacgaattgaatgttttgggtgcaagaggtccaagaaggatgaactgcattatggattccatccccacatcagctgttcaagagggtgggaaagctccaacacagactgaatttcctctcagtggcctcgactctttcccatcgatttcattcttcagatcaaaatcacctcgtatagagatagtgcaactttacaattatctactcagaaggaagaaaagctggttccgaagaataaatctcctaggtggcatgagcaactgcaatgatggtgcctcaacttccgtggacggccacgggctactcttgcctctgtgaaaaactttcagctggtgtcgtctgatgaaaatggaccaactaaccaggagcaggacaaggtgattcctccagtttggaaagattgagaaggacttgttcaccatggactaccgttatccgatatcagcatttcaatcatttgcaatctgtctgagacctcccacggtggcctttctggactca

SEQ ID NO: 90529 - DNA, 441 bp, Oryza sativa
  Clone ID: PAT_MRT4530_89190C.1
cccaattgcacttcgcatggaagtactctgtggagctaccggaactaatgcttgcccttcaggaggtgttggtatctataatcctggtgactggggcatgaacattgaaaaaacaaaggtctacaaagttagcatgtacattaggtcatcagattcagtggatttggcagtttctttgacaagttcagatggtcttcaaaatctagccactcataccatcacggctgagaagagagatatttcaggatgctttgcattcctaggcactgctctttttccttaaaaaagtaaggtcgattgaatttgggagttttctagtttgatttagttgggggtgagttcaatggaatgtggtgtgtggtggtgctctgtctcctcttgttattgggatgttacctatgaataatagaaacggcctctgtgccgtttctgcaataatat

SEQ ID NO: 90530 - DNA, 382 bp, Oryza sativa
  Clone ID: PAT_MRT4530_89191C.1
gacgcagcactaccggctgggcttggttcatgccggggagcaacaacagcgagtagctccagcagatggcgatgagacaacggctgtgcaggcggccgtaacaggcaattccaacagctccctggtaatggcggtggcgacaggtgccaggaggagggctatgttggaagtgaagaaggaccaggccgtggaggcactccgaggtcgcgaggtgtggttcaactcgtaccttaggagttgttgcaccgccatggccgtcgtctgcagggaactccgagtacctcgcgggaatcccgaggagtcagcggccggctatatctcgtggctgaacggggcatgcgctcagctcgaaggtatcggcaagcgtacgacgaggccctga

SEQ ID NO: 90531 - DNA, 448 bp, Oryza sativa
  Clone ID: PAT_MRT4530_89192C.1
atggaggttggtgcacccctaactatcattaagagtggttgtggagttgacacgtggaggatggggccgaggggtgccacccttggttcagccaggcaaaccgcctttccccaccgcctttggtcaggggatgataggtcctcctcctacctccggctccccaatcccaaccgtgatgccgacattgccgcctcacgcgccgccgattccgagccacgccgggcgccgcccttgttgccgaggtgggggggaccggaccggcaccaggggggtggacggggtggggggtggctagggcgaggggatcgggtgcgggtggggcccgtggcgcgggcgcggtgggcggccgacttgaggcgggcgggggaggggcgattggggggtggggtggggcgcggccgtggggaggggaagggggtggaggggcgcagcgagggggggaggacgg

SEQ ID NO: 90532 - DNA, 2505 bp, Oryza sativa
  Clone ID: PAT_MRT4530_89193C.1
atgcaaacaaccggcacttacactacacgtggaggcgtacggcggaggagaccaccagggaatgggatgtgtgggcaagtggcagtgccggcgaacccccacaagcgtctgaggcaggcagcgttggtggacgggcgggcgtcgcccttgcgcgtggaggagagcagcggcagcggatgggcggcgctgccgagaacgagggctgcgacggccggcaccttcgtgcgattggacgcgcaacggtcgacgacacaacttgatcagctacatcagcacggccatgaggagcgagccgcatgcgcgtgtcagattgtcttgcaccgcacctccatcgtcttcgtaatctcgccggtcggttcgagctcctggcgacttggcaagctcctacccgccacgcatgctgaaacagcaaagaacccatctcgtcaactgcccgaccgccaggcgcgtggggacgcgggattgtcagtgggcccgtctggccacaactgcaatcatcgcgcgctctgcgccggctgcgctggtgacagcccccagcgttcttctcagagaattcgtctcctttgtttcgccattttctcgcccgcatacacgcttctcagcccccagcgttcttctctccctccatcgtactttgcacgcccaacttctcgcccgcatccgccggctgctatggcccaagacgctggcagcgccatccttccggcatcgcgcatcacggcagagaggcacatgagcctcatccgcaagattatgccggaggacgccgccgtgagagcaggggagacgcggccgcggccgcggtacccggagagattcttttacgaggtcttggatttttacgagatccacgccttgcatgtcgctcccaatgccgtgatgatcctggccatcttcgcgcatctgtgtgagatgttcgtcggggcagtcgcagaactgggggaggagtacgacgcggtccaggatcgcctcagaggcttgcggagccggggtctgacggcagcgatggtgttcggcgactacttcccccgtcgcatcgcatctttccaagagcggtccagcggcgcgtgggagtacaccgggtataacgacccgatgcgtactcacgtcggcgagcggtgggactggagcgacgaagacgcgaagacggtggtccggcgggtgtcgggcctggacaccgtcgagcaaacgttaatcctagacgggatcctccccctctgcagcgaccgcgaccgggagagcatcctggcggtgacgatggcggtgggcacagggggaggtcggccccgccggggcgctaccggcggcggcgttggcgacggcgtggggagcagcagcagagctggcggttccggcggcggcagcagctctagggcgcccggcccgagctgcggggccggtaggagcccgtctgccaacccgaaagggaagcggaagttttctgagtctagaccaccttctcctccgtgcggtggcggcgccgagtgcgcagccgaccggccaccgatgagtcaccagcgccccgccgcagcagaagccgggcggaagaagaaaaggctccggaagatgggccagatggagccgtgccggggggagcttcatcgagcccccagagtggaccttcaagcgcccccctcacagcggggccggcgggccacacgcctagtccggctccgagtccaccacgggcgagaccgtccccttgagggaggagaggacgccatccgctgtcggtggtggtggcaccgaggtccccctcgggggtggtcccgagggcacagccgaagggaacgcggcctggaggcggaggccgaggcggaacgcggcccggacgccgaggcggaacacggcccagaggccaagcgcgaggccaccctggccgcccacgaggtgacggcggctgaggccgaatccgcccttcgcctccgcgaggaggccgctgctgagtgcacccgaaccaccaccgccaccgaggctacagtggctcgttgcgcggaggagctgtggcttcgagaggaggtgtggtgggagcaggacgccgcgcttgccaaacgcgaggccgaggttaaccgccgcgaggcgtctgagctggaggccagggagaaggaactagcgtcgcgtgggcagcccggcgataccgatctggccatccagctcgccacggcccaagacaccctcgctgatatgggacggctggtgcaggaccaggctggagagatcgcggccctccatctcgccaacgacatcgggcccggccaactccacgatgccatcgaacggctggagcgtgcggggcgccaggtgggcatctccatgcgctgggacaagaagctcccatccacaaggccggcactcgcacgacggttggacaagatggcggcggacctggagaagctggaggaggaggtcggcgaggccgtgaagtcgtcatcggcttccttggtgcgggcggagatggagcttgtcctcacgagtcaccaggcccgcgaccccgacttccttccc

SEQ ID NO: 90533 - DNA, 274 bp, Oryza sativa
  Clone ID: PAT_MRT4530_89194C.1
gcccggttctgtggccggaggtcctcatgtccgtgaccgggcgtccgcaacgccagccggcaggctggcccctggcgtggctttggcgctcccgccgctcctcccggctggccagatccccccagacgcgcgcgcagtcgtggcggccgcagtcctgctcccgtcgggcgccggcgtcccggtgtcccgctcccgcccgatggccaacactgccagcggccagccgggacttcgcctctccggctcggctcttcgcctctccggactccggtga

SEQ ID NO: 90534 - DNA, 918 bp, Oryza sativa
  Clone ID: PAT_MRT4530_89195C.1
atggtgccccgcctcttcccttccctctccctcctcgccatgctccccgtcgcaggcgtggtgttcctggccgtcatcgtggtgggcaggttctggaggaggttcatcggagtggcggcatcggcgccgctgttcgtactgttcaacatcctcttcttgtggggcgtctacgtgtttgtcatccggggaggcacttcttccctgttagatatggtaattaatgctgaatgtgcaatgcttttgtttggactttacaggatattttctggtgatcctggcattgtgatctatgaatcttcatttttcgaagaagctggctgtaaggattttgtggaagctatatgcccgagtgagaaattttcatcacttccaagggtaaggcactgtaactgctgcaaagcaaatgttagaggttatgatcaccattgtcctgcatttggtaactgcatagatatcactagatgcataaattctggaactataagatcggagaatcctatgtctgttaacatggtaatcggcacaatgctcttctctgttctccaagtgctctggcagctaagaggtgagattttccagataaactggaagaaataccctgaattccagatgaaggaacagcctcaatcaggtaggatccagcaattaggcaaagatgggctggctgagtctgcagatcaggatggaggtttacttggtccaagtgttctgctgtcatcttctcagccgccactagaaattatcaaatactttcctgattcatgcggaaattggaattcaaggaggcccatttggaatgtgagagctttcctgattatgcggaaattctttcctgattcaaggcagaaatcggaattcaaggcaggtgtcatgcagaaatcggaattcaaggcaggtgaatactcgcttatcgcttag

SEQ ID NO: 90535 - DNA, 468 bp, Oryza sativa
  Clone ID: PAT_MRT4530_89196C.1
ctgctccgtacctcccgttctccgtgtgggcgcgtgggtgagcgtgcgtgtgagtgagtgagacttggcgtgtggagatctctctctgcgggagcggttctccgcttctctgtgcgtgtggttggctggctcttgggagtccgcgaaatcggttcccgaatcccgattggttgtttgtttgtgcaaattgtttttgggaattttcgttgccgatggagtactatgggatgatgtgttcggatctgtgctccatgttctgtagggagattgttgaggaggcagacgtatggagtaagttccctggcgcggtgtgcttgaactgtttgtttcctgggtggacactgggaacactcgaatttccagtcttatctgctcacatttccttaacgacagagtttcatgtaatttgagagaaacattccttggatcttctactcttgagtatggagttaccaaaaaaaaaaaaaa

SEQ ID NO: 90536 - DNA, 192 bp, Oryza sativa
  Clone ID: PAT_MRT4530_89197C.1
agagtcgtacgagtgccttgccaggccagaggcgtctcaggcgaagagtgcaaggcgaagactatctgccgaaggaagatgacttcgcgttggcaagttcacccccgcaagggccgaagaagccttttcggcctatcaagcctaggggcaatagggccggcgatcgccagacggcccatcaggggcccatga

SEQ ID NO: 90537 - DNA, 261 bp, Oryza sativa
  Clone ID: PAT_MRT4530_89198C.1
aggagcccccttatggggagggatttttagaaggtccattgcatgggttcacaaggtatgcaatgaccatcctacttttttttagcgggaaaatttccaaaactagttacaaaaaaagcgaggaagcccaatgtcaatgaaatgggatggggatgaaaagattcacgaaatatgaatggggagctaaaaaaacttttgccgcttaaaaaggggcaccggccctttaagaaaaaaaatggttataaagaactttaattttta

SEQ ID NO: 90538 - DNA, 642 bp, Oryza sativa
  Clone ID: PAT_MRT4530_89199C.1
acgccgcgttcggggggggggcgggcgcggacctactcggcgcgcgcgcgcgcggcacgccgcgcctcgtccagagcgcgccgctccaggcgcccgacatcgacgcggcgcgcgcccccgttgacgagttcgagcccgtcgactccggcagcgacctcgagtccgacgatctgaaatctgcacttggaaagcagaggcgggatgggaaatctgcacctttggaaccactgacaaaagttcaacggatttatattggcagattaatagagaagcatggtgatgactacaaggccatgttcatggatatcaagctgaacacgatgcaacactcggttggtaccctgaaaaagctatgtgaaagataccatgttgttggcaagagcatcatccatcctctgaagtagtatcatacgagtgtttaggattctctttcactgtgtaccgtattcctcttgctcccactaatgggaagaaaattcctcctatgaaaattggtgtatgcattactgtactactgtggtttgagattactatcagagaagatggcgtgcgctctgtacctcgaggaaaatcatgaaagtcgtaactaattcagaattgttctgcactcttttaaaaaaaaaaaaacccccaccccccaca

SEQ ID NO: 90539 - DNA, 216 bp, Oryza sativa
  Clone ID: PAT_MRT4530_8919C.1
tcgtcgtccggcagcgagccggacgggatgcatattctgaacagcgagctacactggcgttatgacgataccaaacatggcattgtgctcggcgtgcaaggcgaccatccatcgccatcgtgcgcgccggaacggaatctctgtcacgcgaacgactacggctgaacacaatcatatcatctggcacaagaacgccggtgatgacgcagaccatct

SEQ ID NO: 90540 - DNA, 198 bp, Oryza sativa
  Clone ID: PAT_MRT4530_891C.1
gttggccggagacgaaggagaatggatagctcaccggtgtgcgaggagaaccgggctccggtggggtttagcggaaaccgagcggcggccgaggtggctcacgcggcggcaatgctaatggcggcggcggctctagcggctgcggcgcacgaccggaggtggcggcatgcggcggcgctagtggcgagcggcgcgtga

SEQ ID NO: 90541 - DNA, 411 bp, Oryza sativa
  Clone ID: PAT_MRT4530_89200C.1
atgtcagcgtgccacgtcatcaccatctctctctttcccttcgacctctctctgggctggcgtttatgcctgtcaattttcaaccaaattcatcttcgtcacaacaaattttgtgtcaaaaatttcagcataaccaccaatggccttggccttgtgaaccctgacagagtgttcagcttctacgacgagctacacgcctaccttgcatcaactgggatcgatggagtgaaaagcattcatccgatggctgaataccatgctgcagcaagagcagtcggtggctgtgccatatatgtcagtgacaagcctgggaaccatgacttcaatctgctgaagaagctggttcttcctgacggatcgatcctgagaaccaaactccctgagatgccatgccatgacgatccagtgtga

SEQ ID NO: 90542 - DNA, 590 bp, Oryza sativa
  unsure (1)..(590): unsure at all n locations
  Clone ID: PAT_MRT4530_89201C.1
cagatgtggcaaggggatcatatatatgaaaatcgaaatcaagttccaacttttgtttgtttgtctataccttctttagttacataggcatgcttatatacatatcatttctacgaggatatactcaacctgctcaaggaaacatatggctcaggtaaaagaattcattgactggattactgaataccaaaagccattctcttctatttttgtatcggagatttttcaggagttcatatatacagtacaaaagtctataagttttggaccgtggttccgttaactcggatgtatggaacatgagcaacatatggccaatcggcaccatctttagatacccgagtactcaaacacgaagtacagttgtttatattgaactcttggagagtcaggggcagagcattgtctggtatggactgcaagccacgcaagccatgaagctctaatatcttaatggagagcatggtaaccaagaatgaagggagacgttgcaatgcatgaaaaccttcaatgcagaggtgctctagcgagttttgttgctgaaacccagntcttgcttgaccgagaaatagtgccattcgattcattgc

SEQ ID NO: 90543 - DNA, 2534 bp, Oryza sativa
  Clone ID: PAT_MRT4530_89202C.1
atgacggtgggagccggggtggcggtgcaggacggcggcctggtggcgctgggcgccacggtgctgacggaggtgcgcgacaatgtgctcctgacgccggccgccggcgccggcatgacgagcggcacgttcgtcggagtccgctccgccaccgccggcagccgcagcgtcttccccgtcgggaagctcaggggattgcggttcatctgcacgttccggtttaagatgtggtggatgacgcagaggatggggacgtcaggccgcgacatccccttcgagacgcagttcctcctcgtcgaggccgccgacgccgacggatcacacctcgccggcgacggcgccgccgcggtgtacaccgtgttcctcccgatcttggagggaccgttccgagctgtgcttcaggggaactctgatgatgagctcgagatttgcctcgagagtggtgacccagctgtggaatcattcgaaggcacgcatctggttttcgtcggtgccggatcggatccattcgaagtcatcacaaattctgtcaaggctgttgagaggcacttgcagacgtttactcacagggaaaagaagaagatgccagacatgctaaactggtttggttggtgcacatgggatgcgttttatactgatgttacttcagaaggagtaatggaaggattacagagtctaggaaaaggtggaactggcccaaaatttgtgataattgatgatggatggcaatcagttagtatggatcctgcaggaattgcatcattagctgataactcagccaactttgcaaacaggttgactcacataaaggagaaccacaaatttcagctaaacgggaggaaaggtcacagggaagagaatccggcaaatggccttgcacacattgtcaatgaaattaagggcaaacatcagctgaagtatgtttatgtgtggcacgcgatcaccggatactggggtggagtaaggcctggtgctgatggaatggagcactacgaatcgaagatgcagtacccggtctcatcaccgggagttcagaagaacgagccatgtgatgctctgaacagcataaccaccaacggccttggccttgtgaaccctgacagagtgttcagcttctacaacgagctacacgcctaccttgcatctgctgggatcgatggagtgaaagtagatgtgcagaacattcttgagacactgggtgctggccatggtggaagagtgcttctggcaaggaagtatcaccaggctctagaagcttccatcgcccggaacttccgcgacaacggcatcatatgctgcatgagccacaacacggataacttgtacagttctaagaggagtgctgttgtgagagcttctgatgatttctggcctagagaccctgcttcccatactatacatattgcatctgttgcatataatactgtatttcttggagaattcatgcaaccagattgggacatgttccatagtgttcacccaatggctgaataccatgctgcagcaagagcagtcggtggctgtgccatatatgtcagtgacaagcctgggaaccatgacttcaatttgctgaagaagctggttcttcctgacggatcgatcctgagagccaaactccccggcaggccaaccagagactgtctgttttcagaccctgcaagggatggcaagagtatcctgaagatatggaatctgaacgagcactccggtgtgattggcgccttcaattgccagggtgctggatggtgcagagtagggaagaagaacctcgtccacgacgagcagccggcgacggtcaccggtgtcatccgtgcacaggacgtgcatcacctcgcaaccgttgctgccgatggctggaacggcgacgtgatcgtctactcgcacatcggaggggaggtgacctgcctgcccaagaacgcgtcgttgccggtgacactgaagacgcgagagtacgaggtcttcaccgtcgtaccactgaagaagctcgacaatggcgtctccttcgccgcggtcgggctgatcgggatgttcaactccggcggggcggtgacggcggtgaggtacgtggaggacgccggcgttgaggtcagggtgcgtggctccggcacggtcggggcgtactcctcggcgaagccggcgagggtggtggtggattcggaggcggcggaattctcctacgatgatggatgcggcttggtcacgttcgagctcgccgtgccggagcaagaactctactcctggaccatctcgatcgagtactgacgtagtgacgttgcttaccatgaagtttctcaatgtttttcatgatgaaaaatggagtggatgagatttcggaaaatatattcaggttcttgctgaatcccgggttgggaattcagcatggtgctgaacattgtaagctaaggttgagatgttcgcaacattcttgctgcatatgttgcggctaattcgtgttattccgagcatacacatacagtatgccaaaaatcccaagggaaaaaaaaaatggtttctgtcaaaacctgcagcccggg

SEQ ID NO: 90544 - DNA, 3357 bp, Oryza sativa
  Clone ID: PAT_MRT4530_89203C.1
gggagaattggatgccaagagaaactaatatttacagaacagtttaactaacatcctttgcaagttacattcttttcaactggacagactttctatagaaagccatatgaaagctcagaagtgggaacatgccgaactagcagctcctgcagctgctgaaaacatctactacgagggggaacctcaaacctggtacaggatttggcgatgccatcgtgtaactaactagtcattggcgactaactctaagtttgcattctctaacctctggaggacaagcttcttctgtggagcaaggcctttcgcgatcgccacggagctcacgtcgacgaggacggtgtcgtcttctttgaagtcgcccttcaggacactgagggcgatctcgttctctaccatctgctggatcaccctcttcacaggcctagcaccgtagttagggtcaaagccgagagagccaagatgctccacagcttctggtgtgtactgcagatgaatcttctgttgcctcagccggttcttgactcggttcagctggatctccacgatgcgatttatctctgtggtgtccagcggctggaatacaatgtactcatctatcctattcaaaaactctggccggaatgactgccgagccatgtcaatcacttgcttcttcattatttcataaactgcctccttgctgtctgatgtgtttctaagcgtatcaagaatcaatggcgacccaatgtttgaagtcatgatgataacacagttagtaaagctgactgttctgccctgagagtcggttattcttccatcatccaaaagttgcaataagatgttgaacacatcctggtgcgctttctcaatttcatcgaaaagaaccacagaataaggcctacgacgaacagcttctgtcagttggcccccttccccataaccaatatagccaggaggggctccaaccaaacgggagacggcatgcttttccatgtactcgctcatatcaatccgtattagagcattctctgtgttgaaaaggaattcagctagtgttttccccagttcggtctttcctacacctgttggacccataaacattaagcttgctatgggacggttagggtctgataggcctgccctagaacgacggattgcattagccactgacttcactgcaatatcttggccaataaccctcttgtggagtacatcttccaatagcagtagcttttccttttcagattgttgaaggtttgacactggaataccagtccacttgctaacaatctcagcaatgtcaacatcagtcacctcttctcgaagcattgacttgcctgactgctggaattccatgagtttgttctcagcctcttcaagctgtttttgtagcgacagaagtgttccgtacttgagctcagctgcacggttcaaatcatactctctctcagcagcttcaatctccaggttaactctgtcagtctcttccttgatcgatcttatgcgagtcatcaaggacttctcatattcccaatgttctgaaaggtttttctgcttctgcttcagagattctagatcagcttcaagcttgctcagtcgctgtttggaggctttatcggtatcattcttcaatgagagcttctccatttcaagccttatgatttccctatctacctcatccaattcaataggtttcgatgttatctccattttcagcttagcagctgcttcatcaactaggtcaatagctttatcaggcaaaaaacgtccagtgatgtagcgatctgataaaacagccgcagaaacaagagctccatctgatattttgacaccatggtgcagttcataccgctctcttaggccacgcagtatagagattgtatcctcaactgctggctcaccacaataaacctgctggaacctacgctccagagcagcatccttctcaatgtacttcctgtactcatctagtgttgttgctccaatgcaacggagttcaccccgacctaacattggcttcagcaaattaccagcatccattgccccacctgctgctcctgcaccaacaatagtgtggatctcatcaatgaacaagatgatctgcccattcgaggcagtgatctccttcagaacagccttaagtctctcttcaaattgaccttggaatttagccccagcaagtaatgctcccatgtccaatgaaataagctttctattctgtaaaggttcaggaacatctccccgcacaatacgctgtgccaatccttcagcgatagcagttttgccgactcctggctcaccaataattacaggattattcttagttctcctgcaaaggatctgaatgcatcgtcgcacttcatcatcacggccaataacaggatccagttttccacgtcgagctaattctgtcatgtcaataccatacttctctagagcctggtacttcccctccggatctggaagcagcaccataaaaagagttatgattcctaaggttatcaaacagtcacactgggtacattttaatgctaacatgaaaaaccatctggctgaaacaaaaccattgccattggcagagtctcccctcaagttgtgaatagagagctgaacaaagagatacctctgtagaaaaacaatctgatctgtgacccgctgactgccacgtacagcggagatagcttccttcaactcattctccccaattttgagatctctgaacagctgttgtccaaacctcttatcttctgtgaatgctcgcaatatgtgctcaacagatacaaactcatcagcatattctttcttatgcttccttgcattatccaaaattgatacaaagcttgacccaatgatcggtccacttgtatcgccaacaacctttggctgtctcgagatgaactcatcagtagcttgcaggacagatgtgttatctattccagctttcgaaaatattctgcgcgctaaaccatccttctgctccagaagagctttcatcaggtgctctgcttccactacttgttgcttcgacattctagctgcatcaaccgcgccgacaaccccctcccaggccatctcagtaaattctcctggagttatctgagacgacgacgaggtgctgtacctcgccgcctgcgtggggtggaacagcctccgctgcggcggcggcggcggaaccagcagcccgcctccaccgagccggcccatgggcggcgcgaaccacgcgggcctcctcgccccaccaccagcggaagcggaagcgtctccagcgagcgacgcgagggcgcggagcgggtcccggccgccagcgtggtggcgccgcgccgccgccgcggcgcgggcggcgcgcgcgagcctggacacggcggtggcgcgtgacat

SEQ ID NO: 90545 - DNA, 236 bp, Oryza sativa
  Clone ID: PAT_MRT4530_89204C.1
tttatgccgccgtcgtcgccgacggccacgacgagcctgaggatgaagaggcacgcggcgtgcgagccggaggcgtgccgggcggaggccaggcacgtggcggcggcggcggcgagcagcacgaggaacggcgcgccggtgctcgtgatgatgccgctggacacggagagcaagagcgggagcgcgctgaaccggaagaaggcggtggcggcgagcctggcggcgctgaaaagcgc

SEQ ID NO: 90546 - DNA, 411 bp, Oryza sativa
  Clone ID: PAT_MRT4530_89205C.1
atgccgtgctgtacctctgcaagctgcaacagcgagacaagattctccggaaaagctcaaaaagaaaaatatgcaagaatcatgtcgagagaaacgattctacatccctttcctgcggcgagcgggccaggcgcagcccctcccgccagtggcggcggctcgacgctgggaggatgcggtggtggcaactcggctggggaggaggcgacggtgatggctcggccagggggcgacggtggcggctcaacatggggaggaggtggcggtggcgactcagcttggaaaggaggcggcggcccggctaggggtgacagcggcggtggcccactggcccggccaggaggcggagaggaggaggcggcggcggtggcccgtcgacccggccaggaggcggcgacttgtagaatatga

SEQ ID NO: 90547 - DNA, 150 bp, Oryza sativa
  Clone ID: PAT_MRT4530_89206C.1
atgcggtcacagcagcagctggagtggcagcagcagctggagtggcagaagcaactggaggctgtgcacttggaggtgcttgtggaggtggtgttcttgcaactgaggcaactggagttgctggttgagactagtgcaaataaacagtaa

SEQ ID NO: 90548 - DNA, 378 bp, Oryza sativa
  Clone ID: PAT_MRT4530_89207C.1
atggcttcttgccatgtatgggaggtggcggcccggcgaccggcgaccggcgaccggcggtggcggcgcggccaggccagcacccgatcggcggcggcgcggcggccacccgtggctaggcggcgcgcggtggtcaggcgggacggcgccgcgtcaagtagtcggcgggggccggcctttatgcgaaggcgcgcccgtgagagcacgtggccggtgcgagtgcgatcgtgcgacggcgcgggcgcgggcgtggccggcgcgagtgcgaccgtgcggcggcgcgggtgcgggcgtggggcggcggcggccttgcgcaggcgtggcacggtggcgtcggcggccaggcggcagcgagcgccagtggcggcgaggccatga

SEQ ID NO: 90549 - DNA, 2420 bp, Oryza sativa
  Clone ID: PAT_MRT4530_89208C.1
gcagccattcccatttttgcccactcctcctcctcctctccagtaaaccctagcccacccaacctccaatccccccccaaccagcgcccgaatcgcagccccgcgaggccccaatcgagctagggttcaccgatttcgggggccgagccagcgaaggctctcagttttcgctgcgatttgtggggtgaaattttcgcgcggggtttgatttctttctctcacggtgggggatggggagccggagggaggaggagaggaacgagaagatcatccgtgggctcatgaagctgccgcccaatcgcaagtgcatcaattgcaacagtgtggggccacaatatgtatgtaccaatttctggaccttcatatgcttgtcatgcagtggaatacaccgggagtttacccaccgtgtcaagtcagtgtcaatggctaaattcactactcaagaagtgcggtctcttgaacagggagggaaccagcgagcacgtgatatctacctaaaagattgggattggcaacgaatgaggttgcctgacaatagcaatccagacaggataagggaattcatcagagctgtttatgtagacaagaagtatgctggtgggaagtccacggacaaaccagtcaatgatagtgagagtgtaaagagcagcgaaaatgatactagaagacctagctcctaccattcgtattcccaaagcccaccttacgattttcaatatgaagatagacgatatggtaaacaagtggacacacttgcacgaaggccttcagatagggcactctttgatgggaagcttggcagttttttatacagtccaggtcgtttgagagatcagatgcatgaagatcgatttgctaatgagagtactgggtcaaggttttctgatttttcggcctcaagcactggtgacattagaaatgatgtgctttctcctagctctcaggatacagggtacagcagtccttctatccaccattcaaggaatgtgtcttctgaaaatcctccatcccatcggcatccgaatgcaacttctcaaattgattttaatggagtccgacgatcacagagaacaggttcttcaggaagttttggatcatttgatggtagctcagcatctaataagtcagttgattcaggtgccttacctgatgcacctacagaaaagccagtgaattctgctgtaaatcgtcagtctgttgcgccccccatggctcattcagcacaattgtatgcctcacagagcaatataaactcttcagtcagccaaactgctcccaccagggaatctgtgcaacatggaagggttcacatggtctctgtagcaaagccgccggtttcaacacagccaacgacttccacaaatcaggacttctttgatcagtcaatgcaacatccggtcaattctgcagcaccaatagatctttttgctggctttaaccaacaggctccatcagttccccatagagcagttgatgtaggcagccattctgttcctaaagaaactctgcatgacgttgtggttcagaaagccgtggcatcttcaccacctgttcaagccgaagcaccctctacatctcatcctgtccatcatgatctcttgagtctgtcgcctttgcaggaaccttcaatttcctctacccctccgtcaatagatttatttgctggctttgaccaacaactgccacctacaactagtgttcagcaaagtcaaccagccgaaccatcaatttcctctacccctcagtcaatagatttatttgctggctttgaccaacaactgccacctacgactagtgttcagcaaagtcaacaggcagccccattggttgctgacgaaggatgggctttcttcctcgatacacctcaacacgtatctccgacttccatttcaaacgtgcaagctcaggtagccaccgcaatagctgcattccctccaagtgagagtcttgctaaaggaactaatcagtcaatgttgccaacttcgccaccaaatgctttgattccacaaagttacccgcttatgatggatcagtggagtttaaatgctgaagaggtgaagacccctgtctccaaagaaacctcacagccttggaatgcctttggtgcatctactgggaacacacccaacgactcattcacatttaacactatctctcaagtagcacctaatcacttcaatgtgcctagtgttccacatgctgaagccagaggtccacaggatttgcctagcagtgaacctgaaagactaacccctggggatataacccctggtttcaatgtctctcctggtgacatggctgggccatcatttcgtggaccacttcaacagcaactggacatcgtggccatctcagcctgcaaaatcaacaattccatttggacatggcatttgaagtttgaatgtttaagcgactaacat

SEQ ID NO: 90550 - DNA, 111 bp, Oryza sativa
  Clone ID: PAT_MRT4530_89209C.1
tggggccgcatcgcgaagaggctattttcgcatgatgcggccgtcttaagtgaccgcatgcgaagatcgatcttcgcatgcggctgcgacggccgcatgcgcaaatggtga

SEQ ID NO: 90551 - DNA, 1545 bp, Oryza sativa
  Clone ID: PAT_MRT4530_8920C.1
gcacgagggaactagtctcgagttttttttttttttttttttatctgaagctggtgagatctaaaatcgatccccactggattaatatttagcagagcttctgaaaaactggaaataaaggctacacaaaccgcacaagatgggtgcggtattttccttttcaacaatgaatgtgagatggcatacattgaagtgaaacaatgagctaaaaggttaagacaactactttggtacatgatcatgaacaagtaaattgaggttgaaattgatgaatgctatgcaccagagaaccaattgtgcaatgtactcctccagtggtaaagcccctgttgtctcaattagcacctaagaacaacctctcgcggtttctacggcggcgccgacgccgcctctctggtctaaccataccggtgcttccgcctccggccataaccaaatcatcctcatcgtcgccttccaaggggtaatggtaaggcgtggttgcatttgcaccactgctcaccgcataattgtcctcggcaccgccagttgtaccaattgcattctgaagcctttggttttgatgatgccgagcaacttggcgcattagaaacattaacattcgtctagtgttatctgtcccgtgtccgttggcattgtcatcctcatcactttctacatcatctaaatcatcttcatcttccaagtctagcacataatcaccgaaaacaatcgccctccccatagttgctgttatcgtactgagtgcatcttgcctctctctttcaatctctagcaatctccacttctgttcaaggatgggatcgacttcccttggctttgcaagagggtgctctgacttcacatgcttgcggagttccttgtaggttcctacaaatgagcaaccatcctgcatgcatgtcctccttttcccattgagataacttcgagctggttctactatagtccatcccttcaccttgccacgacacagtggacatgcaagatcaacagactcatttttttcacctgcaatcaatggcgtcgagtccaagttcgtgccaacagtgttggcaggaagttcctctagcaatgcacccttggtgtaagccttcttgaattgatcaaggcaatttgagtggcggtggctagttccacacatgtaagggcgacaacctttatcatgcgaagaacaaaggaggagaacagcattatgcgggtattccatgcacacagagcagttggcatcttcccagtccatcttctgtgcagctggcagagttttctttcggtttgattctttcattgctttccagcggtacgaagggatgggatacggtgcggatctaagctgacgagccacatgcctccttgcccttgcacttcttgccatttcttcggaaacctagacccggggggcgagcgcccgatgcgggagcggaggaggtcagccggattccggcggcggtgagcgcgaggccgcgacggagttggagacgacgacgaggaggaggagagcagcaaaccgagcgagagagaaaatggcgaaagacaaggacaccccta

SEQ ID NO: 90552 - DNA, 438 bp, Oryza sativa
  Clone ID: PAT_MRT4530_89210C.1
atgcccctgccgagtgaccagctagggtttctcctgagagtcgttctggcttcgttacacgaaacagaggatgagcagccaaatcttccgcctccggctggaaatggcgttggcacagccacagtgaagcagcctaagatgatacttgatcccggggacaacttcagcaactgggatcggtacattatggcaatcttggaggtggcgactggagttcagatcatttacgcgctttttcgagagatactgttgcctgatgcatctgagttaatcgtaggtagcagctacatatgtatccctgtttatgtatcttggatccctggatccctgaacttgaatctgatggcaccaccttacatctttgcagtactcagctgtccacacaaacgattacttgattactatgcgtcgaaggtggtggcctatgaagccagctag

SEQ ID NO: 90553 - DNA, 586 bp, Oryza sativa
  unsure (1)..(586): unsure at all n locations
  Clone ID: PAT_MRT4530_89211C.1
cccctaataatccattcatgaactatgaaatgatgaaaattagggaaaaattttgtgtttttttaccaaaaaaaaattacccattaccgaaaaaaaaaaaccctctctcaaaatcctcagtcccactcgtcgtcgctgatcatttcgtcctcgtccctgggcggccggacaacaacaaacacctcggcgggggcctcgccaacgccctccgccgccagcttcctccccttctccaccaccagcctcccctccctctccaccatgtaaatgccgtcctcaaccacctccctccgcccgcggttcgccaccaccagcatccgctccggcctccgccgancgccatggnagctttgcgcccgtcggnnaactcaatnccaccncctccccggntnctccgccaggggccccaccngggcacaccgccaccggntncacccttttcactccnccatgccnagttccnctccttcttgtcccntcngncgttggnaaccctccccccntccctccccncaccggaaanacangttcctccccctcccgttttaccccccggccnggaggccanncggggggnttggggcct

SEQ ID NO: 90554 - DNA, 1782 bp, Oryza sativa
  Clone ID: PAT_MRT4530_89212C.1
atgccggcggtgaaggtggaggaggaggaggaggagcggaatccggtggcgtcgagcccttcggtctcggaggggagcgcgcacgccgccgcgctggcgtcgcccaccgcggcggattccatcttcggtcgcaggcgaaaaagtggcccggtaaggagagctaagggtggctggacaccagaagaggatgaaaaattgcggaaggcagttgatatttataatggcaaaaactggaagaagatagccgaatctttctctgataggacagaagtacaatgtctgcatagatggcagaaagttcttgatcctgaacttataaaaggtccatggacccaagaggaagatgatgtcatcatcaatatggtaaagaagcatggaccaaaaaaatggtctgttatagcaaggtcactaaatggtcgaattggtaaacaatgccgagagaggtggcataatcatttggacccacaaataaggaaagaagcttggactgttgaagaggagcgtgtgcttgcccgtgctcattgtatgtatgggaataaatgggcagaaattgctaaacttcttcctggaaggacagacaattctataaaaaaccattggaacagttcattaagaaaaaaaatagatgactacaataccagagatattctgccagttcatccaccagttgttggtgatggtttgaaacagttaccaaagcggccacctgctgacaaccattttgacttaaacaaagagccaattatctgttcaagagaccgcttaggagtagttcattctgaccctacctctcatcaacgggcatccaatttgaaagactttaagggctgtgcagattacctctcacttggtcagccagtaacttcatgtgaggcttctgcagctgatgattctgcttttgatctagcaacacagggaatgagaatggattctgttcatgacaagggtactgggaacaattttgtttgtgggaaggttcagggaatcaattttcttggtgacaagggacttaaaattaatcagatatcagataaaatgggctgttcaagacaagctaagagagaaggtgaagcagccattaatggcggcggatcatccttgcagagtgaggctcactctgttggttctctttgttatcagatacctaagatggaagacattgctcctgcccaatccccagtgtttacagcaaattatgtaccggaacactctaggaacgtaatgcactcacccaatggctatactactccacccactcatggaaaaggatcagatcagcttagtgttgaatccatattgagaagtgctgctgaaaaattccatggtactccctcaatactaagaagaagaaaaagagataaaccgacgcctgctgaagataatgatttgaagattggcagattaagcagtgatgacttccacactcccataggaaagtgtactacagatagcccacagtcattcaaaactgcagcacttttgtccttgggtcctatggatgagcaagggagtcttgatgtttcccctccatatcgactaaggtcaaaaagattggctgtcctgaaaactgttcaaaatcatctggatttttcatctgatgaaatgagcatttgtgatactacaatgaaatctgcctgcgggaattctgattgtgctaatgccagtagtggtgtttcaagcattcaagggaagaaactggatgagcatatgattggattggaaactttaaccatgaactttgcgcatacgacaaagttggatgctacccaacctaatttgtag

SEQ ID NO: 90555 - DNA, 1146 bp, Oryza sativa
  Clone ID: PAT_MRT4530_89213C.1
atggcagctgccagcaccaccgatcaaggtgtagccgttatcaacgacagcccactgtgcaagctcctctcttccggcgacggtcggcacgtcacgttccgggtcgactacgcggccgcgaggcgacccgccgtcgccggccgtacgctgcgcacgacgtgcgccatcggcgacagcggcgcgtacaggtgtgaggcgtccttcaggctgctgatcgggcggagaaagctggccgccttcgccgtgggtgtgtccggcccacgctaccgagacgtgcacaaggtggtggtcgatctcgtcctcgtcgacaatgccaggtcggtggccctgcagccgcctacgagatccatggctatccaggccgccgccgggagcaaccaaggagggtgcgggttgctcgtctccaaggattacctcgaggagaactgcgtgcaggatggcgtcctggtggcggtgtgctccgtgctctttctcccggagttgccaccttgcctatggctggactcgctaggccaccgtctcgccgccatgtcgaacaagaaggacagtactctcaccgacgtatgcttcgacgtcgatggcgagaggttcaacgcgcaccgcctggtgatggcggcgcagtcggaggtgttcaggagcttgctgttcggctccgatgacgccgagaccaagacggagaccgcagtcgtcaccatcgacggcatcagcgccaccaccttcaagcacatgctccactacatctactgcaaccagctaccgccaccggccaccggcgacggtgacgacgatgacggcgaggcagaccatgtcacgaggatcgccgagctgcagcggctgctcgtcgcggccgacgcgtacggggtggaggcgctgaggcaggcgtgcgaggacacgctgtgcgccgggatcaacatggacacggtcgcctcgacgctggcgctgacggagaaggggtcgtacccgaagctgagggggtcgtgcctcgagttcctgtccaacacgcagatttactcggtggcgaccaacgacgagtgctacgaggtggtgcagagctacccggacgtgctgacggagatacgggacagttgtctaatatattatcgttatgctactttcgtcgttgttactgagttagaggatttgtga

SEQ ID NO: 90556 - DNA, 189 bp, Oryza sativa
  Clone ID: PAT_MRT4530_89214C.1
gaccgcctactctacctgggtccgttgacggcgagccgtcgagctacctgaccggcgagttcgccgtcgactacggatgggacaccgttgcattatcaacaccaacattgatcatactttgctgcgttagagcaggtacaatggcaggctataagccagctcttacatattttccctataaatacttag

SEQ ID NO: 90557 - DNA, 159 bp, Oryza sativa
  Clone ID: PAT_MRT4530_89215C.1
atgacgaagactacgacaatggcaggcctcgagagtggtggatccaacaccgccaccatcgggaggggcggatctattgtcctcggcctcggtaggggcgatgatgatggggagcgtgtatccaagcgcatcctgtggaggagattgctgtccaagtga

SEQ ID NO: 90558 - DNA, 477 bp, Oryza sativa
  Clone ID: PAT_MRT4530_89216C.1
acccaaatgacactttattaatgaccggtctgagatcaggcctacaccgtacactctactactacttcacccgcagtcgagtccagttggttacttcctcctctgggcggccaatgggagcttgccatcgcatgagccgtgattagtttagctgaaatggaggttgtaccttgcaagtacccccagctgatgctgatggggaggtgtggctgtcacacaggcaacagtagcagggaattgagagttggaggtccaccaccaaagaaccaagcatcacatgccataaacctctctgtgtcatcctcctgctagctcttctctcctctgtgtttcacaatcacagcccacagaaacaccaatggaagggaacggggcaccacaccaccacaaagggtgggcacggcaaaacagttcgctgctgttgcaggattcatttggcacaacaccttcaacttgcgccaggctgcctgcacacac

SEQ ID NO: 90559 - DNA, 670 bp, Oryza sativa
  Clone ID: PAT_MRT4530_89217C.1
gcacgaggggcgcaccacgcaggcttcgcttcctccaatccacgacaatggcgcccgcgtcgctgacgagattgaccaacccgttgccgtgcgcctctccatctccaagatgccggcgccggccggggagatctccgccggcgaggtcggcggcgtgcggggtggtttccaggaggagggcggtgtcggagatggcgattcttagcggcgccgccgcggccgcggcctcctgctgcgtcgatctcttcttcgcccacatgcctgcccgtgccgccacgctggagcctgatgtgatcaggtacagaaagctggacagtggagtgaagcttgaagatgttgtggatggcgagggtccagaagcacgtgaaggagatgtcgtgcaattcaactatgtgtgccgccgcgcaaatggttatttcgtgcatagcacggttgaccagtttagcggcgagagtaagccggtcacacttgcacttgatggaaaagagatgattcgaggtctcaaagacgtcatcgttggaatgaagaccggaggtaagaggagagctctgatacctcctcaagtaggttacactgatgagagcttgcagcccataccagaagagttcggtccacggcgaagcctcctgtcacatgccaaggagcctctggtgtttgaggttcagctgct

SEQ ID NO: 90560 - DNA, 806 bp, Oryza sativa
  Clone ID: PAT_MRT4530_89218C.1
atggagtaattctgacacaagaaaagtatgcaaatgacatgctcaaacgagtagggatacaagattgtaaacctgtaagtaccccattacttgtttcagaaaaactttcagcccacgaagatacacttcttggcctaaatgatgcaacacaatatagaagtgtagtaggagctttgcaatatttaactttgactaggcctgatattgcttattcagtaaataaagtccgtcaatttttgcatgctcctactctaacacattggacagtggtcaagagaattctgagatatgtaatgttaagtatacagttggtcatggtttagagattcataaatctccttctatgctggtaaatgagtttactgatgttgactgggcaggctgtgtagatgataggagatctataggtggttttgctatatatcttgggtcaaacttggtgtcatggagtgcaagaaaacagactacagtctccagatctagcactgaagcagaatataaggctttagctaatactacagctgaaattatgtggatacaaacattggtacaggaaataggtgttgagacgcctagaactgctaagatttggtgtgataatattagagctaaacatttatctgctaacccagtttttcatgcacgcactaatcatatagaagtagactaccattttgtcagagaaaagagtaattgagatagaatatatttcttccaaggatcaagttgtagatgggttcaccaagcctttggctgtgagacagtttgaagatttcagaaacaatctcaacttaagaagtttcaat

SEQ ID NO: 90561 - DNA, 594 bp, Oryza sativa
  Clone ID: PAT_MRT4530_89219C.1
atggcgcggcggcgcgaggctcggggcgacggcgacgtgcggcggtgggacggcgcggcgcaacggcgacagtgcgcggcgcgggcggggcttgaggcgctgatggcgacggcgtggcgcgaggcggcgagaggacgggcgcgcggcgacgcggcgagggtgacgccgacgggtgacagcgacgcgcgcggcgcggcacggggcgcgacgcgatgcgacgcgcgcagggctaggcacggcgcggcagcacggggctcggggcttgaaggcgcggtagcgcgacggcgacggctcgcggtgcgtggcgatggcgcgcggcgcggcagcggggacgggacgcgacggcgacggcgcgtggcgcggcagggcaggggcgcggggccgacggggcatgtgcgcggcgacgggacgtcgcacggcgatggacagcacgacagccgcggcgatgcgacgttagcgcggcgcggcgtggtgacggcgacggtgcagcagcggcggcagcggcgtggcgcgcgcggggcgcaaggcagcggcgcagcgcaagcaggggcgacgcggggctcgagggggagcgcgaggagggggaagggctag

SEQ ID NO: 90562 - DNA, 1365 bp, Oryza sativa
  Clone ID: PAT_MRT4530_8921C.1
gccccacgcgtccgcccacgcgtcagcaaaaagctctcgcctttctctctggtagcttcgccttgctctccagcttctgcttttgctgccgcccatggccgatccggccgccgaggagaccgtccccgcgccgccgccaaccccggcggtcgaccccgccgagggtgcctcggacgcgccgcagccggtcgagctgcccgccgacaccgccgccgcctcgccggagaaggtgtcgtcgccaccaccggagccggcgccggcggtgaggagccgggggttcaggctgctcggggaggacacctccgtgcacaaggctcttgggggcggtaaaactgctgatgtactattatggaaagacaagaagacatccgctgtagtgattggtggtgcaactgtcatatggatcttgtttgaagtgcttgattaccatctcttgactctgctttcccatgtgatgattggtgccttggccatcttgttcctgtggtcaaaagctaccacatttatcaagaagagtccaccagatattcctgtagtacagatacctgaagatgtcgccgtgaacgtgtcacgagcattacgcagtgacataaacagagcacttcacctgtttcgggagatcgcgttggggcatgacctaaagaagtttctgggcgtgattgttgctctctgggttctctcagaagtaggaagctgctgcgacttcctcaccttgatatatgttgccgtcctgatgctccacacggtgccgatcttgtatgacaagtaccaggataaggtcgaccactttgctggaagggctcactctgaggcctgcaagcactatgaggtgctggatgccaaggttttgagcaagatacccaggggcccggtgaagccaaagaagaactagaataagttgcgcaaggggactcgattcggaagggtggcgtcttttgtcgggtttgcgagttctcaggtgtacccaactgcgtcgcgtcctactgacggtagcagctgaatgttcgttctgcttgatgggtggtttgctggcttcgctgctgtgtgcttcagtgatgccagttcatgttcattctatcttgaagcctgtatctaaaatatctaaacgtgactgaatgctacgtttctgctactgaagctgcctgtagatatccgtgataaaacatgataaacccttgttcatgatattcgtgttgttcggtatgtttgtcggaattgcaaaatggattcaggctgtgtttagatccaaactttggatccaaatgcagtcaatgaaggaagtgacatttcaaactaaaaaaaaaaaaaaaagggcgaccaaagagaggcgccaagcagacgtacgcgctgcatgcaagggcatag

SEQ ID NO: 90563 - DNA, 927 bp, Oryza sativa
  Clone ID: PAT_MRT4530_89220C.1
tcagtgaccatggttgaggtggtggaacatgaggtggtggtacgcacacccattcttccgggagtgaggatgcaagtgggagtagcgatcctcgacaccatcaccagaattctccaactcctccgcgccatagcccccgacggcaggaggaccccaatcggtctgggggctcggccctctccccgccacctggtggggggaggccacaccgcgccagggtgcggcgccgcctaacctacggcgacgaaggttcgccccagggcgcacttcaggcggtgggggctcttctgcggcaccccccctgtcaacccccactaccctctccttgtccgcaagaaggagggcccgtcgatcggccttgacatcgaagcggtcgacagcccaacgtcgtcgtggccctcggaaagccggaggcatcatgatgacctgtccattcccggtggggccgggtgcaaggccgtcgtggcgagtctccggaatgtccggtggcccccgaagttccgtcccaacctcaccgagaagtatgacggcagcatcaacccctttgagttcctccagatctacaccacaatcatcgtggtggcgggaggtgatgaccgagtcatggcgaattattttcccatggcccctaagggtcaggtgcgcggctggctcatgacccagcccccggcccatacggccgtttatgcattccgcagcgacgtgcggcacaatcgcatgctcgagaagatcacctccaaggagcccaagaccaccgcctagctcttcgagctggcggacaaggtggctcggaaggaagaggcgtgggcttggaactcctctggctatggtgcggcggcagtggctacccccgagccctcttcccactccaagcggtgggataagaggagaaagaggaagccggcccgctccaacgacgagggccat

SEQ ID NO: 90564 - DNA, 724 bp, Oryza sativa
  Clone ID: PAT_MRT4530_89221C.1
tcagaatctttcagtgcgccttcgttggataagccgccctctccctcccgctgtccacctccacctcacaggcacaccatccaggcttcgcttcctccaatccacgacaatggcgcccgcgtcgctgacgagattgaccaacccgttgccgtgcgcctctccatctccaaggtaaatgcggcacgcggagaagttctcctggatgtgttcttttctcggggtctgagtttgcttgctgttcttgggcgcgctctcgatcagatgccggcgccggccggggagatctccgccggcgagggcggcggcgtgcggggtggtttccaggaggagggcggtgtcggagatggcgattcttggcggcgccgccgcggccgcggcctcctgctgcgtcgatctcttcttcgcccacatgcctgcccgtgccgccacgctggagcctgatgtgatcaggtacagaaagctggacagtggagtgaagcttgaagctgcactctgtgatccagcacggttgaccagtttagcggcgagaatgattcgaggtctcaaagacgtcatcgttggaatgaagacaggaggtaagaggagagctctgatacctcctcaagtaggttacactgatgagagcttgcagcccataccagaagagttcggtccacggcgaagcctcctgtcacatgccaaggagcctctggtgtttgaggttcagctgctcaaggtcctctga

SEQ ID NO: 90565 - DNA, 1725 bp, Oryza sativa
  Clone ID: PAT_MRT4530_89222C.1
atggttgaggtggtggaacatgaggtggtggtacgcacacccattcttccgggagtgaggatgcaagtgggagtagcgatcctcgacaccatcaccagaattctccaactcctccgcgccatagcccccgacggcaggaggaccccaatcggggaaggcgcctcctcatctggagtgtcgcgcccctccgcgcgaggtggctcgccccccacgtccattcccggtggggccgggtgcaaggccgtcgtggcgagtctccggaatgtccggtggcccccgaagttccgtcccaacctcaccgagaagtatgacggcagcatcaacccctttgagttcctccagatctacaccacaatcatcgtggtggcgggaggtgatgaccgagtcatggcgaattattttcccatggcccctaagggtcaggtgcgcggctggctcatgacccagccccctgactctatccactcctgggaggactgtgctagcggttcatcacgaacttccagggcacatatccctgcccaggagtggaggcggacctgcacgctgtgcagcgaaaggacgacgagtcccttcgctcgtacatacagcgtttctgctaggtccacaacaccatcccctgcataccggcccatacggccgtttatgcattccgcagcgacgtgcggcacaatcgcatgctcgagaagatcacctccaaggagcccaagaccaccgcctagctcttcgagctggcggacaaggtggctcggaaggaagaggcgtgggcttggaactcctctggctatggtgcggcggcagtggctacccccgagccctcttcccactccaagcggtgggataagaggagaaagaggaagccggcccgctccaacgacgagggccatgtccttgccgcagacggtccttctcggaccccatgcaaggagaaggtcactagcgacaagccaagcatcaccactccccccggcgaaagccggtcagcggataagtggtgctcggtgcacaacacttatcggcacagccttgctgactgccgcacggtcaagaacttggccgagcggcgggtcggaggtgaagctcactttcgaccagagcgaccacccgacggtgctcacccgtggagggaagctggtcctcatggtctccccgaccatccacaacgtcaagatgaagcgcgtctcggtcgacgggggggctagcctcagcatcatctccccggtggccttccatgccctcaaggcctcggggatgaggcttcagccgtcgctgccaatcattgcggtgacaccagggcacacgtggcctttgggccacatcgagctcccagtcaccttcggcgactccaacaacttccgcattgagcggattgactttgatgtggcgaatctgaatttgccctataatgtggtcctgggaaggcccgcggttgtgaagttcatggccgccacccactacgcctaccttcagatgaagatgccgggccccaatggcccaatcaccatctctggcgatgtcaagatcgccttggcttgtgcggagcagtgtgctgacagcttggcggcggccaccgagccagtggaggccggcggattcccgaaggcctccgcatcccacgcctccaagaagcgcatcacctcgggcgataaggtgcccgtcaaggagccccttggcgatgatctgtccaagaccgccaagattggcggcaacttggacgccaaatag

SEQ ID NO: 90566 - DNA, 752 bp, Oryza sativa
  Clone ID: PAT_MRT4530_89223C.1
ccggccggtcaaaagaggaaaggcttgcggtggatacctaggtacccagagacgaggaagggcgtagcaagcgacgaaatgcttcggggagttgaaaataagctcaactcactctcgatcaaactagtagccagtactcctcgatctccttgggttaatcacctccttcgcttcagactttctcttcagctcccatcccatcatcgtcttgatcgcgatggcaacggtgacccgtgctcacctggagcagaggctcgccctggccaagcgctgctcgcgtgaggcgaacattgcaggggttaaggcggctgccgttgcgaccatcgcctccgccgttccaaccctggcgagcgtgaggatgctgccatgggcgaaggcgaacatcaacccgacggggcaggcgctgatcatctgcacggcggccgggatggcatacttcgtggccgccgacaagaagatcctctcgctggcgaggaggcactccttcgagaacgcaccggagcacctcaagaacacctccttccagggcgccggccgccctcaccctgccttcttcaggccatgaatttctcctaatcaactagctatagaaaaaaaaaatgctgcttgcattgctaggctagctgctgcttcagaaagtgtttgctgtgtacttggatcgatgtagtatactgtatgtctgtatctccagtttgtagtactaataaacaaatcttttgaactataaaaaaaaaaaaaaaaaatttgcggcc

SEQ ID NO: 90567 - DNA, 243 bp, Oryza sativa
  Clone ID: PAT_MRT4530_89224C.1
aaacccggccggacccacgcgtccggagcaaataaggatagatcttgttgagctgcatatatggccccctccgcaatggcgacgaccgtcactaccgtcgctcccttccatgagctcaagtccaccgtcggtatgcccgtctcccgcctctctggcatctccagtttcttcaacgttagctatgtccgtaggatcaggtgcattcaggtgtgtcctatctccgtcattaagaacttccattac

SEQ ID NO: 90568 - DNA, 771 bp, Oryza sativa
  Clone ID: PAT_MRT4530_89225C.1
aggatctcatctcatctcgctcagcactactgatccaaccagtaggcgattctctccacctcccagctacttcacttcaggactagtttcttctcagctccatcgatcttgctcgacaatgtcgacgacggtgacccgtgctcacctggagcagaggctcgccctcgccaagcgctgctcccgggaggcgaaccttgcaggggttaaggcggctgctgtcgcgaccatcgcctctgccgttccaaccctggcgagcgtgaggatgctgccatgggcgaaggccaacatcaacccgacggggcaggcgctgatcatctgcacggcggccgggatggcatacttcgtcgccgccgacaagaagatcctctcgctggccaggaggcactccttcgagaacgcacctgaacacctcaagaacacctccttccagggcaccggccgccctcaccctgccttcttcaggccctgatcaataattacaagaacacaacatatgctatattatatatacttctagctacctggctagctagctgcatatgatcagagtagtatctgtatcatgtagtagtagtagtagtagtaatacaatacaagtactacgcccctgcagagatcgaaccgtttacaacagctagctgctcatcctggcctcttgccattaggcattatctagccacacctgaatatgaatacatgcatgtactcctatcttgtactaataacttcatgtaacactgctgcagtaataatgttcagaaatcacaacac

SEQ ID NO: 90569 - DNA, 929 bp, Oryza sativa
  Clone ID: PAT_MRT4530_89226C.1
cggcacgagggcttcttcattccgctacatcgatctcttgggtcttggcttgcctgcctataaattcgcaggcccccatgcctctccccaatccaatccatccatctcccttgcttgccgctacactcgatctactctctcacacactcctctgatctctctctctctctctcgctagtcgattggcttgcctagctctctcaaactgctctagtgcagttcagcaaaaactaagtgactgaaactaatttacatggcaacggtgacccgtgcacacctggagcagaggctcgccctcgccaagcgctgctcgcgtgaggcaaacattgcaggggttaaggcggctgccgttgcgaccatcgcttctgcagttcccacctcttcattcatcagcagagctcatcagctggcgagcgtgaggatgctgccatgggcgaaggccaacatcaacccgacggggcaggcgctgatcatctgcacggcggccgggatggcatacttcgtcgccgccgacaagaagatcctctcgctggcgaggaggcactccttcgagaacgcacctgaacacctcaagaacacctccttccagggcaccggccgccctcaccctgccttcttcaggccctgaacaattagaacagcatatgcatgcatgaatctgaaacttgatcacagtatctagctctcgatcgatccctgtgtcatataataatcgatgtacgcccctgcagaaccatttagagctgcttctgtagagcagtggtgttagtactcatctctgtcgtatctgccattagccacctaattaaatacatgtactgctatcttgcactggggctcactgcatgtaacactactgcagagtgcatgcactcctcataatgttcagaaatcacaagtggtactactatatattccgaccactatag

SEQ ID NO: 90570 - DNA, 1749 bp, Oryza sativa
  Clone ID: PAT_MRT4530_89227C.1
atggcgcaggagggctccgaggcctccgtcgccagctcgccaccggcgccgccgcccccttcctcctcctcctcctccgccgccgccgcggcctcctggtggcgcgacatgcaccacccgtacggcgccgcgtcggcgccaagctggctgccaccgccatcggccacggcgccgcggtggcctccgacgatggcggcggcgcaccaacaccaccaccaccggacgtcgtcgtctggcgccgaggacgacctgtcggcgtccaacgccaccatcacctccttcaccaacacctccaccaccaaccactccggcctcagcatggactcctccggcgaggccgccgccgccgccgccgcagccgccgccgagagccacctcatctggaaccaagtactcatgggcgccgccggcggcgaggtcgggaggagcatgccggcggtgcacgacgcccacgacgacagcgagaacttcctcgagctgctcaactcgaggacgctcgcgccggagctcttcgccgagccgccggcgtgcgactacctcaagaagatggagtacggcggcggcggcggcggaggagggggaggctggccggagcaccagttcacggcggcggccgcgctggagaagcacctgagctccgccgccgccgctggttacggcggcgcgctggcgcaccaccaccacgccgcgggcgcgccggagcggctcacggccaacctctccgacctggtcagcaactggtccatcgcgccgcccaaccacggccaccacgtcggcggcgccgccgcatgcgataacccagcggtggccgcggccatggcagcagcccacggcggcgggaacgtgaagcagtccggcagcagcttccttgacagcggcgggggcggcggcggcgcgatgctgcagcaggagagcagcagcagcacgggcaccggcggcggcgggcaggacttcctgaggccgatggggcttgccgccgggtcgtcgtcgtacagctccatgctagggctgagcagcaggatgtacggcggcggcggcacggccaccatggacgtgccgtgggggagcagcaatgccggcgcggcgaggagcctgtcggacctgatatcgttcggcggaggcgcgatggacaagccgccgccgccgccaccgtcgtcagcgccggcgaggacgtcgtcggcggactacaagaagcagcaagggcagcaggagatctcgtccccagtgaagacgagcagcagcggcggtggcgggaaggaggggaagaagaagaggtcggaggaggcggcagggtcggaggggagcacgaagaagtccaagcatgaggccacctctcccacctcttctctcaaagattacaatgcatggggagggttggataggaaggagaaggcagatgcagaggttgacttgagaagcttcaacactccctcatggcgctactgccgtcgccaccttgaccaggttgctcgtgttctccgtaacgagccgcgtagtcacatcgccgtcgcctccatcctcctaccatggcaacctcaccaccgctgcgcaccagccatgtcatgctcgcaccacggcgtcgtccgcgccggccttccacagcccccatcggtcttccactatcgctgctcacgcgccactgcccgctcaccgctccggactcccgtagccctatcgtcttcggcttatgccaagttggataaagaagcatcacttggccttagtgagaagcagaccatggaaacatga

SEQ ID NO: 90571 - DNA, 1881 bp, Oryza sativa
  Clone ID: PAT_MRT4530_89228C.1
atggacggcggcggcgggggcgatccgggcggccgggtcggagaggccaaggcggatgccacacgcgctgcgaacaagcgaagggccccatcgccagccgggggtgggggagtcgaggccaagaggaggaggaaggacgccatgggctcgtcggtctccggcagcagatctggtggcggtgggggcaggaggctgcgacatggtcgaggtagaagagctcgtgccttcagacgcaagcttgaggaggaaaataagaattcaaataatagaccccgtgcctcaaatgtggttattgcttatacgcctaacctcattcggcggtatgggactctcttgagaaacatctcatttctgcttccttatgatggtcaaggaaaggcatatgcttgtccttcggacaaaatcaatgtgtttcttaaatggagcagatgcaacttttgtctcttctttgagtgggcagaaggtgatcagatgatgatttgtcatatgttcaatacattgaaagagattcacatatcgtttcttataaatccagcattcctagatgaaagtatggaagtgaaagtaacaaatcctttactttcattttcatccaattttgttgaagatgaaacttgggctcttgtgaaggagatgctaatgatgatgttttctccagttcaagaagatgagcgtgcagcttcagatctatatgtcttcacaaagagtagagattctgtttacttcaggattttcaagatcactagtatccctgcaggcgagagtgaaaattcactggttcttgatgaggttgggctaaatttttgcctcaagcttttagatgtccacggtgcttttgttggctcagactgtgatcaagctctggatggtcttcaaagtcagacaagaaatgagttgaaattatccccagatatatattactgtgtgccaaatgataaacttggatgctgcactctccactcagttgctttgaataatcagaactatttattttttttggagaatggcttggatttatcacattttgaaggtttctgtttgactttggaagaatttctcgagaggaattcttttctgaagataaagcatattgttgggtcaaggaatgatgaggaatgtaattttgttcgcgtccgtgctaaggcaattattcgttccatgctgtcacaccttgttaacttgttctctttggggaaatgtttgaggatgggaacagaccttctgagaaggaggaaaattcttttaaaaggatctgatgtcaagttctttcaacttgaagtgattgcatatgaggaggatgaagcaataaataatgtgctgcaggttgttgagttggttaaaagttgttttgttggggaaatgataccggctgatctgcaaggtgatctacatgatttaaaggaaaatcctttgaagagacttgaatcagtgatagacagcagctcattaatgtcagctaaagagaagaaaggattattggtcaatttgcacactgaatataaaaccaatattagtccagctattagcgaagatgatcgtgatagtttatttaagcacatcccgtatttggactgctggatgaacagaacggaagacaatgagtatctaaagctcgttgctaatttggattcaaaaaaagtggctttgaaagttaacaaggttggaacggataagagaaaaccatctaaaaatggtatcttacagtttgattttatgaggaattccgatgttcatatacctgaaaaggcattaaaggatggtatcaccccctttcgtttgtcatggacagattatattttaacttcccgctacccaacgtacttgcgtgccattcaaaaaagtttggaaccatacatgaagtcaagaaagaagttaaaatga

SEQ ID NO: 90572 - DNA, 523 bp, Oryza sativa
  Clone ID: PAT_MRT4530_89229C.1
ccggccgggctaattcctctctatacaggacatatctgggagaaaccttgcacatggtgttgagacaaacacaactgcagtcaaattcctgtagttcaaatgctgggattatgcatgggacttcttttgattttgtccttgtactcagaaagtgacagcgcaatcctatgcaaacgtatatgttcctacagctactgaggctaatgcatactctgctttcactgggcggctattacagcatatatgtggcttaaattttggcgaccagctaattttctatatgacaaagctacacttcttttattaatgacccgttcaacgcttcatgtgatggcgcatcaagctgactgccaatgcattaatatagtttaagcaggtgtgcatcagctacaacttgcagctatttaatggaggatcttttgatcagactgaagctcaagcccaaactctgttgacccttaacttgccatccatatgcggtatctaccctaactactatagtgctcccaggagcattgccact

SEQ ID NO: 90573 - DNA, 438 bp, Oryza sativa
  Clone ID: PAT_MRT4530_8922C.1
gtcgttgttacgtaggcaccacaggctaggcagaacgctctggcttgcttcggcaccacctgcactgcgacgatcctgctcctgatcctgggtcgggcggagaaggggtaccggatgctggagctcacgctggactacgcgagcgacctgaacaagggcactgtcttttcgcgcatgcatgggtacgccgctgtctacatgttcgggagcaacggcccgatgcacatgcacgggacccacgccgaccggagcggtgggaggaaccctgcgtggaacaccgcgctccacttacctgttgctgcctgctttgacacccgaggtctcgtccttcacgtacagctacgagcacggcgctacttcggagggcaccgagacgtcggtgacgtgatcgtgcccctagacgacctacacggcggtacgcacgacagaggtgagccg

SEQ ID NO: 90574 - DNA, 996 bp, Oryza sativa
  Clone ID: PAT_MRT4530_89230C.1
atggccttagacccgctctcccccatgttatttattttggtcatggatgtcttgaactcagtggtcatgcttctcttgaaggctgacaatgtggttatgttcctaaggccaacagtgaataacatcactatcatcaagcaactgttggatgtgttcggtcatgcatctgggctagtgactaatttgcaaaagagctcagtcactcctatccagtgcaaagaagaagatctagaaataatttccaaccttctctcttgtggagtaaaagagtttccctgcacctacctggggttgtctctcaatattaagaaatctagcaaagctaaactgcaattcttggtggataaggtggctgacaaccttcctacatggaaggcttccctcatgaacagagctgggagactcaccacggtttgtcgaccccctatgtacggtggtttggggattcacaacttggagctcatgaattgggtccttcgcattcggtggctttggttgcaaaagactgatggtgctcgggcttggcaaggattggaccttcaagttccaagcaatgctcatgtcatgttcaatatggccatggaaacaatggttgggaatggtcaatccatcttgttctggtcagaaagatggatacagggcaggactgcagaggtggccgctaatcttatcaatttagtccagaaaaaggatattaaaaaccatattgtggcacaggctttggaaaaccatagatggactacagaaatcagaggagccctccctgtccaagtcatcgtggagtatcttcacttgtgggacttggtggctgaagtggaattacaggatggcatctctgaccagtaccactggaagctggacaagactgctactgtcctccaaacagtggaaaatgagtgtatcatgtggtcgctagccagggcttctaggctaaaggagttaattgaaaggttggtaggcgctgatcctttcccattccttttttccttctcttaa

SEQ ID NO: 90575 - DNA, 252 bp, Oryza sativa
  Clone ID: PAT_MRT4530_89231C.1
atggagacaccagtcggcggtgatgacggcaagccggtggtgaagacgtggacgcccaacaacagtggcggggataccatggacgacggtgatgaaggcaagccaacggcgaggacaccattcggcggtggtgaaggtgaactagcgttgaagataatgacgcccatcaacggtggtgtgaccaaccgaccatgccagccgtcggagacaccagttggcggcagacgaggtggcttgtcggtgaagacgtag

SEQ ID NO: 90576 - DNA, 705 bp, Oryza sativa
  Clone ID: PAT_MRT4530_89232C.1
atgaacgcctttcggttcctcggggacatgacccacctcttctcggtcctcgtcctcctgctcaagatctacgccacgaaatcctgctcaggggtgtcgaggaagacgcaggagctgtacatgctggtgttcgtggcgaggtacatggacctgttcacggactacatctcgctctacaactcggtgatgaaggtggttttcatcaccagctcggcggcgatcgtgtggtgcatgcggcgccacccacaggtgcggcgcacgtacgacaaggatcaggacaccttccgccatgtggtgctcgtcgccgctgccttcgtgctcgcattgctcttcaacgagcggttcaccttccgcgagatctgctgggcattttcgatttacttggaggcagtggcaattctccctcagttagttttgctgcagagaagtagaaatgtggacaacttgactggacaatatgtattcttcctaggggcctaccgtgcattttacatcctaaactggatttaccgttacttcactgagggtcaccacagcagatggatcccttggattgctggtttggtccaaacagctctttatgcggatttcttctactactatttcttaagctctattacacttggtgtaaacaaacagtgtgatttccggtgtcttgtaaaaaccaatgcactccaaactactccgaaataccagaaatattga

SEQ ID NO: 90577 - DNA, 1298 bp, Oryza sativa
  Clone ID: PAT_MRT4530_89233C.1
aactagtggctagccccgccgcatctggagctctaaaacccaaaccctagccactgcgccgccgccgtcgccttcgccgccggcccgccgccgccgcttcagccatgaacgcctttcggttcctcggggacatgacccacctcttctcggtcctcgtcctcctgctcaagatctacgccacgaaatcctgctcaggggtgtcgaggaagacgcaggagctgtacatgctggtgttcgtggcgaggtacatggacctgttcacggactacatctcgctctacaactcggtgatgaaggtggttttcatcaccagctcggcggcgatcgtgtggtgcatgcggcgccacccacaggtgcggcgcacgtacgacaaggatcaggacaccttccgccatgtggtgctcgtcgccgctgccttcgtgctcgcattgctcttcaacgagcggttcaccttccgcgagatctgctgggcattttcgatttacttggaggcagtggcaattctccctcagttagttttgctgcagagaagtagaaatgtggacaacttgactggacaatatgtattcttcctaggggcctaccgtgcattttacatcctaaactggatttaccgttacttcactgagggtcaccacagcagatggatcccttggattgctggtttggtccaaacagctctttatgcggatttcttctactactatttcttaagttggaagaacaatgtgaagcttgagttgcctgcttgatagttcttcgccacgccagaaaatgtgcacatcacatgagaattatcgagattagttgatgctggcagagacttggtaatgaagtgggcagttgcaatttgtactgttgactatgaaaattgatgatgttcatgtgatggtttcccttggcaaaggctattacgtttcagaagctaacagttgctactgcacagaagtagactagttcctttttggacctcatactgagatggaaaatcacacccaattcatttggcttgttgtttgcagctctattacacttggtgtaaacaaacagtgtgatttccggtgtcttgtaaaaaccaatgcactccaaactactccgaaataccagaaatattgattgtgcttcctggatcctatcatcactgcttcagcatttgcctgtggaacagatcaactgttcaattttagcttttcaatcgtgggagttgtcatgtgatgattaaactactgaattataatctgattgtcggaaaaaaaaaaaaaaaaaaaaaaaaaaaaaaaaaaaaaaaaaaaaaaaaa

SEQ ID NO: 90578 - DNA, 380 bp, Oryza sativa
  Clone ID: PAT_MRT4530_89234C.1
ttcccgtttccacccgtctttctccaacccggagccgagctagagctccacctgcgccgccgccgccgccgcctccggcgaggccccaccgccacagatccccccgcgacggcgctgcgccggctgctgtacgccgcagagcgccgtcactccgccgccgcggcggcggtagcggggcccggcaatgcgcgcgaggcatccatcgcggtcgtcgccgtggggcccggcgtcatcgaacccgacgcggacccggaccagcccccaatgatggtggacgaccgcatcgacgaggccgttaacgccaggctccgtcagttcttgcagccggacccccgcttgctccggtacgcgagaccagtccccgtccacgccgaccacac

SEQ ID NO: 90579 - DNA, 649 bp, Oryza sativa
  Clone ID: PAT_MRT4530_89235C.1
aacaattagattttattactctatgagatatctttaagagggattttaccgcttctgcgcttaaaaaaaatctttgtgctgcaaaagattttctgtgggattgtaaacctcctaagagcgatatggtggtatgttattacgaattaatttagaaccttttaataatggcttaattgatgagggtttttttttatataaaattttatttttgtaataaattatataagtataaatgagctttagtcttggtatatgggtcgacacaaaataaatctaaggaacaatttcttactaaataaactaggatgtgtagtcatgaaaacttaccaattattatttgggtgactttaatatattacacaacagaggaaaagaataatgataattttgataatagatgacctttttttaatgctattattgatggtctgagcctttctggtagaaattatgcccgggcaaataatttatcattgccaacttataaaaaaaatagatagagtgctaatgtctagtcctttactcttaaatacaaattcatcttctgtttataatagtcataagaattttaagtttaagttaggttggctattaagtcggtctgacattgattatctgataagtcgatctctaagttttcaggagccta

SEQ ID NO: 90580 - DNA, 317 bp, Oryza sativa
  Clone ID: PAT_MRT4530_89236C.1
aaaaataataaacctcaaaagatatcttgaacattgtaataattcctagccagttacactggtgtcactgaacttgcgcggaggaatagaaaaagaattgctattgaaactgtaaatactatatttttaaaaattttaaggggggggcctttttaaggataccaaattttcttccccgttcttgcaaaataatattttttttttgggtgtccttaaattaaattccctggcccttgttttaaaaacttggaattggaaaaaccttggggttcccaaaataaattcttttgaaaaaaatttcttttttcacaattggg

SEQ ID NO: 90581 - DNA, 264 bp, Oryza sativa
  Clone ID: PAT_MRT4530_89237C.1
atgtcgtcgatgaagactaacacccctttgcgcaaaaatggagcaaatataatgttcatcaacccttggaatgttgctggtgcaccagcccccgccaactcatccaacaattcatcaatgattggcaagggcgataaggacgaagattcactagctgagctcctgacaacaaagggatactatgatcaaacactcgagaaggaggcaatccgctggcatagcttgctctactccctgggattcaacaacacacaattcaactga

SEQ ID NO: 90582 - DNA, 134 bp, Oryza sativa
  Clone ID: PAT_MRT4530_89238C.1
tgcaaacccatcgtatcaaccaccaaatcgaaggcacgttggtgagcaccaacagcttcattgggcatggcttgggggctcgtttttggcgggaaccttcttgccggttattgaagggcaccgttcggggaagc

SEQ ID NO: 90583 - DNA, 2391 bp, Oryza sativa
  Clone ID: PAT_MRT4530_89239C.1
atggccgccatggttggagcacgcagggccctcctagctgcccgttactcgcctcgcggcgcgctcgcttcgcccgtccgtcgcgtggattcgccgcccagtcttccagctgacagaggttgtctgtggcctttggttccacatcgaggcgctggcaatttcgcatcagaacagatcgatggggactatcaccgcgaatggggagcacgtaatgatgggaactacagggagccccatcgaactgatagtctcagccaccaagttcaggcaaatctcccttcaactgattcctctgtaggagctgatagaattagaggtgtgagtggtgatggaagtgtcaatgctaattacagacgcaatcctgggcaaccggagtttccaaatcgtcatgagccgtacagtagtgcaagggtgaataatggagcatctggatataatgacaggcaaccctatggcagtgccaatgcacagtacagaagcaattctgcgcagccttcccaaacaggtggaccatatggatttgcgaatcgtaatgagccatatactagtgcaagagtgaattatgaagcacctggatacaatgacaagcaaccttatggtggtggtactacatacaaccagcaaatcgctaatggggatctaccaaattcccagtatagccgcagacaaggtaataatagtggcgtttctggatatggtacagggcatcattatcatggatctgacacatacagatctggctacaacacccaaaataaccagcaggcatatgatagtaggcagtatggatatggcccttcaggacaatcatatcaagaatcaactggaaatgatcagcaagtctttcaacaacaggaagttgatcaaagatctgctggcaattatgcaaataggcctggttctacctcagaatatccaaatccaagtagattcaataaggaacatgctgcaaattttcagcaaggctacaatggtggtattggacataatgtttcacatgcacctcagagcccttacgtcagtagcaaaattgatgcacaaggtaattttccagggcaacccatgaatgtaaacagatctgtgcaacacaatactcatgcacctgcactgtatcaagatggcatataccgcaatccactaactgatagcccgtcaattgatgggttaccttctggagcatctgatgtaaccagtggagaatccaaagttactgttgaagagatggataagttatgtgaagatggcaaagtaaaagaagctgtggaacttctggctttgctacaggaagaaggaactgtagtgcatgctcctcaatattttaaattgatgcaagcatgtggtgatgcaacttctcttgcagaagcaagaaaaatacataatcaaatatctcaatcagcacttgctgttgacacagatattaacaacaaaattttggagatgtatgctaaatgtgggtcaatggaagatgcgaagaagctattcaatactatagctcaacgtaatttggcatcatggaacactataatctcaggttttgtgtataatggtcttggtgacgaagcaactgatttttttgatcagtttaagcagacaggtaataagccagattcaaccatgttcacacatgttttcttggcatgtggaattttgggttctgttgatgaggggatgttgcattttgaatcaatgcaaaaggactttggtgtaactcccaccatggaacattatgtcagcattgttaatatgcttgggcagtctggctatattgatgaagcttgtgaatttgttgaacaaatgcctgtggaaccgagcattgatgtctgggaaagtttgatgaatatgtgtcgactaaatggctttttggagctaggaaatcgctgtgctcaaattgtagagcgattggattcttctaggctaaatgaccagtctaaaattggtcttttccctgttgatgcttcagaacttgcaaaggagaaagaaagaaaaaaggctaatgctgttgaagctaggagcaaagttcatgaatacagagcaggagataggtcccatcctgaacatcttaagatctatgaagagctgagatacttagcagctcatatgaaagaggctggctatattgcagatactcgatttgtgcttcatgatgttgatcaagaaactaaagaggatgctttactagctcatagtgagaggctagctgtcagttatggtcttataactagtgctgctcggtcacctattcgggttataaagaatctacgctcatgtggagattgtcatacagctttgaagataatctctaaactcgttggtcgtttgatcattgcaagggatgcaaagagatttcaccattttgagaatggtgtatgctcttgcaaagactattggtaa

SEQ ID NO: 90584 - DNA, 2244 bp, Oryza sativa
  Clone ID: PAT_MRT4530_8923C.1
tcatagggccctccagtccaggccctttgggaatgctggataccctgcacaagtgtggtatgactcatatccactagcagggtttggatcatccaagttgacaatgtagtggaatatgatcatgtgctttatgcgcatgacaaacgcgtcatgacgaaatcaggattttttgcgtcctagcctgtgttgagttggcctagagcctacgatgagcaatttcgcatcttgcgaaatactcagaagatgctcgttgcttacttcggaacatcctccagagtacataaggcgctcctgtggaggtcagagtgaccctagtcctgtcaataggtggaatgacgccactttagtaacagctcccccaaatttcaaggagctagtctttccattggctgatcaagcagagcttgtgttctcaaccttgcccggttttccctccaccgcgtggatggcaaactgggttagcctccaatcagaattaccgccgtgacaaattgccacgccatgattgatcttctgatcggaggcggcagccctgataccggcctcgcacccccggaccttcggcaccgagtggcagtagtacacctgatactggcacaagatcgggccacaccatccggaccggctcaccttgccggcatcaacaccggtaacattgccgaccgtgatttgcagccgagttgcccccgcggaggccgtcctgcgcacaaccatgtcattgcctagcatctccacggcaaagtccacaatgtcctcagctgaggttgcacaccgcttggtctcaccccggctcggcgctcgctcgcactcagccaccgtggacgtgaccgccttccccattgcagtgtccaacggcaccccgaacacctccgacaccgcattcggcttgaatggtatcttcttggcaatgtcccttggtaggaatgccctgggtggcatcttgtccttgatgtcaggcatcggcattgtgttcccggacaccagctccgtctccctaaagaacttccctggctccggcgaccacttcaaatgctggtggccggacgacaccgcctccaatgacatcgtcgtcgccgcgtctgccgacgacgtgttgtggtactccttgaaatcgacgccggacttggcataccccttgaatgaattgttgctcccggcatactccttgaagccaatgtggtgattggggttgctcccttcgccgtagcctttgaaggtgacggtgccggggttgaatgagccgccatagttctggaactcggcggcgttgccgttggcgcccttggcgtaggaggcgaagctgtcgtcgccgacattggactcggagcggtagcccttgaaggtgtcgacgccggcattgccgccggcgccgtagctccggaaggtgttgtcggggacgttcccctctttgccgtaggcggtgaaggtgtcggtggcgccgttgccggactcgccgtagttggtgaagccggaggcgatgacgttggagtcgttgccgtaggtggtgaaggtctccctgaggccgttgccgttcttgccgtagccggcgaaggtgttcgacccgtggttggcctcctgggagtaggaggtgaactcgcggcggcggccgttggcctcggcgtcgtagttggtgaaggtggagtccggcacgttggtgtcggcggcgtagccggagaatgagcccgacccgcccgtggcggcgccggcgtagaaggtaaagttgccggtgaccacgttcccctccgcctcgtagctggcgaacgtgtccaccctccgcgtcgagtcgcggccgtaccgccggaacgagtcgccgacgacgttgaggtcgggggagtaggcgctgaacccgtcggcgccgcccacgccgccgctgccgtagttggtgaagttggcattactataccccttaaacggcccaccacctccgccgccgccgacggcgagggaggcggccgtctcggtgtcggaggcggaggggcagagcagggcggccctggcgcagagcggcgggagaagccgcgggagcgcggctgcgaaggaggcggcgtcggcggcctggagcggggagagcttggcgacgaagaaggccgggtgggggcggttgttgggcacccgccggttccagtaccggatgaacgccgccttcgccgtgaacgggttcaccctggcaccgtcgccgccggcggcattgcagacgacgacgaggaggaggaggaggagggggaggtggggaggagacgccat

SEQ ID NO: 90585 - DNA, 2177 bp, Oryza sativa
  Clone ID: PAT_MRT4530_89240C.1
atgtcgatcagtatcgaaaacgacgtcaacgacaactgcgacaggaatagcaatggagggaacggcaacggctcaatcgggaacgacaacatcaacaccacaacctctgaatccagagcgttctgcggcttctccttcctccggccctatcgcgcggtgcggtatctccgggatttgcaaccatacatcctctcctccattcaaagcgccagtcgtgtaccaccgcccgaggcacgtagaaccacgccaagatgcgtgaacccccgcttgcgtcgcgtcgacatgcgcagcggcgcccatgctccccatgtcgttgtcccgctccggctggcgatacacctagcccccagcctccccgcctgctccttcggccggtctcggcctcccccttcgttgatctccaacctgagcaccgtcgaccacgccgacgccggcgacgcctcgcccgcgtacaagagagaaaaagaagcaatgggcatcggcatcggcatcggcatcggcatcggcatcggcaccggcaccggcgcggcgctaccattcggcgaggcctcgccgtggagcctgctcggcggcgcggtggccgcgctgctgctggtctgggccgcgcagatgctggagtgggcctggctggccccgcggcggatggaacgggccctcagggcccagggcctgaggggcacccagtaccgcttcctccatggcgacctcaccgaggacctgcggctcgtcacggcggcccgctccaagcccgtgcccatggaccggccccacgacttcatcccgcgcgtcgcgcctctgcttcaccgtgccttggaggaacacggtgtctttgtaccatgttctgatctctgtgcgcatgaaaatacagaaggccacgaagaacggcgaagccagcaaggacgatctgctcggcttgctcctacaatccaacatggattattacagcgacgaggacggcaaatccagcaaggggatgaccgtcgaggagatcatcgacgaatgcaagctgttctacttcgccgggatggagacaaccgccgtgttgctcacctggacaatggttgccctgagcatgcacccggagtggcaggatcgcgccagggaggagattctgcaggtctttgggcgaaacaaacctgatatcaatggcgttagccgcctgaaagtcgtgaccatggtgctgcacgaggtgctgcgcctgtacccgccggtggtgatgatgaaccgccgcacgtacaaggagatcgagctcggcggcgtcaggtacccggcgggcgtgatgctgtcgctgcccgtgctgttcatccaccgcgacgccgccgcgtgggggcacgacgccggcgagttcgacccggggaggttcgcggagggcgtggccagggcgtgcaaggaccccggcgccggcgcgttcttcccgttcagctggggcccgcgcatctgcatcggccagaacttcgcgctgctggaggccaaggtggcgctcggcatgatcctgcagcgcttcgcgttccagctgtcccccgcgtacgcgcacgcgccctacaccgtgctgacgctgcacccgcagcacggcgttccgaacacatttgctgataaacactggaagctccatgttccgggcatccggcactctgaaatctcaatctctgatatgaaagcagaacactatttgctgacaaccgctgctgcagttccttgcatagttgaagtgtatgagtatccgtactccatatcacgggcaatcctcgaatatctcaatctgtggcctgcaatccactccttggatgacctctccaaggagcccgattccctcatctggtggtgggagtcttcaggggaatactcgtcatattccgcctacctgtctctgtttgtgggaactggaaagggtgcagttctaggacaagccgatttggaggtcgttggcgcctcctcgatggcgttacttcatgtggttggtggatcccaattgcctgccattcaatgaagcatccttccacttgtggctttgtgataaccgcatgaaggttgacaaggctcaccgacggggattcgacaccatcgcagccctggttgcctggacgatttggaaggagaggaataacagggttttcaatcagcatcacaagccctgggtcgaagtggcaaagggtatggctgctgatgctgagctatga

SEQ ID NO: 90586 - DNA, 749 bp, Oryza sativa
  Clone ID: PAT_MRT4530_89241C.1
gtcagcaaatagtgttctgctttcatatcagagattgagatttcagagtgccggatgcccggaacatggagcttccagtgtttatcagcaaatgtgttctgctttgatatcagagattcagaatgccggatgcacggatctatacagacgatttcatttcatttcatctttttttctttccctaacccgacgatcagagtcggcgcagcctaaccggaacgccgtgctgcgggtgcagcgtcagcacggtgtagggcgcgtgcgcgtacgccggcgacagctcgaacgcgaagcgctgcaggatcatgccgagcgccaccttggcctccagcagcgcgaagttctggccgatgcagatgcgcgggccccagctgaacgggaagaacgcgccggcgccggggtccttgcacgccctggccacgccctccgcgaacctccccgggtcgaactcgccggcgtcgtgcccccacgcggcggcgtcgcggtggatgaacagcacgggcagcgacagcatcacgcccgccgggtacctgacgccgccgagctcgatctccttgtacgtgcggcggttcatcatcaccaccggcgggtacaggcgcagcacctcgtgcagcaccatggtcacgactttcaggcggctaacgccattgatatcaaggtttgtttcgcccaaagacctgcagaatctcctccctggcgcgatcctgccactccgggtgcatgctcagggcaccattgtccaggtgagc

SEQ ID NO: 90587 - DNA, 1356 bp, Oryza sativa
  Clone ID: PAT_MRT4530_89242C.1
atgcggatcgaggagcttccgggtgattccggcggaggaggtggggatggtggtggtggtggtggcggcggggcgctgctgcagctgcgtcgtggggcggcggcggcggcggcggcggtggaggaggagggtggggtggtgatgcgtgtggctttcgacgcgaagcgcgcggcggtgggcgtcggcgcgcggatgctgttctacccgacgctggtgtacaacgtcgtcaggaaccgattcgagccgcacttccactggtgggatcaggtcgacgagcatgttctgctcggtgctgttcctttccccagcgatgttctacggctgaaggagcttggagtttgcggtgttgtgacactgaatgaatcctacgagaggctggttcccaggtgcctgtatgaggctcatggaattgaaaacctggtgttaccaactagagattatctttatgcaccatcatttgagaacctttgccgggctgctgacttcatccacagaaatgctttgtgtgggaagttgacatatgttcactgcaaagctggacgtggacggagcacaacagttgttctttgctacttggtgcaatacaaacaaatgactccggctgaagcttatgaacatgttcgcttgcgcaggccaagggtgctattagcttctgcacagcggcaggctgttgagcaattctaccagcttagggtgaagaaatctgggaaatccatttgcctggacagcccaataatgaaaccaccgctgttccttgccactcgcaacctcattgcatttgacgagaagacattcgtcatggtttccaaatcggacctcgaagggtatgatgcggataccttggccgttaacgtgggcagtggcttgtgggagataagcctagtataccgcgtgcagtttgcgagccaggcggcctttgcagggttctcatacctgtgggtacgatgccgtgccccccgtaagaacaaggaggcactccctgtccctgagagtaacaatagcgtggggagcgagagctgctcccttgaggcagagcaactcgccaaacctcacccatgtttgcttcaaggtgtcatggttaatccatgatcgttcgacttgcattcgccgcgacctttcttttaactttttgtctggcatgtcatccgtatatattaaagccaagaacatgcaaatgcaatgtgaagtccttaactccagtctcctcagcaagcaaagagtgcagttgcttgggtatgtacatatctgtaataagttgacttctacatgtacagaggtaaatgacaaggtatctcaaaacaaaaaaaaaaaaaaaaaaaaaaaaaaaaaaaaaaaaaaaaaaaaaaaaaaaaaaaa

SEQ ID NO: 90588 - DNA, 1340 bp, Oryza sativa
  Clone ID: PAT_MRT4530_89243C.1
cgccgcacggagaagtcccgagaccggcgccgccaggaccgccacccacctctgcctccgccctccaaaccctagctccggcgatggccccgaagcgccccactccgccgccgccgccgcctccggttgcctcctcagaggaaaccgcctccggctcggactcggacgagtcggaggaggaggaggaggagagtccccttgctcagcccgcacccgtggtctctaacaagggcgcggagtccgattcttccggggaggaggaatcggaggaggaggaggaggaggacttggtgcgctcctccgctaccaagagcagggatccaccgcaggagaatcgcgaggaggatgattcgtccgatgaggaagaggacgagtcgtccgaatccgagaaggcggaggcgccgccgccgccgccgccgaatccggctccgaagcagggggcggaggggaatggcccgaaggtctcgtcgcccaagaggcaggccttccaccgcatctggtcgaccgaggacgaggtgcgcatcctcgaggcgctcgcggcgcaccgccgggagcacgggtcgctgccacagaccgacgcgctcatcgccaccctcgccggcagcctcgacaacactggctacggccgcaaggagctccaggggaaggtcagcactctcaagcgccgttacgaatccaccgctaagaagaagggcgatctcccaagcaagggccatgaccgccggctctatgacctctccaagagcgtctggggcagcgaggcggcagcggcggcggtgaacggcaccaccaccgcgccgagggagttcggcgagatgtgcgagctgtacccgcacctcgctgaggaggtcaagttgctggaggcggcacaccctggcttgttcaagagggacttcgggaagctcgatgacgacaaggcgcatgcgctggacatgaagatcaagaagcagaggattgccgagatttcggtggtgctgcgccgtggcgacctgaccaaggaggtgaccaaggtgctcgctgagctggtcgagtgactaggtgagctgaactgaagtgaacagtagtagctcggcgttccttaccatggcataagaaagtgtacctggtcattacctgcaaactatatcgtgaacaggcattacctgcaaaattttgcttcttagtgatggagttggatgttctatgttcttgtctaggcaattcagtcagcgtctcttctcagttcagatagatcgataggatgtagtataaaacattgaaatttcgtttttggtttgtcttatcattccagacagtgatagaatgtagcaagactgaaatcggtcatcgaatcagtcctg

SEQ ID NO: 90589 - DNA, 1668 bp, Oryza sativa
  unsure (1)..(1668): unsure at all n locations
  Clone ID: PAT_MRT4530_89244C.1
ttttttttnttttttttttttttttttttttcccnccaaatcccaactttccattacatcacatcacatccaaaactttcctacgcacatataactcctaactttttttttccaaactatcaacttcttcccaaacttttcccaaacacgacctaaaccaggcctaggtctgnttctgatcagttcagcatatcacattctggactctggagtatagcagagagaatttcactgcatcggttcatccattcgcatgtcttttcacgatccttgtacctgtccggattcatgtcaggtgtatttgcctgnaattgccagcttgaagcttccaacttctcctttttttttttcttcgtgtgtttatgagctcagggattcatgcatttttagagtttcagaaatcagaactgaaattaaggacgacgattacaaaagggtcatcacaaagaggatgccagcaagccactgactttacaggattttttctcacgcatcacaaaccaacgaacgatgcgatcgacgaagaaccatccacccaaacgatcactactggctcaggagcagcatcgcctccggccgctgctgcccgaagccgtagaacgggtggtggtagtggtgcggctcctccgccgccgcctcggccttcgcctcggccatcgacaccaccagcaggttctccttgtcgccgtcgtccacgcaggcctccctcctccacctgccctcgtaccgcgagttgctccggccgtagcactggtgctccatcgcccccgcgcggagggctgccgccgccgaccccgacgcatgcgcgctgctgaggttgaagctgccgaatcccttgatctcgtgcgctatcttgcgcgcacgctcacgctcatcctccaggaaggggccccgctccagcagcctcagcacgcgctccgacttgctcttcaccgtcatcccccagttgaaaccttactcgtcgatgtgctggaaggagaccatctgctcgatgacctcccgatccctctggaactccaacgcgacgctacgggggccgtgcgtcaggaggtgctcgaggaggaggagggccttgtacgcctcacgccactgccgcctgtcgaacctcgcgaacctcttgtggaggatgtcggagatcctgacgtactcgtcgatctcgaacgcctgccgcgcgatgaggctcatcgtcttcacgttcggcggcgatgcgtccccgctcgtcgcctcctccgtcatcagctgcgtcggggtaacatcggtgagcgcgagccgcgcggagcggatcttgtcggtgaggtaggacgaggcctgccgcctgagctcgtggaagctgaagggcgaggacgcgtccatggccgccgcgtactgcgcgcagaatcccgcacatccgccaagaggcgacggatatagcaagtgcccctgcttcgtcacccgcacgcagctactgccacgcgcatcgacgcgtccgtccgcccgcctcgccggccagcaaccactccgcaccggagcgcgcggtacgaacagagctcgctcgcagggggcgcaaccactccacaaatccgctagtgatgcatgggatgggatgggagacagcgacggcgagcggtggaatggcttgtgtgcttggactggacgagcttatttggaggggaaagaagtgcacacccc

SEQ ID NO: 90590 - DNA, 343 bp, Oryza sativa
  Clone ID: PAT_MRT4530_89245C.1
agtttgcccctctgcctcatgtacctcctgcggttgatcacctcctcccatcaggaaatgagagacgtttggcttgcctggaacagtgcgccttgtggaagtaatcggtggtttttgatgccgccggcgccggtgcggatgaagatgtggcgggcgcccaggcttgttggcagggcactggtcagctacggcttgcgctggtgcccggcccggctgcagcacacgcgccagttgtcgcagcgaaacggtgaagatatgtccgccatccttgctgcacgcgccactgatgcctcgccgcggcgcgccaaggttggacacgtcagtgctcgtggcggcctccacg

SEQ ID NO: 90591 - DNA, 1696 bp, Oryza sativa
  Clone ID: PAT_MRT4530_89246C.1
ccgggctgcaggaatcggcacgaggctctcccccccctcttcttccccaactcgccgccgtcctgcccgcctccaccctttcgcctcctcgttccccgcacccaaaccctaatcctagccgccgctgccgctgccgctgccgccgccatggccagcagcaacgtctccacggtctatatctccgtcatcgacgacgtcatctccaaggtccgcgacgacttcatctcgtacggcgtcggcgacgctgtcctcaacgagctccaggcgctctgggagatgaagatgctgcactgcggcgcaatctccgggaccatcgaccgctccaaggcggctcccgcgccgtccgcaggcacccccggcgctggaaccaccccgccggtacacgacctaaacgtgccctacgaggccacctcggaggagtacgccacccccacagcggacatgctgttccccccgacgccgctacaaaccccgatccagacccctcttccaggaacagatgcagggatgtacaacattcccactgggccttcagactatgccccttccccgatcagtgacgtgaggaatggcatggccatgaatggagctgatccaaagactggtcgcccgagtccctacatgcctccaccctctccctggatgactcagaggccgctgggcgttgatgtgaatgtcgcttatgtggagaaccgtgaggacccagataggaccggacagcctccgcaactaactaaggattttctaatgatgtcctctgggaaacgcaagagggatgaatatcctggtcagctcccttctggttcttttgtgccacaacaagatggaagtgcagatcagatagttgaatttgttgtctcaaaggacaacgcacaacaactttggagttccattgtgaacaagcaaggaacagcaacaaaagaatcttccacaaaggaaacaataattgctccaacgattcctcaacgggatgggatggatgactataatgatccattttacttccaaggagttccaactgaggattacaatacccctggagaatcgtcggaataccgagctcccacaccggctgttggaacaccaaaaccgagaaatgatgtaggcgatgatgatgagcctccgcttaatgaagatgacgatgatgatgatgagttagatgaccttgagcaaggggaggatgagcctaacacacagcaccttgtcctcgcacagtttgacaaagtgacaaggacaaagaaccgctggaaatgcactttgaaggatggaatcatgcatttaaatggccgagatgttctattcaacaaggctaccggcgaatttgatttttgaattttgtgacaaagaggagctattttagaagctgctgtatcgacatatctttgtctttgacataagagtggggaatgacaaaagcactggtggggggtgggtttgttcctgtggaggctttgctctacccagtgggtttgttaccgtaactgttatcgctgtaaaaaaaaatgctacagttgggactgttgtagacattttcctgagatggttatcttaaagttggcggaggattaccttgtctgatttgtgttatctgtttcaatttctgtaagatggtttaaagaagtaaattttctgttaccgcaacatagccaaatccttctgaatagacggcctcaaagagctgttgttcgattgatct

SEQ ID NO: 90592 - DNA, 406 bp, Oryza sativa
  unsure (1)..(406): unsure at all n locations
  Clone ID: PAT_MRT4530_89247C.1
ctggatgaaaaggggtgggacgcaccacaagtgtgtgggaagtgttggatgactgtgacctgcaagatgggaagtgaaaacgagtgaggcacaaaggaacaccaaaccatgagcatggatcgcaagatgttgcagcgacaatgcaagattttgggctgacttgggtgaaatttggggcgtccttgcaaaatgctganggatcccccactgtggtcacaagaattgactggttgtggtgctggatggtgatgaaangccacccaatgtgtgttgctgaccaaaagatggggcttctcctgacaantagcctgctagtttttaagaangtaatgaagtcagttttgacgcagataacgtttactcagaatttatgnggaccggangacccgtaaaaaaaaaaaaaaaa

SEQ ID NO: 90593 - DNA, 531 bp, Oryza sativa
  Clone ID: PAT_MRT4530_89248C.1
catcatgcatgggcgaccgtggaggccgccacgagcactgacgtgtccaaccttggcgcgccgcggcgaggcatcagtggcgcgtgcagcctgagggcgtggtgtcgaggcatatacgtacgtatatccggatcggacagacaaggatggcggacatatcttcaccctgattatcgaccatcgccgacttcagcgaccagtacacgcactaacaggatcgacgacaagctatctaacaacgacgacgggtggctcgagtacgtttcgctgcgacaactggcgcgtgtgctgcagccgggccgggcaccagcgcaagccgtagctgaccagtgccctgccaacaagcctgggcgcccgccacatcttcatccgcaccggcgccggcggcatcaaaaaccaccgattacttccacaaggcgcactgttccaggcaagccaaacgtctctcatttccttaatttgcatattatttcttatactctcaagctagaacatgcagcatggctattatttatcacgctaatacactga

SEQ ID NO: 90594 - DNA, 5373 bp, Oryza sativa
  Clone ID: PAT_MRT4530_89249C.1
atgccccccacgaggcccaagcggcggcgcggcggctccgcgcgatcccgcggccggaagaagcagaagcgcctcgacgccatccacgatgtcgcgccggtatccgcccctcccgccggagccgccgtcgtcgtcggcggcggcggcgagagcgaggattccgacgcggagggcccccgacggagcacgcgggtgcgccgcgcgccggccctgctcgacacctcgccgctcccctccccgcgccgtaagagggcgcgcggcggcggcggcggcggggtggccgggtcgagcggcgggagctcgcggaggagaagcagaggtagggcgaggggcgaggcgggggttgcccgcgagattggcgaggaagaggaggaggaggaagacgacgaggcggggaacgtggtgtggcgctctcggctgcgggatagggtcaaggggaaggctaagctggataagcgagttaggagcctctggttcgacgaggactacgaggtggagctgaaggaggaggaggaggtggtggtggaggaggaggaggaggatgaggaggagggggatgaggaggaggaggaggagcaggttaggacattggtggtggaccttcgggagggagctgaggaagagacaatgggcgagggaagtgggagcttgccaatgcgagggagggaagtgatggatagggaaatcaatctaaccatcgatttgaatgtggaagaacatgaggctgtcgagggtgtcaatgtggtggaagaggaagatggggaaaaaggaggcgaagcggatgaggagaaaggagatgcgattggtcctggaaatgatctacacgaaggcaagcatgaggaggtaggggacgaggagggtttacatgagaaggagagaactgaagagctgggatcagcagtactagaagggcgaaatggtgatgagctaccttgcaatgagaataatgctgaggatggcactggcagttcacatgaacacgagcatcttcttgtgcaaaatgagcagactgtggaagagagcaacctttgtgttgagcagcaaatggaactggatggttctagtcctagtgagcaattgaaagaggttcagcaggatgtacagacaggtggtgcctcaaatgtagtactgcccgaggaggccccaaaggaaggagtccgcaaatttccagtttcggaagaaaaacagggtaccatggagattaaagaagggagacgttgtgggctctgtggtggagggactgatggaagaccacctaaggttgcattacatgatacagttgacagtgataatgaagcctatgagggggctttgccttcagaggatccaaactatgatatgtgggacgggttcggtgatgatcctgggtggcttggaaggttattgggtccaatacatgatcagtttggcattgctcgtgtctgggttcatcagaattgtgcagtttggagtcctgaggtttactttgctggtttgggctgcctaaaaaatgtaagagcagcactttgccgtggaaggcttttgaagtgcagccgatgtggcagacctggtgcaactattgggtgtcgagttgatcgatgtccgaaaacctaccatttgccttgtagtcgagcagaagcctgtatatttgatcaccggatgtttcttatagcctgcaatgatcatcgacattacttccaacctcaaggagataaatatgttgaactgctcagaaaaatgaagataaaaaagatgaaggcagatatcagaaaggtgtcacatgatgcatggagaaaggacatagaggccgaggaaaaatggttagagaactgtggagaagatgaggaattcttgaaacgtgaggggaagaggctaaacagagatctttcgagaattgcacctgtttacataggaggcacttctgaaaatgaaaaggcgtactgtggctgggagtctgttgctgggctcagtaacgttattcagagcatgaaggaagtggtgatactgcctcttctgtatcctgagtttttcagttctttaggtcttacacctccaagaggtgttctgctgcatggccatcctggtactggtaaaacactcgtagtgcgtgcactaataggggcatgctctcaggggaacagaaggattgcttattttgctcgaaaaggtgctgattgtttgggaaagtatgttggcgatgctgagagacaactaagacttctgtttcaggtagctgaaagatgtcaaccttcgatcatattttttgatgagatagatggcttagcaccttctagatccagacgacaagaccagacacacaattcagttgtggcgactttgctttctttgctggatggtttgaaatcacggggttcagttatagtaatcggcgcaacaaatcgtcctgatgctattgatcctgctcttaggaggccaggaagatttgaccgtgagatatacttcccgctccccacctttgaggatagatccgctattctttcattacacacgaaaaaatggccaagtcctatttctggggcattcctctcagttattgcaagccaaactgttggatatgctggtgctgatctgcagtcaatttgcacccaagctgcaataaatgctttgaaaaggacttgcccattgaaggaaatcttactctctgcagagaaaggatttgagcatgggcgacttcctctaccatcaattcttgtggaggaaagggattggcttgctgctcttgcagctgctccaccaccctgttcacagagagaagcagggattgctgcaaatgatctagtttcctctcctcttgtctcctatcttgtgccgtgccttcttaaaccattgctgcacctttttatctccctctatttggatgagcgaatctggttaccttcatctcttctgaaggcatttgcttctattaagcaagttatcttctcatctatggagaagaataatgtgcctcacacattttggtcttcctatctcccatctttgatacaacagaaaggtattgcaaaaagaattgcatcaatcttgtcaggctatggtctaatagcttatcaactaggaaaccatgattctgtgttaaatcacaatgaacagcacgagaagtttgatgcccacagattgaattccaccggttctcacccaaaaggaggtttagcacataaattatcaggatttagagctttagctgctggagcgcccagatcaggccaacaacatctgatccgttgccttcttcatggttttgtgggtcatactgtaatacacaagcttgatcttgcaactatggcacaggagggaaacggtgatattcttagtggactcacacaaattcttcaacacacaataccaaggttctctgtgaatgttgacagctactttacctgggatgaggttattgacgcatgctgtttgcggatatcacatgatttagttcagcagcatgttcaacttttgcatgacagggctcataacaatcatgatgaacagaaagaggtctttgttcctatggaaattagtgcaccaggtgaacatagatccagtgggagtaaggaagccagcatgttaacgaagtatccattgaacatggacaagcatccctcatgtggggtttcttcaagagagcatcctactcagctgggcacatgtagtgctcagcaagagccaccaacatctaatgttgaagataaagaggacaatactgagaaaattgatttcaatgagaaagtcgcaacaaatcgttctaatagaattgtgaaggacagtgaatcactagctattatggcctttggaattcagatactacagcacccgcaattttctaaactttgttgggttacatcgaaactacgagagggcccctgcactgatataaatggaccatggaaaggctggccatttaattcctgtttattgcaaagcactacagctgataaatcattatctggaggaaacaatgttcttaagggcaaagagaagattccgtctgtcagaggacttgttgctgttggtctattagcatatagaggtgcttatgcatctgttttggaaatctgttctgaggtgagaaaggtcttggaactgttagttggacaggtccgaactaaaattttggaaaagagaagtcgatatcggtacttccatattctgtcccaagttgcttatctggatgatatcatgagcagctgggcatacacctttcaaaggttacatagtgaaaacaggagagtaaaaacaagtccaaaggtaactgttggaaagtcatccacaagagaatgtcaaggcgacagcaacactgcagaagcaaacatacttggtgctcctgctggctgctctgaggcccaaggcactcctggccaacatacagatgaccttgaagttattcctgctcactgccctagtgagatgcaagagaattcagtccaacatgctccaggccatcttgaaatccatggcattgtctgcgaccttgacaatgataatgtgacatctatatccagcataaatgcagtggaacctgatcttatccattcagcttcacttgatgtgcacacagattcacttaccccagcagatgcagtaataaatgatgggcaatcttgtggggttgacaatgatgggcaaatgtccagagtaatcaatggagaagaaaaccacatatctaatattgaaagacctgaaagccacacagtatctgttgcggatttcaatgagttgcaaaggaaaaatgctgttgcatcctcaactagtaccgacagtgcaggaacatccaggaacatggtgtcttctgaagctcgtggaagtgacaatgagcggaatactgatttccctgtggatgatgtcaaattaggtcatttggttaatcctcaatcacaggataccatgaaaagtctctcagttctgaaacctccatgtctctacaaatgttgccctgtgtgtttcaatgctgtttataagatggttcatgatattctttcaaattcagtaaggcctagtctgcattgcttagcagtcgatgatatgcatgaccttttgtcatcatggtcagtgaatcttctagcaacagttagaaaatggtatacttctcaaggtattgttggctctgaagaaaattctggagaagggcattgtgtttgtagcagtgataatggttgtgttccaagggagtgcacatgccatttggaaagcaacgaagatgctggaactataaaggatgagagctattatctaagtggacagccattaagttttttctttaaagatggtgtattgataccaccagatatcactgcaccaactacacttcattgcagttatatgagattatgtgtttgctcgataccaggttcaatttctatgttcaatcggatctcgagttga

SEQ ID NO: 90595 - DNA, 384 bp, Oryza sativa
  Clone ID: PAT_MRT4530_8924C.1
gcaggcccagggggtttcattcagcgcaccagtgcccgggcacacacacagcagctagttcacccagcttgccgccggcacttcttgtccaggcaccccagccccagcccggcgactgggaacgcccgggaggaccgcggcgagcggcgccgtgctcgttgccgccgccctcctcggcgcgccggtgcccagggttctgagaagatcgctgttcgcttggggctttaggaacttggggggagatttggggattctttgattttgtcatagatttgttctgtatgagagctcaagaagaagcttcttcgtcgtagaaaatggggtaaatttataaattaaaaggaaggagaatctatcggaggaacctggtgcatcaaaaaaaaa

SEQ ID NO: 90596 - DNA, 360 bp, Oryza sativa
  Clone ID: PAT_MRT4530_89250C.1
taccctcctggggcgcccgcggattctcacagcgtcgccgctccccccgttcaacatcaccatgagggagtgcatctcgatccacatcggccaggctgggatccaggccggaaacgcgtgctgggagctgtactgcctcgagcatggcattcaggctgatggccagatgcccggtgacaagaccattgggggaggtgatgatgctttgaacaccttcttgagtgagactggcgctgggaagcacgccccccgtgctgcctcggatgcccttgaccccactgccatcgatgaggggcggactggcacctaccggcagctcttggatcctgagcagctcatcaggcgcagtgaggacgcccc

SEQ ID NO: 90597 - DNA, 390 bp, Oryza sativa
  Clone ID: PAT_MRT4530_89251C.1
atggtcggccgcggatttggagggcacgtacacgtagaggacgtcgagacgaacccaacggtactcaccacaacgacaaacgacgaacgacgacggccggcgacgagaagggcgacggcggcgactcggcttgacggcgacggcggagctccggtggccggcggcgaaggggaaggtggggccgggcttcctcacctccgtgcgcacctaacggcggcgacgacaagcggcggcgacggcaggagcggcgcggcggcgcggctgaagacggccggcggcggcggcgaactaagtgcgcgcggcggcgactctacggagcacgggagaccacgggagagggggcaaacgaaagagggcgacgaggtggtcctatttatagccttggattga

SEQ ID NO: 90598 - DNA, 579 bp, Oryza sativa
  Clone ID: PAT_MRT4530_89252C.1
tgggagggagagtagcggcggcacgcaccgcgccggcggagagggcggccgacgggagggcggaagggcgggccgccgagcgccgcctccctctctcgcccgaccgccgcgagcggccccttgtcttgcccgagcgccagcgcgccgcttcgcccaccgccccccctttgcgacgccgcaagctttgcccctcctcacccggccgccacgcgccgctccgcccaccgcccctctttacgccgccgctcgccgttctgaatcatttgtcacataagcgccacgttggacgaggacctagtcaaagggagccacgtaggcgtcacagaacgagatctgagcccatcttgctgtcgacgagtcacgaggagctccacttcagaactctaaaaataagagacatgacacaccttggcatcaagggagcctttgctggttatatcaggcctcatcaggatcatccggcttatggttcctcccctcataagcccgctcccaggagccccaggtttggggtctccgccccccccccgggcacccatacccccgcgctcgccattcctccctacggcgccgcgaaca

SEQ ID NO: 90599 - DNA, 254 bp, Oryza sativa
  Clone ID: PAT_MRT4530_89253C.1
tttttggtgttttttttttttttttttttgtccaacccaacctgtttctgttttgattcgccgtattgtctatattgacaatatggatctcttttgtcatctacaaaggtgtgctcaaaaatgtgttctgggaccagacaacacaataaccgcatggctgaaaaaaagggggcggaatgataagcaggtgatactagaattacacgatggaaaacttgatgatcactacccaaccagggtaatgagagcttcca

SEQ ID NO: 90600 - DNA, 396 bp, Oryza sativa
  Clone ID: PAT_MRT4530_89254C.1
atgagggctggggcttccgccttgtcaccttgggcaagctcctatcccggcccccaagctcaaagccacccccgccgagctgctcaaaaaccgatgtgttcagatatccctgagctctgcctctccttcatggaggagcactggtggctctaccgcatcgtctttaagggttctacctaccgccgctgcccaacggccgctgcccttctccctatcggtcgccagccaccgcacacctcttccgtgactcaacatccaatgtcctcttcatgcgcacggacgctcatggagccagtggtgctcgggatcgtgctcaggcatcacaatgtactccatctcctgtctcttggagatcttctcgccaatcccaatggtgtggctgacacgcgaccctga

SEQ ID NO: 90601 - DNA, 348 bp, Oryza sativa
  Clone ID: PAT_MRT4530_89255C.1
atggggaatgaactcaccgtcctccttcccggcgaaccctggctcgtccctggaggccaggacgcttgcccacgcgctggcttccgcgaacctgaagcgacgaccaccaacctggcggcggcggcggcggcggcgagacgccgcgtcaggagggacggcgcggcggggcggagggagtgcgagcgcgcgcgcgcgcgtgcggcggattgccgcgctttggggatcgcgagcggcaagaaccggagccagaggcagagccagccaggggggcggctggacatgttgattgtccacctcgtgagcccaccacctttagctcgagctggcccgacatggctaaccagctga

SEQ ID NO: 90602 - DNA, 190 bp, Oryza sativa
  Clone ID: PAT_MRT4530_89256C.1
gcgggtgagggccgagggttttgcgaggttttttggggaatggaagatggagaatgaaggagtggagaggaagtgtcttgaagtagggaaacggaggcggtgctgcgagggggatgggctgggcttggctgggttctcgtgggccttgacttcgctgcaaccgaaagaaggaaaaagtggttttcgttga

SEQ ID NO: 90603 - DNA, 878 bp, Oryza sativa
  Clone ID: PAT_MRT4530_89257C.1
gtccgaggcgtagaagctggtggcgccgtcggtggaggcggccgccgcgatgaggaggaccacggccgccgccgccgccgcggccttcccatcacaacccaaacctccaggacagccgccaataggtagggagaatagtgttggctgacggggaaaagctcgacggcggaggccgctggccgacgtggctcccaacaatctggagcgcgtgcgcggtgcggcctggtcctacctgtaatggcaatgtcatctttacctacgcgcatgagggctggggcttccgccttgtcaccttgggcaagctcctatcccggcccccaagctcaaagccacccccgccgagctgctcaaaaaccgatgtgttcagatatccctgagctctgcctctccttcatggaggagcactggtggctctaccgcatcgtctttaaggtcaattccatcttcgcgccgccttccactatcaagcttctcgacagctgcaagccttctccccgcccatcgctagttgtcgtcgtcagggttctacctaccgccgctgcccaacggccgctgcccttctccctatcggtcgccagccaccgcacacctcttccgtgactcaacatccaatgtcctcttcatgcgcacggacgctcatggagccagtggtgctcgggatcgtgctcaggcatcacaatgtactccatctcctgtctcttggagatcttctcgccaatcccaatggtgtggctgacacgcgaccctgaattgtttaacaaaggcctcttagaggaaaacacttttgctacatcctcacacatgtcgacgttgaaagaacatcctaaattttcattaaatgtccaagaacttcgatgtgacaacgcgcataagaaaag

SEQ ID NO: 90604 - DNA, 584 bp, Oryza sativa
  Clone ID: PAT_MRT4530_89258C.1
attactctgggcaaatattctgagagtatacattagttttcttggagtttatttgtcactctccatgtgtactatacttgagtacttttgttcagtccacggaaaggcaatgtttgtgttttaactctgatggaatgaagctctttctttattataaaactatgtacaccaacaagtgtaatgtttaaactatcagaacactgtaagatgcatacattaaaaccaaatgttatgaacagtatctttcctggaatagttttacatttcctaaatagtacttcattatgaaaactatccatttcaaagtaaaaaaaaattgttagatgatcactaaaatataagtgctctgtcagaaatatattacataaaaaatgtgcattattttatcttcaaacaaaaaactaaacccggaaatcattcacatattttagcaataaatagtatgtatgcatttaccaaaatatttaactgcaacattcaaatcacagcatttttttccacaaagagatggctctttgaatagaatattctgacaaatggatcacttaatccatcaaaatatcttttatatagattataaatgt

SEQ ID NO: 90605 - DNA, 1623 bp, Oryza sativa
  Clone ID: PAT_MRT4530_89259C.1
atggctgtgctctgctctccctcgccattgctcaccacttccatcctgctgccttgctgctcttccccaccagatgcaaggactggcaccaccgttccacgacaccccatcggtgaggctgggttcgtcgtggttgaggttgttctagccaagagtcaagtgcattgcttccattgtagagctagtgtggcacttaatcatctccgagccgcgtcatcgcttgttactcttggaggttgccgccttctagacggtttgtggaggagttgcctggtgacctctccgagaagattatggaggaggcccggtgctggtttgaacaagtttgatgataaacgaggcacacaattgtgccaaacgaggcgcacaaccactcatggccgtcagctcagcgccaagccccttggcgctgaggttgtgcatggaagctccaacgggcctggcgctgacctcgtggcagcgtggcggtcaaggagatcacccagcagatatgtcagggatgtcagcgccgaagcggttggcgctgagatggctaagctcagtgccagatacattggcgctgaggctgtggtgtggattagggaatgtgggatggagtactttccagggttggaggatttctacgaggagaagcaccgggctcccaagatagcgagcggagaggcagtcacaggtgacataagctcaaggaactggaggcagcgggtggaggagtacctcggtgtggagcctccagtggcaccaaatggtcagaggctgacgaagacctccggtgtgccacttagttggctgcgtgccaacttctccctgtgtcccgccgatgctgacgacgacacgttgcagcgttactgcagagcggttgacagtcggaagaacaagaaggtgactgattgggcttactaccatcaagatcatatcacgcattgggagaaacttgaagcgaacgtagtaccagaccacggggagcacaacaagatggagttcgatgcgtacttggcctggctccacaggaactatcatcttgtcctacgtccggcctggatgctagccgacatagcggaagaccccgaagatgtcgaggagcagaacgagtacaacacacgtacccgtgaaggtggcatggttgagtcgggacctattcgcaatagagtgagactacagcaacgatgtcggaagttggcagcacggctggaatgtaggtccaacgatgccgtcgatcaacctccgggccaccaaaagggggaggaacaagctgaagtacacgtggaggcggatgaagaacaagagggggatgatgaggaggcggacgaagaagaggaagcggaggaagaagaggaagtggagaagaagaggaggcagttgagctcggtgcctcgcagctggaggatgcaccgcaatcgttacaggccggtccatcgcaaaccgggttgtctcgaccactacgcaggcgggctccttcccaggactggtggtacactcccggtgcgcctcgtcctcgcactaggggtaggaagagagagctggttgtttctggaattttgcaatcttagcgccagactacttggcgctgagatgtccaacgtcagcaccaaatacattggcgctaacatctggatgggctga

SEQ ID NO: 90606 - DNA, 243 bp, Oryza sativa
  Clone ID: PAT_MRT4530_8925C.1
atgaggaaagtggcagctcttctgatgcaagacgagaagggtgaaggagaactcgaggaagtgatgggcagggagctcatcgccagagagtggacgaaggaggacgcagctactgacgatgagctctggcgtggggcgtggatgatggaggacgcgtccgccgccgacgtgctccgacgtggcatggacggtggaggatgtgaccgtcggcgacgagctctagtgtggggcgtggatgactaa

SEQ ID NO: 90607 - DNA, 712 bp, Oryza sativa
  Clone ID: PAT_MRT4530_89260C.1
aaagacctatagttttcctttatgtaccatggaccaaacatcaaaattgcaaagttcatttacaatttactatgttttttatgtacatttttatcctctcagctgatttaagaatgaagcatagtttctaggttagtagggtaacacatgtccacgtggcgaccattccatacattgtcggctagaatggcgttaacggcgtctgtaggatgaaactggtcccaccagaggtgaccggaggcgtcagagcaagccatctccggcgagatgcatggaagccatcctttgtacctccctagcccacaacacgcatctgtcgtctcattaaaaccgtagtgttggtggttcctgagaatgtccatagcgctttggaacacgtcacagtagataatggatgcccctggaagctcacggttgagtttatctacagtgtatctcatgacaaagttggattccatgatcatgctgttcacttcttctgcacattctccgttctggcttctgtatttccacatgtagtatggtgcacagccaataggtggcagtcccatcaccaccatcctcctcaccttgacattgtacaaggtcttgagctcctgtctcatattagaagccaagaactgattaaaattccatggagtatagagattctgcacattggagatgtttctgatgtaaaaatgtatgtaatcattcactccaatcgatatgt

SEQ ID NO: 90608 - DNA, 489 bp, Oryza sativa
  Clone ID: PAT_MRT4530_89261C.1
atgggcctggcgctgaccaccaccaagcgccttggtgctgagatgtacaacctcagcgccaaagtggttggcgccaaggttggacttagccaaggcggcaaagctactcctcagcccatccagatgttagcgccaatgtatttgtgcgaggacgaggcgcaccgggagtgtaccaccagtcctgggaaggagcccgcctgcgtagtggtcgagacaacccggtttgcgatggaccggcctgtaacgattgcggtgcatcctccagctgcgaggcaccgagctcaactgcctcctcttcttctccacttcctcttcttcctccgcttcctcttcttcgtccgcctcctcatcatccccctcttgttcttcatccgcctccacgtgtacttcagcttgttcctcccccttttggtggcccggaggttgatcgacggcatcgttggacctacattccagccgtgctgccaacttccgacatcgttgctgtag

SEQ ID NO: 90609 - DNA, 192 bp, Oryza sativa
  Clone ID: PAT_MRT4530_89262C.1
atgccgccaaccacccaatgcaagaagcttcctcgaagtggcgcccaccccaacttcccaacggccacctcaccacaacttcttggctaccacccgctcaggcttcctagatccaaccgctgtccatccgtcatcgtcgcatcttgtcgcaactcccactaccaccgtggtggacaccggctctcacattaa

SEQ ID NO: 90610 - DNA, 2546 bp, Oryza sativa
  Clone ID: PAT_MRT4530_89263C.1
gcagcgctggaaagcggttgccagcaatgtggattagatagggctaagggcaattttgtctttttaaaaattctctctcctctttttgttaagaaatgataaaatattgtctcggatgtcctatagcaaattacacaaattttgtggtgtccatcagcagcgacgcgattttacagttgcatgtacccgtgtcggctacctttgctgttgccgactaacatcttcactgaccggccgcctcgtccgctaccgactggagccctcgcctgcacggctggtctattatgccgccgctgttgggcgtctacgacttcaccgccggcctgcctccgttgccgccgactgttgtcctcgcctttatggtctgttggtcacaccaccgttcacgggcgtccacgtcttcaccgaccggctggccttcgccgccgccgactggtgtttccgcctgcacggctggcctattatgccgcagctattgggcatctacgacttcaccgccggcctacctccgtcgccgccgactggtgtcctcgcctatacagttggtcggccacaccaccgttcatgggcatccacgtcttcaccgaccggcttgccttcgccgccgccgactggtgtctctgcctacacggctggccaattaagccgccgttggtgggcatcttcgctttcaccgtcgaccgccttcattaccgccgactggtgtcttcattattattgatggacgactttgttcccatattggccacctctgccaccaccaaggggaatattacaaagctaagtcatcaataattttctttatatgatattttccttttcctctgtctcactacatcaactggttcgccgttgactagtgagtcgggggctatagatgttatatcatatttttaaacaatttttatttatcttgattgcttgtgaaataatccgagtaacaataaagaaatatatatttataaatattttaaaatacttgaatctttctcaagtactgtatttacatcagatactactcatcctatatgtttgttctgcaggatccagatacagatatacataaaagggattcatggctttaagcttatctcttacgctccaggaatggatcagtcagaacatcaccgaccggccgcctcgtccgccgctgactggtgtttccgcctgcatggctggcctttatgccgccgttgttgggcgtctacgacttcaccgaccggccgcctcgtccgctgccgactggtgtttccgcctgcacggttggccaattatgccgccgttgtcaagcgtctacgtcttcaccgaccggccgcctcgtccgccgccgactggtgtttccgcctgcacggctggcctttatgccgccgttgttgggcgtctacgtcttcaccgaccggccgcctcgtccgctgccgactagtgtttccgcctgcacggctggcctattatgccgcagttgtcgggcgtctacgtcttcaccgaccggccgcctcgtccgttgccgactggtgtttccgcctgcacggctggcctattatgccaccgttgtcgggcgtctacgtcttcaccgaccggccgcttcgtccgccgccgactggtgtttccgcctgcacggctggcctattatgccgccgttgttgggcgtctacgtcttcaccgaccggccgccttcaccgactggccgcctcgtccgccaccgactggtgtttccgcctgcacggctggcctattatgccgccgttgttgagcgtctacatcttcaccgaccggccgcatcgtccgcctgcacggctggcctattatgccgccgttgttgggcgtctacgtcttcaccgaccggcttgccttcgccgccgccaactggtgtctccgcctgcacaactggcctattatgccgccgttgttgggcgtctccgtcttcaacgaccggccgcctcgtgtgacgccaactagtgctatcgtcttcacggctagccatgtcgctgccaccgctaataagcgtcatcatcttcaacgcaagctatctacgtctgccgctaactggtttcttcacttccatggctgcatgattctgccagtgttgattggccttatcgtcttcatcgccggtcgtctcatctgctgctgactagtgccctcacctctacgtctggtttatacagctaccactactgatggacatcatcgtcttctgtcgccgactggttatgccgccgccgactggtgcttttatcttcacaactgtgcgtcttcactaccagttcacttcatcacggcaatgcaactttgtcgtcatggtagaacgacttcatctttattatcttcggcaccggcaaactctattgctgctacttcgcaagttttgctacttcaataacctcgacatctcggcatgcgatgccgtgttattttactacaacaagtagctctccaatattcaggatttctacttggacatcttcaacacatatcttcaatcaagcaatgactattcgacgacaagaagctacagttctcgactctatgttcagttgtttcccaac

SEQ ID NO: 90611 - DNA, 1065 bp, Oryza sativa
  Clone ID: PAT_MRT4530_89264C.1
atgggcgtccatgtcttcaccgaccggctggccttcgccgccgccgactggtgtttccgcctacacggctggcctattatgccgccgctgttgggcgtctacgacttcaccgccggcccgcctccgtcgccgccgattggtgcctccgcctacacggctggcctattatgccgccgctgttgggcgtctacgacttcaccgccggcctgcctccgtcgccgccgagtggtgcctccgcctacacgggtggcctattatgccgccgctgttgggcgtctacgacttcaccgccggcctgcctccgtcgccggcgagtggtgtccccgcctatacggtcggttggtcacaccaccgttgatgggcatcgtcatcttcaccgccggcctgcctccgtcgccgccgattggtgcctccgcctacacggctggcctattatgccgcctgggcatcttcgctttcaccgtcgaccgccttcgtcgccgccgactggtgtcttcattattattgatggacgactttgttcccacattggccacttctgccatcaccaaggggaatattacaaagctaagaatggatcagtcagaacaccaccaccggctcgcctcgaccgccgccgactggtgtttccgcctgcacggctggcttattatgccgccgttgttgggcgtctacgtcttcaccgaccggcttgccttcgccgccgccgactggtgtttccgcctgcacggctggcctttatgccgccgttgttgggcgtctacgtcttcaccgaccggcttgccttcgccgccgccgactggtgtttccgcctgcacggctggcctttatgccgccgttgttgggtgtctacgtcttcaccgaccggcttgcctttgccgccgccgactggtgtttctgcctgcacggctggcctttatgccgccgttgttgggcgtctacgtcttcaccgaccggctgcctcgaccgccgccgactggtgtttccgcctgcacggctgacttattatgctgccgttgttgggcgtctacgtcttcaccgaccggtcgccgcatccgccgctga

SEQ ID NO: 90612 - DNA, 509 bp, Oryza sativa
  Clone ID: PAT_MRT4530_89265C.1
cccacgcgtccgcccacgcgtccgtgaactcgctgaaaatcggggcttgcgtcaacctgctgctggggcttatggacatggggatcagcaaccgggtatgcaacaaatcatgaaccctggcaaagagtctctgaggcaccaatgcaccccgatgagtctaccttgggagcaggctcacacgctacaactgagcaatttacatgcgatgtcggatcaatgctgtcatcagatgaggttgaaagcgtaacaatatcattgccaggttaattgcgccatggcgcaatctatcatgcatcacgtgcatggcgatcatgcctatgctgtcgatccctaagtacaggcccatgcctaagtggctctcaattggccatccctgtgtggagtaaaccataggtactgcagaactccatgcaaagttgcacatgacatgagtgggtcttgatactgtgcaccatgatatatatatagtggtatcaataaagtgatgtacataatgatgtgtgttatgt

SEQ ID NO: 90613 - DNA, 458 bp, Oryza sativa
  unsure (1)..(458): unsure at all n locations
  Clone ID: PAT_MRT4530_89266C.1
tgaacaacaaaataaataaattacaacttattcatcaccatgcagtttattaattacnccctctgtttcagattatgagtcgttttgactttggttaaagtcaaactgttgtaagtttgactaatttattagtctataattagttctattaaatctataattgaatatatttnnataatatatttgtcttgggttgaaaatattattattaattttctgtaaatttggtcaaacttgaagcagtttgactttgaccaaagtcaaaacgacttataatatgaaacggagggagtaattagcttgatcatgacatgactatcttttgcataattgacatcatatatttgatctgcccaaaaaaagaggaggaaactctcactacatgcngtttatgagcttggttataactatccgttgcataattgacatgcaggtaatttgganatttgactggggaa

SEQ ID NO: 90614 - DNA, 784 bp, Oryza sativa
  Clone ID: PAT_MRT4530_89267C.1
atgctggtcatggactcgaggcgtctcagctttccggtcgatcggccgcgagtccactccgccggcttgtcctcgccaccgccattgctgatagcaacaacgacttcatcgccggcctgcctccgtcgccgccgactggtgtcatcgcctatacggctggtctatcacaccaccgttcatgggcgtctacgtcttcaccgccggcctacctccgtcgccgccgagtggtgcctccgcctacacggctggcctattatgccgccgctgttgggcgtctacgacttcaccgccggcctgccttcgtcgccgccgactggtgtcatcgcctatacggaatggatcagtcagaacatcaccaccggctcgcctcgaccgccgccgactggtgtttccgcctgcacggctggcctttatgccgccgttgttgggcgtctacgtcttcaccgaccggcttgccttcgccgccgccgactggtgtttccgcctgcacggctggcctttatgccgccgctgttgggcgtctacgtcttcaccgacccgtttgccttccccgccgccgactggtgtttccgcctgcacggctggcctttatgccaccgttgttgggcgtctacgtcttcaccaaccggccgcctcgtccgccgccgactggtgtttccgcctgcacggctggcctttatgccgccgttgttgggcgtctacgtcttcaccgaccggcttgccttctgcgccgccgactggtgtatccgcctgcacggctgggctttatgcccccgtgttgggc

SEQ ID NO: 90615 - DNA, 483 bp, Oryza sativa
  Clone ID: PAT_MRT4530_89268C.1
atgatctacgacgcttattacaaccacgcagctttcacaaaagcgaaaggcaactcagtgactcaattgggatgcagtgcagatgaaaaaaaatctaaccttttatcgccatcagaaaaagggagaaaaagagatggtgagctctacgttcttgtggatgtggtgcctatgctgcaaacgtttatactgctgtgtagaagtagtagtagtagtgatgttgccttgctttcactgatcctgccgttgaataaaaagaagcatcggttgcatcaatctgcctttcgccttcctcttttcatcttgacacaaacgtatcggttaaaagcagaaaagtcgtatgcaagggtacagaagcatgaaaccaacgcatcttttaatctgacagcatatgctacacaagctgcaagatttgacaatacgagcaaagggtttagctgcagcagtccagaaccaaatcatttgtttgtaaacaagaagtttgac

SEQ ID NO: 90616 - DNA, 2303 bp, Oryza sativa
  Clone ID: PAT_MRT4530_89269C.1
gatggaaccactgacaccaacatgggcagtgaggagaacgtgtgcctccgtcgccgccaactggtgccctcatctacacggttggttggtcacaccaccattgttgggtgtctacatcatcaccgtcggcctgccttcgtcgccgccgactggtgccctcgcctacacatttggttgttcacaccaccgttgttgggcatctacgtcttcaccgaccggctggccatcgccgccgccggctggtgtttccgcctatacggctgaactattatgccgccactgttgggcgtctacgacttcaccaccggcctgcctccgtcgccgccgactggtgtcctcgcctatatggttggttggtcacaccaccatttatgggcgtccacgttttcaccgaccggctggccttcgccgccgccgactggtgtttccgcctgcacggctggcctattatgccgccgctgttgggcgtctacgacttcaccgccggccggccttcgtcgccgccgactggtgtcctcgcctatatggctggttggtcacaccaccgtttatggtcgtctacgtcttcaccgaccggctggccttcgccgctgccgactggtgtttccgcctgcacagctggcctattatgccgccgctgttgggcgtctacaacttcactgccagcctgcctccgtcgccgccgattggtgtgctcgcctatacggttggttggtcacaccaccatttatgggcgtccacgtcttcaccgaccggctggccttcgccgccgtcgactggtgtccgcctgcacggctggcctattatgccgcgttgttgggtgtctacgacttcaccgctggcctgccttcgccgccgtcgactggtgtttccgcctgcacggctgacctattatgccaccgttgatgggcgtctacatcttcaccgctagctcgccttcgttgccgccgactggtgtttctgcctatacggttggcctattatgccgccgttgatgggtgtcttcactatcatcgaccggccacctcagccgccaccgaggagaacattaaaaagatatgtcatcatttattttctccattatatgatattttccttttcctctgcctcactacatcaactggtccaccgttgactagtgagtcgggggctacagcttatctcttacgctacaggaatggatcagtcagaacatcaccaccggcttgccgtcgtcgccgctgactggtgtcctcgcctatacggttgggttgacacaccgccgttgttgggcgtcgttgtcttcatcgaccggcttcgtcgtccgccgccgactagtgtcttcgcccatacggttggttggttacaccaccgttgttaggcatctacgtcttcaccaccagcttgcctccgtcgccaccgaatggtgtttccgcctgcacgactggcctattatgccaccgttgatgggcgtctacgtctttaccgaccagtcgcctcgtctgccgccgactggtgtctccgcctacacggctggtctattatgccgccgttgatgagcgtcaacgttttcactgccagcttgccttcgccgccgcagactgatgtttccgcctgcacggctggcctattatgccaccgttattgggcatctatgtcttcacgaccgtccaactagtactatcgttttcatggctggccacatcgccaccaccgcaaataggcgtcatcaccttcaacgcaagctgtctacgtctgctgccgactggtttcttcactcctatggctgcatgattctgccagtgttgattggccttatcgtcttcatcgccagtcgtctcgtctgttgctgactaatgccctcgcctctacgtctggtttataccgctaccaccactgatggacatcatcgtcttccgtcgccgactggttatgccgccgccgactagagtatttatcttcacaactacacgtcttcgccaccggttttcttctgttgccgctgactcgtgttcacttcatcacggctttgcaactttgtcaccatggtggagcgacttcatctttattatcttcggcaccggcaaactcaattgctgctacttcgcaagttttgctacttcaccagccatgacatctacagaagcttcgacatctcggcatgcattatcaactatgatgccgtgttatattattacaacaagtggtgttccaatcttcaatatttctactcggacatcttcaacatacattttcactcaagcaatgactactcgacgacaagaaactacagttctcgactctatgttcagttgtttcccaac

SEQ ID NO: 90617 - DNA, 195 bp, Oryza sativa
  Clone ID: PAT_MRT4530_8926C.1
atggcagcagggatcagtggcggcgaggagcagcttggcgtggaaggcatcggcagcgacctgacgacaaaagggcttccggcggggggatcggtggagggcgagccttcagcggggatcggtggcgagtgttacgtggcgatcaacttagaagtgtttatgggtgtaccattaagcccagagatttgcagttag

SEQ ID NO: 90618 - DNA, 3474 bp, Oryza sativa
  Clone ID: PAT_MRT4530_89270C.1
atggcacggggctctgctctgctcgacggtagcgtactaccgccttctcgcatcgtgagcgagaggcaggcggggctgccgcgccgcttcatgccggagtctgccaccggccgggagatagtgatgctgggcgagggacgcccggcacctgactaccctgggcggtccgtcttcttcctcccctttgcaatggcggggctggttccgccattttcttctttctttatggatgttctggagttctacgatctccagatggcgcacctcacccccaatgcggtgatgacgttggccatcttcgcgcatctgtgcgagatgttcattggggtgcgcccatctcttcggctgttccggtggttcttcaccgtgcagtcggtatcgccgccgtcggtggttggtggctgctacttccagccgcgggggccggtgctgaactgctacatcccctgcgccctccgcaagaagtgggacgactggaagagcgactggttctacacccccctcgccaacgaagcgcgcctccgacttccaagccagcccccggcgcaggtctccagctggcgggcgccggtagatctgggggatgactatgacgccgtcctcgaccgtctggcgggcctgcgatcccaggggctcacaggggccatggtgtacggcgactacctccgtcgccggattgcgccgcttcagcggcgcgcccggagcgcatgggagtacaccgggtccgaggactacatgaggacccaccagggagtcaaatgggactgggctcctgaggacttcaagatattggtccaacgggtgctgaatctcaactccgtggaagcatccctcattcctcaaggagttctccccctttgcatcgatccagaccgcgcctccatcctgaccattatgatgggggtcggggcctcagaggaggaggctcctaagggccacgatgccgtgggcgggagccgccgggaagaatctaccccaggagggggtcgtgcttctgggccccgcgacgggggctcggggagcagccgccctgccgacgcccgggggaagaggaaactgggaggaacacctcccccatctcctccccgagggggcggggcggtgcgtgccagcagcaggcgcccggagggggccgcgccgacatcacagcccgagacggagcgcaagaagaagcggctccgcaagacgggggagacggaaccatcccggggaaacctgatttcccctccaatgtggtcgtttaaccgaccccctcgcagtgatatcccgacgcgttcctcccgccatcccaagtccggccagtccgaggccgaagatccggcggccgcagaggaacaaaggcgagaatctgaccggcgagaggccgcagatcgcctacgggaagctgaagaggccgcccgggaggccgctcgggttcgtcaggcggaggataccgctcgggaggaggccgcccgggctcgccaagccgaagaagccgctaaggaggaggccgcccgggctcgccaggctgaggcgatggcgtcttccgaggcagctcacgacaaggctgctggcgcgtcgcttgggcccactccctcgggcgacgctcaggcgacagcctccggggcggctcgcgacgaggccgcgggcgcatcgcctgggcccgctccctcgggcgacgcccaggaccaaacgggttcgggggacatccctgagctcagcgcgtcttcaggcgggccgagccgcgtcgcattctctccaaggcggcttttctcctcgtcttctgtcgccccgctgagcgccgagccccttctgcaagccttggccgccgcaaacaccgcggtgctagatgggttcagcgcccaggtggaggccttgcgagcggagcgagcggagcgagaggccgcatgggcgcgcgtcgaggaggggcggcgctcggtggatgtcatggtggaggtgggccgtaaggctcaccgccgtcatgtctcggagcttgaagcccgcaaagcggcgctggcggagatcgcccgagaggtggaggaggagcgggaggccgccctcatcgccaccactgtgatgatcgaggcgcaggacaccctccgtctccaacacgggagctgggaggcggagctaaagaaaaagctcgacgccgcccagcaacaacgacttcaccgccggcctgcctccgtcgccgccgactggtgtcatcgcctatacggttggtcggtcacaccaccgttcatgggcgtccatgtcttcaccgaccggctggccttcgccgccgccgactggtgtttccgcctgcacggctggcctattatgccgccgctgttgggcgtctacgacttcaccaccggcctgcctccgtcgccgccgactggtgtcctcgcctatacgctggcctattatgccgccgctgttgggcgtctacgacttcaccgccggcccgcctccgtcgccgccaagtggtgcctccgcctacacggctggcctattgtgccgccgctgttgggcgtctacgacttcaccgccggcctgccttcgtcgccgccgattggtgcctccgcctacacggctagcctattatgccgccgctgttgggcgtctacgccttcaccaccggcctgcctccgtcgccgccgactggtgtccccgcctatacggtcggttggtcacaccaccgttgatgggcatcgtcatcttcaccgccggcctgcctccgtcgccgccgactggtgcctccgcctacacggctggcctattatgccgccgctgttgggggtcttcgctttcatcgtcgaccgccttcgtcgccgccgactggaatggatcagtcagaacatcaccgactggcttgccttcgctgctgccgactggtgtttccgcctgcacggctggcctttatgccgccattgttgggcgtctacgtcttcaccgaccggccgcctcgtccgccgccgactggtgcttccgcctgcacggctggcctttatgccgccgttgttgggcgtctacgtcttcaccgaccggcttgccttcgctgccgccgactggtgtcctcgcctgcacggctggcctattatgccgccgctgttgggcgtctacgtcttcaccgaccggccgcctcgaccgccgccgactggtgtttccgcctgcacggctggcctttatgccgccgctgttgggcgtctacgtcttcaccgaccggccgcctcgtccgccgccgactggtgtttccgcctgcacggctggcctattatgctgccgttgttgggcatctacgtcttcaccgaccggccgcctcgtccgccgccgactggtgttttcgcctgcacggctggcctattatgccgccgttgttgggcgtctacgtcttcaccgaccggcttgccttcgccgcctccgactggtgtttccgcctgcacggttggcctattatgctgccgttggtgggcgtctacgtcttcaccgaccggtcaccgcatccgccgctga

SEQ ID NO: 90619 - DNA, 429 bp, Oryza sativa
  Clone ID: PAT_MRT4530_89271C.1
atggcaggaggcgacggagtgaagggcgccgccgccgtcgtcttcgttgacgacgacgacgacgagctgttcgacatcgacatcgccttgctcgaccgccactattaccaccaacgacgacgcgacgacgacgatgaagctgaagacaaagatggcggcggcggcgacgctcttcttgccaactgcctcctgccggtgagctcggtgagcaaggcggtgcccgtgacggcgacgacggcggcgagctcgtcgtcagcctctaccttccttccggccgtccggtacggcggctccaggagtatgctcctcttcaacggccgcggcggcggagggaggaggctagtgcggagaggcagcaactcgtcggcgaggttttggctcgccgcgagaggactcgacgccgccatgggaaactttcagaggtactag

SEQ ID NO: 90620 - DNA, 1969 bp, Oryza sativa
  Clone ID: PAT_MRT4530_89272C.1
tgggctcggcttttgtgcccacgatgctggtcatggactcgaggcgtctcagctttccggtcgatcggccgcgagtccactctgccggcttgtcttcgccaccgccattgctgataacaacaacgacttcaccgccggcctgcctccgtcgccgccgattggtgcctccgtctacacggctggcctattatgccgccgctgttgggcgtctacgacttcaccgccggcctgcctccgtcgccgccgactggtgtcttcgcctgtatggttggttggtcacaccaccgttgttgggcgtctacgtcttcaccgccggcctgcctccgtcgccgccgattggtgcctccgtctacacggctggcctattatgccgccgctgtgggcgtctacgacttcaccgccggcctgcctccgccgccgccgactggtgtcttcgcctatatggttggttggtcacaccaccgttgttgggcgtctacgtcttcaccgaccggcctgcctccgtcgccaccgactggtgtcttcgcctatatggttggttggtcacaccaccgttgttgggcgtctacgtcttcaccgccggcctgcctccgtcgccgccgattggtgcctccgtctacacggctggcctattatgccgccgctgttgggcgtctacgacttcaccgccggcttgcctccgtcgccgccgactggtgtcttcgcctatatggttggttggtcacaccaccgttgttgggcgtctacgtcttcaccgccggcctgcctccgtcgccgccgattggtgcctccgtctacatggctggcctattatgccgccgctgttgggcgtctacgtcctcaccgttggctcacgttcgttcccgtcgactggtgtttccgcttacacggctgacctattatgccgccattagtgggcatcttcgctttcaccgtcgaccgccttcgtcgccgccgactggtgtcttcattgttattgatggacgactttgttcccacattggccacttctgccatcaccaaggggaatattacaaagctaagatccagatccagatatgcataaaagggattcatggctttaagcttatctcttacgctccaggaatggatcagtcagaacatcaccgaccggcttgcctcatccgccgccgactggtgttttcgcctgcacggctggcctttatgccgctgttgttgggcatctacgtcttcaccgaccggccgcctcgtccgccaccgactggtgcttccgcctgcacggctggcctttatgccgccgttattgggcgtctacgtcttcaccgaccggcttgccttcgccgccgccgactggtgtttccgcctgcacggctggcctttatgccgccgttgttgggcgtctacgtcttcaccgaccggcttgccttcgccgctgccgactggtgtttccgcctgcacggctggcctttatgccgccgttgttgggcgtctacgtcttcaccgaccggccgcctcgtccgccgccgactggtgcttccgcctgcacggctggcctattatgccaccgttgatgggcgtctgcgtcttcaccgaccggccgcctcatccgccgccgactggtgtcaccgcctacacggctggcctattatgccgctgttgttgggcacctacatcttcatcgccggtcgtctcgtctgctgctgactagtgcccttacctctacgtctggttatacagctaccactactgatggacatcatcgtcttccgtcgccgactggttatgccgccgccgactggtgcttttatcttcacaactgcgcgtcttcaccaccggatttctacttggacatcttcaacacatatcttcaatcaagcaatgactattcgacgacaagaagctacagttctcgactctatgttcagttgtttcccaactaatcaaagagtcgggggctacacaaatacaaggctcaaaatttgacaaa

SEQ ID NO: 90621 - DNA, 678 bp, Oryza sativa
  Clone ID: PAT_MRT4530_89273C.1
atgggtataagagatggattctccaacaacaagctactcgacgacttcggctgtgatcgagatacgcctacacctggttctagaccagtagatcgtagtgatctctcatcatctaaaaattcatcttcaggtgatcgagatacgcctacacctggtcctcgaccagtagatcgtagcgatctctcaccacctaaaaattcatcttcaggtgatcgagatagacctacacctggtcctcgaccagtagatagtagcaatctctcaccacctaaaaattcatcttcagtcggttacaggaatctctcgacatctaatgcgacaatcaacatcatcgtaatagcaacaatcaagaccgactggatcgtcgttttcactaggacgacattgtctaggactaatgacataaggacgacaacggacaaggttaacgacatcacgacatcacatgacgacgaagaaactcgagatccccagacttctagagggcccgaagacaaggaggcagttctcgcaggtcacgagaatgtcgtccatctattacgctggattcccttcaaatggtcgagatatgactacgactggtcttcgactagcaatgtagcaatcatcgaggatcatcgcaccacgacttctaatggtcaagatatgactacaattggtcttcaaccagcaacgtag

SEQ ID NO: 90622 - DNA, 1572 bp, Oryza sativa
  Clone ID: PAT_MRT4530_89274C.1
atggacgccgtcgagacgcggcatggcgagtcggccaggggaaaaggtggagggacggtcatctaccgttcgcaagggcgcgtggcggcggtggcgaggtacaacgggttgggtagattccgtcggcagcggcaccccggactccggcagcgcgacagcggcggaaggacgacggtggctggccgggttggctcatctcgcagctcgccaggctggcttggcgaggtgcgcctggtagtggggacgacgacaagccgctggttcggcaacggtgtgaacagattcagcaatatcgaggttgccagccggcttgccttcgccgccgccgactggtgcctcgacctacacggctggtctattatgccgctgttgatgggcgtctacgtcttcaccgcccggccgtctcgtccgctgccgactggtgtttccgcctacacggctggcctattatgccgctgttgttgggcgtccacatcctcaccaaccggcttgccttcgccgccgccgattggtgtctccgcctacacggctggcctattatgccgctgttggtgggcgtccacatattcaccaaccggcttgccttcgccgccgctgattggtgtctccgcctacatggctggcctattatgccgtcgttattgggcgtccatgacctcaccgccagcctacctccatcgccaccgactggtgtttctgcctacacggctggcctattatgccgccattgttgggcgtctacgacttcaccggcctgtctctgtcgccaccgactggtgtcctcgcctatacggttggttggtcacaccaccgttcatgggcatctacgtcttcaccaaccggtttgcctttgccgccaccgactggtgtctctgcctacatggctggtctattatgacgccgttggtgggcatcttcgctttcaccgtcgaccgccttctttcgccgccgactgtcgtcaccgccgactggtgtcttcgtctatacggttggttggtcacaccaccgtcgttagacgtctacatcttcaccgccggcttgccttcgccgctgccgactgaccggcttgccttcgccgccgccgactggtgtctccgcctgcacggctggcctattatgctgccattgttgggcatttacgtcttcaccgaccggcttgccttcaccgtcgccgactggtgtcttcgcctacacggctggtctattatgccgctgttgttgggcgtctatgtcttcaccgccggcgtgccttcgctgccgccgactggtgtttccgcctacacgctcgccttcgctgccgccgactggtgtctccgcctgcacggctggcctattatgccgccgttgttgggcgtctacgtcttcaccgaccagctgcctcgtatgacgacaactggtgatatcgtcttcacggccagccatgtcgctgccaccgctaataggtgtcatcatcttcaacacaagttgtctgcgtctgctgccgaccggtttcttcacttccatggctgcatgattcttccagtgttgattggccttatcgtcttcaccgccggtcgtctcatctgctgctga

SEQ ID NO: 90623 - DNA, 457 bp, Oryza sativa
  unsure (1)..(457): unsure at all n locations
  Clone ID: PAT_MRT4530_89275C.1
cttggaatctgctggcattttgaggcagttggcgaactatctcgatgccaatattccgaatgccgaccttattgcaagcgctatcggtgtagcatcagcaattatagacaatgttccacttgttgctgcaacaatggggatgtatgacctgacttcatttcctcaagatgcggacttttggcagcttattgcgttctgtgctggtacgggtggttctatgcttatcattggctctgcagcaggtgtggctttcatgggaatggaaaaggtggatttcttttggtatttccgcaaggtgagtggttttgcccttgcaggttatgcagctggtatcatcacttatctagctgcacaaaatctccctctatcccttcccacttcactagccgagatcccatntatcttggggtcatgaaagggggaccagattcaggtatggaaatggacatattttatt

SEQ ID NO: 90624 - DNA, 1944 bp, Oryza sativa
  Clone ID: PAT_MRT4530_89276C.1
atgggcgtccacgtcttcaccgaccggctggccttcgccgcctccgactggtgttttcgcttgcacgactggtctattatgccgccgttgttgggcgtctacgacttcaccgccggcttgcctccgtcgccgccgactagtgtttttgcctatacggttggttggtcacaccaccgttcatgggcgtccacatcttcaccgaccggctggccttcggcgtcgccgactggtgttttcgcctgcacggctggcctattatgccgccgctgttgggcatctacgacttcatcgccggcttgcctttgccgccaccgactggagtctctgcctacacggctggcctattatgtcgccgttgggggcaacttcgctttcaccatcgccgactggtgtctccgcctacacggctggcctattatgccgccgttgttgggcgtctacgactccaccgccggcctgcctccgccaccactgactggatccagatccagatatgcacaaaagggatacatggctttaagcttatctcttacgctccaggaatggatcagtcagaacatcaccaccagcttgccgtcatcgtcgccgactggtgtcttcgcctatacggttgtttggtcacaccaccgttgttgggcgtctacgtcttcaccgactggccgccacgttcgccgccgactggtgtttccgcctgcatggttgacctattatgtcgccgttgttgggcgtctacgtcttcaccgaccggccgcctcgtccgccgccgactggtgtttccgcgtgcacggctggcctgttataccaccgttgttgggcgtctacgtcttcaccgaccggccgcctcgtctgccgccgactggtgtttccacctgcacgctggcctattatgccgccgctgttgggcgtctacgacttcaccgccggcttgcctccgttgccgccgagtggtgcctccgcctacacggctggcctattatgccgccgctgttgggcgtctacgacttcaccgccggcttgcctccgttgccgccgagtggtgcctccgcctacacggctggcctattatgccgccgctgttgggcatctacgacttcaccgccggcctgcctccgtcgccgccgagtggtgcctccgcctacacggctggcctattatgccgccgttgttgggcgtctacgacttcaccgccggcttgcctccgttgccgccgagtggtgcctccgcctacacggctggcctattatgccgccgctgttaggcgtctacgacttcaccgccggcctgcctccgtcgccgccgactggtgcctccgcctacacggctggcctattatgccgccgctattgggcgtctacgacttcaccgccggcccgcctccgtcgccgccgagtggtgtttccgcctgcacggttggcctattatgtcgccgttgttgggcgtctacgtcttcaccgaccggccgcctcgtccgccgccgactggtgtttctgcgtgcacggctggcctgttataccaccgttgttgggcgtctacgtcttcaccgaccggccgcctcgtctgccgccgactggtgtttccacctgcacgctggcctattatgccgccgttgttgggcgtctacgtcttcaccgaccggccgcctcgcccgccgccgactggtgtttccgcctgcacggctggcctattatgccgctgttgttgggcgtttacgtcttcaccgaccggccgcctcgcccgccgccgactggtgtttccgcctgcacggctggcctattatgccgccgttgttgggcgtctacgtcttcaccgaccggcttgccttcgctgccgccgactggtgtttccgcctgcacggctggcctattatgccgccgttgttgggcgtctacgtcttcaccgaccggccgcctcgtccaccaccgactggtgtttccgcctgcatag

SEQ ID NO: 90625 - DNA, 4305 bp, Oryza sativa
  Clone ID: PAT_MRT4530_89277C.1
atgtttcgacagttggcgcgccagcaacaacgacttcaccgccggcctgcctccgtcgccgccgattggtgcctccgcctacacggctggcctattatgccgccgctgttgggcgtctacgacttcaccgccggcctgcctccgtcgccgccgattggtgcctccgcctacacggctggcctattatgccaccgctgttgggcgtctacgacttcaccgccggcctgcctccgtcgccgccgattggtgcctccgcctacacggctggcctattatgccgccgctgttgggcgtctacgacttcaccgccggcctgcctccgtcgccgccgattggtgcctccgcctacacggctggcctattatgccgccgctgttgggcgtctacgacttcaccgccggcctgccttcgtcgccgccgattggtgcctccgcctacacggctagcctattatgccgctgctgttgggcgtctacgacttcaccaccggcctgcctccgtcgccgccgactggtgcctccgcctacacggctagcctattatgccgctgctgttgggcgtctacgacttcaccgccggcctgcctccgtcgccgccgactggtgcctccgcctacacggctggcctattatgccgccgctgttgggcgtctacgacttcaccaccggcctgcctccgtcgccgccgactggtgtccccgcctatacggtcggttggtcacaccaccgttgatgggcatcgtcatcttcaccgccggcctgcctccgtcgccgccgactggtgcctccgcctacacggctggcctattatgccgccgctgttgggcgtcttcgctttcaccgtcgaccgccttcgtcgccgccgactggtggcttccgcctacacggctggcctattatgctgccgttgttgggcgtctacgtcttcaccgaccggccgcctcgtccgccgccgactggtgcttccgcctgcacggctggcctattatgccgccgttgttgggcgtctacgtcttcaccgccggcttgccttcgtcgctgccgactggtgtttccgcctgcacggctggcctttatgccgccgttgttgggcgtctacgtcgtcaccgaccggccgcctcgtccgccgccgactggtgcttccgcctacacggctggcctattatgctgccgttgttgggcgtctacgtcttcaccgaccggccgcctcgtccgccgccgactggtgcttccgcctgcacggctggcctattatgccgccgttgttgggcgtctacgacttcaccaccggcctgcctccgtcgccgccggctggtgtcatcgcctatacggttggtcggccacaccaccgttcatgggcgtccacgtcttcaccgaccggcttgccttcgtcgccgccgactggtgtctccgcctacacggctggcctattatgccgccgttgttgggcttccacgacttcaccgaccggctcgccttcatcgccgctgactggtgtctccgcctgcacggctggcctattatgccgccgctgttgggcgtctacgacttcaccaccagcctgcctccgtcgccgccgactggtgtcatcgcctatacggtcggttggtcacaccaccgttgatgggcatcgtcatctacactgccggcctgcctccgtcgccgccgactggtgtcatcgcctatacggttggtcggccacaccaccgttcatgggcgtccacgtcttcaccgaccggcttgccttcgtcgccgccgactggtgtctccgcctacacggctggcctattatgccgccgttgttgggcttccacgacttcaccgaccggctcgccttcatcgccgctgactggtgtctccgcctgcacggctggcctgttatgccgccgctgttgggcgtctacgacttcaccaccagcctgcctccgtcgccgccgactggtgtcatcgcctacacggctggcctattatgccgccgctgttgggcgtctacgacttcaccactggcctgactccgccgccgccgactggtgtttccgcctgcacggctggcctattatgccgcagctgttgggcgtctacgacttcaccaccggctcgccgtcgtcgccgccgactggtgtcttcgcctatacggctggcctattatgccgccgttgttggatgtctacatcttcaccgttggctcaccttcgttgccgtcgactggtgtttccgcttacacggctggcctattatgccgccgttagtgggcatcttcgctttcaccgtcgaccgccttcgtcgccgccgactggtgtcttcattgtcattgatggacgactttgttcccacattggccacttctgccatcaccaaggggaatattacaaagctaagatccagatccagatatgcataaaagggattcatggctttaagcttatctcttacgctccaggaatggatcagtcagaacatcaccgaccggcttgccttcgccgctgccgactggtgtttccgcctgcacggctggcctttatgccgccgttgttgggcgtctacgtcttcaccgaccggcttgccttcgccaccgccgactggtgtttccgcctgcacggctggcctttatgccgccgttgttgggcgtctacgtcttcaccgaccggcttgccttcgccgccgccgactggtgtttccgcctgcacggctggcctttatgccgccgttgttgggcgtctacgtcttcaccgaccggccgcctcgtccgccgccgactggtgcttccgcctgcacggctggcctattatgccgccgttgttgggcctctacgtcttcaccgaccggcttgccttcgccgccgccgactggtgtttccgcctgcacggctggcctttatgccgccgttgttgggcgtctacgtcttcaccgaccggcttgccttcgccgctgccgactggtgtttccgcctgcacggctggcctttatgccgccattgttgggcgtctacgtcttcaccgaccggcttgccttcgccgccgccgactggtgtttccgcctgcacggctggcctttatgccgccgttgttgggcgtctacgtcttcaccgaccggcttgccttcgccgccgccgactggtgtttccgcctgcacggctggcctttatgctgccgttgttgggcgtctacgtcttcaccgaccggcttgccttcgccgccgccgactggtgtttccgcctgcacggctggcctttatgccgccgttgttgggcgtctacgtcttcaccgaccggccgcctcgtccgccgccgactggtgcttccgcctgcacggctggcctattatgccgccgttgttgggcgtctacgtcttcaccgactggcttgccttcgccgccgccgactggtgtttccgcctgcacggctggcctattatgccaccgttgttgggcatctacgtcttcaccgaccggcttgccttcgtcgccgccgactggtgtttccgcctgcacggctggcctttatgccgccattgttgggcgtctacgtcttcaccgaccggccgcctcgtccgccgccgactggtgcttccgcctgcacggctggcctattatgctgccgttgttgggcgtctacgtcttcaccgaccggccgccgcatccgccgccgagtggtgcctccgcctgcacggctggcttgttataacgccaactgatgctatcttcttcacggctggctacatcgctgtcactactaataggcatcagtatcttcaacacaaactgcctacgtttgccatggctaccgactggtttcttcacttccatggctgcatgattctgccagtgttgattggccttaccatcttcatcgcctttcgtctcgtctgctgcggactagtgccctcgcctctacatctggtttatacagctaccactacttatgaacatcatcgtcttccgtcgccgactggttatgctgtcgccgactagtgcttttatcttcgcaactgcgcgtcttcactaccagttcacttcatcacggcaatgcaactttgtcatcatggtagagcgacttcatctttattatcttcggcactggcaaactctattgttgctacttcgcaagttttgctacttcaccaaccacgacgtctttgtgagcctcgacatctcggcatgcgatgccatgttattttattacaacaagaggctctccaatattcaggatttctacttggacatcttcaacacatatcttcaatcaagcaatgactactcgacgacaagaagctataattctcgactctatgttcagttgtttcccaac

SEQ ID NO: 90626 - DNA, 1212 bp, Oryza sativa
  Clone ID: PAT_MRT4530_89278C.1
atgtcatactgccatcatgctatcacggtgatgatcatatcgaggctgaagcggagtacaggacacaagtcgctgcgcaactcgccggctgcatgtcttgatccatgcattttggacgtcacgttactctatacggccgtcgcacgttcgcatggtgtcatgatctccaccaattgcggcctcacgcgctcatcaatggatctaacaccgatgactggattggattgtcgaccatacccactgacggccatatccgtcattgtcgaccgggcagatcacacccctattaaattgttcagatatcggttgcctttgggccgattcctagcacctgggggcttgttggatggaccgaataacgtaaggatccagatccagatatgcataaaagggattcatggctttaagcttatctcttacgccccaggaatggatcagtcagaacatcaccactggcttgccgtcgccgccgccgactggtgtcttcgtctatacggttggttggtcacaacaccgttgttgggcgtctacgtcttcaccgaccggccgcctcgtccgccgctgactggtgtttctacctgcacggctgggctttatgccgccgttgttgggcgtctaagtcttcaccgaccggccgcctcgtccgccgttgactggtgtttccgcctgcacggctggcctattatgccgccgttgttgggcttctatgtcttcaccgaccggccgcctcgtccgccaccgactggtgtttccgcctgcacgctaccactactgatggacatcatcgtcttccgtcgccgactggttatgccgccgccggctggtgcttttatcttcacaattatatgtcttcactaccgctttcctacttcaccaaccacgacgtctacaggagcttcgacatctcggcatgcgtcaccaaatatgatgccgtgttatattattacaacaagtggtgttccaatcttcaatatttctactcggacatcttcaacatgcatctttactcaagcaatgactattcgactacaagaagctacagttctcgactctatgttcagttgtttctcaactaaccaaagagtcgggggctacacaaatacaagactatcaaaattcgacaagctttatgtcaagattaagcaatcaatcaatcaacgagtcaattcggggagttattatcttcgtctacgcttcagaaccgtcatttaa

SEQ ID NO: 90627 - DNA, 329 bp, Oryza sativa
  Clone ID: PAT_MRT4530_89279C.1
ccggccggggcgcagcacccaacttcttcctcccaccccccagctcaatcaacacaatcagacacaatggctgaccgaggaacttctcgcggtggaggctttgcttcccgaggtggtgaccgtggcagaggtcgcggacgaggccgtggccgcggtcgcggtaagaacgaggagaaggagtggcagcccgtcaccaagctcggtcgtctcgtaaaggccggcaagatcaacagcatggaggagatctacctgcactctctgcccatcaaggagtaccagatcgtcgacaacttcctgcccaagctcaaggatgaggtcatgaatatcaa

SEQ ID NO: 90628 - DNA, 586 bp, Oryza sativa
  Clone ID: PAT_MRT4530_8927C.1
cggtacccccggcagcggtgccccgccccccgccggcgcccccccgtccgccccaccccctcccccccccccgcccgacagacggccccccccccacccgcggggggcccctgggcaaaaacccgggcgccggcgcgcaagagaacactggggccggcgacacgcgtgtgcccaccgggcggccgctggccccgccgtttcaacgtaccgcatgcgatccgatggtgaacaggacgagagctacccgaaaatcggcgggagcgcccacccgcccccctccgccccgcctcgccgcgcccacgcgcacccgcacagctcccccccaccaccccgccgcgcgccgggccgcgcccaccaccacccttatcgcgggacggatccccccatatcgccctccgccccaacgcaccgacgcgccccccggacccaagcccccgcccacccgcccccgccggccctcgcacgcgttccccgcgccccccccgccgccagcggcggcgcagccacacacggccgcggaggggccggccccgcgcgcgaccggggatttctcagcccccggttgttctccccacccggggagtaa

SEQ ID NO: 90629 - DNA, 231 bp, Oryza sativa
  Clone ID: PAT_MRT4530_89280C.1
gttgtccgcgcgggaacaaagaagcagccaaggggagggggttgaagccgggacgccggggacgaccgagacgatcaagaacggcctggctaagcagagaaagaacagggagaggcaccacacccacccgggaggaggacccgatagaaagcggcagcggcgacagaaggatgagtgcttcgatggacaacaacaactagggacacggcgagcacaacaagaccgcagccg

SEQ ID NO: 90630 - DNA, 332 bp, Oryza sativa
  Clone ID: PAT_MRT4530_89281C.1
tctcactgcgtccgggagagctctcgagaggaaagggaagaaacgaagaatcaagaatcagctccacctcccgtgccaccgtatccatccacccaaagccccggccttttcatcttgtccccctctttttttttccctgccttttcgacttcgacttcctatagcctcactcagcatctccgttgcaccggccaagaattccacgcacagctggccggcggcgacggcggactcgccgaggaagcaaggatgtcatgagccggcggtgtgaaggcgccgccgggggatggagaaccgggagagggcggcggccggcgccgtcggaagcgccg

SEQ ID NO: 90631 - DNA, 255 bp, Oryza sativa
  Clone ID: PAT_MRT4530_89282C.1
atggcgaaggctatggagcaagaacggcgcaagttatcgtttcgacaacagacatatctactagatggtctaatgcgtgtcttctatcgacatgaaaccatgcctttgctaacgaaatatctcaaattgttgattgctatcaagttgatccagaacctaactctgactagtgtggcagcattatttggtcacgctggtttggctagagtggtagcgctatttggccacatcaccctcgccgacgtggcaggataa

SEQ ID NO: 90632 - DNA, 903 bp, Oryza sativa
  Clone ID: PAT_MRT4530_89283C.1
gacacgacctactttgggaaacattgactggaaaagagcatctattgttttatgggagattaaagaatcttaaaggcgctgaattagagaaggcagttgatgactccctgaagaatgttaacctgtttcacggtggtgttggaaataagcaagtggggaagtacagtggtggcatgaaacgaaggcttagtgtcgcaatctcattgattggggaccccaaggttgttttcatggatgagcctagcactggactagatccagcatcaagaaataacttgtggaatgttgtgaaggaggcaaagaaaaatcgtgctatcattcttacaacacattcaatggaagaggcagaggtgctatggtgatagactcggtatttttgtagatggtggttttcaatgccttgggaatccaaaggagctgaaagctagatatggtggcacatatgtgttcactatgacaacatcttcagaacatgaacaggaggtcaaacagctggttcagcatttgtcaccaagtgcaaacaggatatatcacatatcagggacgcagaaatttgagctgccaaaacaggaggtgaagatagcagacgttttccatgcagttgagaaggcaaaaagacagttcagcatacacgcttggggcctcgtcgacaccaccttggaggatgtcttcatcaaggttgccaaaggagcacaaggagtcaatgtgatcgcgtaaataatattatggatcgataggtggttattttttttccttcataggatcatgtgttgtatatagtttgtttgaactatatgctaacctttacttggcattgtgattgagttgttcatgtagtatggtaaagttgtatatttagcaaccatggaattcatattgtaatgtataacaccaattaggccc

SEQ ID NO: 90633 - DNA, 2565 bp, Oryza sativa
  Clone ID: PAT_MRT4530_89284C.1
atggcgggatctttcgtcgcggtcagggggaagcctcggtcgtccccgaagcggagcggcggcggcggcggcgcggatccgcccttgtctctggccatgccgaccgtcgccgatctccacaagacggctgagttggagaagttcttggttgaagccggcctttatgaaggggaggaggagtccgcgaaacgggaggaggttcttcgggagattgatcagatagtcaaggaatgggtgaagaaggtcactattcagaaaggatatagtgagcaaatggttaaagaggcaaatgcagtccttttcacttttggatcttacagactgggggttcatgggcctggagcagacattgatgcactatgtattggaccctcatatgtgaaacgagaggaggaattttttgtcatgctatatggcgcattatcagaaatggaagaagtgactgaactgcaacctgtacctgatgctcatgtaccagttatgaaattcaagtttcgtgggctaccaattgaccttctctatgccagtgtatctcttccagtaataccaccagattttgacatctctcaaggatctgtactttgtgatgttgatgaagcaactgttcgaagtctcaatgggtgcagggtggcagaccagattcttcgacttgttccaaatgcggagatcttccggaaaacactcagatgtttgaagtactgggcacagagaagaggagtttattctaatgttactggtttgctggggggtgtcagctgggccctattggttgctcgtgtctgccaactttatcccaatgctgtgccaagtatgctggtttcaagattcttcagagttttcacccagtggcagtggccaaatcctgtgatgctttgtgccattgagaacgatgataaccttggctttgctgtgtgggatccacgtaagaatcctcgtgatagatcacatgttatgcctatcatcacgccagcatatccatgcatgaactctagttacaatgtttcaactagcacattgagggttattatggagcaatttcagtttggtaataagatttgtcaggaaattgagcttaacaaggctagctggagttctttgtttgagcctttccaatttttcgaggcatatacaagatatctagtggttgacattgttgcagatgatgatgatgatcttcggctttggaagggatggattgaatctcgattgagacagctgactctaaagattgagcgggacactaaagggatgctgcaatgccatcctaacccatgtgaatatgcagatccttcaatacagtgtgctcactgtgccttctacatgggcttatcaaggaaagagggaatgaaaatacgtggtcaaaaatttgatatccgtggaacagtagacgagtttatgcatgaaattggaatgtatacacagtggaaatccgggatggatctagctgtcactcatgtccgtaagaaggagatccccctttatgtatttgaacagggctgccagaaaactcgtccaccaacgccaatatgtgcagagcagcaagaccagtctgataaaaatgactctgaagtttgcacaacgacagcatctctggtgggtcagctcaagcgaaagtatcattctgttggaggtgctgacgttgactcattcaaatctgttagaagggcttcagttagcccggcttgtgaggaagcatcaattcagttgcatgatgatgcaaattttggactgactaattgctccacttcaccacatggatctgaggggtccactgtatcaggcaacagctgtgcagcagttggcactattggtttggttgatgaaactagctgacctggctgcttgatgcccaatgttgaaaatgatccaattcaaacaattttagagcaggcgccttcagaaagtgtggttgagaaggatgaaagaaaactagaaggaattgaaagcttggcaagtagcaactgtactgaattcatggaggttgcagaagtggtcgctgggacgatccttactgagaatggtgatatacgcttaagtggacatgaagtgatctgaattggccttccagatggagatcttttcaggtgtggaaccggatgcatcccaggtttgaaagcattcttgagattttgtcaggagacggagacttgaacagatggcgcccaaatcttcatcaaatcatacgctgaaagaaaaaaaaggatgcctttcggttgctttcaggataagagaagctctgggattgagaaaccatggaagctcaaatatgaagttcttaggctaggctctggagttatggacttgtggttgtgggaggactgaggagactgagcgagcaccagtgtatcagttaaggtagtgcctttccttggctgctagttaggtctaggtcagtatatttggtagttttaaaagaaaaagaaatagaatgccattattcttggctatccattttcactgtgtccactttcctatacttgtttcagattcgttgatgaagtactggtggtacttcacagggtttgtgaaagattgatgggaaaaagtgatatctaattttgaatg

SEQ ID NO: 90634 - DNA, 827 bp, Oryza sativa
  Clone ID: PAT_MRT4530_89285C.1
atcaggcaacagctgtgcagcagttggcactattggtttggttgatgaaactagctgacctggctgcttgatgcccaatgttgaaaatgatccaattcaaacaattttagagcaggcgccttcagaaagtgtggttgagaaggatgaaagaaaactagaaggaattgaaagcttggcaagtagcaactgtactgaattcatggaggttgcagaagtggtcgctgggacgatccttactgagaatggtgatatacgcttaagtggacatgaagtgatctgaattggccttccaagatggaggttttgctttctgtgcactcactctgtactgttcttatcctttcatttcgttctgcttaaattgactgacctataaatatgaatatggtgttggattggtttgcaaagatcttttcaggtgtggaaccggatgcatcccaggtttgaaagcattcttgaggcatgtcttgtactctcacccttcaaatttaacatttaaaatgttctttttgtctatccggtgttgtttggcaccttctctgccatggaagagctcgtctgtcatgaactgagcaattggcgaggagttgaagagaacaaccacccttgacacaccgaatactttgtcacagattttgtcaggagacggagacttgaacagatggcgcccaaatcttcattaaatcatacgctgaaagaaaaaaaaggatgcctttcggttgctttcaggataagagaagctctgggattgagaaaccatggaagctcaaatatgaagttcttaggctaggctctggagttatggacttgtggttgtgggaagactg

SEQ ID NO: 90635 - DNA, 985 bp, Oryza sativa
  Clone ID: PAT_MRT4530_89286C.1
ggttgggtttaccaccaccacccggtgcggttcggtgatagttgcaaacctttctccggtctacaaagacctcagctttcctacctccacttcttctttcttccacaaagcccattccttttcctcccgttcttctcccctcccttctttttccacccactcgaatcctcccttcacattctagttctagctccgcacctttgctgcgcgcgcggatttggttcagggtttggaaatggcaatagacgatgaatcgccgctcagaatggcggcgttggatcgaatgcggcagggaggaggaggggagtgcgacggggcggagaaccagcggtggccgccatggctgaagccgctgctggcgacgagcttcttcggccaatgcaagctgcacgcggactcgcacaagagcgagtgcaacatgtactgcctcgactgcatgaacggcgcgctctgctcgcagtgcctctcctaccaccgcgaccaccacgccatccagatacggaggtcctcctaccacgacgtgatccgggtgtcggagatacagaaagtgctggacatcaccggcgtgcagacgtacatcatcaacagcgcgcgcgtcgtgttcctcaacgagcgcccccagccgaggcccggcaagggcgtcaccaacacctgcgaggtctgcgagcgcagcctgctcgacaccttccgcttctgctccctcggctgcaagatcgtcggcacctccggcgactaccgcggccggaagaggcacgccggcggcggcatcaagaagacgaagaagctgcacaagggcgcggcggcggtgccgtcggactcggacgactcctccacgaccacaagcggcgggagcgacaagagcagcgtggtgcagagcttcaccccgtccacgcctccggcgaccgccaacagctaccgcaccggcaagcgtcgcaagggcgtcccgcaccggtcgccgttcggcagcctcatggtggagttctaa

SEQ ID NO: 90636 - DNA, 532 bp, Oryza sativa
  Clone ID: PAT_MRT4530_89287C.1
aaggacaaaggaattaccattgtatactctctttccacaactgccggggggcaatattgagttttaacatccaagtttaaacccaacaaaaaatagagttttaaatgaggggcttagggcccaaagggagcagattttaacgggcaatgcaccaactgaaatgaccgtcgacaaaacttaacggggtctaaaagaggtaaatatctcaaaggcagatttggaaagcacctcttgaacgagggtcatttttttttggcggcagccttggtcaccttggcaccggttgggtcctttttctccacgtttttgatgacgccaacagccaccggttgcctcatgtcccgcccggcaaaacgaccaagaggggggtcctcaaaaaagggccccacaaccatgggcttggggggaatttttttaaccataccagcattaccggttttgaggaacttgggctccttctccagctccttaccaaatggggtggcgatcttgggcacccgctcagcaaacttgacggtattgtgggaggggg

SEQ ID NO: 90637 - DNA, 178 bp, Oryza sativa
  unsure (1)..(178): unsure at all n locations
  Clone ID: PAT_MRT4530_89288C.1
gcccaagccaccgtggggacctcgtagccggtgcattacgccactaccccgatctggtcgncggtcaccccgatctactcatcgccacaggtgtcggcgatgggaagggaaggannagcccatggcacgtgagccaggccaaattcttctggcacactgtgaacgccctgagcatacg

SEQ ID NO: 90638 - DNA, 588 bp, Oryza sativa
  unsure (1)..(588): unsure at all n locations
  Clone ID: PAT_MRT4530_89289C.1
cntggcgctgagccgctcctncgccgtcnccgccgctgctgctggtggcgcgccatggcgtggtgtcntctccgctggccgcgccgcgcctcgccggcgtgtcgcgctcgtcgtcagggcccagtccgagccggaagtggagccgacnaaagaagagacggccacgtcgtcgtcgtccccgtctccggcgacgaccccgactccgagccccgcggcggcggcgcccaaggcgaaaccggcggcgaagcacgaaagctgttgggacntgctggccgttccacggggccggcgcccgaancggatcaacnggcggctggcgaattgtggggttcgtgtccgcgctggccgtggaagcntcccgcggcggcgggctcctggaccangccggcaactgganccggctggcgtggttcgccgccaccgccgccgngctctccgcggcgtccttgtngccgctgctccgccgcnaanaccgcngaagccaagaaccngcggcgttnattnagccccaccccnaactctggaacggggggttngccatctccgggctcgtccgcggctcgccttcnccgaanttcctccaccggg

SEQ ID NO: 90639 - DNA, 673 bp, Oryza sativa
  Clone ID: PAT_MRT4530_8928C.1
ctgcaggaattcggcacgagggaaaatagacagatacagcatgcagttctgacacttaacaggcaaatcatagaagcacaactctaccatcttcctaggccaataatcatgcagcaagcctgcattgtgttgttcttcttctagacggaacggacaacggcgtccattataatacagataccgaaggaacatcttcataaaaaatatctgaggttcaagatgaatcagcatgcagggtacagatggccatagcgtgtcttcaccttgatgtttaagcagcgctatagctcttttgaggaagaaagtgagaacataaccagagatatcagggttgaagattttatacagggagaaagactcagttacttcatcattatttggtgtgattatgatggcactacgagcagagcaatcatctgggaaagcaagctttatatgactccagatcgattcgtcacggacgtcgtgaagaacaacgagaaagattttacctcgcaaatagcagtgaatcttctccaccagttgctcctcattccagccatccatgtcactcttgaacttgttcagagggagaacaacctgagatagtatgtctttaagtatgtcaaggtgagattcagctccatggacattgatccaggcctggcagtcaaacaagccagtgatggaggag

SEQ ID NO: 90640 - DNA, 947 bp, Oryza sativa
  unsure (1)..(947): unsure at all n locations
  Clone ID: PAT_MRT4530_89290C.1
ggcacgagggctagctttacaaagcaactaagtatcaagcatgagcacattcggcgtgcccatcaccgacgagacgctggaggcgatgtcgcggtacgccgggaagagcatcagccaggtggaccgcgcgcgggaggcgatgcgcctcatccacgccgagggcaagaacctggacgcgctgcagcacgcggtggggctcaaggcctcctacggcgacggcgtctccgccatggtgctcgtctacaacgccaccggcgccgcgctggagctcgtcgacggggagggcgggacgatggactggtacggctacgtctaccacgagcagccgccggcgtcgttccagaacggccagtggctggcgttcctccacgcccacccgacggcgcagtcgatcggctgcgaggcggcgcgcgtcttccgcggcccaagccgcgacgtcgacggccaggtccgggacttcatggtcgcatggtcccttccttggagcgccacgcagaactctgcttacaccgaggtacgtgagaaagatcacttcccaaattactggggttacatcaaagaagagaaactggaaaaggccggcaaaatctgcacagaccaaaccgacaagaactgtgcatcaaccgtcagcgttggtggctgcacctccagcgaattcatcgcggttctgcagcacaagtttggccctctcccagaggagtgacaagggaaatagaaatataataataatcatcgtctgcatgcatggagtcacgataatattgttaactttcaagaattctgtgtatgatcgatcaagtatctttttttttattatctcttaataattcgtgcatgcgcacgcgtacgtgtgcatagaacatctatttattaagagactttggtttcttagttatggatgtaacaattagtttccagcaaataaaagggacatttatctanaaaaa

SEQ ID NO: 90641 - DNA, 1716 bp, Oryza sativa
  Clone ID: PAT_MRT4530_89291C.1
atggacgtggaccctcctcctccgctgccgccgccaccgccaccgccaccgccgccggcgacgccgcagcagaacaaggcggtggagcttcctcccggcgtatacttcaacccgacgcgtgaggaggccatgcaccactacctcaaccggtggatcgccggcaagacgataccggagatggaggccgggttcgtcgccggcgccgacgtctacggcgacggccccgacgcgctgcggcggcggcaccggccgggatactggtgcaactgcgtgtacaagtggttcttcctttgccaccgcaagcgccagagctcgcgcaggaccaccggcaacaagcgcgccgagcgcgtcgtcgccgccggtgggcggtggaaggtggagcaggggaagaaggtgctcggcggcggcggcggcggcggggagagggacagcttagggttctactccagtaactccacgaagaagacgtcatggattatggaggagtacacgagctccgccgctgatggcgccgccgccgcccgcggcgaggaggacagaatggagcccgtgctctgcaagatctacctctcgccgcgcgcccccgccggcgagaagcgggcgctgttcggggaggacggcgtggcggtcgggcccgacggacgcaagaggaacgcccgggtgacggttctggcgacactgttcgacgacgtcgcggcactccttggacagccggtcgccgcgccgccgctgccggcgccaggcgaacagcttggccatggccatggccatttcgatgatgtagcggctcgtttcggacaggtcgccgtggcggcgctgccggcgtcgggcgatcttggccacggcgatttcgatgacgacgccgcggccctccttggacaggtcgccatggcgccggcgccggcgccgggacatcaccaacagggttatgtcgtcgcggaggcgccgctgccggagtcaggttatcttggccattatcaccacgacggccatctcgcgcaggcggcggcggcgccggagcaagatcattatcttggctatcacagtcacgacgcgcatgtcgtggacgcggaggcgacgccggagcaaggctatcatgacgacgcgcatgtcgcggtggcgccggcgccggagcaaggcgatcttggccatgaccaggggcatctcgcggcggcgctgacgccggaggaatgtggcgagatagttggcgcatacgaatttcacccggaaatggtgcagatgctgtccattggcttcgccgcgcccgacgaacagttgttgccgcagctgctagaccccaccggcggcggctacgacatggctagctccgccatcgccgccgttggcgacgtgaacgcatatgccgccgcggcgcccacgccgcgaattagacccaacgcggcggaggcaatggcggcgacggcgacggcagagacaatgccaccaccgctggacgccgtggcggccgagctatccgcgccgccgcgtggcttaccgccggagctcgctttcagtgccttgccgtcggtgcagcaggagccatcctgtgacgacggcgacaacttcggcgagctcgtggcggaggcgatgccgccgttgatcggggagaacgccggcgtcgatgccggcagcgacgagcctctgccggatttggccggcatcatgacggagttggattttggacatgactttttcagcaatcagcacagagaatga

SEQ ID NO: 90642 - DNA, 394 bp, Oryza sativa
  Clone ID: PAT_MRT4530_89292C.1
agagaagctcgcaggcattctgggctacgacgagtttacactctgcgttcgcgccggcatccatgggcggctaactcctctgctcatcgacctgcctcgcagccgggagaccctgcacatcgtccttgtcatgcccaacagtgaaactgacgatcagttgctattcccaaatctgaatgcattgttgttacttgcctcggttacctctcacatctccggcagctcttcttccgacagaggatatgcagtttcaggctccaatggtctcagattgccattgatcacactgaggcccaatgaaactgctccgcagagctcgacgcctcacaatgcttatacccttcctttgacggataatggcaccgcagccacagcaaaggtacagtcccgctga

SEQ ID NO: 90643 - DNA, 537 bp, Oryza sativa
  Clone ID: PAT_MRT4530_89293C.1
atgcgggagtggagtggtttggggctctgggctttttttggtggggtacgcgtcggcgtcggcgtcggcgtcgacgtggcacgatgttcacggcaaagtccacgtgaagacgacctcgacacatgcccaatatttccactcactctacatcaggacaacgatatgtatgccgctcacgacgtcccggcgtgtgcagtggcggaggcggagcagcagccgatccacctgcacttctacatgcacgacgtggtcaccggcccgggcgccacggcggcggaggggttgtacgtgttcgcgacccttgacgccgacgcgccggcgctgttgttctccataaataatgtggtgctcgccgcggggacgccgtatggtgggagcatggtggcggtgatggggcgggacgacttcgtgcggctgccagtggtgagcggcacggggaggtttcgcatggcgagagggtacgcgctggtgaggacggccagcgagcacgggaagaacgccgtgctggagatcgacatctgtttgacgagtttttag

SEQ ID NO: 90644 - DNA, 678 bp, Oryza sativa
  Clone ID: PAT_MRT4530_89294C.1
ccctccgccgccgccgccgccatcaatgttcgcacgccggcggccgcagctgcggcaggtgcgcctgcacggccagcagtatgaatccggagagctcgacgaagccgaagatgagcatggtccagaagcttccgaggtaggagtcggagaggaagccaccgaggagggagaggaggaagacggtgccaatgaagttggtcacgatgttggccgactttgacagcgggtagtgcatctcgttgaagacgtaggtgatcaggttgttccccaccgccgcgatcgccatcatctcgaacgcctggatccctagcacaaagacggccgctttcatgccgccatgcttgcgagagccgcaaggcctgcccctccagtccacggagacctcggaggcagccatggtgtcaccacccttggggccttgccttgactcaacatccatattagctcagagctcactcaacgcaagctcacacaaatggcttaattagctcttcactgtgctagctcactcctaccaagaagagaggctgcaatgctacactgatcagatagtgatatcagtttcttctctgatccttttggtgatagtgcttgctttgtgcttgtgtggtcaggcaacttcttggaggcctcaccaagagcacactatcatcagtggtagtgtgatgtgtgctcgtg

SEQ ID NO: 90645 - DNA, 1952 bp, Oryza sativa
  Clone ID: PAT_MRT4530_89295C.1
atgggcgtctacgacttcaccgccggcctgcctccgtcgccgccgactgatgcttctgcctacacggctggcctattatgccactgctgttgggcgtctacgacttcaccgccggcctgcctccgtcgccgccgattggtgcctccgcctacacggctggcctattatgccgccgctgttgggcgtctacgacttcaccgccggcctgcctccgtcgccgccgactggtgtcctcgcctatacggttggttggtcacaccaccgttcatgggcgtctacgacttcatcgccggcctgcctccgtcgccgcggactggtgcctccgcctacacggctggcctattatgccgccgttgttggatgaatggatcagtcagaacatcaccgaccggcttgccttcgccgccgccgactggtgtttccgcctgcacggctggcctttatgccgccgttgttgggcgtctacgtcttcaccgaccggccgcctcgtccgccgccgactggtgcttccgcctgcacggctggcctattatgccgccgttgttgggcgtctacgtcttcaccgaccggcttgccttcgccaccgccgactggtgtttccgcctgcacggctggcctttatgccgccgttgttgggcgtctacgtcttcaccgactggcttgcctttgccgctgccgactggtgtttccgcctgcacggctggcctttatgccgccattgttgggcgtctacgtcttcaccgaccggcttgccttctccgccgccgactggtgtttccgcctgcacggctggcctttatgccgccgttgttgggcgtctacgtcgtcaccgaccggccacctcgaccgccgccgactgacgagttgggcaacaacatcaactctcctccaattatttgtcttcacggttggcctactacgcaactgccgatagaggatctcatcgttatcatcggctgctacatcgctattgactggatcaccgacatcgtcatcttcatcaacatcttgtcaagcctcatcaacatagccaactctgctgccgttgatgggaaacttcgtcatcatagcgcgccgccacgccaccttccctcctccctcctcgccgccgacgaactcccggccatctccgccatggcgtcggagaagaagcagtcgaacccgatgcgggagatcaaggtgcagaagctcgtcctcaacatctccgtcggcgagagcggcgaccgcctaacccgcgcctccaaggtgctggagcagctcagcgggcagaccccggtgttctccaaggcgaggtacaccgtgcggtcgttcggaatcaggcgtaacgagaagatcgcgtgctacgtgacggtgagaggggagaaggcgatgcagctgctggagagcgggctcaaggtcaaggagtacgagctgctcaggaggaacttcagtgacaccggatgcttcggcttcggtatccaggagcacattgatcttggcatcaagtacgacccctcaacaggtatctatggaatggacttctatgttgtgcttgagcgtgctggctaccgtgttgcccgtcgtcggaggtgcaagtctcgcgttgggatccagcaccgggtgaccaaggaggatgccatgaagtggttccaggtcaagtatgaaggagtcatcctcaacaaggcccaggcgaatacctcttaaaacattttcacctgtaggctcagctgttagaaaagcttttcccttgttgggcagaagttcaccttccaagttttatgttacttgatgaattttccggccagatgtttttgtcaattacctgaaagctaagagcatgatctgatcttacatcatcttgtccaatgtcacacttgtgcttttgcatggaaacatgtagctacctctgaatctgatcacctacttacaattgcaagttcaggaaggtagtcccttctagattagatattttc

SEQ ID NO: 90646 - DNA, 3195 bp, Oryza sativa
  Clone ID: PAT_MRT4530_89296C.1
atggcacggggctctgctctgctcgacggtagcgtactaccgccttctcgcatcgtgagcgagaggcaggcggggctgccgcgccgcttcatgccggagtctgccaccggccgggagatagtgatgctgggcgagggacgcccggcacctgactaccctgggcggtccgtcttcttcctcccctttgcaatggcggggctggttccgccattttcttctttctttatggatgttctggagttctacgatctccagatggcgcacctcacccccaatgcggtgatgacgttggccatcttcgcgcatctgtgcgagatgttcattggggtgcgcccatctcttcggctgttccggtggttcttcaccgtgcagtcggtatcgccgccgtcggtggttggtggctgctacttccagccgcgggggccggtgctgaactgctacatcccctgcgccctccgcaagaagtgggacgactggaagagcgactggttctacacccccctcgccaacgaagcgcgcctccgacttccaagccagcccccggcgcaggtctccagctggcgggcgccggtagatctgggggatgactatgacgccgtcctcgaccgtctggcgggcctgcgatcccaggggctcacaggggccatggtgtacggcgactacctccgtcgccggattgcgccgcttcagcggcgcgcccggagcgcatgggagtacaccgggtccgaggactacatgaggacccaccagggagtcaaatgggactgggctcctgaggacttcaagatattggtccaacgggtgctgaatctcaactccgtggaagcatccctcattcctcaaggagttctccccctttgcatcgatccagaccgcgcctccatcctgaccattatgatgggggtcggggcctcagaggaggaggctcctaagggccacgatgccgtgggcgggagccgccgggaagaatctaccccaggagggggtcgtgcttctgggccccgcgacgggggctcggggagcagccgccctgccgacgcccgggggaagaggaaactgggaggaacacctcccccatctcctccccgagggggcggggcggtgcgtgccagcagcaggcgcccggagggggccgcgccgacatcacagcccgagacggagcgcaagaagaagcggctccgcaagacgggggagacggaaccatcccggggaaacctgatttcccctccaatgtggtcgtttaaccgaccccctcgcagtgatatcccgacgcgttcctcccgccatcccaagtccggccagtccgaggccgaagatccggcggccgcagaggaacaaaggcgagaatctgaccggcgagaggccgcagatcgcctacgggaagctgaagaggccgcccgggaggccgctcgggttcgtcaggcggaggataccgctcgggaggaggccgcccgggctcgccaagccgaagaagccgctaaggaggaggccgcccgggctcgccaggctgaggcgatggcgtcttccgaggcagctcacgacaaggctgctggcgcgtcgcttgggcccactccctcgggcgacgctcaggcgacagcctccggggcggctcgcgacgaggccgcgggcgcatcgcctgggcccgctccctcgggcgacgcccaggaccaaacgggttcgggggacatccctgagctcagcgcgtcttcaggcgggccgagccgcgtcgcattctctccaaggcggcttttctcctcgtcttctgtcgccccgctgagcgccgagccccttctgcaagccttggccgccgcaaacaccgcggtgctagatgggttcagcgcccaggtggaggccttgcgagcggagcgagcggagcgagaggccgcatgggcgcgcgtcgaggaggggcggcgctcggtggatgtcatggtggaggtgggccgtaaggctcaccgccgtcatgtctcggagcttgaagcccgcaaagcggcgctggcggagatcgcccgagaggtggaggaggagcgggaggccgccctcatcgccaccactgtgatgatcgaggcgcaggacaccctccgtctccaacacgggagctgggaggcggagctaaagaaaaagctcgacgccgcccaggaatggatcagtcagaacatcaccgactggcttgccttcgctgctgccgactggtgtttccgcctgcacggctggcctttatgccgccattgttgggcgtctacgtcttcaccgaccggccgcctcgtccgccgccgactggtgcttccgcctgcacggctggcctttatgccgccgttgttgggcgtctacgtcttcaccgaccggcttgccttcgctgccgccgactggtgtcctcgcctgcacggctggcctattatgccgccgctgttgggcgtctacgtcttcaccgaccggccgcctcgaccgccgccgactggtgtttccgcctgcacggctggcctttatgccgccgctgttgggcgtctacgtcttcaccgaccggccgcctcgtccgccgccgactggtgtttccgcctgcacggctggcctttatgccgccgctgttgggcgtctacgtcttcaccgaccggccgcctcgtccgccgccgactggtgtttccgcctgcacggctggcctttatgccgccgctgttgggcgtctacgtcttcaccgaccggccgcctcgaccgccgccgactggtgtttccgcctgcacggctggcctttatgccgccgctgttgggcgtctacgtcttcaccgaccggccgcctcgaccgccgccgactggtgtttccgcctgcacggctggcctttatgccgccgctgttgggcgtctacgtcttcaccgaccggccgcctcgtccgccgccgactggtgcttccgcctgcacggctggcctattatgctgccgttgttgggcatctacgtcttcaccgaccggccgcctcgtccgccgccgactggtgttttcgcctgcacggctggcctattatgccgccgttgttgggcgtctacgtcttcaccgaccggcttgccttcgccgcctccgactggtgtttccgcctgcacggttggcctattatgctgccgttggtgggcgtctacgtcttcaccgaccggtcaccgcatccgccgctgactggtgtcaccgcctgcacggctggcccattataa

SEQ ID NO: 90647 - DNA, 4980 bp, Oryza sativa
  Clone ID: PAT_MRT4530_89297C.1
atggctgagctcacggcgggcgccgtgagctcgctgttgggcctcatccgcaacgcggagctgatgatgtcgggccgcgccaaggaggacatgcagttcatcaaggatgagatggacagcatcaacggcaccctcatgtacctcaccgagaataaggcctcccacaacgaccaggtccgggtgtggatgaggcaggtccgtgatatcgcctacgtcgccgacgactgcatcacgctctaccgccgcgacctcaccccgccggagccgggcttctggccctggctccgccacgtcccgacgtggctgagcacggtgcccacccgccatcgcctcgccaagaagatccacgagctcaaggaccgtgtccgcgacgtcggcgagcggcggcagaggtatggagtggtgggggagatcccgacgaagaatgcggcgtcttcttccggccacgggtctcagacggcgccgtcttctgatgctgcggcggccacagctgcagctgatgctcgagcagatgaagaggacgacgaccagaatcatgcagcaacggcgaccgtcgtcgatggtcgtcctgaccgccgaagagctctagagcctcgcactctagaggactactgctgcgagaacctgcacaagtggctcaaggaattcaacacaaagaggggttcaatggtgccatttatcgctgttgaggcaccgcgtccagaggatgccgccgccgtttcttcaatagtctcgtatgtggcggcggaggcagctggtttcaatcccgcagtctgggtcaatctcccgctgctgcacgcggaatttgatctgccacttgaaccctgggaaattctctgctacatcctgggggagctcaagcctcgatcccagcccgtacaagcacaaggcagcagagataaacgcaagcagaagcaggaggagggaggcaaagatgacaaggccatgggcagtgacgacgacgacgacaaccttcaatcgcaagcctccgatgaaaaatggcaagtgtttgatgaaatgtgggaagagatagaaaaaaggaatttcgacgaccgcattgaacaactcaagacgaagatcgacagcatcaaggacaagaaaacgaccaatgaaatcgagaaaacggtgagaagccaagaaaaggttaatctcaacgctcttgtctacaataaacctttgggcatacttttcctggcattgctgcctcccatgccaaatgatgtaaagtcggtgaggcgtgccctgcgtaccttagcatcgggcgaggcgaatattatcagaaaaattgcagaggcgcttaaaattcatatggaagtatcagaggtgaacaagattcatctcagtaagaagcaatatgtaaacatcctgagggaagtgttcccgacagtcagcagcacgccactgaagcaggataaatctaccaccaagtccactgcactaggaccaagtgctgctgctactatgttaggcaaggatcaaatcaaagaaattgtccacaaggctatactagacaagcaattggagaagcacttggaagtggctgatgctattgaagaaactaagaacaagataggggatatcaaggagaagattaaagtccagctggtgatccaagggattgtggacaagatcaaagaccatttggagaaggataaaaggaccctgattatcctccaagatgataaaggcttcttgtcttcgtgcgaggagaccaccatgaatgctttaagcctactgggttacacttgcgctgatgcaatggtcgtgcttttccgtgacatcttggacaagtgtgatccagatgagttctgcatgaagatgtttgctcatgctttgtatgctgaacccaataggagcaacaatgatctgcgcgagttgtataaaaccctggttccacaaaaatcgctagccagtaatgcttccaaggctagtcctgagcctgacaaaagcaatgacagcacccaactggtctcagaagaatcatcgttgtgcaacaatgctaagaagatattcgagttctcctacaacgacatgcctacagaatacttgtcctgcttgctgtacctagctatcttccctcaaggccaaagcatcaggagatcaaccttacaagcacggtgggttgtagaagggctgataaccgggaaggacgattggcctagtgcagactgtgcggtgcgtaatgctgagagatgttttgacgtgctcatcgatcggtggcttgtttatccaggggatgttaccgctgcaggaaaggtcaagagctgcatggtagacaatcttgttcatgagttcatcaccaaggctgccaaggagaaacaatttgtgaaggaaagccaattgcatcacttggctcaccacttttctattttttgcaatctccgactccgccgctctgacaacatcgaaaagttcatgcaaaatctcaagtatttttcaccttatttgcaactgctcaaggtgctggatctagaaggctgccaatcatttgacaagaacaaccactacctcgaagacatctgcaacaaagttttactgcttaagtatctgagcctaaaggacacaaatgttgcccacctgcccaatgctatcaataaccttcatgagctggaggtattagatatccggcaagccaaggtacctgagattgacacaaactctatcatgcttttcaatctgaagcgactactggcaggtcaagtttatccaagcccaagatacaatagcaccggcatgtatctcaaacgacatgaagagacaatatcatccagtgtgcggattcctcgcaagattgagaaaatggttaaaatggaagtaatgtatagtgtcaacgtttcacgggatggtaatatgttgacagagattggaaagctacggcaactaagaaagcttggtgtggttatcgacgaccatgatggtcacctcaggaagttgcttcaggtgatcagtgacctgagtgggtccctccggtctttatcgatcactctaattggaacaggaagtgagcaggctccttccagcgaagagacatctgcagattgcttgaaacaacatcccaagcttctagagagcttaagcatcagtggagtgatagacaaggtgcagcttctaccattgttggccataggtcagggcaaccgtaaccttgccaaggtaactattagtgggaccatgctgaagcaagaggatctgaaaaaagacatcgccaagctccacaatctatgctgttttaggctcaggcatcgatcatacgacgatgagaaaatcacttttgaagagaatgagttcctggaactcaaataccttatcatagagggcaccaacatgatgagcattatatttaaacaaggagcagcccctaagattgagaagattatcctgtccttcacgtccacaactcatattgctggaattgttgaccttccaaacctgaaggagcttgagctgaaagggaataataatgatcggaagcttgttgcatgtcttgccggtgctcctcacctttccaggttaacactcgatggtaccttgctggatctcaatgaactgaaaatactggccgagctaccaagcttgcgcagcctcattctcctgcaacagtcttgcgtcagaagtagcctcaacttcaacaatggtgagttcagcaagctcaacctccttgttgttaattgctcgaacatcaccagcatcagcttcacagacgaaggagcagcacctaagctcgagaagatcacctggtccttcactaccaagatgttgtccctctctggcatctgctaccttccgcaactgaaggagctcgagctcaacgcacgacggcaacgacggggcaacgacagctcgacggatttgatggtcgtcctcgtccaccaccaagcctactggtccaatctacccaacgaggatgccatggtgttgcaagatggatctacaaacacgaagcatgccaaaaccgatctaatcggatgcataggagacggctgcagccacgccgatgccttcctgccgtcctgcgtcgtgctgatggacaccaacgccgcccgcgactgcgacctccgcctcctccgctccgtctcggagccgccgctgttgggcgtctacgacttcaccgccggcctgcctccgtcgccgccgattggtgcctccgcctacacggctggcctattatgccgccgctgttgggcgtctacgacttcaccaccggcctgcctccatcgccgccgactggtgtccccgcctatacggtcggttggtcacaccaccgttgatgggcatcgtcgacttcaccgccggcctgcctccgtcgccgccgagtggtgcctccgcctacacggctggcctattatgccgccgctgttgggcgtctacgacttcaccgccggcctgcctccgtcgccggcgagtggtgcctccgcctacacggctggcctattatgccgccgctgttgggcgtctacgacttcaccgccggcctgcctccgtcgccgccgagtggtgcttccgcctgcacggctggcctattatgccgccactgttgggcgtctacgacttcaccgccggcctgcctccgtcgccgccgagtggtacctctgcctacacggctggcctattatgccgccgctgttgggcgtctacgacttcaccgccggcctgcctccgtcgccgccgagtggtgccttcgcctacacggctggcctattatgccgccgctgttgggcgtctacgacttcaccgccggcctgcctccgtcgccgccgagtggtgcctccgcctacacggctggcctattatgccgccgctgttgggcgtctacgacttcaccgtcggcctgcctccgtcgccgccgagtggtgcctccgcctacacggctggcctattatgccgccgttgttggatgtctacatcctcaccgttggctcaccttcgttgccgtcgactggtgtttccgcttacacagctgacctattatgccgccattag

SEQ ID NO: 90648 - DNA, 343 bp, Oryza sativa
  Clone ID: PAT_MRT4530_89298C.1
ggaaagtccaaagcttgcacttttaaagtaacatttgcaggagtccatccaccataaatgggggttttttcgatccaggggcattttatgttggtccatactaggggtacagtttaacaataaactgttgtttaaacccagcagtttttgggacgattcttgagtaatacataaattctattttacatatattatctccatgccaagtatttttgaagactggcatagggggcagaagtttaatttgcttttgcactccttggaaaggcaaagatgcctacaaggcaccaattgtatgcaagccctcctttgacttgcaaattttacatgcggtcaaattttt

SEQ ID NO: 90649 - DNA, 1428 bp, Oryza sativa
  Clone ID: PAT_MRT4530_89299C.1
atgggcatcttcatcatcattgccgggttgccttcgccgccgccgactggtgttcccgcctacacggctggcctgttatgccaccgttgctgggcgtctacgacttcgccgccggcttgcctccgccgccgccgactggtgtctccgcctacacggctggcctattatgccgccgttgctgggcgactacgacttcgccactggcttgcctccgccgctgccgactggtgtctccggctacacgactggcctattatgccgccgttgctgagcgtctacgacttcatcgccggcatgcctccgtcgccgccgactggtgtcctcgcctatacgattggttggtcacaccaccgttcatgggcgtccacattttcaccgaccgacttgcctttgccgccgccgactggtgtctctgcctacacggctggcctattatgccgctgttggtgggcaccttcgctttcaccattgaccgcgttcatcgccgttgactggatccagatccagacatgcataaaagggattcatggctttaagcttatctcttacgctccaggaatggatcagtcagaacatcaccaccagcttgatttcgccaccgccgactggtgtcaccgcctgcacggctggcctattatgccgcaattgttgggcgtctacgtcttcaccgaccggccgcctcgtccgccgccggctggtgtttccgcctgcacggctggcctattatgccgccgttgttgggcgtctacgtcttcaccgaccggccgcctcgtccgccgccgactggtgtttccgccggcacgggtggcctattatgccgccgttgttgggcatcgacgtcttcaccgaccggccgcctcgtctgccgccgactggtgtttccgcctgcatggctggcctattatgccgccgttgttgggtgtcaacgtcttcaccgaccggccgcctcatccgccgccgactggtgtttccgccggcacggctggcctattatgctgccgttgttgggcgtctacgtcttcaccggccgcctcatccgccgctgaccggtgtttctatcttcacgactatgcgtcttcatcaccggtttgcttctgttgcctccggctcgtgttcacttcatcacggctatgcaactttgtcaccatggtggagcaacttcatcttcattgtcttctgcaccggcaaacccatttgctgctacttcgcaagtttttctacttcaccaaccatgacgtctacaagatcttcgacatctcggcatgcacttccatattcaatgccgtgttattttactacaacaagtggctctccaatattcaggatttctacttggtcatcttcaacacatatcttcaatcaagcgatgactattcgacgacaagaagctacacttctcgactctatgttcagttgtttcccaactaa

SEQ ID NO: 90650 - DNA, 791 bp, Oryza sativa
  unsure (1)..(791): unsure at all n locations
  Clone ID: PAT_MRT4530_8929C.1
gcccaaataatgtccaagaggagtccacaaaaggctctgcccggtcaggtacctacatcttgctctgtagtaaacntttgttaatatcgccaaaaccactgtgccgtgttcctaccaagaattaaggaattgtggtcgaatgggaccccggcccggtggtggtgnganatacgcccttataggtatatgtagtgcttgtgtgcttcgaacgaattgggtggaaacgggtctttaactgccacttgggacgcacaatagncgtttggaacgtgccacttgtcgnccaagctgggccggagcttgctgtgctgtgggcatggatgcacggtggatttggcaccatgtgtgtggccaatgggaaaggtgagacataaggtgggaaatgatatgggaggtgttggctgggtgtgatggccgggtgtcncaggcccttgacagggacccggatgtngactnggttttggagcggctgcataattaccttgaagcctcgtgtggaaagtaaggtaaggttgccctgtgtgtgccactgttgcaatgcctgtggtnggtggtttgcctgggaacccacaggaaccactgtgtgtgtgtgttgcctgtgcctgggtgttgctgccatgggtggcccccctgtgctgtgggccacccttgtgggtgggccatggaaaaggaccccctctcaaagaaagaaagaggccaaaaaagaaagaacaaaagaaagacatttcctttgaggaatggactgtaccangatataaagtaaagatcccattcttcaaaaaaaaaaaaaa

SEQ ID NO: 90651 - DNA, 616 bp, Oryza sativa
  Clone ID: PAT_MRT4530_892C.1
atggtcaagatgcaagttaagagtagctatcttcgtgatctgaagaagcaattggtggaaccatggaattcgttcatagatcagcatcaaaatggcaatatcttcacttcatcatggtggccggcgacggcgcggaggagcggcgtggcgctgaggcggaaggtgcgggagctccggcggctggtgcccggcggggagggcgcgccggcgaggagcctgctcgtccgcaccgccgactacatcgtccggctcaaggcgagggtcgagctcctcagggcgctctccgcgctctacgacgagcttccactccccgccggcgccgccgccggcgtctgagcccgccgccggggcgccggtggcgcgccgcgatcgatcattgcttgcttgcaccgagatgagagatatacagtagctatgtatagaagaagaattgaatgaattcatttcgaacaagacagcataaaagacattactattgaattgtttgttgtagagtggatggagttcatgcaggctggcggataatcgattaattacaagctgttatttagttacatggagtatataatatatacctcatcatgtgctattaactaaaaaaaaaaaaaaaaaaaaa

SEQ ID NO: 90652 - DNA, 574 bp, Oryza sativa
  unsure (1)..(574): unsure at all n locations
  Clone ID: PAT_MRT4530_89300C.1
tttttttttttttntnttttttttttttttttttttttttgaaaatattagaataacttatattgtgaaacggagagtagtactactacaagatgtgcgcattcctgtgagaatataacaggcaagtaaagaaagcccacccaaccactaaattgcttatcctccaaacgacaacaatacacatcagtaactctatcttcacaagatgatgatcatcatctagctcatgtggcagacaacacgtacaaatacaactcatacatcaccacaattcacgaagaacaagttacaagggaggggatagaaaggtacatgagcagttctgcactacagattgtccatcttttttttcctgttgaaaaatcctatactgtactgagaacacaaacaccctaggacacaagtcttattcacactttgtaaacactacaaggctcaagctgatcaaggacatcacattcggggtgctgtccctttaatgggggcgatgaacatcaagtggccggcatcagggacctcaaaacaaccacacaaacagggaccttcaaacaaccgtgcacactgggggtggcag

SEQ ID NO: 90653 - DNA, 427 bp, Oryza sativa
  unsure (1)..(427): unsure at all n locations
  Clone ID: PAT_MRT4530_89301C.1
accacgcgtacgcctaggcaagggattatttgtatatctggaaataagagaaaccttcaagcttacaggcgtgaggttgaggagcgatcaaagaaaatatttagtggctttagcactagactaatttgcgtggatctatgcgtaagaagttaagtgggaaggaatttgcaatgtgaaaatgaccaaataggataaatatgttcgtgtggaagacttgatcagttgttttctatcctattgttgagctgaattacatttattggtcccatttcaaggatagaattggtatgctagctgcacatttcgtgcttggctgatgttgctgagggtgccttattattagcaacatgattatcgnctgttgttggtncattttgttattaatatttttgtttcananncttatttttnaanattattagtagta

SEQ ID NO: 90654 - DNA, 3128 bp, Oryza sativa
  Clone ID: PAT_MRT4530_89302C.1
atgagacaacctgatcgtcagatttatactatactcggcggattcaaatccccaaacaggagtctcttgcgctacccccttttattattgccgaattcatgtttcgacagtcggcgcgctaggtaggggttgcgtcgaattacccatctataagtgtgatggaatcaacttcagaacaaatgctcagatcaatctgatcaagttcgatggcttgaatcttcaatcccggtttgtctgttctaatctgatttatccgccggcttcctccgatgacggcgttgtgctgatggaccattaagctagccatcggctacagggccagatactcagatttggtgatggttaatttttttttaattaatcaccgctggcaagccggccgacgccgacttcttctgcaaatcgatgaaaaagcagacagcatgcaccttaattatatccagatcattaattttctattgctaattggattgatttctgattacaaattaattaatgcttttttggctatttcgttggcatgtattcatgtactccgtatcaaacaaggaccatggtgggcagcttgttcggcttcatgacatcatctccgcccagcagatcagatggatccgcctgatgcgccccacggcagcctccacgctgcaactggtgctgctgcctcggcgtcctccctgcgattttcctggagtgaatacatgcatgagttgatccatcgatcaacgtgcactatttacttatataatcacgcgtatatttgcatggatttcttttgagctgaccgcatggcaaatatcgtcacggccacaactagaaccatcaattcatcgggttctttccttttaacttattattctatattattagattgatttttaatctcagattaatctcttgctatttttgcgattgatgctggtcatggactcgaggcgtctcagctttccggtcaatcggccgcgagtccactccgccggattgtcctcgccaccgccattgctgatagcaacaacgacttcaccgccggcttgcctccgtcgccgccgactggtgtctccgcctacacggctggcctgttatgctgccgtcattgggcgtttacgacttcaccgccggctcgcctccgtcgccgccgactggtgtcaccgcctgcacggctggcctgttatgccgccgtcgttgggcgtctatgacttcaccgtcggcttgcctccgtcgccgccgactggtgtcaccgcttgcacggctggcctattgtgccgctgttgttgggcgtctacgacttcactgccggcctgtctccgtcatcgccgactggtgtcctcgcctatacggttggcggactccgcctccgttgatgggcctcgtcatctacactggcttgccttcatcgccgctgcctagtgttttcgttgctactgatggacgactttgtttccacattggccacctctatcgtcaccgagggaaatatcaaaaagctaagtcatcactaattttcttttttatatgatattttccttttcctctgcctcactacgtcaactggttcgtcgttgcctagtgagtcgggggctacagatgttatatcaatattttttcaacaattttcttaatatttatcttgattgctcgcgacataacctgagtacaaaagtgccaatcgagttatggagtttcatcttcctatgctttccgtttggtttgctaatggatagttgcctttgggctgattcctagcacccgggggctcgttggatggaccgaataacgcaaggtgctaagtattaatcggaataaatcaaaagcatatagataagataatttattttctgctctttacagttacaaaagtacccgagtagtaaattctgattcgtgaaactttgttccattaatgacgaactcatgtcactcatatgcatgtttgggaagtgcctaggccgactcccggtgcttgggggctatgactactcggacagagcgtttaaacgtaatgagtgatctgctcggggaaatcaaaattgacaggaggagaaatacatatttataaacattttaaaatacttttatttttctcgagtattatatttacatcagatactactcatcctatatgtttgttctgcaggatccagatccagatatgcacaaaagggattcatggctttaagcttatctcttacgctcctgtaagggatcagtcagaacatcaccaacggcttgccgtcatcgccgccgactgttgtcttcgcctatacggttgtttggtcacaccaccgttgttgggcgtctacgtcttcaccgaccggcttgccttcgccgccgccgactgttgtctccgcttgcacgactggcctattatgccgccgttgttgggcatctacgtcttcatcgaccggccgcctcgtccgccgccgactggtgtgtccgcctgcacggctggcctattatgccgtcgttgttgggcgtctacgtcttcaccaaccggcttgccttcgccgccgccgactggtgtctccgcctacacggctggcctattatgccgccgttgttgggcgtctacgtcttcaccgaccggccgcctcgtccaccgccgactagtgtttccgcctgcacagctggcctgttatgacgccaactgatgctatcttcttcacggctggctacgtcgccgtcaccgctaatagtttattcacttccatggctgcatgattctgccagtgttgattggccttatcttcatgaccgctgctaccactactgatggacatcatcgtcttccgtcactgactggttatgccgtcgccgactggtgcttttatcttcacaactgcgcgtcttcactaccggtttgcttctgttgccgccgactcgtgttcacttcatcacggcaatgcaactttgtcatcatggtagagcgacttcatctttattatcttcggcaccggcaaactctattgccgatacttcgcaagttttgctacttcatcaaccacgacgtctttgtgaacctcgacatctcggcatgcgatgccgtgttattttactacaacaagtggctctccaatattcaggatttttacttggacatcttcaacacatatcttcaatcaagcaatgactac

SEQ ID NO: 90655 - DNA, 2466 bp, Oryza sativa
  Clone ID: PAT_MRT4530_89303C.1
atgggcgtccatgtcttcaccgaccggctggccttcgccgccgccgactggtgtttccgcctgcacggctggcctattatgccgccgctgttgggcgtcaacgacttcaccgccggcctgcctccgtcgccgccgattggtgcctccgcctacacggctggcctattatgccgccgctgttgggcgtctacgacttcaccgccggcctgcctccgtcgccgccgagtggtgcctccgcctacacggctggcctattatgccgccgctgttgggcgtctacgacttcaccgccggcctgcctccgtcgccgccgagtggtgcctccgcctacacggctggcctattatgccgccgctgttgggcgtctacgacttcaccgccggcctgcctccgtcgccgccgagtggtgcctccgcctacacggctggcctattatgccgccgctgttgggcgtctacgacttcaccgccggcctgcctccgtcgccgccgagtggtgcctccgcctacacggctggcctattatgccgccgctgttgggcgtctacgacttcaccgccggcctgcctacgtcgccgccgagtggtgcctccgcctacacggctggcctattatgccgccgctgttgggcgtctacgtcttcaccgaccggcttgccttcgccgccgccgactggtgtttccgcctgcacggctggcctttatgccgccgttgttgggcgtctacgtcttcaccgaccggccgcctcgtccgccgccgactggtgcttccgcctgcacggctggcctttatgccgccgttgttgggcgtctacgtcttcaccgactggcttgccttcgccgctgccgactggatccagatccagatatgcataaaagggattcatggctttaggcttatctcttacgctccaggaatggatcagtcagaacatcaccgactggcttgccttcgccgctgccgactggtgtttccgcctgcacggctggcctttatgccgccattgttgggcgtctacgtcttcactgaccggcgtgccttcgtcgccgccgagtggtgcctccgcctacacggctggcctattatgccgccgctgttgggcgtctacgacttcaccgccggcctgcctccgtcgccgccgagtggtgcctccgcctacacggctggcctattatgccgccgctgttgggcgtctacgacttcaccgccggcctgcctacgtcgccgccgagtggtgcctccgcctacacggctggcctattatgccgccgctgttgggcgtctacgacttcaccgccggcctgcctccgtcgccgccgagtggtgcctccgcctacacggctggcctattatgccgccgctgttgggcgtctacgacttcaccgccggcctgcctccgtcgccgccgagtgccgcctgtgccgcctcgcccgtgcgccggccggccgcgccatcgcctcctccagcgtcgccgccacctcctccacgccggcctgccctccgtttcgcgaggagacccccggaactacgttcccgccgtcgccctcctctttccttcgcgccggccacctccagccgccttcctctcctcgcccgagcgccgcccggccgcgccgtcttctccctcggcctcgcagctgcctcctctttcccggcttcgcctccgtttcgcggggaaatcaccggagacgcgtcctcaccgacgactagtggtgtcgccaccactccaccatctccagctgtcccggccgcctcgcctgagcgtcggccgacgtcaccgtctcctccctcggcgtcgccgcatcgccctccaccccggctgctcctcggttttcgccggaacgccgtcgccgcgccggtctctccatcctcttcgtcgccggtgtcctttcggccgccccttcctcctccccggctcgtcggctcgctgcacctccaccacctccggcatcgcagcggcaaggtcgctcttggcctcgcttcccctccatccaaacccctccgcggtccatcatcgtcgtctccgatcgttctcgtcgtcgacgtcccgtcggtcgcccggctcgtcgtctcgcggcaccgcctccgtcatcgtcatcgcagcggcgtgtcccacgtcgtcctcgtctccgtgcagccgctgccggctgtcctcgtcgcctcctcgccggttccggtcgtcgtcgtcatcgtcctctcgtcgttcccggtttcgctcgtcgtggcgttcgtccctccgtcaagccgttctcatccgtcgtccgcatcagtcaagcaagtcgctgcagcccccgtcctcgtcttcgtcctcggctccgcgtcgtcaagcctcgtgccggccgcgtctcgccttcgttcaaggatcgccgccgaagccgtcccctcgccgttcgtctccgttgtgcccgtctgtctccgccgcgcccgttcgtcgttgtcgttcccgcgcctcgtcgcgtggtggtaa

SEQ ID NO: 90656 - DNA, 336 bp, Oryza sativa
  unsure (1)..(336): unsure at all n locations
  Clone ID: PAT_MRT4530_89304C.1
atggtggaaggatctgaggagccggtctcgtcagagttgctgcccccgctgagggccatgcgccaatgctgcgcaccaaaancgcngccacggtggatgagcatggcgactcacggcgtggggatgccagctaccttggggaccggtagcgacatctcggcggaggcccgtgacatcaaatccgctagggcaccggctacttcggggaccggcagggacatccgggcggcgcccgtgacattgaatcggcagggccacggtttgtggtcgtcgtcgtcagagcaagaagcagcagcagcagaaaacggagccccgaaaccatcccaagctgcctaa

SEQ ID NO: 90657 - DNA, 2717 bp, Oryza sativa
  Clone ID: PAT_MRT4530_89305C.1
atgagacaacctgatcgtcagatcaatacacactcggcggattcaaatccccaaacaggagtctcgtgcgctacccccttttattattgccgaattcatgtttcgacagttggcgcgccaggtaggggctgcgtcgaattacccatcgaaaagtgtgatggaatcgactacagaagaaacggcgagattaatctcgatggctcaaatcttcagtcgggagcagcgccgacggatgcgttgcggccaccacgccaccacgggcacatgggagcagccgcctatagcttgctcggagaaatttcatgcatgcatgagttgattcagcagatcaacatacagctggcatatcaagccgccgttgttgggcgtctacgtcttcaccgaccggcttgcctccgccgccgccgactggtgtctctgcctacacggctggcctattatgccgccgctgttgggcgtctacgacttcaccgccggcctgcctccgtcgccgccgagtggtgcctccgcctacacggctggcctattatgccgccgctgttaggcgtctacgacttcaccaccggcctgcctccgtcgccgccgagtggtgcctccgcctacacagctggcctattattatgccgccgttgttggatgtctacatcctcaccgttggctcaccttcgttgccgtcgactggtgtttccgcttacacggctgacctatcatgccgccattagtgggcatcttcgctttcaccgtcgaccgccttcgtcgccgccaactggtgtcttcattgttattgatggacgactttgttcccacattggccacttctgccatcaccaaggggaatattacaaagctaagtcatcatttattttattctttatatgatattttttccttttcctctgcctcactacaccaattggtcttccattgagtagtgagtcgggggctacagatgttatatcatatttttcataatatttatcttgattgcttgcgacataatctgagtacaaaagtacctatcgagttatggagttctatcttcctatgctttccgtttggtttgccaatggatggttgcctttgggccgattcctagcacccgggggctcgttggatggaccgagtaacgcaaggtgctaagtactattcggaataaatcaaaagcatagagatgagataaatttattttctgctcttaataattgcaaaagtacccgagtagtaaactccgatccgtgaaactttgttccattaatgacgaactcatgacactcatatgcatgtttgggaagtgcttaggccgactcccagtgcttggtggctatgattagtcgggcagagtgtttaaacgtaatgagtcatctgctcggggaaatcaaaattgacaagaggagaaatacatatttataaatattttaaaatacttgattttttctcgagtattatatttatatcagatactactcatcctatatgtttgttctgcaggatccagatccagatatgcataaaagggattcatggttttaagcttatctcttacgctccaggaatggatcagtcagaacatcaccaaccggccgcctcgtctgccgccgactggtgcttccgcctgcacggctgacttattatgccgccgttgttgggcgtctacgacttcaccgaccggcttgccttcgccgccgccgactggtgcttccgcctgcacggctgacttattatgccgccgttgttgggcgtctacgacttcaccgaccggcttgccttcgccgccgccgactggtgtttccgcctgcacggctggcctttaatgccgccgttgttgggcgtctacgtcttcaccgaccggcttgccttcgccgccgccgactggtgcttccgcctgcacggctgacctattatgccgccgttgttgggcgtctacgtcttcaccgaccggcttgccttcgccgccgccgactggtgtttccgcctgcacggctgacttattatgccgccgttgttgggcgtctacgtcttcaccaaccggccgcctcgaccgccgccgactggtgtttccgcctgcacggctggcctattatgctgccgttgttaggcgtctacgtcttcaccgaccggccgccgcatccgccgctgactggtgtcaccgcttgcacggctggcctgttataacgccaactgatgctatcttcttcacggctggctacatcgctgtcactactaataggcatcagtatcttcaacacaagctgcctacatttgccatggctgccgactgttttcttcacttccatggctgcatgattctgccagtgttgattggccttaccatcttcatcgccgctatcactactgatgaacatcatcgtcttccgtcgccgactggttatgttgtcgccgactagtgcttttattttcacaactgcgcgtcttcactaccagtttgcttctgttgccgacgactcgtgttcacttcatcacggcaatgcaactttgtcatcatggtagagcgacttcatctttattatcttcggcactggcaaactctattgatgctacttcgcaagttttgctacttcaccaaccacgacgtctttgtgagcctcgacatctcggcatgcgatgccatgttattttactacaacaagaggctctccaatatttaggatttctacttgaacatcttcaacacatatcttcaatcaagcaataactat

SEQ ID NO: 90658 - DNA, 1674 bp, Oryza sativa
  Clone ID: PAT_MRT4530_89306C.1
atggagagcagcttggtcgacacagccgccgccactctctgcctggcggcggccgtcggcgggcggcgccgcgccggcagcttcttgaactgctcgtgctcctccaaagagtacagggtgagcgcatcctactccattgggcggatgctgagcggggtgaggtcggcggcgcgcaagaagctgttcaggagcgagccggccgacctgctggggatcagctggtcgccggactcgccgccgtcgaacggcaccgacggcggccaccaccaccattggtggacggctctcgagaacaacttcgtcctcgagtcctccgaggacgagtacggcggggtcgtcgtggacgccgacaggctgccgtccgacaaggccgccttcgcgcgctcgctcgcggcgtcactctcctactggaagtccgtgggaaagaaaggggtttggctaaagttaccagtggatcgctcagagtttgttcctatagcagtgaagaaaaagaaaggtgggggttttagtcagatatgcaatggtgattttgacattggaatttggaaagaaggtttcaagtaccaccatgccgaggaagcatatgtgatgctgacatactggattcctcatgaagagccatgtatgctccctgcaaatgcatctcaccaggttggagttggggggtttgtgatcaacgatcaaatggaggtcctagtggtgcaagaaaagtactgtggttcatctttggatggtgcttggaaactccccacagggttcattcttgcgtcggaggaaatatttacaggagctactagagaagtcaaggaagaaactggggttgacactgaatttgtggacgttgttgcttttaggcatgcacacaacgtggcatttcagaagtccgacctgttcttcatctgcatgctaaggcctacatcaaacaatatcaaaatcgacgaaacagagattcaggcagcgaagtggatgccgctggaggagttcgtcaagcagccgttcatccagggggaccacatgttccagaagatcatggacatctgcatccagaggctcaggaagtgctactgcggcctgaccgcgcacaacgtcatctccaggttcgacggcaggaggtcgacgctgtactacaacgtttctgaacctgaggatgtgaactgcaatgcttcttgacaacggatcgcccaaccttccgtcaggttcgcgttgtgatctagcattaggctctgtgcaatgcagtgcagagtctcgagtacagcgacctgggtaactgcttgtgaagcagaaatcctctgtaaatatgaaaagaagataggatttatggcaggtcgggtagctctgaccggctgttgcagtttcacgtagattgcagctgaactgaagaagatcttgaagacttttcagaaaatttcgtttctgtgtatgcgctcacgctaagcagctgcttaatgtgtatctagtgttgctatggcgaaagcaaaggacacgtacacaccaagaaccaggacactagtaggatgtgattgcgctccgagttctgcacttacgcgaacagtgtgccaaaatttaggtacttgcaacattgcaagtatcaaatgtgtatgcaaccccttctttgcgcgtgcaaagtataattgaagaacctcctgaatgtctcatcactaaaaaaaaaaaaaa

SEQ ID NO: 90659 - DNA, 1268 bp, Oryza sativa
  unsure (1)..(1268): unsure at all n locations
  Clone ID: PAT_MRT4530_89307C.1
ggcagccatggcggccctccccgcttctccctgctcatcctcctcgtccccgtcgtcccttttcctcgctcccaacccgtgctgctggaaggcggcgccaagagctacggtccgcgcatcggcgtcggcggcacggcggacgctctcctccgcgtgggaacttcccgggccgtcggcggctcggcctgcggcaaggaagccgcgcctcgaggagctggacaccaccaacatgctccttcgccagcgcatcgtcttcctcggctccccggtggatgatatgagtgctgatcttatcatcagccaactcttgctgctggatgctgaggataaaactaaggacatcaaattgtttattaactcacctggaggctccataacagcaggaatgggagtttatgatgccatgaaattttgcaaggctgatatatcaactgtctgctttggactggcggcttccatgggtgcatttttgctagctgctgggacaaaggggaagagattttgcatgcctaatgcgagaattatgatccatcaaccatcagggggtgctggtgggaaggtcacagagatgggattacagatacgagagatgatgtatgagaagataaagatcaacaaaatactgtcaagaatcaccgggaagcctgaagagcagattgatgaggatacaaagtttgactatttcatgagtccttgggaagccaaggattatggcatagttgacagcgttatagatgaagggaagccggggttggttgctcctttggcaggagctgtgccacctccaaaatcgcgtgtgtggtacttatggaatgcttcaggaccaactagaaaaatcatgaaaaatctaccttcagaggagaagcttattcaaaatggtaatggcagtgcaagtggagacgatgggaagttcaaggagatctcaacagcttgaggttattacacattgtgaagcttaatgtagtctggcagtagtagaaaaagaatgtcaagtagctgtagcgctccttaattttatggactgcaagaacacgttcttccaatgcaataactcatggcgatttccagtgtacattgctttcattctgccattatgttggctgaattattattggtcttgccaattgccatacttaaaaaaaaagagagaaaacccagctagttatattacaacactgcctagattgttctcttatgttatgtatatgcactctataaacaaatcgatatggtggttgtttcagctttcaaanttnnnnnaaaaaaaa

SEQ ID NO: 90660 - DNA, 673 bp, Oryza sativa
  Clone ID: PAT_MRT4530_89308C.1
atgcagctcgccaagatgccggctggagccgctatacactaccagcctgcacaaccctgcttgatcgtactgctctgcatggaggtcggccacgggagtcaccactgctatctggacaggcgtgctggagcgatggatgttcacacgcaccggatagcaatcgagcctccgatccagtcgtcgtcgtcatcgccgttttctgttatgctcggggcagatgcaagcacagtggaccggcttgccttcgccaccgccgactggtgtctcgacctacacggctggtctattatgccgctgttgatgggtgtccacgtcttcaccgaccggctggccttcgccgactggtgtttccgcctgcacggctggcctattatgccgctgctgttgggcgtctacgacttcaccaccggcctgcctccgtcgccgccgactggtgtcctcgcctatacggtcggttggtcacaccaccgttgatgggcatcgtcatcttcaccgccggccgccggcctgcctccgtcgccgccgactggtgcctccgcctacacggctggcctaatatgccgccgctgttgggcgtcttcgctttcaccgtcgaccgccttcgtcgccgccgactggtgtcttcattgttattgatggacgactttgttcccacattggccacttctgccat

SEQ ID NO: 90661 - DNA, 669 bp, Oryza sativa
  Clone ID: PAT_MRT4530_89309C.1
atggaaaatcatatagcgagtgctaaggaaacaaagggggatgaagaacacccgactggagaccatgctgcacaaacatccaaggtcctccttgcaaacaaccagatagtaaagctccaatggcgtgattctgaaggcagagcccatggaattattttgaataaacaaagagaagctaaagaacgtgacctcttggtgaagagtctctctgaatacaccaaactactgaatagaatataccggcgatctcaagctaagtccaaaacattagagaagctagtgcctcaccttgggacactggaatcaattaagcaagagcttaaggtctcccaggatgccgcgaaagcaaaagagcgccagctaatggacaagattggccaacttcaaaacacaaacttggagtatcatggttcaatcggagatgccacagaaatcttcgataaattaaggaatgctccagacaagcacttcaagaacatcaatgaagcagccatcatgggagcaagtcaagtactcgcaatgacaaagtcattatatctccgggtggatattgtagtagtcggggatggcttcgcagatggaagttcagaagaacaagcttttgagttgataaatgatgctcaagaatccgctcggaagatagctacagatgtattagaaaacttctga

SEQ ID NO: 90662 - DNA, 1587 bp, Oryza sativa
  Clone ID: PAT_MRT4530_8930C.1
ttttttttcccccccccctccttcctcccggcctccctcggcccaagccgcttcccctcctctcctcctgggccggtcgcccggcccaaccctagccgcgcccccgccccgtgccgcgcacgtgcgcgcgcgtgcgcgcgctgacgccgccgcccgaccgcgtggggcccacgcgccagcgtcgtcttcctcctcccgcgccggccgtcctcctctctccctcccgagcgagccctagcgccattcctcctctaaatccgctctattctctccccgccgtcctcctctctctcccgtgccgccggccgcctccagccgcctctcccgcctcgcccgagcgccgtccggtcgcgtcgtcgcctcctacagcatcgccgccacctcctccacgccggcctgccctccgtttcgcgaggagacccccggaactacgttcccgccgtcgccctcccctttccctcgcgccggccacctccagccgccttcctctcctcgcccgaacgccgcccggccgcgccgtcttctccctcggcctcgcagctgccccctctccctcggtcagccctccgtttcgcggggaaatcaccggagacgcgccctcgccggcgtccagtggcgtcgccaccacttctccgcctccggccgcctctgccacgtccccggagcgccggccgacgtcgccaccaccttcctcggctccacgacgccgctctcatccccggcatcacctccgcctcgcccgaacttcgccggaacaccgtcgcccgcgccggtttctccttcctcctcggcggcatctcctccggctgccccggtcgccgcgccagagcgtcggccgacgtcgccgtctcctccctcggcgtcgccgcatcgccctccaccccggcctgccctcggtttcgccggaacgtcgccgcgaacctctccgtccgcctcaccggagttgttcggccgcccgtccctcctcgccgtgcatcggtcggccacctccaccaccatcttcggcatcgcagcggcaaggtcgtcctcggcatcgtttcccctccatccaaacccctccgcggtccatcatcgtcgtctccgatcgttctcgtcgtcgacgtcccgttcatcctcgctcggctcgtcgtctcgcggcgccgcctccgtcatcgtcatcgctgcggcgtgttccgcgtcgtccccgtctctgtgcagccactgccggctgccctcgtcgccccctcgccggtcccggtcgtcgtcgtcgtcgtcgtcctctcgtcgttcccggtcgtcgtggcgttcgcccctccgtcaagccgttcccgttcgtcgtcctcgcttcgtcaaggtcgctgcagcccccgtcatcgtcttcgtcctcgcctccgcgtcgtcaagcctcgtgccggccgcgtctcgccttcgtccaaggatcgccgccgaagccgtcccctcgccgttcgtctccgttgtgcccgtctgtctccgccgcgcccgttcgtcgttgtcgttcccgcgcctcgtcgcgtggtggtaaggatccgtcctctcgcttccccgccctcgtccgtggtcctttaggttgacatgtggggtccgcat

SEQ ID NO: 90663 - DNA, 493 bp, Oryza sativa
  Clone ID: PAT_MRT4530_89310C.1
atagagtgcgtggacataacataagagaacaatctaggcagtgttgtaatataacttgctgggttttctctctttctttttaagtatggcaattggcaagaacaataataattcagccaacataatggcagaatgaaagcaatgtacactggaaatcgccatgagttattgcattggaagaacgtgttcttgcagtccataaaattaaggagcgctacagctacttgacattctttttctactactgccagactacattaagcttcacaatgtgtaataacctgatgaagggaacccaaagttgtgcattgtaagctaacatatcatgccaagctatgttcgaccgtagaacaatggtaactgtgtgacctggcagacgtacctcaagctgttgagatctccttgaacttcccatcgtctccacttgcactgccattaccattttgaataagcttctcctctgaaggtagatttttcatgatttttctagttg

SEQ ID NO: 90664 - DNA, 2854 bp, Oryza sativa
  Clone ID: PAT_MRT4530_89311C.1
atgcacgcacagatcgggacctacgatgctggtcatggactcgaggcgtctcagctttccggtcgatcggccgcgagtccactttgccggcttgtcttcgccagcgccattgctgataacaacaacgacttcaccgccggcctgcctccgtcgccgccgagtggtgcctccgcctacacggctggcctattatgccgccgctgttgggcgtctacgacttcaccgccggcctgcctccgtcgccgccgagtggtgcctccgcctacacggctggcctattatgccgccgctgttaggcgtctacgacttcaccgccggcccgcctctgtcgccaacgagtggtgcctcgcctacacggctggcctattatgccgccgctgttaggcgtctacgacttcaccgccggcctgcctccgtcgccgccgagtggtacctccgcctacacggttggcctattatgccgctgctgttgggcgtctacgacttcaccgccggcctgcctccgtcgccgccgattggtgcttccgcctacacggctggcctattatgccgccgctgttgggcgtctacgacttcaccgctggcccgcctccgtcgccgccgagtggtgcctccgcctacacggctggcctattatgccgccgctgttgggcgtctacgacttcaccgccggctcgcctctgtcgccaacgagtggtgcctcgcctacacggctggcctattatgccgccgctgttaggcgtctacgacttcaccgccggcttgcccccgtcgccgccaagtggtgcctccgcctacacggctggcctattatgccgccgctgttgggcgtctacgacttcaccgaccggccgcctcgtctgccgttgttggatgtctacatcttcaccgttggctcaccttcgttgccgtcgactggtgtttccgcttacacggctggcctattatgccgccgttagtgggcatcttcgctttcaccgtcgaccgccttcgtcgccgccgactggtgtcttcattgttattgatggacgactttgttcccacattggccacttctgtcatcaccaaggggaatattacaaagctaagtcatcatttattttattctttatatgatatttttccttttcctctgcctcactacaccaattggtcttccattgagtagtgagtcgggggctacagatgttatatcatatttttcataatatttatcttgattgcttgcgacataatctgagtacaaaagtacctatcgagttatggagttctatcttcctatgctttccgttcggtttgccaatggatggttgcctttgggccgattcctagcatccgggggctcgttggatggaccgaataacgcaaggtgctaagtattattcggaataaatcaaaagcatagagataagataatttattttctgctcttaataattgcaaaagtacccgagtagtaaactccgatccgtgaaactttgttccattaatgacgaactcatgacactcatatgcatgtttgggaagtgcttaggccgactcccagtgcttggtggctatgattagtcgggcagagtgtttaaacgtaatgagtcatctgctcggggaaatcataattgataagaggagaaatacatatttataaatatttttaaatacttgattttttctcgagtattatatttatatcagatattactcatcctatatgtttgttctgcaggatccagatccagatatgcacaaaagggattcatggctttaagcttatctcttacgctccaggaatggatcagtcagaacatcaccaccggcttgccgtcatcgccgccgactggtgtcttcgcctatacggttgtttggtcacaccaccgttgttgggcgtctacgtcttcaccgaccggccgcctcgtccgccgtcgactggtgtttccgcctgcacggctggcctattatgaccgccgttgttgggcgtctacgtcttcaccgaccggccgcctcgtccgccgctgactggtgtttccgcctgcacggctggcttattatgccgccgttgttgggcgtctatgtcttcaccgaccggccgcctcgtccgccgccgactggtgtttccgcctgcacggttggcctattatgccgccgttgttgggcgtctacgtcttcaccgaccggccgcctcgtccgccgccgactggtgttgactggtgtcaccgcctgcacggctagcctgttatgacgccaactgatgctatcttcttcacggctggccacgtcgccgtcaccgctaataggcgttatcatcttcaacgcaagctgtctacatctgctgccgactagtttattcacttccatggctgcatgattccgccagtgttgattggctttatcttcttcatcgccggtcgtctcgtctactgctgactagtgccctcgcctctacgtcttgtttatacagctaccactactgatggaaatcatcgtcttccgtcgccgactggttatgccgccgccgactggtgcttttatcttcacaactgcgcgtcttcactaccggttcacttcatcacggcaacgcaactttgtcatcatggtggagcgacttcatctttattatcttcggtaccagcaaactctattgctgctacttcacaagttttgctacttcaccaaccatgacgtctttgtgaatctcgacatctcggcatgcgatgctgtgttattttactacaacaagtggctctccaacattcatgatttctacttggacatcttcaacacatatcttcaatcaagcaataactattcaacgacaagaagctacagttctcgactctatgttcagttgtttcccaac

SEQ ID NO: 90665 - DNA, 601 bp, Oryza sativa
  Clone ID: PAT_MRT4530_89312C.1
atgaagagaggagaggaagatatatagagtataatgagttaatattgagagtatgtcgccatatttatggtttggtgtctatatgggatatgtacactatgctatgataaaaacctatattgtgtggatgaaaacctatccaatgtatgaatgaaaatatgaaccaggatgatttccggaatatgcgtgaatgttggattggaaaacaagagtaatacccaaatgtgttcccagggattgaaccaaaaggagcctgtccccggaggttgaataaacctggagaaattggaccttccgggaaagaaattttttgggaaagctccaattggcgagattcaaacctgaccattaaaggagaaccaagtgggaaccagaccaagaccctaatggacctggataggattttcttggaaaagatatgccctatacttccattggttggatgccggaccacccaaaaaaatggtcttattggataaggttagtgaattaccaataagccaggaaagagtaaatattccgcccccgaaatttttattgaattagaatcctttcccgcaatccaataagagtaaaataaaaaaggagattaaaaaaaaaa

SEQ ID NO: 90666 - DNA, 690 bp, Oryza sativa
  Clone ID: PAT_MRT4530_89313C.1
atggatcagtcagaatatcaccactggcttgtcttcgccgccgctgactgtcttcgcctgcacggctggcctattatgccgccgttgttgggcgtctacgtcttcaccaaccggcttaccttcgtcgccgccgactggtgttttcgcctatacggttggttggtcacaccaccgttgttgagcgtctggccagcgtgctttcgccgccgccgactgctatcaccgcctgcacggctggcctattatgccgctgttgttgggcgtctacgtcttcaccgaccggccgcctcgtccgccgccgactggtgtttccgcctgcacggctggcctattatgccgccgttgttgggcgtctacgtcttcaccgatcggtcgcctcgtccgccgccgactggtgtttccgcctgcacggctggcctattatgccgccgttgttgggcgtctacaccttcacaaaccagccgccttcgccgccgccgactggtgtctccgcctacacggctggcctattatgctgccgtcgttgacgcctacatcttcaccgaccggccgcttcgtatgacgctaattgatgctatcgtcttcatggctggccacgtcgccgccaccacaaatatgcgtcatcaccttcaactcaagttgtctatgtctacgactggtttcttcactttcatggctgcaggattctaa

SEQ ID NO: 90667 - DNA, 987 bp, Oryza sativa
  Clone ID: PAT_MRT4530_89314C.1
gcgccgtcgccctcgtcgcctggcgccgcgccaccgtcgccatcgccatctcatcgccgcggccgcgccgtcgccgtcgcgtcccgccccgcgccgcacgtgcatcccatcgccacctcgcgccgcgcgccaccactgccgcgccgtcgccgtcgccgtcgccatcccgtcgccgcgtgcgcgttccatcgccgcctcgagccgtgctgctgccgctgccacgccgcgagcccgcgccgcgccatcccatcgttgcggtcacaccgtgccgtcatgtcgccgcccatcgcatcccgccccgagccgcgcgccaccgctgtcgccgtcgccatcgacgtcccgtcgccgcgcgcatcccatcgccgctgccgcgccgcgcgctgtctcgtcgcctcgcgccccgtgccgcgctgctccccgagccccgtgccgccgctgctaccgcgccgcgccgcccgttccatcacctcgccgcctgtcgccgtcgccatgcgccgcgcgccgccgctgccgctcgcccgtcgcgtcgctcgcgccacgcagccgtcgcgtcgcctcgctccgcgcgcccccacctcgcgccccgcgccgccgtcgcctctcccctcttcccctctcctatataaacccctattcccactctttccctccatcctcacctcctctcctctacccactccaccacgccgccgcctccacgccgccgcgtcgtcgcatagagccgccgcgccgccgttgtcgtgccgccgcgccgccaccttcgaagccgccgcgccgtcgccccggagccgccgcgccgtgcgtcgccgccttgcgctgccgtcgccgtcgtcgccgccaccgccgccgccgagcccgagggagttgcggatccaagcgaaggccaagacccgcaagactttgagcaaggcaaaagcgggagatgaagcctcggaggatccctatgcctactaccaggagggagatgaagacgatggcgctcagtag

SEQ ID NO: 90668 - DNA, 158 bp, Oryza sativa
  Clone ID: PAT_MRT4530_89315C.1
tcggccacgcttgcgtccacgaaaaccaatctatctcactataggtgggcgatagaacatgagaaagcaagtgcttcatgagtagcagaggggagaggtgagattgcagactgaaaagcatcttcgtgacgaaggcagcactctatctatgggctcta

SEQ ID NO: 90669 - DNA, 315 bp, Oryza sativa
  Clone ID: PAT_MRT4530_89316C.1
actggaatcctggacgcgagagtgcattacccgctgcagggtatgaatggggcaaacgggcagcaagagagggggcgggcggcgctacagccgatgcacactgaacggaggttgctaacccgacaccgagaggcgcggcctgtaccagaccgaccaatacacaaccttcttctgacggaaggacaacgccaacggtcgcgactgcaagtccatgcgcgagtatctcgagacgaattgcaagcgagcaccaacggcaaggagaccactaagctggtcatctcgagccgaccttgaggctgaagagagcggagccag

SEQ ID NO: 90670 - DNA, 618 bp, Oryza sativa
  unsure (1)..(618): unsure at all n locations
  Clone ID: PAT_MRT4530_89317C.1
cgggtcncctttcncccggtgtntccgggcccaaggccttccgggtggtctggccacccaccgggccccttgttcgggcgccttccgcgggcgccagggcgcgccccgcgctctgtggctgctctaccaaacgcggcacactccgcgacgaggccggtcaagcttctgcgcgccngcctngccagccgcctcccgcgtcatagctntccggcagctttactccgccagcacgcccccggcggtggcttcgagatgcaggcgctcgcctcgttgatcgcgtaggcgatcgatccacgtggacgcatgcactgtcacgtgccgatcttttttgacttggtcaaacctgggccggttataacgaattttccaactcgaatgaatggatgaactgatgaactcgaatggctgtagataaaagtagcaatcattttgctgagataaaaaataatcacagtgagatgaaattggcaaggacgagccaagctaacgactgaacgaacgctctattactatcgctcgacgatcagttgctcatttttctcgatcctggaggacgaattntcccgaattcaatatatcatccgatgtaaatttgataaaaaaaaaaaaaaaaaaaaa

SEQ ID NO: 90671 - DNA, 643 bp, Oryza sativa
  Clone ID: PAT_MRT4530_89318C.1
gccattctcgcattatgagaacgctgcttggtcacacttaacacatgtcacaagggcatggggtacgaggcgttcaacagtgaataactgaagatggaaactaaaaaacctgaacttgccaggataacaacatccgaaatggcttgctactaatatgttggctgtggacccaagggttagatcacggccagggagagaagtacgtgtctggtatatctggcagaagaggtgctttctctccgatcagacgatcagcaggtgtaacagaaggctgtgcagccacactgggtctgacatacgatccacattcatacgggaggaagcccagacagactgtttgtttggtcatacagagtgacctggcagagcctgaacttagtgatgagtcctatgatgcacttgctatatgctagtcctttgaacatggacatagtgttgacaatgagcatatgatacctatgggctcgaaaagcgaggttcaacagaatatgatggcgctatcgcaggttgttgctatgaaaccgcgtatggctgtggttgttaagagtgaatgggttacacaatgaattacgcctactaatggatttaaaccatttccatggggccctctcgagagcgaaaagtgataatgacccaaactctt

SEQ ID NO: 90672 - DNA, 189 bp, Oryza sativa
  Clone ID: PAT_MRT4530_89319C.1
atggccagtggggaagcagggcggctgagggcgaagaggaacgccgtggtggcttcgcaccgacgaacccagcctcaccgatggggtgtcgtggaacggtggtgccagtccttgcatctggtggggaagagcagcaaggcagcaggatggaagtgcaaagaggacgacgtcgagatgttggagaggtga

SEQ ID NO: 90673 - DNA, 853 bp, Oryza sativa
  Clone ID: PAT_MRT4530_8931C.1
atgacgtcaccaccggcggcggcggctcggcggctcggacggcgcacgctcgccggcgaacggcggcgcttcggcacgaacggaggacaccaacgggtagcggacggcacggcaaactcaccggcgaccaaagcgacggcggaagaggaacggacggcgacggcgacgaggtcaaagcggcggcggagatcgggtcgacggtgacggcggtgctccgacgatctccggcggcgacgaagaggcggacgaggacggcggtgacttggcgaccacgacggtggtcttcccgagcgacggcgatgaccggaacggcggcggcgcacggctggagcgacggcggcgatggcggctcgaggctactcggcgctagggcgctacggacgacgagaggcgaaggcgagggtggcggcgggtagaggagagctcgggggtccttttaaaggggctaggaggcgacggcgaaggcccacggcgaccggcgacgagaaggaaagatcgggctcggagagagaaaagccgatccgattcgacctcgaatcaaacactttccaagccgatttagccgatgtttccaaaggggaaaaggtagaggagatcccgaggatcatttcccctcttttgattcagccggagaaggaaaggagcggccggatttggaaggaaacggcggcggcgcggcgctagggtttcgggcggcggccgacgcgaggaagacgacgacctgacaggcgggccccacctgtcagcgagcgaggacgcgcgcgcgcgggcggctgcggactgggccggctgggccgaggagagagagaagggttttgggccgactttcggcccaaagccaaaagaagacttt

SEQ ID NO: 90674 - DNA, 333 bp, Oryza sativa
  Clone ID: PAT_MRT4530_89320C.1
gggtttggttattgtaattcttttttttctttttttttttttttttttttctaaaaggactggccccaaattttaaaattttaaaaagattgcgcagaactcaggttttacaaggggtttttaactttttagcaagattgaatcaatttacaggcccatgggtagaaaatttacagtttgggcaaaagtaagcctgaaatggaaaaggggtggttttgaaattaaagggaagcccttattcttagcaccattttgggcccctttgggagaaaaatttacagctggggcaaaagtaagctgaaatggaaaatgggggttttgaatttaaaaggg

SEQ ID NO: 90675 - DNA, 354 bp, Oryza sativa
  Clone ID: PAT_MRT4530_89321C.1
atggccagcggcggcgacgacgactctgtctccgcgctccgacgacgccccgcacgagctgttcatcttctccacgtctcgtcggcagacgacgacttcgcctcggtgctccgacgacgccttgacggtggagctggagcgggaggcggtgccgcgctaccgtcgtcttgcctccatgctccaccacgcgtctgccttatcctctctctcctcctcctcgtcctccagactaccaggtatcaggtatcacgagtacctaggtaccatacttggtacatggaagggaacatggacaaacttgatgtgggcgacgtcctcgacgagcagctcgaagtggcagccgacgcacgttag

SEQ ID NO: 90676 - DNA, 503 bp, Oryza sativa
  Clone ID: PAT_MRT4530_89322C.1
tttgtttttttttttttttttgttttttttttttttttttttttttttttttaaactcattttcatgtgttttgggtacaatactagtgaagtcttttttaaaaaaaaggacggggggaaatccaaaatatccttaaaaacaaagggggataaaccaaagcgcatagaccagacaatttggaagggtcgcaggacaaaaaaaacacccattgtgggaaagagggaggccctaaacaaaaacacggggggaaaaaaacaaaggggaaaaagggcgaatttttcttttctccaaagagggccccacaggggaggggggaccccaaaaaaggccccttttttttgggggggcccaaaattggtatggggaaaaatttcttaaccctaggattaggccaatccggcagatttgggggggggggtatcgggaacaaaaaggctttttgcacaaacaccacaaccggggggggggcgaacaaaactggaagggcaagagggggcccccc

SEQ ID NO: 90677 - DNA, 499 bp, Oryza sativa
  Clone ID: PAT_MRT4530_89323C.1
aagctggcacgcctgcaggtgccggtacgctatacagcggtcgacctacgcgttcgtttacgcgtggacgaaggcgatcacaatttcaagctgttaagatcaataaaaagacagtgttcaacggagagcttcaattggtacagatacatatagtaccacatcactatgtagttgataagaatggacaactagaaagaagtgcttacattgaattcaagacaaaccctatctttattttaaggcacattaatggaaagagctccatctttcgggctttctcaactgatgttatacttaatgctatgatagactatatgagaagagtctaacatgcttaagcatagcacaggagatgagactgttgcattcactgcggttcaatacaagagctaccaagacgttgataaggaggcggaatcatcttaagttggcgagcgctgattacgaataactagtgaagtggtacataaattgcatgcactcgagtaactgctatgta

SEQ ID NO: 90678 - DNA, 729 bp, Oryza sativa
  Clone ID: PAT_MRT4530_89324C.1
atggatggaacggacgtgacattcgacattggtcaggacatattctcagcgcacaagtgcatactcgctgctcgttcatctgtcttcaaggctgagttctttggcgccatgagtgccaaagcccataggaccatcaaaattgaagatatggaagctggtgtgtttagatcactactgcatttcatctacactgacgctctgcctgagacggctttagatgttgtgatggccatgaaggcaaacttcagctcttgcgtggcgcggcaagaatgatcggtacaatgtagagaggctgaagctgatttgcgaggagaagctgtcaaagcacattgactccaacatggtggctaccactttggctctagctgagcagcatagctgccacggattgaaggaagcatgcttcaagttccttagttctgatgccaatcttgagaggatgaaggccagtgaaggttatgagcatttgaaggttagttgcccatttgttctcaaggaacttattgcgagattcatctctccggaaatggaagctgcaagggaaataaccatggatcttcagtaaacttgaagatttgggttgaaacttttgatagtttgtgttataattttgagaattataagaagttctggagatccaataaagataccagaaaaggaaaggaaatggtgttctgcacccatggacggatctacagtagaaaggccggtgtcaggcgacaccgataa

SEQ ID NO: 90679 - DNA, 602 bp, Oryza sativa
  Clone ID: PAT_MRT4530_89325C.1
acaaacactgcaagaacaaagcattaacatggctcaagaatcgaagcctctcgtcgttgctctcctcctctgcctcatgatcgccaaaggcaactgcctctgcatgggctgcatgaacgaccacgtcgtcgtcagccagctcgccgacgaccggagcaaggtcggcggcggcggcggcggcggcggcgcgggcacgctgttcaaggtgacggtggccaaccagtgctgctgcgacgtggggcacgtcgtcgcggcggcgccggggttccggagcgccatcccggtcgaccccaaactgttccggcggaaccccggcggcgatcgggagagctacctcgtcggcgacggcggggcgatcccggcgaacgggagcgtcaccttctactacgcgtggagctccatgttcaggatcagcgtcgtcggcatgactgtggcgaactgcctgtaggactacgcagggaaaatcaattgcttcaaatgggatgagtcatagtccgtgttcaaaattccggaatgaaatttccgaaatttttaaccccccaatatgatttttttcggctgaaatttttttcaatttttttgaatttggtaatattttgttc

SEQ ID NO: 90680 - DNA, 4047 bp, Oryza sativa
  Clone ID: PAT_MRT4530_89326C.1
cgccgatgaacccgttgcgcgagccgccgccgccgccgcgccggtgccgcgccaaccacaggtcgtacgcggcgcgcgcctcggcctccgtccgctccagcagattggggattgaggtgttacggttggccatcgttgacgcctcgctcgggcgtttatacatgtaccgccggcctgcctccgtcgccgccgactggtgcctccgcctatacggtcggttggtcacaccaccgttgatgggcgtctacgacttcaccgccggcctgcctccgtcgccgccgagtggtgtcctccgcctatacggctggcctattatgccgccgctgttgggcgtctacgacttcaccgccggcctgcctccgtcgccgccgagtggtgcctccgcctacacggctggcctattatgccgccgctgttgggcgtctacgacttcaccgccggcctgcctccgtcgccgccgagtggtgcctccgcctacacggctggcctattatgccgccgctgttgggcgtctacgacttcaccgccggcctgcctccgtcgccgccgagtggtgcctccgcctacacggctgacctattatgccgccgctgttgggcgtctacgacttcaccgttggcctgcctccgtcgccgccgactggtgcctccgcctacacggctggcctattatgccgccgctgttgggcgtcttcgctttcaccgccggcctgcctccgtcgccgccgagtggtgcctccgcctacacggctggcctattatgccgccgctgttgggcgtctacgacttcaccgccggcctgcctccgtcgccgccgagtggtgcataaaagggattcatggctgacctattatgccgccgttgttggacgtctacgtcctcaccgttggctcaccttcgttgccgccgactggtgtttccgcttacacggctggcctattatgccgccattagtgggcgtcttcgctttcaccgtcgaccgccttcgtcgccgccgactggtgtcttcattgttattgatggacgactttgttcccgaatggatcagtctacgtcttcaccgaccggctcgcctcgaccgccgccgactggtgtttccgcctgcacggctggcctattatgctgccgttgttgggcgtctacgtcttcaccgaccggccgcctcgtccgctgccgactggtgtttccgcctgcacggctggcctttatgccgccgttgttgggcgtctacgtcttcaccgaccggcttgcctcgaccgccgccgactggtgtttccgcctgcacggctggcctttatgccgccgttgttgggcgtctacgtcttcaccgaccggccgcctcgtccgccgccgactggtgtttccgcctgcacggctgacttattatgccgccgttgttgggtgtctacgtcttcaccgaccggcttgccttcgccgccgccgactggtgtttccgcctgcacggctggcctttatgccgccgttgttgggcgtctacgtcttcaccgaccggcttgccttcgccgctgccgactggtgtttccgcctgcacggctggcctttatgccgccgttgttgggcgtctacgtcttcaccgaccggccacctcgaccgccgctgactggtgtttccgcctgcacggctggcctattatgctgccgttgttgggcgtctacgtcttcaccgaccggccgccgcatccgccgctgactggtgtcaccgcttgcacggctggcctgttatgccgccgctgttgggcgtctacgacttcaccgccggcctgcctccgtcgccgccgagtggtgcctccgcctacacggctggcctattatgccgccgctgttgggcgtctacgacttcaccgccggcctgcctccgtcgccgccgagtggtgcctccgcctacacggctgacctattatgccgccgttgttggacgtctacgtcctcaccgttggctcaccttcgttgccgtcgactggtgtttccgcttacacggctgacctattatgccgccattagtgggcatcttcgctttcaccgtcgaccgccttcgtcgccgccgactggtgtcttcattgttattgatggacgactttgttcccacattggccacttctgccatcaccaaggggaatattacaaaggatccagatccagatatgcataaaagggattcatggctttaagcttatctcttacgctccaggaatggatcagtcagaacgtcaccaccggctcgcctcgaccgccgccgactggtgtttccgcctgcacggctggcctattatgctgccgttgttgggcgtctacgtcttcaccgaccggccgcctcgtccactgccgactggtgtttccgcctgcacggctggcctttatgccgccgttgttgggcgtctacgtcttcaccgaccggccgcctcgaccgccgccgactggtgtttccgcctgcacggctggcctttatgctgccgttgttgggcgtctacgtcttcaccgaccggccgcctcgtccgctgccgactggtgtttccgcctgcacggctggcctttatgctgccgttgttgggcgtctacgtcttcaccgaccggccgcctcgtccgctgcccactggtgtttccgcctgcacggctggcctttatgccgccgttgttgggcgtctacgtcttcaccgaccggcttgccttcgccgctgccgactggtgtttccgcctgcacggctggcctttatgccgccgttgttgggcgtctacgtcttcaccgaccggcttgccttcgccgctgccgactggtgtttccgcctgcacggctggcctttatgccgccgttgttgggcgtctacgtcttcaccgaccggcttgccttcgccgctgccgactggtgtttccgcctgcacggctggcctttatgccgccgttgttgggcgtctacgtcttcaccgaccggccgcctcgtccgccgccgactgatgcttccgcctgcacgactggcctattatgccgccgttgttgggcgtctacgtcttcaccgaccggccgcctcgtccgccgccgactggtgcttccgcctgcacggctggcctatatgccgtcgttgttgggcgtctacgtcttcaccgaccggcttgccttcgccgctgccgactggtgtttccgcctgcacggctggcctttatgccgccgttgttgggcgtctacgtcttcaccgaccggccgcctcgtccgccgccgactggtgcttccgcctgcacggctgacttattatgccgccgttgttgggtgtctacgtcttcaccgaccggcttgccttcgccgccgccgactggtgtttccgcctgcacggctggcctttataccgcagttgttgggcgtctacgtcttcaccgaccggcttgccttcgccgctgccgactggtgtttccgcctgcacggctggcctttatgccgccgttgttgggcgtctacgtcttcaccgaccggccgcctcgtccgccgccgactggtgcttccgcctgcacggctgacttattatgccgccgttgttgggtgtctacgtcttcaccgaccggcttgccttcgccgccgccgactggtgtttccgcctgcacggctggcctttatggaccggccgccgcatccgccgctgactgctatcactactgatgaacatcatcgtcttccgtcgccgactggttatgttgtcgccgactagtgcttttattttcacaactgcgcgtcttcactaccagttcacttcatcacggcaatgcaactttgtcatcatggtagagcaacttcatctttattatcttcggcactggcaaactctattgctgctacttcgcaagttttgctacttcaccaaccacgacgtctttatgagcctcgacatctcggcatgcgatgccatgttattttactacaacaagaggctctccaacattcatgatttctacttggacatcttcaacacatatcttcaatcaagcaataactattcgacgacaagaggctacagttctcgactctatgttcagttgtttcccaac

SEQ ID NO: 90681 - DNA, 283 bp, Oryza sativa
  Clone ID: PAT_MRT4530_89327C.1
atggaggacgacatacttgtaaaatcaaaaggattcgtcattttatgtgaccggtcagaccgggatctggtagccggagtgctgttggtgcactttgtaaacacagagagaatcaataaagtcgtcatctactttaagagttcttcgatttgtgtttcaccgggtttcggcggtctaaccggcgatctacgggcggtcagaccggcggcaagtggcggtcagaccggcgggagcacggcggtcagaccggcggcggcgacaggcgcggcaggcgactttggcg

SEQ ID NO: 90682 - DNA, 1740 bp, Oryza sativa
  Clone ID: PAT_MRT4530_89328C.1
atagtaattggctctgtcattcttttttttaagaatgttaaactttaatagtttaatttgcattactaaatattaccgtagcgttagcacggttcaattactaagtataaattgagtcttaaaacaaaatgaaggaaacaatatactactcctataggtacagtaattattatgagtatcaaggaaggaagcatttatcggtgagactcttctccgcgtccttgatggcctcctcgaggggagtgaggacgaggccgaggtcgaggagccggcgtgctgcgtcacgggcgtcgcgcggcacgagccacggttgtgtagtcccctcctcgaagcggtggatggcgtgggcgtacgcggggcagatcctggcagctagccgtgcgaagtcgctgaactggtagatgccgttggtgcagaggtacctcccggagacggtgggagcctcgagcagcaggaggtgggcggcggcgacgtcgcggacgtggacggcgccgagccagtagtccgcctggtcgtccgtggagccctgcaagaggcgctgcagcacgacagagctggcgttcagggtgggctgcaggagcgggccgaggcatgtcgacggcaggatggtggccaactcgaagccgggccaccgcgccgcgtactcccacgccgccctctcggccagcgtcttggacaccgggtaccacttgccccgggccttgcagaattccatgtccgtccagcttcgctcgtcgacgagctctcccgccgccaaccccgggttgggcaccatggctgagatggaggacgtcaccaccacgcgccgcgctcccgcgccccgcgccgcctccagcacgtgcagcgtgccccgcaccgccggctccaccagttcggcctgcggatcccgcgggtcagccagcgtgcacgggggaggccacgtgcagcacgcccgcccggcagcccccgcccgctgccgccgccgcggagatggcgcccgcatcaagcaggtcggcggggagcaggaggagcctttcgtcgtcgagggcgaggaggtgcgcagcgtccgtgcccggctggtaggttgcggtcacggcgtacccgcgtgcgagaaggatccgcacgatccaggatccgatgaaaccattgccgccggtcacgagcacgcgccgctcctcctccatactcgattccgccggcgatccagatgtcacgcggacgagagggtgtggtcagtggtggactgttcacaacgcactaccactggggtggggaagaacgctcagaaagactttgctttctcgtgcgacaccttctttccaacagttctctcctctatcttctccaatctcccatctcccatcttcctactacccggcgaggcatcgagccgtttgactgatggcatctcttgccacggcgaggtcacagctagcagcactagacgacgtgtcgaagaaagggacaaggcggcgagcggcatcgacctcgtgcccaagttcccaacccagccgctgtcaatagatcttaaggtgaatattgtccatggaagaagcatgacgggtgcggtggcaaccggaaactctgctctagaccttgcccccggaccttgctgcggctgaagatgctggactctcggtcccaagagcgagctggatttgtcaccaagtccccggccggaggaagaagaaagggaacaggagagatatttgttgctctaagatttgtgtggataggtgtcgtgcgggaagcaaagtcttt

SEQ ID NO: 90683 - DNA, 1647 bp, Oryza sativa
  Clone ID: PAT_MRT4530_89329C.1
atggagttctatcttcctatgctttccgtttggtttgccaatggatggctgcctttgggccgattcctagcacccgggggctcgttggatggaccgagtaacgcaaggatccagatccagatatgcataaaagggattcatggctttaagcttacctcttacgctccaggaatggatcagtcagaacatcaccaccggctcgcctcgaccgccgctgactggtgtttccgcctgcacggctggcctattatgccgccgttgttgggcgtctacgtcttcaccgaccggcttgccttcgccgccgccgactggtgtttccgcctgcacggctggcctattatgccgccgctgttgggcgcctacgtcttcaccgaccggctcgcctttgccgccgccgactggtgtttccgcctgcacggctggcctttatgccgccgttgttgggcgtctacgtcttcaccgaccggcttgccttcgccgctgccgattggtgcttccgcctgcacagctcgcctttatgccgccgttgttgggcgtctacgtcttcaccgaccggcttgccttcgccgccgccgactggtggttccgcctgcacggctggcctttatgccgccgttgttgggcgtctacgtcttcaccgaccggccgcctcgtccgccgccgactggcgtctacgtcttcaccgaccggcttgccttcgtcgccgccgactggtatcctcgcctgcacggctggcctattatgccgccgttgttgggcgcctacgtcttcaccgaccggcttgccttcgtcgccgccgactggtgtcctcgcctgcacggctggcctttatgccgccgttgttgggcgtctacgtcttcaccgaccggccgcctcgtccgccgccgactggtgcttccgcctgcacggctggcctttatgccgccgttgttgggcgtctacgtcttcaccgaccggccgcctcgtccgccgccgactggtgcttccgcctgcacggctggcctattatgccgccgttgttgggcgcctacgtcttcaccgaccggcttgccttcgtcgccgccgaccgatgtcctcgcctgcacggctggcctttatgccgccgttgttggacgtctacgtcttcaccgaccggcttgccttcgtcgccgccgaccgatgtcctcgcctgcacggctggcctttatgccgccgttgttgggcgtctacgtcttcaccgaccggcttgcctttgtcgccgccgaccgatgtcctcgcctgcacggctggcctttatgccgccgttgttgggcgtctacgtcttcaccgaccggcttgccttcgccgccgccgactggtgtttccgcctgcacggctggcctttatgccgccgttgttgggcgtctacgtcttcaccgaccggccgccgcatccgccgctgactggtgtcaccgcctgcacggctggcctgttataacgccaactgatgctatcttcttcacggctggctacatcgctgtcactactaataggcatcagtatcttcaacacaagctgcctacgtttgccatggctgccgactggtttcttcacttccatggctgcatgattctgccagtgttgattggccttaccatcttcatcgccggtcatctcgtctgctgctga

SEQ ID NO: 90684 - DNA, 999 bp, Oryza sativa
  Clone ID: PAT_MRT4530_8932C.1
atggcggccggacctcccggccggtttccttcctctcccggcaccctctcccccttccaaccctatttaaaccctacccgcacctccttcgcccatttccaccctttgccgcgccttctcctcgctggaatcgagctcgcgccgtcgccctctctctcctccgtcgccgacgacctccggccggccttctccgctcgccgggaccgtctccagccccggcgtcgcctcctccggcttcgccgcaccgccatcgaccccgtctaccccgtcgccgagcccgccgaccgccggaacgccgtcgaccccgtcgacccgagccgcgccgccgccttcctccgctccggccgcctttttcgtcgtcgccgtcgacctagggtgagccgtggaccgccgcctcttttcccccttcccttcccctctctcggccgccgctccgccgtgcctatggccgccgtcggtgacaataggggcgcgggcaccgcctcccgccggccgcgccgagtggccgccttcgggcgggccgagtggctggtccaccgtggaccgtgaggctgccgcatgggccccactcctgtggacccggtccgcgtgccccttcccctcggcgccaagggtggtaatgctactaggtgcactatagtacctagggtagataccatatctagatggcaagttcaaagccaacagagcttgagcttgagcttgagccagattccgatcaaagtagagatcatcaaactgctggagttgtagctgctgcgctatggcctgaacaatgttaataccttgatagtgagactgctgcgccaccaccctgagctgttgccagacttggttgtttctcagttgaaacgcagctgattgcaataaggggcttgccgctatgccatactgctgccttacgaactcattatatgggctaagcacctgttgatcaaactgcgcagaggcgctgcatgcagcaatagcaagaagagcaaagacgaaaatgatcttcat

SEQ ID NO: 90685 - DNA, 426 bp, Oryza sativa
  Clone ID: PAT_MRT4530_89330C.1
atggtgaggactaagtgcctcttaagcggagacgccaatcggcggcggacgaggcggacagtcggtgaagtcgatgacgcccaacaacagcggcataataggccggccgtgcaagcagaaactccagtcggcggcagacgaggcggccagtcggtgaagtcgatgacgcccgacaacggcggcataataggccggccgtgcaggcgaaaacaccagtcggtggtggcgaaggcaagccggtcggtgaagacgcagaaacaccagtcggcggcggacgaggcggccggcggaaacaccagtcagcggcggacgaggcggccggtcggtgaagatgtagacgcccaacaacagcggcataataggccagctgtgcaggcggtgacaccagttggtggcggcgaaagcaaaccggcggtgaagatatag

SEQ ID NO: 90686 - DNA, 1353 bp, Oryza sativa
  Clone ID: PAT_MRT4530_89331C.1
atgccaagattcatgcaccaccttttctcctccaactccggcaggcttcccttcttctccagcgccggcgacaccccaactccagcaggaagcatacgggttagggtttggggttggggtgagggtaggaggggagttggggaagagggaagaggggggtttcctcggggcttagagggatggctgtggacggccgagaaccggcggtgggcggtggactacggcgggcggtgggccagcgtcggcggcgagggcaaagcaagcgtgtggttaggaggtggccggcagtggttgcggatccggcgacagggagccaccggagacggggaagacggcggggcggaggctcctcgccgtcgccgcctcgtggagaaagagtgggggagaagggggaagggggagggggcttgccgggggtgcctcgccggcgccgttgatcccttctggctagccggcgaggcgggcggcggcacgaatgagacctcaccggagaccaccacgatgcggcgcgccggggagagggacaccgtcctagtcatgatgcgggttgctggatggctcacccagcaaccaccggaccagccggaactattacagggcaagcagatctgggaggcacaggagcattttaggatactggatgagcttcgagattcgtgcttcaggccttctcttccaacactggcgacctcctcattttctccggcgccggcgacacctatactccgacagaggaccctacgggttaggttcccgggggacggggtggggtgggggtgggagggggagggggaaggggaagagttcgctagctctagagggatggccgggggaggcggcggcccggcgctgggcggcgaggcgccggagccgcggggctgggggagggcgatatacaaacagtcaaaaaaaagggaggggggatttgaatatttgatacgcattggaggagcggaggtgaccaacatcatcagccgcagcagaagcaacacgaagaaaacacgtccactgattaaaaggatccagatccagatatgcataaaagggattcatggctttaagcttacctcctacgctccagggatggatcagtcagaacataaccaccggcttgccgtcgtcgctgccgactggtgtcctcgcctatacggttgggtggtcacaccgccgttgttgggcgtctacgtcttcaccgccggcttgccttcgccgctgccgactggtgtctccacctgcacggctggcctattatgccgccgttgttgggcgtctacgtcttcatcgacctgccgcctcgtccgccgccgactggtgtttccgcctacacggctggcctgttatgacgccaactga

SEQ ID NO: 90687 - DNA, 2172 bp, Oryza sativa
  Clone ID: PAT_MRT4530_89332C.1
atgactgacaatccattatattgtccttatcataggtatgtcggccatgctattgaagattgcatcgccttcaaagaatggctccaaagggcagtcaacgagaaaagaatcaatcttgatgcagacgccatcaacccagactaccatgccgtcaatatggtgtccgttgagcctttccctcaaaaacaaagagaaggtaggcgtgcaacatcatgggcgccgctagcccaagttgaagaccaaattgcaaaaataatactgacgaaagcacccgccactcatgtggaggctagccatggcgacaacaaccgaccatggagtgttgtgcaacggaagcctcaaccattgagctttccaccccgtcgcccacaaatgaagttgtcaccgcatactcacccaacttcaagaagatggctagacccaagtcagcgacgtcctccacctcgatttgtccccttctcagagggagacaagtcttttccccgctggggtcgtgagctacctactttggcgcaatttctgcccaagggttgggagcaatcctcaataagcacaagggaggctatggaggtggacaattccaccccgactccaaacattgctccatgcaatgtcatcctcacctacaatgactccacaagtaccggttccgatgaaacgtttacgggaagggagcgagaaatattccatgctgagttggatccagagaagacgaaggtagaagagtccaaagctccaaatgtagacaagcctaccaaggaggcctctcctcctggagaagctccagaaacaaaaactggaagcaaagagaagcctgctgtcgactacaacgttcttgcgcatctcaaacggatcccagcactattgagtgtctatgatgctcttatgatggtgcctgatctgcgcgaagctcttataaaggcgttgcaggctccagaagtttacgaagttgatatggctaagcatcgactctacgacaaccccttgtttgtgaatgagattaccttcgctgatgaagattgtggagattatgggtctcgtgcgctacccccttttattattgccgaattcatgtttcgacagttggcgcgccaggcgattgatgctggtcatggactcgaggcgtctcagctttccggtcgatcggccgcgagtccactccgccggcttgtcctcgccaccgccattgctgatagcaacaacgacttcaccgccggcctgcctccgtcgccgccgactggtgtcatcgcctatacggttggtcggtcacaccaccgttcatgggcgtccatgtcttcaccgaccggctggccttcgccgccgccgactggtgtttccgcctgcacggctggcctattatgccgccgctgttgggcgtctacgacttcaccaccggcctgcctccgtcgccgccgactggtgtcctcgcctatacggtcggttggtcacaccaccgttgatgggcatcgtcatctacaccaccggcctgcctccgtcgccgccgactggtgtccccgcctatacggtcggttggtcacaccaccgttgatgggcatcatcatctacaccgccggcctgcctccgttgccgccgagtggtgcctccgcctacacagctggcctattatgccgccgctgttgggcgtctacgacttcaccgccggcctgcctccgtcgccgccgagtggtgcctccgcctacacggctggcctattatgccgccgctgttgggcgtctacgacttcaccgccggcctgcctccgtcgccgccgagtggtgcctccgcctacacggctggcctattatgccgccgctgttgggcgtctacgacttcaccgccggcctgcctccgtcgccgccgagtggtgcctccgcctacacggctggcctattatgccgccgctgttgggcgtctacgacttcaccaccggcctgcctccgtcgccgccgattggtgcctccgcctacacggctggcctattatgccgccgctgttgggcgtctacgacttcaccgccggcttgcctccgtcgccgccgagtggtgcctccgcctacacggctggcctattatgccgccgttgttggatgtctacatcctcactgttggctcaccttcgctgccgtcgactggtgtttccgcttacacggctgacctattatgccgccattag

SEQ ID NO: 90688 - DNA, 362 bp, Oryza sativa
  Clone ID: PAT_MRT4530_89333C.1
gcaattccgggctacgacccacgcttccgtttaaaggagggggagaacttcaagtagcagtctagattgtgaagatgcgccatgtatggttcgaactggcagtttcaagatcagcagaattgatagtactgacaggggtagacatgtagagactatagtatagtgctattcgagaacccttcagctgatcttagctaacgcaatcagattgttatgaatgagcacagtgatgttgctagagatgccgcgagcataaagataggatctattaacaaaaacgggaattatctcaatcaacaatacctgtctgtaccaaagaaagctagagagttgcttgtagctgggagccatgctagcaattt

SEQ ID NO: 90689 - DNA, 1413 bp, Oryza sativa
  Clone ID: PAT_MRT4530_89334C.1
atggctggcctattaagccgccgctgttgggcgtctacgacttcaccaccggcctgcctccgtcgccgccgactggtgcctccgcctatacggacggtctatcacaccaccgctgatgggcatctacgtcttcaccgccggcctgcctccgtcgccgccgagtggtgcctccgcctacacggctggcctattatgccgccgctgttgggcgtctacgacttcaccgccggcctgcctccgtcgccgccgagtggtgcctccgcctacacggctggcctattatgccgccgctgttgggcgtctacgacttcaccgccggcctgcctccgtcgtcgccgagtggtgcctccgcctacacggctggcctattatgccgccgctgttgggcgtctacgacttcaccgccggcttgcctccgtcgccgccgagtggtgcctccgcctacacggctggcctattatgccgccgctgttgggcgtctacgacttcaccgccggcctgcctccgtcgccgccgagtggtgcctccgcctgcacggctggtctattatgccgccgctgttgggcgtctacgacttcaccgccggcctgcctccgtcgccgccgactggtgtcttcattgttattgatggacgactttgttcccacattggccacttctgccatcaccaaggggaatattacaaagctaatcagaacatcaccaccggctcgcctcgaccgccgccgactggtgtttccgcctgcacggctggcctattatgccgccgttgttgggcgtctacgtcttcaccgaccggcttgccttcgccgccgccgactggtgtttccgcctgcacggctggcctattatgccgccgttgttgggcgtctacgtcttcaccgaccggccgcctcgaccgccgccgactggtgtttccgcctgcacggctggcctattatgccgccgttgttgggcgtctacgtcttcaccgaccggctgcctcgtccgccgccgactggtgcttccgcctgcacggctgacttattatgccgccgttgttgggcgtctacgtcttcaccgaccggctgcctcgaccgccgccgactggtgtttccgcctgcacggctggcctattatgccgctgttgttgggcgtctacgtcttcaccgaccggccgcctcgtccgccgccgactggtgtttccgcctgcacggctggcctattatgccgccgttgttgggcgtctacgctttaccgaccggccgcctcgtccgccgccgactggtgtcaccgcctgaacggctggcctttatgccgacgttgttgggcgtctacgtcttcaccgaccggcttgctttttcgccgccgactggtgctttccgctgcacggttgacttattattccgaccgtggtgggcgtttacgttttaa

SEQ ID NO: 90690 - DNA, 320 bp, Oryza sativa
  Clone ID: PAT_MRT4530_89335C.1
tgtatctgttgatagcctgtaagcacaagtttttatttgcgagtttttttttttttgggagcacacggccctgatgtagactaggatattgtcgacaaaggtgcaaaaggaaattgctcatttgtgcttagccactaatttggggtgcaaaatctggactgcgggtgagcatttttgttgtgtacacctgctggtttattttttattagtagaaagtagagtgaagatctgatagaaaataataagtagcccataatattatagcagaaaaacaatgtttattacgacttaaaaaaaaaaaaaaaaaaaaaaaaaaaaaa

SEQ ID NO: 90691 - DNA, 2026 bp, Oryza sativa
  Clone ID: PAT_MRT4530_89336C.1
gagtgctgttctgccccaagccgacgactttcgtcctcgatgcttgcgtcgcctctcgaatacaccgagtgtacgttgggagaagtacagatatgcagagggatcgcggagttgacccgtattgcatgcaggcagctgctgcttttcttgcggcaaccggagctggtgctggcctcgccaggttcaggttaatggtcaaccaccaccaccactagttgcgctactgagacagagcaatggaggagggggcgaagatcgggagggagcacgagcagcagcagcagcagcacgggagggtgaacggtagcgggagggtcgcggccgtcggtggcggcagcggcggtggcggggacgagattgagattgaggtcgccgcagccgcaggggcttcgccgtcgcggcaacacggcggtctgcacggcgatgtccaggcacccacttggaagagatttcttgcacatgttggtcctggatttgttatctccatcgcataccttgatcctagtaacttgcagactgatttggtagctggatccagccacagatattcgttgctatgggtactcctatttgggttcatatttgtgttgactgtacaatcattggcagcaaatttgggtatcattacaggaaggcacctcgctgagttgtgcatgggtgaatatccaaagtatgtcaagtactgcctatggttactagcagagcttggtgttattgctgccactataccaggagttttaggaactgctttagcctacaacatgctactccacatccctttctgggccggtgtcctagcatgtggggcatgcactttcctaattctcgggttacaaggatatggggctcggaaaatggagttcactatatcagttcttatgttggtgatggctacttgcttttttatggaacttggcaaagttaatcctcctgctggtggggtaattgaggggctttttatcccaaggcccaaaggggattattctacttcagatgcggttgctatgtttggttctcttgttgttccgcataatctcttcctacattcttctttggtgctaacgagaaaaatgccatatacttccaaaggacgcaaggatgcttctacattcttcttgcttgagaatgcattagctctgttcattgcactacttgtaaatgtcgctattgtatcaatatctggtactatatgtgccaacaatctctcatttgccgacacaagcacgtgcagcagtctaacattgaattcaacttatgtactactcaagaatattttgggaaaatcaagttcaactgtgtatggtgtggccttattagtttctggacagagctgcatggtggctacgagttatgctggccaatacatcatgcagattgtactatcatttgtgctgccgtttgctctaattccactcattaaattcagtagcagctgcacaaatataggaccatacaagaatgcaacatctattatccgaatcgcgtggatactgtcattggtgattattggaatcaatatttatttcttctgtactagctttgtcgcttggcttgttcatagcgaccttccaagggttgttaatgcaataattagcagccttgttttccctttcatggcagcctatattgctgctctgatctacttggctttcagaaaagttaacctttcagatccattccccaccaattcagtttctggtgagattgaagttcaacacatacaaatacaagagaagcaggaagatttaggtgtacatttatgaatagaaaaggtaacaccgtccatgtgattcttctctggacatgcatcaagtatttagcatatactgaaattgggacttcaattcatttgaagatgtatatagctcaaagcctcgaaatcatttagaaacattctagctagcaaccgtatgttcagtacaattaggcatatagcaaaacttttctagtcataggtgttgtcctttcgttaattgctcatcaaataaaattctcttccacgccataaaaaaaaaaaaaaaaaaaa

SEQ ID NO: 90692 - DNA, 2514 bp, Oryza sativa
  Clone ID: PAT_MRT4530_89337C.1
atggctggcctattatgccgccgctgttgggcgtctacgacttcaccgccggcttgcctccgtcgccgccgagtggtgcctccgcctacacggctggcctattatgccgccgctgttgggcgtctacgacttcaccgccggcttgcctccgtcgccgccgactggtgtcttcgcctatatggttggttggtcacaccaccgttgttgggcgtctacgtcttcaccgccggcctgcctccgtcgccgccgattggtgcctccgcctacacggctggcctattatgccgccgctgttgggcgtctacgacttcaccgccggcctgcctccgttgccgccgactggtgtcctcgcctacacggctggcctattatgccgccgctgttgggcgtctaccacttcaccgccggcctgcctccgtcgccgccgattggtgcctccgcctacacggctggcctattatgccgccgctgttgggcgtctacgacttcaccgccggcctgcctccgtcgccgccgagtggtgcctccgcctacacggctggcctattatgccgccgctgttgggcgtctacgacttcaccgccggcctgcctccgtcgccgccgagtggtgcctccgcctacacggctggcctattatgccgccgctgttgggcgtctacgacttcaccgccggcctgcctccgtcgccgccgagtggtgcctccgcctacacggctggcctattatgccgccgctgttgggcgtctacgacttcaccgccggcctgcctccgtcgccgccgagtggtgtcctccgcctacacggctggtctattatgccgccgctgttgggcgtctacgacttcaccgccggcctgcctccgtcgccgccgattggtgcctccgcctacacggctggcctattatgccgccgctgttgggcgtctacgacttcactgtcggcctgcctccgtcgccgccgagtggtgcctccgcctacacggctggcctattatgccgccgctgttgggcgtctacgacttcaccgccggcctgcctccgtcgccgccgagtggtgcctccgcctacacggctggcctattatgccgccgctgttgggcgtctacgacttcaccgccggcctgcctccgtcgccgccgagtggtgcctccgcctacacggctggcctattatgccgccgctgttgggcgtctacgacttcaccgccggcctgcttccgtcgccgccgagtggtgcctccgcctacacggctggcctattatgccgccgctgttgggcgtctacgacttcaccgccggcctgcctccgtcgccgccgagtggtgcctccgcctacacggctggtctattatgccgccgctgttgggcgtctacgacttcaccgccggcctgcctccgtcgccgccgagtggtgcctccgcctacacggctggcctattatgccgccgctgttgggcgtctacgacttcaccgccggcctgcctccgtcgccgccgactggtgtcctcgcctatacggatccagatccagatatgcataaaagggattcatggctttaagcttatctcttacgctccaggaatggatcagtcagaacatcaccgaccggcttgcctcatccgccgccgactggtgttttcgcctgcacggctggcctttatgccgctgttgttgggcatctacgtcttcaccgaccggccgcctcgtccgccaccgactggtgcttccgcctgcacggctggcctttatgccgccgttattgggcgtctacgtcttcaccgaccggcttgccttcgccgccgccgactggtgtttccgcctgcacggctggcctttatgccgctgttgttgggcgtctacgtcttcaccgaccggcttgccttcgccgccgccgactggtgtttccgcctgcacggctggcctttatgccgccgttgttgggcgtctacgtcttcaccgaccggccgcctcgtccgccgccgactggtgttttcgcctgcacggctggcctttatgccgctgttgttgggcatctacgtcttcaccgaccggccgcctcgtccgccgccgactggtgcttccgcctgcacggctggcctttatgccgccgttgttgggcgtctacgtcttcaccgaccggcttgccttcgccgccgccgactggtgtttccgcctgcacggctggcctttatgccgccgttgttgggcgtctacgtcttcaccgaccggcttgccttcgccgctgccgactggtgtttccgcctgcacggctggcctttatgccgccgttgttgggcgtctacgtcttcaccgaccggccgcctcgtccgccgccgactggtgcttccgcctgcacggctggcctattatgccaccgttgatgggcgtctgcgtcttcaccgaccggccgcctcatccgccgccgactggtgtcaccgcctacacggctggcctattatgccgctgttgttgggcacctacatcttcatcgccggtcgtctcgtctgctgctga

SEQ ID NO: 90693 - DNA, 2065 bp, Oryza sativa
  Clone ID: PAT_MRT4530_89338C.1
tttttatcattatttatcatattgatttttaatctcagattaatttcttgctattttttgttgttgttcgcatataactacgcggcactattgaggcgattgatgctggtcatggactcgaggcgtctcagctttccggtcgatcggccgcgagtccactccgccggcttgtcctcgccaccgccattgctgatagcaacaacgacttcaccgccggcctacctccgtcgccgccgactggtgtcatcgcctatacggttggtcggtcacaccaccgttcatgggcgtccatgtcttcaccgaccggctggccttcgccgccgccgactggtgtttccgcctgcacggctggcctattatgccgccgctgttgggcgtctacgacttcaccaccggcctgcctccgtcgccgccgactggtgtcctcgcctatacggtcggttggtcacactaccgttgatgggcatcgtcatctacaccgccggcctgcctccgtcgccgccgactggtgtccccgcctatacggtcggttggtcacaccaccgttgatgggcatcgtcatctacaccgccggcctgcctccgtcgccgccgagtggtgcctccgcctacacggctggcctattatgccgccgctgttgggcgtctacgacttcaccgccggcctgcctccgtcgccgccgagtggtgcctccgcctacacggctggcctattatgccgccgttgttggatgtctacatcctcaccgttggctcaccttcgctgccgtcgactggtgtttccgcttacacggctgacctattatgccgccattagtgggcatcttcgctttcaccgtcgaccgccttcgtcgccgccgactggtgtcttcattgttattgatggacgactttgttcccacattggccacttccgccatcaccaaccggccgcctcgtccgccgccgactggtgttttcgcctgcacggttggcctattatgccgccgttgttgggcgtatacgtcttcaccgaccggccgcctcgtccgccgccgactggtgttttcgcctgcacggctggcctttatgccgctgttgttgggcgtctacgtcttcaccgaccggcttgcttcgccgccgccgactggtgtttccgcctgcacggctggcctttatgccgccgttgttgggcgtctacgtcttcaccgaccggcttgccgcatccgccgccgactggtgtcaccgcctgcacggctggcctgttataacgccaactgatgctatcttcttcacggtgccctcgcctctacgtctggtttatacagctaccactactgatggacatcatcgttttctgccgccgactcgtgttatgccgccgtcgactggtgcttttatcttcacaactgcgtcttcactaccagtttgcttctgttgccgccgactcgtgttcacttcatcacggcgatgcaactttgtcatcatggtagagcgacttcatatttattatcttcggcaccggcaaactctattgctgctacttcgcaagttttactacttcaccaaccacgacgtctttgtgaacctcgacatctcggcatgcaatgccatgttattttactacaacaagtggctctccaatattcaggatttctacttggacatcttcaacacataccttcaatcaagtaatgactattcgacgacaagaagctacagttctcgactctatgttcagttgtttcccaactaatcaaagaacattctacttcaacaacttcaaatatttcggtttagacgagttgggcaataacatcaactctcctccaattatttgtcttcacggttggcctactacgcaactgccgatagaggatctcatcgttatcatcggctgctacatcgctattgactggatcaccgacatcgtcatcttcatcaacatcttgtcaagcctcatcaacatagcatactctgctgccgttgatgggaaacttcgtcatcatagtcggctatctctgttgccgctaatcatcattaccgtcggatgcgtttgtcgccgccgattattttcttcatcttca

SEQ ID NO: 90694 - DNA, 663 bp, Oryza sativa
  Clone ID: PAT_MRT4530_89339C.1
atgtcggagcgcgcccggctggcgcgcgttgccgctgccggagcccggcacgctgcggtgcccgcgctgcgactcgacgaacaccaagttctgctacttcaacaactactcgctgtcgcagccgcgccacttctgcaaggcttgccgccgctactggacgcgcggcggcgcgtccgcaacgtccccgtcggcggcgggtgccgccgcaacaccaagcgctcgaccaagaaatcgtcgtcgtcgtcgtcgcgccagggaggcggcgccgggaacgcggcggcggcggccacgtcgtcgtcatccaccacctccacctccacgacggccaccacctcgagcgccgccgccccggcggcggccgcggcggccgacccgccgccgttcttgcagcaagggctgcacggctaccacttcgccgacggtgacgtcgccgccggcgccgccctggccgacggcgggttcccgaggggcgtggcgtcgggcctcctcgcgcagctggcgtccgtcaagatggaggagcacggcaccaacaatggcggcggcgtcggcggcggcttcgtcggagcgcacgagcagtactggcacggcggcaatggcggcggcgggtggccggcggagttcttgtcagggttcagctcatcgtcgtcggggaatgtgttgtga

SEQ ID NO: 90695 - DNA, 1914 bp, Oryza sativa
  Clone ID: PAT_MRT4530_8933C.1
atgctgctggacgagcccctcgacttcgagaaggaggatccgctcctccctaaggcgcgccccgccaagaggaagaaggttattgggttggacgatcttttagaggatttctttgcaagtggtaaggatgaccttaaagcttatggtattgagtccaagcatggatccaaaggatataattcagatgatgaagacaagaaagtgaaggagaaggagattaagtttcgcaaatttgttgaggagtatgaggagcagtcgaaagagttggatgctggtgatgatgtgccccaatggggtcagagagtttttggttgccagaaatccccttctgttcttactgtcacaggagttgaaaattgtcaacttctgaaatcattctgtgcaaatgagcatttaggttttgatctaaacattgaacaaggagaagggtttctagaaggcttgttggtggatggatggcttttgaagttggtcctcttgcatggctctgttgaagattctatagcatcttgggcactaaccaaattgttgtactcgtgtaataagaagtttcgagttgctgcatctgacttttgggacagtgttctttccctaaatgaggctgacaaactctcagttgacattggacactttccaagctactctgttctaaagagtgccatactcaactatggatatatatttgataattgcactgaagtttccacctctgaaagtgtgattgcagatgatggcccacctcaaaacatcattgaatggttaaaaattacatctgcttgctgcaaaatcagaaatgtgcattccatattctcatcttccgaggcagaagaactccttgttattgttatttccttatttttggaccgacaacttgagggcctgctgcttattttgggagactgtctgagttcacttatcttgtacttcaattcaagtgaatgggaaagtagctgtctaatagtggctcagtccatttcccagagagtcacaatggacctgaattgtttaaggattgttgactgtatcactgggactgattaccgtagcaaattcttaaggagccagctggccctacaattcctcaaagttagctttggccttaaggtggcaaatgttgagaagatcttgaagtcagtcatgtccataaatgtgaaggataaagattgcaactttttcagtctgtacgtatacctagttttgatggataacttactcttctcaagtgatgcctttagagataagcatgcgatcattaattcttggcgtaattatctgcggaattgttcaacccaaataggatgcacagactggagattatatgcctcaaaggttcggaacaaggcttcttatcttctgcaaggtgcggtcttgagaagatctgctggcggtgctagcttacccgttcagtaatttggaacttactggaactgggatcaaatggtgcctgtttgaccagtatctatattttaaactactggcaccaaaaactgcatggcagggcaaactttcaggttcttatatttgctttaggaattgtaggccatcttttgtagacaggggcaaaatggctggcagcttgtttatggtatcatggctgacagcacatttggcccatgtatagcttgttccagtatgtggaacctttcaagattttgagacacttgtagctgattagtgattaccccttaccgtcggttttgggatttcccatccggtatggagtgcacgtgcagcttcatcagatagagtctcctcgactgatcgctggaattggtcagattttgcgtgaagcgtggaattcatcaaatgtttaccactcatatttatgaaatattgtcagcattcaatgaatctgtgttaaacaggtcatactaactaatctttaaacgagtctattacaaaaaaaaaaaaaaa

SEQ ID NO: 90696 - DNA, 3421 bp, Oryza sativa
  Clone ID: PAT_MRT4530_89340C.1
atgagacaacctgatcgtcagatcaatacacactcggcggattcaaatccccaaacaggagtctcgtgcgctacccccttttattattgccgaattcatgtttcgacagttggcgcgccaggtaggggctgcgtcgaattacccatcgaaaagtgtgatggaatcgactacagaagaaacggcgagattaatctcgatggctcaaatcttcagtcgggagcagcgccgacggatgcgttgcggccaccacgccaccacgggcacatgggagcagccgcctatagcttgctcggagaaatttcatgcatgcatgagttgattcagcagatcaacatacagctggcatatcaagccgccgttgttgggcgtctacgtcttcaccgaccggcttgcctccgccgccgccgactggtgtctctgcctacacggctggcctattatgccgccgctgttgggcgtctacgacttcaccgccggcctgcctccgtcgccgccgagtggtgcctccgcctacacggctggcctattatgccgccgctgttaggcgtctacgacttcaccaccggcctgcctccgtcgccgccgagtggtgcctccgcctacacagctggcctattattatgccgccgctgttgggcgtctacgacttcaccgccggcctgcctccgtcgccgccgagtggtgcctccgcctacacggctggcctattatgccgccgctgttgggcgtctacgacttcaccgccggcttgcctccgtcgccgccgagtggtgcctccgcctacacggctggcctattatgccgccgctgttgggcgtctatgacttcaccaccggcctgcctccgtcgccgccgattggtgcctccgcctacacggctggcctattatgccgccgctgttgggtgtctacgacttcaccgccggcctgcctccgttgccgccgagtggtgcctccgcctgcacggctggcctattatgccaccgttgttgggcgtctacatcttcaccgccggcctgcctccgtcgccgccgattggtgcctccgtctacacggctggcctattatgccgccgttgttgggcgtctacatcttcaccgccggcctgcctccgtcgccgccgactggtgtcttcgcctatatggttggttggtcacaccaccgttgttgggcgtctacatcttcaccgccggcctgcctccgtcgccgccgattggtgcctccgcctacacggctggcctattatgcctccgttgttgggcgtctacatcttcaccgccggcctgcctccgtcgccgccgattggtgcctccgtctacacggctggcctattatgccgccgttgttgggcgtctacatcttcaccgccggcctgcctccgtcgccgccgattggtgcctccgtctacacggctggcctattatgccgccgctgttgggcgtctacgacttcaccgccggcctgcctccgtcgccgccgagtggtgcctccgcctacacggctggcctattatgccgccgttgttggatgtctacatcctcaccgttggctcaccttcgttgccgtcgactggtgtttccgcttacacggctgacctatcatgccgccattagtgggcatcttcgctttcaccgtcgaccgccttcgtcgccgccaactggtgtcttcattgttattgatggacgactttgttcccacattggccacttctgccatcaccaaggggaatattacaaagctaaataaaagggattcatggttttaagcttatctcttacgctccaggaatggatcagtcagaacatcaccaaccggccgcctcgtctgccgccgactggtgcttccgcctgcacggctgacttattatgccgccgttgttgggcgtctacgacttcaccgaccggcttgccttcgccgccgccgactggtgcttccgcctgcacggctgacttattatgccgccgttgttgggcgtctacgacttcaccgaccggcttgccttcgccgccgccgactggtgtttccgcctgcacggctggcctttaatgccgccgttgttgggcgtctacgtcttcaccgaccggcttgccttcgccgccgccgactggtgcttccgcctgcacggctggcctattatgccgccgttgttgggcgtctacgtcttcaccgaccggcttgccttcgccgccgccgactggtgtttccgcctgcacggctgacttattatgccgccgttgttgggcgtctacgtcttcaccgaccggcttgccttcgccgccgccgactggtgtttccgcctgcacggctggcctttatgccgccgttgttgggcgtctacgtcttcaccaaccggccgcctcgaccgccgccgactggtgtttccgcctgcacggctggcctattatgctgccgttgttaggcgtctacgtcttcaccgaccggccgccgcatccgccgctgactggtgtcaccgcttgcacggctggcctgttataacgccaactgatgctatcttcttcacggctggctacatcgctgtcactactaataggcatcagtatcttcaacacaagctgcctacatttgccatggctgccgactgttttcttcacttccatggctgcatgattctgccagtgttgattggccttaccatcttcatcgccgctatcactactgatgaacatcatcgtcttccgtcgccgactggttatgttgtcgccgactagtgcttttattttcacaactgcgcgtcttcactaccagtttgcttctgttgccgacgactcgtgttcacttcatcacggcaatgcaactttgtcatcatggtagagcgacttcatctttattatcttcggcactggcaaactctattgatgctacttcgcaagttttgctacttcaccaaccacgacgtctttgtgagcctcgacatctcggcatgcgatgccatgttattttactacaacaagaggctctccaatatttaggatttctacttgaacatcttcaacacatatcttcaatcaagcaataactattcgacgacaagaggctacagttctcgactctatgttcagttgtttcccaactaatcaaagaacattctacttcaacaacttcaaatatttcggtttagacgagttggacaacaacatcaactctcctccaatatttcaccttcacggttgacctactatgcaaatgctgatgagcgtctttgtcattttcattggttgctacactgctattggctggatcaccgacatcgtcatcttcatcatgtcggttgcgtttgttgtcgtcaactacacaactttatcgctgagcgccttcatattcattgctggctgacctgactgccgccgactggtttcttcgcctccatggctatgcgacttcagtacttttgattggtatca

SEQ ID NO: 90697 - DNA, 1175 bp, Oryza sativa
  Clone ID: PAT_MRT4530_89341C.1
cttatctcttacgctccaggaatggatcagtcagaacatcaccaaccggccgcctcgtctgccgccgactggtgtttccgcctgcacggctggcctttatgccgccgttgttgggcgtctacgtcttcaccgaccggcttgccttcgccgctgccgactggtgtttccgcctgcacggctggcctttatgccgccgttgttgggtgtctacgtcttcaccgactggccgcctcgtccgccgccgactggtgtttccgcctgcacggctggcctattatgccgccgttgttgggcatctacgtcttcaccgaccggcttgccttcgccgccgccgactggtgtttccgcctgcacggctggcctattatgccgccgttgttgggcgtctacgtcttcaccgaccggccgcctcgaccgccgccgactggtgtttccgcctgcacggctggcctattatgctgccgttgttgggcgtctacgtcttcaccgaccggccgccgcatccgccgctgactggtgtcaccgcttgcacggctggcctgttataacgccaactgatgctatcttcttcacggctggctacatcgctgtcactactaataggcatcagtatcttcaacacaagctgcctacgtttgccatggctgccgactggtttcttcacttccatggctgcatgattctgccagtgttgatgggcctattatgccgctgtttagtgcccttacctctacgtctggtttagacagctaccactactgatggacatcatcgtcttccgttgccgactggttatgccgccgccgactggtgcttttatcttcacaactgcgcgtcttcgctaccagtttgcttctgttgccgccgactcgtgttcacttcatcgcggcgatgccactttgtcatcatggtggagcgacttcatctttattatcttcgtcactggcaaactctattgctgctacttcgcaagttttgcgggttcaccaaccacgacgtctttgtgcaacctcgacatctcggcatgcgatgctgtgttattttactacaacaagtggctctccaatattcaggatttctacttggacatcttcaacacatatcttcaatcaagcaataactattcgacgacaagaggctacagttctcgactctatgttcagttgtttcccaac

SEQ ID NO: 90698 - DNA, 3009 bp, Oryza sativa
  Clone ID: PAT_MRT4530_89342C.1
atggagcttcagcaggaaagctcggatgcggggactttgttctcggcgccatcaaggaacctatcatcctcttcatcagcatttgtttctgctaaccaatcccctttcttcacgccacgatgtctatctgcccgtgtctcagatcacgcacatcctgagaacaatagttccttgagtggtactgtgctgaaaatcagtgatattctttccagcgacactctgttaaagcgggagcaattaccatcagccactgtggggttattgccatcggatgcttctcctcctcctagtatttgcacttcaagcaattttgacactccagcaattgtctataacaatcctagcttcatttccaccttcagtgacccatgtcaaggcagttcatcagcaactagcactggtgtccgttcaactcagaaggagaagcataagagacagtggggattatatcggaaatcttcatcctctcaacctacgacatcagctacctctgtcaacagacttcggagctttgatgtgtacataggatttcatggccgtaaggcttcactactgaggttcactaattggcttcgtgcagagcttgagatccatggaatcagctgctttgcttctgacaggtctagatgccggagttctcacagccatgatactattgagaggattatgaatgcttccacatatggagttgtcatccttacaagaaaatcatttggcaatccttataccatcgaggagctgaggaacttctttggcaagaaaaatctgatccctatattctttgacttgggtgctgctgattgccttgccagagatattattgagaagagaggagaactgtgggagagacatggcggcgagctttggatgttatatggtggaatggaacaggaatggagggaatcagttgatgctctttctcgggtgtcagatgtgcaattagaagcaaatgatggcaattggagacattgcatacttcaaactatcattgttttggccacaaaattgggcaggagaagtgtggttgatcgggtgaataggtggagaggaagggtggagaaggaggaattccctttccctcgtaatgctgattttgttggtaggaaaaaagagctctcagagttggaactcattttatttggagatgtcagcggagatggggaaagagagtattttgagatcaagacaaagcagagaagaaagggcctcgtaattggacggtctgttaacaattatgagcaagtaaatactgatgatggtaaaggaaaggagccggttttgtggaaggaaaccaaggaaaacattgagatgcagagactggggagtccaccacgacatggaaggccatcgagaacaaagaatgatggcaggtatgggaggaaaagaagatgtaggaagatactctacggaaagggtattgcttgcatttcaggggaatctggaattggcaagacagacttggttttggagtatgcatacaggttctcccagagatataagatggtcttatgggtcagaggggaaagcaggtacattcgacaaaactacttagctttgcggacttttctggaagtagatttaagtgttgatagtcacttgcatgagaaaggaagtgaccgatgctttgaagagcaggaagaggaagccattgccaaaatacggcaagagctgatgcgggacataccgtttttagtaatcattgataatcttgagagtgagaaagactggtgggataagagagtcataacagaccttcttccacattttggtggagagacccacttcatcataacaacacgccttccacgtgtgatgaacttggagccaatgaagctttcttatttgtctggtgccgaggcaatgtctttgatgaagggaggcgtcaaggattatccactggtggaaattgatgcactaaaggccattgaagaaaagcttggaagactcactcttggccttggtattgtgggatctatactctcagagcttccaatcactccgagcaggcttcttgatacgttgagtcggacactgcccataagagattgttcttggaatgagagagatgctatcagtttgaaaaatcatgaaatccttgtccggctcctggatgtctgcctatcaatatttgaccatgccgatggtcctaggagtctggcaacccggatggttcaagtgtgtggttggtttgcaccttctgcggtcccaatacatatgttggcgttggctgcacataaagtcccaaagaagcatcggaggggtccaaggtggaggaagtggtggcgaacgctgacttgtggcttggctacatctaggatgaagagatctgaagctgaagcagctgcaatgctgatgaggtttggaattgccagatgcagcacaaagcctgaatatgtacagttccatgatctgatcaggctatatgctcgaaagcgaggaggcacacgaatggcacaagctgtggtccaatcgatctacctccgaggctcaattaaacattcttctgaacatctgtgggctgcctgcttcatgttttttggatttggttctgatcctttcctggtagaaccgaggccatcagagttgattttctttgtgaagcagatcgtcgtgccacttgcaatcaacacattcatcacatattcccgatgtaatgcagcactggagctgctgcgtctatgcactgaggcattggagcgggcagctgactcaatgctttctcatgctggcaaatggagagaaacaccattgtcctgtttcaggccaactcagtcagaagcccaatacacctacctttggcaggagctggctcttctgaaagcatctgtattggaaacacgggccaagctgatgcttcgaggtggacagtatgacactggagatgacctaataaggaaggccatattcatcctgacttccatttgtggcgagcaccatcctaacacggtttctgctcgagaaaccctcagtaaactcacaaggcttcttacaaatgttcagcttagttga

SEQ ID NO: 90699 - DNA, 1347 bp, Oryza sativa
  Clone ID: PAT_MRT4530_89343C.1
atggatctcggcctcagcctcggcctcggcctcgcctcgcagggcagcctcacctcctccaccaccaccacctcctcccccggcgccggatcatcctccccgtgggccgccgcgctcaactccatcgtcggcgacgtgaggcgggatcaggccgcggcgcatgctgccgcggcggtgggggttggggttgggggcgaggagatgtaccaggggagggcgtccacgtcgccggacagcgcggcggcgctgtcgagcgcgagcgggaagagggagagggagctggagcggtcgggatccggggttgacgacgacgacggcgcggacggcgccggcgggcggaagaagctcaggctgtccaaggaccaggccgccgtgctcgaggagtgcttcaagacgcactccactctcaaccccaagcagaaggtggcgctggcgaacaggctggggctgcggccgcggcaggtggaggtgtggttccagaaccggagggcgaggacgaagctgaagcagacggaggtggactgcgagtacctgaagcggtggtgcgagcgcctcgccgacgagaacaagcgcctcgagaaggagctcgccgacctcagggcgctcaaggccgcgccctcgccggcgtccgcgtccgcgatgcagccctcctcctccgccgccgccacgctcaccatgtgcccctcctgccgccgcgtcgccaccgccggcgcgccgcaccagcctaaccaccaacaatgccatcccaaatctaacaccaccatctcctcctcctccaccgccgccgccgccgtcgccgtcgccggcggcaacgtgctgcccagccactgccagttcttcccggccgccgccgccgccgccgaccggacaagccagagcacgtggaacgccgccgcgccgctcgtcaccagagagctcttctagaaacaatccatccatcgccatgacaaacttgggaaaggatcaagctttgattggtcaagacagtgtttttaccaggtggtgatttggttaattaattaattataattaatcactcaaaaggaggggattaattgccttgatttggtacctaattactagtatgattagcagtagtagtagtagcacaaatttggtttggattaattcagtttgattccatgatatgaacaaaggaacaaagcaacaaaaaaatggccgtctgctttttcttggacggcattcttatatgtaccaattcaccaaatctgctggttggtggattaacagcttgataattggtatattgattgtactactaccactaattgattgaattatgagaaaagttaatgaaatcaaaaaaaataaaacagcaaaacaaaa

SEQ ID NO: 90700 - DNA, 879 bp, Oryza sativa
  Clone ID: PAT_MRT4530_89344C.1
attgcattgccgccggtgacgaccatggagcatatcaagcctatattcaatcaagatggggttctcgacaagtatgagatgccatactataatggcaagattccaagagtggaggaaacaccatatgaatttgatttgcctgagtatcgtgaagtctattacaaggcaatgttgtcgtccaatccatcttcaggtgactgcattgtcatgctcatccatcaaccgtattcacagctctcgtttgcaagagtaggagaagatcattggaattggattcctattggtttgttttatactgattgcatctatcataagggatggttttacaccgtcagtgttttaggagcagtggatgccttcaatctgaatgggccatctgtcgtacacaaaagaattcttaaagatatgctaacactagggtatgaacagatgtatatagttcaatctccatggggcgatatcctaatagtaaacaggatgacaataattccgcgcaatgggaatcctgaaatagaagaaacagagctatatacatctgacattgtagtatacaaggctgatattggtgaacagaagcttgtcaaactgacaggcataggtgattatgcgctgtttattgggcataatacttcctcctgccttcctgtgaaggattgccatatgttgatgccaaatcatgtctatattaccgacgatgagtatctatggctacttgagtttagacataagcgacgggatgttggaatttacagcttggaaaataactctctatcaaatgtggttagccctgaaccttggaaaagttggttgcctcctatatggatgatgcccaatctcatgaaaacaggttttcaggaccaaaataatgggggagattag

SEQ ID NO: 90701 - DNA, 771 bp, Oryza sativa
  Clone ID: PAT_MRT4530_89345C.1
atgcagcagcagcagcatccggcgccgggcgcggagttcgtggcggaccgggacgcggcgcgggcggaggtggagcgtgcactgggcgggtacagcttccgcgacggcggcgcgctgctgctggaggacgccctgacgcacagcgtgcaccccagggacgaggccggcgggcgggccaggcaccagcggctcgagttcctcggcgacgctgcgctcggcctcgccttcgccaccatcttctaccgggacgacccgggcctcgaccagggggacctcacggtgctccgctccgccaacgtctccacccagaagctcgcccgcgtcgccgtccgccggcgcctctatccgctgctccggcgctacaactgcgcccctcaagaccacgaagtcagccgttttaccaagtcagttgaaggcccatatagtggtgaccccattgagggtccaagggtgcttgctgatattgttgaggccattgttggtgccgtctatcttgattccaagcttgatcttgaagtactccagaaggttgcgaagttgctgtgtgagccaattatcaccaaaaaggcattactagaagatcctgagtccatgttgaatgagctagggggagaacatagggaagatttggaaatcaaaatattggcgtggaggaaggtggcaaacgtagtcgatgatggccgggagcaagcgatcacaactagtggacttggcaacggctcagaggatgaggttggaaagcttagaacaataagaatagaagaagcttaa

SEQ ID NO: 90702 - DNA, 807 bp, Oryza sativa
  Clone ID: PAT_MRT4530_89346C.1
cccacgcgtccgctcgagctgatctactagctacctagtactctcatcttcttcactagcttttgcttgatcaattgcagcaatggcggcgaaggcagcgctcgttctagcggtgagcctcctggtggtggccgtggcgagcgcctgcacctactgcccggagccgccgacgccgaagccgaagccgccggcgccgaggccgccgacgcccggcggcggcgccgggtcgtgcccgcgcgacgcgctgaagctgcacgtgtgcgccaacgtgctcggcctcgtgaaggccaagatcggcgcggtggcgccgtacgagccctgctgctcgctgctcgacggcctcgtcgacctcgacgccgccgtctgcctctgcaccgccatcaaggccaacgtgctcggcctcaacctcaacatccccatcgacctcagcctcatcctcaacaactgcggcaagatctgcccatccgactaccagtgtgcttaatcacattgggacactgcagccgatcgatcgatcgatcgattgacagtgtgctacacgtcgtctacatgtttttgttggttggtttactgtgagcagtctgaactctctgaactttggaaactgtctgttttgtctttgtttatgcttgcaaagtttaattagttctgggaaaaaaccattggccagtatgtattattacatgtgtaagtgttggttgtgaccccgggtgatcagtttactggtcaatatatatgtattttttgtgcttatgatctgttatggttcagatgtcaatcgaagttgcaattagtattttcttttgt

SEQ ID NO: 90703 - DNA, 1641 bp, Oryza sativa
  Clone ID: PAT_MRT4530_89347C.1
atggcaactgctgctggtagatatgaagacagcggagtcagtgtctctttccggcggaaggcggcgtacacggcggcgtcgctgctcgtcttcctcgtcgccggccagctgccgctctatggcgtcaagaagtacaacggcgacaaggatgtcccggatcccttgtactggatgaattgcatgtttgcgtcaagcaataacaccctgatgactcttgggatcatccctcttcttctctccgagatggccgtccgcatcttctccgcactcatcatcaccaggtggccacccttccatcatgtgcgcctgaacagagcaagaaagttgttggcgatagccatggccatggtgatggcagtttccggtgtgctatctgccggcgttgcagcagagcttggcacgatggcttcacttgttgtcatgtttcaacttttcctcggcggtatgattgccatttatctggatgagctccttcagaagggatatggattgctgtccggtgtctccttgtttgcagccgccaattgttgtgcgtgtattttttggaaggcgttcacagctgaagaccccttgctacactgggctgctatcatcgtcttcttcaagcttgtgctgcaactacagagctgccacatcactttgccagcggtgacgtcaccggatgatcctactctgcaaaccacatacaccatcagcccatcctacatggcctacgtgcccatcctctttcaacctgcattcttctcctttcccctcgtttccatctcacagacgcttagcatcaagtatggggagacgaatagagtggtaaatctgctgggtaagtggcagcaaatgtgcaagtatcctggctactacgttcctgtcgctaggatcgcctcctacgtcactacgccaccatccttcggtgagatagtaacaggagacccgggttctcttctttatgccgtgttcctgcttactggatgtgcttttctctcactattttgcttcaaagtttgtgcaaaaagttcaaaaagatatctggtcaggctggttgggaagccgaaacaaacaagactgtcgcctgatgatgaacagctgcctgacgaggacgagtcgattagccccaagcaatgcaggcgatacatgaccattgcagcaatttttgttggattttgtgttggtttcctgagcctcttggcaggtttcttgggattggatggccctgcaatcatgcttgccgtgactgtcatccattcggtcgtccaagatcattcagaaagtgatggaatacgagcaaaagtatataaacacactcgtctcgtctcgtctctcttcctctccatcatcatgtttgaccaccgctctcctatggccggcggcgagggcttcttcgtcgacgtccaggtggacgccgtccgcgccgtggtcatgacgccggcggccggtggcaacgcgctgcggctgctggtgcaggagcaggagcagcgcgccggcggccggaggaggacggatggtggtgacagtgaggaagatgacggcggcgactgcctccggccgtacgagccgatcatcatctgctgcgcggcgcttgtgtatttggcgctgtggctctgcggattacttttgttttgccgctctgtgcaattcttgatttga

SEQ ID NO: 90704 - DNA, 694 bp, Oryza sativa
  Clone ID: PAT_MRT4530_89348C.1
gttaaatttgctttcggcccagggcttccgaagctggcccaaacttgggccggcccgtctttgctcgagccgagtcagttcgacggctcgcaagccgagcaaccgagcgcggcccacatacgcggcaatggcccgatgcacttctgtggcccattgggctgcgtaatcagcggcggcagcggcccgacacagggcaaatctgaaccgtccgatctaatggacggctccgatcgtccctgcgccggatgaagcgccgaccgggagagaggagcaaaaccctagctcctaaatccttctctcccgatcccctttctctccggtgacgagagagcggaacgatggcgaaggcagcgatggtggtctagcgagctggtgcgtgtgggtagtgacgaccgccgagcagctcctgcttcaccggctggggggcaccaagccatgccacggcatcggcggtccagcgaggcgggcgcgcaaacggtgatgagcgccgagcggcccagatctcgtcggtagggcaacgccaatgccaatgcttctcgtctccggcaagggacggtggaagagtgctccaggacagcgcacgcacggggaactcgacgcgactgcgaggaggagaaggtgcggcggtgccgcttcccggaaagctctggtgagattataggcttcaagtccggtaagtaacctgaacccttag

SEQ ID NO: 90705 - DNA, 412 bp, Oryza sativa
  Clone ID: PAT_MRT4530_89349C.1
gatggcggattacaggtgttcgtaggcgaaaaatgcaacagctgttgctgtgcatacataccaatgaatgatctatcgttacaacactatgccttcttacttgtgtacggctagtcctactcactaccaccacatacaggtagggcaacgcggacacaacatcacttggaacttgcttccaaggtacacacatgaggagcagcatactctggacggttattcaacagagacgaccaatgtctagcccaataacgccttggaacggatcaaagttcagttggcgccaccaccgggtggctccttctactccgagttgacgtacgagaggaacctctggagctggcggaagtacgcgcacgggcgttcgacatacatcagatggtcggacttggtgatgccgtaaaggaagcac

SEQ ID NO: 90706 - DNA, 2229 bp, Oryza sativa
  unsure (1)..(2229): unsure at all n locations
  Clone ID: PAT_MRT4530_8934C.1
atggcggttgccggggcagtggcgatgtccggcggtattctcctcctcctcctcctcctcctcctcctcctagctgccgcctgcgtcgaagccggcgagctgccgccgattagccggagaagcttccccaaggggttcatcttcgggacgtcctccgcgtcctatcagaaattcaaggcgaaatctaaacatctagaaaaacctccgcgtcgctctcgcacgggcggctcgggggcgaaaaccctagctgcccgcgccgccactccgcctcctccacctcgccgcccccggagctcgccggcgggaaagctgccagcgagcagggaaggcggcggcgaggcacatcaactcgacggcctccacctcggcgcgacgaggacaggggaacgacgaagctctccgccgcggtcagaggcggagacggtggggctgcttggagaggcggtggatccggcttctttgaggccggatttggccctccgacgcctggatctggccggagcagctgctccggcgtggcggcgcgaggcagctggccggcctgggcatgttggcggcgtgagcggctcggcagttgggaacggcggcggcgtagcctgcccgggcgcggagacggtgcgagcggcggcggctcggcggctaggaacggcggcggcgtggccggcccggagctacgggctgggagcgggcggcagcatggcgctggtgcggctgcccgggcgcagcggcggcgtgccgcggctcggctgtgcggccgcgagcagccccatggcgcggccagtcctcggctgccggggtgccgccgcgatgccctgcggccgggtgggtggcgtggcgtggccaggtggggcgcggcggccgggcaacaggggcgccggagccggaggggtagtagcttcaccggcgtcggcatctagcaaggaggctggcgggtggtggaacagaggggtcctgggccagctctcagggatggtgggggtttccgagcgaaagcttagcccaattctttgggccaacagtgactacgtcttcgggcgtggtaaccctcctgagggcattgttgaggccttacaaaaggggaagattggaataattgtgaactcacagtggtatgttcccttctccccatccaaaaccaacaaggatgcagcaagacgtgttctagatttcgtgcttggatggcttatggatcctctcattagaggggactaccccctaaacatgagagaattggttggaaatcgcttgccaaagttcaccaaagagcaatctgaaatggtcaagggtgcatttgatttcattggacttaattactactcttcaagctatgctgagaatgttcttccatcgtatggtcttaagaacagctacaatactgatttccacgctaggattaccgggctccgtgaattgttgctttatatcaaggaaaactacggcaatcctaccatctttattactgaaaatggtgttgatgaagtcaataacaagaccatgccactcaaggaggccctgaatgataatacgaggatagaatattatcacaagcaccttctcgccctgcgaaatgctatgagggatggagcaaacgtgaaggggtactttgcatggtctctgcttgacaactttgagtgggcggatggctacacactccggatacgcgggtgggttacatgccaaaatcccgagcatccgatccgcatcccggcggcatatctctcctcgccgtccgacggctacgtcccctgcctcgcttccaggcagatcgagcacacgcacccgccaccgccggatccttgcgtggggagggcggcgccgctcctggccgncgccgcctacgtcggcggcgcccccatcatgccgggagggaaaatcatttgcatagtagtgtcaccaaacagtgctacctgccatcggcaggccgtaaggcggtgcaacggtggctacagcgtccaggttgtcgtgatgcaggcgccgaggcgcggggccactgtggacagacggcggcgtacgacaagcggcccggccatcggtgctgctcgccgcccctccccttgttctcttttcttcttttcctcctcctttcccgatgtcttcgtctgccatttgtgggcgacggggctcatcgggacggtgtcggcgcggccgtggggaagcatagtgttgccatggaacggcgacacggccttgtgtgggcatggcaggcgggcagcgggccggcgaacttga

SEQ ID NO: 90707 - DNA, 399 bp, Oryza sativa
  Clone ID: PAT_MRT4530_89350C.1
atgccggtgcccggtggtgcgaagaggagggacaatggggctgatggagaggagggggaaagggccctcgtgcaaaaactggaggcttgctgccggtggagttcctacttcctagaagggtttcatgctagtggtagatcaaagattgagacgaccagcccgagaggagatggcaacaggcatggtgatggctgtggtggtgggagaccaggacagattaaagtacgcgagcagttgtacccacctagcgtgggtgaggttttcggtatggccgacggcagcgcctgcatctgtgcctcctgcttgcaggagaagctcgggatgctcgactcttcgtcccagtcaaacccttcccacccactgtctgtgtgtcgtccaccttctcttcctattctttga

SEQ ID NO: 90708 - DNA, 144 bp, Oryza sativa
  Clone ID: PAT_MRT4530_89351C.1
atggtcgcaatacagcactctggcgaagacatagggacaaattggagcaaggtaatgctgattgctggcgccaagatggtgacggtgcccatcactggtttccacaaggggattgcggaggaacagaaggcagcaatttcgtga

SEQ ID NO: 90709 - DNA, 637 bp, Oryza sativa
  unsure (1)..(637): unsure at all n locations
  Clone ID: PAT_MRT4530_89352C.1
tgctggaatgtggcgggaatataaagccaaaggaaggggaaatttccaaagaaggaacactttggtagggggtgcccacctcacagtatctgttgctntggtgaatagccttcaagggaaccacatgcacggtgtcctgtttttgggtggagagcatgggcatggatggatggcggcttgtggtggttgtgngcctgactgacaaggacggagcctactcgacccaaacactgtgcctgtgtgactgtgctgctgcatggggctggaaggaggtgcaagtggctggagcaggtgtgcactgtgctggctgcagacaactggatggtgtgtgtatgctgatgcgcaagtgccgcggtgatgtttgtgggtgctgagtgctgatgggtgtggtgacacgtgtgactgccgttgatgggtgctgaatggttgggtggtgcggaaacaaactgatgcgtgtgtggcttgggtgtgatggcgatggttggagatggagtgcctgttataaaaaaacctgccggattgatgtgggattgcatggagctnccttaaatggtttgggaacgatattaattngcnttgtgatggctggagaaagataatgatgaaattgttgtgctaaaaaaaaaaaaaaaaaaaa

SEQ ID NO: 90710 - DNA, 1535 bp, Oryza sativa
  Clone ID: PAT_MRT4530_89353C.1
atgacgctgcgcacgggagaagcaacgccgcctccccaggcgcatgccgaggaggagccggggcgggggaagcgccggcgcgtcgtcgcccgtgagacgaggctgcagcaggaggaggaggaggaggagggcgcctcatccgagccggagaccagaccgcgccctccccccgccacccccgccactgcagaggagcccgccgccaccgccgctggggcggaggccagggctcagctggccataaacattcgccgtatgcttgctgtcgaggcagagagaaggggccgaatcgctgaacgaattggagttcaggctgagggtccaattctcactctggaggatacattttgtgatattgatgatggtagtgctaaaagccaagttgctcgaaaggttgctttgggtgtttcacagtcaattgtcagtttatcttcctttgcaggtcgaaaaaggatacgggtttgctcaggatttgtgatacggtggaacgatagtaccagcattggtacaatattaacctcagcagcacttgttagacctccatgcggagatgatgtcagggtggaggtctttctacctagtggggatatatctatttgccagatttccatggtagatttccatcataacatagccttagttgaagtcacatccaatttcaagcttcaagaggctgttatccttaaatatattatcgacaagggagatgttttagcccttggccgttcttatgaaggtggtcttctgatgtgctcaaggggagaaataagcaacagagccagcatatttgagtgttcagaactgttagtatcaagttgcgagataacaatgattttactactaaagcacacacaatcttcacacaactcatattctgtcaatactgagatgatgttatatgcttctctgtgtctttcagtactgaacaattcaggtttcatttttgctgatgtgtccatcatagagcaggtggctgagggatcacccgctgatattgctggaatatgtcagggtgatattctcatgaaatgtggtgggaaattcctctctactgcccctgagttcggtgcaatgttgatggataaatgcaaggaaactatggaagagtatgaccaagaaaccaatggtgatttttcagcgaaaaggataacagttgaggtggcctacaccgatccctaggatggaagcactatagagaaaactatatctgctggtttgatagaagagtttaactataacaggtgacttcctttttctttactcctgtagacgtaggagtattttgtttgttgttgataaaattttgttctcctttacattcaacccatttctttggctatacaggtggcctacaccgatccctagctataaggtcagacgagatactattggaaggtgttaagagccttagaggtgcagttcatctacgtgcatgcatgttataattaggtctgacccacacaatttgtccggcccggtgacctgtgttacatccctctgcattttgcacatcccgttccaaaaaaaaaaaaaaa

SEQ ID NO: 90711 - DNA, 386 bp, Oryza sativa
  Clone ID: PAT_MRT4530_89354C.1
tggtgatgttcttccggcgggtgccccaccaagagaacgccgtggccaccaacaacatcagcatatggatgggcaccatcttcatctttgccctctttagtgctttccgtagtgattcctatacggggtgctacttcacttggatcatgttacaatttatcttcatcgtgatatatgctccttctgttctcacataggtgatatcttaaaatgtatgaggcatatatactttctacctaatattataaagtatatgcctctatatagatcaaataaagcagaaaagtcattgttattaccaatcgtgtacttttgttctaaacatctcaactagtttaaagtatttgtctctcttgaacaaaaaaaaaaaaaaaaaacccgcggcc

SEQ ID NO: 90712 - DNA, 2290 bp, Oryza sativa
  Clone ID: PAT_MRT4530_89355C.1
acgcccctcctgagcacagcaacggttgatccagcactcctgagcatggtgacggcagatcccctctcccaacctcactgaaggcagatccacctcgcccaacctcggtcgcagccctcgtggcgagtgagatacattgaggaagaaaaaaaaccttgttttggttgtgtggtacttgccaattataccccgcgtaaaatgactgttgtctattaggcaggatggtgtgataatgtgttggcatgtttcaggtagacacaagaaggattgcaagctcgacatccagctaatgctagatagtggagaaacattaatagcatgtttttgtcttttggcaatgaaccaaggaatatgaggtttgtgctgagtacagatagtatgaacccttttgatgactggaactgacacataataattggtccgttgtcttatccatgtacaacctacctccatagttatgcatggaacgaagatacctcatgtcgacccttctgttgcaaggtccatgataatctggtaatgatatcgatgtgcttgttgaaccattgttagaagttatggcaacctcgtagaatgattgagtcgagctaagggatatgttctgccagcaacccttcatgcttagagccatgatatttgttaccataagtgattatcccgccctactatatttactaggttaccttaaagggacgataacatatgtggtatgtatggatgacaccgtgtcattgtacattcctttctcaaagaagttggtctatatgtgtcatcgatggttcttattgacagggcacaagtatgggaggatgaaataaaggttttataacaccgtcgaggataggaaaccaccttaagtaaggagtttgtcattcatgttgagaatcatttcgcacatagtgaagggatggaagcggggtgaaaatcgaaagcagaaaggtacaaaggttgatccttcaagtgcaccactgtttaagaagaagtcaattttccataaaaatctatcctattaggagcatttagaactttgccatagcattgatgctatacacattattaagaatgtgtgtgaaagcattattgtcaccttattggacatcacgttcaagacaaagtatggcttgaagtcatggcaagacctgacaaaactaaaaataaggaaatagcttcatcctaccaaattgaaaacaagaagtattgccttccaccagctagcatctctttgactgttgagtacaagaagtctatgtgcaattgcttacatgggctaaaagtgtcgactgggtactcatctaacaccgaaaacttagtttcaacgaaagatttgaagataacaggaatgaagtatcatgattggtatgtctcgccctatagcaatcaggggactacccaccagggttcatatactggtgcttacgaatattacacacatgtatgtgagttttcaacaggactttagtgagatcagggatgtgccactagtttcctgtgtgtttgtagacaccatgagccaacttgagaagtgtttccattatttatttttcgatataatgctgcacctctgttggttcacctagtccatgagttagaggcactagggcacatgtcttgtaacattggatgtttctatttgagaggtcgatgggattgcttaaaggcaccgttccgaattacacaattccggagacttccatcattgagtcatacaatacaaaggaaaagaaacattcattgaatcattgattatcagtacaaggaattgggccgggctcatgttaccatctttcaaggtttgaaggtacttgagcccttcatcgcgcaacacctttgtgagctaggaatatcctagccagatcattcagtgcaatggatcgtaaaagaacataagcgcatctttaccctttggttcaagacacaaaacataatggacaatggtaatgctgtggacacacaaactatcaaattacttgccattggccctgcgattatggttacatcatggcaagcgtatcatatttttgggtgcacattttataccctggaaagggaggcatagaacaacggggttttgttctgaagctcctcatgaaaccagattgatgatcgcctgctacgacataatagatgatatacggaattgactacggcgtgaatatactaatcctagtagtttaatgccattggattagacacccagctaatatgtaagtcgagaactatgagtttacaattgtggaccacaataaacttgctcacagacgatttgtggatcttgtcatctcaaaccgta

SEQ ID NO: 90713 - DNA, 1791 bp, Oryza sativa
  Clone ID: PAT_MRT4530_89356C.1
atgctgtccaaggcaaggcacacctttttattcctttttattaccatgccagtaagaccaaacaaggttttcaaggcaaaatagcaggcaaccattggccaattctatcttcgctcttgattaaccacgatgaaaaatccacaatcaggattctcatcacattattggcacattacggccaataacagaacactatcaataaaatgaataaatcccacacaaaaaaccaatgtggtgttgtgtgtcttgtatcacaacacctctaagatctagcttagttatgtacagatccttttgtttcccctaattaatattactcctatatcttcccctcttaggtctgaccatgaaattctaggcacccctctccttgagatagctcggtgtccttctgtgccgcctgagcgaggtggtgtacgatccgatggagccgtcgcgttgcagcacgatgtcagcatggattgcagagtttgggttcttctgccggtatcgatcatggtgactctggtgcttctcttccactgtcgcctcgatcctcatgtcaaccttgttctcaccatctacttgcttggttttggtcacatcgtccttcttgttatcttccacaacgacggtgaacacaaatgtaccaatttggaggtagtcattcatgtccaatatgggctctagggccttgaccacctccctcatgctgggcctggactttggtgatgggctcaagcacttgtaggctaccaaagcagcctcttgggcccctttgtaggagtattggccctccatggctgggtccatgacgacccggtgcaactggtcgggcttcttgaggtactttcttgtccaatccaccagactttgctccctatggcgacgagagcggtccaccgagtgccgacccgataatagctccagtagtaccacaccaaaactatacacatcgctcttgtcggtcaggtgccctgtcatgatgtactcgggcgctgcatacccgtttgtccccatgacacgcgtcgtgacatgggtcgcgtcgccctgcggcccatccttggcaagcccaaagtcggaaagcttggtgttgaagtccgagtcgaggaggatgttggatgccttgaagtcacggtagatgaccggcgtgtcggcgtcgtggaggaaggcgagccccttcgccgcgccgacggcggtctgcatcctcctcatccatggcatggcgccatcgagacttttgaagagatgcttctccaagctcccgttgctcatgtactcgtacaccagcatccggtgttcgtcctcgtagcagtagccgatcagcttgacgagattcttgtgcctcaactgaccaaggaagaacacctcagccagccactccctgtggccctgcgtgccgcagtcgaggtcgaggtacttgacggcgacggcctgcgcggcgaggccggggcggaggccgtcgtcggcgcggcccttgtacacggggccgaacccgccggagccgaggtagttggcgcgggagaagccgccggtgacggccctcatctcggcgtaggtgaaggcgtacaggttcgagcccgacagcgtcagcgacaggtcctccggcgtgagggtccccgtcgagctcaggctcgacagcgacaccctcgacgccgacgacgccgacgacgacgacgacagcagccgctggtggtgaccaccccctctgaccctcctcctctccggcggcacgtcgtcctcaacgccggccaccccgccgccgccgacgcagcagagcatcgacttccacgacgtccgcaactcagccat

SEQ ID NO: 90714 - DNA, 781 bp, Oryza sativa
  unsure (1)..(781): unsure at all n locations
  Clone ID: PAT_MRT4530_89357C.1
cggacgcgtgggtgctgctcaatcattttccccagattttttttacagcgattgtttctccattgctaactgttctgtattgatttgggattcaaattcctttcatggtttttgctcgttttctttacaatctcattcatttgtctgtgcaacatttgggaaaaattgggagaagtgatgatattatatccataccacatttctgcattcactatgatgatcattaacttcatgcactaccatctgatctcccactacacataataaagttatggtacaaggtatataaattgaagttgtgcaatgatggactgattttcatttacacgctgaatttattttgctaattaatgtgcaatctgtgatgcaaataatcccatttgctgaatcactgtgattattgcaatcaaaatcaccatctttcggctgagattgcacattgttattctgcaaaatttatctttgttttaaattaaggtttatgccatttggtatctgacacataatcatttctctgattatgtgtctcgaaacatggcagaaagtgagggggaacggtccttgcgacactggttgctactatatgagcttctagttactatatacccgtttacatttccttgctgttttagtatttctgtttaacttttgtcatgcctatngtgtgagatgcattnagctttgtactgtggagattgtacccctgtcaaaccacttaatgatattacagantattattagacctgaaatgccngtctttggctgatcactctgatcaatc

SEQ ID NO: 90715 - DNA, 162 bp, Oryza sativa
  Clone ID: PAT_MRT4530_89358C.1
atggcttctgtctgttcttcaatgcttgccatgcaattggagtatactgattacatctacatcgacaagtggcaagatgcagtcgcaggtggccacatgaatgacatgtcagttcagaacgttcagatccaaggctttaggtcaggcaggcagaactgctga

SEQ ID NO: 90716 - DNA, 1777 bp, Oryza sativa
  Clone ID: PAT_MRT4530_89359C.1
ctacgcggcactattgaggcgattgatgctggtcatggactcgaggcgtctcagctttccggtcgatcggccgcgagtccactccgccggcttgtcctcgccaccgccattgggttggtcggtcacaccaccgttcatgggcgtccatgtcttcaccgaccggctggccttcgccgccgccgactggtgtttccgccaccgttcatgggcatccatgtcttcaccgaccggctggccttcgccgccgccgactggtgtttccgcctgcacggctggcctattatgccgccgctgttgggcgtctacgacttcaccaccggcctgcctccatcgccgccgactggtgtccccgccaccgttcatgggcgtccatgtcttcaccgaccggctggccttcgccgccgccgactggtgtttccgcggttggtcggtcacaccaccgttcatgggcgtccatgtcttcaccgaccggctggccttcgccgccgccgactggtgtttccgccgccggcctgcctccgtcgccgccgactggtgtccccgcctatacggtcggttggtcacaccaccgttcatgggcgtccacgtcttcaccgaccggctagccttcgccgactggtgtttccgccgccggcctgcctccgtcgccgccgactggtgtccccgcctatacggtcggttggtcacaccaccgttcatgggcgtccacgtcttcaccgaccggctggccttcgccgactggatccagatccagatatgcataaaagggattcatggctttaagcttatctcttacgctccaggaatggatcagtcagaacatcaccaccggctcgcctcgaccgccgccgactggtgtttccgcctgcacggctggcctattatgccgccgttgttgggcgtctacgtcttcaccgaccggcttgccttcgccgccgccgactggtgtttccgcctgcacggctggcctattatgccgccgttgttgggcgtctacgtcttcaccgaccggcttgccttcgccgccgccgactggtgtttccgcctgcacggctggcctttatgccgccgttgttgggcgtctacgtcttcaccgaccggcttgccttcgccgctgccgactggtgtttccgcctgcacggctggcctttatgccgccgttgttgggcgtctacgtcttcaccgaccggccgcctcgtccgccgccgactggtgcttccgcctgcacggcagacttattatgccgccgttgttgggcgtctacgtcttcaccgaccggccgcctcgaccgccgccgactggtgtttccgcctgcacggctggcctattatgctgccgttgttgggcgtctacgtcttcaccgaacggccgcctcgtccgctgccgactggtgttcccgcctgcacggctggcctttatgccgccgttgttgggcgtctacgtcttcaccgaccggccgcctcgaccgccgccgactggtgtttccgcctgcacggctggcctattatgctgccgttgttgggcgtctacgtcttcaccgaccggccgcctcgtccgctgccgactggtgtttccgcctgcacggctggcctttatgccgccgttgttgggcgtctacgtcttcaccgaccggccgcctcgaccgccgccgactggtgtttccgcctgcacggctggcctattatgctgccgttgttgggcgtctacgtctttcaccgaccggccgccgcatccgccgctgactggtgtcactgcctgcacggctggcctgttataa

SEQ ID NO: 90717 - DNA, 5194 bp, Oryza sativa
  Clone ID: PAT_MRT4530_8935C.1
gttccgacgttcccggagagtccgattttggaggggaagattttgaagaattccagggccagcaaggcaactcctggtttggaatggtatattcctggtttggagatagaactgtgcagccgggaatggttgttcaggatggttgggcctatgcaacgggatgccgcgcttcaagcctgagtacttgttcggtactgagggatttgtccaggagttgcgtacgatgtccttcgccataggatttgggactgcccctttgtatgcccagattcctcatgaccgtgatgaagagaagtgccgtgtcaaggtcaccttgaacactaatcatgaagacatcccatcgctgatgttcgaggctggagggggaaactacattcatgcttgtcaggaggtggcaaggatcgccataggagagcttcgcgattgctacagtgatcagttggccgacactgagtatcgctaccatcctcgccaaccccagggaagtgaccgtggcagctaccttgaacctgcaggaattgagaatgatgctaccacaaggcatttggttgagatgctgtgggccatggatgagttccgcgctgagattgtgttagctgctcaagatcgtgaagaccggaatcgtggtaagatatgtaagcttgaggacaaagttgatcgtttggagaaggaactagccgcgttgaagggagaagcaccaccacaaaaggccagggttcgtcttaccacaaggaagagagctctatttgtccctcgctaccagttggcgcctaagatggtgcttactcacagcaatgggaatggcccaaacaacaacaacaacaacaacaacaacaatggagagaatcccacgcttgcccaagtcctggtccaacaggcacagctcatgaacatgatgatgcagcaattccagaaccagcagaaccaggggaacaaccatgcacctccccagaacaagttagcagaatttcttcgtgtgaggccgcccactttttctagcactaccaatccagttgaggctagtgattggctgcacgccatagaaaagaaattggacctgcttcagtgcactaatcaagaaaaagtctccttcgcttcacatcagcttcatggccctgcctctgagtggtgggatcacttccgtctcaacaggaccactgcggaaccaatcacttggcttgagttcactgctgctttgcggaaaactcacataccgtcgggagtggtgtctcccaagaagaaggagttcaggacgctcactcagggatctcgctctgtcactgaatacttgcatgaatttaatcgtctagctcgctatgctccagaagatgtacgtacagatgaagagcgtcaagagaagttcttggaaggactgaatgatgagctctcttacccattaatgactggggattatcatgatttccagaagttggtggatatggccattcgccaggaggacaagtacaaccgaatggagcagaagaaacgcaggattgctcacttcaaagctcagcaggggaatagtcagaggccgtgtcttgctatgggacctcaggcagtgtcacagggaggatcttcgttggttgcccgtccacagcgtcagttcttcaacaacaattctggcaacaacaaccgcaaccaagctccacgtcctgttgcaactctagcccagcatcagcctgccaagagggagccgggaaacaagccaagagtgtgcttcaactgtggggaaccaggtcattattctgacaagtgtccgaagccccggcgcgtgaaggttgtccctgcacagaacaactccaccgcaccagtgtccaaggctcgtgtcaatcatgttgctgctgcagaagcccaaggtgctccagatgtgattttgggtacgttccttgttaactcagttcctgcaacagtgcttttcgattctggtgctacacattcatttttgtctatgagttttgcgagaaatcacgggatggaggtagaagatcttagacgtccgttgatggttagtacccccagcaaccaagcactctcgtcacaacgtagcccctccgtcagaatagagattcaaggagtaccatttctggccaaccttattctattagaatccaaagaccttgatgtcatcctagggatggactggttagcccgatataaaggtgtgatagactgtgccaatagaaaagtaactctcaccagcaatgacggtcaagttgtaactgtttacgcattgccttctgagcctttaaggtcaagtctgaaccaagtaagtttggaagagattcccatagtacaggactacccggatgtgttcccggatgatttacctggtatgccgcccaagagagatatagaattcagaatagatctggtaccaagaaaaactccgatccataagagaccttatagaatggcagccaatgaactagcagaggtcaagaggcaagtagatgatttgcttcagaaaggatacattagaccaagttcgtctccatggggagctccagtcatttttgtggaaaagaaagatcatactgagaggatgtgtatggattatcgtgcactaaatgatgtgactatcaagaataaatacccactgcctagaattgatgatttgtttgttcagcttaaaggagccaccgttttctccaagatcgatcttcgatcagggcagttgaggattaaagaggaagatatacctaagacggattttaccactcaagatgggttgtttgaatgtactgttatgtcttttggacttaccaatgcccccgctttcttcatgaacttgatgaataaggtgtttatggaatacctggacaagttcgtggtggtttttattgatgacattcttatctactcccgaaccaaagaagagcatgaagaacaccttcgccttgcactagagaagctacgagaacatcaactgtatgccaagtttagcaaatgtgaattttggttgtctgaagtaaagttccttggacacgtcatctcagccggaggagttgccgttgatccgagtaatgtggaatgagtaaccaactagaaacaaccgaagacagtctccgagattcatagtttcctgggtcttgcaggctattaccggaggttcatagagaatttttccaagattgctaagcccatgacacaactgctttagaaagatgtgaagtacaagtggtcagaagaatgtgagcagagttttcaagagttgaaaagtcgcttaatatcaacacccattttgattttgcctgatccaaagaagggtttccatgtgtactacgacgcatctaagcttgggttaggttgtgttctgatgcaagatgggaaggtggttgcgtatgcatctcgtcagttacatccgcatgagaagaactaccctagtcatgaccttgagttagccgcagtggttcatgcgttgaagatttggcgtcactacctctttggtactcgtacggaggtgtacacgaatcacaagggtttaaagtatatctttactcagccggatctgaacatgagacagcggagatggttggaactgattaaggattatgacatgggaattcattatcacccgggaaaggctaatgttgtagcagatgctctcagcaggaaaggctattgcaatgctacggaaggacggcggttgccgtgggaattatgcaaggaatttgaaagattgaatttgggaattgtcagtagaggttttgttgcagctttagaagcgaagcccactctcattgaccaggttagagaagctcaaatcaatgatcctgatattcaagagattaagaagaacatgagaaggggaaaggctatcgggtatttggaagatgagcaaggaaccgtatggttgggtgagagaatttgtgtcccagagaacaaggagttgaaaaatgcaatcttgaaggaagctcatgacactttatactccattcaccctggtagtaccaagatgtaccaagatctcaaggagaaattttggtgggcaagtataaagcgtgagatagcagagtatgtagctgtgtgtgatgtttgttagcgagtcaaggcagaacatcagaaacccacaggtttgctgcagcccttaatgataccagaatggaagtgggaggaaatttggatggatttcatcactggtctacccagaacgtcatcaggccatgactctatttgggtgatagtcgacaaacttaccaaagtggctcatttcatccctgtgaggacaacatattccggaagtcgtttggcggaattgtatatggcaagaattgtgtgtttgcacggagtgcctaagaaaatagtatccgatcgaggtagccagtttacttcaaagttttggaagaagcttcaggaagagatgggttccaagctgaacttcagtaccgcttatcatccgcagacagacggacaaattgaaagggtaaatcagattttggaagacatgttgagagcttgtgctttagacttcggtggaagttgggataagaatctgccttacgcggaattctcatacaacaacagttatcaagctagtcttcaaatggctccttatgaagcactgtatggtcggaagtgccgcactccgctgttgtgggatcaaacgcgagaacgtcaggttttcgggactgatattctgagggaagtagaagagaaggtaaagatcactcaagagaggttgcgtatagctcagtctcgtcataagagttatgccgacaatcgccgcagggatttaagttttgaggaaggagatcatgtgtaccttcgtgtcatgcctctttggggggttcatcgttttcacaccaaaggaaaattggcaccgcgttttgtgggaccttataagattgtcagtagaagaggtgaggttgcttatcagttggagttacctcaatgcttggcaggtgttcataatgtgttccatgtgtcatagttgaaaaagtgtttaagggtacacactgaagaagctaatcttgagcagattgaaatccaagaggatttgacatatgttgagaaaccaatccgtatcctggagacagatgagagaagaaccaggaatcgagttatccgtttctgtaaggtccaatggagtaatcactcggaagaagaagctacctgggaacgagaagaagaattaaagtcagctcatccgcatcttttcgccagctcttccgaatctcgaggacgagattctgtt

SEQ ID NO: 90718 - DNA, 2253 bp, Oryza sativa
  Clone ID: PAT_MRT4530_89360C.1
cacggttggcctattatgccccggctgttgggcgtccacgacttcaccgccggcctgcctccgtcgccgccgactggtgtcatcgcctatacggtcggttggtcacaccaccgttcatgggcgtccatgtcttcaccgccggcatgcctccgttgccgccgagtggtgcctccgcctacacggctggcctattatgccgccgctgttgggcgtccacgacttcaccgccggcctgcctccgtcgccgccgactggtgtcatcgcctgtacggttggtcggtcacaccaccgttcatgggcgtccatgtcttcaccgccggcatgcctccgttgccgccgagtggtgcctccgcctacacggctggcctattatgccgccgctgttgggcgtccacgacttcaccgccggcctgcctccgttgccgccgagtggtgcctccgcctacacggctggcctattatgccgccgctgttaggcgtctacgacttcaccgccggcctgcctccgtcgccgccgactggtgtcctcgcctatacggttggttggtcacaccaccgttcatgggcgtccacgtcttcgccgaccggctggccttcgccgctgccgattggtgtttttgcctatacggttggcggacttcgccgctgttaatgggcttcatcatctacaccactggcttggttccactggcgccgactggtgtttttgtcaccattgatggactgctttattcccacatcggctacttctgctgtcaccgagggaatattacaaagctaagtcatcatttattttattctttatatgatattttgtcttttcctttgcctcactacatcaactggttcgccgttgactagtgagtcgggggctatagatgttatatcgtattttttaaacaattttcataatatttatcttgattgcttgcgacataatctgagtacaaaagtacctatcgagtggatccagatccagatatgcataaaagggattcatggctttaggcttatctcttacgctccaggaatggatcagtcagaacatcaccgactggcttgccttcgccgcggccgactggtgtttccgcctgcacggctggcctttatgccgccattgttgggcgtctacgtcttcaccaaccggcttgccttcgccgccgccgactggtgtttccgcctgcacggctggcctttatgccgccgctgttgggcgtctacgtcttcaccgaccggcttgcttcgccgccgccgactggtgtttccgcctgcacggctggcctttatgccgccgtaattgggggtataagtttttaccgaccgggttgcctttgttgccgccgaccgatgtccttgccgcaaggggtggcctaataagccgccgttgttgggggcctaagttttcaccgaccggcttgcctttgttgccgacgacgagtcctcgcctgcacgggtggcctttatgccgccgttgttgggcgtctacgtcttcaccgaccggcttgccttcgccgccgccgactggtgtttccgcctgcacggctggcctttatgccgccgttgttgggcgtctacgtcttcaccgaccggccgcctcgtccgccgccgactggtgcttccgcctgcacggctggcctttataccgccgttgttgggcgtctacgtcttcaccgaccggccgcctcatctgccgctgactggtgtcaccgcctgcacggctggcctgttataacgccaactgatgctatcttcttcacggctggctacatcgctgtcactactaataggcatcagtatcttcaacacaagctgcctacgtttgccatggctgccgactggtttcttcacttccatggctgcatgattctgctagtgttgattggccttaccatcttcatcgccgctaccactactgatggacatcatcgtcttccgccgccgactcgtgttatgccgccgccgactggtgcttttatcttcacaactgcgcgtcttcactaccggttcacttcatcacggcaacacaactttgtcattatggtggagcgacttcatctttattatcttcggcaccggcaaactctattgctgctacttcgcaagttttactacttcaccaaccacgacgtctttgtgaacctcgacatctcggcatgcaatgccatgatattttactacaacaagtgactctccaatattcaggatttctacttggacaccttcaacacatatcttcaatcaagcaatgactac

SEQ ID NO: 90719 - DNA, 189 bp, Oryza sativa
  Clone ID: PAT_MRT4530_89361C.1
gcctacaacacgccctctcacgcagtcaacctcgccgctcacgctcgccaccaccgcttgcgtcgcgctcgccgccccgctctcgtcgcgcttgcggtcatggctgacccgctcgcctcacttgctcgcgccatggaggttgtgccggactcggagatggaggtagcgccggtatcatcgtcggagtag

SEQ ID NO: 90720 - DNA, 708 bp, Oryza sativa
  Clone ID: PAT_MRT4530_89362C.1
atgctgagctcgacggagaggcggacgaggcggcgctgctgctgcggctcgacctcggagattgacagcgacaaagacgagcgcttcctccacaccatcgacaacctgcgctgcctcgcacatccaagaccatctcacaccttatcttgctccggtttgacggtgacgaagacgagcacttcctccacaccgtcaacgacctgcgctgcctcgcgccgcctccaaggctatctcacacctcatctttctccggttcgtcggcgacgaagacgagcgcttcctccacaccgtcaacgacctgcgctgcctcgcgctgcctccaagaccatctcacacctcaaatcgccgtctaggccagacgccgtcgtcgtcttcctcgccgacctcggcctctccgccgctgacatcaccaccgccgtcgccggcgacccgcgtatcctctgcacgccgtcttcctccagcgcgggggttgagctgctcccgtccagcttccatcggtggcgcgggatccgtcaccgcccctctcctccagcgcggggctcgggctcggcgcttccctccaccctcaccggagaagccctctctaccccgtcgtcgacgagcctgagcgccgccagatttttgcctgagttggagaagaaagggatctgcgataacagagctaacggaggtattggcagttgctgtgacggagtggcatatctctaa

SEQ ID NO: 90721 - DNA, 603 bp, Oryza sativa
  Clone ID: PAT_MRT4530_89363C.1
atggcggcggcgcacggtggctgcgacggcggcggcgcacggcgactgcgacggcggcggggaacgcggcacggccaaggcgcggcgcggcagctctatgcgacgacgcggcggcgtggaggcggcgtggtggggtgggtagaggagaggagggcgcgggacgcgaggagcggcagcggcgacgcgacggccgaacggcgacggcgcgaggcgatggaacgggcggcgcggcgcggtagcagcggcggcacggggctcggggaagcagcgcggcacggggcgcgaggcggcgggctcgcggcgcgaggcgacgagacggcacgcagcgcggcaatggcacggctcgaggcggcgatggaacgcgcacgcggcgacgggatggcgacggcgacggcgcggcaaaggtggcgcgcggcacgaggcggcgatgggatgcacgcgcagcgcggggcgggacgcgacggcgacggcgcggccgcggcgatgagatggcgatggcgacggtggcgcggcggcaggcgacgagggcgacggcgcgcggcggctagcgacgatggcgacggtgcgcggcggctcggggcgcgaggcggcaacgcgcggtga

SEQ ID NO: 90722 - DNA, 489 bp, Oryza sativa
  Clone ID: PAT_MRT4530_89364C.1
gtcaccaatgtaggagatatccaagagaaccggacaaaattggtgtgcagtctttgcaaggttatgcatggtgcatgcattcgatgtagccatggagcatgccgagcctgctttcatcctatatgtgcaagagagtcaaagcatcagatggagatatggggcaaaactgggaacaccaatgttgagatgagggcattttgcttgaagcattcgacagtccaagaaactatctcaatacagaatgacagaatatgtgctgaagaggatacctcacaaatcgagcttgatgatgcaagccttgccactcagaagattcaacaactgagattgacacgcaataacaaggacaaatttaccagcagcatgattgctagctcttgttcgtctagcctcaaacagacaacagaattagccacatcgccatctactgctaggagtgtgggaagtcaagaaacccaaataacagatatggctgttgatcgacctata

SEQ ID NO: 90723 - DNA, 3153 bp, Oryza sativa
  Clone ID: PAT_MRT4530_89365C.1
atgagacaacctgatcgtcagatctatactacacccggcggattcaaatccccaaacaggagtctcgtgcgctacccccttttattattgccgaaatcatgtttcgacagttggcgcgccaggtaggggttgcgtcgagtttcctatcaacaagcgcgatggaatcaatttcatgagtcgccgacttcgttttcgctttgggagttttcacttcctttccgtcgaccacttcttcaagctcctcttctctgacttgatccaaatcagtcagggggaaactcaatctgatttttatcattatttatcgtattgatttttaatcccagattaatctccggctggcctattatgccgccgctgttgggcgtctacgacttcaccgccggcctgcctccgtcgccgccgattggtgcctccgcctacacggttggcctattatgccgccgctgttgggcgtctacgacttcaccgccggcctgcctccgtcgccgccgattggtgcctccgcctacacggctggcctattatgccgccgctgttgggcgtctacgacttcaccgccggcctgcctccgtcgccgccgagtggtgcctccgcctacacggctggcctattatgccgccgctgttgggcgtctacgacttcaccgccggcctgcctccgtcgccgccgattggtgcctccgcctacacggctagcctattatgccgctgctgttgggcgtctacgacttcaccgccagcctgcctccgtcgccgccgactggtgtcctcgcctatacggttggttggtcacaccaccgttcatgggcgtccacgtcttcaccgaccggcttgccttcgccgccgccgactggtgtttctgcctacacggctggcctatttatgccgccgctgttgggcgtctacgacttcaccgccggcctgcctccgtcgccgccgactggtgtcctcgcctatacggttggttggtcacaccaccgttcatgggcgtccacgtcttcaccgaccggcttgccttcgccgccgccgactggtgtttctgcctacacggctagcctattatgccgctgctgttgggcgtctacgacttcaccgccggcctgcctccgtcgccgccgactggtgtcctcgcctatacggttggttggtcacaccaccgctgttgggcgtctacgacttcaccaccggcctgcctccgtcgccgccgactggtgtccccgcctatacggtcggttggtcacaccaccgttgatgggcatcgtcatcttcaccgccggcctgcctccgtcgccgccgactggtgcctccgcctacacggctggcctattatgccgccgctgttgggcgtctacgacttcaccaccggcctgcctccgtcgccgccgactggtgtccccgcctatacggtcggttggtcacaccaccgttgatgggcatcgtcatcttcaccgccggcctgcctccgtcgccgccgactggtgcctccgcctacacggctggcctaatatgccgccgctgttgggcgtcttcgctttcaccgtcgaccgccttcgtcgccgccgactggatccagatccagatatgcataaaagggattcatggctttaagcttatctcttacgctccaggaatggatcagtcagaacatcaccaccggctcgcctcgaccgccgccgactggtgtttccgcctgcacggctggcctattatgccgccgttgttgggcgtctacgtcgtcaccgaccggcttgccttcgccgctgccgactggtgtttccgcctgcacggctggcctttatgccgccgttgttgggcgtctacgtcgtcaccgaccggcttgccttcgccgctgccgactggtgtttccgcctgcacggctggcctttatgccgccgttgttgggcgtctacgtcttcaccgaccggcttgccttcgccgctgccgactggtgtttccgcctgcacggctggcctttatgccgccgttgttgggcgtctacgtcttcaccgaccggcttgccttcgccgctgccgactggtgtttccgcctgcacggctggcctttatgccgccgttgttgggcgtctacgtcttcaccgaccggcttgccttcgccgctgctgactggtgtttccgcctgcacggctggcctattatgccgccgttgttgggcggctacgtcttcaccgaccggcttgccttcgccgctgccgactggtgtttccgcctgcacggctggcctttatgccgccgttattgggcgtctacgtcttcaccgaccggcttgccttcgccgctgccgactggtgtttccgcctgcacggctggccttttatgccgccgttgttgggcgtctacgtcttcaccgaccggccgcctcgtccgccgccgactggtgcttccgcctgcacggctggcctattatgccgccgttgttgggcgtctatgtcttcaccgaccggcttgccttcgccgccgccgactggtgtttccgcctgcacggctggcctattatgccgccgttgttgggcgtctacgtcttcaccgaccggcttgccttcaccgctgccgactggtgtttccgcctgcacggctggcctgttataacgccaactgatgctatcttcttcacggctggctacatcgctgtcactactaataggcatcagtatcttcaacacaagctgcctacgtttgtcatggctgccgactggtttcttcacttccatggctgcatgattctgccagtgttgattggccttaccatcttcatcgctgctaccactactgatggacatcatcatcttccgtcgccgactgattatgccgccgccgactggtgcttttatcttcacaactgcgcgtcttcactaccggtttgcttctgttgccgccgacttgtgttcacttcattacggcaatacaactttgtcatcatggtggagcgacttcatctttattatcttcggcactggcaaactctattgctgctacttcgcaagttttactacttcaccaaccacgacgtctttgtgaacctcgacatctcggcatgcaatgccatgatattttactacaacaagtgactctccaatattcaggatttctacttggacaccttcaacacatatcttcaatcaagcaatgactac

SEQ ID NO: 90724 - DNA, 1032 bp, Oryza sativa
  Clone ID: PAT_MRT4530_89366C.1
atggctttaagcttatctcttacgctccaggaatggatcagtcagaacatcaccaccggctcgccgtcgtcaccgccgactggagtcttcgcctatacggttgattggtcacaccaccgttgttgggcgtctacgtctttaccgaccggccgcttcgtccaccgtcgactggtgtcttcgcctatacggttggttggtcacaccaccgttgttgggcctctacgtcttcaccgaccggcttgccttcgtcgccgccgactggtgtctccgcctgcactgccggcctattatgcggctattgttgggcgtctacgtcttcaccaaccggcttgccttcaccgccgccgactagtgtctccgcctgcacggctggcctattatgccaccgttgttgggcgtctacgtcttcaccgaccggccacctcgtccgccgccgactggtgtttccgcttgcacggctggcctattatgccgccgttgttgggcgtctatgtcttcaccgaccggccgccttgtccgccgccgactggtgtcaccgcctgcacggctgccctattatgccgccgttgttgggcgtctacgtcttcgccgaccggccgcctcctccgccgccgactggtgtttccgcctgcacggctggcctattatgccgctattgttgggcgtctacgtcttcaccgaccagccgcctcatccgccgccgactggtgtcaccgcctgcacggctggcctattacgccgccgttgttgggcgtctacgtcttcgccgaccggccgcctcgtccgccgccgactggtgtttccgcctgcacggctggcctattatgccgctgttgttgggcgtctacgtcttcaccgaccggccgcctcgtccgctgccgactggtgtttccgcctgcatggctggcctattatgccaccgttgttgggcgtctacgtcttcaccgaccggccgcttcaccgaccggccgcctcatccgccgccgtctggtgtcaccgcctgcacggctggcctgttatgacgccaactga

SEQ ID NO: 90725 - DNA, 2844 bp, Oryza sativa
  Clone ID: PAT_MRT4530_89367C.1
atgggcgtccacgtcttcaccgaccggctggccttcgccgactggtgtttccgcctgcacggctggcctattatgccgccgctgttgggcgtctacgacttcaccaccggcctgcctccgtcgccgccgactggtgtcctcgcctatacggtcggttggtcacaccactgttcatgggcgtccacgtcttcaccgaccggctggccttcgccgactggtgtttccgcctgcacggctggcctattatgccgccgctgttgggcgtctatgacttcaccgccggcccgcctccgtcgccgccgagtggtgcctccgcctacacggctggcctattatgccgccgctgttggacgtctacgacttcaccgccggcctgcctccgtcgccgccgagtggtgcctccgcctacacggctggcctattatgccgtcgctgttgggcgtctacgacttcaccgccggcctgcctccgtcgccgccgagtggtgcctccgcctacacggctggtctattatgccgccgctgttgggtgtctacgacttcaccgccggcccgcctccgtcgccgccgagtggtgcctccgcctacacggctggcctattatgccgccgctgttgggcgtctacgacttcaccgccggcctgcctccgtcgccgccgagtggtgcctccgcctacacggctggtctattatgccgccgctgttgggcgtctacgacttcaccaccggcctgcctccgtcgccgccgactggtgtcctcgcctatacggttggttggtcataccaccgttcatgggcgtccacgtcttcgctgaccggctggccttcgccgccgccgactggtgtttctgcctacacggctagcctattatgccgccgctgttgggcgtctacgacttcaccgccggcctgcctccgtcgccgccgactggtgtccccgcctatacggtcggttggtcacaccaccgttgatgggcatcgtcatcttcaccgccggcctgcctccgtcgccgccgattggtgcctccacctacacggctggcctattatgccgccgctgttgggcgtctacgacttcaccgccggcctgcctccgtcgccgccgattggtgcctccgcctacacggctggcctattatgccgccgctgttgggcgtttacgacttcaccgccggcctgcctccgtcgccgccgagtggtgcctccgcctacacggctggcctattatgccgccgctgttgggcgtctacgacttcaccgccggcctgcctccgtcgccgccgattggtgcctccgcctacacggctggcctattatgccgccgctgttgggcgtctacgacttcaccgccggcctgcctccgtcgccgccgagtggtgcctccgcctacacggctggcctattatgccgccgctgttgggcgtctacgacttcaccgccggcctgcctccgtcaccgccgattggtgcctccgcctacacggctggcctattatgccgccgctgttgggcgtctacgacttcaccgccggcctgcctccgtcgccgccgagtggtgcctccgcctacacggctggcctattatgccgccgctgttgggcgtctacgacttcaccgccggcctgcctccgtcaccgccgattggtgcctccgcctacacggctggcctattatgccgccgctgttgggcgtctacgacttcaccgccggcgtgcctccgtcgccgccgagtggtgcctccgcctacacggctggcctattatgccgccgctgttgggcgtctacgacttcaccgccggcctgcctccgtcgccgccgagtggtgcctccgcctacacggctggcctattatgccgccgctgttgggcgtctacgacttcaccgccggcctgcctccgtcgccgccgagtggtgcctccgcctacacggctggcctattatgccgccgttgttggacgtctacgtcctcaccgttggctcaccttcgttgccgtcgactggtgtttccgcttacacggctgacctattatgccgccattagtgggcatcttcgctttcaccgtcgaccgccttcgtcgccgccgactggtgtcttcattgttattgatggacgactttgttcccacattggccacttctgccatcaccaaggggaatattataaagctaagatccagatccagatatgcataaaagggattcatggctttaagcttatctcttacgctccaggaatggatcagtcagaacgtcaccaccggctcgcctcgaccgccgccgactggtgtttccgcctgcacggctggcctattatgctgccgttgttgggcgtctacgtcttcaccgaccggccgcctcgtccgctgccgactggtgtttccgcctgcacggctggcctttatgccgccgttgttgggtgtctacgtcttcaccgaccggccgcctcgaccgccgccgactggtgtttccgcctgcacggctggcctttatgctgccgttgttgggcgtctacgtcttcaccgaccggccgcctcgtccgctgccgactggtgtttccgcctgcacggctggcctttatgctgccgttgttgggcgtctacgtcttcaccgaccggccgcctcgtccgctgccgactggtgtttccgcctgcacggctggcctttatgccgccgttgttgggcgtctacgtcttcaccgaccggccgcctcgaccgccgccgactggtgtttccgcctgcacggctggcctattatgctgccgttattgggcgtctacgtcttcaccgaccggccgccgcatccgccgctgactggtgtcaccgcctgcacggctggcctgttataa

SEQ ID NO: 90726 - DNA, 5730 bp, Oryza sativa
  Clone ID: PAT_MRT4530_89368C.1
atgacggcgcacgcgcggagggcggcggcgctcacgggggagaggaaaggaaggaggaaaagggattcctcaccgaggcgatggcggcgaccggcgtggaaagagacgagcggcgatgaccggcgacgcggaggcacggacgggcggcggcgacaccctaggagaagatggagaggcgttaggagaggagacgacgaccacggcggcttgaattgccggccggagatggaggggagggaaaaactcaccggctcgcgaggggagaggtgctccgggcgtgacacaacggagggcgcctcctcgtccagagtgtcacctccacatggacgtgaggaccagccctccgtgcccccggttggtggtgttggctgtagagcctttgtggcgagtcttcggaatgtccgttggcccccaaggttccggcccaccatcaccgaggagtatgatgggagcgtcaaccccaccgagtttctccaggtctatacgaccgggatcgaggccgctgggggagacgacagggtcatggcgaatttctttcccatggccctgaagggacaggcgcggggttggctaatgaacctgccacccgcgtcggtccactcctgggaggatctgtgccagcagttcaccatgatctttcaaggcacttatccacgcccaggtgaagaagcggacttgcacgcagtacagcgaggggatgatgaatcccttcgctcgtacattcagcgtttctgccaagtccgcaatactataccttgcatccctgcacacgcggtgatctacgcgttcagggggggtgtgcggcacaaccgcatgctcgaaaagattgcctccaaagagccccagactaccgcagagctttttcagctcgcggaccgagtggctcgtaaggaggaggcctggacctggaacccctccggttccggtgtggcagcttcggccgcccccggatccgccgctcagacagggcggcgtgacaggaggaggaagaaaaggtcggtccattccggcgacgagggtcacgtcctcgccgtcgagggcgttccgcgggccacccgaaaggggaggcctgcgagcgacaaaaagaaagaggctggtactcccagcagggagcgcccagccagcaagtggtgctccgtccacaacacctccctccacgatctcgcggattgtcgcgcagtcaaaaacttggctgagcgaacgaggaagtgggaggaggacaggaggcaggaacgccgtgagggcaagtccgcggctagttccctcctgttaaacggcgaagaacccggggccaccattgccactgtcgacgggggagcgtgtgctcacgtttctcgccggagttttaaggccatgaggcgagagcttctggccgcggcccctactcatgaggcgacgcgccgggcgcggtggtcggaggttgccctcactttcgaccagaccgaccacccaccgtgcgttgcccggggagggcagattgcgatggtggtttcccccaccatctgcaatgtgaagttggggcgtgtcctcatagatggaggagcggctctcaacatcctttcccccgcggcctttgatgctatcaaggccccggggatggtgctccagccgtctcaaccgatcatcggtgtgacgccggggcacacatggccgttaggtcacatcgacctaccggtcacctttggtggatcagccaacttccgcacggagcgggtgaacttcgatgtggcggacctcagtctgccctacaacgcggtcctggggagacccgcgttggtgaagttcatggcggcggtccactacgcctacctccagatgaagatgtcgggccccggtggccccatctctgtccgtggcgaccttaaagtcgcgctcgcttgcatggagcagcgtgcggaccacctcgctgctgtgaccaagcccgagggtggtgacgagaggcttggcacctccgcccccaccgccccgaggcagcggattgccacatgcgacgaggtcccggaagacgcgctcgtctccttcctgcgggcaaacgctgacgtcttcgcatggagaccagcggatatgcccggggtccccagggaggtgattgagcaccgtcttgccgtgcggccgggcgcaaggccggtccggcagaaagtgcggcggcaggccccggaacgtcaagccttcatccgcgaggaggtggcgagacttctggaggccggattcatccgtgaagtcgtccatccggagtggctggcgaacccggtggtcgttcccaaggcgaacggcaagcttcggatgtgcatcgactacaccgaccttaacaaggcatgtcctaaggatccttaccccctgcctcgcatagatcagatcgtcgactccactgcggggtgcgaccttttgtgctttctagatgcatactctggttaccatcagattcgcatggctagggaggatgaggaaaaaactgcgttcattacccccgtaggaacctattgttatacatcaatgcccttcgggttaaagaatgcaggtcctacttttcaacgtactactcgaatttctttgggtagccaaataggacgtaatgttgaggcttatgtcgatgacttggttgtaaaaacgcgcaaccaagaaactttactttcagatctagcggaaacttttgagaacctccgctccgcccgcataaagctgaaccccgataagtgtgtgtttggtgtacctgcgggcaagctcctcgggttcttggtctctgcccgaggcattgaggccaaccccgagaagattcgagctatcgagcggatgcgcccccccagcaaacttagggatgtgcaatgcgtcaccggttgcatggccgccctaagtcgtttcatatcaaggctgggagagaaggcgctacccttgtttaagctcctcaagcgctcggggccgtttacttggacggaggaagctgaacatgccctcactcagttaaaggcatatctcagctctcccccggttctagtcgccccggagccaaatgagcccctgctactttacttagcggcgaccccccaagtagttagtgcagcgttggttgtggagcgcgatgaagacaatcctcatttcgcgcacccccgccctgtgctgacttggcccgggagcgagcagggaggagaagcccccgagtcgaacggtggcctaaggcccctgacgaccggagtcggccctctgcccgcttgtcagacggtgctgggtgcccccgaccctcaggagggccccgaggccactgcgggaaggccgcacctaacgccctttggccccgaggctaaccctgtgctgactcgacccgggagaaagcagggagaagaggcccccgagccgaacggaggcctgaggcccctgacgaccggagtaggccctttgcccgcttgtccgacgacgccaggagcccccgacccccaggacggccccgaggccactgtgggaaggccgctcctgtcatcctccgaccccgaggacatcggcacagaaggcgagtgcgccccgagaggccacttggacgaagaatgccccggggatgcggcccctagcaaagagggtcggccccgccgaaaggtgcagcggcctgtctactttgttagtgaggccctccgggacgccaagacccgataccctcaggcccagaagatgctttacgctattctgatggcctcgaggaaactgcgccattatttccaggcacatcgggtcactgtggttacgtcttaccccctcgggcaaatcttgcataatcgagagggtacaggacgagtggtaaaatgggcaatcgagctttctgagttcgatctgcactttgaaccacgccacgctatcaagagccaggccctcgccgattttgtggcagagtggaccccggctccagagaccgtctcaatacccgaggccagcacggacccctttcagctgcctcgcaccacccactgggtgatgcagttcgacggttctctgtctctccagggtgccggtgcgggggtcacgttgacctccccgacaggggacgtcctcagatacttggtccgtctcgactttcgagcgactaacaatatggcagagtacgagggactccttgccggactcagagtggcagctggactggggatccgccgcctcttggtattaggtgactcccagctagtcgttaaccaggtctgtaaggagtaccggagctctgacccacagatggacgcctacgtacgccaagtgcggcgtatggagcgccatttcgatgggatagaacttcggcatgtacccagaagggataacatgatagccgacgaactctcacggctcgcgtcctcgcgagcccagaccccaccgggcgcctttgaagaaaggcttacccagccgtcggcgcgacccgaccccttaggggagacggatgcgcctgaccggcccccgaggcccgtcggagtccaggcctcgggacccgaagggagcgctccaagctccctcagattgatcgcttggatctctgagatccaaacatacctcacagataagactctacctgaggaccgcgaagggagtgaacgcgtacaacgcatttccaaacgctatgtgctggtagaagggaccctctatcggcgcgcggctaacggaatcctcctgaagtgcattcctcaggaacaaggcgttgagcttcttgctgacatccatgagggcgagtgcggagcccattccgcctcgcgcaccctggttggcaaggcctttcgtcaaggattttattggccgacagctctcaatgatgcagtcgatctggtccggcgatgcagagcgtgtcagttccacgccaagcaaatccatcagccggcccaggccctgcagatcataccactgtcatggccatttgctgtctgggggcttgatatcttgggaccgttcaaacgggccccgggcgggtttgagtatctgtatgttgcgatcgacaagttcactaagtggcccgaggcttatccggttgtcaagatcgataagcactctgctcttaaattcattaagggcatcacggcccgttttggagtgcctaaccgtattattacggataatggcacccaattcactagtgaactcttcggcgactactgcgaagacatgggcatcaagctctgcttcgcctcacctgcccaccccagaagcaatggccaagtggagcgcgccaatgcagaaatcctcaaaggccttaaaaccaagaccttcaatattctcaagaagcacggcgattcatggatcgaggagttaccagcggtgctctgggcaaaccgaaccacaccaagccgagcgaccggggaaacgcctttcttcctcgtctacggcgcagaagcggttctcccatccgagctcaccctgaggtctcctcgggccaccatgtactgcgaggctgatcaagatcagcttcgtagagatgacctcgactacttagaagagcgaaggcggcgcgcggctctccgagccgcgcgctaccagcagagcttgcggcgctaccatcagcgccacgtccgggcccgaccactctgcgtcgacgacctcgtcctacgccgcgtccaaacgcgtgctggattgagcaaactctcaccaatgtgggagggtccgtatcgagtgatcggtgttccccggccgggctcggtacggctggccacgggcgacggcacggagctgcctaacccatggaacatcgaacaccttcgtcgcttctacccctga

SEQ ID NO: 90727 - DNA, 2924 bp, Oryza sativa
  Clone ID: PAT_MRT4530_89369C.1
ttgggcttctccaagaacaaccagggaataaagagacacaaagcactgcaggaaaatggtacgacaaagtcaaaataatgaaaagtttccaagttaattaattatgagatcgagtggtcaagatacctgcaagggctaacatagtacatcatggaaatcaaattaagcctaacaccttttttcttcagaaaaatctcaatgaagatcagtctaagggcttctgcgacgactccacccatctggtaaaccacaccaacccagctgattgtaatttcaccaacagaggccacaataaccccaacactgatgacaggcatgatagcaagcattttacagctcatttcttcaaggccaagggcagctccgaggagaaacacagctactacaatgctcaaacaaagaatcaatcttctggtatattttcctgtgtcgatcttgtgtcggtcggcggagatcaagccgaagctgtcgacgacgccctcacgcatcgagactttcttcgtgctttgccggcggacatgtggtggccatcgctgggcacagtttaccaggagaaaacactgcatgaggccgttgatggcttccgccggctactgctgatcgaggcattgcgacccaagctgatcgacgcgcacgacgtatccaagccacgccatcacgacacggccgccatcgtcgcctactcggccactcgggtgcctcttgccgtgtccgagtgctcctctcttcccttccatgcagatggacgtgctgctagattggcacaggacacaggaatatactcggccaccaggagcaagcactcgagatcaaacaatcattcactgcttgcggcctcgctgccacggttggtgtgtgccgccgccgttgccgatagcgacatcgtcttcaccactggcttgcctccgtcgccgccgattggtgcctccgcctacacggctggtctattatgccgccgctgttgggcgtctacgacttcaccgccggcctgcctccgtcgccgccgagtggtgcctccgcctacacggctggcctattatgccgccgctgttgggcgtctacgacttcacgccgccggcctgcctccgtcgccgccgattggtgcctccgcctacacggctggcctgttatgccgccgctgttgggcgtctacgacttcaccgccggcctgcctccgtcgccgccgattggtgcctccgcctacacggctggcctattatgccgccgctgttgggcgtctacgacttcaccgccggcctgcctccgtcgccgccgactggtgtctttgcctatatggttggttggtcacaccaccgttgttgggcgtctacgacttcaccgccggcctgcctccgtcgccgccgactggtgtcttcgcctatatggttggttggtcacaccaccgttgttgggcgtctacatcttcaccgaccggccgtctcgtccgccgccgactggtgtttccgcctgcacggctggcctattatgccgccgctgttgggcgtctacgacttcaccgccggcctgcctccgtcgccgccgagtggtgcctccgcctacacggctggcctattatgccgccgctgttgggcgtctacgacttcaccgccggcttgcctccgtcgccgccgattggtgcctccgcctacacggctggcctattatgccgccgctgttgggcgtctacgacttcaccgccggcttgcctccgtcgccgccgagtggtgcctccgcctacacggctggcctattatgccgccgctgttgggcgtctacgacttcaccgccggcctgcctccgtcgccgccgagtggtgcctccgcctacacggctggcctattatgccgccgctgttgggcgtctacgacttcaccgccggcctgcctccgtcgccgccgactggtgtcttcattgttattgatggacgactttgttcccacattggtcacttctgccatcaccaaggggaatattacaaagctaagaatggatcagtcagaacatcaccgaccggccgcctcgcccgccgccgactggtgcttccgcctgcacggctggcctttatgccgccgttgttgggcgtctacgtcttcaccgaccggcttgccttcgccgccgccgaatggtgtttccgcctgcatggctggcctttatgccgccgttgttgggcgtctacgtcttcaccgaccggcttgcctttgccgccgccgactggtgtttccgcctgcacggctggcctttatgccgccgttgttgggcgtctacgtcttcaccgaccggcttgccttcgccgccgccgactggtgcttccgcctgcacggctggcctattatgccgccgttgttgggcgtctacgtcttcaccgaccggccgcctcgcccgccgccgactggtgtctccgcctgcacggctggcctattatgctgccgttgttgggcgtctacgtcttcaccgaccggcttgcctcgcccgccgccgactggtgtttccgcctgcacggctggcctattatgccgccgttgttgggcgtctacgtcttcaccgaccggccgcctcgcccgccgccgactggtgtctccgcctgcacggctggcctattatgccgccgttgttgggcgtctacgtcttcaccgaccggccgcctcgcccgccgccgactggtgtttccgcctgcacggctggcctattatgccgccgttgttgggcgtctacgtcttcaccgaccggccgcctcgcccgccgccgactggtgtttccgcctgcacggctggcctattatgctgccgttgttgggcgtctacgtcttcaccgaccggccgcctcgcccgccgtcgactggtgtttccgcctgcacggctagcctattatgctgccgttgttgggcgtctacgtcttcaccgaccggccgccgcatccgccgctga

SEQ ID NO: 90728 - DNA, 1616 bp, Oryza sativa
  Clone ID: PAT_MRT4530_8936C.1
atggctgacaatgagaaaggcaataaggtcagaagtcaggacattggtacctcaagctcccgagtgaatgaagcaccagacaccagttgtgtgacactggtccaacacctgattaaccagaaccgattgcttatagagatactacagcagcatcagacgccaattctgaacctgagtcaaatacaacctcaagtgcagttggaggcagtccaagcactcacaccacaagtcagcatgccgccagcatcccgaaggacccatggtgacgtgccacatgttgacccaaaagaagcaagtaacatttgctttatgtgtgatgagcaagggcactatgcaagggagcgtcctcagcagaaaagaaaaacaccaatgcgaaccgaagatgaagtccgaatgaccagacgtcagagaagaaataccttccgaggtgcaccacagttgacagagcatcttttagctaatggaggtagagtgtctgatagtgaagattcagatcaagtctcctcagatgatgaagatgaaatggaatgtaaggcatgctctcgttgtggagaaacccgtcatgtcgccagctcgtgtgccactatatgcgttcattgcgaggaagaccatccacccgacaggtgtccaacgagcaggatcacttgtttcttttgtgaaggaactgatcatgtaccaaaagattgtcaattcagttttctgctgacgaagaagatggctaaccaacccgccagttccaacggagagaagcatcaaggcaacaccaatcctcgccaagattacagtttcagcctaactccagtgccaggacagaggaatcaaaatgagaaaagaaaatgccgagtccgggaagatatctgttgcttcaattgtcaaggaatgggtcatttcgccgacaagtgcccaaaaccgagaaacataactgccagcacgtcagtccacgcaactccctgcaatctgaagcttgctcctcagcgaattgtcatccatgcatcccgaagcagtcctatagcccgcgttgcaacagctccaactccagcgagtgcattaccacaaggtgtcaatgctcactttcagccccagcaaagaattgtcgtcgatggaagaagttgtgtctctccccgacctactccaggccaagcaaagggcaatcgacctccggagggcgataccaagcagaagaccgtcatccgcttcaaccagcaatcagaaggaagcttctcctgtgaatgatagcaatatgcagtcctatcacatcatcacagaaccaatcaaggatgcagtcactagaacaatgccagctgcaaggagtgaaatcttcaactcggtatcagatgctacacggagtgaaaagtgcaagccccggttaccaggttgactccgaagatatgaatcatgagaagttctggaacggaagcatcattgaactaccgcaacctagtctgagtcagccaaaaggtgcaccctggtccaagtcaggtgaagagaagattccatccgcaacaggaggtcaagccaagcagttccgagtggtgaagttttgctggaagtttgtcaagacgcaacggaagaagtcagacaagaagagaagaccgcccaacctatcttcttgctag

SEQ ID NO: 90729 - DNA, 5740 bp, Oryza sativa
  Clone ID: PAT_MRT4530_89370C.1
atggccgagcaagcaaaggtgcacgacctctctccgagtgtgagcggcgacgacggggagccaaacccacgccgtcgagctcgtactcccccacctcctccacaccaaagtcctaagcagggggaggcgctcgagagggttgataaatccgcagcatcaccggtcgcgggtgatacaggagaacggcgagatggggagcgtcgcctcctcgtctacggcgacggcagcacgcctcagggcgcgcttcaggctgctggcgcgctcctacgtcacccgcccgtcgtccatgaccctgagtctccagctcagcgatggctggacgacgtggccaacttggtcatgacggcccagcagcgcctgggtgctggtggacggtccgccaccaccaagacctccggcgccgccaccaccgctggacaaccggacaccccggccgacccaactccatcacgcccaccctcgccaccggtgcctaggaaagggtcgagctatacttcagatcaagcagttacccactcccgcttgtgcggcactaaggggaaaggagagggaggcgccggcatgtgggccccacgggcagtggctcaagggggagggagtgggcggcggcatgctcggcacggctcaagccggccggccatggcgaggcgacgacggcgcacgaccgccggcggtgaccggcggcgcggggagacggcggcggccggcgcgaaggcggcggcggcagccgaagatgacggcgcacgcgcggagggcggcggcgctcacgggggagaggaaaggaaggaggaaaagggattcctcaccgaggcgatggcggcgaccggcgtggaaagagacgagcggcgatgaccggcgacgcggaggcacggacgggcggcggcgacaccctaggagaagatggagaggcgttaggagaggagacgacgaccacggcggcttgaattgccggccggagatggaggggagggaaaaactcaccggctcgcgaggggagaggtgctccgggcgtgacacaacggagggcgcctcctcgtccagagtgtcacctccacatggacgtgaggaccagccctccgtgcccccggttggtggtgttggctgtagagcctttgtggcgagtcttcggaatgtccgttggcccccaaggttccggcccaccatcaccgaggagtatgatgggagcgtcaaccccaccgagtttctccaggtctatacgaccgggatcgaggccgctgggggagacgacagggtcatggcgaatttctttcccatggccctgaagggacaggcgcggggttggctaatgaacctgccacccgcgtcggtccactcctgggaggatctgtgccagcagttcaccatgatctttcaaggcacttatccacgcccaggtgaagaagcggacttgcacgcagtacagcgaggggatgatgaatcccttcgctcgtacattcagcgtttctgccaagtccgcaatactataccttgcatccctgcacacgcggtgatctacgcgttcagggggggtgtgcggcacaaccgcatgctcgaaaagattgcctccaaagagccccagactaccgcagagctttttcagctcgcggaccgagtggctcgtaaggaggaggcctggacctggaacccctccggttccggtgtggcagcttcggccgcccccggatccgccgctcagacagggcggcgtgacaggaggaggaagaaaaggtcggtccattccggcgacgagggtcacgtcctcgccgtcgagggcgttccgcgggccacccgaaaggggaggcctgcgagcgacaaaaagaaagaggctggtactcccagcagggagcgcccagccagcaagtggtgctccgtccacaacacctccctccacgatctcgcggattgtcgcgcagtcaaaaacttggctgagcgaacgaggaagtgggaggaggacaggaggcaggaacgccgtgagggcaagtccgcggcagttccctccggtaaacggcgaagtgaggccaaacagaaggcccccgccgttgacattgatgacggtgatgatgacctaggtttccaggaacccggggccaccattgccactgtcgacgggggagcgtgtgctcacgtttctcgccggagttttaaggccatgaggcgagagcttctggccgcggcccctactcatgaggcgacgcgccgggcgcggtggtcggaggttgccctcactttcgaccagaccgaccacccaccgtgcgttgcccggggagggcagattgcgatggtggtttcccccaccatctgcaatgtgaagttggggcgtgtcctcatagatggaggagcggctctcaacatcctttcccccgcggcctttgatgctatcaaggccccggggatggtgctccagccgtctcaaccgatcatcggtgtgacgccggggcacacatggccgttaggtcacatcgacctaccggtcacctttggtggatcagccaacttccgcacggagcgggtgaacttcgatgtggcggacctcagtctgccctacaacgcggtcctggggagacccgcgttggtgaagttcatggcggcggtccactacgcctacctccagatgaagatgtcgggccccggtggccccatctctgtccgtggcgaccttaaagtcgcgctcgcttgcatggagcagcgtgcggaccacctcgctgctgtgaccaagcccgagggtggtgacgagaggcttggcacctccgcccccaccgccccgaggcagcggattgccacatgcgacgaggtcccggaagacgcgctcgtctccttcctgcgggcaaacgctgacgtcttcgcatggagaccagcggatatgcccggggtccccagggaggtgattgagcaccgtcttgccgtgcggccgggcgcaaggccggtccggcagaaagtgcggcggcaggccccggaacgtcaagccttcatccgcgaggaggtggcgagacttctggaggccggattcatccgtgaagtcgtccatccggagtggctggcgaacccggtggtcgttcccaaggcgaacggcaagcttcggatgtgcatcgactacaccgaccttaacaaggcatgtcctaaggatccttaccccctgcctcgcatagatcagatcgtcgactccactgcggggtgcgaccttttgtgctttctagatgcatactctggttaccatcagattcgcatggctagggaggatgaggaaaaaactgcgttcattacccccgtaggaacctattgttatacatcaatgcccttcgggttaaagaatgcaggtcctacttttcaacgtactactcgaatttctttgggtagccaaataggacgtaatgttgaggcttatgtcgatgacttggttgtaaaaacgcgcaaccaagaaactttactttcagatctagcggaaacttttgagaacctccgctccgcccgcataaagctgaaccccgataagtgtgtgtttggtgtacctgcgggcaagctcctcgggttcttggtctctgcccgaggcattgaggccaaccccgagaagattcgagctatcgagcggatgcgcccccccagcaaacttagggatgtgcaatgcgtcaccggttgcatggccgccctaagtcgtttcatatcaaggctgggagagaaggcgctacccttgtttaagctcctcaagcgctcggggccgtttacttggacggaggaagctgaacatgccctcactcagttaaaggcatatctcagctctcccccggttctagtcgccccggagccaaatgagcccctgctactttacttagcggcgaccccccaagtagttagtgcagcgttggttgtggagcgcgatgaagacaatcctcatttcgcgcacccccgccctgtgctgacttggcccgggagcgagcagggaggagaagcccccgagtcgaacggtggcctaaggcccctgacgaccggagtcggccctctgcccgcttgtcagacggtgctgggtgcccccgaccctcaggagggccccgaggccactgcgggaaggccgcacctaacgccctttggccccgaggctaaccctgtgctgactcgacccgggagaaagcagggagaagaggcccccgagccgaacggaggcctgaggcccctgacgaccggagtaggccctttgcccgcttgtccgacgacgccaggagcccccgacccccaggacggccccgaggccactgtgggaaggccgctcctgtcatcctccgaccccgaggacatcggcacagaaggcgagtgcgccccgagaggccacttggacgaagaatgccccggggatgcggcccctagcaaagagggtcggccccgccgaaaggtgcagcggcctgtctactttgttagtgaggccctccgggacgccaagacccgataccctcaggcccagaagatgctttacgctattctgatggcctcgaggaaactgcgccattatttccaggcacatcgggtcactgtggttacgtcttaccccctcgggcaaatcttgcataatcgagagggtacaggacgagtggtaaaatgggcaatcgagctttctgagttcgatctgcactttgaaccacgccacgctatcaagagccaggccctcgccgattttgtggcagagtggaccccggctccagagaccgtctcaatacccgaggccagcacggacccctttcagctgcctcgcaccacccactgggtgatgcagttcgacggttctctgtctctccagggtgccgtcgatctggtccggcgatgcagagcgtgtcagttccacgccaagcaaatccatcagccggcccaggccctgcagatcataccactgtcatggccatttgctgtctgggggcttgatatcttgggaccgttcaaacgggccccgggcgggtttgagtatctgtatgttgcgatcgacaagttcactaagtggcccgaggcttatccggttgtcaagatcgataagcactctgctcttaaattcattaagggcatcacggcccgttttggagtgcctaaccgtattattacggataatggcacccaattcactagtgaactcttcggcgactactgcgaagacatgggcatcaagctctgcttcgcctcacctgcccaccccagaagcaatggccaagtggagcgcgccaatgcagaaatcctcaaaggccttaaaaccaagaccttcaatattctcaagaagcacggcgattcatggatcgaggagttaccagcggtgctctgggcaaaccgaaccacaccaagccgagcgaccggggaaacgcctttcttcctcgtctacggcgcagaagcggttctcccatccgagctcaccctgaggtctcctcgggccaccatgtactgcgaggctgatcaagatcagcttcgtagagatgacctcgactacttagaagagcgaaggcggcgcgcggctctccgagccgcgcgctaccagcagagcttgcggcgctaccatcagcgccacgtccgggcccgaccactctgcgtcgacgacctcgtcctacgccgcgtccaaacgcgtgctggattgagcaaactctcaccaatgtgggagggtccgtatcgagtgatcggtgttccccggccgggctcggtacggctggccacgggcgacggcacggagctgcctaacccatggaacatcgaacaccttcgtcgcttctacccctga

SEQ ID NO: 90730 - DNA, 6747 bp, Oryza sativa
  Clone ID: PAT_MRT4530_89371C.1
atggccgagcaagcaaaggcgcacgacctctctccgagtgtgagcggcgacgacggggagccaaacccacgccgtcgagctcgtactcccccacctcctccacaccaaaatcctaagcagggggaggcactcgagagagtcgaaaaatccgcagcatcgctagtcgcgggtggtgcaggagaacggcgagatggggagcgtcgcctcctcgtctacggtgacggcagcacgcctcagggcgcgctccaggctgttggcgcgctcctacgtcacccgcctgtcgtccctgacccggagtctccagcccagcgatggctggacgacgtggccaacttggtcatgacggcacagcagcgcctgggtgctggtggacggtccgccaccaccaagacctccggcgccgccaccaccggttccgtgtcatcaaggcggagggcgcggcgagcggcggcggctgcacgtcattcggctgccactccctcgtcgacgccttcgactcgggaggatcagcatggggagccggatgcccgcctcaacatcgagcgccggcgtaacggccggcgtactccccgtgcaacggagggcgcctcctcgtccagagtgtcacctccacatggacgtaaggaccagccctccgtgcccccggttggtggtgttggctgtagagcctttgtggcgagtcttcggaatgtccgttggcccccaaggttccggcccaccatcaccgagaagtatgatgggagcgtcaaccccaccgagtttctccaggtctatacgaccgggatcgaggccgctgggggagacgacagggtcatggcgaatttctttcccatggccctgaagggacaggcgcggggttggctaatgaacctgccacccgcgtcggtccactcctgggaggatctgtgccagcagttcaccatgaactttcaaggcacttatccacgcccaggtgaagaagcggacttgcacgcagtacagcgaggggatgatgaatcccttcgctcgtacattcagcgtttctgccaagtccgcaatactataccttgcatccctgcacacgcggtgatctacgcgttcagggggggtgtgcggcataaccgcatgctcgaaaagattgcctccaaagagccccagactaccgcagagctttttcagctcgcggaccgagtggctcgtaaggaggaggcctggacctggaacccctccggttccggtgtggcagcttcggccgcccccggatccgccgctcagacagggcggcgtgacaggaggaggaagaaaaggtcggtccattccggcgacgagggtcacgtcctcgccgtcgagggcgttccgcgggccacccgaaaggggaggcctgcgagcgacaaaaagaaagaggctggtactcccagcagggagcgcccagccagcaagtggtgctccgtccacaacacctccctccacgatctcgcggattgtcgcgcagtcaaaaacttggctgagcgaacgaggaagtgggaggaggacaggaggcaggaacgccgtgagggcaagtccgcggcagttccctccggtaaacggcgaagtgaggccaaacagaaggcccccgccgttgacattgatgacggtgatgatgacctaggtttccaggaacccggggccaccattgccactgtcgacgggggagcgtgtgctcacgtttctcgccggagttttaaggccatgaggcgagagcttctggccgcggcccctactcatgaggcgacgcgccaggcgcggtggtcggaggttgccctcactttcgaccagaccgaccacccaccgtgcgttgcccggggagggcagattgcgatggtggtttcccccaccatctgcaatgtgaagttggggcgtgtcctcatagatggaggagcggctctcaacatcctttcccccgcggcctttgatgctatcaaggccccggggatggtgctccagccgtctcaaccgatcatcggtgtgacgccggggcacacatggccgttaggtcacatcgacctaccggtcacctttggtggatcagccaacttccgcacggagcgggtgaacttcgatgtggcggacctcagtctgccctacaacgcggtcctggggaggcccgcgttggtgaagtttatggcggcggtccactacgcctacctccagatgaagatgccgggccccggtggccccatctctgtccgtggcgaccttaaagtcgcgctcgcttgcatggagcagcgcgcggaccacctcgctgctgcgaccaagcccgagggtggtgacgagaggcttggcacctccgcccccaccgccccgaggcagcggattgccacatgcgacgaggtcccggaagacgcgctcgtctccttcctgcgggcaaacgctgacgtcttcgcatggagaccagcggacatgcccggggtccccagggaggtgattgagcaccgtctcgccgtgcggccgggcgcaaggccggtccggcagaaagtgcggcggcaggccccggaacgtcaagccttcatccgcgaggaggtggcgagacttctggaggccggattcatccgtgaagtcatccatccggagtggctggcgaacccggtggtcgttcccaaggcgaacggcaagcttcggatgtgcatcgactacaccgaccttaacaaggcatgtcctaaggatccttaccccttgcctcgcatagatcagatcgtcgactccactgcggggtgcgaccttttgtgttttctagacgcatactctggttaccatcagattcgcgtggctagggaggatgaggaaaaaactgcgttcattacccccgtaggaacctattgttatacatcaatgcccttcgggttaaagaatgcaggtcctacttttcaacgtactactcgaatttctttgggtagccaaataggacgtaatgttgaggcttatgttgatgatttggttgtaaaaacgcgcaaccaagaaactttactttcagatctggcggaaacttttgagaacctccgctccgcccgcataaagctgaaccccgataagtgtgtgtttggtgtacctgcgggcaagcttctcgggttcttggtctctgcccgaggcattgaggccaaccccgagaagattcgagctatcgagcggatgcgcccccccagcaaacttagggatgtgcaatgcgtcgccggttgcatggccgccctaagtcgtttcatatcaaggctgggagagaaggcgctacccttgtttaagctcctcaagcgctcggggccgtttacttggacggaggaagctgagcatgcccttactcagttaaaggcatatctcagctctcccccggttctagtcgccccggagccaaatgagcccctgctactttacttagcggcgaccccccaagtagttagtgcagcgttggttgtggagcgcgatgaagacaatcctcatttcgcgcacccccgccctgtgctgacttggcccgggagcgagcagggaggagaagcccccgagtcgaacggtggcctaaggcccctgacgaccggagtcggccctctgcccgcttgtcagacggtgctggatgcccccgaccctcaggaaggccccgaggccactgcgggaaggccgcacctatcgccctttggccccgaggctaaccctgtgctgactcgacccgggagaaagcagggagaagaggcccccgagccgaacggaggcctgaggcccctgacgaccggagtaggccctttacccgcttgtccgacgacgccaggagcccccgacccccaggacggccccgaggccactgtgggaaggccgctcctgtcatcctccgaccccgaggacatcggcacagaaggcgagtgcgccccgagaggccacttggacgaagaatgccccggggatgcggcccctagcaaagagggtcggccccgccgaaaggtgcagcggcctgtctactttgttagtgaggccctccgggacgccaagacccgataccctcaggcccagaagatgctttacgctattctgatggcctcgaggaaactgcgccattatttccaggcgcatcgggtcactgtggttacgtcttaccccctcgggcaaatcttgcataatcgagagggtacaggacgagtggtaaaatgggcaatcgagctttctgagttcgatctgcactttgaaccacgccacgctatcaagagccaggccctcgccgattttgtggcagagtggaccccggctccagagaccgtctcaatacccgaggccagcacggacccctctcagctgcctcgcaccacccactgggtgatgcagttcgacggttctctgtctctccagggcgctggtgcgggggtcacgttgacctctccaaacggagacgtcctcagatacctggtccgcctcgactttcgagcgaccaataatatggcagagtacgagggactccttgccggactcagagtggcagccgggctggggatccgccgcctcctggtgttaggcgactctcagctggttgttaaccaagtctgtaaggagtaccggtgctctgacccacagatggacgcctacgtacgccaagtacggcgtatggagcgccattttgacgggatagagcttcggcatgtgcccagacgggataacatgatagccgacgaactctcacggctcgcgtcctcgcgagcccagaccccaccgggcgcctttgaagaaaggcttacccagccgtcggcgcgacccgaccccttaggggagacggatgcgcctgaccggcccccgaggcccgtcggagtccaggcctcgggacccgaagggagcgctccaagctcccttagattgattgcttggatctctgagatccaaacatacctcacagataagactctacctgaggactgcgaagggagtgaacgcgtacaacgcatttccaaacgctacgtgttggtagaagggaccctctatcggcgcgcggctaacggaatcctcctgaagtgcattcctcaggaacaaggcgttgagcttcttgctgacatccatgagggcgagtgcggagcccattccgcctcgcgcaccctggttggcaaggcctttcgtcaaggattttattggccgacagctctcaatgatgcagtcgatctggtccggcgatgcagagcgtgtcagttccacgccaagcaaatccatcagccggcccaggccctgcagatcataccactgtcatggccatttgctgtctgggggcttgatatcctgggaccgttcaaacgggccccgggcgggtttgagtatctgtatgttgcggtcgacaagttcactaagtggcccgaggcttatccggttgtcaagatcgataagcactctgctcttaaattcattaagggcatcacggcccgttttggactggaaactcatggctccaatctgacagaagagcagcttgaaacacatactatatctgcgtggaaggaggccaagcgtcaaacttatgccagaaacgagggttcttggagggcaaatcaccatttagttcatgccaccccttatgaatccctgagggaaattgctatgaagatactgcaaaacggtgtttctaccgttccaattatgttttcctcatcaccagatggctcatatccacaattgttgcatcttgcttccctttctggaattttgaaatgtatttgtagatattttaaaaattctcaaggtaatttacctattttgagccaacctgtatgcacaattcctctgggtacctgggttccaaaaattggtgatcctaatggccgtccattggctatgttgcggcctaacacatctcttagcgctgccctgaatttgctggttcaagctggtgtgagctcaataccaattgtggatgacaatgactcactgcttgacacatattccagaagtgacatcacagctcttgcaaaagacaaggtgtacacacacattcgcctagatgagatgaccattcatcaggtgaaggtgaaggtgaaggtgcaggtgcagcgtgcggtgcgtccttggtccctgtcgagtaacggcgacgggcttggcgtcgagcggaaagatctagagaggctgaatgagaaggtgaaggagcacatcgaggagaaggcggggagagcagtggcgaagcacagccagcttgtgaaggaggtggacgtgcgcctctccgcccgcggtggcgagctcagccgaggtcccaagatttgcaggtgcgagatcactctcttcaccaagcgccacggcgtcatccgcgccgaggaggacgccgagtccacctacgccagcatcgacctcgcctcctccatcatcaagaggaagctcaggaagatcaaggagaaggagaccgacgtccgccacctcaaggggaccaagccccccgtctccgactggccgccatcattgctcgacaacaacgacgacgacgcccaggcccagctcaaggatctggaggaggccgtcggcgccgaggacgaggacacggtgctcaccaaggtggtgcgcaccaaggtgttcgagatgccgccgctgtcggtggaggaggcgatggagcagctagtgaatgtggaccacaacttctacgccttcagagacgagaagaccggggagatgaacgtcctgtacaagaggaaggaaggaggcttcggtctcatcgtccccaagggagacggtcatctccacaaggagaccatccccaactctgaccaccaccacccctcccttgctgcctag

SEQ ID NO: 90731 - DNA, 2270 bp, Oryza sativa
  Clone ID: PAT_MRT4530_89372C.1
atgacaaagatgattgaagcactcggctttggaggtacagtacaaccaatcagacagaagattaattcagaggcggacgacgacaacgagcttcggaggcggaggcggacgacgacgacgagctttggagcacgacggcaacgacggggcaacgacagttcgacggatttgatggtcgtcctcgtccaccaccaagcctactggtccaatctacccaacgaggatgccatggtgttgcaagatggatctacaaacacgaagcatgccaaaaccgatctaatcggatgcataggagacggctgcagccacgccgatgccttcctgccgtcctgcgtcgtgctgatggacaccaacgccgcccgcgactgcgacctccgcctcctccgctccgtctcagaattaatctctcttgttgggcgtctacgacttcaccgccggcttgcctccgtcgccgccgagtggtgcctccgcctacacggctggcctattatgccgccgctgttgggcgtctacgacttcaccgctggcttgcctccgtcgccgccgagtggtgcctccgcctacacggctggcctattatgccgccgctgttgggcgtctacgacttcaccgccggcctgcctccgtcgccgccgagtggtgcctccgcctacacggctggcctattatgccgccgctgttgggcgtctacgacttcaccgccggcttgcctccgtcgccgccgagtggtgcctccgcctacacggctggcctattatgccgccgctgttgggcctctacgacttcaccgccggcttgcctccgtcgccgccgagtggtgcctccgcctacacggctggcctattatgccgccgctgttgggcgtctacgacttcaccgccggcctgcctccgtcgccgccgagtggtgcctccgcctacacggctggcctattatgccgccgttgttggatgtctacatcctcaccgttggctcaccttcgttgccgtcgactggatccagatccagatatgcataaaagggattcatggcctttaagcttatctcttacgctccaggaatggatcagtcagaacaccaccaccggctcgcctcgaccgccgccgactggtgtttccgcctgcacggctggcctattatgccgccgttgttgggcgtctacgtcttcaccgaccggcttgccttcgccgccgccgactggtgtttccgcctgcacggctggcctttatgccgctgttgttgggcgtccacgtcttcaccgaccggcttgccttcgccgccgccaactggtgtttccgcctgcacggctggcctattatgccgccgttgttgggcgtctacgtcttcaccgaccggcttgccttcgccgccgccgactggtgtttccgccgaccggcttgccttcgccgccgccgactggtgtttccgcctgcacggctggcttttatgccgccgttgttgggcgtctacgtcttcaccgaccggcttgccttcgccgccgccgacggccgcctcgaccgccgccgactggtgtttccgcctgcacggctggcctattatgccgccgttgttgggcgtctacgtcttcactgaccggccgcctcgttcgctgccgactggtgtttccgcctgcacgttggcctattatgccgccgttgttgggcgtatacgtcttcaccgaccggccgcctcgtccgccgcagactggtgtttccgcctgcacggctggcctattatgccgccgttgttgggcgtatacgttttcaccgaccggccgcttcgtccgccgccgactggtggcaccgcctgcacggctggccttgttgattggccttaccatcttcatcgctggtcgtctcgtctgctgctgactagtgccctcgcctctacgtctgaggatctcatcgttatcatcggctgctacatcgctattgactggatcaccgacatcgtcatcttcatcataggagttggtacaatgcatcttaaaaggtgtcaaacagtaaagctttatatagctgtcccgctgacttttttatatataagtcaaggtgctgtttgggtttttaagcaattgattggatacaatatcgttgctttttgccacccctccacagtcttctgacttggaaaaagtactcgggagatcatggcgaagatgattgaagcactcggctttggagtaatctagttcgagagaagattatcttttcgacttccatcatgctagcaagtactgttcatgctagcaagttgtccattataaatga

SEQ ID NO: 90732 - DNA, 450 bp, Oryza sativa
  unsure (1)..(450): unsure at all n locations
  Clone ID: PAT_MRT4530_89373C.1
tctcccactcgttctcgaactctttattgcatattatttctcttcaattcatctattatttccggacgggtattttatatgcagcgctgcctcttttcttccttacaacantatttgtggctgcatattactcactccctgcttcactttcttctgagattttactatttctttatttctctattcaactaccactacaacttttaataataactatattggcacaatatttttttagtacatactactatatttgattccaaaatatacattttcttctatgctcaatttttcaatcatttaatttaccttgcaactgtccatgaattttatattttatactgcttatagtattatgtccatgtatacaactacagtatttgatattcaagttatgcgactatagattattcttttaggtgacaaattataaaaaaaaaatgtcatcct

SEQ ID NO: 90733 - DNA, 1962 bp, Oryza sativa
  Clone ID: PAT_MRT4530_89374C.1
atggctttaagcttatctcctacgcttcagggatggatcagtcagaacatcaccaccggcttgccttcgccgccgccaactggtgtctccgcctgcacggctggcctattatgccgccgttgttgggcgtctatgtctttaccgccggctgccttcgccgccgctgactggtgtctccgcctgcacggctggcctattatgccgccgttgttttgggcgtctacgtcttcaccgtcggctgccttcgccgccgctgactggtgtctccgcttgcacggctggcctattatgccgtcgtcgttgggcgtctacatcttcaccgaccggcttgccttcgccgccgccaactggtgtctccgcctgcacggctggcctattatgccgccgttgttgggcgtctacgtcttcaccgaccggcttgcctttgccgccgccgactggtgtcttcgcctgcacggctagtctattatgccgccgtcgttgggcatcaacgtcttcaccgaccggcttgcctttgccgccaccgactggtgtctttgcctgcacggctgacctattatgccgccgtttgttgggcgtctacgctttcaccgactggcttgccttcgccgccgctgactggtgttttcgcctacacggctagcctattatgctgccgttgttcggcgtcatcgacttcactgaccagccgcctcgtcttccgccgactggtgtctccgcctgcacggctggcctattatgccgccgttgttgggcgctcattatgccgccgttgttgggcgtctacgacttcaccaccggcctgcctccgtcgccgccgactggtgtcctcgcctatacggttcgttggtcacaccactgttcatgggcgtctacgtcttcaccgaccggcttgccttcgccgccgccgactggtgtcttcgcctgcacggctgacctattatgtcgccgtttgttgggcgtctacgctttcaccgatcggcttgccttcgccgccgctgactggtgttttcgcctacacgcctagcctattatgctaccgttgttcggcgtcatcgacttcaccgaccggtcgcctcgtctgccgccgactggtgtctccgcctgcacggctggcctattatgccgccgtcgttgggcgtctacatcttcaccgaccggcttgccttcgccgccgccaactggtgtctccgcctacacggctggcctattatgtcgccgttgttgggcgtctacatcttcaccgaccggcttgccttcgccgccgccgactggtgtctccgcctgcacggctggcctattatgccgccgtcgttgggcgtctacgtcttcaccgccagctgccttcgccgccaccgactggtgtctccgcctgcacggctggcctattatgccgctgttgttttgggcgtctacgtcttcaccgtcggctgccttcgccgccgccgactggtgtctccgcctacacggctggcctattatgccgccgttgttttgggcgtctacgtcttcaccgccggctcgccttcgccgccgtcgactggtgtctccgcctgcacggctgttatgccgccgtcgactggtgtttttatcttcacaactattcatcttcgctaccgctttgctacttcgccgaccacgacatctacaggagccttgacatctcggcatgcgtcaacaagtataatgccatgttattttactagtggtgttccaatattcaagatttctactcggacatcttcaatgcgtatattcactcaagcaatgactactcgacgacaagaagctacagttctcgactctatattcagttgtttctcaactaaccaaagagtcgggggctacataaatacaagactctcaaaattcgacaagcttgatgtcaagatgaagcaatcaatcaatcaacgagtcaactcgaggagttattatcttcgtcttcgtttcagagccgacatt

SEQ ID NO: 90734 - DNA, 1608 bp, Oryza sativa
  Clone ID: PAT_MRT4530_89375C.1
taaacacccggtggattcaaatccccaaacaggagtagggtattacctcttattgagagggcctgaacctgtctaaatccctgtctctgcatccatccacttttaggtctcgtacgctaccccccattgttggacgtctacgtcttcaccgaccggcctgcacggctggcctattatgccgctgttgttgggtgtctacatcttcaccgaccggccgccttgtccgccgccgactggtgtttccgcctgcacggttggcctattatgccgctattgttgggcgtctacatcttcaccgaccggccgcctcgtccaccgccgactggtgtttccgcctgcacggctggcctattatgccgccgttgttgggcgtctacctcttcaccgaccggccgcctcgtccgccgccgactagtgtttccgcttgcacggctggcctattatgccgccattgttgggcgtctacctcttcaccgaccggccgcctcgtccgccgtcgactggtgtcaccgcctgcacggttggtctattatgccgccgttgttgggcgtctacatcttcaccgaccggccgcttcgtccgccgccgactggtgtttccgcctacacggctggcctattatgctgccgttgttgggcgtctacgtcttcaccgaccggccatctcgtccgccgtcaactggtgtttccgcctgcacgactggcctctacgtcgccgtcaccgctaataggcgtcatcatcttcaacacaagctatctacgtctgctgccgactggtttcttcactcccatggctgcatgattctgccagtgttgattggccttatcgtcttcatgccctcgcctctacgtctagtttatactgctaccactactgatggacatcatcatctttcgtcgctgactggttatgtcgccgccgactggagtatctatcttcacaactacacgtcttcgccaccggttttcttatgttgccactgactcgtgttcacttcatcacggctttgcaactttgtcaccatggtgagcaacttcatttttattatcttcggcatcggcaaactctattgcctctacttcgcaaactgtgctacttcaccaaccacgacgactacaagagtttcgacaccttggcatacgtcaccaaatatgatgccgtgttattttattacaacaagtggtgttccaatcttcaatatttatcttcactcaagcaatgactactcgacgacaagctacagttctcgactctatgttcagttgtttcccaactaaccaaagaacgttctacttcagcaacttcaattatttcactgcttcgcctctggctgcttccgtcattgccgacttgttatttcgccttcatggttgacctactatgcaaacgctgatgagcatcttcgtcattatcatcggctgttacaccgctgttgactagatcaccgacatcgtcatcttcatcaataacctgtcaagcctcttcaacattgcccactctactgctattggtgggcaacttcgtcatcatatttgatcatctatgttgctgcttatcatcattactgtcggttgcgtttgtcgtcgccgactattttcttcatcttca

SEQ ID NO: 90735 - DNA, 676 bp, Oryza sativa
  Clone ID: PAT_MRT4530_89376C.1
ctcacacgtccttggtgacgccgagctcggccaccccggggtgctcgatttacctttgcaacctggacgaccagtgattactccgggtctgcatgaagtacctctacgtgttcccgccgtccgccggcggggccgccaacaccgtgagggccgcgctcggcagggccctagtgcactactacccgctggccggaaggctcaggcaccgcgccaacgataggctcgcgctcaagtgcaatgccgagggcgcgctcttcgacgaggccttgctgcccaccctcaccgcctgacgactgactacgcgccggcgccaccgccaagccgcacaaggcctggaggaagctgctctacatagtacacgccgacgccttcgtcgccgtcccgccggtcggcgtgcacgtgacacaactggggtgcggaggcatggtctagtgtacagccatcagccactgagtatgcgacggcatagcatcacggcgacttactccacgcgtgggccgtcttcgccgcagccgacctggacctcgccgccggtcgtgacgacgacctatccgaggttctgcatgaccgccgggcattgcgcacgtgctgtcttgcgcgcgttgacttcactcacctggagtaccacaccaaccgcagcagcagcagactccttgtcatccagccccagatgatg

SEQ ID NO: 90736 - DNA, 300 bp, Oryza sativa
  Clone ID: PAT_MRT4530_89377C.1
atggcgagagcattgcttgcgccgtgccctcctcctctggctccatttgcctcaactggcaccagggatagagaggacgtcgacttcttcttcttccccttcctggtcctctacaagtgcggtcgcttgcatgccatccaaggactacttgttgaacctcgcatgccatccaaggactacttgttgaacctcgccaacctcacggcagggaagcgcagtggcaacaagttgctgatcgtggtgttctaccacagtggtgcgttcaccatagagttggtctcttcgccgatgtaccagtga

SEQ ID NO: 90737 - DNA, 229 bp, Oryza sativa
  unsure (1)..(229): unsure at all n locations
  Clone ID: PAT_MRT4530_89378C.1
gagcgntnntntnttntactntaaaaataaaatatactaatccatccactgtacagtagagatgtactggatccacacaaagtcaacaactgcctctgtcttcctgtctttcgaagcaaagacgcacgagaaagagagagaaaaaacaagcaaaaaaaaagttaaccaaaagcaagcggaggatgatgattaattagcttaattgcgaganctaatcaatcgagcaacc

SEQ ID NO: 90738 - DNA, 229 bp, Oryza sativa
  Clone ID: PAT_MRT4530_89379C.1
ttcctgccggaacagcaagctgccctcctcctgcaactctcgcaattggaaatggtacaataagacaaaacctctgaggctcaggacgaagagcacgaggatggagaatacatcttcaggtaaacatatgctaccagaagattttgtcaagaagcagagagcctactttgaggaggttgatgcctttgagctgccagaggaggaggcctcagagacggacctggagtga

SEQ ID NO: 90739 - DNA, 1192 bp, Oryza sativa
  Clone ID: PAT_MRT4530_8937C.1
atgtcatggcacagggccggtgtcctgctgctgggggctcagtcctgcctacctgtcccgggggttccggccgtaggtggggttgggtcggtactcttgtttatggctaggatgggttgggaactatgtcacgtcttccgtccgtataccgtggtgatgtttaacagagaaaaaggaaagaatgtcagcaggtatgcctccagtaactcaagttttcaactcaatccaccactggcctcaagagagttaacaagggcacacccttggtccattccaagcatgctgctgagttcacagctaccattggttggaagtccagaccaaaatcagtatgtgtttgatcgagcatttgccacccaggtcgatgagcttccaatgccagaagaggatgtccccttttgtcacgattgtagagagcaaggacactatgccctgaattgtccatgggtatatgccaaagaagccccttcctttggtttagcagggcagacatcgctaaaccagcctcctcgcaccaagtcaagcttgcagcctagtgtacaaaggagagagcctaatggagagaatccattgaatcccgggaattgctctcctcctagcttttcgtaccacgtggggtcacatactaagcaagccaaaggccagaagagtaagaatcagaagagaaaagcaccgatgcgaactgaagaagaagtacgtaagatgactattaccagcaccgaatggcctccagcaaggataactatccctacacgtcaaagaggaaatgcctttcgaggtgcccgtcagttgacccagcaccttctaatccatggtggcagagtatctgatagtgaagggtcagatcaggtctcctcgcatgatgaagatgagtctccccgacatctcggcgaggaagaaatggaatcaaaggcatgcacccgttgtggagaaattggacacgttgctagcatgtgtctcacactctgccctcattgtgaggaagaccatccaccaggtgaatgtcccacccgcaagcctcagcaaagaattgttgtcgatggaagaagttgtgtctctccccgacctactccaggccgagcaaagggcaatcaatctcaggagggcgataccaagcagaataccgttctctgcttcaaatagcaatcagaaggaagcttctcctgtgaatgatagcaatatgcagtcctaa

SEQ ID NO: 90740 - DNA, 211 bp, Oryza sativa
  Clone ID: PAT_MRT4530_89380C.1
ggatttcatgcggacggcgactgtttataaacctcggatgaataaaatcgggagttcttatagtctctcttttagttgaattcttctgagctttcttggtattcagatgcctcaagcaaaggagaactcattgggcttgacgttcatttgggtggtgatactatgcaaagttttaacttaatgctagtaccatagcgtaagttgtttaact

SEQ ID NO: 90741 - DNA, 138 bp, Oryza sativa
  Clone ID: PAT_MRT4530_89381C.1
atgagagaagagatagatttgggtgggaaattgggactctggggtcaggtcgcggagtcgtcgctgatccgcatcgtccaaaataaatccaagggtcaagaacaaagcagagggccagcgaagcgaagagcaagatag

SEQ ID NO: 90742 - DNA, 372 bp, Oryza sativa
  Clone ID: PAT_MRT4530_89382C.1
atgggcgcggcgctccacgccgccctgctcctccgtcgccgccggctcggcgactcctccgcgcggccgcgcatcacctgccactgcggcacccttctcaccggtggcggctcgtcagatcgcccccctccactatggattcgttgttgtaatccactcctcttctgcgtgattcacctattcttcacattccctgacgccatgtcaaaatggattggggcgtgctctaagctctatgtgtgtgtacagctagcaatggctttgatgcgggcgaagagttatactgaaacatgcccatgcgacaaaagcccaaaaaggaaaaaaaataacaggaatactcatctgggcaagcgaaatggcaagcacaactga

SEQ ID NO: 90743 - DNA, 3877 bp, Oryza sativa
  Clone ID: PAT_MRT4530_89383C.1
ccggccgggacgaaccaaaataatattggcctcgtccatttccgcagaaacccccaaaatccccaaaccccaactccccgtcttcctcgccggccaccgccgcgtctctgctgctgcggcggctgccgcgcgggcgtcctcctcccggcggcgccagcttggtcggtctctcagagattacagtcccggtacatgcctcattcttgatccagctcgcgaggtcatcaagaaccaacattcaacaggttcgcatgtgttaattgttgccatggtggatgcaagggagaaatagccttaccgttgggtccacctgccatgataaagccaagggtcaactggtcggatcatgcaaatgctgttcaaagctcctgtatcaaagatgaattcctgagttcaagttttttgttctctttaccaacacaaaggcctaatcaggaagcagattgtacgggaatgcttcctttaaggtctgctgcttgcagaattcaaggcctagagcgtcttcaagctccatccattgagaaggcctggcgttctctacgcaacactcaggttgcacggaagaattatttaagacctggtttatctggaaaagtgaaagattgtgatagcgaccatgctcatacttatgggacaagttcttcatataatgttaacaaaatggacagtgtgtccagaaataggaatcccacccaggaaagtatgcatcagacgactgaaagtggtactatggagaagaacagtagccatctgcctgcaggcaccaagtcctgtacaaggacttacctgaacaatcatgtggtgcaggcagataccattacaacaacaaatcaaagtcttgcaagaactggtcctgaattattcaagactgctccttttattgacaacatgtgtgatgatgctaaattagatgccatggatgaggatgagcttctagcgagtattgatgtggaccgaatagtcatggaacattatcaagcaacaaatacacccagagggtcatccaaatctccattagagaagtgcaacttcaatggatttgatgagaataatttaccacaagaactctctataatgtgtgaccacggtagcaagctagctttttgcccagaggcgaagtctcatttgcttgaaatgaaggataacttgcttgcaatatcccatgagcttattgacggtcaactcagccctcaacaatctgatgatcttcatcaaaagagagcactcctaaagaagcagattgagctgcttggggagtatacggcgaggttaacccaagatgaagagcgacagcaatctcattctatggcctccacaacagctcatcagggccatcaccccactagcatcctaagtagctcttttgtaaaggataccaatatattccaatcaccgatttacaccaggaatgaacctggggaaagtggtttatgcttttcttctgctccatattcctatatggatggtttaagcatgccattaccgtctgttcagagagattacactccaagggctattgatatcagttacactgaaggttctggtgataaacagtggagtagtacacactttgcatggactaaggaactcgaggccaacaacaaaagagtatttggaaaccgttcttttcgcccaaatcaacgagaaataatcaacgccacaatgagtgggaatgatgtttttgttttgatgccaactggtggtggaaaaagtttgacatatcagtcccaaaatgttagtatttttgaggtgggcaccggtattaagagagtaggtagaaatgattggaggaaggcaaatatttctgcagcttaccttagcgccagcatggagtggtcagaacagcaggagatattaagagaattaatgtctcctacatgcacgtacaagttactgtatgttacgcctgaaaagatagccaagagtgatgctctgttgagacaattggaaaatttatattcgcgaggccatctctctagaattgtcattgatgaagcccactgtgttagccagtggggtcatgatttccgacctgattaccagttctttatccatcagcatctaggcattttaaaacagaagttcccgcagacgccagtcctggccttgactgcaacagcaactgcaagtgtcaaggaagatgtcgtgcaagttctaggccttgcaaactgcattattttcagacaaagttttaatcgtccaaatctgaggattgcaggtattaataaacctgatgtccgttttgttatccatcattccctgcccaaatcaattgaaggatatcatcaggagtgtggacgtgctggtcgtgacagtcagctttcaacttgtgtcctgttctacaattattctgattatattcgtctcaaacacatggttacccaaggatttgcggagcaaggaacatcagcaccacgaggaggttcttcgcaggaacaagcgcttgaaacgcataaggaaaatctcctgcgaatggttagttactgcgaaaatgatgtggactgcagacgtctactacagctgatccactttggagagatgtttaatccttcatgttgtgcaaaaacatgtgataattgcttgaaagagttgagatgggtcgaaaaagatgtgaccaacattgctagacaattggttgatctggtaatgatgacaaagcaaacatattcaactactcatattctcgaagtatacagaggttcagtaaaccaaaatgtcaagaagcaccgccatgatactttgagtcttcatggagctggaaagcatctagctaaaggtgaagcagcgagaatattgcgccatctagtaattgaggaaatactcattgaggatgtcaaaaagagcgaaaactatggatctgtatcatctgtcttaaagtttaaaacttatgaaaaaatatatcaaaggttccccactcctgagaaggctcctaagatgggtgtactcgatgaatcgtcagttccacgaattaataagactaatcaacagagtcaagtggacgggagccttgcagccgagctttatgaagctttgcaatgccttaggactcagataatggatgaaaatccacaattattggcataccacatatttaaaaacgagacattgaaggaaatcagcaaccgaatgccaagaacgaaagaggaacttgtggagataaatggcatcggcaagaacaagctgaacaagtacggggaccgtgtgcttgcaaccatagaggatttcctcgccagatatccaaatgcgaccaggaaaaccagcagcggcggcagcaacgagcacagcgaggcggtcaagaagcgaagaggcttctccgtcaccaacacctctaccaactgtgacgactttgaggaacgcacggtccagtccaagaaacgcgctgcaaagacacgtacaaggcaggaaatatctgatgctgccagcatcgtccaggacgtccgctacatagatcttgagctagatggttgtgaacaagtcaatgaagtgccatacagtgtacaaaagcctgtggcttctggtagggttttacctgcgtggcagtccgccagaatagcctagggttaacaccccctcgtagtttctaatttatgtgaagaatttatatgcattaagtaggatcctaggctaaccccattgagctttatgtaggccttgggccaactacttgtaagatggcaccaaccagaccacatgttaggttgcttctgaacatatatggtagtagtccttttcagtatagttcccgtagcgcatgtaactaacatgactattactatggcaaattttgatgtcaacagcttcaggaagtggacatcgaaaggtcctagtactgctgtaagccgcttacttatagtatgagccttacgcttgttttttt

SEQ ID NO: 90744 - DNA, 508 bp, Oryza sativa
  Clone ID: PAT_MRT4530_89384C.1
ctaaaggcctttgaaagcattttcggcggcagctccgttaagcggtccactgcgtgcagtgttcgtcgctgtctctaccaagccgccgcccttcttcctcgtcatagagccaccgtcgccaacgggattggaggggaggggaagagtcgatctgccgccggccctcctcctcatcgctggccatcctcgccggtcgagccactgccgctgctcctcgccgagccatcgccgcttctcctcgctgagtcgagaatcccccgtcgtggccctcgtcctcctcgccgcgccgctgcctccatgggccctccgcatcctcctcgccgagccgttctcgctgccggccctcctcctcgttggctctcctcccggcttactgagccgctgccaccgccggccctcctcctcatcgagccgctaccgccgccggcacctcctcgccgagccaccgactgccctcctcctccttgtaagctctgaggagagggagagggagagggagagggtttga

SEQ ID NO: 90745 - DNA, 116 bp, Oryza sativa
  Clone ID: PAT_MRT4530_89385C.1
cgcccgcgacgaagctagacctgccggaccccctccgtctcgctggggacatgacgatccgcgtcgccgacatgccggacggatacctcgataggtccaaccccgtgttttggtag

SEQ ID NO: 90746 - DNA, 3855 bp, Oryza sativa
  unsure (1)..(3855): unsure at all n locations
  Clone ID: PAT_MRT4530_89386C.1
gagatgattggtgacactatgaagagctatgacgtcgcatgcacgcggtactagcttggatcctctagagtgaccaccaccacggtaccacccacctcccatctcccccatctccggcgatcgccggcggcgagatggacctcctcgtggcgcagatcacggccgacctgaggtcgtcggacgcgctgcggcagtcgtcggcgctgctgcaggcgctgcagcagtgcgcggcggggcgggacgtgtccgcggtggcgcgcaccgtggcgaccgagatcctggcggcgccgtcgtcggcggtatgcaagcgcctcgcgctcgacctcctccgcgctctcccgctgccccccgacctcctcgacccgctgctgctctcctccctcgcctccgacctctccttcccggacccggacgtcgccgcctcgtccatcgcctcgttcccctcgctcccttcccacctcctcccgtcgctcctctcctcggcccacgccgacatcgccgccgcgctctcctcccccgccgagtcgctccgcctcgcggcggtgacctcgctctcctcgctcctcccgcgggacgacctcgcgctcatgtgctcctccaacccgtcgctcatggcgcacgccaccacgtggtggggacgcctggcggagctcgcgctggactccgccgacgccgtggccgccgcggcgtttgaggcgctggctaggctcttccaggagctggacgcgcgccgcatgagccggcttgccggggacaagcttgtcgacggcgagggcgcgctcgccgtgcgtgctcagtgggcggcggatgccatcaatttcatctggtcaaggcgcaacatgctcattgcccggtccatggtgatgcccgtagagagattccgggtcaccgtgtaccctcttgtgcacgcagcgaaaatggtcgcttctggcgcggtgaacacgctgcggcggattgccaagccaggggacactactattgccgatagcgtggaatcgagcgcagagaagttggttggggtgtcagacatcgtctcacacttgctgcctttccttagctctctggatccgccgctggtgttcgaggtggggatcaatatgctggcacttgcagatgtacctggaggtaagccggagtgggcttcggctgccactactgcnattcttacactatgggaccggcaagagttctcatcgatgagggagacgattgttagggctgttgtgaccaatctccatttgttggatctcggaatgcaggtgtctctgttcaaaagacttcttcagatggtgagaaacttgagagccgaatcagatcgtatgcatgcattggcatgtatttgtcggactgctctttgtgttgatctttttgcaaaggagagtgttcgaagaggtcagaagcctgttccaggaacagatgtgatctctctttttgaggatgtaagggcgaaggacgacctaaacagcattacaagcaaaagcttgttcagggaagagctggttgcttccctggttgaaagttgtttccagctatcgcttccactacctgagcagaataattctggcacagagagcagagttataggagcattagcctatggaactggttatggtgcattgaattggacagaacctgctttggatgtggtagaagtttgcaggccttgtgttctctgggattgtaatgggcgcacctatgcaattgattgctatctgaagttacttgttcggctttgtcatatatatgatactaggggtggtgtaaagacaattaaggctggtgcatcccaagatcagattctaaatgagacaagacttagaaatttacagctgcagcttatcagggatcttcgtgaggtccataccccaagaatatcatcacggttgatatgggcgatttctgaacacttcgatcttgaaggtctggatcctctcttagctgatgacccagaggatccactgaatattatcatatctaacatgcacaagattttattcaacaccgaatcctctaccactacatcgaataggatacaagatatgcagtctgtcctcatatgtgcccaacgtttgggaacaagaaatgcaagagctggccagctcctcagtaaagaattggaagaatatagagcaagtacttcagctgattttgtcaccaaacatcagtcacgttatgtcttgcagataataaaatatgtgacaagccatccagataacaggtgggtgggcgtaggtgatgccacaggggattatccatttagccaccacaaactcaccgtccagttttcagaggcgtctgctgctcaagacaggaaattggaggggttagtacataaagctattctggagctctggaggccaagtcccacacagttgagtctgctacagacaaaagggattggtactttgcataaagagctcccaaaagcgtatactttgaccggcagcagtgatccatgctatattgaagcgtatcatttggcagatccaactgatggcagaatcacactgcatctaaagatcttgaatttgactgagccggagctcaacagggttgatatccgagttggactctctggagcactgtattacatggatggattttcccgcaccgttcgacacctccgtaatcttgtttcccaggatccagtccaaagtagtgtaactgtcggagtttcacattttgagagatgctccctctgggttcaagtcttgtactacccatttgatggaagtgtaggatctactgattatgaaggagattatgaagagagctcacaaatgacgaggcaaaagcgcgcatttcgggcagagcttggggagccagttgttttgcgctgccagccatacaagatccctcttgctgaacttctcttgccatatgaatgctctccagttgagtatttccggttatggccaagtttgccagccatggtggagtgcactggcacatacacatatgaaggcagtggtttcaaggccactgctgctcagcagtatgatagctctcctttcctcagtgggttgaagtcgatttcttcaaagcctttccatcaagtttgctctcatttcatcagaacagtagctgggttccagttatgctacgctgcgaagacttggtttggtggatttgtgggcatgatgatctttggtgcaagcgaggtcagccggaacgttgatctgggcgacgaaacaaccacaatgatctgcaaattcgtagtgcgtgcatccgatgaatcgatcacaagagagatcgaatcagacctccagggctggatggacgatatcaccgatggcgccgtggaatacatgcccgaggatgaggtgaagagcgcggccgctgagcggctgaagatctccatggagagaatagccctgctcaaggcagccaaaccgaaggtgccgcctgcgaaaacaaaggaagaagaggaagaggagaagaagcaaaacgaggacctggatgaattcgggaaccccaagggcccctcgacgctttcaaagctcacggcggaggaagctgagcaccgtgccctccaggcggccgttctgcaggagtggcatcagctgtgcaaggagaaagccatgaaagcacagtgaggttctgtttttttttttcctttttttttggcatgcggcacatgttcaattttgtatctgtttctcattctttgcccccaatttgtgtatgtattacatgtgtgtcccttttaccccccttttgtgtatgtatgtattatcagtattatcctgctgatttcacttactggtgactagtgaggtggtgatgacgcaggacctgaacaatgagtagaatgatatgcccatcttgtcaaaaaaaaaaaaaaaaaaccaaaca

SEQ ID NO: 90747 - DNA, 185 bp, Oryza sativa
  Clone ID: PAT_MRT4530_89387C.1
aactgggggcccaaccaaaagcccctatgggacaaaaattggttgccccaatttttttttttagcaacatttgggccagactatggggaaaagcaaactaacccccgggggggggaggactttggggggaacggaaaattggggctgggctttagccaaagggaaatattaccaaaacccgcccc

SEQ ID NO: 90748 - DNA, 3623 bp, Oryza sativa
  Clone ID: PAT_MRT4530_89388C.1
cgcgccgctgacgggcgggcccgcccgccaccctcgctgacgggtggggcccacccgtcatccccttcctcccgccgctcccgccgctccgtccgcgccaagcgccgccgccgcctcgcgacgttgctctctctctccgccgtcgccgccgagctctggtccgccgccgtcgtcaccccggaccgcctcccacctcggcgccgcctccttcggcttcgccgcatcctcgccgacctcgtccacctgcttctgaggtggctcctccttggcctccgccagcacgcgtctccttcctcgccgccgccattgctgatagcaacaacgacttcaccgccggcctgcttccgtcgccgccgactggtgtcatcgcctatacggttggtcggtcacaccaccgttcatgggcgtccatgtcttcaccgaccagctggccttcgccgccgccgactggtgtttccgcctgcacggctggcctattatgccgccgctgttgggcgtctacgacttcaccaccggcctgcctccgtcgcagccgactggtgtcctcgcctatacggtcggttggtcacaccaccgttgatgggcatcgtcatctacaccgccggcctgcctccgtcgccgccgactggtgtccccgcctatacggtcggttggtcacaccaccgttgatgggcatcgtcatctacaccgccggcctgcctccgtcgccgccgactggtgtccccgcctatacggtcggttggtcacaccaccgttgatgggcatcgtcatctacaccgccggcttgcctccgtcgccgccgagtggtgcctccgcctacacggctggcctattatgccgccgctgttgggcgtctacgacttcaccgccggcctgcctccgtcgccgccgagtggtgcctccgcctacacggctggcctattatgccgccgctgttgggcgtctacgacttcaccgccggcctgcctccgtcgccgccgattggtgcctccgcctacacggctggcctattatgccgccgctgttgggcgtctacgactccaccgccggcgtgcctccgtcgccgccgagtggtgcctccgcctacacggctggcctattatgccgccgctgttgggcgtctacgactccaccgccggcgtgcctccgtcgccgccgagtggtgcctccgcctacacggctggcctattatgccgccgctgttgggcgtctacgacttcaccgccggcctgcctccgtcgccgccgagtggtgcctacgcctacacggttggcctattatgccgccgctattgggcgtctacgacttcaccgccggcctgcctccgtcgccgccgagtggtgcctccgcctacacggctggcctattacgccgccgctgttgggcgtctacgacttcaccgccggcctgcctccgtcgccgccgattggtgcctccgcctacacggctggcctattatgccgccgctgttgggcgtctacgactccaccgccggcgtgcctccgtcgccgccgagtggtgcctccgcctacacggctggcctattatgccgccgttgttggatgtctacatcctcaccgttggctcaccttcgttgccgtcgactggtgtttccgcttacacggctgacctattatgccgccattagtaggcatcttcgctttcaccgtcgaccgccttcgtcgccgccgactggtgtcttcattgttattgatggacgactttgttcccacattggccacttctgccatcaccaaggggaatattacaaagctaagatccagatccagatatgcataaaagggattcatggctttaagcttatctcttacgctccaggaatggatcagtcagaacatcaccaccggctcgcctcgaccgccgccgactggtgtcctcgcctgcacggctggcctattatgccgccgttgttgggcgcctacgtcttcaccgaccggcttgccttcgccgccgccgactggtgtttccgcctgcacggctggcctattatgccgccattgttgggcgtctacgtcttcaccgaccggcttgccttcgccgccgccgactggtgtttccgcctgcacggctggcctattatgccgccattgttgggcgtctacgtcttcaccgaccggcttgccttcgccgccgccgactggtgtttccgcctgaacggctggcctttatgccgccgttgttgggcgcctacgtcttcaccgaccggcttgccttcgccgccgccgactggtgtttccgcctgcacggctggcctattatgccgccgttgttgggcgtctacgtcttcaccgaccggcttgccttcgccgccgccgactggtgtttccgcctgcacggctggcctttatgccgccgttgttgggcgtctacgtcttcaccgaccggcttgccttcgccgccgccgactggtgtttccgcctgcacggctggcctattatgccgccgttgttgggcgcctacgtcttcaccgaccggctcgccttcgtcgccgccgactggtgtcctcgcctgcacggctggcctattatgccgccgttgttgggcgcctacgtcttcaccgaccggctcgccttcgccgccgccgactggtgtcctcgcctgcacggctggcctattatgccgccgttgttgggcgcctacgtcttcaccgaccggcttgccttcgctgccgccgactggtgtcctcgcctgcacagctggcctattatgccgccgttgttgggcgcctacgtcttcaccgaccggcttgccttcgccgccgccgactggtgtttccgcctgcacggctggcctttatgccgccgttgttgggcgtctacgtcttcaccgaccggcttgccttcgccgctaccgattggtgcttccgcctgcacgacagacttattatgctgccgttgttgggcgtctacgtcttcaccgaccggccgccgcatccgccgctgactggtgtcaccgcctgcacggctggcctgttataacgccaactgatgctaccttcttcacggctggctacatcgctgtcactactaataggcatcagtatcttcaacacaagctgcctacgtttgccatggctgccgactggtttcttcacttccatggctgcatgattctgccagtgttgattggccttatcttcttcaccgccggtcgtctcgtctgctgctgactagtgccctcacctctacgtctggtttatacagctaccactactgatggacatcatcgtcttccgttgccgactggttatgccgccgccgactagtgcttttatcttcacaactgcgcgtcttcgctaccagttcacttcatcacggcgatgcaactttgtcatcatggtggagcgacttcatctttattatcttcggcactggcaaactctattgctgctacttcgcaagttttactacttcaccaaccacgacgtctttgtgaaccttgacatctcggcatgcaatgccatgatattttactacaacaagtgactctccaatattcaggatttctacttggacaccttcaacacatatcttcaatcaagcaataactattcgacgacaagatgctacagttctcgactatatgttcagttgtttcccaac

SEQ ID NO: 90749 - DNA, 468 bp, Oryza sativa
  Clone ID: PAT_MRT4530_89389C.1
ggaaacaaacaaacttgactaattttttggggggaaaggcaaaaggctaaaccattttaccccatcaacaggagccaatcaaggccccaacaatgggtccacttcattcccgttggtaataatggaacccacccaaaaaccccctcaaaaaaaaacaaacaaaattaccctgcccccaggcgggggggacaattctaggggggaaaaaaacccaaacccccctaaaatcccaaaatggggggaaaaaacccccccacggaggtaactttcaaagacttcggcttggatttcggcttctccaaccccaaggaagccccaaaccctacgggggggaaacccccggactttttaaacaagggcccgggggaatcccctgcagggccgtttggggggggcccattcgatggcggaccttaaaaggcatttggagggcgggcagaagcggaagaaacaccgccaggggctgga

SEQ ID NO: 90750 - DNA, 1076 bp, Oryza sativa
  Clone ID: PAT_MRT4530_8938C.1
agaatcaacatatgaaaagtgtgaagtttggtaatctccttcctcctccttctccttcttctttttgagtatattttccttctaagatgacatgagttgagcattgcgcgcattattggggttcgaatatgccttgagaatgggatgtactgggaatttaagtcaaacagtatctgcacacaacagtagagtcaaaattgtggtaccatgcatgcttgttgatagtctaccccacagtttagttcttcctagttttgggcaatcaggccgaatgtatgatgtagctcttcacattctaaacctaatattattcacaacgcaagacaacttgttaataagcacaaccaagtccttcccaacgaattgcttgagttggtcattagacatggcattaaggacagtaaaaacagtaggtgtcgatgaagaagagcaatcataaaaagaagatgaaaaagaaaccaaaacattagacttaaaatcaactttacgagaaagaatattcatgtcatgggttttgagtttaatgtaaaacaacagactcttaaattgatgtaactttcatcttcctaattaacataccaagacggttcaaaagatgtagtgaaattttatattagggataattagtattgtaagatcaatctacagatccaagattgcttaaaactttgttaaagcacacaaaataatcatctaaagtctctccatatttcatttcaaatttcatgtactacttttaaaaacatatttgtataattccttgatgttagaagttccttgatgaaaattagataaaaccttccaaatctcattagcagtttgaagatgtgagacacggtcaaaatccgaataagaaataccattaaaaaaaatttggcgagctttacaattgattttaaaatcagtttttatagcaacaatattgatctgagtaggaatttcatttggattttcaattttaagccaaatatcataactcttaaacatgatataatattgcatggttaaacattttttaaaaagtcaacggcgtcaaacattttaggatggaggtagtacctcgccaagtacccata

SEQ ID NO: 90751 - DNA, 6102 bp, Oryza sativa
  Clone ID: PAT_MRT4530_89390C.1
atggctttaagcatatctcttatgctccaggaatggatcagtcagaacatcaccaccggctcgcctcgaccgccgccgactggcgtttccgcctgcacggctggcctattatgccgccgatgttgggcgtctacgtcttcaccgaccggtttgccttcgccgccgccgactggtgtgtccgcctgcacgggtggcctattatgccgccgttgttgggcgtctacgtcttcaccgaccggcttgccttcgccgccgccgactggtgtgtccgcctgcacggtctggcctattatgccgccgttgttgggcgtctacgtcttcaccgaccggcctgccttcgccgctgccgactgtggtgtccgctgcacggctcttatggctgccgttgtgggcgtctacgtcttcaccgaccggccgcctcgtcggccgccgactggtgtttccgtctgcacggctggcctattacgccaccgttgttgggcgtctacgtcttcaccgatggccgcctcgtccgccgccgattggtgtcttcgcctatacggttggttggtcacaccaccgttgttgggcgtctacgtcttcaccgaccggcttgccttcgtcgccgccgactggtgtctccgcctgcacggctggcctattatgccaccattgttgggcgtctacgtcttcaccgagcggccgcctcgtcagccgccgactggtgtttccgcctgcacggctggcctattatgccaccgttgttgggcgtctacgtcttcaccgaccggccgcctcgtcagccgccgactggtgtttccgcctgcacggctggcctattatgccaccgttgttgggcgtctacgtcttcaccgaccggccgccttcgtccgccgccgactggtgtgtccgcctgcacggctggcctattatgccgtcgttgttgggcgtctacatcttcaccgaccggccgcctcgtcggccgccgactggtgtctccgcctgcacggctggcctattatgccaccattgttgggcgtctacgtcttcaccgaccggccgcctcgtcagccgccgactggtgtttccgcctgcacggctggcctattatgtcaccgttgttgggcgtctacgtcttcaccgaccggccgcctcgtcagccgccgactggtgtttccgcctgcccggttggcctattatgccaccgttgttgggcgtctacgtcttcaccgaccggccgcctcgtccgccgccgactggtgtttccgcctgcacggctggcctattatgccgccgttgttgggcgtctacgtcttcaccgaccggcctgcctccgtcgccgccgactggtgtcctcgcctaaacggttggttggtcacaccaccgtttatgggcatccacgtcttcaccgaccggccacctcgtccgccgccggactggtgttccgcctgcacggctggcctattgagccgtcgttgttgggcgtctacgactccaccaccggcctgcctccgtcgccgccgactggtgtcctcgcctaaacggttggttggtcacaccaccgttcatgggcatccacgtcttcaccgaccggccgcctcgtccgctgccgactggtgtttccgcctgcacggctggcctattatgccgccgttgttgggcgtatacgtcttcaccgaccggccgcctcggtcgccgccgactggtgtttccgcctgcacggctggcctttatgccgccgttgttgggcgtctacgtcttcaccgaccggcctgccttcgccgctgccgactggtgtttccgcctgcacggctggcctttatgctgccgttgttgggcgtctacgtcttcaccgaccggccgcctcgtcggccgtcgactggtgtttccgcctgcacggctggcctattatgccaccgttgttgggcgtctacgtcttcaccgaccggccgcctcgtccgccgccgattggtgtcttcgcctatacggttggtgtttccgtctgcacggctggcctattacgccaccgttgttgggcgtctacgtcttcaccgaccggccgcctcgtccgccgccgactggtgtttccgcctgcacggctggcctattatgccgccgttgttgggcgtctacgtcttcactgaccggcttgccttcgccgccgctgactggtgtttccgcctgcacggctggcctttatgccgccgttgttgggcgtctacgtcttcaccgaccggccgcctcgtcggccgccgactggtgtttccgcctgcacggctggcctattatgcctccgttgttgggcgtctacgtcttcaccgaccggccgcctcgtccgccgccgattggtgtcttcgcctatacggttggttggtcacaccaccgttgttgggcgtctacgtcatcaccgatcggcttgccttcgtcgccgccgactggtgtctccgcctgcacggctggcctattatgccaccgttgttgggcgtctacgtcttcaccgaccggccgcctcgtccgccgccgactggtgtttccgcctgcacggctggcctattatgccgccgttgttgggcgtctacgtcttcactgaccggcttgccttcgccgccgctgactggtgtttccgcctgcacggctggcctttatgccgccgttgttgggcgtctacgtcttcaccgaccggcctgccttcgccgctgccgactggtgtttccgcctgcacggctggcctttatgctgccgttgttgggcgtctacgtcttcaccgaccggccgcctcgtcggccgccgactggtgtttccgcctgcacggctggcctattatgccaccgttgttgggcgtctacgtcttcaccgaccggccgctcgtccgccgccgattggtgtcttcgcctatacggttggttggtcacaccaccgttgttgggcgtctacgtcttcaccgatcggcttgccttcgtcgccgccgactggtgtctccgcctgcacggctggcctattatgccaccgttgttgggcgtctacgtcttcaccgaccggccgcctcgtccgccgccgactggtgtttccgcctgcacggctggcctttatgctgccgttgttgggcgtttacgtcttcaccgaccggccgcctcgtcggccgccgactggtgtttccgtctgcacggctggcctattacgccaccgttgttgggcgtctacgtcttcaccgactggccgcctcgtccgccgccgattggtgtcttcgcctatacggttggttggtcacaccaccgttgttgggcgtctacgtcttcaccgaccggcttgccttcgtcgccgccgactggtgtctccgcctgcacggctggcctttatgctgccgttgttgggcgtctacgtcttcaccgaccggccgcctcgtcggccgccgactggtgtttccgcctgcacggctggcctattatgccaccgttgttgggcgtctacgtcttcaccgaccgggccgccttcgttcgccgccggactggtgtttccgcctgcacggctggcctattatgccgccgttgttgggcgtctacgtcttcaccgaccggcttgccttcgccgccgctgactggtgtttccggctgcacggctggcctttttgccgccgttgttgggcgtctacgtcttcaccgaccggcctgccttcgccgctgccgactggtgttttccgcctgcacggctggcctttatgctgccgttgttgggcgtctacgtcttcaccgaccggccgcctcgtcggccgccgactggtgtttccgcctgcacgggtggcctattatgccaccgttgttgggcgtctacgtcttcaccgaccggccgcctcgtccgccgccgattggtgtcttcgcctatacggttggttggatccagatccagatatgcataaaagggattcatggctttaagcatatctcttatgctccaggaatggatcagtcagaacatcaccaccggctcgcctcgaccgccgccgactggcgtttccgcctgcacggctggcctattatgccgccgttgttgggcgtctacgtcttcaccgaccggcttgccttcgccgccgccgactggtgtgtccgcctgcacggctggcctattatgccgccgttgttgggcgtctacgtcttcaccgaccggcttgccttcgccgccgccgactggtgtgtccgcctgcacggctggcctattatgccgccgttgttgggcgtctacgtcttcaccgaccggcctgccttcgccgctgccgactggtgtttccgcctgcacggctggcctttatgctgccgttgttgggcgtctacgtcttcaccgaccggccgcctcgtcagccgccgactggtgtttccgcctgcacggctggcctattatgccaccgttgttgggcgtctacgtcttcaccgaccggccgcctcgtccgccgccgattggtgtcttcgcctatacggttggttggtcacaccaccgttgttgggcgtctacgtcttcaccgaccggcctgccttcgccgccgccgactggtgtctccgcctgcacggctggcctttatgctgccgttgttgggcgtctacgtcttcaccgaccggccgcctcgtcggccgccgactggtgtttccgcctgcacggctggcctattatgccaccgttgttgggcgtctacgtcttcaccgaccggccgcctcgtccgccgccgactggtgtttccgcctgcacggctggcctattatgccgccgttgttgggcgtctacgtcttcaccgaccggcttgccttcgccgccgctgactggtgtttccgcactgcacggctggcactttatgccgccgtttgttgggcgtctacgtcttcaccgaccggcactgccttcgccgctgccgactggtgtttccgcctgcacggctggcactttatgctgcccgttgtttcgttggggccgggttctacgtcttcaccgaccggccgcctcgtcggccgccagactggtgtttccgcctgcacggctggcctattacgccacgcgttgttgggcgtctacgtcttcaccgaccggcctgccttcgccgctgccgactggtgtttccgcctgcacggctggcctttatgctgcctgttgttgggcgtctacgtcttcaccgaccggccgcctcgtcggccgccgactggtgtttccgcctgcacggctggcctattacgccaccgttgttgggcgtctacgtcttcaccgaccggcctgccttcgccgctgccgactggtgtttccgcctgcacgggtggcctttatgccgccgttgttgggcgtctacgtcttcaccgaccggccgcctcgtccgtcgccgactggtgtttccgcctgcacggctggcctattatgccgccgttgttgggcgtctacgtcttcactgaccggcttgccttcgtcgccgccgactggtgtctccgcctgcacgactggcctattatgccaccgttgttgggcgtctacgtcttcaccgaccggccgcctcgtccgccgccgactggtgtttccgcctgcacggctggcctattatgccaccgttgttgggcgtctacgtcttcaccgaccggccgcctcgtcagccgccgactggtgtttccgcctgcacggctggcctattatgccaccgttgttgggcgtctacgtcttcaccgacgggccgcctcgtccgccgccgactggtgtttccgcctgcacggctggcctattatgccaccgttgttgggcgtctacgtcttcaccgaccggccgcctcgtccgccgccgactggtgtttccgcctgcacggctggcctattatgccaccgttgttgggcgtctacgtcttcaccgaccggccgcctcgtccgccgccgactggtgtttccgcctgcacggctggcctattatgccaccgttgttgggcgtctacgtcttcaccgaccggccgccgcatccgccgctgactggtgtcaccgcctgcacggctggcctgttataacgccaactgatgctatcttcttcacggctggctacatcgctgtcactactaataggcatcagtatcttcaacacaagctgcctacgtttgccatggctgccgactag

SEQ ID NO: 90752 - DNA, 1174 bp, Oryza sativa
  Clone ID: PAT_MRT4530_89391C.1
cgtcaaattcgacggatcgtggtctgaccgaagatgttgtgccggtccgaccgcctgatgaacgtcggtctgaccgatgtagattgatcgatcgaaccgccgagatcacctaccgctccctgtagcagtcgccggtctgaccgcccgtatgccgtcagtctgaccgccgcttgccgccggtctgaccgccgatagatcgccggtcagaccgccgaaacccggtaaacataaatcgaagaactcttaaagtggatgacgactttattgattctctccaagccgactcccggtccatcaccgcaaatactctcccgagacatcgagtcacgtatagtatccatctagaagccataatcatgaaataaactcggatatccaaataaacaacccgaaaccaaaaccgacacagtgtcggccggtcagaccgcgagctggccggtccgaccgcacattacatgccggtctgaccggcaacacctgcccggtctgaccggtccacataaaatgataacctgtagattcacctatgaaatccaatcatccccaaaaccacttcgtgaataaattccaaataacaacaccaataatctccaatgcccaattgttcatcactgaataataatcaaaaacacctttgattttacatttctgaataccacaacctctagttttccgaacatacttccttctacctggacggcacgcgggcgccgagctcgctccacgccgtcgcacgaagccgcgcccgcagagaacggccgctctcgccgcctcagctccccaagcgcgccggcacaccctccctctaccccgggcgccctcctgcctgctcctcgctgcaccgccaccggcgctctcctcctcctactcggaggcagatgagagaaagagagaagaaaagatcgagataatgaagggaaagagagagaaaaaagaaaagaaagagaacgtgtgggtagagcccctaacaactaccatcgccgcctccatccatccccacccaatccatcgcgccgccgtccgcctcggcgccgcctcacgcccccgccaccgtccggaggcccgacgagcaccgccgcctgcctcgagcgccgcctccagcctccgccgtaaccctgacgagcaccgcctccccccttcgccgcagtcccgacgagcaccaccgtccgcctag

SEQ ID NO: 90753 - DNA, 3881 bp, Oryza sativa
  Clone ID: PAT_MRT4530_89392C.1
aacgacttcaccgccggcttgcctccgtcgccgccgactggtgtcatcgcctatacggttggtcggtcacaccaccgttcatgggcgtccatgtcttcactgaccggctggccttcgccgccgccgactggtgtttccgcctgcacggctggtctattatgccgccgccgttgggcgtctacgacttcaccgccggcctgcctccgtcgccgccgactggtgcctccgcctatatggttggttggtcacaccaccgttgttgggcgtctacgtcttcaccaccggcctgcctccgtcgccgccgactggtgcctccgcctacacggctggcctattatgccgctgctgttgggcgtctacgacttcgccgccgactggtgcctccgcctatatggttggttggtcacaccaccgttgttgggcgtctacgtcttcaccaccggcctgcctctgtcaccgccgactggtgcctccgcctacacggctggcctattattccgctgctgttgggcgtctacgacttcaccgccggcctgcctccgtcgccgccgagtggtgcctccgcctacacggctggcctattatgccgccgccgttgggcgtctacgtcttcaccgccggcctgcctccgtcgccgccgattggtgcctccgcctacacggctggcctattatgccgctgctgttgggcgtctacgtcttcaccgccggcctgactccgtcgccgccgattggtgcctccgtctacacggctggcctattatgccgccgctgttgggcgtctacgacttcaccgccggcctgcctccgtcgccgccgactggtgtcctcgcctacacggctggcctattatgccgccgctgttgagcgtctacgacttcaccgccggcctgcctccgtcgccgccgattggtgcctccgcctacacggctggcctattatgccgccgctattgggcgtctacgacttcaccaccggcctgcctccgtcgccgccgattggtgcctccgcctacacggctggcctattatgccgccgctgttaggcgtctacgacttcaccgccggcctgcctccgtcgccgccgactggtgtcctcgcctacacggctggcctattatgccgccgctgttgggcgtctacgacttcaccgccggcctgcctccgtcgccgccgagtggtgcctccgcctacacggctggcctattatgccgccgctgttgggcgtctacgacttcaccaccggcctgcctccgtcgccgccgattggtgcctccgcctacacggctggcctattatgccgccgctgttgggcgtctacgacttcaccgccggcttgcctccgtcgccgccgagtggtgcctccgcctacacggctggcctattatgccgctgctgttgggcgtctacgtcttcaccgccggcctgcctccgtcgccgccgagtggatcctccgcctacacggctggcctattatgccgccgctgttgggcgtctacgacttcaccgccggcctgcctccgtcgccgccgagtggtgcctccgcctacatggctggcctattatgccgccgctgttgggcgtctacgacttcaccgccggcctgcctccgtcgccgccgagtggtgcctccgcctacacggctggcctattatgccgccgctgttgggcgtctacgacttcaccgccggcctgcctccgtcgccgccgagtggtgcctccgcctacacggctggcctattatgccgccgttgttggatgtctacatcctcaccgttggctcaccttcgttgccgtcgactggtgtttccgcttacacggctgacctattatgccgccattagtgggcatcttcgctttcaccgtcgaccgccttcgtcgccgccgactggtgtcttcattgttattgatggacgactttgttcccacattggccacttttgccatcaccaaggggaatattacaaagctaagatccagatccagatatgcataaaagggattcatggctttaagcttatctcttacgctccaggaatggatcagtcagaacatcaccaccggctcgcctcgaccgccgccgactggtgtttccgcctgcacggctggcctattatgccgccgttgttgggcgtctacgtcttcaccgaccggcttgccttcgccgccgccgactggtgtcctcgcctgcacggctggcctattatgccgccgttgttgggcgcctacgtcttcaccgaccggcttgccttcgtcgccgccgatcgatgtcctcgcctgcacggctggcctttatgccgccgttgttgggcgtctacgtcttcaccgaccggcttgccttcgccgccgccgactggtgtttccgcctgcacggctggcctattatgccgccgttgttgggcgtctacgtcttcaccgaccggcttgccttcgtcgccgccgactggtgtccccgcctgcacggctggcctttatgccgccgttgttgggcgtctacgtcttcaccaacgggcttgccttcgccgccgccgactggtgtttccgcttgcacggctggcctttatgccgccgttgttgggcgcctacgtcttcaccgaccggcttgccttcgtcgccgccgatcgatgtcctcgcctgcacggctggcctttatgccgccgttgttgggcgtctacgtcttcaccgaccggcttgccttcgccgccgccgactggtgtttccgcctgcacggctggcctattatgccgccgttgttgggcgtctacgtcttcaccgaccggcttgccttcgtcgccgccgactggtgtccccgcctgcacggctggcctttatgccgccgttgttgggcgtctacgtcttcaccgaccggcttgccttcgccgccgccgactggtgtttccgcttgcacggctggcctttatgccgccgtagttgggcgtctacgtcttcaccgaccggcttgccttcgtcgccgccgactggtgtcctcgcctgcatggctggcctattatgccgccgttgttgggcgcctacgtcttcaccgaccggcttgccttcgccgccgccgactggtgtttccgcctgcacggctggcctttatgccgccgttgttgggcgtctacgtcttcaccgaccggcttgccttcgccgccgccgactggtgtttccgcctgcacggctggcctttatgccgccgttgttgggcgtctacgtcttcaccgaccggcttgccttcgccgccgcctactggtgtttccgcctgcacggctggcctttatgccgccgttgttgggcgtctacgtcttcaccgaccggccgcctcgaccgccgccgactggtgtttctgcctgcacggctggcctattatgctgccgttgttgggcgtctacgtcttcaccgaccggccgccgcatccgccgctgactggtgtcaccgcctgcacggctggcttgttataacgcccctctacatctggtttatacagctaccactactgatgaacatcatcgtcttccgtcgccgactggttatgctgtcgccgactagtgcttttatcttcacaactgcgcgtcttcactaccagttcacttcatcacggcaatgcaactttgtcatcatggtagagcgacttcatctttattatcttcggcactggcaaactctattgctgctacttcgcaagttttgctacttcaccaaccacgacgtctttgtgagcctcgacatctcggcatgcgatgccatgttattttactacaacaagaggctctccaatattcaggatttctacttggacatcttcaacacatatcttcaatcaagcaatgactactcgacgacaagaagctataattctcgactctatgttcagttgtttcccaac

SEQ ID NO: 90754 - DNA, 491 bp, Oryza sativa
  Clone ID: PAT_MRT4530_89393C.1
ccccgatcgatgccgctctgctctgatctggtgtggttggatggggatggcgaaatgctgcttgtttttttttttttggtgctctcgattcgattccagctcgatatgttggcgagattgatggtggttgtggatggctgtgttgttgaatttaatgagcttttgccgtgcagtcaaaccttgagattttaatgcgcatttgttagaattagggggttcctgtacaggcgtacggtgcagagtgcgcaccactctgtctctgccttaatgcttgcaattgcggcgatgatgcgtgattcctgactagttgctgtaaattttagcattttatcctcacttttgattggttgttttttttttttttgaaatttatagatgggtatcatgccagtatgagatttagccagaatttgaagtgtactgtttctgttagaccatctgtattttagagccaatctctgagtaatggtgacattgttgatttttaatct

SEQ ID NO: 90755 - DNA, 2898 bp, Oryza sativa
  Clone ID: PAT_MRT4530_89394C.1
atgagacaacctgatcgtcagatctatactacacccggcggattcaaatccccaaacaggagtctcgtacgctacccccttttattattgccgaattcatgtttcgacagttggcgcgccaggtaggggttgcgtcgagtttcctatcaacgagcgcgatggaatcaatttcatgagtcgccgacttcgctttcgctttgggagttttcacttcctttccgtcgaccacttcttcaagctcctcttctctgacttgatccaaatcagtcagggggaaactcaatctgatttttatcattatttatcatattgatttttaatctcagattaatttcttgctattttttgttgttgttcgcatataacaacaacgacttcaccgccggcctacctccgtcgccgccgactggtgtcatcgcctatacggttggtcggtcacaccaccgttcatgggcgtccatgtcttcaccgaccggctggccttcgccgccgccgactggtgtttccgcctgcacggctggcctattatgccgccgctgttgggcgtctacgacttcaccaccggcctgcctccgtcgccgccgactggtgtcctcgcctatacggtcggttggtcacactaccgttgatgggcatcgtcatctacaccgccggcctgcctccgtcgccgccgactggtgtccccgcctatacggtcggttggtcacaccaccgttgatgggcatcgtcatctacaccgccggcctgcctccatcgccgccgagtggtgcctccgcctacacggctggcctattatgccgccgctgttgggcgtctacgacttcaccgccggcctgcctccgtcgccgccgagtggtgcctccgcctacacggctggcctattatgccgccgctgttgggcgtctacgacttcaccgccggcctgcctccgtcgccgccgagtggtgcctccgcctacacggctggcctattatgccgccgttgttggatgtctacatcctcaccgttggctcaccttcgctgccgtcgactggtgtttccgcttacacggctgacctattatgccgccattagtgggcatcttcgctttcaccgtcgaccgccttcgtcgccgccgactggtgtcttcattgttattgatggacgactttgttcccacattggccacttccgccatcaccaaggggaatattacaaagggctcgttggatggaccgagtaacgcaaggtgctaagtattattcggaataaatcaaaagcatagagatgagataaatttattttctgctcttaataattgcaaaagtacccgagtagtaaactccgatccgtgaaactttgttccattaatgacgaactcatgtcactcatatgcatgtttgggaagtgcttaggccgactcccagtgcttggtggctatgactagttgggcagagcgtttaaacgtaatgagtcaactgctcggggaaatcaaaattgacaagaggagaaatacatatttataaatattttaaaatacttgattttttctcgagtattatatttatatcagatactactcatcctatatgtttgttctgcaggatccagatccagatatgcataaaagggattcatggctttaagcttatctcttacgctctaggaatggatcagtcagaacatcaccaccggccgcctcgtccgccgccgactggtgttttcgcctgcacggttggcctattatgccgccgttgttgggcgtctacgtcttcaccgaccggccgcctcgtccgccgccgactggtgtttccgcctgcacggctggcctttatgccgctgttgttgggcgtctacgtcttcaccgaccggcttgccttcgccgccgccgactggtgtttccgcctgcacggctggcctttatgccgctgttgttgggcgtctacgtcttcaccgaccggcttgccttcgccgccaccgactggtgtttccgcctgcacggctggcctttatgaccgctgttgttgggcgtccacgtcttcaccgaccggcttgccttcgccgccgccgactggtgtttccgccagcacggctggcctattatgccgccgttgttgggcgtctacgtcttcaccgaccggccgcctcgtccgccgccgactggtgtttccgcctgcacggctggcctattatgccgccgttgttgggcgtctacgtcttcaccgaccggcttgccttcgccgcctccgactggtgtttccgcctgcacggctggcctattatgctgccgttggtgggcgtctacgtcttcaccgaccggccaccgcatccgccgctgactggtgtcaccgcctgcacggctggcctgttataacgccaactgatgctatcttcttcacggctggctacatcgctgtcactactaataggcatcagtatcttcaacacaagctgcctacgtttgccatggctgccgactggtttcttcacttccatggctacatgattctaccagtgttgattagccttatcttcttcaccgccgctaccactactgatggacatcatcgttttctgccgccgactcgtgttatgccgccgtcgactggtgcttttatcttcacaactgcgtcttcactaccagtttgcttctgttgccgccgactcgtgttcacttcatcacggcgatgcaactttgtcatcatggtagagcgacttcatatttattatcttcggcaccggcaaactctattgctgctacttcgcaagttttactacttcaccaaccacgacgtctttgtgaacctcgacatctcggcatgcaatgccatgttattttactacaacaagtggctctccaatattcaggatttctacttggacatcttcaacacataccttcaatcaagtaatgactat

SEQ ID NO: 90756 - DNA, 300 bp, Oryza sativa
  Clone ID: PAT_MRT4530_89395C.1
atggatcccattggggttcaatggagttaatggagaagtttttggagattggaaggggttcctggagggggtcaaggtgggggacaagccacagggggcctattgcgtacgggaccaacgtgggctggagaggctactggggcaacaccctggagcttgggtcggcatgctggccgagacactggagctggagttctttcaggaatttggggaaggaaggataccaaaggtggaggtgcgttggccaatcttggtgaacttttggagggcaactctaacccatgattttggaatcggggg

SEQ ID NO: 90757 - DNA, 2769 bp, Oryza sativa
  Clone ID: PAT_MRT4530_89396C.1
gtctcgtgcgctaccccgttttattattgccgaattcatgtttcgacagttggcgcgccaggtaggggtaaacgccgagtttcctgctgcagccacgccgatgtcttcctgccgtcctgcgtcgtgctgatggacaccaacgccgcccgcgactgcgacctccgcctcctccgctccgacgactacgtcgcctccctccccgccgtcctcccggagttgtggatctgttccctctgccgcttcaacgtcgacgaggattgcccgattttccatggcttctacatctactgccagacctgcgcaggggactgtgcccgcgccatcatcgatcgctaccatggcgcacaaaacgtcgtcatcaacaaggctttggatggcaacatggccgacaaatgagacgatggcacgtcaccagcatggacatgactatgcaacaggaccatgcagcatgctaccgagacgccgtggtggtcaggctgtcgccgtgctgcagaatgtcgacttgatttgtccacgagttggccgctcattgctgccgggcctctacgcctgtgtggctggctacatccgctgacactgtcgaccccttcaacaagttcacgatcggctgcctccacaccaccgagtccgagtaccacaggagcttggcccggctacgtccaaggcatgcacactcgagcccggggggctccgccatgcggacccggctgcgcctcaccgttcgccgctgctgatgggcgtcttcactttcaccgaccggccgcctccatcgccgccgactgatgtttccgcctacatggctggcctattatgccgccgtttgttgggcgtctacgacctcaccctcggcgtgcctccgtcgccgctgactggtgtcctcgcctatacggttggttggtcacaccaccgttcatgggcgtccacgtcttcaccgaccggcttgtcttcgccgccgccgattggtatctccgcctacagggctggcctattatgccgccattagtgggcatcttcgctttcaccgtcgacagccttcgtcgccgccgactggtgtcttcattgttattaatggacgactttgttcccacattggccacctctgccatcaccaaggggaatattataaagctaagtcatcatttattttattctttatatgatatttttccttttcctctgcctcactacaccaattggatccagatccagatatgcacaaaagggattcatggctttaagcttatctcttacgctccaggaatggatcagtcagaacatcaccaccggcttgccgtcatcgccgccgactggtgtttccgcctgcacggttggcctattatgccgccgttgttgggcgtctacatcttcaccgaccggccgcctcgtccgccgccgactggtgtttccacctgcacggctagccttttatgccgccgttgttgggcgtctacgtcttcaccgaccggccgcctccgtccgccgccgactggtgtttccgcctgtacggctggcctattatgccgctgttgttgggcgtctacgtcttcaccgaccggccgcctccgtccgccgccgactggtgtttccgcctgcacggctggcctattataccgctgttgttgggcgtctacgtcttcaccaactggccgcctcatccaccgccgactagtgtttccgcctgcacggctggcctattatgtcaccgttgttgggcgtctacgtcttcaccgaccggctgcctcgtctgccgtcgactggtgtttccgcctacacggttgccctattatgccgccgttgttgggcatctacgtcttcaccgaccggccgcctcgtccgccgccgactggtgtttccgcctgcacggctggcccattatgccgccgttgttgggcgtctacgtcttcaccgaccggccgcctcatccgccgccgactggtgtcaccgcctgcacggctggcccgttatgatgccaattgatgctatcttcttcacggtgccctcgcctctacgtctggtttatacaactaccactactgatggacatcattgtcttccgtcgtcgactggttatgccgccgccgactggtgcttttatcttcacaattgtgcgtcttcactaccggtttgcttctgttgccgccgactcgtgttcacttcatcacggctatgcaactttgtcaccatggtggagcaacttcatttttattatcttcggcatcggcaaactctattgcctctacttcgcaagctttgctacttcaccaaccatgacgactacaagagtttcgacaccttggcatacgtcaccaaatatgatgccgtgttattttattacaacaagtggtgttccaatcttcaatatttatcttcactcaagcaatgactactcgacgacaagaagttacagttctcgactctatgttcagttgtttcccaaccaaccaaagagtcgggggctacacaaatacaagactctcaaaattcgacaagctgaagcaatcaattaattagccaacgagccctgtcatcaactctgttgctaatggatgactatgtcttcgccgacttattatttcactttcatggttgctatcgactggatcaccgacatcgttatcttcatcaacatcctatcaagcctcttcaacatagcccactctactgctattgatgggcaacttcgtcattatatttgatcatctatgattgctgcttatcatcattactgtcggttgcgtttgtcgttgccgactattttcttcatcttca

SEQ ID NO: 90758 - DNA, 518 bp, Oryza sativa
  Clone ID: PAT_MRT4530_89397C.1
tttattcctcttaatttttctagtatcacatctccaaggcctttcatatggttatggaaaaccaaatgtgttatgaagataaaagtgttcatatggctacttttctatgatatactaaacaccagagatatgcttgataggaagaattgtgcccctgtatatgctgatctcttttgtgtgttatgttcaagcagggtgagggagaccatgatgcatttgttctttctatgcccttttagcaagagatgctggaggagataggccttacatgcaataccaatttgaatatttttcagatgttggctttgtcaatgatctatttcagaagaaaaggtttcatggaaattatgttcattgcatcctagtacatttggaagcaaaggaatggattgatatttcagaatatctagccatctgaaggcatatggtttcagggtttcaagcatgaaattctcctacatatgtgtaggatgaatgagcctttaagatcatttgtttctgattggttataaaatttg

SEQ ID NO: 90759 - DNA, 420 bp, Oryza sativa
  unsure (1)..(420): unsure at all n locations
  Clone ID: PAT_MRT4530_89398C.1
acaaaagaaagtgataaccaaaaaatttgaacacattattctaagctttaccttttttttttattttggggattttaaagtttgcaataacttacattaatttcttttttctaaaaaaaatttttttatttaaaaaatttaaaaaaaattatgattattaaattaaaaancaaactttttttattctaaaaaagtattccactcaaatttaattgtttttcaaacattcctactttaaaaaatgaaaaaccttttaccacttttttttttaatatttcaaaaaacctttaaaaagatttttttttttatttcccaaaatttttttttttttttataaaagatgttattataaaatttttttttttttataattttttattcaaaaaatatatattttttttattcattttttttcataaa

SEQ ID NO: 90760 - DNA, 2868 bp, Oryza sativa
  Clone ID: PAT_MRT4530_89399C.1
atggctggcctattatgccgctgctgttgggcgtctacgacttcaccgccggcccgcctccgtcgccgccgagtggtgcctccgcctacacggctggcctattatgccgccgctgttgggtgtctacgacttcaccgccggcctgcctccgtcgccgccgactggtgtcctcgcctatacggttggttggtcacaccaccgttcatgggcgtccacgtctttaccgaccggctggccttcgtcgccgccgctgttgggcgtctacgacttcaccgccggcttgcctccgtcgccgccgagtggtgcctccgcctgcacggctggcctattatgcggccgctgttgggcgtctacgacttcaccgccggcttgcctccgttgccgccgagtggtgcctccgcctacacggctggcctattatgccgccgctgttgggcgtctacgacttcaccgccggcttgcctccgtagccgccgagtggtgcctccgcctacacggctggcctattatgccgctgctgttgggcgtctacgacttcaccgccggcccgcctccgtcgccgccgagtggtgcctccgcctacacggctggcctattatgccgccgctgttgggcgtctacgacttcaccgccggcctgcctccgtcgccgccgactggtgtcctcgcctatacggttggttggtcacaccaccgttcatgggcgtccacgtctttaccgaccggctggccttcgtcgccgccgactggtgcctccgcctgcacggctggcctattatgccgccgctgttgggcgtctacgacttcaccgccggcctgcctccgtcgccgccgagtggtgcctccgcctacacggctggcctattatgccgccgctgttgggcgtctacgacttcaccgccggcctgcctccgtcgccgccgagtggtgcctccgcctacacggctggcctattatgccgccgctgttgggcgtctatgacttcactgccggcctacctccgtcgccgccgactggtgtcctcgcctatacggttggttggtcacaccaccgttcatgggcgtccacgtcttcaccaccggcctgcctccgtcgccgccgagtggtgcctccgcctacacggctggcctatcatgccgccgctgttgggcgtctacgacttcaccgccggcctgcctccgtcgccgccgattggtgcctccgcctacacggctggcctattatgccgccgctgttgggcgtctacgacttcaccgccggcctgcctccgtcgccgccgggtggtgcctccgcctacacggctggcctattatgccgccgctgttgggcgtctacgacttcaccgccggcttgccttcgccgccgccgactggtgtttttgcctatacggttggcggacttcgccgctgttaatgggcttcatcatctacaccactggcttggttccactggcgccgactggatccagatccagatatgcataaaatggattcatggctttaagcttatctcttacgctccaggaatggatcagtcagaacatcaccgccggcctgcctccgtcgccgccgagtggtgcctccgcctacacggctggcctattatgccgccgctgttgggcgtctacgacttcaccgccggcttgcctccgtcgccgccgagtggtgcctccgcctacacggctggcctattatgccgccgctgttgggcgtctacgacttcaccgccggcctgcctccgtcgccgccgagtggtgcctccgcctacacggctggcctattatgccgccgctgttgggcgtctacgacttcaccgccggcctgcctccgtcgccgccgactggtgcctccgcctacacggctggcctattatgccgccgctgttgggcgtctacgacttcaccgccggcctgcctccgtcgccgccgactggtgccctcgcctatatggttggttggtcacaccaccgttcatgggcgtccacgtcttcaccgccggcctgccttcgccgccgccgactggtgtttccgcctgcacggctggcctttatgccgccgttgttgggcgtctacgtcttcaccgaccggcttgccttcgccgccgccgactggtgtatccgcctgcacggctggcctttatgccgccgttgttgggcgtctacgtcttcaccgaccggcttgccttcgccgccgccgactggtgtttccgcctgcacggctggcctttatgccgccgttgttgggcgtctacgttttcaccgaccggcttgccttcgccgccaccgactggtgtatccgcctgcacggctggcctttatgccgccgttgttgggcgtctacgtcttcaccgaccggcttgccttcgccgccgccgactggtgtttccgcctgcacggctggcctttatgccgccgttgttgggcgtctacgtcttcaccgaccggcttgccttcgccgccgccgactggtgtctccgcctgcacggctggcctttatgccgccgttgttgggcgtctacgtcttcaccgaccggcttgcctccccccctccgactggtgtctccgcctgcacggctggcctttatgccgccgttgttgggcgtctacgtcttcaccgaccggctgcctcgaccgccgccgactggtgtttccgcctgcacggctggcttattatgctgccgttgttgggcgtctacgtcttcaccgaccggccgccgcatccgccgctgactggtgtcaccgcctgcacggctggcctgttataacgccaactgatgctatcttcttcacggctggctacatcgctgtcactactaataggcatcagtatcttcaacacaagctgcctacgtttgccatggctgccgactag

SEQ ID NO: 90761 - DNA, 557 bp, Oryza sativa
  Clone ID: PAT_MRT4530_8939C.1
cttgggcttacaccgtcgttttcgctcccttttggctgcctgtgctgccgcgttcaattcgccgctgcttggtctcgtttggttccatccgctatggcagggggccgggatttgcacggcgtggatcgctgcttccatggttcttgaacctgttcatcagcacagcaaaggtcttccgcggcggcagctcgcgtgcggacccccctatctttccttcgctttctggatcgactcgttcgtgtcttctctgtctcgtcctcctctcgtacttgcttcgtccttgttgtcccacggcgttcgcgggcctcttcgtccgaggctgcgccgcctggcgcttagcgcggctttcatgaacaagacatggccgctcttgtacataaattttgccataaatatgttccatctgtatgtttgtactatatactcctggctcactatagcgtatatccttatttctcagcttctgtatggagacatcagcaagcagatcaagacacggctctctaggctatgggattccacgatatcaatgatgaagaaaaatatatcacactgaa

SEQ ID NO: 90762 - DNA, 204 bp, Oryza sativa
  Clone ID: PAT_MRT4530_893C.1
tcagtaggccagaagtgctgaaccatctgaagcagcaaatgcaccacccacggtctcagtaccagcaggaagtaatgcaacacatccagtcaccccagtaccacagccaccagcaccagcagcaccaatgtaatcgcaggctttcattagcctgctaaaagcaatctccactagtgctgcttctgccaccgcaacaatcgccat

SEQ ID NO: 90763 - DNA, 309 bp, Oryza sativa
  Clone ID: PAT_MRT4530_89400C.1
ttaggcgtctacgtcttcaccgtcggctgccttcgccgccgccgactggtatctccgcctgcacggctggcctattatgccgccgttgttttgggcgtctacgtcttcaccgtcggctgccttcgccgccgccaactggtatctccaccgttgtaggacgtctacatcttcatcgaccggccgcctcgtatgacgccaactggtgctatcgtcttcccggctggccacgtcaccgccaccgcaaataggcgtcatcaccatcaacgcaagctgtctacgtctgctaccgattggtttcttcacttccat

SEQ ID NO: 90764 - DNA, 346 bp, Oryza sativa
  Clone ID: PAT_MRT4530_89401C.1
attctggcagagtcactccacgcatttgctggtggttatcggttgtcatgccgattagagcgacgggcatattggtcagaacactgtcgtggtcagtcgcccgtaacccgctcacgcagtgatacaccaaatggagcccatggctcagtgagagtcttacttggttcatactgtttcagactgcgcaaattgcttctgcgtaccttatccctagaccgttcgctctacaccacaaagatagtgttaaggaaggagagacggaccagaacatagtaggacagtgagtaagaatagatacggctcaacccagcataccttaccacttcaaaaaaaaaaaaaaaaaaaa

SEQ ID NO: 90765 - DNA, 4495 bp, Oryza sativa
  Clone ID: PAT_MRT4530_89402C.1
atggaggtgttggggaggcagccatgcaagagggagcaggaattgggttggggaagttttcatccaagcagcgcccaccaactgttcgatggaacgccaagccaacctgcgatgtccaagaaagatcagagcatatctgagcccattcccatcaattccaccatgaaaaaagaggagaaatggctagatgaagctttggatcggatattggagaagtttgaacaaatggaggccaagcgtaggtgtgatgagaagattgatcgaattttgaagaagttggacgagatagatgctaataggaacaagttcttcgaggagatgggtgcctctatcaaggcgaccactgccgtactcaatgctggatcatctctaccacccatggcaccgtctcctctagcgcctaccaagtgtttgacggaatgctccaacaacaacatcacttgggtggctgcgaattcaagtcacattggtgaggtgcttgctccgatagctgcctgggagctaggagacagaaaggacatggaccaagctccctacattgtcaccaaggacctcctcaaggtcacgcccaccaagtgttcgacgatatgctctagctctgacaccaagcccgatctcactgtagttgctccggttacttgcaccaccctcgctgtgtcatcaatggtgttgttagcttctgacggcaccactggcaacactaacattgacgcccctgtttgtttcaaggagacgcatgccatgtgctcgatggtcggcctcgacgtcaatggtggcaatgaccaagctgtggttgcattccaaaccaagacagtggtgtccaaggacgtttcagcatccgtccaccccatgggcaacctagcaaccagattattcgttgacaagatgatggtacaatgtgagctgcagccagtaccttgtgaaacgttcaactcctatgacacaagagtacatatcttgcaaccttggccgccgacaattaaagtaagttggcttgcactgatatttattgaaattggagtagctcacactgatatgatggataaagtgttgcattgggctgatctaaaaccatggcctccaccttcgggaaatggcagtgtgcatttcctgatcagtgcacatgcaagtgttgaattacaggaattagatttggctgaggcaagggaaggtgagttattatcagttgttgacctatggtttgttgagatgtggcactcaggttatgcaatcctcaatgaaaattatgaagactataacctgcttcaactcctattatgcaagaagtggcttaaacttgtactatgtgaaatgtgctgtagaagatatgaactgaagttgccaattgggtgtgatcctaaacagtacattgttgacttgattctagagttggaaggtactttggaggctctgggtgattattgtttcctgtgtcagggagtatggtctgaattcatagttggcaataatttagattttttgaagcagctagaattaacatctgataagctggtgcaagtaacctcgaatctagtaagaacatgttatatgcagaagttaggaactggagaggaacacatactcaaattcaaatatgcttgtaatggatggcccacaaggaagttcagaaagatgccaaagaatgattgtaatggacactggaagatgtctagattgtttgtgaacctacattacttctcctttggcttatcgactgctaaaacagttcaaaagggcagctgctatctaaggggctctgacaaggtgttgttaactaagttggaaatgcagagttgtgtgaacctgggcgatgataatgtttcttgtcacacgatggctcctagtgaaggaatggatttttgtgagttaaaagtgcttgaggtaacaagtgatggatgcccaatattctggattttggttctagcagctactgaatggaaggttggaaattatacaattctaactgaagggacttataccaagatggctgtttgttcagagcagaaattacaatgtgatgcattaaaaagaaaccagacaggggcaaagcatgttatccagaggaacacatttgttgctcctgggaatttagcctactcagtaaccaacaactatctaccagaaggcaacaaacatagaactatggccacaagggtgaatgtttttggacatggtatccactcaacagaaaaccaaggattttattcagaagggattcaggtgcattcgagtgtccagaaaattcctgctcttgtactgaaccgtgaattaagtatggattttagcaaagatattgcagctccaatgaaatatgctctacaagtttctgaatcttttgagctcaacaggagcaaaaaggtacatgatctattccatttcgacgatggtttactgtctagcagccaagaattggagcacccatgggatccaggaggtttgcttcatcggcttggggacaagccgattttcaaggagaggggattgttaggaccggatgggctatggttggaccgttacaacaatcctccaatccagcccaagaaggcccagttggagaggcaacaaaagcagcagcagcaggaagatactactcatcctatatgtttgttctgcaggatccagatccagatatgcataaaagggattcatggctttaagcttatctcttacgctccaggaatggatcagtcagaacatcaccgccggcctgcctccgtcgccaccgactggtgtcttcgcctacacggctggcctattatgccgccgctgttgggcgtctacgacttcaccgccggcctgcctccgtcgccgccgactggtgtctccgcctgcacggctggcctattatgccgccgtctgttgggcgtttacgtcttcaccgaccggccgcctcgtctgccgccgactggtgtctccgcctacacggctgacctattatgccgccgttgttgggcgtctacgtttacaccgactggccacctcgtctgccgccgagtggagtctccgcctgcacggctggcctattatgccgccgtctgttgggcgtctacgtcttcaccgaccggccgcctcgtctgccgccgactggtgtccccgccttcacggctggcctattatgccgccgttgttgggcgtctacgtcttcaccgaccggccgccttgtctgccgccgactggtgtctccgcctgcacggctggcctattatgtcgccatttttgggcgtctacgtcttcaccgacaggccgcctcgtctgccgtcgactggtgtctccgcctacacggctggcctattatgccgccgttgttgggcgtctacgtcttcaccgaccggccgcctcgtctgccgccgactggtgtttccgcctgcacggcgggcctattatgccaccgtctgttgggcatctacgtcttcgccgcaaccgactggtgtctccaccgccgccgactggtgtctccgcctacaaggctggcctattatgccgccgttgttgggcgtctacgtcttcaccgaccggccgcctcgtctgccgccgactggtgtctccgcctgcacggcttgcctattatgccgccgttgttgagcgtctacgtcttcaccgccggtcgtctcttctgctgttgactagtgccgtcgcctttactgctggtttatattgttaccactactgatagacgtcattgttttcattgctggccgccttgtctgacgccgactggcttgttcacctccacgcatcatcattctacttcttccgttgccgactggttacgccgccaccaactggtgtttttatcttcatgactgcgcatcttcgccaccggtttgcttctgttgccgccaactcctgttcacgtcatcacggctatgcaactttgtcaccatggtggagcaacatcatctttattatcttcggcattggcaaactctattgcctctacttcgcaagctttgctacttcgccgaccacgacatctacaggagcctcgacatctcggcatgcgtcaacaagtataatgccatgttattttactacaacaagtggtgttccaatattaaagatttctactcggacatcttctatgagtatattcactcaagcaatgactactcgatgacaagaagctacagttctcgactctatgttcagttgtttctcaattaaccaaagaacgttctacttcagcaacttcaattatttcactgcttcgcctctggctgcttccgtcattgccgacttgttatttcgccttcatggttgacctactatgcaaacgctgatgagcatcttcgtcattatcatcggctgttacaccgctgttgactggatcaccgacatcgtcatcttcatcaataacttgtcaagcctcttcaacattgcccactctactgctattggtgggcaacttcgtcatcatatttgatcatctctgttgctgcttatcatcattactgtcagttgcgtttgtcgtcgccgactattgtcttcatcttca

SEQ ID NO: 90766 - DNA, 310 bp, Oryza sativa
  Clone ID: PAT_MRT4530_89403C.1
atagtatagcccatatctctatattatatgagtattaacaaaaactggtcatgcccagctatagcttgaacgcaatcttatacacagaacaatgagaaaacataaaaaggcgaaataattaatagcaagcgtcaagcctgcctgcttaaaaggtgtaaaggcagctgccgtcttcgctcctcgccgattggtcgaatttcttggcaacagggtcgtagcaaccttacatctcaggctgtgtactcttcttgctatgctcttttgccatttttctaattattgcaatacgctctatttttgcatttttttg

SEQ ID NO: 90767 - DNA, 1005 bp, Oryza sativa
  Clone ID: PAT_MRT4530_89404C.1
atgggcgtccacgtcttcaccgaccggctggccttcgccgactggtgtttccgcctgcacggctggcctattatgccgccgctgttgggcgtctacgacttcaccaccggcctgcctccgtcgccgccgactggtgtcctcgcctatacggttggttggtcataccaccgttcatgggcgtccacgtcttcgccgaccggctggccttcgccgccgccgactggtgtttctgcctacacggctagcctattatgccgccgctgttgggcgtctacgacttcaccgccggcctgcctccgtcgccgccgactggtgtccccgcctatacggatccagatccagatatgcataaaagggattcatggctttaagcttatctcttacgctccaggaatggatcagtcagaacgtcaccaccggctcgcctcgaccgccgccgactggtgtttccgcctgcacggctggcctattatgctgccgttgttgggcgtctacgtcttcaccgaccggccgcctcgtccgctgccgactggtgtttccgcctgcacggctggcctttatgccgccgttgttgggtgtctacgtcttcaccgaccggccgcctcgaccgccgccgactggtgtttccgcctgcacggctggcctttatgctgccgttgttgggcgtctacgtcttcaccgaccggccgcctcgtccgctgccgactggtgtttccgcctgcacggctggcctttatgctgccgttgttgggcgtctacgtcttcaccgaccggccgcctcgtccgctgccgactggtgtttccgcctgcacggctggcctttatgccgccgttgttgggcgtctacgtcttcaccgaccggccgcctcgaccgccgccgactggtgtttccgcctgcacggctggcctattatgctgccgttattgggcgtctacgtcttcaccgaccggccgccgcatccgccgctgactggtgtcaccgcctgcacggctggcctgttataa

SEQ ID NO: 90768 - DNA, 1925 bp, Oryza sativa
  Clone ID: PAT_MRT4530_89405C.1
atggctttaagcttatctcttacgctccaggaatggatcagtcagaacatcaccaccggctcgcctcgaccgccgccgactggtgtttccgcctgcacggctggcctttatgccgccgttgttgggcctctacgtcttcaccgaccggcttgccttcgccgccgccgactggtgtttccgcctgcacggctggcctttatgccgccgttgttgggcgtctacgtcttcaccgaccggtttgccttcgccgccgccgactggtgtttccgcctgcacggctggcctttatgccaccgttgttgggcgactacgtcttcaccgaccggccgcctcgtccgccgccgactggtgtttccgcctgcacggctggcctttatgccgccgttgttgggcgtctacgtcttcaccgaccggcttgccttcgccgcagccgactggtgtcctcgcctgcacggctggcctattatgaccgccgttgttgggcatctacgtcttcaccgaccggcttgccttcgccgccgccgactggtgtttccgcctgcacggctggcctattatgccgccgttgttgggcgtctacgtcttcaccgaccggcttgccttcgccgccgccgactggtgtttccgcctgcacggctggcctattatgccgccgttgttgggcgttacgtcttcaccgaccggcttgccttcgccaccgccgactggtgtttccgcctgcacggctgacttattatgccgccattgttgggcgtctacatcttcaccgactggccgcctcgaccgccgccgactggtatttccgcctgtacggctggcctattatgccaccgttgttgggcgtctacgtcttcaccgaccggccgcctcgtccgccgccgactggtgtttcctcctgcacggctggcctttatgccgccgttgttgggcgtctacgtcttcaccgaccggcttgccttcgccgccgccgactggtgtttccgcctgcacggctggcctttatgccgccgttgttgggcgtctacgtcttcaccgaccggcttgccttcgccgccgccgactggtgtcctcgcctgcacggctggcctattatgaccgccgttgttgggcatctacgtcttcaccgactggcttgccttcgccgccgccgactggtgtttccgcctgcacggctggcctattatgccaccgttgttgggcgtctacgtcttcaccgaccggccgccgcatccgccgctgactggtgtcaccgcctgcacggctggcctgttataacgccaactgatgctatcttcttcacggctggctacatcgctgtcactactaataggcatcagtatcttcaacacaagctgcctacgtttgccatggctgccgactagtttctgcacttccatggctgcatgattctaccagtgttgattggccttatcttcttcaccgccggtcatctcgtctgctgttgactagtgccctcgcctctacgtctggtttataccgctaccactactgatggacatcatcatcttccgtcgccgactggttatgccgccgtcgactggtgtttttatcttcacaactgcgcgtcttcactaccagtttgcttctgttgccgacgactcgtgttcacttcatcacggcaatgcaactttgtcatcatggtagagcgacttcatctttattatcttcggcactggcaaactctattgctgctacttcgcaagttttgctacttcaccaaccacgacgtctttgtgagcctcgacatctcggcatgcgatgccatgttattttactacaacaagaggctctccaatattcaggatttctacttggacatcttcaacacatatcttcaatcaagcaatgactactcgacgacaagaagctataattctcgactctatgttcagttgtttcccaac

SEQ ID NO: 90769 - DNA, 1077 bp, Oryza sativa
  Clone ID: PAT_MRT4530_89406C.1
atggccgcggctgccttcaccgccgccgactggtgtttccgcctgcacggctggcctattatgtcgccgttgatgggcgtctatgtcttcaccgaccggccgcctcattcgccgccgactggtgttctcgtctacacagttggaatggatcagttagaacatcaccaccggcttgccttcgccaccgccgactggtgtctccgcctgcacgattggcctattatgccgccgttgttgggcatctacgtcttcaccgccggcttgccttcgccgccggcgactggtgtctccgcctgcacggctggcctattatgccgccgtttgttgggcgtctacgtcttcaccgaccggcttgccttcgccgctgccgactggtgtctccgcttgcacggctggcctattgtgccgccgttgtttggcgtctacgtcttcaccgccggctcgccttcgccgccgccgactgtgttgattggccttatcgtcttcaccgccggcctgtctccgtcgctgccgactggtgtcctcgcctatacggttggttggtcacaccaccgttcatgggcgttcacgtcttcaccgaccggccgcctcgtccgccgccgactggtgttctcgcctacactattggatggtcacaccactgttgttgggcatccacactttcaccgacgactgcctttgccgccgccgactggtatctccgcctgcacggctggcctattatgccgccgttgttgggtgtctacgtcttcaccgccggctgccttcgccgccgccgactggtatctccgcctgcacggctgccctattatgccgccgttgttgggtgtctacgtcttcaccgctggctgccttcgccgttgccgactggacgtcttcgttttcgtcatcattctacttcttccgtcgccgactgattatgtcgccgccgactgcgactccaattattacaccggcagctatagcaccaagttctactgccatcttcataaatcaagaggcgttgcatcaatcttcatcacacacatgccaacattaagaaaatacttgagcatggatttcttctcaacagtttga

SEQ ID NO: 90770 - DNA, 159 bp, Oryza sativa
  Clone ID: PAT_MRT4530_89407C.1
ccgacgcgtgcggtacacatatactggaaacgaaaaagctagattaaccatgggacgtagcctatggatgctgatacatacctctacgagagctaactaagggacggcgccaccaaagttcgccaggctcacacgacgagggaggggacaacgacatac
